United States Patent Application Publication US 2005/0244851 A1 - sequence listing, part 55

SEQ ID NO: 2134708 - DNA, 25 bp, Homo sapien
tcttatctgtgtcccaggtatccat

SEQ ID NO: 2134709 - DNA, 25 bp, Homo sapien
ttccagtaacatcttatctgtgtcc

SEQ ID NO: 2134710 - DNA, 25 bp, Homo sapien
actataggaaccaaaggcttcttca

SEQ ID NO: 2134711 - DNA, 25 bp, Homo sapien
aaccgggtagtcctgatagttctgg

SEQ ID NO: 2134712 - DNA, 25 bp, Homo sapien
taagggagggatatcaactgtttct

SEQ ID NO: 2134713 - DNA, 25 bp, Homo sapien
gttctcagggatgtgatattagagt

SEQ ID NO: 2134714 - DNA, 25 bp, Homo sapien
atatagatatacaggaacaacaggg

SEQ ID NO: 2134715 - DNA, 25 bp, Homo sapien
ttcattctcaatggatgccatctca

SEQ ID NO: 2134716 - DNA, 25 bp, Homo sapien
ctcagtgagtataggattgatttga

SEQ ID NO: 2134717 - DNA, 25 bp, Homo sapien
ggatgccatctcactcttcttgagc

SEQ ID NO: 2134718 - DNA, 25 bp, Homo sapien
cctctcagtgagtataggattgatt

SEQ ID NO: 2134719 - DNA, 25 bp, Homo sapien
tcagttttggttgatcacccatgac

SEQ ID NO: 2134720 - DNA, 25 bp, Homo sapien
tctaaggctcagttttggttgatca

SEQ ID NO: 2134721 - DNA, 25 bp, Homo sapien
tgaaccctgtatttctaaggctcag

SEQ ID NO: 2134722 - DNA, 25 bp, Homo sapien
gatcacccatgacttattgtccaca

SEQ ID NO: 2134723 - DNA, 25 bp, Homo sapien
taaaacctctttggcagatttagga

SEQ ID NO: 2134724 - DNA, 25 bp, Homo sapien
tgtaaaacctctttggcagatttag

SEQ ID NO: 2134725 - DNA, 25 bp, Homo sapien
aaacctctttggcagatttaggatt

SEQ ID NO: 2134726 - DNA, 25 bp, Homo sapien
aactttgttagcacccaaatatgag

SEQ ID NO: 2134727 - DNA, 25 bp, Homo sapien
tgtgttagctaaaagacaggtgtct

SEQ ID NO: 2134728 - DNA, 25 bp, Homo sapien
tagtattcagttctcctttagtccc

SEQ ID NO: 2134729 - DNA, 25 bp, Homo sapien
tccctgaaccacattatcagtggag

SEQ ID NO: 2134730 - DNA, 25 bp, Homo sapien
aggtttggttccagattgccacaac

SEQ ID NO: 2134731 - DNA, 25 bp, Homo sapien
ccagattgccacaacaaagtgaata

SEQ ID NO: 2134732 - DNA, 25 bp, Homo sapien
gtagtgataagatctcaccatcttg

SEQ ID NO: 2134733 - DNA, 25 bp, Homo sapien
taaacattgcttatactatagtcta

SEQ ID NO: 2134734 - DNA, 25 bp, Homo sapien
cgccgcggctgacttaaccttagat

SEQ ID NO: 2134735 - DNA, 25 bp, Homo sapien
aattttacattgactggagcctgtg

SEQ ID NO: 2134736 - DNA, 25 bp, Homo sapien
tctcgaatgccccttgaaaatgtag

SEQ ID NO: 2134737 - DNA, 25 bp, Homo sapien
taaaagcagggtaagccatgaagtg

SEQ ID NO: 2134738 - DNA, 25 bp, Homo sapien
ccaaggtagagcttaagggcaaaat

SEQ ID NO: 2134739 - DNA, 25 bp, Homo sapien
gaattaggctatgacttaacattgg

SEQ ID NO: 2134740 - DNA, 25 bp, Homo sapien
tgtcaggccaagtccattcaagtgt

SEQ ID NO: 2134741 - DNA, 25 bp, Homo sapien
ttaaaataggtgcttatggctgggc

SEQ ID NO: 2134742 - DNA, 25 bp, Homo sapien
ttctcagacccaccatgtcattctt

SEQ ID NO: 2134743 - DNA, 25 bp, Homo sapien
ggtgggaatagctatcttcaaattc

SEQ ID NO: 2134744 - DNA, 25 bp, Homo sapien
ggacccctctcctggatcagctcta

SEQ ID NO: 2134745 - DNA, 25 bp, Homo sapien
cttcccctgtagtctgggcttcaag

SEQ ID NO: 2134746 - DNA, 25 bp, Homo sapien
gtctgcatagccttttaccttctca

SEQ ID NO: 2134747 - DNA, 25 bp, Homo sapien
tttaccttctcacaggtggtcccca

SEQ ID NO: 2134748 - DNA, 25 bp, Homo sapien
ggtggtctgcatagccttttacctt

SEQ ID NO: 2134749 - DNA, 25 bp, Homo sapien
aggtaggtggtctgcatagcctttt

SEQ ID NO: 2134750 - DNA, 25 bp, Homo sapien
gcaggcagttagcacagggagagct

SEQ ID NO: 2134751 - DNA, 25 bp, Homo sapien
gtgcaggcagttagcacagggagag

SEQ ID NO: 2134752 - DNA, 25 bp, Homo sapien
tgtccaaggtgcaggcagttagcac

SEQ ID NO: 2134753 - DNA, 25 bp, Homo sapien
aggcagttagcacagggagagctgg

SEQ ID NO: 2134754 - DNA, 25 bp, Homo sapien
actaatccttctgatttgcgcaccc

SEQ ID NO: 2134755 - DNA, 25 bp, Homo sapien
aggcaggtcccaactaatccttctg

SEQ ID NO: 2134756 - DNA, 25 bp, Homo sapien
aatccttctgatttgcgcacccgct

SEQ ID NO: 2134757 - DNA, 25 bp, Homo sapien
aaggcaggtcccaactaatccttct

SEQ ID NO: 2134758 - DNA, 25 bp, Homo sapien
cactgagagggccacaatagttacg

SEQ ID NO: 2134759 - DNA, 25 bp, Homo sapien
agcctgggggtcagcttgatagtcc

SEQ ID NO: 2134760 - DNA, 25 bp, Homo sapien
gagggccacaatagttacggttctg

SEQ ID NO: 2134761 - DNA, 25 bp, Homo sapien
gatagtccccatgaaaacaaagaag

SEQ ID NO: 2134762 - DNA, 25 bp, Homo sapien
aatgatgtgctccttcccattattg

SEQ ID NO: 2134763 - DNA, 25 bp, Homo sapien
tgagagcccaatgatgtgctccttc

SEQ ID NO: 2134764 - DNA, 25 bp, Homo sapien
tgtgctccttcccattattggaagt

SEQ ID NO: 2134765 - DNA, 25 bp, Homo sapien
cttgagagcccaatgatgtgctcct

SEQ ID NO: 2134766 - DNA, 25 bp, Homo sapien
cactggggctagacctaagcccttg

SEQ ID NO: 2134767 - DNA, 25 bp, Homo sapien
tagacctaagcccttgtcaccctcc

SEQ ID NO: 2134768 - DNA, 25 bp, Homo sapien
ggctagacctaagcccttgtcaccc

SEQ ID NO: 2134769 - DNA, 25 bp, Homo sapien
ccactggggctagacctaagccctt

SEQ ID NO: 2134770 - DNA, 25 bp, Homo sapien
tgacctgatttcaattccatctggt

SEQ ID NO: 2134771 - DNA, 25 bp, Homo sapien
gtggcttctgctaccccaccctgtc

SEQ ID NO: 2134772 - DNA, 25 bp, Homo sapien
gcctcgggtactcattttgacctga

SEQ ID NO: 2134773 - DNA, 25 bp, Homo sapien
agtgcaggctgcctcgggtactcat

SEQ ID NO: 2134774 - DNA, 25 bp, Homo sapien
taatctaacaccaaactgctaccac

SEQ ID NO: 2134775 - DNA, 25 bp, Homo sapien
taacaccaaactgctaccaccaaga

SEQ ID NO: 2134776 - DNA, 25 bp, Homo sapien
caaactgctaccaccaagacagaaa

SEQ ID NO: 2134777 - DNA, 25 bp, Homo sapien
ttcataatctaacaccaaactgcta

SEQ ID NO: 2134778 - DNA, 25 bp, Homo sapien
gcagcaacaacgctttgagatctta

SEQ ID NO: 2134779 - DNA, 25 bp, Homo sapien
catgactaacctcctcgatgcagag

SEQ ID NO: 2134780 - DNA, 25 bp, Homo sapien
tagagagtccctctaagaggcaaga

SEQ ID NO: 2134781 - DNA, 25 bp, Homo sapien
caagaaatggctcctgaactgcata

SEQ ID NO: 2134782 - DNA, 25 bp, Homo sapien
cagttaggagccaagacttccagat

SEQ ID NO: 2134783 - DNA, 25 bp, Homo sapien
ggagccaagacttccagatgctggc

SEQ ID NO: 2134784 - DNA, 25 bp, Homo sapien
cttatagtcagttaggagccaagac

SEQ ID NO: 2134785 - DNA, 25 bp, Homo sapien
gtttcttatagtcagttaggagcca

SEQ ID NO: 2134786 - DNA, 25 bp, Homo sapien
caagcctggagtaaggtaaagtcag

SEQ ID NO: 2134787 - DNA, 25 bp, Homo sapien
cctgccttgtcagagactgtcctta

SEQ ID NO: 2134788 - DNA, 25 bp, Homo sapien
taaataaaggtaggctccgacgcta

SEQ ID NO: 2134789 - DNA, 25 bp, Homo sapien
taaagtcagcaaggctacttacctt

SEQ ID NO: 2134790 - DNA, 25 bp, Homo sapien
gagggagggctcgaacatagctctt

SEQ ID NO: 2134791 - DNA, 25 bp, Homo sapien
gagggctcgaacatagctcttgtaa

SEQ ID NO: 2134792 - DNA, 25 bp, Homo sapien
cagagggagggctcgaacatagctc

SEQ ID NO: 2134793 - DNA, 25 bp, Homo sapien
gggagggctcgaacatagctcttgt

SEQ ID NO: 2134794 - DNA, 25 bp, Homo sapien
tcgggcttgcgagcaatcagcaggc

SEQ ID NO: 2134795 - DNA, 25 bp, Homo sapien
gcacaagggtcatgacgatgccaca

SEQ ID NO: 2134796 - DNA, 25 bp, Homo sapien
tagcgtttgagaggatcaccgacca

SEQ ID NO: 2134797 - DNA, 25 bp, Homo sapien
ttccaaacaccagagcatgggcgta

SEQ ID NO: 2134798 - DNA, 25 bp, Homo sapien
tcactttgccctgaggggccttctc

SEQ ID NO: 2134799 - DNA, 25 bp, Homo sapien
ttcactttgccctgaggggccttct

SEQ ID NO: 2134800 - DNA, 25 bp, Homo sapien
cttcactttgccctgaggggccttc

SEQ ID NO: 2134801 - DNA, 25 bp, Homo sapien
caagatgtgagagttgccccagagt

SEQ ID NO: 2134802 - DNA, 25 bp, Homo sapien
tcaaccgtaacagtggagcagctgc

SEQ ID NO: 2134803 - DNA, 25 bp, Homo sapien
catggacgcaactgcctggaaggtc

SEQ ID NO: 2134804 - DNA, 25 bp, Homo sapien
gagattcccggccatgagactacat

SEQ ID NO: 2134805 - DNA, 25 bp, Homo sapien
caccttcaattttctccgaaatcat

SEQ ID NO: 2134806 - DNA, 25 bp, Homo sapien
tttgatacaccttcaattttctccg

SEQ ID NO: 2134807 - DNA, 25 bp, Homo sapien
tacaccttcaattttctccgaaatc

SEQ ID NO: 2134808 - DNA, 25 bp, Homo sapien
gatacaccttcaattttctccgaaa

SEQ ID NO: 2134809 - DNA, 25 bp, Homo sapien
ctgattggctggcgttcccactgtg

SEQ ID NO: 2134810 - DNA, 25 bp, Homo sapien
cagcgagtgggccgttgctgctgga

SEQ ID NO: 2134811 - DNA, 25 bp, Homo sapien
gagcagcgagtgggccgttgctgct

SEQ ID NO: 2134812 - DNA, 25 bp, Homo sapien
agctgattggctggcgttcccactg

SEQ ID NO: 2134813 - DNA, 25 bp, Homo sapien
gctgggcggagcaacgcactcagct

SEQ ID NO: 2134814 - DNA, 25 bp, Homo sapien
gcaacgcactcagctgaagcctgat

SEQ ID NO: 2134815 - DNA, 25 bp, Homo sapien
atgcgcttccgcgcagacccagagg

SEQ ID NO: 2134816 - DNA, 25 bp, Homo sapien
gccgcctccggaattcaaagaagct

SEQ ID NO: 2134817 - DNA, 25 bp, Homo sapien
aatatgtccaaaccagtgggacgtt

SEQ ID NO: 2134818 - DNA, 25 bp, Homo sapien
ccagatcaggagaggaatatgtcca

SEQ ID NO: 2134819 - DNA, 25 bp, Homo sapien
cctccctggaacagatgaggccaga

SEQ ID NO: 2134820 - DNA, 25 bp, Homo sapien
cagtgggacgttacaggttccgagt

SEQ ID NO: 2134821 - DNA, 25 bp, Homo sapien
tagaggtcaaggagcggcaagaaac

SEQ ID NO: 2134822 - DNA, 25 bp, Homo sapien
ctgcagtgcagagacgagaatgtta

SEQ ID NO: 2134823 - DNA, 25 bp, Homo sapien
ggtttgactgtagcctgcactaggc

SEQ ID NO: 2134824 - DNA, 25 bp, Homo sapien
tgtttgacgatcatgttagctgcag

SEQ ID NO: 2134825 - DNA, 25 bp, Homo sapien
tagctaggcatagccgcacgtgcct

SEQ ID NO: 2134826 - DNA, 25 bp, Homo sapien
agctaggcatagccgcacgtgcctg

SEQ ID NO: 2134827 - DNA, 25 bp, Homo sapien
gctggaagatcccttcaacctagga

SEQ ID NO: 2134828 - DNA, 25 bp, Homo sapien
tactactaccttgtgaagtcctgtt

SEQ ID NO: 2134829 - DNA, 25 bp, Homo sapien
ctgttttgtgcctggacgttcttaa

SEQ ID NO: 2134830 - DNA, 25 bp, Homo sapien
tgtgcctggacgttcttaactctct

SEQ ID NO: 2134831 - DNA, 25 bp, Homo sapien
ctgaaagcgtggtctgaaaactact

SEQ ID NO: 2134832 - DNA, 25 bp, Homo sapien
cccactggattgttttgtccatgtt

SEQ ID NO: 2134833 - DNA, 25 bp, Homo sapien
tgttcttcgagttgcttggatcctg

SEQ ID NO: 2134834 - DNA, 25 bp, Homo sapien
cttggatcctgttttactttccagg

SEQ ID NO: 2134835 - DNA, 25 bp, Homo sapien
tgttcataatctcccactggattgt

SEQ ID NO: 2134836 - DNA, 25 bp, Homo sapien
gagtgcaatatttaatagaatatca

SEQ ID NO: 2134837 - DNA, 25 bp, Homo sapien
gaagctaacccattcttccaagcca

SEQ ID NO: 2134838 - DNA, 25 bp, Homo sapien
cactgagtgcaatatttaatagaat

SEQ ID NO: 2134839 - DNA, 25 bp, Homo sapien
tgaagctaacccattcttccaagcc

SEQ ID NO: 2134840 - DNA, 25 bp, Homo sapien
aaaaatgctgaatttggggccgagc

SEQ ID NO: 2134841 - DNA, 25 bp, Homo sapien
aaaaaatgctgaatttggggccgag

SEQ ID NO: 2134842 - DNA, 25 bp, Homo sapien
aaaatgctgaatttggggccgagcg

SEQ ID NO: 2134843 - DNA, 25 bp, Homo sapien
gctaccagaacacttgccaacacaa

SEQ ID NO: 2134844 - DNA, 25 bp, Homo sapien
acttcaatatccgtgtgtttacagc

SEQ ID NO: 2134845 - DNA, 25 bp, Homo sapien
tattactgttgctgggatcatgcac

SEQ ID NO: 2134846 - DNA, 25 bp, Homo sapien
caggagactgccttaaccacagaat

SEQ ID NO: 2134847 - DNA, 25 bp, Homo sapien
tgcaaccagccaacgataaaaaagt

SEQ ID NO: 2134848 - DNA, 25 bp, Homo sapien
cgatcaatgaagtcaaacattgcaa

SEQ ID NO: 2134849 - DNA, 25 bp, Homo sapien
aaaagaagccatagagcaagttaat

SEQ ID NO: 2134850 - DNA, 25 bp, Homo sapien
caagttaatttgctccttacgatca

SEQ ID NO: 2134851 - DNA, 25 bp, Homo sapien
aatataacaaatggcaaacataagg

SEQ ID NO: 2134852 - DNA, 25 bp, Homo sapien
ggtaagtaaatataacaaatggcaa

SEQ ID NO: 2134853 - DNA, 25 bp, Homo sapien
ataacaaatggcaaacataagggca

SEQ ID NO: 2134854 - DNA, 25 bp, Homo sapien
tggtaagtaaatataacaaatggca

SEQ ID NO: 2134855 - DNA, 25 bp, Homo sapien
gcagttttctcacacgaaatggttt

SEQ ID NO: 2134856 - DNA, 25 bp, Homo sapien
gatcaagcagttttctcacacgaaa

SEQ ID NO: 2134857 - DNA, 25 bp, Homo sapien
caagcagttttctcacacgaaatgg

SEQ ID NO: 2134858 - DNA, 25 bp, Homo sapien
agttttctcacacgaaatggtttga

SEQ ID NO: 2134859 - DNA, 25 bp, Homo sapien
agttttccattttcaattctgtggc

SEQ ID NO: 2134860 - DNA, 25 bp, Homo sapien
ccattttcaattctgtggctattaa

SEQ ID NO: 2134861 - DNA, 25 bp, Homo sapien
attttcaattctgtggctattaaga

SEQ ID NO: 2134862 - DNA, 25 bp, Homo sapien
aataagttttccattttcaattctg

SEQ ID NO: 2134863 - DNA, 25 bp, Homo sapien
agcaaagaacttatacagtgacaac

SEQ ID NO: 2134864 - DNA, 25 bp, Homo sapien
ggcaaagatactgaaatcagagcag

SEQ ID NO: 2134865 - DNA, 25 bp, Homo sapien
gcaggagcaaagaacttatacagtg

SEQ ID NO: 2134866 - DNA, 25 bp, Homo sapien
ggagcaaagaacttatacagtgaca

SEQ ID NO: 2134867 - DNA, 25 bp, Homo sapien
ggcaagcagagccgtcttccataga

SEQ ID NO: 2134868 - DNA, 25 bp, Homo sapien
acggcaagcagagccgtcttccata

SEQ ID NO: 2134869 - DNA, 25 bp, Homo sapien
tctttttagaggacgaacattagct

SEQ ID NO: 2134870 - DNA, 25 bp, Homo sapien
ctttttagaggacgaacattagctg

SEQ ID NO: 2134871 - DNA, 25 bp, Homo sapien
tactggaattgagcactggtataac

SEQ ID NO: 2134872 - DNA, 25 bp, Homo sapien
ggaattgagcactggtataactgag

SEQ ID NO: 2134873 - DNA, 25 bp, Homo sapien
ttgagcactggtataactgagagag

SEQ ID NO: 2134874 - DNA, 25 bp, Homo sapien
aattgagcactggtataactgagag

SEQ ID NO: 2134875 - DNA, 25 bp, Homo sapien
gcaatggatgttctgtaaaagttgg

SEQ ID NO: 2134876 - DNA, 25 bp, Homo sapien
taagcaatggatgttctgtaaaagt

SEQ ID NO: 2134877 - DNA, 25 bp, Homo sapien
tctaagcaatggatgttctgtaaaa

SEQ ID NO: 2134878 - DNA, 25 bp, Homo sapien
ctctaagcaatggatgttctgtaaa

SEQ ID NO: 2134879 - DNA, 25 bp, Homo sapien
gctcatctctgacacagttaatgta

SEQ ID NO: 2134880 - DNA, 25 bp, Homo sapien
aacctcagcaagactggctcatctc

SEQ ID NO: 2134881 - DNA, 25 bp, Homo sapien
atctctgacacagttaatgtagtga

SEQ ID NO: 2134882 - DNA, 25 bp, Homo sapien
ctcagcaagactggctcatctctga

SEQ ID NO: 2134883 - DNA, 25 bp, Homo sapien
atgatggtatccaggaagttggtaa

SEQ ID NO: 2134884 - DNA, 25 bp, Homo sapien
tgatggtatccaggaagttggtaaa

SEQ ID NO: 2134885 - DNA, 25 bp, Homo sapien
ttatacaggaatgcttcacaggaat

SEQ ID NO: 2134886 - DNA, 25 bp, Homo sapien
agctgaaggaactgtgaccgacaac

SEQ ID NO: 2134887 - DNA, 25 bp, Homo sapien
gctgaaggaactgtgaccgacaaca

SEQ ID NO: 2134888 - DNA, 25 bp, Homo sapien
tcccagagaggaaggctcttataca

SEQ ID NO: 2134889 - DNA, 25 bp, Homo sapien
tgatgtaaagaagagctgcgctaga

SEQ ID NO: 2134890 - DNA, 25 bp, Homo sapien
gagctgcgctagatggtcaaaaaga

SEQ ID NO: 2134891 - DNA, 25 bp, Homo sapien
taaagaagagctgcgctagatggtc

SEQ ID NO: 2134892 - DNA, 25 bp, Homo sapien
aatggttgatgtaaagaagagctgc

SEQ ID NO: 2134893 - DNA, 25 bp, Homo sapien
gtgaatgtccatagaaagccacaac

SEQ ID NO: 2134894 - DNA, 25 bp, Homo sapien
ttgtaacaggtttcatgtgaatgtc

SEQ ID NO: 2134895 - DNA, 25 bp, Homo sapien
catgtgaatgtccatagaaagccac

SEQ ID NO: 2134896 - DNA, 25 bp, Homo sapien
agaggactgtttgtaacaggtttca

SEQ ID NO: 2134897 - DNA, 25 bp, Homo sapien
tacagatcgtctcttgtggaagacc

SEQ ID NO: 2134898 - DNA, 25 bp, Homo sapien
caataggaacttagagaattagcct

SEQ ID NO: 2134899 - DNA, 25 bp, Homo sapien
gtcaaagttgcaaattctagtctca

SEQ ID NO: 2134900 - DNA, 25 bp, Homo sapien
gaaagaagtcatttagcagataagg

SEQ ID NO: 2134901 - DNA, 25 bp, Homo sapien
ctacatagtggatcagtttagacac

SEQ ID NO: 2134902 - DNA, 25 bp, Homo sapien
aagtgcagcaagaaagtattgttgc

SEQ ID NO: 2134903 - DNA, 25 bp, Homo sapien
tggatcagtttagacacagagttca

SEQ ID NO: 2134904 - DNA, 25 bp, Homo sapien
ttgttgctctccaagcgcattgcag

SEQ ID NO: 2134905 - DNA, 25 bp, Homo sapien
tgctggtatccaggctgaggagtgc

SEQ ID NO: 2134906 - DNA, 25 bp, Homo sapien
gcagaatagaagatcccaggaggaa

SEQ ID NO: 2134907 - DNA, 25 bp, Homo sapien
ggaggaaacaataccactaatggaa

SEQ ID NO: 2134908 - DNA, 25 bp, Homo sapien
gagtgcagaatagaagatcccagga

SEQ ID NO: 2134909 - DNA, 25 bp, Homo sapien
gccccatatcggaaggtcatgtcca

SEQ ID NO: 2134910 - DNA, 25 bp, Homo sapien
ggaaggtcatgtccaaaagcaagcc

SEQ ID NO: 2134911 - DNA, 25 bp, Homo sapien
aaacacagctaccatggccccatat

SEQ ID NO: 2134912 - DNA, 25 bp, Homo sapien
cagcagtggaggatttaaaaaacac

SEQ ID NO: 2134913 - DNA, 25 bp, Homo sapien
tctttgcggcagtcaaatttttacg

SEQ ID NO: 2134914 - DNA, 25 bp, Homo sapien
ttgtaccaactcatttttctttgcg

SEQ ID NO: 2134915 - DNA, 25 bp, Homo sapien
tgcggcagtcaaatttttacgatat

SEQ ID NO: 2134916 - DNA, 25 bp, Homo sapien
tcatttttctttgcggcagtcaaat

SEQ ID NO: 2134917 - DNA, 25 bp, Homo sapien
caaagggtttggacgtccacaggca

SEQ ID NO: 2134918 - DNA, 25 bp, Homo sapien
tccacaggcaaccaaccattgatgt

SEQ ID NO: 2134919 - DNA, 25 bp, Homo sapien
tagcaaaaaggaaacagcgtaactc

SEQ ID NO: 2134920 - DNA, 25 bp, Homo sapien
cagccactccagttttttctaggat

SEQ ID NO: 2134921 - DNA, 25 bp, Homo sapien
tcaggaaagtccattaacaagtatg

SEQ ID NO: 2134922 - DNA, 25 bp, Homo sapien
agtctgcctgtgcacactccaatag

SEQ ID NO: 2134923 - DNA, 25 bp, Homo sapien
tttttgaggattacaacaatgctcc

SEQ ID NO: 2134924 - DNA, 25 bp, Homo sapien
tatgccatgactcctacctgactga

SEQ ID NO: 2134925 - DNA, 25 bp, Homo sapien
ccgaatagagctcacatttactgtc

SEQ ID NO: 2134926 - DNA, 25 bp, Homo sapien
tagagctcacatttactgtcctttc

SEQ ID NO: 2134927 - DNA, 25 bp, Homo sapien
gagctcacatttactgtcctttctt

SEQ ID NO: 2134928 - DNA, 25 bp, Homo sapien
ctcacatttactgtcctttcttctg

SEQ ID NO: 2134929 - DNA, 25 bp, Homo sapien
acagggaaaaacatcttctctacta

SEQ ID NO: 2134930 - DNA, 25 bp, Homo sapien
aatgcccagcctatgtatggctttg

SEQ ID NO: 2134931 - DNA, 25 bp, Homo sapien
cacaatgcccagcctatgtatggct

SEQ ID NO: 2134932 - DNA, 25 bp, Homo sapien
cagggaaaaacatcttctctactaa

SEQ ID NO: 2134933 - DNA, 25 bp, Homo sapien
gttgcagtttatgccctctgctctg

SEQ ID NO: 2134934 - DNA, 25 bp, Homo sapien
aagaatgatgaacactacttcttat

SEQ ID NO: 2134935 - DNA, 25 bp, Homo sapien
tgattgttgcagtttatgccctctg

SEQ ID NO: 2134936 - DNA, 25 bp, Homo sapien
gaatgatgaacactacttcttataa

SEQ ID NO: 2134937 - DNA, 25 bp, Homo sapien
aggagtgagtttagtccagtgtgtt

SEQ ID NO: 2134938 - DNA, 25 bp, Homo sapien
atgaggagtgagtttagtccagtgt

SEQ ID NO: 2134939 - DNA, 25 bp, Homo sapien
atgagccactttgctctagcaatga

SEQ ID NO: 2134940 - DNA, 25 bp, Homo sapien
cactttgctctagcaatgaggagtg

SEQ ID NO: 2134941 - DNA, 25 bp, Homo sapien
caccaaggctctcctaagccatgaa

SEQ ID NO: 2134942 - DNA, 25 bp, Homo sapien
ggccagtctgagtactccttgagga

SEQ ID NO: 2134943 - DNA, 25 bp, Homo sapien
aaggctctcctaagccatgaacaga

SEQ ID NO: 2134944 - DNA, 25 bp, Homo sapien
gtctgagtactccttgaggatggca

SEQ ID NO: 2134945 - DNA, 25 bp, Homo sapien
caaattgctatgattgaaggcccag

SEQ ID NO: 2134946 - DNA, 25 bp, Homo sapien
tagagcagttccatgaaatcagaca

SEQ ID NO: 2134947 - DNA, 25 bp, Homo sapien
tacaatttggtagaacgcagagcct

SEQ ID NO: 2134948 - DNA, 25 bp, Homo sapien
gcagctcatagtacccaaaaatgtg

SEQ ID NO: 2134949 - DNA, 25 bp, Homo sapien
ggcaaaattttatagtacattttca

SEQ ID NO: 2134950 - DNA, 25 bp, Homo sapien
caaaattttatagtacattttcagc

SEQ ID NO: 2134951 - DNA, 25 bp, Homo sapien
tcagcaagatattctagctattatt

SEQ ID NO: 2134952 - DNA, 25 bp, Homo sapien
attttcagcaagatattctagctat

SEQ ID NO: 2134953 - DNA, 25 bp, Homo sapien
gattcatcccgggatgcaaagatga

SEQ ID NO: 2134954 - DNA, 25 bp, Homo sapien
aacacattgtatccctattccctgc

SEQ ID NO: 2134955 - DNA, 25 bp, Homo sapien
tccatgccaggctataaggacctgg

SEQ ID NO: 2134956 - DNA, 25 bp, Homo sapien
tcactatgctgtaaccttactggcc

SEQ ID NO: 2134957 - DNA, 25 bp, Homo sapien
ctagctgtactaggtgatctcatcc

SEQ ID NO: 2134958 - DNA, 25 bp, Homo sapien
tcaatgctggcataccttaggtctc

SEQ ID NO: 2134959 - DNA, 25 bp, Homo sapien
gttctacatgatcttaaggaccaaa

SEQ ID NO: 2134960 - DNA, 25 bp, Homo sapien
tcaactcccttctcacaatggaaag

SEQ ID NO: 2134961 - DNA, 25 bp, Homo sapien
aagatacccagggaatcattattga

SEQ ID NO: 2134962 - DNA, 25 bp, Homo sapien
aaaaagatacccagggaatcattat

SEQ ID NO: 2134963 - DNA, 25 bp, Homo sapien
tacccagggaatcattattgaacaa

SEQ ID NO: 2134964 - DNA, 25 bp, Homo sapien
ggaatcattattgaacaaaaagaca

SEQ ID NO: 2134965 - DNA, 25 bp, Homo sapien
gtttgctctgtagcttggagactgc

SEQ ID NO: 2134966 - DNA, 25 bp, Homo sapien
ggcagagcctctgtattatggagca

SEQ ID NO: 2134967 - DNA, 25 bp, Homo sapien
taaagtcaggcctctcaggaagggc

SEQ ID NO: 2134968 - DNA, 25 bp, Homo sapien
tgaccgtgattttagcaaggcctcc

SEQ ID NO: 2134969 - DNA, 25 bp, Homo sapien
tgtaacacgttgcactatgacagca

SEQ ID NO: 2134970 - DNA, 25 bp, Homo sapien
tatgggactaccaccatacatgttg

SEQ ID NO: 2134971 - DNA, 25 bp, Homo sapien
gacacagtcgtttattctcatcaag

SEQ ID NO: 2134972 - DNA, 25 bp, Homo sapien
ttaggctaggcctacaccagggcag

SEQ ID NO: 2134973 - DNA, 25 bp, Homo sapien
gactactaccccaggcaccttcctg

SEQ ID NO: 2134974 - DNA, 25 bp, Homo sapien
caatgactactaccccaggcacctt

SEQ ID NO: 2134975 - DNA, 25 bp, Homo sapien
atgactactaccccaggcaccttcc

SEQ ID NO: 2134976 - DNA, 25 bp, Homo sapien
ctcaatgactactaccccaggcacc

SEQ ID NO: 2134977 - DNA, 25 bp, Homo sapien
aggggcccctcggtagccagtccag

SEQ ID NO: 2134978 - DNA, 25 bp, Homo sapien
ccctcggtagccagtccaggattct

SEQ ID NO: 2134979 - DNA, 25 bp, Homo sapien
acaaaaccaactttggagccagcag

SEQ ID NO: 2134980 - DNA, 25 bp, Homo sapien
tgttgagggttgaaacactgtggtc

SEQ ID NO: 2134981 - DNA, 25 bp, Homo sapien
gacagggatgccgacagctgctgta

SEQ ID NO: 2134982 - DNA, 25 bp, Homo sapien
ggcaaaaatacccttgactgggcaa

SEQ ID NO: 2134983 - DNA, 25 bp, Homo sapien
tctgtgaatcagcaaagaagtccct

SEQ ID NO: 2134984 - DNA, 25 bp, Homo sapien
taaaactaccagagatgtggcggct

SEQ ID NO: 2134985 - DNA, 25 bp, Homo sapien
tagctttgttgagaggagttaattc

SEQ ID NO: 2134986 - DNA, 25 bp, Homo sapien
cactcacacggcgaatattatgtag

SEQ ID NO: 2134987 - DNA, 25 bp, Homo sapien
aaatgttatctattacgatagccac

SEQ ID NO: 2134988 - DNA, 25 bp, Homo sapien
tctggcatttagtagatattcaaat

SEQ ID NO: 2134989 - DNA, 25 bp, Homo sapien
gcaccaactattgatcattaagcac

SEQ ID NO: 2134990 - DNA, 25 bp, Homo sapien
atgaggataggcagtgcaccaacta

SEQ ID NO: 2134991 - DNA, 25 bp, Homo sapien
gggatgaggataggcagtgcaccaa

SEQ ID NO: 2134992 - DNA, 25 bp, Homo sapien
ggttgcataaaaaccaaggctcatg

SEQ ID NO: 2134993 - DNA, 25 bp, Homo sapien
cctgccagtcatgacatcgtgggag

SEQ ID NO: 2134994 - DNA, 25 bp, Homo sapien
tatgatggaactggtcagctgcctg

SEQ ID NO: 2134995 - DNA, 25 bp, Homo sapien
cttcggaggctgctgctatgatgga

SEQ ID NO: 2134996 - DNA, 25 bp, Homo sapien
aggctgctgctatgatggaactggt

SEQ ID NO: 2134997 - DNA, 25 bp, Homo sapien
ctacaggaatagttggaacagctgc

SEQ ID NO: 2134998 - DNA, 25 bp, Homo sapien
ggtccacctacaggaatagttggaa

SEQ ID NO: 2134999 - DNA, 25 bp, Homo sapien
tccacctacaggaatagttggaaca

SEQ ID NO: 2135000 - DNA, 25 bp, Homo sapien
cacctacaggaatagttggaacagc

SEQ ID NO: 2135001 - DNA, 25 bp, Homo sapien
aatccagacctagtgtctggtgagc

SEQ ID NO: 2135002 - DNA, 25 bp, Homo sapien
tgatcatccctcaccaggaatccag

SEQ ID NO: 2135003 - DNA, 25 bp, Homo sapien
gagtccatagcaggatccggcagct

SEQ ID NO: 2135004 - DNA, 25 bp, Homo sapien
aacaggcagaatcctgacaggctct

SEQ ID NO: 2135005 - DNA, 25 bp, Homo sapien
cacaaacatcctgtgatccttggat

SEQ ID NO: 2135006 - DNA, 25 bp, Homo sapien
cccagcaccatcttgaggaggtgca

SEQ ID NO: 2135007 - DNA, 25 bp, Homo sapien
agaggcaccaacagacccgttcaac

SEQ ID NO: 2135008 - DNA, 25 bp, Homo sapien
accccagcaccatcttgaggaggtg

SEQ ID NO: 2135009 - DNA, 25 bp, Homo sapien
aggcaccaacagacccgttcaacag

SEQ ID NO: 2135010 - DNA, 25 bp, Homo sapien
ggctgagccagtcaataatctcttg

SEQ ID NO: 2135011 - DNA, 25 bp, Homo sapien
gctgagctgacaactcctcatcctt

SEQ ID NO: 2135012 - DNA, 25 bp, Homo sapien
cacatccccctgtaggggcagctga

SEQ ID NO: 2135013 - DNA, 25 bp, Homo sapien
gggcagctgagctgacaactcctca

SEQ ID NO: 2135014 - DNA, 25 bp, Homo sapien
tgtaggggccccgagacttgacttc

SEQ ID NO: 2135015 - DNA, 25 bp, Homo sapien
ctttgctctcagaatgaggctcctc

SEQ ID NO: 2135016 - DNA, 25 bp, Homo sapien
gactccagcacagaatagatgtagg

SEQ ID NO: 2135017 - DNA, 25 bp, Homo sapien
gaatgaggctcctctaactcctcaa

SEQ ID NO: 2135018 - DNA, 25 bp, Homo sapien
tagtgcttagttcctccattgcccc

SEQ ID NO: 2135019 - DNA, 25 bp, Homo sapien
tacaaagcggctgagattctggatc

SEQ ID NO: 2135020 - DNA, 25 bp, Homo sapien
cagagtccgctcaatgtgacggtgc

SEQ ID NO: 2135021 - DNA, 25 bp, Homo sapien
cggactccctcagcttggctcagag

SEQ ID NO: 2135022 - DNA, 25 bp, Homo sapien
gaatcaatgaagagatccccaatgg

SEQ ID NO: 2135023 - DNA, 25 bp, Homo sapien
tcaatgaagagatccccaatgggct

SEQ ID NO: 2135024 - DNA, 25 bp, Homo sapien
gtgaatcaatgaagagatccccaat

SEQ ID NO: 2135025 - DNA, 25 bp, Homo sapien
atcaatgaagagatccccaatgggc

SEQ ID NO: 2135026 - DNA, 25 bp, Homo sapien
tgtagtccaggccaacaatggagtc

SEQ ID NO: 2135027 - DNA, 25 bp, Homo sapien
tgtttcaataacacagcctagtgct

SEQ ID NO: 2135028 - DNA, 25 bp, Homo sapien
aaccagactaaggtgtgggcggcca

SEQ ID NO: 2135029 - DNA, 25 bp, Homo sapien
caggtctcagggtagactgtagtca

SEQ ID NO: 2135030 - DNA, 25 bp, Homo sapien
ttgacaagtgcacatcagaaatggc

SEQ ID NO: 2135031 - DNA, 25 bp, Homo sapien
tcggacgttgatctgttccagggcc

SEQ ID NO: 2135032 - DNA, 25 bp, Homo sapien
tgtagttgtttccatcggacgttga

SEQ ID NO: 2135033 - DNA, 25 bp, Homo sapien
agttggtgggccagatcattcacca

SEQ ID NO: 2135034 - DNA, 25 bp, Homo sapien
ctccccatggttcactccaggctgc

SEQ ID NO: 2135035 - DNA, 25 bp, Homo sapien
tccccatggttcactccaggctgct

SEQ ID NO: 2135036 - DNA, 25 bp, Homo sapien
ccatggttcactccaggctgctctt

SEQ ID NO: 2135037 - DNA, 25 bp, Homo sapien
tggttcactccaggctgctcttcta

SEQ ID NO: 2135038 - DNA, 25 bp, Homo sapien
ggcatcctggagctgcttaagcctc

SEQ ID NO: 2135039 - DNA, 25 bp, Homo sapien
tgcttaagcctctcactaactgacg

SEQ ID NO: 2135040 - DNA, 25 bp, Homo sapien
cccaaagtcccggtgggcatcctgg

SEQ ID NO: 2135041 - DNA, 25 bp, Homo sapien
caaagtcccggtgggcatcctggag

SEQ ID NO: 2135042 - DNA, 25 bp, Homo sapien
tgtcaaggtatactgggctcccacc

SEQ ID NO: 2135043 - DNA, 25 bp, Homo sapien
atgtcaaggtatactgggctcccac

SEQ ID NO: 2135044 - DNA, 25 bp, Homo sapien
acaatagactctccaggaagatggc

SEQ ID NO: 2135045 - DNA, 25 bp, Homo sapien
gccccaggggataacaatagactct

SEQ ID NO: 2135046 - DNA, 25 bp, Homo sapien
ctttattgggtgaaattgctctttc

SEQ ID NO: 2135047 - DNA, 25 bp, Homo sapien
tgggtgaaattgctctttcccaggg

SEQ ID NO: 2135048 - DNA, 25 bp, Homo sapien
gtgaaattgctctttcccagggaac

SEQ ID NO: 2135049 - DNA, 25 bp, Homo sapien
tgatgtagtagggaactttattggg

SEQ ID NO: 2135050 - DNA, 25 bp, Homo sapien
tcacctttacccaagtagaatcttg

SEQ ID NO: 2135051 - DNA, 25 bp, Homo sapien
cactcagatgtgcacaccactcaag

SEQ ID NO: 2135052 - DNA, 25 bp, Homo sapien
tcaagtgacaggttggatgcaagaa

SEQ ID NO: 2135053 - DNA, 25 bp, Homo sapien
gttcgagggtaaacccaagatgcca

SEQ ID NO: 2135054 - DNA, 25 bp, Homo sapien
gggatggtcccagcatgtggtctga

SEQ ID NO: 2135055 - DNA, 25 bp, Homo sapien
ggtttggtataactctgtcatcttg

SEQ ID NO: 2135056 - DNA, 25 bp, Homo sapien
agggtttggtataactctgtcatct

SEQ ID NO: 2135057 - DNA, 25 bp, Homo sapien
gtttggtataactctgtcatcttgg

SEQ ID NO: 2135058 - DNA, 25 bp, Homo sapien
ctggactctgcggagtttcatggca

SEQ ID NO: 2135059 - DNA, 25 bp, Homo sapien
gggctttctggactctgcggagttt

SEQ ID NO: 2135060 - DNA, 25 bp, Homo sapien
tgagaacttaatgttgttcagatca

SEQ ID NO: 2135061 - DNA, 25 bp, Homo sapien
tggcagtgcgataagctgagaactt

SEQ ID NO: 2135062 - DNA, 25 bp, Homo sapien
tcctccaaacgttcatataaggcag

SEQ ID NO: 2135063 - DNA, 25 bp, Homo sapien
aaaacattgaggagccaattgaggc

SEQ ID NO: 2135064 - DNA, 25 bp, Homo sapien
tgaggctcatgtccacacagagtgg

SEQ ID NO: 2135065 - DNA, 25 bp, Homo sapien
tggcctgcagatcatgctcattgaa

SEQ ID NO: 2135066 - DNA, 25 bp, Homo sapien
tccttcacttccgtgccacacaagc

SEQ ID NO: 2135067 - DNA, 25 bp, Homo sapien
tcacttccgtgccacacaagcatgc

SEQ ID NO: 2135068 - DNA, 25 bp, Homo sapien
agacaatgcccgcatctttccgctg

SEQ ID NO: 2135069 - DNA, 25 bp, Homo sapien
gtcttaaaagacaatgcccgcatct

SEQ ID NO: 2135070 - DNA, 25 bp, Homo sapien
cttttcaaactggactacatagagg

SEQ ID NO: 2135071 - DNA, 25 bp, Homo sapien
gtcaagaatggccaaccccgacaca

SEQ ID NO: 2135072 - DNA, 25 bp, Homo sapien
cccgacacaggaatggccggagaat

SEQ ID NO: 2135073 - DNA, 25 bp, Homo sapien
cacagactgagctaatgacttttca

SEQ ID NO: 2135074 - DNA, 25 bp, Homo sapien
ctgagttggccacttggctgaagag

SEQ ID NO: 2135075 - DNA, 25 bp, Homo sapien
aaaacggaagcaactacggacactg

SEQ ID NO: 2135076 - DNA, 25 bp, Homo sapien
gggcacctgaatggcctcatgaagc

SEQ ID NO: 2135077 - DNA, 25 bp, Homo sapien
ttcacccagctgacggggcacctga

SEQ ID NO: 2135078 - DNA, 25 bp, Homo sapien
caaggtggcgctggtcacactggct

SEQ ID NO: 2135079 - DNA, 25 bp, Homo sapien
caatggtgacccgatgcagaacagc

SEQ ID NO: 2135080 - DNA, 25 bp, Homo sapien
gggcactgcctacagatagagcact

SEQ ID NO: 2135081 - DNA, 25 bp, Homo sapien
gaactgggatgcttcaatgactggc

SEQ ID NO: 2135082 - DNA, 25 bp, Homo sapien
tgatgcttcacttgctcagcaatgg

SEQ ID NO: 2135083 - DNA, 25 bp, Homo sapien
cctgatgtcattcacagtgggagta

SEQ ID NO: 2135084 - DNA, 25 bp, Homo sapien
taaatggtgtgcaactgaggatctg

SEQ ID NO: 2135085 - DNA, 25 bp, Homo sapien
tcataccagctcacgacagttggct

SEQ ID NO: 2135086 - DNA, 25 bp, Homo sapien
gttgtgaaccatttgctggcatacc

SEQ ID NO: 2135087 - DNA, 25 bp, Homo sapien
gtcaacgttgaattgcttcagactc

SEQ ID NO: 2135088 - DNA, 25 bp, Homo sapien
tgatggggtagtgcagcttattgcc

SEQ ID NO: 2135089 - DNA, 25 bp, Homo sapien
taatactccatgatggggtagtgca

SEQ ID NO: 2135090 - DNA, 25 bp, Homo sapien
caggtctggcagatgtcaacgttga

SEQ ID NO: 2135091 - DNA, 25 bp, Homo sapien
gaaataatgcttggagcggaatttg

SEQ ID NO: 2135092 - DNA, 25 bp, Homo sapien
gattgcacaggcagataacctcgct

SEQ ID NO: 2135093 - DNA, 25 bp, Homo sapien
tcagcctccagcactgattgcacag

SEQ ID NO: 2135094 - DNA, 25 bp, Homo sapien
taaggttgtggcaaagtccctcatg

SEQ ID NO: 2135095 - DNA, 25 bp, Homo sapien
tgtgtcggcgtgtggccacatcggg

SEQ ID NO: 2135096 - DNA, 25 bp, Homo sapien
aaatgctcaattcgggagtgtgtgt

SEQ ID NO: 2135097 - DNA, 25 bp, Homo sapien
gtgtgtgtcggcgtgtggccacatc

SEQ ID NO: 2135098 - DNA, 25 bp, Homo sapien
caattcgggagtgtgtgtcggcgtg

SEQ ID NO: 2135099 - DNA, 25 bp, Homo sapien
attttgactttccatctcagcaagc

SEQ ID NO: 2135100 - DNA, 25 bp, Homo sapien
gaaggagcaattttgactttccatc

SEQ ID NO: 2135101 - DNA, 25 bp, Homo sapien
gggacaagctgtcattaaagaagga

SEQ ID NO: 2135102 - DNA, 25 bp, Homo sapien
gctgtcattaaagaaggagcaattt

SEQ ID NO: 2135103 - DNA, 25 bp, Homo sapien
ggccacactgcatggagcctgctgt

SEQ ID NO: 2135104 - DNA, 25 bp, Homo sapien
gtggccacactgcatggagcctgct

SEQ ID NO: 2135105 - DNA, 25 bp, Homo sapien
ccgcagcaggtactggtcctcgtct

SEQ ID NO: 2135106 - DNA, 25 bp, Homo sapien
gatcttctgtagctcccctttgctt

SEQ ID NO: 2135107 - DNA, 25 bp, Homo sapien
tatgttgccgaaggatacgggcctc

SEQ ID NO: 2135108 - DNA, 25 bp, Homo sapien
tcttcgaggatctgcatgcgcgtct

SEQ ID NO: 2135109 - DNA, 25 bp, Homo sapien
tagctgcttgttgtgatcttcgagg

SEQ ID NO: 2135110 - DNA, 25 bp, Homo sapien
tcggccagaagctcctcattgcggt

SEQ ID NO: 2135111 - DNA, 25 bp, Homo sapien
tggagaggaagctagggacgagcct

SEQ ID NO: 2135112 - DNA, 25 bp, Homo sapien
ggaagctagggacgagcctgcagag

SEQ ID NO: 2135113 - DNA, 25 bp, Homo sapien
cactgccatctgattcggtgggtgg

SEQ ID NO: 2135114 - DNA, 25 bp, Homo sapien
gagaggaagctagggacgagcctgc

SEQ ID NO: 2135115 - DNA, 25 bp, Homo sapien
tgtcccttctcccgggggtgactgc

SEQ ID NO: 2135116 - DNA, 25 bp, Homo sapien
ctggagtagtctgtcccttctcccg

SEQ ID NO: 2135117 - DNA, 25 bp, Homo sapien
tggagtagtctgtcccttctcccgg

SEQ ID NO: 2135118 - DNA, 25 bp, Homo sapien
gggaaggcatgacggagtttctcca

SEQ ID NO: 2135119 - DNA, 25 bp, Homo sapien
cagcagggtgttggcagtcacatca

SEQ ID NO: 2135120 - DNA, 25 bp, Homo sapien
tcacatcagaacttcgcacactggg

SEQ ID NO: 2135121 - DNA, 25 bp, Homo sapien
tgttggcagtcacatcagaacttcg

SEQ ID NO: 2135122 - DNA, 25 bp, Homo sapien
cagcctgagagctagaagggtcaca

SEQ ID NO: 2135123 - DNA, 25 bp, Homo sapien
catggtatatgtcgcctaggaagag

SEQ ID NO: 2135124 - DNA, 25 bp, Homo sapien
cagagcaactcgcaactcagtgggt

SEQ ID NO: 2135125 - DNA, 25 bp, Homo sapien
cacggtagccagttgcaaatgcctt

SEQ ID NO: 2135126 - DNA, 25 bp, Homo sapien
tgtgaagtctgacaccctggacctg

SEQ ID NO: 2135127 - DNA, 25 bp, Homo sapien
ggttctatgattgatgcccgcctac

SEQ ID NO: 2135128 - DNA, 25 bp, Homo sapien
gatgctaatcccacagtcagaaggt

SEQ ID NO: 2135129 - DNA, 25 bp, Homo sapien
aaatgtcagtgaccccttagtgaga

SEQ ID NO: 2135130 - DNA, 25 bp, Homo sapien
gcacacacatcaggaagcacagata

SEQ ID NO: 2135131 - DNA, 25 bp, Homo sapien
tcaaatgctggatatagagcccaaa

SEQ ID NO: 2135132 - DNA, 25 bp, Homo sapien
gagttaaggcagctactttcttgct

SEQ ID NO: 2135133 - DNA, 25 bp, Homo sapien
ggtgccacagaccatgactctgcca

SEQ ID NO: 2135134 - DNA, 25 bp, Homo sapien
gaccagttcttgtagccagcaagca

SEQ ID NO: 2135135 - DNA, 25 bp, Homo sapien
ggtcaggcctcaatactgccatagg

SEQ ID NO: 2135136 - DNA, 25 bp, Homo sapien
caagcagcataccagacttcggtca

SEQ ID NO: 2135137 - DNA, 25 bp, Homo sapien
gatggactctgcgagctgagccctg

SEQ ID NO: 2135138 - DNA, 25 bp, Homo sapien
atacacagatcaatcaatatgattc

SEQ ID NO: 2135139 - DNA, 25 bp, Homo sapien
gcaaggttgattagacatacacaga

SEQ ID NO: 2135140 - DNA, 25 bp, Homo sapien
ttcatcatatcaacacaatggagga

SEQ ID NO: 2135141 - DNA, 25 bp, Homo sapien
catatcaacacaatggaggataaaa

SEQ ID NO: 2135142 - DNA, 25 bp, Homo sapien
atacttcacggatttgtgcatcatc

SEQ ID NO: 2135143 - DNA, 25 bp, Homo sapien
tggaatacttcacggatttgtgcat

SEQ ID NO: 2135144 - DNA, 25 bp, Homo sapien
atggaatacttcacggatttgtgca

SEQ ID NO: 2135145 - DNA, 25 bp, Homo sapien
gaatacttcacggatttgtgcatca

SEQ ID NO: 2135146 - DNA, 25 bp, Homo sapien
ctttttgaatagtacacattccctc

SEQ ID NO: 2135147 - DNA, 25 bp, Homo sapien
ttttgaatagtacacattccctcga

SEQ ID NO: 2135148 - DNA, 25 bp, Homo sapien
ttgaatagtacacattccctcgatg

SEQ ID NO: 2135149 - DNA, 25 bp, Homo sapien
gaatagtacacattccctcgatgtc

SEQ ID NO: 2135150 - DNA, 25 bp, Homo sapien
ggttaacagtgtagacacagttttg

SEQ ID NO: 2135151 - DNA, 25 bp, Homo sapien
ttaacagtgtagacacagttttgcc

SEQ ID NO: 2135152 - DNA, 25 bp, Homo sapien
ctggttaacagtgtagacacagttt

SEQ ID NO: 2135153 - DNA, 25 bp, Homo sapien
tagacacagttttgccatggtaaca

SEQ ID NO: 2135154 - DNA, 25 bp, Homo sapien
tttgtttacaacaatgccaacagca

SEQ ID NO: 2135155 - DNA, 25 bp, Homo sapien
ttgtttacaacaatgccaacagcat

SEQ ID NO: 2135156 - DNA, 25 bp, Homo sapien
tgtttacaacaatgccaacagcatg

SEQ ID NO: 2135157 - DNA, 25 bp, Homo sapien
ctttgtttacaacaatgccaacagc

SEQ ID NO: 2135158 - DNA, 25 bp, Homo sapien
ttccctcatgcgtttcaggaagcta

SEQ ID NO: 2135159 - DNA, 25 bp, Homo sapien
tctctttttggcttcctttttctga

SEQ ID NO: 2135160 - DNA, 25 bp, Homo sapien
gtgcttaatgtactcaatccgcaca

SEQ ID NO: 2135161 - DNA, 25 bp, Homo sapien
tagagtgcttaatgtactcaatccg

SEQ ID NO: 2135162 - DNA, 25 bp, Homo sapien
cagcctggcacttgagttgaaccca

SEQ ID NO: 2135163 - DNA, 25 bp, Homo sapien
gagcagcctggcacttgagttgaac

SEQ ID NO: 2135164 - DNA, 25 bp, Homo sapien
tggagcagcctggcacttgagttga

SEQ ID NO: 2135165 - DNA, 25 bp, Homo sapien
gcagcctggcacttgagttgaaccc

SEQ ID NO: 2135166 - DNA, 25 bp, Homo sapien
atgcttgaattcataggggataggt

SEQ ID NO: 2135167 - DNA, 25 bp, Homo sapien
ttttgcacctattatgcttgaattc

SEQ ID NO: 2135168 - DNA, 25 bp, Homo sapien
tatgcttgaattcataggggatagg

SEQ ID NO: 2135169 - DNA, 25 bp, Homo sapien
tgcttgaattcataggggataggtt

SEQ ID NO: 2135170 - DNA, 25 bp, Homo sapien
gttattatctgcaacccggagagat

SEQ ID NO: 2135171 - DNA, 25 bp, Homo sapien
tgtgtaaggtacagcacagtattcc

SEQ ID NO: 2135172 - DNA, 25 bp, Homo sapien
ggttaaaatgtagtcagtcagtctg

SEQ ID NO: 2135173 - DNA, 25 bp, Homo sapien
gagatttagcatgggctgattccaa

SEQ ID NO: 2135174 - DNA, 25 bp, Homo sapien
tgtaagccctgcgatctcaaggcgc

SEQ ID NO: 2135175 - DNA, 25 bp, Homo sapien
gtctctgcaagcttggtcgccctgg

SEQ ID NO: 2135176 - DNA, 25 bp, Homo sapien
ggctgggacctgaacactgtaccta

SEQ ID NO: 2135177 - DNA, 25 bp, Homo sapien
ctgaactttgttgggtgaggagcct

SEQ ID NO: 2135178 - DNA, 25 bp, Homo sapien
tgatctggcactgactataaacttg

SEQ ID NO: 2135179 - DNA, 25 bp, Homo sapien
ggcacacaagtccagagtgaaagac

SEQ ID NO: 2135180 - DNA, 25 bp, Homo sapien
taaacttgcagattggctctctggc

SEQ ID NO: 2135181 - DNA, 25 bp, Homo sapien
tcagttggccagaatatattgtcgc

SEQ ID NO: 2135182 - DNA, 25 bp, Homo sapien
aagccaggactagggtcgaatgaag

SEQ ID NO: 2135183 - DNA, 25 bp, Homo sapien
ggagcagtgtttttcccagatcctc

SEQ ID NO: 2135184 - DNA, 25 bp, Homo sapien
tttggtggactctgctacgtagtgg

SEQ ID NO: 2135185 - DNA, 25 bp, Homo sapien
ctgctacgtagtggcgttcagtgaa

SEQ ID NO: 2135186 - DNA, 25 bp, Homo sapien
tagagtgtaaggctcagcgcagcgc

SEQ ID NO: 2135187 - DNA, 25 bp, Homo sapien
ctgagaggactcagttcggagccgc

SEQ ID NO: 2135188 - DNA, 25 bp, Homo sapien
tatataggaggttcccgatcgcact

SEQ ID NO: 2135189 - DNA, 25 bp, Homo sapien
tcatgggagtcggtaggagcaatca

SEQ ID NO: 2135190 - DNA, 25 bp, Homo sapien
cagctaaagctgaggcactccagga

SEQ ID NO: 2135191 - DNA, 25 bp, Homo sapien
cctttagggttgatcccggcaagat

SEQ ID NO: 2135192 - DNA, 25 bp, Homo sapien
gattaagctggatgttactcggccc

SEQ ID NO: 2135193 - DNA, 25 bp, Homo sapien
tacctctgactacagggtgggccag

SEQ ID NO: 2135194 - DNA, 25 bp, Homo sapien
cttgtactgtgtcactttatggggt

SEQ ID NO: 2135195 - DNA, 25 bp, Homo sapien
cccttcttgtactgtgtcactttat

SEQ ID NO: 2135196 - DNA, 25 bp, Homo sapien
gtactgtgtcactttatggggttgg

SEQ ID NO: 2135197 - DNA, 25 bp, Homo sapien
ttcttgtactgtgtcactttatggg

SEQ ID NO: 2135198 - DNA, 25 bp, Homo sapien
cactctgcttcctgtcataacgccg

SEQ ID NO: 2135199 - DNA, 25 bp, Homo sapien
tgcttcctgtcataacgccgctttc

SEQ ID NO: 2135200 - DNA, 25 bp, Homo sapien
tctgcttcctgtcataacgccgctt

SEQ ID NO: 2135201 - DNA, 25 bp, Homo sapien
gaaaatcggcttagtttgcccacca

SEQ ID NO: 2135202 - DNA, 25 bp, Homo sapien
tcagttcttaggaaagcagggcaca

SEQ ID NO: 2135203 - DNA, 25 bp, Homo sapien
gagacaagtgcatatccttacggca

SEQ ID NO: 2135204 - DNA, 25 bp, Homo sapien
tagtgcaaccaacaagcgaggattc

SEQ ID NO: 2135205 - DNA, 25 bp, Homo sapien
taaacagaaactcgctcagcctgag

SEQ ID NO: 2135206 - DNA, 25 bp, Homo sapien
caacgcactcaagccttagcacaat

SEQ ID NO: 2135207 - DNA, 25 bp, Homo sapien
cttgcatcttttaatagccagcatt

SEQ ID NO: 2135208 - DNA, 25 bp, Homo sapien
gcagttgggctcaacgcactcaagc

SEQ ID NO: 2135209 - DNA, 25 bp, Homo sapien
tgggctcaacgcactcaagccttag

SEQ ID NO: 2135210 - DNA, 25 bp, Homo sapien
aaatactcaccatgctgttaagctg

SEQ ID NO: 2135211 - DNA, 25 bp, Homo sapien
tatttttagaggattacccctgagc

SEQ ID NO: 2135212 - DNA, 25 bp, Homo sapien
ccctgagctctatgccacaatgaat

SEQ ID NO: 2135213 - DNA, 25 bp, Homo sapien
gaaaaagattgcaccttccacccat

SEQ ID NO: 2135214 - DNA, 25 bp, Homo sapien
attgtcttcataataaaagatgaca

SEQ ID NO: 2135215 - DNA, 25 bp, Homo sapien
gattttattgtcttcataataaaag

SEQ ID NO: 2135216 - DNA, 25 bp, Homo sapien
tttattgtcttcataataaaagatg

SEQ ID NO: 2135217 - DNA, 25 bp, Homo sapien
aaactcaagattttattgtcttcat

SEQ ID NO: 2135218 - DNA, 25 bp, Homo sapien
gaactcaaccagtcagcttcaatgc

SEQ ID NO: 2135219 - DNA, 25 bp, Homo sapien
tcaatgcaaaacaagtagtaccagt

SEQ ID NO: 2135220 - DNA, 25 bp, Homo sapien
gaggcataaatttccccacaagcgg

SEQ ID NO: 2135221 - DNA, 25 bp, Homo sapien
ccacaagcggaattgtattgatggc

SEQ ID NO: 2135222 - DNA, 25 bp, Homo sapien
tgtagctatgataaaccggcaggag

SEQ ID NO: 2135223 - DNA, 25 bp, Homo sapien
catcgcagttgcttccctgggtaaa

SEQ ID NO: 2135224 - DNA, 25 bp, Homo sapien
cctgtgaaaaggaagctagggttct

SEQ ID NO: 2135225 - DNA, 25 bp, Homo sapien
gcaggagattggtggacctcgctct

SEQ ID NO: 2135226 - DNA, 25 bp, Homo sapien
catgtgagatctcggtcacgtgagc

SEQ ID NO: 2135227 - DNA, 25 bp, Homo sapien
gggatcactaaggtgccgcacttcc

SEQ ID NO: 2135228 - DNA, 25 bp, Homo sapien
gcaactctcggcttaaactcgggat

SEQ ID NO: 2135229 - DNA, 25 bp, Homo sapien
tgagcgcctacgtcatgtgagatct

SEQ ID NO: 2135230 - DNA, 25 bp, Homo sapien
tccttcttccctcaaacggctatag

SEQ ID NO: 2135231 - DNA, 25 bp, Homo sapien
tatagcgagacggtagacgacgacc

SEQ ID NO: 2135232 - DNA, 25 bp, Homo sapien
cagaactacttctgctcacgtaagc

SEQ ID NO: 2135233 - DNA, 25 bp, Homo sapien
tagacgacgaccagaactacttctg

SEQ ID NO: 2135234 - DNA, 25 bp, Homo sapien
ccccgaaccccgctctggtcttcat

SEQ ID NO: 2135235 - DNA, 25 bp, Homo sapien
agagaacgaaagaggcggaggcggc

SEQ ID NO: 2135236 - DNA, 25 bp, Homo sapien
cacaggcggcttcccggcactgaga

SEQ ID NO: 2135237 - DNA, 25 bp, Homo sapien
ggaaagcagagaacgaaagaggcgg

SEQ ID NO: 2135238 - DNA, 25 bp, Homo sapien
gagtgcctgaatggatagaccagca

SEQ ID NO: 2135239 - DNA, 25 bp, Homo sapien
tacttcattactgcgtctcctggga

SEQ ID NO: 2135240 - DNA, 25 bp, Homo sapien
ttacagacaatcaggcagtggagac

SEQ ID NO: 2135241 - DNA, 25 bp, Homo sapien
tcaggttgagcagtcgtctccgggt

SEQ ID NO: 2135242 - DNA, 25 bp, Homo sapien
gcaagtttggctcaatgcaattttg

SEQ ID NO: 2135243 - DNA, 25 bp, Homo sapien
gtttggctcaatgcaattttggtgt

SEQ ID NO: 2135244 - DNA, 25 bp, Homo sapien
agtttggctcaatgcaattttggtg

SEQ ID NO: 2135245 - DNA, 25 bp, Homo sapien
caagtttggctcaatgcaattttgg

SEQ ID NO: 2135246 - DNA, 25 bp, Homo sapien
taactagactggttggataagccca

SEQ ID NO: 2135247 - DNA, 25 bp, Homo sapien
gaagaagcgcatcacttcatcggct

SEQ ID NO: 2135248 - DNA, 25 bp, Homo sapien
tacatagctgtgatcgtaagcaccc

SEQ ID NO: 2135249 - DNA, 25 bp, Homo sapien
tagtgggttcgaacttcagctcggc

SEQ ID NO: 2135250 - DNA, 25 bp, Homo sapien
gattttcatacaaacgacacgacca

SEQ ID NO: 2135251 - DNA, 25 bp, Homo sapien
tgtacactcacgtgccttacaggat

SEQ ID NO: 2135252 - DNA, 25 bp, Homo sapien
cagtaagcatgaatcacaagcctgt

SEQ ID NO: 2135253 - DNA, 25 bp, Homo sapien
tgtttctcaacatgcatccgaagtt

SEQ ID NO: 2135254 - DNA, 25 bp, Homo sapien
gaaggagctggtcccagcgctagtc

SEQ ID NO: 2135255 - DNA, 25 bp, Homo sapien
gtacaccaccccataaggatcccag

SEQ ID NO: 2135256 - DNA, 25 bp, Homo sapien
ctttctccccgaattcttgtgggct

SEQ ID NO: 2135257 - DNA, 25 bp, Homo sapien
cccgaattcttgtgggcttgggagc

SEQ ID NO: 2135258 - DNA, 25 bp, Homo sapien
cttccgtcattcgccacgctgacca

SEQ ID NO: 2135259 - DNA, 25 bp, Homo sapien
cgtcattcgccacgctgaccacttc

SEQ ID NO: 2135260 - DNA, 25 bp, Homo sapien
ccgccatttcccgacagcctcttcc

SEQ ID NO: 2135261 - DNA, 25 bp, Homo sapien
catttcccgacagcctcttccctgt

SEQ ID NO: 2135262 - DNA, 25 bp, Homo sapien
cctcttggagctccgcggacacccg

SEQ ID NO: 2135263 - DNA, 25 bp, Homo sapien
aggcctttccagatgccctgccgtg

SEQ ID NO: 2135264 - DNA, 25 bp, Homo sapien
tggcaaagcgattgtcttccctctt

SEQ ID NO: 2135265 - DNA, 25 bp, Homo sapien
tccagatgccctgccgtgtttggca

SEQ ID NO: 2135266 - DNA, 25 bp, Homo sapien
tcacggttggtgagctgtctgtcct

SEQ ID NO: 2135267 - DNA, 25 bp, Homo sapien
tttttgaagttccagtatggtgctg

SEQ ID NO: 2135268 - DNA, 25 bp, Homo sapien
ccagtatggtgctgtcacggttggt

SEQ ID NO: 2135269 - DNA, 25 bp, Homo sapien
tgctgtcacggttggtgagctgtct

SEQ ID NO: 2135270 - DNA, 25 bp, Homo sapien
tcaatgtgaactaaggagtgggagg

SEQ ID NO: 2135271 - DNA, 25 bp, Homo sapien
agtcaatgtgaactaaggagtggga

SEQ ID NO: 2135272 - DNA, 25 bp, Homo sapien
caagtcaatgtgaactaaggagtgg

SEQ ID NO: 2135273 - DNA, 25 bp, Homo sapien
acaagtcaatgtgaactaaggagtg

SEQ ID NO: 2135274 - DNA, 25 bp, Homo sapien
gcttgtaaggccctgcatgccctga

SEQ ID NO: 2135275 - DNA, 25 bp, Homo sapien
gatatagactgaatggcttaagatg

SEQ ID NO: 2135276 - DNA, 25 bp, Homo sapien
gacaaatctgattcgttctccccat

SEQ ID NO: 2135277 - DNA, 25 bp, Homo sapien
cccacagggcttccaatggctctta

SEQ ID NO: 2135278 - DNA, 25 bp, Homo sapien
acagcggatctctcggcagaaactc

SEQ ID NO: 2135279 - DNA, 25 bp, Homo sapien
aagacacataattgtaattgtcaga

SEQ ID NO: 2135280 - DNA, 25 bp, Homo sapien
ttcaccaaagttgaaatgaaggaaa

SEQ ID NO: 2135281 - DNA, 25 bp, Homo sapien
ccacaaagggaagcccatcagacta

SEQ ID NO: 2135282 - DNA, 25 bp, Homo sapien
tgagtttcaggagctttacacagca

SEQ ID NO: 2135283 - DNA, 25 bp, Homo sapien
gagtttcaggagctttacacagcag

SEQ ID NO: 2135284 - DNA, 25 bp, Homo sapien
agtttcaggagctttacacagcagc

SEQ ID NO: 2135285 - DNA, 25 bp, Homo sapien
ttgagtttcaggagctttacacagc

SEQ ID NO: 2135286 - DNA, 25 bp, Homo sapien
gtattcttaaaacatatctcttcta

SEQ ID NO: 2135287 - DNA, 25 bp, Homo sapien
aaaccatagcagtgtctttgccagg

SEQ ID NO: 2135288 - DNA, 25 bp, Homo sapien
ttgaggcaaaccctgtgtattctta

SEQ ID NO: 2135289 - DNA, 25 bp, Homo sapien
aggcagacctgcttttggtcaaggt

SEQ ID NO: 2135290 - DNA, 25 bp, Homo sapien
taatctgggtactcccactgcagtt

SEQ ID NO: 2135291 - DNA, 25 bp, Homo sapien
atctgggtactcccactgcagtttt

SEQ ID NO: 2135292 - DNA, 25 bp, Homo sapien
ctaatctgggtactcccactgcagt

SEQ ID NO: 2135293 - DNA, 25 bp, Homo sapien
aatctgggtactcccactgcagttt

SEQ ID NO: 2135294 - DNA, 25 bp, Homo sapien
cagggcatgaatatcgtggaagcca

SEQ ID NO: 2135295 - DNA, 25 bp, Homo sapien
gaaacagggcatgaatatcgtggaa

SEQ ID NO: 2135296 - DNA, 25 bp, Homo sapien
aacagggcatgaatatcgtggaagc

SEQ ID NO: 2135297 - DNA, 25 bp, Homo sapien
ggaaacagggcatgaatatcgtgga

SEQ ID NO: 2135298 - DNA, 25 bp, Homo sapien
gcaaatggttcctagtttttcatct

SEQ ID NO: 2135299 - DNA, 25 bp, Homo sapien
tctgcactgccaagattgagtggtt

SEQ ID NO: 2135300 - DNA, 25 bp, Homo sapien
agtggttggatggcaaccatgtgat

SEQ ID NO: 2135301 - DNA, 25 bp, Homo sapien
gcactgccaagattgagtggttgga

SEQ ID NO: 2135302 - DNA, 25 bp, Homo sapien
ctggcatcttgttcatggaaaatgc

SEQ ID NO: 2135303 - DNA, 25 bp, Homo sapien
aggtcctggcatcttgttcatggaa

SEQ ID NO: 2135304 - DNA, 25 bp, Homo sapien
tcctggcatcttgttcatggaaaat

SEQ ID NO: 2135305 - DNA, 25 bp, Homo sapien
ggtcctggcatcttgttcatggaaa

SEQ ID NO: 2135306 - DNA, 25 bp, Homo sapien
acagaattatcccagagtttatgtg

SEQ ID NO: 2135307 - DNA, 25 bp, Homo sapien
tatcccagagtttatgtgtcagggt

SEQ ID NO: 2135308 - DNA, 25 bp, Homo sapien
ctggagagaaataatttagttataa

SEQ ID NO: 2135309 - DNA, 25 bp, Homo sapien
gaattatcccagagtttatgtgtca

SEQ ID NO: 2135310 - DNA, 25 bp, Homo sapien
tctaactgtttgtagacaaagttcc

SEQ ID NO: 2135311 - DNA, 25 bp, Homo sapien
gcccttgggctgcatcttctaactg

SEQ ID NO: 2135312 - DNA, 25 bp, Homo sapien
ctaactgtttgtagacaaagttcca

SEQ ID NO: 2135313 - DNA, 25 bp, Homo sapien
gggctgcatcttctaactgtttgta

SEQ ID NO: 2135314 - DNA, 25 bp, Homo sapien
catgttcttcaacatcgccacccat

SEQ ID NO: 2135315 - DNA, 25 bp, Homo sapien
tagcaggattcttgcctaatggcag

SEQ ID NO: 2135316 - DNA, 25 bp, Homo sapien
catgccctggttaagcagaatgctc

SEQ ID NO: 2135317 - DNA, 25 bp, Homo sapien
taggattcttggtagagggaagcca

SEQ ID NO: 2135318 - DNA, 25 bp, Homo sapien
taatggcagaccaaggtcatgccct

SEQ ID NO: 2135319 - DNA, 25 bp, Homo sapien
caaatttgaagatggtgctatcagc

SEQ ID NO: 2135320 - DNA, 25 bp, Homo sapien
cacaaatttgaagatggtgctatca

SEQ ID NO: 2135321 - DNA, 25 bp, Homo sapien
cttccacaaatttgaagatggtgct

SEQ ID NO: 2135322 - DNA, 25 bp, Homo sapien
tccacaaatttgaagatggtgctat

SEQ ID NO: 2135323 - DNA, 25 bp, Homo sapien
gagccaacattatatgtaggaaatt

SEQ ID NO: 2135324 - DNA, 25 bp, Homo sapien
agccaacattatatgtaggaaattt

SEQ ID NO: 2135325 - DNA, 25 bp, Homo sapien
gattgttgtctgaccacctcttcac

SEQ ID NO: 2135326 - DNA, 25 bp, Homo sapien
tttgtttcattatcagattgttgtc

SEQ ID NO: 2135327 - DNA, 25 bp, Homo sapien
tcatctaagcgtcttctcttcacat

SEQ ID NO: 2135328 - DNA, 25 bp, Homo sapien
cattatcagattgttgtctgaccac

SEQ ID NO: 2135329 - DNA, 25 bp, Homo sapien
agccttttccaattcagggccaaca

SEQ ID NO: 2135330 - DNA, 25 bp, Homo sapien
tgaatgctgggtgggcagccgagct

SEQ ID NO: 2135331 - DNA, 25 bp, Homo sapien
gagtctaactggaccgtttgtaaca

SEQ ID NO: 2135332 - DNA, 25 bp, Homo sapien
aaccagacacaagcataacagacag

SEQ ID NO: 2135333 - DNA, 25 bp, Homo sapien
gaagcatgggtctatagaacatcaa

SEQ ID NO: 2135334 - DNA, 25 bp, Homo sapien
gcagtatcagcaccacgtgaaagcc

SEQ ID NO: 2135335 - DNA, 25 bp, Homo sapien
ctgttagacatgcagcttaggcccc

SEQ ID NO: 2135336 - DNA, 25 bp, Homo sapien
gggacctattggataagagcctgca

SEQ ID NO: 2135337 - DNA, 25 bp, Homo sapien
tgtaaaacagctgtgaccagaagcc

SEQ ID NO: 2135338 - DNA, 25 bp, Homo sapien
ctgtaaaacagctgtgaccagaagc

SEQ ID NO: 2135339 - DNA, 25 bp, Homo sapien
taatacctggcatagcagatttcca

SEQ ID NO: 2135340 - DNA, 25 bp, Homo sapien
taacatcaagggactgcaatagcat

SEQ ID NO: 2135341 - DNA, 25 bp, Homo sapien
gaagtggtaccacaagcagagttct

SEQ ID NO: 2135342 - DNA, 25 bp, Homo sapien
tagcatgcagatccagtaatacctg

SEQ ID NO: 2135343 - DNA, 25 bp, Homo sapien
tatacacctacagatgatgcatgct

SEQ ID NO: 2135344 - DNA, 25 bp, Homo sapien
gaaatgcatatctttgggtctcaac

SEQ ID NO: 2135345 - DNA, 25 bp, Homo sapien
taccttttacgtgactctaagagag

SEQ ID NO: 2135346 - DNA, 25 bp, Homo sapien
gagcctctgctccactccataaatg

SEQ ID NO: 2135347 - DNA, 25 bp, Homo sapien
cacactcaaggatagggattatgca

SEQ ID NO: 2135348 - DNA, 25 bp, Homo sapien
gcatgaacactaggaggcatggctc

SEQ ID NO: 2135349 - DNA, 25 bp, Homo sapien
atggagagcatcaagtgccagcacc

SEQ ID NO: 2135350 - DNA, 25 bp, Homo sapien
tcattgagatcaccgtcttagaggc

SEQ ID NO: 2135351 - DNA, 25 bp, Homo sapien
tggaaacgttttcaccctctcttga

SEQ ID NO: 2135352 - DNA, 25 bp, Homo sapien
tgatgttggtcatacaccttggccc

SEQ ID NO: 2135353 - DNA, 25 bp, Homo sapien
cagagtaagatggaacctggaaacg

SEQ ID NO: 2135354 - DNA, 25 bp, Homo sapien
catatcctgagctctagaaatctag

SEQ ID NO: 2135355 - DNA, 25 bp, Homo sapien
tgtgttgtctttctatatactgaag

SEQ ID NO: 2135356 - DNA, 25 bp, Homo sapien
atgaaaaatactctcctagatggag

SEQ ID NO: 2135357 - DNA, 25 bp, Homo sapien
tcttactgattttgcagaagggctg

SEQ ID NO: 2135358 - DNA, 25 bp, Homo sapien
gatgtagttaaatgcatcagtcttt

SEQ ID NO: 2135359 - DNA, 25 bp, Homo sapien
tattgatgtggcagtgtacagcagc

SEQ ID NO: 2135360 - DNA, 25 bp, Homo sapien
gaatctgacactgggcaggcaagcc

SEQ ID NO: 2135361 - DNA, 25 bp, Homo sapien
gcagcagaacacttgcggaacaggg

SEQ ID NO: 2135362 - DNA, 25 bp, Homo sapien
ccagcaggtgacattagacagcaac

SEQ ID NO: 2135363 - DNA, 25 bp, Homo sapien
caaaatggataggtaatgtacaggc

SEQ ID NO: 2135364 - DNA, 25 bp, Homo sapien
caccaaatgttggtgagaacatgga

SEQ ID NO: 2135365 - DNA, 25 bp, Homo sapien
tcaaaagactaacagcaccaaatgt

SEQ ID NO: 2135366 - DNA, 25 bp, Homo sapien
tatagtacatgtagctgacaaagga

SEQ ID NO: 2135367 - DNA, 25 bp, Homo sapien
attattgccacaatttcagctcctg

SEQ ID NO: 2135368 - DNA, 25 bp, Homo sapien
ttgccacaatttcagctcctgttat

SEQ ID NO: 2135369 - DNA, 25 bp, Homo sapien
tgattattgccacaatttcagctcc

SEQ ID NO: 2135370 - DNA, 25 bp, Homo sapien
tattgccacaatttcagctcctgtt

SEQ ID NO: 2135371 - DNA, 25 bp, Homo sapien
tattttgaagtttacgtcattggaa

SEQ ID NO: 2135372 - DNA, 25 bp, Homo sapien
gttgaatattaggagagatctggtg

SEQ ID NO: 2135373 - DNA, 25 bp, Homo sapien
tacgtcattggaatgtgcccctttc

SEQ ID NO: 2135374 - DNA, 25 bp, Homo sapien
ggtgaaatggtatcttccctctatt

SEQ ID NO: 2135375 - DNA, 25 bp, Homo sapien
tgttttcacatctcatctttgcatt

SEQ ID NO: 2135376 - DNA, 25 bp, Homo sapien
tgggttctttagtttgcaatcttcc

SEQ ID NO: 2135377 - DNA, 25 bp, Homo sapien
atgttgttttgtcctaatgggttct

SEQ ID NO: 2135378 - DNA, 25 bp, Homo sapien
gctgttttcacatctcatctttgca

SEQ ID NO: 2135379 - DNA, 25 bp, Homo sapien
gaagacaaatccttcattgccctgc

SEQ ID NO: 2135380 - DNA, 25 bp, Homo sapien
aatatcacacttttacatggtgtcg

SEQ ID NO: 2135381 - DNA, 25 bp, Homo sapien
caactatttttggatatccttgggc

SEQ ID NO: 2135382 - DNA, 25 bp, Homo sapien
tactcagatctgtttcatcgattga

SEQ ID NO: 2135383 - DNA, 25 bp, Homo sapien
ctacataggtttcccgacataggga

SEQ ID NO: 2135384 - DNA, 25 bp, Homo sapien
cttgggaggctacttggcaagaaga

SEQ ID NO: 2135385 - DNA, 25 bp, Homo sapien
tttgagaccaccctacataggtttc

SEQ ID NO: 2135386 - DNA, 25 bp, Homo sapien
cccacaagagtacaattctagtata

SEQ ID NO: 2135387 - DNA, 25 bp, Homo sapien
caaaactcagggaccaaatatgcag

SEQ ID NO: 2135388 - DNA, 25 bp, Homo sapien
tacaagcccctcagaataatcccaa

SEQ ID NO: 2135389 - DNA, 25 bp, Homo sapien
ggcagcctctttcttagaacattga

SEQ ID NO: 2135390 - DNA, 25 bp, Homo sapien
tactccaaatatagaccctccaggc

SEQ ID NO: 2135391 - DNA, 25 bp, Homo sapien
aatgtacaggatcccaagcaattgc

SEQ ID NO: 2135392 - DNA, 25 bp, Homo sapien
tcacaagtggaagggcaatgtacag

SEQ ID NO: 2135393 - DNA, 25 bp, Homo sapien
tttttccctcacaagtggaagggca

SEQ ID NO: 2135394 - DNA, 25 bp, Homo sapien
ggcaatgtacaggatcccaagcaat

SEQ ID NO: 2135395 - DNA, 25 bp, Homo sapien
tacatactaccctagcagtggcgag

SEQ ID NO: 2135396 - DNA, 25 bp, Homo sapien
gacccaactcctgatgagcctagtg

SEQ ID NO: 2135397 - DNA, 25 bp, Homo sapien
caactgctagagcttggatggaaag

SEQ ID NO: 2135398 - DNA, 25 bp, Homo sapien
tcgtaacacttgagatctcgccggt

SEQ ID NO: 2135399 - DNA, 25 bp, Homo sapien
gtgccccagtgcgcacgcgttgtca

SEQ ID NO: 2135400 - DNA, 25 bp, Homo sapien
gccccagtgcgcacgcgttgtcact

SEQ ID NO: 2135401 - DNA, 25 bp, Homo sapien
tgccccagtgcgcacgcgttgtcac

SEQ ID NO: 2135402 - DNA, 25 bp, Homo sapien
ggtgccccagtgcgcacgcgttgtc

SEQ ID NO: 2135403 - DNA, 25 bp, Homo sapien
ccaccaagggccggcggccagtcac

SEQ ID NO: 2135404 - DNA, 25 bp, Homo sapien
cacccaccaagggccggcggccagt

SEQ ID NO: 2135405 - DNA, 25 bp, Homo sapien
accaagggccggcggccagtcacca

SEQ ID NO: 2135406 - DNA, 25 bp, Homo sapien
aagggccggcggccagtcaccagga

SEQ ID NO: 2135407 - DNA, 25 bp, Homo sapien
ggtcacgtgaggaccgcgcgtcacc

SEQ ID NO: 2135408 - DNA, 25 bp, Homo sapien
ctgcagctccgggtcacgtgaggac

SEQ ID NO: 2135409 - DNA, 25 bp, Homo sapien
gtcaccgccgagctcgccctcctcc

SEQ ID NO: 2135410 - DNA, 25 bp, Homo sapien
tgaggaccgcgcgtcaccgccgagc

SEQ ID NO: 2135411 - DNA, 25 bp, Homo sapien
ccgctttccccgggcccgatgccag

SEQ ID NO: 2135412 - DNA, 25 bp, Homo sapien
ggagctggtagccagatgcgagtga

SEQ ID NO: 2135413 - DNA, 25 bp, Homo sapien
tagccagatgcgagtgacgactgca

SEQ ID NO: 2135414 - DNA, 25 bp, Homo sapien
tgcgagtgacgactgcaacgaaggc

SEQ ID NO: 2135415 - DNA, 25 bp, Homo sapien
cattttctctgcaaacgccaccgtg

SEQ ID NO: 2135416 - DNA, 25 bp, Homo sapien
tttctctgcaaacgccaccgtggcg

SEQ ID NO: 2135417 - DNA, 25 bp, Homo sapien
caccgtggcgcatcccttccactaa

SEQ ID NO: 2135418 - DNA, 25 bp, Homo sapien
ccaccgtggcgcatcccttccacta

SEQ ID NO: 2135419 - DNA, 25 bp, Homo sapien
tccttgatccagtgcagttttctcc

SEQ ID NO: 2135420 - DNA, 25 bp, Homo sapien
tttctcctcgccgcaaacagtgcta

SEQ ID NO: 2135421 - DNA, 25 bp, Homo sapien
tcctcgccgcaaacagtgctacacc

SEQ ID NO: 2135422 - DNA, 25 bp, Homo sapien
tcgccgcaaacagtgctacaccgaa

SEQ ID NO: 2135423 - DNA, 25 bp, Homo sapien
caagatggtcaggtaggtagaggga

SEQ ID NO: 2135424 - DNA, 25 bp, Homo sapien
ccaagatggtcaggtaggtagaggg

SEQ ID NO: 2135425 - DNA, 25 bp, Homo sapien
caggtaggtagagggatctggaaaa

SEQ ID NO: 2135426 - DNA, 25 bp, Homo sapien
tgcctgcctggatttagagacccat

SEQ ID NO: 2135427 - DNA, 25 bp, Homo sapien
gacataggtccctgtacctgcctgc

SEQ ID NO: 2135428 - DNA, 25 bp, Homo sapien
catctaagacataggtccctgtacc

SEQ ID NO: 2135429 - DNA, 25 bp, Homo sapien
ctgcctggatttagagacccatttg

SEQ ID NO: 2135430 - DNA, 25 bp, Homo sapien
caatggtaaacagccctactgcagg

SEQ ID NO: 2135431 - DNA, 25 bp, Homo sapien
tccaatggtaaacagccctactgca

SEQ ID NO: 2135432 - DNA, 25 bp, Homo sapien
aatggtaaacagccctactgcaggc

SEQ ID NO: 2135433 - DNA, 25 bp, Homo sapien
ttctagattgatctcctcctctttc

SEQ ID NO: 2135434 - DNA, 25 bp, Homo sapien
ttgcttccagtgatcttaagccctg

SEQ ID NO: 2135435 - DNA, 25 bp, Homo sapien
tccagtgatcttaagccctgcagca

SEQ ID NO: 2135436 - DNA, 25 bp, Homo sapien
ttccagtgatcttaagccctgcagc

SEQ ID NO: 2135437 - DNA, 25 bp, Homo sapien
gcttccagtgatcttaagccctgca

SEQ ID NO: 2135438 - DNA, 25 bp, Homo sapien
agatacataaattcatgagatctct

SEQ ID NO: 2135439 - DNA, 25 bp, Homo sapien
tagatacataaattcatgagatctc

SEQ ID NO: 2135440 - DNA, 25 bp, Homo sapien
aaagtagatacataaattcatgaga

SEQ ID NO: 2135441 - DNA, 25 bp, Homo sapien
agtagatacataaattcatgagatc

SEQ ID NO: 2135442 - DNA, 25 bp, Homo sapien
ctgtaatgatccgaggcagttccct

SEQ ID NO: 2135443 - DNA, 25 bp, Homo sapien
gtaatgatccgaggcagttccctcc

SEQ ID NO: 2135444 - DNA, 25 bp, Homo sapien
aatgatccgaggcagttccctcctc

SEQ ID NO: 2135445 - DNA, 25 bp, Homo sapien
atgatccgaggcagttccctcctct

SEQ ID NO: 2135446 - DNA, 25 bp, Homo sapien
acaaggtatggtagagcgcactcgg

SEQ ID NO: 2135447 - DNA, 25 bp, Homo sapien
aaaggccactacagctgcctctgga

SEQ ID NO: 2135448 - DNA, 25 bp, Homo sapien
aaagcacgaacaaggtatggtagag

SEQ ID NO: 2135449 - DNA, 25 bp, Homo sapien
tcaaaggccactacagctgcctctg

SEQ ID NO: 2135450 - DNA, 25 bp, Homo sapien
cacttcctgaatgcggcccatgtaa

SEQ ID NO: 2135451 - DNA, 25 bp, Homo sapien
aaggtctggctctgtaccccaacca

SEQ ID NO: 2135452 - DNA, 25 bp, Homo sapien
taaatttgtaaatgtagtagcaggt

SEQ ID NO: 2135453 - DNA, 25 bp, Homo sapien
gtttctgctccaatctcgacttggg

SEQ ID NO: 2135454 - DNA, 25 bp, Homo sapien
cctgagagttggctctgtgtatggc

SEQ ID NO: 2135455 - DNA, 25 bp, Homo sapien
ttggtctctacttcagccctaggcc

SEQ ID NO: 2135456 - DNA, 25 bp, Homo sapien
tggctctgccccaaccattgccttg

SEQ ID NO: 2135457 - DNA, 25 bp, Homo sapien
tatggctatagcagtggccttggtc

SEQ ID NO: 2135458 - DNA, 25 bp, Homo sapien
gggtcactgcttctttcatggccac

SEQ ID NO: 2135459 - DNA, 25 bp, Homo sapien
ttccctgggtactgccaaggtctca

SEQ ID NO: 2135460 - DNA, 25 bp, Homo sapien
gctttagccttggtctgtgtcactg

SEQ ID NO: 2135461 - DNA, 25 bp, Homo sapien
tggcctctgtcttggcaaccagcgc

SEQ ID NO: 2135462 - DNA, 25 bp, Homo sapien
ctcttccagagctcttgtcttggtt

SEQ ID NO: 2135463 - DNA, 25 bp, Homo sapien
cttccagagctcttgtcttggtttc

SEQ ID NO: 2135464 - DNA, 25 bp, Homo sapien
cagagctcttgtcttggtttcatcc

SEQ ID NO: 2135465 - DNA, 25 bp, Homo sapien
agtctcttccagagctcttgtcttg

SEQ ID NO: 2135466 - DNA, 25 bp, Homo sapien
ccctggacatgccattgggatttcc

SEQ ID NO: 2135467 - DNA, 25 bp, Homo sapien
tgggatttcccctagcatcaactgt

SEQ ID NO: 2135468 - DNA, 25 bp, Homo sapien
tcagactgagtcttagccacactca

SEQ ID NO: 2135469 - DNA, 25 bp, Homo sapien
gcacaggacttcatgtccactccag

SEQ ID NO: 2135470 - DNA, 25 bp, Homo sapien
cctcagcgtgagtactggcaacagc

SEQ ID NO: 2135471 - DNA, 25 bp, Homo sapien
ccttagccataacattgggattgcc

SEQ ID NO: 2135472 - DNA, 25 bp, Homo sapien
tcaacctgggaattggccctcaagt

SEQ ID NO: 2135473 - DNA, 25 bp, Homo sapien
tagcatcagacatggcctcagcgtg

SEQ ID NO: 2135474 - DNA, 25 bp, Homo sapien
aagctgaggctgtgtacaggacaac

SEQ ID NO: 2135475 - DNA, 25 bp, Homo sapien
tccttaggcatggtattgacattgc

SEQ ID NO: 2135476 - DNA, 25 bp, Homo sapien
tttgccatcagacaaggtatcagcc

SEQ ID NO: 2135477 - DNA, 25 bp, Homo sapien
gacattgcccctgaccttaattttg

SEQ ID NO: 2135478 - DNA, 25 bp, Homo sapien
cagcctgaggttgtgtacaggtttt

SEQ ID NO: 2135479 - DNA, 25 bp, Homo sapien
ccctgtcttacacttggctttggct

SEQ ID NO: 2135480 - DNA, 25 bp, Homo sapien
agtggcattaggattgcccctacca

SEQ ID NO: 2135481 - DNA, 25 bp, Homo sapien
ggctttggctttgcccctagcctta

SEQ ID NO: 2135482 - DNA, 25 bp, Homo sapien
acagaccctctggtctgccttagtc

SEQ ID NO: 2135483 - DNA, 25 bp, Homo sapien
cacagaccctctggtctgccttagt

SEQ ID NO: 2135484 - DNA, 25 bp, Homo sapien
agaccctctggtctgccttagtccc

SEQ ID NO: 2135485 - DNA, 25 bp, Homo sapien
accctctggtctgccttagtcccgg

SEQ ID NO: 2135486 - DNA, 25 bp, Homo sapien
tatatggcccaacccctgaattagg

SEQ ID NO: 2135487 - DNA, 25 bp, Homo sapien
tggaaactgaccactgcctcaggct

SEQ ID NO: 2135488 - DNA, 25 bp, Homo sapien
tagacacagcattaagattggcctt

SEQ ID NO: 2135489 - DNA, 25 bp, Homo sapien
cacaatgggaattagccacagcctg

SEQ ID NO: 2135490 - DNA, 25 bp, Homo sapien
gcccctgccttagacacaacattgg

SEQ ID NO: 2135491 - DNA, 25 bp, Homo sapien
tggacagagcccattatgcctgccc

SEQ ID NO: 2135492 - DNA, 25 bp, Homo sapien
caaggtctcacgctgggagttggcc

SEQ ID NO: 2135493 - DNA, 25 bp, Homo sapien
tgaaaactggccacaacctggacct

SEQ ID NO: 2135494 - DNA, 25 bp, Homo sapien
acatagacttgtcccttgccccagg

SEQ ID NO: 2135495 - DNA, 25 bp, Homo sapien
gcctcaggctttgcataggcctcat

SEQ ID NO: 2135496 - DNA, 25 bp, Homo sapien
ccagtccctgctttaggcacagcaa

SEQ ID NO: 2135497 - DNA, 25 bp, Homo sapien
ctgggaaccggccacaatctgaggc

SEQ ID NO: 2135498 - DNA, 25 bp, Homo sapien
ttcccagtctccatccatggtctga

SEQ ID NO: 2135499 - DNA, 25 bp, Homo sapien
taaatttgatccaccgctcagcagc

SEQ ID NO: 2135500 - DNA, 25 bp, Homo sapien
caccaatcccattccagtagtagtc

SEQ ID NO: 2135501 - DNA, 25 bp, Homo sapien
aatcccattccagtagtagtcatgg

SEQ ID NO: 2135502 - DNA, 25 bp, Homo sapien
acccttcactggcttggttctcagc

SEQ ID NO: 2135503 - DNA, 25 bp, Homo sapien
caagaccgaataatcccagccttat

SEQ ID NO: 2135504 - DNA, 25 bp, Homo sapien
agattgatcactagtcccagcccag

SEQ ID NO: 2135505 - DNA, 25 bp, Homo sapien
ggcttgatcctcaaatctaggcttg

SEQ ID NO: 2135506 - DNA, 25 bp, Homo sapien
ggactgatctacgtggcccagccta

SEQ ID NO: 2135507 - DNA, 25 bp, Homo sapien
ccagcctagaccctccactggcttg

SEQ ID NO: 2135508 - DNA, 25 bp, Homo sapien
cactggactgatctacgtggcccag

SEQ ID NO: 2135509 - DNA, 25 bp, Homo sapien
aggccccaacattgaccctccacta

SEQ ID NO: 2135510 - DNA, 25 bp, Homo sapien
accaccagactgatcaagtgtccca

SEQ ID NO: 2135511 - DNA, 25 bp, Homo sapien
acccaccaccagactgatcaagtgt

SEQ ID NO: 2135512 - DNA, 25 bp, Homo sapien
accagactgatcaagtgtcccagcc

SEQ ID NO: 2135513 - DNA, 25 bp, Homo sapien
agactgatcaagtgtcccagcccag

SEQ ID NO: 2135514 - DNA, 25 bp, Homo sapien
gagttagcccatgaccttccactgg

SEQ ID NO: 2135515 - DNA, 25 bp, Homo sapien
ggcccaacactagctggatgcccag

SEQ ID NO: 2135516 - DNA, 25 bp, Homo sapien
taagaatcctccactgatttggtcc

SEQ ID NO: 2135517 - DNA, 25 bp, Homo sapien
gacctgatcctcaaatataggcttt

SEQ ID NO: 2135518 - DNA, 25 bp, Homo sapien
cccagcactggactggttcgtgggc

SEQ ID NO: 2135519 - DNA, 25 bp, Homo sapien
tcaaatccaggtttggaacaaccac

SEQ ID NO: 2135520 - DNA, 25 bp, Homo sapien
ccaggaacctattccactggactga

SEQ ID NO: 2135521 - DNA, 25 bp, Homo sapien
ttcgtgggccctggcctagaccctc

SEQ ID NO: 2135522 - DNA, 25 bp, Homo sapien
ctggtctgcaggccccggcctagct

SEQ ID NO: 2135523 - DNA, 25 bp, Homo sapien
tcccccaaggacctggccaccagcc

SEQ ID NO: 2135524 - DNA, 25 bp, Homo sapien
ccggcctagctcccccaaggacctg

SEQ ID NO: 2135525 - DNA, 25 bp, Homo sapien
gcctagctcccccaaggacctggcc

SEQ ID NO: 2135526 - DNA, 25 bp, Homo sapien
caaattcaggcttggaacagtcaac

SEQ ID NO: 2135527 - DNA, 25 bp, Homo sapien
ctcaaattcaggcttggaacagtca

SEQ ID NO: 2135528 - DNA, 25 bp, Homo sapien
ggaacagtcaacagcctgatcccca

SEQ ID NO: 2135529 - DNA, 25 bp, Homo sapien
tccacaagcctgatcctcaaattca

SEQ ID NO: 2135530 - DNA, 25 bp, Homo sapien
ggcccaaaccagaatccttcattgg

SEQ ID NO: 2135531 - DNA, 25 bp, Homo sapien
tggtcctcagatctagcccaggatc

SEQ ID NO: 2135532 - DNA, 25 bp, Homo sapien
gctccaggcccaaaccagaatcctt

SEQ ID NO: 2135533 - DNA, 25 bp, Homo sapien
agcaccaagaccctataacggcctc

SEQ ID NO: 2135534 - DNA, 25 bp, Homo sapien
tcagcctcaatcctagaacaaatca

SEQ ID NO: 2135535 - DNA, 25 bp, Homo sapien
caatcctagaacaaatcatggcctc

SEQ ID NO: 2135536 - DNA, 25 bp, Homo sapien
gcctcaatcctagaacaaatcatgg

SEQ ID NO: 2135537 - DNA, 25 bp, Homo sapien
tctcagcctcaatcctagaacaaat

SEQ ID NO: 2135538 - DNA, 25 bp, Homo sapien
tcagatctaatccaggagccactac

SEQ ID NO: 2135539 - DNA, 25 bp, Homo sapien
ctcagatctaatccaggagccacta

SEQ ID NO: 2135540 - DNA, 25 bp, Homo sapien
tcctcagatctaatccaggagccac

SEQ ID NO: 2135541 - DNA, 25 bp, Homo sapien
cctcagatctaatccaggagccact

SEQ ID NO: 2135542 - DNA, 25 bp, Homo sapien
aggtccaggactctacaccagcctc

SEQ ID NO: 2135543 - DNA, 25 bp, Homo sapien
aaggtccaggactctacaccagcct

SEQ ID NO: 2135544 - DNA, 25 bp, Homo sapien
ggtccaggactctacaccagcctct

SEQ ID NO: 2135545 - DNA, 25 bp, Homo sapien
caaggtccaggactctacaccagcc

SEQ ID NO: 2135546 - DNA, 25 bp, Homo sapien
gaccttaaactgatctcctcaatat

SEQ ID NO: 2135547 - DNA, 25 bp, Homo sapien
agggctggactctctacttagctca

SEQ ID NO: 2135548 - DNA, 25 bp, Homo sapien
ggactctctacttagctcatcctct

SEQ ID NO: 2135549 - DNA, 25 bp, Homo sapien
atctcctcaatatcagggctggact

SEQ ID NO: 2135550 - DNA, 25 bp, Homo sapien
cagctccagactcaaaactggcatc

SEQ ID NO: 2135551 - DNA, 25 bp, Homo sapien
cccactcttagatctgaacgtatta

SEQ ID NO: 2135552 - DNA, 25 bp, Homo sapien
tgttttcattaccagcacagaacca

SEQ ID NO: 2135553 - DNA, 25 bp, Homo sapien
tgctggtgttatccccagctccaga

SEQ ID NO: 2135554 - DNA, 25 bp, Homo sapien
tgcctcttgactcagatgacttttt

SEQ ID NO: 2135555 - DNA, 25 bp, Homo sapien
ctgccccagggaccatgtacggata

SEQ ID NO: 2135556 - DNA, 25 bp, Homo sapien
tatatgcctcttgactcagatgact

SEQ ID NO: 2135557 - DNA, 25 bp, Homo sapien
ggaccatgtacggatatatgcctct

SEQ ID NO: 2135558 - DNA, 25 bp, Homo sapien
gatgccttatcaaccttagtccagc

SEQ ID NO: 2135559 - DNA, 25 bp, Homo sapien
tgggaagctggcctcactttggtgt

SEQ ID NO: 2135560 - DNA, 25 bp, Homo sapien
acttagtttccgaccagatcatggc

SEQ ID NO: 2135561 - DNA, 25 bp, Homo sapien
tgtttacagcggcaagaccagggcc

SEQ ID NO: 2135562 - DNA, 25 bp, Homo sapien
aaacatggtctttagtttctccact

SEQ ID NO: 2135563 - DNA, 25 bp, Homo sapien
caaaacatggtctttagtttctcca

SEQ ID NO: 2135564 - DNA, 25 bp, Homo sapien
catggtctttagtttctccacttcc

SEQ ID NO: 2135565 - DNA, 25 bp, Homo sapien
tggtctttagtttctccacttccca

SEQ ID NO: 2135566 - DNA, 25 bp, Homo sapien
gcattctgctgctaaggctcgaagt

SEQ ID NO: 2135567 - DNA, 25 bp, Homo sapien
ggcacatgctttaggtcgttggaat

SEQ ID NO: 2135568 - DNA, 25 bp, Homo sapien
ggctcgaagtttcttggcacatgct

SEQ ID NO: 2135569 - DNA, 25 bp, Homo sapien
tgtcctgggtaaatgcttttgctct

SEQ ID NO: 2135570 - DNA, 25 bp, Homo sapien
aaatttgtttgggaacatacagcca

SEQ ID NO: 2135571 - DNA, 25 bp, Homo sapien
cattacttccagagtgcaaaaccaa

SEQ ID NO: 2135572 - DNA, 25 bp, Homo sapien
ggtccagctatagaccatcataggt

SEQ ID NO: 2135573 - DNA, 25 bp, Homo sapien
catcataggtaacatcagtttcaaa

SEQ ID NO: 2135574 - DNA, 25 bp, Homo sapien
tttttactagggaatgctcttggga

SEQ ID NO: 2135575 - DNA, 25 bp, Homo sapien
ttttactagggaatgctcttgggat

SEQ ID NO: 2135576 - DNA, 25 bp, Homo sapien
tcagcatgaagcgtttttactaggg

SEQ ID NO: 2135577 - DNA, 25 bp, Homo sapien
agcatgaagcgtttttactagggaa

SEQ ID NO: 2135578 - DNA, 25 bp, Homo sapien
cacttcttgtaccaactgttgcagg

SEQ ID NO: 2135579 - DNA, 25 bp, Homo sapien
gtgtttgctttctcgaaccacttct

SEQ ID NO: 2135580 - DNA, 25 bp, Homo sapien
ctgttgcaggttggcttcccaggaa

SEQ ID NO: 2135581 - DNA, 25 bp, Homo sapien
tgctttctcgaaccacttcttgtac

SEQ ID NO: 2135582 - DNA, 25 bp, Homo sapien
tattccagaggcctatctactccac

SEQ ID NO: 2135583 - DNA, 25 bp, Homo sapien
tgcttagcaacagccgcccaatttt

SEQ ID NO: 2135584 - DNA, 25 bp, Homo sapien
tctcaaaggtctgatacatggcacc

SEQ ID NO: 2135585 - DNA, 25 bp, Homo sapien
gtgtcccattttaccagtatgccaa

SEQ ID NO: 2135586 - DNA, 25 bp, Homo sapien
cataactcggcatagaagacttgtc

SEQ ID NO: 2135587 - DNA, 25 bp, Homo sapien
tgctggctaggttatgtcccgaaac

SEQ ID NO: 2135588 - DNA, 25 bp, Homo sapien
gagccatcgcagtaatgagttcgtg

SEQ ID NO: 2135589 - DNA, 25 bp, Homo sapien
ttttccatacttcgaggagccatcg

SEQ ID NO: 2135590 - DNA, 25 bp, Homo sapien
gacaccaagcacaagaggcagactc

SEQ ID NO: 2135591 - DNA, 25 bp, Homo sapien
aatccagtcccatgagcacaagaac

SEQ ID NO: 2135592 - DNA, 25 bp, Homo sapien
tgcattcataccctcatcaggagag

SEQ ID NO: 2135593 - DNA, 25 bp, Homo sapien
gggaaacaggtacacgcaaaagaca

SEQ ID NO: 2135594 - DNA, 25 bp, Homo sapien
taaaattctgagggaaatgacctaa

SEQ ID NO: 2135595 - DNA, 25 bp, Homo sapien
tatccaataattaccagtcaagtgt

SEQ ID NO: 2135596 - DNA, 25 bp, Homo sapien
ccagtcaagtgtaagggtagaatac

SEQ ID NO: 2135597 - DNA, 25 bp, Homo sapien
taattaccagtcaagtgtaagggta

SEQ ID NO: 2135598 - DNA, 25 bp, Homo sapien
tcagaagtgtgctttgcatatacac

SEQ ID NO: 2135599 - DNA, 25 bp, Homo sapien
gtgctttgcatatacactttctcag

SEQ ID NO: 2135600 - DNA, 25 bp, Homo sapien
gctttgcatatacactttctcagga

SEQ ID NO: 2135601 - DNA, 25 bp, Homo sapien
aaagatctcagaagtgtgctttgca

SEQ ID NO: 2135602 - DNA, 25 bp, Homo sapien
ggagttcaaggccatcctgggcaat

SEQ ID NO: 2135603 - DNA, 25 bp, Homo sapien
ttcaaggccatcctgggcaatgtgg

SEQ ID NO: 2135604 - DNA, 25 bp, Homo sapien
agttcaaggccatcctgggcaatgt

SEQ ID NO: 2135605 - DNA, 25 bp, Homo sapien
tcaaggccatcctgggcaatgtggc

SEQ ID NO: 2135606 - DNA, 25 bp, Homo sapien
tcatgatttttcttttcatagcaac

SEQ ID NO: 2135607 - DNA, 25 bp, Homo sapien
taatatcatgatttttcttttcata

SEQ ID NO: 2135608 - DNA, 25 bp, Homo sapien
tatcatgatttttcttttcatagca

SEQ ID NO: 2135609 - DNA, 25 bp, Homo sapien
atatcatgatttttcttttcatagc

SEQ ID NO: 2135610 - DNA, 25 bp, Homo sapien
gcaacaagcaaatcaggaagagagg

SEQ ID NO: 2135611 - DNA, 25 bp, Homo sapien
gcatttttctatcagacgagggttt

SEQ ID NO: 2135612 - DNA, 25 bp, Homo sapien
cgagggtttggtaatagctggacac

SEQ ID NO: 2135613 - DNA, 25 bp, Homo sapien
tgctggcgattttttaggacggtgc

SEQ ID NO: 2135614 - DNA, 25 bp, Homo sapien
tgcccctgggtcagagtagcctatg

SEQ ID NO: 2135615 - DNA, 25 bp, Homo sapien
tagccttgggcatacacacattctt

SEQ ID NO: 2135616 - DNA, 25 bp, Homo sapien
tggatttctaggatttgcccctggg

SEQ ID NO: 2135617 - DNA, 25 bp, Homo sapien
cattcagccactagtaccttggagg

SEQ ID NO: 2135618 - DNA, 25 bp, Homo sapien
tctttgagattattccatttggaat

SEQ ID NO: 2135619 - DNA, 25 bp, Homo sapien
ctagaggtggttttctttgagatta

SEQ ID NO: 2135620 - DNA, 25 bp, Homo sapien
catgaaacttcttgaatttataaat

SEQ ID NO: 2135621 - DNA, 25 bp, Homo sapien
ccatttggaattcatgaaacttctt

SEQ ID NO: 2135622 - DNA, 25 bp, Homo sapien
tcattttcagcagttcaataagatg

SEQ ID NO: 2135623 - DNA, 25 bp, Homo sapien
cttggaatgatcagtctaaaatttt

SEQ ID NO: 2135624 - DNA, 25 bp, Homo sapien
cttctgcaacgatcacactggaagc

SEQ ID NO: 2135625 - DNA, 25 bp, Homo sapien
ttttcagcagttcaataagatgtgc

SEQ ID NO: 2135626 - DNA, 25 bp, Homo sapien
gttccattctctcatcaatcaaaca

SEQ ID NO: 2135627 - DNA, 25 bp, Homo sapien
ccattctctcatcaatcaaacacag

SEQ ID NO: 2135628 - DNA, 25 bp, Homo sapien
tccattctctcatcaatcaaacaca

SEQ ID NO: 2135629 - DNA, 25 bp, Homo sapien
tggttccattctctcatcaatcaaa

SEQ ID NO: 2135630 - DNA, 25 bp, Homo sapien
taatcctaacaccatgggactggct

SEQ ID NO: 2135631 - DNA, 25 bp, Homo sapien
gagtccaggcatagcttccataata

SEQ ID NO: 2135632 - DNA, 25 bp, Homo sapien
tcagccttggtgagtagaagttcgt

SEQ ID NO: 2135633 - DNA, 25 bp, Homo sapien
gaagttcgtgttgttgagtccaggc

SEQ ID NO: 2135634 - DNA, 25 bp, Homo sapien
tcacatacttcttcagtaggttaac

SEQ ID NO: 2135635 - DNA, 25 bp, Homo sapien
taggttaactggtgcaatagtgaaa

SEQ ID NO: 2135636 - DNA, 25 bp, Homo sapien
tccctgatatacctaagagcccaag

SEQ ID NO: 2135637 - DNA, 25 bp, Homo sapien
agcattcatccctgatatacctaag

SEQ ID NO: 2135638 - DNA, 25 bp, Homo sapien
catcagccaccgtactgtcacggga

SEQ ID NO: 2135639 - DNA, 25 bp, Homo sapien
gtcacgggataatgctaattcaatc

SEQ ID NO: 2135640 - DNA, 25 bp, Homo sapien
tagctgttacagtttcccactgaag

SEQ ID NO: 2135641 - DNA, 25 bp, Homo sapien
taattcaatcatattcgcccacctg

SEQ ID NO: 2135642 - DNA, 25 bp, Homo sapien
tccaaagctgtgccagggcattcca

SEQ ID NO: 2135643 - DNA, 25 bp, Homo sapien
ttacaaatggagtctgggggatgca

SEQ ID NO: 2135644 - DNA, 25 bp, Homo sapien
caagcagaagtcaattacaaatgga

SEQ ID NO: 2135645 - DNA, 25 bp, Homo sapien
aaaacatagcccaaatcagagtggg

SEQ ID NO: 2135646 - DNA, 25 bp, Homo sapien
tatttctggagcctagtgagagcta

SEQ ID NO: 2135647 - DNA, 25 bp, Homo sapien
tgcaagattatgagacccaacaagc

SEQ ID NO: 2135648 - DNA, 25 bp, Homo sapien
tagctgttaccctaggcctaagagg

SEQ ID NO: 2135649 - DNA, 25 bp, Homo sapien
gcacccagaggttagcaatagcagg

SEQ ID NO: 2135650 - DNA, 25 bp, Homo sapien
ttcccacagggcattagttctcaga

SEQ ID NO: 2135651 - DNA, 25 bp, Homo sapien
taaaatgcacactagtgggcccacc

SEQ ID NO: 2135652 - DNA, 25 bp, Homo sapien
tcagtcagagtcctagccagtaaaa

SEQ ID NO: 2135653 - DNA, 25 bp, Homo sapien
cagtgagttgcatccagaagttatc

SEQ ID NO: 2135654 - DNA, 25 bp, Homo sapien
aacagcaatgcatcgaagggctttc

SEQ ID NO: 2135655 - DNA, 25 bp, Homo sapien
ggtaacagcaatgcatcgaagggct

SEQ ID NO: 2135656 - DNA, 25 bp, Homo sapien
taacagcaatgcatcgaagggcttt

SEQ ID NO: 2135657 - DNA, 25 bp, Homo sapien
acagcaatgcatcgaagggctttct

SEQ ID NO: 2135658 - DNA, 25 bp, Homo sapien
tctgggctataggaagagtgcaacc

SEQ ID NO: 2135659 - DNA, 25 bp, Homo sapien
cggaccaaacgaagactaggattag

SEQ ID NO: 2135660 - DNA, 25 bp, Homo sapien
ttagaaggacgtctgcacgcgtcgg

SEQ ID NO: 2135661 - DNA, 25 bp, Homo sapien
tataggaagagtgcaaccggaccaa

SEQ ID NO: 2135662 - DNA, 25 bp, Homo sapien
ctttgttcccaaatggcacagcgtc

SEQ ID NO: 2135663 - DNA, 25 bp, Homo sapien
ttcctttgttcccaaatggcacagc

SEQ ID NO: 2135664 - DNA, 25 bp, Homo sapien
caggcagactattcctttgttccca

SEQ ID NO: 2135665 - DNA, 25 bp, Homo sapien
gactattcctttgttcccaaatggc

SEQ ID NO: 2135666 - DNA, 25 bp, Homo sapien
ttcctgcagccactgttacatcctc

SEQ ID NO: 2135667 - DNA, 25 bp, Homo sapien
cctgcagccactgttacatcctctt

SEQ ID NO: 2135668 - DNA, 25 bp, Homo sapien
gcaatcacaagcacttttcctgcag

SEQ ID NO: 2135669 - DNA, 25 bp, Homo sapien
gcagccactgttacatcctctttta

SEQ ID NO: 2135670 - DNA, 25 bp, Homo sapien
gttggactggcctccggccccaaga

SEQ ID NO: 2135671 - DNA, 25 bp, Homo sapien
tccaagggttggactggcctccggc

SEQ ID NO: 2135672 - DNA, 25 bp, Homo sapien
ttggactggcctccggccccaagat

SEQ ID NO: 2135673 - DNA, 25 bp, Homo sapien
cctgctccaagggttggactggcct

SEQ ID NO: 2135674 - DNA, 25 bp, Homo sapien
ccgaaatggtgtagataagagggaa

SEQ ID NO: 2135675 - DNA, 25 bp, Homo sapien
gctccgaaatggtgtagataagagg

SEQ ID NO: 2135676 - DNA, 25 bp, Homo sapien
ggtccacgggcccattcgagttgca

SEQ ID NO: 2135677 - DNA, 25 bp, Homo sapien
cattcgagttgcagtcgccaccatg

SEQ ID NO: 2135678 - DNA, 25 bp, Homo sapien
agctattttcttccctgtcttgtac

SEQ ID NO: 2135679 - DNA, 25 bp, Homo sapien
cagctattttcttccctgtcttgta

SEQ ID NO: 2135680 - DNA, 25 bp, Homo sapien
tcagctattttcttccctgtcttgt

SEQ ID NO: 2135681 - DNA, 25 bp, Homo sapien
ttggtcgacggaccaacaccaagga

SEQ ID NO: 2135682 - DNA, 25 bp, Homo sapien
gtgtcattataccaactacctctgc

SEQ ID NO: 2135683 - DNA, 25 bp, Homo sapien
gccgtactggcgtgaaatgcctaaa

SEQ ID NO: 2135684 - DNA, 25 bp, Homo sapien
tgagaatatctaaaagccgtactgg

SEQ ID NO: 2135685 - DNA, 25 bp, Homo sapien
gctgcggctttggaattcattatct

SEQ ID NO: 2135686 - DNA, 25 bp, Homo sapien
cgaagatgtcgccacacattttcat

SEQ ID NO: 2135687 - DNA, 25 bp, Homo sapien
cccatcattggcatcctccgaagat

SEQ ID NO: 2135688 - DNA, 25 bp, Homo sapien
acagagctgcggctttggaattcat

SEQ ID NO: 2135689 - DNA, 25 bp, Homo sapien
ggtatagctgggacaaatctcttaa

SEQ ID NO: 2135690 - DNA, 25 bp, Homo sapien
gtcgcgggcggagtctgcagctact

SEQ ID NO: 2135691 - DNA, 25 bp, Homo sapien
gagcacaaaacaggctcgctctggc

SEQ ID NO: 2135692 - DNA, 25 bp, Homo sapien
ctggcccagagaagcgcgcacacgt

SEQ ID NO: 2135693 - DNA, 25 bp, Homo sapien
gccagtctgtatacacagtagcagg

SEQ ID NO: 2135694 - DNA, 25 bp, Homo sapien
ggcaccagccccgataaccacacca

SEQ ID NO: 2135695 - DNA, 25 bp, Homo sapien
ccgataaccacaccagcggccacgc

SEQ ID NO: 2135696 - DNA, 25 bp, Homo sapien
gattttctcgttctcgtctcttccc

SEQ ID NO: 2135697 - DNA, 25 bp, Homo sapien
tttacacccggacaatcctcgagtc

SEQ ID NO: 2135698 - DNA, 25 bp, Homo sapien
tgccccagcgttagttttagctcct

SEQ ID NO: 2135699 - DNA, 25 bp, Homo sapien
aaactcacctcaggcttgacctctg

SEQ ID NO: 2135700 - DNA, 25 bp, Homo sapien
gaatcaccctgaagtttggccccag

SEQ ID NO: 2135701 - DNA, 25 bp, Homo sapien
cctctaggccacctccgctgtggga

SEQ ID NO: 2135702 - DNA, 25 bp, Homo sapien
tgcctgcctttgcacttgcctgttc

SEQ ID NO: 2135703 - DNA, 25 bp, Homo sapien
tgcctgttccttcagcgtgttgaaa

SEQ ID NO: 2135704 - DNA, 25 bp, Homo sapien
cagcgtgttgaaaagggccttggcc

SEQ ID NO: 2135705 - DNA, 25 bp, Homo sapien
gaggtcgggagcactcagaatatca

SEQ ID NO: 2135706 - DNA, 25 bp, Homo sapien
aaagttgaacttgcctctccggaca

SEQ ID NO: 2135707 - DNA, 25 bp, Homo sapien
gacaggccatgttgtagctggagcc

SEQ ID NO: 2135708 - DNA, 25 bp, Homo sapien
tcctgggcagggtaaactcggtgca

SEQ ID NO: 2135709 - DNA, 25 bp, Homo sapien
aaaggatcatttgttcgctccagga

SEQ ID NO: 2135710 - DNA, 25 bp, Homo sapien
ggttaacagtcttagcccagccatc

SEQ ID NO: 2135711 - DNA, 25 bp, Homo sapien
gggacaccacccaattcacgtatgg

SEQ ID NO: 2135712 - DNA, 25 bp, Homo sapien
tctgcacagctgagtccaagcgaca

SEQ ID NO: 2135713 - DNA, 25 bp, Homo sapien
tttcctggatgatgcgagcccttca

SEQ ID NO: 2135714 - DNA, 25 bp, Homo sapien
ccaccagatcattgtgatttgctag

SEQ ID NO: 2135715 - DNA, 25 bp, Homo sapien
tattaaagagggaaatcaattctga

SEQ ID NO: 2135716 - DNA, 25 bp, Homo sapien
caattctgatggtactttacaactg

SEQ ID NO: 2135717 - DNA, 25 bp, Homo sapien
tagagtttggttaatactttcagga

SEQ ID NO: 2135718 - DNA, 25 bp, Homo sapien
caaaatagcagctgaaaagatctct

SEQ ID NO: 2135719 - DNA, 25 bp, Homo sapien
caaatcacatcgtaccaactgcaaa

SEQ ID NO: 2135720 - DNA, 25 bp, Homo sapien
cattacaaccaacatcagtcactgt

SEQ ID NO: 2135721 - DNA, 25 bp, Homo sapien
aagatctctttaccatatacgcaca

SEQ ID NO: 2135722 - DNA, 25 bp, Homo sapien
tgaattcgacatttttctttcccaa

SEQ ID NO: 2135723 - DNA, 25 bp, Homo sapien
tcccaacaattacacaactcaacat

SEQ ID NO: 2135724 - DNA, 25 bp, Homo sapien
tctttcccaacaattacacaactca

SEQ ID NO: 2135725 - DNA, 25 bp, Homo sapien
ctgaattcgacatttttctttccca

SEQ ID NO: 2135726 - DNA, 25 bp, Homo sapien
tgaaggaaacagagacagaaaaaaa

SEQ ID NO: 2135727 - DNA, 25 bp, Homo sapien
atcaacaaaattgatagaccgctag

SEQ ID NO: 2135728 - DNA, 25 bp, Homo sapien
gagctggttttttgaaaggatcaac

SEQ ID NO: 2135729 - DNA, 25 bp, Homo sapien
cccttcaaaaaattaatgaatccag

SEQ ID NO: 2135730 - DNA, 25 bp, Homo sapien
tgctatagattttgacactgctttc

SEQ ID NO: 2135731 - DNA, 25 bp, Homo sapien
tctgtgctatagattttgacactgc

SEQ ID NO: 2135732 - DNA, 25 bp, Homo sapien
gtgtaccaccctcttgtgacaggtt

SEQ ID NO: 2135733 - DNA, 25 bp, Homo sapien
gtaccaccctcttgtgacaggttct

SEQ ID NO: 2135734 - DNA, 25 bp, Homo sapien
ttaaagttttgagcatacccagaaa

SEQ ID NO: 2135735 - DNA, 25 bp, Homo sapien
agttttgagcatacccagaaatttt

SEQ ID NO: 2135736 - DNA, 25 bp, Homo sapien
tattttcattgggggaataggtcat

SEQ ID NO: 2135737 - DNA, 25 bp, Homo sapien
aaagttttgagcatacccagaaatt

SEQ ID NO: 2135738 - DNA, 25 bp, Homo sapien
gctaaatggaaagcccgcatccttg

SEQ ID NO: 2135739 - DNA, 25 bp, Homo sapien
ccttgggctcggcaaacaacagttt

SEQ ID NO: 2135740 - DNA, 25 bp, Homo sapien
gctattgatatcctggctaaatgga

SEQ ID NO: 2135741 - DNA, 25 bp, Homo sapien
ggctggccaaatggctattgatatc

SEQ ID NO: 2135742 - DNA, 25 bp, Homo sapien
aacaaatttaatccggcctgctgca

SEQ ID NO: 2135743 - DNA, 25 bp, Homo sapien
aatactcgcatttaagttatccggg

SEQ ID NO: 2135744 - DNA, 25 bp, Homo sapien
gagttgcagcaacgtgacacagtct

SEQ ID NO: 2135745 - DNA, 25 bp, Homo sapien
agagcatctgggcaccgactaactc

SEQ ID NO: 2135746 - DNA, 25 bp, Homo sapien
gattccgtcccattgtgttcgagag

SEQ ID NO: 2135747 - DNA, 25 bp, Homo sapien
taaggctggatcttcagtagcaccc

SEQ ID NO: 2135748 - DNA, 25 bp, Homo sapien
catctgcaaaccaagcgcgttgtgg

SEQ ID NO: 2135749 - DNA, 25 bp, Homo sapien
taggttcactatccatcaggcgcgt

SEQ ID NO: 2135750 - DNA, 25 bp, Homo sapien
cacaactttattgatgatacacaca

SEQ ID NO: 2135751 - DNA, 25 bp, Homo sapien
caactttattgatgatacacacaga

SEQ ID NO: 2135752 - DNA, 25 bp, Homo sapien
actttattgatgatacacacagatg

SEQ ID NO: 2135753 - DNA, 25 bp, Homo sapien
caatcaaagcacacaactttattga

SEQ ID NO: 2135754 - DNA, 25 bp, Homo sapien
tgggcagccgcgatctctgtggtgc

SEQ ID NO: 2135755 - DNA, 25 bp, Homo sapien
agcttgccttccaggtgggttacaa

SEQ ID NO: 2135756 - DNA, 25 bp, Homo sapien
ggtgctgggcattctgcttgttctg

SEQ ID NO: 2135757 - DNA, 25 bp, Homo sapien
ggtgccctctcggtctcccagggct

SEQ ID NO: 2135758 - DNA, 25 bp, Homo sapien
cgggaacaacgaccaggacaagaag

SEQ ID NO: 2135759 - DNA, 25 bp, Homo sapien
ccaggacaagaaggacttctgcaca

SEQ ID NO: 2135760 - DNA, 25 bp, Homo sapien
actcagacgggaacaacgaccagga

SEQ ID NO: 2135761 - DNA, 25 bp, Homo sapien
agacgggaacaacgaccaggacaag

SEQ ID NO: 2135762 - DNA, 25 bp, Homo sapien
ggctgcaagcgggacatatgtcttg

SEQ ID NO: 2135763 - DNA, 25 bp, Homo sapien
tcaagcaccccgactttatggaatc

SEQ ID NO: 2135764 - DNA, 25 bp, Homo sapien
cgtttcgcagcatcgaaatgggctg

SEQ ID NO: 2135765 - DNA, 25 bp, Homo sapien
gaggcgcctcagtacccgcgacggt

SEQ ID NO: 2135766 - DNA, 25 bp, Homo sapien
catggtcagtaagacacagccacag

SEQ ID NO: 2135767 - DNA, 25 bp, Homo sapien
cactgagcgcttggtggacggacta

SEQ ID NO: 2135768 - DNA, 25 bp, Homo sapien
gcagaaagacgggaaactgccgcca

SEQ ID NO: 2135769 - DNA, 25 bp, Homo sapien
ggttctgctgacatatcgcgttgca

SEQ ID NO: 2135770 - DNA, 25 bp, Homo sapien
tggccacccgggagaggcttggacc

SEQ ID NO: 2135771 - DNA, 25 bp, Homo sapien
ctggccacccgggagaggcttggac

SEQ ID NO: 2135772 - DNA, 25 bp, Homo sapien
gccacccgggagaggcttggaccca

SEQ ID NO: 2135773 - DNA, 25 bp, Homo sapien
cgacctccaccgattaggattaaat

SEQ ID NO: 2135774 - DNA, 25 bp, Homo sapien
cttcttttgcctggcgttgtgccgc

SEQ ID NO: 2135775 - DNA, 25 bp, Homo sapien
ctcaaatcgacctccaccgattagg

SEQ ID NO: 2135776 - DNA, 25 bp, Homo sapien
cttttgcctggcgttgtgccgcaac

SEQ ID NO: 2135777 - DNA, 25 bp, Homo sapien
gggagtgcaagaaacacattcggac

SEQ ID NO: 2135778 - DNA, 25 bp, Homo sapien
tgagagaggaggattacgaacaaac

SEQ ID NO: 2135779 - DNA, 25 bp, Homo sapien
aactatccgataggtttccctgctg

SEQ ID NO: 2135780 - DNA, 25 bp, Homo sapien
gatgacagatcgaaaacatggagag

SEQ ID NO: 2135781 - DNA, 25 bp, Homo sapien
ctctactgatcggaggaaacttcct

SEQ ID NO: 2135782 - DNA, 25 bp, Homo sapien
tgatcggaggaaacttcctccctcg

SEQ ID NO: 2135783 - DNA, 25 bp, Homo sapien
tcgcttcaagcggagccacctgcta

SEQ ID NO: 2135784 - DNA, 25 bp, Homo sapien
tcctccctcgcttcaagcggagcca

SEQ ID NO: 2135785 - DNA, 25 bp, Homo sapien
ttttccctagtggtgtgccactccc

SEQ ID NO: 2135786 - DNA, 25 bp, Homo sapien
tagtggtgtgccactcccaacaatc

SEQ ID NO: 2135787 - DNA, 25 bp, Homo sapien
agacaagcagttcgccccttcttct

SEQ ID NO: 2135788 - DNA, 25 bp, Homo sapien
tcaagacaagcagttcgccccttct

SEQ ID NO: 2135789 - DNA, 25 bp, Homo sapien
tgcacagagggacaagataataata

SEQ ID NO: 2135790 - DNA, 25 bp, Homo sapien
gcttgtgttgccccatgcagggagc

SEQ ID NO: 2135791 - DNA, 25 bp, Homo sapien
gcacagagggacaagataataataa

SEQ ID NO: 2135792 - DNA, 25 bp, Homo sapien
agggtgatcgtcttcagccacttca

SEQ ID NO: 2135793 - DNA, 25 bp, Homo sapien
tcaaggccacaagagctgattctgg

SEQ ID NO: 2135794 - DNA, 25 bp, Homo sapien
caaggaatagagtagtcactcaggc

SEQ ID NO: 2135795 - DNA, 25 bp, Homo sapien
ccgacaatagcagggaccaaggaat

SEQ ID NO: 2135796 - DNA, 25 bp, Homo sapien
ttcccctagtcagtctataaatgca

SEQ ID NO: 2135797 - DNA, 25 bp, Homo sapien
agccccaatcaccaggcctgcggtc

SEQ ID NO: 2135798 - DNA, 25 bp, Homo sapien
tataaatgcaatagcaggcgccagc

SEQ ID NO: 2135799 - DNA, 25 bp, Homo sapien
ggcctgcggtcacccagcctacttt

SEQ ID NO: 2135800 - DNA, 25 bp, Homo sapien
cagaccagtcattatacctggcccc

SEQ ID NO: 2135801 - DNA, 25 bp, Homo sapien
tcagaccagtcattatacctggccc

SEQ ID NO: 2135802 - DNA, 25 bp, Homo sapien
agaccagtcattatacctggcccca

SEQ ID NO: 2135803 - DNA, 25 bp, Homo sapien
tccgagcccaaggtgggtaccatac

SEQ ID NO: 2135804 - DNA, 25 bp, Homo sapien
gttccagcttcagtcccaatccgag

SEQ ID NO: 2135805 - DNA, 25 bp, Homo sapien
ttcagtcccaatccgagcccaaggt

SEQ ID NO: 2135806 - DNA, 25 bp, Homo sapien
tctggttccagcttcagtcccaatc

SEQ ID NO: 2135807 - DNA, 25 bp, Homo sapien
tctttgcgacaattgggagaccacc

SEQ ID NO: 2135808 - DNA, 25 bp, Homo sapien
gagcagttccctagtcatggctgga

SEQ ID NO: 2135809 - DNA, 25 bp, Homo sapien
tgtaagcaatctcagtccagcaagc

SEQ ID NO: 2135810 - DNA, 25 bp, Homo sapien
taagcagcattgttacccagagcaa

SEQ ID NO: 2135811 - DNA, 25 bp, Homo sapien
ctttaccatataaacaaggtggaga

SEQ ID NO: 2135812 - DNA, 25 bp, Homo sapien
catgttttcagaacaagtagtgata

SEQ ID NO: 2135813 - DNA, 25 bp, Homo sapien
tctaggcagcgagataaaaagcaac

SEQ ID NO: 2135814 - DNA, 25 bp, Homo sapien
ggttcactgtcacttatgcagaaga

SEQ ID NO: 2135815 - DNA, 25 bp, Homo sapien
gatgatacacaaattaaatcaatga

SEQ ID NO: 2135816 - DNA, 25 bp, Homo sapien
atgaaaatgacagaagggagcttac

SEQ ID NO: 2135817 - DNA, 25 bp, Homo sapien
ccagcattaacatacaattttattg

SEQ ID NO: 2135818 - DNA, 25 bp, Homo sapien
tattgatgatacacaaattaaatca

SEQ ID NO: 2135819 - DNA, 25 bp, Homo sapien
tagtggctctgggtattcaatggga

SEQ ID NO: 2135820 - DNA, 25 bp, Homo sapien
gaagctttagccgactagcacatcc

SEQ ID NO: 2135821 - DNA, 25 bp, Homo sapien
tctcctgtcataggaagagggttcc

SEQ ID NO: 2135822 - DNA, 25 bp, Homo sapien
ttttactagcttagacagtgctggg

SEQ ID NO: 2135823 - DNA, 25 bp, Homo sapien
ccattcagtatgttttccaatcaat

SEQ ID NO: 2135824 - DNA, 25 bp, Homo sapien
tatgtgccagaacattgtaagtact

SEQ ID NO: 2135825 - DNA, 25 bp, Homo sapien
attctaggtaattaagggtgctcga

SEQ ID NO: 2135826 - DNA, 25 bp, Homo sapien
ttaaatgacactaaaacatggcaga

SEQ ID NO: 2135827 - DNA, 25 bp, Homo sapien
aactaacaaccctgcattctaggta

SEQ ID NO: 2135828 - DNA, 25 bp, Homo sapien
cccatctgagtgtcacgcaggtaca

SEQ ID NO: 2135829 - DNA, 25 bp, Homo sapien
catatataaagcaggataacatccc

SEQ ID NO: 2135830 - DNA, 25 bp, Homo sapien
gatcatgtctgaggaaacactttgg

SEQ ID NO: 2135831 - DNA, 25 bp, Homo sapien
caaatgacaataggatatccccatc

SEQ ID NO: 2135832 - DNA, 25 bp, Homo sapien
gttaggtgttgtatgttaataggcc

SEQ ID NO: 2135833 - DNA, 25 bp, Homo sapien
agtttcagttagacaaatggattaa

SEQ ID NO: 2135834 - DNA, 25 bp, Homo sapien
aatggattaagttctagtagcctat

SEQ ID NO: 2135835 - DNA, 25 bp, Homo sapien
ttaataggcctgttttaatcattcc

SEQ ID NO: 2135836 - DNA, 25 bp, Homo sapien
gaaaattctagccagccgggtgtac

SEQ ID NO: 2135837 - DNA, 25 bp, Homo sapien
gggcaacgtaatgagactcttatgt

SEQ ID NO: 2135838 - DNA, 25 bp, Homo sapien
aaaattctagccagccgggtgtact

SEQ ID NO: 2135839 - DNA, 25 bp, Homo sapien
gcaacgtaatgagactcttatgtct

SEQ ID NO: 2135840 - DNA, 25 bp, Homo sapien
gaaatccttgaacattgttggtggg

SEQ ID NO: 2135841 - DNA, 25 bp, Homo sapien
tattgactatagttggaaaaaccta

SEQ ID NO: 2135842 - DNA, 25 bp, Homo sapien
ttagactaccttttacaaactgtga

SEQ ID NO: 2135843 - DNA, 25 bp, Homo sapien
tgttgtcacattcacttaggccact

SEQ ID NO: 2135844 - DNA, 25 bp, Homo sapien
tataatttcctaatagaatagaagt

SEQ ID NO: 2135845 - DNA, 25 bp, Homo sapien
gttaccaacattaactcaagaaata

SEQ ID NO: 2135846 - DNA, 25 bp, Homo sapien
gactagaacaattactacagatgag

SEQ ID NO: 2135847 - DNA, 25 bp, Homo sapien
ttgactagaacaattactacagatg

SEQ ID NO: 2135848 - DNA, 25 bp, Homo sapien
agggttgaaccacacaaatagatgt

SEQ ID NO: 2135849 - DNA, 25 bp, Homo sapien
taaacatcatgagtatgactaagaa

SEQ ID NO: 2135850 - DNA, 25 bp, Homo sapien
atcacaccgggtcctgttagtgggt

SEQ ID NO: 2135851 - DNA, 25 bp, Homo sapien
attatgattaaagggttgaaccaca

SEQ ID NO: 2135852 - DNA, 25 bp, Homo sapien
tctttacatatcagctcagcaacct

SEQ ID NO: 2135853 - DNA, 25 bp, Homo sapien
actatgtattgaatgctacttggac

SEQ ID NO: 2135854 - DNA, 25 bp, Homo sapien
tattgagcacttagtacttgtcagg

SEQ ID NO: 2135855 - DNA, 25 bp, Homo sapien
tcagcaaccttatgagataatccaa

SEQ ID NO: 2135856 - DNA, 25 bp, Homo sapien
ccttagagttgttggaggaggtcca

SEQ ID NO: 2135857 - DNA, 25 bp, Homo sapien
ggaatcaatttaggatctgctgcat

SEQ ID NO: 2135858 - DNA, 25 bp, Homo sapien
tgtccagcgaacttccagtcaacag

SEQ ID NO: 2135859 - DNA, 25 bp, Homo sapien
cattttccgtggtgtgtctaagatc

SEQ ID NO: 2135860 - DNA, 25 bp, Homo sapien
gtttgatgcccaagtttctctctcc

SEQ ID NO: 2135861 - DNA, 25 bp, Homo sapien
cgatgtccacgatcagtaatgtctt

SEQ ID NO: 2135862 - DNA, 25 bp, Homo sapien
ctcagggctagtttgatgcccaagt

SEQ ID NO: 2135863 - DNA, 25 bp, Homo sapien
gcttttactaggcaatggtttacaa

SEQ ID NO: 2135864 - DNA, 25 bp, Homo sapien
tctaggtactcaaagttatctccat

SEQ ID NO: 2135865 - DNA, 25 bp, Homo sapien
gagaggctctgctacacgtggccat

SEQ ID NO: 2135866 - DNA, 25 bp, Homo sapien
ccttctctaggtactcaaagttatc

SEQ ID NO: 2135867 - DNA, 25 bp, Homo sapien
caaaagagtctgaggttaatgttcc

SEQ ID NO: 2135868 - DNA, 25 bp, Homo sapien
aaagtaatagttgaaaggagtggca

SEQ ID NO: 2135869 - DNA, 25 bp, Homo sapien
taaagtaatagttgaaaggagtggc

SEQ ID NO: 2135870 - DNA, 25 bp, Homo sapien
agtaatagttgaaaggagtggcaga

SEQ ID NO: 2135871 - DNA, 25 bp, Homo sapien
aatagttgaaaggagtggcagaggc

SEQ ID NO: 2135872 - DNA, 25 bp, Homo sapien
gattctgggtgtccgcgatctcagg

SEQ ID NO: 2135873 - DNA, 25 bp, Homo sapien
aagacccgttgccatgcagaagcgc

SEQ ID NO: 2135874 - DNA, 25 bp, Homo sapien
ggatgatatcatggcctctaacctg

SEQ ID NO: 2135875 - DNA, 25 bp, Homo sapien
tctggttcccctagaacagcggtgg

SEQ ID NO: 2135876 - DNA, 25 bp, Homo sapien
ttctctgggaaacgggcccatcctc

SEQ ID NO: 2135877 - DNA, 25 bp, Homo sapien
ctcctgagctactggtcatttctgc

SEQ ID NO: 2135878 - DNA, 25 bp, Homo sapien
tgggaaacgggcccatcctcttctc

SEQ ID NO: 2135879 - DNA, 25 bp, Homo sapien
catcttctcctgagctactggtcat

SEQ ID NO: 2135880 - DNA, 25 bp, Homo sapien
ttctttttagtcttcgtgcacacaa

SEQ ID NO: 2135881 - DNA, 25 bp, Homo sapien
caccacctccaccatgcagggcact

SEQ ID NO: 2135882 - DNA, 25 bp, Homo sapien
ttagtcttcgtgcacacaacaaaag

SEQ ID NO: 2135883 - DNA, 25 bp, Homo sapien
tcttcgtgcacacaacaaaagtgtc

SEQ ID NO: 2135884 - DNA, 25 bp, Homo sapien
ctacaaggatctggatgggtttcct

SEQ ID NO: 2135885 - DNA, 25 bp, Homo sapien
acaaggatctggatgggtttcctcc

SEQ ID NO: 2135886 - DNA, 25 bp, Homo sapien
tacaaggatctggatgggtttcctc

SEQ ID NO: 2135887 - DNA, 25 bp, Homo sapien
cttcgtgctcccttgaacgaatcca

SEQ ID NO: 2135888 - DNA, 25 bp, Homo sapien
cttgaacgaatccactggactcaga

SEQ ID NO: 2135889 - DNA, 25 bp, Homo sapien
gtctcacctagggtctggagtctca

SEQ ID NO: 2135890 - DNA, 25 bp, Homo sapien
aactgtctcacctagggtctggagt

SEQ ID NO: 2135891 - DNA, 25 bp, Homo sapien
agcagcagagaaaattgatccaggg

SEQ ID NO: 2135892 - DNA, 25 bp, Homo sapien
aagcagcagagaaaattgatccagg

SEQ ID NO: 2135893 - DNA, 25 bp, Homo sapien
tgcacagagtcctgctaatattctc

SEQ ID NO: 2135894 - DNA, 25 bp, Homo sapien
tgtatgtcattcctgcacagagtcc

SEQ ID NO: 2135895 - DNA, 25 bp, Homo sapien
tcattcctgcacagagtcctgctaa

SEQ ID NO: 2135896 - DNA, 25 bp, Homo sapien
gagtcctgctaatattctctgcatc

SEQ ID NO: 2135897 - DNA, 25 bp, Homo sapien
tgattgtgtcctccaatccaatcat

SEQ ID NO: 2135898 - DNA, 25 bp, Homo sapien
gtcttttgattgtgtcctccaatcc

SEQ ID NO: 2135899 - DNA, 25 bp, Homo sapien
tttgattgtgtcctccaatccaatc

SEQ ID NO: 2135900 - DNA, 25 bp, Homo sapien
ggcagtcttttgattgtgtcctcca

SEQ ID NO: 2135901 - DNA, 25 bp, Homo sapien
aaagcagacaaataccaagagctct

SEQ ID NO: 2135902 - DNA, 25 bp, Homo sapien
tcaaaagcagacaaataccaagagc

SEQ ID NO: 2135903 - DNA, 25 bp, Homo sapien
gcagacaaataccaagagctctcga

SEQ ID NO: 2135904 - DNA, 25 bp, Homo sapien
acaaataccaagagctctcgaaggc

SEQ ID NO: 2135905 - DNA, 25 bp, Homo sapien
aattaagctgcctcatatgtacatg

SEQ ID NO: 2135906 - DNA, 25 bp, Homo sapien
tcaggactgtgacgccaaacctacg

SEQ ID NO: 2135907 - DNA, 25 bp, Homo sapien
gtgacgccaaacctacgctcttcag

SEQ ID NO: 2135908 - DNA, 25 bp, Homo sapien
catgtttaagaagtccccactggca

SEQ ID NO: 2135909 - DNA, 25 bp, Homo sapien
gaagattccctaggactgagacagc

SEQ ID NO: 2135910 - DNA, 25 bp, Homo sapien
ttcccagcctgatttgtgcatgttg

SEQ ID NO: 2135911 - DNA, 25 bp, Homo sapien
ttgtgcatgttgtaggacaagtagg

SEQ ID NO: 2135912 - DNA, 25 bp, Homo sapien
tggacagactttggcagttcccagc

SEQ ID NO: 2135913 - DNA, 25 bp, Homo sapien
actttgggctactttaggttagatg

SEQ ID NO: 2135914 - DNA, 25 bp, Homo sapien
tgtatgtcattgtatagcttctggg

SEQ ID NO: 2135915 - DNA, 25 bp, Homo sapien
gttagatggtcagcaaagcactctc

SEQ ID NO: 2135916 - DNA, 25 bp, Homo sapien
gtactatgcagaatatgaaacagag

SEQ ID NO: 2135917 - DNA, 25 bp, Homo sapien
ggaatcattatctcttcacaagtgg

SEQ ID NO: 2135918 - DNA, 25 bp, Homo sapien
ttagcgctcagcattttttattgga

SEQ ID NO: 2135919 - DNA, 25 bp, Homo sapien
gggtacctctaaatcactacaacat

SEQ ID NO: 2135920 - DNA, 25 bp, Homo sapien
tttgatgctgaggttttatgggtac

SEQ ID NO: 2135921 - DNA, 25 bp, Homo sapien
ggaatcttccatcgaacatactcaa

SEQ ID NO: 2135922 - DNA, 25 bp, Homo sapien
agaattcggatccttaccattggaa

SEQ ID NO: 2135923 - DNA, 25 bp, Homo sapien
tgctccattccctctaagatgtagg

SEQ ID NO: 2135924 - DNA, 25 bp, Homo sapien
tccacagttaaggttgggccagcta

SEQ ID NO: 2135925 - DNA, 25 bp, Homo sapien
caaagtctattttttcatctcgttc

SEQ ID NO: 2135926 - DNA, 25 bp, Homo sapien
ttaagaaagtggaaagctgctatat

SEQ ID NO: 2135927 - DNA, 25 bp, Homo sapien
taagaaagtggaaagctgctatatt

SEQ ID NO: 2135928 - DNA, 25 bp, Homo sapien
agtctattttttcatctcgttcttt

SEQ ID NO: 2135929 - DNA, 25 bp, Homo sapien
aagtggacctaatagacatctacag

SEQ ID NO: 2135930 - DNA, 25 bp, Homo sapien
cctaatagacatctacagaactctc

SEQ ID NO: 2135931 - DNA, 25 bp, Homo sapien
caggaattgaactcagctctgcacc

SEQ ID NO: 2135932 - DNA, 25 bp, Homo sapien
ggacctaatagacatctacagaact

SEQ ID NO: 2135933 - DNA, 25 bp, Homo sapien
cactatactttttcagggtcacaca

SEQ ID NO: 2135934 - DNA, 25 bp, Homo sapien
taagctgtcctagaattctgtcccc

SEQ ID NO: 2135935 - DNA, 25 bp, Homo sapien
ttttacagagatcaaggatagaccc

SEQ ID NO: 2135936 - DNA, 25 bp, Homo sapien
ttagcctccgttttagatgataagc

SEQ ID NO: 2135937 - DNA, 25 bp, Homo sapien
ttccagtaggaacgcacatgatgtc

SEQ ID NO: 2135938 - DNA, 25 bp, Homo sapien
tgggaggaccaaccaacatatggtg

SEQ ID NO: 2135939 - DNA, 25 bp, Homo sapien
gaacacctgtaattctggcagcaca

SEQ ID NO: 2135940 - DNA, 25 bp, Homo sapien
tcaagagaaacctagtgagtctgcc

SEQ ID NO: 2135941 - DNA, 25 bp, Homo sapien
gagtctattcttgggtattgaactt

SEQ ID NO: 2135942 - DNA, 25 bp, Homo sapien
gaaaagaacataagaactcaaggag

SEQ ID NO: 2135943 - DNA, 25 bp, Homo sapien
tagacaaaagcaagaggatcagatg

SEQ ID NO: 2135944 - DNA, 25 bp, Homo sapien
ttgtttgcccaaggattaattgagg

SEQ ID NO: 2135945 - DNA, 25 bp, Homo sapien
gattttcacatgaggcttcccagac

SEQ ID NO: 2135946 - DNA, 25 bp, Homo sapien
gagactttccggacatacgcagcac

SEQ ID NO: 2135947 - DNA, 25 bp, Homo sapien
gaaatggttgatgtcagacccagac

SEQ ID NO: 2135948 - DNA, 25 bp, Homo sapien
gagactttccagacctattcaggac

SEQ ID NO: 2135949 - DNA, 25 bp, Homo sapien
tggctctttcattttgagagcagta

SEQ ID NO: 2135950 - DNA, 25 bp, Homo sapien
tcaaagaacagtaacagcagatgcc

SEQ ID NO: 2135951 - DNA, 25 bp, Homo sapien
gatgccctcattacaagtgagtaag

SEQ ID NO: 2135952 - DNA, 25 bp, Homo sapien
aactgtttcactcatcacccatttt

SEQ ID NO: 2135953 - DNA, 25 bp, Homo sapien
cattgcaccgatagggcttttcctt

SEQ ID NO: 2135954 - DNA, 25 bp, Homo sapien
tcgatgagacgggagctctggccga

SEQ ID NO: 2135955 - DNA, 25 bp, Homo sapien
gttgcattcgtagggctggcttctc

SEQ ID NO: 2135956 - DNA, 25 bp, Homo sapien
tccccagcgtggattcgctaatgtt

SEQ ID NO: 2135957 - DNA, 25 bp, Homo sapien
tgggtgctctgcctaaaggactttc

SEQ ID NO: 2135958 - DNA, 25 bp, Homo sapien
gtgggtgctctgcctaaaggacttt

SEQ ID NO: 2135959 - DNA, 25 bp, Homo sapien
cccatgtccccagcacatgtggagt

SEQ ID NO: 2135960 - DNA, 25 bp, Homo sapien
tgtccccagcacatgtggagtgggt

SEQ ID NO: 2135961 - DNA, 25 bp, Homo sapien
tatggcttaaggtcttcccatgtcc

SEQ ID NO: 2135962 - DNA, 25 bp, Homo sapien
ctatggcttaaggtcttcccatgtc

SEQ ID NO: 2135963 - DNA, 25 bp, Homo sapien
gttttagtatatgtgctgctgaagt

SEQ ID NO: 2135964 - DNA, 25 bp, Homo sapien
atttgtgtgtcatccatatgcaggg

SEQ ID NO: 2135965 - DNA, 25 bp, Homo sapien
tgctaattttctctgtatcattcca

SEQ ID NO: 2135966 - DNA, 25 bp, Homo sapien
gtatatgtgctgctgaagtaagcat

SEQ ID NO: 2135967 - DNA, 25 bp, Homo sapien
gcggcggcggcagtaattgttcctg

SEQ ID NO: 2135968 - DNA, 25 bp, Homo sapien
ggcggcagtaattgttcctgcctcc

SEQ ID NO: 2135969 - DNA, 25 bp, Homo sapien
gcggcggcagtaattgttcctgcct

SEQ ID NO: 2135970 - DNA, 25 bp, Homo sapien
cggcggcggcagtaattgttcctgc

SEQ ID NO: 2135971 - DNA, 25 bp, Homo sapien
cataaagctggaaccggtacctagg

SEQ ID NO: 2135972 - DNA, 25 bp, Homo sapien
ttctgctcttgctagtaattagccc

SEQ ID NO: 2135973 - DNA, 25 bp, Homo sapien
tacctagggctactgaatccaagac

SEQ ID NO: 2135974 - DNA, 25 bp, Homo sapien
tgctagtaattagccccagtgtgcc

SEQ ID NO: 2135975 - DNA, 25 bp, Homo sapien
caaccttggcgttttagtcaaagct

SEQ ID NO: 2135976 - DNA, 25 bp, Homo sapien
ctggacaaccttggcgttttagtca

SEQ ID NO: 2135977 - DNA, 25 bp, Homo sapien
cttggcgttttagtcaaagcttcct

SEQ ID NO: 2135978 - DNA, 25 bp, Homo sapien
ttggcgttttagtcaaagcttcctc

SEQ ID NO: 2135979 - DNA, 25 bp, Homo sapien
tctgggcactcttgtatggggtcca

SEQ ID NO: 2135980 - DNA, 25 bp, Homo sapien
tgatgggatcttaatgctttctggg

SEQ ID NO: 2135981 - DNA, 25 bp, Homo sapien
ttactatggacaatgccccctttag

SEQ ID NO: 2135982 - DNA, 25 bp, Homo sapien
gctattacttttgaggtccccctca

SEQ ID NO: 2135983 - DNA, 25 bp, Homo sapien
gaagcctatagtcatcttcactctt

SEQ ID NO: 2135984 - DNA, 25 bp, Homo sapien
ccctttatcctgcacactaaatact

SEQ ID NO: 2135985 - DNA, 25 bp, Homo sapien
aggtgaagaagcctatagtcatctt

SEQ ID NO: 2135986 - DNA, 25 bp, Homo sapien
ctttatcctgcacactaaatactcc

SEQ ID NO: 2135987 - DNA, 25 bp, Homo sapien
tcccataaaggtggctgttcacact

SEQ ID NO: 2135988 - DNA, 25 bp, Homo sapien
tctgagggcatgaaggccgtcatca

SEQ ID NO: 2135989 - DNA, 25 bp, Homo sapien
gttcacactggttctgagggcatga

SEQ ID NO: 2135990 - DNA, 25 bp, Homo sapien
catgaaggccgtcatcaagtacatc

SEQ ID NO: 2135991 - DNA, 25 bp, Homo sapien
ctttaccatattaagctacactaac

SEQ ID NO: 2135992 - DNA, 25 bp, Homo sapien
tttaccatattaagctacactaact

SEQ ID NO: 2135993 - DNA, 25 bp, Homo sapien
gccttgctttaccatattaagctac

SEQ ID NO: 2135994 - DNA, 25 bp, Homo sapien
gctttaccatattaagctacactaa

SEQ ID NO: 2135995 - DNA, 25 bp, Homo sapien
tcaaagtggtcacgttaatgtaaaa

SEQ ID NO: 2135996 - DNA, 25 bp, Homo sapien
agtggtcacgttaatgtaaaatctc

SEQ ID NO: 2135997 - DNA, 25 bp, Homo sapien
atctcccaggagtaagccgggtact

SEQ ID NO: 2135998 - DNA, 25 bp, Homo sapien
gccgggtactttagattaagccata

SEQ ID NO: 2135999 - DNA, 25 bp, Homo sapien
catttgtctctaaatccgtctctgc

SEQ ID NO: 2136000 - DNA, 25 bp, Homo sapien
taaatccgtctctgccaaattgctg

SEQ ID NO: 2136001 - DNA, 25 bp, Homo sapien
aagggatgattcctgggctgcctga

SEQ ID NO: 2136002 - DNA, 25 bp, Homo sapien
atgcaagggatgattcctgggctgc

SEQ ID NO: 2136003 - DNA, 25 bp, Homo sapien
cttttttggatatcttcagtagttt

SEQ ID NO: 2136004 - DNA, 25 bp, Homo sapien
tttttggatatcttcagtagtttac

SEQ ID NO: 2136005 - DNA, 25 bp, Homo sapien
tcactttggatcttttttggatatc

SEQ ID NO: 2136006 - DNA, 25 bp, Homo sapien
atcttttttggatatcttcagtagt

SEQ ID NO: 2136007 - DNA, 25 bp, Homo sapien
tggcataatacagcccgggttccat

SEQ ID NO: 2136008 - DNA, 25 bp, Homo sapien
caatggtggcataatacagcccggg

SEQ ID NO: 2136009 - DNA, 25 bp, Homo sapien
tggtggcataatacagcccgggttc

SEQ ID NO: 2136010 - DNA, 25 bp, Homo sapien
ggccaatggtggcataatacagccc

SEQ ID NO: 2136011 - DNA, 25 bp, Homo sapien
cccatggaccagtatgctgtcagtg

SEQ ID NO: 2136012 - DNA, 25 bp, Homo sapien
tgaaagttggacaaaacttgcttgg

SEQ ID NO: 2136013 - DNA, 25 bp, Homo sapien
agttggacaaaacttgcttggaatg

SEQ ID NO: 2136014 - DNA, 25 bp, Homo sapien
tgctgcctacggacttttctgtttt

SEQ ID NO: 2136015 - DNA, 25 bp, Homo sapien
ttgctgcctacggacttttctgttt

SEQ ID NO: 2136016 - DNA, 25 bp, Homo sapien
agctgcctccacaacagggctgctg

SEQ ID NO: 2136017 - DNA, 25 bp, Homo sapien
ctgcctccacaacagggctgctgct

SEQ ID NO: 2136018 - DNA, 25 bp, Homo sapien
cagctcccagggccaggcaaccaga

SEQ ID NO: 2136019 - DNA, 25 bp, Homo sapien
gctcccagggccaggcaaccagaac

SEQ ID NO: 2136020 - DNA, 25 bp, Homo sapien
cacaacagctcccagggccaggcaa

SEQ ID NO: 2136021 - DNA, 25 bp, Homo sapien
caacagctcccagggccaggcaacc

SEQ ID NO: 2136022 - DNA, 25 bp, Homo sapien
tttcctgacatacctcaccttccat

SEQ ID NO: 2136023 - DNA, 25 bp, Homo sapien
tctttcctgacatacctcaccttcc

SEQ ID NO: 2136024 - DNA, 25 bp, Homo sapien
ctctttcctgacatacctcaccttc

SEQ ID NO: 2136025 - DNA, 25 bp, Homo sapien
tctctttcctgacatacctcacctt

SEQ ID NO: 2136026 - DNA, 25 bp, Homo sapien
agctcagacagctgattctgcgcgg

SEQ ID NO: 2136027 - DNA, 25 bp, Homo sapien
cggacccgaccgctgggcgggctgg

SEQ ID NO: 2136028 - DNA, 25 bp, Homo sapien
acagctgattctgcgcgggcgcccg

SEQ ID NO: 2136029 - DNA, 25 bp, Homo sapien
tcagacagctgattctgcgcgggcg

SEQ ID NO: 2136030 - DNA, 25 bp, Homo sapien
ttccatgggtgtagattgtgagaag

SEQ ID NO: 2136031 - DNA, 25 bp, Homo sapien
tatgtctacgtttcactgtcgcact

SEQ ID NO: 2136032 - DNA, 25 bp, Homo sapien
taaaatggatggaggactcagtgca

SEQ ID NO: 2136033 - DNA, 25 bp, Homo sapien
gccacctcatttttgcggagatcaa

SEQ ID NO: 2136034 - DNA, 25 bp, Homo sapien
cgctgggaacaacagacgcgcagac

SEQ ID NO: 2136035 - DNA, 25 bp, Homo sapien
gagcgctgggaacaacagacgcgca

SEQ ID NO: 2136036 - DNA, 25 bp, Homo sapien
gcgctgggaacaacagacgcgcaga

SEQ ID NO: 2136037 - DNA, 25 bp, Homo sapien
agagcgctgggaacaacagacgcgc

SEQ ID NO: 2136038 - DNA, 25 bp, Homo sapien
cattgtctatctttccttgattcga

SEQ ID NO: 2136039 - DNA, 25 bp, Homo sapien
tctatctttccttgattcgaaggca

SEQ ID NO: 2136040 - DNA, 25 bp, Homo sapien
tctttccttgattcgaaggcattcc

SEQ ID NO: 2136041 - DNA, 25 bp, Homo sapien
ccttgattcgaaggcattccttcat

SEQ ID NO: 2136042 - DNA, 25 bp, Homo sapien
tctcttgcccgtgttttctgtgttt

SEQ ID NO: 2136043 - DNA, 25 bp, Homo sapien
ggttcctcaactctcttgcccgtgt

SEQ ID NO: 2136044 - DNA, 25 bp, Homo sapien
ctctcttgcccgtgttttctgtgtt

SEQ ID NO: 2136045 - DNA, 25 bp, Homo sapien
tcctcaactctcttgcccgtgtttt

SEQ ID NO: 2136046 - DNA, 25 bp, Homo sapien
ctgggtatatcatcctcagctgggc

SEQ ID NO: 2136047 - DNA, 25 bp, Homo sapien
gcctttcccgcactctctggctttt

SEQ ID NO: 2136048 - DNA, 25 bp, Homo sapien
cctgcagcccttgtttcactttctg

SEQ ID NO: 2136049 - DNA, 25 bp, Homo sapien
tatatcatcctcagctgggcgcttt

SEQ ID NO: 2136050 - DNA, 25 bp, Homo sapien
tccaccctagccatgttgtcaaatt

SEQ ID NO: 2136051 - DNA, 25 bp, Homo sapien
tcatgtatggcttccttatattgct

SEQ ID NO: 2136052 - DNA, 25 bp, Homo sapien
ctccaccctagccatgttgtcaaat

SEQ ID NO: 2136053 - DNA, 25 bp, Homo sapien
tattgcttgaggtactgagccagcc

SEQ ID NO: 2136054 - DNA, 25 bp, Homo sapien
ggtgggtcaaaacgctactggtagc

SEQ ID NO: 2136055 - DNA, 25 bp, Homo sapien
aacatatggcctgacaaatgcctgc

SEQ ID NO: 2136056 - DNA, 25 bp, Homo sapien
gaaacatagagcaagcaaacactgg

SEQ ID NO: 2136057 - DNA, 25 bp, Homo sapien
tactggtagcaggaggaacgactaa

SEQ ID NO: 2136058 - DNA, 25 bp, Homo sapien
tcagctgccacagttatcatggcat

SEQ ID NO: 2136059 - DNA, 25 bp, Homo sapien
ggcactgttgctaggtcctctatca

SEQ ID NO: 2136060 - DNA, 25 bp, Homo sapien
tccctaggtcgagccaggtcagtgg

SEQ ID NO: 2136061 - DNA, 25 bp, Homo sapien
gtgggcactgttgctaggtcctcta

SEQ ID NO: 2136062 - DNA, 25 bp, Homo sapien
tgctgtgcacatccctatgtcttcc

SEQ ID NO: 2136063 - DNA, 25 bp, Homo sapien
gaaaggcatctgagcagtgaggaga

SEQ ID NO: 2136064 - DNA, 25 bp, Homo sapien
gagatgtgtcaagggctcaggagga

SEQ ID NO: 2136065 - DNA, 25 bp, Homo sapien
catctgagcagtgaggagatgatga

SEQ ID NO: 2136066 - DNA, 25 bp, Homo sapien
gagagaatgtggagatgtgtcaagg

SEQ ID NO: 2136067 - DNA, 25 bp, Homo sapien
gttcccagcgctcttggaggcctgc

SEQ ID NO: 2136068 - DNA, 25 bp, Homo sapien
tgttcccagcgctcttggaggcctg

SEQ ID NO: 2136069 - DNA, 25 bp, Homo sapien
ctccgcaaaaacggggtggcgctga

SEQ ID NO: 2136070 - DNA, 25 bp, Homo sapien
ggcgctgagacaggttgcctccggg

SEQ ID NO: 2136071 - DNA, 25 bp, Homo sapien
caaaaacggggtggcgctgagacag

SEQ ID NO: 2136072 - DNA, 25 bp, Homo sapien
gggtggcgctgagacaggttgcctc

SEQ ID NO: 2136073 - DNA, 25 bp, Homo sapien
atccgctcccatggaaacatctgac

SEQ ID NO: 2136074 - DNA, 25 bp, Homo sapien
tcacaatccgctcccatggaaacat

SEQ ID NO: 2136075 - DNA, 25 bp, Homo sapien
aatccgctcccatggaaacatctga

SEQ ID NO: 2136076 - DNA, 25 bp, Homo sapien
acaatccgctcccatggaaacatct

SEQ ID NO: 2136077 - DNA, 25 bp, Homo sapien
tcagggatactcaggcggtgatgtc

SEQ ID NO: 2136078 - DNA, 25 bp, Homo sapien
tgtccctcagggatactcaggcggt

SEQ ID NO: 2136079 - DNA, 25 bp, Homo sapien
ttggcaaagctgatatgagacacgg

SEQ ID NO: 2136080 - DNA, 25 bp, Homo sapien
tcaggcggtgatgtccaataaacag

SEQ ID NO: 2136081 - DNA, 25 bp, Homo sapien
tcgatgtatccaagaagttcaatac

SEQ ID NO: 2136082 - DNA, 25 bp, Homo sapien
gactgcaaattactcaaacttgagg

SEQ ID NO: 2136083 - DNA, 25 bp, Homo sapien
ggaaaaatgactgcaaattactcaa

SEQ ID NO: 2136084 - DNA, 25 bp, Homo sapien
tgaggaaagacactaatcgatgtat

SEQ ID NO: 2136085 - DNA, 25 bp, Homo sapien
caattgagattattcagtccgagga

SEQ ID NO: 2136086 - DNA, 25 bp, Homo sapien
aacagtaggtttgggcaggcaaaag

SEQ ID NO: 2136087 - DNA, 25 bp, Homo sapien
aaataggtcaattgagattattcag

SEQ ID NO: 2136088 - DNA, 25 bp, Homo sapien
tattcagtccgaggagcagaaaaat

SEQ ID NO: 2136089 - DNA, 25 bp, Homo sapien
gataaaacacaaggagtgtcctggc

SEQ ID NO: 2136090 - DNA, 25 bp, Homo sapien
gatgtccggcttctttcacctagta

SEQ ID NO: 2136091 - DNA, 25 bp, Homo sapien
tctcttgatgtacacttggcttgct

SEQ ID NO: 2136092 - DNA, 25 bp, Homo sapien
tccagggaactaacccattccagtg

SEQ ID NO: 2136093 - DNA, 25 bp, Homo sapien
caaagacccaccgatttctctggaa

SEQ ID NO: 2136094 - DNA, 25 bp, Homo sapien
cttcctcttctcttgcgttttgctc

SEQ ID NO: 2136095 - DNA, 25 bp, Homo sapien
ttctctggaaccttcagtaatccga

SEQ ID NO: 2136096 - DNA, 25 bp, Homo sapien
cataataccataactattaggcaca

SEQ ID NO: 2136097 - DNA, 25 bp, Homo sapien
ctgccccgggttttggagaggatgt

SEQ ID NO: 2136098 - DNA, 25 bp, Homo sapien
ggagatgatatggaacggttcatgg

SEQ ID NO: 2136099 - DNA, 25 bp, Homo sapien
aacattgatatgatagatggagatg

SEQ ID NO: 2136100 - DNA, 25 bp, Homo sapien
agaggatgtgcccaataggcttgtc

SEQ ID NO: 2136101 - DNA, 25 bp, Homo sapien
gaatctgggtgactcacagcccttc

SEQ ID NO: 2136102 - DNA, 25 bp, Homo sapien
aaagactgcctctgatccctgaagg

SEQ ID NO: 2136103 - DNA, 25 bp, Homo sapien
tgcccgagttgagtgcaggagaaac

SEQ ID NO: 2136104 - DNA, 25 bp, Homo sapien
tgcgtttgtgcagccgatttcaagg

SEQ ID NO: 2136105 - DNA, 25 bp, Homo sapien
tgtgacggctcgctgttgccctgaa

SEQ ID NO: 2136106 - DNA, 25 bp, Homo sapien
cagtctggtagttgtcgctggccgt

SEQ ID NO: 2136107 - DNA, 25 bp, Homo sapien
tgcgtggattagtccctcctcctag

SEQ ID NO: 2136108 - DNA, 25 bp, Homo sapien
gagacccagagccaatgcgtggatt

SEQ ID NO: 2136109 - DNA, 25 bp, Homo sapien
actcaatagctgttctttcagatgg

SEQ ID NO: 2136110 - DNA, 25 bp, Homo sapien
cacaagtgaagtcaggaggagtact

SEQ ID NO: 2136111 - DNA, 25 bp, Homo sapien
gaagtcaggaggagtactcaatagc

SEQ ID NO: 2136112 - DNA, 25 bp, Homo sapien
gttctttcagatggttccaaaaagc

SEQ ID NO: 2136113 - DNA, 25 bp, Homo sapien
catagcaaggctatcaaattgagaa

SEQ ID NO: 2136114 - DNA, 25 bp, Homo sapien
tcgaactggtgcacatagcaaggct

SEQ ID NO: 2136115 - DNA, 25 bp, Homo sapien
cacatagcaaggctatcaaattgag

SEQ ID NO: 2136116 - DNA, 25 bp, Homo sapien
tggtgcacatagcaaggctatcaaa

SEQ ID NO: 2136117 - DNA, 25 bp, Homo sapien
catagggagaaacagaacatttaca

SEQ ID NO: 2136118 - DNA, 25 bp, Homo sapien
ccatagggagaaacagaacatttac

SEQ ID NO: 2136119 - DNA, 25 bp, Homo sapien
ctgccatagggagaaacagaacatt

SEQ ID NO: 2136120 - DNA, 25 bp, Homo sapien
tgccatagggagaaacagaacattt

SEQ ID NO: 2136121 - DNA, 25 bp, Homo sapien
cattaggcccagaacatggaagatg

SEQ ID NO: 2136122 - DNA, 25 bp, Homo sapien
tcattaggcccagaacatggaagat

SEQ ID NO: 2136123 - DNA, 25 bp, Homo sapien
ttaggcccagaacatggaagatgcc

SEQ ID NO: 2136124 - DNA, 25 bp, Homo sapien
tttcattaggcccagaacatggaag

SEQ ID NO: 2136125 - DNA, 25 bp, Homo sapien
aaagctctgaatggtatagttcacc

SEQ ID NO: 2136126 - DNA, 25 bp, Homo sapien
tgttcatactggatggaatgctcct

SEQ ID NO: 2136127 - DNA, 25 bp, Homo sapien
gggctgtttatcacggagttcctgg

SEQ ID NO: 2136128 - DNA, 25 bp, Homo sapien
ctcctgcaggtagggttgaaagctc

SEQ ID NO: 2136129 - DNA, 25 bp, Homo sapien
tggtatagcaccattgttggactgg

SEQ ID NO: 2136130 - DNA, 25 bp, Homo sapien
gaggttcaggtagccttggtatagc

SEQ ID NO: 2136131 - DNA, 25 bp, Homo sapien
tagccttggtatagcaccattgttg

SEQ ID NO: 2136132 - DNA, 25 bp, Homo sapien
caggaggagctaggtgagtcaggag

SEQ ID NO: 2136133 - DNA, 25 bp, Homo sapien
cctggagccagattctgtccatcag

SEQ ID NO: 2136134 - DNA, 25 bp, Homo sapien
caggacagttaactggtgcaactgg

SEQ ID NO: 2136135 - DNA, 25 bp, Homo sapien
actggtgcaactggaatgccagttc

SEQ ID NO: 2136136 - DNA, 25 bp, Homo sapien
ggaatgccagttcctggagccagat

SEQ ID NO: 2136137 - DNA, 25 bp, Homo sapien
aaaacttcaccagagaagcttctgg

SEQ ID NO: 2136138 - DNA, 25 bp, Homo sapien
aaattcctcagttagggccttggtg

SEQ ID NO: 2136139 - DNA, 25 bp, Homo sapien
caggtgatctgaataaaacttcacc

SEQ ID NO: 2136140 - DNA, 25 bp, Homo sapien
taaaacttcaccagagaagcttctg

SEQ ID NO: 2136141 - DNA, 25 bp, Homo sapien
ccgcaaggtaccacctgatcccaac

SEQ ID NO: 2136142 - DNA, 25 bp, Homo sapien
tcccaacatacagtaccatatgcca

SEQ ID NO: 2136143 - DNA, 25 bp, Homo sapien
cgcaaggtaccacctgatcccaaca

SEQ ID NO: 2136144 - DNA, 25 bp, Homo sapien
tgatcccaacatacagtaccatatg

SEQ ID NO: 2136145 - DNA, 25 bp, Homo sapien
atgaaggagagaatgcagagtgggc

SEQ ID NO: 2136146 - DNA, 25 bp, Homo sapien
taatgaaggagagaatgcagagtgg

SEQ ID NO: 2136147 - DNA, 25 bp, Homo sapien
gataatgaaggagagaatgcagagt

SEQ ID NO: 2136148 - DNA, 25 bp, Homo sapien
cttagataatgaaggagagaatgca

SEQ ID NO: 2136149 - DNA, 25 bp, Homo sapien
acgatgctacgaatgccactctctt

SEQ ID NO: 2136150 - DNA, 25 bp, Homo sapien
caacgatgctacgaatgccactctc

SEQ ID NO: 2136151 - DNA, 25 bp, Homo sapien
aacgatgctacgaatgccactctct

SEQ ID NO: 2136152 - DNA, 25 bp, Homo sapien
ggcctccaggaaagtgtagcagaga

SEQ ID NO: 2136153 - DNA, 25 bp, Homo sapien
ctccaggaaagtgtagcagagactc

SEQ ID NO: 2136154 - DNA, 25 bp, Homo sapien
gaggcctccaggaaagtgtagcaga

SEQ ID NO: 2136155 - DNA, 25 bp, Homo sapien
cttcaatgagaatgaggcctccagg

SEQ ID NO: 2136156 - DNA, 25 bp, Homo sapien
cctgctgattatgatacttcagaat

SEQ ID NO: 2136157 - DNA, 25 bp, Homo sapien
gattatgatacttcagaatgacaaa

SEQ ID NO: 2136158 - DNA, 25 bp, Homo sapien
ctggggtgcagcactatctgtttct

SEQ ID NO: 2136159 - DNA, 25 bp, Homo sapien
ggtgcagcactatctgtttcttgtg

SEQ ID NO: 2136160 - DNA, 25 bp, Homo sapien
gagggcccactggattctcattcag

SEQ ID NO: 2136161 - DNA, 25 bp, Homo sapien
ctcaggccagcatactgaagaatga

SEQ ID NO: 2136162 - DNA, 25 bp, Homo sapien
ctggctcaggccagcatactgaaga

SEQ ID NO: 2136163 - DNA, 25 bp, Homo sapien
aaccggagggcccactggattctca

SEQ ID NO: 2136164 - DNA, 25 bp, Homo sapien
cccgtggaagctgagacctgtcctt

SEQ ID NO: 2136165 - DNA, 25 bp, Homo sapien
aagagaaatcccgtggaagctgaga

SEQ ID NO: 2136166 - DNA, 25 bp, Homo sapien
aagaaagagaaatcccgtggaagct

SEQ ID NO: 2136167 - DNA, 25 bp, Homo sapien
gaaatcccgtggaagctgagacctg

SEQ ID NO: 2136168 - DNA, 25 bp, Homo sapien
tgagtcagctgatattcataacctg

SEQ ID NO: 2136169 - DNA, 25 bp, Homo sapien
cagctgatattcataacctggcagt

SEQ ID NO: 2136170 - DNA, 25 bp, Homo sapien
cagactaggagtgactcctagaatc

SEQ ID NO: 2136171 - DNA, 25 bp, Homo sapien
ccccagactaggagtgactcctaga

SEQ ID NO: 2136172 - DNA, 25 bp, Homo sapien
tgagatagacgtaaggaggcttcat

SEQ ID NO: 2136173 - DNA, 25 bp, Homo sapien
ggctgagatagacgtaaggaggctt

SEQ ID NO: 2136174 - DNA, 25 bp, Homo sapien
ggaggctgagatagacgtaaggagg

SEQ ID NO: 2136175 - DNA, 25 bp, Homo sapien
gctgagatagacgtaaggaggcttc

SEQ ID NO: 2136176 - DNA, 25 bp, Homo sapien
cttgcccagggtgccttggaaacca

SEQ ID NO: 2136177 - DNA, 25 bp, Homo sapien
ctgtgacacaagataggagagtcca

SEQ ID NO: 2136178 - DNA, 25 bp, Homo sapien
tggaaaccaagacggcaggaaacgc

SEQ ID NO: 2136179 - DNA, 25 bp, Homo sapien
agggtgatccgtttccagggtagcg

SEQ ID NO: 2136180 - DNA, 25 bp, Homo sapien
gaaccatggagattatgaggtccac

SEQ ID NO: 2136181 - DNA, 25 bp, Homo sapien
gtaggacggaaccatggagattatg

SEQ ID NO: 2136182 - DNA, 25 bp, Homo sapien
gacggaaccatggagattatgaggt

SEQ ID NO: 2136183 - DNA, 25 bp, Homo sapien
atcagggaggagtaggacggaacca

SEQ ID NO: 2136184 - DNA, 25 bp, Homo sapien
gtctgctagcgaagcccctctgcct

SEQ ID NO: 2136185 - DNA, 25 bp, Homo sapien
ctcgtcctcgactggcggcctcgcc

SEQ ID NO: 2136186 - DNA, 25 bp, Homo sapien
tgcgtctgctagcgaagcccctctg

SEQ ID NO: 2136187 - DNA, 25 bp, Homo sapien
ctctgcgtctgctagcgaagcccct

SEQ ID NO: 2136188 - DNA, 25 bp, Homo sapien
caggagactggtcatctaaacagaa

SEQ ID NO: 2136189 - DNA, 25 bp, Homo sapien
tgggatcattctggagcacagtttc

SEQ ID NO: 2136190 - DNA, 25 bp, Homo sapien
ctcagtcttcggcatcttgatgtta

SEQ ID NO: 2136191 - DNA, 25 bp, Homo sapien
cattctctgctacactgggatcatt

SEQ ID NO: 2136192 - DNA, 25 bp, Homo sapien
gaaatcttggtttactacaatttca

SEQ ID NO: 2136193 - DNA, 25 bp, Homo sapien
caatttcatgtgaaatgctcagctt

SEQ ID NO: 2136194 - DNA, 25 bp, Homo sapien
ggttaaatgagcagattgctctttt

SEQ ID NO: 2136195 - DNA, 25 bp, Homo sapien
aagaagggttaaatgagcagattgc

SEQ ID NO: 2136196 - DNA, 25 bp, Homo sapien
aagggttaaatgagcagattgctct

SEQ ID NO: 2136197 - DNA, 25 bp, Homo sapien
gaagggttaaatgagcagattgctc

SEQ ID NO: 2136198 - DNA, 25 bp, Homo sapien
actcaatagctgttctttcagatgg

SEQ ID NO: 2136199 - DNA, 25 bp, Homo sapien
gaagtcaggaggagtactcaatagc

SEQ ID NO: 2136200 - DNA, 25 bp, Homo sapien
cacaagtgaagtcaggaggagtact

SEQ ID NO: 2136201 - DNA, 25 bp, Homo sapien
gttctttcagatggttccaaaaagc

SEQ ID NO: 2136202 - DNA, 25 bp, Homo sapien
tagaggacaattaccattcaaggct

SEQ ID NO: 2136203 - DNA, 25 bp, Homo sapien
agggctcgcctattcatctccggga

SEQ ID NO: 2136204 - DNA, 25 bp, Homo sapien
tgctcttaggccaaaggcatcccag

SEQ ID NO: 2136205 - DNA, 25 bp, Homo sapien
caagttccttgtgggcaagggctcg

SEQ ID NO: 2136206 - DNA, 25 bp, Homo sapien
ccatggtaatagcagtgatagcaag

SEQ ID NO: 2136207 - DNA, 25 bp, Homo sapien
ctgccatggtaatagcagtgatagc

SEQ ID NO: 2136208 - DNA, 25 bp, Homo sapien
atggtaatagcagtgatagcaaggt

SEQ ID NO: 2136209 - DNA, 25 bp, Homo sapien
gccatggtaatagcagtgatagcaa

SEQ ID NO: 2136210 - DNA, 25 bp, Homo sapien
ccggtgcacatagcagagccatcaa

SEQ ID NO: 2136211 - DNA, 25 bp, Homo sapien
gaaccggtgcacatagcagagccat

SEQ ID NO: 2136212 - DNA, 25 bp, Homo sapien
atctcgaaccggtgcacatagcaga

SEQ ID NO: 2136213 - DNA, 25 bp, Homo sapien
tgcacatagcagagccatcaaattg

SEQ ID NO: 2136214 - DNA, 25 bp, Homo sapien
cattttcattaggcccagaacacgg

SEQ ID NO: 2136215 - DNA, 25 bp, Homo sapien
attttcattaggcccagaacacgga

SEQ ID NO: 2136216 - DNA, 25 bp, Homo sapien
tgaggtcaaatctcccctctcctgc

SEQ ID NO: 2136217 - DNA, 25 bp, Homo sapien
ctgaggtcaaatctcccctctcctg

SEQ ID NO: 2136218 - DNA, 25 bp, Homo sapien
tactcttggtctataaagaagtgat

SEQ ID NO: 2136219 - DNA, 25 bp, Homo sapien
gagacatactcttggtctataaaga

SEQ ID NO: 2136220 - DNA, 25 bp, Homo sapien
ggctctgagacatactcttggtcta

SEQ ID NO: 2136221 - DNA, 25 bp, Homo sapien
atggctctgagacatactcttggtc

SEQ ID NO: 2136222 - DNA, 25 bp, Homo sapien
taggtgagtcaggagaactcggaca

SEQ ID NO: 2136223 - DNA, 25 bp, Homo sapien
gagctaggtgagtcaggagaactcg

SEQ ID NO: 2136224 - DNA, 25 bp, Homo sapien
ccgcttggaagtgaacacgccatgc

SEQ ID NO: 2136225 - DNA, 25 bp, Homo sapien
ctgccccgcttggaagtgaacacgc

SEQ ID NO: 2136226 - DNA, 25 bp, Homo sapien
ggtatagcaccattgttggactggg

SEQ ID NO: 2136227 - DNA, 25 bp, Homo sapien
attctacgttttcaagatcccagag

SEQ ID NO: 2136228 - DNA, 25 bp, Homo sapien
ttctacgttttcaagatcccagagg

SEQ ID NO: 2136229 - DNA, 25 bp, Homo sapien
aaaacttcaccagagaagcttctgg

SEQ ID NO: 2136230 - DNA, 25 bp, Homo sapien
aaattcctcagttagggccttggtg

SEQ ID NO: 2136231 - DNA, 25 bp, Homo sapien
caggtgatctgaataaaacttcacc

SEQ ID NO: 2136232 - DNA, 25 bp, Homo sapien
taaaacttcaccagagaagcttctg

SEQ ID NO: 2136233 - DNA, 25 bp, Homo sapien
tcactgctcagagtagtgaggccca

SEQ ID NO: 2136234 - DNA, 25 bp, Homo sapien
ctcagagtagtgaggcccatgtcct

SEQ ID NO: 2136235 - DNA, 25 bp, Homo sapien
tgttctggagttggcctagaagaga

SEQ ID NO: 2136236 - DNA, 25 bp, Homo sapien
cttggtgatgttctggagttggcct

SEQ ID NO: 2136237 - DNA, 25 bp, Homo sapien
cttttctgcacgacgaccatggaga

SEQ ID NO: 2136238 - DNA, 25 bp, Homo sapien
tctgcacgacgaccatggagattct

SEQ ID NO: 2136239 - DNA, 25 bp, Homo sapien
tgccacttttctgcacgacgaccat

SEQ ID NO: 2136240 - DNA, 25 bp, Homo sapien
gcacgacgaccatggagattcttac

SEQ ID NO: 2136241 - DNA, 25 bp, Homo sapien
acaatgacaagaggaacgaagacgg

SEQ ID NO: 2136242 - DNA, 25 bp, Homo sapien
tgacaagaggaacgaagacggtaca

SEQ ID NO: 2136243 - DNA, 25 bp, Homo sapien
gaggaacgaagacggtacagaagaa

SEQ ID NO: 2136244 - DNA, 25 bp, Homo sapien
cgaagacggtacagaagaaattcac

SEQ ID NO: 2136245 - DNA, 25 bp, Homo sapien
atttgagaaaaaaacggatccactg

SEQ ID NO: 2136246 - DNA, 25 bp, Homo sapien
ctgcatgccatgaagcaaacagcat

SEQ ID NO: 2136247 - DNA, 25 bp, Homo sapien
agcatttgagaaaaaaacggatcca

SEQ ID NO: 2136248 - DNA, 25 bp, Homo sapien
ttgagaaaaaaacggatccactgat

SEQ ID NO: 2136249 - DNA, 25 bp, Homo sapien
gattgagaaacttccagcccagttc

SEQ ID NO: 2136250 - DNA, 25 bp, Homo sapien
ttgagaaacttccagcccagttctg

SEQ ID NO: 2136251 - DNA, 25 bp, Homo sapien
ctgattatgatgcatcagattgaga

SEQ ID NO: 2136252 - DNA, 25 bp, Homo sapien
tgctgattatgatgcatcagattga

SEQ ID NO: 2136253 - DNA, 25 bp, Homo sapien
tttaggatctcagcatagtatgggc

SEQ ID NO: 2136254 - DNA, 25 bp, Homo sapien
aggatctcagcatagtatgggccaa

SEQ ID NO: 2136255 - DNA, 25 bp, Homo sapien
ttttaggatctcagcatagtatggg

SEQ ID NO: 2136256 - DNA, 25 bp, Homo sapien
ttaggatctcagcatagtatgggcc

SEQ ID NO: 2136257 - DNA, 25 bp, Homo sapien
ttgggccagttggtgcttacatgct

SEQ ID NO: 2136258 - DNA, 25 bp, Homo sapien
tcgactaaccacaggtgatgtcctc

SEQ ID NO: 2136259 - DNA, 25 bp, Homo sapien
tgagtccctgttgccatagctgggg

SEQ ID NO: 2136260 - DNA, 25 bp, Homo sapien
tgtgtcctggctatagcgaggaaga

SEQ ID NO: 2136261 - DNA, 25 bp, Homo sapien
ctagtccagtggttttgaaacagtc

SEQ ID NO: 2136262 - DNA, 25 bp, Homo sapien
tcatctagtccagtggttttgaaac

SEQ ID NO: 2136263 - DNA, 25 bp, Homo sapien
ttcaactcaagctgcctagctttga

SEQ ID NO: 2136264 - DNA, 25 bp, Homo sapien
ctcttattcgtgatcttctggaaag

SEQ ID NO: 2136265 - DNA, 25 bp, Homo sapien
gcttggagctggtaactttttgctt

SEQ ID NO: 2136266 - DNA, 25 bp, Homo sapien
tgggagggggactgtctataaccat

SEQ ID NO: 2136267 - DNA, 25 bp, Homo sapien
gactgtctataaccattatcctatg

SEQ ID NO: 2136268 - DNA, 25 bp, Homo sapien
taaccattatcctatgtccatgtca

SEQ ID NO: 2136269 - DNA, 25 bp, Homo sapien
ggaaccaacctgggagctacacttc

SEQ ID NO: 2136270 - DNA, 25 bp, Homo sapien
gaaccaacctgggagctacacttcc

SEQ ID NO: 2136271 - DNA, 25 bp, Homo sapien
aataaagattgaggaaatgtcagcc

SEQ ID NO: 2136272 - DNA, 25 bp, Homo sapien
tggaagaccaataaagattgaggaa

SEQ ID NO: 2136273 - DNA, 25 bp, Homo sapien
gcaatgaagcgtcctggataagatc

SEQ ID NO: 2136274 - DNA, 25 bp, Homo sapien
atgaagaccaaatgcaatgaagcgt

SEQ ID NO: 2136275 - DNA, 25 bp, Homo sapien
aaagcacaaaggctcttctacctgg

SEQ ID NO: 2136276 - DNA, 25 bp, Homo sapien
gtctcagtacaaggcaaatccagtg

SEQ ID NO: 2136277 - DNA, 25 bp, Homo sapien
gataaagacgagataccaactgaag

SEQ ID NO: 2136278 - DNA, 25 bp, Homo sapien
gaaggcctcgctaatttccataaag

SEQ ID NO: 2136279 - DNA, 25 bp, Homo sapien
agtgatgaacaatggaacaaagagg

SEQ ID NO: 2136280 - DNA, 25 bp, Homo sapien
tcctcaagagcatggatagctgcag

SEQ ID NO: 2136281 - DNA, 25 bp, Homo sapien
agactccatgcagcgagctctagca

SEQ ID NO: 2136282 - DNA, 25 bp, Homo sapien
caaagaggtctcatgggagctcctc

SEQ ID NO: 2136283 - DNA, 25 bp, Homo sapien
gagacaacgggagggccaaatcctc

SEQ ID NO: 2136284 - DNA, 25 bp, Homo sapien
tcaacggtccaacatggagacaacg

SEQ ID NO: 2136285 - DNA, 25 bp, Homo sapien
tctagtgtacatagggttaccgagg

SEQ ID NO: 2136286 - DNA, 25 bp, Homo sapien
ggaggatctgcaggaccatcaatcg

SEQ ID NO: 2136287 - DNA, 25 bp, Homo sapien
ggctgcagcataccctcctgatgac

SEQ ID NO: 2136288 - DNA, 25 bp, Homo sapien
tgcagcataccctcctgatgactca

SEQ ID NO: 2136289 - DNA, 25 bp, Homo sapien
tgggagactgttaggccaccccctg

SEQ ID NO: 2136290 - DNA, 25 bp, Homo sapien
tcaggctgcagcataccctcctgat

SEQ ID NO: 2136291 - DNA, 25 bp, Homo sapien
cagagatcctcagcattcaccgtca

SEQ ID NO: 2136292 - DNA, 25 bp, Homo sapien
ggtgaccccaagtgttggaccaaca

SEQ ID NO: 2136293 - DNA, 25 bp, Homo sapien
cattagagtccttaaggtgacccca

SEQ ID NO: 2136294 - DNA, 25 bp, Homo sapien
taatcacctctgtaagacattagag

SEQ ID NO: 2136295 - DNA, 25 bp, Homo sapien
tcctccgatcctccccagtctggtg

SEQ ID NO: 2136296 - DNA, 25 bp, Homo sapien
cccagtctggtgtccatgttgttct

SEQ ID NO: 2136297 - DNA, 25 bp, Homo sapien
tgtacaaactcaacatcttttattg

SEQ ID NO: 2136298 - DNA, 25 bp, Homo sapien
tccatgttgttcttctatgtaatca

SEQ ID NO: 2136299 - DNA, 25 bp, Homo sapien
tgtctgggtcctgctttaaatccag

SEQ ID NO: 2136300 - DNA, 25 bp, Homo sapien
ctgctttaaatccaggaccctccgt

SEQ ID NO: 2136301 - DNA, 25 bp, Homo sapien
tcagagcatgtggttctgctgtctg

SEQ ID NO: 2136302 - DNA, 25 bp, Homo sapien
gcatgtggttctgctgtctgggtcc

SEQ ID NO: 2136303 - DNA, 25 bp, Homo sapien
gaaaagagttgccttgttctcaagg

SEQ ID NO: 2136304 - DNA, 25 bp, Homo sapien
tgctcaactttactcgaaaggaaag

SEQ ID NO: 2136305 - DNA, 25 bp, Homo sapien
gttctcaaggtaccatcaagggaaa

SEQ ID NO: 2136306 - DNA, 25 bp, Homo sapien
cgcttttgtgggcagacacttgatg

SEQ ID NO: 2136307 - DNA, 25 bp, Homo sapien
caacagtcttaggtgggtaacctca

SEQ ID NO: 2136308 - DNA, 25 bp, Homo sapien
tcatagcaatggacagggacaggat

SEQ ID NO: 2136309 - DNA, 25 bp, Homo sapien
gaagactcgtgagcacaggcattgt

SEQ ID NO: 2136310 - DNA, 25 bp, Homo sapien
caacgctgttaagtgctgcagaaga

SEQ ID NO: 2136311 - DNA, 25 bp, Homo sapien
tatgatggatcttagaccacaggca

SEQ ID NO: 2136312 - DNA, 25 bp, Homo sapien
ggtcagaactctatttactacctgg

SEQ ID NO: 2136313 - DNA, 25 bp, Homo sapien
gaaactgcgaactcactagtagatc

SEQ ID NO: 2136314 - DNA, 25 bp, Homo sapien
tatgtccctatatgtatatccgagt

SEQ ID NO: 2136315 - DNA, 25 bp, Homo sapien
tgtgagattctgatgactgaatcct

SEQ ID NO: 2136316 - DNA, 25 bp, Homo sapien
tctgtgagattctgatgactgaatc

SEQ ID NO: 2136317 - DNA, 25 bp, Homo sapien
atgagatggatgggcatcagctcct

SEQ ID NO: 2136318 - DNA, 25 bp, Homo sapien
atttatctctgtgagattctgatga

SEQ ID NO: 2136319 - DNA, 25 bp, Homo sapien
gcatcataggaatggcaatcagccc

SEQ ID NO: 2136320 - DNA, 25 bp, Homo sapien
tcaaggaaggcatcataggaatggc

SEQ ID NO: 2136321 - DNA, 25 bp, Homo sapien
cataggaatggcaatcagccctaca

SEQ ID NO: 2136322 - DNA, 25 bp, Homo sapien
ccctgaacagccaggatttccaccc

SEQ ID NO: 2136323 - DNA, 25 bp, Homo sapien
ttggggatccatgctagtggcttta

SEQ ID NO: 2136324 - DNA, 25 bp, Homo sapien
ttttggggatccatgctagtggctt

SEQ ID NO: 2136325 - DNA, 25 bp, Homo sapien
gggatccatgctagtggctttagga

SEQ ID NO: 2136326 - DNA, 25 bp, Homo sapien
tggggatccatgctagtggctttag

SEQ ID NO: 2136327 - DNA, 25 bp, Homo sapien
tcagtaaacttctagtaccggctgg

SEQ ID NO: 2136328 - DNA, 25 bp, Homo sapien
gaaagttgccggaaggcttcagatc

SEQ ID NO: 2136329 - DNA, 25 bp, Homo sapien
cagcgcgtcaggatatgaaagttgc

SEQ ID NO: 2136330 - DNA, 25 bp, Homo sapien
gcttcagatctgagccgaagtccaa

SEQ ID NO: 2136331 - DNA, 25 bp, Homo sapien
agtctcacagaacgaacttggaaat

SEQ ID NO: 2136332 - DNA, 25 bp, Homo sapien
ttgtcctgacactacagtctcacag

SEQ ID NO: 2136333 - DNA, 25 bp, Homo sapien
gctttgtcctgacactacagtctca

SEQ ID NO: 2136334 - DNA, 25 bp, Homo sapien
gtctcacagaacgaacttggaaatg

SEQ ID NO: 2136335 - DNA, 25 bp, Homo sapien
cttcagttctgtatgtcccacactt

SEQ ID NO: 2136336 - DNA, 25 bp, Homo sapien
tgtcccacacttctttagagtagag

SEQ ID NO: 2136337 - DNA, 25 bp, Homo sapien
cacacttctttagagtagagcacat

SEQ ID NO: 2136338 - DNA, 25 bp, Homo sapien
tgtatgtcccacacttctttagagt

SEQ ID NO: 2136339 - DNA, 25 bp, Homo sapien
cagtttagcttcaagccggacacaa

SEQ ID NO: 2136340 - DNA, 25 bp, Homo sapien
cggcagtttagcttcaagccggaca

SEQ ID NO: 2136341 - DNA, 25 bp, Homo sapien
tgtggtggccccggctttaccactg

SEQ ID NO: 2136342 - DNA, 25 bp, Homo sapien
cttgccggcagtttagcttcaagcc

SEQ ID NO: 2136343 - DNA, 25 bp, Homo sapien
gaaacaggttatgcggaaggattca

SEQ ID NO: 2136344 - DNA, 25 bp, Homo sapien
cggaaggattcagtagggagcttaa

SEQ ID NO: 2136345 - DNA, 25 bp, Homo sapien
tgcggaaggattcagtagggagctt

SEQ ID NO: 2136346 - DNA, 25 bp, Homo sapien
atgaaacaggttatgcggaaggatt

SEQ ID NO: 2136347 - DNA, 25 bp, Homo sapien
aacatctggcgtttattgagggaga

SEQ ID NO: 2136348 - DNA, 25 bp, Homo sapien
aaatacgtgttagttgcattcgttg

SEQ ID NO: 2136349 - DNA, 25 bp, Homo sapien
tgagggagaaatacgtgttagttgc

SEQ ID NO: 2136350 - DNA, 25 bp, Homo sapien
gttgcattcgttgttattagtcctc

SEQ ID NO: 2136351 - DNA, 25 bp, Homo sapien
gatagggctttctggacatctggtc

SEQ ID NO: 2136352 - DNA, 25 bp, Homo sapien
tgacagaaatgaggagaggcgttcc

SEQ ID NO: 2136353 - DNA, 25 bp, Homo sapien
ggaggcttttgcaaatagtgtgaca

SEQ ID NO: 2136354 - DNA, 25 bp, Homo sapien
ttccctgaatccagcagatagggct

SEQ ID NO: 2136355 - DNA, 25 bp, Homo sapien
tgcctgtccagatacaagagcctta

SEQ ID NO: 2136356 - DNA, 25 bp, Homo sapien
gcaaagtgccaacccgccacataag

SEQ ID NO: 2136357 - DNA, 25 bp, Homo sapien
cttatctcacaggtggcacaatcag

SEQ ID NO: 2136358 - DNA, 25 bp, Homo sapien
ggtagggctagcaaagtgccaaccc

SEQ ID NO: 2136359 - DNA, 25 bp, Homo sapien
acgtaccacgtcgtgagctaactcc

SEQ ID NO: 2136360 - DNA, 25 bp, Homo sapien
cacgtaccacgtcgtgagctaactc

SEQ ID NO: 2136361 - DNA, 25 bp, Homo sapien
gtaccacgtcgtgagctaactccat

SEQ ID NO: 2136362 - DNA, 25 bp, Homo sapien
cgtaccacgtcgtgagctaactcca

SEQ ID NO: 2136363 - DNA, 25 bp, Homo sapien
gaaaagtgctaccatggtcatggca

SEQ ID NO: 2136364 - DNA, 25 bp, Homo sapien
cagtgtgaaggcgggcgctcatacc

SEQ ID NO: 2136365 - DNA, 25 bp, Homo sapien
ccttgaaaagtgctaccatggtcat

SEQ ID NO: 2136366 - DNA, 25 bp, Homo sapien
ctcttgtcaaaattatcccggaaag

SEQ ID NO: 2136367 - DNA, 25 bp, Homo sapien
aatgaaagggttgcacagtcccggg

SEQ ID NO: 2136368 - DNA, 25 bp, Homo sapien
gaaggcgggtatccattaaatctaa

SEQ ID NO: 2136369 - DNA, 25 bp, Homo sapien
taagaaagtctcctatacatgctcc

SEQ ID NO: 2136370 - DNA, 25 bp, Homo sapien
ggctgctacgtgcaaaccaggctgc

SEQ ID NO: 2136371 - DNA, 25 bp, Homo sapien
tgtgaccttaaaccagttccttgtg

SEQ ID NO: 2136372 - DNA, 25 bp, Homo sapien
ctatttctccacgtggtaatacgga

SEQ ID NO: 2136373 - DNA, 25 bp, Homo sapien
tacggatttcgtcttcactatgcca

SEQ ID NO: 2136374 - DNA, 25 bp, Homo sapien
ttcgcatcggatgctataaggagtg

SEQ ID NO: 2136375 - DNA, 25 bp, Homo sapien
attgaattcattagccatgccttgt

SEQ ID NO: 2136376 - DNA, 25 bp, Homo sapien
gattgaattcattagccatgccttg

SEQ ID NO: 2136377 - DNA, 25 bp, Homo sapien
ggattgaattcattagccatgcctt

SEQ ID NO: 2136378 - DNA, 25 bp, Homo sapien
ttgaattcattagccatgccttgtc

SEQ ID NO: 2136379 - DNA, 25 bp, Homo sapien
aatgcggaggcagcgctagcatcct

SEQ ID NO: 2136380 - DNA, 25 bp, Homo sapien
ggaggcagcgctagcatcctggaca

SEQ ID NO: 2136381 - DNA, 25 bp, Homo sapien
cggaggcagcgctagcatcctggac

SEQ ID NO: 2136382 - DNA, 25 bp, Homo sapien
ttcaatgcggaggcagcgctagcat

SEQ ID NO: 2136383 - DNA, 25 bp, Homo sapien
gcctggcttcaacttattcttcaca

SEQ ID NO: 2136384 - DNA, 25 bp, Homo sapien
agacattgtaccgtttgttcatggt

SEQ ID NO: 2136385 - DNA, 25 bp, Homo sapien
attatatcaatgtcacggcccatca

SEQ ID NO: 2136386 - DNA, 25 bp, Homo sapien
atatcaatgtcacggcccatcaagt

SEQ ID NO: 2136387 - DNA, 25 bp, Homo sapien
ttatatcaatgtcacggcccatcaa

SEQ ID NO: 2136388 - DNA, 25 bp, Homo sapien
tatatcaatgtcacggcccatcaag

SEQ ID NO: 2136389 - DNA, 25 bp, Homo sapien
cagaaaggccatccagctggtacag

SEQ ID NO: 2136390 - DNA, 25 bp, Homo sapien
ctctgtaatgtcagaaaggccatcc

SEQ ID NO: 2136391 - DNA, 25 bp, Homo sapien
taatgtcagaaaggccatccagctg

SEQ ID NO: 2136392 - DNA, 25 bp, Homo sapien
ccttctctgtaatgtcagaaaggcc

SEQ ID NO: 2136393 - DNA, 25 bp, Homo sapien
ccgagaaggtgctgcacaacgggtt

SEQ ID NO: 2136394 - DNA, 25 bp, Homo sapien
aacgggttcccttctagccatagct

SEQ ID NO: 2136395 - DNA, 25 bp, Homo sapien
taggcggactggtccgagaaggtgc

SEQ ID NO: 2136396 - DNA, 25 bp, Homo sapien
agctcttcgagcttcagccctttca

SEQ ID NO: 2136397 - DNA, 25 bp, Homo sapien
ggcaggaaggcctgtctcagcatga

SEQ ID NO: 2136398 - DNA, 25 bp, Homo sapien
ctttttggagcaagagaaggagaac

SEQ ID NO: 2136399 - DNA, 25 bp, Homo sapien
aggagtgaagagtcaggccccagct

SEQ ID NO: 2136400 - DNA, 25 bp, Homo sapien
gaggagtgaagagtcaggccccagc

SEQ ID NO: 2136401 - DNA, 25 bp, Homo sapien
cttggggaaacaatcccggatggca

SEQ ID NO: 2136402 - DNA, 25 bp, Homo sapien
caacttggggaaacaatcccggatg

SEQ ID NO: 2136403 - DNA, 25 bp, Homo sapien
ctggtgcggataactctcggccgtc

SEQ ID NO: 2136404 - DNA, 25 bp, Homo sapien
gtcaacaatcactggtgcggataac

SEQ ID NO: 2136405 - DNA, 25 bp, Homo sapien
atcactggtgcggataactctcggc

SEQ ID NO: 2136406 - DNA, 25 bp, Homo sapien
acaatcactggtgcggataactctc

SEQ ID NO: 2136407 - DNA, 25 bp, Homo sapien
gcaacccaaatcttgcttggtcctt

SEQ ID NO: 2136408 - DNA, 25 bp, Homo sapien
caacccaaatcttgcttggtccttc

SEQ ID NO: 2136409 - DNA, 25 bp, Homo sapien
ggactaaatgctttagggtctcaga

SEQ ID NO: 2136410 - DNA, 25 bp, Homo sapien
aaatgctttagggtctcagatccag

SEQ ID NO: 2136411 - DNA, 25 bp, Homo sapien
tgcaggaattgcaggactaaatgct

SEQ ID NO: 2136412 - DNA, 25 bp, Homo sapien
gggtctcagatccagtaaagttttc

SEQ ID NO: 2136413 - DNA, 25 bp, Homo sapien
aggagaccctgtcgatctccagagt

SEQ ID NO: 2136414 - DNA, 25 bp, Homo sapien
gaagcaggcctcatcgtggtaagca

SEQ ID NO: 2136415 - DNA, 25 bp, Homo sapien
ggagaagcaggcctcatcgtggtaa

SEQ ID NO: 2136416 - DNA, 25 bp, Homo sapien
cctgtcgatctccagagtcatagat

SEQ ID NO: 2136417 - DNA, 25 bp, Homo sapien
tattcctgctatcctcaaagtactt

SEQ ID NO: 2136418 - DNA, 25 bp, Homo sapien
gggtccttgagtgttttcatattcc

SEQ ID NO: 2136419 - DNA, 25 bp, Homo sapien
ctcaaagtacttgcacaagctgctc

SEQ ID NO: 2136420 - DNA, 25 bp, Homo sapien
tcctcaaagtacttgcacaagctgc

SEQ ID NO: 2136421 - DNA, 25 bp, Homo sapien
cttgcccactcttccccatcacaca

SEQ ID NO: 2136422 - DNA, 25 bp, Homo sapien
gcccactcttccccatcacacactt

SEQ ID NO: 2136423 - DNA, 25 bp, Homo sapien
ccactcttccccatcacacacttac

SEQ ID NO: 2136424 - DNA, 25 bp, Homo sapien
ttgcccactcttccccatcacacac

SEQ ID NO: 2136425 - DNA, 25 bp, Homo sapien
gttttgtgcgcctcagcagttcccc

SEQ ID NO: 2136426 - DNA, 25 bp, Homo sapien
ccacaatgtcacgttttgtgcgcct

SEQ ID NO: 2136427 - DNA, 25 bp, Homo sapien
aatgtcacgttttgtgcgcctcagc

SEQ ID NO: 2136428 - DNA, 25 bp, Homo sapien
tgtcacgttttgtgcgcctcagcag

SEQ ID NO: 2136429 - DNA, 25 bp, Homo sapien
ctctctgggcctgcccaagggagga

SEQ ID NO: 2136430 - DNA, 25 bp, Homo sapien
ggctctctgggcctgcccaagggag

SEQ ID NO: 2136431 - DNA, 25 bp, Homo sapien
tctgggcctgcccaagggaggaagc

SEQ ID NO: 2136432 - DNA, 25 bp, Homo sapien
tgggcctgcccaagggaggaagcag

SEQ ID NO: 2136433 - DNA, 25 bp, Homo sapien
cttccttgaaaaccccattgacaga

SEQ ID NO: 2136434 - DNA, 25 bp, Homo sapien
cttgaaaaccccattgacagaaaag

SEQ ID NO: 2136435 - DNA, 25 bp, Homo sapien
tgaaaaccccattgacagaaaagca

SEQ ID NO: 2136436 - DNA, 25 bp, Homo sapien
tccttgaaaaccccattgacagaaa

SEQ ID NO: 2136437 - DNA, 25 bp, Homo sapien
cttcaaagacaacaaacaccaccac

SEQ ID NO: 2136438 - DNA, 25 bp, Homo sapien
gggtagcaatgaaggtccgggtgaa

SEQ ID NO: 2136439 - DNA, 25 bp, Homo sapien
caggggtagcaatgaaggtccgggt

SEQ ID NO: 2136440 - DNA, 25 bp, Homo sapien
caatgaaggtccgggtgaaggcgag

SEQ ID NO: 2136441 - DNA, 25 bp, Homo sapien
ctgccaggggtagcaatgaaggtcc

SEQ ID NO: 2136442 - DNA, 25 bp, Homo sapien
gcatccctcacaaacagctcgtcat

SEQ ID NO: 2136443 - DNA, 25 bp, Homo sapien
tcacaaacagctcgtcattcacgat

SEQ ID NO: 2136444 - DNA, 25 bp, Homo sapien
tccctcacaaacagctcgtcattca

SEQ ID NO: 2136445 - DNA, 25 bp, Homo sapien
ggcatccctcacaaacagctcgtca

SEQ ID NO: 2136446 - DNA, 25 bp, Homo sapien
gagaccactccagtttcatcccaga

SEQ ID NO: 2136447 - DNA, 25 bp, Homo sapien
tgagaccactccagtttcatcccag

SEQ ID NO: 2136448 - DNA, 25 bp, Homo sapien
cagactgggcagagaaagcctgcac

SEQ ID NO: 2136449 - DNA, 25 bp, Homo sapien
ttctgagaccactccagtttcatcc

SEQ ID NO: 2136450 - DNA, 25 bp, Homo sapien
ctggccagctctagtgtagttccac

SEQ ID NO: 2136451 - DNA, 25 bp, Homo sapien
aaggcctggccagctctagtgtagt

SEQ ID NO: 2136452 - DNA, 25 bp, Homo sapien
ctggagcatagtgaaggcctggcca

SEQ ID NO: 2136453 - DNA, 25 bp, Homo sapien
tagtgtagttccactcattgtcctg

SEQ ID NO: 2136454 - DNA, 25 bp, Homo sapien
cttggccctcctgacgacccagaga

SEQ ID NO: 2136455 - DNA, 25 bp, Homo sapien
gccctcctgacgacccagagacagc

SEQ ID NO: 2136456 - DNA, 25 bp, Homo sapien
ttcttggccctcctgacgacccaga

SEQ ID NO: 2136457 - DNA, 25 bp, Homo sapien
tggccctcctgacgacccagagaca

SEQ ID NO: 2136458 - DNA, 25 bp, Homo sapien
cttgaaggcctctgcggggatcttg

SEQ ID NO: 2136459 - DNA, 25 bp, Homo sapien
aggcctctgcggggatcttgccctc

SEQ ID NO: 2136460 - DNA, 25 bp, Homo sapien
gcttgaaggcctctgcggggatctt

SEQ ID NO: 2136461 - DNA, 25 bp, Homo sapien
cctctgcggggatcttgccctcggt

SEQ ID NO: 2136462 - DNA, 25 bp, Homo sapien
caaagaagacatcggagggctcctt

SEQ ID NO: 2136463 - DNA, 25 bp, Homo sapien
gaggatgtgaacgaagacaaagaag

SEQ ID NO: 2136464 - DNA, 25 bp, Homo sapien
gacaaagaagacatcggagggctcc

SEQ ID NO: 2136465 - DNA, 25 bp, Homo sapien
ggaaacaaagaggatgtgaacgaag

SEQ ID NO: 2136466 - DNA, 25 bp, Homo sapien
tggctctttgggtggttatgtcacg

SEQ ID NO: 2136467 - DNA, 25 bp, Homo sapien
ctttgggtggttatgtcacgtggcc

SEQ ID NO: 2136468 - DNA, 25 bp, Homo sapien
cagagcaactggctctttgggtggt

SEQ ID NO: 2136469 - DNA, 25 bp, Homo sapien
gttatgtcacgtggcctgcaagtta

SEQ ID NO: 2136470 - DNA, 25 bp, Homo sapien
gcatctgacagagtccaactgtctc

SEQ ID NO: 2136471 - DNA, 25 bp, Homo sapien
agtccaactgtctctcaaggccagt

SEQ ID NO: 2136472 - DNA, 25 bp, Homo sapien
gaagcccctggtgtgccaaggtaac

SEQ ID NO: 2136473 - DNA, 25 bp, Homo sapien
gtgggcctccaggtcgagcatctga

SEQ ID NO: 2136474 - DNA, 25 bp, Homo sapien
aagcacacattgtagtctctgctcc

SEQ ID NO: 2136475 - DNA, 25 bp, Homo sapien
gctgagaagcacacattgtagtctc

SEQ ID NO: 2136476 - DNA, 25 bp, Homo sapien
aggctgagaagcacacattgtagtc

SEQ ID NO: 2136477 - DNA, 25 bp, Homo sapien
tagtccccacgatgaggctgagaag

SEQ ID NO: 2136478 - DNA, 25 bp, Homo sapien
tgactggaagaccaggacgtcagag

SEQ ID NO: 2136479 - DNA, 25 bp, Homo sapien
agaccaggacgtcagagctggctag

SEQ ID NO: 2136480 - DNA, 25 bp, Homo sapien
gctgaatagacactgtggttgatgg

SEQ ID NO: 2136481 - DNA, 25 bp, Homo sapien
tcaggtgtcagagttagcatgtgct

SEQ ID NO: 2136482 - DNA, 25 bp, Homo sapien
tgcttctggactccttccacatgga

SEQ ID NO: 2136483 - DNA, 25 bp, Homo sapien
ttgcttctggactccttccacatgg

SEQ ID NO: 2136484 - DNA, 25 bp, Homo sapien
tgacccaatccagaactgcagcttg

SEQ ID NO: 2136485 - DNA, 25 bp, Homo sapien
tcagtcaatgccatctgttgaccca

SEQ ID NO: 2136486 - DNA, 25 bp, Homo sapien
aatgccatctgttgacccaatccag

SEQ ID NO: 2136487 - DNA, 25 bp, Homo sapien
gcttggatatcactttagcaaggga

SEQ ID NO: 2136488 - DNA, 25 bp, Homo sapien
ggatgtctacctcagtcgaaatgga

SEQ ID NO: 2136489 - DNA, 25 bp, Homo sapien
tcttgcctgaagaggttgaatgcaa

SEQ ID NO: 2136490 - DNA, 25 bp, Homo sapien
gcatacagtgtcttaaaccatagca

SEQ ID NO: 2136491 - DNA, 25 bp, Homo sapien
tttgcttcacaaacaggcttatcct

SEQ ID NO: 2136492 - DNA, 25 bp, Homo sapien
gacacataatgattgcacacattta

SEQ ID NO: 2136493 - DNA, 25 bp, Homo sapien
ggtacgtacgtataatgtgtaatga

SEQ ID NO: 2136494 - DNA, 25 bp, Homo sapien
tggaggtttctcaaacaacgaaaca

SEQ ID NO: 2136495 - DNA, 25 bp, Homo sapien
cagtcagcctactgtgctatcagaa

SEQ ID NO: 2136496 - DNA, 25 bp, Homo sapien
cacccaggcgtgatttcaaagtcga

SEQ ID NO: 2136497 - DNA, 25 bp, Homo sapien
tcacatcggccgtaagtgacagaat

SEQ ID NO: 2136498 - DNA, 25 bp, Homo sapien
cactgataagccagaggtcttttcc

SEQ ID NO: 2136499 - DNA, 25 bp, Homo sapien
taattgaatagacacgatggcactg

SEQ ID NO: 2136500 - DNA, 25 bp, Homo sapien
aacatgggctcaggggggtgggcga

SEQ ID NO: 2136501 - DNA, 25 bp, Homo sapien
ttctaaacatgggctcaggggggtg

SEQ ID NO: 2136502 - DNA, 25 bp, Homo sapien
taaacatgggctcaggggggtgggc

SEQ ID NO: 2136503 - DNA, 25 bp, Homo sapien
tctaaacatgggctcaggggggtgg

SEQ ID NO: 2136504 - DNA, 25 bp, Homo sapien
gagaagctgcaggattatgaaagcc

SEQ ID NO: 2136505 - DNA, 25 bp, Homo sapien
gcatgtcatacacttgcctgctcat

SEQ ID NO: 2136506 - DNA, 25 bp, Homo sapien
gggcttagttgtcccagatctttcc

SEQ ID NO: 2136507 - DNA, 25 bp, Homo sapien
caggattatgaaagcccagcatgtc

SEQ ID NO: 2136508 - DNA, 25 bp, Homo sapien
agagcctcctgaaactcactcagtg

SEQ ID NO: 2136509 - DNA, 25 bp, Homo sapien
ctcagtgcaatacaaaggagggatc

SEQ ID NO: 2136510 - DNA, 25 bp, Homo sapien
ggtggttgtcagtttctggcttttc

SEQ ID NO: 2136511 - DNA, 25 bp, Homo sapien
tcctgaaactcactcagtgcaatac

SEQ ID NO: 2136512 - DNA, 25 bp, Homo sapien
ctggaagtaggtcaggcttgtttga

SEQ ID NO: 2136513 - DNA, 25 bp, Homo sapien
tcaggcttgtttgagtgaagtcagc

SEQ ID NO: 2136514 - DNA, 25 bp, Homo sapien
aagtaggtcaggcttgtttgagtga

SEQ ID NO: 2136515 - DNA, 25 bp, Homo sapien
gtcaggcttgtttgagtgaagtcag

SEQ ID NO: 2136516 - DNA, 25 bp, Homo sapien
ttgagaacaaggcaactcttttctt

SEQ ID NO: 2136517 - DNA, 25 bp, Homo sapien
tgcaaattcatcaagtgtctgccca

SEQ ID NO: 2136518 - DNA, 25 bp, Homo sapien
ctttcctttcgagtaaagttgagca

SEQ ID NO: 2136519 - DNA, 25 bp, Homo sapien
cacaaaagcgtcctgtagtttctgg

SEQ ID NO: 2136520 - DNA, 25 bp, Homo sapien
tagtggacatttcccttgatggtac

SEQ ID NO: 2136521 - DNA, 25 bp, Homo sapien
ttagtggacatttcccttgatggta

SEQ ID NO: 2136522 - DNA, 25 bp, Homo sapien
gaaggcgtcagggttgcgaggcggg

SEQ ID NO: 2136523 - DNA, 25 bp, Homo sapien
gggctggcgcttcgcgtctgcaccg

SEQ ID NO: 2136524 - DNA, 25 bp, Homo sapien
cagggggccgccttctgcgctcgat

SEQ ID NO: 2136525 - DNA, 25 bp, Homo sapien
gagcgagtccgcgcctttgtcttcc

SEQ ID NO: 2136526 - DNA, 25 bp, Homo sapien
cagagtaataatttttcaaaagcca

SEQ ID NO: 2136527 - DNA, 25 bp, Homo sapien
agagtaataatttttcaaaagccat

SEQ ID NO: 2136528 - DNA, 25 bp, Homo sapien
ggccaggtgatagaagcccctagaa

SEQ ID NO: 2136529 - DNA, 25 bp, Homo sapien
gccttcatgtatatgggtcccgcca

SEQ ID NO: 2136530 - DNA, 25 bp, Homo sapien
ccttctgtgacggaagcaatgcgga

SEQ ID NO: 2136531 - DNA, 25 bp, Homo sapien
gcaatgcggacctcggtttcctgga

SEQ ID NO: 2136532 - DNA, 25 bp, Homo sapien
tcttccccatcacaagcttgagagt

SEQ ID NO: 2136533 - DNA, 25 bp, Homo sapien
tccccatcacaagcttgagagtttt

SEQ ID NO: 2136534 - DNA, 25 bp, Homo sapien
ttccccatcacaagcttgagagttt

SEQ ID NO: 2136535 - DNA, 25 bp, Homo sapien
cccatcacaagcttgagagttttta

SEQ ID NO: 2136536 - DNA, 25 bp, Homo sapien
cagggcctgtccaagggagtaagca

SEQ ID NO: 2136537 - DNA, 25 bp, Homo sapien
agggagtaagcaggtgcttgccttc

SEQ ID NO: 2136538 - DNA, 25 bp, Homo sapien
ctcagggcctgtccaagggagtaag

SEQ ID NO: 2136539 - DNA, 25 bp, Homo sapien
ggagtaagcaggtgcttgccttctg

SEQ ID NO: 2136540 - DNA, 25 bp, Homo sapien
tccagtgctcaggatcccccttaac

SEQ ID NO: 2136541 - DNA, 25 bp, Homo sapien
ctgaaagggaagagctccagtgctc

SEQ ID NO: 2136542 - DNA, 25 bp, Homo sapien
gaaagggaagagctccagtgctcag

SEQ ID NO: 2136543 - DNA, 25 bp, Homo sapien
gctccagtgctcaggatccccctta

SEQ ID NO: 2136544 - DNA, 25 bp, Homo sapien
cttctttcaacacaccgtagacaga

SEQ ID NO: 2136545 - DNA, 25 bp, Homo sapien
caacacaccgtagacagaaaagtag

SEQ ID NO: 2136546 - DNA, 25 bp, Homo sapien
tttcaacacaccgtagacagaaaag

SEQ ID NO: 2136547 - DNA, 25 bp, Homo sapien
acacaccgtagacagaaaagtagag

SEQ ID NO: 2136548 - DNA, 25 bp, Homo sapien
catgttcatcatgaaggttctcctt

SEQ ID NO: 2136549 - DNA, 25 bp, Homo sapien
catcatgaaggttctcctttccaaa

SEQ ID NO: 2136550 - DNA, 25 bp, Homo sapien
atcatgttcatcatgaaggttctcc

SEQ ID NO: 2136551 - DNA, 25 bp, Homo sapien
gttcatcatgaaggttctcctttcc

SEQ ID NO: 2136552 - DNA, 25 bp, Homo sapien
tatttggggatcctcgtggacatcc

SEQ ID NO: 2136553 - DNA, 25 bp, Homo sapien
tcttatttggggatcctcgtggaca

SEQ ID NO: 2136554 - DNA, 25 bp, Homo sapien
ttatttggggatcctcgtggacatc

SEQ ID NO: 2136555 - DNA, 25 bp, Homo sapien
tttcttatttggggatcctcgtgga

SEQ ID NO: 2136556 - DNA, 25 bp, Homo sapien
tggcatttcacactcctactatcgg

SEQ ID NO: 2136557 - DNA, 25 bp, Homo sapien
tcttggtattcactatggcatttca

SEQ ID NO: 2136558 - DNA, 25 bp, Homo sapien
cctactatcgggttgtaaggtagag

SEQ ID NO: 2136559 - DNA, 25 bp, Homo sapien
tattcactatggcatttcacactcc

SEQ ID NO: 2136560 - DNA, 25 bp, Homo sapien
acattttttgcattttctcaggaca

SEQ ID NO: 2136561 - DNA, 25 bp, Homo sapien
ttttgcattttctcaggacactcac

SEQ ID NO: 2136562 - DNA, 25 bp, Homo sapien
attttttgcattttctcaggacact

SEQ ID NO: 2136563 - DNA, 25 bp, Homo sapien
ctttcctgcacattttttgcatttt

SEQ ID NO: 2136564 - DNA, 25 bp, Homo sapien
ccaactcttatcatactttatccca

SEQ ID NO: 2136565 - DNA, 25 bp, Homo sapien
tatccaactcttatcatactttatc

SEQ ID NO: 2136566 - DNA, 25 bp, Homo sapien
ttcactatccaactcttatcatact

SEQ ID NO: 2136567 - DNA, 25 bp, Homo sapien
cactatccaactcttatcatacttt

SEQ ID NO: 2136568 - DNA, 25 bp, Homo sapien
caggcagcactagcatcctgaataa

SEQ ID NO: 2136569 - DNA, 25 bp, Homo sapien
aatgggcccgatttttgttgtagtg

SEQ ID NO: 2136570 - DNA, 25 bp, Homo sapien
tcatcatgaatcttgcagttgactt

SEQ ID NO: 2136571 - DNA, 25 bp, Homo sapien
catgaatcttgcagttgactttctt

SEQ ID NO: 2136572 - DNA, 25 bp, Homo sapien
aagacaatgactagaccctggcctg

SEQ ID NO: 2136573 - DNA, 25 bp, Homo sapien
ccagagactgtatatagggaatgtt

SEQ ID NO: 2136574 - DNA, 25 bp, Homo sapien
tgaggcaagttgagcacgaggacct

SEQ ID NO: 2136575 - DNA, 25 bp, Homo sapien
gcacgaggacctcaatctcaaaaaa

SEQ ID NO: 2136576 - DNA, 25 bp, Homo sapien
ttctggatagactggggtttagtag

SEQ ID NO: 2136577 - DNA, 25 bp, Homo sapien
gatagactggggtttagtagaaaga

SEQ ID NO: 2136578 - DNA, 25 bp, Homo sapien
tagtagaaagattgacaaaaacaaa

SEQ ID NO: 2136579 - DNA, 25 bp, Homo sapien
tagaaagattgacaaaaacaaatac

SEQ ID NO: 2136580 - DNA, 25 bp, Homo sapien
ctctggagatcaagagcttgctggg

SEQ ID NO: 2136581 - DNA, 25 bp, Homo sapien
gatcaagagcttgctgggagacatc

SEQ ID NO: 2136582 - DNA, 25 bp, Homo sapien
gagatcaagagcttgctgggagaca

SEQ ID NO: 2136583 - DNA, 25 bp, Homo sapien
tcaagagcttgctgggagacatcat

SEQ ID NO: 2136584 - DNA, 25 bp, Homo sapien
caaagttgccgtccatataagtctc

SEQ ID NO: 2136585 - DNA, 25 bp, Homo sapien
gttgccgtccatataagtctccttt

SEQ ID NO: 2136586 - DNA, 25 bp, Homo sapien
cctcccaaagttgccgtccatataa

SEQ ID NO: 2136587 - DNA, 25 bp, Homo sapien
caaccctcccaaagttgccgtccat

SEQ ID NO: 2136588 - DNA, 25 bp, Homo sapien
gagagaagggcatcagaaggctgta

SEQ ID NO: 2136589 - DNA, 25 bp, Homo sapien
gccgagagaagggcatcagaaggct

SEQ ID NO: 2136590 - DNA, 25 bp, Homo sapien
ccgagagaagggcatcagaaggctg

SEQ ID NO: 2136591 - DNA, 25 bp, Homo sapien
cgagagaagggcatcagaaggctgt

SEQ ID NO: 2136592 - DNA, 25 bp, Homo sapien
caggattatatcaatatgatgtttc

SEQ ID NO: 2136593 - DNA, 25 bp, Homo sapien
ttatatcaatatgatgtttcaccaa

SEQ ID NO: 2136594 - DNA, 25 bp, Homo sapien
cctttcaatgatcttcagagtggca

SEQ ID NO: 2136595 - DNA, 25 bp, Homo sapien
cagagtggcagccatgtagtttctt

SEQ ID NO: 2136596 - DNA, 25 bp, Homo sapien
tataatgtcaggcaggccatccagg

SEQ ID NO: 2136597 - DNA, 25 bp, Homo sapien
ataatgtcaggcaggccatccaggt

SEQ ID NO: 2136598 - DNA, 25 bp, Homo sapien
ctataatgtcaggcaggccatccag

SEQ ID NO: 2136599 - DNA, 25 bp, Homo sapien
ttcagggtcttgactttgggagcct

SEQ ID NO: 2136600 - DNA, 25 bp, Homo sapien
cagggtcttgactttgggagccttc

SEQ ID NO: 2136601 - DNA, 25 bp, Homo sapien
agagattcagggtcttgactttggg

SEQ ID NO: 2136602 - DNA, 25 bp, Homo sapien
tttggagagattcagggtcttgact

SEQ ID NO: 2136603 - DNA, 25 bp, Homo sapien
ccattattctgatatgtactgccat

SEQ ID NO: 2136604 - DNA, 25 bp, Homo sapien
cattattctgatatgtactgccatc

SEQ ID NO: 2136605 - DNA, 25 bp, Homo sapien
tctgatatgtactgccatccaccct

SEQ ID NO: 2136606 - DNA, 25 bp, Homo sapien
tattctgatatgtactgccatccac

SEQ ID NO: 2136607 - DNA, 25 bp, Homo sapien
ccagccatagctcttcgagcttcaa

SEQ ID NO: 2136608 - DNA, 25 bp, Homo sapien
agctcttcgagcttcaaccctttca

SEQ ID NO: 2136609 - DNA, 25 bp, Homo sapien
tacataggcggactggtcagagaag

SEQ ID NO: 2136610 - DNA, 25 bp, Homo sapien
tgcacaatgagttcccttccagcca

SEQ ID NO: 2136611 - DNA, 25 bp, Homo sapien
ggcaggaaggcctgtctcagcatga

SEQ ID NO: 2136612 - DNA, 25 bp, Homo sapien
aggagtgaagagtcaggccccagct

SEQ ID NO: 2136613 - DNA, 25 bp, Homo sapien
gaggagtgaagagtcaggccccagc

SEQ ID NO: 2136614 - DNA, 25 bp, Homo sapien
caacttggggaaatattcccggatg

SEQ ID NO: 2136615 - DNA, 25 bp, Homo sapien
gcataacaacttggggaaatattcc

SEQ ID NO: 2136616 - DNA, 25 bp, Homo sapien
caggcataacaacttggggaaatat

SEQ ID NO: 2136617 - DNA, 25 bp, Homo sapien
acttggggaaatattcccggatgat

SEQ ID NO: 2136618 - DNA, 25 bp, Homo sapien
ggaggtagagctggatgagtaagga

SEQ ID NO: 2136619 - DNA, 25 bp, Homo sapien
gggaggtagagctggatgagtaagg

SEQ ID NO: 2136620 - DNA, 25 bp, Homo sapien
gaggtagagctggatgagtaaggag

SEQ ID NO: 2136621 - DNA, 25 bp, Homo sapien
aggaaagaggcagtcagcagtgcat

SEQ ID NO: 2136622 - DNA, 25 bp, Homo sapien
gaaagaggcagtcagcagtgcatac

SEQ ID NO: 2136623 - DNA, 25 bp, Homo sapien
ggaaagaggcagtcagcagtgcata

SEQ ID NO: 2136624 - DNA, 25 bp, Homo sapien
gccaattataattggagatgctaac

SEQ ID NO: 2136625 - DNA, 25 bp, Homo sapien
tctcaggggcttcaatgccaattat

SEQ ID NO: 2136626 - DNA, 25 bp, Homo sapien
aggttttattatctcaggggcttca

SEQ ID NO: 2136627 - DNA, 25 bp, Homo sapien
ttggagatgctaactcctggccatc

SEQ ID NO: 2136628 - DNA, 25 bp, Homo sapien
agactctttatggtctcagatcctt

SEQ ID NO: 2136629 - DNA, 25 bp, Homo sapien
actctttatggtctcagatccttta

SEQ ID NO: 2136630 - DNA, 25 bp, Homo sapien
gactctttatggtctcagatccttt

SEQ ID NO: 2136631 - DNA, 25 bp, Homo sapien
cccgttcgatcttcagagtcataga

SEQ ID NO: 2136632 - DNA, 25 bp, Homo sapien
cctcagggttgagggtaatggtcag

SEQ ID NO: 2136633 - DNA, 25 bp, Homo sapien
taaacactgaggagacccgttcgat

SEQ ID NO: 2136634 - DNA, 25 bp, Homo sapien
ttgtcatggtaaacactgaggagac

SEQ ID NO: 2136635 - DNA, 25 bp, Homo sapien
cttgaagtatttttccaagctgctc

SEQ ID NO: 2136636 - DNA, 25 bp, Homo sapien
attcctgctatccttgaagtatttt

SEQ ID NO: 2136637 - DNA, 25 bp, Homo sapien
ccttgatattctttatattcctgct

SEQ ID NO: 2136638 - DNA, 25 bp, Homo sapien
aagggtccttgatattctttatatt

SEQ ID NO: 2136639 - DNA, 25 bp, Homo sapien
tgtaccctattattgactctccacc

SEQ ID NO: 2136640 - DNA, 25 bp, Homo sapien
ccctgtaccctgtaccctattattg

SEQ ID NO: 2136641 - DNA, 25 bp, Homo sapien
ggctgccacaccctgtaccctgtac

SEQ ID NO: 2136642 - DNA, 25 bp, Homo sapien
tgatcttcacccatcacacactcac

SEQ ID NO: 2136643 - DNA, 25 bp, Homo sapien
taccacataggagttaaggtcatgc

SEQ ID NO: 2136644 - DNA, 25 bp, Homo sapien
tgcttcagcagctgaatcctcaggc

SEQ ID NO: 2136645 - DNA, 25 bp, Homo sapien
tggatgcacaagtctaccacatagg

SEQ ID NO: 2136646 - DNA, 25 bp, Homo sapien
tctgggcaatacactgagggagtcc

SEQ ID NO: 2136647 - DNA, 25 bp, Homo sapien
ctctgggcctgactgagggaggaag

SEQ ID NO: 2136648 - DNA, 25 bp, Homo sapien
gggcctgactgagggaggaagcagg

SEQ ID NO: 2136649 - DNA, 25 bp, Homo sapien
cagctctctgggcctgactgaggga

SEQ ID NO: 2136650 - DNA, 25 bp, Homo sapien
gactgagggaggaagcaggtgctca

SEQ ID NO: 2136651 - DNA, 25 bp, Homo sapien
atgatcctcctacccacctacctac

SEQ ID NO: 2136652 - DNA, 25 bp, Homo sapien
catgatcctcctacccacctaccta

SEQ ID NO: 2136653 - DNA, 25 bp, Homo sapien
aagaaaaaactagagccttcatgat

SEQ ID NO: 2136654 - DNA, 25 bp, Homo sapien
tgatcctcctacccacctacctact

SEQ ID NO: 2136655 - DNA, 25 bp, Homo sapien
tccattgacagaaaagacgagcatc

SEQ ID NO: 2136656 - DNA, 25 bp, Homo sapien
gctgtgtccctaacgcctgagtggt

SEQ ID NO: 2136657 - DNA, 25 bp, Homo sapien
gttcttggagtaagcccagcctggg

SEQ ID NO: 2136658 - DNA, 25 bp, Homo sapien
ggagataatcttttggcaccctgaa

SEQ ID NO: 2136659 - DNA, 25 bp, Homo sapien
caaaaataggaacaagcggcaccca

SEQ ID NO: 2136660 - DNA, 25 bp, Homo sapien
gatgaaggttcgggtgaaggcaaga

SEQ ID NO: 2136661 - DNA, 25 bp, Homo sapien
ttggaattgccgacagaagtcaaga

SEQ ID NO: 2136662 - DNA, 25 bp, Homo sapien
caagatgaaggttcgggtgaaggca

SEQ ID NO: 2136663 - DNA, 25 bp, Homo sapien
tggaattgccgacagaagtcaagat

SEQ ID NO: 2136664 - DNA, 25 bp, Homo sapien
tccacctttggagagattgcctacc

SEQ ID NO: 2136665 - DNA, 25 bp, Homo sapien
cagttggctttctatggtactgaga

SEQ ID NO: 2136666 - DNA, 25 bp, Homo sapien
tactgagaacatcccgaggactgca

SEQ ID NO: 2136667 - DNA, 25 bp, Homo sapien
taggctttacccctgctgcagagtc

SEQ ID NO: 2136668 - DNA, 25 bp, Homo sapien
ctgaaggaaagacaagctctcagac

SEQ ID NO: 2136669 - DNA, 25 bp, Homo sapien
gaaggaaagacaagctctcagacaa

SEQ ID NO: 2136670 - DNA, 25 bp, Homo sapien
tgaaggaaagacaagctctcagaca

SEQ ID NO: 2136671 - DNA, 25 bp, Homo sapien
attcctcacaatcagcttgtcattc

SEQ ID NO: 2136672 - DNA, 25 bp, Homo sapien
cattcctcacaatcagcttgtcatt

SEQ ID NO: 2136673 - DNA, 25 bp, Homo sapien
tgggtggagacagtctccaccattt

SEQ ID NO: 2136674 - DNA, 25 bp, Homo sapien
gactgggtggagacagtctccacca

SEQ ID NO: 2136675 - DNA, 25 bp, Homo sapien
ctgggtggagacagtctccaccatt

SEQ ID NO: 2136676 - DNA, 25 bp, Homo sapien
actgggtggagacagtctccaccat

SEQ ID NO: 2136677 - DNA, 25 bp, Homo sapien
aaacctggtcagctttggtgtagtt

SEQ ID NO: 2136678 - DNA, 25 bp, Homo sapien
cctccactgagatcttgccttcggt

SEQ ID NO: 2136679 - DNA, 25 bp, Homo sapien
ggcctccactgagatcttgccttcg

SEQ ID NO: 2136680 - DNA, 25 bp, Homo sapien
gcctccactgagatcttgccttcgg

SEQ ID NO: 2136681 - DNA, 25 bp, Homo sapien
aggcctccactgagatcttgccttc

SEQ ID NO: 2136682 - DNA, 25 bp, Homo sapien
cacggccttaggctggtaaaaagag

SEQ ID NO: 2136683 - DNA, 25 bp, Homo sapien
gaacaactggttcttcaagtggtta

SEQ ID NO: 2136684 - DNA, 25 bp, Homo sapien
gtggttatgttacccggcctgcaag

SEQ ID NO: 2136685 - DNA, 25 bp, Homo sapien
taactttggctttccggtgagccag

SEQ ID NO: 2136686 - DNA, 25 bp, Homo sapien
aacatgcccgcttctgtttggctcc

SEQ ID NO: 2136687 - DNA, 25 bp, Homo sapien
taacatgcccgcttctgtttggctc

SEQ ID NO: 2136688 - DNA, 25 bp, Homo sapien
ggtaacatgcccgcttctgtttggc

SEQ ID NO: 2136689 - DNA, 25 bp, Homo sapien
acatgcccgcttctgtttggctcca

SEQ ID NO: 2136690 - DNA, 25 bp, Homo sapien
ggttccatgattcctgcacacaaag

SEQ ID NO: 2136691 - DNA, 25 bp, Homo sapien
gatgggttccatgattcctgcacac

SEQ ID NO: 2136692 - DNA, 25 bp, Homo sapien
tgggttccatgattcctgcacacaa

SEQ ID NO: 2136693 - DNA, 25 bp, Homo sapien
gtgatgggttccatgattcctgcac

SEQ ID NO: 2136694 - DNA, 25 bp, Homo sapien
tgagcagagatggaagcaggtcacc

SEQ ID NO: 2136695 - DNA, 25 bp, Homo sapien
cttgatgagcagagatggaagcagg

SEQ ID NO: 2136696 - DNA, 25 bp, Homo sapien
gatgagcagagatggaagcaggtca

SEQ ID NO: 2136697 - DNA, 25 bp, Homo sapien
gagcagagatggaagcaggtcaccc

SEQ ID NO: 2136698 - DNA, 25 bp, Homo sapien
agctgtggtgtcaggaaatctcttc

SEQ ID NO: 2136699 - DNA, 25 bp, Homo sapien
cttctggcctgacaggcggaagtgt

SEQ ID NO: 2136700 - DNA, 25 bp, Homo sapien
cctgacaggcggaagtgttccagtc

SEQ ID NO: 2136701 - DNA, 25 bp, Homo sapien
tctggcctgacaggcggaagtgttc

SEQ ID NO: 2136702 - DNA, 25 bp, Homo sapien
gcagacaaataccagagtgtttctg

SEQ ID NO: 2136703 - DNA, 25 bp, Homo sapien
tttgcgggagctccccccaccaagc

SEQ ID NO: 2136704 - DNA, 25 bp, Homo sapien
cagacaaataccagagtgtttctgt

SEQ ID NO: 2136705 - DNA, 25 bp, Homo sapien
cctgtggccgcttcaggtattggaa

SEQ ID NO: 2136706 - DNA, 25 bp, Homo sapien
cagggacgaattccggatataggga

SEQ ID NO: 2136707 - DNA, 25 bp, Homo sapien
gaatgcgcagggacgaattccggat

SEQ ID NO: 2136708 - DNA, 25 bp, Homo sapien
tcaggtattggaatgcgcagggacg

SEQ ID NO: 2136709 - DNA, 25 bp, Homo sapien
tatcaggctttgtttagcgccgcga

SEQ ID NO: 2136710 - DNA, 25 bp, Homo sapien
gaagcggagtgatatcaggctttgt

SEQ ID NO: 2136711 - DNA, 25 bp, Homo sapien
ttatggaagcggagtgatatcaggc

SEQ ID NO: 2136712 - DNA, 25 bp, Homo sapien
tagcgccgcgactcttttctgtcgg

SEQ ID NO: 2136713 - DNA, 25 bp, Homo sapien
gctagagcgtagtttatggggatcc

SEQ ID NO: 2136714 - DNA, 25 bp, Homo sapien
cttttcctccgcagacgaggttctt

SEQ ID NO: 2136715 - DNA, 25 bp, Homo sapien
tccgcgttacccacaacggcagtgg

SEQ ID NO: 2136716 - DNA, 25 bp, Homo sapien
agacgaggttcttccacgtccgcgt

SEQ ID NO: 2136717 - DNA, 25 bp, Homo sapien
caaactgttgtcacttttggtattc

SEQ ID NO: 2136718 - DNA, 25 bp, Homo sapien
caagacgagataaccgctttatcag

SEQ ID NO: 2136719 - DNA, 25 bp, Homo sapien
tatcagattaaagactgcgattggc

SEQ ID NO: 2136720 - DNA, 25 bp, Homo sapien
ctcctcagaacctcgcgcgtagtta

SEQ ID NO: 2136721 - DNA, 25 bp, Homo sapien
tcttatttccttgcctcgaggtgct

SEQ ID NO: 2136722 - DNA, 25 bp, Homo sapien
cagtcagacacaaggactcgaggca

SEQ ID NO: 2136723 - DNA, 25 bp, Homo sapien
ctgtgtatggggattgactcggcac

SEQ ID NO: 2136724 - DNA, 25 bp, Homo sapien
gctgtgtcatacagcagcaggaaca

SEQ ID NO: 2136725 - DNA, 25 bp, Homo sapien
tgttcacctctgatacccacatcca

SEQ ID NO: 2136726 - DNA, 25 bp, Homo sapien
ggtcgcgtatccagtgttcacctct

SEQ ID NO: 2136727 - DNA, 25 bp, Homo sapien
tcccatgaccaggtcgcgtatccag

SEQ ID NO: 2136728 - DNA, 25 bp, Homo sapien
acatccacccccaagcgatgcgcac

SEQ ID NO: 2136729 - DNA, 25 bp, Homo sapien
tctgctctattctcaaagtctgaca

SEQ ID NO: 2136730 - DNA, 25 bp, Homo sapien
aagcccctctgctctattctcaaag

SEQ ID NO: 2136731 - DNA, 25 bp, Homo sapien
ccctctgctctattctcaaagtctg

SEQ ID NO: 2136732 - DNA, 25 bp, Homo sapien
gctctattctcaaagtctgacaatt

SEQ ID NO: 2136733 - DNA, 25 bp, Homo sapien
caaaacttcacaactgacagttcca

SEQ ID NO: 2136734 - DNA, 25 bp, Homo sapien
ccattttacaaaacttcacaactga

SEQ ID NO: 2136735 - DNA, 25 bp, Homo sapien
ttccacagacctggggacagatcta

SEQ ID NO: 2136736 - DNA, 25 bp, Homo sapien
ttaacagatacagggcaattttctc

SEQ ID NO: 2136737 - DNA, 25 bp, Homo sapien
tcgaagttgcccccctgtccctgta

SEQ ID NO: 2136738 - DNA, 25 bp, Homo sapien
agtcgaagttgcccccctgtccctg

SEQ ID NO: 2136739 - DNA, 25 bp, Homo sapien
gagaatgtggaaactgatctcctgg

SEQ ID NO: 2136740 - DNA, 25 bp, Homo sapien
gaatgtccctcgttcagattagact

SEQ ID NO: 2136741 - DNA, 25 bp, Homo sapien
tcttcagtgattgccctagaatgtc

SEQ ID NO: 2136742 - DNA, 25 bp, Homo sapien
aggttcaagcgtgagagcaggacaa

SEQ ID NO: 2136743 - DNA, 25 bp, Homo sapien
aatggtgacaagccctacagcagat

SEQ ID NO: 2136744 - DNA, 25 bp, Homo sapien
caatggtgacaagccctacagcaga

SEQ ID NO: 2136745 - DNA, 25 bp, Homo sapien
ccaatggtgacaagccctacagcag

SEQ ID NO: 2136746 - DNA, 25 bp, Homo sapien
tctggagtaactttctcctccttac

SEQ ID NO: 2136747 - DNA, 25 bp, Homo sapien
ctgcactgatctggagtaactttct

SEQ ID NO: 2136748 - DNA, 25 bp, Homo sapien
tgatctggagtaactttctcctcct

SEQ ID NO: 2136749 - DNA, 25 bp, Homo sapien
gcactgatctggagtaactttctcc

SEQ ID NO: 2136750 - DNA, 25 bp, Homo sapien
aggtagggaaggatggctgtgcatg

SEQ ID NO: 2136751 - DNA, 25 bp, Homo sapien
gggaaggatggctgtgcatgggccc

SEQ ID NO: 2136752 - DNA, 25 bp, Homo sapien
ctcagccttgactgaagttttgtcc

SEQ ID NO: 2136753 - DNA, 25 bp, Homo sapien
cacacaaagtccagtagtcactctg

SEQ ID NO: 2136754 - DNA, 25 bp, Homo sapien
tgtcccggttggtgttttcacacaa

SEQ ID NO: 2136755 - DNA, 25 bp, Homo sapien
ccgtctcagccttgactgaagtttt

SEQ ID NO: 2136756 - DNA, 25 bp, Homo sapien
cagtggcaggaccactgattccatc

SEQ ID NO: 2136757 - DNA, 25 bp, Homo sapien
cctcagcctttcctctagcccttgc

SEQ ID NO: 2136758 - DNA, 25 bp, Homo sapien
ccactgattccatcttgcaggccag

SEQ ID NO: 2136759 - DNA, 25 bp, Homo sapien
attccatcttgcaggccagcctcag

SEQ ID NO: 2136760 - DNA, 25 bp, Homo sapien
tgaccctagacataggcatggcctt

SEQ ID NO: 2136761 - DNA, 25 bp, Homo sapien
tagcctccctgtaggtcactgtatg

SEQ ID NO: 2136762 - DNA, 25 bp, Homo sapien
gacttggttacagtactgaccctag

SEQ ID NO: 2136763 - DNA, 25 bp, Homo sapien
ggtctggacccagtattggccttat

SEQ ID NO: 2136764 - DNA, 25 bp, Homo sapien
tggtcaaaggtcgaatccccagagg

SEQ ID NO: 2136765 - DNA, 25 bp, Homo sapien
tctggaggcaaggattgctcccctc

SEQ ID NO: 2136766 - DNA, 25 bp, Homo sapien
tcaactggaactaggacaatatacc

SEQ ID NO: 2136767 - DNA, 25 bp, Homo sapien
tccccagaggagtttcaatcaaggt

SEQ ID NO: 2136768 - DNA, 25 bp, Homo sapien
taagcaggactgatgcccattatca

SEQ ID NO: 2136769 - DNA, 25 bp, Homo sapien
tcaagtgccctagtaatttcagtcc

SEQ ID NO: 2136770 - DNA, 25 bp, Homo sapien
gagctgtcatccaccatacttaaag

SEQ ID NO: 2136771 - DNA, 25 bp, Homo sapien
cattcttgttaaagggtgcaaccaa

SEQ ID NO: 2136772 - DNA, 25 bp, Homo sapien
agtattaatcgtatgactttatctc

SEQ ID NO: 2136773 - DNA, 25 bp, Homo sapien
ttaatcgtatgactttatctctcac

SEQ ID NO: 2136774 - DNA, 25 bp, Homo sapien
ttttagtattaatcgtatgacttta

SEQ ID NO: 2136775 - DNA, 25 bp, Homo sapien
tattaatcgtatgactttatctctc

SEQ ID NO: 2136776 - DNA, 25 bp, Homo sapien
cataaaattgcctccctcaatcaac

SEQ ID NO: 2136777 - DNA, 25 bp, Homo sapien
tataattacaatatgcattggtttc

SEQ ID NO: 2136778 - DNA, 25 bp, Homo sapien
tatccataaaattgcctccctcaat

SEQ ID NO: 2136779 - DNA, 25 bp, Homo sapien
ggtttcatattgcaactccaaaaaa

SEQ ID NO: 2136780 - DNA, 25 bp, Homo sapien
tatcaggtcacgttgcagaaatacc

SEQ ID NO: 2136781 - DNA, 25 bp, Homo sapien
tcaccagttttagcatgcaacttta

SEQ ID NO: 2136782 - DNA, 25 bp, Homo sapien
tagcttactcaggatgaatagattc

SEQ ID NO: 2136783 - DNA, 25 bp, Homo sapien
tcaatataaagcacagaagtatagc

SEQ ID NO: 2136784 - DNA, 25 bp, Homo sapien
tgtgcagctgtccatggcttactga

SEQ ID NO: 2136785 - DNA, 25 bp, Homo sapien
gatagggcttcattcctcatttgaa

SEQ ID NO: 2136786 - DNA, 25 bp, Homo sapien
aaagctgagcacaagttccggaact

SEQ ID NO: 2136787 - DNA, 25 bp, Homo sapien
ggttaaaaagcttcaaggcatcctg

SEQ ID NO: 2136788 - DNA, 25 bp, Homo sapien
tccaaagggtctggtccaattgtat

SEQ ID NO: 2136789 - DNA, 25 bp, Homo sapien
ccacagggcatttgagacacagaat

SEQ ID NO: 2136790 - DNA, 25 bp, Homo sapien
catcaactgattaagtgtgtgctcc

SEQ ID NO: 2136791 - DNA, 25 bp, Homo sapien
caacactgagagtagtacccacagc

SEQ ID NO: 2136792 - DNA, 25 bp, Homo sapien
gctcaacatcataagactttcggga

SEQ ID NO: 2136793 - DNA, 25 bp, Homo sapien
caatctaggagatgacttcgcatcc

SEQ ID NO: 2136794 - DNA, 25 bp, Homo sapien
cacaattcccatccaaggagagacc

SEQ ID NO: 2136795 - DNA, 25 bp, Homo sapien
gatgacacctcatgaacaatctagg

SEQ ID NO: 2136796 - DNA, 25 bp, Homo sapien
tcactagacaattccaacaaacata

SEQ ID NO: 2136797 - DNA, 25 bp, Homo sapien
ttctaactaattctacggagccagc

SEQ ID NO: 2136798 - DNA, 25 bp, Homo sapien
gaagagtcaacaacaatccttctca

SEQ ID NO: 2136799 - DNA, 25 bp, Homo sapien
caggaccagacggtttcactagaca

SEQ ID NO: 2136800 - DNA, 25 bp, Homo sapien
gaagctaggaatcaacgccagaaag

SEQ ID NO: 2136801 - DNA, 25 bp, Homo sapien
cagtggtatacatcaactagaccta

SEQ ID NO: 2136802 - DNA, 25 bp, Homo sapien
ctaacagacatatatagaactctgc

SEQ ID NO: 2136803 - DNA, 25 bp, Homo sapien
gtctcaatgaactttgtaagactaa

SEQ ID NO: 2136804 - DNA, 25 bp, Homo sapien
cagcagacttttgcttagacatcca

SEQ ID NO: 2136805 - DNA, 25 bp, Homo sapien
ctggagttgaagtagctaggacaca

SEQ ID NO: 2136806 - DNA, 25 bp, Homo sapien
gaaacaacaaatgcggaaaacttga

SEQ ID NO: 2136807 - DNA, 25 bp, Homo sapien
tagattgcaattgtgtgaggactga

SEQ ID NO: 2136808 - DNA, 25 bp, Homo sapien
gccacattcgtagacagaaagcata

SEQ ID NO: 2136809 - DNA, 25 bp, Homo sapien
gactatcatgctcaagaacatcgag

SEQ ID NO: 2136810 - DNA, 25 bp, Homo sapien
ctttgagaacatcaatctgtgcgcc

SEQ ID NO: 2136811 - DNA, 25 bp, Homo sapien
aatctgtgcgccatccactctgagt

SEQ ID NO: 2136812 - DNA, 25 bp, Homo sapien
ggtgagaagattcgaaatgtactct

SEQ ID NO: 2136813 - DNA, 25 bp, Homo sapien
tcctcctgtcaatgtgaaactttgt

SEQ ID NO: 2136814 - DNA, 25 bp, Homo sapien
ctatatataagcgagatcatggagt

SEQ ID NO: 2136815 - DNA, 25 bp, Homo sapien
gtatgcatgatggaataaatttggc

SEQ ID NO: 2136816 - DNA, 25 bp, Homo sapien
tatgaggcaacaggaagtgtcattc

SEQ ID NO: 2136817 - DNA, 25 bp, Homo sapien
gatatgaggcaacaggaagtgtcat

SEQ ID NO: 2136818 - DNA, 25 bp, Homo sapien
tgaggcaacaggaagtgtcattcat

SEQ ID NO: 2136819 - DNA, 25 bp, Homo sapien
gaggcaacaggaagtgtcattcatt

SEQ ID NO: 2136820 - DNA, 25 bp, Homo sapien
gggatcccatgcttttgtgacttca

SEQ ID NO: 2136821 - DNA, 25 bp, Homo sapien
gaaagtcgtagatggagagaatcac

SEQ ID NO: 2136822 - DNA, 25 bp, Homo sapien
gaaccagtgctagggtaggaaaatc

SEQ ID NO: 2136823 - DNA, 25 bp, Homo sapien
gaaggctaggtgtgtacaaatctga

SEQ ID NO: 2136824 - DNA, 25 bp, Homo sapien
tgttgtccggttctgcatgaagctt

SEQ ID NO: 2136825 - DNA, 25 bp, Homo sapien
tttctgttgtccggttctgcatgaa

SEQ ID NO: 2136826 - DNA, 25 bp, Homo sapien
ctgttgtccggttctgcatgaagct

SEQ ID NO: 2136827 - DNA, 25 bp, Homo sapien
tctgttgtccggttctgcatgaagc

SEQ ID NO: 2136828 - DNA, 25 bp, Homo sapien
tgtgctgtaacacaaactgaatggc

SEQ ID NO: 2136829 - DNA, 25 bp, Homo sapien
tagtggtggcagatgtacaacagtg

SEQ ID NO: 2136830 - DNA, 25 bp, Homo sapien
ttagaagttaccaagtgctccaagg

SEQ ID NO: 2136831 - DNA, 25 bp, Homo sapien
ctctgaaggcatgcgggaaggatat

SEQ ID NO: 2136832 - DNA, 25 bp, Homo sapien
aactggaaccctactggaaatgtat

SEQ ID NO: 2136833 - DNA, 25 bp, Homo sapien
tgctttacacctcctatgatcagta

SEQ ID NO: 2136834 - DNA, 25 bp, Homo sapien
gatcttgccattcttcacctagata

SEQ ID NO: 2136835 - DNA, 25 bp, Homo sapien
tgccattcttcacctagataataca

SEQ ID NO: 2136836 - DNA, 25 bp, Homo sapien
actggggtctgctcgggggtgcggg

SEQ ID NO: 2136837 - DNA, 25 bp, Homo sapien
cagtgatagactggaaatgaagaac

SEQ ID NO: 2136838 - DNA, 25 bp, Homo sapien
cactggggtctgctcgggggtgcgg

SEQ ID NO: 2136839 - DNA, 25 bp, Homo sapien
cagggactccatgtcagattgaagc

SEQ ID NO: 2136840 - DNA, 25 bp, Homo sapien
gattattctgggttatcttggccaa

SEQ ID NO: 2136841 - DNA, 25 bp, Homo sapien
aagaaatacaggctgtctccagaac

SEQ ID NO: 2136842 - DNA, 25 bp, Homo sapien
gattgaagcagcatagaaagtctac

SEQ ID NO: 2136843 - DNA, 25 bp, Homo sapien
aggatgcggcaagaaccgctctccg

SEQ ID NO: 2136844 - DNA, 25 bp, Homo sapien
agttggattcccaccgctttcccag

SEQ ID NO: 2136845 - DNA, 25 bp, Homo sapien
tggctgctcttcagttggattccca

SEQ ID NO: 2136846 - DNA, 25 bp, Homo sapien
gatccgaatggcaaagacgagtccc

SEQ ID NO: 2136847 - DNA, 25 bp, Homo sapien
ctctctctagcgcccggctccgaac

SEQ ID NO: 2136848 - DNA, 25 bp, Homo sapien
tctctagcgcccggctccgaacgga

SEQ ID NO: 2136849 - DNA, 25 bp, Homo sapien
tagcgcccggctccgaacggatcgt

SEQ ID NO: 2136850 - DNA, 25 bp, Homo sapien
tctagcgcccggctccgaacggatc

SEQ ID NO: 2136851 - DNA, 25 bp, Homo sapien
tcagcgcggttctcctccagacgat

SEQ ID NO: 2136852 - DNA, 25 bp, Homo sapien
aaagctggctgggaagcggtcagcg

SEQ ID NO: 2136853 - DNA, 25 bp, Homo sapien
ctccagacgatctgacggtgcctct

SEQ ID NO: 2136854 - DNA, 25 bp, Homo sapien
ctgggaagcggtcagcgcggttctc

SEQ ID NO: 2136855 - DNA, 25 bp, Homo sapien
acagactttgacatcaacctggagt

SEQ ID NO: 2136856 - DNA, 25 bp, Homo sapien
cagacagactttgacatcaacctgg

SEQ ID NO: 2136857 - DNA, 25 bp, Homo sapien
cgcgcagacagactttgacatcaac

SEQ ID NO: 2136858 - DNA, 25 bp, Homo sapien
gcgcagacagactttgacatcaacc

SEQ ID NO: 2136859 - DNA, 25 bp, Homo sapien
ttcaagcctctcctctacagatgct

SEQ ID NO: 2136860 - DNA, 25 bp, Homo sapien
tatttcaagcctctcctctacagat

SEQ ID NO: 2136861 - DNA, 25 bp, Homo sapien
tttcaagcctctcctctacagatgc

SEQ ID NO: 2136862 - DNA, 25 bp, Homo sapien
aagcctctcctctacagatgctcac

SEQ ID NO: 2136863 - DNA, 25 bp, Homo sapien
cagtaaagcccttggtagagagacc

SEQ ID NO: 2136864 - DNA, 25 bp, Homo sapien
gaagcgcctggaacaccattagaga

SEQ ID NO: 2136865 - DNA, 25 bp, Homo sapien
tctgaggattcaccactaggtgcgc

SEQ ID NO: 2136866 - DNA, 25 bp, Homo sapien
tagagagaccaacgctaaggataag

SEQ ID NO: 2136867 - DNA, 25 bp, Homo sapien
ctccagaggtgtgagccagtctcct

SEQ ID NO: 2136868 - DNA, 25 bp, Homo sapien
cagaggtgtgagccagtctcctcct

SEQ ID NO: 2136869 - DNA, 25 bp, Homo sapien
ccttgcctttcttgcagaactggcc

SEQ ID NO: 2136870 - DNA, 25 bp, Homo sapien
agaactggccagccttaaagcaggc

SEQ ID NO: 2136871 - DNA, 25 bp, Homo sapien
cagagtagaagtgggtctgcaccca

SEQ ID NO: 2136872 - DNA, 25 bp, Homo sapien
actgtgcaaatccagcagagtagaa

SEQ ID NO: 2136873 - DNA, 25 bp, Homo sapien
tggtagataggcaagcactctggct

SEQ ID NO: 2136874 - DNA, 25 bp, Homo sapien
tggctcctgtgacaaatatctgtct

SEQ ID NO: 2136875 - DNA, 25 bp, Homo sapien
ttcacttatgtggtgcagtttcccc

SEQ ID NO: 2136876 - DNA, 25 bp, Homo sapien
ttcaagtagtgtcaagccccacagc

SEQ ID NO: 2136877 - DNA, 25 bp, Homo sapien
tcttgttcaagtagtgtcaagcccc

SEQ ID NO: 2136878 - DNA, 25 bp, Homo sapien
cttcacttatgtggtgcagtttccc

SEQ ID NO: 2136879 - DNA, 25 bp, Homo sapien
caaacacagtctcagtcagtaattc

SEQ ID NO: 2136880 - DNA, 25 bp, Homo sapien
gaaagtccagtactatactcctccc

SEQ ID NO: 2136881 - DNA, 25 bp, Homo sapien
cacactctgatctttaggtgattga

SEQ ID NO: 2136882 - DNA, 25 bp, Homo sapien
ttgagggtggttgtcagcagcaacc

SEQ ID NO: 2136883 - DNA, 25 bp, Homo sapien
gcttgctccaggcataaccttggac

SEQ ID NO: 2136884 - DNA, 25 bp, Homo sapien
ccttggacttattcttgggccttgc

SEQ ID NO: 2136885 - DNA, 25 bp, Homo sapien
cttaaatcgtgaaacaggtattgcc

SEQ ID NO: 2136886 - DNA, 25 bp, Homo sapien
ttggccttactcttagggcgtgccc

SEQ ID NO: 2136887 - DNA, 25 bp, Homo sapien
ttggatgtaggcctaggacagcacc

SEQ ID NO: 2136888 - DNA, 25 bp, Homo sapien
cagaaccagggtgtcttaacagact

SEQ ID NO: 2136889 - DNA, 25 bp, Homo sapien
tccaccggcaggatacatacagggt

SEQ ID NO: 2136890 - DNA, 25 bp, Homo sapien
ggaccagaaccacgaattgacaatg

SEQ ID NO: 2136891 - DNA, 25 bp, Homo sapien
cacgctataagcaagggtttcctca

SEQ ID NO: 2136892 - DNA, 25 bp, Homo sapien
ttatagatgggaagccgaccctacc

SEQ ID NO: 2136893 - DNA, 25 bp, Homo sapien
tgaacacgtggacctgcaaatggcc

SEQ ID NO: 2136894 - DNA, 25 bp, Homo sapien
taagatgctctcgaatttcctggac

SEQ ID NO: 2136895 - DNA, 25 bp, Homo sapien
aagaggcctataaattctgacactg

SEQ ID NO: 2136896 - DNA, 25 bp, Homo sapien
gtagctaataaggagagaaacccag

SEQ ID NO: 2136897 - DNA, 25 bp, Homo sapien
cccttcagggtcattttgattgtct

SEQ ID NO: 2136898 - DNA, 25 bp, Homo sapien
ccttgttttggcattgcctgtagct

SEQ ID NO: 2136899 - DNA, 25 bp, Homo sapien
gctctaatattcagctggcatcaga

SEQ ID NO: 2136900 - DNA, 25 bp, Homo sapien
cagcttacagacagagttggacaaa

SEQ ID NO: 2136901 - DNA, 25 bp, Homo sapien
ggaacataaggacaatctgaggcca

SEQ ID NO: 2136902 - DNA, 25 bp, Homo sapien
tagaacgacaatcagaagggtggct

SEQ ID NO: 2136903 - DNA, 25 bp, Homo sapien
tgaagtatgccctacatagcagccc

SEQ ID NO: 2136904 - DNA, 25 bp, Homo sapien
tcctgactcaatcaaatccctatgc

SEQ ID NO: 2136905 - DNA, 25 bp, Homo sapien
tatggaagcagcagttgtactttga

SEQ ID NO: 2136906 - DNA, 25 bp, Homo sapien
tctaggcaaacaggatacctcactc

SEQ ID NO: 2136907 - DNA, 25 bp, Homo sapien
gcttttcctaaaaccctatacatca

SEQ ID NO: 2136908 - DNA, 25 bp, Homo sapien
gacaccagtgttctctattatatga

SEQ ID NO: 2136909 - DNA, 25 bp, Homo sapien
tcaaatgggatcatacttcccatgt

SEQ ID NO: 2136910 - DNA, 25 bp, Homo sapien
atacatcatcatgtttaatggctgt

SEQ ID NO: 2136911 - DNA, 25 bp, Homo sapien
tgcgcagtcagctagtttgccacag

SEQ ID NO: 2136912 - DNA, 25 bp, Homo sapien
cacgtgactgcgcagtcagctagtt

SEQ ID NO: 2136913 - DNA, 25 bp, Homo sapien
gactgcgcagtcagctagtttgcca

SEQ ID NO: 2136914 - DNA, 25 bp, Homo sapien
agtcagctagtttgccacagccctg

SEQ ID NO: 2136915 - DNA, 25 bp, Homo sapien
tgagggatagtttcctctaccaaga

SEQ ID NO: 2136916 - DNA, 25 bp, Homo sapien
ctagggcaggtagagtctctgcttc

SEQ ID NO: 2136917 - DNA, 25 bp, Homo sapien
aaaagacagaccgtctaagaccgct

SEQ ID NO: 2136918 - DNA, 25 bp, Homo sapien
tgcttctcttcacgaacgcctaggg

SEQ ID NO: 2136919 - DNA, 25 bp, Homo sapien
tcccactgagacgaatgcaaaaggc

SEQ ID NO: 2136920 - DNA, 25 bp, Homo sapien
ggatggcatcatccatggagaacaa

SEQ ID NO: 2136921 - DNA, 25 bp, Homo sapien
taaaattatgaactggagaagggcc

SEQ ID NO: 2136922 - DNA, 25 bp, Homo sapien
aattgtcaaggtgaaccctgcagta

SEQ ID NO: 2136923 - DNA, 25 bp, Homo sapien
gacaaactttctagtgtacagtccc

SEQ ID NO: 2136924 - DNA, 25 bp, Homo sapien
agcaaggtgtttccactaacctgaa

SEQ ID NO: 2136925 - DNA, 25 bp, Homo sapien
cagtcccatctcaaaggaagtattt

SEQ ID NO: 2136926 - DNA, 25 bp, Homo sapien
cactaacctgaaccagcattgaata

SEQ ID NO: 2136927 - DNA, 25 bp, Homo sapien
tgctccaactttataactacatttt

SEQ ID NO: 2136928 - DNA, 25 bp, Homo sapien
catatgctccaactttataactaca

SEQ ID NO: 2136929 - DNA, 25 bp, Homo sapien
cagaatggcaaggtggataagagtc

SEQ ID NO: 2136930 - DNA, 25 bp, Homo sapien
acacacataggctcatgaaagcaga

SEQ ID NO: 2136931 - DNA, 25 bp, Homo sapien
gaatccaggggctggattttgaaaa

SEQ ID NO: 2136932 - DNA, 25 bp, Homo sapien
caatgaatccaggggctggattttg

SEQ ID NO: 2136933 - DNA, 25 bp, Homo sapien
atccaggggctggattttgaaaaga

SEQ ID NO: 2136934 - DNA, 25 bp, Homo sapien
atgaatccaggggctggattttgaa

SEQ ID NO: 2136935 - DNA, 25 bp, Homo sapien
aaaaactctaatatattgtcttagt

SEQ ID NO: 2136936 - DNA, 25 bp, Homo sapien
aaaaaactctaatatattgtcttag

SEQ ID NO: 2136937 - DNA, 25 bp, Homo sapien
tgtttgatcattactactgtataga

SEQ ID NO: 2136938 - DNA, 25 bp, Homo sapien
tttagagttttcagtgaacaaatat

SEQ ID NO: 2136939 - DNA, 25 bp, Homo sapien
catctgcaaatgtttatgatattat

SEQ ID NO: 2136940 - DNA, 25 bp, Homo sapien
tggatctcctaggattttctatatg

SEQ ID NO: 2136941 - DNA, 25 bp, Homo sapien
gcccacaagggctgatgagaagtct

SEQ ID NO: 2136942 - DNA, 25 bp, Homo sapien
cctatgaggagttcaaactggtgag

SEQ ID NO: 2136943 - DNA, 25 bp, Homo sapien
taaccaatgggtgttgagtgggaca

SEQ ID NO: 2136944 - DNA, 25 bp, Homo sapien
caggctgggcctttattgtgatcaa

SEQ ID NO: 2136945 - DNA, 25 bp, Homo sapien
tcaggtacttgaattgatcattgga

SEQ ID NO: 2136946 - DNA, 25 bp, Homo sapien
acttaaagaagtcttgacagctatt

SEQ ID NO: 2136947 - DNA, 25 bp, Homo sapien
tttaaactctgctcctcttcgatgt

SEQ ID NO: 2136948 - DNA, 25 bp, Homo sapien
atcattggataagcgtttctgtgcc

SEQ ID NO: 2136949 - DNA, 25 bp, Homo sapien
aggatgcggcaagaaccgctcgccg

SEQ ID NO: 2136950 - DNA, 25 bp, Homo sapien
gaccactaccatatttctgtcgctg

SEQ ID NO: 2136951 - DNA, 25 bp, Homo sapien
gatacggcgcgaaagtgcttgacgc

SEQ ID NO: 2136952 - DNA, 25 bp, Homo sapien
tgctttccccgcgatccgaacggga

SEQ ID NO: 2136953 - DNA, 25 bp, Homo sapien
gctcacctccggcggactgggtaca

SEQ ID NO: 2136954 - DNA, 25 bp, Homo sapien
agcgcggttctcctccaaacgatct

SEQ ID NO: 2136955 - DNA, 25 bp, Homo sapien
aagcgcctggctccgaccggatcgt

SEQ ID NO: 2136956 - DNA, 25 bp, Homo sapien
atcgggacccggagtagcaaacgcg

SEQ ID NO: 2136957 - DNA, 25 bp, Homo sapien
caagactttgacatcaacctggagc

SEQ ID NO: 2136958 - DNA, 25 bp, Homo sapien
gacacaagactttgacatcaacctg

SEQ ID NO: 2136959 - DNA, 25 bp, Homo sapien
cacagacacaagactttgacatcaa

SEQ ID NO: 2136960 - DNA, 25 bp, Homo sapien
cgcacagacacaagactttgacatc

SEQ ID NO: 2136961 - DNA, 25 bp, Homo sapien
tatttcaagcctctcctctacagac

SEQ ID NO: 2136962 - DNA, 25 bp, Homo sapien
atccaggcaatattcgtgctccttt

SEQ ID NO: 2136963 - DNA, 25 bp, Homo sapien
atttcaagcctctcctctacagacg

SEQ ID NO: 2136964 - DNA, 25 bp, Homo sapien
ccaggcaatattcgtgctcctttat

SEQ ID NO: 2136965 - DNA, 25 bp, Homo sapien
tccagagctgtgagccagtctcctc

SEQ ID NO: 2136966 - DNA, 25 bp, Homo sapien
tgcagaattggccagccttaaagta

SEQ ID NO: 2136967 - DNA, 25 bp, Homo sapien
ccttgcctttcttgcagaattggcc

SEQ ID NO: 2136968 - DNA, 25 bp, Homo sapien
cagaattggccagccttaaagtagg

SEQ ID NO: 2136969 - DNA, 25 bp, Homo sapien
ttcaagtggtgtcaagccccacagc

SEQ ID NO: 2136970 - DNA, 25 bp, Homo sapien
ttcttgttcaagtggtgtcaagccc

SEQ ID NO: 2136971 - DNA, 25 bp, Homo sapien
cttcactgatgtggtgcagtttccc

SEQ ID NO: 2136972 - DNA, 25 bp, Homo sapien
ttcactgatgtggtgcagtttcccc

SEQ ID NO: 2136973 - DNA, 25 bp, Homo sapien
gagggtggttgtcagcagcaactcc

SEQ ID NO: 2136974 - DNA, 25 bp, Homo sapien
caggtacaaccaagctaaaggaaga

SEQ ID NO: 2136975 - DNA, 25 bp, Homo sapien
taatacagatagagtgagaacaggt

SEQ ID NO: 2136976 - DNA, 25 bp, Homo sapien
ggtaatatactcctcccgtagtcta

SEQ ID NO: 2136977 - DNA, 25 bp, Homo sapien
gttttagaacgagcgccacctactg

SEQ ID NO: 2136978 - DNA, 25 bp, Homo sapien
caagcaacggcattagtctgggaca

SEQ ID NO: 2136979 - DNA, 25 bp, Homo sapien
gattcctttctgaccctgggtgcca

SEQ ID NO: 2136980 - DNA, 25 bp, Homo sapien
gaccagaacccagactcattagagg

SEQ ID NO: 2136981 - DNA, 25 bp, Homo sapien
aacccaggactgcttatagaactca

SEQ ID NO: 2136982 - DNA, 25 bp, Homo sapien
gattcacagattgctgaagctccac

SEQ ID NO: 2136983 - DNA, 25 bp, Homo sapien
tgggccctgagtttcaaggcagtat

SEQ ID NO: 2136984 - DNA, 25 bp, Homo sapien
cctgagcttggacctgatatttgcc

SEQ ID NO: 2136985 - DNA, 25 bp, Homo sapien
taagatgctctcgaatttcccggac

SEQ ID NO: 2136986 - DNA, 25 bp, Homo sapien
gaaacttcgttctcgcattggctgt

SEQ ID NO: 2136987 - DNA, 25 bp, Homo sapien
cagaagcctcttcgggaattccaaa

SEQ ID NO: 2136988 - DNA, 25 bp, Homo sapien
aattcaacagtgacctcgtcccagg

SEQ ID NO: 2136989 - DNA, 25 bp, Homo sapien
caccaaagcactactcagggctctt

SEQ ID NO: 2136990 - DNA, 25 bp, Homo sapien
ccaaagcactactcagggctctttg

SEQ ID NO: 2136991 - DNA, 25 bp, Homo sapien
aaagcactactcagggctctttggg

SEQ ID NO: 2136992 - DNA, 25 bp, Homo sapien
caaagcactactcagggctctttgg

SEQ ID NO: 2136993 - DNA, 25 bp, Homo sapien
tttaaacaacgaatagcagggtagc

SEQ ID NO: 2136994 - DNA, 25 bp, Homo sapien
cagggtagcttacttaggtgacaca

SEQ ID NO: 2136995 - DNA, 25 bp, Homo sapien
gaaaaataccgcaatctggacagca

SEQ ID NO: 2136996 - DNA, 25 bp, Homo sapien
tgatccagctcaaaacaagagtttg

SEQ ID NO: 2136997 - DNA, 25 bp, Homo sapien
cttgcgatgggaggcaaaactgcca

SEQ ID NO: 2136998 - DNA, 25 bp, Homo sapien
ggcatgctcatctataactcaaggc

SEQ ID NO: 2136999 - DNA, 25 bp, Homo sapien
ccttaccaaactaggatcaggtggg

SEQ ID NO: 2137000 - DNA, 25 bp, Homo sapien
cataatcattccaacggctgcatgg

SEQ ID NO: 2137001 - DNA, 25 bp, Homo sapien
gactgcgcagtcagcttgttcgccg

SEQ ID NO: 2137002 - DNA, 25 bp, Homo sapien
ggaccactcggctggcgaggaacat

SEQ ID NO: 2137003 - DNA, 25 bp, Homo sapien
tgttcgccgcagtcctgtaccatgg

SEQ ID NO: 2137004 - DNA, 25 bp, Homo sapien
tattttgtatacgactcaagcgaca

SEQ ID NO: 2137005 - DNA, 25 bp, Homo sapien
tctggatgcaagaaaacactcctct

SEQ ID NO: 2137006 - DNA, 25 bp, Homo sapien
cggagcacaggtgtcgtccgcctct

SEQ ID NO: 2137007 - DNA, 25 bp, Homo sapien
catcccgccgttcctcccacgttct

SEQ ID NO: 2137008 - DNA, 25 bp, Homo sapien
tcttttctggatgcaagaaaacact

SEQ ID NO: 2137009 - DNA, 25 bp, Homo sapien
aagacgctcccggttggctgacgga

SEQ ID NO: 2137010 - DNA, 25 bp, Homo sapien
gacaaaagacagacgggctaagacg

SEQ ID NO: 2137011 - DNA, 25 bp, Homo sapien
tgacggattgtttcctttaccaaca

SEQ ID NO: 2137012 - DNA, 25 bp, Homo sapien
aagacagacgggctaagacgctccc

SEQ ID NO: 2137013 - DNA, 25 bp, Homo sapien
cgtcgggcaggtagactctctgctt

SEQ ID NO: 2137014 - DNA, 25 bp, Homo sapien
ctccacgaacgcgtcgggcaggtag

SEQ ID NO: 2137015 - DNA, 25 bp, Homo sapien
tcctccaacagcaaccgctgctcct

SEQ ID NO: 2137016 - DNA, 25 bp, Homo sapien
tgctcctctccacgaacgcgtcggg

SEQ ID NO: 2137017 - DNA, 25 bp, Homo sapien
agggatgccatctgccgtccttgca

SEQ ID NO: 2137018 - DNA, 25 bp, Homo sapien
ctctcagggatgccatctgccgtcc

SEQ ID NO: 2137019 - DNA, 25 bp, Homo sapien
gggatgccatctgccgtccttgcac

SEQ ID NO: 2137020 - DNA, 25 bp, Homo sapien
tcagggatgccatctgccgtccttg

SEQ ID NO: 2137021 - DNA, 25 bp, Homo sapien
gctatttcctgatagggataacgga

SEQ ID NO: 2137022 - DNA, 25 bp, Homo sapien
cacatggatatgcaatatttgtaca

SEQ ID NO: 2137023 - DNA, 25 bp, Homo sapien
aattctttgtcccatattcctggca

SEQ ID NO: 2137024 - DNA, 25 bp, Homo sapien
gctcctagaacccttgctatttcct

SEQ ID NO: 2137025 - DNA, 25 bp, Homo sapien
gctgtgtcagcaactagggataaag

SEQ ID NO: 2137026 - DNA, 25 bp, Homo sapien
caaagatactcctgtcacacaggaa

SEQ ID NO: 2137027 - DNA, 25 bp, Homo sapien
cataagctgaatgctggccccagta

SEQ ID NO: 2137028 - DNA, 25 bp, Homo sapien
tgttgacatactcgaaaaaacacac

SEQ ID NO: 2137029 - DNA, 25 bp, Homo sapien
aatcatcattttgcttggatacaca

SEQ ID NO: 2137030 - DNA, 25 bp, Homo sapien
caccctgctcttcggctgagattaa

SEQ ID NO: 2137031 - DNA, 25 bp, Homo sapien
acaggaattctaggctaagggagct

SEQ ID NO: 2137032 - DNA, 25 bp, Homo sapien
ctgctttggagtacatttgggactt

SEQ ID NO: 2137033 - DNA, 25 bp, Homo sapien
gtgggaatgtcacctcctctgctaa

SEQ ID NO: 2137034 - DNA, 25 bp, Homo sapien
catagaagtaatgcacatcagctcc

SEQ ID NO: 2137035 - DNA, 25 bp, Homo sapien
gacaggaggtctaacaatattcagg

SEQ ID NO: 2137036 - DNA, 25 bp, Homo sapien
ccttagtagagtaccctggcacata

SEQ ID NO: 2137037 - DNA, 25 bp, Homo sapien
tatgccccagcgctaagttttctga

SEQ ID NO: 2137038 - DNA, 25 bp, Homo sapien
taaaatggcttttcacgcccaccag

SEQ ID NO: 2137039 - DNA, 25 bp, Homo sapien
taattggaactccagtgctgccggt

SEQ ID NO: 2137040 - DNA, 25 bp, Homo sapien
tagggtccacaccaagtaggtcaga

SEQ ID NO: 2137041 - DNA, 25 bp, Homo sapien
gagggcctttccctgtcaggactcg

SEQ ID NO: 2137042 - DNA, 25 bp, Homo sapien
tcaggttggcattgcgccgtcccca

SEQ ID NO: 2137043 - DNA, 25 bp, Homo sapien
tcaggactcgcaggaggtcgtaaca

SEQ ID NO: 2137044 - DNA, 25 bp, Homo sapien
gtagggatggtcttggcgcctctcc

SEQ ID NO: 2137045 - DNA, 25 bp, Homo sapien
gggatacggcgcgaaagtgctcgac

SEQ ID NO: 2137046 - DNA, 25 bp, Homo sapien
aagaaccgctctctccgcgagggtg

SEQ ID NO: 2137047 - DNA, 25 bp, Homo sapien
tacggcgcgaaagtgctcgacgccc

SEQ ID NO: 2137048 - DNA, 25 bp, Homo sapien
tatcagaatggcaaagacgcgtccc

SEQ ID NO: 2137049 - DNA, 25 bp, Homo sapien
tctggcggctcctcacttcgattct

SEQ ID NO: 2137050 - DNA, 25 bp, Homo sapien
tggcggctcctcacttcgattctca

SEQ ID NO: 2137051 - DNA, 25 bp, Homo sapien
ggcggctcctcacttcgattctcac

SEQ ID NO: 2137052 - DNA, 25 bp, Homo sapien
cctctggcggctcctcacttcgatt

SEQ ID NO: 2137053 - DNA, 25 bp, Homo sapien
agaacccaacagacctatcacgcag

SEQ ID NO: 2137054 - DNA, 25 bp, Homo sapien
tccagacgatctgacggtgcctctc

SEQ ID NO: 2137055 - DNA, 25 bp, Homo sapien
cacaggcccctttccggaatcaggg

SEQ ID NO: 2137056 - DNA, 25 bp, Homo sapien
tatcacgcagacaggagactttaac

SEQ ID NO: 2137057 - DNA, 25 bp, Homo sapien
taacttccaagtgaacagctacata

SEQ ID NO: 2137058 - DNA, 25 bp, Homo sapien
ttccaagtgaacagctacatacaga

SEQ ID NO: 2137059 - DNA, 25 bp, Homo sapien
aattaacttccaagtgaacagctac

SEQ ID NO: 2137060 - DNA, 25 bp, Homo sapien
cttaattaacttccaagtgaacagc

SEQ ID NO: 2137061 - DNA, 25 bp, Homo sapien
tatgatctggtctaacccacttggc

SEQ ID NO: 2137062 - DNA, 25 bp, Homo sapien
tgggcaggcctatggacaaaaatac

SEQ ID NO: 2137063 - DNA, 25 bp, Homo sapien
tcataggtgtattcaggcagcactc

SEQ ID NO: 2137064 - DNA, 25 bp, Homo sapien
tatataccactagacctcataggtg

SEQ ID NO: 2137065 - DNA, 25 bp, Homo sapien
tggtagcaagaattagagtcaactg

SEQ ID NO: 2137066 - DNA, 25 bp, Homo sapien
tgggggagaatgattgttcccaagt

SEQ ID NO: 2137067 - DNA, 25 bp, Homo sapien
gctgggggagaatgattgttcccaa

SEQ ID NO: 2137068 - DNA, 25 bp, Homo sapien
tgtcagttctgcagtcacaaagttc

SEQ ID NO: 2137069 - DNA, 25 bp, Homo sapien
gtcttggccttggttctcaatgtgt

SEQ ID NO: 2137070 - DNA, 25 bp, Homo sapien
cagtcttggccttggttctcaatgt

SEQ ID NO: 2137071 - DNA, 25 bp, Homo sapien
tctcaatgtgtcctaggtcgaagtc

SEQ ID NO: 2137072 - DNA, 25 bp, Homo sapien
ttggttctcaatgtgtcctaggtcg

SEQ ID NO: 2137073 - DNA, 25 bp, Homo sapien
ctgctactgcatctgtcttagaccc

SEQ ID NO: 2137074 - DNA, 25 bp, Homo sapien
catctgtcttagaccctgtcttggc

SEQ ID NO: 2137075 - DNA, 25 bp, Homo sapien
ttcgtctcagcaacaaccttgttct

SEQ ID NO: 2137076 - DNA, 25 bp, Homo sapien
ttccttcgtctcagcaacaaccttg

SEQ ID NO: 2137077 - DNA, 25 bp, Homo sapien
ccaggaattgatagtggcctcttcc

SEQ ID NO: 2137078 - DNA, 25 bp, Homo sapien
gaaccaggaattgatagtggcctct

SEQ ID NO: 2137079 - DNA, 25 bp, Homo sapien
accaggaattgatagtggcctcttc

SEQ ID NO: 2137080 - DNA, 25 bp, Homo sapien
cagaaccaggaattgatagtggcct

SEQ ID NO: 2137081 - DNA, 25 bp, Homo sapien
agccgcaggttccaactcctcagca

SEQ ID NO: 2137082 - DNA, 25 bp, Homo sapien
tcattcttagtgctgaaactattac

SEQ ID NO: 2137083 - DNA, 25 bp, Homo sapien
cacagacctgggcaccaatttcagg

SEQ ID NO: 2137084 - DNA, 25 bp, Homo sapien
taggtttgcaatcggccccagccgc

SEQ ID NO: 2137085 - DNA, 25 bp, Homo sapien
gaggcttaactatcctgctcacagg

SEQ ID NO: 2137086 - DNA, 25 bp, Homo sapien
taaatcctaacacagctggagttac

SEQ ID NO: 2137087 - DNA, 25 bp, Homo sapien
aggagggcttgcctcagatggtgcc

SEQ ID NO: 2137088 - DNA, 25 bp, Homo sapien
tagaagggcggcaagctgttgccac

SEQ ID NO: 2137089 - DNA, 25 bp, Homo sapien
agggataggctgtgagcatgagcga

SEQ ID NO: 2137090 - DNA, 25 bp, Homo sapien
cagggataggctgtgagcatgagcg

SEQ ID NO: 2137091 - DNA, 25 bp, Homo sapien
ccctgatcctgatttgacgtctaat

SEQ ID NO: 2137092 - DNA, 25 bp, Homo sapien
tggacacccattgcaatccgtgcta

SEQ ID NO: 2137093 - DNA, 25 bp, Homo sapien
gctttcaataagtgtcactacacct

SEQ ID NO: 2137094 - DNA, 25 bp, Homo sapien
cacctacttcgttaataaactcttg

SEQ ID NO: 2137095 - DNA, 25 bp, Homo sapien
caacaatgtagtgatggacaaaatc

SEQ ID NO: 2137096 - DNA, 25 bp, Homo sapien
aaatatggccacaccactaacaaga

SEQ ID NO: 2137097 - DNA, 25 bp, Homo sapien
gccttcatattgatcatgtctctgg

SEQ ID NO: 2137098 - DNA, 25 bp, Homo sapien
ggtgagttcaaaggaaatgacatgg

SEQ ID NO: 2137099 - DNA, 25 bp, Homo sapien
taaatagcctataggaactcctgcc

SEQ ID NO: 2137100 - DNA, 25 bp, Homo sapien
catagcctaaatgtcctgggaatgc

SEQ ID NO: 2137101 - DNA, 25 bp, Homo sapien
ctttcatatcagcttagaccaggga

SEQ ID NO: 2137102 - DNA, 25 bp, Homo sapien
catttggccatgagcgtgcacgtgc

SEQ ID NO: 2137103 - DNA, 25 bp, Homo sapien
ggcaagtctcaatactgtgttccca

SEQ ID NO: 2137104 - DNA, 25 bp, Homo sapien
tcccgaccaaagagtacatgctata

SEQ ID NO: 2137105 - DNA, 25 bp, Homo sapien
tgtcagaaaatgtcccatggttgcc

SEQ ID NO: 2137106 - DNA, 25 bp, Homo sapien
ggccaaactctgaacagcccaaatg

SEQ ID NO: 2137107 - DNA, 25 bp, Homo sapien
gagctttccacaaaggacctaactg

SEQ ID NO: 2137108 - DNA, 25 bp, Homo sapien
tgttcattgctaacatactaggcat

SEQ ID NO: 2137109 - DNA, 25 bp, Homo sapien
catgggcctagtggagcacactttc

SEQ ID NO: 2137110 - DNA, 25 bp, Homo sapien
ctaactgggccttaggttgtagcca

SEQ ID NO: 2137111 - DNA, 25 bp, Homo sapien
cagcatattacataggacatgtcaa

SEQ ID NO: 2137112 - DNA, 25 bp, Homo sapien
taatttctagcatatacaaaggtag

SEQ ID NO: 2137113 - DNA, 25 bp, Homo sapien
ccatatgcccaccagcaagttgcaa

SEQ ID NO: 2137114 - DNA, 25 bp, Homo sapien
caacatctagtaacattctgccatt

SEQ ID NO: 2137115 - DNA, 25 bp, Homo sapien
tcataaccttggttgtgtacgtgtt

SEQ ID NO: 2137116 - DNA, 25 bp, Homo sapien
gagagtccactctgtaatgttttgc

SEQ ID NO: 2137117 - DNA, 25 bp, Homo sapien
tgtgtacgtgtttgcctactatcat

SEQ ID NO: 2137118 - DNA, 25 bp, Homo sapien
ggagagtccactctgtaatgttttg

SEQ ID NO: 2137119 - DNA, 25 bp, Homo sapien
ggaggtttgtgagagggctgacagc

SEQ ID NO: 2137120 - DNA, 25 bp, Homo sapien
gaggtttgtgagagggctgacagca

SEQ ID NO: 2137121 - DNA, 25 bp, Homo sapien
aggtttgtgagagggctgacagcag

SEQ ID NO: 2137122 - DNA, 25 bp, Homo sapien
ggtttgtgagagggctgacagcaga

SEQ ID NO: 2137123 - DNA, 25 bp, Homo sapien
ctaaaccccacggagattcaggcca

SEQ ID NO: 2137124 - DNA, 25 bp, Homo sapien
ccacggagattcaggccacactgct

SEQ ID NO: 2137125 - DNA, 25 bp, Homo sapien
tgggcactcacaacctccactgagt

SEQ ID NO: 2137126 - DNA, 25 bp, Homo sapien
ctccactgagtccaaacgcctgaag

SEQ ID NO: 2137127 - DNA, 25 bp, Homo sapien
tctctccttcacgaaacagccagag

SEQ ID NO: 2137128 - DNA, 25 bp, Homo sapien
cgccgatccccaaagtgggaacgag

SEQ ID NO: 2137129 - DNA, 25 bp, Homo sapien
gaaacagccagagcgccgatcccca

SEQ ID NO: 2137130 - DNA, 25 bp, Homo sapien
gtcgatctggggtcctttcgtctcc

SEQ ID NO: 2137131 - DNA, 25 bp, Homo sapien
acaccacactcactggggccagaag

SEQ ID NO: 2137132 - DNA, 25 bp, Homo sapien
ggacaccctggagcaggacaccaca

SEQ ID NO: 2137133 - DNA, 25 bp, Homo sapien
atcctcccgcgtcccgcctttacag

SEQ ID NO: 2137134 - DNA, 25 bp, Homo sapien
agtagccccgggacaccctggagca

SEQ ID NO: 2137135 - DNA, 25 bp, Homo sapien
aacagatgtatgtactcccatgttc

SEQ ID NO: 2137136 - DNA, 25 bp, Homo sapien
ctcaaacagatgtatgtactcccat

SEQ ID NO: 2137137 - DNA, 25 bp, Homo sapien
tcaaacagatgtatgtactcccatg

SEQ ID NO: 2137138 - DNA, 25 bp, Homo sapien
caaacagatgtatgtactcccatgt

SEQ ID NO: 2137139 - DNA, 25 bp, Homo sapien
tagagacctagcaaaacaccttcac

SEQ ID NO: 2137140 - DNA, 25 bp, Homo sapien
ctgccatagagacctagcaaaacac

SEQ ID NO: 2137141 - DNA, 25 bp, Homo sapien
catagagacctagcaaaacaccttc

SEQ ID NO: 2137142 - DNA, 25 bp, Homo sapien
aacaccttcactcttcagataactc

SEQ ID NO: 2137143 - DNA, 25 bp, Homo sapien
tatgcaattaccaggctctaccatc

SEQ ID NO: 2137144 - DNA, 25 bp, Homo sapien
caagttttatgcaattaccaggctc

SEQ ID NO: 2137145 - DNA, 25 bp, Homo sapien
aatttcaagttttatgcaattacca

SEQ ID NO: 2137146 - DNA, 25 bp, Homo sapien
ttatgcaattaccaggctctaccat

SEQ ID NO: 2137147 - DNA, 25 bp, Homo sapien
ctcttttatttactctatgaaaata

SEQ ID NO: 2137148 - DNA, 25 bp, Homo sapien
cctcttttatttactctatgaaaat

SEQ ID NO: 2137149 - DNA, 25 bp, Homo sapien
taaacctcttttatttactctatga

SEQ ID NO: 2137150 - DNA, 25 bp, Homo sapien
tcttttatttactctatgaaaataa

SEQ ID NO: 2137151 - DNA, 25 bp, Homo sapien
acagcttattaagctgcccttacta

SEQ ID NO: 2137152 - DNA, 25 bp, Homo sapien
tatggacagaacagcttattaagct

SEQ ID NO: 2137153 - DNA, 25 bp, Homo sapien
agggtatggacagaacagcttatta

SEQ ID NO: 2137154 - DNA, 25 bp, Homo sapien
gacagaacagcttattaagctgccc

SEQ ID NO: 2137155 - DNA, 25 bp, Homo sapien
catttataacctaatgtttcattca

SEQ ID NO: 2137156 - DNA, 25 bp, Homo sapien
gctgttacatttataacctaatgtt

SEQ ID NO: 2137157 - DNA, 25 bp, Homo sapien
tacatttataacctaatgtttcatt

SEQ ID NO: 2137158 - DNA, 25 bp, Homo sapien
gttacatttataacctaatgtttca

SEQ ID NO: 2137159 - DNA, 25 bp, Homo sapien
tgagttagtagttcttatacacttt

SEQ ID NO: 2137160 - DNA, 25 bp, Homo sapien
agccatattgttatacatgggggca

SEQ ID NO: 2137161 - DNA, 25 bp, Homo sapien
gggcatgagttagtagttcttatac

SEQ ID NO: 2137162 - DNA, 25 bp, Homo sapien
gcatgagttagtagttcttatacac

SEQ ID NO: 2137163 - DNA, 25 bp, Homo sapien
tggagttgtatcgattttttggctc

SEQ ID NO: 2137164 - DNA, 25 bp, Homo sapien
atttggagttgtatcgattttttgg

SEQ ID NO: 2137165 - DNA, 25 bp, Homo sapien
gagttgtatcgattttttggctcct

SEQ ID NO: 2137166 - DNA, 25 bp, Homo sapien
agttgtatcgattttttggctccta

SEQ ID NO: 2137167 - DNA, 25 bp, Homo sapien
tgctttattgaattaagctacatca

SEQ ID NO: 2137168 - DNA, 25 bp, Homo sapien
gctttattgaattaagctacatcag

SEQ ID NO: 2137169 - DNA, 25 bp, Homo sapien
ctttattgaattaagctacatcagc

SEQ ID NO: 2137170 - DNA, 25 bp, Homo sapien
tttattgaattaagctacatcagct

SEQ ID NO: 2137171 - DNA, 25 bp, Homo sapien
ttctgggtgtaagccaggtgttttg

SEQ ID NO: 2137172 - DNA, 25 bp, Homo sapien
tgggtgtaagccaggtgttttgaat

SEQ ID NO: 2137173 - DNA, 25 bp, Homo sapien
tgttttgaattcagatacattttgg

SEQ ID NO: 2137174 - DNA, 25 bp, Homo sapien
ctgggtgtaagccaggtgttttgaa

SEQ ID NO: 2137175 - DNA, 25 bp, Homo sapien
gactaattaccttaagaatgcctca

SEQ ID NO: 2137176 - DNA, 25 bp, Homo sapien
gcctcaaaagcacttggaaggactg

SEQ ID NO: 2137177 - DNA, 25 bp, Homo sapien
tctctgtacggccaaacagctgagg

SEQ ID NO: 2137178 - DNA, 25 bp, Homo sapien
tgatctcagaaaacagcccaccatt

SEQ ID NO: 2137179 - DNA, 25 bp, Homo sapien
gagcaatgtgattcccatctggaaa

SEQ ID NO: 2137180 - DNA, 25 bp, Homo sapien
gactgagtagccctgtctccagcaa

SEQ ID NO: 2137181 - DNA, 25 bp, Homo sapien
gcaaagagggactgagtagccctgt

SEQ ID NO: 2137182 - DNA, 25 bp, Homo sapien
caatgtgattcccatctggaaaacc

SEQ ID NO: 2137183 - DNA, 25 bp, Homo sapien
cacaggagactttgatatggggacc

SEQ ID NO: 2137184 - DNA, 25 bp, Homo sapien
gcaggggctcagtcagaacgacaca

SEQ ID NO: 2137185 - DNA, 25 bp, Homo sapien
catatgaattgactggctcttaagg

SEQ ID NO: 2137186 - DNA, 25 bp, Homo sapien
gaacgacacatgtttcttctggaac

SEQ ID NO: 2137187 - DNA, 25 bp, Homo sapien
tttgggggctcaatagaaactgctt

SEQ ID NO: 2137188 - DNA, 25 bp, Homo sapien
cctgtaggtgctaacagatctggaa

SEQ ID NO: 2137189 - DNA, 25 bp, Homo sapien
cactcactcttcatttgggggctca

SEQ ID NO: 2137190 - DNA, 25 bp, Homo sapien
gaaatcctggtgcagggtcctgtag

SEQ ID NO: 2137191 - DNA, 25 bp, Homo sapien
gtactgtgcccttgtgggtactcac

SEQ ID NO: 2137192 - DNA, 25 bp, Homo sapien
ttttagtactgtgcccttgtgggta

SEQ ID NO: 2137193 - DNA, 25 bp, Homo sapien
tagtactgtgcccttgtgggtactc

SEQ ID NO: 2137194 - DNA, 25 bp, Homo sapien
tttagtactgtgcccttgtgggtac

SEQ ID NO: 2137195 - DNA, 25 bp, Homo sapien
ctcttcatttgagactcaatgggaa

SEQ ID NO: 2137196 - DNA, 25 bp, Homo sapien
tctgcactctcttcatttgagactc

SEQ ID NO: 2137197 - DNA, 25 bp, Homo sapien
ttcatttgagactcaatgggaaact

SEQ ID NO: 2137198 - DNA, 25 bp, Homo sapien
cactctcttcatttgagactcaatg

SEQ ID NO: 2137199 - DNA, 25 bp, Homo sapien
cctgtgggtggtaatgggtctagca

SEQ ID NO: 2137200 - DNA, 25 bp, Homo sapien
tctgaagaagctgatggtgcagatg

SEQ ID NO: 2137201 - DNA, 25 bp, Homo sapien
gagggtcaagggcttgtgactccta

SEQ ID NO: 2137202 - DNA, 25 bp, Homo sapien
tgaaatcccactgcaaggtcctgtg

SEQ ID NO: 2137203 - DNA, 25 bp, Homo sapien
taacaaagaactcacctaaggagca

SEQ ID NO: 2137204 - DNA, 25 bp, Homo sapien
ccagaaggtcaaggcattcttagtc

SEQ ID NO: 2137205 - DNA, 25 bp, Homo sapien
ggcatctgaggccttgctaactggg

SEQ ID NO: 2137206 - DNA, 25 bp, Homo sapien
tgtccagggtcagctaattcctagt

SEQ ID NO: 2137207 - DNA, 25 bp, Homo sapien
gtgtagagcaccttggttcaataca

SEQ ID NO: 2137208 - DNA, 25 bp, Homo sapien
tgctgggagcttagtaggggctact

SEQ ID NO: 2137209 - DNA, 25 bp, Homo sapien
ctgtgtagagcaccttggttcaata

SEQ ID NO: 2137210 - DNA, 25 bp, Homo sapien
atctgctgggagcttagtaggggct

SEQ ID NO: 2137211 - DNA, 25 bp, Homo sapien
agacacctgatatgagctcagacat

SEQ ID NO: 2137212 - DNA, 25 bp, Homo sapien
gaatctgcctctttcagacacctga

SEQ ID NO: 2137213 - DNA, 25 bp, Homo sapien
tgatatgagctcagacatccacatg

SEQ ID NO: 2137214 - DNA, 25 bp, Homo sapien
cacctgatatgagctcagacatcca

SEQ ID NO: 2137215 - DNA, 25 bp, Homo sapien
gatgtaagtgctggtggtctcctag

SEQ ID NO: 2137216 - DNA, 25 bp, Homo sapien
ggtggtctcctaggattgttgccct

SEQ ID NO: 2137217 - DNA, 25 bp, Homo sapien
atgtaagtgctggtggtctcctagg

SEQ ID NO: 2137218 - DNA, 25 bp, Homo sapien
gggatgtaagtgctggtggtctcct

SEQ ID NO: 2137219 - DNA, 25 bp, Homo sapien
ttgtgcctgtaactgtgcccttcag

SEQ ID NO: 2137220 - DNA, 25 bp, Homo sapien
ggaattgtgcctgtaactgtgccct

SEQ ID NO: 2137221 - DNA, 25 bp, Homo sapien
gaattgtgcctgtaactgtgccctt

SEQ ID NO: 2137222 - DNA, 25 bp, Homo sapien
aattgtgcctgtaactgtgcccttc

SEQ ID NO: 2137223 - DNA, 25 bp, Homo sapien
cttcagaatgtagtgaagaatgttg

SEQ ID NO: 2137224 - DNA, 25 bp, Homo sapien
tagtgaagaatgttgataagcatct

SEQ ID NO: 2137225 - DNA, 25 bp, Homo sapien
tgccatcctgataattctcttttgt

SEQ ID NO: 2137226 - DNA, 25 bp, Homo sapien
taagcatctggttataaggactgcc

SEQ ID NO: 2137227 - DNA, 25 bp, Homo sapien
ggaacaacccatagagctcatagat

SEQ ID NO: 2137228 - DNA, 25 bp, Homo sapien
aaatgaatgcatatagggccgggtg

SEQ ID NO: 2137229 - DNA, 25 bp, Homo sapien
tcaaagggtgtagaaatagccagga

SEQ ID NO: 2137230 - DNA, 25 bp, Homo sapien
tttagtcacagtttaccttcagggc

SEQ ID NO: 2137231 - DNA, 25 bp, Homo sapien
gattagtgccttccttgccaaccaa

SEQ ID NO: 2137232 - DNA, 25 bp, Homo sapien
tactgcttgtaccattaaagttgaa

SEQ ID NO: 2137233 - DNA, 25 bp, Homo sapien
gagtgccagagcatctctttccttc

SEQ ID NO: 2137234 - DNA, 25 bp, Homo sapien
gagcttcgaagtcccctttctgaca

SEQ ID NO: 2137235 - DNA, 25 bp, Homo sapien
tgatacagctccagacaaagctaag

SEQ ID NO: 2137236 - DNA, 25 bp, Homo sapien
aagaaggaatcacaagctgggctat

SEQ ID NO: 2137237 - DNA, 25 bp, Homo sapien
aggttcccgcatccataaaaattgg

SEQ ID NO: 2137238 - DNA, 25 bp, Homo sapien
caacttatttagagaggctatgctc

SEQ ID NO: 2137239 - DNA, 25 bp, Homo sapien
tctcttgctccagtgtcccgaacag

SEQ ID NO: 2137240 - DNA, 25 bp, Homo sapien
ttgggtctggcaccaatatgcagag

SEQ ID NO: 2137241 - DNA, 25 bp, Homo sapien
cagacagtatgaggctttcatcaag

SEQ ID NO: 2137242 - DNA, 25 bp, Homo sapien
cagtgtcccgaacagcagacagtat

SEQ ID NO: 2137243 - DNA, 25 bp, Homo sapien
agagaggatagaacgatgggaagat

SEQ ID NO: 2137244 - DNA, 25 bp, Homo sapien
tgatagtatgggatgtacacaggta

SEQ ID NO: 2137245 - DNA, 25 bp, Homo sapien
tagtatgggatgtacacaggtatcc

SEQ ID NO: 2137246 - DNA, 25 bp, Homo sapien
tttgtgatagtatgggatgtacaca

SEQ ID NO: 2137247 - DNA, 25 bp, Homo sapien
agtatgggatgtacacaggtatccc

SEQ ID NO: 2137248 - DNA, 25 bp, Homo sapien
atcactacatagagacccagggcgg

SEQ ID NO: 2137249 - DNA, 25 bp, Homo sapien
tgaccttgagggagtattatcacta

SEQ ID NO: 2137250 - DNA, 25 bp, Homo sapien
taaggctctagacgatgagctagcc

SEQ ID NO: 2137251 - DNA, 25 bp, Homo sapien
cccagggcggtatcctaaggctcta

SEQ ID NO: 2137252 - DNA, 25 bp, Homo sapien
caccaggccatgtaagtctctattg

SEQ ID NO: 2137253 - DNA, 25 bp, Homo sapien
tattgaaaagtcgtcacagtcaccc

SEQ ID NO: 2137254 - DNA, 25 bp, Homo sapien
tatggcaaccgagatgtacaggctt

SEQ ID NO: 2137255 - DNA, 25 bp, Homo sapien
tgtcctccacttcggaaatgctgcc

SEQ ID NO: 2137256 - DNA, 25 bp, Homo sapien
tatgaactcactggaatcaggcatc

SEQ ID NO: 2137257 - DNA, 25 bp, Homo sapien
tacaatgggtttctcaccagagcct

SEQ ID NO: 2137258 - DNA, 25 bp, Homo sapien
tctgtgcctggcaccatacgaggca

SEQ ID NO: 2137259 - DNA, 25 bp, Homo sapien
ggtagtgatcatatccagaaggtac

SEQ ID NO: 2137260 - DNA, 25 bp, Homo sapien
tgttactggacatagctgggtatca

SEQ ID NO: 2137261 - DNA, 25 bp, Homo sapien
tagtgacaggcatgctgtgtttacc

SEQ ID NO: 2137262 - DNA, 25 bp, Homo sapien
catcttccggactatgttgtgaacc

SEQ ID NO: 2137263 - DNA, 25 bp, Homo sapien
ggaagaatgcataccgtaatcacag

SEQ ID NO: 2137264 - DNA, 25 bp, Homo sapien
taatcttacctctaccacatgatcc

SEQ ID NO: 2137265 - DNA, 25 bp, Homo sapien
tctggaagctgaaaccctcatacgc

SEQ ID NO: 2137266 - DNA, 25 bp, Homo sapien
tattgacccttgaatgagaatgcat

SEQ ID NO: 2137267 - DNA, 25 bp, Homo sapien
tgaactcctaagtattgacccttga

SEQ ID NO: 2137268 - DNA, 25 bp, Homo sapien
taggtaaagacttcattagtgagac

SEQ ID NO: 2137269 - DNA, 25 bp, Homo sapien
caggagaaaatccttgtgactttgg

SEQ ID NO: 2137270 - DNA, 25 bp, Homo sapien
gagatactattacattccagaagaa

SEQ ID NO: 2137271 - DNA, 25 bp, Homo sapien
agtgagacaaaactacaatctgtag

SEQ ID NO: 2137272 - DNA, 25 bp, Homo sapien
tgcaatgccatccatcaatgagaat

SEQ ID NO: 2137273 - DNA, 25 bp, Homo sapien
tgggcagtatccactgagctgaaca

SEQ ID NO: 2137274 - DNA, 25 bp, Homo sapien
aggacataagagtggccagatgaac

SEQ ID NO: 2137275 - DNA, 25 bp, Homo sapien
gaaatatccgaacaatgcaatgcca

SEQ ID NO: 2137276 - DNA, 25 bp, Homo sapien
ctgtcccaaaatcaccagtgcaggg

SEQ ID NO: 2137277 - DNA, 25 bp, Homo sapien
gggttttcagatcatgcattaacca

SEQ ID NO: 2137278 - DNA, 25 bp, Homo sapien
gcattaaccagccacatcggatcag

SEQ ID NO: 2137279 - DNA, 25 bp, Homo sapien
catcggatcagaatttcagccatct

SEQ ID NO: 2137280 - DNA, 25 bp, Homo sapien
gctgctcctagactacttggtatgt

SEQ ID NO: 2137281 - DNA, 25 bp, Homo sapien
ggatgcaaggtttggtgttcgccca

SEQ ID NO: 2137282 - DNA, 25 bp, Homo sapien
cccagtggctgctcctagactactt

SEQ ID NO: 2137283 - DNA, 25 bp, Homo sapien
caaggtttggtgttcgcccagtggc

SEQ ID NO: 2137284 - DNA, 25 bp, Homo sapien
gagatgacccaaatttagttcccca

SEQ ID NO: 2137285 - DNA, 25 bp, Homo sapien
gaagctcgtaagagctgcccaacat

SEQ ID NO: 2137286 - DNA, 25 bp, Homo sapien
gttttgtagacagtagtttctctgc

SEQ ID NO: 2137287 - DNA, 25 bp, Homo sapien
tctctgcttcgtgggtgttatcaga

SEQ ID NO: 2137288 - DNA, 25 bp, Homo sapien
ctaaatctgatattggaagtacagc

SEQ ID NO: 2137289 - DNA, 25 bp, Homo sapien
gggataatgctgcaattgtgaactg

SEQ ID NO: 2137290 - DNA, 25 bp, Homo sapien
aagtacagcatcagtctgaactggg

SEQ ID NO: 2137291 - DNA, 25 bp, Homo sapien
ctgtatttgaggtggtagagctaga

SEQ ID NO: 2137292 - DNA, 25 bp, Homo sapien
gagggggcaccattgtaccaccatt

SEQ ID NO: 2137293 - DNA, 25 bp, Homo sapien
gtagttcaagcttctgtcacgaggg

SEQ ID NO: 2137294 - DNA, 25 bp, Homo sapien
gtcacgagggggcaccattgtacca

SEQ ID NO: 2137295 - DNA, 25 bp, Homo sapien
tgtagttcaagcttctgtcacgagg

SEQ ID NO: 2137296 - DNA, 25 bp, Homo sapien
tcagtcacattcatcacgtttcggg

SEQ ID NO: 2137297 - DNA, 25 bp, Homo sapien
tgtgttgaacaacgtagacagtata

SEQ ID NO: 2137298 - DNA, 25 bp, Homo sapien
cacgtttcgggtgttcaactgccac

SEQ ID NO: 2137299 - DNA, 25 bp, Homo sapien
tgccacagttgccattagctattgt

SEQ ID NO: 2137300 - DNA, 25 bp, Homo sapien
cttcctggggctcaataaattcatt

SEQ ID NO: 2137301 - DNA, 25 bp, Homo sapien
agtttactggtctggcaactaggat

SEQ ID NO: 2137302 - DNA, 25 bp, Homo sapien
gatataggttcaatgacccccatct

SEQ ID NO: 2137303 - DNA, 25 bp, Homo sapien
tctggcaactaggatataggttcaa

SEQ ID NO: 2137304 - DNA, 25 bp, Homo sapien
cagaaatcggtaacaccagggtagc

SEQ ID NO: 2137305 - DNA, 25 bp, Homo sapien
catagagtgggacttcaacggcctt

SEQ ID NO: 2137306 - DNA, 25 bp, Homo sapien
ttctaaaagggaggctactcagggc

SEQ ID NO: 2137307 - DNA, 25 bp, Homo sapien
tcagatcatgcggtattcagccaca

SEQ ID NO: 2137308 - DNA, 25 bp, Homo sapien
tgtccatagaatggtgcacactttc

SEQ ID NO: 2137309 - DNA, 25 bp, Homo sapien
ggtgcacactttccagacatgtttc

SEQ ID NO: 2137310 - DNA, 25 bp, Homo sapien
gacccaaaaggtctgttgtccatag

SEQ ID NO: 2137311 - DNA, 25 bp, Homo sapien
tgttgtccatagaatggtgcacact

SEQ ID NO: 2137312 - DNA, 25 bp, Homo sapien
cacctctcagtagctcaactcctac

SEQ ID NO: 2137313 - DNA, 25 bp, Homo sapien
tcacctctcagtagctcaactccta

SEQ ID NO: 2137314 - DNA, 25 bp, Homo sapien
ctctaggctttccaatttggtggta

SEQ ID NO: 2137315 - DNA, 25 bp, Homo sapien
tccttgaggtgaacagttagattgg

SEQ ID NO: 2137316 - DNA, 25 bp, Homo sapien
tgtgtccttctacttaactacttcc

SEQ ID NO: 2137317 - DNA, 25 bp, Homo sapien
cttccttcaccattaaatagaatac

SEQ ID NO: 2137318 - DNA, 25 bp, Homo sapien
cattatgatgttagccctgagttta

SEQ ID NO: 2137319 - DNA, 25 bp, Homo sapien
tgagttacgttcttttgatgcctag

SEQ ID NO: 2137320 - DNA, 25 bp, Homo sapien
tcgtcattggtgcatacaaacacta

SEQ ID NO: 2137321 - DNA, 25 bp, Homo sapien
tcatcatcagctatttcgtcattgg

SEQ ID NO: 2137322 - DNA, 25 bp, Homo sapien
tgaggaggatgtcctttctccaacg

SEQ ID NO: 2137323 - DNA, 25 bp, Homo sapien
tggtctggattggtttggttatccg

SEQ ID NO: 2137324 - DNA, 25 bp, Homo sapien
gatgtcctttctccaacgtacgttc

SEQ ID NO: 2137325 - DNA, 25 bp, Homo sapien
tctccaacgtacgttcttggtgcct

SEQ ID NO: 2137326 - DNA, 25 bp, Homo sapien
gaaccatacagtttgccagcaagtg

SEQ ID NO: 2137327 - DNA, 25 bp, Homo sapien
caagagtgcatcagttgtggtcctg

SEQ ID NO: 2137328 - DNA, 25 bp, Homo sapien
ggatgccaactttccctagggacag

SEQ ID NO: 2137329 - DNA, 25 bp, Homo sapien
tatttcagggcaaccagtgaccagg

SEQ ID NO: 2137330 - DNA, 25 bp, Homo sapien
tctctatatgttccccgatttctcg

SEQ ID NO: 2137331 - DNA, 25 bp, Homo sapien
attccaagatttcatcttagtttgg

SEQ ID NO: 2137332 - DNA, 25 bp, Homo sapien
ctggtgagctagtgcaatgtttcgg

SEQ ID NO: 2137333 - DNA, 25 bp, Homo sapien
tgttcgattgattgctgagactttc

SEQ ID NO: 2137334 - DNA, 25 bp, Homo sapien
taggtttcgacatttaacatagtct

SEQ ID NO: 2137335 - DNA, 25 bp, Homo sapien
gacccaaattcattctagcttgtag

SEQ ID NO: 2137336 - DNA, 25 bp, Homo sapien
ggacccaaattcattctagcttgta

SEQ ID NO: 2137337 - DNA, 25 bp, Homo sapien
cccaaattcattctagcttgtaggg

SEQ ID NO: 2137338 - DNA, 25 bp, Homo sapien
gactgtgttattgtcatataggtcc

SEQ ID NO: 2137339 - DNA, 25 bp, Homo sapien
tactgagatgaagtactattttatt

SEQ ID NO: 2137340 - DNA, 25 bp, Homo sapien
tcaatgttagtactgagatgaagta

SEQ ID NO: 2137341 - DNA, 25 bp, Homo sapien
tattttggactgtgttattgtcata

SEQ ID NO: 2137342 - DNA, 25 bp, Homo sapien
cattaatggcatgaaacccacttga

SEQ ID NO: 2137343 - DNA, 25 bp, Homo sapien
ttttgatattatggtgaaactggct

SEQ ID NO: 2137344 - DNA, 25 bp, Homo sapien
cttctagaatctttatgggtgttag

SEQ ID NO: 2137345 - DNA, 25 bp, Homo sapien
ggttccatatgtacccatccatgag

SEQ ID NO: 2137346 - DNA, 25 bp, Homo sapien
tacatcaataagttattcagcggtg

SEQ ID NO: 2137347 - DNA, 25 bp, Homo sapien
tcttgcagttataagatggtgttgc

SEQ ID NO: 2137348 - DNA, 25 bp, Homo sapien
gaaagagtatctttaagccccagac

SEQ ID NO: 2137349 - DNA, 25 bp, Homo sapien
tatttccacagtaacctagtggtga

SEQ ID NO: 2137350 - DNA, 25 bp, Homo sapien
tgtataggggtactgaaggactcca

SEQ ID NO: 2137351 - DNA, 25 bp, Homo sapien
aaagtgagcattcccagtgtatagg

SEQ ID NO: 2137352 - DNA, 25 bp, Homo sapien
ttggtggaaaagtgagcattcccag

SEQ ID NO: 2137353 - DNA, 25 bp, Homo sapien
aattgctgccttttactatgccgag

SEQ ID NO: 2137354 - DNA, 25 bp, Homo sapien
tattgtagtttttgctccttgcgga

SEQ ID NO: 2137355 - DNA, 25 bp, Homo sapien
ttcccgacacaaatctgcattgcag

SEQ ID NO: 2137356 - DNA, 25 bp, Homo sapien
aaagtttgataatggtggtaccgtg

SEQ ID NO: 2137357 - DNA, 25 bp, Homo sapien
tccttgcggacacttctttgctgaa

SEQ ID NO: 2137358 - DNA, 25 bp, Homo sapien
tctgagtgatttcatgaagaccatc

SEQ ID NO: 2137359 - DNA, 25 bp, Homo sapien
agaccatcccgctttcccgtctctg

SEQ ID NO: 2137360 - DNA, 25 bp, Homo sapien
aatcccgctgtgtcagggttcccct

SEQ ID NO: 2137361 - DNA, 25 bp, Homo sapien
gctgtaatgctgaactctgagtgat

SEQ ID NO: 2137362 - DNA, 25 bp, Homo sapien
ggccagaccagcaaggttgtgcgca

SEQ ID NO: 2137363 - DNA, 25 bp, Homo sapien
caaggttgtgcgcagaggcggtgcc

SEQ ID NO: 2137364 - DNA, 25 bp, Homo sapien
aaggttgtgcgcagaggcggtgccg

SEQ ID NO: 2137365 - DNA, 25 bp, Homo sapien
cagaccagcaaggttgtgcgcagag

SEQ ID NO: 2137366 - DNA, 25 bp, Homo sapien
gcaggaagtcgtaggcctggtcggg

SEQ ID NO: 2137367 - DNA, 25 bp, Homo sapien
tcgtaggcctggtcggggctgcccg

SEQ ID NO: 2137368 - DNA, 25 bp, Homo sapien
cccaccagcaggaacttgagcagga

SEQ ID NO: 2137369 - DNA, 25 bp, Homo sapien
aacttgagcaggaagtcgtaggcct

SEQ ID NO: 2137370 - DNA, 25 bp, Homo sapien
cgtcttgtagtcgattccccccagg

SEQ ID NO: 2137371 - DNA, 25 bp, Homo sapien
cccaggtgactgtacggggactcgg

SEQ ID NO: 2137372 - DNA, 25 bp, Homo sapien
ttgtagtcgattccccccaggtgac

SEQ ID NO: 2137373 - DNA, 25 bp, Homo sapien
ccaggtgactgtacggggactcggc

SEQ ID NO: 2137374 - DNA, 25 bp, Homo sapien
tgcaccacgagagtaggagcggaat

SEQ ID NO: 2137375 - DNA, 25 bp, Homo sapien
gtcgtagaccaggatcactccttgt

SEQ ID NO: 2137376 - DNA, 25 bp, Homo sapien
ttaatccatcgatccataccctcga

SEQ ID NO: 2137377 - DNA, 25 bp, Homo sapien
cctcgaaagaccagcggtttgcaat

SEQ ID NO: 2137378 - DNA, 25 bp, Homo sapien
atgccagatgtaggcgattccccac

SEQ ID NO: 2137379 - DNA, 25 bp, Homo sapien
gaatgccagatgtaggcgattcccc

SEQ ID NO: 2137380 - DNA, 25 bp, Homo sapien
tgaatgccagatgtaggcgattccc

SEQ ID NO: 2137381 - DNA, 25 bp, Homo sapien
cttgaatgccagatgtaggcgattc

SEQ ID NO: 2137382 - DNA, 25 bp, Homo sapien
ccaggcgctcggcgtaggcctgggc

SEQ ID NO: 2137383 - DNA, 25 bp, Homo sapien
tgttgaaattgcacagagggctgac

SEQ ID NO: 2137384 - DNA, 25 bp, Homo sapien
gatgttgaaattgcacagagggctg

SEQ ID NO: 2137385 - DNA, 25 bp, Homo sapien
tgatgttgaaattgcacagagggct

SEQ ID NO: 2137386 - DNA, 25 bp, Homo sapien
atgttgaaattgcacagagggctga

SEQ ID NO: 2137387 - DNA, 25 bp, Homo sapien
tcggcctcccgagccagttcaacct

SEQ ID NO: 2137388 - DNA, 25 bp, Homo sapien
gcctcccgagccagttcaacctgtg

SEQ ID NO: 2137389 - DNA, 25 bp, Homo sapien
agccagttcaacctgtgccgcagca

SEQ ID NO: 2137390 - DNA, 25 bp, Homo sapien
tgcaagctcagtaccttgctcggcc

SEQ ID NO: 2137391 - DNA, 25 bp, Homo sapien
tgtgcaggacacgatggtgcggcag

SEQ ID NO: 2137392 - DNA, 25 bp, Homo sapien
gagcttgtccaccagatgcacaggt

SEQ ID NO: 2137393 - DNA, 25 bp, Homo sapien
gagaggcctcgcatcatcctggcat

SEQ ID NO: 2137394 - DNA, 25 bp, Homo sapien
ctggcattcaggcccttagccatgg

SEQ ID NO: 2137395 - DNA, 25 bp, Homo sapien
ctggtgcagtttttgggtgggctct

SEQ ID NO: 2137396 - DNA, 25 bp, Homo sapien
cagctgtttctggtgcagtttttgg

SEQ ID NO: 2137397 - DNA, 25 bp, Homo sapien
tctggggtgggcagacgatcttcac

SEQ ID NO: 2137398 - DNA, 25 bp, Homo sapien
ggctctggggtgggcagacgatctt

SEQ ID NO: 2137399 - DNA, 25 bp, Homo sapien
tatttctttgaatctagaatgcatc

SEQ ID NO: 2137400 - DNA, 25 bp, Homo sapien
tttctttgaatctagaatgcatctt

SEQ ID NO: 2137401 - DNA, 25 bp, Homo sapien
tctttgaatctagaatgcatcttcc

SEQ ID NO: 2137402 - DNA, 25 bp, Homo sapien
ttctttgaatctagaatgcatcttc

SEQ ID NO: 2137403 - DNA, 25 bp, Homo sapien
ttcttactgacccattgaaaccatg

SEQ ID NO: 2137404 - DNA, 25 bp, Homo sapien
ctgacccattgaaaccatgttggct

SEQ ID NO: 2137405 - DNA, 25 bp, Homo sapien
tactgacccattgaaaccatgttgg

SEQ ID NO: 2137406 - DNA, 25 bp, Homo sapien
ttactgacccattgaaaccatgttg

SEQ ID NO: 2137407 - DNA, 25 bp, Homo sapien
tcattacccagaggggttgtggagt

SEQ ID NO: 2137408 - DNA, 25 bp, Homo sapien
tctgccttcatcattacccagaggg

SEQ ID NO: 2137409 - DNA, 25 bp, Homo sapien
catcattacccagaggggttgtgga

SEQ ID NO: 2137410 - DNA, 25 bp, Homo sapien
tcctctgccttcatcattacccaga

SEQ ID NO: 2137411 - DNA, 25 bp, Homo sapien
tacacccatgtctcttggtacaaag

SEQ ID NO: 2137412 - DNA, 25 bp, Homo sapien
aggatcagccaactcgtgtggccct

SEQ ID NO: 2137413 - DNA, 25 bp, Homo sapien
tcaaggatcagccaactcgtgtggc

SEQ ID NO: 2137414 - DNA, 25 bp, Homo sapien
ctacacccatgtctcttggtacaaa

SEQ ID NO: 2137415 - DNA, 25 bp, Homo sapien
tcctgggcagctgcgtccataatgt

SEQ ID NO: 2137416 - DNA, 25 bp, Homo sapien
ggtcctgggcagctgcgtccataat

SEQ ID NO: 2137417 - DNA, 25 bp, Homo sapien
tgggtcctgggcagctgcgtccata

SEQ ID NO: 2137418 - DNA, 25 bp, Homo sapien
taagtgggtcctgggcagctgcgtc

SEQ ID NO: 2137419 - DNA, 25 bp, Homo sapien
gggcaccacggtaccaccattatcg

SEQ ID NO: 2137420 - DNA, 25 bp, Homo sapien
cgaactctatcaagaagggtctgca

SEQ ID NO: 2137421 - DNA, 25 bp, Homo sapien
tcagccttctgtcacgagagggcac

SEQ ID NO: 2137422 - DNA, 25 bp, Homo sapien
aatgtccgctttgccacccagagtt

SEQ ID NO: 2137423 - DNA, 25 bp, Homo sapien
tactgaacataaatccaagctgtcg

SEQ ID NO: 2137424 - DNA, 25 bp, Homo sapien
caagctgtcgcactccctaactgtg

SEQ ID NO: 2137425 - DNA, 25 bp, Homo sapien
tgtcgccaggattgcaatgaacatg

SEQ ID NO: 2137426 - DNA, 25 bp, Homo sapien
gaacatgatcttaccaaggttgcaa

SEQ ID NO: 2137427 - DNA, 25 bp, Homo sapien
catactagtcgattagaggcctctc

SEQ ID NO: 2137428 - DNA, 25 bp, Homo sapien
gaggcctctcatgagctctaaagtg

SEQ ID NO: 2137429 - DNA, 25 bp, Homo sapien
gaagaatgtaattgacctcagctgg

SEQ ID NO: 2137430 - DNA, 25 bp, Homo sapien
tacaggagtaaccagtacagggtcc

SEQ ID NO: 2137431 - DNA, 25 bp, Homo sapien
ttatttcaccataaatttaacacag

SEQ ID NO: 2137432 - DNA, 25 bp, Homo sapien
cagtgaatgctttttcaaattaata

SEQ ID NO: 2137433 - DNA, 25 bp, Homo sapien
ccataaatttaacacagtgaatgct

SEQ ID NO: 2137434 - DNA, 25 bp, Homo sapien
gtttaatcaactttatttcaccata

SEQ ID NO: 2137435 - DNA, 25 bp, Homo sapien
agggccctgctgatggcgtcatcgg

SEQ ID NO: 2137436 - DNA, 25 bp, Homo sapien
ctgctgatggcgtcatcggcagctg

SEQ ID NO: 2137437 - DNA, 25 bp, Homo sapien
tcttgaatgtaggactgtcagcgcc

SEQ ID NO: 2137438 - DNA, 25 bp, Homo sapien
tccttcctccaactcttgaatgtag

SEQ ID NO: 2137439 - DNA, 25 bp, Homo sapien
agaaaggaacctgatgctggctgta

SEQ ID NO: 2137440 - DNA, 25 bp, Homo sapien
ggaagcatctggtctgagctagaaa

SEQ ID NO: 2137441 - DNA, 25 bp, Homo sapien
gatggaaagctggcagttgggaagc

SEQ ID NO: 2137442 - DNA, 25 bp, Homo sapien
tagaaaggaacctgatgctggctgt

SEQ ID NO: 2137443 - DNA, 25 bp, Homo sapien
gaatctcacctagggactgccagtc

SEQ ID NO: 2137444 - DNA, 25 bp, Homo sapien
ccatggctctatagtcaccagtgag

SEQ ID NO: 2137445 - DNA, 25 bp, Homo sapien
gaaccagaatcaggcaggccagaca

SEQ ID NO: 2137446 - DNA, 25 bp, Homo sapien
cagagctagggctccaatgggaact

SEQ ID NO: 2137447 - DNA, 25 bp, Homo sapien
tccaactgtgccaaactgccaagac

SEQ ID NO: 2137448 - DNA, 25 bp, Homo sapien
tgccaagaccacaacatcctcgtaa

SEQ ID NO: 2137449 - DNA, 25 bp, Homo sapien
caacatcctcgtaaactgctgaatt

SEQ ID NO: 2137450 - DNA, 25 bp, Homo sapien
ccttgcaaaataacaggaacttgtc

SEQ ID NO: 2137451 - DNA, 25 bp, Homo sapien
tgaaggccggaagcagcaacactga

SEQ ID NO: 2137452 - DNA, 25 bp, Homo sapien
gcttctagcggaatatgccccaaag

SEQ ID NO: 2137453 - DNA, 25 bp, Homo sapien
gggtcttcacctctaataaggccaa

SEQ ID NO: 2137454 - DNA, 25 bp, Homo sapien
gccaaatccgcatgctgaatgaagg

SEQ ID NO: 2137455 - DNA, 25 bp, Homo sapien
catacccatggttggcaggaacgga

SEQ ID NO: 2137456 - DNA, 25 bp, Homo sapien
gaacggaggctccaggttgataaga

SEQ ID NO: 2137457 - DNA, 25 bp, Homo sapien
caagggccacagctaccattgtcct

SEQ ID NO: 2137458 - DNA, 25 bp, Homo sapien
aggccatgtacaagcaggcagagtg

SEQ ID NO: 2137459 - DNA, 25 bp, Homo sapien
tgtgcatccaggtattcacaaagct

SEQ ID NO: 2137460 - DNA, 25 bp, Homo sapien
gtgtgcatccaggtattcacaaagc

SEQ ID NO: 2137461 - DNA, 25 bp, Homo sapien
ggtgtgcatccaggtattcacaaag

SEQ ID NO: 2137462 - DNA, 25 bp, Homo sapien
gtgcatccaggtattcacaaagctc

SEQ ID NO: 2137463 - DNA, 25 bp, Homo sapien
ttggagctccatcagcagcttcagt

SEQ ID NO: 2137464 - DNA, 25 bp, Homo sapien
ggagctccatcagcagcttcagtca

SEQ ID NO: 2137465 - DNA, 25 bp, Homo sapien
gagctccatcagcagcttcagtcat

SEQ ID NO: 2137466 - DNA, 25 bp, Homo sapien
tggagctccatcagcagcttcagtc

SEQ ID NO: 2137467 - DNA, 25 bp, Homo sapien
gagggttccatcttctccagtctcc

SEQ ID NO: 2137468 - DNA, 25 bp, Homo sapien
agtctccatcaggtcaccaagttcc

SEQ ID NO: 2137469 - DNA, 25 bp, Homo sapien
gaagctgcctccttgacccaagact

SEQ ID NO: 2137470 - DNA, 25 bp, Homo sapien
agactgaagagatatgaaaggccct

SEQ ID NO: 2137471 - DNA, 25 bp, Homo sapien
tggtagatcgcaccagggaaacaag

SEQ ID NO: 2137472 - DNA, 25 bp, Homo sapien
gtgagatcaatggtagatcgcacca

SEQ ID NO: 2137473 - DNA, 25 bp, Homo sapien
gatcaatggtagatcgcaccaggga

SEQ ID NO: 2137474 - DNA, 25 bp, Homo sapien
ctagtgagatcaatggtagatcgca

SEQ ID NO: 2137475 - DNA, 25 bp, Homo sapien
tggtagtctccaacaggcaaagggc

SEQ ID NO: 2137476 - DNA, 25 bp, Homo sapien
cttggtagtctccaacaggcaaagg

SEQ ID NO: 2137477 - DNA, 25 bp, Homo sapien
cagaggatgggggtgacagagtggg

SEQ ID NO: 2137478 - DNA, 25 bp, Homo sapien
gcagaggatgggggtgacagagtgg

SEQ ID NO: 2137479 - DNA, 25 bp, Homo sapien
atgaaacaccaggcagctttagtgc

SEQ ID NO: 2137480 - DNA, 25 bp, Homo sapien
catgaaacaccaggcagctttagtg

SEQ ID NO: 2137481 - DNA, 25 bp, Homo sapien
tgaaacaccaggcagctttagtgca

SEQ ID NO: 2137482 - DNA, 25 bp, Homo sapien
gacatcaacgtaccagtattatcaa

SEQ ID NO: 2137483 - DNA, 25 bp, Homo sapien
ctgtcacaaggcgacatcaacgtac

SEQ ID NO: 2137484 - DNA, 25 bp, Homo sapien
caaggcgacatcaacgtaccagtat

SEQ ID NO: 2137485 - DNA, 25 bp, Homo sapien
tcacaaggcgacatcaacgtaccag

SEQ ID NO: 2137486 - DNA, 25 bp, Homo sapien
ccttttcacgaagacttccagaaag

SEQ ID NO: 2137487 - DNA, 25 bp, Homo sapien
ctgctcagcgatgtttaaactgcag

SEQ ID NO: 2137488 - DNA, 25 bp, Homo sapien
ctccttttcacgaagacttccagaa

SEQ ID NO: 2137489 - DNA, 25 bp, Homo sapien
cgatgtttaaactgcagttcaggct

SEQ ID NO: 2137490 - DNA, 25 bp, Homo sapien
attttaagaggattggccaccctca

SEQ ID NO: 2137491 - DNA, 25 bp, Homo sapien
taaattccaggtattgacaggttca

SEQ ID NO: 2137492 - DNA, 25 bp, Homo sapien
ggttcagaataactaggacctgtcc

SEQ ID NO: 2137493 - DNA, 25 bp, Homo sapien
tcaaccagtaatggcccttaggtaa

SEQ ID NO: 2137494 - DNA, 25 bp, Homo sapien
gtaaattgattcaaatcaatcaagg

SEQ ID NO: 2137495 - DNA, 25 bp, Homo sapien
catccacatcttagctcaagctgct

SEQ ID NO: 2137496 - DNA, 25 bp, Homo sapien
tatgactgactaatagacacgtgga

SEQ ID NO: 2137497 - DNA, 25 bp, Homo sapien
tataagtacaatgtaaaaacaggca

SEQ ID NO: 2137498 - DNA, 25 bp, Homo sapien
gatgagttttgccttatgccctgaa

SEQ ID NO: 2137499 - DNA, 25 bp, Homo sapien
tacgtgggtctcctattaccagctt

SEQ ID NO: 2137500 - DNA, 25 bp, Homo sapien
gttgagtcatagtctgcgggcagtc

SEQ ID NO: 2137501 - DNA, 25 bp, Homo sapien
catgatgtgcccttgttgtaaacct

SEQ ID NO: 2137502 - DNA, 25 bp, Homo sapien
tcgtgtctcgctaccagctccccgc

SEQ ID NO: 2137503 - DNA, 25 bp, Homo sapien
cgtgtctcgctaccagctccccgct

SEQ ID NO: 2137504 - DNA, 25 bp, Homo sapien
gtgtctcgctaccagctccccgctg

SEQ ID NO: 2137505 - DNA, 25 bp, Homo sapien
ttggcggtgacgcacggccctcacg

SEQ ID NO: 2137506 - DNA, 25 bp, Homo sapien
acggccctcacgtgaccgggagctg

SEQ ID NO: 2137507 - DNA, 25 bp, Homo sapien
gccctcacgtgaccgggagctgcag

SEQ ID NO: 2137508 - DNA, 25 bp, Homo sapien
gaaggagggtgagcttggcggtgac

SEQ ID NO: 2137509 - DNA, 25 bp, Homo sapien
catattcttcagtgatgtagtctga

SEQ ID NO: 2137510 - DNA, 25 bp, Homo sapien
gattttttaagtggcgctgacaaac

SEQ ID NO: 2137511 - DNA, 25 bp, Homo sapien
taagtggcgctgacaaacactacat

SEQ ID NO: 2137512 - DNA, 25 bp, Homo sapien
ttttaagtggcgctgacaaacacta

SEQ ID NO: 2137513 - DNA, 25 bp, Homo sapien
cttcatgctatatgtgggatcggac

SEQ ID NO: 2137514 - DNA, 25 bp, Homo sapien
tcaaaaagatttactacacgagaga

SEQ ID NO: 2137515 - DNA, 25 bp, Homo sapien
gatttactacacgagagacatttaa

SEQ ID NO: 2137516 - DNA, 25 bp, Homo sapien
tatgtgggatcggacttagagcacg

SEQ ID NO: 2137517 - DNA, 25 bp, Homo sapien
atcaatgcttaataagtttgctgta

SEQ ID NO: 2137518 - DNA, 25 bp, Homo sapien
tttgctgtagtaaggatacctttca

SEQ ID NO: 2137519 - DNA, 25 bp, Homo sapien
aagtttgctgtagtaaggatacctt

SEQ ID NO: 2137520 - DNA, 25 bp, Homo sapien
gctgtagtaaggatacctttcattt

SEQ ID NO: 2137521 - DNA, 25 bp, Homo sapien
gccacaaactgagcattcaaatagt

SEQ ID NO: 2137522 - DNA, 25 bp, Homo sapien
tcttgtggtcgttctttaaattgag

SEQ ID NO: 2137523 - DNA, 25 bp, Homo sapien
tctcttccagtgaggagcctgtcgg

SEQ ID NO: 2137524 - DNA, 25 bp, Homo sapien
ttacataaccgaatccaaggcaacc

SEQ ID NO: 2137525 - DNA, 25 bp, Homo sapien
tatcctccacagaggctccttgtga

SEQ ID NO: 2137526 - DNA, 25 bp, Homo sapien
tgagaagcactccttgttggaggtg

SEQ ID NO: 2137527 - DNA, 25 bp, Homo sapien
gaactcaatgccctcgtactcgatg

SEQ ID NO: 2137528 - DNA, 25 bp, Homo sapien
ttgcttctgggcttatcctccacag

SEQ ID NO: 2137529 - DNA, 25 bp, Homo sapien
ccaccttgctatataagaggaggag

SEQ ID NO: 2137530 - DNA, 25 bp, Homo sapien
gcctggtacaatgggcaggacttgt

SEQ ID NO: 2137531 - DNA, 25 bp, Homo sapien
gagagtccttaaagagaagctgggc

SEQ ID NO: 2137532 - DNA, 25 bp, Homo sapien
ccttggagccgccagagagtcctta

SEQ ID NO: 2137533 - DNA, 25 bp, Homo sapien
gttttggtaaccattgcacaaggtc

SEQ ID NO: 2137534 - DNA, 25 bp, Homo sapien
ttggtaaccattgcacaaggtccag

SEQ ID NO: 2137535 - DNA, 25 bp, Homo sapien
aggtccttgtggaagttatggtgac

SEQ ID NO: 2137536 - DNA, 25 bp, Homo sapien
caggtccttgtggaagttatggtga

SEQ ID NO: 2137537 - DNA, 25 bp, Homo sapien
gaaaaataagcatcccgttccattg

SEQ ID NO: 2137538 - DNA, 25 bp, Homo sapien
tcccgttccattgaatagttgtgct

SEQ ID NO: 2137539 - DNA, 25 bp, Homo sapien
ttgatggggccctcatcaggtgtgc

SEQ ID NO: 2137540 - DNA, 25 bp, Homo sapien
tcaggtgtgccatgatatggggttc

SEQ ID NO: 2137541 - DNA, 25 bp, Homo sapien
cagggatactgatctggacagctgc

SEQ ID NO: 2137542 - DNA, 25 bp, Homo sapien
ttcagggatactgatctggacagct

SEQ ID NO: 2137543 - DNA, 25 bp, Homo sapien
tcagggatactgatctggacagctg

SEQ ID NO: 2137544 - DNA, 25 bp, Homo sapien
agggatactgatctggacagctgcg

SEQ ID NO: 2137545 - DNA, 25 bp, Homo sapien
tctgaagctccaataaggccccaga

SEQ ID NO: 2137546 - DNA, 25 bp, Homo sapien
tttctgaagctccaataaggcccca

SEQ ID NO: 2137547 - DNA, 25 bp, Homo sapien
tggatggttcagggactgggtccca

SEQ ID NO: 2137548 - DNA, 25 bp, Homo sapien
tctttctgaagctccaataaggccc

SEQ ID NO: 2137549 - DNA, 25 bp, Homo sapien
gtcaaaggactcaagacagcccagg

SEQ ID NO: 2137550 - DNA, 25 bp, Homo sapien
tcaagtcaaaggactcaagacagcc

SEQ ID NO: 2137551 - DNA, 25 bp, Homo sapien
ggactcaagacagcccaggaatcat

SEQ ID NO: 2137552 - DNA, 25 bp, Homo sapien
tcaagacagcccaggaatcatctcc

SEQ ID NO: 2137553 - DNA, 25 bp, Homo sapien
ctcttggtggtagtgataatgatga

SEQ ID NO: 2137554 - DNA, 25 bp, Homo sapien
tgatgatagaaatgaaatcctgccc

SEQ ID NO: 2137555 - DNA, 25 bp, Homo sapien
tctacaacccctcttggtggtagtg

SEQ ID NO: 2137556 - DNA, 25 bp, Homo sapien
aatcctgccctttggtccgagagac

SEQ ID NO: 2137557 - DNA, 25 bp, Homo sapien
ggtttagataacagtcgtcatttct

SEQ ID NO: 2137558 - DNA, 25 bp, Homo sapien
tgggaaactgcttttccaatatcaa

SEQ ID NO: 2137559 - DNA, 25 bp, Homo sapien
aatgggaaactgcttttccaatatc

SEQ ID NO: 2137560 - DNA, 25 bp, Homo sapien
caatgggaaactgcttttccaatat

SEQ ID NO: 2137561 - DNA, 25 bp, Homo sapien
gggaaactgcttttccaatatcaat

SEQ ID NO: 2137562 - DNA, 25 bp, Homo sapien
aggtcatagatcacagggtggtgac

SEQ ID NO: 2137563 - DNA, 25 bp, Homo sapien
gttgaggtcatagatcacagggtgg

SEQ ID NO: 2137564 - DNA, 25 bp, Homo sapien
tgaggtcatagatcacagggtggtg

SEQ ID NO: 2137565 - DNA, 25 bp, Homo sapien
cggttgaggtcatagatcacagggt

SEQ ID NO: 2137566 - DNA, 25 bp, Homo sapien
tcttctgtgaaatcccaaggaaggt

SEQ ID NO: 2137567 - DNA, 25 bp, Homo sapien
ggtcatgctgatctctatttctaca

SEQ ID NO: 2137568 - DNA, 25 bp, Homo sapien
cccaaggaaggtcatgctgatctct

SEQ ID NO: 2137569 - DNA, 25 bp, Homo sapien
ggaaggtcatgctgatctctatttc

SEQ ID NO: 2137570 - DNA, 25 bp, Homo sapien
aatctgcccacaattgctctgtgta

SEQ ID NO: 2137571 - DNA, 25 bp, Homo sapien
ttacataaatctgcccacaattgct

SEQ ID NO: 2137572 - DNA, 25 bp, Homo sapien
gctctgtgtaacagattcttctctg

SEQ ID NO: 2137573 - DNA, 25 bp, Homo sapien
ggcatcttacataaatctgcccaca

SEQ ID NO: 2137574 - DNA, 25 bp, Homo sapien
cagttcatgccattgttgccagtga

SEQ ID NO: 2137575 - DNA, 25 bp, Homo sapien
catgtcttctggtggttatcaatcc

SEQ ID NO: 2137576 - DNA, 25 bp, Homo sapien
gctgctgccagtgtagccactccta

SEQ ID NO: 2137577 - DNA, 25 bp, Homo sapien
ggtggttatcaatcccaaggctgac

SEQ ID NO: 2137578 - DNA, 25 bp, Homo sapien
gccagagcgagacaacactcagtgt

SEQ ID NO: 2137579 - DNA, 25 bp, Homo sapien
ggtaccaccgccgagaatggaacga

SEQ ID NO: 2137580 - DNA, 25 bp, Homo sapien
aatggaacgagccacgacggctctg

SEQ ID NO: 2137581 - DNA, 25 bp, Homo sapien
cactcagtgttggccggtcacgtgg

SEQ ID NO: 2137582 - DNA, 25 bp, Homo sapien
ggctgcatcgcggaccgattgcttc

SEQ ID NO: 2137583 - DNA, 25 bp, Homo sapien
gcggaccgattgcttctccgcacgg

SEQ ID NO: 2137584 - DNA, 25 bp, Homo sapien
ggaccgattgcttctccgcacggct

SEQ ID NO: 2137585 - DNA, 25 bp, Homo sapien
gcatcgcggaccgattgcttctccg

SEQ ID NO: 2137586 - DNA, 25 bp, Homo sapien
cattttctgcaccaagaagtgcggg

SEQ ID NO: 2137587 - DNA, 25 bp, Homo sapien
aaagcttgcgctgatggcgtaggca

SEQ ID NO: 2137588 - DNA, 25 bp, Homo sapien
gaaaagcttgcgctgatggcgtagg

SEQ ID NO: 2137589 - DNA, 25 bp, Homo sapien
tggcgtaggcaggtgtttccgaagg

SEQ ID NO: 2137590 - DNA, 25 bp, Homo sapien
aacgctagctaggaactaccgccat

SEQ ID NO: 2137591 - DNA, 25 bp, Homo sapien
tagctaggaactaccgccatccggc

SEQ ID NO: 2137592 - DNA, 25 bp, Homo sapien
gctgctgcagcagaacgctagctag

SEQ ID NO: 2137593 - DNA, 25 bp, Homo sapien
tgcagcagaacgctagctaggaact

SEQ ID NO: 2137594 - DNA, 25 bp, Homo sapien
cctcctccggattcttgacgcgagg

SEQ ID NO: 2137595 - DNA, 25 bp, Homo sapien
gattcttgacgcgaggtgcgccgcc

SEQ ID NO: 2137596 - DNA, 25 bp, Homo sapien
attcttgacgcgaggtgcgccgccg

SEQ ID NO: 2137597 - DNA, 25 bp, Homo sapien
tctcctcctccggattcttgacgcg

SEQ ID NO: 2137598 - DNA, 25 bp, Homo sapien
tggactgataagcactgaggacaga

SEQ ID NO: 2137599 - DNA, 25 bp, Homo sapien
ctgagaagccagtatgccctgtggg

SEQ ID NO: 2137600 - DNA, 25 bp, Homo sapien
gacagaggccctactaggcaccttt

SEQ ID NO: 2137601 - DNA, 25 bp, Homo sapien
agaaaatgggctgaattcttggtgg

SEQ ID NO: 2137602 - DNA, 25 bp, Homo sapien
caatatgcctattaggtatggccca

SEQ ID NO: 2137603 - DNA, 25 bp, Homo sapien
tttccccgttgagattgtttgccgc

SEQ ID NO: 2137604 - DNA, 25 bp, Homo sapien
tcgaaaattagggacaagtcgccta

SEQ ID NO: 2137605 - DNA, 25 bp, Homo sapien
tgtttgccgctagttcctctttgga

SEQ ID NO: 2137606 - DNA, 25 bp, Homo sapien
caaggtatgaggcaaaagtcataat

SEQ ID NO: 2137607 - DNA, 25 bp, Homo sapien
cataatggttgtcaggttcaggagt

SEQ ID NO: 2137608 - DNA, 25 bp, Homo sapien
gttcaggagtttggaagcgcatata

SEQ ID NO: 2137609 - DNA, 25 bp, Homo sapien
gaagcgcatatagtgcctcatctgc

SEQ ID NO: 2137610 - DNA, 25 bp, Homo sapien
gtgaattgccatgctgaccgtaact

SEQ ID NO: 2137611 - DNA, 25 bp, Homo sapien
gagccccactctgtgagtctggacg

SEQ ID NO: 2137612 - DNA, 25 bp, Homo sapien
ggtagactcactctgaaaaacacta

SEQ ID NO: 2137613 - DNA, 25 bp, Homo sapien
gaccgtaacttttaggctgagacaa

SEQ ID NO: 2137614 - DNA, 25 bp, Homo sapien
ccacgcccagtctggggtctctttt

SEQ ID NO: 2137615 - DNA, 25 bp, Homo sapien
ctgatcctattcatgaggactctgc

SEQ ID NO: 2137616 - DNA, 25 bp, Homo sapien
ataagggtactgatcctattcatga

SEQ ID NO: 2137617 - DNA, 25 bp, Homo sapien
tctcttttataagggtactgatcct

SEQ ID NO: 2137618 - DNA, 25 bp, Homo sapien
tggtgtgcactgaggcactgttcac

SEQ ID NO: 2137619 - DNA, 25 bp, Homo sapien
tgtggcccctcaagattggcgaaga

SEQ ID NO: 2137620 - DNA, 25 bp, Homo sapien
ttcatcggtgatgccatttgtggcc

SEQ ID NO: 2137621 - DNA, 25 bp, Homo sapien
ctcaagattggcgaagaccagagtg

SEQ ID NO: 2137622 - DNA, 25 bp, Homo sapien
caggttatggcaaagcagcatattt

SEQ ID NO: 2137623 - DNA, 25 bp, Homo sapien
tggattttgacccattttccaggtc

SEQ ID NO: 2137624 - DNA, 25 bp, Homo sapien
taatgaacacgtgtctcacacacaa

SEQ ID NO: 2137625 - DNA, 25 bp, Homo sapien
tccttggtaccagcatctcattgga

SEQ ID NO: 2137626 - DNA, 25 bp, Homo sapien
ccgttaggcatttggaccctgaaga

SEQ ID NO: 2137627 - DNA, 25 bp, Homo sapien
aacaagtttgtgatgatgcattgga

SEQ ID NO: 2137628 - DNA, 25 bp, Homo sapien
gcttagggaagagataagaagagta

SEQ ID NO: 2137629 - DNA, 25 bp, Homo sapien
tgataagaggagtagatgagcttga

SEQ ID NO: 2137630 - DNA, 25 bp, Homo sapien
acacaaatcgaggtgagggaagaga

SEQ ID NO: 2137631 - DNA, 25 bp, Homo sapien
ggaaaatcccctgaatccctgcagg

SEQ ID NO: 2137632 - DNA, 25 bp, Homo sapien
gatatttggttttttgggcgcgaca

SEQ ID NO: 2137633 - DNA, 25 bp, Homo sapien
taaaggtgcaattgcttcaggtctc

SEQ ID NO: 2137634 - DNA, 25 bp, Homo sapien
gcgaagataacagtttattgtctcc

SEQ ID NO: 2137635 - DNA, 25 bp, Homo sapien
tcctcctggtaatctgagaaaggcg

SEQ ID NO: 2137636 - DNA, 25 bp, Homo sapien
tccgattggcaaatacgaaaaaaga

SEQ ID NO: 2137637 - DNA, 25 bp, Homo sapien
gaaaggcgaataaatactccagggc

SEQ ID NO: 2137638 - DNA, 25 bp, Homo sapien
ttcaatgctggataggattccaggg

SEQ ID NO: 2137639 - DNA, 25 bp, Homo sapien
catttcaatgctggataggattcca

SEQ ID NO: 2137640 - DNA, 25 bp, Homo sapien
tccaggggaaatggtggactgtagg

SEQ ID NO: 2137641 - DNA, 25 bp, Homo sapien
tcaaccttagattcttttccagccc

SEQ ID NO: 2137642 - DNA, 25 bp, Homo sapien
gaaagacttagaagatgtcccatat

SEQ ID NO: 2137643 - DNA, 25 bp, Homo sapien
aaatgggtggttttcattggatgca

SEQ ID NO: 2137644 - DNA, 25 bp, Homo sapien
agatgtacaggatccattcgcccca

SEQ ID NO: 2137645 - DNA, 25 bp, Homo sapien
catttgccggcctatgtgctttaac

SEQ ID NO: 2137646 - DNA, 25 bp, Homo sapien
cctttgaatgttagtgaatactgtg

SEQ ID NO: 2137647 - DNA, 25 bp, Homo sapien
tggccctacctttgaatgttagtga

SEQ ID NO: 2137648 - DNA, 25 bp, Homo sapien
cctacctttgaatgttagtgaatac

SEQ ID NO: 2137649 - DNA, 25 bp, Homo sapien
ttgaatgttagtgaatactgtgtgc

SEQ ID NO: 2137650 - DNA, 25 bp, Homo sapien
ttggccacaagcacgcacggcacgc

SEQ ID NO: 2137651 - DNA, 25 bp, Homo sapien
gcacgcacggcacgcttgtctgcag

SEQ ID NO: 2137652 - DNA, 25 bp, Homo sapien
cacaagcacgcacggcacgcttgtc

SEQ ID NO: 2137653 - DNA, 25 bp, Homo sapien
ttcccttggccacaagcacgcacgg

SEQ ID NO: 2137654 - DNA, 25 bp, Homo sapien
cagggtgagagaagccgattatttc

SEQ ID NO: 2137655 - DNA, 25 bp, Homo sapien
aattatctccgacgattttgcagcg

SEQ ID NO: 2137656 - DNA, 25 bp, Homo sapien
gaacctgggattctcatcatcaccg

SEQ ID NO: 2137657 - DNA, 25 bp, Homo sapien
taaatctctaggtgtctctcaaaag

SEQ ID NO: 2137658 - DNA, 25 bp, Homo sapien
gaggaaggagctatctgtggatcaa

SEQ ID NO: 2137659 - DNA, 25 bp, Homo sapien
aggggcggggaggaaggagctatct

SEQ ID NO: 2137660 - DNA, 25 bp, Homo sapien
ggaaggagctatctgtggatcaacc

SEQ ID NO: 2137661 - DNA, 25 bp, Homo sapien
gcggggaggaaggagctatctgtgg

SEQ ID NO: 2137662 - DNA, 25 bp, Homo sapien
tgtgcggggtagtttcctgctcctt

SEQ ID NO: 2137663 - DNA, 25 bp, Homo sapien
ctgtgcggggtagtttcctgctcct

SEQ ID NO: 2137664 - DNA, 25 bp, Homo sapien
cccagatgtctgtgaacacagatcc

SEQ ID NO: 2137665 - DNA, 25 bp, Homo sapien
tgtctgtgaacacagatcctgggac

SEQ ID NO: 2137666 - DNA, 25 bp, Homo sapien
tgttgttgttgtttcctgcttaact

SEQ ID NO: 2137667 - DNA, 25 bp, Homo sapien
atgttgttgttgtttcctgcttaac

SEQ ID NO: 2137668 - DNA, 25 bp, Homo sapien
gatgttgttgttgtttcctgcttaa

SEQ ID NO: 2137669 - DNA, 25 bp, Homo sapien
gcctatggttagaatgcagagccct

SEQ ID NO: 2137670 - DNA, 25 bp, Homo sapien
ccctctttggcacgctgcactttgg

SEQ ID NO: 2137671 - DNA, 25 bp, Homo sapien
gacggtcccgagaatgcctatggtt

SEQ ID NO: 2137672 - DNA, 25 bp, Homo sapien
gaagcagcctctgtctaaaattccc

SEQ ID NO: 2137673 - DNA, 25 bp, Homo sapien
gaatgactggagtaaaacgatagca

SEQ ID NO: 2137674 - DNA, 25 bp, Homo sapien
aatctcagcaacatcgaatgactgg

SEQ ID NO: 2137675 - DNA, 25 bp, Homo sapien
aagcagtggcaacattaataacaga

SEQ ID NO: 2137676 - DNA, 25 bp, Homo sapien
ccttccaaaggcgattgacaagttc

SEQ ID NO: 2137677 - DNA, 25 bp, Homo sapien
aagcaatagaagttaggtcctagaa

SEQ ID NO: 2137678 - DNA, 25 bp, Homo sapien
tcaacttattgtgaatagaagcaca

SEQ ID NO: 2137679 - DNA, 25 bp, Homo sapien
tagtccataacgctcaattcttagg

SEQ ID NO: 2137680 - DNA, 25 bp, Homo sapien
tagaagcacaaaaatggatgccatt

SEQ ID NO: 2137681 - DNA, 25 bp, Homo sapien
cttctttcgagaattgtctcttcca

SEQ ID NO: 2137682 - DNA, 25 bp, Homo sapien
tacttctttcgagaattgtctcttc

SEQ ID NO: 2137683 - DNA, 25 bp, Homo sapien
ttttctacttctttcgagaattgtc

SEQ ID NO: 2137684 - DNA, 25 bp, Homo sapien
tctacttctttcgagaattgtctct

SEQ ID NO: 2137685 - DNA, 25 bp, Homo sapien
gcaaaattcccgcaagtttgactcc

SEQ ID NO: 2137686 - DNA, 25 bp, Homo sapien
tatccagacgggaacaaggaccaga

SEQ ID NO: 2137687 - DNA, 25 bp, Homo sapien
ccgcctgcgctgctgaaggaagctg

SEQ ID NO: 2137688 - DNA, 25 bp, Homo sapien
gaccagattaccaggacttctgcac

SEQ ID NO: 2137689 - DNA, 25 bp, Homo sapien
cagttcccgtagacctggaggtgga

SEQ ID NO: 2137690 - DNA, 25 bp, Homo sapien
cacagtgcatgcaagtcagttcgtt

SEQ ID NO: 2137691 - DNA, 25 bp, Homo sapien
tccggaaagcagtcttagatagcag

SEQ ID NO: 2137692 - DNA, 25 bp, Homo sapien
gccagagactgacacacgtagcttt

SEQ ID NO: 2137693 - DNA, 25 bp, Homo sapien
cttgctggaaacaacagccctgcag

SEQ ID NO: 2137694 - DNA, 25 bp, Homo sapien
ggcactgatcgggtcagtttcttcc

SEQ ID NO: 2137695 - DNA, 25 bp, Homo sapien
cttttctagctttgggtcttgctgg

SEQ ID NO: 2137696 - DNA, 25 bp, Homo sapien
ctagctttgggtcttgctggaaaca

SEQ ID NO: 2137697 - DNA, 25 bp, Homo sapien
gggagccggcaggaacggtggcgct

SEQ ID NO: 2137698 - DNA, 25 bp, Homo sapien
ccaccccaggagactttataatatt

SEQ ID NO: 2137699 - DNA, 25 bp, Homo sapien
cggtggcgcttacaacctttgtctc

SEQ ID NO: 2137700 - DNA, 25 bp, Homo sapien
caggagactttataatattcctctc

SEQ ID NO: 2137701 - DNA, 25 bp, Homo sapien
caaggccctcctttccgccgtccag

SEQ ID NO: 2137702 - DNA, 25 bp, Homo sapien
tatcttccacctaagaagcccagtc

SEQ ID NO: 2137703 - DNA, 25 bp, Homo sapien
atatcttccacctaagaagcccagt

SEQ ID NO: 2137704 - DNA, 25 bp, Homo sapien
gcaatcagagcttcactatccccac

SEQ ID NO: 2137705 - DNA, 25 bp, Homo sapien
aatatcttccacctaagaagcccag

SEQ ID NO: 2137706 - DNA, 25 bp, Homo sapien
gtatctgtctacctctcttccttcc

SEQ ID NO: 2137707 - DNA, 25 bp, Homo sapien
cttgcttattcttctttgaatacaa

SEQ ID NO: 2137708 - DNA, 25 bp, Homo sapien
tttcttgcttattcttctttgaata

SEQ ID NO: 2137709 - DNA, 25 bp, Homo sapien
gcttattcttctttgaatacaatga

SEQ ID NO: 2137710 - DNA, 25 bp, Homo sapien
ctcaggctttggctcttcctcatgc

SEQ ID NO: 2137711 - DNA, 25 bp, Homo sapien
ctttaaactcctggagagattgaat

SEQ ID NO: 2137712 - DNA, 25 bp, Homo sapien
cctggagagattgaatcagcctttc

SEQ ID NO: 2137713 - DNA, 25 bp, Homo sapien
cttccaacgcatcactataagtttg

SEQ ID NO: 2137714 - DNA, 25 bp, Homo sapien
caataaacaatgagatgcagataac

SEQ ID NO: 2137715 - DNA, 25 bp, Homo sapien
tctaaaaccattaatagcaacaggt

SEQ ID NO: 2137716 - DNA, 25 bp, Homo sapien
tgctaataaaaagcaagctatatgg

SEQ ID NO: 2137717 - DNA, 25 bp, Homo sapien
gacagagacttgtagattggttcaa

SEQ ID NO: 2137718 - DNA, 25 bp, Homo sapien
tcccaccaccgagaggctgtacttt

SEQ ID NO: 2137719 - DNA, 25 bp, Homo sapien
tattctagcaataataatgtgtgtt

SEQ ID NO: 2137720 - DNA, 25 bp, Homo sapien
caccgagaggctgtactttctttca

SEQ ID NO: 2137721 - DNA, 25 bp, Homo sapien
aatcattcataatcccaccaccgag

SEQ ID NO: 2137722 - DNA, 25 bp, Homo sapien
gtgccaaagaaatatgctgggcttc

SEQ ID NO: 2137723 - DNA, 25 bp, Homo sapien
caaccattaggctgccatcaccttg

SEQ ID NO: 2137724 - DNA, 25 bp, Homo sapien
cagcaaccattaggctgccatcacc

SEQ ID NO: 2137725 - DNA, 25 bp, Homo sapien
agcaaccattaggctgccatcacct

SEQ ID NO: 2137726 - DNA, 25 bp, Homo sapien
gcaaccattaggctgccatcacctt

SEQ ID NO: 2137727 - DNA, 25 bp, Homo sapien
tctcactccaacatgaattgcagcc

SEQ ID NO: 2137728 - DNA, 25 bp, Homo sapien
actccaacatgaattgcagccctac

SEQ ID NO: 2137729 - DNA, 25 bp, Homo sapien
tcactccaacatgaattgcagccct

SEQ ID NO: 2137730 - DNA, 25 bp, Homo sapien
atctcactccaacatgaattgcagc

SEQ ID NO: 2137731 - DNA, 25 bp, Homo sapien
tggagccttgaggaaccaataggaa

SEQ ID NO: 2137732 - DNA, 25 bp, Homo sapien
catttaatagctgggcaacctcggc

SEQ ID NO: 2137733 - DNA, 25 bp, Homo sapien
tttcttaaccagatggcaggaggcc

SEQ ID NO: 2137734 - DNA, 25 bp, Homo sapien
ccaataggaattcactcagcacagt

SEQ ID NO: 2137735 - DNA, 25 bp, Homo sapien
taattgtgactagattaacaatcta

SEQ ID NO: 2137736 - DNA, 25 bp, Homo sapien
aacaggaggaatagaacaaaagaag

SEQ ID NO: 2137737 - DNA, 25 bp, Homo sapien
taaatgcttcacgagaaaacataca

SEQ ID NO: 2137738 - DNA, 25 bp, Homo sapien
aattgttactatgggttgatagctc

SEQ ID NO: 2137739 - DNA, 25 bp, Homo sapien
gatgcatttctgatattggccatca

SEQ ID NO: 2137740 - DNA, 25 bp, Homo sapien
ctttgagattaaagatgcatttctg

SEQ ID NO: 2137741 - DNA, 25 bp, Homo sapien
tatcttctaaatcgtctccgaggaa

SEQ ID NO: 2137742 - DNA, 25 bp, Homo sapien
ttacacttagaaaccttgcctggtg

SEQ ID NO: 2137743 - DNA, 25 bp, Homo sapien
caatgcccacgtagcccctgaattc

SEQ ID NO: 2137744 - DNA, 25 bp, Homo sapien
gcccacgtagcccctgaattcctac

SEQ ID NO: 2137745 - DNA, 25 bp, Homo sapien
cacgtagcccctgaattcctaccct

SEQ ID NO: 2137746 - DNA, 25 bp, Homo sapien
atgcccacgtagcccctgaattcct

SEQ ID NO: 2137747 - DNA, 25 bp, Homo sapien
cacttctaccccttgcgtgtgcaca

SEQ ID NO: 2137748 - DNA, 25 bp, Homo sapien
ctaccccttgcgtgtgcacagccat

SEQ ID NO: 2137749 - DNA, 25 bp, Homo sapien
cttctaccccttgcgtgtgcacagc

SEQ ID NO: 2137750 - DNA, 25 bp, Homo sapien
tctaccccttgcgtgtgcacagcca

SEQ ID NO: 2137751 - DNA, 25 bp, Homo sapien
ggccttggctttggccttttctgct

SEQ ID NO: 2137752 - DNA, 25 bp, Homo sapien
gctttggccttttctgctttctctc

SEQ ID NO: 2137753 - DNA, 25 bp, Homo sapien
ttggctttggccttttctgctttct

SEQ ID NO: 2137754 - DNA, 25 bp, Homo sapien
ttcaggccttggctttggccttttc

SEQ ID NO: 2137755 - DNA, 25 bp, Homo sapien
atgcacgcgcaaaaaacagcctccc

SEQ ID NO: 2137756 - DNA, 25 bp, Homo sapien
gcgcaaaaaacagcctccctactcc

SEQ ID NO: 2137757 - DNA, 25 bp, Homo sapien
ctccctactcccgtctgcatgaggt

SEQ ID NO: 2137758 - DNA, 25 bp, Homo sapien
tccctactcccgtctgcatgaggtg

SEQ ID NO: 2137759 - DNA, 25 bp, Homo sapien
caccaccgagctcgccccccaactt

SEQ ID NO: 2137760 - DNA, 25 bp, Homo sapien
cgtcaccaccgagctcgccccccaa

SEQ ID NO: 2137761 - DNA, 25 bp, Homo sapien
cgccccccaacttgggcggccagtg

SEQ ID NO: 2137762 - DNA, 25 bp, Homo sapien
gccccccaacttgggcggccagtgc

SEQ ID NO: 2137763 - DNA, 25 bp, Homo sapien
agacgcgagtgacgactgcaccgaa

SEQ ID NO: 2137764 - DNA, 25 bp, Homo sapien
ccgaaggctgcgtcgctctgcagct

SEQ ID NO: 2137765 - DNA, 25 bp, Homo sapien
cgactgcaccgaaggctgcgtcgct

SEQ ID NO: 2137766 - DNA, 25 bp, Homo sapien
ctggtagccagacgcgagtgacgac

SEQ ID NO: 2137767 - DNA, 25 bp, Homo sapien
cccgggccgaatgccagcccgccga

SEQ ID NO: 2137768 - DNA, 25 bp, Homo sapien
cgcttttccccgggccgaatgccag

SEQ ID NO: 2137769 - DNA, 25 bp, Homo sapien
gggccgaatgccagcccgccgagct

SEQ ID NO: 2137770 - DNA, 25 bp, Homo sapien
ttccccgggccgaatgccagcccgc

SEQ ID NO: 2137771 - DNA, 25 bp, Homo sapien
ctgtcgccgaggtcggtcagccgct

SEQ ID NO: 2137772 - DNA, 25 bp, Homo sapien
ccgcggtgttcgctgttttcctgca

SEQ ID NO: 2137773 - DNA, 25 bp, Homo sapien
gtcagccgctgctggcatggccggg

SEQ ID NO: 2137774 - DNA, 25 bp, Homo sapien
ctcgggggtgggtttccatcgctct

SEQ ID NO: 2137775 - DNA, 25 bp, Homo sapien
gaacgctagcgaagacccgccgccg

SEQ ID NO: 2137776 - DNA, 25 bp, Homo sapien
gctcccctcgctgccagcgccccgc

SEQ ID NO: 2137777 - DNA, 25 bp, Homo sapien
cggccctttccgtgctccgagcccg

SEQ ID NO: 2137778 - DNA, 25 bp, Homo sapien
ctagcgaagacccgccgccgcccgg

SEQ ID NO: 2137779 - DNA, 25 bp, Homo sapien
cgcggagacacttagcctcgcagac

SEQ ID NO: 2137780 - DNA, 25 bp, Homo sapien
ttctcctccggattctcgccgcgag

SEQ ID NO: 2137781 - DNA, 25 bp, Homo sapien
ggtgcgccgcggagacacttagcct

SEQ ID NO: 2137782 - DNA, 25 bp, Homo sapien
tctcgccgcgaggtgcgccgcggag

SEQ ID NO: 2137783 - DNA, 25 bp, Homo sapien
ctttcccagagctttgcaggcacca

SEQ ID NO: 2137784 - DNA, 25 bp, Homo sapien
gggattctttcccagagctttgcag

SEQ ID NO: 2137785 - DNA, 25 bp, Homo sapien
caaaatggaggaccggtataggagt

SEQ ID NO: 2137786 - DNA, 25 bp, Homo sapien
ggcaccaaaatggaggaccggtata

SEQ ID NO: 2137787 - DNA, 25 bp, Homo sapien
tcccaccttagaagttccgcgcgtc

SEQ ID NO: 2137788 - DNA, 25 bp, Homo sapien
gcgcgtcctctacggggcctccaat

SEQ ID NO: 2137789 - DNA, 25 bp, Homo sapien
accttagaagttccgcgcgtcctct

SEQ ID NO: 2137790 - DNA, 25 bp, Homo sapien
gcgtcctctacggggcctccaatta

SEQ ID NO: 2137791 - DNA, 25 bp, Homo sapien
ggagagagactgaatgcttggtgct

SEQ ID NO: 2137792 - DNA, 25 bp, Homo sapien
ctctccattctgcataggctgctcc

SEQ ID NO: 2137793 - DNA, 25 bp, Homo sapien
ctccattctgcataggctgctccat

SEQ ID NO: 2137794 - DNA, 25 bp, Homo sapien
tcccaaagggcggtcttcctctcca

SEQ ID NO: 2137795 - DNA, 25 bp, Homo sapien
tctccattctgcataggctgctcca

SEQ ID NO: 2137796 - DNA, 25 bp, Homo sapien
tccccgtcgatttcctgcaggctgg

SEQ ID NO: 2137797 - DNA, 25 bp, Homo sapien
ccgtcgatttcctgcaggctggtgg

SEQ ID NO: 2137798 - DNA, 25 bp, Homo sapien
cccgtcgatttcctgcaggctggtg

SEQ ID NO: 2137799 - DNA, 25 bp, Homo sapien
ctgtccccgtcgatttcctgcaggc

SEQ ID NO: 2137800 - DNA, 25 bp, Homo sapien
agagctcccccataaggatacgcag

SEQ ID NO: 2137801 - DNA, 25 bp, Homo sapien
gatacgcagacaattcctcaactgc

SEQ ID NO: 2137802 - DNA, 25 bp, Homo sapien
tcaactgcagctccctaagttttct

SEQ ID NO: 2137803 - DNA, 25 bp, Homo sapien
ggtcatggtgattagagagctcccc

SEQ ID NO: 2137804 - DNA, 25 bp, Homo sapien
gagtgcaaaggcaatcttcaaatag

SEQ ID NO: 2137805 - DNA, 25 bp, Homo sapien
cggatcagtaaaggcatattaggaa

SEQ ID NO: 2137806 - DNA, 25 bp, Homo sapien
taacatagggttcacagcaaacgga

SEQ ID NO: 2137807 - DNA, 25 bp, Homo sapien
aacacaagacccacttgacacatgg

SEQ ID NO: 2137808 - DNA, 25 bp, Homo sapien
tttccatgcaaatgggtgaaactac

SEQ ID NO: 2137809 - DNA, 25 bp, Homo sapien
ggtgaaactactgctgacagaaact

SEQ ID NO: 2137810 - DNA, 25 bp, Homo sapien
tgcaaatgggtgaaactactgctga

SEQ ID NO: 2137811 - DNA, 25 bp, Homo sapien
aatgggtgaaactactgctgacaga

SEQ ID NO: 2137812 - DNA, 25 bp, Homo sapien
catttttaatgagacaataaatgta

SEQ ID NO: 2137813 - DNA, 25 bp, Homo sapien
tagttcatctgttatatgtaagtat

SEQ ID NO: 2137814 - DNA, 25 bp, Homo sapien
ttcatctgttatatgtaagtataca

SEQ ID NO: 2137815 - DNA, 25 bp, Homo sapien
tttagttcatctgttatatgtaagt

SEQ ID NO: 2137816 - DNA, 25 bp, Homo sapien
gttaccttgaagaccctagcacctc

SEQ ID NO: 2137817 - DNA, 25 bp, Homo sapien
cagcaacagaaataggatccagcag

SEQ ID NO: 2137818 - DNA, 25 bp, Homo sapien
cctccagtcctaagtacctgatggg

SEQ ID NO: 2137819 - DNA, 25 bp, Homo sapien
gaaagtgtggccaatcaagaaggca

SEQ ID NO: 2137820 - DNA, 25 bp, Homo sapien
ccaatgtatggtaaacactaatgca

SEQ ID NO: 2137821 - DNA, 25 bp, Homo sapien
gactgacacattagtttgcttcctc

SEQ ID NO: 2137822 - DNA, 25 bp, Homo sapien
cattaccatggcaataactactaag

SEQ ID NO: 2137823 - DNA, 25 bp, Homo sapien
tcagcgaaaggatccagaactagtt

SEQ ID NO: 2137824 - DNA, 25 bp, Homo sapien
tgagtcccaaacacctgaaggcggg

SEQ ID NO: 2137825 - DNA, 25 bp, Homo sapien
tcatgagaccgccagggcaacttat

SEQ ID NO: 2137826 - DNA, 25 bp, Homo sapien
gtatagaaagttgccccaggacacc

SEQ ID NO: 2137827 - DNA, 25 bp, Homo sapien
caacttatgccaaagcgggaacgag

SEQ ID NO: 2137828 - DNA, 25 bp, Homo sapien
gtctagcagattcaacaccacacct

SEQ ID NO: 2137829 - DNA, 25 bp, Homo sapien
taaagtgtccccatgatggaatctg

SEQ ID NO: 2137830 - DNA, 25 bp, Homo sapien
ttcagtagcctgtctagcagattca

SEQ ID NO: 2137831 - DNA, 25 bp, Homo sapien
cattcttctccacaaactactggtt

SEQ ID NO: 2137832 - DNA, 25 bp, Homo sapien
gcagggatgagattggatgtctaca

SEQ ID NO: 2137833 - DNA, 25 bp, Homo sapien
ttggatgtctacaaggccctccagg

SEQ ID NO: 2137834 - DNA, 25 bp, Homo sapien
catatcaatgcttgaagtagctcca

SEQ ID NO: 2137835 - DNA, 25 bp, Homo sapien
tgagcactgttccatatcaatgctt

SEQ ID NO: 2137836 - DNA, 25 bp, Homo sapien
tagccccaggacacctcgagcagga

SEQ ID NO: 2137837 - DNA, 25 bp, Homo sapien
agccccaggacacctcgagcaggac

SEQ ID NO: 2137838 - DNA, 25 bp, Homo sapien
cctgatatcagctcaattacccgat

SEQ ID NO: 2137839 - DNA, 25 bp, Homo sapien
tgatatcagctcaattacccgatga

SEQ ID NO: 2137840 - DNA, 25 bp, Homo sapien
gacacctgatatcagctcaattacc

SEQ ID NO: 2137841 - DNA, 25 bp, Homo sapien
tatcagctcaattacccgatgaaga

SEQ ID NO: 2137842 - DNA, 25 bp, Homo sapien
ccttcaaatatggagtggaagcttc

SEQ ID NO: 2137843 - DNA, 25 bp, Homo sapien
gaactgctgaccttcaaatatggag

SEQ ID NO: 2137844 - DNA, 25 bp, Homo sapien
gagaactgctgaccttcaaatatgg

SEQ ID NO: 2137845 - DNA, 25 bp, Homo sapien
gctgaccttcaaatatggagtggaa

SEQ ID NO: 2137846 - DNA, 25 bp, Homo sapien
ggtatatccatatactacttagcaa

SEQ ID NO: 2137847 - DNA, 25 bp, Homo sapien
ggcagctttatttagaagaacccca

SEQ ID NO: 2137848 - DNA, 25 bp, Homo sapien
aaactgaaaactacctactgtccat

SEQ ID NO: 2137849 - DNA, 25 bp, Homo sapien
caaaaagttaataggctgaatgtaa

SEQ ID NO: 2137850 - DNA, 25 bp, Homo sapien
tgagactttcatcgcttcactcttg

SEQ ID NO: 2137851 - DNA, 25 bp, Homo sapien
tagttctagggcacagagtacaccc

SEQ ID NO: 2137852 - DNA, 25 bp, Homo sapien
tccagtagcctgtctagcagactcc

SEQ ID NO: 2137853 - DNA, 25 bp, Homo sapien
aatatgtcccaatgatgagactttc

SEQ ID NO: 2137854 - DNA, 25 bp, Homo sapien
acttacatccagctatccttctgta

SEQ ID NO: 2137855 - DNA, 25 bp, Homo sapien
gattaatgggatcagacatggtttt

SEQ ID NO: 2137856 - DNA, 25 bp, Homo sapien
cttttcacttacatccagctatcct

SEQ ID NO: 2137857 - DNA, 25 bp, Homo sapien
ggagcttgattaatgggatcagaca

SEQ ID NO: 2137858 - DNA, 25 bp, Homo sapien
cactgtaccactattatcaaacttc

SEQ ID NO: 2137859 - DNA, 25 bp, Homo sapien
actgtaccactattatcaaacttct

SEQ ID NO: 2137860 - DNA, 25 bp, Homo sapien
cctgctcagcgatgttcaagctgct

SEQ ID NO: 2137861 - DNA, 25 bp, Homo sapien
gcgatgttcaagctgctgcagttca

SEQ ID NO: 2137862 - DNA, 25 bp, Homo sapien
tcagcgatgttcaagctgctgcagt

SEQ ID NO: 2137863 - DNA, 25 bp, Homo sapien
gctcagcgatgttcaagctgctgca

SEQ ID NO: 2137864 - DNA, 25 bp, Homo sapien
cgctgactcgggctttgcttgtatg

SEQ ID NO: 2137865 - DNA, 25 bp, Homo sapien
gaaaaattcgagttgcacctgatca

SEQ ID NO: 2137866 - DNA, 25 bp, Homo sapien
tgcttgtatgaaaaattcgagttgc

SEQ ID NO: 2137867 - DNA, 25 bp, Homo sapien
tcgagttgcacctgatcacttccac

SEQ ID NO: 2137868 - DNA, 25 bp, Homo sapien
caggctgctagttctgcctctcttt

SEQ ID NO: 2137869 - DNA, 25 bp, Homo sapien
aggctgctagttctgcctctctttc

SEQ ID NO: 2137870 - DNA, 25 bp, Homo sapien
ccctatagctctgggtctgtgacaa

SEQ ID NO: 2137871 - DNA, 25 bp, Homo sapien
ggaagtcatgccctcacagctcttg

SEQ ID NO: 2137872 - DNA, 25 bp, Homo sapien
gagacccaagtgtctctttgcagca

SEQ ID NO: 2137873 - DNA, 25 bp, Homo sapien
tgcagcaagcccatggaaggcatcc

SEQ ID NO: 2137874 - DNA, 25 bp, Homo sapien
ctgtgcaaggcccattaagtcttaa

SEQ ID NO: 2137875 - DNA, 25 bp, Homo sapien
ctcaaagccataggcagtccggcct

SEQ ID NO: 2137876 - DNA, 25 bp, Homo sapien
ttgctgtactcagtctactcaccag

SEQ ID NO: 2137877 - DNA, 25 bp, Homo sapien
aggcagtccggcctctatgggtttg

SEQ ID NO: 2137878 - DNA, 25 bp, Homo sapien
aataagaaattcctttatgcatgtc

SEQ ID NO: 2137879 - DNA, 25 bp, Homo sapien
aagaaattcctttatgcatgtcaca

SEQ ID NO: 2137880 - DNA, 25 bp, Homo sapien
tcaataagaaattcctttatgcatg

SEQ ID NO: 2137881 - DNA, 25 bp, Homo sapien
taagaaattcctttatgcatgtcac

SEQ ID NO: 2137882 - DNA, 25 bp, Homo sapien
ctgaccattttgttataattgtcta

SEQ ID NO: 2137883 - DNA, 25 bp, Homo sapien
ttttagtggagtcagcatttcaccg

SEQ ID NO: 2137884 - DNA, 25 bp, Homo sapien
tactgtttattattgcttagatatg

SEQ ID NO: 2137885 - DNA, 25 bp, Homo sapien
agtggagtcagcatttcaccgtgtt

SEQ ID NO: 2137886 - DNA, 25 bp, Homo sapien
gatcatgcatgatccagccacatca

SEQ ID NO: 2137887 - DNA, 25 bp, Homo sapien
atcatgcatgatccagccacatcac

SEQ ID NO: 2137888 - DNA, 25 bp, Homo sapien
tcatgcatgatccagccacatcaca

SEQ ID NO: 2137889 - DNA, 25 bp, Homo sapien
catggagtgggacttcaattgccct

SEQ ID NO: 2137890 - DNA, 25 bp, Homo sapien
gtagaccccaatccagttcccaatg

SEQ ID NO: 2137891 - DNA, 25 bp, Homo sapien
cacagacatccatataagggaagta

SEQ ID NO: 2137892 - DNA, 25 bp, Homo sapien
ttggctgagcctcacggctaaggca

SEQ ID NO: 2137893 - DNA, 25 bp, Homo sapien
gccacaatatcaggggggaatctga

SEQ ID NO: 2137894 - DNA, 25 bp, Homo sapien
ggccacaatatcaggggggaatctg

SEQ ID NO: 2137895 - DNA, 25 bp, Homo sapien
gggccacaatatcaggggggaatct

SEQ ID NO: 2137896 - DNA, 25 bp, Homo sapien
cacaatatcaggggggaatctgacc

SEQ ID NO: 2137897 - DNA, 25 bp, Homo sapien
attgcatttgcttacagtggttcag

SEQ ID NO: 2137898 - DNA, 25 bp, Homo sapien
tgacttacataaactcccctaaaga

SEQ ID NO: 2137899 - DNA, 25 bp, Homo sapien
tcaaggattagctaactcctgtggc

SEQ ID NO: 2137900 - DNA, 25 bp, Homo sapien
agatctcatggcacaaagcgcagga

SEQ ID NO: 2137901 - DNA, 25 bp, Homo sapien
tactctccagatgtgtccctgtagg

SEQ ID NO: 2137902 - DNA, 25 bp, Homo sapien
gcatatctcactggcctgaagccta

SEQ ID NO: 2137903 - DNA, 25 bp, Homo sapien
acccaaaagggtctgttgtcaacag

SEQ ID NO: 2137904 - DNA, 25 bp, Homo sapien
ccctgtaggtgaggtgcacgcaaac

SEQ ID NO: 2137905 - DNA, 25 bp, Homo sapien
tatttagcatagtaagaggctggac

SEQ ID NO: 2137906 - DNA, 25 bp, Homo sapien
tctgtttggccatcagtatccctga

SEQ ID NO: 2137907 - DNA, 25 bp, Homo sapien
tgttccacccagacttatagaaagc

SEQ ID NO: 2137908 - DNA, 25 bp, Homo sapien
tgctcccggatgttcaagctgcagt

SEQ ID NO: 2137909 - DNA, 25 bp, Homo sapien
tatgacttgcaacctggggatccac

SEQ ID NO: 2137910 - DNA, 25 bp, Homo sapien
gacttgcaacctggggatccactgc

SEQ ID NO: 2137911 - DNA, 25 bp, Homo sapien
ttatatgacttgcaacctggggatc

SEQ ID NO: 2137912 - DNA, 25 bp, Homo sapien
caggttatatgacttgcaacctggg

SEQ ID NO: 2137913 - DNA, 25 bp, Homo sapien
caattggcctaaatctgcttctgaa

SEQ ID NO: 2137914 - DNA, 25 bp, Homo sapien
cagaacgtaaggtatggcaattggc

SEQ ID NO: 2137915 - DNA, 25 bp, Homo sapien
tcttcctgccgtcagttgcagagac

SEQ ID NO: 2137916 - DNA, 25 bp, Homo sapien
cagggtggatccctccagaacgtaa

SEQ ID NO: 2137917 - DNA, 25 bp, Homo sapien
gttctcctagagctactggtggcat

SEQ ID NO: 2137918 - DNA, 25 bp, Homo sapien
tcaatattagagaagagctggagtc

SEQ ID NO: 2137919 - DNA, 25 bp, Homo sapien
ttaagtgacacaagagctggaccac

SEQ ID NO: 2137920 - DNA, 25 bp, Homo sapien
gatggcagtgtgtttgtctagaaga

SEQ ID NO: 2137921 - DNA, 25 bp, Homo sapien
ccctagtatacaaaatgctctgata

SEQ ID NO: 2137922 - DNA, 25 bp, Homo sapien
aaattccctagtatacaaaatgctc

SEQ ID NO: 2137923 - DNA, 25 bp, Homo sapien
ttccctagtatacaaaatgctctga

SEQ ID NO: 2137924 - DNA, 25 bp, Homo sapien
attccctagtatacaaaatgctctg

SEQ ID NO: 2137925 - DNA, 25 bp, Homo sapien
gaaacgagtccgcagacagttcctg

SEQ ID NO: 2137926 - DNA, 25 bp, Homo sapien
tcttatgaaagacagagaaccttgt

SEQ ID NO: 2137927 - DNA, 25 bp, Homo sapien
gattgtaacaaagtcccgcagaagg

SEQ ID NO: 2137928 - DNA, 25 bp, Homo sapien
tctgggccattgctttagaaacgag

SEQ ID NO: 2137929 - DNA, 25 bp, Homo sapien
cagcttgtgcatgaaatggatttga

SEQ ID NO: 2137930 - DNA, 25 bp, Homo sapien
ggaaaacaccaaagatatctctagt

SEQ ID NO: 2137931 - DNA, 25 bp, Homo sapien
tacaagatatgaagctaagggagga

SEQ ID NO: 2137932 - DNA, 25 bp, Homo sapien
gattgtatataacagatctgtccag

SEQ ID NO: 2137933 - DNA, 25 bp, Homo sapien
ctgcttgggaatgtgtgtgatgcct

SEQ ID NO: 2137934 - DNA, 25 bp, Homo sapien
caggaaaaactctggttacacctgg

SEQ ID NO: 2137935 - DNA, 25 bp, Homo sapien
gcaaaatttcttaaggaaggcacca

SEQ ID NO: 2137936 - DNA, 25 bp, Homo sapien
tttcagtttctcacgggaaccatgc

SEQ ID NO: 2137937 - DNA, 25 bp, Homo sapien
cagagcccacccaaaaactgcacca

SEQ ID NO: 2137938 - DNA, 25 bp, Homo sapien
gagcccacccaaaaactgcaccaga

SEQ ID NO: 2137939 - DNA, 25 bp, Homo sapien
cccagagcccacccaaaaactgcac

SEQ ID NO: 2137940 - DNA, 25 bp, Homo sapien
cacccaaaaactgcaccagaaacag

SEQ ID NO: 2137941 - DNA, 25 bp, Homo sapien
gtctacgacattgcaaaccgctggt

SEQ ID NO: 2137942 - DNA, 25 bp, Homo sapien
tgtgcatctggtggacaagctcccg

SEQ ID NO: 2137943 - DNA, 25 bp, Homo sapien
tctcgtggtgcacaaggagtgatcc

SEQ ID NO: 2137944 - DNA, 25 bp, Homo sapien
ttaagaagattgaggaacatgcccc

SEQ ID NO: 2137945 - DNA, 25 bp, Homo sapien
aaaaggaaaacaatcgctgaatcag

SEQ ID NO: 2137946 - DNA, 25 bp, Homo sapien
tccatgatgaattaactgctgtgtc

SEQ ID NO: 2137947 - DNA, 25 bp, Homo sapien
gctgaatcagtttcctagggtttgt

SEQ ID NO: 2137948 - DNA, 25 bp, Homo sapien
tccaaaaggcatggttccataacga

SEQ ID NO: 2137949 - DNA, 25 bp, Homo sapien
aaacatgcgtggcttgtcaaggatc

SEQ ID NO: 2137950 - DNA, 25 bp, Homo sapien
aacccttcactgatggatgcatgca

SEQ ID NO: 2137951 - DNA, 25 bp, Homo sapien
tcaaggatcacatgcacagacagtt

SEQ ID NO: 2137952 - DNA, 25 bp, Homo sapien
tgcagcaagaaaagtattagtgccc

SEQ ID NO: 2137953 - DNA, 25 bp, Homo sapien
aaagaataacctataacaatggagg

SEQ ID NO: 2137954 - DNA, 25 bp, Homo sapien
caatggactttattaatagagtcaa

SEQ ID NO: 2137955 - DNA, 25 bp, Homo sapien
tacctaaattagatacgtacaagaa

SEQ ID NO: 2137956 - DNA, 25 bp, Homo sapien
gaattgatttcaggtagattgtcag

SEQ ID NO: 2137957 - DNA, 25 bp, Homo sapien
ccttcttgtcgcatcatatctggga

SEQ ID NO: 2137958 - DNA, 25 bp, Homo sapien
tgacagtcttgaggagtacaggctc

SEQ ID NO: 2137959 - DNA, 25 bp, Homo sapien
gaaggaataccactagttccggtgc

SEQ ID NO: 2137960 - DNA, 25 bp, Homo sapien
tatctgggagtatacgatgcctgca

SEQ ID NO: 2137961 - DNA, 25 bp, Homo sapien
tgcgcatcgcggttaccatagtaac

SEQ ID NO: 2137962 - DNA, 25 bp, Homo sapien
tagtaacctgacgtcattttggcga

SEQ ID NO: 2137963 - DNA, 25 bp, Homo sapien
cgcttccagggaaaggcgaaggctt

SEQ ID NO: 2137964 - DNA, 25 bp, Homo sapien
cagaagcattttcggtgtggaggac

SEQ ID NO: 2137965 - DNA, 25 bp, Homo sapien
ataaatagatatcccacaaagcctg

SEQ ID NO: 2137966 - DNA, 25 bp, Homo sapien
gcaatactaaccttaataacctgta

SEQ ID NO: 2137967 - DNA, 25 bp, Homo sapien
aagaacctagcagctgaactcttct

SEQ ID NO: 2137968 - DNA, 25 bp, Homo sapien
tggaaaaagtttgtcagcccatgtc

SEQ ID NO: 2137969 - DNA, 25 bp, Homo sapien
agctgcggcgcctggcctccagctg

SEQ ID NO: 2137970 - DNA, 25 bp, Homo sapien
gtgagctgcggcgcctggcctccag

SEQ ID NO: 2137971 - DNA, 25 bp, Homo sapien
gagctgcggcgcctggcctccagct

SEQ ID NO: 2137972 - DNA, 25 bp, Homo sapien
gcgtgagctgcggcgcctggcctcc

SEQ ID NO: 2137973 - DNA, 25 bp, Homo sapien
cattgacagatgtggactttgtctc

SEQ ID NO: 2137974 - DNA, 25 bp, Homo sapien
tgtcccgctccacatatgatatgtg

SEQ ID NO: 2137975 - DNA, 25 bp, Homo sapien
acctttccattcttcgcattgacag

SEQ ID NO: 2137976 - DNA, 25 bp, Homo sapien
atttccgaagttgttatgtcccgct

SEQ ID NO: 2137977 - DNA, 25 bp, Homo sapien
aggaaccggagcagacgagacccag

SEQ ID NO: 2137978 - DNA, 25 bp, Homo sapien
gcactcggaccggtgcctacatctg

SEQ ID NO: 2137979 - DNA, 25 bp, Homo sapien
gtgcctacatctgcgcccgtgcaga

SEQ ID NO: 2137980 - DNA, 25 bp, Homo sapien
gaccaagaattaggagcccaggaac

SEQ ID NO: 2137981 - DNA, 25 bp, Homo sapien
cattccagtgttccgctggcagcgt

SEQ ID NO: 2137982 - DNA, 25 bp, Homo sapien
tggcagcgtggaaggcccgcacact

SEQ ID NO: 2137983 - DNA, 25 bp, Homo sapien
gctggcagcgtggaaggcccgcaca

SEQ ID NO: 2137984 - DNA, 25 bp, Homo sapien
ccagtgttccgctggcagcgtggaa

SEQ ID NO: 2137985 - DNA, 25 bp, Homo sapien
cagcttccctcgactcgacccgacc

SEQ ID NO: 2137986 - DNA, 25 bp, Homo sapien
tggaaagcgagcatggatacttggg

SEQ ID NO: 2137987 - DNA, 25 bp, Homo sapien
ctccccctcagccacccctagccgt

SEQ ID NO: 2137988 - DNA, 25 bp, Homo sapien
aaagcgagcatggatacttgggggt

SEQ ID NO: 2137989 - DNA, 25 bp, Homo sapien
gggggtgctcgccttcctcaccctc

SEQ ID NO: 2137990 - DNA, 25 bp, Homo sapien
cggctccaaaatggacggagggcag

SEQ ID NO: 2137991 - DNA, 25 bp, Homo sapien
tgtctcactactggggcggccccag

SEQ ID NO: 2137992 - DNA, 25 bp, Homo sapien
tggggtttacttccactgtctcact

SEQ ID NO: 2137993 - DNA, 25 bp, Homo sapien
ttacttccactgtctcactactggg

SEQ ID NO: 2137994 - DNA, 25 bp, Homo sapien
tttctttccaggcctcgggcaccaa

SEQ ID NO: 2137995 - DNA, 25 bp, Homo sapien
ttctttccaggcctcgggcaccaaa

SEQ ID NO: 2137996 - DNA, 25 bp, Homo sapien
gcgctcagcgggctcacacggacgc

SEQ ID NO: 2137997 - DNA, 25 bp, Homo sapien
gcccttctcatccaacgttttcctc

SEQ ID NO: 2137998 - DNA, 25 bp, Homo sapien
tctcatccaacgttttcctccccta

SEQ ID NO: 2137999 - DNA, 25 bp, Homo sapien
cagcgggctcacacggacgcggttc

SEQ ID NO: 2138000 - DNA, 25 bp, Homo sapien
ttgctcctccttttcaggcttcgca

SEQ ID NO: 2138001 - DNA, 25 bp, Homo sapien
tcctccttttcaggcttcgcagagc

SEQ ID NO: 2138002 - DNA, 25 bp, Homo sapien
ttcgcagagcgctgggaacaacaga

SEQ ID NO: 2138003 - DNA, 25 bp, Homo sapien
gctcctccttttcaggcttcgcaga

SEQ ID NO: 2138004 - DNA, 25 bp, Homo sapien
tctctgcactggttcagcctggtaa

SEQ ID NO: 2138005 - DNA, 25 bp, Homo sapien
cactggttcagcctggtaaggtgtg

SEQ ID NO: 2138006 - DNA, 25 bp, Homo sapien
cagcctggtaaggtgtgtgttcatg

SEQ ID NO: 2138007 - DNA, 25 bp, Homo sapien
cgggccctccacactctcaaccctt

SEQ ID NO: 2138008 - DNA, 25 bp, Homo sapien
caaagaggagacatgggagactgag

SEQ ID NO: 2138009 - DNA, 25 bp, Homo sapien
aagaggagacatgggagactgagtg

SEQ ID NO: 2138010 - DNA, 25 bp, Homo sapien
gagacatgggagactgagtgcatgg

SEQ ID NO: 2138011 - DNA, 25 bp, Homo sapien
gaggagacatgggagactgagtgca

SEQ ID NO: 2138012 - DNA, 25 bp, Homo sapien
tctggctttctctcgtcttgtggct

SEQ ID NO: 2138013 - DNA, 25 bp, Homo sapien
gctttctctcgtcttgtggctgttc

SEQ ID NO: 2138014 - DNA, 25 bp, Homo sapien
ctttctctcgtcttgtggctgttct

SEQ ID NO: 2138015 - DNA, 25 bp, Homo sapien
ggctttctctcgtcttgtggctgtt

SEQ ID NO: 2138016 - DNA, 25 bp, Homo sapien
ctgttttgcccttgttttctgtctt

SEQ ID NO: 2138017 - DNA, 25 bp, Homo sapien
tcttgtcttccagagtacaagttac

SEQ ID NO: 2138018 - DNA, 25 bp, Homo sapien
taacttcttgtcttccagagtacaa

SEQ ID NO: 2138019 - DNA, 25 bp, Homo sapien
ttctaacttcttgtcttccagagta

SEQ ID NO: 2138020 - DNA, 25 bp, Homo sapien
ccctctatctctggttttccctctc

SEQ ID NO: 2138021 - DNA, 25 bp, Homo sapien
cctctatctctggttttccctctct

SEQ ID NO: 2138022 - DNA, 25 bp, Homo sapien
tgggcgctttcctgcagcccttgtt

SEQ ID NO: 2138023 - DNA, 25 bp, Homo sapien
tcatcctcagctgggcgctttcctg

SEQ ID NO: 2138024 - DNA, 25 bp, Homo sapien
atcatcctcagctgggcgctttcct

SEQ ID NO: 2138025 - DNA, 25 bp, Homo sapien
gcgctttcctgcagcccttgtttca

SEQ ID NO: 2138026 - DNA, 25 bp, Homo sapien
gaggtaatgagccagccccttatta

SEQ ID NO: 2138027 - DNA, 25 bp, Homo sapien
atgagccagccccttattagttttt

SEQ ID NO: 2138028 - DNA, 25 bp, Homo sapien
taatgagccagccccttattagttt

SEQ ID NO: 2138029 - DNA, 25 bp, Homo sapien
ggtaatgagccagccccttattagt

SEQ ID NO: 2138030 - DNA, 25 bp, Homo sapien
aattctcttatcatgtcctcattgc

SEQ ID NO: 2138031 - DNA, 25 bp, Homo sapien
gggtcctgtaaatttctttgcatcc

SEQ ID NO: 2138032 - DNA, 25 bp, Homo sapien
cctcattgctgaaattcatatcatg

SEQ ID NO: 2138033 - DNA, 25 bp, Homo sapien
tttctttgcatccacaaaaacgccc

SEQ ID NO: 2138034 - DNA, 25 bp, Homo sapien
taattttacaatgcaccatcaacat

SEQ ID NO: 2138035 - DNA, 25 bp, Homo sapien
taccgtaacgttaaagcacatggcc

SEQ ID NO: 2138036 - DNA, 25 bp, Homo sapien
tgaacatttcctactgagaacactg

SEQ ID NO: 2138037 - DNA, 25 bp, Homo sapien
gaacactgcattgcagataggtcaa

SEQ ID NO: 2138038 - DNA, 25 bp, Homo sapien
attactaggtaagtatctttgtagt

SEQ ID NO: 2138039 - DNA, 25 bp, Homo sapien
tttacaaaaatgtactgatgccata

SEQ ID NO: 2138040 - DNA, 25 bp, Homo sapien
gttttacaaaaatgtactgatgcca

SEQ ID NO: 2138041 - DNA, 25 bp, Homo sapien
tgttaatcttttagtggacacagct

SEQ ID NO: 2138042 - DNA, 25 bp, Homo sapien
taagtggagcctatggagacatgac

SEQ ID NO: 2138043 - DNA, 25 bp, Homo sapien
tatttctgggcacaggtgagaccct

SEQ ID NO: 2138044 - DNA, 25 bp, Homo sapien
gacaattgggtactaacaacctgag

SEQ ID NO: 2138045 - DNA, 25 bp, Homo sapien
gcattacccaggaagagtggcaccc

SEQ ID NO: 2138046 - DNA, 25 bp, Homo sapien
ttttgtcaatactctgccttcaagg

SEQ ID NO: 2138047 - DNA, 25 bp, Homo sapien
gccttcaaggaggtaataatgccct

SEQ ID NO: 2138048 - DNA, 25 bp, Homo sapien
gacaaacactacttcagtcaggtta

SEQ ID NO: 2138049 - DNA, 25 bp, Homo sapien
ataatgccctactccttaagtgtgg

SEQ ID NO: 2138050 - DNA, 25 bp, Homo sapien
gcaatcagtatgtctagcacccaga

SEQ ID NO: 2138051 - DNA, 25 bp, Homo sapien
caatggaagcgtgtcaaatgaatac

SEQ ID NO: 2138052 - DNA, 25 bp, Homo sapien
tgctatgtcaactgagagggcctag

SEQ ID NO: 2138053 - DNA, 25 bp, Homo sapien
tgtacatagcactctactccagttg

SEQ ID NO: 2138054 - DNA, 25 bp, Homo sapien
ggctgccaaagaactgacaaatgcc

SEQ ID NO: 2138055 - DNA, 25 bp, Homo sapien
gcaaagtcccagcatacaagattaa

SEQ ID NO: 2138056 - DNA, 25 bp, Homo sapien
gccaaagaactgacaaatgcctggt

SEQ ID NO: 2138057 - DNA, 25 bp, Homo sapien
ggtgcaaagtcccagcatacaagat

SEQ ID NO: 2138058 - DNA, 25 bp, Homo sapien
cgccaggaccggaccgcagggcggg

SEQ ID NO: 2138059 - DNA, 25 bp, Homo sapien
ggcgggtcacgtgagcgccgcgtca

SEQ ID NO: 2138060 - DNA, 25 bp, Homo sapien
gggctggtgcccacgtaggcgcccg

SEQ ID NO: 2138061 - DNA, 25 bp, Homo sapien
gttctgcgcgggcgccaggaccgga

SEQ ID NO: 2138062 - DNA, 25 bp, Homo sapien
gcctgtgccttctccggctcgcgga

SEQ ID NO: 2138063 - DNA, 25 bp, Homo sapien
ctgtgccttctccggctcgcggaag

SEQ ID NO: 2138064 - DNA, 25 bp, Homo sapien
gccttctccggctcgcggaagcccg

SEQ ID NO: 2138065 - DNA, 25 bp, Homo sapien
tgtgccttctccggctcgcggaagc

SEQ ID NO: 2138066 - DNA, 25 bp, Homo sapien
actgttgcactgcggggttgccccc

SEQ ID NO: 2138067 - DNA, 25 bp, Homo sapien
tgcactgcggggttgcccccccgta

SEQ ID NO: 2138068 - DNA, 25 bp, Homo sapien
tgttgcactgcggggttgccccccc

SEQ ID NO: 2138069 - DNA, 25 bp, Homo sapien
cactgttgcactgcggggttgcccc

SEQ ID NO: 2138070 - DNA, 25 bp, Homo sapien
ctttccaaactgcgtttgtctctgt

SEQ ID NO: 2138071 - DNA, 25 bp, Homo sapien
tttccaaactgcgtttgtctctgtg

SEQ ID NO: 2138072 - DNA, 25 bp, Homo sapien
tctttccaggcctcgggcaccaaac

SEQ ID NO: 2138073 - DNA, 25 bp, Homo sapien
aggcctcgggcaccaaaccaggatg

SEQ ID NO: 2138074 - DNA, 25 bp, Homo sapien
gcagggattctggacaggttgctcc

SEQ ID NO: 2138075 - DNA, 25 bp, Homo sapien
tgctcctcctttttaggcctcgcag

SEQ ID NO: 2138076 - DNA, 25 bp, Homo sapien
tcctcctttttaggcctcgcagagc

SEQ ID NO: 2138077 - DNA, 25 bp, Homo sapien
gcctcgcagagcgctgggaacagac

SEQ ID NO: 2138078 - DNA, 25 bp, Homo sapien
gggccctccacactctcaaccctta

SEQ ID NO: 2138079 - DNA, 25 bp, Homo sapien
ccttatagggccctgtccattgagc

SEQ ID NO: 2138080 - DNA, 25 bp, Homo sapien
tatagggccctgtccattgagctcc

SEQ ID NO: 2138081 - DNA, 25 bp, Homo sapien
tccacactctcaacccttatagggc

SEQ ID NO: 2138082 - DNA, 25 bp, Homo sapien
tgtcttcccctccacgtctggcttt

SEQ ID NO: 2138083 - DNA, 25 bp, Homo sapien
tcatcatcaggctctacttcatctt

SEQ ID NO: 2138084 - DNA, 25 bp, Homo sapien
tcttctggctttccctcgttttcca

SEQ ID NO: 2138085 - DNA, 25 bp, Homo sapien
tggcttttcttcctcgtctgacttt

SEQ ID NO: 2138086 - DNA, 25 bp, Homo sapien
ttgccctcgccttgtggcttgccct

SEQ ID NO: 2138087 - DNA, 25 bp, Homo sapien
gccctcgccttgtggcttgccctca

SEQ ID NO: 2138088 - DNA, 25 bp, Homo sapien
ggcttgccctcgccttgtggcttgc

SEQ ID NO: 2138089 - DNA, 25 bp, Homo sapien
ctcgccttgtggcttgccctcacct

SEQ ID NO: 2138090 - DNA, 25 bp, Homo sapien
ttaaaggtatgggatatcgtgtaag

SEQ ID NO: 2138091 - DNA, 25 bp, Homo sapien
aaaggtatgggatatcgtgtaagcc

SEQ ID NO: 2138092 - DNA, 25 bp, Homo sapien
taaaggtatgggatatcgtgtaagc

SEQ ID NO: 2138093 - DNA, 25 bp, Homo sapien
cttaaggttaaagcattgggcctgg

SEQ ID NO: 2138094 - DNA, 25 bp, Homo sapien
aaggttaaagcattgggcctggcaa

SEQ ID NO: 2138095 - DNA, 25 bp, Homo sapien
taaggttaaagcattgggcctggca

SEQ ID NO: 2138096 - DNA, 25 bp, Homo sapien
ggttaaagcattgggcctggcaaat

SEQ ID NO: 2138097 - DNA, 25 bp, Homo sapien
gatacactgggtcaaaaactcaagg

SEQ ID NO: 2138098 - DNA, 25 bp, Homo sapien
catattagggtctcagcaatggcct

SEQ ID NO: 2138099 - DNA, 25 bp, Homo sapien
cagaaccttggttagggcatccacc

SEQ ID NO: 2138100 - DNA, 25 bp, Homo sapien
caaacattgggatagcagtggcagg

SEQ ID NO: 2138101 - DNA, 25 bp, Homo sapien
attcatatgccttataattcaccca

SEQ ID NO: 2138102 - DNA, 25 bp, Homo sapien
ctgcaagccccatgcaaccacgaat

SEQ ID NO: 2138103 - DNA, 25 bp, Homo sapien
ttttagaatatttatggaggtgggc

SEQ ID NO: 2138104 - DNA, 25 bp, Homo sapien
cttctacatatgttacaagccatgt

SEQ ID NO: 2138105 - DNA, 25 bp, Homo sapien
agaatccagacaagctcagagcaca

SEQ ID NO: 2138106 - DNA, 25 bp, Homo sapien
tcccagaatccagacaagctcagag

SEQ ID NO: 2138107 - DNA, 25 bp, Homo sapien
ccagaatccagacaagctcagagca

SEQ ID NO: 2138108 - DNA, 25 bp, Homo sapien
ttcccagaatccagacaagctcaga

SEQ ID NO: 2138109 - DNA, 25 bp, Homo sapien
gaccacctgcggactgtggctgctg

SEQ ID NO: 2138110 - DNA, 25 bp, Homo sapien
tggggaccacctgcggactgtggct

SEQ ID NO: 2138111 - DNA, 25 bp, Homo sapien
gagtggggaccacctgcggactgtg

SEQ ID NO: 2138112 - DNA, 25 bp, Homo sapien
ctgagtggggaccacctgcggactg

SEQ ID NO: 2138113 - DNA, 25 bp, Homo sapien
catgacaacagtctccaagtggtgt

SEQ ID NO: 2138114 - DNA, 25 bp, Homo sapien
tgacaacagtctccaagtggtgtgg

SEQ ID NO: 2138115 - DNA, 25 bp, Homo sapien
tgccatgacaacagtctccaagtgg

SEQ ID NO: 2138116 - DNA, 25 bp, Homo sapien
caacagtctccaagtggtgtggcct

SEQ ID NO: 2138117 - DNA, 25 bp, Homo sapien
cctatgagggtatattgcttggtcc

SEQ ID NO: 2138118 - DNA, 25 bp, Homo sapien
gctctgggaggtgacaaattgttcc

SEQ ID NO: 2138119 - DNA, 25 bp, Homo sapien
tgagatgggatttaaaacctaaggc

SEQ ID NO: 2138120 - DNA, 25 bp, Homo sapien
aaagtgtgacaactgagctctggga

SEQ ID NO: 2138121 - DNA, 25 bp, Homo sapien
cctctcatctctcatgtggcttctc

SEQ ID NO: 2138122 - DNA, 25 bp, Homo sapien
tcctctcatctctcatgtggcttct

SEQ ID NO: 2138123 - DNA, 25 bp, Homo sapien
tagggtgataaagtcagcaaactcg

SEQ ID NO: 2138124 - DNA, 25 bp, Homo sapien
caagctgttaatccacttctgtaaa

SEQ ID NO: 2138125 - DNA, 25 bp, Homo sapien
gcatgccactagtactaaatagggt

SEQ ID NO: 2138126 - DNA, 25 bp, Homo sapien
cattctgtatattagctgcaaatca

SEQ ID NO: 2138127 - DNA, 25 bp, Homo sapien
gacggtccgcatctagtctcgggta

SEQ ID NO: 2138128 - DNA, 25 bp, Homo sapien
tctagtctcgggtagtattgcctct

SEQ ID NO: 2138129 - DNA, 25 bp, Homo sapien
ttgccagagacggtccgcatctagt

SEQ ID NO: 2138130 - DNA, 25 bp, Homo sapien
cctggttgccagagacggtccgcat

SEQ ID NO: 2138131 - DNA, 25 bp, Homo sapien
tagggagatggtggacaggcaaaaa

SEQ ID NO: 2138132 - DNA, 25 bp, Homo sapien
tgctttccctctcgaccaaagggta

SEQ ID NO: 2138133 - DNA, 25 bp, Homo sapien
tcgaccaaagggtaatagggagatg

SEQ ID NO: 2138134 - DNA, 25 bp, Homo sapien
gagatggtggacaggcaaaaaaaag

SEQ ID NO: 2138135 - DNA, 25 bp, Homo sapien
ctggacctttccgggccgtgtgctc

SEQ ID NO: 2138136 - DNA, 25 bp, Homo sapien
gaggtgccccgctgtgaccagcaga

SEQ ID NO: 2138137 - DNA, 25 bp, Homo sapien
cgaggtgccccgctgtgaccagcag

SEQ ID NO: 2138138 - DNA, 25 bp, Homo sapien
tcctagtcgtcctctcctcgaggtg

SEQ ID NO: 2138139 - DNA, 25 bp, Homo sapien
atgcctttcggcgtccaccctcgcg

SEQ ID NO: 2138140 - DNA, 25 bp, Homo sapien
ccagcaggctttgctacaggcctcg

SEQ ID NO: 2138141 - DNA, 25 bp, Homo sapien
tgcagactccatgcctttcggcgtc

SEQ ID NO: 2138142 - DNA, 25 bp, Homo sapien
gggccaggtcctcaaccttgcgctt

SEQ ID NO: 2138143 - DNA, 25 bp, Homo sapien
gagtcagaatactaagcggctggac

SEQ ID NO: 2138144 - DNA, 25 bp, Homo sapien
tactaagcggctggactaacaccca

SEQ ID NO: 2138145 - DNA, 25 bp, Homo sapien
aaaggcagaatagagtcagaatact

SEQ ID NO: 2138146 - DNA, 25 bp, Homo sapien
ggctggactaacacccaggccgtgg

SEQ ID NO: 2138147 - DNA, 25 bp, Homo sapien
gggaattttcttcttcaagcacagt

SEQ ID NO: 2138148 - DNA, 25 bp, Homo sapien
attttcttcttcaagcacagttatt

SEQ ID NO: 2138149 - DNA, 25 bp, Homo sapien
gttgggaattttcttcttcaagcac

SEQ ID NO: 2138150 - DNA, 25 bp, Homo sapien
gaattttcttcttcaagcacagtta

SEQ ID NO: 2138151 - DNA, 25 bp, Homo sapien
tgcttttcgggagagtgctccaccg

SEQ ID NO: 2138152 - DNA, 25 bp, Homo sapien
catgtatgtcccctctaaattgcgg

SEQ ID NO: 2138153 - DNA, 25 bp, Homo sapien
tttcctactccacaaggaggctgct

SEQ ID NO: 2138154 - DNA, 25 bp, Homo sapien
taaattgcgggcgagaacgagccaa

SEQ ID NO: 2138155 - DNA, 25 bp, Homo sapien
aggacggctccgttttgccttccag

SEQ ID NO: 2138156 - DNA, 25 bp, Homo sapien
gctccgttttgccttccagtgcatt

SEQ ID NO: 2138157 - DNA, 25 bp, Homo sapien
ataggataaggacggctccgttttg

SEQ ID NO: 2138158 - DNA, 25 bp, Homo sapien
gacggctccgttttgccttccagtg

SEQ ID NO: 2138159 - DNA, 25 bp, Homo sapien
catctttcatgcaaatgtgtagggc

SEQ ID NO: 2138160 - DNA, 25 bp, Homo sapien
ggtggcaatggcaatactattagca

SEQ ID NO: 2138161 - DNA, 25 bp, Homo sapien
caaccactgttatgcctttgaagtc

SEQ ID NO: 2138162 - DNA, 25 bp, Homo sapien
gtgccacattgtcgttataagctga

SEQ ID NO: 2138163 - DNA, 25 bp, Homo sapien
agtccagcacgtcagcagggatgag

SEQ ID NO: 2138164 - DNA, 25 bp, Homo sapien
gagccagtggaaggatcaggaccca

SEQ ID NO: 2138165 - DNA, 25 bp, Homo sapien
agctgtgcctagcagatacggtagg

SEQ ID NO: 2138166 - DNA, 25 bp, Homo sapien
cttaagcagtccagcacgtcagcag

SEQ ID NO: 2138167 - DNA, 25 bp, Homo sapien
cagggactccagagcaatcagtgag

SEQ ID NO: 2138168 - DNA, 25 bp, Homo sapien
cagagcaatcagtgaggctttgtac

SEQ ID NO: 2138169 - DNA, 25 bp, Homo sapien
ctccagagcaatcagtgaggctttg

SEQ ID NO: 2138170 - DNA, 25 bp, Homo sapien
agggactccagagcaatcagtgagg

SEQ ID NO: 2138171 - DNA, 25 bp, Homo sapien
tgcagggcagcttggccattagcct

SEQ ID NO: 2138172 - DNA, 25 bp, Homo sapien
cagcttggccattagcctaagaggg

SEQ ID NO: 2138173 - DNA, 25 bp, Homo sapien
cattagcctaagagggccctgtgcc

SEQ ID NO: 2138174 - DNA, 25 bp, Homo sapien
ttggccattagcctaagagggccct

SEQ ID NO: 2138175 - DNA, 25 bp, Homo sapien
tgtctgcctggacttgaggagttct

SEQ ID NO: 2138176 - DNA, 25 bp, Homo sapien
cgagtccccttggtttcactttgca

SEQ ID NO: 2138177 - DNA, 25 bp, Homo sapien
cttctgtggcaggaacagaaccctc

SEQ ID NO: 2138178 - DNA, 25 bp, Homo sapien
ttgaggagttctgccctctccagcc

SEQ ID NO: 2138179 - DNA, 25 bp, Homo sapien
cctgagcctgatcccttctatgctg

SEQ ID NO: 2138180 - DNA, 25 bp, Homo sapien
acactcttttgcactgtctcctaag

SEQ ID NO: 2138181 - DNA, 25 bp, Homo sapien
gggatcctggttagcacagagctct

SEQ ID NO: 2138182 - DNA, 25 bp, Homo sapien
ccagataagtcactgcttggatatg

SEQ ID NO: 2138183 - DNA, 25 bp, Homo sapien
ggcccacttcttgtacatgggaaac

SEQ ID NO: 2138184 - DNA, 25 bp, Homo sapien
gggaaacacctatctgtcttttgcc

SEQ ID NO: 2138185 - DNA, 25 bp, Homo sapien
gaatctgtagcacccccaaacagct

SEQ ID NO: 2138186 - DNA, 25 bp, Homo sapien
tcagctggaatctgtagcaccccca

SEQ ID NO: 2138187 - DNA, 25 bp, Homo sapien
gcttgaagtaaaacagcccatcctc

SEQ ID NO: 2138188 - DNA, 25 bp, Homo sapien
ccagtgattacaaagtggcttctgc

SEQ ID NO: 2138189 - DNA, 25 bp, Homo sapien
caatgcattattgtgtagccacggt

SEQ ID NO: 2138190 - DNA, 25 bp, Homo sapien
gcaaagccctgtgagcgtctacaga

SEQ ID NO: 2138191 - DNA, 25 bp, Homo sapien
caggcctttctggactaatacaaga

SEQ ID NO: 2138192 - DNA, 25 bp, Homo sapien
ggatctctagcaactaccatagtac

SEQ ID NO: 2138193 - DNA, 25 bp, Homo sapien
aataacctaatcacccatacctggg

SEQ ID NO: 2138194 - DNA, 25 bp, Homo sapien
tacttgtcccaaagcagatatgcag

SEQ ID NO: 2138195 - DNA, 25 bp, Homo sapien
tccctgctgcactttacactgtaga

SEQ ID NO: 2138196 - DNA, 25 bp, Homo sapien
tttcattggccctcgtagtgtccac

SEQ ID NO: 2138197 - DNA, 25 bp, Homo sapien
tagtgtccactaccagctatgtgat

SEQ ID NO: 2138198 - DNA, 25 bp, Homo sapien
tcatctgggaaatcactaggagttc

SEQ ID NO: 2138199 - DNA, 25 bp, Homo sapien
cagatctctgcttaattcatttgaa

SEQ ID NO: 2138200 - DNA, 25 bp, Homo sapien
tgtatccatgtgcaaatattcccgc

SEQ ID NO: 2138201 - DNA, 25 bp, Homo sapien
gatcctgtagtattatgccactgcc

SEQ ID NO: 2138202 - DNA, 25 bp, Homo sapien
tattcccgcaacatactgtgctagc

SEQ ID NO: 2138203 - DNA, 25 bp, Homo sapien
ccagtactggtcagagcatgaggca

SEQ ID NO: 2138204 - DNA, 25 bp, Homo sapien
cccgcttctgagagtcttaaaggaa

SEQ ID NO: 2138205 - DNA, 25 bp, Homo sapien
gatttgatagcccttatgagctcac

SEQ ID NO: 2138206 - DNA, 25 bp, Homo sapien
tcttgactcactaagcccgcttctg

SEQ ID NO: 2138207 - DNA, 25 bp, Homo sapien
tgcagagcagtatggatctcacctt

SEQ ID NO: 2138208 - DNA, 25 bp, Homo sapien
catgacttgcaaactactagatgga

SEQ ID NO: 2138209 - DNA, 25 bp, Homo sapien
gatctaattacttgaggtgaacgaa

SEQ ID NO: 2138210 - DNA, 25 bp, Homo sapien
ggcatacatgctcactcaggatact

SEQ ID NO: 2138211 - DNA, 25 bp, Homo sapien
ttagcatttgcagtctgattcccaa

SEQ ID NO: 2138212 - DNA, 25 bp, Homo sapien
gttagcatttgcagtctgattccca

SEQ ID NO: 2138213 - DNA, 25 bp, Homo sapien
acacaaaagatgttagcatttgcag

SEQ ID NO: 2138214 - DNA, 25 bp, Homo sapien
atacacaaaagatgttagcatttgc

SEQ ID NO: 2138215 - DNA, 25 bp, Homo sapien
cctggctttactatggcggttggag

SEQ ID NO: 2138216 - DNA, 25 bp, Homo sapien
cctccagggtgacgtgtctgcctat

SEQ ID NO: 2138217 - DNA, 25 bp, Homo sapien
gaggaacggcagtgatcacacgtcg

SEQ ID NO: 2138218 - DNA, 25 bp, Homo sapien
tcacacgtcggctgctgggaagatc

SEQ ID NO: 2138219 - DNA, 25 bp, Homo sapien
ttagacaagacgattgtgattggct

SEQ ID NO: 2138220 - DNA, 25 bp, Homo sapien
caagacgattgtgattggctgaagg

SEQ ID NO: 2138221 - DNA, 25 bp, Homo sapien
tagacaagacgattgtgattggctg

SEQ ID NO: 2138222 - DNA, 25 bp, Homo sapien
gacaagacgattgtgattggctgaa

SEQ ID NO: 2138223 - DNA, 25 bp, Homo sapien
cgtagacacttcctctcccagtggg

SEQ ID NO: 2138224 - DNA, 25 bp, Homo sapien
atttccgcctatcctatttccgcag

SEQ ID NO: 2138225 - DNA, 25 bp, Homo sapien
cactcgcgggaaccttagctcattt

SEQ ID NO: 2138226 - DNA, 25 bp, Homo sapien
tccgtgttcggggagttgcgccaca

SEQ ID NO: 2138227 - DNA, 25 bp, Homo sapien
acagcacctcccgagccacgagggc

SEQ ID NO: 2138228 - DNA, 25 bp, Homo sapien
ccacgagggccgctcacacagcaac

SEQ ID NO: 2138229 - DNA, 25 bp, Homo sapien
aggggcgcacgcctgcgcaaacaca

SEQ ID NO: 2138230 - DNA, 25 bp, Homo sapien
tggccttaatgccttgcgcccgttg

SEQ ID NO: 2138231 - DNA, 25 bp, Homo sapien
gcttgcttggagatcaggacgcaaa

SEQ ID NO: 2138232 - DNA, 25 bp, Homo sapien
gcaaaggtaagagcgcctcagtcgc

SEQ ID NO: 2138233 - DNA, 25 bp, Homo sapien
tatttgcctgaagaaggtcagtgtg

SEQ ID NO: 2138234 - DNA, 25 bp, Homo sapien
gaaaattaacagtgcgtatttgcct

SEQ ID NO: 2138235 - DNA, 25 bp, Homo sapien
ttaccgttcagcaaatcagaaaggg

SEQ ID NO: 2138236 - DNA, 25 bp, Homo sapien
catttgcccagggtactgagactag

SEQ ID NO: 2138237 - DNA, 25 bp, Homo sapien
catctagtggcagactcgagaggta

SEQ ID NO: 2138238 - DNA, 25 bp, Homo sapien
tcagttttcaataccagggtccagg

SEQ ID NO: 2138239 - DNA, 25 bp, Homo sapien
cagaaagaaaagttatttttctcat

SEQ ID NO: 2138240 - DNA, 25 bp, Homo sapien
ttagtcatgaggtaagacagggcca

SEQ ID NO: 2138241 - DNA, 25 bp, Homo sapien
caagggtgcccaactaataaggtag

SEQ ID NO: 2138242 - DNA, 25 bp, Homo sapien
tccagacctaggaaggctctcttag

SEQ ID NO: 2138243 - DNA, 25 bp, Homo sapien
tcagctgttctggtgaggttgcaac

SEQ ID NO: 2138244 - DNA, 25 bp, Homo sapien
gtgtgaatctggcatcccaaggtca

SEQ ID NO: 2138245 - DNA, 25 bp, Homo sapien
tgtaggactcagcatacactggagg

SEQ ID NO: 2138246 - DNA, 25 bp, Homo sapien
gaaagcggtcctcatttctgtgggt

SEQ ID NO: 2138247 - DNA, 25 bp, Homo sapien
gaagcagtgctcagattgtaggact

SEQ ID NO: 2138248 - DNA, 25 bp, Homo sapien
ggtgtcctctgtcattagcagcttt

SEQ ID NO: 2138249 - DNA, 25 bp, Homo sapien
cagagccttccaagaataccctgag

SEQ ID NO: 2138250 - DNA, 25 bp, Homo sapien
attagcagctttgtcctctccagca

SEQ ID NO: 2138251 - DNA, 25 bp, Homo sapien
tcctcagtaaggacctctttgccac

SEQ ID NO: 2138252 - DNA, 25 bp, Homo sapien
gaggccacaagcaatactcctttga

SEQ ID NO: 2138253 - DNA, 25 bp, Homo sapien
taactggcataagggagcagattga

SEQ ID NO: 2138254 - DNA, 25 bp, Homo sapien
gctaatcctataatcaaaccaagag

SEQ ID NO: 2138255 - DNA, 25 bp, Homo sapien
caggtagtgccaatcaatgagaggc

SEQ ID NO: 2138256 - DNA, 25 bp, Homo sapien
ctggcacactgagacctttgaagtg

SEQ ID NO: 2138257 - DNA, 25 bp, Homo sapien
gtcagttgaagctaccagaaacgtc

SEQ ID NO: 2138258 - DNA, 25 bp, Homo sapien
acgtcagaatagagagagttggtgt

SEQ ID NO: 2138259 - DNA, 25 bp, Homo sapien
gcctgacataccactgggacatggg

SEQ ID NO: 2138260 - DNA, 25 bp, Homo sapien
attgttactgtagagctattccagg

SEQ ID NO: 2138261 - DNA, 25 bp, Homo sapien
tgccaaccaatccagagtcctttca

SEQ ID NO: 2138262 - DNA, 25 bp, Homo sapien
ttcaccagctaagttgcctgtatgg

SEQ ID NO: 2138263 - DNA, 25 bp, Homo sapien
gcctgtatggatgtcccagcaacaa

SEQ ID NO: 2138264 - DNA, 25 bp, Homo sapien
tcattgggtgcattagagttgttgg

SEQ ID NO: 2138265 - DNA, 25 bp, Homo sapien
gatcttcattgggtgcattagagtt

SEQ ID NO: 2138266 - DNA, 25 bp, Homo sapien
ggcttgagttgttgttctccctcac

SEQ ID NO: 2138267 - DNA, 25 bp, Homo sapien
tcttgatcttcattgggtgcattag

SEQ ID NO: 2138268 - DNA, 25 bp, Homo sapien
tatgatgggcagtccgatcttttcc

SEQ ID NO: 2138269 - DNA, 25 bp, Homo sapien
ggttgaaaatccactcagtaggcca

SEQ ID NO: 2138270 - DNA, 25 bp, Homo sapien
tacgtgaaggcaatcgacatctgga

SEQ ID NO: 2138271 - DNA, 25 bp, Homo sapien
cagtaggccacggaaggacttcaag

SEQ ID NO: 2138272 - DNA, 25 bp, Homo sapien
gcttccagcaccctaggaaagctgt

SEQ ID NO: 2138273 - DNA, 25 bp, Homo sapien
ccctaggaaagctgtatctcttcac

SEQ ID NO: 2138274 - DNA, 25 bp, Homo sapien
ccagcaccctaggaaagctgtatct

SEQ ID NO: 2138275 - DNA, 25 bp, Homo sapien
gcaccctaggaaagctgtatctctt

SEQ ID NO: 2138276 - DNA, 25 bp, Homo sapien
agcaccagaagttgagcctccgctt

SEQ ID NO: 2138277 - DNA, 25 bp, Homo sapien
catatctttggtagttgaaaataac

SEQ ID NO: 2138278 - DNA, 25 bp, Homo sapien
tgagtctaggactgtgaaacctcca

SEQ ID NO: 2138279 - DNA, 25 bp, Homo sapien
ccgctttcaagtaaattgtcatatc

SEQ ID NO: 2138280 - DNA, 25 bp, Homo sapien
gagctcaggatgagctgagctccct

SEQ ID NO: 2138281 - DNA, 25 bp, Homo sapien
ctcaggatgagctgagctccctggc

SEQ ID NO: 2138282 - DNA, 25 bp, Homo sapien
ttcctcctgggtgtttctctgcagt

SEQ ID NO: 2138283 - DNA, 25 bp, Homo sapien
ttctctgcagtgctaaaatgttcat

SEQ ID NO: 2138284 - DNA, 25 bp, Homo sapien
gactttgggaaaaaggcctatgcca

SEQ ID NO: 2138285 - DNA, 25 bp, Homo sapien
cagttgggggataggcctacgtggc

SEQ ID NO: 2138286 - DNA, 25 bp, Homo sapien
tgggaaaaaggcctatgccatcgcc

SEQ ID NO: 2138287 - DNA, 25 bp, Homo sapien
aaaaaggcctatgccatcgccaagc

SEQ ID NO: 2138288 - DNA, 25 bp, Homo sapien
gaatcctgtctatgaagtctgtctc

SEQ ID NO: 2138289 - DNA, 25 bp, Homo sapien
gaaactgtgttgtggagagaccgct

SEQ ID NO: 2138290 - DNA, 25 bp, Homo sapien
gaccgctgagtgtcaggaatcctgt

SEQ ID NO: 2138291 - DNA, 25 bp, Homo sapien
gagagaccgctgagtgtcaggaatc

SEQ ID NO: 2138292 - DNA, 25 bp, Homo sapien
catgagaggcggcacacatgctgct

SEQ ID NO: 2138293 - DNA, 25 bp, Homo sapien
tatcttccgagatatgtgaccctga

SEQ ID NO: 2138294 - DNA, 25 bp, Homo sapien
aaaccatttaaactagccatggtgg

SEQ ID NO: 2138295 - DNA, 25 bp, Homo sapien
attcacttgtacacatgagaggcgg

SEQ ID NO: 2138296 - DNA, 25 bp, Homo sapien
cctcatttggttcaatctgatcaca

SEQ ID NO: 2138297 - DNA, 25 bp, Homo sapien
acagccctcatttggttcaatctga

SEQ ID NO: 2138298 - DNA, 25 bp, Homo sapien
catttggttcaatctgatcacaggt

SEQ ID NO: 2138299 - DNA, 25 bp, Homo sapien
tgccacagccctcatttggttcaat

SEQ ID NO: 2138300 - DNA, 25 bp, Homo sapien
tttcacttcacccagaaggcagctg

SEQ ID NO: 2138301 - DNA, 25 bp, Homo sapien
cttcacccagaaggcagctggtcat

SEQ ID NO: 2138302 - DNA, 25 bp, Homo sapien
acttcacccagaaggcagctggtca

SEQ ID NO: 2138303 - DNA, 25 bp, Homo sapien
tcacttcacccagaaggcagctggt

SEQ ID NO: 2138304 - DNA, 25 bp, Homo sapien
ttgaaggaggaaagcggtagagaga

SEQ ID NO: 2138305 - DNA, 25 bp, Homo sapien
ctgtggaagttgaaggaggaaagcg

SEQ ID NO: 2138306 - DNA, 25 bp, Homo sapien
aggaggaaagcggtagagagaggaa

SEQ ID NO: 2138307 - DNA, 25 bp, Homo sapien
gaagttgaaggaggaaagcggtaga

SEQ ID NO: 2138308 - DNA, 25 bp, Homo sapien
cagtcctcactccagttgttagtaa

SEQ ID NO: 2138309 - DNA, 25 bp, Homo sapien
tgggatgatttcaatactggacaaa

SEQ ID NO: 2138310 - DNA, 25 bp, Homo sapien
cctcactccagttgttagtaaagag

SEQ ID NO: 2138311 - DNA, 25 bp, Homo sapien
caatactggacaaattaaactggtc

SEQ ID NO: 2138312 - DNA, 25 bp, Homo sapien
aaggttaatgtcaggtcctgacact

SEQ ID NO: 2138313 - DNA, 25 bp, Homo sapien
ccaaggttaatgtcaggtcctgaca

SEQ ID NO: 2138314 - DNA, 25 bp, Homo sapien
caaggttaatgtcaggtcctgacac

SEQ ID NO: 2138315 - DNA, 25 bp, Homo sapien
catgtggccgaattccttttcccct

SEQ ID NO: 2138316 - DNA, 25 bp, Homo sapien
gacagtcaagcagctttgtggcctg

SEQ ID NO: 2138317 - DNA, 25 bp, Homo sapien
tccttttcccctaggcagacagtca

SEQ ID NO: 2138318 - DNA, 25 bp, Homo sapien
ccctaggcagacagtcaagcagctt

SEQ ID NO: 2138319 - DNA, 25 bp, Homo sapien
aaggcatggggactttgggactcta

SEQ ID NO: 2138320 - DNA, 25 bp, Homo sapien
ctgggaccaacactgtgatggtaga

SEQ ID NO: 2138321 - DNA, 25 bp, Homo sapien
tggggactttgggactctagcttct

SEQ ID NO: 2138322 - DNA, 25 bp, Homo sapien
cagatccattcgatgtaagcagaat

SEQ ID NO: 2138323 - DNA, 25 bp, Homo sapien
atgcactcgcatgcacatacatctg

SEQ ID NO: 2138324 - DNA, 25 bp, Homo sapien
ctctcccaagtacacagatatgcat

SEQ ID NO: 2138325 - DNA, 25 bp, Homo sapien
ctcccaagtacacagatatgcatgc

SEQ ID NO: 2138326 - DNA, 25 bp, Homo sapien
tgcactcgcatgcacatacatctgt

SEQ ID NO: 2138327 - DNA, 25 bp, Homo sapien
gacatgtacatgagtcccctctcct

SEQ ID NO: 2138328 - DNA, 25 bp, Homo sapien
tcaggacctggttcctgatgcctgc

SEQ ID NO: 2138329 - DNA, 25 bp, Homo sapien
tctgggacagtgtagccttagggca

SEQ ID NO: 2138330 - DNA, 25 bp, Homo sapien
ttccagatttagtccttcactcagg

SEQ ID NO: 2138331 - DNA, 25 bp, Homo sapien
gagaattctgaaagggctcagaatc

SEQ ID NO: 2138332 - DNA, 25 bp, Homo sapien
tttctgagaattctgaaagggctca

SEQ ID NO: 2138333 - DNA, 25 bp, Homo sapien
ttctgagaattctgaaagggctcag

SEQ ID NO: 2138334 - DNA, 25 bp, Homo sapien
ctgagaattctgaaagggctcagaa

SEQ ID NO: 2138335 - DNA, 25 bp, Homo sapien
ttctggccaagagaaccgagggctg

SEQ ID NO: 2138336 - DNA, 25 bp, Homo sapien
caacttcatgccgattggctagact

SEQ ID NO: 2138337 - DNA, 25 bp, Homo sapien
gctagactatgcctttctggccaag

SEQ ID NO: 2138338 - DNA, 25 bp, Homo sapien
tgagggccagagatgtcacatactt

SEQ ID NO: 2138339 - DNA, 25 bp, Homo sapien
tgcttctcattcccaggataatgtc

SEQ ID NO: 2138340 - DNA, 25 bp, Homo sapien
ctgggtcatctgctattatttgggc

SEQ ID NO: 2138341 - DNA, 25 bp, Homo sapien
ccagaccaaattttggaaggcagct

SEQ ID NO: 2138342 - DNA, 25 bp, Homo sapien
gtgaaagcctgggtcatctgctatt

SEQ ID NO: 2138343 - DNA, 25 bp, Homo sapien
tgccaagggattcctcaagaggcac

SEQ ID NO: 2138344 - DNA, 25 bp, Homo sapien
tattcttgagtccagctaggctcct

SEQ ID NO: 2138345 - DNA, 25 bp, Homo sapien
ctgcactgccaagggattcctcaag

SEQ ID NO: 2138346 - DNA, 25 bp, Homo sapien
ttcttgagtccagctaggctcctgc

SEQ ID NO: 2138347 - DNA, 25 bp, Homo sapien
ttcctgagggctccctacagacctc

SEQ ID NO: 2138348 - DNA, 25 bp, Homo sapien
gagggctccctacagacctcatagg

SEQ ID NO: 2138349 - DNA, 25 bp, Homo sapien
ggctccctacagacctcatagggta

SEQ ID NO: 2138350 - DNA, 25 bp, Homo sapien
ccctacagacctcatagggtatctt

SEQ ID NO: 2138351 - DNA, 25 bp, Homo sapien
taagaggggcacctgttggaagact

SEQ ID NO: 2138352 - DNA, 25 bp, Homo sapien
cctttaaaacaactggctggcatat

SEQ ID NO: 2138353 - DNA, 25 bp, Homo sapien
gaaggaaggtatggtctcctggaac

SEQ ID NO: 2138354 - DNA, 25 bp, Homo sapien
tggaagactccggagaaggaaggta

SEQ ID NO: 2138355 - DNA, 25 bp, Homo sapien
tggaatttcgctttgctgcagagac

SEQ ID NO: 2138356 - DNA, 25 bp, Homo sapien
taaggcttgcctggaatttcgcttt

SEQ ID NO: 2138357 - DNA, 25 bp, Homo sapien
tccctaaggcttgcctggaatttcg

SEQ ID NO: 2138358 - DNA, 25 bp, Homo sapien
tgcctggaatttcgctttgctgcag

SEQ ID NO: 2138359 - DNA, 25 bp, Homo sapien
tgaaaagggctttctgattgacagc

SEQ ID NO: 2138360 - DNA, 25 bp, Homo sapien
caatgaaaagggctttctgattgac

SEQ ID NO: 2138361 - DNA, 25 bp, Homo sapien
aagggctttctgattgacagccaac

SEQ ID NO: 2138362 - DNA, 25 bp, Homo sapien
ggctttctgattgacagccaacccc

SEQ ID NO: 2138363 - DNA, 25 bp, Homo sapien
tctctctgagtatctttgtcctctt

SEQ ID NO: 2138364 - DNA, 25 bp, Homo sapien
gctggaaggatcctggtctctccag

SEQ ID NO: 2138365 - DNA, 25 bp, Homo sapien
cagcctccttcttcggtcttttact

SEQ ID NO: 2138366 - DNA, 25 bp, Homo sapien
tttgttcagctggaaggatcctggt

SEQ ID NO: 2138367 - DNA, 25 bp, Homo sapien
ctctgactccaattgtagccggctg

SEQ ID NO: 2138368 - DNA, 25 bp, Homo sapien
gactctgactccaattgtagccggc

SEQ ID NO: 2138369 - DNA, 25 bp, Homo sapien
ggactctgactccaattgtagccgg

SEQ ID NO: 2138370 - DNA, 25 bp, Homo sapien
tctgactccaattgtagccggctgg

SEQ ID NO: 2138371 - DNA, 25 bp, Homo sapien
atcctcaatcgtgcccttatctgtg

SEQ ID NO: 2138372 - DNA, 25 bp, Homo sapien
tggcccaagtatcgtccacccttag

SEQ ID NO: 2138373 - DNA, 25 bp, Homo sapien
tgtgcatcctcaatcgtgcccttat

SEQ ID NO: 2138374 - DNA, 25 bp, Homo sapien
taggacctgggacccaatgtgcatc

SEQ ID NO: 2138375 - DNA, 25 bp, Homo sapien
ttggcaaacagccacttttggatgg

SEQ ID NO: 2138376 - DNA, 25 bp, Homo sapien
cacttttggatggaggcatcacagt

SEQ ID NO: 2138377 - DNA, 25 bp, Homo sapien
gtctggttaccagggtaacagccac

SEQ ID NO: 2138378 - DNA, 25 bp, Homo sapien
cagacgacaacaggcttgcagacaa

SEQ ID NO: 2138379 - DNA, 25 bp, Homo sapien
tgtgaagctgatttggggaacctta

SEQ ID NO: 2138380 - DNA, 25 bp, Homo sapien
tgttgcagtgtgaagctgatttggg

SEQ ID NO: 2138381 - DNA, 25 bp, Homo sapien
cttattctcttccttgggactcttt

SEQ ID NO: 2138382 - DNA, 25 bp, Homo sapien
cagtgtgaagctgatttggggaacc

SEQ ID NO: 2138383 - DNA, 25 bp, Homo sapien
ctagggatggatggggatcagtggg

SEQ ID NO: 2138384 - DNA, 25 bp, Homo sapien
tagggatggatggggatcagtgggt

SEQ ID NO: 2138385 - DNA, 25 bp, Homo sapien
gttgacaaggccgaaatgctagagc

SEQ ID NO: 2138386 - DNA, 25 bp, Homo sapien
ctgcagtagttgacaaggccgaaat

SEQ ID NO: 2138387 - DNA, 25 bp, Homo sapien
ccgaaatgctagagcagccgtgact

SEQ ID NO: 2138388 - DNA, 25 bp, Homo sapien
aatgctagagcagccgtgactggta

SEQ ID NO: 2138389 - DNA, 25 bp, Homo sapien
tgaacagaggcctccttgatcaggg

SEQ ID NO: 2138390 - DNA, 25 bp, Homo sapien
gaacagaggcctccttgatcagggc

SEQ ID NO: 2138391 - DNA, 25 bp, Homo sapien
cccatgaacagaggcctccttgatc

SEQ ID NO: 2138392 - DNA, 25 bp, Homo sapien
catgaacagaggcctccttgatcag

SEQ ID NO: 2138393 - DNA, 25 bp, Homo sapien
tgtgaatctgggaactcatcaaagg

SEQ ID NO: 2138394 - DNA, 25 bp, Homo sapien
gatccaggttcatcaagggactgtg

SEQ ID NO: 2138395 - DNA, 25 bp, Homo sapien
gaaagagaccaattgtaccctgcac

SEQ ID NO: 2138396 - DNA, 25 bp, Homo sapien
gatgctgtctctttaagcaggcacc

SEQ ID NO: 2138397 - DNA, 25 bp, Homo sapien
atagctcccccggacaaagaagcct

SEQ ID NO: 2138398 - DNA, 25 bp, Homo sapien
tcaggagcctgattggtattccaca

SEQ ID NO: 2138399 - DNA, 25 bp, Homo sapien
tctcaggagcctgattggtattcca

SEQ ID NO: 2138400 - DNA, 25 bp, Homo sapien
ggagcctgattggtattccacaggg

SEQ ID NO: 2138401 - DNA, 25 bp, Homo sapien
caagaactaaagcattgctgccagg

SEQ ID NO: 2138402 - DNA, 25 bp, Homo sapien
taagcagctaacatttggagcagaa

SEQ ID NO: 2138403 - DNA, 25 bp, Homo sapien
gagtgtcacaccaaagatgagcctc

SEQ ID NO: 2138404 - DNA, 25 bp, Homo sapien
gaagcccaagccaaacaaagtaagc

SEQ ID NO: 2138405 - DNA, 25 bp, Homo sapien
atttgttgcaaagaatgcttgattc

SEQ ID NO: 2138406 - DNA, 25 bp, Homo sapien
gtttacatatgggaggagcagtcca

SEQ ID NO: 2138407 - DNA, 25 bp, Homo sapien
catttttgagcatcgtgtgtatttg

SEQ ID NO: 2138408 - DNA, 25 bp, Homo sapien
tattgtcagacaggattttagcatg

SEQ ID NO: 2138409 - DNA, 25 bp, Homo sapien
aagtggtaacagagggtaaatgcac

SEQ ID NO: 2138410 - DNA, 25 bp, Homo sapien
cagccaagtaagtggtaacagaggg

SEQ ID NO: 2138411 - DNA, 25 bp, Homo sapien
ttcaggcagccaagtaagtggtaac

SEQ ID NO: 2138412 - DNA, 25 bp, Homo sapien
gtaagtggtaacagagggtaaatgc

SEQ ID NO: 2138413 - DNA, 25 bp, Homo sapien
cttttctgtgccagtgagggcttca

SEQ ID NO: 2138414 - DNA, 25 bp, Homo sapien
gcaaagggggcccctaccagacatc

SEQ ID NO: 2138415 - DNA, 25 bp, Homo sapien
agatactcatagtcttggtagtttt

SEQ ID NO: 2138416 - DNA, 25 bp, Homo sapien
agccacagaacagtgccaccccaaa

SEQ ID NO: 2138417 - DNA, 25 bp, Homo sapien
ttgtagtcgccaaagatctgcctga

SEQ ID NO: 2138418 - DNA, 25 bp, Homo sapien
gaaagaggcagttccatagatgaca

SEQ ID NO: 2138419 - DNA, 25 bp, Homo sapien
actgcgccggtggtgtagaagccct

SEQ ID NO: 2138420 - DNA, 25 bp, Homo sapien
atctgcctgactgcgccggtggtgt

SEQ ID NO: 2138421 - DNA, 25 bp, Homo sapien
tgatgttggcctctggaacccctcc

SEQ ID NO: 2138422 - DNA, 25 bp, Homo sapien
gatgttggcctctggaacccctccc

SEQ ID NO: 2138423 - DNA, 25 bp, Homo sapien
cgggatgtcctagccattttcccaa

SEQ ID NO: 2138424 - DNA, 25 bp, Homo sapien
agccattttcccaaacaatgacaca

SEQ ID NO: 2138425 - DNA, 25 bp, Homo sapien
cttgtcgggatgtcctagccatttt

SEQ ID NO: 2138426 - DNA, 25 bp, Homo sapien
tgtcgggatgtcctagccattttcc

SEQ ID NO: 2138427 - DNA, 25 bp, Homo sapien
cagctgggcaccacgttcttcctga

SEQ ID NO: 2138428 - DNA, 25 bp, Homo sapien
tcactcaaatgccaggcccctagag

SEQ ID NO: 2138429 - DNA, 25 bp, Homo sapien
cctttgaaaggtgaggctaagccag

SEQ ID NO: 2138430 - DNA, 25 bp, Homo sapien
tgaccttctcgttcggctgcagcca

SEQ ID NO: 2138431 - DNA, 25 bp, Homo sapien
gttgaagtaaatgtacacaggcaca

SEQ ID NO: 2138432 - DNA, 25 bp, Homo sapien
cagcacagagactgcctatactggc

SEQ ID NO: 2138433 - DNA, 25 bp, Homo sapien
cacacaacggtcagggcataggtga

SEQ ID NO: 2138434 - DNA, 25 bp, Homo sapien
ccaggagccacacaacggtcagggc

SEQ ID NO: 2138435 - DNA, 25 bp, Homo sapien
aaggttggagccacaaaccttgcca

SEQ ID NO: 2138436 - DNA, 25 bp, Homo sapien
tggacagaaggttggagccacaaac

SEQ ID NO: 2138437 - DNA, 25 bp, Homo sapien
ggagccacaaaccttgccagggaaa

SEQ ID NO: 2138438 - DNA, 25 bp, Homo sapien
gccacaaaccttgccagggaaagca

SEQ ID NO: 2138439 - DNA, 25 bp, Homo sapien
atgcagcaataaacaggtggaaggt

SEQ ID NO: 2138440 - DNA, 25 bp, Homo sapien
ggaaaccagtgtagctgcagccccc

SEQ ID NO: 2138441 - DNA, 25 bp, Homo sapien
aaaccagtgtagctgcagcccccac

SEQ ID NO: 2138442 - DNA, 25 bp, Homo sapien
gcagcaataaacaggtggaaggtca

SEQ ID NO: 2138443 - DNA, 25 bp, Homo sapien
cagccacatcatgcagtagagctct

SEQ ID NO: 2138444 - DNA, 25 bp, Homo sapien
gccacatcatgcagtagagctctcc

SEQ ID NO: 2138445 - DNA, 25 bp, Homo sapien
acacagccacatcatgcagtagagc

SEQ ID NO: 2138446 - DNA, 25 bp, Homo sapien
cacagccacatcatgcagtagagct

SEQ ID NO: 2138447 - DNA, 25 bp, Homo sapien
cacatcaatatgtccgagtgactta

SEQ ID NO: 2138448 - DNA, 25 bp, Homo sapien
tcagggaagtgaacaatatttggct

SEQ ID NO: 2138449 - DNA, 25 bp, Homo sapien
cgagtgacttagagtcatagggtgc

SEQ ID NO: 2138450 - DNA, 25 bp, Homo sapien
gatctagcactgagttttcctcagg

SEQ ID NO: 2138451 - DNA, 25 bp, Homo sapien
taaggacggcaaagttgtaagtggc

SEQ ID NO: 2138452 - DNA, 25 bp, Homo sapien
aaggacggcaaagttgtaagtggca

SEQ ID NO: 2138453 - DNA, 25 bp, Homo sapien
gacggcaaagttgtaagtggcagca

SEQ ID NO: 2138454 - DNA, 25 bp, Homo sapien
ggacggcaaagttgtaagtggcagc

SEQ ID NO: 2138455 - DNA, 25 bp, Homo sapien
ggcttcagtagtccatcgccatcgg

SEQ ID NO: 2138456 - DNA, 25 bp, Homo sapien
gagtgagaagatgctgacaacaccc

SEQ ID NO: 2138457 - DNA, 25 bp, Homo sapien
caactgaatagctgatgactggtgc

SEQ ID NO: 2138458 - DNA, 25 bp, Homo sapien
tcatcaagtaagaagagggccagtt

SEQ ID NO: 2138459 - DNA, 25 bp, Homo sapien
aagatgggctttccccacaggtcca

SEQ ID NO: 2138460 - DNA, 25 bp, Homo sapien
agtgtgtcgccacaagatgggcttt

SEQ ID NO: 2138461 - DNA, 25 bp, Homo sapien
cagtgtgtcgccacaagatgggctt

SEQ ID NO: 2138462 - DNA, 25 bp, Homo sapien
tgggctttccccacaggtccaacca

SEQ ID NO: 2138463 - DNA, 25 bp, Homo sapien
cacattggaccctttgagttgcata

SEQ ID NO: 2138464 - DNA, 25 bp, Homo sapien
tgaaaggttagatgtgggactccac

SEQ ID NO: 2138465 - DNA, 25 bp, Homo sapien
gaatagcgtttcagtggcatgacag

SEQ ID NO: 2138466 - DNA, 25 bp, Homo sapien
tcggcatggatgtagctgataactt

SEQ ID NO: 2138467 - DNA, 25 bp, Homo sapien
attcccggcacgcagagctgacctg

SEQ ID NO: 2138468 - DNA, 25 bp, Homo sapien
tgactctaaggagccggattcccgg

SEQ ID NO: 2138469 - DNA, 25 bp, Homo sapien
tgccccattgaggacgaggaggcag

SEQ ID NO: 2138470 - DNA, 25 bp, Homo sapien
cttcccattgtgttgggtaaggtgc

SEQ ID NO: 2138471 - DNA, 25 bp, Homo sapien
catcagaagttcctatgtcttccat

SEQ ID NO: 2138472 - DNA, 25 bp, Homo sapien
cgaccatcatagtaatgggcaatat

SEQ ID NO: 2138473 - DNA, 25 bp, Homo sapien
tgggcaatatcaggtccgcgtaagt

SEQ ID NO: 2138474 - DNA, 25 bp, Homo sapien
ggcaggaaacgaccatcatagtaat

SEQ ID NO: 2138475 - DNA, 25 bp, Homo sapien
cgtaagtcatggcagcagagcaaga

SEQ ID NO: 2138476 - DNA, 25 bp, Homo sapien
tcttgctagcagtagcttcagggcc

SEQ ID NO: 2138477 - DNA, 25 bp, Homo sapien
cccaccagtggagcgcaggtaaaga

SEQ ID NO: 2138478 - DNA, 25 bp, Homo sapien
caggtaaagaaagagcgcgcgattt

SEQ ID NO: 2138479 - DNA, 25 bp, Homo sapien
tctgcgaagcactcgctaagccggg

SEQ ID NO: 2138480 - DNA, 25 bp, Homo sapien
tcagctctcctaccaaaggtcttct

SEQ ID NO: 2138481 - DNA, 25 bp, Homo sapien
gatacccaggccactaaatccacag

SEQ ID NO: 2138482 - DNA, 25 bp, Homo sapien
gcaggagtaaaagctcaagaggccc

SEQ ID NO: 2138483 - DNA, 25 bp, Homo sapien
tacctcagagcgcaataatgttcca

SEQ ID NO: 2138484 - DNA, 25 bp, Homo sapien
cttatagataggaaaggtcagaaaa

SEQ ID NO: 2138485 - DNA, 25 bp, Homo sapien
tggcatggatctgttgccgaaacac

SEQ ID NO: 2138486 - DNA, 25 bp, Homo sapien
ctctgacactgccatggcatggatc

SEQ ID NO: 2138487 - DNA, 25 bp, Homo sapien
catggatctgttgccgaaacacaac

SEQ ID NO: 2138488 - DNA, 25 bp, Homo sapien
ccatggcatggatctgttgccgaaa

SEQ ID NO: 2138489 - DNA, 25 bp, Homo sapien
gaggaccttcgtgccaaagtgtctc

SEQ ID NO: 2138490 - DNA, 25 bp, Homo sapien
aggaccttcgtgccaaagtgtctca

SEQ ID NO: 2138491 - DNA, 25 bp, Homo sapien
tgaggaccttcgtgccaaagtgtct

SEQ ID NO: 2138492 - DNA, 25 bp, Homo sapien
ggaccttcgtgccaaagtgtctcac

SEQ ID NO: 2138493 - DNA, 25 bp, Homo sapien
aaccatggtagtagccccgtgacag

SEQ ID NO: 2138494 - DNA, 25 bp, Homo sapien
agaaaccatggtagtagccccgtga

SEQ ID NO: 2138495 - DNA, 25 bp, Homo sapien
gccagaaaccatggtagtagccccg

SEQ ID NO: 2138496 - DNA, 25 bp, Homo sapien
aaaccatggtagtagccccgtgaca

SEQ ID NO: 2138497 - DNA, 25 bp, Homo sapien
gctccaaggcatgtgtcttactgac

SEQ ID NO: 2138498 - DNA, 25 bp, Homo sapien
gaggctataccacatcagagcttga

SEQ ID NO: 2138499 - DNA, 25 bp, Homo sapien
cagaatcagtaccatctatgaagtg

SEQ ID NO: 2138500 - DNA, 25 bp, Homo sapien
aagggacagcaaccggaggctatac

SEQ ID NO: 2138501 - DNA, 25 bp, Homo sapien
ctctaatggcgccttggtctctctg

SEQ ID NO: 2138502 - DNA, 25 bp, Homo sapien
cagggaaatacctaacgttgaccag

SEQ ID NO: 2138503 - DNA, 25 bp, Homo sapien
tgcaaacattgaatcgaggaatact

SEQ ID NO: 2138504 - DNA, 25 bp, Homo sapien
ttcacatcacggcaatcaacaaaga

SEQ ID NO: 2138505 - DNA, 25 bp, Homo sapien
catacggtgatctagactggtgcag

SEQ ID NO: 2138506 - DNA, 25 bp, Homo sapien
gcatgacaatctgggcactggaaat

SEQ ID NO: 2138507 - DNA, 25 bp, Homo sapien
tctccgagaagggaaacaactgtcc

SEQ ID NO: 2138508 - DNA, 25 bp, Homo sapien
gagagtccaagaagcctgcatagag

SEQ ID NO: 2138509 - DNA, 25 bp, Homo sapien
aatgctcaccgaagaaaattcccgg

SEQ ID NO: 2138510 - DNA, 25 bp, Homo sapien
gctccgagacgttgataaagaacct

SEQ ID NO: 2138511 - DNA, 25 bp, Homo sapien
cactgctttagtcctgagggtccac

SEQ ID NO: 2138512 - DNA, 25 bp, Homo sapien
tgttgtgtcaagacgccgatggacc

SEQ ID NO: 2138513 - DNA, 25 bp, Homo sapien
ctctggctcccgaaggcgcggcatc

SEQ ID NO: 2138514 - DNA, 25 bp, Homo sapien
aaggcggcgccccagaaagacaaag

SEQ ID NO: 2138515 - DNA, 25 bp, Homo sapien
aagacaaaggctcggactcgccggg

SEQ ID NO: 2138516 - DNA, 25 bp, Homo sapien
ctcggcatcgctcgcagaaggcggc

SEQ ID NO: 2138517 - DNA, 25 bp, Homo sapien
gctgtggacctgacgaaatgcctgg

SEQ ID NO: 2138518 - DNA, 25 bp, Homo sapien
cccaagcagtcagaagtgtcgaaca

SEQ ID NO: 2138519 - DNA, 25 bp, Homo sapien
tccctggcgtagaatgcagaggccc

SEQ ID NO: 2138520 - DNA, 25 bp, Homo sapien
gacagctaactaggatcagacccag

SEQ ID NO: 2138521 - DNA, 25 bp, Homo sapien
caccgcgccaggacagaaaaaaaca

SEQ ID NO: 2138522 - DNA, 25 bp, Homo sapien
cgcgccaggacagaaaaaaacattt

SEQ ID NO: 2138523 - DNA, 25 bp, Homo sapien
agccaccgcgccaggacagaaaaaa

SEQ ID NO: 2138524 - DNA, 25 bp, Homo sapien
ccgcgccaggacagaaaaaaacatt

SEQ ID NO: 2138525 - DNA, 25 bp, Homo sapien
gcctcagcatctcaagaaactggga

SEQ ID NO: 2138526 - DNA, 25 bp, Homo sapien
ttcctctgcctcagcatctcaagaa

SEQ ID NO: 2138527 - DNA, 25 bp, Homo sapien
cctcagcatctcaagaaactgggat

SEQ ID NO: 2138528 - DNA, 25 bp, Homo sapien
ctctgcctcagcatctcaagaaact

SEQ ID NO: 2138529 - DNA, 25 bp, Homo sapien
acctgtcaaacttctccacttccga

SEQ ID NO: 2138530 - DNA, 25 bp, Homo sapien
aaacttctccacttccgacaagtct

SEQ ID NO: 2138531 - DNA, 25 bp, Homo sapien
gtcaaacttctccacttccgacaag

SEQ ID NO: 2138532 - DNA, 25 bp, Homo sapien
acttctccacttccgacaagtctgg

SEQ ID NO: 2138533 - DNA, 25 bp, Homo sapien
tatgatgtttgaacacactctttct

SEQ ID NO: 2138534 - DNA, 25 bp, Homo sapien
tgaacacactctttctcctgctgga

SEQ ID NO: 2138535 - DNA, 25 bp, Homo sapien
acacactctttctcctgctggatag

SEQ ID NO: 2138536 - DNA, 25 bp, Homo sapien
ttatgatgtttgaacacactctttc

SEQ ID NO: 2138537 - DNA, 25 bp, Homo sapien
taaaattggcttatcctgcatgagg

SEQ ID NO: 2138538 - DNA, 25 bp, Homo sapien
gaggcacccattgtagaaagttaaa

SEQ ID NO: 2138539 - DNA, 25 bp, Homo sapien
ctgtaagaagctgccaaaggatgca

SEQ ID NO: 2138540 - DNA, 25 bp, Homo sapien
gattatgaaactattgaggcaccca

SEQ ID NO: 2138541 - DNA, 25 bp, Homo sapien
gctaccagatgcaactaactaggag

SEQ ID NO: 2138542 - DNA, 25 bp, Homo sapien
actacccagggtacaaatcaagact

SEQ ID NO: 2138543 - DNA, 25 bp, Homo sapien
tagtgactaaaagagtagcccaaca

SEQ ID NO: 2138544 - DNA, 25 bp, Homo sapien
tacaactgctataacaaagccctgg

SEQ ID NO: 2138545 - DNA, 25 bp, Homo sapien
caaaactttgctgcagagatctcag

SEQ ID NO: 2138546 - DNA, 25 bp, Homo sapien
tgagtggcgactattccaggcattg

SEQ ID NO: 2138547 - DNA, 25 bp, Homo sapien
ggcacctattaaccagaagattgaa

SEQ ID NO: 2138548 - DNA, 25 bp, Homo sapien
taaaaagagtcaccacggactgagt

SEQ ID NO: 2138549 - DNA, 25 bp, Homo sapien
aaatttacgactctgtacttcccag

SEQ ID NO: 2138550 - DNA, 25 bp, Homo sapien
tgaccatatgtcctgatttcgcctg

SEQ ID NO: 2138551 - DNA, 25 bp, Homo sapien
tgattggtcctaattcttgacggaa

SEQ ID NO: 2138552 - DNA, 25 bp, Homo sapien
cccactatggtaatatgagacaata

SEQ ID NO: 2138553 - DNA, 25 bp, Homo sapien
taatgaagtatctccagtcctgggc

SEQ ID NO: 2138554 - DNA, 25 bp, Homo sapien
taagctcagttagccactgggatcc

SEQ ID NO: 2138555 - DNA, 25 bp, Homo sapien
tattggcagcgacaggtgagctctg

SEQ ID NO: 2138556 - DNA, 25 bp, Homo sapien
tgttagctctagtcaacacgtggca

SEQ ID NO: 2138557 - DNA, 25 bp, Homo sapien
gctccttgaagagggcttgacctcc

SEQ ID NO: 2138558 - DNA, 25 bp, Homo sapien
tgccacaccgtgagcactttgaagg

SEQ ID NO: 2138559 - DNA, 25 bp, Homo sapien
tgaagggtgtcacggaaaactccca

SEQ ID NO: 2138560 - DNA, 25 bp, Homo sapien
tatcatgtcaaccaatcacagtggg

SEQ ID NO: 2138561 - DNA, 25 bp, Homo sapien
aaagcctcagccatggtggaggcag

SEQ ID NO: 2138562 - DNA, 25 bp, Homo sapien
ctcagaggttgtcttagagaaagcc

SEQ ID NO: 2138563 - DNA, 25 bp, Homo sapien
tctgggccgtcatggagttggcctc

SEQ ID NO: 2138564 - DNA, 25 bp, Homo sapien
tggtcttcctcagaggttgtcttag

SEQ ID NO: 2138565 - DNA, 25 bp, Homo sapien
tggcgcctacgggagcctcgaagcc

SEQ ID NO: 2138566 - DNA, 25 bp, Homo sapien
ctgttggcatggcgcctacgggagc

SEQ ID NO: 2138567 - DNA, 25 bp, Homo sapien
tgttggcatggcgcctacgggagcc

SEQ ID NO: 2138568 - DNA, 25 bp, Homo sapien
ggcatggcgcctacgggagcctcga

SEQ ID NO: 2138569 - DNA, 25 bp, Homo sapien
ataggcggcaaagctgtccccgaag

SEQ ID NO: 2138570 - DNA, 25 bp, Homo sapien
aagctgtccccgaagatatctccgc

SEQ ID NO: 2138571 - DNA, 25 bp, Homo sapien
gcggcaaagctgtccccgaagatat

SEQ ID NO: 2138572 - DNA, 25 bp, Homo sapien
gggaaataggcggcaaagctgtccc

SEQ ID NO: 2138573 - DNA, 25 bp, Homo sapien
acacggccatccgaatgtcccggga

SEQ ID NO: 2138574 - DNA, 25 bp, Homo sapien
ctgagactcagcgagcttgcccatc

SEQ ID NO: 2138575 - DNA, 25 bp, Homo sapien
tgcggtccagtatgtcacgaaccat

SEQ ID NO: 2138576 - DNA, 25 bp, Homo sapien
tcacgcacttggagtagtgggccag

SEQ ID NO: 2138577 - DNA, 25 bp, Homo sapien
ttgccatatcgcacataatgaagtt

SEQ ID NO: 2138578 - DNA, 25 bp, Homo sapien
acacacaactggaaggaaggaaggt

SEQ ID NO: 2138579 - DNA, 25 bp, Homo sapien
ctactgacacacaactggaaggaag

SEQ ID NO: 2138580 - DNA, 25 bp, Homo sapien
tgacacacaactggaaggaaggaag

SEQ ID NO: 2138581 - DNA, 25 bp, Homo sapien
gacacacaactggaaggaaggaagg

SEQ ID NO: 2138582 - DNA, 25 bp, Homo sapien
gacaatgagtgttgctcatagactt

SEQ ID NO: 2138583 - DNA, 25 bp, Homo sapien
ccacgtggaatatcacaggaaggct

SEQ ID NO: 2138584 - DNA, 25 bp, Homo sapien
ggttcagcttcggtcactcgtccca

SEQ ID NO: 2138585 - DNA, 25 bp, Homo sapien
actcgtcccacattgggacaatgag

SEQ ID NO: 2138586 - DNA, 25 bp, Homo sapien
aacttgatgttagggtcaaggaacg

SEQ ID NO: 2138587 - DNA, 25 bp, Homo sapien
tcaaggaacgtatattaatcttagc

SEQ ID NO: 2138588 - DNA, 25 bp, Homo sapien
tagggtcaaggaacgtatattaatc

SEQ ID NO: 2138589 - DNA, 25 bp, Homo sapien
gcgttatctgacttcttctaatggc

SEQ ID NO: 2138590 - DNA, 25 bp, Homo sapien
gtgcagtaagtacagcttcaactat

SEQ ID NO: 2138591 - DNA, 25 bp, Homo sapien
tgttttggaacaggtatacagctct

SEQ ID NO: 2138592 - DNA, 25 bp, Homo sapien
gcagtaagtacagcttcaactattt

SEQ ID NO: 2138593 - DNA, 25 bp, Homo sapien
ggtgttttggaacaggtatacagct

SEQ ID NO: 2138594 - DNA, 25 bp, Homo sapien
tccgatcttcgcatcaatccacccc

SEQ ID NO: 2138595 - DNA, 25 bp, Homo sapien
tcttccgatcttcgcatcaatccac

SEQ ID NO: 2138596 - DNA, 25 bp, Homo sapien
ttcctcttccgatcttcgcatcaat

SEQ ID NO: 2138597 - DNA, 25 bp, Homo sapien
cctcttccgatcttcgcatcaatcc

SEQ ID NO: 2138598 - DNA, 25 bp, Homo sapien
gtagaggccagtcatgaagattttc

SEQ ID NO: 2138599 - DNA, 25 bp, Homo sapien
cccatgacacgtagaggccagtcat

SEQ ID NO: 2138600 - DNA, 25 bp, Homo sapien
ttccatgatccccatgacacgtaga

SEQ ID NO: 2138601 - DNA, 25 bp, Homo sapien
catgatccccatgacacgtagaggc

SEQ ID NO: 2138602 - DNA, 25 bp, Homo sapien
tcacacatcaggtctttgggaaccc

SEQ ID NO: 2138603 - DNA, 25 bp, Homo sapien
gctttctcaagagaaagtgggctcc

SEQ ID NO: 2138604 - DNA, 25 bp, Homo sapien
caccatgctgaacgaggatctgcag

SEQ ID NO: 2138605 - DNA, 25 bp, Homo sapien
tgcaccatgctgaacgaggatctgc

SEQ ID NO: 2138606 - DNA, 25 bp, Homo sapien
tctagcatgctacatggactctctc

SEQ ID NO: 2138607 - DNA, 25 bp, Homo sapien
gggatgtggcaaatagtatggccat

SEQ ID NO: 2138608 - DNA, 25 bp, Homo sapien
tagtatggccatgtcacagttggag

SEQ ID NO: 2138609 - DNA, 25 bp, Homo sapien
tgagattcaaggagggagtagtggc

SEQ ID NO: 2138610 - DNA, 25 bp, Homo sapien
ggacaactagcacaggaatgatccc

SEQ ID NO: 2138611 - DNA, 25 bp, Homo sapien
gacaactagcacaggaatgatcccc

SEQ ID NO: 2138612 - DNA, 25 bp, Homo sapien
tgtcctctctagaacgctgaggtgt

SEQ ID NO: 2138613 - DNA, 25 bp, Homo sapien
tggagtgccacattttaggggagcc

SEQ ID NO: 2138614 - DNA, 25 bp, Homo sapien
tcctctctagaacgctgaggtgtgt

SEQ ID NO: 2138615 - DNA, 25 bp, Homo sapien
tctctagaacgctgaggtgtgtgct

SEQ ID NO: 2138616 - DNA, 25 bp, Homo sapien
aaatacccaccttcatgacttggaa

SEQ ID NO: 2138617 - DNA, 25 bp, Homo sapien
cggaggaatttaggagtgagaactg

SEQ ID NO: 2138618 - DNA, 25 bp, Homo sapien
actgcaggagcgatcttatccctcg

SEQ ID NO: 2138619 - DNA, 25 bp, Homo sapien
cttatccctcgctgtttgaacaagc

SEQ ID NO: 2138620 - DNA, 25 bp, Homo sapien
gagtgagaactgcaggagcgatctt

SEQ ID NO: 2138621 - DNA, 25 bp, Homo sapien
tacaataaacgccatcgtaaccatt

SEQ ID NO: 2138622 - DNA, 25 bp, Homo sapien
cagcactacaataaacgccatcgta

SEQ ID NO: 2138623 - DNA, 25 bp, Homo sapien
gcatccagcactacaataaacgcca

SEQ ID NO: 2138624 - DNA, 25 bp, Homo sapien
tccagcatccagcactacaataaac

SEQ ID NO: 2138625 - DNA, 25 bp, Homo sapien
tggtatgccgcagagcaagtgctca

SEQ ID NO: 2138626 - DNA, 25 bp, Homo sapien
tcagcgttgtgtgtcagggttgcca

SEQ ID NO: 2138627 - DNA, 25 bp, Homo sapien
gactctcaactagggcgagctctgc

SEQ ID NO: 2138628 - DNA, 25 bp, Homo sapien
caagctgcgttgtactaggaatcct

SEQ ID NO: 2138629 - DNA, 25 bp, Homo sapien
ggaagcagcggccattagatagcaa

SEQ ID NO: 2138630 - DNA, 25 bp, Homo sapien
aagcagcggccattagatagcaaga

SEQ ID NO: 2138631 - DNA, 25 bp, Homo sapien
gcagcggccattagatagcaagaac

SEQ ID NO: 2138632 - DNA, 25 bp, Homo sapien
agcggccattagatagcaagaacag

SEQ ID NO: 2138633 - DNA, 25 bp, Homo sapien
gccttcctccgaggttgtctcagag

SEQ ID NO: 2138634 - DNA, 25 bp, Homo sapien
tctggccttcctccgaggttgtctc

SEQ ID NO: 2138635 - DNA, 25 bp, Homo sapien
aagctgtccccacggcggttggcgt

SEQ ID NO: 2138636 - DNA, 25 bp, Homo sapien
cctcggcaccctcgcctcttctgct

SEQ ID NO: 2138637 - DNA, 25 bp, Homo sapien
gtcacgcgcttggtgtaatgggcca

SEQ ID NO: 2138638 - DNA, 25 bp, Homo sapien
tgagggcggcattcgtgccctgggc

SEQ ID NO: 2138639 - DNA, 25 bp, Homo sapien
gcagtcgcacggccatctggatgtc

SEQ ID NO: 2138640 - DNA, 25 bp, Homo sapien
caatatgtcatggatcatagaatcc

SEQ ID NO: 2138641 - DNA, 25 bp, Homo sapien
ttgccatatcgcacataatgaagtt

SEQ ID NO: 2138642 - DNA, 25 bp, Homo sapien
cgtaatcctactgacacacacctgg

SEQ ID NO: 2138643 - DNA, 25 bp, Homo sapien
ggtaaagaatcacactgccgttcct

SEQ ID NO: 2138644 - DNA, 25 bp, Homo sapien
tatctgacttctactaatggttgcc

SEQ ID NO: 2138645 - DNA, 25 bp, Homo sapien
tcaatgactgttgctcatagactgc

SEQ ID NO: 2138646 - DNA, 25 bp, Homo sapien
cttggtctcctcgtgcaataagcac

SEQ ID NO: 2138647 - DNA, 25 bp, Homo sapien
tcttggtctcctcgtgcaataagca

SEQ ID NO: 2138648 - DNA, 25 bp, Homo sapien
ttcttggtctcctcgtgcaataagc

SEQ ID NO: 2138649 - DNA, 25 bp, Homo sapien
tgtggtgttttgtcaggtacacagc

SEQ ID NO: 2138650 - DNA, 25 bp, Homo sapien
cacattgggccatggccccttggct

SEQ ID NO: 2138651 - DNA, 25 bp, Homo sapien
tttcagaccaggaaacctgatcaca

SEQ ID NO: 2138652 - DNA, 25 bp, Homo sapien
atcacacattgggccatggcccctt

SEQ ID NO: 2138653 - DNA, 25 bp, Homo sapien
ctatttcagaccaggaaacctgatc

SEQ ID NO: 2138654 - DNA, 25 bp, Homo sapien
cagaggttggcatggccgtcactgc

SEQ ID NO: 2138655 - DNA, 25 bp, Homo sapien
agaggttggcatggccgtcactgcc

SEQ ID NO: 2138656 - DNA, 25 bp, Homo sapien
gtcccagaaatggaggtcacctcct

SEQ ID NO: 2138657 - DNA, 25 bp, Homo sapien
catctctctcttggtcccagaaatg

SEQ ID NO: 2138658 - DNA, 25 bp, Homo sapien
acactgcacttagcatgctatatcg

SEQ ID NO: 2138659 - DNA, 25 bp, Homo sapien
ttagcatgctatatcgactctctct

SEQ ID NO: 2138660 - DNA, 25 bp, Homo sapien
cacttagcatgctatatcgactctc

SEQ ID NO: 2138661 - DNA, 25 bp, Homo sapien
tgcacttagcatgctatatcgactc

SEQ ID NO: 2138662 - DNA, 25 bp, Homo sapien
ctgattggacgtttccatcatccca

SEQ ID NO: 2138663 - DNA, 25 bp, Homo sapien
ctgtggccaatggccatggactgag

SEQ ID NO: 2138664 - DNA, 25 bp, Homo sapien
ctcaggtacaccaaaagcaagtgag

SEQ ID NO: 2138665 - DNA, 25 bp, Homo sapien
gatgggcaagctcgctgagtctcag

SEQ ID NO: 2138666 - DNA, 25 bp, Homo sapien
agatgggcaagctcgctgagtctca

SEQ ID NO: 2138667 - DNA, 25 bp, Homo sapien
tcacctcccgggacattcggatggc

SEQ ID NO: 2138668 - DNA, 25 bp, Homo sapien
caacagcggcggagatatcttcggg

SEQ ID NO: 2138669 - DNA, 25 bp, Homo sapien
tatggttcgtgacatactggaccgc

SEQ ID NO: 2138670 - DNA, 25 bp, Homo sapien
gactgtgacatagagccatgtggcc

SEQ ID NO: 2138671 - DNA, 25 bp, Homo sapien
agatgacatgtgttatagtttcccc

SEQ ID NO: 2138672 - DNA, 25 bp, Homo sapien
gtcagagagcatttgccaccaaggt

SEQ ID NO: 2138673 - DNA, 25 bp, Homo sapien
tacagatatcttagtaatgccctcc

SEQ ID NO: 2138674 - DNA, 25 bp, Homo sapien
tgctattagcaccagttcaggaact

SEQ ID NO: 2138675 - DNA, 25 bp, Homo sapien
ctggcagttgctcttaggtttcctt

SEQ ID NO: 2138676 - DNA, 25 bp, Homo sapien
cacacacttaggggtgatgctggca

SEQ ID NO: 2138677 - DNA, 25 bp, Homo sapien
ctcacacacttaggggtgatgctgg

SEQ ID NO: 2138678 - DNA, 25 bp, Homo sapien
gcagttgctcttaggtttccttcag

SEQ ID NO: 2138679 - DNA, 25 bp, Homo sapien
tttggcatcactggccccagagaag

SEQ ID NO: 2138680 - DNA, 25 bp, Homo sapien
ggttgctaggttgcccttctgtgag

SEQ ID NO: 2138681 - DNA, 25 bp, Homo sapien
gctctctgttgctgatatggctctt

SEQ ID NO: 2138682 - DNA, 25 bp, Homo sapien
tggctcaaggacaggttgctaggtt

SEQ ID NO: 2138683 - DNA, 25 bp, Homo sapien
gggcagccgcggttgctttcagtct

SEQ ID NO: 2138684 - DNA, 25 bp, Homo sapien
ccgggcagccgcggttgctttcagt

SEQ ID NO: 2138685 - DNA, 25 bp, Homo sapien
cgggcagccgcggttgctttcagtc

SEQ ID NO: 2138686 - DNA, 25 bp, Homo sapien
tccgggcagccgcggttgctttcag

SEQ ID NO: 2138687 - DNA, 25 bp, Homo sapien
acagctctgtttcgccttccggtcc

SEQ ID NO: 2138688 - DNA, 25 bp, Homo sapien
gcctcgcagttactgattctccaag

SEQ ID NO: 2138689 - DNA, 25 bp, Homo sapien
accaggccaagggagtgctccatcc

SEQ ID NO: 2138690 - DNA, 25 bp, Homo sapien
tatccagtcggcagcatccagatga

SEQ ID NO: 2138691 - DNA, 25 bp, Homo sapien
ttaatccaggcaaatcctaaatcct

SEQ ID NO: 2138692 - DNA, 25 bp, Homo sapien
gctctgcaatccgccgcacagaatt

SEQ ID NO: 2138693 - DNA, 25 bp, Homo sapien
caagttcggattcggctttgatgac

SEQ ID NO: 2138694 - DNA, 25 bp, Homo sapien
cagaattcaagttcggattcggctt

SEQ ID NO: 2138695 - DNA, 25 bp, Homo sapien
caatccgccgcacagaattcaagtt

SEQ ID NO: 2138696 - DNA, 25 bp, Homo sapien
tgtcgccaggcggaaaattccctct

SEQ ID NO: 2138697 - DNA, 25 bp, Homo sapien
ccactgtcgccaggcggaaaattcc

SEQ ID NO: 2138698 - DNA, 25 bp, Homo sapien
tctcccatcttctgaacgcaagcca

SEQ ID NO: 2138699 - DNA, 25 bp, Homo sapien
ttctgaacgcaagccaaagtgcctc

SEQ ID NO: 2138700 - DNA, 25 bp, Homo sapien
actgggtgtcgcagatcccagtcct

SEQ ID NO: 2138701 - DNA, 25 bp, Homo sapien
gacttttgtccactgggtgtcgcag

SEQ ID NO: 2138702 - DNA, 25 bp, Homo sapien
tgccgtgagaaaattagcctctggg

SEQ ID NO: 2138703 - DNA, 25 bp, Homo sapien
acggccgacttttgtccactgggtg

SEQ ID NO: 2138704 - DNA, 25 bp, Homo sapien
tagcgttcgcctttattttacgtgc

SEQ ID NO: 2138705 - DNA, 25 bp, Homo sapien
gcctttattttacgtgcagcctctg

SEQ ID NO: 2138706 - DNA, 25 bp, Homo sapien
tattttacgtgcagcctctgcaaca

SEQ ID NO: 2138707 - DNA, 25 bp, Homo sapien
tacgtgcagcctctgcaacaggtgc

SEQ ID NO: 2138708 - DNA, 25 bp, Homo sapien
gccttatctgcaggattctccaaag

SEQ ID NO: 2138709 - DNA, 25 bp, Homo sapien
tccaaagcaacgttcctgggctgtg

SEQ ID NO: 2138710 - DNA, 25 bp, Homo sapien
ggattctccaaagcaacgttcctgg

SEQ ID NO: 2138711 - DNA, 25 bp, Homo sapien
ttttggaaaagccttatctgcagga

SEQ ID NO: 2138712 - DNA, 25 bp, Homo sapien
ctgacgacgatagggtatctgaata

SEQ ID NO: 2138713 - DNA, 25 bp, Homo sapien
acacacgcagtgatgctagccatga

SEQ ID NO: 2138714 - DNA, 25 bp, Homo sapien
aaaggtgcattctgctgcctgctgt

SEQ ID NO: 2138715 - DNA, 25 bp, Homo sapien
caaggcggcaaaggtgcattctgct

SEQ ID NO: 2138716 - DNA, 25 bp, Homo sapien
tgcctgctgttacccacacacgcag

SEQ ID NO: 2138717 - DNA, 25 bp, Homo sapien
gacctcattgacttggatcagccag

SEQ ID NO: 2138718 - DNA, 25 bp, Homo sapien
tatcacgttgcagttacagtcagca

SEQ ID NO: 2138719 - DNA, 25 bp, Homo sapien
gaagatgcttaagcctgaagcgcag

SEQ ID NO: 2138720 - DNA, 25 bp, Homo sapien
tattggctcagaccttttcggccgc

SEQ ID NO: 2138721 - DNA, 25 bp, Homo sapien
gcacttgatccagaggtctggctct

SEQ ID NO: 2138722 - DNA, 25 bp, Homo sapien
caccactggtagaaagagactgagc

SEQ ID NO: 2138723 - DNA, 25 bp, Homo sapien
cccagaattgttgggggaatcaata

SEQ ID NO: 2138724 - DNA, 25 bp, Homo sapien
aggaccatcattcttatacccagaa

SEQ ID NO: 2138725 - DNA, 25 bp, Homo sapien
gttgctctcattgtcacaggtttct

SEQ ID NO: 2138726 - DNA, 25 bp, Homo sapien
tgaacagcgggttgtgtattttcgc

SEQ ID NO: 2138727 - DNA, 25 bp, Homo sapien
cctccccacaatatgaacagcgggt

SEQ ID NO: 2138728 - DNA, 25 bp, Homo sapien
cacaatatgaacagcgggttgtgta

SEQ ID NO: 2138729 - DNA, 25 bp, Homo sapien
tgcagggtgatgatcagattctcaa

SEQ ID NO: 2138730 - DNA, 25 bp, Homo sapien
cctcttttgacctctcctctgtatg

SEQ ID NO: 2138731 - DNA, 25 bp, Homo sapien
tcttttgacctctcctctgtatgtg

SEQ ID NO: 2138732 - DNA, 25 bp, Homo sapien
ttgacctctcctctgtatgtgtcag

SEQ ID NO: 2138733 - DNA, 25 bp, Homo sapien
tgtggctcagaagcatcactgtgtt

SEQ ID NO: 2138734 - DNA, 25 bp, Homo sapien
gaatagacccttaagccagcagaga

SEQ ID NO: 2138735 - DNA, 25 bp, Homo sapien
catccactgtgctggtatgcaagac

SEQ ID NO: 2138736 - DNA, 25 bp, Homo sapien
ctgacaatggttacaaaagggtgct

SEQ ID NO: 2138737 - DNA, 25 bp, Homo sapien
ggaaggacattcaccaaagggctga

SEQ ID NO: 2138738 - DNA, 25 bp, Homo sapien
ccatttgcaccaaaagcatagactg

SEQ ID NO: 2138739 - DNA, 25 bp, Homo sapien
catttgcaccaaaagcatagactgg

SEQ ID NO: 2138740 - DNA, 25 bp, Homo sapien
atctctcctccactcattgttgcag

SEQ ID NO: 2138741 - DNA, 25 bp, Homo sapien
ttgcaccaaaagcatagactggaaa

SEQ ID NO: 2138742 - DNA, 25 bp, Homo sapien
cccagaaggatgtatggtcagttgg

SEQ ID NO: 2138743 - DNA, 25 bp, Homo sapien
ccctgttatagcagggagtgcgtac

SEQ ID NO: 2138744 - DNA, 25 bp, Homo sapien
tgttgatgttacaattctgcctgtc

SEQ ID NO: 2138745 - DNA, 25 bp, Homo sapien
tactggattagtactccccagaagg

SEQ ID NO: 2138746 - DNA, 25 bp, Homo sapien
taaaaccacacttccacagagtcag

SEQ ID NO: 2138747 - DNA, 25 bp, Homo sapien
ttaaaaccacacttccacagagtca

SEQ ID NO: 2138748 - DNA, 25 bp, Homo sapien
atgggctctcaaaataatacagggt

SEQ ID NO: 2138749 - DNA, 25 bp, Homo sapien
tgcgactgtcgctgctttctgaggc

SEQ ID NO: 2138750 - DNA, 25 bp, Homo sapien
cgaggcggaggtttgtagcacttct

SEQ ID NO: 2138751 - DNA, 25 bp, Homo sapien
cgaaggtccggtgactgcgactgtc

SEQ ID NO: 2138752 - DNA, 25 bp, Homo sapien
gctgagggcgtagacacatcctgct

SEQ ID NO: 2138753 - DNA, 25 bp, Homo sapien
cggaaataaagagagcggaagcaaa

SEQ ID NO: 2138754 - DNA, 25 bp, Homo sapien
cggccaactgacgtagtcgcgaaac

SEQ ID NO: 2138755 - DNA, 25 bp, Homo sapien
tcgcgaaacggttaatgtcgaggcg

SEQ ID NO: 2138756 - DNA, 25 bp, Homo sapien
caaagaggattgtgggagctccgtt

SEQ ID NO: 2138757 - DNA, 25 bp, Homo sapien
ctataccagattagtcgcctggctc

SEQ ID NO: 2138758 - DNA, 25 bp, Homo sapien
agattagtcgcctggctctcccaaa

SEQ ID NO: 2138759 - DNA, 25 bp, Homo sapien
taccagattagtcgcctggctctcc

SEQ ID NO: 2138760 - DNA, 25 bp, Homo sapien
tagtcgcctggctctcccaaacaga

SEQ ID NO: 2138761 - DNA, 25 bp, Homo sapien
gactgcctgatgataagttgggaag

SEQ ID NO: 2138762 - DNA, 25 bp, Homo sapien
gcaagaataacaacatcctgggtac

SEQ ID NO: 2138763 - DNA, 25 bp, Homo sapien
gaaaaaaccattgtggactgcctga

SEQ ID NO: 2138764 - DNA, 25 bp, Homo sapien
gagagtgggtaggtgtggagcaaga

SEQ ID NO: 2138765 - DNA, 25 bp, Homo sapien
cagcgccgccgcccggcccggccag

SEQ ID NO: 2138766 - DNA, 25 bp, Homo sapien
gcgccgccgcccggcccggccaggc

SEQ ID NO: 2138767 - DNA, 25 bp, Homo sapien
agcgcagcgccgccgcccggcccgg

SEQ ID NO: 2138768 - DNA, 25 bp, Homo sapien
cgcagcgccgccgcccggcccggcc

SEQ ID NO: 2138769 - DNA, 25 bp, Homo sapien
gccacccagttagcgccccggtggc

SEQ ID NO: 2138770 - DNA, 25 bp, Homo sapien
ggggccgcgcgaagaggctgctcga

SEQ ID NO: 2138771 - DNA, 25 bp, Homo sapien
cggcccaccggccacccagttagcg

SEQ ID NO: 2138772 - DNA, 25 bp, Homo sapien
cccgctgctgcttgccggggtgcgg

SEQ ID NO: 2138773 - DNA, 25 bp, Homo sapien
tggagatggcctggctcgggctccc

SEQ ID NO: 2138774 - DNA, 25 bp, Homo sapien
ttggagatggcctggctcgggctcc

SEQ ID NO: 2138775 - DNA, 25 bp, Homo sapien
agtcgccgacgctccggggtgtgcc

SEQ ID NO: 2138776 - DNA, 25 bp, Homo sapien
ccccactctaacctgtccgcagtcg

SEQ ID NO: 2138777 - DNA, 25 bp, Homo sapien
agccgaagtcgctgatgtccaggca

SEQ ID NO: 2138778 - DNA, 25 bp, Homo sapien
tgatggccgaggcctcgtcggacat

SEQ ID NO: 2138779 - DNA, 25 bp, Homo sapien
ggtggagcgggtcggtgcgatggca

SEQ ID NO: 2138780 - DNA, 25 bp, Homo sapien
acttctcgtaggaagtgatggccga

SEQ ID NO: 2138781 - DNA, 25 bp, Homo sapien
gtaggaagtactttcatccattgcc

SEQ ID NO: 2138782 - DNA, 25 bp, Homo sapien
acaaagtaggaagtactttcatcca

SEQ ID NO: 2138783 - DNA, 25 bp, Homo sapien
aagtaggaagtactttcatccattg

SEQ ID NO: 2138784 - DNA, 25 bp, Homo sapien
taggaagtactttcatccattgcca

SEQ ID NO: 2138785 - DNA, 25 bp, Homo sapien
caggagtctgtggttatagcaagct

SEQ ID NO: 2138786 - DNA, 25 bp, Homo sapien
tacatacaaaatttggacaacctga

SEQ ID NO: 2138787 - DNA, 25 bp, Homo sapien
catgctcgctaggtgaacagtatcc

SEQ ID NO: 2138788 - DNA, 25 bp, Homo sapien
ggaatcataccctggtttgagacca

SEQ ID NO: 2138789 - DNA, 25 bp, Homo sapien
gcagacactcccctcaggaaataaa

SEQ ID NO: 2138790 - DNA, 25 bp, Homo sapien
tatctgaccaatcccagtaagtgct

SEQ ID NO: 2138791 - DNA, 25 bp, Homo sapien
catctaacagggaatagcaatcatc

SEQ ID NO: 2138792 - DNA, 25 bp, Homo sapien
tgttccacaagaagttaggttccac

SEQ ID NO: 2138793 - DNA, 25 bp, Homo sapien
gcagacattcgagtttatctagcga

SEQ ID NO: 2138794 - DNA, 25 bp, Homo sapien
tcgagtttatctagcgaataaaatc

SEQ ID NO: 2138795 - DNA, 25 bp, Homo sapien
atgtagcagacattcgagtttatct

SEQ ID NO: 2138796 - DNA, 25 bp, Homo sapien
gtttatctagcgaataaaatctttg

SEQ ID NO: 2138797 - DNA, 25 bp, Homo sapien
gtgttttggttctatagagcttgca

SEQ ID NO: 2138798 - DNA, 25 bp, Homo sapien
aaaagcgaagagctactttagtcat

SEQ ID NO: 2138799 - DNA, 25 bp, Homo sapien
gagcttgcaactgtatctgaactct

SEQ ID NO: 2138800 - DNA, 25 bp, Homo sapien
gatttctaggcttctgcggttacca

SEQ ID NO: 2138801 - DNA, 25 bp, Homo sapien
acttggaatactgggtatgacatca

SEQ ID NO: 2138802 - DNA, 25 bp, Homo sapien
tgggtatgacatcagaaagtacatc

SEQ ID NO: 2138803 - DNA, 25 bp, Homo sapien
gagttcatctaaattccggtgcttg

SEQ ID NO: 2138804 - DNA, 25 bp, Homo sapien
caagggagttcatctaaattccggt

SEQ ID NO: 2138805 - DNA, 25 bp, Homo sapien
gaagacccatctcagtactcacttt

SEQ ID NO: 2138806 - DNA, 25 bp, Homo sapien
tatcaagttgctcccgaagacccat

SEQ ID NO: 2138807 - DNA, 25 bp, Homo sapien
tttgagcagaaggatcaatgatctt

SEQ ID NO: 2138808 - DNA, 25 bp, Homo sapien
tcatctgtgagacagttaagttcaa

SEQ ID NO: 2138809 - DNA, 25 bp, Homo sapien
tgcaccttgatgttctaccttcaaa

SEQ ID NO: 2138810 - DNA, 25 bp, Homo sapien
cttgggatgcacaaacacaaactgg

SEQ ID NO: 2138811 - DNA, 25 bp, Homo sapien
acaaactggttagtgttgcaccttg

SEQ ID NO: 2138812 - DNA, 25 bp, Homo sapien
tgggatgcacaaacacaaactggtt

SEQ ID NO: 2138813 - DNA, 25 bp, Homo sapien
gcctctcttgcaggccgttggcgag

SEQ ID NO: 2138814 - DNA, 25 bp, Homo sapien
actggcaccgctcactccactggtg

SEQ ID NO: 2138815 - DNA, 25 bp, Homo sapien
ggccgttggcgagggctatgttcct

SEQ ID NO: 2138816 - DNA, 25 bp, Homo sapien
gcactggcaccgctcactccactgg

SEQ ID NO: 2138817 - DNA, 25 bp, Homo sapien
tctgctgcacttgcagacaggttgc

SEQ ID NO: 2138818 - DNA, 25 bp, Homo sapien
caggttgctgtcactgtgtgctcga

SEQ ID NO: 2138819 - DNA, 25 bp, Homo sapien
gactcatgttggcactggagtttga

SEQ ID NO: 2138820 - DNA, 25 bp, Homo sapien
tttgaatcccgaatccgctctgctg

SEQ ID NO: 2138821 - DNA, 25 bp, Homo sapien
caggcaactagacagcaggatcatt

SEQ ID NO: 2138822 - DNA, 25 bp, Homo sapien
catcagcaacgtagtgagattcgct

SEQ ID NO: 2138823 - DNA, 25 bp, Homo sapien
tcttaggagctaatagacagcaaca

SEQ ID NO: 2138824 - DNA, 25 bp, Homo sapien
caatatggttgtgggtcaaaacagc

SEQ ID NO: 2138825 - DNA, 25 bp, Homo sapien
tgtaacttccgctgcttggatcgct

SEQ ID NO: 2138826 - DNA, 25 bp, Homo sapien
ctgtaacttccgctgcttggatcgc

SEQ ID NO: 2138827 - DNA, 25 bp, Homo sapien
ctttcaaggacagcacctcttcgtt

SEQ ID NO: 2138828 - DNA, 25 bp, Homo sapien
gacagcacctcttcgttaaggaaga

SEQ ID NO: 2138829 - DNA, 25 bp, Homo sapien
aaaaacaatgctaggcgcctccctg

SEQ ID NO: 2138830 - DNA, 25 bp, Homo sapien
gcatgtaaacccataaggatggagt

SEQ ID NO: 2138831 - DNA, 25 bp, Homo sapien
ggcccactagtatgcattcctaaca

SEQ ID NO: 2138832 - DNA, 25 bp, Homo sapien
tgcatcagaataacccagcacttgt

SEQ ID NO: 2138833 - DNA, 25 bp, Homo sapien
taatgaaggcactatcgtaaacagc

SEQ ID NO: 2138834 - DNA, 25 bp, Homo sapien
tattaataaccaacaagctaaggtg

SEQ ID NO: 2138835 - DNA, 25 bp, Homo sapien
taactaggtcacatgccagaagctg

SEQ ID NO: 2138836 - DNA, 25 bp, Homo sapien
tacagctcttcctacagaatcacgg

SEQ ID NO: 2138837 - DNA, 25 bp, Homo sapien
tcaatcacaagcaagcccaagttag

SEQ ID NO: 2138838 - DNA, 25 bp, Homo sapien
tctttgggtcctctaagctggttag

SEQ ID NO: 2138839 - DNA, 25 bp, Homo sapien
gagtattctggtgtctatccctaag

SEQ ID NO: 2138840 - DNA, 25 bp, Homo sapien
agataaatggtgctctatggtctcc

SEQ ID NO: 2138841 - DNA, 25 bp, Homo sapien
gacagaggaactggacaaaactgcc

SEQ ID NO: 2138842 - DNA, 25 bp, Homo sapien
tcaatgatctagctaggccgaaaat

SEQ ID NO: 2138843 - DNA, 25 bp, Homo sapien
taaggcacatgaggctatacagagt

SEQ ID NO: 2138844 - DNA, 25 bp, Homo sapien
tataaacggactgcgagtacccttc

SEQ ID NO: 2138845 - DNA, 25 bp, Homo sapien
ccttactcttaatggccagttagaa

SEQ ID NO: 2138846 - DNA, 25 bp, Homo sapien
gcattataagtagttatgttccgga

SEQ ID NO: 2138847 - DNA, 25 bp, Homo sapien
gtgagtcaactcagatcttcagcag

SEQ ID NO: 2138848 - DNA, 25 bp, Homo sapien
gttccggatactatgctaacaaaga

SEQ ID NO: 2138849 - DNA, 25 bp, Homo sapien
tactgttaaaagagccagcagctcc

SEQ ID NO: 2138850 - DNA, 25 bp, Homo sapien
aaatggatccactacaggaacagac

SEQ ID NO: 2138851 - DNA, 25 bp, Homo sapien
caaaactagtcatggcttcaggcca

SEQ ID NO: 2138852 - DNA, 25 bp, Homo sapien
tatgcataattagagcaagtctccc

SEQ ID NO: 2138853 - DNA, 25 bp, Homo sapien
tgaattgctcctccatacatagaac

SEQ ID NO: 2138854 - DNA, 25 bp, Homo sapien
gacctactgcccagtaatagcatgg

SEQ ID NO: 2138855 - DNA, 25 bp, Homo sapien
ggagcagttctcctctgttggtaaa

SEQ ID NO: 2138856 - DNA, 25 bp, Homo sapien
tccctctagtggcaaaagataaagt

SEQ ID NO: 2138857 - DNA, 25 bp, Homo sapien
taaagctgttgtgggttatgatcac

SEQ ID NO: 2138858 - DNA, 25 bp, Homo sapien
gataatgatcactacataaaccagc

SEQ ID NO: 2138859 - DNA, 25 bp, Homo sapien
tacaacagttaactgtgggcagcag

SEQ ID NO: 2138860 - DNA, 25 bp, Homo sapien
gggcagcagttttttagccactaat

SEQ ID NO: 2138861 - DNA, 25 bp, Homo sapien
ggcccaaacttctcacattattcaa

SEQ ID NO: 2138862 - DNA, 25 bp, Homo sapien
ggtcactatgataaatttctccact

SEQ ID NO: 2138863 - DNA, 25 bp, Homo sapien
tggtagtggctttaatgaagcagaa

SEQ ID NO: 2138864 - DNA, 25 bp, Homo sapien
aaagctgcatggcagcactctgcaa

SEQ ID NO: 2138865 - DNA, 25 bp, Homo sapien
catgggtgagctttgcaccagagct

SEQ ID NO: 2138866 - DNA, 25 bp, Homo sapien
caggacaatctttacacatgggtga

SEQ ID NO: 2138867 - DNA, 25 bp, Homo sapien
cagttttagagtcaaggccatgtgc

SEQ ID NO: 2138868 - DNA, 25 bp, Homo sapien
caagccctgttctaagtgtcccgag

SEQ ID NO: 2138869 - DNA, 25 bp, Homo sapien
cttctgaatgcctctgttgcttttc

SEQ ID NO: 2138870 - DNA, 25 bp, Homo sapien
ctaggtttttcttcacaacattttg

SEQ ID NO: 2138871 - DNA, 25 bp, Homo sapien
tctgaatgcctctgttgcttttcta

SEQ ID NO: 2138872 - DNA, 25 bp, Homo sapien
gaatgcctctgttgcttttctaggt

SEQ ID NO: 2138873 - DNA, 25 bp, Homo sapien
gagaaatcagctttccggataagga

SEQ ID NO: 2138874 - DNA, 25 bp, Homo sapien
agggtagaagacttaatgacctcag

SEQ ID NO: 2138875 - DNA, 25 bp, Homo sapien
gggtagaagacttaatgacctcagt

SEQ ID NO: 2138876 - DNA, 25 bp, Homo sapien
cagctttccggataaggagagtagg

SEQ ID NO: 2138877 - DNA, 25 bp, Homo sapien
agcagtggtgaaccaaccccagtca

SEQ ID NO: 2138878 - DNA, 25 bp, Homo sapien
cccagtcagatccatagcttgaagc

SEQ ID NO: 2138879 - DNA, 25 bp, Homo sapien
ctggagcagatcagaactaaccagc

SEQ ID NO: 2138880 - DNA, 25 bp, Homo sapien
cagtcagatccatagcttgaagcat

SEQ ID NO: 2138881 - DNA, 25 bp, Homo sapien
gtagcagtaatggccagctgttgtg

SEQ ID NO: 2138882 - DNA, 25 bp, Homo sapien
tcaggtatccatattgaatatttca

SEQ ID NO: 2138883 - DNA, 25 bp, Homo sapien
cagtagcagtaatggccagctgttg

SEQ ID NO: 2138884 - DNA, 25 bp, Homo sapien
caggtatccatattgaatatttcaa

SEQ ID NO: 2138885 - DNA, 25 bp, Homo sapien
ccaaatgcaggtcgcatagatcacc

SEQ ID NO: 2138886 - DNA, 25 bp, Homo sapien
aatgcaggtcgcatagatcacccat

SEQ ID NO: 2138887 - DNA, 25 bp, Homo sapien
ccaccaaatgcaggtcgcatagatc

SEQ ID NO: 2138888 - DNA, 25 bp, Homo sapien
aaatgcaggtcgcatagatcaccca

SEQ ID NO: 2138889 - DNA, 25 bp, Homo sapien
ttccagagaagggatcagtgtagtc

SEQ ID NO: 2138890 - DNA, 25 bp, Homo sapien
gcagttaatggaagtcgaatgccct

SEQ ID NO: 2138891 - DNA, 25 bp, Homo sapien
gccctggtagctcataacacaaatt

SEQ ID NO: 2138892 - DNA, 25 bp, Homo sapien
agccatcacctgctctttggagggt

SEQ ID NO: 2138893 - DNA, 25 bp, Homo sapien
tcctaaatctagtggcctaatatca

SEQ ID NO: 2138894 - DNA, 25 bp, Homo sapien
gcagatatagctgtcaagctgcccc

SEQ ID NO: 2138895 - DNA, 25 bp, Homo sapien
tggcagagtttttccaatgagaaat

SEQ ID NO: 2138896 - DNA, 25 bp, Homo sapien
tcatttccacctgttggcagatata

SEQ ID NO: 2138897 - DNA, 25 bp, Homo sapien
gaacccaattgcatggtagactaac

SEQ ID NO: 2138898 - DNA, 25 bp, Homo sapien
tgtttgggctgctgaactttccgcg

SEQ ID NO: 2138899 - DNA, 25 bp, Homo sapien
acaagttcactttcgcatgtttggg

SEQ ID NO: 2138900 - DNA, 25 bp, Homo sapien
gctgctgaactttccgcgctttcct

SEQ ID NO: 2138901 - DNA, 25 bp, Homo sapien
catgagccagctagccctcagccag

SEQ ID NO: 2138902 - DNA, 25 bp, Homo sapien
atcagagcctgcatgagccagctag

SEQ ID NO: 2138903 - DNA, 25 bp, Homo sapien
ccagctagccctcagccaggggaaa

SEQ ID NO: 2138904 - DNA, 25 bp, Homo sapien
tgtaaagcatcagagcctgcatgag

SEQ ID NO: 2138905 - DNA, 25 bp, Homo sapien
cccagactcttccttggaagaattt

SEQ ID NO: 2138906 - DNA, 25 bp, Homo sapien
gagtttgccctttgaactgccagaa

SEQ ID NO: 2138907 - DNA, 25 bp, Homo sapien
agaattttgccaccccagagtttgc

SEQ ID NO: 2138908 - DNA, 25 bp, Homo sapien
caagatcacgaagtaaatcccagac

SEQ ID NO: 2138909 - DNA, 25 bp, Homo sapien
gacaattgatgaaatcgctcatgtt

SEQ ID NO: 2138910 - DNA, 25 bp, Homo sapien
catagacaattgatgaaatcgctca

SEQ ID NO: 2138911 - DNA, 25 bp, Homo sapien
gatgaaatcgctcatgttttgaaat

SEQ ID NO: 2138912 - DNA, 25 bp, Homo sapien
gggtcgtggcatagacaattgatga

SEQ ID NO: 2138913 - DNA, 25 bp, Homo sapien
gcttagttagctgagttgccccaga

SEQ ID NO: 2138914 - DNA, 25 bp, Homo sapien
tgtacagagcttagttagctgagtt

SEQ ID NO: 2138915 - DNA, 25 bp, Homo sapien
ctaggccctggtaattacagaattt

SEQ ID NO: 2138916 - DNA, 25 bp, Homo sapien
tctaggccctggtaattacagaatt

SEQ ID NO: 2138917 - DNA, 25 bp, Homo sapien
tcataggtctagttccaggaaagga

SEQ ID NO: 2138918 - DNA, 25 bp, Homo sapien
atctatgattgtcagtggctgcccc

SEQ ID NO: 2138919 - DNA, 25 bp, Homo sapien
catctatgattgtcagtggctgccc

SEQ ID NO: 2138920 - DNA, 25 bp, Homo sapien
tggcttaaaggctacccacgttgta

SEQ ID NO: 2138921 - DNA, 25 bp, Homo sapien
agccttggcccagtagggcgatgcc

SEQ ID NO: 2138922 - DNA, 25 bp, Homo sapien
gggcgatgccaatgacagcaactcc

SEQ ID NO: 2138923 - DNA, 25 bp, Homo sapien
caactccaggttctgtagcaagctg

SEQ ID NO: 2138924 - DNA, 25 bp, Homo sapien
ttcagcagaaaccttcggaagacaa

SEQ ID NO: 2138925 - DNA, 25 bp, Homo sapien
caacctcaggtccaatgtaagtgaa

SEQ ID NO: 2138926 - DNA, 25 bp, Homo sapien
aacctcaggtccaatgtaagtgaag

SEQ ID NO: 2138927 - DNA, 25 bp, Homo sapien
aatgtaagtgaaggtctcccaggac

SEQ ID NO: 2138928 - DNA, 25 bp, Homo sapien
taagtgaaggtctcccaggacccca

SEQ ID NO: 2138929 - DNA, 25 bp, Homo sapien
ttcccatagcataccagccagccat

SEQ ID NO: 2138930 - DNA, 25 bp, Homo sapien
aacattcccatagcataccagccag

SEQ ID NO: 2138931 - DNA, 25 bp, Homo sapien
attcccatagcataccagccagcca

SEQ ID NO: 2138932 - DNA, 25 bp, Homo sapien
acattcccatagcataccagccagc

SEQ ID NO: 2138933 - DNA, 25 bp, Homo sapien
agatgaaggcaaatcctgtctgatg

SEQ ID NO: 2138934 - DNA, 25 bp, Homo sapien
tatacgagtctctatacagacaaat

SEQ ID NO: 2138935 - DNA, 25 bp, Homo sapien
caaataacccagtgtagcaatcagt

SEQ ID NO: 2138936 - DNA, 25 bp, Homo sapien
tactctccaggattttgctatacga

SEQ ID NO: 2138937 - DNA, 25 bp, Homo sapien
gaaggacacatggagtgcatcttgg

SEQ ID NO: 2138938 - DNA, 25 bp, Homo sapien
tcttggctacaacatatggtgctga

SEQ ID NO: 2138939 - DNA, 25 bp, Homo sapien
cagcaagctgataagtctttagcag

SEQ ID NO: 2138940 - DNA, 25 bp, Homo sapien
tctttagcagtacttgacagtggta

SEQ ID NO: 2138941 - DNA, 25 bp, Homo sapien
ttctgtctccttaagtctgtatcag

SEQ ID NO: 2138942 - DNA, 25 bp, Homo sapien
cattctgtctccttaagtctgtatc

SEQ ID NO: 2138943 - DNA, 25 bp, Homo sapien
tcccattctgtctccttaagtctgt

SEQ ID NO: 2138944 - DNA, 25 bp, Homo sapien
ctgtctccttaagtctgtatcagcc

SEQ ID NO: 2138945 - DNA, 25 bp, Homo sapien
tactggacactaacatccaattaat

SEQ ID NO: 2138946 - DNA, 25 bp, Homo sapien
atactggacactaacatccaattaa

SEQ ID NO: 2138947 - DNA, 25 bp, Homo sapien
aatcaagaatatagtactttgggca

SEQ ID NO: 2138948 - DNA, 25 bp, Homo sapien
gaatatagtactttgggcaggattc

SEQ ID NO: 2138949 - DNA, 25 bp, Homo sapien
taatcttgtaggattgatgaatgag

SEQ ID NO: 2138950 - DNA, 25 bp, Homo sapien
ttagaaattggccatagcagttgga

SEQ ID NO: 2138951 - DNA, 25 bp, Homo sapien
ccatagcagttggagatgtagttaa

SEQ ID NO: 2138952 - DNA, 25 bp, Homo sapien
gttaactattcgaaagaaatcactg

SEQ ID NO: 2138953 - DNA, 25 bp, Homo sapien
gtgaacttggccatggatgccctga

SEQ ID NO: 2138954 - DNA, 25 bp, Homo sapien
gaacttggccatggatgccctgaca

SEQ ID NO: 2138955 - DNA, 25 bp, Homo sapien
tgaagttgtagctgcagtaacggtg

SEQ ID NO: 2138956 - DNA, 25 bp, Homo sapien
ggtttctgattcctcaagtacagcc

SEQ ID NO: 2138957 - DNA, 25 bp, Homo sapien
tagcttagctggtattgagaggcag

SEQ ID NO: 2138958 - DNA, 25 bp, Homo sapien
agcttagctggtattgagaggcagt

SEQ ID NO: 2138959 - DNA, 25 bp, Homo sapien
gcttagctggtattgagaggcagtt

SEQ ID NO: 2138960 - DNA, 25 bp, Homo sapien
ctagcttagctggtattgagaggca

SEQ ID NO: 2138961 - DNA, 25 bp, Homo sapien
tcctgtcccgctaagatcctcagtg

SEQ ID NO: 2138962 - DNA, 25 bp, Homo sapien
ggcactttgctcctgtcccgctaag

SEQ ID NO: 2138963 - DNA, 25 bp, Homo sapien
actttgctcctgtcccgctaagatc

SEQ ID NO: 2138964 - DNA, 25 bp, Homo sapien
tgtcccgctaagatcctcagtgagc

SEQ ID NO: 2138965 - DNA, 25 bp, Homo sapien
caatctccttatgtgacatccagga

SEQ ID NO: 2138966 - DNA, 25 bp, Homo sapien
catgaatcactgcagacatacattc

SEQ ID NO: 2138967 - DNA, 25 bp, Homo sapien
agacatacattctcaggtcctctga

SEQ ID NO: 2138968 - DNA, 25 bp, Homo sapien
tgagtcaatctccttatgtgacatc

SEQ ID NO: 2138969 - DNA, 25 bp, Homo sapien
tgtcctgttggtttctcgtttcatc

SEQ ID NO: 2138970 - DNA, 25 bp, Homo sapien
tcctgttggtttctcgtttcatcat

SEQ ID NO: 2138971 - DNA, 25 bp, Homo sapien
cttcctgtcctgttggtttctcgtt

SEQ ID NO: 2138972 - DNA, 25 bp, Homo sapien
cctgtcctgttggtttctcgtttca

SEQ ID NO: 2138973 - DNA, 25 bp, Homo sapien
ccaactgccaggtgcttccaaccag

SEQ ID NO: 2138974 - DNA, 25 bp, Homo sapien
tgttagtggtcctcaatgccaactg

SEQ ID NO: 2138975 - DNA, 25 bp, Homo sapien
agctgggtacggcaggcagcaacac

SEQ ID NO: 2138976 - DNA, 25 bp, Homo sapien
tggaaggacaccacctggtcaagtc

SEQ ID NO: 2138977 - DNA, 25 bp, Homo sapien
catgattaaggttattctccctctc

SEQ ID NO: 2138978 - DNA, 25 bp, Homo sapien
ttcccctgtggaccatctctttcga

SEQ ID NO: 2138979 - DNA, 25 bp, Homo sapien
gccaagtttatgcactcttcccctg

SEQ ID NO: 2138980 - DNA, 25 bp, Homo sapien
catctctttcgacaaatccagcaaa

SEQ ID NO: 2138981 - DNA, 25 bp, Homo sapien
ggccgcttggcctcggtccaccacc

SEQ ID NO: 2138982 - DNA, 25 bp, Homo sapien
atttggccgcttggcctcggtccac

SEQ ID NO: 2138983 - DNA, 25 bp, Homo sapien
ttatttggccgcttggcctcggtcc

SEQ ID NO: 2138984 - DNA, 25 bp, Homo sapien
cgcttggcctcggtccaccacccac

SEQ ID NO: 2138985 - DNA, 25 bp, Homo sapien
agcgctcaactgagtgcaggtatgg

SEQ ID NO: 2138986 - DNA, 25 bp, Homo sapien
gagtaggccggcgtacaggattggg

SEQ ID NO: 2138987 - DNA, 25 bp, Homo sapien
gcgagcgctcaactgagtgcaggta

SEQ ID NO: 2138988 - DNA, 25 bp, Homo sapien
gcgccgtctagcgtccttaccagag

SEQ ID NO: 2138989 - DNA, 25 bp, Homo sapien
agcctcctggctgactgattgcacc

SEQ ID NO: 2138990 - DNA, 25 bp, Homo sapien
gaattagagagaagcgctctggcgc

SEQ ID NO: 2138991 - DNA, 25 bp, Homo sapien
tggcgcgtcacgaaaagagctgctt

SEQ ID NO: 2138992 - DNA, 25 bp, Homo sapien
ctcctggctgactgattgcaccggg

SEQ ID NO: 2138993 - DNA, 25 bp, Homo sapien
ggaaatgagctccaggctcgcctca

SEQ ID NO: 2138994 - DNA, 25 bp, Homo sapien
gggaaccctacagccagtgtgcaaa

SEQ ID NO: 2138995 - DNA, 25 bp, Homo sapien
gaagggcgcctggaaatgagctcca

SEQ ID NO: 2138996 - DNA, 25 bp, Homo sapien
caagtctcccttagttccgaagagg

SEQ ID NO: 2138997 - DNA, 25 bp, Homo sapien
gatgcgtagttccatgtccagggcg

SEQ ID NO: 2138998 - DNA, 25 bp, Homo sapien
acttcccaggcagtcggagtggctg

SEQ ID NO: 2138999 - DNA, 25 bp, Homo sapien
tgagtcttgcaaaacggccagcaaa

SEQ ID NO: 2139000 - DNA, 25 bp, Homo sapien
tcagctccgtagttagaatggcaga

SEQ ID NO: 2139001 - DNA, 25 bp, Homo sapien
taaaatttcaatgggctttgcagct

SEQ ID NO: 2139002 - DNA, 25 bp, Homo sapien
tggtcagattctttacagcatgtct

SEQ ID NO: 2139003 - DNA, 25 bp, Homo sapien
catcagttcaccctaataagcagca

SEQ ID NO: 2139004 - DNA, 25 bp, Homo sapien
gctgttctccaggttatctcaccat

SEQ ID NO: 2139005 - DNA, 25 bp, Homo sapien
tcaaacgaagaaggcagtgtgtaca

SEQ ID NO: 2139006 - DNA, 25 bp, Homo sapien
cacaaaggaggttatggtacttctc

SEQ ID NO: 2139007 - DNA, 25 bp, Homo sapien
tgtcacagaatctactcagggcctc

SEQ ID NO: 2139008 - DNA, 25 bp, Homo sapien
tacatttgtcttccaacagtcccag

SEQ ID NO: 2139009 - DNA, 25 bp, Homo sapien
tcccttaaagtaccagatatgtcag

SEQ ID NO: 2139010 - DNA, 25 bp, Homo sapien
cagatatgtcaggtttctggttcat

SEQ ID NO: 2139011 - DNA, 25 bp, Homo sapien
aagtaccagatatgtcaggtttctg

SEQ ID NO: 2139012 - DNA, 25 bp, Homo sapien
cttcctcccttaaagtaccagatat

SEQ ID NO: 2139013 - DNA, 25 bp, Homo sapien
agctgacagtgtgtagggaccataa

SEQ ID NO: 2139014 - DNA, 25 bp, Homo sapien
gtgtgtagggaccataacttgctaa

SEQ ID NO: 2139015 - DNA, 25 bp, Homo sapien
tctgaaagctgacagtgtgtaggga

SEQ ID NO: 2139016 - DNA, 25 bp, Homo sapien
tcacgatttctgtctgaaagctgac

SEQ ID NO: 2139017 - DNA, 25 bp, Homo sapien
accatcttcagatttgtgctgacta

SEQ ID NO: 2139018 - DNA, 25 bp, Homo sapien
acagaacagaccacaagggccaaaa

SEQ ID NO: 2139019 - DNA, 25 bp, Homo sapien
atcttcagatttgtgctgactacag

SEQ ID NO: 2139020 - DNA, 25 bp, Homo sapien
gaacagaccacaagggccaaaagaa

SEQ ID NO: 2139021 - DNA, 25 bp, Homo sapien
ttccttgacaatgtaaaggttgagc

SEQ ID NO: 2139022 - DNA, 25 bp, Homo sapien
gaatgccaggtttatgtaaattaac

SEQ ID NO: 2139023 - DNA, 25 bp, Homo sapien
caatgtaaaggttgagcttcctgaa

SEQ ID NO: 2139024 - DNA, 25 bp, Homo sapien
agcttcctgaatgccaggtttatgt

SEQ ID NO: 2139025 - DNA, 25 bp, Homo sapien
gaaatagaggtagttcaattcccac

SEQ ID NO: 2139026 - DNA, 25 bp, Homo sapien
taagcttccagcagggcatgtgcat

SEQ ID NO: 2139027 - DNA, 25 bp, Homo sapien
tagtaagtcaacttcagctggcttg

SEQ ID NO: 2139028 - DNA, 25 bp, Homo sapien
tacggcccctcataatctgcctaag

SEQ ID NO: 2139029 - DNA, 25 bp, Homo sapien
gcaggtaggtgttacttagactgta

SEQ ID NO: 2139030 - DNA, 25 bp, Homo sapien
ctcttcttatattggtgggaggagc

SEQ ID NO: 2139031 - DNA, 25 bp, Homo sapien
tgcacacaaagagaactttaaaggt

SEQ ID NO: 2139032 - DNA, 25 bp, Homo sapien
taaatgatactgaactgcttcttcc

SEQ ID NO: 2139033 - DNA, 25 bp, Homo sapien
ggcattcaaagctggcaagtcctcc

SEQ ID NO: 2139034 - DNA, 25 bp, Homo sapien
atttgccaatcccatagctttctct

SEQ ID NO: 2139035 - DNA, 25 bp, Homo sapien
aagtcctccctcactgatttgccaa

SEQ ID NO: 2139036 - DNA, 25 bp, Homo sapien
ctaatagccctggtatgttccttca

SEQ ID NO: 2139037 - DNA, 25 bp, Homo sapien
gaagctgatcacaaattgctttgta

SEQ ID NO: 2139038 - DNA, 25 bp, Homo sapien
ttgagctcatattcgtggtctgtgt

SEQ ID NO: 2139039 - DNA, 25 bp, Homo sapien
tgtgctttgagctcatattcgtggt

SEQ ID NO: 2139040 - DNA, 25 bp, Homo sapien
gggcttgttagggaagctgatcaca

SEQ ID NO: 2139041 - DNA, 25 bp, Homo sapien
ccttgcagagatactacaacaaaag

SEQ ID NO: 2139042 - DNA, 25 bp, Homo sapien
tctgttaccaaaaccttgcagagat

SEQ ID NO: 2139043 - DNA, 25 bp, Homo sapien
cattctgttaccaaaaccttgcaga

SEQ ID NO: 2139044 - DNA, 25 bp, Homo sapien
tgcagagatactacaacaaaagaaa

SEQ ID NO: 2139045 - DNA, 25 bp, Homo sapien
tgtgaaatcctctaggcctggtgat

SEQ ID NO: 2139046 - DNA, 25 bp, Homo sapien
aaattcaactctgacattggcagca

SEQ ID NO: 2139047 - DNA, 25 bp, Homo sapien
cagatcagcatgaggcagtatttca

SEQ ID NO: 2139048 - DNA, 25 bp, Homo sapien
tctaactacttaaagtggacacagc

SEQ ID NO: 2139049 - DNA, 25 bp, Homo sapien
caatccaattctttgggtggctttt

SEQ ID NO: 2139050 - DNA, 25 bp, Homo sapien
tatttgcacttgcaccaaactgtgg

SEQ ID NO: 2139051 - DNA, 25 bp, Homo sapien
cactctttaccgcatattctcctgt

SEQ ID NO: 2139052 - DNA, 25 bp, Homo sapien
gaaaagctactactaactactccta

SEQ ID NO: 2139053 - DNA, 25 bp, Homo sapien
caagagtcggttggtgttgattctg

SEQ ID NO: 2139054 - DNA, 25 bp, Homo sapien
ctgggcaactgggatggtttctaca

SEQ ID NO: 2139055 - DNA, 25 bp, Homo sapien
tgttcccttgggctaagacaagagt

SEQ ID NO: 2139056 - DNA, 25 bp, Homo sapien
tttctacatctagaaactggtcact

SEQ ID NO: 2139057 - DNA, 25 bp, Homo sapien
tggagataacctgtacactgagcag

SEQ ID NO: 2139058 - DNA, 25 bp, Homo sapien
ggaaattccggtagaaataatgcat

SEQ ID NO: 2139059 - DNA, 25 bp, Homo sapien
aatgcatctgctgacaatatttgag

SEQ ID NO: 2139060 - DNA, 25 bp, Homo sapien
gatacagagctgtcaaagtggagat

SEQ ID NO: 2139061 - DNA, 25 bp, Homo sapien
acctctgagagtggccaaaatccgg

SEQ ID NO: 2139062 - DNA, 25 bp, Homo sapien
tgttggtcccacctcaatctttgca

SEQ ID NO: 2139063 - DNA, 25 bp, Homo sapien
acacttaccagtgcctgagctgaga

SEQ ID NO: 2139064 - DNA, 25 bp, Homo sapien
aaatccggggatgccaataatgttg

SEQ ID NO: 2139065 - DNA, 25 bp, Homo sapien
ggcagaacccactctataaggctgg

SEQ ID NO: 2139066 - DNA, 25 bp, Homo sapien
tagtggttctcgtcacccttcatgc

SEQ ID NO: 2139067 - DNA, 25 bp, Homo sapien
cgcaacaaaattcttgtagtggttc

SEQ ID NO: 2139068 - DNA, 25 bp, Homo sapien
ggctggcttctgcttatcgcaacaa

SEQ ID NO: 2139069 - DNA, 25 bp, Homo sapien
ttccttcattggttgtttctccctg

SEQ ID NO: 2139070 - DNA, 25 bp, Homo sapien
ctaggctgctacttcttccttcatt

SEQ ID NO: 2139071 - DNA, 25 bp, Homo sapien
tacttcttccttcattggttgtttc

SEQ ID NO: 2139072 - DNA, 25 bp, Homo sapien
ttcttccttcattggttgtttctcc

SEQ ID NO: 2139073 - DNA, 25 bp, Homo sapien
cttcttagcatccacagaacaattt

SEQ ID NO: 2139074 - DNA, 25 bp, Homo sapien
ggacttggcaatgacatgattaagt

SEQ ID NO: 2139075 - DNA, 25 bp, Homo sapien
gacttggcaatgacatgattaagtg

SEQ ID NO: 2139076 - DNA, 25 bp, Homo sapien
acttggcaatgacatgattaagtgc

SEQ ID NO: 2139077 - DNA, 25 bp, Homo sapien
gtgccactgcatgagttgtggtgca

SEQ ID NO: 2139078 - DNA, 25 bp, Homo sapien
tctggatccagtgggcccaaccaca

SEQ ID NO: 2139079 - DNA, 25 bp, Homo sapien
ccatttctctgtagtactgggtgac

SEQ ID NO: 2139080 - DNA, 25 bp, Homo sapien
tggatccagtgggcccaaccacatt

SEQ ID NO: 2139081 - DNA, 25 bp, Homo sapien
catttctctgtagtactgggtgaca

SEQ ID NO: 2139082 - DNA, 25 bp, Homo sapien
tgtggaactgtttgattgctggcac

SEQ ID NO: 2139083 - DNA, 25 bp, Homo sapien
gaagtgtggcttgtgttgacaatgc

SEQ ID NO: 2139084 - DNA, 25 bp, Homo sapien
gcggtgggacagcacaaacttgatc

SEQ ID NO: 2139085 - DNA, 25 bp, Homo sapien
ttgacaatgcaggatgcggtgggac

SEQ ID NO: 2139086 - DNA, 25 bp, Homo sapien
aaattatctggcctaccttgtttgg

SEQ ID NO: 2139087 - DNA, 25 bp, Homo sapien
tgtgatgcaattaaccctctaagat

SEQ ID NO: 2139088 - DNA, 25 bp, Homo sapien
tctaaaggatcccatgtacatacgt

SEQ ID NO: 2139089 - DNA, 25 bp, Homo sapien
gtgaaacttcaaagcagctaccaag

SEQ ID NO: 2139090 - DNA, 25 bp, Homo sapien
gagtaacatgggagtcctcattcaa

SEQ ID NO: 2139091 - DNA, 25 bp, Homo sapien
tacaccaagatagaatcagaacact

SEQ ID NO: 2139092 - DNA, 25 bp, Homo sapien
aattacttaggagttgggattagca

SEQ ID NO: 2139093 - DNA, 25 bp, Homo sapien
tattgaataacaaggaggagtggca

SEQ ID NO: 2139094 - DNA, 25 bp, Homo sapien
cagcaaatactagagccttgtcaga

SEQ ID NO: 2139095 - DNA, 25 bp, Homo sapien
atactagagccttgtcagaatgaga

SEQ ID NO: 2139096 - DNA, 25 bp, Homo sapien
gattgattttcgacttaatttccca

SEQ ID NO: 2139097 - DNA, 25 bp, Homo sapien
aggcaaacattgacagggattgatt

SEQ ID NO: 2139098 - DNA, 25 bp, Homo sapien
tagcctggagatatgttttacaaag

SEQ ID NO: 2139099 - DNA, 25 bp, Homo sapien
ggtaacacagagaatcactgaccct

SEQ ID NO: 2139100 - DNA, 25 bp, Homo sapien
taaaatccatttagttagcctggag

SEQ ID NO: 2139101 - DNA, 25 bp, Homo sapien
tcaatcaaagcccaaagtcatactc

SEQ ID NO: 2139102 - DNA, 25 bp, Homo sapien
tatatgtggctagggtgtgatctct

SEQ ID NO: 2139103 - DNA, 25 bp, Homo sapien
tgtgttaatgtaaccccattggtcc

SEQ ID NO: 2139104 - DNA, 25 bp, Homo sapien
tgagaaacactggtagcgacagacc

SEQ ID NO: 2139105 - DNA, 25 bp, Homo sapien
gtcatgagacagagccaaggttact

SEQ ID NO: 2139106 - DNA, 25 bp, Homo sapien
gctactgggacaaccctccagtggg

SEQ ID NO: 2139107 - DNA, 25 bp, Homo sapien
gatgccaggggttatcagcccagca

SEQ ID NO: 2139108 - DNA, 25 bp, Homo sapien
cacgctcagggtaagaaggatgcca

SEQ ID NO: 2139109 - DNA, 25 bp, Homo sapien
tctaggggctgctctcgggctactg

SEQ ID NO: 2139110 - DNA, 25 bp, Homo sapien
ctctggtgagcgcaagtaaccaaac

SEQ ID NO: 2139111 - DNA, 25 bp, Homo sapien
tgagcgcaagtaaccaaacactccc

SEQ ID NO: 2139112 - DNA, 25 bp, Homo sapien
aaacactcccttgaggagtaacaat

SEQ ID NO: 2139113 - DNA, 25 bp, Homo sapien
gagtaacaatgccatttgtcatgtt

SEQ ID NO: 2139114 - DNA, 25 bp, Homo sapien
tgtctttttatcaccaagcccaaag

SEQ ID NO: 2139115 - DNA, 25 bp, Homo sapien
tcttcactaaattctgggaaatcca

SEQ ID NO: 2139116 - DNA, 25 bp, Homo sapien
tttctgacaagaggtagtaattaca

SEQ ID NO: 2139117 - DNA, 25 bp, Homo sapien
gggaaatccatgtgggtagcatctt

SEQ ID NO: 2139118 - DNA, 25 bp, Homo sapien
ccgaaattcgttctgcagaaactca

SEQ ID NO: 2139119 - DNA, 25 bp, Homo sapien
gctttcactttggtcccaattacca

SEQ ID NO: 2139120 - DNA, 25 bp, Homo sapien
tcttgctgcaatcttccgaaattcg

SEQ ID NO: 2139121 - DNA, 25 bp, Homo sapien
tctgttcacttcagaagtaccctca

SEQ ID NO: 2139122 - DNA, 25 bp, Homo sapien
gaactctaggattagtcattcgcat

SEQ ID NO: 2139123 - DNA, 25 bp, Homo sapien
catttgatttcttcagtagagctca

SEQ ID NO: 2139124 - DNA, 25 bp, Homo sapien
gagctcagaactctaggattagtca

SEQ ID NO: 2139125 - DNA, 25 bp, Homo sapien
tcttcagtagagctcagaactctag

SEQ ID NO: 2139126 - DNA, 25 bp, Homo sapien
gacttttctcttcttggcatttctc

SEQ ID NO: 2139127 - DNA, 25 bp, Homo sapien
tagacttttctcttcttggcatttc

SEQ ID NO: 2139128 - DNA, 25 bp, Homo sapien
tcttctcacttgctccaggtttctg

SEQ ID NO: 2139129 - DNA, 25 bp, Homo sapien
tatagacttttctcttcttggcatt

SEQ ID NO: 2139130 - DNA, 25 bp, Homo sapien
aagcagcaggcctagagcctttggc

SEQ ID NO: 2139131 - DNA, 25 bp, Homo sapien
tagagcctttggcaagattatttgg

SEQ ID NO: 2139132 - DNA, 25 bp, Homo sapien
caagcagcaggcctagagcctttgg

SEQ ID NO: 2139133 - DNA, 25 bp, Homo sapien
agcctttggcaagattatttggcaa

SEQ ID NO: 2139134 - DNA, 25 bp, Homo sapien
gtatcaggatatctgctcccttcca

SEQ ID NO: 2139135 - DNA, 25 bp, Homo sapien
tgctcccttccatcatgataataaa

SEQ ID NO: 2139136 - DNA, 25 bp, Homo sapien
tctctagtacttgtggaacagtatc

SEQ ID NO: 2139137 - DNA, 25 bp, Homo sapien
taaaccctgaggatgcaactctttg

SEQ ID NO: 2139138 - DNA, 25 bp, Homo sapien
cctctaagaacagaacttctatgct

SEQ ID NO: 2139139 - DNA, 25 bp, Homo sapien
tttctgaacctctaagaacagaact

SEQ ID NO: 2139140 - DNA, 25 bp, Homo sapien
gaacagaacttctatgctctcttgg

SEQ ID NO: 2139141 - DNA, 25 bp, Homo sapien
tgctctcttgggctactttaaacat

SEQ ID NO: 2139142 - DNA, 25 bp, Homo sapien
gcttttccgcagattcctggtccca

SEQ ID NO: 2139143 - DNA, 25 bp, Homo sapien
tatcgggcttcagttcttctcatgg

SEQ ID NO: 2139144 - DNA, 25 bp, Homo sapien
catggttgtattccagtgctggcca

SEQ ID NO: 2139145 - DNA, 25 bp, Homo sapien
gtgctggccagctatcatgtttctg

SEQ ID NO: 2139146 - DNA, 25 bp, Homo sapien
agatacttcaggctgttgagtcacc

SEQ ID NO: 2139147 - DNA, 25 bp, Homo sapien
tgcattcgcactggtctcagtggtg

SEQ ID NO: 2139148 - DNA, 25 bp, Homo sapien
aaaacagatacttcaggctgttgag

SEQ ID NO: 2139149 - DNA, 25 bp, Homo sapien
tctgggaagtcgtttctaaaacaga

SEQ ID NO: 2139150 - DNA, 25 bp, Homo sapien
ctcagaggtgcattgaaatggaact

SEQ ID NO: 2139151 - DNA, 25 bp, Homo sapien
ttgatgttctttgattgaaatgcaa

SEQ ID NO: 2139152 - DNA, 25 bp, Homo sapien
cagtctgctctgtccgattattgat

SEQ ID NO: 2139153 - DNA, 25 bp, Homo sapien
cagaggtgcattgaaatggaacttt

SEQ ID NO: 2139154 - DNA, 25 bp, Homo sapien
ctgagtcaaagggaaccgatcttga

SEQ ID NO: 2139155 - DNA, 25 bp, Homo sapien
aaagggaaccgatcttgatcctgcc

SEQ ID NO: 2139156 - DNA, 25 bp, Homo sapien
tatggtctgtaggttttagaagctc

SEQ ID NO: 2139157 - DNA, 25 bp, Homo sapien
gaagctccacagatttgcattcact

SEQ ID NO: 2139158 - DNA, 25 bp, Homo sapien
tagaaccttggtataattggatgtc

SEQ ID NO: 2139159 - DNA, 25 bp, Homo sapien
ctgagcatgatgctacccgacaatg

SEQ ID NO: 2139160 - DNA, 25 bp, Homo sapien
tacttctggtacaatctatcactga

SEQ ID NO: 2139161 - DNA, 25 bp, Homo sapien
tggatgtcaacctaacactacttct

SEQ ID NO: 2139162 - DNA, 25 bp, Homo sapien
actaagagtaagtactccgtaaatg

SEQ ID NO: 2139163 - DNA, 25 bp, Homo sapien
tctcattaagataatgtgttaaatg

SEQ ID NO: 2139164 - DNA, 25 bp, Homo sapien
aaatgctttgtgaatggttttctca

SEQ ID NO: 2139165 - DNA, 25 bp, Homo sapien
tactccgtaaatgctttgtgaatgg

SEQ ID NO: 2139166 - DNA, 25 bp, Homo sapien
cactccaaagtgccagatcttattc

SEQ ID NO: 2139167 - DNA, 25 bp, Homo sapien
ccactccaaagtgccagatcttatt

SEQ ID NO: 2139168 - DNA, 25 bp, Homo sapien
tccactccaaagtgccagatcttat

SEQ ID NO: 2139169 - DNA, 25 bp, Homo sapien
tcatcctggttccaagagttaccaa

SEQ ID NO: 2139170 - DNA, 25 bp, Homo sapien
aatagactgtcacaaggtaacctgg

SEQ ID NO: 2139171 - DNA, 25 bp, Homo sapien
tggaggagagcctttacacctgaca

SEQ ID NO: 2139172 - DNA, 25 bp, Homo sapien
tgaaatagagacactccagggacca

SEQ ID NO: 2139173 - DNA, 25 bp, Homo sapien
ccttaggacatctggtattctgccc

SEQ ID NO: 2139174 - DNA, 25 bp, Homo sapien
gccttaggacatctggtattctgcc

SEQ ID NO: 2139175 - DNA, 25 bp, Homo sapien
agattctcttctcataagtcttcat

SEQ ID NO: 2139176 - DNA, 25 bp, Homo sapien
ctgccttaggacatctggtattctg

SEQ ID NO: 2139177 - DNA, 25 bp, Homo sapien
atccaggaatgatagtctcacaggc

SEQ ID NO: 2139178 - DNA, 25 bp, Homo sapien
ttccaccatataggccactagcatg

SEQ ID NO: 2139179 - DNA, 25 bp, Homo sapien
tctgaaagaaccagcatggatccag

SEQ ID NO: 2139180 - DNA, 25 bp, Homo sapien
tcacaggcttccaccatataggcca

SEQ ID NO: 2139181 - DNA, 25 bp, Homo sapien
ccagaagaatatggcataaggtcag

SEQ ID NO: 2139182 - DNA, 25 bp, Homo sapien
agagccagaagaatatggcataagg

SEQ ID NO: 2139183 - DNA, 25 bp, Homo sapien
gcataaggtcagtaggaatgggaat

SEQ ID NO: 2139184 - DNA, 25 bp, Homo sapien
atgggaatagaaccccctggacaat

SEQ ID NO: 2139185 - DNA, 25 bp, Homo sapien
gaagaggtataagatacagtgagca

SEQ ID NO: 2139186 - DNA, 25 bp, Homo sapien
aagaggtataagatacagtgagcat

SEQ ID NO: 2139187 - DNA, 25 bp, Homo sapien
tcttgagatccactgaccagtcaat

SEQ ID NO: 2139188 - DNA, 25 bp, Homo sapien
tgtcttgagatccactgaccagtca

SEQ ID NO: 2139189 - DNA, 25 bp, Homo sapien
gtatgtcttgagatccactgaccag

SEQ ID NO: 2139190 - DNA, 25 bp, Homo sapien
tatgtcttgagatccactgaccagt

SEQ ID NO: 2139191 - DNA, 25 bp, Homo sapien
tctgggccgtgctatagttggtacg

SEQ ID NO: 2139192 - DNA, 25 bp, Homo sapien
ggcacatttcactcggactggttca

SEQ ID NO: 2139193 - DNA, 25 bp, Homo sapien
gacctctgaaaagatgatgggctct

SEQ ID NO: 2139194 - DNA, 25 bp, Homo sapien
tgagtgaaaccatattgaatcttcc

SEQ ID NO: 2139195 - DNA, 25 bp, Homo sapien
agtctctctataactggagctgtag

SEQ ID NO: 2139196 - DNA, 25 bp, Homo sapien
ctgtgagaaagtctctctataactg

SEQ ID NO: 2139197 - DNA, 25 bp, Homo sapien
gtctctctataactggagctgtagc

SEQ ID NO: 2139198 - DNA, 25 bp, Homo sapien
tgagaaagtctctctataactggag

SEQ ID NO: 2139199 - DNA, 25 bp, Homo sapien
gatttttctaaatagcggatcctgc

SEQ ID NO: 2139200 - DNA, 25 bp, Homo sapien
tagcacaggcctgattcattctctg

SEQ ID NO: 2139201 - DNA, 25 bp, Homo sapien
tataccacacaacatcaggctcctg

SEQ ID NO: 2139202 - DNA, 25 bp, Homo sapien
tctctgcaacagtcaaggacattga

SEQ ID NO: 2139203 - DNA, 25 bp, Homo sapien
ctggagggagattctacttttagca

SEQ ID NO: 2139204 - DNA, 25 bp, Homo sapien
gagggagattctacttttagcagtt

SEQ ID NO: 2139205 - DNA, 25 bp, Homo sapien
tttagcagttggagaaaggcgtatt

SEQ ID NO: 2139206 - DNA, 25 bp, Homo sapien
gagaaaggcgtattgcttctaacac

SEQ ID NO: 2139207 - DNA, 25 bp, Homo sapien
ttgagacctggacgttctagtacag

SEQ ID NO: 2139208 - DNA, 25 bp, Homo sapien
tattgtcttcattaagataattccc

SEQ ID NO: 2139209 - DNA, 25 bp, Homo sapien
ctgtagtctatatgtttgtgcataa

SEQ ID NO: 2139210 - DNA, 25 bp, Homo sapien
tctagtacagagtatgttcttggtg

SEQ ID NO: 2139211 - DNA, 25 bp, Homo sapien
tggctgctaggcttactgctgtcat

SEQ ID NO: 2139212 - DNA, 25 bp, Homo sapien
tgctaggcttactgctgtcattact

SEQ ID NO: 2139213 - DNA, 25 bp, Homo sapien
gcttactgctgtcattacttctctc

SEQ ID NO: 2139214 - DNA, 25 bp, Homo sapien
taggcttactgctgtcattacttct

SEQ ID NO: 2139215 - DNA, 25 bp, Homo sapien
tcttggatcagaagagcatttcctt

SEQ ID NO: 2139216 - DNA, 25 bp, Homo sapien
tgttcgtcttacaagttttccttca

SEQ ID NO: 2139217 - DNA, 25 bp, Homo sapien
tcaattcagttgttcgtcttacaag

SEQ ID NO: 2139218 - DNA, 25 bp, Homo sapien
catatttaagttcacatgtgtaatt

SEQ ID NO: 2139219 - DNA, 25 bp, Homo sapien
tttgcaggcaattctaaattcacag

SEQ ID NO: 2139220 - DNA, 25 bp, Homo sapien
tgaacaaaactcttgcttcccaaac

SEQ ID NO: 2139221 - DNA, 25 bp, Homo sapien
aaattcacagaaagttgactctttg

SEQ ID NO: 2139222 - DNA, 25 bp, Homo sapien
catttgccgtaattttgtagaactg

SEQ ID NO: 2139223 - DNA, 25 bp, Homo sapien
cattttccttggttaccatgatctc

SEQ ID NO: 2139224 - DNA, 25 bp, Homo sapien
ttttccttggttaccatgatctcta

SEQ ID NO: 2139225 - DNA, 25 bp, Homo sapien
tccttggttaccatgatctctattt

SEQ ID NO: 2139226 - DNA, 25 bp, Homo sapien
tggttaccatgatctctattttcat

SEQ ID NO: 2139227 - DNA, 25 bp, Homo sapien
caactttggaatcctccttgagttg

SEQ ID NO: 2139228 - DNA, 25 bp, Homo sapien
gagtcaccaactttggaatcctcct

SEQ ID NO: 2139229 - DNA, 25 bp, Homo sapien
tctggagtcaccaactttggaatcc

SEQ ID NO: 2139230 - DNA, 25 bp, Homo sapien
caccaactttggaatcctccttgag

SEQ ID NO: 2139231 - DNA, 25 bp, Homo sapien
ctgcagactctggacaaagagtctg

SEQ ID NO: 2139232 - DNA, 25 bp, Homo sapien
ttgtcttcaaatttgagttcagtcc

SEQ ID NO: 2139233 - DNA, 25 bp, Homo sapien
tgcagactctggacaaagagtctga

SEQ ID NO: 2139234 - DNA, 25 bp, Homo sapien
atttgagaatattgcacattgccat

SEQ ID NO: 2139235 - DNA, 25 bp, Homo sapien
aatttgagaatattgcacattgcca

SEQ ID NO: 2139236 - DNA, 25 bp, Homo sapien
gaatttgagaatattgcacattgcc

SEQ ID NO: 2139237 - DNA, 25 bp, Homo sapien
tgaatttgagaatattgcacattgc

SEQ ID NO: 2139238 - DNA, 25 bp, Homo sapien
cgctgggtcctgagggagccgccac

SEQ ID NO: 2139239 - DNA, 25 bp, Homo sapien
gctgggtcctgagggagccgccacc

SEQ ID NO: 2139240 - DNA, 25 bp, Homo sapien
actcggattcgcctccctttgccac

SEQ ID NO: 2139241 - DNA, 25 bp, Homo sapien
ctccctccacccactcggattcgcc

SEQ ID NO: 2139242 - DNA, 25 bp, Homo sapien
cacttttgtgtgacaatcagtcata

SEQ ID NO: 2139243 - DNA, 25 bp, Homo sapien
cttactctttccgttcttagggctg

SEQ ID NO: 2139244 - DNA, 25 bp, Homo sapien
ttactctttccgttcttagggctgc

SEQ ID NO: 2139245 - DNA, 25 bp, Homo sapien
acttttgtgtgacaatcagtcatat

SEQ ID NO: 2139246 - DNA, 25 bp, Homo sapien
aatcagataaagttccatatacagc

SEQ ID NO: 2139247 - DNA, 25 bp, Homo sapien
cagataaagttccatatacagcaac

SEQ ID NO: 2139248 - DNA, 25 bp, Homo sapien
gataaagttccatatacagcaacca

SEQ ID NO: 2139249 - DNA, 25 bp, Homo sapien
tcagataaagttccatatacagcaa

SEQ ID NO: 2139250 - DNA, 25 bp, Homo sapien
gaggatcaataaatgattctccttc

SEQ ID NO: 2139251 - DNA, 25 bp, Homo sapien
ctgaggatcaataaatgattctcct

SEQ ID NO: 2139252 - DNA, 25 bp, Homo sapien
tgtctgaggatcaataaatgattct

SEQ ID NO: 2139253 - DNA, 25 bp, Homo sapien
gatcaataaatgattctccttcaca

SEQ ID NO: 2139254 - DNA, 25 bp, Homo sapien
tggtaggagtaatgcgtgtagttgt

SEQ ID NO: 2139255 - DNA, 25 bp, Homo sapien
gtaggagtaatgcgtgtagttgtaa

SEQ ID NO: 2139256 - DNA, 25 bp, Homo sapien
aggagtaatgcgtgtagttgtaaag

SEQ ID NO: 2139257 - DNA, 25 bp, Homo sapien
ctggtaggagtaatgcgtgtagttg

SEQ ID NO: 2139258 - DNA, 25 bp, Homo sapien
aaacaaattgatttctccatttgtc

SEQ ID NO: 2139259 - DNA, 25 bp, Homo sapien
tccatttgtctttataaacaaacac

SEQ ID NO: 2139260 - DNA, 25 bp, Homo sapien
cttagaattcagggaaacaaattga

SEQ ID NO: 2139261 - DNA, 25 bp, Homo sapien
tttctccatttgtctttataaacaa

SEQ ID NO: 2139262 - DNA, 25 bp, Homo sapien
ctatgatattgcttatttccccaga

SEQ ID NO: 2139263 - DNA, 25 bp, Homo sapien
atgatattgcttatttccccagaca

SEQ ID NO: 2139264 - DNA, 25 bp, Homo sapien
cccagacacttttgtccttaaacat

SEQ ID NO: 2139265 - DNA, 25 bp, Homo sapien
cttttgtccttaaacatgtgggcca

SEQ ID NO: 2139266 - DNA, 25 bp, Homo sapien
acgcaaggagttcaaaatgggttca

SEQ ID NO: 2139267 - DNA, 25 bp, Homo sapien
aatgagctgtccatgacgcaaggag

SEQ ID NO: 2139268 - DNA, 25 bp, Homo sapien
acaatgagctgtccatgacgcaagg

SEQ ID NO: 2139269 - DNA, 25 bp, Homo sapien
tgtccatgacgcaaggagttcaaaa

SEQ ID NO: 2139270 - DNA, 25 bp, Homo sapien
aaaaatcttgcttcttctaacacac

SEQ ID NO: 2139271 - DNA, 25 bp, Homo sapien
caaaaaatcttgcttcttctaacac

SEQ ID NO: 2139272 - DNA, 25 bp, Homo sapien
aaaaaatcttgcttcttctaacaca

SEQ ID NO: 2139273 - DNA, 25 bp, Homo sapien
aggtgttagatcaatgagacaatac

SEQ ID NO: 2139274 - DNA, 25 bp, Homo sapien
cttccaggtgttagatcaatgagac

SEQ ID NO: 2139275 - DNA, 25 bp, Homo sapien
ccaggtgttagatcaatgagacaat

SEQ ID NO: 2139276 - DNA, 25 bp, Homo sapien
tccaggtgttagatcaatgagacaa

SEQ ID NO: 2139277 - DNA, 25 bp, Homo sapien
acaaattcctttcgggatattggtg

SEQ ID NO: 2139278 - DNA, 25 bp, Homo sapien
gggatattggtgaatgatcctccgg

SEQ ID NO: 2139279 - DNA, 25 bp, Homo sapien
ctagcaaaaaatcggacaaattcct

SEQ ID NO: 2139280 - DNA, 25 bp, Homo sapien
gtgaatgatcctccggtggttgaga

SEQ ID NO: 2139281 - DNA, 25 bp, Homo sapien
gtatcgaaggtccaaacgagaaaga

SEQ ID NO: 2139282 - DNA, 25 bp, Homo sapien
agcggcttaaattggccattttgaa

SEQ ID NO: 2139283 - DNA, 25 bp, Homo sapien
aaatcctggcatcgcagttctgact

SEQ ID NO: 2139284 - DNA, 25 bp, Homo sapien
ggtccaaacgagaaagatcagcacc

SEQ ID NO: 2139285 - DNA, 25 bp, Homo sapien
cagagatcagctcattcaagatttg

SEQ ID NO: 2139286 - DNA, 25 bp, Homo sapien
cagctcattcaagatttgcacagca

SEQ ID NO: 2139287 - DNA, 25 bp, Homo sapien
agatcagctcattcaagatttgcac

SEQ ID NO: 2139288 - DNA, 25 bp, Homo sapien
tgatccagagatcagctcattcaag

SEQ ID NO: 2139289 - DNA, 25 bp, Homo sapien
gatcgcacccagatagatcacaatt

SEQ ID NO: 2139290 - DNA, 25 bp, Homo sapien
tccctggagatttgcacagttaagt

SEQ ID NO: 2139291 - DNA, 25 bp, Homo sapien
aagatcgcacccagatagatcacaa

SEQ ID NO: 2139292 - DNA, 25 bp, Homo sapien
gcacccagatagatcacaattctct

SEQ ID NO: 2139293 - DNA, 25 bp, Homo sapien
ttgtaaaggtctgatctcctcccac

SEQ ID NO: 2139294 - DNA, 25 bp, Homo sapien
gaaaatagattatctctcaatacaa

SEQ ID NO: 2139295 - DNA, 25 bp, Homo sapien
atacaatacttctctgtcttggtaa

SEQ ID NO: 2139296 - DNA, 25 bp, Homo sapien
ctaagcacaccatgtttagatcttt

SEQ ID NO: 2139297 - DNA, 25 bp, Homo sapien
aacatattaagcttttcacccatca

SEQ ID NO: 2139298 - DNA, 25 bp, Homo sapien
cattaacaccttagagcaaatgagc

SEQ ID NO: 2139299 - DNA, 25 bp, Homo sapien
aacaccttagagcaaatgagctcac

SEQ ID NO: 2139300 - DNA, 25 bp, Homo sapien
aagcttttcacccatcattaacacc

SEQ ID NO: 2139301 - DNA, 25 bp, Homo sapien
catcaacctctgtgccattgctcaa

SEQ ID NO: 2139302 - DNA, 25 bp, Homo sapien
tcacgtcatcaacctctgtgccatt

SEQ ID NO: 2139303 - DNA, 25 bp, Homo sapien
caacctctgtgccattgctcaaatc

SEQ ID NO: 2139304 - DNA, 25 bp, Homo sapien
tctgtgccattgctcaaatcttcac

SEQ ID NO: 2139305 - DNA, 25 bp, Homo sapien
caaaggctccccttaatctttggca

SEQ ID NO: 2139306 - DNA, 25 bp, Homo sapien
tactatgagtgaatcttctagttca

SEQ ID NO: 2139307 - DNA, 25 bp, Homo sapien
tatcttcacattgatgttagccaac

SEQ ID NO: 2139308 - DNA, 25 bp, Homo sapien
gatgttagccaacaaacagggtggc

SEQ ID NO: 2139309 - DNA, 25 bp, Homo sapien
cctcaagattctaaccagcattact

SEQ ID NO: 2139310 - DNA, 25 bp, Homo sapien
ctactgttatgacaactttcattgt

SEQ ID NO: 2139311 - DNA, 25 bp, Homo sapien
caactttcattgtcctcttttgttg

SEQ ID NO: 2139312 - DNA, 25 bp, Homo sapien
tgttatgacaactttcattgtcctc

SEQ ID NO: 2139313 - DNA, 25 bp, Homo sapien
tatgacaactttcattgtcctcttt

SEQ ID NO: 2139314 - DNA, 25 bp, Homo sapien
tattagacagtgttcctacttccta

SEQ ID NO: 2139315 - DNA, 25 bp, Homo sapien
ccattgattcactgtaaataggcca

SEQ ID NO: 2139316 - DNA, 25 bp, Homo sapien
tttcccagcacatttagagcaccat

SEQ ID NO: 2139317 - DNA, 25 bp, Homo sapien
tcctacttgggttgttactctatcc

SEQ ID NO: 2139318 - DNA, 25 bp, Homo sapien
taacacttggctgattctccatggg

SEQ ID NO: 2139319 - DNA, 25 bp, Homo sapien
catctataacacttggctgattctc

SEQ ID NO: 2139320 - DNA, 25 bp, Homo sapien
ccagctggacatctataacacttgg

SEQ ID NO: 2139321 - DNA, 25 bp, Homo sapien
gctggacatctataacacttggctg

SEQ ID NO: 2139322 - DNA, 25 bp, Homo sapien
gaaatctcgcaaatgttaaagggca

SEQ ID NO: 2139323 - DNA, 25 bp, Homo sapien
tttctgtaccaatcaccaatgcaag

SEQ ID NO: 2139324 - DNA, 25 bp, Homo sapien
aactgctatcgcactgaactccagg

SEQ ID NO: 2139325 - DNA, 25 bp, Homo sapien
tgaaagagatcctagcaggcctctg

SEQ ID NO: 2139326 - DNA, 25 bp, Homo sapien
tacaatggtccttctccttgctttg

SEQ ID NO: 2139327 - DNA, 25 bp, Homo sapien
ctacaatggtccttctccttgcttt

SEQ ID NO: 2139328 - DNA, 25 bp, Homo sapien
tctccttgctttggatcaatacttt

SEQ ID NO: 2139329 - DNA, 25 bp, Homo sapien
ttggatcaatacttttcaaactttg

SEQ ID NO: 2139330 - DNA, 25 bp, Homo sapien
cagtataggtctttctgtgaccggc

SEQ ID NO: 2139331 - DNA, 25 bp, Homo sapien
tttgccatatccttaccagcgctta

SEQ ID NO: 2139332 - DNA, 25 bp, Homo sapien
caccaatggtgcacaagctttctga

SEQ ID NO: 2139333 - DNA, 25 bp, Homo sapien
tatatccattgttgtacagcagacc

SEQ ID NO: 2139334 - DNA, 25 bp, Homo sapien
tactgtgaagaaatttggcatcctg

SEQ ID NO: 2139335 - DNA, 25 bp, Homo sapien
tctgagtaattctgggcttcgggag

SEQ ID NO: 2139336 - DNA, 25 bp, Homo sapien
aatgttgcaggttaggttctgtgga

SEQ ID NO: 2139337 - DNA, 25 bp, Homo sapien
ggagttaagaaatgttgcaggttag

SEQ ID NO: 2139338 - DNA, 25 bp, Homo sapien
ttttttggcaacatctttattaatg

SEQ ID NO: 2139339 - DNA, 25 bp, Homo sapien
ggtgagctgtcagcattaatttttt

SEQ ID NO: 2139340 - DNA, 25 bp, Homo sapien
gagctgtcagcattaattttttggc

SEQ ID NO: 2139341 - DNA, 25 bp, Homo sapien
tttttggcaacatctttattaatgg

SEQ ID NO: 2139342 - DNA, 25 bp, Homo sapien
ttccgttacctctaaaagtgtcaca

SEQ ID NO: 2139343 - DNA, 25 bp, Homo sapien
tcatttcccatcagctacaccaggg

SEQ ID NO: 2139344 - DNA, 25 bp, Homo sapien
cgttacctctaaaagtgtcacaatt

SEQ ID NO: 2139345 - DNA, 25 bp, Homo sapien
atttcccatcagctacaccaggggt

SEQ ID NO: 2139346 - DNA, 25 bp, Homo sapien
gccttaaatacagggaggactatag

SEQ ID NO: 2139347 - DNA, 25 bp, Homo sapien
gaatacaggactactactattgtcc

SEQ ID NO: 2139348 - DNA, 25 bp, Homo sapien
taatagggccagatttaacttcctg

SEQ ID NO: 2139349 - DNA, 25 bp, Homo sapien
agtagacctaactatagaaaagcag

SEQ ID NO: 2139350 - DNA, 25 bp, Homo sapien
ctaaatttatagtgtaagtgcttgt

SEQ ID NO: 2139351 - DNA, 25 bp, Homo sapien
tgcagtggtgtaaggacggcccaat

SEQ ID NO: 2139352 - DNA, 25 bp, Homo sapien
tttgtggggttcagtaaaagctcta

SEQ ID NO: 2139353 - DNA, 25 bp, Homo sapien
agaaagcagaagatagtaaactatt

SEQ ID NO: 2139354 - DNA, 25 bp, Homo sapien
aagccaggatagtgagttgcagctg

SEQ ID NO: 2139355 - DNA, 25 bp, Homo sapien
ccttccttcttctagctcctctcca

SEQ ID NO: 2139356 - DNA, 25 bp, Homo sapien
ttccttcttctagctcctctccact

SEQ ID NO: 2139357 - DNA, 25 bp, Homo sapien
ccttcttctagctcctctccacttt

SEQ ID NO: 2139358 - DNA, 25 bp, Homo sapien
tcttctagctcctctccactttccc

SEQ ID NO: 2139359 - DNA, 25 bp, Homo sapien
tttccgcattgcagggctaatgtgg

SEQ ID NO: 2139360 - DNA, 25 bp, Homo sapien
cattgcagggctaatgtggacctga

SEQ ID NO: 2139361 - DNA, 25 bp, Homo sapien
tacaagaaaaaactttccgcattgc

SEQ ID NO: 2139362 - DNA, 25 bp, Homo sapien
aaaactttccgcattgcagggctaa

SEQ ID NO: 2139363 - DNA, 25 bp, Homo sapien
caccaaccgattattcacaacagga

SEQ ID NO: 2139364 - DNA, 25 bp, Homo sapien
gattattcacaacaggaatgccagg

SEQ ID NO: 2139365 - DNA, 25 bp, Homo sapien
gaatgccaggggcaacaagaggcct

SEQ ID NO: 2139366 - DNA, 25 bp, Homo sapien
gggagtgcaccaaccgattattcac

SEQ ID NO: 2139367 - DNA, 25 bp, Homo sapien
gggaataagcaatgcccgtgaccat

SEQ ID NO: 2139368 - DNA, 25 bp, Homo sapien
tgcccgtgaccatactgcaaatttt

SEQ ID NO: 2139369 - DNA, 25 bp, Homo sapien
gagggcaggacatatgcttaagtcg

SEQ ID NO: 2139370 - DNA, 25 bp, Homo sapien
gtgccttgcatctacccagtatggt

SEQ ID NO: 2139371 - DNA, 25 bp, Homo sapien
tttcatccagtagatcattggccca

SEQ ID NO: 2139372 - DNA, 25 bp, Homo sapien
cactgaatccgaagaatgctttgca

SEQ ID NO: 2139373 - DNA, 25 bp, Homo sapien
cttctctaatgtgacctgccagttc

SEQ ID NO: 2139374 - DNA, 25 bp, Homo sapien
ctttgcaggggatgttcagaggctt

SEQ ID NO: 2139375 - DNA, 25 bp, Homo sapien
taagattgattagaaggaagttctg

SEQ ID NO: 2139376 - DNA, 25 bp, Homo sapien
ctcactagcaaattccttaaaacaa

SEQ ID NO: 2139377 - DNA, 25 bp, Homo sapien
cattatccccaaaggacattgtgcg

SEQ ID NO: 2139378 - DNA, 25 bp, Homo sapien
gaagttctgtagtggtacaggactg

SEQ ID NO: 2139379 - DNA, 25 bp, Homo sapien
ggtataattcgccaggtcagcttcc

SEQ ID NO: 2139380 - DNA, 25 bp, Homo sapien
gagtcaaagatgagtgccaattcaa

SEQ ID NO: 2139381 - DNA, 25 bp, Homo sapien
gtccatttcggttttcaacatggca

SEQ ID NO: 2139382 - DNA, 25 bp, Homo sapien
ctttttacgcagcaaaacactggca

SEQ ID NO: 2139383 - DNA, 25 bp, Homo sapien
tgtagaagagcatcaattcaatgtt

SEQ ID NO: 2139384 - DNA, 25 bp, Homo sapien
aatgaccaccagcagtacaaggagg

SEQ ID NO: 2139385 - DNA, 25 bp, Homo sapien
atttgtaaatgaccaccagcagtac

SEQ ID NO: 2139386 - DNA, 25 bp, Homo sapien
caatgttgtagcatttgtaaatgac

SEQ ID NO: 2139387 - DNA, 25 bp, Homo sapien
tctagaagcacaccattcgttgaaa

SEQ ID NO: 2139388 - DNA, 25 bp, Homo sapien
catgtccttggtacgtattaacacc

SEQ ID NO: 2139389 - DNA, 25 bp, Homo sapien
taaattttacctcgcattctagaag

SEQ ID NO: 2139390 - DNA, 25 bp, Homo sapien
aatgcttctggtttcattcgtgtcc

SEQ ID NO: 2139391 - DNA, 25 bp, Homo sapien
actcagggctgccgatgatacacag

SEQ ID NO: 2139392 - DNA, 25 bp, Homo sapien
gactcagggctgccgatgatacaca

SEQ ID NO: 2139393 - DNA, 25 bp, Homo sapien
gcgcattccactgttgtgcataaaa

SEQ ID NO: 2139394 - DNA, 25 bp, Homo sapien
cgcattccactgttgtgcataaaat

SEQ ID NO: 2139395 - DNA, 25 bp, Homo sapien
ggcgcattccactgttgtgcataaa

SEQ ID NO: 2139396 - DNA, 25 bp, Homo sapien
gacatctggcagtacttcaagagca

SEQ ID NO: 2139397 - DNA, 25 bp, Homo sapien
cacttttgtgtaagagagataggca

SEQ ID NO: 2139398 - DNA, 25 bp, Homo sapien
caggattgtcacagtctaaagtatc

SEQ ID NO: 2139399 - DNA, 25 bp, Homo sapien
tccatagtgtttttccaggacatct

SEQ ID NO: 2139400 - DNA, 25 bp, Homo sapien
gttgctttcgctattctcagggaca

SEQ ID NO: 2139401 - DNA, 25 bp, Homo sapien
tcaaggatcctctaggccccatgaa

SEQ ID NO: 2139402 - DNA, 25 bp, Homo sapien
ctcaagtttgtgtctctaggcagtt

SEQ ID NO: 2139403 - DNA, 25 bp, Homo sapien
cacaatgtgctctgtgtagagtagt

SEQ ID NO: 2139404 - DNA, 25 bp, Homo sapien
ggatgatgatcagtggctgggcagc

SEQ ID NO: 2139405 - DNA, 25 bp, Homo sapien
cgagactgtgccctagcttccatat

SEQ ID NO: 2139406 - DNA, 25 bp, Homo sapien
tgggcagcaacctcaatgtttgaaa

SEQ ID NO: 2139407 - DNA, 25 bp, Homo sapien
ttcagatgtgaagcccacatttcac

SEQ ID NO: 2139408 - DNA, 25 bp, Homo sapien
agttttcagatgtgaagcccacatt

SEQ ID NO: 2139409 - DNA, 25 bp, Homo sapien
ttttcagatgtgaagcccacatttc

SEQ ID NO: 2139410 - DNA, 25 bp, Homo sapien
aaaaccaagtggaagttttcagatg

SEQ ID NO: 2139411 - DNA, 25 bp, Homo sapien
tctggcaaagcctagtggagagttg

SEQ ID NO: 2139412 - DNA, 25 bp, Homo sapien
actggctgtgcttattctggcaaag

SEQ ID NO: 2139413 - DNA, 25 bp, Homo sapien
gataattcctgctgaaaacctcctg

SEQ ID NO: 2139414 - DNA, 25 bp, Homo sapien
ggagagttgaggcaaccatccagat

SEQ ID NO: 2139415 - DNA, 25 bp, Homo sapien
gaaaatactccatccccgtctgaga

SEQ ID NO: 2139416 - DNA, 25 bp, Homo sapien
aaagtccttgttctgcggagtccag

SEQ ID NO: 2139417 - DNA, 25 bp, Homo sapien
tactggcaaggtcgtggctggtatc

SEQ ID NO: 2139418 - DNA, 25 bp, Homo sapien
tagctgtccgttgagtagcgtcaga

SEQ ID NO: 2139419 - DNA, 25 bp, Homo sapien
ctagctgttcagaggaattcagatt

SEQ ID NO: 2139420 - DNA, 25 bp, Homo sapien
tattaggtgtactttatgcttggta

SEQ ID NO: 2139421 - DNA, 25 bp, Homo sapien
tactttatgcttggtataacagaaa

SEQ ID NO: 2139422 - DNA, 25 bp, Homo sapien
aacagaaattctctatgcttatcta

SEQ ID NO: 2139423 - DNA, 25 bp, Homo sapien
tcacctactgttggtgcagaatgca

SEQ ID NO: 2139424 - DNA, 25 bp, Homo sapien
gaacaggacttttcaaaggagcaac

SEQ ID NO: 2139425 - DNA, 25 bp, Homo sapien
tgaacaaaactcgtggatcacagaa

SEQ ID NO: 2139426 - DNA, 25 bp, Homo sapien
tgtcccgctgtgaaatgaacatgta

SEQ ID NO: 2139427 - DNA, 25 bp, Homo sapien
gaactctgtttcaccctctgattgc

SEQ ID NO: 2139428 - DNA, 25 bp, Homo sapien
tcttggacacctctataaacttctc

SEQ ID NO: 2139429 - DNA, 25 bp, Homo sapien
ggatactactcattcccatgtcctc

SEQ ID NO: 2139430 - DNA, 25 bp, Homo sapien
tccaacctgttgtggaagttatccc

SEQ ID NO: 2139431 - DNA, 25 bp, Homo sapien
ggtgcacccctatggaaagcttcca

SEQ ID NO: 2139432 - DNA, 25 bp, Homo sapien
taggaactacggtgcacccctatgg

SEQ ID NO: 2139433 - DNA, 25 bp, Homo sapien
gattataggaactacggtgcacccc

SEQ ID NO: 2139434 - DNA, 25 bp, Homo sapien
tccttgtgagtcacttgtgaactgc

SEQ ID NO: 2139435 - DNA, 25 bp, Homo sapien
ttcaggtcatggcagtctccttcca

SEQ ID NO: 2139436 - DNA, 25 bp, Homo sapien
caggtcatggcagtctccttccaaa

SEQ ID NO: 2139437 - DNA, 25 bp, Homo sapien
tttcaggtcatggcagtctccttcc

SEQ ID NO: 2139438 - DNA, 25 bp, Homo sapien
tcaggtcatggcagtctccttccaa

SEQ ID NO: 2139439 - DNA, 25 bp, Homo sapien
tctcctcaatatcgtagggtcttct

SEQ ID NO: 2139440 - DNA, 25 bp, Homo sapien
ataatctcctcaatatcgtagggtc

SEQ ID NO: 2139441 - DNA, 25 bp, Homo sapien
ggtgctcccctcatcaaatataatc

SEQ ID NO: 2139442 - DNA, 25 bp, Homo sapien
caatatcgtagggtcttctatgcat

SEQ ID NO: 2139443 - DNA, 25 bp, Homo sapien
gagaaggcaaatagatggcctccag

SEQ ID NO: 2139444 - DNA, 25 bp, Homo sapien
cttggggaaggtcagctcctctagc

SEQ ID NO: 2139445 - DNA, 25 bp, Homo sapien
cagctcctctagcagaagagaaggc

SEQ ID NO: 2139446 - DNA, 25 bp, Homo sapien
cttgtaagctggcattatggggatt

SEQ ID NO: 2139447 - DNA, 25 bp, Homo sapien
ctcttctaagaagatttatacgaat

SEQ ID NO: 2139448 - DNA, 25 bp, Homo sapien
ttcccactgacctagagctctccat

SEQ ID NO: 2139449 - DNA, 25 bp, Homo sapien
tcttcccactgacctagagctctcc

SEQ ID NO: 2139450 - DNA, 25 bp, Homo sapien
gatttatacgaataattcttcccac

SEQ ID NO: 2139451 - DNA, 25 bp, Homo sapien
aagttgggctaaggcgagagaggag

SEQ ID NO: 2139452 - DNA, 25 bp, Homo sapien
ccggagtttgcgaggcgggaaagca

SEQ ID NO: 2139453 - DNA, 25 bp, Homo sapien
aagctagaagggtgctccgtgtcga

SEQ ID NO: 2139454 - DNA, 25 bp, Homo sapien
tcagtcctggagacgaagaagctag

SEQ ID NO: 2139455 - DNA, 25 bp, Homo sapien
acgggagcgggcgactgaattgggt

SEQ ID NO: 2139456 - DNA, 25 bp, Homo sapien
agccgaacgggagcgggcgactgaa

SEQ ID NO: 2139457 - DNA, 25 bp, Homo sapien
cgactgaattgggtgcgcgcagagt

SEQ ID NO: 2139458 - DNA, 25 bp, Homo sapien
cttcgaggagccgaacgggagcggg

SEQ ID NO: 2139459 - DNA, 25 bp, Homo sapien
gcaggtggcccagatccgtgacctc

SEQ ID NO: 2139460 - DNA, 25 bp, Homo sapien
agatccgtgacctccctgtccctcc

SEQ ID NO: 2139461 - DNA, 25 bp, Homo sapien
ccagatccgtgacctccctgtccct

SEQ ID NO: 2139462 - DNA, 25 bp, Homo sapien
gcccagatccgtgacctccctgtcc

SEQ ID NO: 2139463 - DNA, 25 bp, Homo sapien
tgcctttgcctttcgttggagtttg

SEQ ID NO: 2139464 - DNA, 25 bp, Homo sapien
agtttggtgcggtcccggtgcccag

SEQ ID NO: 2139465 - DNA, 25 bp, Homo sapien
tagcccgttttgagggcgtccgctc

SEQ ID NO: 2139466 - DNA, 25 bp, Homo sapien
ggacccgtcgaagtcctggtctagc

SEQ ID NO: 2139467 - DNA, 25 bp, Homo sapien
aatgccccgctgtttagggtccgca

SEQ ID NO: 2139468 - DNA, 25 bp, Homo sapien
gctgtttagggtccgcagcacccca

SEQ ID NO: 2139469 - DNA, 25 bp, Homo sapien
gccccgctgtttagggtccgcagca

SEQ ID NO: 2139470 - DNA, 25 bp, Homo sapien
gtttagggtccgcagcaccccactg

SEQ ID NO: 2139471 - DNA, 25 bp, Homo sapien
aaggtcaccccgcaagtaagcatct

SEQ ID NO: 2139472 - DNA, 25 bp, Homo sapien
taagcatctcccatggcaaaagaag

SEQ ID NO: 2139473 - DNA, 25 bp, Homo sapien
tagtcgctgtcacctaaagtaaagg

SEQ ID NO: 2139474 - DNA, 25 bp, Homo sapien
gataacaggaaggaggagtactctc

SEQ ID NO: 2139475 - DNA, 25 bp, Homo sapien
cttattccctttcggagaatccagg

SEQ ID NO: 2139476 - DNA, 25 bp, Homo sapien
gacagggtgcgagtgaaatgccaat

SEQ ID NO: 2139477 - DNA, 25 bp, Homo sapien
cattccagcgcggtgcctgcttatt

SEQ ID NO: 2139478 - DNA, 25 bp, Homo sapien
cctgaactacagttgcctggtgatc

SEQ ID NO: 2139479 - DNA, 25 bp, Homo sapien
gtctcaaggacacaggcatactagg

SEQ ID NO: 2139480 - DNA, 25 bp, Homo sapien
catggcagtgtcaaataccaaggcc

SEQ ID NO: 2139481 - DNA, 25 bp, Homo sapien
cacagccgtgaggaatgtcattacc

SEQ ID NO: 2139482 - DNA, 25 bp, Homo sapien
tatagattaggactgcacatggcag

SEQ ID NO: 2139483 - DNA, 25 bp, Homo sapien
aagcagtgttaactggtcaagggag

SEQ ID NO: 2139484 - DNA, 25 bp, Homo sapien
tagaaagcagtgttaactggtcaag

SEQ ID NO: 2139485 - DNA, 25 bp, Homo sapien
aagagccaatagaaagcagtgttaa

SEQ ID NO: 2139486 - DNA, 25 bp, Homo sapien
caatagaaagcagtgttaactggtc

SEQ ID NO: 2139487 - DNA, 25 bp, Homo sapien
ttaaaagtcctagtctggctgccca

SEQ ID NO: 2139488 - DNA, 25 bp, Homo sapien
agtctggctgcccactgaaatctca

SEQ ID NO: 2139489 - DNA, 25 bp, Homo sapien
aattatctcctgcagtttaaaagtc

SEQ ID NO: 2139490 - DNA, 25 bp, Homo sapien
attctggggagtcgtttctgtctcc

SEQ ID NO: 2139491 - DNA, 25 bp, Homo sapien
tttatctagtgagaatattccagtt

SEQ ID NO: 2139492 - DNA, 25 bp, Homo sapien
gacattggagagactttaaccaaaa

SEQ ID NO: 2139493 - DNA, 25 bp, Homo sapien
cagggaacgaagccttggaaacaag

SEQ ID NO: 2139494 - DNA, 25 bp, Homo sapien
gccagggaacgaagccttggaaaca

SEQ ID NO: 2139495 - DNA, 25 bp, Homo sapien
gaagacattggagagactttaacca

SEQ ID NO: 2139496 - DNA, 25 bp, Homo sapien
aaatttagtcatcagctttgagtat

SEQ ID NO: 2139497 - DNA, 25 bp, Homo sapien
taaagactatctgcttgtccacatc

SEQ ID NO: 2139498 - DNA, 25 bp, Homo sapien
tgagtatcctgtaaagactatctgc

SEQ ID NO: 2139499 - DNA, 25 bp, Homo sapien
agtcatcagctttgagtatcctgta

SEQ ID NO: 2139500 - DNA, 25 bp, Homo sapien
tacaagcaaagcactaactttcatt

SEQ ID NO: 2139501 - DNA, 25 bp, Homo sapien
gcaaagcactaactttcattgatcc

SEQ ID NO: 2139502 - DNA, 25 bp, Homo sapien
gggctcccagtagaagcaataaaac

SEQ ID NO: 2139503 - DNA, 25 bp, Homo sapien
gaaaaacacccttgcctcagagatg

SEQ ID NO: 2139504 - DNA, 25 bp, Homo sapien
tacagctgccagcaaagccgcattc

SEQ ID NO: 2139505 - DNA, 25 bp, Homo sapien
ctggagtcaatgatccctacagctg

SEQ ID NO: 2139506 - DNA, 25 bp, Homo sapien
aaagccgcattcctatgaagctctg

SEQ ID NO: 2139507 - DNA, 25 bp, Homo sapien
tggagtcaatgatccctacagctgc

SEQ ID NO: 2139508 - DNA, 25 bp, Homo sapien
aagaaaggtggtaaagatagatgat

SEQ ID NO: 2139509 - DNA, 25 bp, Homo sapien
tgcaccccttaacagctgctgaaac

SEQ ID NO: 2139510 - DNA, 25 bp, Homo sapien
gcctttgccacttgtgtgggtttaa

SEQ ID NO: 2139511 - DNA, 25 bp, Homo sapien
aatatttgttgcaccccttaacagc

SEQ ID NO: 2139512 - DNA, 25 bp, Homo sapien
aaattatcttgatatagcaatgcct

SEQ ID NO: 2139513 - DNA, 25 bp, Homo sapien
caatgcctacaaggctgtatgacca

SEQ ID NO: 2139514 - DNA, 25 bp, Homo sapien
gaccaatatcttcatcctaaataag

SEQ ID NO: 2139515 - DNA, 25 bp, Homo sapien
tcctaaataagtctttaagagatac

SEQ ID NO: 2139516 - DNA, 25 bp, Homo sapien
tgagagctatgccacctcgagtgct

SEQ ID NO: 2139517 - DNA, 25 bp, Homo sapien
tccttgggctaaactttgaacacaa

SEQ ID NO: 2139518 - DNA, 25 bp, Homo sapien
acacaaagtaactgactgaactggt

SEQ ID NO: 2139519 - DNA, 25 bp, Homo sapien
tttcccctgagctgaccgacaaatg

SEQ ID NO: 2139520 - DNA, 25 bp, Homo sapien
cttgctcacaactttgacttttttc

SEQ ID NO: 2139521 - DNA, 25 bp, Homo sapien
ttgctcacaactttgacttttttct

SEQ ID NO: 2139522 - DNA, 25 bp, Homo sapien
ttcctccttcaaatagtttcaccat

SEQ ID NO: 2139523 - DNA, 25 bp, Homo sapien
ttctttcctccttcaaatagtttca

SEQ ID NO: 2139524 - DNA, 25 bp, Homo sapien
caaaggctgtgaaagtactgtggct

SEQ ID NO: 2139525 - DNA, 25 bp, Homo sapien
gcccagtgggctccatgatatgctg

SEQ ID NO: 2139526 - DNA, 25 bp, Homo sapien
tgtggctaagtactccaggaactca

SEQ ID NO: 2139527 - DNA, 25 bp, Homo sapien
catatgtgctgaactgaccaagtca

SEQ ID NO: 2139528 - DNA, 25 bp, Homo sapien
gatcagttggcactttatattcctg

SEQ ID NO: 2139529 - DNA, 25 bp, Homo sapien
gttggcactttatattcctgagcca

SEQ ID NO: 2139530 - DNA, 25 bp, Homo sapien
atgatcagttggcactttatattcc

SEQ ID NO: 2139531 - DNA, 25 bp, Homo sapien
cagttggcactttatattcctgagc

SEQ ID NO: 2139532 - DNA, 25 bp, Homo sapien
tataaatattgcttatgacactgct

SEQ ID NO: 2139533 - DNA, 25 bp, Homo sapien
ctatcttcacatgtatcacgagggt

SEQ ID NO: 2139534 - DNA, 25 bp, Homo sapien
aagctgctacaactttcaggtcaaa

SEQ ID NO: 2139535 - DNA, 25 bp, Homo sapien
ggatcgcctcttccttcaagaatag

SEQ ID NO: 2139536 - DNA, 25 bp, Homo sapien
tacgagcgttcatcactttaacagc

SEQ ID NO: 2139537 - DNA, 25 bp, Homo sapien
cgagcgttcatcactttaacagctg

SEQ ID NO: 2139538 - DNA, 25 bp, Homo sapien
cttacgagcgttcatcactttaaca

SEQ ID NO: 2139539 - DNA, 25 bp, Homo sapien
ttacgagcgttcatcactttaacag

SEQ ID NO: 2139540 - DNA, 25 bp, Homo sapien
tcactcgccttcctatttcaggtaa

SEQ ID NO: 2139541 - DNA, 25 bp, Homo sapien
tctcactcgccttcctatttcaggt

SEQ ID NO: 2139542 - DNA, 25 bp, Homo sapien
ctcgccttcctatttcaggtaaagg

SEQ ID NO: 2139543 - DNA, 25 bp, Homo sapien
tatttattcactctcactcgccttc

SEQ ID NO: 2139544 - DNA, 25 bp, Homo sapien
gagttcagtcctgagatcctcttcc

SEQ ID NO: 2139545 - DNA, 25 bp, Homo sapien
gaccagggggactcagcttgaaaaa

SEQ ID NO: 2139546 - DNA, 25 bp, Homo sapien
tcagaaggttgagttcagtcctgag

SEQ ID NO: 2139547 - DNA, 25 bp, Homo sapien
tttgtggaaagagtacttcctcaga

SEQ ID NO: 2139548 - DNA, 25 bp, Homo sapien
gtcattctcactacatcagtgaccg

SEQ ID NO: 2139549 - DNA, 25 bp, Homo sapien
taaactctgattactggtcattctc

SEQ ID NO: 2139550 - DNA, 25 bp, Homo sapien
gaacctgctgcacataactccatca

SEQ ID NO: 2139551 - DNA, 25 bp, Homo sapien
tcggcagatataagcaatccaatct

SEQ ID NO: 2139552 - DNA, 25 bp, Homo sapien
tctgacctttgatgtcccggtgaat

SEQ ID NO: 2139553 - DNA, 25 bp, Homo sapien
cttcagcattatgagtcagcagcac

SEQ ID NO: 2139554 - DNA, 25 bp, Homo sapien
ttacttcagcattatgagtcagcag

SEQ ID NO: 2139555 - DNA, 25 bp, Homo sapien
aattactcggtgtgcgtgaaggtga

SEQ ID NO: 2139556 - DNA, 25 bp, Homo sapien
tcatcacagtcaatcacctcaggtg

SEQ ID NO: 2139557 - DNA, 25 bp, Homo sapien
cattagttctgctcacctgggcact

SEQ ID NO: 2139558 - DNA, 25 bp, Homo sapien
tatggtgtcccaatgaaactattcc

SEQ ID NO: 2139559 - DNA, 25 bp, Homo sapien
gtaatcataggagcgtcttgggtcc

SEQ ID NO: 2139560 - DNA, 25 bp, Homo sapien
agtaattcccacagaccacacatca

SEQ ID NO: 2139561 - DNA, 25 bp, Homo sapien
tcaatggcagtaattcccacagacc

SEQ ID NO: 2139562 - DNA, 25 bp, Homo sapien
atggcagtaattcccacagaccaca

SEQ ID NO: 2139563 - DNA, 25 bp, Homo sapien
aggggctccttcagccatttcaatg

SEQ ID NO: 2139564 - DNA, 25 bp, Homo sapien
catccgctggatttgactgtgggag

SEQ ID NO: 2139565 - DNA, 25 bp, Homo sapien
gactgtgggagcagattcccgcaaa

SEQ ID NO: 2139566 - DNA, 25 bp, Homo sapien
aataacgaagagagcttccaagggt

SEQ ID NO: 2139567 - DNA, 25 bp, Homo sapien
gcttccaagggttgaaggttacaca

SEQ ID NO: 2139568 - DNA, 25 bp, Homo sapien
tatcgtacacttttccatgaaattg

SEQ ID NO: 2139569 - DNA, 25 bp, Homo sapien
taatgactcaacaacatgtcgttca

SEQ ID NO: 2139570 - DNA, 25 bp, Homo sapien
taatgattccagtaagatgccttgt

SEQ ID NO: 2139571 - DNA, 25 bp, Homo sapien
gaagcatgtttgcagaagtaggacg

SEQ ID NO: 2139572 - DNA, 25 bp, Homo sapien
ctgaatcttctcacggtgtactgtt

SEQ ID NO: 2139573 - DNA, 25 bp, Homo sapien
cttctcacggtgtactgttccttaa

SEQ ID NO: 2139574 - DNA, 25 bp, Homo sapien
aatcttctcacggtgtactgttcct

SEQ ID NO: 2139575 - DNA, 25 bp, Homo sapien
ctcacggtgtactgttccttaatag

SEQ ID NO: 2139576 - DNA, 25 bp, Homo sapien
tctcagaagctcgtgagtgcaagag

SEQ ID NO: 2139577 - DNA, 25 bp, Homo sapien
ctgctggttggcaatctcagaagct

SEQ ID NO: 2139578 - DNA, 25 bp, Homo sapien
ggttggcaatctcagaagctcgtga

SEQ ID NO: 2139579 - DNA, 25 bp, Homo sapien
caatctcagaagctcgtgagtgcaa

SEQ ID NO: 2139580 - DNA, 25 bp, Homo sapien
taacctgtgcctgtagtggcatgag

SEQ ID NO: 2139581 - DNA, 25 bp, Homo sapien
tgtagtggcatgaacacccgagctg

SEQ ID NO: 2139582 - DNA, 25 bp, Homo sapien
tagaggcttaggtgcactgtccaga

SEQ ID NO: 2139583 - DNA, 25 bp, Homo sapien
tccgtagtcgtggaggtgccttaat

SEQ ID NO: 2139584 - DNA, 25 bp, Homo sapien
gaaattcctctggtacctggtccaa

SEQ ID NO: 2139585 - DNA, 25 bp, Homo sapien
gatatcttcccatctgcgttggcgc

SEQ ID NO: 2139586 - DNA, 25 bp, Homo sapien
ttggtgcccgaagcaagtctcttga

SEQ ID NO: 2139587 - DNA, 25 bp, Homo sapien
catcagggtttgcaacggaccaagt

SEQ ID NO: 2139588 - DNA, 25 bp, Homo sapien
aaatgtatggcttcaatggctctat

SEQ ID NO: 2139589 - DNA, 25 bp, Homo sapien
caatggctctatctggacttcagcc

SEQ ID NO: 2139590 - DNA, 25 bp, Homo sapien
gcctgaatcgaatgaaatacttcat

SEQ ID NO: 2139591 - DNA, 25 bp, Homo sapien
tggacttcagcctgaatcgaatgaa

SEQ ID NO: 2139592 - DNA, 25 bp, Homo sapien
cttgaagagaacttgacatgatgtg

SEQ ID NO: 2139593 - DNA, 25 bp, Homo sapien
gcacagaaggagatctctcttgaac

SEQ ID NO: 2139594 - DNA, 25 bp, Homo sapien
ggttgttaggcacagaaggagatct

SEQ ID NO: 2139595 - DNA, 25 bp, Homo sapien
tgaagagaacttgacatgatgtgca

SEQ ID NO: 2139596 - DNA, 25 bp, Homo sapien
cgattttgcgaactcctttgtctga

SEQ ID NO: 2139597 - DNA, 25 bp, Homo sapien
ctttgtctgatgtcaatgggcttct

SEQ ID NO: 2139598 - DNA, 25 bp, Homo sapien
caatgggcttctgagcttgttccaa

SEQ ID NO: 2139599 - DNA, 25 bp, Homo sapien
agccaattttgacgattttgcgaac

SEQ ID NO: 2139600 - DNA, 25 bp, Homo sapien
ctatgactgctttgggatctaatcc

SEQ ID NO: 2139601 - DNA, 25 bp, Homo sapien
agtgagtgcactaagattctgagac

SEQ ID NO: 2139602 - DNA, 25 bp, Homo sapien
taaaagaactctgccataatctgag

SEQ ID NO: 2139603 - DNA, 25 bp, Homo sapien
caaatttatagtaaggtgctctgag

SEQ ID NO: 2139604 - DNA, 25 bp, Homo sapien
tctgatcaatagtagaataaggtgg

SEQ ID NO: 2139605 - DNA, 25 bp, Homo sapien
cagcaacttctgatcaatagtagaa

SEQ ID NO: 2139606 - DNA, 25 bp, Homo sapien
caaccagcaacttctgatcaatagt

SEQ ID NO: 2139607 - DNA, 25 bp, Homo sapien
ggactttcttcctcagaagaagatt

SEQ ID NO: 2139608 - DNA, 25 bp, Homo sapien
tgtcaagtatacagggggtgatatt

SEQ ID NO: 2139609 - DNA, 25 bp, Homo sapien
tttgtcaagtatacagggggtgata

SEQ ID NO: 2139610 - DNA, 25 bp, Homo sapien
tcgtttgtcaagtatacagggggtg

SEQ ID NO: 2139611 - DNA, 25 bp, Homo sapien
ccattcgtttgtcaagtatacaggg

SEQ ID NO: 2139612 - DNA, 25 bp, Homo sapien
gatttcagagagtgcattatagcct

SEQ ID NO: 2139613 - DNA, 25 bp, Homo sapien
gacaggtgccggagttaaccaatca

SEQ ID NO: 2139614 - DNA, 25 bp, Homo sapien
agcactggcatcatagagttcaaca

SEQ ID NO: 2139615 - DNA, 25 bp, Homo sapien
cttggacaactaggcgcctcataat

SEQ ID NO: 2139616 - DNA, 25 bp, Homo sapien
tcttcactggttcgaacgactccct

SEQ ID NO: 2139617 - DNA, 25 bp, Homo sapien
tatggcttccatagcctctgtaggc

SEQ ID NO: 2139618 - DNA, 25 bp, Homo sapien
ttcaaagtcctgagacgcaggtctc

SEQ ID NO: 2139619 - DNA, 25 bp, Homo sapien
tccatcataaccatcttgcttgcag

SEQ ID NO: 2139620 - DNA, 25 bp, Homo sapien
cactggcaaagttagcatcagcaga

SEQ ID NO: 2139621 - DNA, 25 bp, Homo sapien
gacggtgcagcacctgagtcaatgg

SEQ ID NO: 2139622 - DNA, 25 bp, Homo sapien
tctcatgatcaggtgctgacggtgc

SEQ ID NO: 2139623 - DNA, 25 bp, Homo sapien
acctttggaaggagatgagtgattg

SEQ ID NO: 2139624 - DNA, 25 bp, Homo sapien
gcagatctcagaagtgaactccttt

SEQ ID NO: 2139625 - DNA, 25 bp, Homo sapien
catagagtgggttaacattgacttc

SEQ ID NO: 2139626 - DNA, 25 bp, Homo sapien
agggttgcttaggtgattcctcagg

SEQ ID NO: 2139627 - DNA, 25 bp, Homo sapien
ttcctcaggtacttctacgaatcca

SEQ ID NO: 2139628 - DNA, 25 bp, Homo sapien
taagacttgaatctggcggaatggt

SEQ ID NO: 2139629 - DNA, 25 bp, Homo sapien
tggtaatcagcaaattgagtggctc

SEQ ID NO: 2139630 - DNA, 25 bp, Homo sapien
taagtttagtaatgtcagcctttcc

SEQ ID NO: 2139631 - DNA, 25 bp, Homo sapien
cagatatagattagatcgggttccc

SEQ ID NO: 2139632 - DNA, 25 bp, Homo sapien
ggacactgaagtgttcacagcctgt

SEQ ID NO: 2139633 - DNA, 25 bp, Homo sapien
accaggtcagatgatacacccgaag

SEQ ID NO: 2139634 - DNA, 25 bp, Homo sapien
ttaacttatcaatagctttgcaggc

SEQ ID NO: 2139635 - DNA, 25 bp, Homo sapien
tacacccgaagtctgttcttatgac

SEQ ID NO: 2139636 - DNA, 25 bp, Homo sapien
cataaaggtgaattgatgatttcaa

SEQ ID NO: 2139637 - DNA, 25 bp, Homo sapien
aaggactttggtgcccatgcataaa

SEQ ID NO: 2139638 - DNA, 25 bp, Homo sapien
tcaaaggactttggtgcccatgcat

SEQ ID NO: 2139639 - DNA, 25 bp, Homo sapien
tgcataaaggtgaattgatgatttc

SEQ ID NO: 2139640 - DNA, 25 bp, Homo sapien
gatcagctgcctgtatttttgccag

SEQ ID NO: 2139641 - DNA, 25 bp, Homo sapien
tataggcttgataggacatgtagtc

SEQ ID NO: 2139642 - DNA, 25 bp, Homo sapien
cagagtctgctgattgatcaatgca

SEQ ID NO: 2139643 - DNA, 25 bp, Homo sapien
taaaccggttcactggatcagctgc

SEQ ID NO: 2139644 - DNA, 25 bp, Homo sapien
cactggcttatgatcaagtgttgga

SEQ ID NO: 2139645 - DNA, 25 bp, Homo sapien
cagattctgcatcgatgaggtgata

SEQ ID NO: 2139646 - DNA, 25 bp, Homo sapien
tttggcagggtcacatcagacataa

SEQ ID NO: 2139647 - DNA, 25 bp, Homo sapien
gaaccaatagccaggtcaactgtca

SEQ ID NO: 2139648 - DNA, 25 bp, Homo sapien
gaaggtgagcatcatgccaattccc

SEQ ID NO: 2139649 - DNA, 25 bp, Homo sapien
gccaattcccaagcaatcaggtaaa

SEQ ID NO: 2139650 - DNA, 25 bp, Homo sapien
tcagcattgaaggtgagcatcatgc

SEQ ID NO: 2139651 - DNA, 25 bp, Homo sapien
tgagcatcatgccaattcccaagca

SEQ ID NO: 2139652 - DNA, 25 bp, Homo sapien
tgtggttcgctgtgtacattcaaaa

SEQ ID NO: 2139653 - DNA, 25 bp, Homo sapien
cccatcctgtggttcgctgtgtaca

SEQ ID NO: 2139654 - DNA, 25 bp, Homo sapien
gcaaagagcgcacttcaatggcctt

SEQ ID NO: 2139655 - DNA, 25 bp, Homo sapien
cctggattgcaaagagcgcacttca

SEQ ID NO: 2139656 - DNA, 25 bp, Homo sapien
caggaatctcagcttcttaattgac

SEQ ID NO: 2139657 - DNA, 25 bp, Homo sapien
tgcacaggaatctcagcttcttaat

SEQ ID NO: 2139658 - DNA, 25 bp, Homo sapien
tgtcaccccgggtgcacaggaatct

SEQ ID NO: 2139659 - DNA, 25 bp, Homo sapien
cacaggaatctcagcttcttaattg

SEQ ID NO: 2139660 - DNA, 25 bp, Homo sapien
ctaaggcttttgacatccacagtgg

SEQ ID NO: 2139661 - DNA, 25 bp, Homo sapien
gacatccacagtggctatatttagg

SEQ ID NO: 2139662 - DNA, 25 bp, Homo sapien
gctatatttaggagattttgtgaca

SEQ ID NO: 2139663 - DNA, 25 bp, Homo sapien
aggactaaggcttttgacatccaca

SEQ ID NO: 2139664 - DNA, 25 bp, Homo sapien
cataattgctttggagctcttcaag

SEQ ID NO: 2139665 - DNA, 25 bp, Homo sapien
ccggctgtggtgattgcgcagggta

SEQ ID NO: 2139666 - DNA, 25 bp, Homo sapien
ttgcgcagggtagaggtaaagaaca

SEQ ID NO: 2139667 - DNA, 25 bp, Homo sapien
tgtcatgaagtaaacccggctgtgg

SEQ ID NO: 2139668 - DNA, 25 bp, Homo sapien
gatgcagactgcctatacatgatgt

SEQ ID NO: 2139669 - DNA, 25 bp, Homo sapien
agtttgtgcaaaagacattgtacac

SEQ ID NO: 2139670 - DNA, 25 bp, Homo sapien
ccattggagtacctagagcttgcta

SEQ ID NO: 2139671 - DNA, 25 bp, Homo sapien
caaagagtaatgtttgaattcacag

SEQ ID NO: 2139672 - DNA, 25 bp, Homo sapien
gcttgtaatctaattcataacaggt

SEQ ID NO: 2139673 - DNA, 25 bp, Homo sapien
taatctaattcataacaggtttctt

SEQ ID NO: 2139674 - DNA, 25 bp, Homo sapien
aatctgaatacagatactgtccaaa

SEQ ID NO: 2139675 - DNA, 25 bp, Homo sapien
ccagtgccaattcttttgaaggctg

SEQ ID NO: 2139676 - DNA, 25 bp, Homo sapien
tcagtgagaaaacgagtggtggcct

SEQ ID NO: 2139677 - DNA, 25 bp, Homo sapien
tcagcgatgaggtacttgcacaaag

SEQ ID NO: 2139678 - DNA, 25 bp, Homo sapien
tgtctgatagtcacactgttggcca

SEQ ID NO: 2139679 - DNA, 25 bp, Homo sapien
tggaaaaatcacacacagtttgccg

SEQ ID NO: 2139680 - DNA, 25 bp, Homo sapien
tattccttcgctcataacactgtcc

SEQ ID NO: 2139681 - DNA, 25 bp, Homo sapien
tacttttattccttcgctcataaca

SEQ ID NO: 2139682 - DNA, 25 bp, Homo sapien
aattccaatttgtgatgatactttt

SEQ ID NO: 2139683 - DNA, 25 bp, Homo sapien
ctaaagtagctgaagtcagtgtacc

SEQ ID NO: 2139684 - DNA, 25 bp, Homo sapien
gacctaaatacttcctgtagttcat

SEQ ID NO: 2139685 - DNA, 25 bp, Homo sapien
gaagggtgttcttcgccttatctga

SEQ ID NO: 2139686 - DNA, 25 bp, Homo sapien
gagatgctgatcaatacttcccctt

SEQ ID NO: 2139687 - DNA, 25 bp, Homo sapien
gatactgagagcttcagctgaagca

SEQ ID NO: 2139688 - DNA, 25 bp, Homo sapien
tgcctcctggaaaacggtaggaaca

SEQ ID NO: 2139689 - DNA, 25 bp, Homo sapien
ggtaggaacaaaggcaatgaaagca

SEQ ID NO: 2139690 - DNA, 25 bp, Homo sapien
aggcaatgaaagcagcactggcctc

SEQ ID NO: 2139691 - DNA, 25 bp, Homo sapien
acaaaggcaatgaaagcagcactgg

SEQ ID NO: 2139692 - DNA, 25 bp, Homo sapien
cacagtgaagggttatctctggaaa

SEQ ID NO: 2139693 - DNA, 25 bp, Homo sapien
tctggaaagtggcagcccaaggagg

SEQ ID NO: 2139694 - DNA, 25 bp, Homo sapien
ggaggggctacgttttctatccaca

SEQ ID NO: 2139695 - DNA, 25 bp, Homo sapien
ctccacagtgaagggttatctctgg

SEQ ID NO: 2139696 - DNA, 25 bp, Homo sapien
tgctggcattggctcagttggttcc

SEQ ID NO: 2139697 - DNA, 25 bp, Homo sapien
tctgtccacattgacttctgctgct

SEQ ID NO: 2139698 - DNA, 25 bp, Homo sapien
catgatctttaattcatagaggccc

SEQ ID NO: 2139699 - DNA, 25 bp, Homo sapien
gggacttgctcatgtattgccttca

SEQ ID NO: 2139700 - DNA, 25 bp, Homo sapien
cagaggttagctgatcattgcctgc

SEQ ID NO: 2139701 - DNA, 25 bp, Homo sapien
cattgcctgctttgcatatagcatc

SEQ ID NO: 2139702 - DNA, 25 bp, Homo sapien
tcataacttcgtgaaagcagcatgc

SEQ ID NO: 2139703 - DNA, 25 bp, Homo sapien
tctggaaggtcatgtaagtcacagc

SEQ ID NO: 2139704 - DNA, 25 bp, Homo sapien
gccattggctaattgcacgtgtgta

SEQ ID NO: 2139705 - DNA, 25 bp, Homo sapien
agttgtgaacccaacggaagcgtag

SEQ ID NO: 2139706 - DNA, 25 bp, Homo sapien
gatgtgagcttggacttgcattccc

SEQ ID NO: 2139707 - DNA, 25 bp, Homo sapien
tgtggaagaggccaatcctatggca

SEQ ID NO: 2139708 - DNA, 25 bp, Homo sapien
aaactgagattgtggagaccttggg

SEQ ID NO: 2139709 - DNA, 25 bp, Homo sapien
cctcacagacactccaatggtagag

SEQ ID NO: 2139710 - DNA, 25 bp, Homo sapien
cctgaaggcaaagtaacagcctgcc

SEQ ID NO: 2139711 - DNA, 25 bp, Homo sapien
gcattcaatctgtaccggaggttca

SEQ ID NO: 2139712 - DNA, 25 bp, Homo sapien
aatttattgatagcctcccttgaac

SEQ ID NO: 2139713 - DNA, 25 bp, Homo sapien
gtcctaccagtagtgatttcaccca

SEQ ID NO: 2139714 - DNA, 25 bp, Homo sapien
gtgggatatcacaatgaactgtgcc

SEQ ID NO: 2139715 - DNA, 25 bp, Homo sapien
gtagtgatttcacccaccggtttca

SEQ ID NO: 2139716 - DNA, 25 bp, Homo sapien
cattgataccgctgagaaattcatt

SEQ ID NO: 2139717 - DNA, 25 bp, Homo sapien
tagaaacattgataccgctgagaaa

SEQ ID NO: 2139718 - DNA, 25 bp, Homo sapien
ttcttagaagcagtagaaacattga

SEQ ID NO: 2139719 - DNA, 25 bp, Homo sapien
gcagtagaaacattgataccgctga

SEQ ID NO: 2139720 - DNA, 25 bp, Homo sapien
gcatcgtctgatcatatcgacctca

SEQ ID NO: 2139721 - DNA, 25 bp, Homo sapien
tcaggcagggtgtttgtgcatcgtc

SEQ ID NO: 2139722 - DNA, 25 bp, Homo sapien
gtctgatcatatcgacctcatctcc

SEQ ID NO: 2139723 - DNA, 25 bp, Homo sapien
agggtgtttgtgcatcgtctgatca

SEQ ID NO: 2139724 - DNA, 25 bp, Homo sapien
taggctgccagaccatctgtgacac

SEQ ID NO: 2139725 - DNA, 25 bp, Homo sapien
ttttgtcatcggagccaaagcccat

SEQ ID NO: 2139726 - DNA, 25 bp, Homo sapien
tcagagccagagctaggagcacact

SEQ ID NO: 2139727 - DNA, 25 bp, Homo sapien
caaaatatacaagtgctgtgcttcc

SEQ ID NO: 2139728 - DNA, 25 bp, Homo sapien
tccaaatcttcgagaactctctgaa

SEQ ID NO: 2139729 - DNA, 25 bp, Homo sapien
ggaagcctccgaagcctgtgtgtaa

SEQ ID NO: 2139730 - DNA, 25 bp, Homo sapien
aaaataactagcatttacgacagcc

SEQ ID NO: 2139731 - DNA, 25 bp, Homo sapien
tacgacagccattacctccaagctt

SEQ ID NO: 2139732 - DNA, 25 bp, Homo sapien
tttcccgttattcctaagcagcact

SEQ ID NO: 2139733 - DNA, 25 bp, Homo sapien
tcagagatactcgaatttgcacagt

SEQ ID NO: 2139734 - DNA, 25 bp, Homo sapien
gttgattaccacctccccgactgtg

SEQ ID NO: 2139735 - DNA, 25 bp, Homo sapien
ccaccactgccttttgatggaaaca

SEQ ID NO: 2139736 - DNA, 25 bp, Homo sapien
tggacaaagcttagtaaacctggca

SEQ ID NO: 2139737 - DNA, 25 bp, Homo sapien
aatttcaatcacactctacatgctg

SEQ ID NO: 2139738 - DNA, 25 bp, Homo sapien
tacatgctgtctcatagtcggctaa

SEQ ID NO: 2139739 - DNA, 25 bp, Homo sapien
ggcaagcaccatcttgtgaccagaa

SEQ ID NO: 2139740 - DNA, 25 bp, Homo sapien
gtggttgacctgtctttctggggct

SEQ ID NO: 2139741 - DNA, 25 bp, Homo sapien
ttctgtggttgacctgtctttctgg

SEQ ID NO: 2139742 - DNA, 25 bp, Homo sapien
gcttgtccagcagggtctttacctg

SEQ ID NO: 2139743 - DNA, 25 bp, Homo sapien
gttgacctgtctttctggggctcgg

SEQ ID NO: 2139744 - DNA, 25 bp, Homo sapien
tagcctaagtgttcaagctacagta

SEQ ID NO: 2139745 - DNA, 25 bp, Homo sapien
cataatattctaggccttcactttc

SEQ ID NO: 2139746 - DNA, 25 bp, Homo sapien
agtaaaatgttaccataagctaagg

SEQ ID NO: 2139747 - DNA, 25 bp, Homo sapien
caagctacagtagtatacataatat

SEQ ID NO: 2139748 - DNA, 25 bp, Homo sapien
gaagcttcttgtcagctgcagcctc

SEQ ID NO: 2139749 - DNA, 25 bp, Homo sapien
cttgaagcttcttgtcagctgcagc

SEQ ID NO: 2139750 - DNA, 25 bp, Homo sapien
tgaagcttcttgtcagctgcagcct

SEQ ID NO: 2139751 - DNA, 25 bp, Homo sapien
agcttcttgtcagctgcagcctctt

SEQ ID NO: 2139752 - DNA, 25 bp, Homo sapien
gaggacacatgcaaggctgtagttg

SEQ ID NO: 2139753 - DNA, 25 bp, Homo sapien
gcaaccaggctacccacttgatcag

SEQ ID NO: 2139754 - DNA, 25 bp, Homo sapien
aaaagtggttcttgctgaccatggc

SEQ ID NO: 2139755 - DNA, 25 bp, Homo sapien
ccatggctgtacctgtggactgaaa

SEQ ID NO: 2139756 - DNA, 25 bp, Homo sapien
tcagattccactcaagagcatagct

SEQ ID NO: 2139757 - DNA, 25 bp, Homo sapien
gaaaatggtaaagctatccctgtct

SEQ ID NO: 2139758 - DNA, 25 bp, Homo sapien
gaagatgtaacaaaccccagataaa

SEQ ID NO: 2139759 - DNA, 25 bp, Homo sapien
tacatacagctagccaggagtcttc

SEQ ID NO: 2139760 - DNA, 25 bp, Homo sapien
tgtggatcctggtgggtctggtcct

SEQ ID NO: 2139761 - DNA, 25 bp, Homo sapien
tctttccaaggcttggttggcatca

SEQ ID NO: 2139762 - DNA, 25 bp, Homo sapien
gtctggtcctgtggtccggctgtct

SEQ ID NO: 2139763 - DNA, 25 bp, Homo sapien
tcacatgcagattgcccaggtcatg

SEQ ID NO: 2139764 - DNA, 25 bp, Homo sapien
ccaaggatgcttgaacacgttgttt

SEQ ID NO: 2139765 - DNA, 25 bp, Homo sapien
tgtttgaataggatgataccggaag

SEQ ID NO: 2139766 - DNA, 25 bp, Homo sapien
cttatgactacaaagggtttacagc

SEQ ID NO: 2139767 - DNA, 25 bp, Homo sapien
tacagcttgtgtggcctgttctcca

SEQ ID NO: 2139768 - DNA, 25 bp, Homo sapien
taatcccagacagggttagaggcac

SEQ ID NO: 2139769 - DNA, 25 bp, Homo sapien
ggtctctaggcaggtatcctcgctc

SEQ ID NO: 2139770 - DNA, 25 bp, Homo sapien
gaatagtatcgaccattgtgggtgc

SEQ ID NO: 2139771 - DNA, 25 bp, Homo sapien
gggaaagtctcgcaccagctagagt

SEQ ID NO: 2139772 - DNA, 25 bp, Homo sapien
gcaaagagcccgtgaaagaaccaca

SEQ ID NO: 2139773 - DNA, 25 bp, Homo sapien
cagccatctggatccttttgtgcca

SEQ ID NO: 2139774 - DNA, 25 bp, Homo sapien
agcagccttcatccggtcagggaga

SEQ ID NO: 2139775 - DNA, 25 bp, Homo sapien
caggttcttgttggctcggtcccga

SEQ ID NO: 2139776 - DNA, 25 bp, Homo sapien
gtaatctaacccatcaacagcagaa

SEQ ID NO: 2139777 - DNA, 25 bp, Homo sapien
gcctcgtaatctaacccatcaacag

SEQ ID NO: 2139778 - DNA, 25 bp, Homo sapien
tcagctgcctcgtaatctaacccat

SEQ ID NO: 2139779 - DNA, 25 bp, Homo sapien
tgcttcagctgcctcgtaatctaac

SEQ ID NO: 2139780 - DNA, 25 bp, Homo sapien
tatgactgtataacaagagcccaag

SEQ ID NO: 2139781 - DNA, 25 bp, Homo sapien
gagagctccctgtcatggtttcaac

SEQ ID NO: 2139782 - DNA, 25 bp, Homo sapien
tcatatgtctagagtggccaggctg

SEQ ID NO: 2139783 - DNA, 25 bp, Homo sapien
tcaactagtatctatgagagctccc

SEQ ID NO: 2139784 - DNA, 25 bp, Homo sapien
gctttattcccatcagaaatccatg

SEQ ID NO: 2139785 - DNA, 25 bp, Homo sapien
tcagaaatccatgctcctttttcta

SEQ ID NO: 2139786 - DNA, 25 bp, Homo sapien
atctccggaggtcccactagccaat

SEQ ID NO: 2139787 - DNA, 25 bp, Homo sapien
gaggtcccactagccaatgatcagc

SEQ ID NO: 2139788 - DNA, 25 bp, Homo sapien
tagctaaaggtcatctccggaggtc

SEQ ID NO: 2139789 - DNA, 25 bp, Homo sapien
aggtcatctccggaggtcccactag

SEQ ID NO: 2139790 - DNA, 25 bp, Homo sapien
tgataaggccacttggaaacaggag

SEQ ID NO: 2139791 - DNA, 25 bp, Homo sapien
cagctccctattgggtctggtccct

SEQ ID NO: 2139792 - DNA, 25 bp, Homo sapien
gacttgcgggcattatcggctttga

SEQ ID NO: 2139793 - DNA, 25 bp, Homo sapien
tagagtgtgcatcaatgccattgcc

SEQ ID NO: 2139794 - DNA, 25 bp, Homo sapien
tcctcatgagtaaagccagaagtag

SEQ ID NO: 2139795 - DNA, 25 bp, Homo sapien
gacgagtcaccagttatccattcac

SEQ ID NO: 2139796 - DNA, 25 bp, Homo sapien
tggaagaaacggttctctcctcatg

SEQ ID NO: 2139797 - DNA, 25 bp, Homo sapien
tctgtattctgaaatagcctgacac

SEQ ID NO: 2139798 - DNA, 25 bp, Homo sapien
aactggattccgaataacaatgagg

SEQ ID NO: 2139799 - DNA, 25 bp, Homo sapien
actggattccgaataacaatgaggt

SEQ ID NO: 2139800 - DNA, 25 bp, Homo sapien
ctggattccgaataacaatgaggtc

SEQ ID NO: 2139801 - DNA, 25 bp, Homo sapien
ggaactggattccgaataacaatga

SEQ ID NO: 2139802 - DNA, 25 bp, Homo sapien
tctgtaactggttctgaccaattag

SEQ ID NO: 2139803 - DNA, 25 bp, Homo sapien
ggagtggagaaggaataaggaaatc

SEQ ID NO: 2139804 - DNA, 25 bp, Homo sapien
tggttctgaccaattagttgtaaac

SEQ ID NO: 2139805 - DNA, 25 bp, Homo sapien
aaacaccactgcactcgaatcagct

SEQ ID NO: 2139806 - DNA, 25 bp, Homo sapien
ttagctaactagtttctgggcaggt

SEQ ID NO: 2139807 - DNA, 25 bp, Homo sapien
tgggtcttcactggattctctggtc

SEQ ID NO: 2139808 - DNA, 25 bp, Homo sapien
cagtgtccatcaggatgaactggag

SEQ ID NO: 2139809 - DNA, 25 bp, Homo sapien
tcctgttgctgtcctgccctgctgt

SEQ ID NO: 2139810 - DNA, 25 bp, Homo sapien
acagccactatcacagactgttgtc

SEQ ID NO: 2139811 - DNA, 25 bp, Homo sapien
cttgtcagcagccattttagtggca

SEQ ID NO: 2139812 - DNA, 25 bp, Homo sapien
tctcctcagcggcagtgatctgggt

SEQ ID NO: 2139813 - DNA, 25 bp, Homo sapien
tttagtggcagccttggcgggtccc

SEQ ID NO: 2139814 - DNA, 25 bp, Homo sapien
cagaatcatgtcacaaaccatggct

SEQ ID NO: 2139815 - DNA, 25 bp, Homo sapien
ctatttcaatgacgatattatgttg

SEQ ID NO: 2139816 - DNA, 25 bp, Homo sapien
gggcagaatcatgtcacaaaccatg

SEQ ID NO: 2139817 - DNA, 25 bp, Homo sapien
ggctttgctggtttcaatttctatt

SEQ ID NO: 2139818 - DNA, 25 bp, Homo sapien
ttggcatgtgcccaacagtgcctga

SEQ ID NO: 2139819 - DNA, 25 bp, Homo sapien
acttctcaatccctgtccaacactg

SEQ ID NO: 2139820 - DNA, 25 bp, Homo sapien
catgtgcccaacagtgcctgacttc

SEQ ID NO: 2139821 - DNA, 25 bp, Homo sapien
gcccaacagtgcctgacttctcaat

SEQ ID NO: 2139822 - DNA, 25 bp, Homo sapien
gctgtcaaagttctgtctatgctcc

SEQ ID NO: 2139823 - DNA, 25 bp, Homo sapien
gtagggctgtaggctgtgcatcaca

SEQ ID NO: 2139824 - DNA, 25 bp, Homo sapien
gtctgtgctctgcagttaggcagtg

SEQ ID NO: 2139825 - DNA, 25 bp, Homo sapien
cacagcacagttgggcaagttcaat

SEQ ID NO: 2139826 - DNA, 25 bp, Homo sapien
gagagaagaaggcttcacatgatca

SEQ ID NO: 2139827 - DNA, 25 bp, Homo sapien
gttgagagaagaaggcttcacatga

SEQ ID NO: 2139828 - DNA, 25 bp, Homo sapien
tgactttgacgagttgagagaagaa

SEQ ID NO: 2139829 - DNA, 25 bp, Homo sapien
agagaagaaggcttcacatgatcaa

SEQ ID NO: 2139830 - DNA, 25 bp, Homo sapien
ctcttttagagccacgtgaccagta

SEQ ID NO: 2139831 - DNA, 25 bp, Homo sapien
cgtgaccagtatgacattcactact

SEQ ID NO: 2139832 - DNA, 25 bp, Homo sapien
gagccacgtgaccagtatgacattc

SEQ ID NO: 2139833 - DNA, 25 bp, Homo sapien
tttagagccacgtgaccagtatgac

SEQ ID NO: 2139834 - DNA, 25 bp, Homo sapien
aattgtgactgaatggagtttgtgg

SEQ ID NO: 2139835 - DNA, 25 bp, Homo sapien
gaatggagtttgtggtgtcttcctt

SEQ ID NO: 2139836 - DNA, 25 bp, Homo sapien
tgtggtgtcttccttggagaaaagg

SEQ ID NO: 2139837 - DNA, 25 bp, Homo sapien
tctggacttttaaattgtgactgaa

SEQ ID NO: 2139838 - DNA, 25 bp, Homo sapien
caagagggtgaatcatgggtccaca

SEQ ID NO: 2139839 - DNA, 25 bp, Homo sapien
aagagggtgaatcatgggtccacag

SEQ ID NO: 2139840 - DNA, 25 bp, Homo sapien
acagggaacaatgaacaagagaact

SEQ ID NO: 2139841 - DNA, 25 bp, Homo sapien
gagggtgaatcatgggtccacaggg

SEQ ID NO: 2139842 - DNA, 25 bp, Homo sapien
ctgcagcaaggatagtttcagcatc

SEQ ID NO: 2139843 - DNA, 25 bp, Homo sapien
gcagcaaggatagtttcagcatcat

SEQ ID NO: 2139844 - DNA, 25 bp, Homo sapien
cagcaaggatagtttcagcatcatc

SEQ ID NO: 2139845 - DNA, 25 bp, Homo sapien
gcaaggatagtttcagcatcatcat

SEQ ID NO: 2139846 - DNA, 25 bp, Homo sapien
tgggagtcatggaaaaagtgctcca

SEQ ID NO: 2139847 - DNA, 25 bp, Homo sapien
tcttgagtgatgtcacattgatcct

SEQ ID NO: 2139848 - DNA, 25 bp, Homo sapien
tcatctgtgacacctcttgagtgat

SEQ ID NO: 2139849 - DNA, 25 bp, Homo sapien
ttgactcatctggttctttgccatc

SEQ ID NO: 2139850 - DNA, 25 bp, Homo sapien
ttgattgatgttgttcccttttcct

SEQ ID NO: 2139851 - DNA, 25 bp, Homo sapien
gttgattgatgttgttcccttttcc

SEQ ID NO: 2139852 - DNA, 25 bp, Homo sapien
ggttgattgatgttgttcccttttc

SEQ ID NO: 2139853 - DNA, 25 bp, Homo sapien
taaaaccgcgcgctttggcgacgat

SEQ ID NO: 2139854 - DNA, 25 bp, Homo sapien
tgcaaagactttacgcgtgcgcgcg

SEQ ID NO: 2139855 - DNA, 25 bp, Homo sapien
gagttacgtagcaggtcgtccgacc

SEQ ID NO: 2139856 - DNA, 25 bp, Homo sapien
actaggcagtcacacgcgcgagtta

SEQ ID NO: 2139857 - DNA, 25 bp, Homo sapien
tgtgagggaccagcctcaggctgtc

SEQ ID NO: 2139858 - DNA, 25 bp, Homo sapien
gggaccagcctcaggctgtcctgac

SEQ ID NO: 2139859 - DNA, 25 bp, Homo sapien
ctgcatgtgagggaccagcctcagg

SEQ ID NO: 2139860 - DNA, 25 bp, Homo sapien
ggaccagcctcaggctgtcctgact

SEQ ID NO: 2139861 - DNA, 25 bp, Homo sapien
gatcttcgttattccacagcgccag

SEQ ID NO: 2139862 - DNA, 25 bp, Homo sapien
tctaacaggtacctctggacggcca

SEQ ID NO: 2139863 - DNA, 25 bp, Homo sapien
cactggcgaggtgagtccataatct

SEQ ID NO: 2139864 - DNA, 25 bp, Homo sapien
gacgttatctatgcacaggatcccc

SEQ ID NO: 2139865 - DNA, 25 bp, Homo sapien
agatgagaaagggaaattattttgg

SEQ ID NO: 2139866 - DNA, 25 bp, Homo sapien
caagatgagaaagggaaattatttt

SEQ ID NO: 2139867 - DNA, 25 bp, Homo sapien
tcaagatgagaaagggaaattattt

SEQ ID NO: 2139868 - DNA, 25 bp, Homo sapien
ttcaagatgagaaagggaaattatt

SEQ ID NO: 2139869 - DNA, 25 bp, Homo sapien
tggttcaatcatctttttatcaggt

SEQ ID NO: 2139870 - DNA, 25 bp, Homo sapien
tcaggttttccatagtatcgcagtt

SEQ ID NO: 2139871 - DNA, 25 bp, Homo sapien
cgcagttttgatttatgtaagatcc

SEQ ID NO: 2139872 - DNA, 25 bp, Homo sapien
taagatcctcacaagcaatgcagga

SEQ ID NO: 2139873 - DNA, 25 bp, Homo sapien
acttttataccactcaggacacagg

SEQ ID NO: 2139874 - DNA, 25 bp, Homo sapien
ggacacagggcattccacataatca

SEQ ID NO: 2139875 - DNA, 25 bp, Homo sapien
gcagaagaactaaaccaacccgcaa

SEQ ID NO: 2139876 - DNA, 25 bp, Homo sapien
ttagtttgatctgtggatccacggg

SEQ ID NO: 2139877 - DNA, 25 bp, Homo sapien
agtttgcatattccgaagtactttc

SEQ ID NO: 2139878 - DNA, 25 bp, Homo sapien
tttgcatattccgaagtactttcat

SEQ ID NO: 2139879 - DNA, 25 bp, Homo sapien
gtttgcatattccgaagtactttca

SEQ ID NO: 2139880 - DNA, 25 bp, Homo sapien
gggatctcgaagattcaggcagatt

SEQ ID NO: 2139881 - DNA, 25 bp, Homo sapien
cttgtggtaaatcggtgatttagct

SEQ ID NO: 2139882 - DNA, 25 bp, Homo sapien
tgatttagctttggcagtctccatt

SEQ ID NO: 2139883 - DNA, 25 bp, Homo sapien
aattatatttgttgggggatctcga

SEQ ID NO: 2139884 - DNA, 25 bp, Homo sapien
ttttgaccgctggacccttcctaca

SEQ ID NO: 2139885 - DNA, 25 bp, Homo sapien
gcaattttctggcatatcatccagt

SEQ ID NO: 2139886 - DNA, 25 bp, Homo sapien
aaaggccaataacatcacagatgca

SEQ ID NO: 2139887 - DNA, 25 bp, Homo sapien
aactaaaaggccaataacatcacag

SEQ ID NO: 2139888 - DNA, 25 bp, Homo sapien
tggttgttctgaagtaccgtcagca

SEQ ID NO: 2139889 - DNA, 25 bp, Homo sapien
tgaatccagcgatatgaccaaaaat

SEQ ID NO: 2139890 - DNA, 25 bp, Homo sapien
ttctggctgcgatgttgaaaacagt

SEQ ID NO: 2139891 - DNA, 25 bp, Homo sapien
tgaaaacagttccactataaatggt

SEQ ID NO: 2139892 - DNA, 25 bp, Homo sapien
tggtgaggtaaagcagcttaggtac

SEQ ID NO: 2139893 - DNA, 25 bp, Homo sapien
gacaactttcaactgtgtacacaca

SEQ ID NO: 2139894 - DNA, 25 bp, Homo sapien
cactctcatttgtagtggtgaggta

SEQ ID NO: 2139895 - DNA, 25 bp, Homo sapien
acactccactctcatttgtagtggt

SEQ ID NO: 2139896 - DNA, 25 bp, Homo sapien
gcatcatacgtatacggctggcctc

SEQ ID NO: 2139897 - DNA, 25 bp, Homo sapien
atcatacgtatacggctggcctcta

SEQ ID NO: 2139898 - DNA, 25 bp, Homo sapien
cttggcatcatacgtatacggctgg

SEQ ID NO: 2139899 - DNA, 25 bp, Homo sapien
tacgtatacggctggcctctatgac

SEQ ID NO: 2139900 - DNA, 25 bp, Homo sapien
taggggtaatatccaccaataacca

SEQ ID NO: 2139901 - DNA, 25 bp, Homo sapien
aactactatacttggaaaatgtctc

SEQ ID NO: 2139902 - DNA, 25 bp, Homo sapien
tcagactttgttctaatccattgaa

SEQ ID NO: 2139903 - DNA, 25 bp, Homo sapien
aatgtctctggcactggtggatagg

SEQ ID NO: 2139904 - DNA, 25 bp, Homo sapien
ctattatcggtgaatgttgctaaac

SEQ ID NO: 2139905 - DNA, 25 bp, Homo sapien
tttagatctgcattaagacaaagct

SEQ ID NO: 2139906 - DNA, 25 bp, Homo sapien
gctaaactttagatcactcccataa

SEQ ID NO: 2139907 - DNA, 25 bp, Homo sapien
caccatgcgagatatagggaaaact

SEQ ID NO: 2139908 - DNA, 25 bp, Homo sapien
gctccaatgagtagttctttgagtg

SEQ ID NO: 2139909 - DNA, 25 bp, Homo sapien
cagcttccctaatgcaaaattccaa

SEQ ID NO: 2139910 - DNA, 25 bp, Homo sapien
agtgtcacttcagtactcaagaagt

SEQ ID NO: 2139911 - DNA, 25 bp, Homo sapien
tccaatgagtagttctttgagtgtc

SEQ ID NO: 2139912 - DNA, 25 bp, Homo sapien
ataagaattagatttgcaatgtaat

SEQ ID NO: 2139913 - DNA, 25 bp, Homo sapien
tgtgtttatatctggcatccttcta

SEQ ID NO: 2139914 - DNA, 25 bp, Homo sapien
ttactacattaactgtgagacactg

SEQ ID NO: 2139915 - DNA, 25 bp, Homo sapien
tctggcatccttctatataattttg

SEQ ID NO: 2139916 - DNA, 25 bp, Homo sapien
ctgaattgcaatgcgcttttgttcc

SEQ ID NO: 2139917 - DNA, 25 bp, Homo sapien
cagtcgcactgctatgggggatata

SEQ ID NO: 2139918 - DNA, 25 bp, Homo sapien
tgttccctatactgcaagtcttcaa

SEQ ID NO: 2139919 - DNA, 25 bp, Homo sapien
tagcagtaattatcccctgaattgc

SEQ ID NO: 2139920 - DNA, 25 bp, Homo sapien
cgaagtgtttctgatgctgaggcac

SEQ ID NO: 2139921 - DNA, 25 bp, Homo sapien
ccgaagtgtttctgatgctgaggca

SEQ ID NO: 2139922 - DNA, 25 bp, Homo sapien
acactttaggctaattcacaattat

SEQ ID NO: 2139923 - DNA, 25 bp, Homo sapien
ttaggctaattcacaattattaatc

SEQ ID NO: 2139924 - DNA, 25 bp, Homo sapien
ctttaggctaattcacaattattaa

SEQ ID NO: 2139925 - DNA, 25 bp, Homo sapien
cactttaggctaattcacaattatt

SEQ ID NO: 2139926 - DNA, 25 bp, Homo sapien
ggctcatcatcttgatgccgtttac

SEQ ID NO: 2139927 - DNA, 25 bp, Homo sapien
gatgtagtttggaaatactgagaat

SEQ ID NO: 2139928 - DNA, 25 bp, Homo sapien
tagctgcttgagaggtcgagggtct

SEQ ID NO: 2139929 - DNA, 25 bp, Homo sapien
cttgatgccgtttaccatttctttc

SEQ ID NO: 2139930 - DNA, 25 bp, Homo sapien
gatgcttggcatgcccggtttaatt

SEQ ID NO: 2139931 - DNA, 25 bp, Homo sapien
aagatgcttggcatgcccggtttaa

SEQ ID NO: 2139932 - DNA, 25 bp, Homo sapien
cttggcatgcccggtttaattccct

SEQ ID NO: 2139933 - DNA, 25 bp, Homo sapien
tgaagatgcttggcatgcccggttt

SEQ ID NO: 2139934 - DNA, 25 bp, Homo sapien
gcagattagcatttatatttgctcg

SEQ ID NO: 2139935 - DNA, 25 bp, Homo sapien
cttgcagattagcatttatatttgc

SEQ ID NO: 2139936 - DNA, 25 bp, Homo sapien
agattagcatttatatttgctcgac

SEQ ID NO: 2139937 - DNA, 25 bp, Homo sapien
tgcagattagcatttatatttgctc

SEQ ID NO: 2139938 - DNA, 25 bp, Homo sapien
cacggctgtagtgtaggtgatctat

SEQ ID NO: 2139939 - DNA, 25 bp, Homo sapien
gtggtacatatttcgcaggctgaga

SEQ ID NO: 2139940 - DNA, 25 bp, Homo sapien
gaatactttcaggataaacacggct

SEQ ID NO: 2139941 - DNA, 25 bp, Homo sapien
ggcttcgggcgctcttaaaatcatc

SEQ ID NO: 2139942 - DNA, 25 bp, Homo sapien
tgcaaccgctcttggacctggcaat

SEQ ID NO: 2139943 - DNA, 25 bp, Homo sapien
tacatgggtaggaaagcaacatcga

SEQ ID NO: 2139944 - DNA, 25 bp, Homo sapien
cgaatatcttctggacaatacatgg

SEQ ID NO: 2139945 - DNA, 25 bp, Homo sapien
cacagctgtaattcatggaggtcaa

SEQ ID NO: 2139946 - DNA, 25 bp, Homo sapien
atccaagataccgacgatatgcact

SEQ ID NO: 2139947 - DNA, 25 bp, Homo sapien
taccgacgatatgcactctatccag

SEQ ID NO: 2139948 - DNA, 25 bp, Homo sapien
tatgcactctatccagttcagttgc

SEQ ID NO: 2139949 - DNA, 25 bp, Homo sapien
gacgatatgcactctatccagttca

SEQ ID NO: 2139950 - DNA, 25 bp, Homo sapien
taagaagtattctctggactataaa

SEQ ID NO: 2139951 - DNA, 25 bp, Homo sapien
aagaagtattctctggactataaat

SEQ ID NO: 2139952 - DNA, 25 bp, Homo sapien
agaagtattctctggactataaatc

SEQ ID NO: 2139953 - DNA, 25 bp, Homo sapien
agtcacagaactatagggctacaag

SEQ ID NO: 2139954 - DNA, 25 bp, Homo sapien
actgtaacacgagaggaatccactg

SEQ ID NO: 2139955 - DNA, 25 bp, Homo sapien
gaaattcgaaccacacaaagtcaca

SEQ ID NO: 2139956 - DNA, 25 bp, Homo sapien
tgtctttaggttcataggctgctca

SEQ ID NO: 2139957 - DNA, 25 bp, Homo sapien
tgcattccattaatttttgtgcccc

SEQ ID NO: 2139958 - DNA, 25 bp, Homo sapien
ctgcaagttgctgcattccattaat

SEQ ID NO: 2139959 - DNA, 25 bp, Homo sapien
tccattaatttttgtgccccatgtg

SEQ ID NO: 2139960 - DNA, 25 bp, Homo sapien
tgcaagttgctgcattccattaatt

SEQ ID NO: 2139961 - DNA, 25 bp, Homo sapien
acctctggatacatcagctctattt

SEQ ID NO: 2139962 - DNA, 25 bp, Homo sapien
ctggatacatcagctctatttcact

SEQ ID NO: 2139963 - DNA, 25 bp, Homo sapien
cctctggatacatcagctctatttc

SEQ ID NO: 2139964 - DNA, 25 bp, Homo sapien
ctagcaacataacctctggatacat

SEQ ID NO: 2139965 - DNA, 25 bp, Homo sapien
attgtccactcacgtccctgctgaa

SEQ ID NO: 2139966 - DNA, 25 bp, Homo sapien
gttgcacgtaggtaactgatctcac

SEQ ID NO: 2139967 - DNA, 25 bp, Homo sapien
tatttccaactatcagtcaccattg

SEQ ID NO: 2139968 - DNA, 25 bp, Homo sapien
cgtccctgctgaacagaagtttgaa

SEQ ID NO: 2139969 - DNA, 25 bp, Homo sapien
aactggacctattctcctggttcat

SEQ ID NO: 2139970 - DNA, 25 bp, Homo sapien
aaactggacctattctcctggttca

SEQ ID NO: 2139971 - DNA, 25 bp, Homo sapien
tgttcttagggatgcctaccactcc

SEQ ID NO: 2139972 - DNA, 25 bp, Homo sapien
tggtgaagctaatccataaacgcca

SEQ ID NO: 2139973 - DNA, 25 bp, Homo sapien
ctctttctatcagcgcaatccaggg

SEQ ID NO: 2139974 - DNA, 25 bp, Homo sapien
tatcgtctgattgccagtctctgga

SEQ ID NO: 2139975 - DNA, 25 bp, Homo sapien
tctgagttctgctccaaggagtcct

SEQ ID NO: 2139976 - DNA, 25 bp, Homo sapien
ctctgttaagagtcagcatggtgtc

SEQ ID NO: 2139977 - DNA, 25 bp, Homo sapien
caagccgaggaaccccaatctttct

SEQ ID NO: 2139978 - DNA, 25 bp, Homo sapien
gagtcagcatggtgtcatcaagccg

SEQ ID NO: 2139979 - DNA, 25 bp, Homo sapien
tggtgtcatcaagccgaggaacccc

SEQ ID NO: 2139980 - DNA, 25 bp, Homo sapien
taactcggagtaaacaagtatctgg

SEQ ID NO: 2139981 - DNA, 25 bp, Homo sapien
caataagtgaccaggtgctagcacg

SEQ ID NO: 2139982 - DNA, 25 bp, Homo sapien
tagcacgtagttgggacaactgaaa

SEQ ID NO: 2139983 - DNA, 25 bp, Homo sapien
gccactcatgattcacagaataatt

SEQ ID NO: 2139984 - DNA, 25 bp, Homo sapien
tggggctttagcgtgaagctccgcc

SEQ ID NO: 2139985 - DNA, 25 bp, Homo sapien
tgccgcgtcgggctctggggcttta

SEQ ID NO: 2139986 - DNA, 25 bp, Homo sapien
ctctggggctttagcgtgaagctcc

SEQ ID NO: 2139987 - DNA, 25 bp, Homo sapien
gctttagcgtgaagctccgcccagc

SEQ ID NO: 2139988 - DNA, 25 bp, Homo sapien
gtcttgagcaggtgcgcgccaggtg

SEQ ID NO: 2139989 - DNA, 25 bp, Homo sapien
ctacgtcggagccaggaggcacgta

SEQ ID NO: 2139990 - DNA, 25 bp, Homo sapien
ctagcgcttggcaggaccctggtct

SEQ ID NO: 2139991 - DNA, 25 bp, Homo sapien
acgtagcgtcagcacacaggttgcc

SEQ ID NO: 2139992 - DNA, 25 bp, Homo sapien
aatctggaaaagccgcagccaccgc

SEQ ID NO: 2139993 - DNA, 25 bp, Homo sapien
cagcaatctggaaaagccgcagcca

SEQ ID NO: 2139994 - DNA, 25 bp, Homo sapien
ccagcaatctggaaaagccgcagcc

SEQ ID NO: 2139995 - DNA, 25 bp, Homo sapien
gcaatctggaaaagccgcagccacc

SEQ ID NO: 2139996 - DNA, 25 bp, Homo sapien
gatcttgtctgcgaaggtgcagccc

SEQ ID NO: 2139997 - DNA, 25 bp, Homo sapien
caaaccgtgggcaccgtgaaattcg

SEQ ID NO: 2139998 - DNA, 25 bp, Homo sapien
gaagttaaagatgacggctccagac

SEQ ID NO: 2139999 - DNA, 25 bp, Homo sapien
accaagagacttgcacggtgcttcc

SEQ ID NO: 2140000 - DNA, 25 bp, Homo sapien
gctcaaacagtccttgatttgccag

SEQ ID NO: 2140001 - DNA, 25 bp, Homo sapien
tggggacagaaagagcacccacttt

SEQ ID NO: 2140002 - DNA, 25 bp, Homo sapien
cctggtgaatctcggggaggaccct

SEQ ID NO: 2140003 - DNA, 25 bp, Homo sapien
gaaaagggaacgcaaagagctcaaa

SEQ ID NO: 2140004 - DNA, 25 bp, Homo sapien
tgtgaatcagaattttctgaatact

SEQ ID NO: 2140005 - DNA, 25 bp, Homo sapien
tatctgtgtgaatcagaattttctg

SEQ ID NO: 2140006 - DNA, 25 bp, Homo sapien
ctgtgtgaatcagaattttctgaat

SEQ ID NO: 2140007 - DNA, 25 bp, Homo sapien
ttatctgtgtgaatcagaattttct

SEQ ID NO: 2140008 - DNA, 25 bp, Homo sapien
gaaggaagataatatagtcgtttca

SEQ ID NO: 2140009 - DNA, 25 bp, Homo sapien
gagaaggaagataatatagtcgttt

SEQ ID NO: 2140010 - DNA, 25 bp, Homo sapien
aagataatatagtcgtttcagtttc

SEQ ID NO: 2140011 - DNA, 25 bp, Homo sapien
taatatagtcgtttcagtttcttga

SEQ ID NO: 2140012 - DNA, 25 bp, Homo sapien
aaacaaagcaggtgtagcaatccta

SEQ ID NO: 2140013 - DNA, 25 bp, Homo sapien
aacaaagcaggtgtagcaatcctag

SEQ ID NO: 2140014 - DNA, 25 bp, Homo sapien
acaaagcaggtgtagcaatcctagt

SEQ ID NO: 2140015 - DNA, 25 bp, Homo sapien
tcacttgtatgcctctttgaataga

SEQ ID NO: 2140016 - DNA, 25 bp, Homo sapien
tgaccattgtcacttgtatgcctct

SEQ ID NO: 2140017 - DNA, 25 bp, Homo sapien
cctctttgaatagattgcagaattt

SEQ ID NO: 2140018 - DNA, 25 bp, Homo sapien
gaatagattgcagaatttttgtgcc

SEQ ID NO: 2140019 - DNA, 25 bp, Homo sapien
tagtgattcacccaagggccatgtt

SEQ ID NO: 2140020 - DNA, 25 bp, Homo sapien
tcttgcattccgtagccttcgagca

SEQ ID NO: 2140021 - DNA, 25 bp, Homo sapien
aatagcccacagttgccgccgtaat

SEQ ID NO: 2140022 - DNA, 25 bp, Homo sapien
cgtagccttcgagcagaataaaaga

SEQ ID NO: 2140023 - DNA, 25 bp, Homo sapien
ctgaccagcaaataagtctaacaga

SEQ ID NO: 2140024 - DNA, 25 bp, Homo sapien
caaataagtctaacagaaacagtga

SEQ ID NO: 2140025 - DNA, 25 bp, Homo sapien
cagaaacagtgaataggaaggccta

SEQ ID NO: 2140026 - DNA, 25 bp, Homo sapien
aacagtgaataggaaggcctagacc

SEQ ID NO: 2140027 - DNA, 25 bp, Homo sapien
tgtttcagtgtgcgtagttgaagcc

SEQ ID NO: 2140028 - DNA, 25 bp, Homo sapien
gcgtagttgaagccttccaatagct

SEQ ID NO: 2140029 - DNA, 25 bp, Homo sapien
ccttgtttcagtgtgcgtagttgaa

SEQ ID NO: 2140030 - DNA, 25 bp, Homo sapien
cgtagttgaagccttccaatagctt

SEQ ID NO: 2140031 - DNA, 25 bp, Homo sapien
ttgcacgttaagatgcgtaccaaat

SEQ ID NO: 2140032 - DNA, 25 bp, Homo sapien
gcacgttaagatgcgtaccaaatca

SEQ ID NO: 2140033 - DNA, 25 bp, Homo sapien
acaactatctccatcagggccaatt

SEQ ID NO: 2140034 - DNA, 25 bp, Homo sapien
ttaagatgcgtaccaaatcatttgg

SEQ ID NO: 2140035 - DNA, 25 bp, Homo sapien
tgagtatgtcacatttgcacatggg

SEQ ID NO: 2140036 - DNA, 25 bp, Homo sapien
gggcaagtcctgtgttctaacagcc

SEQ ID NO: 2140037 - DNA, 25 bp, Homo sapien
gctttgagtatgtcacatttgcaca

SEQ ID NO: 2140038 - DNA, 25 bp, Homo sapien
ttctaacagccatgggtcaacacat

SEQ ID NO: 2140039 - DNA, 25 bp, Homo sapien
catctgttccctgtactgaagcata

SEQ ID NO: 2140040 - DNA, 25 bp, Homo sapien
tggatacagggacttgtaaagacac

SEQ ID NO: 2140041 - DNA, 25 bp, Homo sapien
gaagcatatccagatgatgcggtct

SEQ ID NO: 2140042 - DNA, 25 bp, Homo sapien
tgttgactgcacgtgttcctccaga

SEQ ID NO: 2140043 - DNA, 25 bp, Homo sapien
gtcaacatgaggaataacatccact

SEQ ID NO: 2140044 - DNA, 25 bp, Homo sapien
cttgattaggagtttcgtcttcttc

SEQ ID NO: 2140045 - DNA, 25 bp, Homo sapien
tgaggaataacatccactgccacag

SEQ ID NO: 2140046 - DNA, 25 bp, Homo sapien
agcagtctcttgattaggagtttcg

SEQ ID NO: 2140047 - DNA, 25 bp, Homo sapien
taatagaaactaggccctgattggc

SEQ ID NO: 2140048 - DNA, 25 bp, Homo sapien
tatcactactgagaggaaacttgcc

SEQ ID NO: 2140049 - DNA, 25 bp, Homo sapien
tattaaggcacctggaattctcccc

SEQ ID NO: 2140050 - DNA, 25 bp, Homo sapien
tcaagaagtactcgcctaagtttgc

SEQ ID NO: 2140051 - DNA, 25 bp, Homo sapien
tgtgccccccgggagcagtgaccta

SEQ ID NO: 2140052 - DNA, 25 bp, Homo sapien
ccaccaaatcttcctcaggcgacag

SEQ ID NO: 2140053 - DNA, 25 bp, Homo sapien
acctcactctcaacccgtctcttcc

SEQ ID NO: 2140054 - DNA, 25 bp, Homo sapien
agcagtgacctagatgccctcctca

SEQ ID NO: 2140055 - DNA, 25 bp, Homo sapien
tgcagcacgaagtagtcgttggacc

SEQ ID NO: 2140056 - DNA, 25 bp, Homo sapien
agccacagcttcagcgcatttttca

SEQ ID NO: 2140057 - DNA, 25 bp, Homo sapien
agtagtcgttggacctttccatcag

SEQ ID NO: 2140058 - DNA, 25 bp, Homo sapien
cgacgccgctgcagcacgaagtagt

SEQ ID NO: 2140059 - DNA, 25 bp, Homo sapien
tatattctagtaccacaagtctctg

SEQ ID NO: 2140060 - DNA, 25 bp, Homo sapien
tgtatactcaacacccaggacaagg

SEQ ID NO: 2140061 - DNA, 25 bp, Homo sapien
tctatcatgataccttactttattt

SEQ ID NO: 2140062 - DNA, 25 bp, Homo sapien
tgtccacagctcatcctaagaggcc

SEQ ID NO: 2140063 - DNA, 25 bp, Homo sapien
tgattggttgagtgttggttttgct

SEQ ID NO: 2140064 - DNA, 25 bp, Homo sapien
ctctgattggttgagtgttggtttt

SEQ ID NO: 2140065 - DNA, 25 bp, Homo sapien
agctctgattggttgagtgttggtt

SEQ ID NO: 2140066 - DNA, 25 bp, Homo sapien
tccttttctggaagctctgattggt

SEQ ID NO: 2140067 - DNA, 25 bp, Homo sapien
gtgtaggatgcgaaatggagctact

SEQ ID NO: 2140068 - DNA, 25 bp, Homo sapien
ggagctactttagcagtagagtcca

SEQ ID NO: 2140069 - DNA, 25 bp, Homo sapien
gactgaatcaagagtcccaaccaga

SEQ ID NO: 2140070 - DNA, 25 bp, Homo sapien
tgcaattgacaagtaaacttgagaa

SEQ ID NO: 2140071 - DNA, 25 bp, Homo sapien
cagataaggtcttcataatattttg

SEQ ID NO: 2140072 - DNA, 25 bp, Homo sapien
taatattttgttccaaccaatccca

SEQ ID NO: 2140073 - DNA, 25 bp, Homo sapien
ccaatcccaatgcttggttatttct

SEQ ID NO: 2140074 - DNA, 25 bp, Homo sapien
tttgaatcaaatacagataaggtct

SEQ ID NO: 2140075 - DNA, 25 bp, Homo sapien
tcaaaagggcttctcgaaatttctc

SEQ ID NO: 2140076 - DNA, 25 bp, Homo sapien
aagggcttctcgaaatttctcagga

SEQ ID NO: 2140077 - DNA, 25 bp, Homo sapien
ggcttctcgaaatttctcaggatca

SEQ ID NO: 2140078 - DNA, 25 bp, Homo sapien
tctcgaaatttctcaggatcatctt

SEQ ID NO: 2140079 - DNA, 25 bp, Homo sapien
aataactgcatgaataataggtcac

SEQ ID NO: 2140080 - DNA, 25 bp, Homo sapien
gaaagttggtgctaagataaagcca

SEQ ID NO: 2140081 - DNA, 25 bp, Homo sapien
ggtgctaagataaagccaaccctga

SEQ ID NO: 2140082 - DNA, 25 bp, Homo sapien
ctttccaataactgcatgaataata

SEQ ID NO: 2140083 - DNA, 25 bp, Homo sapien
tctgtagaggattataaaggactgg

SEQ ID NO: 2140084 - DNA, 25 bp, Homo sapien
tgccagctgttccataagaaggtat

SEQ ID NO: 2140085 - DNA, 25 bp, Homo sapien
tccttgggaacacacgtgaatactc

SEQ ID NO: 2140086 - DNA, 25 bp, Homo sapien
gagacttcatcccaggagataatga

SEQ ID NO: 2140087 - DNA, 25 bp, Homo sapien
ggcattaaattgctcactgtgggct

SEQ ID NO: 2140088 - DNA, 25 bp, Homo sapien
aggcattaaattgctcactgtgggc

SEQ ID NO: 2140089 - DNA, 25 bp, Homo sapien
gcattaaattgctcactgtgggctc

SEQ ID NO: 2140090 - DNA, 25 bp, Homo sapien
tacactacactgattgccatcttgg

SEQ ID NO: 2140091 - DNA, 25 bp, Homo sapien
attttcccatgagtattgaagtggc

SEQ ID NO: 2140092 - DNA, 25 bp, Homo sapien
gcacattttcccatgagtattgaag

SEQ ID NO: 2140093 - DNA, 25 bp, Homo sapien
gaagtggctgaatggtacccataag

SEQ ID NO: 2140094 - DNA, 25 bp, Homo sapien
gaagctgctccgcatctgagcctga

SEQ ID NO: 2140095 - DNA, 25 bp, Homo sapien
catgatattgagttgaagctgctcc

SEQ ID NO: 2140096 - DNA, 25 bp, Homo sapien
catggaagcgaaaagctgtttttcc

SEQ ID NO: 2140097 - DNA, 25 bp, Homo sapien
tttcctttgatgctaatgatgacag

SEQ ID NO: 2140098 - DNA, 25 bp, Homo sapien
tgggctacactaaacacacaccttt

SEQ ID NO: 2140099 - DNA, 25 bp, Homo sapien
ctgcttaaggatgtgagttagacaa

SEQ ID NO: 2140100 - DNA, 25 bp, Homo sapien
gagtcctttttcgaggcctcactga

SEQ ID NO: 2140101 - DNA, 25 bp, Homo sapien
gaattcctcttgaagaatgggctac

SEQ ID NO: 2140102 - DNA, 25 bp, Homo sapien
gggccagagttgacctgtaaaacca

SEQ ID NO: 2140103 - DNA, 25 bp, Homo sapien
tatattatggtcataggaagcacct

SEQ ID NO: 2140104 - DNA, 25 bp, Homo sapien
aataggatcctgttcatagtccaca

SEQ ID NO: 2140105 - DNA, 25 bp, Homo sapien
cattatcatgtaggaaacccattac

SEQ ID NO: 2140106 - DNA, 25 bp, Homo sapien
tatttgggtgttcacacttacgaca

SEQ ID NO: 2140107 - DNA, 25 bp, Homo sapien
aatcacatctagaaagcaacataga

SEQ ID NO: 2140108 - DNA, 25 bp, Homo sapien
gacttttagtgcctgagcaaaatcc

SEQ ID NO: 2140109 - DNA, 25 bp, Homo sapien
caacatagattgttaactctatagc

SEQ ID NO: 2140110 - DNA, 25 bp, Homo sapien
aagaaagaatgtagttgtcccagat

SEQ ID NO: 2140111 - DNA, 25 bp, Homo sapien
gaatgtagttgtcccagatgcatgc

SEQ ID NO: 2140112 - DNA, 25 bp, Homo sapien
gttgtcccagatgcatgcttacgtt

SEQ ID NO: 2140113 - DNA, 25 bp, Homo sapien
tgtagttgtcccagatgcatgctta

SEQ ID NO: 2140114 - DNA, 25 bp, Homo sapien
ggtgaaatactgtcattaaggcttc

SEQ ID NO: 2140115 - DNA, 25 bp, Homo sapien
gattgcacctcaaaattatcagatg

SEQ ID NO: 2140116 - DNA, 25 bp, Homo sapien
gttcacagttttactgcattccctc

SEQ ID NO: 2140117 - DNA, 25 bp, Homo sapien
cctctgacttgtcaaagattgcacc

SEQ ID NO: 2140118 - DNA, 25 bp, Homo sapien
tggaatccctcttacaacaagatct

SEQ ID NO: 2140119 - DNA, 25 bp, Homo sapien
aacatactaacaccacgtccacatt

SEQ ID NO: 2140120 - DNA, 25 bp, Homo sapien
atactaacaccacgtccacattctg

SEQ ID NO: 2140121 - DNA, 25 bp, Homo sapien
tctcgagtctttttggttcgaaaca

SEQ ID NO: 2140122 - DNA, 25 bp, Homo sapien
tcttcagtagccaagttgcaggtcc

SEQ ID NO: 2140123 - DNA, 25 bp, Homo sapien
taaggactgctcaaccacttcagta

SEQ ID NO: 2140124 - DNA, 25 bp, Homo sapien
caggcagagagcgacgtaaatcacg

SEQ ID NO: 2140125 - DNA, 25 bp, Homo sapien
tatgcataagctgtgagtacccttc

SEQ ID NO: 2140126 - DNA, 25 bp, Homo sapien
tgaatctcagtaaaaccagtaagct

SEQ ID NO: 2140127 - DNA, 25 bp, Homo sapien
catgcaagaagccatactaggaggg

SEQ ID NO: 2140128 - DNA, 25 bp, Homo sapien
caatagcttacagcaattcaggtag

SEQ ID NO: 2140129 - DNA, 25 bp, Homo sapien
tcggaatcaactttagaactctgga

SEQ ID NO: 2140130 - DNA, 25 bp, Homo sapien
ataattcgacgattaaaataatcag

SEQ ID NO: 2140131 - DNA, 25 bp, Homo sapien
tcaggcaacattcgttcacatacag

SEQ ID NO: 2140132 - DNA, 25 bp, Homo sapien
aaaataatcaggcaacattcgttca

SEQ ID NO: 2140133 - DNA, 25 bp, Homo sapien
aacattcgttcacatacagcaacca

SEQ ID NO: 2140134 - DNA, 25 bp, Homo sapien
actagtggcataaaatcatctgaac

SEQ ID NO: 2140135 - DNA, 25 bp, Homo sapien
gtccttggattcttactagtggcat

SEQ ID NO: 2140136 - DNA, 25 bp, Homo sapien
tctccccaataacacattgtccttg

SEQ ID NO: 2140137 - DNA, 25 bp, Homo sapien
ttctccccaataacacattgtcctt

SEQ ID NO: 2140138 - DNA, 25 bp, Homo sapien
tgagttctcagctatcaatcaagag

SEQ ID NO: 2140139 - DNA, 25 bp, Homo sapien
tttcagactccagcaatacacagag

SEQ ID NO: 2140140 - DNA, 25 bp, Homo sapien
gaagccagggccttctaattggtta

SEQ ID NO: 2140141 - DNA, 25 bp, Homo sapien
tgccaggtgctaccccagattttcc

SEQ ID NO: 2140142 - DNA, 25 bp, Homo sapien
tgagtctttattatatgcagagacc

SEQ ID NO: 2140143 - DNA, 25 bp, Homo sapien
tattataagagctataccaattaat

SEQ ID NO: 2140144 - DNA, 25 bp, Homo sapien
gtattataagagctataccaattaa

SEQ ID NO: 2140145 - DNA, 25 bp, Homo sapien
tgaagagttatttattgagtcttta

SEQ ID NO: 2140146 - DNA, 25 bp, Homo sapien
ttcaaagactgcctgatccaccaag

SEQ ID NO: 2140147 - DNA, 25 bp, Homo sapien
aaagaatgtcatatcagtcatgtgt

SEQ ID NO: 2140148 - DNA, 25 bp, Homo sapien
aaagactgcctgatccaccaaggca

SEQ ID NO: 2140149 - DNA, 25 bp, Homo sapien
ggaaggtgatccctgataagttctt

SEQ ID NO: 2140150 - DNA, 25 bp, Homo sapien
agcatcatctttacaagtcagcagt

SEQ ID NO: 2140151 - DNA, 25 bp, Homo sapien
gcactttcaataggtagcacactaa

SEQ ID NO: 2140152 - DNA, 25 bp, Homo sapien
ttgccaatcccagttgcaaaatggc

SEQ ID NO: 2140153 - DNA, 25 bp, Homo sapien
gcaaaatggcctttattccatcata

SEQ ID NO: 2140154 - DNA, 25 bp, Homo sapien
gtaatatccactctagtatgactgg

SEQ ID NO: 2140155 - DNA, 25 bp, Homo sapien
tgctgaacatttgaaggcaatggac

SEQ ID NO: 2140156 - DNA, 25 bp, Homo sapien
tatgactggttttttcatcactcac

SEQ ID NO: 2140157 - DNA, 25 bp, Homo sapien
caatggactatccttattagtgaca

SEQ ID NO: 2140158 - DNA, 25 bp, Homo sapien
tcctctagggtctgtatcacataca

SEQ ID NO: 2140159 - DNA, 25 bp, Homo sapien
tatatcttcatagcgaatattacca

SEQ ID NO: 2140160 - DNA, 25 bp, Homo sapien
tcacatacaacctatttcgacagcg

SEQ ID NO: 2140161 - DNA, 25 bp, Homo sapien
tcgacagcgcatactatgtatatct

SEQ ID NO: 2140162 - DNA, 25 bp, Homo sapien
tcatccaattcttgaaggctcaatt

SEQ ID NO: 2140163 - DNA, 25 bp, Homo sapien
tccaattcttgaaggctcaatttca

SEQ ID NO: 2140164 - DNA, 25 bp, Homo sapien
catccaattcttgaaggctcaattt

SEQ ID NO: 2140165 - DNA, 25 bp, Homo sapien
ctgggcaacccaaacaccaataaca

SEQ ID NO: 2140166 - DNA, 25 bp, Homo sapien
ggcaacccaaacaccaataacaaga

SEQ ID NO: 2140167 - DNA, 25 bp, Homo sapien
tgggcaacccaaacaccaataacaa

SEQ ID NO: 2140168 - DNA, 25 bp, Homo sapien
ggcagactggggtcatgatgcttca

SEQ ID NO: 2140169 - DNA, 25 bp, Homo sapien
cagactggggtcatgatgcttcaat

SEQ ID NO: 2140170 - DNA, 25 bp, Homo sapien
tccaaatatggcagactggggtcat

SEQ ID NO: 2140171 - DNA, 25 bp, Homo sapien
caaatatggcagactggggtcatga

SEQ ID NO: 2140172 - DNA, 25 bp, Homo sapien
tttgaagtttataaggcaatcagag

SEQ ID NO: 2140173 - DNA, 25 bp, Homo sapien
caacaagtgatacaacgctctgaac

SEQ ID NO: 2140174 - DNA, 25 bp, Homo sapien
agtctttatttgcagaatgagccca

SEQ ID NO: 2140175 - DNA, 25 bp, Homo sapien
aaggcaatcagagttttcatctaac

SEQ ID NO: 2140176 - DNA, 25 bp, Homo sapien
agcagcttaagcttctcagtaaaac

SEQ ID NO: 2140177 - DNA, 25 bp, Homo sapien
cagcttaagcttctcagtaaaactt

SEQ ID NO: 2140178 - DNA, 25 bp, Homo sapien
gaatatgtagcttaaaaagcagctt

SEQ ID NO: 2140179 - DNA, 25 bp, Homo sapien
aaaagcagcttaagcttctcagtaa

SEQ ID NO: 2140180 - DNA, 25 bp, Homo sapien
catgcagctgactgaaataaagtaa

SEQ ID NO: 2140181 - DNA, 25 bp, Homo sapien
gtaattcttccttggaaagttcatc

SEQ ID NO: 2140182 - DNA, 25 bp, Homo sapien
tgaagcatccttagatttcacttca

SEQ ID NO: 2140183 - DNA, 25 bp, Homo sapien
agttcatctccttttgaagcatcct

SEQ ID NO: 2140184 - DNA, 25 bp, Homo sapien
tgtaattgcattctgtaagatgttt

SEQ ID NO: 2140185 - DNA, 25 bp, Homo sapien
gggctgtgttttgctgattctgctt

SEQ ID NO: 2140186 - DNA, 25 bp, Homo sapien
agggctgtgttttgctgattctgct

SEQ ID NO: 2140187 - DNA, 25 bp, Homo sapien
gctcatcttgccattgacttagata

SEQ ID NO: 2140188 - DNA, 25 bp, Homo sapien
ccattgacttagatatgcttgaata

SEQ ID NO: 2140189 - DNA, 25 bp, Homo sapien
tgacttagatatgcttgaatatcaa

SEQ ID NO: 2140190 - DNA, 25 bp, Homo sapien
cttgccattgacttagatatgcttg

SEQ ID NO: 2140191 - DNA, 25 bp, Homo sapien
taatgattcttcttcagggtcctca

SEQ ID NO: 2140192 - DNA, 25 bp, Homo sapien
cacagacagtaccagagaatccttt

SEQ ID NO: 2140193 - DNA, 25 bp, Homo sapien
aatcctttggctgatgatgtagggc

SEQ ID NO: 2140194 - DNA, 25 bp, Homo sapien
cttccatcctgagtaaaaggctggt

SEQ ID NO: 2140195 - DNA, 25 bp, Homo sapien
ctaaaggaacaaggatctttctcca

SEQ ID NO: 2140196 - DNA, 25 bp, Homo sapien
acagcgatgcaagaatctgttcaaa

SEQ ID NO: 2140197 - DNA, 25 bp, Homo sapien
gttcattcaacagcgatgcaagaat

SEQ ID NO: 2140198 - DNA, 25 bp, Homo sapien
tcaacagcgatgcaagaatctgttc

SEQ ID NO: 2140199 - DNA, 25 bp, Homo sapien
cattcaacagcgatgcaagaatctg

SEQ ID NO: 2140200 - DNA, 25 bp, Homo sapien
atcttggttctagaccttaactgag

SEQ ID NO: 2140201 - DNA, 25 bp, Homo sapien
catcttggttctagaccttaactga

SEQ ID NO: 2140202 - DNA, 25 bp, Homo sapien
tcttggttctagaccttaactgaga

SEQ ID NO: 2140203 - DNA, 25 bp, Homo sapien
gttctagaccttaactgagaaattc

SEQ ID NO: 2140204 - DNA, 25 bp, Homo sapien
tatcgattgacatgacatatcagcc

SEQ ID NO: 2140205 - DNA, 25 bp, Homo sapien
agtgatatgcttgtgccctctggtg

SEQ ID NO: 2140206 - DNA, 25 bp, Homo sapien
tattttggccttcagacacattggt

SEQ ID NO: 2140207 - DNA, 25 bp, Homo sapien
ccctcaggtaggaagactgtagaag

SEQ ID NO: 2140208 - DNA, 25 bp, Homo sapien
tcagcaaagtgtgtacaatagtgcc

SEQ ID NO: 2140209 - DNA, 25 bp, Homo sapien
gggagacctcttgagtcactctgaa

SEQ ID NO: 2140210 - DNA, 25 bp, Homo sapien
tattctatgagcgatgaagccccat

SEQ ID NO: 2140211 - DNA, 25 bp, Homo sapien
tcccaaaggctgactgtaccaactc

SEQ ID NO: 2140212 - DNA, 25 bp, Homo sapien
catgtttagtagatatatttatttt

SEQ ID NO: 2140213 - DNA, 25 bp, Homo sapien
tcatgtttagtagatatatttattt

SEQ ID NO: 2140214 - DNA, 25 bp, Homo sapien
gatatatttatttttataaagacaa

SEQ ID NO: 2140215 - DNA, 25 bp, Homo sapien
gtgggcacagggctaccaggggtga

SEQ ID NO: 2140216 - DNA, 25 bp, Homo sapien
cacagggctaccaggggtgagaggg

SEQ ID NO: 2140217 - DNA, 25 bp, Homo sapien
tgctgtgctgcctcagagtggaatg

SEQ ID NO: 2140218 - DNA, 25 bp, Homo sapien
gggatgagggaattctgttcctgcc

SEQ ID NO: 2140219 - DNA, 25 bp, Homo sapien
tctcttgagactcatctctcaactc

SEQ ID NO: 2140220 - DNA, 25 bp, Homo sapien
gctatatcttcacaaatcaagtact

SEQ ID NO: 2140221 - DNA, 25 bp, Homo sapien
agaacctgtggcttctctactcaga

SEQ ID NO: 2140222 - DNA, 25 bp, Homo sapien
cacacacacagtgctatatcttcac

SEQ ID NO: 2140223 - DNA, 25 bp, Homo sapien
ggttgtagggctggagacccagcat

SEQ ID NO: 2140224 - DNA, 25 bp, Homo sapien
ttttcttcatggggttgtagggctg

SEQ ID NO: 2140225 - DNA, 25 bp, Homo sapien
ctgaggtcagttgacaagtttttct

SEQ ID NO: 2140226 - DNA, 25 bp, Homo sapien
tgaggtcagttgacaagtttttctt

SEQ ID NO: 2140227 - DNA, 25 bp, Homo sapien
cagtgtgtagagaatcggcttgctc

SEQ ID NO: 2140228 - DNA, 25 bp, Homo sapien
gacttctggcttcaccccaaggaat

SEQ ID NO: 2140229 - DNA, 25 bp, Homo sapien
caggtggccatgtagtcccgtctct

SEQ ID NO: 2140230 - DNA, 25 bp, Homo sapien
agctctagaaggaaggcttgctgaa

SEQ ID NO: 2140231 - DNA, 25 bp, Homo sapien
ctgtgagctcaggcctcttgcatct

SEQ ID NO: 2140232 - DNA, 25 bp, Homo sapien
gagctcaggcctcttgcatctcatt

SEQ ID NO: 2140233 - DNA, 25 bp, Homo sapien
gtgagctcaggcctcttgcatctca

SEQ ID NO: 2140234 - DNA, 25 bp, Homo sapien
tgagctcaggcctcttgcatctcat

SEQ ID NO: 2140235 - DNA, 25 bp, Homo sapien
gcctaaatcccgctccttcgactat

SEQ ID NO: 2140236 - DNA, 25 bp, Homo sapien
aggctcttctggcctaaatcccgct

SEQ ID NO: 2140237 - DNA, 25 bp, Homo sapien
tctgcacatatgacacctgttaggg

SEQ ID NO: 2140238 - DNA, 25 bp, Homo sapien
ctttcttggccctactggcccctct

SEQ ID NO: 2140239 - DNA, 25 bp, Homo sapien
tgcagaaggttctgttacaaaactt

SEQ ID NO: 2140240 - DNA, 25 bp, Homo sapien
gcgtggggccactttgtaacaatgc

SEQ ID NO: 2140241 - DNA, 25 bp, Homo sapien
gggccactttgtaacaatgcagaag

SEQ ID NO: 2140242 - DNA, 25 bp, Homo sapien
ctttgtaacaatgcagaaggttctg

SEQ ID NO: 2140243 - DNA, 25 bp, Homo sapien
caggtcctcataggccaggtggctg

SEQ ID NO: 2140244 - DNA, 25 bp, Homo sapien
ggacttggggacagctgttgccaaa

SEQ ID NO: 2140245 - DNA, 25 bp, Homo sapien
gggacagctgttgccaaagctgaag

SEQ ID NO: 2140246 - DNA, 25 bp, Homo sapien
cagccaggtcctcataggccaggtg

SEQ ID NO: 2140247 - DNA, 25 bp, Homo sapien
tgctctccttcactggaccacttac

SEQ ID NO: 2140248 - DNA, 25 bp, Homo sapien
ttcactggaccacttactgctgagg

SEQ ID NO: 2140249 - DNA, 25 bp, Homo sapien
tccttcactggaccacttactgctg

SEQ ID NO: 2140250 - DNA, 25 bp, Homo sapien
actggaccacttactgctgaggctg

SEQ ID NO: 2140251 - DNA, 25 bp, Homo sapien
gtgacaacaggtgttgtgcttcttc

SEQ ID NO: 2140252 - DNA, 25 bp, Homo sapien
tccttgagtgtgacaacaggtgttg

SEQ ID NO: 2140253 - DNA, 25 bp, Homo sapien
tgagtgtgacaacaggtgttgtgct

SEQ ID NO: 2140254 - DNA, 25 bp, Homo sapien
agtgtgacaacaggtgttgtgcttc

SEQ ID NO: 2140255 - DNA, 25 bp, Homo sapien
tcctcagagctttgtttttctaggc

SEQ ID NO: 2140256 - DNA, 25 bp, Homo sapien
ttcctcagagctttgtttttctagg

SEQ ID NO: 2140257 - DNA, 25 bp, Homo sapien
aatggggcactgatcccctggcagt

SEQ ID NO: 2140258 - DNA, 25 bp, Homo sapien
cttggcaggctgggacacgctaaaa

SEQ ID NO: 2140259 - DNA, 25 bp, Homo sapien
ttgcaggtacaaatggggcactgat

SEQ ID NO: 2140260 - DNA, 25 bp, Homo sapien
tacaaatggggcactgatcccctgg

SEQ ID NO: 2140261 - DNA, 25 bp, Homo sapien
taatcgttaaccacagctttgcaaa

SEQ ID NO: 2140262 - DNA, 25 bp, Homo sapien
gatttctaatcgttaaccacagctt

SEQ ID NO: 2140263 - DNA, 25 bp, Homo sapien
ttctaatcgttaaccacagctttgc

SEQ ID NO: 2140264 - DNA, 25 bp, Homo sapien
aaggatttctaatcgttaaccacag

SEQ ID NO: 2140265 - DNA, 25 bp, Homo sapien
tgagggaggggagcgaagtacaagg

SEQ ID NO: 2140266 - DNA, 25 bp, Homo sapien
gaggggagcgaagtacaaggggcca

SEQ ID NO: 2140267 - DNA, 25 bp, Homo sapien
ctgagggaggggagcgaagtacaag

SEQ ID NO: 2140268 - DNA, 25 bp, Homo sapien
agggcagttctttgcagagccttgg

SEQ ID NO: 2140269 - DNA, 25 bp, Homo sapien
tttgcagagccttggagggggagat

SEQ ID NO: 2140270 - DNA, 25 bp, Homo sapien
gggcagttctttgcagagccttgga

SEQ ID NO: 2140271 - DNA, 25 bp, Homo sapien
gcagagccttggagggggagatgcc

SEQ ID NO: 2140272 - DNA, 25 bp, Homo sapien
cttcagccttcctgggatggcagct

SEQ ID NO: 2140273 - DNA, 25 bp, Homo sapien
ctgaagagtcaagcttgagtttccc

SEQ ID NO: 2140274 - DNA, 25 bp, Homo sapien
gctgaagagtcaagcttgagtttcc

SEQ ID NO: 2140275 - DNA, 25 bp, Homo sapien
cttggatgatgagggagcactctgg

SEQ ID NO: 2140276 - DNA, 25 bp, Homo sapien
tcttggatgatgagggagcactctg

SEQ ID NO: 2140277 - DNA, 25 bp, Homo sapien
tgatgagggagcactctggaacaag

SEQ ID NO: 2140278 - DNA, 25 bp, Homo sapien
ctcttggatgatgagggagcactct

SEQ ID NO: 2140279 - DNA, 25 bp, Homo sapien
tgacttctctcctccttacaagtgt

SEQ ID NO: 2140280 - DNA, 25 bp, Homo sapien
agcagcctcaagaaggcatctagaa

SEQ ID NO: 2140281 - DNA, 25 bp, Homo sapien
aagtgtctgtgggtggccacaagca

SEQ ID NO: 2140282 - DNA, 25 bp, Homo sapien
ccacaagcagcctcaagaaggcatc

SEQ ID NO: 2140283 - DNA, 25 bp, Homo sapien
tgtagcccacaagttggaggccaag

SEQ ID NO: 2140284 - DNA, 25 bp, Homo sapien
taggatgtagcccacaagttggagg

SEQ ID NO: 2140285 - DNA, 25 bp, Homo sapien
agcccacaagttggaggccaagaga

SEQ ID NO: 2140286 - DNA, 25 bp, Homo sapien
gatgtagcccacaagttggaggcca

SEQ ID NO: 2140287 - DNA, 25 bp, Homo sapien
tgctggcaccgacataagaacttgt

SEQ ID NO: 2140288 - DNA, 25 bp, Homo sapien
gcaccagtggtgagtagaagtcccg

SEQ ID NO: 2140289 - DNA, 25 bp, Homo sapien
taatgcccaagtaaagagcctctcc

SEQ ID NO: 2140290 - DNA, 25 bp, Homo sapien
cactctgtctttggctcgggattcc

SEQ ID NO: 2140291 - DNA, 25 bp, Homo sapien
cctgtcaggctgtaggaattgaact

SEQ ID NO: 2140292 - DNA, 25 bp, Homo sapien
tgtcaggctgtaggaattgaactca

SEQ ID NO: 2140293 - DNA, 25 bp, Homo sapien
ctgtcaggctgtaggaattgaactc

SEQ ID NO: 2140294 - DNA, 25 bp, Homo sapien
gtcaggctgtaggaattgaactcac

SEQ ID NO: 2140295 - DNA, 25 bp, Homo sapien
gtccactgtttttcacagacccagc

SEQ ID NO: 2140296 - DNA, 25 bp, Homo sapien
gatccagtggtagtgtccctcacct

SEQ ID NO: 2140297 - DNA, 25 bp, Homo sapien
agcagcaccttctgacacgatccag

SEQ ID NO: 2140298 - DNA, 25 bp, Homo sapien
ccttctgacacgatccagtggtagt

SEQ ID NO: 2140299 - DNA, 25 bp, Homo sapien
ctgtagtgctctgtgggtggaccct

SEQ ID NO: 2140300 - DNA, 25 bp, Homo sapien
tatcactcagatcatggacacagca

SEQ ID NO: 2140301 - DNA, 25 bp, Homo sapien
tgatcccagcccacaaatatgagag

SEQ ID NO: 2140302 - DNA, 25 bp, Homo sapien
gaagtaggttagagcaatgcccaca

SEQ ID NO: 2140303 - DNA, 25 bp, Homo sapien
gcctggcactgttacagatagtctg

SEQ ID NO: 2140304 - DNA, 25 bp, Homo sapien
tacagagaggtctaggatatggccc

SEQ ID NO: 2140305 - DNA, 25 bp, Homo sapien
caccgaagggtttacaatatacttg

SEQ ID NO: 2140306 - DNA, 25 bp, Homo sapien
tgaaaggcatgttacagacaacaga

SEQ ID NO: 2140307 - DNA, 25 bp, Homo sapien
gctgaatcaggtagggccccattat

SEQ ID NO: 2140308 - DNA, 25 bp, Homo sapien
cattattgtcagtattgccacagtg

SEQ ID NO: 2140309 - DNA, 25 bp, Homo sapien
caggtagggccccattattgtcagt

SEQ ID NO: 2140310 - DNA, 25 bp, Homo sapien
tagggccccattattgtcagtattg

SEQ ID NO: 2140311 - DNA, 25 bp, Homo sapien
tgcagccttcgaagatgtaacaatc

SEQ ID NO: 2140312 - DNA, 25 bp, Homo sapien
ggctttcaagagtctagggtcagaa

SEQ ID NO: 2140313 - DNA, 25 bp, Homo sapien
cagatattgggtccggtataccagg

SEQ ID NO: 2140314 - DNA, 25 bp, Homo sapien
ttcaaggaaggcaccacaccagaaa

SEQ ID NO: 2140315 - DNA, 25 bp, Homo sapien
tgttgaattgtataccttaagtgaa

SEQ ID NO: 2140316 - DNA, 25 bp, Homo sapien
ttttcacaacttagattgtggtgat

SEQ ID NO: 2140317 - DNA, 25 bp, Homo sapien
actctgtgagaatactaaaattgtt

SEQ ID NO: 2140318 - DNA, 25 bp, Homo sapien
gctgatgtgtaggaggtttcttgcg

SEQ ID NO: 2140319 - DNA, 25 bp, Homo sapien
ccttactatgggtcagaacatttcc

SEQ ID NO: 2140320 - DNA, 25 bp, Homo sapien
ttactatgggtcagaacatttcctt

SEQ ID NO: 2140321 - DNA, 25 bp, Homo sapien
cttactatgggtcagaacatttcct

SEQ ID NO: 2140322 - DNA, 25 bp, Homo sapien
tgggtccgtggtccacgagcgccct

SEQ ID NO: 2140323 - DNA, 25 bp, Homo sapien
acgagtgcatttggctccctgctac

SEQ ID NO: 2140324 - DNA, 25 bp, Homo sapien
gctccctgctactgcggagggctgg

SEQ ID NO: 2140325 - DNA, 25 bp, Homo sapien
tactgcggagggctgggtccgtggt

SEQ ID NO: 2140326 - DNA, 25 bp, Homo sapien
ggagcgcgctccgcctccgccagct

SEQ ID NO: 2140327 - DNA, 25 bp, Homo sapien
gagcgcgctccgcctccgccagctg

SEQ ID NO: 2140328 - DNA, 25 bp, Homo sapien
tggagcgcgctccgcctccgccagc

SEQ ID NO: 2140329 - DNA, 25 bp, Homo sapien
gtcttcagcccctcgtaaccattgt

SEQ ID NO: 2140330 - DNA, 25 bp, Homo sapien
tatgttaggcactggagtcttcagc

SEQ ID NO: 2140331 - DNA, 25 bp, Homo sapien
taaccattgttaaccagctgacata

SEQ ID NO: 2140332 - DNA, 25 bp, Homo sapien
tgttgacactatcccagtacatacc

SEQ ID NO: 2140333 - DNA, 25 bp, Homo sapien
gataattccactagaaccaactgct

SEQ ID NO: 2140334 - DNA, 25 bp, Homo sapien
ttcctgataattccactagaaccaa

SEQ ID NO: 2140335 - DNA, 25 bp, Homo sapien
taattccactagaaccaactgctcc

SEQ ID NO: 2140336 - DNA, 25 bp, Homo sapien
cctgataattccactagaaccaact

SEQ ID NO: 2140337 - DNA, 25 bp, Homo sapien
catttattttcacatttgagagaaa

SEQ ID NO: 2140338 - DNA, 25 bp, Homo sapien
tttattttcacatttgagagaaagt

SEQ ID NO: 2140339 - DNA, 25 bp, Homo sapien
tgcatttattttcacatttgagaga

SEQ ID NO: 2140340 - DNA, 25 bp, Homo sapien
cttgcatttattttcacatttgaga

SEQ ID NO: 2140341 - DNA, 25 bp, Homo sapien
gaatgggcctctcagtgtcaatgcc

SEQ ID NO: 2140342 - DNA, 25 bp, Homo sapien
cacttgcagaatgggcctctcagtg

SEQ ID NO: 2140343 - DNA, 25 bp, Homo sapien
gcctctcagtgtcaatgcccaaaac

SEQ ID NO: 2140344 - DNA, 25 bp, Homo sapien
cagaatgggcctctcagtgtcaatg

SEQ ID NO: 2140345 - DNA, 25 bp, Homo sapien
tctgtatcagcatgttcaacatttt

SEQ ID NO: 2140346 - DNA, 25 bp, Homo sapien
aatataacacaggtcccaagagtgt

SEQ ID NO: 2140347 - DNA, 25 bp, Homo sapien
ttttattattgccttctgtatcagc

SEQ ID NO: 2140348 - DNA, 25 bp, Homo sapien
ttcttcaaatataacacaggtccca

SEQ ID NO: 2140349 - DNA, 25 bp, Homo sapien
ccttcttctctgtcagaagagttct

SEQ ID NO: 2140350 - DNA, 25 bp, Homo sapien
cattccatcccacctatgttttctt

SEQ ID NO: 2140351 - DNA, 25 bp, Homo sapien
tcttctctgtcagaagagttcttgt

SEQ ID NO: 2140352 - DNA, 25 bp, Homo sapien
tctctgtcagaagagttcttgtcat

SEQ ID NO: 2140353 - DNA, 25 bp, Homo sapien
catgttgggtcgataggagaaatca

SEQ ID NO: 2140354 - DNA, 25 bp, Homo sapien
agctacaaatcatgttgggtcgata

SEQ ID NO: 2140355 - DNA, 25 bp, Homo sapien
gttgggtcgataggagaaatcatta

SEQ ID NO: 2140356 - DNA, 25 bp, Homo sapien
ttcatgtagaaagctacaaatcatg

SEQ ID NO: 2140357 - DNA, 25 bp, Homo sapien
tctcagaaggtatatcaataagagg

SEQ ID NO: 2140358 - DNA, 25 bp, Homo sapien
tatcaataagaggaccagaatcttc

SEQ ID NO: 2140359 - DNA, 25 bp, Homo sapien
gaaggtatatcaataagaggaccag

SEQ ID NO: 2140360 - DNA, 25 bp, Homo sapien
cctcttccaattccaaagatttatc

SEQ ID NO: 2140361 - DNA, 25 bp, Homo sapien
ctctaaaaagttcttgacaagttat

SEQ ID NO: 2140362 - DNA, 25 bp, Homo sapien
tcttgtgttcttgagtataatgttc

SEQ ID NO: 2140363 - DNA, 25 bp, Homo sapien
tgtgttcttgagtataatgttccac

SEQ ID NO: 2140364 - DNA, 25 bp, Homo sapien
gtgttcttgagtataatgttccact

SEQ ID NO: 2140365 - DNA, 25 bp, Homo sapien
cttggtggcattggttgattggtga

SEQ ID NO: 2140366 - DNA, 25 bp, Homo sapien
tcaacgactaccaccgccactttca

SEQ ID NO: 2140367 - DNA, 25 bp, Homo sapien
gactaccaccgccactttcaccacc

SEQ ID NO: 2140368 - DNA, 25 bp, Homo sapien
aacttcaacgactaccaccgccact

SEQ ID NO: 2140369 - DNA, 25 bp, Homo sapien
cttcaacgactaccaccgccacttt

SEQ ID NO: 2140370 - DNA, 25 bp, Homo sapien
taattagttgtattaataaatacca

SEQ ID NO: 2140371 - DNA, 25 bp, Homo sapien
taataaataccactgtagtcagacc

SEQ ID NO: 2140372 - DNA, 25 bp, Homo sapien
ggcactggcttgagctacgtgtcgt

SEQ ID NO: 2140373 - DNA, 25 bp, Homo sapien
ggtcaactgccacccggttcctgtg

SEQ ID NO: 2140374 - DNA, 25 bp, Homo sapien
ggcttgagctacgtgtcgttcccac

SEQ ID NO: 2140375 - DNA, 25 bp, Homo sapien
tcctgtggggcactggcttgagcta

SEQ ID NO: 2140376 - DNA, 25 bp, Homo sapien
tctggcgtctagcagtctcggaggc

SEQ ID NO: 2140377 - DNA, 25 bp, Homo sapien
cggcggcgacttgccagtaaggtaa

SEQ ID NO: 2140378 - DNA, 25 bp, Homo sapien
tcgtttgtcccgttcgtcagcaggc

SEQ ID NO: 2140379 - DNA, 25 bp, Homo sapien
cccgtatagttcagggccggacagc

SEQ ID NO: 2140380 - DNA, 25 bp, Homo sapien
aagcctcagtctcggttagcttcac

SEQ ID NO: 2140381 - DNA, 25 bp, Homo sapien
taagcctcagtctcggttagcttca

SEQ ID NO: 2140382 - DNA, 25 bp, Homo sapien
ttaagcctcagtctcggttagcttc

SEQ ID NO: 2140383 - DNA, 25 bp, Homo sapien
ttttcccgtctctggctaggctccg

SEQ ID NO: 2140384 - DNA, 25 bp, Homo sapien
ccgtctctggctaggctccgaaaat

SEQ ID NO: 2140385 - DNA, 25 bp, Homo sapien
tctggctaggctccgaaaatagact

SEQ ID NO: 2140386 - DNA, 25 bp, Homo sapien
taggctccgaaaatagactgtgcag

SEQ ID NO: 2140387 - DNA, 25 bp, Homo sapien
cagcccttggcgagtagcaggtctt

SEQ ID NO: 2140388 - DNA, 25 bp, Homo sapien
gcgttcaagttgtcgcacaaaggac

SEQ ID NO: 2140389 - DNA, 25 bp, Homo sapien
tagtctctgcacagtacactcgggc

SEQ ID NO: 2140390 - DNA, 25 bp, Homo sapien
actcgggcccaccaagtgaaggtct

SEQ ID NO: 2140391 - DNA, 25 bp, Homo sapien
caggattaagtagcttagagagggc

SEQ ID NO: 2140392 - DNA, 25 bp, Homo sapien
taagtagcttagagagggcttccag

SEQ ID NO: 2140393 - DNA, 25 bp, Homo sapien
gagagggcttccagagctgtaactg

SEQ ID NO: 2140394 - DNA, 25 bp, Homo sapien
gcttccagagctgtaactgaagaaa

SEQ ID NO: 2140395 - DNA, 25 bp, Homo sapien
tctatttggggtggtccaatattcc

SEQ ID NO: 2140396 - DNA, 25 bp, Homo sapien
ccatggctccaatagtagataaacc

SEQ ID NO: 2140397 - DNA, 25 bp, Homo sapien
tatttggggtggtccaatattccca

SEQ ID NO: 2140398 - DNA, 25 bp, Homo sapien
ggacccatggctccaatagtagata

SEQ ID NO: 2140399 - DNA, 25 bp, Homo sapien
cctcattattttcctcgctggtttc

SEQ ID NO: 2140400 - DNA, 25 bp, Homo sapien
gatttctctaacatcccacatatca

SEQ ID NO: 2140401 - DNA, 25 bp, Homo sapien
tctaacatcccacatatcatcatat

SEQ ID NO: 2140402 - DNA, 25 bp, Homo sapien
tctctaacatcccacatatcatcat

SEQ ID NO: 2140403 - DNA, 25 bp, Homo sapien
ctgggatttctctaacatcccacat

SEQ ID NO: 2140404 - DNA, 25 bp, Homo sapien
actagttcactgcaacaacctgttg

SEQ ID NO: 2140405 - DNA, 25 bp, Homo sapien
taaaaatatatcttcagttcccacc

SEQ ID NO: 2140406 - DNA, 25 bp, Homo sapien
tgttgaggagtccttttttgacaac

SEQ ID NO: 2140407 - DNA, 25 bp, Homo sapien
gttcccacctgctgtctgaatataa

SEQ ID NO: 2140408 - DNA, 25 bp, Homo sapien
ttgtttcctggatatcaatttgaat

SEQ ID NO: 2140409 - DNA, 25 bp, Homo sapien
ggattgtttcctggatatcaatttg

SEQ ID NO: 2140410 - DNA, 25 bp, Homo sapien
ttctgaggagtacgaaggtcaagga

SEQ ID NO: 2140411 - DNA, 25 bp, Homo sapien
gagtacgaaggtcaaggattgtttc

SEQ ID NO: 2140412 - DNA, 25 bp, Homo sapien
tatagaatgctttggcactggtaca

SEQ ID NO: 2140413 - DNA, 25 bp, Homo sapien
agagtttcagtctctgggatataga

SEQ ID NO: 2140414 - DNA, 25 bp, Homo sapien
atgctttggcactggtacattccac

SEQ ID NO: 2140415 - DNA, 25 bp, Homo sapien
gagtttcagtctctgggatatagaa

SEQ ID NO: 2140416 - DNA, 25 bp, Homo sapien
aattgttaccaatgccattttacta

SEQ ID NO: 2140417 - DNA, 25 bp, Homo sapien
tgttaccaatgccattttactactt

SEQ ID NO: 2140418 - DNA, 25 bp, Homo sapien
ttaattgttaccaatgccattttac

SEQ ID NO: 2140419 - DNA, 25 bp, Homo sapien
tttaattgttaccaatgccatttta

SEQ ID NO: 2140420 - DNA, 25 bp, Homo sapien
aatacagtacccaaaaaggcaatgc

SEQ ID NO: 2140421 - DNA, 25 bp, Homo sapien
tatattccagaacaacagtgagagc

SEQ ID NO: 2140422 - DNA, 25 bp, Homo sapien
cagtgagagcctaaacagagaacac

SEQ ID NO: 2140423 - DNA, 25 bp, Homo sapien
gactactgaagtaagtggaccaacc

SEQ ID NO: 2140424 - DNA, 25 bp, Homo sapien
tgctcacgcagcttgccacctggag

SEQ ID NO: 2140425 - DNA, 25 bp, Homo sapien
gcacaacgcgccaccgagcgcgcga

SEQ ID NO: 2140426 - DNA, 25 bp, Homo sapien
ggagcagactagttcccctccagct

SEQ ID NO: 2140427 - DNA, 25 bp, Homo sapien
gttggcttgcttgctcacgcagctt

SEQ ID NO: 2140428 - DNA, 25 bp, Homo sapien
gcggcggcaccaactcgaatttctt

SEQ ID NO: 2140429 - DNA, 25 bp, Homo sapien
aatagtgatggtacgagtcgcggtc

SEQ ID NO: 2140430 - DNA, 25 bp, Homo sapien
gatgactggcttccgcgtactcaaa

SEQ ID NO: 2140431 - DNA, 25 bp, Homo sapien
aactccttgggcgagtatcccgagg

SEQ ID NO: 2140432 - DNA, 25 bp, Homo sapien
cggggatccagaaggtctgcacgca

SEQ ID NO: 2140433 - DNA, 25 bp, Homo sapien
gagcttctctctctagagcctcttt

SEQ ID NO: 2140434 - DNA, 25 bp, Homo sapien
gaagagattcatgcggggatccaga

SEQ ID NO: 2140435 - DNA, 25 bp, Homo sapien
gagatgtggaagagattcatgcggg

SEQ ID NO: 2140436 - DNA, 25 bp, Homo sapien
tttggaaaccctagagcagctggcc

SEQ ID NO: 2140437 - DNA, 25 bp, Homo sapien
taagtattccgtggccttgactagg

SEQ ID NO: 2140438 - DNA, 25 bp, Homo sapien
tcggcttccgccagttcatgtaagt

SEQ ID NO: 2140439 - DNA, 25 bp, Homo sapien
gccaagaaccgcgaacgttgatcat

SEQ ID NO: 2140440 - DNA, 25 bp, Homo sapien
agacagaaagttccctcactcagag

SEQ ID NO: 2140441 - DNA, 25 bp, Homo sapien
ggtccacgttgatcaagtctctgag

SEQ ID NO: 2140442 - DNA, 25 bp, Homo sapien
gattgagttcatgagccagggcttg

SEQ ID NO: 2140443 - DNA, 25 bp, Homo sapien
gtagaacccattgcataacagaggc

SEQ ID NO: 2140444 - DNA, 25 bp, Homo sapien
aatactccccctcagtgtaatacca

SEQ ID NO: 2140445 - DNA, 25 bp, Homo sapien
cctcagtgtaataccaaacagcagc

SEQ ID NO: 2140446 - DNA, 25 bp, Homo sapien
actgctttgcaaacggcatacaaaa

SEQ ID NO: 2140447 - DNA, 25 bp, Homo sapien
aacactgctttgcaaacggcataca

SEQ ID NO: 2140448 - DNA, 25 bp, Homo sapien
gtacttttcagcttaccactcccag

SEQ ID NO: 2140449 - DNA, 25 bp, Homo sapien
cacaatcactctgtgttctaacgta

SEQ ID NO: 2140450 - DNA, 25 bp, Homo sapien
cactctgtgttctaacgtacttttc

SEQ ID NO: 2140451 - DNA, 25 bp, Homo sapien
tcagcttaccactcccaggatagtc

SEQ ID NO: 2140452 - DNA, 25 bp, Homo sapien
cctggctgtcgggactgtcaggctc

SEQ ID NO: 2140453 - DNA, 25 bp, Homo sapien
ctccgggagcagatcgcggccacag

SEQ ID NO: 2140454 - DNA, 25 bp, Homo sapien
acagtcactcggatgctgggcggac

SEQ ID NO: 2140455 - DNA, 25 bp, Homo sapien
tgtcaggctcgacagtcactcggat

SEQ ID NO: 2140456 - DNA, 25 bp, Homo sapien
gcatgagctttttatcctttcccat

SEQ ID NO: 2140457 - DNA, 25 bp, Homo sapien
cagcatgagctttttatcctttccc

SEQ ID NO: 2140458 - DNA, 25 bp, Homo sapien
catcccagcatgagctttttatcct

SEQ ID NO: 2140459 - DNA, 25 bp, Homo sapien
cccagcatgagctttttatcctttc

SEQ ID NO: 2140460 - DNA, 25 bp, Homo sapien
caaaaaaccccagagatagctagaa

SEQ ID NO: 2140461 - DNA, 25 bp, Homo sapien
gcagagccacgtcaagggctgggca

SEQ ID NO: 2140462 - DNA, 25 bp, Homo sapien
gcagcagactgtaagaggatgaggt

SEQ ID NO: 2140463 - DNA, 25 bp, Homo sapien
tgcttggccagctgtagcaaaaggg

SEQ ID NO: 2140464 - DNA, 25 bp, Homo sapien
catgggcaatagtcagtgcatgcag

SEQ ID NO: 2140465 - DNA, 25 bp, Homo sapien
ccagataggatggattgtgtagaac

SEQ ID NO: 2140466 - DNA, 25 bp, Homo sapien
ttgggtcagtgacctggtagattcc

SEQ ID NO: 2140467 - DNA, 25 bp, Homo sapien
tagaacaaactatggctgcatgggc

SEQ ID NO: 2140468 - DNA, 25 bp, Homo sapien
cttttttattctttatttcctgcat

SEQ ID NO: 2140469 - DNA, 25 bp, Homo sapien
tttctggctgtcctgttatcctgga

SEQ ID NO: 2140470 - DNA, 25 bp, Homo sapien
ctgtgaggaaccctatactggatct

SEQ ID NO: 2140471 - DNA, 25 bp, Homo sapien
cctgttatcctggatccttgaccca

SEQ ID NO: 2140472 - DNA, 25 bp, Homo sapien
gaggaaccctatactggatctgaat

SEQ ID NO: 2140473 - DNA, 25 bp, Homo sapien
atgggaattgttctttctcccatag

SEQ ID NO: 2140474 - DNA, 25 bp, Homo sapien
tatgggaattgttctttctcccata

SEQ ID NO: 2140475 - DNA, 25 bp, Homo sapien
ctatgggaattgttctttctcccat

SEQ ID NO: 2140476 - DNA, 25 bp, Homo sapien
tgggaattgttctttctcccatagc

SEQ ID NO: 2140477 - DNA, 25 bp, Homo sapien
taactcagcacacagtgagccttgg

SEQ ID NO: 2140478 - DNA, 25 bp, Homo sapien
ttcacaggttgctctgagaagatcc

SEQ ID NO: 2140479 - DNA, 25 bp, Homo sapien
caccggcgttggaacaaatctgggt

SEQ ID NO: 2140480 - DNA, 25 bp, Homo sapien
aaatctgggtctgcaacccttgcaa

SEQ ID NO: 2140481 - DNA, 25 bp, Homo sapien
tgagaggttctgaggacttgtgaag

SEQ ID NO: 2140482 - DNA, 25 bp, Homo sapien
gttctgaggacttgtgaagtggcat

SEQ ID NO: 2140483 - DNA, 25 bp, Homo sapien
taaaaaataatagcttaatctgcat

SEQ ID NO: 2140484 - DNA, 25 bp, Homo sapien
gacttgtgaagtggcatttaaaaaa

SEQ ID NO: 2140485 - DNA, 25 bp, Homo sapien
atccaagggagaagtgcctcaaaat

SEQ ID NO: 2140486 - DNA, 25 bp, Homo sapien
ggagaaaaggatggatccaagggag

SEQ ID NO: 2140487 - DNA, 25 bp, Homo sapien
atggatccaagggagaagtgcctca

SEQ ID NO: 2140488 - DNA, 25 bp, Homo sapien
gatccaagggagaagtgcctcaaaa

SEQ ID NO: 2140489 - DNA, 25 bp, Homo sapien
agtgacctgtttgttccatggagca

SEQ ID NO: 2140490 - DNA, 25 bp, Homo sapien
aaatgctgctggtgcacctgattca

SEQ ID NO: 2140491 - DNA, 25 bp, Homo sapien
tgattcacagtacccaggaaaggag

SEQ ID NO: 2140492 - DNA, 25 bp, Homo sapien
aatattggtccatctatcctgcacc

SEQ ID NO: 2140493 - DNA, 25 bp, Homo sapien
acttccccactatatcagggcagac

SEQ ID NO: 2140494 - DNA, 25 bp, Homo sapien
tctttttggacagacagccttttcc

SEQ ID NO: 2140495 - DNA, 25 bp, Homo sapien
tccatgggtgcttgatattctgtca

SEQ ID NO: 2140496 - DNA, 25 bp, Homo sapien
cagactagaagcagcgctaaggcgt

SEQ ID NO: 2140497 - DNA, 25 bp, Homo sapien
ccttccctctgtttgggtcatctga

SEQ ID NO: 2140498 - DNA, 25 bp, Homo sapien
ctccttccctctgtttgggtcatct

SEQ ID NO: 2140499 - DNA, 25 bp, Homo sapien
ttccctctgtttgggtcatctgaac

SEQ ID NO: 2140500 - DNA, 25 bp, Homo sapien
cctctgtttgggtcatctgaacttt

SEQ ID NO: 2140501 - DNA, 25 bp, Homo sapien
cttcagaaaaggccagctaaacaac

SEQ ID NO: 2140502 - DNA, 25 bp, Homo sapien
tcagaaaaggccagctaaacaacat

SEQ ID NO: 2140503 - DNA, 25 bp, Homo sapien
cttccaaccatttgtctgctgccgc

SEQ ID NO: 2140504 - DNA, 25 bp, Homo sapien
tccaaccatttgtctgctgccgctg

SEQ ID NO: 2140505 - DNA, 25 bp, Homo sapien
tattgctgctgcagcacttgggagc

SEQ ID NO: 2140506 - DNA, 25 bp, Homo sapien
ctattgctgctgcagcacttgggag

SEQ ID NO: 2140507 - DNA, 25 bp, Homo sapien
tagcctgcctaggttttgtaaaatc

SEQ ID NO: 2140508 - DNA, 25 bp, Homo sapien
taggaataggtagcctgcctaggtt

SEQ ID NO: 2140509 - DNA, 25 bp, Homo sapien
aggctgatcatatatgcggtaggaa

SEQ ID NO: 2140510 - DNA, 25 bp, Homo sapien
ttctcctccaatggagccagctccc

SEQ ID NO: 2140511 - DNA, 25 bp, Homo sapien
tgtgcatgcgtcacctagttctcgt

SEQ ID NO: 2140512 - DNA, 25 bp, Homo sapien
acttgattgaattggctattgaagc

SEQ ID NO: 2140513 - DNA, 25 bp, Homo sapien
ccacttgattgaattggctattgaa

SEQ ID NO: 2140514 - DNA, 25 bp, Homo sapien
catgcgtcacctagttctcgtgcca

SEQ ID NO: 2140515 - DNA, 25 bp, Homo sapien
gtctcatccttgactctaaagtcat

SEQ ID NO: 2140516 - DNA, 25 bp, Homo sapien
tctgtctcatccttgactctaaagt

SEQ ID NO: 2140517 - DNA, 25 bp, Homo sapien
ctctgtctcatccttgactctaaag

SEQ ID NO: 2140518 - DNA, 25 bp, Homo sapien
ggtcagctctgtctcatccttgact

SEQ ID NO: 2140519 - DNA, 25 bp, Homo sapien
gccttgacctctgcctctagctgca

SEQ ID NO: 2140520 - DNA, 25 bp, Homo sapien
gagagccttgacctctgcctctagc

SEQ ID NO: 2140521 - DNA, 25 bp, Homo sapien
cttgagagccttgacctctgcctct

SEQ ID NO: 2140522 - DNA, 25 bp, Homo sapien
ttgacctctgcctctagctgcagct

SEQ ID NO: 2140523 - DNA, 25 bp, Homo sapien
ctcagttccgtgagcgccatctcag

SEQ ID NO: 2140524 - DNA, 25 bp, Homo sapien
gtatgtctcagttccgtgagcgcca

SEQ ID NO: 2140525 - DNA, 25 bp, Homo sapien
agttccgtgagcgccatctcagcag

SEQ ID NO: 2140526 - DNA, 25 bp, Homo sapien
tgtctcagttccgtgagcgccatct

SEQ ID NO: 2140527 - DNA, 25 bp, Homo sapien
tggcagtaggtggcgatcttagcct

SEQ ID NO: 2140528 - DNA, 25 bp, Homo sapien
cgggcctccactttcctcaggctgc

SEQ ID NO: 2140529 - DNA, 25 bp, Homo sapien
atgatccactatccggcagatggtg

SEQ ID NO: 2140530 - DNA, 25 bp, Homo sapien
tttatgatccactatccggcagatg

SEQ ID NO: 2140531 - DNA, 25 bp, Homo sapien
ctgcttctgctggcttaatgtctga

SEQ ID NO: 2140532 - DNA, 25 bp, Homo sapien
tgcttctgctggcttaatgtctgac

SEQ ID NO: 2140533 - DNA, 25 bp, Homo sapien
cctgcttctgctggcttaatgtctg

SEQ ID NO: 2140534 - DNA, 25 bp, Homo sapien
gatatgacagcccaattcctctgct

SEQ ID NO: 2140535 - DNA, 25 bp, Homo sapien
ctagaagatatgacagcccaattcc

SEQ ID NO: 2140536 - DNA, 25 bp, Homo sapien
ttcagctttgctatcaagcagtttc

SEQ ID NO: 2140537 - DNA, 25 bp, Homo sapien
agctttgctatcaagcagtttccag

SEQ ID NO: 2140538 - DNA, 25 bp, Homo sapien
ctggccacagagaggttccagtacc

SEQ ID NO: 2140539 - DNA, 25 bp, Homo sapien
ggttccagtacctggtagacaaagc

SEQ ID NO: 2140540 - DNA, 25 bp, Homo sapien
gaactgtgttctaagggctgaggca

SEQ ID NO: 2140541 - DNA, 25 bp, Homo sapien
taacattgtccaactaagagactcc

SEQ ID NO: 2140542 - DNA, 25 bp, Homo sapien
tactgctgctctcgagatgtgggag

SEQ ID NO: 2140543 - DNA, 25 bp, Homo sapien
cacagcccacagtgaagtagttact

SEQ ID NO: 2140544 - DNA, 25 bp, Homo sapien
aaggcagcgcgcctcttaccttcct

SEQ ID NO: 2140545 - DNA, 25 bp, Homo sapien
cccccctgaaggcagcgcgcctctt

SEQ ID NO: 2140546 - DNA, 25 bp, Homo sapien
ccacccccggttgggctgagacagc

SEQ ID NO: 2140547 - DNA, 25 bp, Homo sapien
ctgaaggcagcgcgcctcttacctt

SEQ ID NO: 2140548 - DNA, 25 bp, Homo sapien
tgtggtagctcttgccatactctgg

SEQ ID NO: 2140549 - DNA, 25 bp, Homo sapien
tctggcacaggtgtgaccttcactg

SEQ ID NO: 2140550 - DNA, 25 bp, Homo sapien
tcaaagtgctgtggtagctcttgcc

SEQ ID NO: 2140551 - DNA, 25 bp, Homo sapien
gccatactctggcacaggtgtgacc

SEQ ID NO: 2140552 - DNA, 25 bp, Homo sapien
gttgactcctaagccagttgttgcc

SEQ ID NO: 2140553 - DNA, 25 bp, Homo sapien
tgactcctaagccagttgttgccat

SEQ ID NO: 2140554 - DNA, 25 bp, Homo sapien
ctggttgactcctaagccagttgtt

SEQ ID NO: 2140555 - DNA, 25 bp, Homo sapien
ggttgactcctaagccagttgttgc

SEQ ID NO: 2140556 - DNA, 25 bp, Homo sapien
tctcttgatgtgcattcccttctct

SEQ ID NO: 2140557 - DNA, 25 bp, Homo sapien
ctctcttgatgtgcattcccttctc

SEQ ID NO: 2140558 - DNA, 25 bp, Homo sapien
ctaagctttcagccctctcttgatg

SEQ ID NO: 2140559 - DNA, 25 bp, Homo sapien
taagctttcagccctctcttgatgt

SEQ ID NO: 2140560 - DNA, 25 bp, Homo sapien
ttggcagcagcaaactcaaaggcct

SEQ ID NO: 2140561 - DNA, 25 bp, Homo sapien
gcagcaaactcaaaggccttctcag

SEQ ID NO: 2140562 - DNA, 25 bp, Homo sapien
cagcaaactcaaaggccttctcagt

SEQ ID NO: 2140563 - DNA, 25 bp, Homo sapien
gcagcagcaaactcaaaggccttct

SEQ ID NO: 2140564 - DNA, 25 bp, Homo sapien
accataatccgcaagcccctgggag

SEQ ID NO: 2140565 - DNA, 25 bp, Homo sapien
tggcccagtgctggttctgaccgga

SEQ ID NO: 2140566 - DNA, 25 bp, Homo sapien
cagtgggcttcgagcgtagccagaa

SEQ ID NO: 2140567 - DNA, 25 bp, Homo sapien
ccttgggcccatctggcaccataat

SEQ ID NO: 2140568 - DNA, 25 bp, Homo sapien
gctgagaagacgctagcctttcaga

SEQ ID NO: 2140569 - DNA, 25 bp, Homo sapien
agctcagctgagaagacgctagcct

SEQ ID NO: 2140570 - DNA, 25 bp, Homo sapien
gagaagacgctagcctttcagagag

SEQ ID NO: 2140571 - DNA, 25 bp, Homo sapien
tcagctgagaagacgctagcctttc

SEQ ID NO: 2140572 - DNA, 25 bp, Homo sapien
cagaacaaacagaatctggggttcc

SEQ ID NO: 2140573 - DNA, 25 bp, Homo sapien
ttcccttcataagtctcgcatcttg

SEQ ID NO: 2140574 - DNA, 25 bp, Homo sapien
cgcatcttgccacaaccagatcttt

SEQ ID NO: 2140575 - DNA, 25 bp, Homo sapien
acccacctctgggaggttgactgaa

SEQ ID NO: 2140576 - DNA, 25 bp, Homo sapien
catgtgggtagataaccatgaagct

SEQ ID NO: 2140577 - DNA, 25 bp, Homo sapien
tgtgggtagataaccatgaagctga

SEQ ID NO: 2140578 - DNA, 25 bp, Homo sapien
actgaagatgtaagtctgagaaata

SEQ ID NO: 2140579 - DNA, 25 bp, Homo sapien
tagataaccatgaagctgattactg

SEQ ID NO: 2140580 - DNA, 25 bp, Homo sapien
aggttttgataagctgcttgccttg

SEQ ID NO: 2140581 - DNA, 25 bp, Homo sapien
aaaaggttttgataagctgcttgcc

SEQ ID NO: 2140582 - DNA, 25 bp, Homo sapien
ggaaaaggttttgataagctgcttg

SEQ ID NO: 2140583 - DNA, 25 bp, Homo sapien
aaaggttttgataagctgcttgcct

SEQ ID NO: 2140584 - DNA, 25 bp, Homo sapien
cttaccagctggcaccagaatcctt

SEQ ID NO: 2140585 - DNA, 25 bp, Homo sapien
gggtccttgtcaaaaccatgtggat

SEQ ID NO: 2140586 - DNA, 25 bp, Homo sapien
aatagcagagcatgcggctgtgatg

SEQ ID NO: 2140587 - DNA, 25 bp, Homo sapien
tctttggacggaaatagcagagcat

SEQ ID NO: 2140588 - DNA, 25 bp, Homo sapien
ttgggcctcccctgcaagatctggg

SEQ ID NO: 2140589 - DNA, 25 bp, Homo sapien
caaattgcaaattaatctcctagtg

SEQ ID NO: 2140590 - DNA, 25 bp, Homo sapien
ccaacaaattgcaaattaatctcct

SEQ ID NO: 2140591 - DNA, 25 bp, Homo sapien
ttgcaaattaatctcctagtgaaca

SEQ ID NO: 2140592 - DNA, 25 bp, Homo sapien
gcaaattaatctcctagtgaacaga

SEQ ID NO: 2140593 - DNA, 25 bp, Homo sapien
tccaatttcctctttcgtggcctcg

SEQ ID NO: 2140594 - DNA, 25 bp, Homo sapien
ctctttcgtggcctcgaaaggaccg

SEQ ID NO: 2140595 - DNA, 25 bp, Homo sapien
caggcaacccaaacgaatccttggg

SEQ ID NO: 2140596 - DNA, 25 bp, Homo sapien
atggatgtctgcttccgacgcgcca

SEQ ID NO: 2140597 - DNA, 25 bp, Homo sapien
ttcctgtgagggagcaacccctgac

SEQ ID NO: 2140598 - DNA, 25 bp, Homo sapien
agctgacttcctgtgagggagcaac

SEQ ID NO: 2140599 - DNA, 25 bp, Homo sapien
tgacttcctgtgagggagcaacccc

SEQ ID NO: 2140600 - DNA, 25 bp, Homo sapien
tgtgagggagcaacccctgactcct

SEQ ID NO: 2140601 - DNA, 25 bp, Homo sapien
ctgagatgatgcaggttgtatctga

SEQ ID NO: 2140602 - DNA, 25 bp, Homo sapien
gagatgatgcaggttgtatctgaag

SEQ ID NO: 2140603 - DNA, 25 bp, Homo sapien
agatgatgcaggttgtatctgaagc

SEQ ID NO: 2140604 - DNA, 25 bp, Homo sapien
gcctgagatgatgcaggttgtatct

SEQ ID NO: 2140605 - DNA, 25 bp, Homo sapien
agacccagggctcaaatagcacccc

SEQ ID NO: 2140606 - DNA, 25 bp, Homo sapien
aagacccagggctcaaatagcaccc

SEQ ID NO: 2140607 - DNA, 25 bp, Homo sapien
aaagacccagggctcaaatagcacc

SEQ ID NO: 2140608 - DNA, 25 bp, Homo sapien
gtagaggaccttgggtgatgaagct

SEQ ID NO: 2140609 - DNA, 25 bp, Homo sapien
aatgacagtcttctggtagaggacc

SEQ ID NO: 2140610 - DNA, 25 bp, Homo sapien
ttctgattgtcgtggctttttggag

SEQ ID NO: 2140611 - DNA, 25 bp, Homo sapien
gctttttggaggtgctccccagttc

SEQ ID NO: 2140612 - DNA, 25 bp, Homo sapien
cctcctgaagctatagtcaataaat

SEQ ID NO: 2140613 - DNA, 25 bp, Homo sapien
gctgctgccatatggcactgtgtgt

SEQ ID NO: 2140614 - DNA, 25 bp, Homo sapien
gacatgttgtctaataggtccagac

SEQ ID NO: 2140615 - DNA, 25 bp, Homo sapien
ggtccagacatgctcctaaaccctg

SEQ ID NO: 2140616 - DNA, 25 bp, Homo sapien
ttgtccaaacagttgcttttcccca

SEQ ID NO: 2140617 - DNA, 25 bp, Homo sapien
tttttctggttgtccaaacagttgc

SEQ ID NO: 2140618 - DNA, 25 bp, Homo sapien
gagaggcatcgtctggaaaacatgg

SEQ ID NO: 2140619 - DNA, 25 bp, Homo sapien
agcttggagaggcatcgtctggaaa

SEQ ID NO: 2140620 - DNA, 25 bp, Homo sapien
gactggcaggatttggaaccatgtg

SEQ ID NO: 2140621 - DNA, 25 bp, Homo sapien
gggagtcttgtcactcccctcaaga

SEQ ID NO: 2140622 - DNA, 25 bp, Homo sapien
tgattccggtaacagaagcctgact

SEQ ID NO: 2140623 - DNA, 25 bp, Homo sapien
ggccaattagccctctgattccggt

SEQ ID NO: 2140624 - DNA, 25 bp, Homo sapien
tcccactcacggtcctggaccctct

SEQ ID NO: 2140625 - DNA, 25 bp, Homo sapien
ctcccactcacggtcctggaccctc

SEQ ID NO: 2140626 - DNA, 25 bp, Homo sapien
gctatgtggttcataggtgcaggca

SEQ ID NO: 2140627 - DNA, 25 bp, Homo sapien
aagaaccaaactctgtccataggtg

SEQ ID NO: 2140628 - DNA, 25 bp, Homo sapien
ccaaactctgtccataggtgcattc

SEQ ID NO: 2140629 - DNA, 25 bp, Homo sapien
tggcccagctatgtggttcataggt

SEQ ID NO: 2140630 - DNA, 25 bp, Homo sapien
gacttgttggcgctaaaaggacttc

SEQ ID NO: 2140631 - DNA, 25 bp, Homo sapien
agctcatttccgacatgggcatcag

SEQ ID NO: 2140632 - DNA, 25 bp, Homo sapien
aaaggacttcttgggatggcaccag

SEQ ID NO: 2140633 - DNA, 25 bp, Homo sapien
tcgtccttgaaggaagccagagaac

SEQ ID NO: 2140634 - DNA, 25 bp, Homo sapien
agccaaagccatatatagggtctcg

SEQ ID NO: 2140635 - DNA, 25 bp, Homo sapien
cacttgtcgcagtatctctgctggc

SEQ ID NO: 2140636 - DNA, 25 bp, Homo sapien
ggcagctgctcacattccatatcat

SEQ ID NO: 2140637 - DNA, 25 bp, Homo sapien
tatagggtctcggtgaacggtcact

SEQ ID NO: 2140638 - DNA, 25 bp, Homo sapien
tccctcggggcttcactcacgtctt

SEQ ID NO: 2140639 - DNA, 25 bp, Homo sapien
ctgataagttctatgagtctctccc

SEQ ID NO: 2140640 - DNA, 25 bp, Homo sapien
taagttctatgagtctctccctcgg

SEQ ID NO: 2140641 - DNA, 25 bp, Homo sapien
cagccaggagcttgttctcagaggg

SEQ ID NO: 2140642 - DNA, 25 bp, Homo sapien
tgtaagaacgatgaattccttagcg

SEQ ID NO: 2140643 - DNA, 25 bp, Homo sapien
ctgatgagtgtgcagaactgtaaga

SEQ ID NO: 2140644 - DNA, 25 bp, Homo sapien
taagaacgatgaattccttagcgct

SEQ ID NO: 2140645 - DNA, 25 bp, Homo sapien
aagaacgatgaattccttagcgctc

SEQ ID NO: 2140646 - DNA, 25 bp, Homo sapien
agaaggaaatcagcctggccgcagc

SEQ ID NO: 2140647 - DNA, 25 bp, Homo sapien
tccaaggatttagagagcacaagac

SEQ ID NO: 2140648 - DNA, 25 bp, Homo sapien
gttttgacaattagccccgtgtgtg

SEQ ID NO: 2140649 - DNA, 25 bp, Homo sapien
ttcccagcctagaagagtgtccaga

SEQ ID NO: 2140650 - DNA, 25 bp, Homo sapien
caaagatgcaagattagatcctgtc

SEQ ID NO: 2140651 - DNA, 25 bp, Homo sapien
tcgcagcactgatgaaagcagattt

SEQ ID NO: 2140652 - DNA, 25 bp, Homo sapien
tcaacttggccttcttcgcagcact

SEQ ID NO: 2140653 - DNA, 25 bp, Homo sapien
tgccacctgctcagaaaatcgaacc

SEQ ID NO: 2140654 - DNA, 25 bp, Homo sapien
cacaggattggacctcaacttggcc

SEQ ID NO: 2140655 - DNA, 25 bp, Homo sapien
tcttgtccccctcaacattgctgag

SEQ ID NO: 2140656 - DNA, 25 bp, Homo sapien
gtagattttgtattgtctcaatctg

SEQ ID NO: 2140657 - DNA, 25 bp, Homo sapien
caataccaccccgtagtagattttg

SEQ ID NO: 2140658 - DNA, 25 bp, Homo sapien
ttttgtattgtctcaatctgaacct

SEQ ID NO: 2140659 - DNA, 25 bp, Homo sapien
ctctcatcccaaccatttccctggg

SEQ ID NO: 2140660 - DNA, 25 bp, Homo sapien
tctcatcccaaccatttccctgggc

SEQ ID NO: 2140661 - DNA, 25 bp, Homo sapien
aaaaccttcaggacattagggatga

SEQ ID NO: 2140662 - DNA, 25 bp, Homo sapien
aaatgtgaatgacttgatctgccca

SEQ ID NO: 2140663 - DNA, 25 bp, Homo sapien
ccttcaggacattagggatgaggag

SEQ ID NO: 2140664 - DNA, 25 bp, Homo sapien
cttaacagtggtccgaccatcaaat

SEQ ID NO: 2140665 - DNA, 25 bp, Homo sapien
ggaggattctgacacaaagcgatat

SEQ ID NO: 2140666 - DNA, 25 bp, Homo sapien
ataaaccaccaaggaggattctgac

SEQ ID NO: 2140667 - DNA, 25 bp, Homo sapien
ccaaggaggattctgacacaaagcg

SEQ ID NO: 2140668 - DNA, 25 bp, Homo sapien
ttctgacacaaagcgatattcacat

SEQ ID NO: 2140669 - DNA, 25 bp, Homo sapien
ctgaagaagcagaaacttgtgattc

SEQ ID NO: 2140670 - DNA, 25 bp, Homo sapien
ccggcatactcaaggacaagagcaa

SEQ ID NO: 2140671 - DNA, 25 bp, Homo sapien
gcaaagtgctcaatgaacctcaggg

SEQ ID NO: 2140672 - DNA, 25 bp, Homo sapien
tgattctgttctggcccggcatact

SEQ ID NO: 2140673 - DNA, 25 bp, Homo sapien
aagcagcaggatcccgacgcagcag

SEQ ID NO: 2140674 - DNA, 25 bp, Homo sapien
tctttgggaaagaagcttattcgga

SEQ ID NO: 2140675 - DNA, 25 bp, Homo sapien
ttattcggaagaggcatttcattcc

SEQ ID NO: 2140676 - DNA, 25 bp, Homo sapien
cattccatgatagtgtgtccgctgt

SEQ ID NO: 2140677 - DNA, 25 bp, Homo sapien
tgtgtatccccaagccagactctac

SEQ ID NO: 2140678 - DNA, 25 bp, Homo sapien
ctgtgtatccccaagccagactcta

SEQ ID NO: 2140679 - DNA, 25 bp, Homo sapien
tctgtgtatccccaagccagactct

SEQ ID NO: 2140680 - DNA, 25 bp, Homo sapien
cagtgatatagatgtggagcgcagc

SEQ ID NO: 2140681 - DNA, 25 bp, Homo sapien
tctgactaggtcgagtggctgagac

SEQ ID NO: 2140682 - DNA, 25 bp, Homo sapien
tcttgagcgagatcttctgactagg

SEQ ID NO: 2140683 - DNA, 25 bp, Homo sapien
gcaaggcccaaaagcatctctggct

SEQ ID NO: 2140684 - DNA, 25 bp, Homo sapien
ctgcaggagggaggggggaagaaag

SEQ ID NO: 2140685 - DNA, 25 bp, Homo sapien
gagagagagatttccggaggttctt

SEQ ID NO: 2140686 - DNA, 25 bp, Homo sapien
tttggtgagccttcagttgctgaga

SEQ ID NO: 2140687 - DNA, 25 bp, Homo sapien
gtgccgcaggaaggatgtgtttggt

SEQ ID NO: 2140688 - DNA, 25 bp, Homo sapien
gatttccggaggttcttctctttga

SEQ ID NO: 2140689 - DNA, 25 bp, Homo sapien
aggtcaggtcttgtgcccccaactc

SEQ ID NO: 2140690 - DNA, 25 bp, Homo sapien
cattccacccagtgacccattctcc

SEQ ID NO: 2140691 - DNA, 25 bp, Homo sapien
gtcaggtcttgtgcccccaactctc

SEQ ID NO: 2140692 - DNA, 25 bp, Homo sapien
ccaggtcaggtcttgtgcccccaac

SEQ ID NO: 2140693 - DNA, 25 bp, Homo sapien
gctgcctagaggatgaagtacaacc

SEQ ID NO: 2140694 - DNA, 25 bp, Homo sapien
cacactgttagagggagcatcctaa

SEQ ID NO: 2140695 - DNA, 25 bp, Homo sapien
cattcccacctgtgtcagggtgaca

SEQ ID NO: 2140696 - DNA, 25 bp, Homo sapien
taagcattcctaagtcccaagcctg

SEQ ID NO: 2140697 - DNA, 25 bp, Homo sapien
ggaaaaacccatccagaaatatgag

SEQ ID NO: 2140698 - DNA, 25 bp, Homo sapien
tgtggaaaaacccatccagaaatat

SEQ ID NO: 2140699 - DNA, 25 bp, Homo sapien
aaaacccatccagaaatatgagaag

SEQ ID NO: 2140700 - DNA, 25 bp, Homo sapien
gaaaaacccatccagaaatatgaga

SEQ ID NO: 2140701 - DNA, 25 bp, Homo sapien
cgcccgtgaaggtaggaagttcatt

SEQ ID NO: 2140702 - DNA, 25 bp, Homo sapien
aattcgtagatactggagctttgcc

SEQ ID NO: 2140703 - DNA, 25 bp, Homo sapien
ggcctacagtgttgaacaaaacgcc

SEQ ID NO: 2140704 - DNA, 25 bp, Homo sapien
gttcattcagaattcgtagatactg

SEQ ID NO: 2140705 - DNA, 25 bp, Homo sapien
cccaccaggagcgtggtggccgact

SEQ ID NO: 2140706 - DNA, 25 bp, Homo sapien
tggcatccatgatgctggtctccac

SEQ ID NO: 2140707 - DNA, 25 bp, Homo sapien
tgctgaactcggacagcacagtggt

SEQ ID NO: 2140708 - DNA, 25 bp, Homo sapien
ataacatggctgatgccatgacggg

SEQ ID NO: 2140709 - DNA, 25 bp, Homo sapien
ctgccttgatcattggaggtggaag

SEQ ID NO: 2140710 - DNA, 25 bp, Homo sapien
gcaagaggcggcagtaccccgcgat

SEQ ID NO: 2140711 - DNA, 25 bp, Homo sapien
ccatcttcctggaatccagcaagag

SEQ ID NO: 2140712 - DNA, 25 bp, Homo sapien
ccgcgatcaggcaggcaaagttggt

SEQ ID NO: 2140713 - DNA, 25 bp, Homo sapien
ccacaggtcctggggatgtaccagg

SEQ ID NO: 2140714 - DNA, 25 bp, Homo sapien
gtcctggggatgtaccaggtgctaa

SEQ ID NO: 2140715 - DNA, 25 bp, Homo sapien
tctacaccaagacattgtccacagg

SEQ ID NO: 2140716 - DNA, 25 bp, Homo sapien
cagccaggagtatgaactataagtt

SEQ ID NO: 2140717 - DNA, 25 bp, Homo sapien
gtgccaaggattgtgaatgagctcc

SEQ ID NO: 2140718 - DNA, 25 bp, Homo sapien
cctggtgccaaggattgtgaatgag

SEQ ID NO: 2140719 - DNA, 25 bp, Homo sapien
ggattgtgaatgagctcccttgttg

SEQ ID NO: 2140720 - DNA, 25 bp, Homo sapien
gccaaggattgtgaatgagctccct

SEQ ID NO: 2140721 - DNA, 25 bp, Homo sapien
cctttgttcccgcatatggaggtag

SEQ ID NO: 2140722 - DNA, 25 bp, Homo sapien
cacaaggctcgtggtctaggctagc

SEQ ID NO: 2140723 - DNA, 25 bp, Homo sapien
gaagctgacaagctcagagtcggca

SEQ ID NO: 2140724 - DNA, 25 bp, Homo sapien
cacagtagaaattcagggcttcagc

SEQ ID NO: 2140725 - DNA, 25 bp, Homo sapien
ggtgggagggacatcaaatctacta

SEQ ID NO: 2140726 - DNA, 25 bp, Homo sapien
caaatctactatattgtcacgagag

SEQ ID NO: 2140727 - DNA, 25 bp, Homo sapien
tatattgtcacgagaggagccaggc

SEQ ID NO: 2140728 - DNA, 25 bp, Homo sapien
tctactatattgtcacgagaggagc

SEQ ID NO: 2140729 - DNA, 25 bp, Homo sapien
gtacagaagcccacgcaggtggcgt

SEQ ID NO: 2140730 - DNA, 25 bp, Homo sapien
catcatctagctcctgggcatgatc

SEQ ID NO: 2140731 - DNA, 25 bp, Homo sapien
gatctcgaactgtccgggtctgcac

SEQ ID NO: 2140732 - DNA, 25 bp, Homo sapien
cactggaatctcatcgtacagaagc

SEQ ID NO: 2140733 - DNA, 25 bp, Homo sapien
tgtggtccatcctcggatgcagcca

SEQ ID NO: 2140734 - DNA, 25 bp, Homo sapien
cggatgcagccagggcttctagagc

SEQ ID NO: 2140735 - DNA, 25 bp, Homo sapien
tgggtgtggtccatcctcggatgca

SEQ ID NO: 2140736 - DNA, 25 bp, Homo sapien
tccatcctcggatgcagccagggct

SEQ ID NO: 2140737 - DNA, 25 bp, Homo sapien
gagatgcaatgacgagagccagaac

SEQ ID NO: 2140738 - DNA, 25 bp, Homo sapien
tacctactggcccttgttggacaag

SEQ ID NO: 2140739 - DNA, 25 bp, Homo sapien
cagtgactctgacacctatttggga

SEQ ID NO: 2140740 - DNA, 25 bp, Homo sapien
taaagaacctttggtacatccactg

SEQ ID NO: 2140741 - DNA, 25 bp, Homo sapien
ctctggatccggaagggcaggtcct

SEQ ID NO: 2140742 - DNA, 25 bp, Homo sapien
tatgttcgttctccctgtacctggc

SEQ ID NO: 2140743 - DNA, 25 bp, Homo sapien
ggtttcatgacctgagtccagcgat

SEQ ID NO: 2140744 - DNA, 25 bp, Homo sapien
tgtgaaccacttgctgtagggcggc

SEQ ID NO: 2140745 - DNA, 25 bp, Homo sapien
tgtagcttgcttgcccactgactct

SEQ ID NO: 2140746 - DNA, 25 bp, Homo sapien
actgactctcggcttgttcgcaaaa

SEQ ID NO: 2140747 - DNA, 25 bp, Homo sapien
gagggaaattttgaacaggcagact

SEQ ID NO: 2140748 - DNA, 25 bp, Homo sapien
caggcagactgtcctcttgttggga

SEQ ID NO: 2140749 - DNA, 25 bp, Homo sapien
cccactggcccgcctttgcctgcca

SEQ ID NO: 2140750 - DNA, 25 bp, Homo sapien
ccactggcccgcctttgcctgccac

SEQ ID NO: 2140751 - DNA, 25 bp, Homo sapien
ctggtctcttcgagcttgcttcttt

SEQ ID NO: 2140752 - DNA, 25 bp, Homo sapien
ggctggtctcttcgagcttgcttct

SEQ ID NO: 2140753 - DNA, 25 bp, Homo sapien
tggtctcttcgagcttgcttctttt

SEQ ID NO: 2140754 - DNA, 25 bp, Homo sapien
gctggtctcttcgagcttgcttctt

SEQ ID NO: 2140755 - DNA, 25 bp, Homo sapien
gctctgacctcgagactggctgctg

SEQ ID NO: 2140756 - DNA, 25 bp, Homo sapien
agccatggggtaggtagctcgggga

SEQ ID NO: 2140757 - DNA, 25 bp, Homo sapien
tggggctctgacctcgagactggct

SEQ ID NO: 2140758 - DNA, 25 bp, Homo sapien
gccatggggtaggtagctcggggaa

SEQ ID NO: 2140759 - DNA, 25 bp, Homo sapien
gagttgtttcaagcttcctagaggg

SEQ ID NO: 2140760 - DNA, 25 bp, Homo sapien
cttcagaggtcgagtgggctccatt

SEQ ID NO: 2140761 - DNA, 25 bp, Homo sapien
tggcagcctgagacctcagtgggct

SEQ ID NO: 2140762 - DNA, 25 bp, Homo sapien
atggtgctcacctgccggctggcag

SEQ ID NO: 2140763 - DNA, 25 bp, Homo sapien
gtttcctgtaattgggagctcccag

SEQ ID NO: 2140764 - DNA, 25 bp, Homo sapien
cagccgcacgaaggtctcaatgagg

SEQ ID NO: 2140765 - DNA, 25 bp, Homo sapien
tccaggctggtagaacgaatgcgct

SEQ ID NO: 2140766 - DNA, 25 bp, Homo sapien
tcagcagctcgttggtgtccagccg

SEQ ID NO: 2140767 - DNA, 25 bp, Homo sapien
cacgcagcaggaaggtgtagttcct

SEQ ID NO: 2140768 - DNA, 25 bp, Homo sapien
acgcagcaggaaggtgtagttcctc

SEQ ID NO: 2140769 - DNA, 25 bp, Homo sapien
gctcataacagtcgccgaagttggg

SEQ ID NO: 2140770 - DNA, 25 bp, Homo sapien
tttttaaggagtgggtgaatgtgct

SEQ ID NO: 2140771 - DNA, 25 bp, Homo sapien
gagcctggtggatgctctgtggctg

SEQ ID NO: 2140772 - DNA, 25 bp, Homo sapien
gctgctggttaaggttacgggctgt

SEQ ID NO: 2140773 - DNA, 25 bp, Homo sapien
cgcccaacacggattgagcaggaag

SEQ ID NO: 2140774 - DNA, 25 bp, Homo sapien
gcccaacacggattgagcaggaagt

SEQ ID NO: 2140775 - DNA, 25 bp, Homo sapien
gcgcccaacacggattgagcaggaa

SEQ ID NO: 2140776 - DNA, 25 bp, Homo sapien
cagcgcccaacacggattgagcagg

SEQ ID NO: 2140777 - DNA, 25 bp, Homo sapien
gacatctggactgagcgccctctcc

SEQ ID NO: 2140778 - DNA, 25 bp, Homo sapien
gcacggcaatgtggcctgctgctac

SEQ ID NO: 2140779 - DNA, 25 bp, Homo sapien
tgccacgaggagctcaaagcctgag

SEQ ID NO: 2140780 - DNA, 25 bp, Homo sapien
ggagccgatgccacgaggagctcaa

SEQ ID NO: 2140781 - DNA, 25 bp, Homo sapien
cagttgggccgctgcaaacagccta

SEQ ID NO: 2140782 - DNA, 25 bp, Homo sapien
aacagcctagtgtggctgttttctg

SEQ ID NO: 2140783 - DNA, 25 bp, Homo sapien
tgccggccagttgggccgctgcaaa

SEQ ID NO: 2140784 - DNA, 25 bp, Homo sapien
ccgctgcaaacagcctagtgtggct

SEQ ID NO: 2140785 - DNA, 25 bp, Homo sapien
gagctgccctgcccatcagtgaggg

SEQ ID NO: 2140786 - DNA, 25 bp, Homo sapien
gggtgatcccagatgcttgctccct

SEQ ID NO: 2140787 - DNA, 25 bp, Homo sapien
cccaaaatgagtggggtgatcccag

SEQ ID NO: 2140788 - DNA, 25 bp, Homo sapien
gctccctagtggactgagctgccct

SEQ ID NO: 2140789 - DNA, 25 bp, Homo sapien
ggcagggattaagcacagtgtacat

SEQ ID NO: 2140790 - DNA, 25 bp, Homo sapien
gattctgcagaagaaactcccctcc

SEQ ID NO: 2140791 - DNA, 25 bp, Homo sapien
ccactcagggagactttattgcact

SEQ ID NO: 2140792 - DNA, 25 bp, Homo sapien
gaggcggacgagaagcaatctatac

SEQ ID NO: 2140793 - DNA, 25 bp, Homo sapien
tgaaggatggcggtggaatgacaca

SEQ ID NO: 2140794 - DNA, 25 bp, Homo sapien
cactccagcttgcagtggctgaggg

SEQ ID NO: 2140795 - DNA, 25 bp, Homo sapien
atctctggcccattcaacaacttgg

SEQ ID NO: 2140796 - DNA, 25 bp, Homo sapien
agaagaccatatcagcactccagct

SEQ ID NO: 2140797 - DNA, 25 bp, Homo sapien
ttgggtccacgccaacagtatgaac

SEQ ID NO: 2140798 - DNA, 25 bp, Homo sapien
cagtatgaacccattttcctttaag

SEQ ID NO: 2140799 - DNA, 25 bp, Homo sapien
attatccacagtgccttcacaacag

SEQ ID NO: 2140800 - DNA, 25 bp, Homo sapien
gcggaggcaggttctttcaattcat

SEQ ID NO: 2140801 - DNA, 25 bp, Homo sapien
aatgctggcagttgaccctccccta

SEQ ID NO: 2140802 - DNA, 25 bp, Homo sapien
aatgtatgccccctcccaatgctgg

SEQ ID NO: 2140803 - DNA, 25 bp, Homo sapien
taagacataaatgtatgccccctcc

SEQ ID NO: 2140804 - DNA, 25 bp, Homo sapien
tgttcggaggaattcgatcctaaga

SEQ ID NO: 2140805 - DNA, 25 bp, Homo sapien
gctccagatgtacacccacagtctg

SEQ ID NO: 2140806 - DNA, 25 bp, Homo sapien
tcatttcctccgactccatggagga

SEQ ID NO: 2140807 - DNA, 25 bp, Homo sapien
gactccatggaggacttccttctcg

SEQ ID NO: 2140808 - DNA, 25 bp, Homo sapien
ggaggacttccttctcgctccagat

SEQ ID NO: 2140809 - DNA, 25 bp, Homo sapien
tacaaacagacttgtcgagcactaa

SEQ ID NO: 2140810 - DNA, 25 bp, Homo sapien
ctccaagaagctttacaaacagact

SEQ ID NO: 2140811 - DNA, 25 bp, Homo sapien
gaagctttacaaacagacttgtcga

SEQ ID NO: 2140812 - DNA, 25 bp, Homo sapien
gctttacaaacagacttgtcgagca

SEQ ID NO: 2140813 - DNA, 25 bp, Homo sapien
ccagatgaggggagctctgatctaa

SEQ ID NO: 2140814 - DNA, 25 bp, Homo sapien
tttgaatgccagtttgagagtgctg

SEQ ID NO: 2140815 - DNA, 25 bp, Homo sapien
tgagagtgctgagtgcagtccagat

SEQ ID NO: 2140816 - DNA, 25 bp, Homo sapien
gatgaggggagctctgatctaagac

SEQ ID NO: 2140817 - DNA, 25 bp, Homo sapien
ggcgcgcggctctaaattacccaaa

SEQ ID NO: 2140818 - DNA, 25 bp, Homo sapien
tcggccacagactcaataccaagcg

SEQ ID NO: 2140819 - DNA, 25 bp, Homo sapien
taagcactccactaagcgatcacgg

SEQ ID NO: 2140820 - DNA, 25 bp, Homo sapien
agcgctttgcgttgctactccgcca

SEQ ID NO: 2140821 - DNA, 25 bp, Homo sapien
gagctgccgctgaagattttgatat

SEQ ID NO: 2140822 - DNA, 25 bp, Homo sapien
ggcccaggcggtcagcaattttctg

SEQ ID NO: 2140823 - DNA, 25 bp, Homo sapien
tgccgctgaagattttgatattcgg

SEQ ID NO: 2140824 - DNA, 25 bp, Homo sapien
gctgccgctgaagattttgatattc

SEQ ID NO: 2140825 - DNA, 25 bp, Homo sapien
ttgatttcgccacaaccactctgaa

SEQ ID NO: 2140826 - DNA, 25 bp, Homo sapien
ttgcaggcattaatcatgatcaaaa

SEQ ID NO: 2140827 - DNA, 25 bp, Homo sapien
tgatttcgccacaaccactctgaac

SEQ ID NO: 2140828 - DNA, 25 bp, Homo sapien
ggaagcatgggatgactgcagtaac

SEQ ID NO: 2140829 - DNA, 25 bp, Homo sapien
atctgcacctgctacagatagcata

SEQ ID NO: 2140830 - DNA, 25 bp, Homo sapien
ctgcacctgctacagatagcatatt

SEQ ID NO: 2140831 - DNA, 25 bp, Homo sapien
tctgcacctgctacagatagcatat

SEQ ID NO: 2140832 - DNA, 25 bp, Homo sapien
ctttcaaacaccaatatttagcttc

SEQ ID NO: 2140833 - DNA, 25 bp, Homo sapien
accaatatttagcttccactgatac

SEQ ID NO: 2140834 - DNA, 25 bp, Homo sapien
aacaccaatatttagcttccactga

SEQ ID NO: 2140835 - DNA, 25 bp, Homo sapien
aaacaccaatatttagcttccactg

SEQ ID NO: 2140836 - DNA, 25 bp, Homo sapien
tgcagtcttcagcatcatcagtcct

SEQ ID NO: 2140837 - DNA, 25 bp, Homo sapien
agtcttcagcatcatcagtcctttc

SEQ ID NO: 2140838 - DNA, 25 bp, Homo sapien
ttggcttctctgcagtcttcagcat

SEQ ID NO: 2140839 - DNA, 25 bp, Homo sapien
tcttcagcatcatcagtcctttcct

SEQ ID NO: 2140840 - DNA, 25 bp, Homo sapien
tcaggtgagacaatagtgcagttcc

SEQ ID NO: 2140841 - DNA, 25 bp, Homo sapien
tgagacaatagtgcagttcctccac

SEQ ID NO: 2140842 - DNA, 25 bp, Homo sapien
tatccactttaggacagccggctct

SEQ ID NO: 2140843 - DNA, 25 bp, Homo sapien
gccggctctgcatacaaattgtcta

SEQ ID NO: 2140844 - DNA, 25 bp, Homo sapien
actgtcactgtcaactgtacctgga

SEQ ID NO: 2140845 - DNA, 25 bp, Homo sapien
tcactgtcaactgtacctggacacc

SEQ ID NO: 2140846 - DNA, 25 bp, Homo sapien
ctggacaccaagcttgggagttttt

SEQ ID NO: 2140847 - DNA, 25 bp, Homo sapien
catccatcaactgtcactgtcaact

SEQ ID NO: 2140848 - DNA, 25 bp, Homo sapien
aaaacagagcgtgttcatatgtatg

SEQ ID NO: 2140849 - DNA, 25 bp, Homo sapien
acagagcgtgttcatatgtatgtgt

SEQ ID NO: 2140850 - DNA, 25 bp, Homo sapien
gcaaaacagagcgtgttcatatgta

SEQ ID NO: 2140851 - DNA, 25 bp, Homo sapien
ctgcaaaacagagcgtgttcatatg

SEQ ID NO: 2140852 - DNA, 25 bp, Homo sapien
acttcattggccttcttccgttctt

SEQ ID NO: 2140853 - DNA, 25 bp, Homo sapien
cttcattggccttcttccgttcttt

SEQ ID NO: 2140854 - DNA, 25 bp, Homo sapien
tccacttcattggccttcttccgtt

SEQ ID NO: 2140855 - DNA, 25 bp, Homo sapien
cacttcattggccttcttccgttct

SEQ ID NO: 2140856 - DNA, 25 bp, Homo sapien
atgcgagaaatagcaggaccggaga

SEQ ID NO: 2140857 - DNA, 25 bp, Homo sapien
ggcataaactctggtggcgccagct

SEQ ID NO: 2140858 - DNA, 25 bp, Homo sapien
cgagaaatagcaggaccggagaaga

SEQ ID NO: 2140859 - DNA, 25 bp, Homo sapien
caagatggcataaactctggtggcg

SEQ ID NO: 2140860 - DNA, 25 bp, Homo sapien
aagtcttgttttgcacaaatctcat

SEQ ID NO: 2140861 - DNA, 25 bp, Homo sapien
tgttttgcacaaatctcatcctcac

SEQ ID NO: 2140862 - DNA, 25 bp, Homo sapien
tcttgttttgcacaaatctcatcct

SEQ ID NO: 2140863 - DNA, 25 bp, Homo sapien
cacttagaaaagtcttgttttgcac

SEQ ID NO: 2140864 - DNA, 25 bp, Homo sapien
gggacatggctgaataggtaagaaa

SEQ ID NO: 2140865 - DNA, 25 bp, Homo sapien
ttataaagggacatggctgaatagg

SEQ ID NO: 2140866 - DNA, 25 bp, Homo sapien
caaggatcatagagatgtcaatcac

SEQ ID NO: 2140867 - DNA, 25 bp, Homo sapien
aggtaagaaacggattctccattgt

SEQ ID NO: 2140868 - DNA, 25 bp, Homo sapien
gattttattctcaaaaagcctcaga

SEQ ID NO: 2140869 - DNA, 25 bp, Homo sapien
ggattttattctcaaaaagcctcag

SEQ ID NO: 2140870 - DNA, 25 bp, Homo sapien
gtggattttattctcaaaaagcctc

SEQ ID NO: 2140871 - DNA, 25 bp, Homo sapien
ttttattctcaaaaagcctcagaag

SEQ ID NO: 2140872 - DNA, 25 bp, Homo sapien
aaagctacactggagcaagccgggt

SEQ ID NO: 2140873 - DNA, 25 bp, Homo sapien
tgctcagctaccaggactaggtttg

SEQ ID NO: 2140874 - DNA, 25 bp, Homo sapien
tcaagcagatggtgatggatcaggc

SEQ ID NO: 2140875 - DNA, 25 bp, Homo sapien
taggaggtcccagcagttaatctca

SEQ ID NO: 2140876 - DNA, 25 bp, Homo sapien
tctgccataatttggagcacaattt

SEQ ID NO: 2140877 - DNA, 25 bp, Homo sapien
tttggagcacaatttgctttattct

SEQ ID NO: 2140878 - DNA, 25 bp, Homo sapien
caaggagtctcagagtggtaaaaaa

SEQ ID NO: 2140879 - DNA, 25 bp, Homo sapien
tcttaaacaaggagtctcagagtgg

SEQ ID NO: 2140880 - DNA, 25 bp, Homo sapien
ggcttatatgccaagcaccgctgtt

SEQ ID NO: 2140881 - DNA, 25 bp, Homo sapien
tccttcaccacgtaattcctccctc

SEQ ID NO: 2140882 - DNA, 25 bp, Homo sapien
cttgtttgagggctggcttatatgc

SEQ ID NO: 2140883 - DNA, 25 bp, Homo sapien
tgccaagcaccgctgttcacttcat

SEQ ID NO: 2140884 - DNA, 25 bp, Homo sapien
tcaacccgtagagaggggctggctt

SEQ ID NO: 2140885 - DNA, 25 bp, Homo sapien
catcattgctttctgctccatccag

SEQ ID NO: 2140886 - DNA, 25 bp, Homo sapien
ctccatccaggcctttgctgatgga

SEQ ID NO: 2140887 - DNA, 25 bp, Homo sapien
ggctggctttcccatcatcattgct

SEQ ID NO: 2140888 - DNA, 25 bp, Homo sapien
atttcataaatctagaggctgtagc

SEQ ID NO: 2140889 - DNA, 25 bp, Homo sapien
caatttcataaatctagaggctgta

SEQ ID NO: 2140890 - DNA, 25 bp, Homo sapien
tcataaatctagaggctgtagcaaa

SEQ ID NO: 2140891 - DNA, 25 bp, Homo sapien
tttcataaatctagaggctgtagca

SEQ ID NO: 2140892 - DNA, 25 bp, Homo sapien
acattgagtttgtgctaatgaggcc

SEQ ID NO: 2140893 - DNA, 25 bp, Homo sapien
gtgacattgagtttgtgctaatgag

SEQ ID NO: 2140894 - DNA, 25 bp, Homo sapien
gccagtgacattgagtttgtgctaa

SEQ ID NO: 2140895 - DNA, 25 bp, Homo sapien
ccagtgacattgagtttgtgctaat

SEQ ID NO: 2140896 - DNA, 25 bp, Homo sapien
catcctttcaatagcggtagcaaca

SEQ ID NO: 2140897 - DNA, 25 bp, Homo sapien
taagatcagacaggaattcctcccg

SEQ ID NO: 2140898 - DNA, 25 bp, Homo sapien
cctcagagacgatactgtgggatac

SEQ ID NO: 2140899 - DNA, 25 bp, Homo sapien
caaacgaatcgctcagaagggcaag

SEQ ID NO: 2140900 - DNA, 25 bp, Homo sapien
ctcttcaggcaataagctctcactg

SEQ ID NO: 2140901 - DNA, 25 bp, Homo sapien
tcttcaggcaataagctctcactgc

SEQ ID NO: 2140902 - DNA, 25 bp, Homo sapien
cctcttcaggcaataagctctcact

SEQ ID NO: 2140903 - DNA, 25 bp, Homo sapien
cttcaggcaataagctctcactgct

SEQ ID NO: 2140904 - DNA, 25 bp, Homo sapien
ctgcccaagaaaacaaaacaagctc

SEQ ID NO: 2140905 - DNA, 25 bp, Homo sapien
tgcccaagaaaacaaaacaagctcc

SEQ ID NO: 2140906 - DNA, 25 bp, Homo sapien
caagaaaacaaaacaagctccgcta

SEQ ID NO: 2140907 - DNA, 25 bp, Homo sapien
ccaagaaaacaaaacaagctccgct

SEQ ID NO: 2140908 - DNA, 25 bp, Homo sapien
accgggacgcttcgccctgcctggg

SEQ ID NO: 2140909 - DNA, 25 bp, Homo sapien
gctcctggtgagttccgggtgactg

SEQ ID NO: 2140910 - DNA, 25 bp, Homo sapien
cagggaaggacgtgagttctttaga

SEQ ID NO: 2140911 - DNA, 25 bp, Homo sapien
tttagattttccaaacgcctctgac

SEQ ID NO: 2140912 - DNA, 25 bp, Homo sapien
caaccaattctcacacgagtcagac

SEQ ID NO: 2140913 - DNA, 25 bp, Homo sapien
tctcacacgagtcagactgtgataa

SEQ ID NO: 2140914 - DNA, 25 bp, Homo sapien
caattctcacacgagtcagactgtg

SEQ ID NO: 2140915 - DNA, 25 bp, Homo sapien
acacgagtcagactgtgataagtgc

SEQ ID NO: 2140916 - DNA, 25 bp, Homo sapien
gaagatcagtttgggcttcacagtg

SEQ ID NO: 2140917 - DNA, 25 bp, Homo sapien
ccagaaagcttgtctgtagcgggtt

SEQ ID NO: 2140918 - DNA, 25 bp, Homo sapien
accttatcctgatgtatggttccag

SEQ ID NO: 2140919 - DNA, 25 bp, Homo sapien
aaggatggtgtcctactgtggatga

SEQ ID NO: 2140920 - DNA, 25 bp, Homo sapien
ggattacagctttgggatgaccgct

SEQ ID NO: 2140921 - DNA, 25 bp, Homo sapien
tgtccactgaaacgtgaagtcctgt

SEQ ID NO: 2140922 - DNA, 25 bp, Homo sapien
cagccttgggagtattgactggtcc

SEQ ID NO: 2140923 - DNA, 25 bp, Homo sapien
gagattgagccaagtcagccttctg

SEQ ID NO: 2140924 - DNA, 25 bp, Homo sapien
tccagcgacagacccctgacaagag

SEQ ID NO: 2140925 - DNA, 25 bp, Homo sapien
ggagaactttacacctagcacagct

SEQ ID NO: 2140926 - DNA, 25 bp, Homo sapien
caagagatgtcctaaggacatggcc

SEQ ID NO: 2140927 - DNA, 25 bp, Homo sapien
acatggccacctgggtccactccag

SEQ ID NO: 2140928 - DNA, 25 bp, Homo sapien
aacaccctgttgaagaccctggcaa

SEQ ID NO: 2140929 - DNA, 25 bp, Homo sapien
tggagaagaactcccagctagagcg

SEQ ID NO: 2140930 - DNA, 25 bp, Homo sapien
ccagctagagcgtgagaacaccctg

SEQ ID NO: 2140931 - DNA, 25 bp, Homo sapien
tgaagagccagctcccgaatcccca

SEQ ID NO: 2140932 - DNA, 25 bp, Homo sapien
aaactgtccggaactctgggccagg

SEQ ID NO: 2140933 - DNA, 25 bp, Homo sapien
caacaagatcgaacaggccatggtg

SEQ ID NO: 2140934 - DNA, 25 bp, Homo sapien
tgtttgcatattgcccgagcaggcc

SEQ ID NO: 2140935 - DNA, 25 bp, Homo sapien
cgtggtggccatagacaacaagatc

SEQ ID NO: 2140936 - DNA, 25 bp, Homo sapien
tggagtttgtgacatacgaggtgac

SEQ ID NO: 2140937 - DNA, 25 bp, Homo sapien
cttggctttgggttcgttctgcagc

SEQ ID NO: 2140938 - DNA, 25 bp, Homo sapien
tgtgacatacgaggtgacacccctc

SEQ ID NO: 2140939 - DNA, 25 bp, Homo sapien
tacgaggtgacacccctcgagtcac

SEQ ID NO: 2140940 - DNA, 25 bp, Homo sapien
tgtgccggtccacagacaagtactc

SEQ ID NO: 2140941 - DNA, 25 bp, Homo sapien
atgcatctgtagattagcatggacc

SEQ ID NO: 2140942 - DNA, 25 bp, Homo sapien
tccagggagtatgacatgggagagc

SEQ ID NO: 2140943 - DNA, 25 bp, Homo sapien
catggacctgtgcatgcattacatg

SEQ ID NO: 2140944 - DNA, 25 bp, Homo sapien
tttctttggaccacagcctgtggag

SEQ ID NO: 2140945 - DNA, 25 bp, Homo sapien
tagcatgattgcgttaggatctttc

SEQ ID NO: 2140946 - DNA, 25 bp, Homo sapien
cacagcctgtggagcactgattcat

SEQ ID NO: 2140947 - DNA, 25 bp, Homo sapien
gataagaggccccagtacttttcca

SEQ ID NO: 2140948 - DNA, 25 bp, Homo sapien
catcttccttggaatcttcggggga

SEQ ID NO: 2140949 - DNA, 25 bp, Homo sapien
ttaacaagccaatgaaaggtcagct

SEQ ID NO: 2140950 - DNA, 25 bp, Homo sapien
gaaagcaatagttgaggaaaaatta

SEQ ID NO: 2140951 - DNA, 25 bp, Homo sapien
tctgtctccacataagggagtccct

SEQ ID NO: 2140952 - DNA, 25 bp, Homo sapien
gcaacattgccgaacctttgggtgg

SEQ ID NO: 2140953 - DNA, 25 bp, Homo sapien
ccctgtgttttgctggcaacattgc

SEQ ID NO: 2140954 - DNA, 25 bp, Homo sapien
gcttctcctgacacaggaccctgtg

SEQ ID NO: 2140955 - DNA, 25 bp, Homo sapien
tctcgcatcatgtctttttccgctt

SEQ ID NO: 2140956 - DNA, 25 bp, Homo sapien
gtggccttcctgtctatagtctccc

SEQ ID NO: 2140957 - DNA, 25 bp, Homo sapien
aactatgtaagtggcagtggccttc

SEQ ID NO: 2140958 - DNA, 25 bp, Homo sapien
ggccatgcagggcagttcacatgat

SEQ ID NO: 2140959 - DNA, 25 bp, Homo sapien
tgcagggcagttcacatgatccaca

SEQ ID NO: 2140960 - DNA, 25 bp, Homo sapien
gcacaattcattgctcctgccatca

SEQ ID NO: 2140961 - DNA, 25 bp, Homo sapien
gccccaaatcaattgctagagctgc

SEQ ID NO: 2140962 - DNA, 25 bp, Homo sapien
tcaattgctagagctgcttttccaa

SEQ ID NO: 2140963 - DNA, 25 bp, Homo sapien
ttctgtgccagagtttgccccaaat

SEQ ID NO: 2140964 - DNA, 25 bp, Homo sapien
gccttgttcccttgctttacaaagc

SEQ ID NO: 2140965 - DNA, 25 bp, Homo sapien
gtgccttgttcccttgctttacaaa

SEQ ID NO: 2140966 - DNA, 25 bp, Homo sapien
tgccttgttcccttgctttacaaag

SEQ ID NO: 2140967 - DNA, 25 bp, Homo sapien
ctgtgccttgttcccttgctttaca

SEQ ID NO: 2140968 - DNA, 25 bp, Homo sapien
agggcaaggaaccttagcacctgcc

SEQ ID NO: 2140969 - DNA, 25 bp, Homo sapien
gggcaaggaaccttagcacctgcct

SEQ ID NO: 2140970 - DNA, 25 bp, Homo sapien
agaaaatggcttggaatttcggctc

SEQ ID NO: 2140971 - DNA, 25 bp, Homo sapien
tgtcccgctggcctggatagactgg

SEQ ID NO: 2140972 - DNA, 25 bp, Homo sapien
tcccgctggcctggatagactggtg

SEQ ID NO: 2140973 - DNA, 25 bp, Homo sapien
ttggaatttcggctcttggaactgt

SEQ ID NO: 2140974 - DNA, 25 bp, Homo sapien
gagagtttccactgaccgctgtgaa

SEQ ID NO: 2140975 - DNA, 25 bp, Homo sapien
gatctcactcacattctggtcaaac

SEQ ID NO: 2140976 - DNA, 25 bp, Homo sapien
aaggcatccgttcctcttaacagag

SEQ ID NO: 2140977 - DNA, 25 bp, Homo sapien
gaccgctgtgaagtatcttaaaagg

SEQ ID NO: 2140978 - DNA, 25 bp, Homo sapien
ctgggaattgacccaggtttgaccg

SEQ ID NO: 2140979 - DNA, 25 bp, Homo sapien
tgacccaggtttgaccgggcagtga

SEQ ID NO: 2140980 - DNA, 25 bp, Homo sapien
gaattgacccaggtttgaccgggca

SEQ ID NO: 2140981 - DNA, 25 bp, Homo sapien
acccaggtttgaccgggcagtgaca

SEQ ID NO: 2140982 - DNA, 25 bp, Homo sapien
ttgagaccttgcacggcccattttc

SEQ ID NO: 2140983 - DNA, 25 bp, Homo sapien
tgagaccttgcacggcccattttca

SEQ ID NO: 2140984 - DNA, 25 bp, Homo sapien
acggcccattttcagtcgtggtcct

SEQ ID NO: 2140985 - DNA, 25 bp, Homo sapien
cattttcagtcgtggtcctgtctga

SEQ ID NO: 2140986 - DNA, 25 bp, Homo sapien
gctcctgaccttgagtcaccatgcg

SEQ ID NO: 2140987 - DNA, 25 bp, Homo sapien
aggagttctgtcagagtgtgaatgt

SEQ ID NO: 2140988 - DNA, 25 bp, Homo sapien
ggagggcttccatgtagccttggca

SEQ ID NO: 2140989 - DNA, 25 bp, Homo sapien
ggcctatgaagctgaaatcctggag

SEQ ID NO: 2140990 - DNA, 25 bp, Homo sapien
aagggcacttccgatggttggcacc

SEQ ID NO: 2140991 - DNA, 25 bp, Homo sapien
gaggatgctgacgtgggcatttcca

SEQ ID NO: 2140992 - DNA, 25 bp, Homo sapien
taggtcttcacgaatggaggtttgt

SEQ ID NO: 2140993 - DNA, 25 bp, Homo sapien
gtgggcatttccacgatttgtgatg

SEQ ID NO: 2140994 - DNA, 25 bp, Homo sapien
ttaccaagagggacaaggccacaaa

SEQ ID NO: 2140995 - DNA, 25 bp, Homo sapien
catctgctgggcactctgctgccca

SEQ ID NO: 2140996 - DNA, 25 bp, Homo sapien
gctatgggggttaccaagagggaca

SEQ ID NO: 2140997 - DNA, 25 bp, Homo sapien
cagacaccagttttggttgctatgg

SEQ ID NO: 2140998 - DNA, 25 bp, Homo sapien
gagtaggtaactctgtctgcctttg

SEQ ID NO: 2140999 - DNA, 25 bp, Homo sapien
tcctccagcgtcgaggctgtggctg

SEQ ID NO: 2141000 - DNA, 25 bp, Homo sapien
caccaggtgttaagcaagggctcct

SEQ ID NO: 2141001 - DNA, 25 bp, Homo sapien
taaccggaggatgtaggcctgttgt

SEQ ID NO: 2141002 - DNA, 25 bp, Homo sapien
gccaggcgacctccgagcctgagaa

SEQ ID NO: 2141003 - DNA, 25 bp, Homo sapien
tcgattgccgctcacctgtcggcct

SEQ ID NO: 2141004 - DNA, 25 bp, Homo sapien
tggcccagtccaagctcgattgccg

SEQ ID NO: 2141005 - DNA, 25 bp, Homo sapien
gtcggcctcgactgctgcaactgct

SEQ ID NO: 2141006 - DNA, 25 bp, Homo sapien
ggctttccggctgctacagcataga

SEQ ID NO: 2141007 - DNA, 25 bp, Homo sapien
tgctacagcatagagaccacaaccc

SEQ ID NO: 2141008 - DNA, 25 bp, Homo sapien
caagagcgagaagtacggcttgttt

SEQ ID NO: 2141009 - DNA, 25 bp, Homo sapien
ttgggatcctgtcaagagcgagaag

SEQ ID NO: 2141010 - DNA, 25 bp, Homo sapien
ctcagagaggaagacagtaagcagc

SEQ ID NO: 2141011 - DNA, 25 bp, Homo sapien
cagagaggaagacagtaagcagcat

SEQ ID NO: 2141012 - DNA, 25 bp, Homo sapien
gattctcagctcagagaggaagaca

SEQ ID NO: 2141013 - DNA, 25 bp, Homo sapien
ctggattctcagctcagagaggaag

SEQ ID NO: 2141014 - DNA, 25 bp, Homo sapien
tgaggactggaaccctgtggccaaa

SEQ ID NO: 2141015 - DNA, 25 bp, Homo sapien
tataagactgttcctaatgggtgag

SEQ ID NO: 2141016 - DNA, 25 bp, Homo sapien
gccattgttgaggactggaaccctg

SEQ ID NO: 2141017 - DNA, 25 bp, Homo sapien
tgtggccaaatatctactttgtgcc

SEQ ID NO: 2141018 - DNA, 25 bp, Homo sapien
tccattcatctaggcaggtcccagt

SEQ ID NO: 2141019 - DNA, 25 bp, Homo sapien
taaaaccgacatcccaatcagtgca

SEQ ID NO: 2141020 - DNA, 25 bp, Homo sapien
tgaactgatggtcccggtagcagct

SEQ ID NO: 2141021 - DNA, 25 bp, Homo sapien
gaaatttacggccactgaactgatg

SEQ ID NO: 2141022 - DNA, 25 bp, Homo sapien
gaatgaaaatcttcacgaaactcat

SEQ ID NO: 2141023 - DNA, 25 bp, Homo sapien
gaaaatcttcacgaaactcatccct

SEQ ID NO: 2141024 - DNA, 25 bp, Homo sapien
aatcttcacgaaactcatcccttac

SEQ ID NO: 2141025 - DNA, 25 bp, Homo sapien
cagaatgaaaatcttcacgaaactc

SEQ ID NO: 2141026 - DNA, 25 bp, Homo sapien
tagatctgagtctgtcttccaaagc

SEQ ID NO: 2141027 - DNA, 25 bp, Homo sapien
gatctgagtctgtcttccaaagcct

SEQ ID NO: 2141028 - DNA, 25 bp, Homo sapien
ctagatctgagtctgtcttccaaag

SEQ ID NO: 2141029 - DNA, 25 bp, Homo sapien
tctgagtctgtcttccaaagcctcc

SEQ ID NO: 2141030 - DNA, 25 bp, Homo sapien
gaaagtaagtacagatgctcattga

SEQ ID NO: 2141031 - DNA, 25 bp, Homo sapien
ggtacctgaagcatggtttctactg

SEQ ID NO: 2141032 - DNA, 25 bp, Homo sapien
cgaaatagttgtatgggtacctgaa

SEQ ID NO: 2141033 - DNA, 25 bp, Homo sapien
gaaagtaggaagtcagtacgtagcg

SEQ ID NO: 2141034 - DNA, 25 bp, Homo sapien
ttcgctgaagataatagtttagaag

SEQ ID NO: 2141035 - DNA, 25 bp, Homo sapien
ctgaagataatagtttagaagtgac

SEQ ID NO: 2141036 - DNA, 25 bp, Homo sapien
cgctgaagataatagtttagaagtg

SEQ ID NO: 2141037 - DNA, 25 bp, Homo sapien
ctgttcgctgaagataatagtttag

SEQ ID NO: 2141038 - DNA, 25 bp, Homo sapien
gcaaaattggctgggaatatgtcat

SEQ ID NO: 2141039 - DNA, 25 bp, Homo sapien
gaagcaagctaattggaccacagac

SEQ ID NO: 2141040 - DNA, 25 bp, Homo sapien
tatgaaagggacagctcatgggctg

SEQ ID NO: 2141041 - DNA, 25 bp, Homo sapien
gacattcgacagattcagcttgagg

SEQ ID NO: 2141042 - DNA, 25 bp, Homo sapien
cagcagccttttctccagcgccctg

SEQ ID NO: 2141043 - DNA, 25 bp, Homo sapien
agccttttctccagcgccctgtcat

SEQ ID NO: 2141044 - DNA, 25 bp, Homo sapien
agcagccttttctccagcgccctgt

SEQ ID NO: 2141045 - DNA, 25 bp, Homo sapien
cagctgattccagcagccttttctc

SEQ ID NO: 2141046 - DNA, 25 bp, Homo sapien
gaggcacgtttacatgtcttctccc

SEQ ID NO: 2141047 - DNA, 25 bp, Homo sapien
tctggaggcacgtttacatgtcttc

SEQ ID NO: 2141048 - DNA, 25 bp, Homo sapien
cctctggaggcacgtttacatgtct

SEQ ID NO: 2141049 - DNA, 25 bp, Homo sapien
tggaggcacgtttacatgtcttctc

SEQ ID NO: 2141050 - DNA, 25 bp, Homo sapien
tccgcagcgggttggctcgggctcc

SEQ ID NO: 2141051 - DNA, 25 bp, Homo sapien
agcaccacactgtcatttccgccgc

SEQ ID NO: 2141052 - DNA, 25 bp, Homo sapien
tccgctcgctcgagggcgctgggct

SEQ ID NO: 2141053 - DNA, 25 bp, Homo sapien
gacaccccaagggagcactgggaag

SEQ ID NO: 2141054 - DNA, 25 bp, Homo sapien
tactgggatttcatgtttcaggacg

SEQ ID NO: 2141055 - DNA, 25 bp, Homo sapien
tcagtaagacgatgatccagagact

SEQ ID NO: 2141056 - DNA, 25 bp, Homo sapien
tcagattgttcggtctcagtaagac

SEQ ID NO: 2141057 - DNA, 25 bp, Homo sapien
cgttcatcaaccagcggagtctgac

SEQ ID NO: 2141058 - DNA, 25 bp, Homo sapien
ctgaaaaaagaagtcgatgagcata

SEQ ID NO: 2141059 - DNA, 25 bp, Homo sapien
tgccttactacagggtgagacctct

SEQ ID NO: 2141060 - DNA, 25 bp, Homo sapien
tgagcataaactagaagaaggtacc

SEQ ID NO: 2141061 - DNA, 25 bp, Homo sapien
aagaaggtaccattgggctgtataa

SEQ ID NO: 2141062 - DNA, 25 bp, Homo sapien
tccttccagaatcatatctctgtct

SEQ ID NO: 2141063 - DNA, 25 bp, Homo sapien
ttccttccagaatcatatctctgtc

SEQ ID NO: 2141064 - DNA, 25 bp, Homo sapien
atacaaagcaagagtcattaggcat

SEQ ID NO: 2141065 - DNA, 25 bp, Homo sapien
ctgaggcattaagaaccacggaggc

SEQ ID NO: 2141066 - DNA, 25 bp, Homo sapien
gaaaatagtcctcctgaggcattaa

SEQ ID NO: 2141067 - DNA, 25 bp, Homo sapien
taagaaccacggaggctgggctttc

SEQ ID NO: 2141068 - DNA, 25 bp, Homo sapien
ctttagtgaaaatagtcctcctgag

SEQ ID NO: 2141069 - DNA, 25 bp, Homo sapien
gattggacaggtcaattcagactcc

SEQ ID NO: 2141070 - DNA, 25 bp, Homo sapien
agcagaagggggtcttcaaacaact

SEQ ID NO: 2141071 - DNA, 25 bp, Homo sapien
aacaactctaggcagattggacagg

SEQ ID NO: 2141072 - DNA, 25 bp, Homo sapien
ctgtgagcacaagggagcagaaggg

SEQ ID NO: 2141073 - DNA, 25 bp, Homo sapien
tgacgacccaccagtttgcataagg

SEQ ID NO: 2141074 - DNA, 25 bp, Homo sapien
aattcgctcgctagacatggcagtg

SEQ ID NO: 2141075 - DNA, 25 bp, Homo sapien
tctcatggtccaggcaggtgatccc

SEQ ID NO: 2141076 - DNA, 25 bp, Homo sapien
gccccggtggttcagcgagataaca

SEQ ID NO: 2141077 - DNA, 25 bp, Homo sapien
catttatgcgacaaagttgtatagg

SEQ ID NO: 2141078 - DNA, 25 bp, Homo sapien
tataggggatgctccccagatccct

SEQ ID NO: 2141079 - DNA, 25 bp, Homo sapien
ctaactgcatttatgcgacaaagtt

SEQ ID NO: 2141080 - DNA, 25 bp, Homo sapien
caaagttgtataggggatgctcccc

SEQ ID NO: 2141081 - DNA, 25 bp, Homo sapien
gatacactcagccacctccacccac

SEQ ID NO: 2141082 - DNA, 25 bp, Homo sapien
tagatacactcagccacctccaccc

SEQ ID NO: 2141083 - DNA, 25 bp, Homo sapien
ctagatacactcagccacctccacc

SEQ ID NO: 2141084 - DNA, 25 bp, Homo sapien
tacactcagccacctccacccacac

SEQ ID NO: 2141085 - DNA, 25 bp, Homo sapien
tttgtcaattctttccgcatggact

SEQ ID NO: 2141086 - DNA, 25 bp, Homo sapien
attctttccgcatggactctctccg

SEQ ID NO: 2141087 - DNA, 25 bp, Homo sapien
tctctccggtttggtccttcttctc

SEQ ID NO: 2141088 - DNA, 25 bp, Homo sapien
cgcatggactctctccggtttggtc

SEQ ID NO: 2141089 - DNA, 25 bp, Homo sapien
ggttagtgcaactttctcaggacag

SEQ ID NO: 2141090 - DNA, 25 bp, Homo sapien
ccttatgttcaagcccggttagtgc

SEQ ID NO: 2141091 - DNA, 25 bp, Homo sapien
caatgtagttaatgactgggccagg

SEQ ID NO: 2141092 - DNA, 25 bp, Homo sapien
agtaaacatgtctcttcgttgttgt

SEQ ID NO: 2141093 - DNA, 25 bp, Homo sapien
cctgctggcagatctgtattagttt

SEQ ID NO: 2141094 - DNA, 25 bp, Homo sapien
tgttgcgcttaaccaggttggtgag

SEQ ID NO: 2141095 - DNA, 25 bp, Homo sapien
tattagtttggccatttgattttct

SEQ ID NO: 2141096 - DNA, 25 bp, Homo sapien
tgattttctagttcgctgttgcgct

SEQ ID NO: 2141097 - DNA, 25 bp, Homo sapien
taaacctgccattctatgccagtgc

SEQ ID NO: 2141098 - DNA, 25 bp, Homo sapien
tgttctatgcgactagcactggtgc

SEQ ID NO: 2141099 - DNA, 25 bp, Homo sapien
catctttggacattcgtaaacctgc

SEQ ID NO: 2141100 - DNA, 25 bp, Homo sapien
tctaatcctcctcgtgtcctgggct

SEQ ID NO: 2141101 - DNA, 25 bp, Homo sapien
tccagaatatttcctttgccaccca

SEQ ID NO: 2141102 - DNA, 25 bp, Homo sapien
ccagaatatttcctttgccacccat

SEQ ID NO: 2141103 - DNA, 25 bp, Homo sapien
ctccagaatatttcctttgccaccc

SEQ ID NO: 2141104 - DNA, 25 bp, Homo sapien
caagcattccaagagtctattcaag

SEQ ID NO: 2141105 - DNA, 25 bp, Homo sapien
tctgtcaagtgaaacccctgggctg

SEQ ID NO: 2141106 - DNA, 25 bp, Homo sapien
gctgcccaagtataacaggaaagga

SEQ ID NO: 2141107 - DNA, 25 bp, Homo sapien
cagagcagtcatacagggaagcaca

SEQ ID NO: 2141108 - DNA, 25 bp, Homo sapien
ttttgacagcgatcatttgcttcct

SEQ ID NO: 2141109 - DNA, 25 bp, Homo sapien
tcttccataagttttgcctcatgca

SEQ ID NO: 2141110 - DNA, 25 bp, Homo sapien
gatctctaccaactcgtcacattct

SEQ ID NO: 2141111 - DNA, 25 bp, Homo sapien
ctggatgatctctaccaactcgtca

SEQ ID NO: 2141112 - DNA, 25 bp, Homo sapien
gaccgttcaagacactggcggcaat

SEQ ID NO: 2141113 - DNA, 25 bp, Homo sapien
tgcagactgtagaaaccgtgcctgg

SEQ ID NO: 2141114 - DNA, 25 bp, Homo sapien
tatgctcagcttggttgatgaggac

SEQ ID NO: 2141115 - DNA, 25 bp, Homo sapien
tggcggcaattagcaacctgctgtg

SEQ ID NO: 2141116 - DNA, 25 bp, Homo sapien
gagcaggcatttccaaagaatataa

SEQ ID NO: 2141117 - DNA, 25 bp, Homo sapien
aggcatttccaaagaatataaggaa

SEQ ID NO: 2141118 - DNA, 25 bp, Homo sapien
tttccaaagaatataaggaactgac

SEQ ID NO: 2141119 - DNA, 25 bp, Homo sapien
gcaggcatttccaaagaatataagg

SEQ ID NO: 2141120 - DNA, 25 bp, Homo sapien
tctctggaaaaatctaaagcaaagt

SEQ ID NO: 2141121 - DNA, 25 bp, Homo sapien
ctctggaaaaatctaaagcaaagtt

SEQ ID NO: 2141122 - DNA, 25 bp, Homo sapien
tgaactcatcatccgagatccagtg

SEQ ID NO: 2141123 - DNA, 25 bp, Homo sapien
ggcagtacagagttcttctcggata

SEQ ID NO: 2141124 - DNA, 25 bp, Homo sapien
gagctgatgctgaactcatcatccg

SEQ ID NO: 2141125 - DNA, 25 bp, Homo sapien
tcttctcggatagatggtgggtttg

SEQ ID NO: 2141126 - DNA, 25 bp, Homo sapien
ctctggccacaggccccaactacac

SEQ ID NO: 2141127 - DNA, 25 bp, Homo sapien
tctggccacaggccccaactacacc

SEQ ID NO: 2141128 - DNA, 25 bp, Homo sapien
tcgtggcgccccggccaatcttgag

SEQ ID NO: 2141129 - DNA, 25 bp, Homo sapien
cgtggcgccccggccaatcttgagc

SEQ ID NO: 2141130 - DNA, 25 bp, Homo sapien
ctcgtggcgccccggccaatcttga

SEQ ID NO: 2141131 - DNA, 25 bp, Homo sapien
tctggagtccatgcactgtgtaatg

SEQ ID NO: 2141132 - DNA, 25 bp, Homo sapien
tgttgggaacaatcatccagctgtc

SEQ ID NO: 2141133 - DNA, 25 bp, Homo sapien
taacgatgaagatgtagcgagtccc

SEQ ID NO: 2141134 - DNA, 25 bp, Homo sapien
ggtaggttcactgttccggctgccg

SEQ ID NO: 2141135 - DNA, 25 bp, Homo sapien
atgaccacctcccaatagtggcagc

SEQ ID NO: 2141136 - DNA, 25 bp, Homo sapien
tgtggctcttctttagagagctttc

SEQ ID NO: 2141137 - DNA, 25 bp, Homo sapien
catgttgaggaacccatgaccacct

SEQ ID NO: 2141138 - DNA, 25 bp, Homo sapien
catctgcaatccatcattggagatc

SEQ ID NO: 2141139 - DNA, 25 bp, Homo sapien
ggaggacacccagacgcttcaggtg

SEQ ID NO: 2141140 - DNA, 25 bp, Homo sapien
cacgaagttactattgcagcgagag

SEQ ID NO: 2141141 - DNA, 25 bp, Homo sapien
gcagttgcattcctgccgctcaggg

SEQ ID NO: 2141142 - DNA, 25 bp, Homo sapien
ggcaggcaagccagacaggatcatt

SEQ ID NO: 2141143 - DNA, 25 bp, Homo sapien
tgaacgctaacttaggtgtaggagg

SEQ ID NO: 2141144 - DNA, 25 bp, Homo sapien
gaagaactgctgaactagagagcca

SEQ ID NO: 2141145 - DNA, 25 bp, Homo sapien
tattttgtgtctcgtatattgaacg

SEQ ID NO: 2141146 - DNA, 25 bp, Homo sapien
agccagtgaattatatactctcctg

SEQ ID NO: 2141147 - DNA, 25 bp, Homo sapien
tctccaatggcttgaacgcagacta

SEQ ID NO: 2141148 - DNA, 25 bp, Homo sapien
aatttttctccaatggcttgaacgc

SEQ ID NO: 2141149 - DNA, 25 bp, Homo sapien
actcagataatttgttctgaaaaac

SEQ ID NO: 2141150 - DNA, 25 bp, Homo sapien
gaacgcagactactcagataatttg

SEQ ID NO: 2141151 - DNA, 25 bp, Homo sapien
tttcctaacaaacccttgatgatag

SEQ ID NO: 2141152 - DNA, 25 bp, Homo sapien
aataaagctcttcccattatctgtg

SEQ ID NO: 2141153 - DNA, 25 bp, Homo sapien
ttgttctagttcgaggtggtgtttg

SEQ ID NO: 2141154 - DNA, 25 bp, Homo sapien
gtaaatctctgctaatccaataaag

SEQ ID NO: 2141155 - DNA, 25 bp, Homo sapien
tagttggtgcatcaataatactcaa

SEQ ID NO: 2141156 - DNA, 25 bp, Homo sapien
cattcttgagcacttcagaagtgtt

SEQ ID NO: 2141157 - DNA, 25 bp, Homo sapien
aggttcctaaagagccttcactgtg

SEQ ID NO: 2141158 - DNA, 25 bp, Homo sapien
gaaaaagcaagtacatttatatggg

SEQ ID NO: 2141159 - DNA, 25 bp, Homo sapien
gaggtacttgtcctaggtcacaacg

SEQ ID NO: 2141160 - DNA, 25 bp, Homo sapien
tcttaaggtccatggcattgccagg

SEQ ID NO: 2141161 - DNA, 25 bp, Homo sapien
gtttattcaaaagtccatccgtgga

SEQ ID NO: 2141162 - DNA, 25 bp, Homo sapien
cttctactgggtgctaagggagcca

SEQ ID NO: 2141163 - DNA, 25 bp, Homo sapien
agtttggccaacctgtaacacacag

SEQ ID NO: 2141164 - DNA, 25 bp, Homo sapien
tggcagactacaccataaaaggcag

SEQ ID NO: 2141165 - DNA, 25 bp, Homo sapien
gagctcccaatacaaacaggcgtgg

SEQ ID NO: 2141166 - DNA, 25 bp, Homo sapien
gagacactattggtccagagctccc

SEQ ID NO: 2141167 - DNA, 25 bp, Homo sapien
aggcatgtaggaatctgcaggcctg

SEQ ID NO: 2141168 - DNA, 25 bp, Homo sapien
atgtaggaatctgcaggcctgggca

SEQ ID NO: 2141169 - DNA, 25 bp, Homo sapien
caggcatgtaggaatctgcaggcct

SEQ ID NO: 2141170 - DNA, 25 bp, Homo sapien
gcatgtaggaatctgcaggcctggg

SEQ ID NO: 2141171 - DNA, 25 bp, Homo sapien
gcggagaaggggaaatgactcagag

SEQ ID NO: 2141172 - DNA, 25 bp, Homo sapien
gaaatgactcagagaggaggcggcc

SEQ ID NO: 2141173 - DNA, 25 bp, Homo sapien
gggaaatgactcagagaggaggcgg

SEQ ID NO: 2141174 - DNA, 25 bp, Homo sapien
aatgactcagagaggaggcggccca

SEQ ID NO: 2141175 - DNA, 25 bp, Homo sapien
ttcccaaagccagtttgctcttcct

SEQ ID NO: 2141176 - DNA, 25 bp, Homo sapien
cagagggtaagggattccaagagaa

SEQ ID NO: 2141177 - DNA, 25 bp, Homo sapien
tcctgccagagggtaagggattcca

SEQ ID NO: 2141178 - DNA, 25 bp, Homo sapien
ggttcccaaagccagtttgctcttc

SEQ ID NO: 2141179 - DNA, 25 bp, Homo sapien
cgtttctcatcctcgctggggaaag

SEQ ID NO: 2141180 - DNA, 25 bp, Homo sapien
aggactgcggggaggcgtttctcat

SEQ ID NO: 2141181 - DNA, 25 bp, Homo sapien
gcgtttctcatcctcgctggggaaa

SEQ ID NO: 2141182 - DNA, 25 bp, Homo sapien
tcaggcgtgtgactttacaggatga

SEQ ID NO: 2141183 - DNA, 25 bp, Homo sapien
tggctgacagcacaactaggtatgc

SEQ ID NO: 2141184 - DNA, 25 bp, Homo sapien
ggctttggctgacagcacaactagg

SEQ ID NO: 2141185 - DNA, 25 bp, Homo sapien
actttacaggatgaacttggtgggc

SEQ ID NO: 2141186 - DNA, 25 bp, Homo sapien
agaggttgcttctaaaatgacattc

SEQ ID NO: 2141187 - DNA, 25 bp, Homo sapien
cttctagaggttgcttctaaaatga

SEQ ID NO: 2141188 - DNA, 25 bp, Homo sapien
ctagaggttgcttctaaaatgacat

SEQ ID NO: 2141189 - DNA, 25 bp, Homo sapien
tctagaggttgcttctaaaatgaca

SEQ ID NO: 2141190 - DNA, 25 bp, Homo sapien
taagatcccttataaggccactgca

SEQ ID NO: 2141191 - DNA, 25 bp, Homo sapien
ctcattatcataggctcaccttctg

SEQ ID NO: 2141192 - DNA, 25 bp, Homo sapien
agatgatggctacactgacctccag

SEQ ID NO: 2141193 - DNA, 25 bp, Homo sapien
ttggtgcctttctcattatcatagg

SEQ ID NO: 2141194 - DNA, 25 bp, Homo sapien
gtcagtgtgttatgatgccctccca

SEQ ID NO: 2141195 - DNA, 25 bp, Homo sapien
tacccagtgtaggtgccattgtgca

SEQ ID NO: 2141196 - DNA, 25 bp, Homo sapien
tgtgagcaaagtctcgccactggca

SEQ ID NO: 2141197 - DNA, 25 bp, Homo sapien
tcacaaaacccttgaggtggtatca

SEQ ID NO: 2141198 - DNA, 25 bp, Homo sapien
caataaactccaggtacaagcaagt

SEQ ID NO: 2141199 - DNA, 25 bp, Homo sapien
agacaataaactccaggtacaagca

SEQ ID NO: 2141200 - DNA, 25 bp, Homo sapien
gacaataaactccaggtacaagcaa

SEQ ID NO: 2141201 - DNA, 25 bp, Homo sapien
aataaactccaggtacaagcaagtt

SEQ ID NO: 2141202 - DNA, 25 bp, Homo sapien
aacgaagccagagaatttgaagcaa

SEQ ID NO: 2141203 - DNA, 25 bp, Homo sapien
atgaaaacgaagccagagaatttga

SEQ ID NO: 2141204 - DNA, 25 bp, Homo sapien
aaaacgaagccagagaatttgaagc

SEQ ID NO: 2141205 - DNA, 25 bp, Homo sapien
gaaaacgaagccagagaatttgaag

SEQ ID NO: 2141206 - DNA, 25 bp, Homo sapien
tgcctggagtaaccgttcctgctgc

SEQ ID NO: 2141207 - DNA, 25 bp, Homo sapien
gtgtctcttctgatataccatggtc

SEQ ID NO: 2141208 - DNA, 25 bp, Homo sapien
cagtcgtgactctatatgcttgcca

SEQ ID NO: 2141209 - DNA, 25 bp, Homo sapien
taaaatgatcttgttgaggaattcc

SEQ ID NO: 2141210 - DNA, 25 bp, Homo sapien
taaggttagcaatatggctgatttc

SEQ ID NO: 2141211 - DNA, 25 bp, Homo sapien
gttgacgtagatgagatagtcacac

SEQ ID NO: 2141212 - DNA, 25 bp, Homo sapien
ggctgatttcaatgcagttgacgta

SEQ ID NO: 2141213 - DNA, 25 bp, Homo sapien
gcagaactaaggttagcaatatggc

SEQ ID NO: 2141214 - DNA, 25 bp, Homo sapien
tgtaaaccataatatctctgcctgg

SEQ ID NO: 2141215 - DNA, 25 bp, Homo sapien
tcttcatggctgtaggccgggcagt

SEQ ID NO: 2141216 - DNA, 25 bp, Homo sapien
tcacaaaactgcacaagagactctc

SEQ ID NO: 2141217 - DNA, 25 bp, Homo sapien
ttcttggtcaccaacagggtcctgc

SEQ ID NO: 2141218 - DNA, 25 bp, Homo sapien
ggtaggttgaagcagtataattgac

SEQ ID NO: 2141219 - DNA, 25 bp, Homo sapien
caggtccaccggctcaatctgtaac

SEQ ID NO: 2141220 - DNA, 25 bp, Homo sapien
cctcctcaaatccaagtaggtgctg

SEQ ID NO: 2141221 - DNA, 25 bp, Homo sapien
tctgtaacctagaagacttatcctt

SEQ ID NO: 2141222 - DNA, 25 bp, Homo sapien
acacagttgggctgttttaatcctt

SEQ ID NO: 2141223 - DNA, 25 bp, Homo sapien
gacacagttgggctgttttaatcct

SEQ ID NO: 2141224 - DNA, 25 bp, Homo sapien
gctaagaacagctgctagagcccca

SEQ ID NO: 2141225 - DNA, 25 bp, Homo sapien
aagctgaagcttccagttttgtctc

SEQ ID NO: 2141226 - DNA, 25 bp, Homo sapien
cagaagagataaggcaccggtacca

SEQ ID NO: 2141227 - DNA, 25 bp, Homo sapien
gatcttttaagcctccatagagcaa

SEQ ID NO: 2141228 - DNA, 25 bp, Homo sapien
actgcacctccaactcattcaggga

SEQ ID NO: 2141229 - DNA, 25 bp, Homo sapien
ttactgcacctccaactcattcagg

SEQ ID NO: 2141230 - DNA, 25 bp, Homo sapien
acctccaactcattcagggaaggtt

SEQ ID NO: 2141231 - DNA, 25 bp, Homo sapien
tgcacctccaactcattcagggaag

SEQ ID NO: 2141232 - DNA, 25 bp, Homo sapien
tgaagtgcaggtgatacagaagcag

SEQ ID NO: 2141233 - DNA, 25 bp, Homo sapien
taagtgaatattgagtccagttctc

SEQ ID NO: 2141234 - DNA, 25 bp, Homo sapien
caagatacttcagattcagtgctgg

SEQ ID NO: 2141235 - DNA, 25 bp, Homo sapien
ttctggtttgtaggcactgagctgg

SEQ ID NO: 2141236 - DNA, 25 bp, Homo sapien
ctggacacactaacagtggtgccag

SEQ ID NO: 2141237 - DNA, 25 bp, Homo sapien
ggagcactcagtgcaccgttaccac

SEQ ID NO: 2141238 - DNA, 25 bp, Homo sapien
actaacagtggtgccagcatatgct

SEQ ID NO: 2141239 - DNA, 25 bp, Homo sapien
agtgcaccgttaccaccacgagggc

SEQ ID NO: 2141240 - DNA, 25 bp, Homo sapien
ggagatggtctctcacctttgtggg

SEQ ID NO: 2141241 - DNA, 25 bp, Homo sapien
caagaggatgactgagccccgtctg

SEQ ID NO: 2141242 - DNA, 25 bp, Homo sapien
cagaaatgtcaggacacccaggaga

SEQ ID NO: 2141243 - DNA, 25 bp, Homo sapien
agctcgtatcattccccctctggag

SEQ ID NO: 2141244 - DNA, 25 bp, Homo sapien
gtctgatgccaaacgttggctccag

SEQ ID NO: 2141245 - DNA, 25 bp, Homo sapien
tgcagcctatcctgtccatgctcat

SEQ ID NO: 2141246 - DNA, 25 bp, Homo sapien
cattttgcttccatcatgcctgatt

SEQ ID NO: 2141247 - DNA, 25 bp, Homo sapien
tccaatctcccactgcttcttagaa

SEQ ID NO: 2141248 - DNA, 25 bp, Homo sapien
tctcccactgcttcttagaaagcca

SEQ ID NO: 2141249 - DNA, 25 bp, Homo sapien
caaattggcttcttcgatcacaccg

SEQ ID NO: 2141250 - DNA, 25 bp, Homo sapien
gactaggctgagtctcaaattggct

SEQ ID NO: 2141251 - DNA, 25 bp, Homo sapien
gatcacaccgaggtttgcctggctt

SEQ ID NO: 2141252 - DNA, 25 bp, Homo sapien
cagcaggtgccagtagcttgcctgg

SEQ ID NO: 2141253 - DNA, 25 bp, Homo sapien
agaaagaccttccaaaatgcgaaca

SEQ ID NO: 2141254 - DNA, 25 bp, Homo sapien
atcagaaagaccttccaaaatgcga

SEQ ID NO: 2141255 - DNA, 25 bp, Homo sapien
tcagaaagaccttccaaaatgcgaa

SEQ ID NO: 2141256 - DNA, 25 bp, Homo sapien
cagaaagaccttccaaaatgcgaac

SEQ ID NO: 2141257 - DNA, 25 bp, Homo sapien
tgctgcaaaataggtcttaaaaact

SEQ ID NO: 2141258 - DNA, 25 bp, Homo sapien
caactatggtgagcatgctgcaaaa

SEQ ID NO: 2141259 - DNA, 25 bp, Homo sapien
gagttcaactcttttagatctcaca

SEQ ID NO: 2141260 - DNA, 25 bp, Homo sapien
caatgtgtagactaaaatcttatgc

SEQ ID NO: 2141261 - DNA, 25 bp, Homo sapien
gggatggtcacttgcaccacactaa

SEQ ID NO: 2141262 - DNA, 25 bp, Homo sapien
ttcacgaaaccgtctgggatggtca

SEQ ID NO: 2141263 - DNA, 25 bp, Homo sapien
tagatccaacagtcacgttcacgaa

SEQ ID NO: 2141264 - DNA, 25 bp, Homo sapien
ggaaagctgttctcgggaggccaca

SEQ ID NO: 2141265 - DNA, 25 bp, Homo sapien
ggtcacaggatccttcggctctgca

SEQ ID NO: 2141266 - DNA, 25 bp, Homo sapien
gaggtagccttgtaaatcccagtgt

SEQ ID NO: 2141267 - DNA, 25 bp, Homo sapien
taagagatgttctgggctcaggcca

SEQ ID NO: 2141268 - DNA, 25 bp, Homo sapien
gacacacagttcaaccaagaggtag

SEQ ID NO: 2141269 - DNA, 25 bp, Homo sapien
tcttgcgtgcgtcatttttagacac

SEQ ID NO: 2141270 - DNA, 25 bp, Homo sapien
agaggtccagctacatcttccccga

SEQ ID NO: 2141271 - DNA, 25 bp, Homo sapien
cctcagtactgaggcacgagctgtg

SEQ ID NO: 2141272 - DNA, 25 bp, Homo sapien
atcttccccgagcgtctcttgcgtg

SEQ ID NO: 2141273 - DNA, 25 bp, Homo sapien
tcaagagtgcccttcacagcctcaa

SEQ ID NO: 2141274 - DNA, 25 bp, Homo sapien
aagagtgcccttcacagcctcaaca

SEQ ID NO: 2141275 - DNA, 25 bp, Homo sapien
agagtgcccttcacagcctcaacat

SEQ ID NO: 2141276 - DNA, 25 bp, Homo sapien
gagtgcccttcacagcctcaacatc

SEQ ID NO: 2141277 - DNA, 25 bp, Homo sapien
gcattacctggatcgttggaccctg

SEQ ID NO: 2141278 - DNA, 25 bp, Homo sapien
taaattgcccgatggctacagcttg

SEQ ID NO: 2141279 - DNA, 25 bp, Homo sapien
gcttgtccaccttgagaaaagtaaa

SEQ ID NO: 2141280 - DNA, 25 bp, Homo sapien
gctggctgcatatgcgagatagtga

SEQ ID NO: 2141281 - DNA, 25 bp, Homo sapien
aagggaaatagtgtggccagtttct

SEQ ID NO: 2141282 - DNA, 25 bp, Homo sapien
ctggtcttccttgaacgctacaaag

SEQ ID NO: 2141283 - DNA, 25 bp, Homo sapien
aggtgttccaagcgcagagagacag

SEQ ID NO: 2141284 - DNA, 25 bp, Homo sapien
tgaacgctacaaaggggcttagaag

SEQ ID NO: 2141285 - DNA, 25 bp, Homo sapien
gaaaccagggaatagacttttgaga

SEQ ID NO: 2141286 - DNA, 25 bp, Homo sapien
ttgaaaccagggaatagacttttga

SEQ ID NO: 2141287 - DNA, 25 bp, Homo sapien
aaccagggaatagacttttgagatc

SEQ ID NO: 2141288 - DNA, 25 bp, Homo sapien
cagggaatagacttttgagatctct

SEQ ID NO: 2141289 - DNA, 25 bp, Homo sapien
gaagaagtgagatcgatttcgcagg

SEQ ID NO: 2141290 - DNA, 25 bp, Homo sapien
caatgaccaaaatcccggtggttgg

SEQ ID NO: 2141291 - DNA, 25 bp, Homo sapien
tggcagtacactggtaataaccttg

SEQ ID NO: 2141292 - DNA, 25 bp, Homo sapien
gaactattgccaagtctgttgatgg

SEQ ID NO: 2141293 - DNA, 25 bp, Homo sapien
ccaacaatgattccaacttctggat

SEQ ID NO: 2141294 - DNA, 25 bp, Homo sapien
ccccaacaatgattccaacttctgg

SEQ ID NO: 2141295 - DNA, 25 bp, Homo sapien
ggctaccaatcaaggccccaacaat

SEQ ID NO: 2141296 - DNA, 25 bp, Homo sapien
agagatgatgatggcggcacctacc

SEQ ID NO: 2141297 - DNA, 25 bp, Homo sapien
gttccgcgatggtcttagaatttct

SEQ ID NO: 2141298 - DNA, 25 bp, Homo sapien
caagttccgcgatggtcttagaatt

SEQ ID NO: 2141299 - DNA, 25 bp, Homo sapien
tcaagttccgcgatggtcttagaat

SEQ ID NO: 2141300 - DNA, 25 bp, Homo sapien
ccgcgatggtcttagaatttctttc

SEQ ID NO: 2141301 - DNA, 25 bp, Homo sapien
ggcactgccataggctctgatcctg

SEQ ID NO: 2141302 - DNA, 25 bp, Homo sapien
tagttgggtagcgtcttctcttggc

SEQ ID NO: 2141303 - DNA, 25 bp, Homo sapien
ggctccaattccgactgcgtttctg

SEQ ID NO: 2141304 - DNA, 25 bp, Homo sapien
tatcagggccagtctcatgaatgga

SEQ ID NO: 2141305 - DNA, 25 bp, Homo sapien
catagtaggaatgagcaccttgtta

SEQ ID NO: 2141306 - DNA, 25 bp, Homo sapien
ttccaaatggcagtaatgggttcct

SEQ ID NO: 2141307 - DNA, 25 bp, Homo sapien
gattaatgctgtacttaggccacca

SEQ ID NO: 2141308 - DNA, 25 bp, Homo sapien
caggaacccttgctgatttagctgt

SEQ ID NO: 2141309 - DNA, 25 bp, Homo sapien
tataaaaggactagccttaggagtc

SEQ ID NO: 2141310 - DNA, 25 bp, Homo sapien
aaaaggactagccttaggagtcact

SEQ ID NO: 2141311 - DNA, 25 bp, Homo sapien
tatacataaatgctatgtcagaaaa

SEQ ID NO: 2141312 - DNA, 25 bp, Homo sapien
ggactagccttaggagtcactaaaa

SEQ ID NO: 2141313 - DNA, 25 bp, Homo sapien
gatggtgtgctctaaaatactgaaa

SEQ ID NO: 2141314 - DNA, 25 bp, Homo sapien
gaccacattttaagttggatggtgt

SEQ ID NO: 2141315 - DNA, 25 bp, Homo sapien
taagttggatggtgtgctctaaaat

SEQ ID NO: 2141316 - DNA, 25 bp, Homo sapien
ctattttgtgtcatcctgtattgaa

SEQ ID NO: 2141317 - DNA, 25 bp, Homo sapien
ggtggcctgggtttaatactcaaga

SEQ ID NO: 2141318 - DNA, 25 bp, Homo sapien
gagttacttgttcgaagcttacagc

SEQ ID NO: 2141319 - DNA, 25 bp, Homo sapien
ttccaggcatcgaataactgttgag

SEQ ID NO: 2141320 - DNA, 25 bp, Homo sapien
tttgtgcacaagacatcatctatga

SEQ ID NO: 2141321 - DNA, 25 bp, Homo sapien
tgagggcagcaaaggcgcctccctg

SEQ ID NO: 2141322 - DNA, 25 bp, Homo sapien
ccaagtctgtgagggcagcaaaggc

SEQ ID NO: 2141323 - DNA, 25 bp, Homo sapien
ctccctgcccggaactgctctcaaa

SEQ ID NO: 2141324 - DNA, 25 bp, Homo sapien
tctgtgagggcagcaaaggcgcctc

SEQ ID NO: 2141325 - DNA, 25 bp, Homo sapien
cttgactacggacggacggtcgcta

SEQ ID NO: 2141326 - DNA, 25 bp, Homo sapien
caccggcaacttgactacggacgga

SEQ ID NO: 2141327 - DNA, 25 bp, Homo sapien
gacggtcgctaggatccctgggact

SEQ ID NO: 2141328 - DNA, 25 bp, Homo sapien
tgggccaattccaccggcaacttga

SEQ ID NO: 2141329 - DNA, 25 bp, Homo sapien
cccggctctttcacacggttccact

SEQ ID NO: 2141330 - DNA, 25 bp, Homo sapien
ccggctctttcacacggttccactc

SEQ ID NO: 2141331 - DNA, 25 bp, Homo sapien
ggctctttcacacggttccactcaa

SEQ ID NO: 2141332 - DNA, 25 bp, Homo sapien
cggctctttcacacggttccactca

SEQ ID NO: 2141333 - DNA, 25 bp, Homo sapien
aagaaatatcactgtccctctctgc

SEQ ID NO: 2141334 - DNA, 25 bp, Homo sapien
agatgacaagatggtctacatagaa

SEQ ID NO: 2141335 - DNA, 25 bp, Homo sapien
gaagaaatatcactgtccctctctg

SEQ ID NO: 2141336 - DNA, 25 bp, Homo sapien
gacaagatggtctacatagaaagtc

SEQ ID NO: 2141337 - DNA, 25 bp, Homo sapien
tttgttgtttagaatcaacctgctg

SEQ ID NO: 2141338 - DNA, 25 bp, Homo sapien
tgttgtttagaatcaacctgctggt

SEQ ID NO: 2141339 - DNA, 25 bp, Homo sapien
ttgtttagaatcaacctgctggtca

SEQ ID NO: 2141340 - DNA, 25 bp, Homo sapien
gttgtttagaatcaacctgctggtc

SEQ ID NO: 2141341 - DNA, 25 bp, Homo sapien
ccataccagctcatctgtatctgga

SEQ ID NO: 2141342 - DNA, 25 bp, Homo sapien
tgctgcttccctaagatccatacca

SEQ ID NO: 2141343 - DNA, 25 bp, Homo sapien
atagtaatctgatcttcatacttgg

SEQ ID NO: 2141344 - DNA, 25 bp, Homo sapien
gaaaatagtaatctgatcttcatac

SEQ ID NO: 2141345 - DNA, 25 bp, Homo sapien
taattgctagctccaggctttccac

SEQ ID NO: 2141346 - DNA, 25 bp, Homo sapien
ggagctccacaatgcctaacttcct

SEQ ID NO: 2141347 - DNA, 25 bp, Homo sapien
caagctctggctttatctgggtgct

SEQ ID NO: 2141348 - DNA, 25 bp, Homo sapien
cttcctccacgctaagtgagggcct

SEQ ID NO: 2141349 - DNA, 25 bp, Homo sapien
tgtaaaccatagacgagcacttata

SEQ ID NO: 2141350 - DNA, 25 bp, Homo sapien
ttatatcagacaacagcttagattt

SEQ ID NO: 2141351 - DNA, 25 bp, Homo sapien
catagacgagcacttatatcagaca

SEQ ID NO: 2141352 - DNA, 25 bp, Homo sapien
ttctgtatgtaaaccatagacgagc

SEQ ID NO: 2141353 - DNA, 25 bp, Homo sapien
accagcatctgatgaagggcccgtt

SEQ ID NO: 2141354 - DNA, 25 bp, Homo sapien
acatccccaaccagcatctgatgaa

SEQ ID NO: 2141355 - DNA, 25 bp, Homo sapien
cagcatctgatgaagggcccgttcc

SEQ ID NO: 2141356 - DNA, 25 bp, Homo sapien
gcatctgatgaagggcccgttccac

SEQ ID NO: 2141357 - DNA, 25 bp, Homo sapien
cttcccaagtgtctacagataaggg

SEQ ID NO: 2141358 - DNA, 25 bp, Homo sapien
cagctggacatccttagtgaaccaa

SEQ ID NO: 2141359 - DNA, 25 bp, Homo sapien
ccctctatgcacttcctttaggtca

SEQ ID NO: 2141360 - DNA, 25 bp, Homo sapien
aaaatagcgccagctccctctatgc

SEQ ID NO: 2141361 - DNA, 25 bp, Homo sapien
aaaaccaaaatagcgccagctccct

SEQ ID NO: 2141362 - DNA, 25 bp, Homo sapien
agtgcctgaactggcatccagccaa

SEQ ID NO: 2141363 - DNA, 25 bp, Homo sapien
gcccaatctcatccaaagtgtcctt

SEQ ID NO: 2141364 - DNA, 25 bp, Homo sapien
aactggaccttcacccaagtgcctg

SEQ ID NO: 2141365 - DNA, 25 bp, Homo sapien
tagcaacagccaatgagttcagcag

SEQ ID NO: 2141366 - DNA, 25 bp, Homo sapien
ccatttgatggatagagtagcaaca

SEQ ID NO: 2141367 - DNA, 25 bp, Homo sapien
tgtaggatgcgttggtattctttgg

SEQ ID NO: 2141368 - DNA, 25 bp, Homo sapien
tggatagagtagcaacaatcttttc

SEQ ID NO: 2141369 - DNA, 25 bp, Homo sapien
ctaagaagcactgtaggatgcgttg

SEQ ID NO: 2141370 - DNA, 25 bp, Homo sapien
attctccaattgatttcccttctcc

SEQ ID NO: 2141371 - DNA, 25 bp, Homo sapien
ctgtatttggtccaaaccattctcc

SEQ ID NO: 2141372 - DNA, 25 bp, Homo sapien
gcaactgtatttggtccaaaccatt

SEQ ID NO: 2141373 - DNA, 25 bp, Homo sapien
tctccaattgatttcccttctccta

SEQ ID NO: 2141374 - DNA, 25 bp, Homo sapien
gcagatgccagactcttttacttac

SEQ ID NO: 2141375 - DNA, 25 bp, Homo sapien
cagatatttgatggtttagtgggag

SEQ ID NO: 2141376 - DNA, 25 bp, Homo sapien
taggagacagcagaataaggcagat

SEQ ID NO: 2141377 - DNA, 25 bp, Homo sapien
gcttagcgggattgcaagaatacct

SEQ ID NO: 2141378 - DNA, 25 bp, Homo sapien
gccaaggaattccattcgtcaaata

SEQ ID NO: 2141379 - DNA, 25 bp, Homo sapien
acagccaaggaattccattcgtcaa

SEQ ID NO: 2141380 - DNA, 25 bp, Homo sapien
ccattcgtcaaataaagcaagtttt

SEQ ID NO: 2141381 - DNA, 25 bp, Homo sapien
ggaattccattcgtcaaataaagca

SEQ ID NO: 2141382 - DNA, 25 bp, Homo sapien
aatcgggaggcctgtcaccagctgt

SEQ ID NO: 2141383 - DNA, 25 bp, Homo sapien
caagggaaggacacggcacattttt

SEQ ID NO: 2141384 - DNA, 25 bp, Homo sapien
gaatcgggaggcctgtcaccagctg

SEQ ID NO: 2141385 - DNA, 25 bp, Homo sapien
ctgtgtcagcactcaagggaaggac

SEQ ID NO: 2141386 - DNA, 25 bp, Homo sapien
tttgaatgcatcaacatagacagga

SEQ ID NO: 2141387 - DNA, 25 bp, Homo sapien
tgcatcaacatagacaggattgatt

SEQ ID NO: 2141388 - DNA, 25 bp, Homo sapien
tatgcccaggcgaaggggcacaatg

SEQ ID NO: 2141389 - DNA, 25 bp, Homo sapien
cgaaggggcacaatgagcagcaggg

SEQ ID NO: 2141390 - DNA, 25 bp, Homo sapien
gcccctaaagactgtggcatcttaa

SEQ ID NO: 2141391 - DNA, 25 bp, Homo sapien
aagactgtggcatcttaaaacactc

SEQ ID NO: 2141392 - DNA, 25 bp, Homo sapien
ttcctcctaatgcccctaaagactg

SEQ ID NO: 2141393 - DNA, 25 bp, Homo sapien
aagaatcctatgaaataatacgcgt

SEQ ID NO: 2141394 - DNA, 25 bp, Homo sapien
tacaattgaccatacgtggaaaacc

SEQ ID NO: 2141395 - DNA, 25 bp, Homo sapien
gaatcatcgctcgtgagaggcaagg

SEQ ID NO: 2141396 - DNA, 25 bp, Homo sapien
tgcatttgacacacctgaatcatcg

SEQ ID NO: 2141397 - DNA, 25 bp, Homo sapien
gggattctagctccaggcttcagaa

SEQ ID NO: 2141398 - DNA, 25 bp, Homo sapien
gcacaatctaaccagctgccagggt

SEQ ID NO: 2141399 - DNA, 25 bp, Homo sapien
caaaagtgcctaagaggtaccccag

SEQ ID NO: 2141400 - DNA, 25 bp, Homo sapien
tgagatgactgaccttgacacaaga

SEQ ID NO: 2141401 - DNA, 25 bp, Homo sapien
tcaggcgagcaaggagagatctacc

SEQ ID NO: 2141402 - DNA, 25 bp, Homo sapien
cattagggagctttctgcctctttt

SEQ ID NO: 2141403 - DNA, 25 bp, Homo sapien
ctgtgagcagcagtagcaaagaggc

SEQ ID NO: 2141404 - DNA, 25 bp, Homo sapien
ttcaatgagaagatgtgccctagca

SEQ ID NO: 2141405 - DNA, 25 bp, Homo sapien
aatgagagaccacagatggcatggc

SEQ ID NO: 2141406 - DNA, 25 bp, Homo sapien
cagggtgagcatgcttaaaggaagc

SEQ ID NO: 2141407 - DNA, 25 bp, Homo sapien
tcaaaggattaccggtcctggccca

SEQ ID NO: 2141408 - DNA, 25 bp, Homo sapien
gcaactgaaggatccaggtttagga

SEQ ID NO: 2141409 - DNA, 25 bp, Homo sapien
ggtttaggatgttcattcgctgtgg

SEQ ID NO: 2141410 - DNA, 25 bp, Homo sapien
gaaagtctggtcattaaccgttcca

SEQ ID NO: 2141411 - DNA, 25 bp, Homo sapien
tcttcagtgtcaacaaaggtctggg

SEQ ID NO: 2141412 - DNA, 25 bp, Homo sapien
ccaaatggtacttttagctagaggc

SEQ ID NO: 2141413 - DNA, 25 bp, Homo sapien
gctcctggtcactggtatactgaca

SEQ ID NO: 2141414 - DNA, 25 bp, Homo sapien
caaatccatcccagagtagtgaaag

SEQ ID NO: 2141415 - DNA, 25 bp, Homo sapien
aaagaatggttcacaagaggaggac

SEQ ID NO: 2141416 - DNA, 25 bp, Homo sapien
aaggctacaccagttatcaaagtct

SEQ ID NO: 2141417 - DNA, 25 bp, Homo sapien
gaacaaggctacaccagttatcaaa

SEQ ID NO: 2141418 - DNA, 25 bp, Homo sapien
caaggctacaccagttatcaaagtc

SEQ ID NO: 2141419 - DNA, 25 bp, Homo sapien
gctacaccagttatcaaagtctttt

SEQ ID NO: 2141420 - DNA, 25 bp, Homo sapien
cttgcagtaaagtcgtatcagagta

SEQ ID NO: 2141421 - DNA, 25 bp, Homo sapien
ctttctcttgcagtaaagtcgtatc

SEQ ID NO: 2141422 - DNA, 25 bp, Homo sapien
gcagtaaagtcgtatcagagtagga

SEQ ID NO: 2141423 - DNA, 25 bp, Homo sapien
tctcttgcagtaaagtcgtatcaga

SEQ ID NO: 2141424 - DNA, 25 bp, Homo sapien
tctgaactaattcaaacatccttaa

SEQ ID NO: 2141425 - DNA, 25 bp, Homo sapien
ttggctggaggtacaaagggaggcc

SEQ ID NO: 2141426 - DNA, 25 bp, Homo sapien
caaacatccttaaattctcctttag

SEQ ID NO: 2141427 - DNA, 25 bp, Homo sapien
cagtggttgtcacttctggcttggc

SEQ ID NO: 2141428 - DNA, 25 bp, Homo sapien
ctccagttgctcagtagagtcaatg

SEQ ID NO: 2141429 - DNA, 25 bp, Homo sapien
ccagttgctcagtagagtcaatgaa

SEQ ID NO: 2141430 - DNA, 25 bp, Homo sapien
tcctccagttgctcagtagagtcaa

SEQ ID NO: 2141431 - DNA, 25 bp, Homo sapien
cagttgctcagtagagtcaatgaat

SEQ ID NO: 2141432 - DNA, 25 bp, Homo sapien
tgctattggcatatcaggcacttgc

SEQ ID NO: 2141433 - DNA, 25 bp, Homo sapien
cacaagctgggaagcaatgaactcc

SEQ ID NO: 2141434 - DNA, 25 bp, Homo sapien
gaccttcaagttgagttcccaggat

SEQ ID NO: 2141435 - DNA, 25 bp, Homo sapien
gctgcttagtccaaaagaggtcaca

SEQ ID NO: 2141436 - DNA, 25 bp, Homo sapien
caaatagtaagatccccgcaaacag

SEQ ID NO: 2141437 - DNA, 25 bp, Homo sapien
ccgcaaacagaagggagatcaagaa

SEQ ID NO: 2141438 - DNA, 25 bp, Homo sapien
tgctgacccctgatttaagtgatca

SEQ ID NO: 2141439 - DNA, 25 bp, Homo sapien
tgagtagatgtgacagaggccgcat

SEQ ID NO: 2141440 - DNA, 25 bp, Homo sapien
cctcctgagtaataagcatggtgtc

SEQ ID NO: 2141441 - DNA, 25 bp, Homo sapien
gaattggctatgcagtacattgtat

SEQ ID NO: 2141442 - DNA, 25 bp, Homo sapien
gttagcagacctaaagcaagcctga

SEQ ID NO: 2141443 - DNA, 25 bp, Homo sapien
gttttccagaacactcttagctatg

SEQ ID NO: 2141444 - DNA, 25 bp, Homo sapien
caaatgccatccagatgtgtgcaat

SEQ ID NO: 2141445 - DNA, 25 bp, Homo sapien
tgcacagtgttggtttccttgtatt

SEQ ID NO: 2141446 - DNA, 25 bp, Homo sapien
agatgtgtgcaatgtggcaaactga

SEQ ID NO: 2141447 - DNA, 25 bp, Homo sapien
gcttacagaattcgctgattcccat

SEQ ID NO: 2141448 - DNA, 25 bp, Homo sapien
aggcttctgactggccctcgcttac

SEQ ID NO: 2141449 - DNA, 25 bp, Homo sapien
tctgactggccctcgcttacagaat

SEQ ID NO: 2141450 - DNA, 25 bp, Homo sapien
tggccctcgcttacagaattcgctg

SEQ ID NO: 2141451 - DNA, 25 bp, Homo sapien
tgcttcaaacgctgattatagatga

SEQ ID NO: 2141452 - DNA, 25 bp, Homo sapien
tcaaacgctgattatagatgaagaa

SEQ ID NO: 2141453 - DNA, 25 bp, Homo sapien
tggctgcttcaaacgctgattatag

SEQ ID NO: 2141454 - DNA, 25 bp, Homo sapien
gggctggctgcttcaaacgctgatt

SEQ ID NO: 2141455 - DNA, 25 bp, Homo sapien
ttctgaaagattgccagcacccgat

SEQ ID NO: 2141456 - DNA, 25 bp, Homo sapien
ctactgttggccgtggcaggcttca

SEQ ID NO: 2141457 - DNA, 25 bp, Homo sapien
cagcacccgattcaaaagcttttaa

SEQ ID NO: 2141458 - DNA, 25 bp, Homo sapien
actgttggccgtggcaggcttcata

SEQ ID NO: 2141459 - DNA, 25 bp, Homo sapien
aaaaaatcctgatgctcctccattt

SEQ ID NO: 2141460 - DNA, 25 bp, Homo sapien
acagacatttcacctctttgtgtgg

SEQ ID NO: 2141461 - DNA, 25 bp, Homo sapien
catttcacctctttgtgtggttaaa

SEQ ID NO: 2141462 - DNA, 25 bp, Homo sapien
ctcggacagacatttcacctctttg

SEQ ID NO: 2141463 - DNA, 25 bp, Homo sapien
ttgctttaacaaccctccgctcaga

SEQ ID NO: 2141464 - DNA, 25 bp, Homo sapien
tctgtgtgctgtcttgagcaactca

SEQ ID NO: 2141465 - DNA, 25 bp, Homo sapien
caaaccaagtgtcatggctggctca

SEQ ID NO: 2141466 - DNA, 25 bp, Homo sapien
tcaggcctgggtgctttccagttgc

SEQ ID NO: 2141467 - DNA, 25 bp, Homo sapien
ccagagctcccgaaagaagtgttga

SEQ ID NO: 2141468 - DNA, 25 bp, Homo sapien
tgtatacagaaactgcccgatcatc

SEQ ID NO: 2141469 - DNA, 25 bp, Homo sapien
aaagatccttcagtatccatctggg

SEQ ID NO: 2141470 - DNA, 25 bp, Homo sapien
gatacagagattgctgtcagatcta

SEQ ID NO: 2141471 - DNA, 25 bp, Homo sapien
aaatgaagcattgccctgtccttgc

SEQ ID NO: 2141472 - DNA, 25 bp, Homo sapien
ctagctttagaaactcgctctttaa

SEQ ID NO: 2141473 - DNA, 25 bp, Homo sapien
ctttaaatgaagcattgccctgtcc

SEQ ID NO: 2141474 - DNA, 25 bp, Homo sapien
tcgctctttaaatgaagcattgccc

SEQ ID NO: 2141475 - DNA, 25 bp, Homo sapien
gcaggaatgtgcaggactctccttc

SEQ ID NO: 2141476 - DNA, 25 bp, Homo sapien
cagctgaaattgtgcttctgcagga

SEQ ID NO: 2141477 - DNA, 25 bp, Homo sapien
tgctcctgacagctgaaattgtgct

SEQ ID NO: 2141478 - DNA, 25 bp, Homo sapien
caggaatgtgcaggactctccttcc

SEQ ID NO: 2141479 - DNA, 25 bp, Homo sapien
tagctgttaggatgctgtgaagttg

SEQ ID NO: 2141480 - DNA, 25 bp, Homo sapien
gctgtgaagttgatgggaagtctcc

SEQ ID NO: 2141481 - DNA, 25 bp, Homo sapien
ttgagggagtaatccctgctgctga

SEQ ID NO: 2141482 - DNA, 25 bp, Homo sapien
aagtctcctgttgagggagtaatcc

SEQ ID NO: 2141483 - DNA, 25 bp, Homo sapien
gatgggcttgatcttgagagaaaag

SEQ ID NO: 2141484 - DNA, 25 bp, Homo sapien
tggagtgtccccagacaagccagga

SEQ ID NO: 2141485 - DNA, 25 bp, Homo sapien
ggcttctcaggtctagtctggtcat

SEQ ID NO: 2141486 - DNA, 25 bp, Homo sapien
gagagcattccaaggtggaaatgac

SEQ ID NO: 2141487 - DNA, 25 bp, Homo sapien
cagctgtcttggcatgcatgggcaa

SEQ ID NO: 2141488 - DNA, 25 bp, Homo sapien
attgatgaataaccatgtgtccaag

SEQ ID NO: 2141489 - DNA, 25 bp, Homo sapien
tgtgtccaagacatccaaagggctt

SEQ ID NO: 2141490 - DNA, 25 bp, Homo sapien
tcttatggttaaacactgggaatgc

SEQ ID NO: 2141491 - DNA, 25 bp, Homo sapien
gcagaaagggagcatagttggtttt

SEQ ID NO: 2141492 - DNA, 25 bp, Homo sapien
accatatgaagggatttttaaagct

SEQ ID NO: 2141493 - DNA, 25 bp, Homo sapien
tctttggctgggatcactaccttac

SEQ ID NO: 2141494 - DNA, 25 bp, Homo sapien
aaactctgagattctgccaagttgg

SEQ ID NO: 2141495 - DNA, 25 bp, Homo sapien
caaatgtggatttgacagatccttt

SEQ ID NO: 2141496 - DNA, 25 bp, Homo sapien
tcaaatgtggatttgacagatcctt

SEQ ID NO: 2141497 - DNA, 25 bp, Homo sapien
tctcaaatgtggatttgacagatcc

SEQ ID NO: 2141498 - DNA, 25 bp, Homo sapien
ctcaaatgtggatttgacagatcct

SEQ ID NO: 2141499 - DNA, 25 bp, Homo sapien
gactaggcgacctttacagcccagt

SEQ ID NO: 2141500 - DNA, 25 bp, Homo sapien
tggacccttgggtggatcttgagat

SEQ ID NO: 2141501 - DNA, 25 bp, Homo sapien
tcacttgaaaagaagtggactaggc

SEQ ID NO: 2141502 - DNA, 25 bp, Homo sapien
gatcttgagatgttcccaaggaacc

SEQ ID NO: 2141503 - DNA, 25 bp, Homo sapien
gaagccatcagggttgaggatgctg

SEQ ID NO: 2141504 - DNA, 25 bp, Homo sapien
acagggatagcccaggaagccatca

SEQ ID NO: 2141505 - DNA, 25 bp, Homo sapien
cattgtaggaggcacagggatagcc

SEQ ID NO: 2141506 - DNA, 25 bp, Homo sapien
ctcccaaaactcattgtaggaggca

SEQ ID NO: 2141507 - DNA, 25 bp, Homo sapien
atatttgttcaacggcactggtttt

SEQ ID NO: 2141508 - DNA, 25 bp, Homo sapien
aatatttgttcaacggcactggttt

SEQ ID NO: 2141509 - DNA, 25 bp, Homo sapien
aaatatttgttcaacggcactggtt

SEQ ID NO: 2141510 - DNA, 25 bp, Homo sapien
tatttgttcaacggcactggttttc

SEQ ID NO: 2141511 - DNA, 25 bp, Homo sapien
ctgataccttatatctccaactagt

SEQ ID NO: 2141512 - DNA, 25 bp, Homo sapien
cagtttgggccagaatagatttatc

SEQ ID NO: 2141513 - DNA, 25 bp, Homo sapien
gagatccacatcaatatcatgcatg

SEQ ID NO: 2141514 - DNA, 25 bp, Homo sapien
cattgagatccacatcaatatcatg

SEQ ID NO: 2141515 - DNA, 25 bp, Homo sapien
tatcacatggttgttccagaggaac

SEQ ID NO: 2141516 - DNA, 25 bp, Homo sapien
taataaaggaggctcagtactggcc

SEQ ID NO: 2141517 - DNA, 25 bp, Homo sapien
cagagtctgatagaaatcataaagc

SEQ ID NO: 2141518 - DNA, 25 bp, Homo sapien
catgtagtctgaatacagagtctga

SEQ ID NO: 2141519 - DNA, 25 bp, Homo sapien
taaagcatgtcttgactggtagtca

SEQ ID NO: 2141520 - DNA, 25 bp, Homo sapien
gattccggggaagacttcaagagac

SEQ ID NO: 2141521 - DNA, 25 bp, Homo sapien
attccggggaagacttcaagagaca

SEQ ID NO: 2141522 - DNA, 25 bp, Homo sapien
gatgataggaggaggattccgggga

SEQ ID NO: 2141523 - DNA, 25 bp, Homo sapien
gataggaggaggattccggggaaga

SEQ ID NO: 2141524 - DNA, 25 bp, Homo sapien
tgcgggtgtacaaaaagacatctct

SEQ ID NO: 2141525 - DNA, 25 bp, Homo sapien
tagtatatactagtgacagtcacac

SEQ ID NO: 2141526 - DNA, 25 bp, Homo sapien
tttctgatgtccaacgcaacagaag

SEQ ID NO: 2141527 - DNA, 25 bp, Homo sapien
gaccaccgtatatgcagtcatccaa

SEQ ID NO: 2141528 - DNA, 25 bp, Homo sapien
ctgctatgtcagtatgattgaccat

SEQ ID NO: 2141529 - DNA, 25 bp, Homo sapien
tccaggaatcttgccacttgtaaaa

SEQ ID NO: 2141530 - DNA, 25 bp, Homo sapien
caggaatcttgccacttgtaaaagt

SEQ ID NO: 2141531 - DNA, 25 bp, Homo sapien
aatcttgccacttgtaaaagtgtca

SEQ ID NO: 2141532 - DNA, 25 bp, Homo sapien
aggaatcttgccacttgtaaaagtg

SEQ ID NO: 2141533 - DNA, 25 bp, Homo sapien
tgcctgaccgaggaactggcagcag

SEQ ID NO: 2141534 - DNA, 25 bp, Homo sapien
ggtgagtctcttctcacgacccttt

SEQ ID NO: 2141535 - DNA, 25 bp, Homo sapien
gcagcagcggtgagtctcttctcac

SEQ ID NO: 2141536 - DNA, 25 bp, Homo sapien
gtggctgctcctggttacgttgtgc

SEQ ID NO: 2141537 - DNA, 25 bp, Homo sapien
gttctgagtaaggaaacagcctcca

SEQ ID NO: 2141538 - DNA, 25 bp, Homo sapien
cgcttagcagtctcccgggacccag

SEQ ID NO: 2141539 - DNA, 25 bp, Homo sapien
tgagtaaggaaacagcctccaagca

SEQ ID NO: 2141540 - DNA, 25 bp, Homo sapien
tctgttctgagtaaggaaacagcct

SEQ ID NO: 2141541 - DNA, 25 bp, Homo sapien
gaaacttccagactagttgactgag

SEQ ID NO: 2141542 - DNA, 25 bp, Homo sapien
tctaggctcagttccaatctcattg

SEQ ID NO: 2141543 - DNA, 25 bp, Homo sapien
gcaccatgagtccaaccgggaagct

SEQ ID NO: 2141544 - DNA, 25 bp, Homo sapien
ggtgtgcgtaccaaagccaattaca

SEQ ID NO: 2141545 - DNA, 25 bp, Homo sapien
tttgagtatcactccgccacagttt

SEQ ID NO: 2141546 - DNA, 25 bp, Homo sapien
atcactccgccacagttttagactg

SEQ ID NO: 2141547 - DNA, 25 bp, Homo sapien
cagcacaagggaatttgagtatcac

SEQ ID NO: 2141548 - DNA, 25 bp, Homo sapien
gcacaagggaatttgagtatcactc

SEQ ID NO: 2141549 - DNA, 25 bp, Homo sapien
cttgggtgaagagaaagaagctttt

SEQ ID NO: 2141550 - DNA, 25 bp, Homo sapien
agaagaagaaggagctactcttcct

SEQ ID NO: 2141551 - DNA, 25 bp, Homo sapien
gagaaagaagctttttaagagtgga

SEQ ID NO: 2141552 - DNA, 25 bp, Homo sapien
gaagaagaagaaggagctactcttc

SEQ ID NO: 2141553 - DNA, 25 bp, Homo sapien
ctagagccggagagggacagtgagg

SEQ ID NO: 2141554 - DNA, 25 bp, Homo sapien
cgaaattcccggctggctctaacca

SEQ ID NO: 2141555 - DNA, 25 bp, Homo sapien
ggctggctctaaccaattgacataa

SEQ ID NO: 2141556 - DNA, 25 bp, Homo sapien
ttcccggctggctctaaccaattga

SEQ ID NO: 2141557 - DNA, 25 bp, Homo sapien
ttcagcacccgcacgaaattcccgg

SEQ ID NO: 2141558 - DNA, 25 bp, Homo sapien
cagtaagaacaagccggcagccagg

SEQ ID NO: 2141559 - DNA, 25 bp, Homo sapien
cagggccagtaagaacaagccggca

SEQ ID NO: 2141560 - DNA, 25 bp, Homo sapien
ggccagtaagaacaagccggcagcc

SEQ ID NO: 2141561 - DNA, 25 bp, Homo sapien
gactcagggccagtaagaacaagcc

SEQ ID NO: 2141562 - DNA, 25 bp, Homo sapien
gtcagtggcttgaatgacctgaggt

SEQ ID NO: 2141563 - DNA, 25 bp, Homo sapien
gaagctggattttcgaagagccaaa

SEQ ID NO: 2141564 - DNA, 25 bp, Homo sapien
gggacgaacttcactgaggcgctaa

SEQ ID NO: 2141565 - DNA, 25 bp, Homo sapien
tcatttgtaacaaggatgtcaaaag

SEQ ID NO: 2141566 - DNA, 25 bp, Homo sapien
tagttttcatacaccgggtacacac

SEQ ID NO: 2141567 - DNA, 25 bp, Homo sapien
ttagttttcatacaccgggtacaca

SEQ ID NO: 2141568 - DNA, 25 bp, Homo sapien
attacattaaactcgatctatcttg

SEQ ID NO: 2141569 - DNA, 25 bp, Homo sapien
taaactcgatctatcttgccctttg

SEQ ID NO: 2141570 - DNA, 25 bp, Homo sapien
actcgatctatcttgccctttgaag

SEQ ID NO: 2141571 - DNA, 25 bp, Homo sapien
aattacattaaactcgatctatctt

SEQ ID NO: 2141572 - DNA, 25 bp, Homo sapien
tgacaaaggaaaaactaagagatat

SEQ ID NO: 2141573 - DNA, 25 bp, Homo sapien
gaaaaactaagagatatgcagaatc

SEQ ID NO: 2141574 - DNA, 25 bp, Homo sapien
aaaggaaaaactaagagatatgcag

SEQ ID NO: 2141575 - DNA, 25 bp, Homo sapien
ggaaaaactaagagatatgcagaat

SEQ ID NO: 2141576 - DNA, 25 bp, Homo sapien
gaagtcgcttcatatgcatggacca

SEQ ID NO: 2141577 - DNA, 25 bp, Homo sapien
cctgtaacccctgtataagtgagaa

SEQ ID NO: 2141578 - DNA, 25 bp, Homo sapien
catataaatgctggttaactctccc

SEQ ID NO: 2141579 - DNA, 25 bp, Homo sapien
tgtagatccaagaattaggtccctg

SEQ ID NO: 2141580 - DNA, 25 bp, Homo sapien
gaaaaacgatcatttccacataaac

SEQ ID NO: 2141581 - DNA, 25 bp, Homo sapien
acataaacctccctctgcgttatct

SEQ ID NO: 2141582 - DNA, 25 bp, Homo sapien
ttagaaaaacgatcatttccacata

SEQ ID NO: 2141583 - DNA, 25 bp, Homo sapien
ccctctgcgttatctaacttagaag

SEQ ID NO: 2141584 - DNA, 25 bp, Homo sapien
ctgacgttgcgtagccttcaatgct

SEQ ID NO: 2141585 - DNA, 25 bp, Homo sapien
tgagctaacatactgcctactactg

SEQ ID NO: 2141586 - DNA, 25 bp, Homo sapien
gttgactacccagatatctgagcta

SEQ ID NO: 2141587 - DNA, 25 bp, Homo sapien
tataacctggctgtagtctatactc

SEQ ID NO: 2141588 - DNA, 25 bp, Homo sapien
gagacctatctgttctataacctgg

SEQ ID NO: 2141589 - DNA, 25 bp, Homo sapien
tgaatgatagctaccacactctcaa

SEQ ID NO: 2141590 - DNA, 25 bp, Homo sapien
ctatgaatgatagctaccacactct

SEQ ID NO: 2141591 - DNA, 25 bp, Homo sapien
tgatagctaccacactctcaaccat

SEQ ID NO: 2141592 - DNA, 25 bp, Homo sapien
aatgatagctaccacactctcaacc

SEQ ID NO: 2141593 - DNA, 25 bp, Homo sapien
ccttttttgtggttgagtagcattc

SEQ ID NO: 2141594 - DNA, 25 bp, Homo sapien
gtggttgagtagcattccatgatgc

SEQ ID NO: 2141595 - DNA, 25 bp, Homo sapien
tgcttttctgtacccatagcttaac

SEQ ID NO: 2141596 - DNA, 25 bp, Homo sapien
cattatacaactctgtatgcttttc

SEQ ID NO: 2141597 - DNA, 25 bp, Homo sapien
gatttttgcactgatgttcagggac

SEQ ID NO: 2141598 - DNA, 25 bp, Homo sapien
ttttgcactgatgttcagggacatt

SEQ ID NO: 2141599 - DNA, 25 bp, Homo sapien
gtaggaacagtgtcatcccttcttt

SEQ ID NO: 2141600 - DNA, 25 bp, Homo sapien
tagtttcagtaggaacagtgtcatc

SEQ ID NO: 2141601 - DNA, 25 bp, Homo sapien
ccttcctgattcggctcttggtgtg

SEQ ID NO: 2141602 - DNA, 25 bp, Homo sapien
ccgactatggtggtagtattcgtat

SEQ ID NO: 2141603 - DNA, 25 bp, Homo sapien
tggtagtattcgtattgttattctg

SEQ ID NO: 2141604 - DNA, 25 bp, Homo sapien
ttctaattctgtcatcccttctggc

SEQ ID NO: 2141605 - DNA, 25 bp, Homo sapien
tcatccgactatggtggtagtattc

SEQ ID NO: 2141606 - DNA, 25 bp, Homo sapien
tatatgctggatttcagctttaggg

SEQ ID NO: 2141607 - DNA, 25 bp, Homo sapien
atatgctggatttcagctttaggga

SEQ ID NO: 2141608 - DNA, 25 bp, Homo sapien
gacaacggagctattctggcatcca

SEQ ID NO: 2141609 - DNA, 25 bp, Homo sapien
gaagttatcttcgacctggctaccc

SEQ ID NO: 2141610 - DNA, 25 bp, Homo sapien
gatttttccgtagcatgcattccca

SEQ ID NO: 2141611 - DNA, 25 bp, Homo sapien
taaacaaatccacaatcagagtcgg

SEQ ID NO: 2141612 - DNA, 25 bp, Homo sapien
cattaaacacatgcacacacataga

SEQ ID NO: 2141613 - DNA, 25 bp, Homo sapien
ataatcattaaacacatgcacacac

SEQ ID NO: 2141614 - DNA, 25 bp, Homo sapien
aaacacatgcacacacatagatacc

SEQ ID NO: 2141615 - DNA, 25 bp, Homo sapien
ttaaacacatgcacacacatagata

SEQ ID NO: 2141616 - DNA, 25 bp, Homo sapien
taaatgcagtacatgaacagctatg

SEQ ID NO: 2141617 - DNA, 25 bp, Homo sapien
tgtacagagacatgaaagatccacg

SEQ ID NO: 2141618 - DNA, 25 bp, Homo sapien
ccttaggtgaggcatgatgcatgct

SEQ ID NO: 2141619 - DNA, 25 bp, Homo sapien
tactagaaggtagacaaacctggcc

SEQ ID NO: 2141620 - DNA, 25 bp, Homo sapien
tacctagggatcactgagcctcctg

SEQ ID NO: 2141621 - DNA, 25 bp, Homo sapien
gtcccaaatgacacaaagcttcgct

SEQ ID NO: 2141622 - DNA, 25 bp, Homo sapien
tatgtaaatctctcactagacttgg

SEQ ID NO: 2141623 - DNA, 25 bp, Homo sapien
gagcctcctgtatctgattatgtaa

SEQ ID NO: 2141624 - DNA, 25 bp, Homo sapien
gccactgcagtcacactttgatcct

SEQ ID NO: 2141625 - DNA, 25 bp, Homo sapien
ccactgcagtcacactttgatcctg

SEQ ID NO: 2141626 - DNA, 25 bp, Homo sapien
cactgcagtcacactttgatcctgg

SEQ ID NO: 2141627 - DNA, 25 bp, Homo sapien
gatttatgatagtcccttattgatc

SEQ ID NO: 2141628 - DNA, 25 bp, Homo sapien
tgatcttttaatggctgtaggaaca

SEQ ID NO: 2141629 - DNA, 25 bp, Homo sapien
ctttcactcacgcatttatttgttt

SEQ ID NO: 2141630 - DNA, 25 bp, Homo sapien
taggaacattcctgatatgggtaat

SEQ ID NO: 2141631 - DNA, 25 bp, Homo sapien
gaggcccttctggacctggaaatcc

SEQ ID NO: 2141632 - DNA, 25 bp, Homo sapien
ggaggcccttctggacctggaaatc

SEQ ID NO: 2141633 - DNA, 25 bp, Homo sapien
cggaggcccttctggacctggaaat

SEQ ID NO: 2141634 - DNA, 25 bp, Homo sapien
aggcccttctggacctggaaatcca

SEQ ID NO: 2141635 - DNA, 25 bp, Homo sapien
tgattccttttggtcctggtggccc

SEQ ID NO: 2141636 - DNA, 25 bp, Homo sapien
cctggtggccctggaattccatcat

SEQ ID NO: 2141637 - DNA, 25 bp, Homo sapien
gtggccctggaattccatcatcacc

SEQ ID NO: 2141638 - DNA, 25 bp, Homo sapien
tctgattccttttggtcctggtggc

SEQ ID NO: 2141639 - DNA, 25 bp, Homo sapien
gaagacctggtgtccctggaaatcc

SEQ ID NO: 2141640 - DNA, 25 bp, Homo sapien
gaaatccaggaagtccaggaggacc

SEQ ID NO: 2141641 - DNA, 25 bp, Homo sapien
aggaagacctggtgtccctggaaat

SEQ ID NO: 2141642 - DNA, 25 bp, Homo sapien
tggaaatccaggaagtccaggagga

SEQ ID NO: 2141643 - DNA, 25 bp, Homo sapien
ggttccattgcatccgggaatacct

SEQ ID NO: 2141644 - DNA, 25 bp, Homo sapien
cattgcatccgggaataccttgagg

SEQ ID NO: 2141645 - DNA, 25 bp, Homo sapien
catccgggaataccttgaggtcctg

SEQ ID NO: 2141646 - DNA, 25 bp, Homo sapien
cttggttccattgcatccgggaata

SEQ ID NO: 2141647 - DNA, 25 bp, Homo sapien
caagacctgaagacactatatccct

SEQ ID NO: 2141648 - DNA, 25 bp, Homo sapien
ccaagattaaatggatggatctcac

SEQ ID NO: 2141649 - DNA, 25 bp, Homo sapien
tactttatgtaatagccaagacctg

SEQ ID NO: 2141650 - DNA, 25 bp, Homo sapien
taattattgtcaagtatactaccca

SEQ ID NO: 2141651 - DNA, 25 bp, Homo sapien
ccgggactgcctggaaatccacgtt

SEQ ID NO: 2141652 - DNA, 25 bp, Homo sapien
gggactgcctggaaatccacgttct

SEQ ID NO: 2141653 - DNA, 25 bp, Homo sapien
gactgcctggaaatccacgttctcc

SEQ ID NO: 2141654 - DNA, 25 bp, Homo sapien
aaccgggactgcctggaaatccacg

SEQ ID NO: 2141655 - DNA, 25 bp, Homo sapien
cttcatacctgggatcccagggggt

SEQ ID NO: 2141656 - DNA, 25 bp, Homo sapien
ttcatacctgggatcccagggggtc

SEQ ID NO: 2141657 - DNA, 25 bp, Homo sapien
tcatacctgggatcccagggggtcc

SEQ ID NO: 2141658 - DNA, 25 bp, Homo sapien
aggacctggatatcctggattaccc

SEQ ID NO: 2141659 - DNA, 25 bp, Homo sapien
gcagtgatgacataattatactacc

SEQ ID NO: 2141660 - DNA, 25 bp, Homo sapien
gatatcctggattaccctttggtcc

SEQ ID NO: 2141661 - DNA, 25 bp, Homo sapien
ctggcagtgatgacataattatact

SEQ ID NO: 2141662 - DNA, 25 bp, Homo sapien
gaccaattggccctggtataccagt

SEQ ID NO: 2141663 - DNA, 25 bp, Homo sapien
ctgggggaccaattggccctggtat

SEQ ID NO: 2141664 - DNA, 25 bp, Homo sapien
ggccctggtataccagtgggaccag

SEQ ID NO: 2141665 - DNA, 25 bp, Homo sapien
ctggtataccagtgggaccaggtag

SEQ ID NO: 2141666 - DNA, 25 bp, Homo sapien
gaagtcctggtggaccaggagggcc

SEQ ID NO: 2141667 - DNA, 25 bp, Homo sapien
cttaggtcctggaagtcctggtgga

SEQ ID NO: 2141668 - DNA, 25 bp, Homo sapien
tggaagtcctggtggaccaggaggg

SEQ ID NO: 2141669 - DNA, 25 bp, Homo sapien
cctggaagtcctggtggaccaggag

SEQ ID NO: 2141670 - DNA, 25 bp, Homo sapien
tccctggaaatttaagcccatattc

SEQ ID NO: 2141671 - DNA, 25 bp, Homo sapien
tcaattggtcttttctgttcactga

SEQ ID NO: 2141672 - DNA, 25 bp, Homo sapien
caggtgggccctgaagaccttgctc

SEQ ID NO: 2141673 - DNA, 25 bp, Homo sapien
tgttcactgatctgcccaggtggcc

SEQ ID NO: 2141674 - DNA, 25 bp, Homo sapien
actctacatcaattggtcttttctg

SEQ ID NO: 2141675 - DNA, 25 bp, Homo sapien
ggaggaccacgtatccctggaggtc

SEQ ID NO: 2141676 - DNA, 25 bp, Homo sapien
tggaggaccacgtatccctggaggt

SEQ ID NO: 2141677 - DNA, 25 bp, Homo sapien
ctcacccttctcacctttctcacca

SEQ ID NO: 2141678 - DNA, 25 bp, Homo sapien
cttctcacctttctcaccacctggg

SEQ ID NO: 2141679 - DNA, 25 bp, Homo sapien
tggctctccttgctcacccttctca

SEQ ID NO: 2141680 - DNA, 25 bp, Homo sapien
ctcacctttctcaccacctggggga

SEQ ID NO: 2141681 - DNA, 25 bp, Homo sapien
tttctccatctttgcctggtttacc

SEQ ID NO: 2141682 - DNA, 25 bp, Homo sapien
cattttctccatctttgcctggttt

SEQ ID NO: 2141683 - DNA, 25 bp, Homo sapien
aggaattcctggttggccattttct

SEQ ID NO: 2141684 - DNA, 25 bp, Homo sapien
ccattttctccatctttgcctggtt

SEQ ID NO: 2141685 - DNA, 25 bp, Homo sapien
tagaggatagggtgacatcagcaca

SEQ ID NO: 2141686 - DNA, 25 bp, Homo sapien
tcagaacttaaccaaagcttgcagc

SEQ ID NO: 2141687 - DNA, 25 bp, Homo sapien
caatcaaggtgaaaaccagcagcct

SEQ ID NO: 2141688 - DNA, 25 bp, Homo sapien
caaatgatggtgttaggaaatctcc

SEQ ID NO: 2141689 - DNA, 25 bp, Homo sapien
gggttcaccagggtaaccaggatca

SEQ ID NO: 2141690 - DNA, 25 bp, Homo sapien
cagggtaaccaggatcaccaggcaa

SEQ ID NO: 2141691 - DNA, 25 bp, Homo sapien
gggtaaccaggatcaccaggcaaac

SEQ ID NO: 2141692 - DNA, 25 bp, Homo sapien
tcaccatcccttccgggttcaccag

SEQ ID NO: 2141693 - DNA, 25 bp, Homo sapien
caggtgggccagtgtcacctttttg

SEQ ID NO: 2141694 - DNA, 25 bp, Homo sapien
ccaggtgggccagtgtcaccttttt

SEQ ID NO: 2141695 - DNA, 25 bp, Homo sapien
tccaggtgggccagtgtcacctttt

SEQ ID NO: 2141696 - DNA, 25 bp, Homo sapien
ggcaacccaggcaacccaatgtttc

SEQ ID NO: 2141697 - DNA, 25 bp, Homo sapien
gccaggtggaccctgtattccagga

SEQ ID NO: 2141698 - DNA, 25 bp, Homo sapien
tattccaggaaatcctcgctctcct

SEQ ID NO: 2141699 - DNA, 25 bp, Homo sapien
tctcctatagttataccagtcccag

SEQ ID NO: 2141700 - DNA, 25 bp, Homo sapien
caggaatggaaattccaggtggtcc

SEQ ID NO: 2141701 - DNA, 25 bp, Homo sapien
cccaggctgtccgtcaagtccagga

SEQ ID NO: 2141702 - DNA, 25 bp, Homo sapien
ccaggaatggaaattccaggtggtc

SEQ ID NO: 2141703 - DNA, 25 bp, Homo sapien
aggctgtccgtcaagtccaggaggt

SEQ ID NO: 2141704 - DNA, 25 bp, Homo sapien
gggcctggttcacatatctcatcac

SEQ ID NO: 2141705 - DNA, 25 bp, Homo sapien
gccagaggataaaatagtgattacc

SEQ ID NO: 2141706 - DNA, 25 bp, Homo sapien
atatttagctaaagaaaccaggcac

SEQ ID NO: 2141707 - DNA, 25 bp, Homo sapien
catgtacacaaagttcaagattagg

SEQ ID NO: 2141708 - DNA, 25 bp, Homo sapien
caatagctccagaccaaatgtccat

SEQ ID NO: 2141709 - DNA, 25 bp, Homo sapien
ttccaatgcagttgaagcaagtgtc

SEQ ID NO: 2141710 - DNA, 25 bp, Homo sapien
tggaggccctgaaataccagttcca

SEQ ID NO: 2141711 - DNA, 25 bp, Homo sapien
gaggccctgaaataccagttccaat

SEQ ID NO: 2141712 - DNA, 25 bp, Homo sapien
cagttgaagcaagtgtcacctttgt

SEQ ID NO: 2141713 - DNA, 25 bp, Homo sapien
taatcctttgggaccagttgcacca

SEQ ID NO: 2141714 - DNA, 25 bp, Homo sapien
tggtaatcctttgggaccagttgca

SEQ ID NO: 2141715 - DNA, 25 bp, Homo sapien
aatcctttgggaccagttgcaccag

SEQ ID NO: 2141716 - DNA, 25 bp, Homo sapien
gtaatcctttgggaccagttgcacc

SEQ ID NO: 2141717 - DNA, 25 bp, Homo sapien
aaagtgaggatatcaccaggttcac

SEQ ID NO: 2141718 - DNA, 25 bp, Homo sapien
tcctttcgggccaggaagccctggc

SEQ ID NO: 2141719 - DNA, 25 bp, Homo sapien
aagccctggcaatccatcctgtcca

SEQ ID NO: 2141720 - DNA, 25 bp, Homo sapien
ggaaaagtgaggatatcaccaggtt

SEQ ID NO: 2141721 - DNA, 25 bp, Homo sapien
gatacaacaactatctgtaggttgg

SEQ ID NO: 2141722 - DNA, 25 bp, Homo sapien
tcacttcctacctaaatatcctggg

SEQ ID NO: 2141723 - DNA, 25 bp, Homo sapien
taggttggtactgaatacaactggg

SEQ ID NO: 2141724 - DNA, 25 bp, Homo sapien
ttctgtggcacattgaacatggcta

SEQ ID NO: 2141725 - DNA, 25 bp, Homo sapien
cagggggacccataggccctatatt

SEQ ID NO: 2141726 - DNA, 25 bp, Homo sapien
ctgccacaccttgtatgcctttttc

SEQ ID NO: 2141727 - DNA, 25 bp, Homo sapien
gccacaccttgtatgcctttttcac

SEQ ID NO: 2141728 - DNA, 25 bp, Homo sapien
ccttgtatgcctttttcacctactg

SEQ ID NO: 2141729 - DNA, 25 bp, Homo sapien
cacaccttgtatgcctttttcacct

SEQ ID NO: 2141730 - DNA, 25 bp, Homo sapien
tacactatagccacacgaaaagtta

SEQ ID NO: 2141731 - DNA, 25 bp, Homo sapien
gagttcaaatataaacggccaggga

SEQ ID NO: 2141732 - DNA, 25 bp, Homo sapien
aaaccattgtgatcccttgctaaga

SEQ ID NO: 2141733 - DNA, 25 bp, Homo sapien
tgtgtgtggtagctacctgtgtgct

SEQ ID NO: 2141734 - DNA, 25 bp, Homo sapien
tatagtctgacctggatccccttta

SEQ ID NO: 2141735 - DNA, 25 bp, Homo sapien
gctgggttatagtctgacctggatc

SEQ ID NO: 2141736 - DNA, 25 bp, Homo sapien
ccccggctgggttatagtctgacct

SEQ ID NO: 2141737 - DNA, 25 bp, Homo sapien
ttccccggctgggttatagtctgac

SEQ ID NO: 2141738 - DNA, 25 bp, Homo sapien
taccaggtatccctggcaagcctgg

SEQ ID NO: 2141739 - DNA, 25 bp, Homo sapien
gcaagcctggttgccctggaagtcc

SEQ ID NO: 2141740 - DNA, 25 bp, Homo sapien
tggcaagcctggttgccctggaagt

SEQ ID NO: 2141741 - DNA, 25 bp, Homo sapien
tctcctttgctaccaggtatccctg

SEQ ID NO: 2141742 - DNA, 25 bp, Homo sapien
ctggaaagccgggtggcccaggagg

SEQ ID NO: 2141743 - DNA, 25 bp, Homo sapien
ccaggagggccttctagaccaattc

SEQ ID NO: 2141744 - DNA, 25 bp, Homo sapien
aagacttggggcttgggatgatatc

SEQ ID NO: 2141745 - DNA, 25 bp, Homo sapien
tgaccttggactattaaagatgatt

SEQ ID NO: 2141746 - DNA, 25 bp, Homo sapien
gatgatatctgagtcaaaatagaga

SEQ ID NO: 2141747 - DNA, 25 bp, Homo sapien
gaccttggactattaaagatgattt

SEQ ID NO: 2141748 - DNA, 25 bp, Homo sapien
cacaacaaaaactcccatgactttt

SEQ ID NO: 2141749 - DNA, 25 bp, Homo sapien
caaaacacaacaaaaactcccatga

SEQ ID NO: 2141750 - DNA, 25 bp, Homo sapien
aaacacaacaaaaactcccatgact

SEQ ID NO: 2141751 - DNA, 25 bp, Homo sapien
acaaaacacaacaaaaactcccatg

SEQ ID NO: 2141752 - DNA, 25 bp, Homo sapien
ggcccaggtggcccaggtaatgcaa

SEQ ID NO: 2141753 - DNA, 25 bp, Homo sapien
ccaggtggcccaggtaatgcaaatc

SEQ ID NO: 2141754 - DNA, 25 bp, Homo sapien
gtggcccaggtggcccaggtaatgc

SEQ ID NO: 2141755 - DNA, 25 bp, Homo sapien
cccaggtggcccaggtaatgcaaat

SEQ ID NO: 2141756 - DNA, 25 bp, Homo sapien
tgcgtcctggaggacccggaggtcc

SEQ ID NO: 2141757 - DNA, 25 bp, Homo sapien
agtgcgtcctggaggacccggaggt

SEQ ID NO: 2141758 - DNA, 25 bp, Homo sapien
ggaccaagtgctcctttgaaacctg

SEQ ID NO: 2141759 - DNA, 25 bp, Homo sapien
tttggaccaagtgctcctttgaaac

SEQ ID NO: 2141760 - DNA, 25 bp, Homo sapien
gtagagagcaatccttgagatcttc

SEQ ID NO: 2141761 - DNA, 25 bp, Homo sapien
catttgagcttctactgattcaggt

SEQ ID NO: 2141762 - DNA, 25 bp, Homo sapien
gattcaggtactagctggcatagaa

SEQ ID NO: 2141763 - DNA, 25 bp, Homo sapien
gagtgtagtctactgatccaaaata

SEQ ID NO: 2141764 - DNA, 25 bp, Homo sapien
catccttagcagcacttattgtcag

SEQ ID NO: 2141765 - DNA, 25 bp, Homo sapien
tacgggtttctatgtgaagcttcac

SEQ ID NO: 2141766 - DNA, 25 bp, Homo sapien
taaggtatctactcaaattgtttgc

SEQ ID NO: 2141767 - DNA, 25 bp, Homo sapien
agtggctgcaccattctgtgtatta

SEQ ID NO: 2141768 - DNA, 25 bp, Homo sapien
aacacctgagtcactagtccttggg

SEQ ID NO: 2141769 - DNA, 25 bp, Homo sapien
tacacataagtatcaagagcaaagg

SEQ ID NO: 2141770 - DNA, 25 bp, Homo sapien
gggccatggcttataaacatgttca

SEQ ID NO: 2141771 - DNA, 25 bp, Homo sapien
ctttttactaactcagggccatggc

SEQ ID NO: 2141772 - DNA, 25 bp, Homo sapien
ggtccaggttgtccatttggtccaa

SEQ ID NO: 2141773 - DNA, 25 bp, Homo sapien
tggtccctgaacacctattcctggc

SEQ ID NO: 2141774 - DNA, 25 bp, Homo sapien
ccaggttgtccatttggtccaacat

SEQ ID NO: 2141775 - DNA, 25 bp, Homo sapien
caggttgacctattggcccaggaat

SEQ ID NO: 2141776 - DNA, 25 bp, Homo sapien
ggaacatcaagtccaggaggtcctg

SEQ ID NO: 2141777 - DNA, 25 bp, Homo sapien
ccttctctcctggtattccatgtaa

SEQ ID NO: 2141778 - DNA, 25 bp, Homo sapien
tggatcccccttctctcctggtatt

SEQ ID NO: 2141779 - DNA, 25 bp, Homo sapien
ctgggggtcctggaacatcaagtcc

SEQ ID NO: 2141780 - DNA, 25 bp, Homo sapien
gatcctggaggtcctataggaccag

SEQ ID NO: 2141781 - DNA, 25 bp, Homo sapien
ggtgctccggggatccctggactgc

SEQ ID NO: 2141782 - DNA, 25 bp, Homo sapien
gaggtcctataggaccaggtgctcc

SEQ ID NO: 2141783 - DNA, 25 bp, Homo sapien
gtcctataggaccaggtgctccggg

SEQ ID NO: 2141784 - DNA, 25 bp, Homo sapien
ttaagaccaggtacaccactcctgc

SEQ ID NO: 2141785 - DNA, 25 bp, Homo sapien
ctggctgaccctgcaagccatcatc

SEQ ID NO: 2141786 - DNA, 25 bp, Homo sapien
ggctgaccctgcaagccatcatcac

SEQ ID NO: 2141787 - DNA, 25 bp, Homo sapien
tggctgaccctgcaagccatcatca

SEQ ID NO: 2141788 - DNA, 25 bp, Homo sapien
tttggatccattggtccaggagggc

SEQ ID NO: 2141789 - DNA, 25 bp, Homo sapien
ccagaagatttggatccattggtcc

SEQ ID NO: 2141790 - DNA, 25 bp, Homo sapien
gaagatttggatccattggtccagg

SEQ ID NO: 2141791 - DNA, 25 bp, Homo sapien
tgagcccagaagatttggatccatt

SEQ ID NO: 2141792 - DNA, 25 bp, Homo sapien
ggttgtccactcagtccaggttgcc

SEQ ID NO: 2141793 - DNA, 25 bp, Homo sapien
tgtccactcagtccaggttgccctg

SEQ ID NO: 2141794 - DNA, 25 bp, Homo sapien
cactcagtccaggttgccctgggtc

SEQ ID NO: 2141795 - DNA, 25 bp, Homo sapien
tccaggttgtccactcagtccaggt

SEQ ID NO: 2141796 - DNA, 25 bp, Homo sapien
tgcttgagctctgtgatgtcatctg

SEQ ID NO: 2141797 - DNA, 25 bp, Homo sapien
tttttcctaggaccacagtattgcc

SEQ ID NO: 2141798 - DNA, 25 bp, Homo sapien
tatcaaggccatgtagtatggagtc

SEQ ID NO: 2141799 - DNA, 25 bp, Homo sapien
gtatggagtctagcgcaaataactg

SEQ ID NO: 2141800 - DNA, 25 bp, Homo sapien
agtccaggaggtcctataagacctg

SEQ ID NO: 2141801 - DNA, 25 bp, Homo sapien
ctggaaaacccatatcaccgatggt

SEQ ID NO: 2141802 - DNA, 25 bp, Homo sapien
caccgatggttcctttaagtccagg

SEQ ID NO: 2141803 - DNA, 25 bp, Homo sapien
ccaggaggtcctataagacctggct

SEQ ID NO: 2141804 - DNA, 25 bp, Homo sapien
tacttgtggattatctaagatgcat

SEQ ID NO: 2141805 - DNA, 25 bp, Homo sapien
ttttaaaaagctccgcaaactctga

SEQ ID NO: 2141806 - DNA, 25 bp, Homo sapien
tttacaaaatatgctttacttgtgg

SEQ ID NO: 2141807 - DNA, 25 bp, Homo sapien
tctgagttagataataatgagcctc

SEQ ID NO: 2141808 - DNA, 25 bp, Homo sapien
gggagccaggttgtccaggaactcc

SEQ ID NO: 2141809 - DNA, 25 bp, Homo sapien
tggggagccaggttgtccaggaact

SEQ ID NO: 2141810 - DNA, 25 bp, Homo sapien
ggggagccaggttgtccaggaactc

SEQ ID NO: 2141811 - DNA, 25 bp, Homo sapien
ctttgtcgcctttctgtccaggtaa

SEQ ID NO: 2141812 - DNA, 25 bp, Homo sapien
ccaatgcttgaaataccaggatcac

SEQ ID NO: 2141813 - DNA, 25 bp, Homo sapien
gacctggaagaccaatgcttgaaat

SEQ ID NO: 2141814 - DNA, 25 bp, Homo sapien
tctcttatccagaatatactatgtc

SEQ ID NO: 2141815 - DNA, 25 bp, Homo sapien
cttaggaatgagcatagtattaaaa

SEQ ID NO: 2141816 - DNA, 25 bp, Homo sapien
aaaacttaggaatgagcatagtatt

SEQ ID NO: 2141817 - DNA, 25 bp, Homo sapien
gtatgtgcctaaaactatatgccaa

SEQ ID NO: 2141818 - DNA, 25 bp, Homo sapien
tggccacaaaccctaaaacatatct

SEQ ID NO: 2141819 - DNA, 25 bp, Homo sapien
tggactggccacaaaccctaaaaca

SEQ ID NO: 2141820 - DNA, 25 bp, Homo sapien
cactaaaaagggatggactaacaag

SEQ ID NO: 2141821 - DNA, 25 bp, Homo sapien
tcctgttgagtccaatgattctgaa

SEQ ID NO: 2141822 - DNA, 25 bp, Homo sapien
tattcagaggactatctcagacacg

SEQ ID NO: 2141823 - DNA, 25 bp, Homo sapien
taataacattaggacaaaggccaac

SEQ ID NO: 2141824 - DNA, 25 bp, Homo sapien
catacagaaatactcaggtgcatta

SEQ ID NO: 2141825 - DNA, 25 bp, Homo sapien
ctgccactatcttgatccaagccat

SEQ ID NO: 2141826 - DNA, 25 bp, Homo sapien
tgtatttcagcatatagcaactcca

SEQ ID NO: 2141827 - DNA, 25 bp, Homo sapien
aagccatcaacatcattagcctgca

SEQ ID NO: 2141828 - DNA, 25 bp, Homo sapien
cttgcaggtgagtaagatctatttt

SEQ ID NO: 2141829 - DNA, 25 bp, Homo sapien
acttccttcctcacttagtacatac

SEQ ID NO: 2141830 - DNA, 25 bp, Homo sapien
tggtaatccgggcaaaccaggatct

SEQ ID NO: 2141831 - DNA, 25 bp, Homo sapien
ctggtaatccgggcaaaccaggatc

SEQ ID NO: 2141832 - DNA, 25 bp, Homo sapien
gtaatccgggcaaaccaggatctcc

SEQ ID NO: 2141833 - DNA, 25 bp, Homo sapien
tcctggtaatccgggcaaaccagga

SEQ ID NO: 2141834 - DNA, 25 bp, Homo sapien
caggagggccactaataccttttgg

SEQ ID NO: 2141835 - DNA, 25 bp, Homo sapien
gccactaataccttttggtccagga

SEQ ID NO: 2141836 - DNA, 25 bp, Homo sapien
caggaataccatcttgaccgggttt

SEQ ID NO: 2141837 - DNA, 25 bp, Homo sapien
gctggtccaggaataccatcttgac

SEQ ID NO: 2141838 - DNA, 25 bp, Homo sapien
gaataccatcttgaccgggtttgcc

SEQ ID NO: 2141839 - DNA, 25 bp, Homo sapien
ttgcctttttcgcctggaggccctg

SEQ ID NO: 2141840 - DNA, 25 bp, Homo sapien
ctaatagtctcaggatgaagaggaa

SEQ ID NO: 2141841 - DNA, 25 bp, Homo sapien
gctaatagtctcaggatgaagagga

SEQ ID NO: 2141842 - DNA, 25 bp, Homo sapien
atgagctaatagtctcaggatgaag

SEQ ID NO: 2141843 - DNA, 25 bp, Homo sapien
gagctaatagtctcaggatgaagag

SEQ ID NO: 2141844 - DNA, 25 bp, Homo sapien
agtcctggaagtccagggggtcctg

SEQ ID NO: 2141845 - DNA, 25 bp, Homo sapien
tcctgggtttccaaagcctggttga

SEQ ID NO: 2141846 - DNA, 25 bp, Homo sapien
cagaaagtcctggaagtccaggggg

SEQ ID NO: 2141847 - DNA, 25 bp, Homo sapien
tgcctttaggtccttccagagctgg

SEQ ID NO: 2141848 - DNA, 25 bp, Homo sapien
ggaatcccaggtaatcctccatcac

SEQ ID NO: 2141849 - DNA, 25 bp, Homo sapien
ctggttcgccctttggacctggaag

SEQ ID NO: 2141850 - DNA, 25 bp, Homo sapien
ttccagagctggacccggagaacca

SEQ ID NO: 2141851 - DNA, 25 bp, Homo sapien
ggactaataaatagaccattctcct

SEQ ID NO: 2141852 - DNA, 25 bp, Homo sapien
taataaatagaccattctcctacca

SEQ ID NO: 2141853 - DNA, 25 bp, Homo sapien
tacatggactaataaatagaccatt

SEQ ID NO: 2141854 - DNA, 25 bp, Homo sapien
aataaatagaccattctcctaccac

SEQ ID NO: 2141855 - DNA, 25 bp, Homo sapien
caagtctcaaaatctgttcataacc

SEQ ID NO: 2141856 - DNA, 25 bp, Homo sapien
caaggatgaaaacgagcatttccaa

SEQ ID NO: 2141857 - DNA, 25 bp, Homo sapien
tgttcataacctatcaccagtgact

SEQ ID NO: 2141858 - DNA, 25 bp, Homo sapien
ctaggctcagtgacattaatcaagg

SEQ ID NO: 2141859 - DNA, 25 bp, Homo sapien
aaagttcaccaaggcccaatgtcat

SEQ ID NO: 2141860 - DNA, 25 bp, Homo sapien
ctgtaggacctggatagggatcaaa

SEQ ID NO: 2141861 - DNA, 25 bp, Homo sapien
agggatcaaagttcaccaaggccca

SEQ ID NO: 2141862 - DNA, 25 bp, Homo sapien
agttcatatccatgcatctgtatat

SEQ ID NO: 2141863 - DNA, 25 bp, Homo sapien
tctcctcgacataggtaaaacttag

SEQ ID NO: 2141864 - DNA, 25 bp, Homo sapien
tctactctactgcaatagtcctgaa

SEQ ID NO: 2141865 - DNA, 25 bp, Homo sapien
tgctccttggctgtaaataatcact

SEQ ID NO: 2141866 - DNA, 25 bp, Homo sapien
tcaggtagaaacaaatggctcccta

SEQ ID NO: 2141867 - DNA, 25 bp, Homo sapien
aacaagaaagtggatgcagcgaaca

SEQ ID NO: 2141868 - DNA, 25 bp, Homo sapien
tgatcaaactttagacaggctcctc

SEQ ID NO: 2141869 - DNA, 25 bp, Homo sapien
aatcggtttagagagagtcccttca

SEQ ID NO: 2141870 - DNA, 25 bp, Homo sapien
tgacggagcttttgaggtaacagaa

SEQ ID NO: 2141871 - DNA, 25 bp, Homo sapien
aatattgtccataagtagtaattac

SEQ ID NO: 2141872 - DNA, 25 bp, Homo sapien
tgtccataagtagtaattactaaag

SEQ ID NO: 2141873 - DNA, 25 bp, Homo sapien
gatgaattgactggtatattttaaa

SEQ ID NO: 2141874 - DNA, 25 bp, Homo sapien
taattactaaaggtatactgatgaa

SEQ ID NO: 2141875 - DNA, 25 bp, Homo sapien
tggccattaccaactgtacttttgc

SEQ ID NO: 2141876 - DNA, 25 bp, Homo sapien
tacagttgactttaaaggcctcatt

SEQ ID NO: 2141877 - DNA, 25 bp, Homo sapien
ccaggaggctttcctattactattt

SEQ ID NO: 2141878 - DNA, 25 bp, Homo sapien
tcaaaacatgaatatacgatggcca

SEQ ID NO: 2141879 - DNA, 25 bp, Homo sapien
ccaagtcttttgtcaccaggtggca

SEQ ID NO: 2141880 - DNA, 25 bp, Homo sapien
gctgaggctgagactaagtaatcct

SEQ ID NO: 2141881 - DNA, 25 bp, Homo sapien
ggtccattaagcaaccagggagatc

SEQ ID NO: 2141882 - DNA, 25 bp, Homo sapien
cagggagatcttatcattggccaag

SEQ ID NO: 2141883 - DNA, 25 bp, Homo sapien
accaggcaagccaggtagcccaggt

SEQ ID NO: 2141884 - DNA, 25 bp, Homo sapien
atctcctttcaaaccaggcaagcca

SEQ ID NO: 2141885 - DNA, 25 bp, Homo sapien
caggcaagccaggtagcccaggttg

SEQ ID NO: 2141886 - DNA, 25 bp, Homo sapien
gatctcctttcaaaccaggcaagcc

SEQ ID NO: 2141887 - DNA, 25 bp, Homo sapien
tgaatacaaacacccacattcttct

SEQ ID NO: 2141888 - DNA, 25 bp, Homo sapien
attttgaatacaaacacccacattc

SEQ ID NO: 2141889 - DNA, 25 bp, Homo sapien
tttgaatacaaacacccacattctt

SEQ ID NO: 2141890 - DNA, 25 bp, Homo sapien
aatacaaacacccacattcttctct

SEQ ID NO: 2141891 - DNA, 25 bp, Homo sapien
caaatctggaacaatgagagcatcg

SEQ ID NO: 2141892 - DNA, 25 bp, Homo sapien
ggctattgctctacttcaagtgcag

SEQ ID NO: 2141893 - DNA, 25 bp, Homo sapien
tcagccacccaactacaggaagaat

SEQ ID NO: 2141894 - DNA, 25 bp, Homo sapien
cactagagactggttgaggcaaaat

SEQ ID NO: 2141895 - DNA, 25 bp, Homo sapien
attccattgagacccggccggccag

SEQ ID NO: 2141896 - DNA, 25 bp, Homo sapien
ttgagacccggccggccaggattac

SEQ ID NO: 2141897 - DNA, 25 bp, Homo sapien
tttcattccattgagacccggccgg

SEQ ID NO: 2141898 - DNA, 25 bp, Homo sapien
cattgagacccggccggccaggatt

SEQ ID NO: 2141899 - DNA, 25 bp, Homo sapien
gatccaggtactccactgggtcctt

SEQ ID NO: 2141900 - DNA, 25 bp, Homo sapien
tgatccaggtactccactgggtcct

SEQ ID NO: 2141901 - DNA, 25 bp, Homo sapien
ctgatccaggtactccactgggtcc

SEQ ID NO: 2141902 - DNA, 25 bp, Homo sapien
gaaatggaagccaaagtgacctaag

SEQ ID NO: 2141903 - DNA, 25 bp, Homo sapien
cctaagttcaggacaaaaattggtg

SEQ ID NO: 2141904 - DNA, 25 bp, Homo sapien
tggtgtgagagaaaccagtttttga

SEQ ID NO: 2141905 - DNA, 25 bp, Homo sapien
cagtttttgaattgctgccatatct

SEQ ID NO: 2141906 - DNA, 25 bp, Homo sapien
ctatgagacaaaacacacaaatttg

SEQ ID NO: 2141907 - DNA, 25 bp, Homo sapien
tatgagacaaaacacacaaatttga

SEQ ID NO: 2141908 - DNA, 25 bp, Homo sapien
atgagacaaaacacacaaatttgaa

SEQ ID NO: 2141909 - DNA, 25 bp, Homo sapien
tgagacaaaacacacaaatttgaag

SEQ ID NO: 2141910 - DNA, 25 bp, Homo sapien
ctgtcctgaaggaccaggtaatcca

SEQ ID NO: 2141911 - DNA, 25 bp, Homo sapien
tctcctttaattatgatactctgtc

SEQ ID NO: 2141912 - DNA, 25 bp, Homo sapien
gatactctgtcctgaaggaccaggt

SEQ ID NO: 2141913 - DNA, 25 bp, Homo sapien
tcctggtagaccctttagcccaggc

SEQ ID NO: 2141914 - DNA, 25 bp, Homo sapien
gccagggagtccattgcgtccagga

SEQ ID NO: 2141915 - DNA, 25 bp, Homo sapien
agggagtccattgcgtccaggatct

SEQ ID NO: 2141916 - DNA, 25 bp, Homo sapien
tgggtctcctttgcgccctcctgca

SEQ ID NO: 2141917 - DNA, 25 bp, Homo sapien
cagacctgggtctcctttgcgccct

SEQ ID NO: 2141918 - DNA, 25 bp, Homo sapien
gaaatccatgtgcaacagaggaggt

SEQ ID NO: 2141919 - DNA, 25 bp, Homo sapien
cattgtggtgcatccgttgtctggc

SEQ ID NO: 2141920 - DNA, 25 bp, Homo sapien
ggctgtggcgtgtaataagaaatcc

SEQ ID NO: 2141921 - DNA, 25 bp, Homo sapien
gacctgggggaccttgcaatccatc

SEQ ID NO: 2141922 - DNA, 25 bp, Homo sapien
ccaagtcttgaccgtgggctctttt

SEQ ID NO: 2141923 - DNA, 25 bp, Homo sapien
tcttgaccgtgggctcttttatttc

SEQ ID NO: 2141924 - DNA, 25 bp, Homo sapien
tactaaagcgacgaaggcagctgcc

SEQ ID NO: 2141925 - DNA, 25 bp, Homo sapien
ctaatgaatggctggatgctctggc

SEQ ID NO: 2141926 - DNA, 25 bp, Homo sapien
ggtagagagccagtaagaatagtca

SEQ ID NO: 2141927 - DNA, 25 bp, Homo sapien
tgttgcagaacatgaaaggcatggt

SEQ ID NO: 2141928 - DNA, 25 bp, Homo sapien
tgtgatacatgtaccccactgtgag

SEQ ID NO: 2141929 - DNA, 25 bp, Homo sapien
gcatgtgagaagtagccatcctgct

SEQ ID NO: 2141930 - DNA, 25 bp, Homo sapien
gcatttgctaagtattgtctcccag

SEQ ID NO: 2141931 - DNA, 25 bp, Homo sapien
tatccagaatgctgggcaggtaccc

SEQ ID NO: 2141932 - DNA, 25 bp, Homo sapien
gggaatctggatcgtctgactgtga

SEQ ID NO: 2141933 - DNA, 25 bp, Homo sapien
cagctggagcttcacatactgcaca

SEQ ID NO: 2141934 - DNA, 25 bp, Homo sapien
tgtgaactgcgatcaccacagctgg

SEQ ID NO: 2141935 - DNA, 25 bp, Homo sapien
tccacagagaatcccatccctgagg

SEQ ID NO: 2141936 - DNA, 25 bp, Homo sapien
cctcatattgggaagaaatgtagat

SEQ ID NO: 2141937 - DNA, 25 bp, Homo sapien
cagtgcttggatagaagctgtttga

SEQ ID NO: 2141938 - DNA, 25 bp, Homo sapien
tattatgcaaatgacagggattcct

SEQ ID NO: 2141939 - DNA, 25 bp, Homo sapien
tgtagatggaatggacagtcagcta

SEQ ID NO: 2141940 - DNA, 25 bp, Homo sapien
ccatgacattcgatgaagggagctg

SEQ ID NO: 2141941 - DNA, 25 bp, Homo sapien
gtagttacaggtacccctcccatga

SEQ ID NO: 2141942 - DNA, 25 bp, Homo sapien
gaggctagggcttgacctgagcctt

SEQ ID NO: 2141943 - DNA, 25 bp, Homo sapien
acatgtctgacacatctacagttgc

SEQ ID NO: 2141944 - DNA, 25 bp, Homo sapien
tgtcttgctcattcaaacccttaaa

SEQ ID NO: 2141945 - DNA, 25 bp, Homo sapien
tatcctgaggtacatacattacgta

SEQ ID NO: 2141946 - DNA, 25 bp, Homo sapien
cagcaatatgatctaatgcagtgac

SEQ ID NO: 2141947 - DNA, 25 bp, Homo sapien
cagtgactagtatggtttaagagcc

SEQ ID NO: 2141948 - DNA, 25 bp, Homo sapien
ctaattcgtgtcctcaagtctcctg

SEQ ID NO: 2141949 - DNA, 25 bp, Homo sapien
tcaagtctcctgctttcagcgtttc

SEQ ID NO: 2141950 - DNA, 25 bp, Homo sapien
ttgacatcggctaattcgtgtcctc

SEQ ID NO: 2141951 - DNA, 25 bp, Homo sapien
agtctcctgctttcagcgtttctga

SEQ ID NO: 2141952 - DNA, 25 bp, Homo sapien
aacacaaaaggaattcttcaaaatg

SEQ ID NO: 2141953 - DNA, 25 bp, Homo sapien
tatatatatatcacattttaaaaca

SEQ ID NO: 2141954 - DNA, 25 bp, Homo sapien
tatatatatcacattttaaaacaca

SEQ ID NO: 2141955 - DNA, 25 bp, Homo sapien
tatatatcacattttaaaacacaaa

SEQ ID NO: 2141956 - DNA, 25 bp, Homo sapien
ggcgcattgctgaggtacatctgaa

SEQ ID NO: 2141957 - DNA, 25 bp, Homo sapien
ggttactagtcagcatgttatcttg

SEQ ID NO: 2141958 - DNA, 25 bp, Homo sapien
tatcttgatcatatatagtagcacc

SEQ ID NO: 2141959 - DNA, 25 bp, Homo sapien
tagagactttgctctggcgcattgc

SEQ ID NO: 2141960 - DNA, 25 bp, Homo sapien
cattaagtcaggagatgatagctag

SEQ ID NO: 2141961 - DNA, 25 bp, Homo sapien
gcaggattagtagcaccgtgaaaaa

SEQ ID NO: 2141962 - DNA, 25 bp, Homo sapien
gagactaaccaagtgttgtttccca

SEQ ID NO: 2141963 - DNA, 25 bp, Homo sapien
aaaacccgggatacagcaggattag

SEQ ID NO: 2141964 - DNA, 25 bp, Homo sapien
aaggagcaaggaaatattgaattgg

SEQ ID NO: 2141965 - DNA, 25 bp, Homo sapien
ggaaatattgaattggaaaacagat

SEQ ID NO: 2141966 - DNA, 25 bp, Homo sapien
ctggcaaaaatctgaattagcattt

SEQ ID NO: 2141967 - DNA, 25 bp, Homo sapien
tggcaaaaatctgaattagcatttc

SEQ ID NO: 2141968 - DNA, 25 bp, Homo sapien
gaaccactgttgcatgctacattgg

SEQ ID NO: 2141969 - DNA, 25 bp, Homo sapien
tgctaaagcaattaggaaccactgt

SEQ ID NO: 2141970 - DNA, 25 bp, Homo sapien
caaaatgagacaacttccctcctgt

SEQ ID NO: 2141971 - DNA, 25 bp, Homo sapien
gctaccttaagtcccagtttgctgc

SEQ ID NO: 2141972 - DNA, 25 bp, Homo sapien
gaaagcaagtcacgaatggtgtgca

SEQ ID NO: 2141973 - DNA, 25 bp, Homo sapien
agagtaagacttagagaccagtgcc

SEQ ID NO: 2141974 - DNA, 25 bp, Homo sapien
ccttgccacgcagaagggcggtaag

SEQ ID NO: 2141975 - DNA, 25 bp, Homo sapien
catgggccacaggataggaaagcaa

SEQ ID NO: 2141976 - DNA, 25 bp, Homo sapien
gctgtaccatcattggcaaacctca

SEQ ID NO: 2141977 - DNA, 25 bp, Homo sapien
tagagctttgttccgtggtggcaca

SEQ ID NO: 2141978 - DNA, 25 bp, Homo sapien
gacctttgagaacgtgacactagca

SEQ ID NO: 2141979 - DNA, 25 bp, Homo sapien
gacactagcaaggtggtgaccacag

SEQ ID NO: 2141980 - DNA, 25 bp, Homo sapien
tagaacagtgcacgcacgtgcaaag

SEQ ID NO: 2141981 - DNA, 25 bp, Homo sapien
tgcacgcacgtgcaaagatgctgtc

SEQ ID NO: 2141982 - DNA, 25 bp, Homo sapien
cagtgcacgcacgtgcaaagatgct

SEQ ID NO: 2141983 - DNA, 25 bp, Homo sapien
gaaagtagaacagtgcacgcacgtg

SEQ ID NO: 2141984 - DNA, 25 bp, Homo sapien
cacaatatgtttgatgccagccaca

SEQ ID NO: 2141985 - DNA, 25 bp, Homo sapien
acaatatgtttgatgccagccacac

SEQ ID NO: 2141986 - DNA, 25 bp, Homo sapien
tgtacagatccaaggctgtgctgcc

SEQ ID NO: 2141987 - DNA, 25 bp, Homo sapien
gcagaggcaaccttccttgtaggga

SEQ ID NO: 2141988 - DNA, 25 bp, Homo sapien
gagggcttcgccagatgttgatcac

SEQ ID NO: 2141989 - DNA, 25 bp, Homo sapien
tctggctgaaaaggtgagggccact

SEQ ID NO: 2141990 - DNA, 25 bp, Homo sapien
agcccaagacgttgccggtggctcg

SEQ ID NO: 2141991 - DNA, 25 bp, Homo sapien
gtttcaacctgttgctaatgctgct

SEQ ID NO: 2141992 - DNA, 25 bp, Homo sapien
taatgctgctgatgccgaagcagta

SEQ ID NO: 2141993 - DNA, 25 bp, Homo sapien
gccgcagctgctggatttgactccg

SEQ ID NO: 2141994 - DNA, 25 bp, Homo sapien
cagaaatcctcagggtggctcttcc

SEQ ID NO: 2141995 - DNA, 25 bp, Homo sapien
tgccaatggctcctcaaaatgtctc

SEQ ID NO: 2141996 - DNA, 25 bp, Homo sapien
gagtatgtgccaatgttacctggaa

SEQ ID NO: 2141997 - DNA, 25 bp, Homo sapien
gagctcacctttgggacagaatgac

SEQ ID NO: 2141998 - DNA, 25 bp, Homo sapien
tctactggtggccgctcgcgcccct

SEQ ID NO: 2141999 - DNA, 25 bp, Homo sapien
tactggtggccgctcgcgcccctcc

SEQ ID NO: 2142000 - DNA, 25 bp, Homo sapien
ctggtggccgctcgcgcccctccat

SEQ ID NO: 2142001 - DNA, 25 bp, Homo sapien
ctctactggtggccgctcgcgcccc

SEQ ID NO: 2142002 - DNA, 25 bp, Homo sapien
ttattcgtgtgcctcagagtcgcgg

SEQ ID NO: 2142003 - DNA, 25 bp, Homo sapien
aagaagctcgatccgccgccttgtg

SEQ ID NO: 2142004 - DNA, 25 bp, Homo sapien
ctcgggagtgcctgcagagcggtgg

SEQ ID NO: 2142005 - DNA, 25 bp, Homo sapien
gttctgagcgccctggtcgtcaacc

SEQ ID NO: 2142006 - DNA, 25 bp, Homo sapien
ggaacctgtgtttcgtgggctagaa

SEQ ID NO: 2142007 - DNA, 25 bp, Homo sapien
tcttgttgacgcgagggatgtgaaa

SEQ ID NO: 2142008 - DNA, 25 bp, Homo sapien
ttcggtctcgctcaaggaaaggaaa

SEQ ID NO: 2142009 - DNA, 25 bp, Homo sapien
tatggctgtatacattgcaggcccc

SEQ ID NO: 2142010 - DNA, 25 bp, Homo sapien
tcattttggttgtaagtgcagggaa

SEQ ID NO: 2142011 - DNA, 25 bp, Homo sapien
gcagtcacagtcagggatctctcag

SEQ ID NO: 2142012 - DNA, 25 bp, Homo sapien
gcagctgaaatatgtagcagtcaca

SEQ ID NO: 2142013 - DNA, 25 bp, Homo sapien
tatatatgtgactacgcagctgaaa

SEQ ID NO: 2142014 - DNA, 25 bp, Homo sapien
agcatatgtactgcaaactgagccc

SEQ ID NO: 2142015 - DNA, 25 bp, Homo sapien
ttccaaatctagcatatgtactgca

SEQ ID NO: 2142016 - DNA, 25 bp, Homo sapien
caaatctagcatatgtactgcaaac

SEQ ID NO: 2142017 - DNA, 25 bp, Homo sapien
tctagcatatgtactgcaaactgag

SEQ ID NO: 2142018 - DNA, 25 bp, Homo sapien
tactgagcttttactgacaaacaca

SEQ ID NO: 2142019 - DNA, 25 bp, Homo sapien
tccttggattttataacaattgcca

SEQ ID NO: 2142020 - DNA, 25 bp, Homo sapien
tgacaaacacatgggtagagcaagt

SEQ ID NO: 2142021 - DNA, 25 bp, Homo sapien
ggtagagcaagttgttccttggatt

SEQ ID NO: 2142022 - DNA, 25 bp, Homo sapien
gcctctcctgtttaccatctgcaat

SEQ ID NO: 2142023 - DNA, 25 bp, Homo sapien
catctgcaatggaaaagagctcacc

SEQ ID NO: 2142024 - DNA, 25 bp, Homo sapien
tattgtcagctatttgagtaaccac

SEQ ID NO: 2142025 - DNA, 25 bp, Homo sapien
actattaaatagatacgaaccagga

SEQ ID NO: 2142026 - DNA, 25 bp, Homo sapien
ccctaggtttttatcaagctctctt

SEQ ID NO: 2142027 - DNA, 25 bp, Homo sapien
tctcttacttctgtctggaccaaaa

SEQ ID NO: 2142028 - DNA, 25 bp, Homo sapien
ggactttactcttgttgtggccttc

SEQ ID NO: 2142029 - DNA, 25 bp, Homo sapien
aagtagccccagtactagggaatgg

SEQ ID NO: 2142030 - DNA, 25 bp, Homo sapien
ggcatcagtctgttcttggattcct

SEQ ID NO: 2142031 - DNA, 25 bp, Homo sapien
tccaccaaaccagcatgaacagcta

SEQ ID NO: 2142032 - DNA, 25 bp, Homo sapien
ggtgagacactattacgctcctcca

SEQ ID NO: 2142033 - DNA, 25 bp, Homo sapien
ccagcatgaacagctactactgaaa

SEQ ID NO: 2142034 - DNA, 25 bp, Homo sapien
tctccaagatttttgtggtgagaca

SEQ ID NO: 2142035 - DNA, 25 bp, Homo sapien
gagatcgcaggaccacaggacctaa

SEQ ID NO: 2142036 - DNA, 25 bp, Homo sapien
gaagggagtatacgaataggtgtgg

SEQ ID NO: 2142037 - DNA, 25 bp, Homo sapien
atcgcaggaccacaggacctaagcg

SEQ ID NO: 2142038 - DNA, 25 bp, Homo sapien
gcaggaccacaggacctaagcgaaa

SEQ ID NO: 2142039 - DNA, 25 bp, Homo sapien
cgaaccctctcttctacatcctcca

SEQ ID NO: 2142040 - DNA, 25 bp, Homo sapien
gaaccctctcttctacatcctccat

SEQ ID NO: 2142041 - DNA, 25 bp, Homo sapien
tactcctgccgtttacccgcgcttc

SEQ ID NO: 2142042 - DNA, 25 bp, Homo sapien
gtcatagttactcctgccgtttacc

SEQ ID NO: 2142043 - DNA, 25 bp, Homo sapien
catagttactcctgccgtttacccg

SEQ ID NO: 2142044 - DNA, 25 bp, Homo sapien
tcctgccgtttacccgcgcttcatt

SEQ ID NO: 2142045 - DNA, 25 bp, Homo sapien
gttcatccattcatgcgcctcacta

SEQ ID NO: 2142046 - DNA, 25 bp, Homo sapien
acgtctcttcaccgtgccagactag

SEQ ID NO: 2142047 - DNA, 25 bp, Homo sapien
ttccccgctgattccgccaagtccg

SEQ ID NO: 2142048 - DNA, 25 bp, Homo sapien
tgattccgccaagtccgttcccttg

SEQ ID NO: 2142049 - DNA, 25 bp, Homo sapien
agagtagtggtatttcaccggcggc

SEQ ID NO: 2142050 - DNA, 25 bp, Homo sapien
cgcagggccggcagaccccgccctg

SEQ ID NO: 2142051 - DNA, 25 bp, Homo sapien
agtggtatttcaccggcggcccgca

SEQ ID NO: 2142052 - DNA, 25 bp, Homo sapien
cagggccggcagaccccgccctgga

SEQ ID NO: 2142053 - DNA, 25 bp, Homo sapien
cgcttggcgccagaagcgagagccc

SEQ ID NO: 2142054 - DNA, 25 bp, Homo sapien
gcgagagcccctcagggctcgcccc

SEQ ID NO: 2142055 - DNA, 25 bp, Homo sapien
tgcggccgggcgcttggcgccagaa

SEQ ID NO: 2142056 - DNA, 25 bp, Homo sapien
ctcaccgggtcagtgaaaaaacgat

SEQ ID NO: 2142057 - DNA, 25 bp, Homo sapien
ttgccacaatttcagctcctgttat

SEQ ID NO: 2142058 - DNA, 25 bp, Homo sapien
tgattattgccacaatttcagctcc

SEQ ID NO: 2142059 - DNA, 25 bp, Homo sapien
ctctgcccagctttggtatcagaat

SEQ ID NO: 2142060 - DNA, 25 bp, Homo sapien
cttttttggttgtgtctctgcccag

SEQ ID NO: 2142061 - DNA, 25 bp, Homo sapien
gatgtgtcctccagatgtgtagcta

SEQ ID NO: 2142062 - DNA, 25 bp, Homo sapien
cctccagatgtgtagctaaaaagtc

SEQ ID NO: 2142063 - DNA, 25 bp, Homo sapien
tgtgatgtgtcctccagatgtgtag

SEQ ID NO: 2142064 - DNA, 25 bp, Homo sapien
tgttgttgtgatgtgtcctccagat

SEQ ID NO: 2142065 - DNA, 25 bp, Homo sapien
aagtttccacttgaagtgtagctat

SEQ ID NO: 2142066 - DNA, 25 bp, Homo sapien
atgtctccacattgtcagggattgg

SEQ ID NO: 2142067 - DNA, 25 bp, Homo sapien
ctccacattgtcagggattgggggg

SEQ ID NO: 2142068 - DNA, 25 bp, Homo sapien
tctccacattgtcagggattggggg

SEQ ID NO: 2142069 - DNA, 25 bp, Homo sapien
tgtctccacattgtcagggattggg

SEQ ID NO: 2142070 - DNA, 25 bp, Homo sapien
gaaggcaacggctttcatctgactt

SEQ ID NO: 2142071 - DNA, 25 bp, Homo sapien
ttcccatgcatggtgtttgtatgag

SEQ ID NO: 2142072 - DNA, 25 bp, Homo sapien
gcttcaccccattcagtagactctg

SEQ ID NO: 2142073 - DNA, 25 bp, Homo sapien
tagactctgctaatgaatccttgtg

SEQ ID NO: 2142074 - DNA, 25 bp, Homo sapien
acaatatagtagcagttcacatttc

SEQ ID NO: 2142075 - DNA, 25 bp, Homo sapien
agtagcagttcacatttccagccat

SEQ ID NO: 2142076 - DNA, 25 bp, Homo sapien
atatagtagcagttcacatttccag

SEQ ID NO: 2142077 - DNA, 25 bp, Homo sapien
tagtagcagttcacatttccagcca

SEQ ID NO: 2142078 - DNA, 25 bp, Homo sapien
ctttggccctatctaaggcttcttg

SEQ ID NO: 2142079 - DNA, 25 bp, Homo sapien
tttctggccaagcagcttcaggctc

SEQ ID NO: 2142080 - DNA, 25 bp, Homo sapien
catttgtgtttctggccaagcagct

SEQ ID NO: 2142081 - DNA, 25 bp, Homo sapien
gtcagcaggtggtaataatagttct

SEQ ID NO: 2142082 - DNA, 25 bp, Homo sapien
tacaatgggctctatttcagtatca

SEQ ID NO: 2142083 - DNA, 25 bp, Homo sapien
ttgccagagctgtgttcaaggagga

SEQ ID NO: 2142084 - DNA, 25 bp, Homo sapien
tttcagtatcagcttgatctcttgc

SEQ ID NO: 2142085 - DNA, 25 bp, Homo sapien
attttgcttactacaatgggctcta

SEQ ID NO: 2142086 - DNA, 25 bp, Homo sapien
gcccagggttgacccattgataggt

SEQ ID NO: 2142087 - DNA, 25 bp, Homo sapien
aggtaggtctgggacttggctgggc

SEQ ID NO: 2142088 - DNA, 25 bp, Homo sapien
acaggatgcatagccaagttcagaa

SEQ ID NO: 2142089 - DNA, 25 bp, Homo sapien
caggggatagctggaacagccaaga

SEQ ID NO: 2142090 - DNA, 25 bp, Homo sapien
tttaacttgagttgttggtgaacca

SEQ ID NO: 2142091 - DNA, 25 bp, Homo sapien
ttaacttgagttgttggtgaaccat

SEQ ID NO: 2142092 - DNA, 25 bp, Homo sapien
tgggatctcccaggtctaactccct

SEQ ID NO: 2142093 - DNA, 25 bp, Homo sapien
tggccctgggatctcccaggtctaa

SEQ ID NO: 2142094 - DNA, 25 bp, Homo sapien
gccctgggatctcccaggtctaact

SEQ ID NO: 2142095 - DNA, 25 bp, Homo sapien
gatctcccaggtctaactccctctt

SEQ ID NO: 2142096 - DNA, 25 bp, Homo sapien
cagatatgttgttagcactgccaca

SEQ ID NO: 2142097 - DNA, 25 bp, Homo sapien
tgagacctcttaggtgtggaaaggc

SEQ ID NO: 2142098 - DNA, 25 bp, Homo sapien
tagagcaacgtctagcatcttgggc

SEQ ID NO: 2142099 - DNA, 25 bp, Homo sapien
tgggtaatctagtgccctttgcaga

SEQ ID NO: 2142100 - DNA, 25 bp, Homo sapien
catgggaggaatcatatatgtagat

SEQ ID NO: 2142101 - DNA, 25 bp, Homo sapien
tattggcaatatctcactcctagaa

SEQ ID NO: 2142102 - DNA, 25 bp, Homo sapien
gaaagagactagtgggctacataac

SEQ ID NO: 2142103 - DNA, 25 bp, Homo sapien
gaaatgggtttcctaatatagacaa

SEQ ID NO: 2142104 - DNA, 25 bp, Homo sapien
tcacgatggaagtgatggtgtgaac

SEQ ID NO: 2142105 - DNA, 25 bp, Homo sapien
tgaactgtgataatgagtatctcca

SEQ ID NO: 2142106 - DNA, 25 bp, Homo sapien
gccagagagtttgcagtacaagagg

SEQ ID NO: 2142107 - DNA, 25 bp, Homo sapien
taaccttgattagggggccagagag

SEQ ID NO: 2142108 - DNA, 25 bp, Homo sapien
aactgtggtatgactaacataccac

SEQ ID NO: 2142109 - DNA, 25 bp, Homo sapien
taacttggtctttagcgtaggccag

SEQ ID NO: 2142110 - DNA, 25 bp, Homo sapien
tgctagcccaagcatcaaagatgga

SEQ ID NO: 2142111 - DNA, 25 bp, Homo sapien
gaccttccccatagccttggtggtg

SEQ ID NO: 2142112 - DNA, 25 bp, Homo sapien
tggtcatggagatcaatgctagccc

SEQ ID NO: 2142113 - DNA, 25 bp, Homo sapien
gctgctggaacaatattgactgcat

SEQ ID NO: 2142114 - DNA, 25 bp, Homo sapien
ggctgctggaacaatattgactgca

SEQ ID NO: 2142115 - DNA, 25 bp, Homo sapien
tggctgctggaacaatattgactgc

SEQ ID NO: 2142116 - DNA, 25 bp, Homo sapien
gttttgaattttcaccaagcagcag

SEQ ID NO: 2142117 - DNA, 25 bp, Homo sapien
cttgagttttgaattttcaccaagc

SEQ ID NO: 2142118 - DNA, 25 bp, Homo sapien
gagttttgaattttcaccaagcagc

SEQ ID NO: 2142119 - DNA, 25 bp, Homo sapien
tgagttttgaattttcaccaagcag

SEQ ID NO: 2142120 - DNA, 25 bp, Homo sapien
agaggaccatttgtgctactgtgcc

SEQ ID NO: 2142121 - DNA, 25 bp, Homo sapien
tctgtggtcagtcacctgcaaggcc

SEQ ID NO: 2142122 - DNA, 25 bp, Homo sapien
tgtgcagatcagagtggcaacctgg

SEQ ID NO: 2142123 - DNA, 25 bp, Homo sapien
catgtccagcataactgtgcagatc

SEQ ID NO: 2142124 - DNA, 25 bp, Homo sapien
gaaagagtaggaggcaatgagggtg

SEQ ID NO: 2142125 - DNA, 25 bp, Homo sapien
gcaatgagggtgggccacgtggctc

SEQ ID NO: 2142126 - DNA, 25 bp, Homo sapien
agtgaaagagtaggaggcaatgagg

SEQ ID NO: 2142127 - DNA, 25 bp, Homo sapien
atgagggtgggccacgtggctcctg

SEQ ID NO: 2142128 - DNA, 25 bp, Homo sapien
gcacacttatttccacccagccgtg

SEQ ID NO: 2142129 - DNA, 25 bp, Homo sapien
agctgttgcagccaagttagcacac

SEQ ID NO: 2142130 - DNA, 25 bp, Homo sapien
tccacccagccgtgctgagtgcagc

SEQ ID NO: 2142131 - DNA, 25 bp, Homo sapien
caggaaccggctacaatttctgatc

SEQ ID NO: 2142132 - DNA, 25 bp, Homo sapien
tagtccttcaaaatttggtcgatca

SEQ ID NO: 2142133 - DNA, 25 bp, Homo sapien
aatggccggggaccacgaggctcat

SEQ ID NO: 2142134 - DNA, 25 bp, Homo sapien
atcatcagtctctcaaatggccggg

SEQ ID NO: 2142135 - DNA, 25 bp, Homo sapien
gctcatggaagtagttggcctcttt

SEQ ID NO: 2142136 - DNA, 25 bp, Homo sapien
ttcttccagagatggtagcactgtc

SEQ ID NO: 2142137 - DNA, 25 bp, Homo sapien
ctttctctcgctctagggcaaaggg

SEQ ID NO: 2142138 - DNA, 25 bp, Homo sapien
tctctcgctctagggcaaagggctc

SEQ ID NO: 2142139 - DNA, 25 bp, Homo sapien
caaagggctccaagatttgaatctt

SEQ ID NO: 2142140 - DNA, 25 bp, Homo sapien
tttgaagaatagagggtcacactgg

SEQ ID NO: 2142141 - DNA, 25 bp, Homo sapien
tgggataacacaaaagcagtggatc

SEQ ID NO: 2142142 - DNA, 25 bp, Homo sapien
taatgaaggtgaactgagctaactg

SEQ ID NO: 2142143 - DNA, 25 bp, Homo sapien
gctaactgttcaggaggacttggca

SEQ ID NO: 2142144 - DNA, 25 bp, Homo sapien
gtgcaacttaattggcaatttcctg

SEQ ID NO: 2142145 - DNA, 25 bp, Homo sapien
gcaatttcctggagtggaaaagttg

SEQ ID NO: 2142146 - DNA, 25 bp, Homo sapien
gagtggaaaagttgtgctgtgtcag

SEQ ID NO: 2142147 - DNA, 25 bp, Homo sapien
tgcaacttaattggcaatttcctgg

SEQ ID NO: 2142148 - DNA, 25 bp, Homo sapien
tctcttcaaggtaggactaacggaa

SEQ ID NO: 2142149 - DNA, 25 bp, Homo sapien
tcttcaaggtaggactaacggaagc

SEQ ID NO: 2142150 - DNA, 25 bp, Homo sapien
aggactaacggaagcttcttctcag

SEQ ID NO: 2142151 - DNA, 25 bp, Homo sapien
caaggtaggactaacggaagcttct

SEQ ID NO: 2142152 - DNA, 25 bp, Homo sapien
ggtgtgtggcccctcataatagtta

SEQ ID NO: 2142153 - DNA, 25 bp, Homo sapien
tggtgtgtggcccctcataatagtt

SEQ ID NO: 2142154 - DNA, 25 bp, Homo sapien
ggaaaagttcatctggtttctccat

SEQ ID NO: 2142155 - DNA, 25 bp, Homo sapien
tgaacaggaaaagttcatctggttt

SEQ ID NO: 2142156 - DNA, 25 bp, Homo sapien
aggaaaagttcatctggtttctcca

SEQ ID NO: 2142157 - DNA, 25 bp, Homo sapien
acaggaaaagttcatctggtttctc

SEQ ID NO: 2142158 - DNA, 25 bp, Homo sapien
aatttagcattctggaacgttctgg

SEQ ID NO: 2142159 - DNA, 25 bp, Homo sapien
cctataggataagtgggcagagctt

SEQ ID NO: 2142160 - DNA, 25 bp, Homo sapien
gactagtgaacaatttagcattctg

SEQ ID NO: 2142161 - DNA, 25 bp, Homo sapien
gaaaggcgtgcgtgactagtgaaca

SEQ ID NO: 2142162 - DNA, 25 bp, Homo sapien
ccaattagaaatgcgaggagaccta

SEQ ID NO: 2142163 - DNA, 25 bp, Homo sapien
aggaggcggagccaaagccctctga

SEQ ID NO: 2142164 - DNA, 25 bp, Homo sapien
gaggcggagccaaagccctctgaag

SEQ ID NO: 2142165 - DNA, 25 bp, Homo sapien
aagaccaattagaaatgcgaggaga

SEQ ID NO: 2142166 - DNA, 25 bp, Homo sapien
tctacttgtttgatacttagtttaa

SEQ ID NO: 2142167 - DNA, 25 bp, Homo sapien
tcccatccaccttatctacttgttt

SEQ ID NO: 2142168 - DNA, 25 bp, Homo sapien
aacatgatactcaacaggaaagtcc

SEQ ID NO: 2142169 - DNA, 25 bp, Homo sapien
tccaccttatctacttgtttgatac

SEQ ID NO: 2142170 - DNA, 25 bp, Homo sapien
atacttatgaagagagcgaaacccg

SEQ ID NO: 2142171 - DNA, 25 bp, Homo sapien
cggaatgatcaatacttatgaagag

SEQ ID NO: 2142172 - DNA, 25 bp, Homo sapien
aagagagcgaaacccgccaaacgca

SEQ ID NO: 2142173 - DNA, 25 bp, Homo sapien
ctgcggaatgatcaatacttatgaa

SEQ ID NO: 2142174 - DNA, 25 bp, Homo sapien
ttgtagcagtgtgttctggcagtgt

SEQ ID NO: 2142175 - DNA, 25 bp, Homo sapien
tgttctggcagtgtcggcgtcacta

SEQ ID NO: 2142176 - DNA, 25 bp, Homo sapien
ggcagtgtcggcgtcactacctcct

SEQ ID NO: 2142177 - DNA, 25 bp, Homo sapien
ccttgtagcagtgtgttctggcagt

SEQ ID NO: 2142178 - DNA, 25 bp, Homo sapien
cgcagtgcagagagccgggacgtga

SEQ ID NO: 2142179 - DNA, 25 bp, Homo sapien
tgcagagagccgggacgtgattcgt

SEQ ID NO: 2142180 - DNA, 25 bp, Homo sapien
agagagccgggacgtgattcgtcac

SEQ ID NO: 2142181 - DNA, 25 bp, Homo sapien
gcagtgcagagagccgggacgtgat

SEQ ID NO: 2142182 - DNA, 25 bp, Homo sapien
tttccgggatcagaaagcgactgct

SEQ ID NO: 2142183 - DNA, 25 bp, Homo sapien
cgcctctcgctatttcccagctcag

SEQ ID NO: 2142184 - DNA, 25 bp, Homo sapien
ctcagggtcctttccgggatcagaa

SEQ ID NO: 2142185 - DNA, 25 bp, Homo sapien
tcagaaagcgactgctaaccaggct

SEQ ID NO: 2142186 - DNA, 25 bp, Homo sapien
caagtgaggtgttagagccaaactc

SEQ ID NO: 2142187 - DNA, 25 bp, Homo sapien
tcgtgccggagaattaaggaatacc

SEQ ID NO: 2142188 - DNA, 25 bp, Homo sapien
ttgaaaaaccggcagctccacttag

SEQ ID NO: 2142189 - DNA, 25 bp, Homo sapien
tgacaccgaagaaagcaacgctgtt

SEQ ID NO: 2142190 - DNA, 25 bp, Homo sapien
ttttatccattgtctcatagtaaat

SEQ ID NO: 2142191 - DNA, 25 bp, Homo sapien
ccattgtctcatagtaaatattgac

SEQ ID NO: 2142192 - DNA, 25 bp, Homo sapien
agctctacatgcctgatctacataa

SEQ ID NO: 2142193 - DNA, 25 bp, Homo sapien
gctctacatgcctgatctacataag

SEQ ID NO: 2142194 - DNA, 25 bp, Homo sapien
ttagggcatccagccctgaaacagc

SEQ ID NO: 2142195 - DNA, 25 bp, Homo sapien
catgaactggttggcaatctaacat

SEQ ID NO: 2142196 - DNA, 25 bp, Homo sapien
tattgacctggaactcactagaagg

SEQ ID NO: 2142197 - DNA, 25 bp, Homo sapien
gaactcactagaaggcaatgtgtca

SEQ ID NO: 2142198 - DNA, 25 bp, Homo sapien
tcatccacattaaaaaaaaaagaga

SEQ ID NO: 2142199 - DNA, 25 bp, Homo sapien
aaagagaacacatcattttctatct

SEQ ID NO: 2142200 - DNA, 25 bp, Homo sapien
aaaaaaagagaacacatcattttct

SEQ ID NO: 2142201 - DNA, 25 bp, Homo sapien
aaaaagagaacacatcattttctat

SEQ ID NO: 2142202 - DNA, 25 bp, Homo sapien
tgtagtttgggactgagttgcttgc

SEQ ID NO: 2142203 - DNA, 25 bp, Homo sapien
ctgtagtttgggactgagttgcttg

SEQ ID NO: 2142204 - DNA, 25 bp, Homo sapien
gtagtttgggactgagttgcttgct

SEQ ID NO: 2142205 - DNA, 25 bp, Homo sapien
acttgcaatcttccacacagtattg

SEQ ID NO: 2142206 - DNA, 25 bp, Homo sapien
cacagtattgttgggagtggactga

SEQ ID NO: 2142207 - DNA, 25 bp, Homo sapien
gaaaacggaagcaatcacttgcaat

SEQ ID NO: 2142208 - DNA, 25 bp, Homo sapien
ccaatcttgaaaacggaagcaatca

SEQ ID NO: 2142209 - DNA, 25 bp, Homo sapien
gaagagttatccacatagcgggaac

SEQ ID NO: 2142210 - DNA, 25 bp, Homo sapien
tagagggcaatgctccaaactggca

SEQ ID NO: 2142211 - DNA, 25 bp, Homo sapien
gttgcaatgtagaaacaaagctggc

SEQ ID NO: 2142212 - DNA, 25 bp, Homo sapien
cctaaatgtatagacctggagctgc

SEQ ID NO: 2142213 - DNA, 25 bp, Homo sapien
acagcatttggacattctgattgtt

SEQ ID NO: 2142214 - DNA, 25 bp, Homo sapien
gacagcatttggacattctgattgt

SEQ ID NO: 2142215 - DNA, 25 bp, Homo sapien
catgtcaaaaatacagtctagtcct

SEQ ID NO: 2142216 - DNA, 25 bp, Homo sapien
cttatacgagtagttccagccattt

SEQ ID NO: 2142217 - DNA, 25 bp, Homo sapien
gaacaatgcacaccgttcaatgtag

SEQ ID NO: 2142218 - DNA, 25 bp, Homo sapien
aaacacaacaatcatgaacaatgca

SEQ ID NO: 2142219 - DNA, 25 bp, Homo sapien
gcaaaacttatcaatccagctatcc

SEQ ID NO: 2142220 - DNA, 25 bp, Homo sapien
acatcagcatctaggcaaaacttat

SEQ ID NO: 2142221 - DNA, 25 bp, Homo sapien
tcagcatctaggcaaaacttatcaa

SEQ ID NO: 2142222 - DNA, 25 bp, Homo sapien
tctaggcaaaacttatcaatccagc

SEQ ID NO: 2142223 - DNA, 25 bp, Homo sapien
cccaacgattattgagaatgaaaat

SEQ ID NO: 2142224 - DNA, 25 bp, Homo sapien
gcagaggcatcccaacgattattga

SEQ ID NO: 2142225 - DNA, 25 bp, Homo sapien
gcatcccaacgattattgagaatga

SEQ ID NO: 2142226 - DNA, 25 bp, Homo sapien
gaggcatcccaacgattattgagaa

SEQ ID NO: 2142227 - DNA, 25 bp, Homo sapien
aatgaaacacaatatcttcttgaaa

SEQ ID NO: 2142228 - DNA, 25 bp, Homo sapien
aaattgaggtacgagggaagaccag

SEQ ID NO: 2142229 - DNA, 25 bp, Homo sapien
aaatgaaacacaatatcttcttgaa

SEQ ID NO: 2142230 - DNA, 25 bp, Homo sapien
ttgaggtacgagggaagaccagccc

SEQ ID NO: 2142231 - DNA, 25 bp, Homo sapien
tggactggtaggagcagtgggagta

SEQ ID NO: 2142232 - DNA, 25 bp, Homo sapien
tgctggactggtaggagcagtggga

SEQ ID NO: 2142233 - DNA, 25 bp, Homo sapien
gagtagaagctaaagatctagggag

SEQ ID NO: 2142234 - DNA, 25 bp, Homo sapien
gcagtgggagtagaagctaaagatc

SEQ ID NO: 2142235 - DNA, 25 bp, Homo sapien
ctaggattcttcatcgcgtgaaggt

SEQ ID NO: 2142236 - DNA, 25 bp, Homo sapien
ccagttgtctttgagtaatatcagc

SEQ ID NO: 2142237 - DNA, 25 bp, Homo sapien
caacattatcgatgcccatagaagt

SEQ ID NO: 2142238 - DNA, 25 bp, Homo sapien
caaatcattcctccaacattatcga

SEQ ID NO: 2142239 - DNA, 25 bp, Homo sapien
taacaattgtcctgatcttacaagt

SEQ ID NO: 2142240 - DNA, 25 bp, Homo sapien
acagaatctacataaggctttgcta

SEQ ID NO: 2142241 - DNA, 25 bp, Homo sapien
gatacatcactaacagaatctacat

SEQ ID NO: 2142242 - DNA, 25 bp, Homo sapien
tcaaaaataccaataccctgagata

SEQ ID NO: 2142243 - DNA, 25 bp, Homo sapien
aagatgctgtggtccaaaataagac

SEQ ID NO: 2142244 - DNA, 25 bp, Homo sapien
atattggtaccgataagatgctgtg

SEQ ID NO: 2142245 - DNA, 25 bp, Homo sapien
ccgataagatgctgtggtccaaaat

SEQ ID NO: 2142246 - DNA, 25 bp, Homo sapien
tggtaccgataagatgctgtggtcc

SEQ ID NO: 2142247 - DNA, 25 bp, Homo sapien
aggcttgtggctgcggctgacttcc

SEQ ID NO: 2142248 - DNA, 25 bp, Homo sapien
cagacgcacggggattagcagctcc

SEQ ID NO: 2142249 - DNA, 25 bp, Homo sapien
tgcctctccgcgctgcttaggtccc

SEQ ID NO: 2142250 - DNA, 25 bp, Homo sapien
gtttcaatgactgtgaagttctgct

SEQ ID NO: 2142251 - DNA, 25 bp, Homo sapien
agagctccactctgtttcccttagg

SEQ ID NO: 2142252 - DNA, 25 bp, Homo sapien
gagctccactctgtttcccttaggt

SEQ ID NO: 2142253 - DNA, 25 bp, Homo sapien
tcagagctccactctgtttccctta

SEQ ID NO: 2142254 - DNA, 25 bp, Homo sapien
gctccactctgtttcccttaggtac

SEQ ID NO: 2142255 - DNA, 25 bp, Homo sapien
gacgagggggcttgatatttccagc

SEQ ID NO: 2142256 - DNA, 25 bp, Homo sapien
tcttgccaataacgttcctccccat

SEQ ID NO: 2142257 - DNA, 25 bp, Homo sapien
tcgggcctgcccatccttaaggcta

SEQ ID NO: 2142258 - DNA, 25 bp, Homo sapien
cacactcttccgtctcagagtcagg

SEQ ID NO: 2142259 - DNA, 25 bp, Homo sapien
tttgccacttggaaagacctctctt

SEQ ID NO: 2142260 - DNA, 25 bp, Homo sapien
aaaacgtttactgctccctcagcaa

SEQ ID NO: 2142261 - DNA, 25 bp, Homo sapien
gaatgagtctttggggtaatcaccc

SEQ ID NO: 2142262 - DNA, 25 bp, Homo sapien
ggttagcctcagagttgtttgccac

SEQ ID NO: 2142263 - DNA, 25 bp, Homo sapien
cagccctgagtgaccccttgaaggt

SEQ ID NO: 2142264 - DNA, 25 bp, Homo sapien
cttggcttgttggaaaaaccctgca

SEQ ID NO: 2142265 - DNA, 25 bp, Homo sapien
gtccttccaatatgcagccctgagt

SEQ ID NO: 2142266 - DNA, 25 bp, Homo sapien
ttggcttgttggaaaaaccctgcat

SEQ ID NO: 2142267 - DNA, 25 bp, Homo sapien
ctggaaggccaccttagcaaatatg

SEQ ID NO: 2142268 - DNA, 25 bp, Homo sapien
tggaaggccaccttagcaaatatga

SEQ ID NO: 2142269 - DNA, 25 bp, Homo sapien
ttagccctctgtccactggaaggcc

SEQ ID NO: 2142270 - DNA, 25 bp, Homo sapien
tcaagtcacattctactctcactgc

SEQ ID NO: 2142271 - DNA, 25 bp, Homo sapien
aatgtttacagatatcaggcagagt

SEQ ID NO: 2142272 - DNA, 25 bp, Homo sapien
gctggacttcccacaacttctcaag

SEQ ID NO: 2142273 - DNA, 25 bp, Homo sapien
ttacagatatcaggcagagtacaga

SEQ ID NO: 2142274 - DNA, 25 bp, Homo sapien
tgctctcgtttacttgcaggcccat

SEQ ID NO: 2142275 - DNA, 25 bp, Homo sapien
tactctgctctcgtttacttgcagg

SEQ ID NO: 2142276 - DNA, 25 bp, Homo sapien
tctgctctcgtttacttgcaggccc

SEQ ID NO: 2142277 - DNA, 25 bp, Homo sapien
attctactctgctctcgtttacttg

SEQ ID NO: 2142278 - DNA, 25 bp, Homo sapien
cagccataaggtcacccctgaaggt

SEQ ID NO: 2142279 - DNA, 25 bp, Homo sapien
ttgggcagcagtccaagacgatgac

SEQ ID NO: 2142280 - DNA, 25 bp, Homo sapien
cagtcctcgttccagccataaggtc

SEQ ID NO: 2142281 - DNA, 25 bp, Homo sapien
ccagggattgggcagcagtccaaga

SEQ ID NO: 2142282 - DNA, 25 bp, Homo sapien
cagttgttattgcagtgtctgcttc

SEQ ID NO: 2142283 - DNA, 25 bp, Homo sapien
tccaaatgcctctcctctattgatt

SEQ ID NO: 2142284 - DNA, 25 bp, Homo sapien
tagctatgccatcttctgctgagga

SEQ ID NO: 2142285 - DNA, 25 bp, Homo sapien
catcccagtggtaacgcctgatttt

SEQ ID NO: 2142286 - DNA, 25 bp, Homo sapien
cacgtccaacacttggcactgaact

SEQ ID NO: 2142287 - DNA, 25 bp, Homo sapien
tgggccgtctaactggcagctgctc

SEQ ID NO: 2142288 - DNA, 25 bp, Homo sapien
tgaagcaatgcattctatcagaact

SEQ ID NO: 2142289 - DNA, 25 bp, Homo sapien
gggaactgaatccaacacgtccaac

SEQ ID NO: 2142290 - DNA, 25 bp, Homo sapien
cagaattgtttagattttgtgttta

SEQ ID NO: 2142291 - DNA, 25 bp, Homo sapien
gttaaaatgcatgattgcagaattg

SEQ ID NO: 2142292 - DNA, 25 bp, Homo sapien
taagtttgcactcaaatcttaagaa

SEQ ID NO: 2142293 - DNA, 25 bp, Homo sapien
tttaagtttgcactcaaatcttaag

SEQ ID NO: 2142294 - DNA, 25 bp, Homo sapien
aactcccaaaagctagaacactgcc

SEQ ID NO: 2142295 - DNA, 25 bp, Homo sapien
gaataactgattagtaagtcttgcc

SEQ ID NO: 2142296 - DNA, 25 bp, Homo sapien
taacacttaaggttgggtgctgcta

SEQ ID NO: 2142297 - DNA, 25 bp, Homo sapien
ggagatgccactaccccttgatttt

SEQ ID NO: 2142298 - DNA, 25 bp, Homo sapien
ccttagaaggtattaagattataat

SEQ ID NO: 2142299 - DNA, 25 bp, Homo sapien
agagtcattgtaatgttgtgaataa

SEQ ID NO: 2142300 - DNA, 25 bp, Homo sapien
gcataggttagatatagagtcattg

SEQ ID NO: 2142301 - DNA, 25 bp, Homo sapien
gctttttttgaaactttgagatcta

SEQ ID NO: 2142302 - DNA, 25 bp, Homo sapien
agacagtgtttttggtatctatcaa

SEQ ID NO: 2142303 - DNA, 25 bp, Homo sapien
caaacagttcaatccagtattggag

SEQ ID NO: 2142304 - DNA, 25 bp, Homo sapien
tgttcattagctaatagtgaaaagc

SEQ ID NO: 2142305 - DNA, 25 bp, Homo sapien
catattaatatactgccggtgggaa

SEQ ID NO: 2142306 - DNA, 25 bp, Homo sapien
tgttctagaaagcagaccctatttt

SEQ ID NO: 2142307 - DNA, 25 bp, Homo sapien
ttgagagctcataaacagaatgtgc

SEQ ID NO: 2142308 - DNA, 25 bp, Homo sapien
tttagcttcttagtcatggagtggg

SEQ ID NO: 2142309 - DNA, 25 bp, Homo sapien
gatgatcttaagagtaaagctgtaa

SEQ ID NO: 2142310 - DNA, 25 bp, Homo sapien
taactgaaggcctgttgtcacatat

SEQ ID NO: 2142311 - DNA, 25 bp, Homo sapien
tgagcgacaagtgagcatttctgcc

SEQ ID NO: 2142312 - DNA, 25 bp, Homo sapien
cctctggtctctggtgcccgaaagt

SEQ ID NO: 2142313 - DNA, 25 bp, Homo sapien
tgtggctttaggatattcccagaaa

SEQ ID NO: 2142314 - DNA, 25 bp, Homo sapien
gccacccagtggcacgttatagaca

SEQ ID NO: 2142315 - DNA, 25 bp, Homo sapien
gctgatgttgctttagcactcttca

SEQ ID NO: 2142316 - DNA, 25 bp, Homo sapien
cagtggcacgttatagacaagctgc

SEQ ID NO: 2142317 - DNA, 25 bp, Homo sapien
ttatagacaagctgctgatgttgct

SEQ ID NO: 2142318 - DNA, 25 bp, Homo sapien
tcagtacggtagagatagacttctg

SEQ ID NO: 2142319 - DNA, 25 bp, Homo sapien
ctgatggtcctctatcctggttcca

SEQ ID NO: 2142320 - DNA, 25 bp, Homo sapien
tccaggagtctctgataagcacaac

SEQ ID NO: 2142321 - DNA, 25 bp, Homo sapien
agttttcacctaagctctgcaagag

SEQ ID NO: 2142322 - DNA, 25 bp, Homo sapien
tcaacctaatagcttgaaaaagatt

SEQ ID NO: 2142323 - DNA, 25 bp, Homo sapien
caacctaatagcttgaaaaagattt

SEQ ID NO: 2142324 - DNA, 25 bp, Homo sapien
tggactaagcaacaatgttgacaaa

SEQ ID NO: 2142325 - DNA, 25 bp, Homo sapien
ctaagcaacaatgttgacaaactta

SEQ ID NO: 2142326 - DNA, 25 bp, Homo sapien
cacataagcatcctaagtactggga

SEQ ID NO: 2142327 - DNA, 25 bp, Homo sapien
gtactgggaccacaagctcatgcca

SEQ ID NO: 2142328 - DNA, 25 bp, Homo sapien
agtactgggaccacaagctcatgcc

SEQ ID NO: 2142329 - DNA, 25 bp, Homo sapien
ccacataagcatcctaagtactggg

SEQ ID NO: 2142330 - DNA, 25 bp, Homo sapien
cagcttaaaagtggaggtggatgcc

SEQ ID NO: 2142331 - DNA, 25 bp, Homo sapien
cctgcaccccctctgattgaaggat

SEQ ID NO: 2142332 - DNA, 25 bp, Homo sapien
ttgaaggatcaccttgcttagggca

SEQ ID NO: 2142333 - DNA, 25 bp, Homo sapien
gaagtctgttgactgtctccctgca

SEQ ID NO: 2142334 - DNA, 25 bp, Homo sapien
gaaacagagcccttatgtcccgtga

SEQ ID NO: 2142335 - DNA, 25 bp, Homo sapien
ttactaagtctccaaagcactgtgg

SEQ ID NO: 2142336 - DNA, 25 bp, Homo sapien
tgtagcggtaataagagagccaggc

SEQ ID NO: 2142337 - DNA, 25 bp, Homo sapien
aaagacaagtgatggccgggcactg

SEQ ID NO: 2142338 - DNA, 25 bp, Homo sapien
gcccctccggtgagtatccctggat

SEQ ID NO: 2142339 - DNA, 25 bp, Homo sapien
agcgggcacgcggttcctttttgcg

SEQ ID NO: 2142340 - DNA, 25 bp, Homo sapien
tgtcggtaccagggccccatttcca

SEQ ID NO: 2142341 - DNA, 25 bp, Homo sapien
tttgcgagctttccgagtgccaggc

SEQ ID NO: 2142342 - DNA, 25 bp, Homo sapien
cgtgggtgggccgagccgtctgcag

SEQ ID NO: 2142343 - DNA, 25 bp, Homo sapien
tcttttccgggctcgcgctgagtcc

SEQ ID NO: 2142344 - DNA, 25 bp, Homo sapien
ggcgcgtcttttccgggctcgcgct

SEQ ID NO: 2142345 - DNA, 25 bp, Homo sapien
agcgattcggctggctctgccacac

SEQ ID NO: 2142346 - DNA, 25 bp, Homo sapien
ttggaacagcattcgtatgaccggc

SEQ ID NO: 2142347 - DNA, 25 bp, Homo sapien
tcttaaagaggagcagtgaaaccca

SEQ ID NO: 2142348 - DNA, 25 bp, Homo sapien
gaagccctcagatagttcgctggca

SEQ ID NO: 2142349 - DNA, 25 bp, Homo sapien
gagcaacaacttgaggcgagccgtt

SEQ ID NO: 2142350 - DNA, 25 bp, Homo sapien
tctatgggaaaatggaaatcagcaa

SEQ ID NO: 2142351 - DNA, 25 bp, Homo sapien
gctagttcaccattacgcatcaggg

SEQ ID NO: 2142352 - DNA, 25 bp, Homo sapien
tgtcaattaccatcaggaacaggaa

SEQ ID NO: 2142353 - DNA, 25 bp, Homo sapien
caagcaccccagataattgtgatgc

SEQ ID NO: 2142354 - DNA, 25 bp, Homo sapien
aaccactgactggattccatatcca

SEQ ID NO: 2142355 - DNA, 25 bp, Homo sapien
tttaaaccactgactggattccata

SEQ ID NO: 2142356 - DNA, 25 bp, Homo sapien
cttctttaaaccactgactggattc

SEQ ID NO: 2142357 - DNA, 25 bp, Homo sapien
taaaccactgactggattccatatc

SEQ ID NO: 2142358 - DNA, 25 bp, Homo sapien
gaatatcttattctggccaccatct

SEQ ID NO: 2142359 - DNA, 25 bp, Homo sapien
caattttgtcatagccatctatttc

SEQ ID NO: 2142360 - DNA, 25 bp, Homo sapien
tacattcctaaaccttcactcttgt

SEQ ID NO: 2142361 - DNA, 25 bp, Homo sapien
gccaaccttggttatcttgtcctga

SEQ ID NO: 2142362 - DNA, 25 bp, Homo sapien
cccatgacttctaatctggtttcta

SEQ ID NO: 2142363 - DNA, 25 bp, Homo sapien
aattctcgtaacacactctttgtca

SEQ ID NO: 2142364 - DNA, 25 bp, Homo sapien
tctgttctaatctttgatcccatga

SEQ ID NO: 2142365 - DNA, 25 bp, Homo sapien
tctggtttctaattctcgtaacaca

SEQ ID NO: 2142366 - DNA, 25 bp, Homo sapien
tactgggcagcaagttcaaatgtta

SEQ ID NO: 2142367 - DNA, 25 bp, Homo sapien
agactgtctttgtcaaaaccagaca

SEQ ID NO: 2142368 - DNA, 25 bp, Homo sapien
cagacagctggcaaccctggaacct

SEQ ID NO: 2142369 - DNA, 25 bp, Homo sapien
tggaacctcaccagggagagccaga

SEQ ID NO: 2142370 - DNA, 25 bp, Homo sapien
tgtgaaagatgtccaagcctgtact

SEQ ID NO: 2142371 - DNA, 25 bp, Homo sapien
tctggactggatctgctactgtgag

SEQ ID NO: 2142372 - DNA, 25 bp, Homo sapien
gatgcccaaacttgtactgtcagag

SEQ ID NO: 2142373 - DNA, 25 bp, Homo sapien
cagggatgagccagaacacttttgt

SEQ ID NO: 2142374 - DNA, 25 bp, Homo sapien
gagtggaaatatcttgccctgtgga

SEQ ID NO: 2142375 - DNA, 25 bp, Homo sapien
gacaaccatgtaaggcctacccata

SEQ ID NO: 2142376 - DNA, 25 bp, Homo sapien
ttccccaatgagaatgccaagagtg

SEQ ID NO: 2142377 - DNA, 25 bp, Homo sapien
tggtttgccaaccaagtgagtgcca

SEQ ID NO: 2142378 - DNA, 25 bp, Homo sapien
atctctgtttctcaatgtggaccat

SEQ ID NO: 2142379 - DNA, 25 bp, Homo sapien
catctctgtttctcaatgtggacca

SEQ ID NO: 2142380 - DNA, 25 bp, Homo sapien
actgatctgtgcatcatcagtgctc

SEQ ID NO: 2142381 - DNA, 25 bp, Homo sapien
cactgatctgtgcatcatcagtgct

SEQ ID NO: 2142382 - DNA, 25 bp, Homo sapien
atgtcactgatctgtgcatcatcag

SEQ ID NO: 2142383 - DNA, 25 bp, Homo sapien
ctgatctgtgcatcatcagtgctcc

SEQ ID NO: 2142384 - DNA, 25 bp, Homo sapien
tttgtggatgtaattggcggcatac

SEQ ID NO: 2142385 - DNA, 25 bp, Homo sapien
ctggcattcaccagaacctgcagag

SEQ ID NO: 2142386 - DNA, 25 bp, Homo sapien
tcaccagaacctgcagagggttctt

SEQ ID NO: 2142387 - DNA, 25 bp, Homo sapien
accagaacctgcagagggttcttgc

SEQ ID NO: 2142388 - DNA, 25 bp, Homo sapien
attcaccagaacctgcagagggttc

SEQ ID NO: 2142389 - DNA, 25 bp, Homo sapien
tgctcgatatatgtggagtcctccc

SEQ ID NO: 2142390 - DNA, 25 bp, Homo sapien
gcaatgctgatgagcttatcggcca

SEQ ID NO: 2142391 - DNA, 25 bp, Homo sapien
tggcttgattcacatggtacagtgg

SEQ ID NO: 2142392 - DNA, 25 bp, Homo sapien
ttatcggccaggtattcagtgatgg

SEQ ID NO: 2142393 - DNA, 25 bp, Homo sapien
aattctggagactaggtgccaagat

SEQ ID NO: 2142394 - DNA, 25 bp, Homo sapien
tatctgtgggtcagcaacttgagca

SEQ ID NO: 2142395 - DNA, 25 bp, Homo sapien
gcagtgcatggtctgtggtctcatc

SEQ ID NO: 2142396 - DNA, 25 bp, Homo sapien
caaactcacttctgtggtagctaga

SEQ ID NO: 2142397 - DNA, 25 bp, Homo sapien
catggtgtagttggatgtctctggc

SEQ ID NO: 2142398 - DNA, 25 bp, Homo sapien
ctccagctccttcaatgcagctcat

SEQ ID NO: 2142399 - DNA, 25 bp, Homo sapien
cttcattttccaggtaggactctcc

SEQ ID NO: 2142400 - DNA, 25 bp, Homo sapien
cattttccaggtaggactctccagc

SEQ ID NO: 2142401 - DNA, 25 bp, Homo sapien
tttccaggtaggactctccagctcc

SEQ ID NO: 2142402 - DNA, 25 bp, Homo sapien
gataattggcatcccatgtttctgc

SEQ ID NO: 2142403 - DNA, 25 bp, Homo sapien
tttatcaatggtccagaaatcatcc

SEQ ID NO: 2142404 - DNA, 25 bp, Homo sapien
tgactaagctttttatcaatggtcc

SEQ ID NO: 2142405 - DNA, 25 bp, Homo sapien
cctgaagtggtatttccgtgataat

SEQ ID NO: 2142406 - DNA, 25 bp, Homo sapien
acgttttcttactagctttgcagag

SEQ ID NO: 2142407 - DNA, 25 bp, Homo sapien
ttcttactagctttgcagagcccag

SEQ ID NO: 2142408 - DNA, 25 bp, Homo sapien
ttttcttactagctttgcagagccc

SEQ ID NO: 2142409 - DNA, 25 bp, Homo sapien
cttactagctttgcagagcccagat

SEQ ID NO: 2142410 - DNA, 25 bp, Homo sapien
tcaagtggccccaagggagatctat

SEQ ID NO: 2142411 - DNA, 25 bp, Homo sapien
tggccccaagggagatctatgaagg

SEQ ID NO: 2142412 - DNA, 25 bp, Homo sapien
ctgcacccatagattgggatcaagt

SEQ ID NO: 2142413 - DNA, 25 bp, Homo sapien
cacccatagattgggatcaagtggc

SEQ ID NO: 2142414 - DNA, 25 bp, Homo sapien
ctggaagagaggattggctccagag

SEQ ID NO: 2142415 - DNA, 25 bp, Homo sapien
ggaagagaggattggctccagagat

SEQ ID NO: 2142416 - DNA, 25 bp, Homo sapien
ggctccagagatggggtagagctca

SEQ ID NO: 2142417 - DNA, 25 bp, Homo sapien
gattggctccagagatggggtagag

SEQ ID NO: 2142418 - DNA, 25 bp, Homo sapien
caaggttgaagtcatcactatggtg

SEQ ID NO: 2142419 - DNA, 25 bp, Homo sapien
attcaggatcaaggttgaagtcatc

SEQ ID NO: 2142420 - DNA, 25 bp, Homo sapien
aagataggggcttggattcaggatc

SEQ ID NO: 2142421 - DNA, 25 bp, Homo sapien
gtcatcactatggtgtcataacaaa

SEQ ID NO: 2142422 - DNA, 25 bp, Homo sapien
ctcttcccaccctgtctccttccat

SEQ ID NO: 2142423 - DNA, 25 bp, Homo sapien
ctgtctcttcccaccctgtctcctt

SEQ ID NO: 2142424 - DNA, 25 bp, Homo sapien
tcccaccctgtctccttccatttct

SEQ ID NO: 2142425 - DNA, 25 bp, Homo sapien
tcttctgtctcttcccaccctgtct

SEQ ID NO: 2142426 - DNA, 25 bp, Homo sapien
ccacacagctcgtgatatgctatca

SEQ ID NO: 2142427 - DNA, 25 bp, Homo sapien
cacagctcgtgatatgctatcagtc

SEQ ID NO: 2142428 - DNA, 25 bp, Homo sapien
gctcgtgatatgctatcagtccaca

SEQ ID NO: 2142429 - DNA, 25 bp, Homo sapien
gctatcagtccacagtacaattata

SEQ ID NO: 2142430 - DNA, 25 bp, Homo sapien
ttagtttatctccatgcatccaagc

SEQ ID NO: 2142431 - DNA, 25 bp, Homo sapien
tatctccatgcatccaagccacttt

SEQ ID NO: 2142432 - DNA, 25 bp, Homo sapien
tgtggcagagccttaacttcagggc

SEQ ID NO: 2142433 - DNA, 25 bp, Homo sapien
gagccttaacttcagggccacttcc

SEQ ID NO: 2142434 - DNA, 25 bp, Homo sapien
aagtcctcatactcccctgtactcc

SEQ ID NO: 2142435 - DNA, 25 bp, Homo sapien
gtaaagtcctcatactcccctgtac

SEQ ID NO: 2142436 - DNA, 25 bp, Homo sapien
agtcctcatactcccctgtactccc

SEQ ID NO: 2142437 - DNA, 25 bp, Homo sapien
taaagtcctcatactcccctgtact

SEQ ID NO: 2142438 - DNA, 25 bp, Homo sapien
cccaacattatatgaagtgttagca

SEQ ID NO: 2142439 - DNA, 25 bp, Homo sapien
tgcacactcccaacattatatgaag

SEQ ID NO: 2142440 - DNA, 25 bp, Homo sapien
cactcccaacattatatgaagtgtt

SEQ ID NO: 2142441 - DNA, 25 bp, Homo sapien
tcccaacattatatgaagtgttagc

SEQ ID NO: 2142442 - DNA, 25 bp, Homo sapien
aatggaacctgagagtcgaatgcat

SEQ ID NO: 2142443 - DNA, 25 bp, Homo sapien
tttgaatcaactcctaccactctgt

SEQ ID NO: 2142444 - DNA, 25 bp, Homo sapien
tctttgaatcaactcctaccactct

SEQ ID NO: 2142445 - DNA, 25 bp, Homo sapien
cctgagagtcgaatgcatacatgat

SEQ ID NO: 2142446 - DNA, 25 bp, Homo sapien
gcggccccggatcgggctactgctc

SEQ ID NO: 2142447 - DNA, 25 bp, Homo sapien
ccggatcgggctactgctccgctcc

SEQ ID NO: 2142448 - DNA, 25 bp, Homo sapien
gcgccgggcgctcggttcccctggc

SEQ ID NO: 2142449 - DNA, 25 bp, Homo sapien
cccgcggccccggatcgggctactg

SEQ ID NO: 2142450 - DNA, 25 bp, Homo sapien
gagggatctcttactcctgcaaccg

SEQ ID NO: 2142451 - DNA, 25 bp, Homo sapien
acagagggatctcttactcctgcaa

SEQ ID NO: 2142452 - DNA, 25 bp, Homo sapien
ggatctcttactcctgcaaccgcgt

SEQ ID NO: 2142453 - DNA, 25 bp, Homo sapien
atctcttactcctgcaaccgcgtgg

SEQ ID NO: 2142454 - DNA, 25 bp, Homo sapien
cagtggccaccaacgaggcagggtt

SEQ ID NO: 2142455 - DNA, 25 bp, Homo sapien
taaagtgctggctctaacttgtccc

SEQ ID NO: 2142456 - DNA, 25 bp, Homo sapien
gtggaccatgtaaggcgggcacacc

SEQ ID NO: 2142457 - DNA, 25 bp, Homo sapien
gatgcagtggttccccttgaccaca

SEQ ID NO: 2142458 - DNA, 25 bp, Homo sapien
aggagactctggtagctataccggg

SEQ ID NO: 2142459 - DNA, 25 bp, Homo sapien
cccatagagccagtccaggagactc

SEQ ID NO: 2142460 - DNA, 25 bp, Homo sapien
gactctggtagctataccgggacat

SEQ ID NO: 2142461 - DNA, 25 bp, Homo sapien
ggcccccattgcctgcaaaactggg

SEQ ID NO: 2142462 - DNA, 25 bp, Homo sapien
tctgcctcaggatgtgccgcagggc

SEQ ID NO: 2142463 - DNA, 25 bp, Homo sapien
gtcttggtggcgaacttaaagccca

SEQ ID NO: 2142464 - DNA, 25 bp, Homo sapien
tccaccccgaaggtcaggcacaggg

SEQ ID NO: 2142465 - DNA, 25 bp, Homo sapien
gctactaagagcagattcttgctca

SEQ ID NO: 2142466 - DNA, 25 bp, Homo sapien
actgtggggctgacgcactgtgcaa

SEQ ID NO: 2142467 - DNA, 25 bp, Homo sapien
tggggctgacgcactgtgcaaaggt

SEQ ID NO: 2142468 - DNA, 25 bp, Homo sapien
ggctgacgcactgtgcaaaggtgaa

SEQ ID NO: 2142469 - DNA, 25 bp, Homo sapien
cactgtggggctgacgcactgtgca

SEQ ID NO: 2142470 - DNA, 25 bp, Homo sapien
cagaggcctcaagaccactttgtag

SEQ ID NO: 2142471 - DNA, 25 bp, Homo sapien
tttacacagaaggtctagctgggac

SEQ ID NO: 2142472 - DNA, 25 bp, Homo sapien
tgctagcactaggtctccagagtct

SEQ ID NO: 2142473 - DNA, 25 bp, Homo sapien
tgtagaagatgcaccctttgaccct

SEQ ID NO: 2142474 - DNA, 25 bp, Homo sapien
catctgcaggtcgtttatcaacagc

SEQ ID NO: 2142475 - DNA, 25 bp, Homo sapien
acagtgtgggccctccttgggacag

SEQ ID NO: 2142476 - DNA, 25 bp, Homo sapien
tttctatctcatcccctatcgagga

SEQ ID NO: 2142477 - DNA, 25 bp, Homo sapien
cctatcgaggattcaagggcatctg

SEQ ID NO: 2142478 - DNA, 25 bp, Homo sapien
ggagggagatttacattaatatgaa

SEQ ID NO: 2142479 - DNA, 25 bp, Homo sapien
tcctcgccaggccttcagattaact

SEQ ID NO: 2142480 - DNA, 25 bp, Homo sapien
cagattaactgctgcatccaagcac

SEQ ID NO: 2142481 - DNA, 25 bp, Homo sapien
cagaagaggggtcctcgccaggcct

SEQ ID NO: 2142482 - DNA, 25 bp, Homo sapien
ccttgatgcccatgaactgacagat

SEQ ID NO: 2142483 - DNA, 25 bp, Homo sapien
aactgacagatgtgcaagcgctgcc

SEQ ID NO: 2142484 - DNA, 25 bp, Homo sapien
tcaggatctcatgctggtaacaggt

SEQ ID NO: 2142485 - DNA, 25 bp, Homo sapien
taacaggtccaagtgccttgatgcc

SEQ ID NO: 2142486 - DNA, 25 bp, Homo sapien
gatctacattgcttgatggccccag

SEQ ID NO: 2142487 - DNA, 25 bp, Homo sapien
caagccctcttgagtacactgggaa

SEQ ID NO: 2142488 - DNA, 25 bp, Homo sapien
tacttaggatgcatggctttcaagc

SEQ ID NO: 2142489 - DNA, 25 bp, Homo sapien
tatctgattctagaaacaggtggcc

SEQ ID NO: 2142490 - DNA, 25 bp, Homo sapien
ttctgctattaatgggttgtttccc

SEQ ID NO: 2142491 - DNA, 25 bp, Homo sapien
gctatactattcactggccagattt

SEQ ID NO: 2142492 - DNA, 25 bp, Homo sapien
gaaagtgaattcagacatcagcctc

SEQ ID NO: 2142493 - DNA, 25 bp, Homo sapien
tttcatgacatagaggaccagctcc

SEQ ID NO: 2142494 - DNA, 25 bp, Homo sapien
tgcttgatcctcgtgaacactgtct

SEQ ID NO: 2142495 - DNA, 25 bp, Homo sapien
taataaaagggggaatagctgacat

SEQ ID NO: 2142496 - DNA, 25 bp, Homo sapien
tgtctctctgtatgccttccagctt

SEQ ID NO: 2142497 - DNA, 25 bp, Homo sapien
catagtctgattccattcgaaaatc

SEQ ID NO: 2142498 - DNA, 25 bp, Homo sapien
agtagagagtacagtagtagttact

SEQ ID NO: 2142499 - DNA, 25 bp, Homo sapien
tagagagtacagtagtagttactag

SEQ ID NO: 2142500 - DNA, 25 bp, Homo sapien
cagtagtagttactagaggtgggga

SEQ ID NO: 2142501 - DNA, 25 bp, Homo sapien
acagtagtagttactagaggtgggg

SEQ ID NO: 2142502 - DNA, 25 bp, Homo sapien
ttctaaaccattaagctacactgct

SEQ ID NO: 2142503 - DNA, 25 bp, Homo sapien
catgctttgttttagccggcaacta

SEQ ID NO: 2142504 - DNA, 25 bp, Homo sapien
tcttattaaatttagctgcctggct

SEQ ID NO: 2142505 - DNA, 25 bp, Homo sapien
cgtgccaacaattgttctcatgagc

SEQ ID NO: 2142506 - DNA, 25 bp, Homo sapien
ggcaatatacagtatagacacaagc

SEQ ID NO: 2142507 - DNA, 25 bp, Homo sapien
tacagtatagacacaagcatgtaaa

SEQ ID NO: 2142508 - DNA, 25 bp, Homo sapien
aatatacagtatagacacaagcatg

SEQ ID NO: 2142509 - DNA, 25 bp, Homo sapien
aaaattggcaatatacagtatagac

SEQ ID NO: 2142510 - DNA, 25 bp, Homo sapien
catctccctgagccaaagtgggcat

SEQ ID NO: 2142511 - DNA, 25 bp, Homo sapien
tgatttaaatggagcatgttttccc

SEQ ID NO: 2142512 - DNA, 25 bp, Homo sapien
atgatttaaatggagcatgttttcc

SEQ ID NO: 2142513 - DNA, 25 bp, Homo sapien
cattaggcactttcctagtgacaag

SEQ ID NO: 2142514 - DNA, 25 bp, Homo sapien
taggcactttcctagtgacaagtgc

SEQ ID NO: 2142515 - DNA, 25 bp, Homo sapien
gagtcattaggcactttcctagtga

SEQ ID NO: 2142516 - DNA, 25 bp, Homo sapien
gatggagtcattaggcactttccta

SEQ ID NO: 2142517 - DNA, 25 bp, Homo sapien
cacattaatgctttcctctattaca

SEQ ID NO: 2142518 - DNA, 25 bp, Homo sapien
gtggggcagtcttctatcattcaca

SEQ ID NO: 2142519 - DNA, 25 bp, Homo sapien
ttcctctattacatgaataatcaag

SEQ ID NO: 2142520 - DNA, 25 bp, Homo sapien
gggcagtcttctatcattcacatta

SEQ ID NO: 2142521 - DNA, 25 bp, Homo sapien
gatttccaagaatctggtaatggca

SEQ ID NO: 2142522 - DNA, 25 bp, Homo sapien
cttgtttatgcatgcagtaattctc

SEQ ID NO: 2142523 - DNA, 25 bp, Homo sapien
atttccaagaatctggtaatggcag

SEQ ID NO: 2142524 - DNA, 25 bp, Homo sapien
tgtttatgcatgcagtaattctcag

SEQ ID NO: 2142525 - DNA, 25 bp, Homo sapien
gatgacctggttaccttgaaactcg

SEQ ID NO: 2142526 - DNA, 25 bp, Homo sapien
ctctgaagtaacagagcctaggcca

SEQ ID NO: 2142527 - DNA, 25 bp, Homo sapien
tgaaactcgtcaagaaaactctgaa

SEQ ID NO: 2142528 - DNA, 25 bp, Homo sapien
cctcctctgacccatttaagagagg

SEQ ID NO: 2142529 - DNA, 25 bp, Homo sapien
atataaaagtcctccagaacacatg

SEQ ID NO: 2142530 - DNA, 25 bp, Homo sapien
tccagaacacatgcgcacatctgcc

SEQ ID NO: 2142531 - DNA, 25 bp, Homo sapien
gacatataaaagtcctccagaacac

SEQ ID NO: 2142532 - DNA, 25 bp, Homo sapien
catcggacatataaaagtcctccag

SEQ ID NO: 2142533 - DNA, 25 bp, Homo sapien
tctggaatacttatccaacagttga

SEQ ID NO: 2142534 - DNA, 25 bp, Homo sapien
cactcctatattccttgcaccgtta

SEQ ID NO: 2142535 - DNA, 25 bp, Homo sapien
aaaagacctattctatgacacagca

SEQ ID NO: 2142536 - DNA, 25 bp, Homo sapien
tcatcgatggatgcatgaataaaga

SEQ ID NO: 2142537 - DNA, 25 bp, Homo sapien
cagagaatacttaaccctttaggct

SEQ ID NO: 2142538 - DNA, 25 bp, Homo sapien
gcatcgtccttattggatgcccaaa

SEQ ID NO: 2142539 - DNA, 25 bp, Homo sapien
gaggtacctagttcaaatgcctggc

SEQ ID NO: 2142540 - DNA, 25 bp, Homo sapien
tcctaaatagatcctgcaacagaaa

SEQ ID NO: 2142541 - DNA, 25 bp, Homo sapien
cattagccaacagagccacatggaa

SEQ ID NO: 2142542 - DNA, 25 bp, Homo sapien
acattttaattcagaggtgcaaggg

SEQ ID NO: 2142543 - DNA, 25 bp, Homo sapien
gctaaactatcactttggctgcaaa

SEQ ID NO: 2142544 - DNA, 25 bp, Homo sapien
tccacctcctatgatggtacacagt

SEQ ID NO: 2142545 - DNA, 25 bp, Homo sapien
cccacagacaagaggaggtaagctg

SEQ ID NO: 2142546 - DNA, 25 bp, Homo sapien
tggagtcaccagagtcatgccagca

SEQ ID NO: 2142547 - DNA, 25 bp, Homo sapien
ggttctgatccacaatttccctagg

SEQ ID NO: 2142548 - DNA, 25 bp, Homo sapien
gaaaggtcctcaatacttctggagt

SEQ ID NO: 2142549 - DNA, 25 bp, Homo sapien
tatctgcattatggacttgttggct

SEQ ID NO: 2142550 - DNA, 25 bp, Homo sapien
tggtgtggtttagaaatcgttgaca

SEQ ID NO: 2142551 - DNA, 25 bp, Homo sapien
catgtgtccctatattgttgagagc

SEQ ID NO: 2142552 - DNA, 25 bp, Homo sapien
tgttgagagctcttattaatatagg

SEQ ID NO: 2142553 - DNA, 25 bp, Homo sapien
acgacgatagctccccgacatggag

SEQ ID NO: 2142554 - DNA, 25 bp, Homo sapien
aagacgacgatagctccccgacatg

SEQ ID NO: 2142555 - DNA, 25 bp, Homo sapien
ttgaagacgacgatagctccccgac

SEQ ID NO: 2142556 - DNA, 25 bp, Homo sapien
cgatagctccccgacatggagggca

SEQ ID NO: 2142557 - DNA, 25 bp, Homo sapien
gaggtggtcacaactcacggttaaa

SEQ ID NO: 2142558 - DNA, 25 bp, Homo sapien
tgaagaaccatatgctcagtggagc

SEQ ID NO: 2142559 - DNA, 25 bp, Homo sapien
ggcccctagcatgctctcaagagaa

SEQ ID NO: 2142560 - DNA, 25 bp, Homo sapien
ttagcagggcagcaaccttccaagg

SEQ ID NO: 2142561 - DNA, 25 bp, Homo sapien
aaggtagaactaggagctgaagaaa

SEQ ID NO: 2142562 - DNA, 25 bp, Homo sapien
tgtgtatatctatgcacatggagta

SEQ ID NO: 2142563 - DNA, 25 bp, Homo sapien
tacaaagggatagtgtggaaaggta

SEQ ID NO: 2142564 - DNA, 25 bp, Homo sapien
gaataagagctacatcaatagactg

SEQ ID NO: 2142565 - DNA, 25 bp, Homo sapien
ggctcacatgcagcctacagtcctc

SEQ ID NO: 2142566 - DNA, 25 bp, Homo sapien
ctctccatccagcaatgcacctcct

SEQ ID NO: 2142567 - DNA, 25 bp, Homo sapien
tctccatccagcaatgcacctcctg

SEQ ID NO: 2142568 - DNA, 25 bp, Homo sapien
atgcagcctacagtcctctctccat

SEQ ID NO: 2142569 - DNA, 25 bp, Homo sapien
tcagtgatgagtccaacgctaagcc

SEQ ID NO: 2142570 - DNA, 25 bp, Homo sapien
tccagagcagctgaccagatgagca

SEQ ID NO: 2142571 - DNA, 25 bp, Homo sapien
tccgaggtgaaggtgccaaaagact

SEQ ID NO: 2142572 - DNA, 25 bp, Homo sapien
tagaatccctcaggttccagagcag

SEQ ID NO: 2142573 - DNA, 25 bp, Homo sapien
gctcctaggaaagcagatacctgag

SEQ ID NO: 2142574 - DNA, 25 bp, Homo sapien
tcctaggaaagcagatacctgagca

SEQ ID NO: 2142575 - DNA, 25 bp, Homo sapien
tggctcctaggaaagcagatacctg

SEQ ID NO: 2142576 - DNA, 25 bp, Homo sapien
gtggctcctaggaaagcagatacct

SEQ ID NO: 2142577 - DNA, 25 bp, Homo sapien
ccagaagagctccattcaacatgtg

SEQ ID NO: 2142578 - DNA, 25 bp, Homo sapien
cagaagagctccattcaacatgtgc

SEQ ID NO: 2142579 - DNA, 25 bp, Homo sapien
gaagagctccattcaacatgtgcat

SEQ ID NO: 2142580 - DNA, 25 bp, Homo sapien
agaagagctccattcaacatgtgca

SEQ ID NO: 2142581 - DNA, 25 bp, Homo sapien
tttaaaatcacatgggcatataggc

SEQ ID NO: 2142582 - DNA, 25 bp, Homo sapien
tgctgttacattcctagaagaggct

SEQ ID NO: 2142583 - DNA, 25 bp, Homo sapien
tataggcaagtactgctttgcatgt

SEQ ID NO: 2142584 - DNA, 25 bp, Homo sapien
tgttgctgttacattcctagaagag

SEQ ID NO: 2142585 - DNA, 25 bp, Homo sapien
tagctttgcacgtgagtactgtaac

SEQ ID NO: 2142586 - DNA, 25 bp, Homo sapien
tatagataaggaacccagtatcacc

SEQ ID NO: 2142587 - DNA, 25 bp, Homo sapien
ggttccatggacaccctacttagct

SEQ ID NO: 2142588 - DNA, 25 bp, Homo sapien
tcagggccagatcactagctttgca

SEQ ID NO: 2142589 - DNA, 25 bp, Homo sapien
gctgggctccaaatctgcctcttga

SEQ ID NO: 2142590 - DNA, 25 bp, Homo sapien
tgggctccaaatctgcctcttgatt

SEQ ID NO: 2142591 - DNA, 25 bp, Homo sapien
tcgctgggctccaaatctgcctctt

SEQ ID NO: 2142592 - DNA, 25 bp, Homo sapien
ttcgctgggctccaaatctgcctct

SEQ ID NO: 2142593 - DNA, 25 bp, Homo sapien
cttcccagttcataccggtgctctc

SEQ ID NO: 2142594 - DNA, 25 bp, Homo sapien
tgtcgttattcctccccgcaacaat

SEQ ID NO: 2142595 - DNA, 25 bp, Homo sapien
tttgtcgttattcctccccgcaaca

SEQ ID NO: 2142596 - DNA, 25 bp, Homo sapien
tcataccggtgctctcttttcagcc

SEQ ID NO: 2142597 - DNA, 25 bp, Homo sapien
gccagttctcctctctcctccaggg

SEQ ID NO: 2142598 - DNA, 25 bp, Homo sapien
agccagttctcctctctcctccagg

SEQ ID NO: 2142599 - DNA, 25 bp, Homo sapien
agttctcctctctcctccaggggaa

SEQ ID NO: 2142600 - DNA, 25 bp, Homo sapien
ccgagccagttctcctctctcctcc

SEQ ID NO: 2142601 - DNA, 25 bp, Homo sapien
aacacgatgtagtgagcctgcctca

SEQ ID NO: 2142602 - DNA, 25 bp, Homo sapien
gagagcaagaccattcctgaacaat

SEQ ID NO: 2142603 - DNA, 25 bp, Homo sapien
gaatgtttctaacacgatgtagtga

SEQ ID NO: 2142604 - DNA, 25 bp, Homo sapien
caagaccattcctgaacaatgggaa

SEQ ID NO: 2142605 - DNA, 25 bp, Homo sapien
aggattccctcgtccttctgtcagc

SEQ ID NO: 2142606 - DNA, 25 bp, Homo sapien
gcaggattccctcgtccttctgtca

SEQ ID NO: 2142607 - DNA, 25 bp, Homo sapien
agctataggatgactcccagagggc

SEQ ID NO: 2142608 - DNA, 25 bp, Homo sapien
ccccagagggcagctataggatgac

SEQ ID NO: 2142609 - DNA, 25 bp, Homo sapien
gcacctttggcccaagttacagttg

SEQ ID NO: 2142610 - DNA, 25 bp, Homo sapien
cagaaggcacctttggcccaagtta

SEQ ID NO: 2142611 - DNA, 25 bp, Homo sapien
ctttggcccaagttacagttgacct

SEQ ID NO: 2142612 - DNA, 25 bp, Homo sapien
gcccaagttacagttgacctctggc

SEQ ID NO: 2142613 - DNA, 25 bp, Homo sapien
ggagagctgccattcccttgctcaa

SEQ ID NO: 2142614 - DNA, 25 bp, Homo sapien
agagctgccattcccttgctcaaaa

SEQ ID NO: 2142615 - DNA, 25 bp, Homo sapien
gagagctgccattcccttgctcaaa

SEQ ID NO: 2142616 - DNA, 25 bp, Homo sapien
cttgctaggacgagactctggatgg

SEQ ID NO: 2142617 - DNA, 25 bp, Homo sapien
gacgagactctggatggtacttcct

SEQ ID NO: 2142618 - DNA, 25 bp, Homo sapien
gactctggatggtacttcctcagga

SEQ ID NO: 2142619 - DNA, 25 bp, Homo sapien
tctggatggtacttcctcaggacag

SEQ ID NO: 2142620 - DNA, 25 bp, Homo sapien
ctggagaaatactccagtagggcag

SEQ ID NO: 2142621 - DNA, 25 bp, Homo sapien
tggagaaatactccagtagggcagg

SEQ ID NO: 2142622 - DNA, 25 bp, Homo sapien
gggtaccacgtagagcataacatgc

SEQ ID NO: 2142623 - DNA, 25 bp, Homo sapien
caggtagatgggtaccacgtagagc

SEQ ID NO: 2142624 - DNA, 25 bp, Homo sapien
ccacgtagagcataacatgctgaat

SEQ ID NO: 2142625 - DNA, 25 bp, Homo sapien
catgctgaatgtagtaaatctccaa

SEQ ID NO: 2142626 - DNA, 25 bp, Homo sapien
agaccccttgcaggcctcgtccatt

SEQ ID NO: 2142627 - DNA, 25 bp, Homo sapien
cctggtgcccggcataaattatgtt

SEQ ID NO: 2142628 - DNA, 25 bp, Homo sapien
tgaagaaactcagtcaagcggcagc

SEQ ID NO: 2142629 - DNA, 25 bp, Homo sapien
tacataggaatgtggtttgctggcc

SEQ ID NO: 2142630 - DNA, 25 bp, Homo sapien
tgggattgcgagaaagtttcttaga

SEQ ID NO: 2142631 - DNA, 25 bp, Homo sapien
aagatttgaacatctgtattggctg

SEQ ID NO: 2142632 - DNA, 25 bp, Homo sapien
agttgtatgggattgcgagaaagtt

SEQ ID NO: 2142633 - DNA, 25 bp, Homo sapien
gatttgaacatctgtattggctgaa

SEQ ID NO: 2142634 - DNA, 25 bp, Homo sapien
ctagcacaggaggtccaatcctcat

SEQ ID NO: 2142635 - DNA, 25 bp, Homo sapien
aagtaactagcacaggaggtccaat

SEQ ID NO: 2142636 - DNA, 25 bp, Homo sapien
tacttccgctttaactggtcccaga

SEQ ID NO: 2142637 - DNA, 25 bp, Homo sapien
tgccattggccaaagtacttccgct

SEQ ID NO: 2142638 - DNA, 25 bp, Homo sapien
aggatgagggccctgaattggcaaa

SEQ ID NO: 2142639 - DNA, 25 bp, Homo sapien
gacagtagtacacaggatgagggcc

SEQ ID NO: 2142640 - DNA, 25 bp, Homo sapien
cccctgacagtagtacacaggatga

SEQ ID NO: 2142641 - DNA, 25 bp, Homo sapien
gcagccccctgacagtagtacacag

SEQ ID NO: 2142642 - DNA, 25 bp, Homo sapien
gtgagatggcaggaatagtgaccca

SEQ ID NO: 2142643 - DNA, 25 bp, Homo sapien
gagatggcaggaatagtgacccact

SEQ ID NO: 2142644 - DNA, 25 bp, Homo sapien
gatggcaggaatagtgacccacttc

SEQ ID NO: 2142645 - DNA, 25 bp, Homo sapien
tggcaggaatagtgacccacttcac

SEQ ID NO: 2142646 - DNA, 25 bp, Homo sapien
gacgctgaagtgataaaagaacatg

SEQ ID NO: 2142647 - DNA, 25 bp, Homo sapien
agagcccaccggaaactgctgaggg

SEQ ID NO: 2142648 - DNA, 25 bp, Homo sapien
caggccgaggatctgcaagacgctg

SEQ ID NO: 2142649 - DNA, 25 bp, Homo sapien
gaacatgaggccagttgagagaaga

SEQ ID NO: 2142650 - DNA, 25 bp, Homo sapien
ataccaggggccgtagaatgggtct

SEQ ID NO: 2142651 - DNA, 25 bp, Homo sapien
tcatggtcatgagagtctggtgtcc

SEQ ID NO: 2142652 - DNA, 25 bp, Homo sapien
ccgaggcccagatgcgataccaggg

SEQ ID NO: 2142653 - DNA, 25 bp, Homo sapien
tgttgttcaaattcacttcggtgac

SEQ ID NO: 2142654 - DNA, 25 bp, Homo sapien
cagccatgtatgagaacaggatgac

SEQ ID NO: 2142655 - DNA, 25 bp, Homo sapien
cccagccatgtatgagaacaggatg

SEQ ID NO: 2142656 - DNA, 25 bp, Homo sapien
gcccagccatgtatgagaacaggat

SEQ ID NO: 2142657 - DNA, 25 bp, Homo sapien
ccagccatgtatgagaacaggatga

SEQ ID NO: 2142658 - DNA, 25 bp, Homo sapien
gctggaagccggagcaaatccagca

SEQ ID NO: 2142659 - DNA, 25 bp, Homo sapien
tcttggctggaagccggagcaaatc

SEQ ID NO: 2142660 - DNA, 25 bp, Homo sapien
tggctggaagccggagcaaatccag

SEQ ID NO: 2142661 - DNA, 25 bp, Homo sapien
tttcttggctggaagccggagcaaa

SEQ ID NO: 2142662 - DNA, 25 bp, Homo sapien
aaggaggaaaatccagcgcccagca

SEQ ID NO: 2142663 - DNA, 25 bp, Homo sapien
tgccctctcccatgattttatcaag

SEQ ID NO: 2142664 - DNA, 25 bp, Homo sapien
cccaggctcaaggagacatcgtagg

SEQ ID NO: 2142665 - DNA, 25 bp, Homo sapien
ttttatcaagaactgggtgttctcc

SEQ ID NO: 2142666 - DNA, 25 bp, Homo sapien
ttgccgctggtatagaaacaaggcc

SEQ ID NO: 2142667 - DNA, 25 bp, Homo sapien
tcacaggcagaacttacacagggtc

SEQ ID NO: 2142668 - DNA, 25 bp, Homo sapien
catgtaaggccactaggagcagaga

SEQ ID NO: 2142669 - DNA, 25 bp, Homo sapien
tgtgctggagactaaatgggacgcc

SEQ ID NO: 2142670 - DNA, 25 bp, Homo sapien
tacatgtagcagtttgacggtgggc

SEQ ID NO: 2142671 - DNA, 25 bp, Homo sapien
cttgaggtccgtgcataactgagct

SEQ ID NO: 2142672 - DNA, 25 bp, Homo sapien
caactgtgttgcctagagtgggaca

SEQ ID NO: 2142673 - DNA, 25 bp, Homo sapien
tggcaaatggcacacggaaacctgg

SEQ ID NO: 2142674 - DNA, 25 bp, Homo sapien
aaccctgcatgccttcacaggctga

SEQ ID NO: 2142675 - DNA, 25 bp, Homo sapien
accctgcatgccttcacaggctgac

SEQ ID NO: 2142676 - DNA, 25 bp, Homo sapien
gaaccctgcatgccttcacaggctg

SEQ ID NO: 2142677 - DNA, 25 bp, Homo sapien
ctgtggcttcagaaccctgcatgcc

SEQ ID NO: 2142678 - DNA, 25 bp, Homo sapien
tgaggtactgtacggtaaagttcgc

SEQ ID NO: 2142679 - DNA, 25 bp, Homo sapien
ctgctgacaacttgctctctgtggg

SEQ ID NO: 2142680 - DNA, 25 bp, Homo sapien
ctgccccaataccagtgcacagaga

SEQ ID NO: 2142681 - DNA, 25 bp, Homo sapien
aaagttcgccgatcaccctggttag

SEQ ID NO: 2142682 - DNA, 25 bp, Homo sapien
gcatcacacatggtccttttttcct

SEQ ID NO: 2142683 - DNA, 25 bp, Homo sapien
gggtcaacatctacaaatccaagga

SEQ ID NO: 2142684 - DNA, 25 bp, Homo sapien
tgcaggagaccctccataatcagcg

SEQ ID NO: 2142685 - DNA, 25 bp, Homo sapien
aatccaaggaagtctttttggcaga

SEQ ID NO: 2142686 - DNA, 25 bp, Homo sapien
tgccatgagtagcaaaccagtgtac

SEQ ID NO: 2142687 - DNA, 25 bp, Homo sapien
tacccgccacaaagcgggcaggatg

SEQ ID NO: 2142688 - DNA, 25 bp, Homo sapien
tgtcacagacgagagcaacaagcga

SEQ ID NO: 2142689 - DNA, 25 bp, Homo sapien
taggttttcctgagcccaaatcagc

SEQ ID NO: 2142690 - DNA, 25 bp, Homo sapien
gacaaaaatcctaagcctgctgctg

SEQ ID NO: 2142691 - DNA, 25 bp, Homo sapien
tgccccaagaggtgagcaaactggt

SEQ ID NO: 2142692 - DNA, 25 bp, Homo sapien
gacgggtctgcccagtgcatagcaa

SEQ ID NO: 2142693 - DNA, 25 bp, Homo sapien
ttccaaaggcgactgcagataccat

SEQ ID NO: 2142694 - DNA, 25 bp, Homo sapien
aacacctgagactaaaattcagaat

SEQ ID NO: 2142695 - DNA, 25 bp, Homo sapien
aaacacctgagactaaaattcagaa

SEQ ID NO: 2142696 - DNA, 25 bp, Homo sapien
gtgagggttccttttcattcaagga

SEQ ID NO: 2142697 - DNA, 25 bp, Homo sapien
tacgtgagggcagctgtaatccagg

SEQ ID NO: 2142698 - DNA, 25 bp, Homo sapien
gagagctcaacaaagtgggtcccct

SEQ ID NO: 2142699 - DNA, 25 bp, Homo sapien
ggtgccctaggacaaagtgctgctt

SEQ ID NO: 2142700 - DNA, 25 bp, Homo sapien
caagcatacatgagttctgacggca

SEQ ID NO: 2142701 - DNA, 25 bp, Homo sapien
atatttcctatacacccatcacaca

SEQ ID NO: 2142702 - DNA, 25 bp, Homo sapien
tatcaacatcctgtatcagagtggc

SEQ ID NO: 2142703 - DNA, 25 bp, Homo sapien
caacatcctgtatcagagtggcaca

SEQ ID NO: 2142704 - DNA, 25 bp, Homo sapien
ccccatatttcctatacacccatca

SEQ ID NO: 2142705 - DNA, 25 bp, Homo sapien
tattttgctctacccagtaactgcg

SEQ ID NO: 2142706 - DNA, 25 bp, Homo sapien
caatggtgagacttgtaatgagcaa

SEQ ID NO: 2142707 - DNA, 25 bp, Homo sapien
taactgcgctggtacatagacgcac

SEQ ID NO: 2142708 - DNA, 25 bp, Homo sapien
tagacgcactgagcaaacaaacttt

SEQ ID NO: 2142709 - DNA, 25 bp, Homo sapien
tgctatgacagcctagtagttgggt

SEQ ID NO: 2142710 - DNA, 25 bp, Homo sapien
ggttatcatagaagagactgcctca

SEQ ID NO: 2142711 - DNA, 25 bp, Homo sapien
gactgcctcaccactttatagaacc

SEQ ID NO: 2142712 - DNA, 25 bp, Homo sapien
tcaaaggtccgtgatagggcttgtc

SEQ ID NO: 2142713 - DNA, 25 bp, Homo sapien
gcatgtttgctaggaggtgatttct

SEQ ID NO: 2142714 - DNA, 25 bp, Homo sapien
tgctttgtagaagaactcactatag

SEQ ID NO: 2142715 - DNA, 25 bp, Homo sapien
aattaggcaaatacattagggagcg

SEQ ID NO: 2142716 - DNA, 25 bp, Homo sapien
gagtcagatactcaatgtacagttc

SEQ ID NO: 2142717 - DNA, 25 bp, Homo sapien
cactaggtagcagtgaaggcagctg

SEQ ID NO: 2142718 - DNA, 25 bp, Homo sapien
gtcagacttggcctcgccagcacta

SEQ ID NO: 2142719 - DNA, 25 bp, Homo sapien
gcagctgccgtatgcctttgtcttt

SEQ ID NO: 2142720 - DNA, 25 bp, Homo sapien
aaggcagctgccgtatgcctttgtc

SEQ ID NO: 2142721 - DNA, 25 bp, Homo sapien
tcttgacccaatagcagagtatgag

SEQ ID NO: 2142722 - DNA, 25 bp, Homo sapien
tccactccacgaaagttagaataga

SEQ ID NO: 2142723 - DNA, 25 bp, Homo sapien
cattaaaacctgtacagaagggaat

SEQ ID NO: 2142724 - DNA, 25 bp, Homo sapien
tatgagaacatgaggccgccttgca

SEQ ID NO: 2142725 - DNA, 25 bp, Homo sapien
ccttcagctcgtagaagtttgttgt

SEQ ID NO: 2142726 - DNA, 25 bp, Homo sapien
cctgtagatgtggttttggtgtaga

SEQ ID NO: 2142727 - DNA, 25 bp, Homo sapien
ttcagctcgtagaagtttgttgtta

SEQ ID NO: 2142728 - DNA, 25 bp, Homo sapien
ttggtgacctgtagatgtggttttg

SEQ ID NO: 2142729 - DNA, 25 bp, Homo sapien
gccatggaaccatagacctagaaga

SEQ ID NO: 2142730 - DNA, 25 bp, Homo sapien
gaagtcacttccagttaagtagccc

SEQ ID NO: 2142731 - DNA, 25 bp, Homo sapien
gctagaagtcaaagattgcctgcaa

SEQ ID NO: 2142732 - DNA, 25 bp, Homo sapien
gccacttggaattagactgagccag

SEQ ID NO: 2142733 - DNA, 25 bp, Homo sapien
tttccagttggaatctccctgctgc

SEQ ID NO: 2142734 - DNA, 25 bp, Homo sapien
ccagttggaatctccctgctgcttt

SEQ ID NO: 2142735 - DNA, 25 bp, Homo sapien
tccagttggaatctccctgctgctt

SEQ ID NO: 2142736 - DNA, 25 bp, Homo sapien
agtttccagttggaatctccctgct

SEQ ID NO: 2142737 - DNA, 25 bp, Homo sapien
ctaagatcttgctttcttgtatggt

SEQ ID NO: 2142738 - DNA, 25 bp, Homo sapien
caaccctgatcgagtggagtgtaag

SEQ ID NO: 2142739 - DNA, 25 bp, Homo sapien
ggttgtgagcaaccctgatcgagtg

SEQ ID NO: 2142740 - DNA, 25 bp, Homo sapien
tcttgtatggttgtgagcaaccctg

SEQ ID NO: 2142741 - DNA, 25 bp, Homo sapien
ggatgaagggaataggatgattcct

SEQ ID NO: 2142742 - DNA, 25 bp, Homo sapien
tatctgtgtccaaggatgaagggaa

SEQ ID NO: 2142743 - DNA, 25 bp, Homo sapien
gatgaagggaataggatgattcctt

SEQ ID NO: 2142744 - DNA, 25 bp, Homo sapien
gattcctgtagcagttcatcaagta

SEQ ID NO: 2142745 - DNA, 25 bp, Homo sapien
tggatagcgtccttggattcctgta

SEQ ID NO: 2142746 - DNA, 25 bp, Homo sapien
aattataatacttagcagtttccag

SEQ ID NO: 2142747 - DNA, 25 bp, Homo sapien
agttcatcaagtaggcagtccccat

SEQ ID NO: 2142748 - DNA, 25 bp, Homo sapien
ccagtactgcaatgtttctggagct

SEQ ID NO: 2142749 - DNA, 25 bp, Homo sapien
caacaggttttaacgcatcttgaac

SEQ ID NO: 2142750 - DNA, 25 bp, Homo sapien
gctggctgtcaggatcagggatgtc

SEQ ID NO: 2142751 - DNA, 25 bp, Homo sapien
catcttgaaccatctgctattagca

SEQ ID NO: 2142752 - DNA, 25 bp, Homo sapien
attgtaatgcatcaatttgggtttt

SEQ ID NO: 2142753 - DNA, 25 bp, Homo sapien
gaattgtaatgcatcaatttgggtt

SEQ ID NO: 2142754 - DNA, 25 bp, Homo sapien
tgtaatgcatcaatttgggttttgg

SEQ ID NO: 2142755 - DNA, 25 bp, Homo sapien
tgaattgtaatgcatcaatttgggt

SEQ ID NO: 2142756 - DNA, 25 bp, Homo sapien
gatgagatttttaccctgttagtaa

SEQ ID NO: 2142757 - DNA, 25 bp, Homo sapien
gcacataatagtggctttacctaaa

SEQ ID NO: 2142758 - DNA, 25 bp, Homo sapien
taaacttactagaggggccaggcgc

SEQ ID NO: 2142759 - DNA, 25 bp, Homo sapien
tctaggaattttgggaatccttcac

SEQ ID NO: 2142760 - DNA, 25 bp, Homo sapien
ttttccagctaagacaagtgcccct

SEQ ID NO: 2142761 - DNA, 25 bp, Homo sapien
agtgaaactcgtactgaaaggcatc

SEQ ID NO: 2142762 - DNA, 25 bp, Homo sapien
cagtttgtacattaagcgtgcattc

SEQ ID NO: 2142763 - DNA, 25 bp, Homo sapien
agcactgttacagctaaaagccagg

SEQ ID NO: 2142764 - DNA, 25 bp, Homo sapien
ctgtagggtggatagccaacgtcag

SEQ ID NO: 2142765 - DNA, 25 bp, Homo sapien
tattaggagctagggtaggaatccc

SEQ ID NO: 2142766 - DNA, 25 bp, Homo sapien
tgtggcataaggtgaacagccccaa

SEQ ID NO: 2142767 - DNA, 25 bp, Homo sapien
ctgaagtttggagggttagctgcac

SEQ ID NO: 2142768 - DNA, 25 bp, Homo sapien
tagtagccatcctatgctttgggtc

SEQ ID NO: 2142769 - DNA, 25 bp, Homo sapien
ccaccaactgtatacaagagttcaa

SEQ ID NO: 2142770 - DNA, 25 bp, Homo sapien
caaatcaagtgtagaaagtggaggc

SEQ ID NO: 2142771 - DNA, 25 bp, Homo sapien
taagatgtctctgactaggattgag

SEQ ID NO: 2142772 - DNA, 25 bp, Homo sapien
tcttgctaatctcaccgttggtggc

SEQ ID NO: 2142773 - DNA, 25 bp, Homo sapien
gaaacccaaggtatgcagcaccata

SEQ ID NO: 2142774 - DNA, 25 bp, Homo sapien
cctccttaggtgaaagaagtggcca

SEQ ID NO: 2142775 - DNA, 25 bp, Homo sapien
cacgcgcttgtcacgaaaatagagt

SEQ ID NO: 2142776 - DNA, 25 bp, Homo sapien
tcaacagcgtaaaagtttcccaggc

SEQ ID NO: 2142777 - DNA, 25 bp, Homo sapien
acagcgtaaaagtttcccaggcagc

SEQ ID NO: 2142778 - DNA, 25 bp, Homo sapien
ggctcaacagcgtaaaagtttccca

SEQ ID NO: 2142779 - DNA, 25 bp, Homo sapien
cggcccccgcgttcaccatgtctgg

SEQ ID NO: 2142780 - DNA, 25 bp, Homo sapien
cagggccctaactcccacagaattt

SEQ ID NO: 2142781 - DNA, 25 bp, Homo sapien
aagctttgtcagtggtaatgcctgc

SEQ ID NO: 2142782 - DNA, 25 bp, Homo sapien
gaactgttgtaagatactttgtgag

SEQ ID NO: 2142783 - DNA, 25 bp, Homo sapien
gctctgacagcacacagaactgttg

SEQ ID NO: 2142784 - DNA, 25 bp, Homo sapien
catttcagtgtcttctccatggaga

SEQ ID NO: 2142785 - DNA, 25 bp, Homo sapien
aggagaggttaatgtttcacaagac

SEQ ID NO: 2142786 - DNA, 25 bp, Homo sapien
gagaggttaatgtttcacgagactg

SEQ ID NO: 2142787 - DNA, 25 bp, Homo sapien
tggacaggtgtacagcaggcgccat

SEQ ID NO: 2142788 - DNA, 25 bp, Homo sapien
tacacatacaattcagcagctggag

SEQ ID NO: 2142789 - DNA, 25 bp, Homo sapien
tgtctctgatcccataaggtcccat

SEQ ID NO: 2142790 - DNA, 25 bp, Homo sapien
tcaggaatatcaggtattcggctcc

SEQ ID NO: 2142791 - DNA, 25 bp, Homo sapien
aggccgcggctgaagctttttagca

SEQ ID NO: 2142792 - DNA, 25 bp, Homo sapien
tgccttgcacaaggtaggcgctcca

SEQ ID NO: 2142793 - DNA, 25 bp, Homo sapien
caaggtaggcgctccatatgttgta

SEQ ID NO: 2142794 - DNA, 25 bp, Homo sapien
aattcacagtcagtagggcggggct

SEQ ID NO: 2142795 - DNA, 25 bp, Homo sapien
aggcgctccatatgttgtagaattc

SEQ ID NO: 2142796 - DNA, 25 bp, Homo sapien
taatcgtttagaggacagtcgctcc

SEQ ID NO: 2142797 - DNA, 25 bp, Homo sapien
atgagcctgactaccttgccgggcc

SEQ ID NO: 2142798 - DNA, 25 bp, Homo sapien
cgggccacaggctcaaagaagcagt

SEQ ID NO: 2142799 - DNA, 25 bp, Homo sapien
tgccaacctaatcccatgagcctga

SEQ ID NO: 2142800 - DNA, 25 bp, Homo sapien
tctcattgcacggtggactgctgca

SEQ ID NO: 2142801 - DNA, 25 bp, Homo sapien
tatcaacacagataagatcatatac

SEQ ID NO: 2142802 - DNA, 25 bp, Homo sapien
cttgtccaaggacctgctttaggga

SEQ ID NO: 2142803 - DNA, 25 bp, Homo sapien
gctttagggaatcactcacagttaa

SEQ ID NO: 2142804 - DNA, 25 bp, Homo sapien
ctcgggtctgtctgactcagccagt

SEQ ID NO: 2142805 - DNA, 25 bp, Homo sapien
ttggctctcaccgctgagagggagc

SEQ ID NO: 2142806 - DNA, 25 bp, Homo sapien
cttggctctcaccgctgagagggag

SEQ ID NO: 2142807 - DNA, 25 bp, Homo sapien
actcgggtctgtctgactcagccag

SEQ ID NO: 2142808 - DNA, 25 bp, Homo sapien
cagccacaggatagtgtggagggag

SEQ ID NO: 2142809 - DNA, 25 bp, Homo sapien
cacagccacaggatagtgtggaggg

SEQ ID NO: 2142810 - DNA, 25 bp, Homo sapien
tgccacagccacaggatagtgtgga

SEQ ID NO: 2142811 - DNA, 25 bp, Homo sapien
gccacagccacaggatagtgtggag

SEQ ID NO: 2142812 - DNA, 25 bp, Homo sapien
gctaccattagcgttgcggacatcg

SEQ ID NO: 2142813 - DNA, 25 bp, Homo sapien
tccagcatctgggactgacagtagc

SEQ ID NO: 2142814 - DNA, 25 bp, Homo sapien
tccgtgcctgacattagcagcgaag

SEQ ID NO: 2142815 - DNA, 25 bp, Homo sapien
gatattgcttcagagtccgtgcctg

SEQ ID NO: 2142816 - DNA, 25 bp, Homo sapien
taaagctcttactggtggtgcagac

SEQ ID NO: 2142817 - DNA, 25 bp, Homo sapien
tgtgcggacattactctagaggctg

SEQ ID NO: 2142818 - DNA, 25 bp, Homo sapien
tcattagtgaggcaggcattactcc

SEQ ID NO: 2142819 - DNA, 25 bp, Homo sapien
tcattagtggtagggacatctctcc

SEQ ID NO: 2142820 - DNA, 25 bp, Homo sapien
actccaaaggctgtctgtggtgtgg

SEQ ID NO: 2142821 - DNA, 25 bp, Homo sapien
cactccaaaggctgtctgtggtgtg

SEQ ID NO: 2142822 - DNA, 25 bp, Homo sapien
gtttcgcagtttcaggagttgtggc

SEQ ID NO: 2142823 - DNA, 25 bp, Homo sapien
cagtcatgtgcgatgtgggctttga

SEQ ID NO: 2142824 - DNA, 25 bp, Homo sapien
tcttctaagaggtagcagagtgctg

SEQ ID NO: 2142825 - DNA, 25 bp, Homo sapien
tccatttgcaagatgaaccacctct

SEQ ID NO: 2142826 - DNA, 25 bp, Homo sapien
tattttcatgtgagagaggttctcc

SEQ ID NO: 2142827 - DNA, 25 bp, Homo sapien
tctcagatagggagtcatatatgcc

SEQ ID NO: 2142828 - DNA, 25 bp, Homo sapien
ggagtcatatatgccctgggatctt

SEQ ID NO: 2142829 - DNA, 25 bp, Homo sapien
gaacagcactgaggatgtctatctc

SEQ ID NO: 2142830 - DNA, 25 bp, Homo sapien
ggcatactgcctgactgacttttgg

SEQ ID NO: 2142831 - DNA, 25 bp, Homo sapien
tggcactcggtgtacagagacctgt

SEQ ID NO: 2142832 - DNA, 25 bp, Homo sapien
caagacaaatgtcgggccagcagca

SEQ ID NO: 2142833 - DNA, 25 bp, Homo sapien
cagaaacctggtccgtagaatggca

SEQ ID NO: 2142834 - DNA, 25 bp, Homo sapien
tacttgttggtatgggccttctgat

SEQ ID NO: 2142835 - DNA, 25 bp, Homo sapien
tctgtccaaggtgatcatgaagacc

SEQ ID NO: 2142836 - DNA, 25 bp, Homo sapien
ctttcaggtagtaacagcgtttgga

SEQ ID NO: 2142837 - DNA, 25 bp, Homo sapien
gtaacagcgtttggaaacatgctgg

SEQ ID NO: 2142838 - DNA, 25 bp, Homo sapien
tgattgtcagggcaggtcttaggca

SEQ ID NO: 2142839 - DNA, 25 bp, Homo sapien
tgtcaagagtttagcccaatgcctg

SEQ ID NO: 2142840 - DNA, 25 bp, Homo sapien
tagcggtcgagtcagatatcacagg

SEQ ID NO: 2142841 - DNA, 25 bp, Homo sapien
gacacatggcaagatacgctaaggg

SEQ ID NO: 2142842 - DNA, 25 bp, Homo sapien
ccattgcctccataacagggttttg

SEQ ID NO: 2142843 - DNA, 25 bp, Homo sapien
gctgggtaccactgtattcgctggc

SEQ ID NO: 2142844 - DNA, 25 bp, Homo sapien
tgcctccataacagggttttgctgg

SEQ ID NO: 2142845 - DNA, 25 bp, Homo sapien
cactgtattcgctggccactgtcac

SEQ ID NO: 2142846 - DNA, 25 bp, Homo sapien
gaggcaagaccgtctttaacagtgt

SEQ ID NO: 2142847 - DNA, 25 bp, Homo sapien
tgatagaggcaagaccgtctttaac

SEQ ID NO: 2142848 - DNA, 25 bp, Homo sapien
gcaagaccgtctttaacagtgtcaa

SEQ ID NO: 2142849 - DNA, 25 bp, Homo sapien
tcaactgatagaggcaagaccgtct

SEQ ID NO: 2142850 - DNA, 25 bp, Homo sapien
tatgtaaacgggcagacaaaggaac

SEQ ID NO: 2142851 - DNA, 25 bp, Homo sapien
tgtatgggtctcaaggcattcgata

SEQ ID NO: 2142852 - DNA, 25 bp, Homo sapien
tctccgcctgaggagctaggtgtgt

SEQ ID NO: 2142853 - DNA, 25 bp, Homo sapien
gaatcagtcactttaccttacatgg

SEQ ID NO: 2142854 - DNA, 25 bp, Homo sapien
gagaagcggaccatcttcctgcagt

SEQ ID NO: 2142855 - DNA, 25 bp, Homo sapien
agcggaccatcttcctgcagtccat

SEQ ID NO: 2142856 - DNA, 25 bp, Homo sapien
cactgtaagagaagcggaccatctt

SEQ ID NO: 2142857 - DNA, 25 bp, Homo sapien
caaatcacactgtaagagaagcgga

SEQ ID NO: 2142858 - DNA, 25 bp, Homo sapien
ggacgagcaaattcctgatggccca

SEQ ID NO: 2142859 - DNA, 25 bp, Homo sapien
taaaagtggtagtacgtgcagacgg

SEQ ID NO: 2142860 - DNA, 25 bp, Homo sapien
cagttccgtccgtagaaggagggag

SEQ ID NO: 2142861 - DNA, 25 bp, Homo sapien
tccccgagatggacgagcaaattcc

SEQ ID NO: 2142862 - DNA, 25 bp, Homo sapien
gaagagcatgttccttgcctgctag

SEQ ID NO: 2142863 - DNA, 25 bp, Homo sapien
ccttgcctgctaggtgttttctttt

SEQ ID NO: 2142864 - DNA, 25 bp, Homo sapien
gagcatgttccttgcctgctaggtg

SEQ ID NO: 2142865 - DNA, 25 bp, Homo sapien
ctgaagagcatgttccttgcctgct

SEQ ID NO: 2142866 - DNA, 25 bp, Homo sapien
gcctcttcttgcacctggattcacc

SEQ ID NO: 2142867 - DNA, 25 bp, Homo sapien
caatgcttcagatgttcctggacag

SEQ ID NO: 2142868 - DNA, 25 bp, Homo sapien
tttcaatgcttcagatgttcctgga

SEQ ID NO: 2142869 - DNA, 25 bp, Homo sapien
atatttcaatgcttcagatgttcct

SEQ ID NO: 2142870 - DNA, 25 bp, Homo sapien
tcaatgcttcagatgttcctggaca

SEQ ID NO: 2142871 - DNA, 25 bp, Homo sapien
atcattaaaactgttgttgagtcag

SEQ ID NO: 2142872 - DNA, 25 bp, Homo sapien
ttgaacttgaacaacaatctgtttc

SEQ ID NO: 2142873 - DNA, 25 bp, Homo sapien
aaactgttgttgagtcagagccaca

SEQ ID NO: 2142874 - DNA, 25 bp, Homo sapien
taaaactgttgttgagtcagagcca

SEQ ID NO: 2142875 - DNA, 25 bp, Homo sapien
gaaagtgccctgaaatgaattgttt

SEQ ID NO: 2142876 - DNA, 25 bp, Homo sapien
ggaaaaaagatatccactttcatgc

SEQ ID NO: 2142877 - DNA, 25 bp, Homo sapien
tactgcgaatgatgtcacctgcttc

SEQ ID NO: 2142878 - DNA, 25 bp, Homo sapien
tctgtagttgacaagagaaagaacc

SEQ ID NO: 2142879 - DNA, 25 bp, Homo sapien
gtggttatgccacagacgccaagct

SEQ ID NO: 2142880 - DNA, 25 bp, Homo sapien
cagccacaagacctacaggaaggag

SEQ ID NO: 2142881 - DNA, 25 bp, Homo sapien
acagacgccaagctgatgccttctc

SEQ ID NO: 2142882 - DNA, 25 bp, Homo sapien
gcagagaatggaatttctgagtggt

SEQ ID NO: 2142883 - DNA, 25 bp, Homo sapien
tctctaccaggtcacaggttttttc

SEQ ID NO: 2142884 - DNA, 25 bp, Homo sapien
agtggcagtctagccttttggtagc

SEQ ID NO: 2142885 - DNA, 25 bp, Homo sapien
ttttggtagctgtagaaaagggaca

SEQ ID NO: 2142886 - DNA, 25 bp, Homo sapien
cacagccaggagtagcaacagtggc

SEQ ID NO: 2142887 - DNA, 25 bp, Homo sapien
ggcactaggcctgccccagatatgt

SEQ ID NO: 2142888 - DNA, 25 bp, Homo sapien
tttattgattggcactaggcctgcc

SEQ ID NO: 2142889 - DNA, 25 bp, Homo sapien
tgtgattactagcttcccagcatgc

SEQ ID NO: 2142890 - DNA, 25 bp, Homo sapien
gtctggttgggtctgcctacctcct

SEQ ID NO: 2142891 - DNA, 25 bp, Homo sapien
ccatcccgaggtgggagatctccgg

SEQ ID NO: 2142892 - DNA, 25 bp, Homo sapien
taatgacatagacagccatcagtga

SEQ ID NO: 2142893 - DNA, 25 bp, Homo sapien
gggaatagaccaggctcctatccat

SEQ ID NO: 2142894 - DNA, 25 bp, Homo sapien
aacatgataagtaagacagaaccca

SEQ ID NO: 2142895 - DNA, 25 bp, Homo sapien
ttaggctatcctcagctccgcagaa

SEQ ID NO: 2142896 - DNA, 25 bp, Homo sapien
ccgcagaaggttgactcttactgat

SEQ ID NO: 2142897 - DNA, 25 bp, Homo sapien
tcctcagctccgcagaaggttgact

SEQ ID NO: 2142898 - DNA, 25 bp, Homo sapien
gctccgcagaaggttgactcttact

SEQ ID NO: 2142899 - DNA, 25 bp, Homo sapien
cccagagtgttgtggccccagatta

SEQ ID NO: 2142900 - DNA, 25 bp, Homo sapien
gagtgttgtggccccagattaagaa

SEQ ID NO: 2142901 - DNA, 25 bp, Homo sapien
caagctgatttgcaggtttctcaca

SEQ ID NO: 2142902 - DNA, 25 bp, Homo sapien
cagagtgttgtggccccagattaag

SEQ ID NO: 2142903 - DNA, 25 bp, Homo sapien
gtctgagtatgattactctcctgga

SEQ ID NO: 2142904 - DNA, 25 bp, Homo sapien
ggagacctagtctgagtatgattac

SEQ ID NO: 2142905 - DNA, 25 bp, Homo sapien
tttggttagtggagacctagtctga

SEQ ID NO: 2142906 - DNA, 25 bp, Homo sapien
ttgctttggttagtggagacctagt

SEQ ID NO: 2142907 - DNA, 25 bp, Homo sapien
gaataggacatagggtaaagaggcc

SEQ ID NO: 2142908 - DNA, 25 bp, Homo sapien
caagctgcctgtagttagtagagaa

SEQ ID NO: 2142909 - DNA, 25 bp, Homo sapien
aagtcaaagtagaaaccctccagtg

SEQ ID NO: 2142910 - DNA, 25 bp, Homo sapien
gagaacacgcagagagtttccctag

SEQ ID NO: 2142911 - DNA, 25 bp, Homo sapien
gataaatctgctctatggctaccct

SEQ ID NO: 2142912 - DNA, 25 bp, Homo sapien
tggttcaaaagtggccacatgctgg

SEQ ID NO: 2142913 - DNA, 25 bp, Homo sapien
tctagcttcggtatggagcactggc

SEQ ID NO: 2142914 - DNA, 25 bp, Homo sapien
taatttactatctcaaccgaggcac

SEQ ID NO: 2142915 - DNA, 25 bp, Homo sapien
ctcaaaattcatccccacgtacttg

SEQ ID NO: 2142916 - DNA, 25 bp, Homo sapien
tcatctaaatcccaactggatctcc

SEQ ID NO: 2142917 - DNA, 25 bp, Homo sapien
gtacttgctgactgtcccaggaccc

SEQ ID NO: 2142918 - DNA, 25 bp, Homo sapien
tcatccccacgtacttgctgactgt

SEQ ID NO: 2142919 - DNA, 25 bp, Homo sapien
agattatactactgccacattctgg

SEQ ID NO: 2142920 - DNA, 25 bp, Homo sapien
tcttcagagattatactactgccac

SEQ ID NO: 2142921 - DNA, 25 bp, Homo sapien
acttcctgtcccctgctcatcttgc

SEQ ID NO: 2142922 - DNA, 25 bp, Homo sapien
aatctcttcagagattatactactg

SEQ ID NO: 2142923 - DNA, 25 bp, Homo sapien
ggcaacccaatcaatgcacccagtg

SEQ ID NO: 2142924 - DNA, 25 bp, Homo sapien
cccagtgcagctgttcggtaagacc

SEQ ID NO: 2142925 - DNA, 25 bp, Homo sapien
ggctctttcagaatcggcaacccaa

SEQ ID NO: 2142926 - DNA, 25 bp, Homo sapien
tgttcgtagctgaagggctctttca

SEQ ID NO: 2142927 - DNA, 25 bp, Homo sapien
cagtcctcctcttagtgctaggtgg

SEQ ID NO: 2142928 - DNA, 25 bp, Homo sapien
tccagtcctcctcttagtgctaggt

SEQ ID NO: 2142929 - DNA, 25 bp, Homo sapien
cctcctcttagtgctaggtgggaat

SEQ ID NO: 2142930 - DNA, 25 bp, Homo sapien
ctcttagtgctaggtgggaatttga

SEQ ID NO: 2142931 - DNA, 25 bp, Homo sapien
gaggacttggttccagagtgtggga

SEQ ID NO: 2142932 - DNA, 25 bp, Homo sapien
catgaggacttggttccagagtgtg

SEQ ID NO: 2142933 - DNA, 25 bp, Homo sapien
ggacttggttccagagtgtgggaag

SEQ ID NO: 2142934 - DNA, 25 bp, Homo sapien
agcatgaggacttggttccagagtg

SEQ ID NO: 2142935 - DNA, 25 bp, Homo sapien
agggtggggagagtggggaagagag

SEQ ID NO: 2142936 - DNA, 25 bp, Homo sapien
tagggtggggagagtggggaagaga

SEQ ID NO: 2142937 - DNA, 25 bp, Homo sapien
gggtggggagagtggggaagagagc

SEQ ID NO: 2142938 - DNA, 25 bp, Homo sapien
tatagggtggggagagtggggaaga

SEQ ID NO: 2142939 - DNA, 25 bp, Homo sapien
gttggatccaagggttgattgccat

SEQ ID NO: 2142940 - DNA, 25 bp, Homo sapien
ccgttggatccaagggttgattgcc

SEQ ID NO: 2142941 - DNA, 25 bp, Homo sapien
gccgttggatccaagggttgattgc

SEQ ID NO: 2142942 - DNA, 25 bp, Homo sapien
atgccgttggatccaagggttgatt

SEQ ID NO: 2142943 - DNA, 25 bp, Homo sapien
caccaagccaattggagtgcctgct

SEQ ID NO: 2142944 - DNA, 25 bp, Homo sapien
ggagtgcctgctaggacagcacagg

SEQ ID NO: 2142945 - DNA, 25 bp, Homo sapien
ttaagcccaagtgtagtcatcagat

SEQ ID NO: 2142946 - DNA, 25 bp, Homo sapien
tggagcatgtagaacaccaagccaa

SEQ ID NO: 2142947 - DNA, 25 bp, Homo sapien
gaccttttgtaaggactgcacctct

SEQ ID NO: 2142948 - DNA, 25 bp, Homo sapien
ttgtaaggactgcacctcttccctc

SEQ ID NO: 2142949 - DNA, 25 bp, Homo sapien
ctgagaccttttgtaaggactgcac

SEQ ID NO: 2142950 - DNA, 25 bp, Homo sapien
ttttgtaaggactgcacctcttccc

SEQ ID NO: 2142951 - DNA, 25 bp, Homo sapien
gccagggaccatggatgataaaatc

SEQ ID NO: 2142952 - DNA, 25 bp, Homo sapien
cagtttgctcctcagcatgccgaga

SEQ ID NO: 2142953 - DNA, 25 bp, Homo sapien
tttcagtgcccaaatggccagggac

SEQ ID NO: 2142954 - DNA, 25 bp, Homo sapien
gaggtacaatctctcatgacatgtg

SEQ ID NO: 2142955 - DNA, 25 bp, Homo sapien
ttgtcagatgatgacgctaaggtca

SEQ ID NO: 2142956 - DNA, 25 bp, Homo sapien
tgtcagatgatgacgctaaggtcat

SEQ ID NO: 2142957 - DNA, 25 bp, Homo sapien
attgtcagatgatgacgctaaggtc

SEQ ID NO: 2142958 - DNA, 25 bp, Homo sapien
gtcaatggctacatgtctaagtaac

SEQ ID NO: 2142959 - DNA, 25 bp, Homo sapien
cactacctgtgttagttgcagggtt

SEQ ID NO: 2142960 - DNA, 25 bp, Homo sapien
gtcctggatcccctgaagcatgtca

SEQ ID NO: 2142961 - DNA, 25 bp, Homo sapien
cctccactacctgtgttagttgcag

SEQ ID NO: 2142962 - DNA, 25 bp, Homo sapien
ccgcgcccgcgccttggctctgccc

SEQ ID NO: 2142963 - DNA, 25 bp, Homo sapien
cgcgccttggctctgcccccgggag

SEQ ID NO: 2142964 - DNA, 25 bp, Homo sapien
tgtgagggcggtgatgtttttcctc

SEQ ID NO: 2142965 - DNA, 25 bp, Homo sapien
gtggtgtgagggcggtgatgttttt

SEQ ID NO: 2142966 - DNA, 25 bp, Homo sapien
tgttccaagaaaccacagaagtacc

SEQ ID NO: 2142967 - DNA, 25 bp, Homo sapien
gatagatctggtgttgttcggaata

SEQ ID NO: 2142968 - DNA, 25 bp, Homo sapien
tctccagaggcatagttagccaatg

SEQ ID NO: 2142969 - DNA, 25 bp, Homo sapien
gaactgaagggaaagtctctggtct

SEQ ID NO: 2142970 - DNA, 25 bp, Homo sapien
tcattcttcgcagcgtggtcacccg

SEQ ID NO: 2142971 - DNA, 25 bp, Homo sapien
cttcttcctaggtgggttagcctcg

SEQ ID NO: 2142972 - DNA, 25 bp, Homo sapien
gccaaacaggttgtctacagctcat

SEQ ID NO: 2142973 - DNA, 25 bp, Homo sapien
gcttgcctctcaagtagggatccca

SEQ ID NO: 2142974 - DNA, 25 bp, Homo sapien
ttaaacttgagtttcagggtgactc

SEQ ID NO: 2142975 - DNA, 25 bp, Homo sapien
tgtgcaacctctggaccttaaactt

SEQ ID NO: 2142976 - DNA, 25 bp, Homo sapien
ttcagccccttgattgacttcctgt

SEQ ID NO: 2142977 - DNA, 25 bp, Homo sapien
cagggtgactctttctagtagccca

SEQ ID NO: 2142978 - DNA, 25 bp, Homo sapien
gcaactttgacaccccctggatgtt

SEQ ID NO: 2142979 - DNA, 25 bp, Homo sapien
tgcatgattgctcctggtgtccctt

SEQ ID NO: 2142980 - DNA, 25 bp, Homo sapien
agagcatcccatgtcagcaactttg

SEQ ID NO: 2142981 - DNA, 25 bp, Homo sapien
gacttcacaactgcctaattcatgc

SEQ ID NO: 2142982 - DNA, 25 bp, Homo sapien
tcttggagatcattaggcaccttca

SEQ ID NO: 2142983 - DNA, 25 bp, Homo sapien
tatcagagctcttaacatggtatgc

SEQ ID NO: 2142984 - DNA, 25 bp, Homo sapien
gggtataaatacattgagcatcaga

SEQ ID NO: 2142985 - DNA, 25 bp, Homo sapien
tcttagtccctttgtgcctagcaaa

SEQ ID NO: 2142986 - DNA, 25 bp, Homo sapien
gccagcagaggtgatctgagtattc

SEQ ID NO: 2142987 - DNA, 25 bp, Homo sapien
cacagccagcagaggtgatctgagt

SEQ ID NO: 2142988 - DNA, 25 bp, Homo sapien
cagaggtgatctgagtattctgtct

SEQ ID NO: 2142989 - DNA, 25 bp, Homo sapien
aggtgatctgagtattctgtctcca

SEQ ID NO: 2142990 - DNA, 25 bp, Homo sapien
ctgaggtctagagcaactgatacac

SEQ ID NO: 2142991 - DNA, 25 bp, Homo sapien
tcaaggatcccagaacatgatgaca

SEQ ID NO: 2142992 - DNA, 25 bp, Homo sapien
gtcgttgctgcttacttctggttta

SEQ ID NO: 2142993 - DNA, 25 bp, Homo sapien
gaatactcagatcactgaggtctag

SEQ ID NO: 2142994 - DNA, 25 bp, Homo sapien
tctaattccaccatcactcagttct

SEQ ID NO: 2142995 - DNA, 25 bp, Homo sapien
tcactcagttctgaacttttgctgg

SEQ ID NO: 2142996 - DNA, 25 bp, Homo sapien
ttctaattccaccatcactcagttc

SEQ ID NO: 2142997 - DNA, 25 bp, Homo sapien
cagcagccacgactatgctgttcat

SEQ ID NO: 2142998 - DNA, 25 bp, Homo sapien
gcagcagccacgactatgctgttca

SEQ ID NO: 2142999 - DNA, 25 bp, Homo sapien
tgcagcagccacgactatgctgttc

SEQ ID NO: 2143000 - DNA, 25 bp, Homo sapien
gagtatactatcactaaaacttcca

SEQ ID NO: 2143001 - DNA, 25 bp, Homo sapien
tccattggtgaagagatagggcaga

SEQ ID NO: 2143002 - DNA, 25 bp, Homo sapien
ctccatatctctcccttagtcaagt

SEQ ID NO: 2143003 - DNA, 25 bp, Homo sapien
taagacattggttttagactggagt

SEQ ID NO: 2143004 - DNA, 25 bp, Homo sapien
tgagcctcaagatcacctccataga

SEQ ID NO: 2143005 - DNA, 25 bp, Homo sapien
actaccaatggttgtttctgattgg

SEQ ID NO: 2143006 - DNA, 25 bp, Homo sapien
cctccatagattagcatataggaag

SEQ ID NO: 2143007 - DNA, 25 bp, Homo sapien
aagatgtagctggacactgctgctc

SEQ ID NO: 2143008 - DNA, 25 bp, Homo sapien
gaggttgagtcataacaatgctcag

SEQ ID NO: 2143009 - DNA, 25 bp, Homo sapien
ggaggttgagtcataacaatgctca

SEQ ID NO: 2143010 - DNA, 25 bp, Homo sapien
acagaggaggttgagtcataacaat

SEQ ID NO: 2143011 - DNA, 25 bp, Homo sapien
gaggaggttgagtcataacaatgct

SEQ ID NO: 2143012 - DNA, 25 bp, Homo sapien
agggttgaaggtcatcacggatcca

SEQ ID NO: 2143013 - DNA, 25 bp, Homo sapien
gatgaggaccaagactggtttcttg

SEQ ID NO: 2143014 - DNA, 25 bp, Homo sapien
tccagtttggacctgcatccctaaa

SEQ ID NO: 2143015 - DNA, 25 bp, Homo sapien
cacggatccagttggagatccagtt

SEQ ID NO: 2143016 - DNA, 25 bp, Homo sapien
gcttgcatcaacacatctctctgaa

SEQ ID NO: 2143017 - DNA, 25 bp, Homo sapien
tggtagcttgcatcaacacatctct

SEQ ID NO: 2143018 - DNA, 25 bp, Homo sapien
gcatcaacacatctctctgaaaact

SEQ ID NO: 2143019 - DNA, 25 bp, Homo sapien
actggtagcttgcatcaacacatct

SEQ ID NO: 2143020 - DNA, 25 bp, Homo sapien
taatcagctccctgtctggacggtc

SEQ ID NO: 2143021 - DNA, 25 bp, Homo sapien
tctggcactggtaaagcaagctgct

SEQ ID NO: 2143022 - DNA, 25 bp, Homo sapien
aggctggcccctttgttcaggagaa

SEQ ID NO: 2143023 - DNA, 25 bp, Homo sapien
gagcaaaataacaagtgcggccgca

SEQ ID NO: 2143024 - DNA, 25 bp, Homo sapien
ggacaggttgccccgacttccacaa

SEQ ID NO: 2143025 - DNA, 25 bp, Homo sapien
gggacaggttgccccgacttccaca

SEQ ID NO: 2143026 - DNA, 25 bp, Homo sapien
tatttttgccatgcaatttgtaaga

SEQ ID NO: 2143027 - DNA, 25 bp, Homo sapien
atttttgccatgcaatttgtaagaa

SEQ ID NO: 2143028 - DNA, 25 bp, Homo sapien
tgggaggtacacgtgtgaaaggagg

SEQ ID NO: 2143029 - DNA, 25 bp, Homo sapien
ggaggtacacgtgtgaaaggaggaa

SEQ ID NO: 2143030 - DNA, 25 bp, Homo sapien
tgttctgggaggtacacgtgtgaaa

SEQ ID NO: 2143031 - DNA, 25 bp, Homo sapien
cttgttctgggaggtacacgtgtga

SEQ ID NO: 2143032 - DNA, 25 bp, Homo sapien
taccctccagcaagtaagagcaggc

SEQ ID NO: 2143033 - DNA, 25 bp, Homo sapien
aaaaactgagtcataggcaccatgc

SEQ ID NO: 2143034 - DNA, 25 bp, Homo sapien
catcacagacagatcaggaccagag

SEQ ID NO: 2143035 - DNA, 25 bp, Homo sapien
caaagcttctggtcactgcatgggc

SEQ ID NO: 2143036 - DNA, 25 bp, Homo sapien
aacagcaggccttccatttgatgtc

SEQ ID NO: 2143037 - DNA, 25 bp, Homo sapien
tctgtggtcagtctctttccgatac

SEQ ID NO: 2143038 - DNA, 25 bp, Homo sapien
acaacagcaggccttccatttgatg

SEQ ID NO: 2143039 - DNA, 25 bp, Homo sapien
tgtttgacttccctaatctttcctc

SEQ ID NO: 2143040 - DNA, 25 bp, Homo sapien
tctgttctgtttccatcccttagca

SEQ ID NO: 2143041 - DNA, 25 bp, Homo sapien
aatttgggtcaatctagctggtcag

SEQ ID NO: 2143042 - DNA, 25 bp, Homo sapien
tcagtctaccggcttcaatgtatct

SEQ ID NO: 2143043 - DNA, 25 bp, Homo sapien
cattcagtctgttgggtgcagcact

SEQ ID NO: 2143044 - DNA, 25 bp, Homo sapien
tgctttctcacaactagactcttct

SEQ ID NO: 2143045 - DNA, 25 bp, Homo sapien
tggacattgctttctcacaactaga

SEQ ID NO: 2143046 - DNA, 25 bp, Homo sapien
cacaactagactcttctcaaattat

SEQ ID NO: 2143047 - DNA, 25 bp, Homo sapien
aaagcaagctgctgaggtgagcaga

SEQ ID NO: 2143048 - DNA, 25 bp, Homo sapien
cataagggccaaatttctcttcggg

SEQ ID NO: 2143049 - DNA, 25 bp, Homo sapien
caaatttctcttcgggcttgccaca

SEQ ID NO: 2143050 - DNA, 25 bp, Homo sapien
tctcttcgggcttgccacaaagttt

SEQ ID NO: 2143051 - DNA, 25 bp, Homo sapien
ggcttgccacaaagtttccctagca

SEQ ID NO: 2143052 - DNA, 25 bp, Homo sapien
gaagccttgaaaatggtatatcctc

SEQ ID NO: 2143053 - DNA, 25 bp, Homo sapien
aagcctgacaagttggctgcattac

SEQ ID NO: 2143054 - DNA, 25 bp, Homo sapien
tatcctctcgacaaagctaagcctg

SEQ ID NO: 2143055 - DNA, 25 bp, Homo sapien
aaaatggtatatcctctcgacaaag

SEQ ID NO: 2143056 - DNA, 25 bp, Homo sapien
tgccatggtcaaggggtcaagatga

SEQ ID NO: 2143057 - DNA, 25 bp, Homo sapien
tactgactgacaaatttatggtggg

SEQ ID NO: 2143058 - DNA, 25 bp, Homo sapien
gggctgccaatccatagaactctgc

SEQ ID NO: 2143059 - DNA, 25 bp, Homo sapien
tctgcaggcccactccacttagaga

SEQ ID NO: 2143060 - DNA, 25 bp, Homo sapien
catgtctgctgccaacaaaatttgt

SEQ ID NO: 2143061 - DNA, 25 bp, Homo sapien
tttctcaaggttgagcctaaggtga

SEQ ID NO: 2143062 - DNA, 25 bp, Homo sapien
tatctgagggagaaccaaaacatgt

SEQ ID NO: 2143063 - DNA, 25 bp, Homo sapien
caaggttgagcctaaggtgatcgtg

SEQ ID NO: 2143064 - DNA, 25 bp, Homo sapien
tgttgggcgaactgaacttctgact

SEQ ID NO: 2143065 - DNA, 25 bp, Homo sapien
ggcgaactgaacttctgactcctca

SEQ ID NO: 2143066 - DNA, 25 bp, Homo sapien
ctcaagtcattccatgttgggcgaa

SEQ ID NO: 2143067 - DNA, 25 bp, Homo sapien
tcattccatgttgggcgaactgaac

SEQ ID NO: 2143068 - DNA, 25 bp, Homo sapien
gctgccatagagtctcctcttcctg

SEQ ID NO: 2143069 - DNA, 25 bp, Homo sapien
tctcctcttcctgagaaggccccat

SEQ ID NO: 2143070 - DNA, 25 bp, Homo sapien
ctgctgccatagagtctcctcttcc

SEQ ID NO: 2143071 - DNA, 25 bp, Homo sapien
tgccatagagtctcctcttcctgag

SEQ ID NO: 2143072 - DNA, 25 bp, Homo sapien
attttataatcgaattttgtggttg

SEQ ID NO: 2143073 - DNA, 25 bp, Homo sapien
actacaggagacatgccaggctaat

SEQ ID NO: 2143074 - DNA, 25 bp, Homo sapien
gcataattttataatcgaattttgt

SEQ ID NO: 2143075 - DNA, 25 bp, Homo sapien
ataattttataatcgaattttgtgg

SEQ ID NO: 2143076 - DNA, 25 bp, Homo sapien
tccgttcatatcctatatcatgttt

SEQ ID NO: 2143077 - DNA, 25 bp, Homo sapien
tgtccttgatttcctgcggttgtga

SEQ ID NO: 2143078 - DNA, 25 bp, Homo sapien
tcatgctatctacttcactgaagaa

SEQ ID NO: 2143079 - DNA, 25 bp, Homo sapien
gaagaattttccgttcatatcctat

SEQ ID NO: 2143080 - DNA, 25 bp, Homo sapien
tgcattatgaatacctgcgtgtgtg

SEQ ID NO: 2143081 - DNA, 25 bp, Homo sapien
cctcgacatttaggcctgtgcatta

SEQ ID NO: 2143082 - DNA, 25 bp, Homo sapien
ctgacctcgacatttaggcctgtgc

SEQ ID NO: 2143083 - DNA, 25 bp, Homo sapien
gcctgtgcattatgaatacctgcgt

SEQ ID NO: 2143084 - DNA, 25 bp, Homo sapien
cagcagcgacagcaaggtgagtgca

SEQ ID NO: 2143085 - DNA, 25 bp, Homo sapien
gtgggatctttcagatctgtacagt

SEQ ID NO: 2143086 - DNA, 25 bp, Homo sapien
gacagcaaggtgagtgcagtcaatg

SEQ ID NO: 2143087 - DNA, 25 bp, Homo sapien
gatctttcagatctgtacagtgcct

SEQ ID NO: 2143088 - DNA, 25 bp, Homo sapien
gagggaaattccttcacctatgtgc

SEQ ID NO: 2143089 - DNA, 25 bp, Homo sapien
gccaagaccctaggaattatgtgcc

SEQ ID NO: 2143090 - DNA, 25 bp, Homo sapien
ggctgcatctgtgtgggctacaatc

SEQ ID NO: 2143091 - DNA, 25 bp, Homo sapien
gggctgggaatactgaaactcctcc

SEQ ID NO: 2143092 - DNA, 25 bp, Homo sapien
aagtctctccgattccaaggccata

SEQ ID NO: 2143093 - DNA, 25 bp, Homo sapien
agtttttgccaagagtgctaagtgc

SEQ ID NO: 2143094 - DNA, 25 bp, Homo sapien
tcattcggtggaacttggctaagcc

SEQ ID NO: 2143095 - DNA, 25 bp, Homo sapien
ggctaagccaggacatgaacccaag

SEQ ID NO: 2143096 - DNA, 25 bp, Homo sapien
gagttagtggattcaccatctgcct

SEQ ID NO: 2143097 - DNA, 25 bp, Homo sapien
caactggaagccttatttacagcca

SEQ ID NO: 2143098 - DNA, 25 bp, Homo sapien
tcaaccattcccttgaactggagag

SEQ ID NO: 2143099 - DNA, 25 bp, Homo sapien
cctgtttttggaagatcaaccattc

SEQ ID NO: 2143100 - DNA, 25 bp, Homo sapien
gcttgctggttctaacttaatgtta

SEQ ID NO: 2143101 - DNA, 25 bp, Homo sapien
ggactgggagtacatggctatagtt

SEQ ID NO: 2143102 - DNA, 25 bp, Homo sapien
gagagggactgggagtacatggcta

SEQ ID NO: 2143103 - DNA, 25 bp, Homo sapien
actgggagtacatggctatagtttc

SEQ ID NO: 2143104 - DNA, 25 bp, Homo sapien
agtcaaagaagccttctcgccctgc

SEQ ID NO: 2143105 - DNA, 25 bp, Homo sapien
gggcacagcatgtaacaacctggtt

SEQ ID NO: 2143106 - DNA, 25 bp, Homo sapien
acagcatgtaacaacctggttgggc

SEQ ID NO: 2143107 - DNA, 25 bp, Homo sapien
gcatgtaacaacctggttgggctct

SEQ ID NO: 2143108 - DNA, 25 bp, Homo sapien
caggggcacagcatgtaacaacctg

SEQ ID NO: 2143109 - DNA, 25 bp, Homo sapien
tcacttgatacgaccacttgtaggg

SEQ ID NO: 2143110 - DNA, 25 bp, Homo sapien
cctgtcctgattaccagatggttcg

SEQ ID NO: 2143111 - DNA, 25 bp, Homo sapien
gatagatgcagatctcagtgtgctg

SEQ ID NO: 2143112 - DNA, 25 bp, Homo sapien
cacgtccacagcaaaatgatgaaga

SEQ ID NO: 2143113 - DNA, 25 bp, Homo sapien
ctctcttcaaggggcttcattatgg

SEQ ID NO: 2143114 - DNA, 25 bp, Homo sapien
gtctgctcctgataaccacataatg

SEQ ID NO: 2143115 - DNA, 25 bp, Homo sapien
cacataatgaggttgtcaggaacag

SEQ ID NO: 2143116 - DNA, 25 bp, Homo sapien
ttgtcaggaacagaagtgcccccat

SEQ ID NO: 2143117 - DNA, 25 bp, Homo sapien
ttgtcgtgacaacctgggcagtgtc

SEQ ID NO: 2143118 - DNA, 25 bp, Homo sapien
aggcagtaatgaataacccactggg

SEQ ID NO: 2143119 - DNA, 25 bp, Homo sapien
ctgggcaggcactgaatgcaaggca

SEQ ID NO: 2143120 - DNA, 25 bp, Homo sapien
tgggcaaaagcaacccagatttcct

SEQ ID NO: 2143121 - DNA, 25 bp, Homo sapien
cagccagaagttgttcccagtagtg

SEQ ID NO: 2143122 - DNA, 25 bp, Homo sapien
tctttgatttaagggtattacaaca

SEQ ID NO: 2143123 - DNA, 25 bp, Homo sapien
ttaagggtattacaacactaccatc

SEQ ID NO: 2143124 - DNA, 25 bp, Homo sapien
tgatttaagggtattacaacactac

SEQ ID NO: 2143125 - DNA, 25 bp, Homo sapien
gctctttgatttaagggtattacaa

SEQ ID NO: 2143126 - DNA, 25 bp, Homo sapien
cctttcctctacctccgagcgctcc

SEQ ID NO: 2143127 - DNA, 25 bp, Homo sapien
tgccacggatccagccaccccgtca

SEQ ID NO: 2143128 - DNA, 25 bp, Homo sapien
cagccaccccgtcaagacctttcct

SEQ ID NO: 2143129 - DNA, 25 bp, Homo sapien
ctttcctctacctccgagcgctcca

SEQ ID NO: 2143130 - DNA, 25 bp, Homo sapien
gcacaaacaggacaggaggggggtc

SEQ ID NO: 2143131 - DNA, 25 bp, Homo sapien
tggggcacaaacaggacaggagggg

SEQ ID NO: 2143132 - DNA, 25 bp, Homo sapien
ctggggcacaaacaggacaggaggg

SEQ ID NO: 2143133 - DNA, 25 bp, Homo sapien
gggatcatgcaaactgctcgcttgg

SEQ ID NO: 2143134 - DNA, 25 bp, Homo sapien
ttgtccgcgaactgggatcatgcaa

SEQ ID NO: 2143135 - DNA, 25 bp, Homo sapien
ctccggggagccacgtaggagactc

SEQ ID NO: 2143136 - DNA, 25 bp, Homo sapien
caaactgctcgcttggtctcagggc

SEQ ID NO: 2143137 - DNA, 25 bp, Homo sapien
gggttttgcctcaagcggcccaggc

SEQ ID NO: 2143138 - DNA, 25 bp, Homo sapien
gctgacgtagctttcaaggcgggtt

SEQ ID NO: 2143139 - DNA, 25 bp, Homo sapien
ccaggccccagtaaacgagtctagg

SEQ ID NO: 2143140 - DNA, 25 bp, Homo sapien
tagggtttgaccaagcgaaggagcc

SEQ ID NO: 2143141 - DNA, 25 bp, Homo sapien
ccttctctccttcgcttctacagac

SEQ ID NO: 2143142 - DNA, 25 bp, Homo sapien
ccaacagcccagaaccctcaagtct

SEQ ID NO: 2143143 - DNA, 25 bp, Homo sapien
gcttctacagaccaacagcccagaa

SEQ ID NO: 2143144 - DNA, 25 bp, Homo sapien
aaccctcaagtctagaatctggaac

SEQ ID NO: 2143145 - DNA, 25 bp, Homo sapien
aaaccatgaggggagcaagactaac

SEQ ID NO: 2143146 - DNA, 25 bp, Homo sapien
gcaaaaccatgaggggagcaagact

SEQ ID NO: 2143147 - DNA, 25 bp, Homo sapien
ctgcaaaaccatgaggggagcaaga

SEQ ID NO: 2143148 - DNA, 25 bp, Homo sapien
catgaggggagcaagactaacatgg

SEQ ID NO: 2143149 - DNA, 25 bp, Homo sapien
tgtcaccaacaggaatggacctcct

SEQ ID NO: 2143150 - DNA, 25 bp, Homo sapien
cagacagccatacacttggcctgga

SEQ ID NO: 2143151 - DNA, 25 bp, Homo sapien
ctcagacagccatacacttggcctg

SEQ ID NO: 2143152 - DNA, 25 bp, Homo sapien
agggccacggtgttgtcaccaacag

SEQ ID NO: 2143153 - DNA, 25 bp, Homo sapien
gggtcagctccttgacatcctaagg

SEQ ID NO: 2143154 - DNA, 25 bp, Homo sapien
tggtgagaatgtccctagggtcctg

SEQ ID NO: 2143155 - DNA, 25 bp, Homo sapien
aagttgcccctgattggaggcctca

SEQ ID NO: 2143156 - DNA, 25 bp, Homo sapien
cagaaacagaggcttacaaatggct

SEQ ID NO: 2143157 - DNA, 25 bp, Homo sapien
catttccacctctgaccaggaaatt

SEQ ID NO: 2143158 - DNA, 25 bp, Homo sapien
gcaaacttgtttgccctatatacca

SEQ ID NO: 2143159 - DNA, 25 bp, Homo sapien
caagacctcagcaaacttgtttgcc

SEQ ID NO: 2143160 - DNA, 25 bp, Homo sapien
cacctctgaccaggaaattctgcaa

SEQ ID NO: 2143161 - DNA, 25 bp, Homo sapien
tttagtagcttagtctctgaacaca

SEQ ID NO: 2143162 - DNA, 25 bp, Homo sapien
cctcacctggtatgtccaccactca

SEQ ID NO: 2143163 - DNA, 25 bp, Homo sapien
acacataatagcaaactctcggatg

SEQ ID NO: 2143164 - DNA, 25 bp, Homo sapien
gcaaactctcggatgtcagcacctt

SEQ ID NO: 2143165 - DNA, 25 bp, Homo sapien
gaatcatccttctaattcttggctg

SEQ ID NO: 2143166 - DNA, 25 bp, Homo sapien
tcaacctccagagttgcctatctca

SEQ ID NO: 2143167 - DNA, 25 bp, Homo sapien
ctcaccagagaattcagggcttttg

SEQ ID NO: 2143168 - DNA, 25 bp, Homo sapien
tggtaaggccacgacttttcttctc

SEQ ID NO: 2143169 - DNA, 25 bp, Homo sapien
ttcttgttctcttggttaaagctac

SEQ ID NO: 2143170 - DNA, 25 bp, Homo sapien
aggctgctgctcattgagtttcttg

SEQ ID NO: 2143171 - DNA, 25 bp, Homo sapien
ttctcttggttaaagctactggttc

SEQ ID NO: 2143172 - DNA, 25 bp, Homo sapien
gaaagagccagttgttgaggctgct

SEQ ID NO: 2143173 - DNA, 25 bp, Homo sapien
ctgtctaggccagattgatagcgcc

SEQ ID NO: 2143174 - DNA, 25 bp, Homo sapien
gattgatagcgcctccacttccctt

SEQ ID NO: 2143175 - DNA, 25 bp, Homo sapien
gccagattgatagcgcctccacttc

SEQ ID NO: 2143176 - DNA, 25 bp, Homo sapien
gtctaggccagattgatagcgcctc

SEQ ID NO: 2143177 - DNA, 25 bp, Homo sapien
cagcccacccatgtaaaagcagtca

SEQ ID NO: 2143178 - DNA, 25 bp, Homo sapien
tagtgccgacttggcagacgagtcc

SEQ ID NO: 2143179 - DNA, 25 bp, Homo sapien
ctggagaagctgtgtagtgccgact

SEQ ID NO: 2143180 - DNA, 25 bp, Homo sapien
ttggcagacgagtccattccaggcc

SEQ ID NO: 2143181 - DNA, 25 bp, Homo sapien
gaagctgtgtagtgccgacttggca

SEQ ID NO: 2143182 - DNA, 25 bp, Homo sapien
taaatgtgtggctattatttgatcc

SEQ ID NO: 2143183 - DNA, 25 bp, Homo sapien
gtgtggctattatttgatccgaggc

SEQ ID NO: 2143184 - DNA, 25 bp, Homo sapien
aatgtgtggctattatttgatccga

SEQ ID NO: 2143185 - DNA, 25 bp, Homo sapien
tggctattatttgatccgaggctga

SEQ ID NO: 2143186 - DNA, 25 bp, Homo sapien
gtttcccagacttagacccagctgt

SEQ ID NO: 2143187 - DNA, 25 bp, Homo sapien
cattgcatcccctgggtttagcaca

SEQ ID NO: 2143188 - DNA, 25 bp, Homo sapien
agctgcaccgttttgctcctcattg

SEQ ID NO: 2143189 - DNA, 25 bp, Homo sapien
ccagctgtagctgcaccgttttgct

SEQ ID NO: 2143190 - DNA, 25 bp, Homo sapien
aaccgctgcacaagggcactggtga

SEQ ID NO: 2143191 - DNA, 25 bp, Homo sapien
aaattgtccccattaaggtcactag

SEQ ID NO: 2143192 - DNA, 25 bp, Homo sapien
catccatatatgcaaggagaaggac

SEQ ID NO: 2143193 - DNA, 25 bp, Homo sapien
aacggtggctggctgagtttctctg

SEQ ID NO: 2143194 - DNA, 25 bp, Homo sapien
gtgcaagctgccaaagctccagaga

SEQ ID NO: 2143195 - DNA, 25 bp, Homo sapien
aggaagaatggcctcaagaagcccc

SEQ ID NO: 2143196 - DNA, 25 bp, Homo sapien
cacaggaagaatggcctcaagaagc

SEQ ID NO: 2143197 - DNA, 25 bp, Homo sapien
agaggggtgcaagctgccaaagctc

SEQ ID NO: 2143198 - DNA, 25 bp, Homo sapien
tgttagtcacctcatcattctgggc

SEQ ID NO: 2143199 - DNA, 25 bp, Homo sapien
cagggtcctaatccaaagagatggc

SEQ ID NO: 2143200 - DNA, 25 bp, Homo sapien
tagtatcaagtgaaaaggcctgcct

SEQ ID NO: 2143201 - DNA, 25 bp, Homo sapien
tcaaggaggcatgattcaggctagc

SEQ ID NO: 2143202 - DNA, 25 bp, Homo sapien
ctgccacaagatgcaaggactcagc

SEQ ID NO: 2143203 - DNA, 25 bp, Homo sapien
tgccacaagatgcaaggactcagct

SEQ ID NO: 2143204 - DNA, 25 bp, Homo sapien
ccacaagatgcaaggactcagctgc

SEQ ID NO: 2143205 - DNA, 25 bp, Homo sapien
gccacaagatgcaaggactcagctg

SEQ ID NO: 2143206 - DNA, 25 bp, Homo sapien
gctcctacagactcagtgctgggca

SEQ ID NO: 2143207 - DNA, 25 bp, Homo sapien
cactgcccatgagaagggtccgggc

SEQ ID NO: 2143208 - DNA, 25 bp, Homo sapien
ctggcttcagctcctacagactcag

SEQ ID NO: 2143209 - DNA, 25 bp, Homo sapien
ccaccgctgcaggacttcagcacag

SEQ ID NO: 2143210 - DNA, 25 bp, Homo sapien
tttaagctaagtctgacaggcccag

SEQ ID NO: 2143211 - DNA, 25 bp, Homo sapien
gcttgacatctgcaacggacttggc

SEQ ID NO: 2143212 - DNA, 25 bp, Homo sapien
tagctcacgaggtctaggcagagtc

SEQ ID NO: 2143213 - DNA, 25 bp, Homo sapien
aatagatgatcggagagacaggcca

SEQ ID NO: 2143214 - DNA, 25 bp, Homo sapien
tgtgcttccactgtggcgtttggga

SEQ ID NO: 2143215 - DNA, 25 bp, Homo sapien
tcgtaagtaaactgtgcttccactg

SEQ ID NO: 2143216 - DNA, 25 bp, Homo sapien
tgttcttagggctttgtcgtaagta

SEQ ID NO: 2143217 - DNA, 25 bp, Homo sapien
gggctttgtcgtaagtaaactgtgc

SEQ ID NO: 2143218 - DNA, 25 bp, Homo sapien
gaggtgcctgaatgttgcttttcaa

SEQ ID NO: 2143219 - DNA, 25 bp, Homo sapien
tcatcctaggtccttgctctattcc

SEQ ID NO: 2143220 - DNA, 25 bp, Homo sapien
gcatcatggctcatcatcctaggtc

SEQ ID NO: 2143221 - DNA, 25 bp, Homo sapien
tagagatttttgcataccacagagg

SEQ ID NO: 2143222 - DNA, 25 bp, Homo sapien
atgtacttatatttgcaaaccgatg

SEQ ID NO: 2143223 - DNA, 25 bp, Homo sapien
tgtacttatatttgcaaaccgatgc

SEQ ID NO: 2143224 - DNA, 25 bp, Homo sapien
tatttgcaaaccgatgcattattac

SEQ ID NO: 2143225 - DNA, 25 bp, Homo sapien
aaccgatgcattattacaggtttca

SEQ ID NO: 2143226 - DNA, 25 bp, Homo sapien
caattcttagatggcctcgttttgg

SEQ ID NO: 2143227 - DNA, 25 bp, Homo sapien
tggagcactcaccaagggaactctg

SEQ ID NO: 2143228 - DNA, 25 bp, Homo sapien
caacaagtttcgttggccagttgta

SEQ ID NO: 2143229 - DNA, 25 bp, Homo sapien
tactgacaacactccaacaagtttc

SEQ ID NO: 2143230 - DNA, 25 bp, Homo sapien
tagctagctgtaagatccagtctgg

SEQ ID NO: 2143231 - DNA, 25 bp, Homo sapien
gagaaaccatcccatagatctggca

SEQ ID NO: 2143232 - DNA, 25 bp, Homo sapien
cctcagagtttggaattgacacagg

SEQ ID NO: 2143233 - DNA, 25 bp, Homo sapien
aatgttccatattctcccaagcagg

SEQ ID NO: 2143234 - DNA, 25 bp, Homo sapien
tttcagttacaactaatttcacagc

SEQ ID NO: 2143235 - DNA, 25 bp, Homo sapien
ggttgttactattcatcctcagtgg

SEQ ID NO: 2143236 - DNA, 25 bp, Homo sapien
gaagatagagcgaagcctggctttc

SEQ ID NO: 2143237 - DNA, 25 bp, Homo sapien
tattcttctcttcaggggccatggg

SEQ ID NO: 2143238 - DNA, 25 bp, Homo sapien
tgagtgctgaagaatcccggttgtt

SEQ ID NO: 2143239 - DNA, 25 bp, Homo sapien
tgaaaatgaaagaataaactagccc

SEQ ID NO: 2143240 - DNA, 25 bp, Homo sapien
aatgaaagaataaactagcccattt

SEQ ID NO: 2143241 - DNA, 25 bp, Homo sapien
aaaatgaaagaataaactagcccat

SEQ ID NO: 2143242 - DNA, 25 bp, Homo sapien
gtgaaaatgaaagaataaactagcc

SEQ ID NO: 2143243 - DNA, 25 bp, Homo sapien
gacaaaatgcaacctctgaagacgt

SEQ ID NO: 2143244 - DNA, 25 bp, Homo sapien
cagtcaatcctcaagaaacaactac

SEQ ID NO: 2143245 - DNA, 25 bp, Homo sapien
ggccctgaacagtcaatcctcaaga

SEQ ID NO: 2143246 - DNA, 25 bp, Homo sapien
aagacgtagatgtaaagggccggca

SEQ ID NO: 2143247 - DNA, 25 bp, Homo sapien
gagacaatattgtggcaacgtggac

SEQ ID NO: 2143248 - DNA, 25 bp, Homo sapien
gattacccttggcttaacactatga

SEQ ID NO: 2143249 - DNA, 25 bp, Homo sapien
gagatttcatatccctgcacgtcac

SEQ ID NO: 2143250 - DNA, 25 bp, Homo sapien
gacagtactgttgctatgattaccc

SEQ ID NO: 2143251 - DNA, 25 bp, Homo sapien
cagtactggccatactaatagtttc

SEQ ID NO: 2143252 - DNA, 25 bp, Homo sapien
ggccatactaatagtttcagctttc

SEQ ID NO: 2143253 - DNA, 25 bp, Homo sapien
caggtgtacaagtggcagtactggc

SEQ ID NO: 2143254 - DNA, 25 bp, Homo sapien
gtgtacaagtggcagtactggccat

SEQ ID NO: 2143255 - DNA, 25 bp, Homo sapien
tctcttgcatggaatgtggttcatt

SEQ ID NO: 2143256 - DNA, 25 bp, Homo sapien
atttcagtgtctaaagacatgtctc

SEQ ID NO: 2143257 - DNA, 25 bp, Homo sapien
tgtctaaagacatgtctctgaaaat

SEQ ID NO: 2143258 - DNA, 25 bp, Homo sapien
cagtttatcttcaatccagagattt

SEQ ID NO: 2143259 - DNA, 25 bp, Homo sapien
tcaagcaagtgaatttaagtggccc

SEQ ID NO: 2143260 - DNA, 25 bp, Homo sapien
gcatgcttcagtagacacagacgtc

SEQ ID NO: 2143261 - DNA, 25 bp, Homo sapien
tattggcaaatgtacctgaagcacc

SEQ ID NO: 2143262 - DNA, 25 bp, Homo sapien
catcagtgggcgcttgctcttcaga

SEQ ID NO: 2143263 - DNA, 25 bp, Homo sapien
aattagatgaaagttagtaatatgc

SEQ ID NO: 2143264 - DNA, 25 bp, Homo sapien
gaccaaaacatttgattgacaagac

SEQ ID NO: 2143265 - DNA, 25 bp, Homo sapien
ttattgtgcattaattagatgaaag

SEQ ID NO: 2143266 - DNA, 25 bp, Homo sapien
ttagtaatatgcattgaccaaaaca

SEQ ID NO: 2143267 - DNA, 25 bp, Homo sapien
gggctaccatatttgtgcccagttt

SEQ ID NO: 2143268 - DNA, 25 bp, Homo sapien
aagcacagaccctggtagataggga

SEQ ID NO: 2143269 - DNA, 25 bp, Homo sapien
tgactgtctgttggttttacggggc

SEQ ID NO: 2143270 - DNA, 25 bp, Homo sapien
cacagaccctggtagatagggagag

SEQ ID NO: 2143271 - DNA, 25 bp, Homo sapien
tctccctctaggcaacacatactgg

SEQ ID NO: 2143272 - DNA, 25 bp, Homo sapien
tgcaaacagctagcaccttcagtgg

SEQ ID NO: 2143273 - DNA, 25 bp, Homo sapien
cacaagcccaattcacaggtcagat

SEQ ID NO: 2143274 - DNA, 25 bp, Homo sapien
ttctgcaagagtgaccacaagccca

SEQ ID NO: 2143275 - DNA, 25 bp, Homo sapien
taaactgggccatcttaaacattca

SEQ ID NO: 2143276 - DNA, 25 bp, Homo sapien
catatagttgggaaggcccatggtg

SEQ ID NO: 2143277 - DNA, 25 bp, Homo sapien
gctaggtcttcagtggctatggaaa

SEQ ID NO: 2143278 - DNA, 25 bp, Homo sapien
cagggtgactatgtttagacctagc

SEQ ID NO: 2143279 - DNA, 25 bp, Homo sapien
tctggatcatgaatgaatctaaggg

SEQ ID NO: 2143280 - DNA, 25 bp, Homo sapien
tattagcaaattaggccctcaggag

SEQ ID NO: 2143281 - DNA, 25 bp, Homo sapien
taaacttagcatcttgggcgaatac

SEQ ID NO: 2143282 - DNA, 25 bp, Homo sapien
caactgacagtacacgctgaataag

SEQ ID NO: 2143283 - DNA, 25 bp, Homo sapien
tctttcatgatgtcccacccatgct

SEQ ID NO: 2143284 - DNA, 25 bp, Homo sapien
ccttgacaatgtggcctggcattcc

SEQ ID NO: 2143285 - DNA, 25 bp, Homo sapien
gctggccatggctagctacttctct

SEQ ID NO: 2143286 - DNA, 25 bp, Homo sapien
acccatgctggccatggctagctac

SEQ ID NO: 2143287 - DNA, 25 bp, Homo sapien
tcaacttcagaattgccagggcggt

SEQ ID NO: 2143288 - DNA, 25 bp, Homo sapien
catgaaccaggtttacccagttaag

SEQ ID NO: 2143289 - DNA, 25 bp, Homo sapien
aatacagggcaagtcagcatgaacc

SEQ ID NO: 2143290 - DNA, 25 bp, Homo sapien
cattctggttcaaatagatgttgcc

SEQ ID NO: 2143291 - DNA, 25 bp, Homo sapien
gaattccccggtgactgcatcaaac

SEQ ID NO: 2143292 - DNA, 25 bp, Homo sapien
ctcaaagtctgaaggaagagagatc

SEQ ID NO: 2143293 - DNA, 25 bp, Homo sapien
aaccccacatgaatcgtatgctcaa

SEQ ID NO: 2143294 - DNA, 25 bp, Homo sapien
gaagagagatctctgggcgctcttt

SEQ ID NO: 2143295 - DNA, 25 bp, Homo sapien
tgaggacttataatcattgaatacc

SEQ ID NO: 2143296 - DNA, 25 bp, Homo sapien
cctcccaacctacttttagcttcag

SEQ ID NO: 2143297 - DNA, 25 bp, Homo sapien
aatggcaatataaaggatgaggact

SEQ ID NO: 2143298 - DNA, 25 bp, Homo sapien
gggtccaagtgtatgaccaggtata

SEQ ID NO: 2143299 - DNA, 25 bp, Homo sapien
gaagcgaccgtcacaggtctagagg

SEQ ID NO: 2143300 - DNA, 25 bp, Homo sapien
gattgacttgaagcgaccgtcacag

SEQ ID NO: 2143301 - DNA, 25 bp, Homo sapien
tccctctgattgacttgaagcgacc

SEQ ID NO: 2143302 - DNA, 25 bp, Homo sapien
ttttccctctgattgacttgaagcg

SEQ ID NO: 2143303 - DNA, 25 bp, Homo sapien
ggcacatctgtgagccatagagatc

SEQ ID NO: 2143304 - DNA, 25 bp, Homo sapien
acatctgtgagccatagagatctgg

SEQ ID NO: 2143305 - DNA, 25 bp, Homo sapien
tgggcacatctgtgagccatagaga

SEQ ID NO: 2143306 - DNA, 25 bp, Homo sapien
gggagcttccctgggcacatctgtg

SEQ ID NO: 2143307 - DNA, 25 bp, Homo sapien
tggagtaatcgtgcccattgctctg

SEQ ID NO: 2143308 - DNA, 25 bp, Homo sapien
tatgttggaagtttggagtaatcgt

SEQ ID NO: 2143309 - DNA, 25 bp, Homo sapien
gaatttgagaacatctagaacagct

SEQ ID NO: 2143310 - DNA, 25 bp, Homo sapien
tagaacagcttgtgggttcttcttc

SEQ ID NO: 2143311 - DNA, 25 bp, Homo sapien
aaggatgggctgctatgtatccatg

SEQ ID NO: 2143312 - DNA, 25 bp, Homo sapien
gaaggatgggctgctatgtatccat

SEQ ID NO: 2143313 - DNA, 25 bp, Homo sapien
cgaaggatgggctgctatgtatcca

SEQ ID NO: 2143314 - DNA, 25 bp, Homo sapien
tgaactgtttacctgaaaataggtg

SEQ ID NO: 2143315 - DNA, 25 bp, Homo sapien
ttggaaacaccaatcatgtgaaaca

SEQ ID NO: 2143316 - DNA, 25 bp, Homo sapien
tatatctaaaaactggatctgtgca

SEQ ID NO: 2143317 - DNA, 25 bp, Homo sapien
caattgtggtgatggtagcataggt

SEQ ID NO: 2143318 - DNA, 25 bp, Homo sapien
tactgttgaggatattgttgtataa

SEQ ID NO: 2143319 - DNA, 25 bp, Homo sapien
ctgttgaggatattgttgtataatc

SEQ ID NO: 2143320 - DNA, 25 bp, Homo sapien
gttgaggatattgttgtataatcat

SEQ ID NO: 2143321 - DNA, 25 bp, Homo sapien
tgttgaggatattgttgtataatca

SEQ ID NO: 2143322 - DNA, 25 bp, Homo sapien
tattttagccataacatagacttca

SEQ ID NO: 2143323 - DNA, 25 bp, Homo sapien
taccagcctgatatccaaacttcct

SEQ ID NO: 2143324 - DNA, 25 bp, Homo sapien
acttcctagagcttataaggaggca

SEQ ID NO: 2143325 - DNA, 25 bp, Homo sapien
cagccactatccatactgtattgta

SEQ ID NO: 2143326 - DNA, 25 bp, Homo sapien
tggtctatctccccggaaaggtaca

SEQ ID NO: 2143327 - DNA, 25 bp, Homo sapien
caacagttcatagatctgaagccca

SEQ ID NO: 2143328 - DNA, 25 bp, Homo sapien
ctgagttgggtcccggactcttagg

SEQ ID NO: 2143329 - DNA, 25 bp, Homo sapien
ggtagacacatgctcttatgtataa

SEQ ID NO: 2143330 - DNA, 25 bp, Homo sapien
tgcgataactggtggtggctcattt

SEQ ID NO: 2143331 - DNA, 25 bp, Homo sapien
gattttgtatgctctggtcttggtg

SEQ ID NO: 2143332 - DNA, 25 bp, Homo sapien
tctggtcttggtgcgataactggtg

SEQ ID NO: 2143333 - DNA, 25 bp, Homo sapien
tatgctctggtcttggtgcgataac

SEQ ID NO: 2143334 - DNA, 25 bp, Homo sapien
ttttctttgccgatctgtgttcctg

SEQ ID NO: 2143335 - DNA, 25 bp, Homo sapien
tctgtgttcctgtacaaagtactgg

SEQ ID NO: 2143336 - DNA, 25 bp, Homo sapien
tggtactgctggtgaagcaatggat

SEQ ID NO: 2143337 - DNA, 25 bp, Homo sapien
gcaatggattcaaccacagaacgag

SEQ ID NO: 2143338 - DNA, 25 bp, Homo sapien
tttctttgggtccccaacactcaca

SEQ ID NO: 2143339 - DNA, 25 bp, Homo sapien
tgggtccccaacactcacaatgctt

SEQ ID NO: 2143340 - DNA, 25 bp, Homo sapien
tttgggtccccaacactcacaatgc

SEQ ID NO: 2143341 - DNA, 25 bp, Homo sapien
tctttgggtccccaacactcacaat

SEQ ID NO: 2143342 - DNA, 25 bp, Homo sapien
gaatcacttctataagcacactaga

SEQ ID NO: 2143343 - DNA, 25 bp, Homo sapien
tagacaccactcttgcccatagttt

SEQ ID NO: 2143344 - DNA, 25 bp, Homo sapien
gtgggtggtcctacccaaagaatca

SEQ ID NO: 2143345 - DNA, 25 bp, Homo sapien
tgtgtggcccaaaatagatccgatg

SEQ ID NO: 2143346 - DNA, 25 bp, Homo sapien
gtgtgtgccattggattcaagaggc

SEQ ID NO: 2143347 - DNA, 25 bp, Homo sapien
ggaaaggccagataactctcggcta

SEQ ID NO: 2143348 - DNA, 25 bp, Homo sapien
aaggccagataactctcggctactc

SEQ ID NO: 2143349 - DNA, 25 bp, Homo sapien
gaaaggccagataactctcggctac

SEQ ID NO: 2143350 - DNA, 25 bp, Homo sapien
ggccagataactctcggctactcac

SEQ ID NO: 2143351 - DNA, 25 bp, Homo sapien
cactttgctcttggaataagcgaac

SEQ ID NO: 2143352 - DNA, 25 bp, Homo sapien
caataggtgccacctaaaccgggat

SEQ ID NO: 2143353 - DNA, 25 bp, Homo sapien
tctaaatatcgattggaactgggct

SEQ ID NO: 2143354 - DNA, 25 bp, Homo sapien
taggcttgaggcttatatcagacaa

SEQ ID NO: 2143355 - DNA, 25 bp, Homo sapien
tctcagggagtaaactcggtgtgta

SEQ ID NO: 2143356 - DNA, 25 bp, Homo sapien
cagggagtaaactcggtgtgtagta

SEQ ID NO: 2143357 - DNA, 25 bp, Homo sapien
ctggctctcagggagtaaactcggt

SEQ ID NO: 2143358 - DNA, 25 bp, Homo sapien
gctctcagggagtaaactcggtgtg

SEQ ID NO: 2143359 - DNA, 25 bp, Homo sapien
gaaggtgaaaattatcaaaagaata

SEQ ID NO: 2143360 - DNA, 25 bp, Homo sapien
tgctgtataaacagtacctgatgcc

SEQ ID NO: 2143361 - DNA, 25 bp, Homo sapien
cctgttgcaatgtctagtgctgtat

SEQ ID NO: 2143362 - DNA, 25 bp, Homo sapien
tgtctagtgctgtataaacagtacc

SEQ ID NO: 2143363 - DNA, 25 bp, Homo sapien
tcttgtcctgttgcaatgtctagtg

SEQ ID NO: 2143364 - DNA, 25 bp, Homo sapien
tatgtcaacccagtgctacccattt

SEQ ID NO: 2143365 - DNA, 25 bp, Homo sapien
ttttttaggcgaagttgccatcgaa

SEQ ID NO: 2143366 - DNA, 25 bp, Homo sapien
tgccatcgaagaagataactgttaa

SEQ ID NO: 2143367 - DNA, 25 bp, Homo sapien
atcaggattgaacgttagcacttac

SEQ ID NO: 2143368 - DNA, 25 bp, Homo sapien
gctgttgaaggttcatctgctttat

SEQ ID NO: 2143369 - DNA, 25 bp, Homo sapien
tgctgttgaaggttcatctgcttta

SEQ ID NO: 2143370 - DNA, 25 bp, Homo sapien
tgggttgctgttgaaggttcatctg

SEQ ID NO: 2143371 - DNA, 25 bp, Homo sapien
gggttgctgttgaaggttcatctgc

SEQ ID NO: 2143372 - DNA, 25 bp, Homo sapien
atgactacccatagttcatcaccca

SEQ ID NO: 2143373 - DNA, 25 bp, Homo sapien
agccaagtattccatgactacccat

SEQ ID NO: 2143374 - DNA, 25 bp, Homo sapien
gtgaccacatcagtcagagagccac

SEQ ID NO: 2143375 - DNA, 25 bp, Homo sapien
ccatagttcatcacccaccaagtag

SEQ ID NO: 2143376 - DNA, 25 bp, Homo sapien
tggaaaagagacagaccgtcaggcc

SEQ ID NO: 2143377 - DNA, 25 bp, Homo sapien
taagggaagttcagattgtactgtg

SEQ ID NO: 2143378 - DNA, 25 bp, Homo sapien
ggctgtaagggaagttcagattgta

SEQ ID NO: 2143379 - DNA, 25 bp, Homo sapien
gaagttcagattgtactgtgaaagc

SEQ ID NO: 2143380 - DNA, 25 bp, Homo sapien
gtttgagtgcaggaaatccaaagct

SEQ ID NO: 2143381 - DNA, 25 bp, Homo sapien
gcaggaaatccaaagcttgcaggca

SEQ ID NO: 2143382 - DNA, 25 bp, Homo sapien
tccatcccgagaagaatattgtcac

SEQ ID NO: 2143383 - DNA, 25 bp, Homo sapien
tctatggatcacctggtttgagtgc

SEQ ID NO: 2143384 - DNA, 25 bp, Homo sapien
ttccctgatactctaataccacctg

SEQ ID NO: 2143385 - DNA, 25 bp, Homo sapien
gaaagaacagaaattccctgatact

SEQ ID NO: 2143386 - DNA, 25 bp, Homo sapien
cagaaattccctgatactctaatac

SEQ ID NO: 2143387 - DNA, 25 bp, Homo sapien
tgatactctaataccacctgaacca

SEQ ID NO: 2143388 - DNA, 25 bp, Homo sapien
ttttcgagtcaccacctcaggtgcc

SEQ ID NO: 2143389 - DNA, 25 bp, Homo sapien
gagaccagatatcaactttcggacc

SEQ ID NO: 2143390 - DNA, 25 bp, Homo sapien
ggttcccaccatagtgcttcgttta

SEQ ID NO: 2143391 - DNA, 25 bp, Homo sapien
caattgccataattccaagagacca

SEQ ID NO: 2143392 - DNA, 25 bp, Homo sapien
ctttagaattaactttgatctggag

SEQ ID NO: 2143393 - DNA, 25 bp, Homo sapien
ttaactttgatctggagggacttaa

SEQ ID NO: 2143394 - DNA, 25 bp, Homo sapien
agaattaactttgatctggagggac

SEQ ID NO: 2143395 - DNA, 25 bp, Homo sapien
aattaactttgatctggagggactt

SEQ ID NO: 2143396 - DNA, 25 bp, Homo sapien
catttcagtgcgcaaatgccgatca

SEQ ID NO: 2143397 - DNA, 25 bp, Homo sapien
tgcgcaaatgccgatcatcacactc

SEQ ID NO: 2143398 - DNA, 25 bp, Homo sapien
aaaacacgtgcatgggcatttcagt

SEQ ID NO: 2143399 - DNA, 25 bp, Homo sapien
tgggcatttcagtgcgcaaatgccg

SEQ ID NO: 2143400 - DNA, 25 bp, Homo sapien
gccaacatacaagtcagtgacaaat

SEQ ID NO: 2143401 - DNA, 25 bp, Homo sapien
tacaagtcagtgacaaatccagttt

SEQ ID NO: 2143402 - DNA, 25 bp, Homo sapien
aagtcagtgacaaatccagttttga

SEQ ID NO: 2143403 - DNA, 25 bp, Homo sapien
ccaacatacaagtcagtgacaaatc

SEQ ID NO: 2143404 - DNA, 25 bp, Homo sapien
caggtggcagctattaggacctcca

SEQ ID NO: 2143405 - DNA, 25 bp, Homo sapien
tgcaggtggcagctattaggacctc

SEQ ID NO: 2143406 - DNA, 25 bp, Homo sapien
gcaggtggcagctattaggacctcc

SEQ ID NO: 2143407 - DNA, 25 bp, Homo sapien
taagagccacagaattccataggag

SEQ ID NO: 2143408 - DNA, 25 bp, Homo sapien
gaatctctgcgtcgtatgtacacca

SEQ ID NO: 2143409 - DNA, 25 bp, Homo sapien
gagccaccccaagagtttcagtaaa

SEQ ID NO: 2143410 - DNA, 25 bp, Homo sapien
tctgggaacagaacctaggtgccaa

SEQ ID NO: 2143411 - DNA, 25 bp, Homo sapien
aaatccattcagcacatacatatta

SEQ ID NO: 2143412 - DNA, 25 bp, Homo sapien
gaaaaatccattcagcacatacata

SEQ ID NO: 2143413 - DNA, 25 bp, Homo sapien
aatagaaaaatccattcagcacata

SEQ ID NO: 2143414 - DNA, 25 bp, Homo sapien
atagaaaaatccattcagcacatac

SEQ ID NO: 2143415 - DNA, 25 bp, Homo sapien
tttaaaaagtcacggaatacagctg

SEQ ID NO: 2143416 - DNA, 25 bp, Homo sapien
ctctggagttccattagtggctatc

SEQ ID NO: 2143417 - DNA, 25 bp, Homo sapien
ttggcagatcctcgcctatccacat

SEQ ID NO: 2143418 - DNA, 25 bp, Homo sapien
catccatctcaagacagcgatttaa

SEQ ID NO: 2143419 - DNA, 25 bp, Homo sapien
tggtaatagcctaactctagacatc

SEQ ID NO: 2143420 - DNA, 25 bp, Homo sapien
gaaaggcaacacgtcaatcaatcat

SEQ ID NO: 2143421 - DNA, 25 bp, Homo sapien
tctagacatctcttgacagagctct

SEQ ID NO: 2143422 - DNA, 25 bp, Homo sapien
tagatgcgtgcctatagttatgtgc

SEQ ID NO: 2143423 - DNA, 25 bp, Homo sapien
tattccaggtatgatctgagttagg

SEQ ID NO: 2143424 - DNA, 25 bp, Homo sapien
tccaggtatgatctgagttagggtg

SEQ ID NO: 2143425 - DNA, 25 bp, Homo sapien
atctgagttagggtgggatagtttt

SEQ ID NO: 2143426 - DNA, 25 bp, Homo sapien
ttattccaggtatgatctgagttag

SEQ ID NO: 2143427 - DNA, 25 bp, Homo sapien
tactaactgctaaacccaacggctg

SEQ ID NO: 2143428 - DNA, 25 bp, Homo sapien
caagcagcccttttgaattaagata

SEQ ID NO: 2143429 - DNA, 25 bp, Homo sapien
tctggaagctgactagcagagtgag

SEQ ID NO: 2143430 - DNA, 25 bp, Homo sapien
tatttatctagagaagctgtcatgc

SEQ ID NO: 2143431 - DNA, 25 bp, Homo sapien
ttgcttcctttgcagcgataatcag

SEQ ID NO: 2143432 - DNA, 25 bp, Homo sapien
tttgcagcgataatcagaggagtca

SEQ ID NO: 2143433 - DNA, 25 bp, Homo sapien
cctttgcagcgataatcagaggagt

SEQ ID NO: 2143434 - DNA, 25 bp, Homo sapien
cagcgataatcagaggagtcaggct

SEQ ID NO: 2143435 - DNA, 25 bp, Homo sapien
tcactactggctctttcgcttcacg

SEQ ID NO: 2143436 - DNA, 25 bp, Homo sapien
gaatgcaagagggactactctctaa

SEQ ID NO: 2143437 - DNA, 25 bp, Homo sapien
tcgcttcacggtggaagtgaccact

SEQ ID NO: 2143438 - DNA, 25 bp, Homo sapien
gtttgggctgcgattcaggcttaca

SEQ ID NO: 2143439 - DNA, 25 bp, Homo sapien
gattgggatgtagccttcactgacc

SEQ ID NO: 2143440 - DNA, 25 bp, Homo sapien
ctctattagggcatggacttccaca

SEQ ID NO: 2143441 - DNA, 25 bp, Homo sapien
gttttggctctcagagaaagtccca

SEQ ID NO: 2143442 - DNA, 25 bp, Homo sapien
tcacctagcaggatgtcacagtttc

SEQ ID NO: 2143443 - DNA, 25 bp, Homo sapien
ttgtaccaaatgtgaatccttcagc

SEQ ID NO: 2143444 - DNA, 25 bp, Homo sapien
gaagtacctggctcctcattgttaa

SEQ ID NO: 2143445 - DNA, 25 bp, Homo sapien
tatacataactctccaatacaggga

SEQ ID NO: 2143446 - DNA, 25 bp, Homo sapien
ggcgttcaagttactcgattgtacc

SEQ ID NO: 2143447 - DNA, 25 bp, Homo sapien
caatgacacacacacgagatcagca

SEQ ID NO: 2143448 - DNA, 25 bp, Homo sapien
tcttacatggcttggccatccagta

SEQ ID NO: 2143449 - DNA, 25 bp, Homo sapien
gaacgaagtcattacccaacatggt

SEQ ID NO: 2143450 - DNA, 25 bp, Homo sapien
tagcaatggaatgtgcttcaccggg

SEQ ID NO: 2143451 - DNA, 25 bp, Homo sapien
tagtctcctaagaaagcgtgtgcca

SEQ ID NO: 2143452 - DNA, 25 bp, Homo sapien
cgctctggccagaaggcatctgctt

SEQ ID NO: 2143453 - DNA, 25 bp, Homo sapien
ccgaatgccataccaaagcagaggg

SEQ ID NO: 2143454 - DNA, 25 bp, Homo sapien
cctgttggacaagaaaatggtggga

SEQ ID NO: 2143455 - DNA, 25 bp, Homo sapien
gatatctcagttcccgcatttgcag

SEQ ID NO: 2143456 - DNA, 25 bp, Homo sapien
tgatggcagcttctaaaggagactc

SEQ ID NO: 2143457 - DNA, 25 bp, Homo sapien
aaggagactccgatggcactaagca

SEQ ID NO: 2143458 - DNA, 25 bp, Homo sapien
tagaatactcgtacacacaggtgtg

SEQ ID NO: 2143459 - DNA, 25 bp, Homo sapien
gaaggctgccacaagttttatcaac

SEQ ID NO: 2143460 - DNA, 25 bp, Homo sapien
tactggccacagcttaatgaaaacc

SEQ ID NO: 2143461 - DNA, 25 bp, Homo sapien
gaaatgctatctttggttcccaaca

SEQ ID NO: 2143462 - DNA, 25 bp, Homo sapien
gtatttgcgggtccataaagcacac

SEQ ID NO: 2143463 - DNA, 25 bp, Homo sapien
taggcagaatgcctcaaagttgagt

SEQ ID NO: 2143464 - DNA, 25 bp, Homo sapien
taaattctaggcagaatgcctcaaa

SEQ ID NO: 2143465 - DNA, 25 bp, Homo sapien
ttctaggcagaatgcctcaaagttg

SEQ ID NO: 2143466 - DNA, 25 bp, Homo sapien
ggcaataaattctaggcagaatgcc

SEQ ID NO: 2143467 - DNA, 25 bp, Homo sapien
ttaaatgatgaacccgccgatgtaa

SEQ ID NO: 2143468 - DNA, 25 bp, Homo sapien
ccgccgatgtaaagagttcagattc

SEQ ID NO: 2143469 - DNA, 25 bp, Homo sapien
aacccgccgatgtaaagagttcaga

SEQ ID NO: 2143470 - DNA, 25 bp, Homo sapien
gatgaacccgccgatgtaaagagtt

SEQ ID NO: 2143471 - DNA, 25 bp, Homo sapien
ttctgacagcttgcaattcaaaaac

SEQ ID NO: 2143472 - DNA, 25 bp, Homo sapien
gacagcttgcaattcaaaaacaaaa

SEQ ID NO: 2143473 - DNA, 25 bp, Homo sapien
tcaaaaacaaaacttctaagtgcat

SEQ ID NO: 2143474 - DNA, 25 bp, Homo sapien
tctgacagcttgcaattcaaaaaca

SEQ ID NO: 2143475 - DNA, 25 bp, Homo sapien
gcacatctggtagaggcactttcca

SEQ ID NO: 2143476 - DNA, 25 bp, Homo sapien
tcaggttaagaaagccagaatcttt

SEQ ID NO: 2143477 - DNA, 25 bp, Homo sapien
tcctgaagttgctgcgaggcacctc

SEQ ID NO: 2143478 - DNA, 25 bp, Homo sapien
tgtgagcagagcttggtacagccca

SEQ ID NO: 2143479 - DNA, 25 bp, Homo sapien
tgcatgtcctctctctagtaatgtg

SEQ ID NO: 2143480 - DNA, 25 bp, Homo sapien
aactttgccaacacttcaccatttt

SEQ ID NO: 2143481 - DNA, 25 bp, Homo sapien
agggccatgtctgcagcctagccca

SEQ ID NO: 2143482 - DNA, 25 bp, Homo sapien
catgtctgcagcctagcccatatta

SEQ ID NO: 2143483 - DNA, 25 bp, Homo sapien
cctcatcactatcacagatctgcct

SEQ ID NO: 2143484 - DNA, 25 bp, Homo sapien
tcatcactatcacagatctgcctac

SEQ ID NO: 2143485 - DNA, 25 bp, Homo sapien
ctcatcactatcacagatctgccta

SEQ ID NO: 2143486 - DNA, 25 bp, Homo sapien
caccctctcttgctctatatctggt

SEQ ID NO: 2143487 - DNA, 25 bp, Homo sapien
tgcctctgggttccaccctctcttg

SEQ ID NO: 2143488 - DNA, 25 bp, Homo sapien
ctcctttttgtcaatgggcaccaga

SEQ ID NO: 2143489 - DNA, 25 bp, Homo sapien
gggcaccagagttttccagcatgcc

SEQ ID NO: 2143490 - DNA, 25 bp, Homo sapien
cagtcttggaagtatttgtggatgc

SEQ ID NO: 2143491 - DNA, 25 bp, Homo sapien
ttgtggatgccccattccagagact

SEQ ID NO: 2143492 - DNA, 25 bp, Homo sapien
ccattccagagactgtccatgctct

SEQ ID NO: 2143493 - DNA, 25 bp, Homo sapien
gactgtccatgctcttttggatggg

SEQ ID NO: 2143494 - DNA, 25 bp, Homo sapien
gaatgaaacagttgtctgtgactga

SEQ ID NO: 2143495 - DNA, 25 bp, Homo sapien
tctgtgactgatttaaactgtggtt

SEQ ID NO: 2143496 - DNA, 25 bp, Homo sapien
ggtttttgacaactgtgccctggat

SEQ ID NO: 2143497 - DNA, 25 bp, Homo sapien
tttagtgttcaagggagctgtgaac

SEQ ID NO: 2143498 - DNA, 25 bp, Homo sapien
atacataagtccacacgcactagtc

SEQ ID NO: 2143499 - DNA, 25 bp, Homo sapien
gcatacataagtccacacgcactag

SEQ ID NO: 2143500 - DNA, 25 bp, Homo sapien
ttgcatacataagtccacacgcact

SEQ ID NO: 2143501 - DNA, 25 bp, Homo sapien
catacataagtccacacgcactagt

SEQ ID NO: 2143502 - DNA, 25 bp, Homo sapien
tgtccactcgtgaatggtgctttgt

SEQ ID NO: 2143503 - DNA, 25 bp, Homo sapien
gctttgtaagccagttaatgtataa

SEQ ID NO: 2143504 - DNA, 25 bp, Homo sapien
aaaaaacctgtccactcgtgaatgg

SEQ ID NO: 2143505 - DNA, 25 bp, Homo sapien
gaatggtgctttgtaagccagttaa

SEQ ID NO: 2143506 - DNA, 25 bp, Homo sapien
gattttaggcaagcctgtgcttcct

SEQ ID NO: 2143507 - DNA, 25 bp, Homo sapien
ctgtgagttataaggagttctgtgc

SEQ ID NO: 2143508 - DNA, 25 bp, Homo sapien
gttctgtgcttgtctggcaatagca

SEQ ID NO: 2143509 - DNA, 25 bp, Homo sapien
tctggcaatagcatagctttgtgga

SEQ ID NO: 2143510 - DNA, 25 bp, Homo sapien
gttctcagtttatattctatgttat

SEQ ID NO: 2143511 - DNA, 25 bp, Homo sapien
ttctcagtttatattctatgttatc

SEQ ID NO: 2143512 - DNA, 25 bp, Homo sapien
tctcagtttatattctatgttatca

SEQ ID NO: 2143513 - DNA, 25 bp, Homo sapien
tggctttttgccgctctacctcttg

SEQ ID NO: 2143514 - DNA, 25 bp, Homo sapien
gcatcttggagccacatgctgctgc

SEQ ID NO: 2143515 - DNA, 25 bp, Homo sapien
gatctcagtgggaaatccacccagc

SEQ ID NO: 2143516 - DNA, 25 bp, Homo sapien
tcccatccacatgggttgcagatgt

SEQ ID NO: 2143517 - DNA, 25 bp, Homo sapien
tctcagggtcatgttgcatcttgga

SEQ ID NO: 2143518 - DNA, 25 bp, Homo sapien
gaaaggcacagcattcgaagccaag

SEQ ID NO: 2143519 - DNA, 25 bp, Homo sapien
tactgaatggcttgcagttgttcct

SEQ ID NO: 2143520 - DNA, 25 bp, Homo sapien
actaaatttaagtgaaggtcatgca

SEQ ID NO: 2143521 - DNA, 25 bp, Homo sapien
cactctaaatggaatgagcttgctg

SEQ ID NO: 2143522 - DNA, 25 bp, Homo sapien
gaaccttagcaccatcaagtctctg

SEQ ID NO: 2143523 - DNA, 25 bp, Homo sapien
catctgaacttctgtccaagtggac

SEQ ID NO: 2143524 - DNA, 25 bp, Homo sapien
caagtggacctgaaagatgtgagtc

SEQ ID NO: 2143525 - DNA, 25 bp, Homo sapien
gcaggcctgagcagatctcatctga

SEQ ID NO: 2143526 - DNA, 25 bp, Homo sapien
tggtaagcatgatttaccctagcac

SEQ ID NO: 2143527 - DNA, 25 bp, Homo sapien
accctagcaccttccattggtacct

SEQ ID NO: 2143528 - DNA, 25 bp, Homo sapien
taccttccctaaagtgtgaaggcag

SEQ ID NO: 2143529 - DNA, 25 bp, Homo sapien
ggacatttgttctgcacactcaagt

SEQ ID NO: 2143530 - DNA, 25 bp, Homo sapien
tcattttaccaaagaagtatttgct

SEQ ID NO: 2143531 - DNA, 25 bp, Homo sapien
tatttgctgaactctgtgtaaccag

SEQ ID NO: 2143532 - DNA, 25 bp, Homo sapien
ctgaactctgtgtaaccagtgttac

SEQ ID NO: 2143533 - DNA, 25 bp, Homo sapien
agtatttgctgaactctgtgtaacc

SEQ ID NO: 2143534 - DNA, 25 bp, Homo sapien
tcttccatctctacagttgatgtgc

SEQ ID NO: 2143535 - DNA, 25 bp, Homo sapien
ttccatctctacagttgatgtgcat

SEQ ID NO: 2143536 - DNA, 25 bp, Homo sapien
ctcttccatctctacagttgatgtg

SEQ ID NO: 2143537 - DNA, 25 bp, Homo sapien
caaccactacactgatgtctcttcc

SEQ ID NO: 2143538 - DNA, 25 bp, Homo sapien
ctgaagggcaccaactgagagggtt

SEQ ID NO: 2143539 - DNA, 25 bp, Homo sapien
caagcttggcaattgtgctgcgtag

SEQ ID NO: 2143540 - DNA, 25 bp, Homo sapien
ggttgacaggcagggcatagatact

SEQ ID NO: 2143541 - DNA, 25 bp, Homo sapien
tgaaccaagactgcaggaccaagct

SEQ ID NO: 2143542 - DNA, 25 bp, Homo sapien
tcagtcctgggcatgtactcaacag

SEQ ID NO: 2143543 - DNA, 25 bp, Homo sapien
gaatggagttctgtctcgtctctgt

SEQ ID NO: 2143544 - DNA, 25 bp, Homo sapien
taatggtgccaagggatcaagcagg

SEQ ID NO: 2143545 - DNA, 25 bp, Homo sapien
tctgagccaatttgtccccagggcc

SEQ ID NO: 2143546 - DNA, 25 bp, Homo sapien
gactggagtctcaggaagcctggga

SEQ ID NO: 2143547 - DNA, 25 bp, Homo sapien
agagaatgagcttatatccttttgc

SEQ ID NO: 2143548 - DNA, 25 bp, Homo sapien
gcctctgggattccacgacagctgc

SEQ ID NO: 2143549 - DNA, 25 bp, Homo sapien
tgcagagaatgagcttatatccttt

SEQ ID NO: 2143550 - DNA, 25 bp, Homo sapien
tacaaacctgatatgtagtaaggca

SEQ ID NO: 2143551 - DNA, 25 bp, Homo sapien
gaccatgaaaggcagcgtgtgaacc

SEQ ID NO: 2143552 - DNA, 25 bp, Homo sapien
gcttgcgtcttcatgctgagcatcc

SEQ ID NO: 2143553 - DNA, 25 bp, Homo sapien
gcatccagcaggtactgccagtcag

SEQ ID NO: 2143554 - DNA, 25 bp, Homo sapien
tcttccttggctccatttccttgtg

SEQ ID NO: 2143555 - DNA, 25 bp, Homo sapien
ttccttgtgtctgcagatctcaaat

SEQ ID NO: 2143556 - DNA, 25 bp, Homo sapien
ccttgtgtctgcagatctcaaataa

SEQ ID NO: 2143557 - DNA, 25 bp, Homo sapien
ttgtgtctgcagatctcaaataatc

SEQ ID NO: 2143558 - DNA, 25 bp, Homo sapien
tattaagtcgttcaacatttgcttc

SEQ ID NO: 2143559 - DNA, 25 bp, Homo sapien
gatcccaatgttattaagtcgttca

SEQ ID NO: 2143560 - DNA, 25 bp, Homo sapien
ccaggaaatgcttgaatatagtgaa

SEQ ID NO: 2143561 - DNA, 25 bp, Homo sapien
tcaaaaccagttgccaatgatccca

SEQ ID NO: 2143562 - DNA, 25 bp, Homo sapien
gcaaccctttgtttgagcgactgca

SEQ ID NO: 2143563 - DNA, 25 bp, Homo sapien
gatgtaaccaattttccagcaaccc

SEQ ID NO: 2143564 - DNA, 25 bp, Homo sapien
ctttgtttgagcgactgcagcacag

SEQ ID NO: 2143565 - DNA, 25 bp, Homo sapien
agagctgatgccgatgatgtaacca

SEQ ID NO: 2143566 - DNA, 25 bp, Homo sapien
tttcattaggaggaagggtagcata

SEQ ID NO: 2143567 - DNA, 25 bp, Homo sapien
cacttaggaaaaaatggacgactct

SEQ ID NO: 2143568 - DNA, 25 bp, Homo sapien
tctgtggagatgttaataatgctgc

SEQ ID NO: 2143569 - DNA, 25 bp, Homo sapien
tgcataaacagccacctcgaatggg

SEQ ID NO: 2143570 - DNA, 25 bp, Homo sapien
gaagattcctccctatagactctag

SEQ ID NO: 2143571 - DNA, 25 bp, Homo sapien
cgataaatatcctgctctcagcggg

SEQ ID NO: 2143572 - DNA, 25 bp, Homo sapien
tactgggtgttagcataaatctcct

SEQ ID NO: 2143573 - DNA, 25 bp, Homo sapien
cctagaagggactcaggtgtcacct

SEQ ID NO: 2143574 - DNA, 25 bp, Homo sapien
tatgtaagtatccagatcaaccttg

SEQ ID NO: 2143575 - DNA, 25 bp, Homo sapien
cagtcttagaaaatccgagctgtgt

SEQ ID NO: 2143576 - DNA, 25 bp, Homo sapien
tcaagagttattacacagaccatgg

SEQ ID NO: 2143577 - DNA, 25 bp, Homo sapien
cagcttttctgaacccaaattgaga

SEQ ID NO: 2143578 - DNA, 25 bp, Homo sapien
gacaatgctgagctcagcataggtc

SEQ ID NO: 2143579 - DNA, 25 bp, Homo sapien
cactgcaggttgtctgacagagaca

SEQ ID NO: 2143580 - DNA, 25 bp, Homo sapien
caggttgtctgacagagacaatgct

SEQ ID NO: 2143581 - DNA, 25 bp, Homo sapien
tgacagagacaatgctgagctcagc

SEQ ID NO: 2143582 - DNA, 25 bp, Homo sapien
ccaaattcttacaccaagctgatag

SEQ ID NO: 2143583 - DNA, 25 bp, Homo sapien
tccaaactctcaaaggtaaatgcca

SEQ ID NO: 2143584 - DNA, 25 bp, Homo sapien
tcagttagtgacaaataagcagttt

SEQ ID NO: 2143585 - DNA, 25 bp, Homo sapien
tacttcacatagaaaggtctttggg

SEQ ID NO: 2143586 - DNA, 25 bp, Homo sapien
tgtgaagatggtagcatccccctac

SEQ ID NO: 2143587 - DNA, 25 bp, Homo sapien
gatgcatgtagcttcaattgtgaag

SEQ ID NO: 2143588 - DNA, 25 bp, Homo sapien
caaggctgctacatattgatgcatg

SEQ ID NO: 2143589 - DNA, 25 bp, Homo sapien
aaatagaaccatgatagttcaaggc

SEQ ID NO: 2143590 - DNA, 25 bp, Homo sapien
cctgggtgctgtctctatgaagctc

SEQ ID NO: 2143591 - DNA, 25 bp, Homo sapien
tgcctgggtgctgtctctatgaagc

SEQ ID NO: 2143592 - DNA, 25 bp, Homo sapien
gcctgggtgctgtctctatgaagct

SEQ ID NO: 2143593 - DNA, 25 bp, Homo sapien
tttgggcggtactcagaaccgaaca

SEQ ID NO: 2143594 - DNA, 25 bp, Homo sapien
tcagaaccgaacaagataaaggctc

SEQ ID NO: 2143595 - DNA, 25 bp, Homo sapien
cagtttctttgcaacgttactaatg

SEQ ID NO: 2143596 - DNA, 25 bp, Homo sapien
caacgttactaatggataggctggg

SEQ ID NO: 2143597 - DNA, 25 bp, Homo sapien
ctttcctttagctccgtgtacaacg

SEQ ID NO: 2143598 - DNA, 25 bp, Homo sapien
cttttctcagccccaacggctttct

SEQ ID NO: 2143599 - DNA, 25 bp, Homo sapien
tcctttagctccgtgtacaacgata

SEQ ID NO: 2143600 - DNA, 25 bp, Homo sapien
tttagctccgtgtacaacgatatcc

SEQ ID NO: 2143601 - DNA, 25 bp, Homo sapien
aaaaaggtgtcatcccatatataac

SEQ ID NO: 2143602 - DNA, 25 bp, Homo sapien
gatgaaaaaggtgtcatcccatata

SEQ ID NO: 2143603 - DNA, 25 bp, Homo sapien
aagatgaaaaaggtgtcatcccata

SEQ ID NO: 2143604 - DNA, 25 bp, Homo sapien
tgaaaaaggtgtcatcccatatata

SEQ ID NO: 2143605 - DNA, 25 bp, Homo sapien
caggactgtagagctctgcttgaga

SEQ ID NO: 2143606 - DNA, 25 bp, Homo sapien
gagatagccacatcagtatgcccat

SEQ ID NO: 2143607 - DNA, 25 bp, Homo sapien
gctctgcttgagatagccacatcag

SEQ ID NO: 2143608 - DNA, 25 bp, Homo sapien
ggtccttccacaggactgtagagct

SEQ ID NO: 2143609 - DNA, 25 bp, Homo sapien
acaaggatggtgatatacaaagacc

SEQ ID NO: 2143610 - DNA, 25 bp, Homo sapien
atcaaccaagatgtttgactgataa

SEQ ID NO: 2143611 - DNA, 25 bp, Homo sapien
aaacaaggatggtgatatacaaaga

SEQ ID NO: 2143612 - DNA, 25 bp, Homo sapien
tcaaccaagatgtttgactgataag

SEQ ID NO: 2143613 - DNA, 25 bp, Homo sapien
aattagttcaatcagattgacttcc

SEQ ID NO: 2143614 - DNA, 25 bp, Homo sapien
tttgaattagttcaatcagattgac

SEQ ID NO: 2143615 - DNA, 25 bp, Homo sapien
tagttcaatcagattgacttcctcc

SEQ ID NO: 2143616 - DNA, 25 bp, Homo sapien
ttgaattagttcaatcagattgact

SEQ ID NO: 2143617 - DNA, 25 bp, Homo sapien
tcatacatccgagtgtgtaggcttt

SEQ ID NO: 2143618 - DNA, 25 bp, Homo sapien
agttgtgaccatacttcctgtcaca

SEQ ID NO: 2143619 - DNA, 25 bp, Homo sapien
gtgaccatacttcctgtcacaggtg

SEQ ID NO: 2143620 - DNA, 25 bp, Homo sapien
catacatccgagtgtgtaggctttt

SEQ ID NO: 2143621 - DNA, 25 bp, Homo sapien
catttcaggtgaaggtaaaggaccg

SEQ ID NO: 2143622 - DNA, 25 bp, Homo sapien
agtgcatccctctacacatttcagg

SEQ ID NO: 2143623 - DNA, 25 bp, Homo sapien
tgatgtccctgagggtaaataagga

SEQ ID NO: 2143624 - DNA, 25 bp, Homo sapien
gcattcgtcttttatttacagtgca

SEQ ID NO: 2143625 - DNA, 25 bp, Homo sapien
tttcctttgattattgccaatatat

SEQ ID NO: 2143626 - DNA, 25 bp, Homo sapien
tcaaggagatttgttaggtaatgct

SEQ ID NO: 2143627 - DNA, 25 bp, Homo sapien
aatgctggctgaattactgagtttc

SEQ ID NO: 2143628 - DNA, 25 bp, Homo sapien
gattattgccaatatatttcctgta

SEQ ID NO: 2143629 - DNA, 25 bp, Homo sapien
tgaattagtctaagtccccagttcc

SEQ ID NO: 2143630 - DNA, 25 bp, Homo sapien
tgaatgaaagcagcctgaattagtc

SEQ ID NO: 2143631 - DNA, 25 bp, Homo sapien
cctgctccttataagctctgaaaag

SEQ ID NO: 2143632 - DNA, 25 bp, Homo sapien
aagagaagtctgtttggatgtgtgt

SEQ ID NO: 2143633 - DNA, 25 bp, Homo sapien
gaagctttcaccaacaggtaacttg

SEQ ID NO: 2143634 - DNA, 25 bp, Homo sapien
aacttgttcaggaacatctctggaa

SEQ ID NO: 2143635 - DNA, 25 bp, Homo sapien
ataggattggtcacttaagtatccc

SEQ ID NO: 2143636 - DNA, 25 bp, Homo sapien
tctcctggcccacagtatgaatagg

SEQ ID NO: 2143637 - DNA, 25 bp, Homo sapien
tgaggcatttcacagtcacttagac

SEQ ID NO: 2143638 - DNA, 25 bp, Homo sapien
tctgcgaggagactatctgaaggct

SEQ ID NO: 2143639 - DNA, 25 bp, Homo sapien
gatgctgacagcagtaggcctaggc

SEQ ID NO: 2143640 - DNA, 25 bp, Homo sapien
gacttaattgggctcttctgcgagg

SEQ ID NO: 2143641 - DNA, 25 bp, Homo sapien
gggattcgactctgcatctctacat

SEQ ID NO: 2143642 - DNA, 25 bp, Homo sapien
tacttgtctgaagaggtatcaacct

SEQ ID NO: 2143643 - DNA, 25 bp, Homo sapien
gaataagcccacatacatgtacagg

SEQ ID NO: 2143644 - DNA, 25 bp, Homo sapien
gatgacatgtttgagccgaaggagc

SEQ ID NO: 2143645 - DNA, 25 bp, Homo sapien
taaacgttttagatagcccacaagc

SEQ ID NO: 2143646 - DNA, 25 bp, Homo sapien
tagctctgcatgtagggatttcaca

SEQ ID NO: 2143647 - DNA, 25 bp, Homo sapien
ccctgggactcagaaggcttgaatg

SEQ ID NO: 2143648 - DNA, 25 bp, Homo sapien
caggtgtactcgtcctttggtggca

SEQ ID NO: 2143649 - DNA, 25 bp, Homo sapien
cagggtcactatcaatgtgaatcgg

SEQ ID NO: 2143650 - DNA, 25 bp, Homo sapien
tgtgaatcgggagacaactgagctg

SEQ ID NO: 2143651 - DNA, 25 bp, Homo sapien
tgggcttttgcaggcactggtgcat

SEQ ID NO: 2143652 - DNA, 25 bp, Homo sapien
gctgtcaatgggcttttgcaggcac

SEQ ID NO: 2143653 - DNA, 25 bp, Homo sapien
aaaccctgacctgttagcattacta

SEQ ID NO: 2143654 - DNA, 25 bp, Homo sapien
tgttagcattactatcacctcccat

SEQ ID NO: 2143655 - DNA, 25 bp, Homo sapien
ctggtaggtagtaattagcatatta

SEQ ID NO: 2143656 - DNA, 25 bp, Homo sapien
gcatattaaattggctagcaaagtc

SEQ ID NO: 2143657 - DNA, 25 bp, Homo sapien
ctgaatgatagaggtctgggcatgc

SEQ ID NO: 2143658 - DNA, 25 bp, Homo sapien
tgaatgatagaggtctgggcatgca

SEQ ID NO: 2143659 - DNA, 25 bp, Homo sapien
gacaaagaaccggttggcatccaag

SEQ ID NO: 2143660 - DNA, 25 bp, Homo sapien
gcaacaccagatgggaagcacctct

SEQ ID NO: 2143661 - DNA, 25 bp, Homo sapien
gatccacgtgaagctgccacaattg

SEQ ID NO: 2143662 - DNA, 25 bp, Homo sapien
tccaaggtgtctgaagatccacgtg

SEQ ID NO: 2143663 - DNA, 25 bp, Homo sapien
aacttgtatcctgcatttgtatgtc

SEQ ID NO: 2143664 - DNA, 25 bp, Homo sapien
cactcccaagacagcacattatatt

SEQ ID NO: 2143665 - DNA, 25 bp, Homo sapien
taattgagcactgtacactcccaag

SEQ ID NO: 2143666 - DNA, 25 bp, Homo sapien
cagtttgacaacttgtatcctgcat

SEQ ID NO: 2143667 - DNA, 25 bp, Homo sapien
gccagcgtcatggtccagaatcctt

SEQ ID NO: 2143668 - DNA, 25 bp, Homo sapien
cagcttttctgagatgccagcgtca

SEQ ID NO: 2143669 - DNA, 25 bp, Homo sapien
ggcaaaggttatctgtgcagtcaac

SEQ ID NO: 2143670 - DNA, 25 bp, Homo sapien
cagaatccttgcatggaccccagtc

SEQ ID NO: 2143671 - DNA, 25 bp, Homo sapien
tggtttctcttgcaacacagtagct

SEQ ID NO: 2143672 - DNA, 25 bp, Homo sapien
gcagcagtgggcataatgaatataa

SEQ ID NO: 2143673 - DNA, 25 bp, Homo sapien
gggcataatgaatataatttaccca

SEQ ID NO: 2143674 - DNA, 25 bp, Homo sapien
ttggtttatgcgtgctgcagcagtg

SEQ ID NO: 2143675 - DNA, 25 bp, Homo sapien
ggccataaagaatgggactgcattg

SEQ ID NO: 2143676 - DNA, 25 bp, Homo sapien
ggagtgagactataggccataaaga

SEQ ID NO: 2143677 - DNA, 25 bp, Homo sapien
agtgagactataggccataaagaat

SEQ ID NO: 2143678 - DNA, 25 bp, Homo sapien
gccataaagaatgggactgcattgg

SEQ ID NO: 2143679 - DNA, 25 bp, Homo sapien
ttgcagcgtcagctgagtgagccaa

SEQ ID NO: 2143680 - DNA, 25 bp, Homo sapien
ggtgtgatgatagacgtccccccca

SEQ ID NO: 2143681 - DNA, 25 bp, Homo sapien
ctcgggatgattataggtgtgatga

SEQ ID NO: 2143682 - DNA, 25 bp, Homo sapien
taaagccttggagtactcttaagca

SEQ ID NO: 2143683 - DNA, 25 bp, Homo sapien
tatgattcccggataggcagtggca

SEQ ID NO: 2143684 - DNA, 25 bp, Homo sapien
ctatgattcccggataggcagtggc

SEQ ID NO: 2143685 - DNA, 25 bp, Homo sapien
tcttttggccgtgatagaaatcggg

SEQ ID NO: 2143686 - DNA, 25 bp, Homo sapien
tgttgctgatcaagcacaggataaa

SEQ ID NO: 2143687 - DNA, 25 bp, Homo sapien
ctcagtgccctgagtctcaatgaag

SEQ ID NO: 2143688 - DNA, 25 bp, Homo sapien
tctctaggtaacaggagaattcgag

SEQ ID NO: 2143689 - DNA, 25 bp, Homo sapien
ccctgatcgcaagggccggatatga

SEQ ID NO: 2143690 - DNA, 25 bp, Homo sapien
cggatatgacgcaactgaggccacg

SEQ ID NO: 2143691 - DNA, 25 bp, Homo sapien
actgaggccacgcacgttgcagtga

SEQ ID NO: 2143692 - DNA, 25 bp, Homo sapien
ggcgcgggttcctcaagccctgatc

SEQ ID NO: 2143693 - DNA, 25 bp, Homo sapien
tgtcgggcgccgacacacacgcaat

SEQ ID NO: 2143694 - DNA, 25 bp, Homo sapien
tggtccctacggtaacaaacacgca

SEQ ID NO: 2143695 - DNA, 25 bp, Homo sapien
atgaggtcgtcaaagctggtggtcc

SEQ ID NO: 2143696 - DNA, 25 bp, Homo sapien
ctacggtaacaaacacgcacttcat

SEQ ID NO: 2143697 - DNA, 25 bp, Homo sapien
agcgcgacggtcaggcaaggctaac

SEQ ID NO: 2143698 - DNA, 25 bp, Homo sapien
ggtttctttccgagcgcgacggtca

SEQ ID NO: 2143699 - DNA, 25 bp, Homo sapien
taacgcggctggcagtatggccgga

SEQ ID NO: 2143700 - DNA, 25 bp, Homo sapien
tatggccggagatggcgggtggcga

SEQ ID NO: 2143701 - DNA, 25 bp, Homo sapien
ggcgagctcggctggctcagacgcc

SEQ ID NO: 2143702 - DNA, 25 bp, Homo sapien
gcgggctccggccaagtgctgaggg

SEQ ID NO: 2143703 - DNA, 25 bp, Homo sapien
ctgaggagaggaaccgcgcgggctc

SEQ ID NO: 2143704 - DNA, 25 bp, Homo sapien
ggacgacgcgcgctgaggagaggaa

SEQ ID NO: 2143705 - DNA, 25 bp, Homo sapien
tgatcaactgcgagaaccgggagcc

SEQ ID NO: 2143706 - DNA, 25 bp, Homo sapien
ttgatcaactgcgagaaccgggagc

SEQ ID NO: 2143707 - DNA, 25 bp, Homo sapien
cggttgtaaccaaggctctcgattt

SEQ ID NO: 2143708 - DNA, 25 bp, Homo sapien
acgactcagtactgaagggttcagg

SEQ ID NO: 2143709 - DNA, 25 bp, Homo sapien
tgtaaacatccagagtaaacgactc

SEQ ID NO: 2143710 - DNA, 25 bp, Homo sapien
tctaccaatttgcaggataagtcgg

SEQ ID NO: 2143711 - DNA, 25 bp, Homo sapien
gcgtgactaataacaagatctgctt

SEQ ID NO: 2143712 - DNA, 25 bp, Homo sapien
gtgactaataacaagatctgctttc

SEQ ID NO: 2143713 - DNA, 25 bp, Homo sapien
ctgcgtgactaataacaagatctgc

SEQ ID NO: 2143714 - DNA, 25 bp, Homo sapien
tgcgtgactaataacaagatctgct

SEQ ID NO: 2143715 - DNA, 25 bp, Homo sapien
tgcaggtacaatagaagagatgacc

SEQ ID NO: 2143716 - DNA, 25 bp, Homo sapien
ttcgtttataaccactacgagtggc

SEQ ID NO: 2143717 - DNA, 25 bp, Homo sapien
agagatgaccctctttgtgtagctg

SEQ ID NO: 2143718 - DNA, 25 bp, Homo sapien
gctttgccagttccagctgatgatt

SEQ ID NO: 2143719 - DNA, 25 bp, Homo sapien
caagcttctagtgtctcaaggaaga

SEQ ID NO: 2143720 - DNA, 25 bp, Homo sapien
ttggcaagcttctagtgtctcaagg

SEQ ID NO: 2143721 - DNA, 25 bp, Homo sapien
cctttggcaagcttctagtgtctca

SEQ ID NO: 2143722 - DNA, 25 bp, Homo sapien
tggccctttggcaagcttctagtgt

SEQ ID NO: 2143723 - DNA, 25 bp, Homo sapien
aaccaaaagtaatagctgccagaca

SEQ ID NO: 2143724 - DNA, 25 bp, Homo sapien
tgcccactgatgactgaatctaact

SEQ ID NO: 2143725 - DNA, 25 bp, Homo sapien
gaaactactagaccatgcatgaaga

SEQ ID NO: 2143726 - DNA, 25 bp, Homo sapien
taatacttctcaggactgggcatat

SEQ ID NO: 2143727 - DNA, 25 bp, Homo sapien
aaaaatgcagaaaatttttctggct

SEQ ID NO: 2143728 - DNA, 25 bp, Homo sapien
ataagtccattgactgtaacagccc

SEQ ID NO: 2143729 - DNA, 25 bp, Homo sapien
ttgataagtccattgactgtaacag

SEQ ID NO: 2143730 - DNA, 25 bp, Homo sapien
gataagtccattgactgtaacagcc

SEQ ID NO: 2143731 - DNA, 25 bp, Homo sapien
gatttaatcacattacataggttga

SEQ ID NO: 2143732 - DNA, 25 bp, Homo sapien
tttgatttaatcacattacataggt

SEQ ID NO: 2143733 - DNA, 25 bp, Homo sapien
aatttgatttaatcacattacatag

SEQ ID NO: 2143734 - DNA, 25 bp, Homo sapien
tgatttaatcacattacataggttg

SEQ ID NO: 2143735 - DNA, 25 bp, Homo sapien
agatgtaggaagtttattaattata

SEQ ID NO: 2143736 - DNA, 25 bp, Homo sapien
gatgtaggaagtttattaattatat

SEQ ID NO: 2143737 - DNA, 25 bp, Homo sapien
tgtaggaagtttattaattatatta

SEQ ID NO: 2143738 - DNA, 25 bp, Homo sapien
tttggacccaatgcaaatgtgcaca

SEQ ID NO: 2143739 - DNA, 25 bp, Homo sapien
tagtaagtcctattggtataagtcc

SEQ ID NO: 2143740 - DNA, 25 bp, Homo sapien
cattaccactgtgagaggagatcct

SEQ ID NO: 2143741 - DNA, 25 bp, Homo sapien
ccaattccacttgagattctaggag

SEQ ID NO: 2143742 - DNA, 25 bp, Homo sapien
gtcaccaccttctaccactagtaag

SEQ ID NO: 2143743 - DNA, 25 bp, Homo sapien
gaccacacactctaatcagaaagaa

SEQ ID NO: 2143744 - DNA, 25 bp, Homo sapien
taaacattgtaccagagagctatgg

SEQ ID NO: 2143745 - DNA, 25 bp, Homo sapien
gataatctactgtaaaggtcttgag

SEQ ID NO: 2143746 - DNA, 25 bp, Homo sapien
tgtcatacgccaaaggaaaacccag

SEQ ID NO: 2143747 - DNA, 25 bp, Homo sapien
gaggcgttactgcacacaattgaca

SEQ ID NO: 2143748 - DNA, 25 bp, Homo sapien
tagataatctcaagaatccgtgcca

SEQ ID NO: 2143749 - DNA, 25 bp, Homo sapien
ccacaaaagggaagtcagaggcgtt

SEQ ID NO: 2143750 - DNA, 25 bp, Homo sapien
gagaactgtgggtcgattctagact

SEQ ID NO: 2143751 - DNA, 25 bp, Homo sapien
gaaatcccaattggctttctccaca

SEQ ID NO: 2143752 - DNA, 25 bp, Homo sapien
cattctgcagattagtacaatagga

SEQ ID NO: 2143753 - DNA, 25 bp, Homo sapien
tgaaatatcgcacttgaaatcccaa

SEQ ID NO: 2143754 - DNA, 25 bp, Homo sapien
agaaaactgttgtacgttgttggtg

SEQ ID NO: 2143755 - DNA, 25 bp, Homo sapien
cagtgtttagaaaaacgaaattctg

SEQ ID NO: 2143756 - DNA, 25 bp, Homo sapien
tgtttagaaaaacgaaattctgtca

SEQ ID NO: 2143757 - DNA, 25 bp, Homo sapien
gaaccacggaagatcccaaatagac

SEQ ID NO: 2143758 - DNA, 25 bp, Homo sapien
tcactccctaacttcaaatcatata

SEQ ID NO: 2143759 - DNA, 25 bp, Homo sapien
tataaagtgagcataatcaaaacag

SEQ ID NO: 2143760 - DNA, 25 bp, Homo sapien
aaaggtattaagaatgcacaatggg

SEQ ID NO: 2143761 - DNA, 25 bp, Homo sapien
caagtggtgccagaacaattgacca

SEQ ID NO: 2143762 - DNA, 25 bp, Homo sapien
ttccagcatattgtacttgtaaaga

SEQ ID NO: 2143763 - DNA, 25 bp, Homo sapien
caaaggtgcaaaatcagttgaatag

SEQ ID NO: 2143764 - DNA, 25 bp, Homo sapien
aaggatcctcaacctatacctcaca

SEQ ID NO: 2143765 - DNA, 25 bp, Homo sapien
acacagtttgggaagagagattgcc

SEQ ID NO: 2143766 - DNA, 25 bp, Homo sapien
gacttcctttgcatgccaatttgaa

SEQ ID NO: 2143767 - DNA, 25 bp, Homo sapien
gagattgccatctttcgttaaggtc

SEQ ID NO: 2143768 - DNA, 25 bp, Homo sapien
cgttaaggtcactaattcactgaga

SEQ ID NO: 2143769 - DNA, 25 bp, Homo sapien
ctaggaatagggaactcagactaag

SEQ ID NO: 2143770 - DNA, 25 bp, Homo sapien
atagggaactcagactaagcaggag

SEQ ID NO: 2143771 - DNA, 25 bp, Homo sapien
gaatagggaactcagactaagcagg

SEQ ID NO: 2143772 - DNA, 25 bp, Homo sapien
taggaatagggaactcagactaagc

SEQ ID NO: 2143773 - DNA, 25 bp, Homo sapien
caggtaggatgggtagcagtaacaa

SEQ ID NO: 2143774 - DNA, 25 bp, Homo sapien
gaagcaatggacttggcttgcccag

SEQ ID NO: 2143775 - DNA, 25 bp, Homo sapien
gcagaatcttggcacttcccaggag

SEQ ID NO: 2143776 - DNA, 25 bp, Homo sapien
ttatgcaggtatccggaaagcagcc

SEQ ID NO: 2143777 - DNA, 25 bp, Homo sapien
attcaaagacttctggctgcagtag

SEQ ID NO: 2143778 - DNA, 25 bp, Homo sapien
tggctgcagtagtttttccatcctt

SEQ ID NO: 2143779 - DNA, 25 bp, Homo sapien
tgatgcctcattcaaagacttctgg

SEQ ID NO: 2143780 - DNA, 25 bp, Homo sapien
gacttctggctgcagtagtttttcc

SEQ ID NO: 2143781 - DNA, 25 bp, Homo sapien
ctgctccgaaatggcccgaaagagg

SEQ ID NO: 2143782 - DNA, 25 bp, Homo sapien
aaacagccctaagctgcctaaatat

SEQ ID NO: 2143783 - DNA, 25 bp, Homo sapien
agctttcgaaacagccctaagctgc

SEQ ID NO: 2143784 - DNA, 25 bp, Homo sapien
aaatggcccgaaagaggcaagaggc

SEQ ID NO: 2143785 - DNA, 25 bp, Homo sapien
aggaccatcccatgtctcaaactct

SEQ ID NO: 2143786 - DNA, 25 bp, Homo sapien
cagtacagggaagatatgttttcct

SEQ ID NO: 2143787 - DNA, 25 bp, Homo sapien
gaaaactcagtacagggaagatatg

SEQ ID NO: 2143788 - DNA, 25 bp, Homo sapien
gcaaactacaggaccatcccatgtc

SEQ ID NO: 2143789 - DNA, 25 bp, Homo sapien
tgattttccctcatatatgagacac

SEQ ID NO: 2143790 - DNA, 25 bp, Homo sapien
tgatttccaaatgatggacctggct

SEQ ID NO: 2143791 - DNA, 25 bp, Homo sapien
caaatgatggacctggctgcaaaac

SEQ ID NO: 2143792 - DNA, 25 bp, Homo sapien
catatatgagacacaagccttcctg

SEQ ID NO: 2143793 - DNA, 25 bp, Homo sapien
ttaggagtaaaactcgaacagcagg

SEQ ID NO: 2143794 - DNA, 25 bp, Homo sapien
gagtaaaactcgaacagcaggcgaa

SEQ ID NO: 2143795 - DNA, 25 bp, Homo sapien
aacagcaggcgaatacccacaataa

SEQ ID NO: 2143796 - DNA, 25 bp, Homo sapien
caggcgaatacccacaataaacaga

SEQ ID NO: 2143797 - DNA, 25 bp, Homo sapien
ccttgtgcccctctataactgacat

SEQ ID NO: 2143798 - DNA, 25 bp, Homo sapien
cactcagtactgaattgagattcat

SEQ ID NO: 2143799 - DNA, 25 bp, Homo sapien
tcacttccgtaagtacccttgtgcc

SEQ ID NO: 2143800 - DNA, 25 bp, Homo sapien
taactgacatataaccactgatctg

SEQ ID NO: 2143801 - DNA, 25 bp, Homo sapien
cgttccaggtatttctcaaaagatc

SEQ ID NO: 2143802 - DNA, 25 bp, Homo sapien
ggtatttctcaaaagatccctccac

SEQ ID NO: 2143803 - DNA, 25 bp, Homo sapien
ttccaggtatttctcaaaagatccc

SEQ ID NO: 2143804 - DNA, 25 bp, Homo sapien
atttctcaaaagatccctccacata

SEQ ID NO: 2143805 - DNA, 25 bp, Homo sapien
gctcttatttccagctggccagcac

SEQ ID NO: 2143806 - DNA, 25 bp, Homo sapien
gagctcttatttccagctggccagc

SEQ ID NO: 2143807 - DNA, 25 bp, Homo sapien
gagaaagagctcttatttccagctg

SEQ ID NO: 2143808 - DNA, 25 bp, Homo sapien
aattagagaaagagctcttatttcc

SEQ ID NO: 2143809 - DNA, 25 bp, Homo sapien
agttataggaacaactatttgtgct

SEQ ID NO: 2143810 - DNA, 25 bp, Homo sapien
tacgtaagagatagttataggaaca

SEQ ID NO: 2143811 - DNA, 25 bp, Homo sapien
tggcatacgtaagagatagttatag

SEQ ID NO: 2143812 - DNA, 25 bp, Homo sapien
aatttggcatacgtaagagatagtt

SEQ ID NO: 2143813 - DNA, 25 bp, Homo sapien
tccaggaaagcgataaagaatgaaa

SEQ ID NO: 2143814 - DNA, 25 bp, Homo sapien
ttttccaggaaagcgataaagaatg

SEQ ID NO: 2143815 - DNA, 25 bp, Homo sapien
ctgtgacataagttggaggttttcc

SEQ ID NO: 2143816 - DNA, 25 bp, Homo sapien
ttatctgtgacataagttggaggtt

SEQ ID NO: 2143817 - DNA, 25 bp, Homo sapien
gagaaatgacgatcaggtctgttta

SEQ ID NO: 2143818 - DNA, 25 bp, Homo sapien
ttagtcattgagaagccaattaggg

SEQ ID NO: 2143819 - DNA, 25 bp, Homo sapien
agggctaacaacactgagattaact

SEQ ID NO: 2143820 - DNA, 25 bp, Homo sapien
acgatcaggtctgtttagagggcta

SEQ ID NO: 2143821 - DNA, 25 bp, Homo sapien
tttcaggatgctgaatgcctagctt

SEQ ID NO: 2143822 - DNA, 25 bp, Homo sapien
gaagcatggcataataaggatggaa

SEQ ID NO: 2143823 - DNA, 25 bp, Homo sapien
ctggaagcatggcataataaggatg

SEQ ID NO: 2143824 - DNA, 25 bp, Homo sapien
catggcataataaggatggaagaaa

SEQ ID NO: 2143825 - DNA, 25 bp, Homo sapien
gcatggcataataaggatggaagaa

SEQ ID NO: 2143826 - DNA, 25 bp, Homo sapien
taaaatcactactaaggttacactg

SEQ ID NO: 2143827 - DNA, 25 bp, Homo sapien
cactactaaggttacactgtgagcc

SEQ ID NO: 2143828 - DNA, 25 bp, Homo sapien
ccaagattaaaatcactactaaggt

SEQ ID NO: 2143829 - DNA, 25 bp, Homo sapien
ggttacactgtgagcctcaatcaca

SEQ ID NO: 2143830 - DNA, 25 bp, Homo sapien
tacacagaatcatagtgaccactac

SEQ ID NO: 2143831 - DNA, 25 bp, Homo sapien
gaaattgttttgagtacacagaatc

SEQ ID NO: 2143832 - DNA, 25 bp, Homo sapien
catagtgaccactacttgagtagca

SEQ ID NO: 2143833 - DNA, 25 bp, Homo sapien
cctgacaaacagctgcacttgactg

SEQ ID NO: 2143834 - DNA, 25 bp, Homo sapien
aatcgcagtcttcaactcttcttca

SEQ ID NO: 2143835 - DNA, 25 bp, Homo sapien
acaatttaatcgcagtcttcaactc

SEQ ID NO: 2143836 - DNA, 25 bp, Homo sapien
tttatagagaatttcgtacaataca

SEQ ID NO: 2143837 - DNA, 25 bp, Homo sapien
tttaatcgcagtcttcaactcttct

SEQ ID NO: 2143838 - DNA, 25 bp, Homo sapien
tcgcttccagttacagcattatttc

SEQ ID NO: 2143839 - DNA, 25 bp, Homo sapien
ttctgatttgaactcttgtaatcag

SEQ ID NO: 2143840 - DNA, 25 bp, Homo sapien
gatttgaactcttgtaatcagtatg

SEQ ID NO: 2143841 - DNA, 25 bp, Homo sapien
aatcagtatgggcatcctcgcttcc

SEQ ID NO: 2143842 - DNA, 25 bp, Homo sapien
ttattgtagccctctggtatatttt

SEQ ID NO: 2143843 - DNA, 25 bp, Homo sapien
ttttcagcattgtagcaggcacccc

SEQ ID NO: 2143844 - DNA, 25 bp, Homo sapien
ttcagcattgtagcaggcaccccac

SEQ ID NO: 2143845 - DNA, 25 bp, Homo sapien
tttcagcattgtagcaggcacccca

SEQ ID NO: 2143846 - DNA, 25 bp, Homo sapien
aacatcaaattctacattacgatag

SEQ ID NO: 2143847 - DNA, 25 bp, Homo sapien
cattacgatagatttctggatccag

SEQ ID NO: 2143848 - DNA, 25 bp, Homo sapien
cagggctttgagcaccttatagggg

SEQ ID NO: 2143849 - DNA, 25 bp, Homo sapien
cttttctgctgtccaaccaaacatc

SEQ ID NO: 2143850 - DNA, 25 bp, Homo sapien
cacttgtctcccaaatagtactgtc

SEQ ID NO: 2143851 - DNA, 25 bp, Homo sapien
aatagtactgtctcccagcatactc

SEQ ID NO: 2143852 - DNA, 25 bp, Homo sapien
ctgacacttgtctcccaaatagtac

SEQ ID NO: 2143853 - DNA, 25 bp, Homo sapien
tctcccaaatagtactgtctcccag

SEQ ID NO: 2143854 - DNA, 25 bp, Homo sapien
gatatgagcattataatatcttcct

SEQ ID NO: 2143855 - DNA, 25 bp, Homo sapien
ggatatgagcattataatatcttcc

SEQ ID NO: 2143856 - DNA, 25 bp, Homo sapien
gactgttactgaattgttctcattt

SEQ ID NO: 2143857 - DNA, 25 bp, Homo sapien
caattcttcaatgaagactgttact

SEQ ID NO: 2143858 - DNA, 25 bp, Homo sapien
cagacatcacttgggtaactggttt

SEQ ID NO: 2143859 - DNA, 25 bp, Homo sapien
cttcctttccgactgggcatagcat

SEQ ID NO: 2143860 - DNA, 25 bp, Homo sapien
ggcaggaacagacatcacttgggta

SEQ ID NO: 2143861 - DNA, 25 bp, Homo sapien
aacctcttcctttccgactgggcat

SEQ ID NO: 2143862 - DNA, 25 bp, Homo sapien
gaacatcttcttctgttgctttatg

SEQ ID NO: 2143863 - DNA, 25 bp, Homo sapien
tctttccctcgaattttcttgaaca

SEQ ID NO: 2143864 - DNA, 25 bp, Homo sapien
cttgaacatcttcttctgttgcttt

SEQ ID NO: 2143865 - DNA, 25 bp, Homo sapien
tcttcttctgttgctttatgtccat

SEQ ID NO: 2143866 - DNA, 25 bp, Homo sapien
tagtgcattggaggatcgtgcccat

SEQ ID NO: 2143867 - DNA, 25 bp, Homo sapien
cataatgcatactgtgctgcagcct

SEQ ID NO: 2143868 - DNA, 25 bp, Homo sapien
tctcccttgccgtaagccatagtca

SEQ ID NO: 2143869 - DNA, 25 bp, Homo sapien
ccagctgtctgtgagtagtgcattg

SEQ ID NO: 2143870 - DNA, 25 bp, Homo sapien
gcccggcatgttgtgcctgtttata

SEQ ID NO: 2143871 - DNA, 25 bp, Homo sapien
gcctgtttataaaccgagatgaatt

SEQ ID NO: 2143872 - DNA, 25 bp, Homo sapien
tgtgcctgtttataaaccgagatga

SEQ ID NO: 2143873 - DNA, 25 bp, Homo sapien
gtgcctgtttataaaccgagatgaa

SEQ ID NO: 2143874 - DNA, 25 bp, Homo sapien
atctataagagaagttatcatagct

SEQ ID NO: 2143875 - DNA, 25 bp, Homo sapien
aagttggataagcagtctcatcccc

SEQ ID NO: 2143876 - DNA, 25 bp, Homo sapien
cattccctggggtaaatccatactg

SEQ ID NO: 2143877 - DNA, 25 bp, Homo sapien
cacaactcatctggcggtgactacg

SEQ ID NO: 2143878 - DNA, 25 bp, Homo sapien
tactgggactccttattcacacaac

SEQ ID NO: 2143879 - DNA, 25 bp, Homo sapien
ccattgtagagggacctccatgatt

SEQ ID NO: 2143880 - DNA, 25 bp, Homo sapien
ccaacacagtatcctgaagtagcag

SEQ ID NO: 2143881 - DNA, 25 bp, Homo sapien
cctgaagtagcaggaaccattgtag

SEQ ID NO: 2143882 - DNA, 25 bp, Homo sapien
aaattcaaagtctgtttgcctgagc

SEQ ID NO: 2143883 - DNA, 25 bp, Homo sapien
tgcacgataaagatattcttcatga

SEQ ID NO: 2143884 - DNA, 25 bp, Homo sapien
ctgcacgataaagatattcttcatg

SEQ ID NO: 2143885 - DNA, 25 bp, Homo sapien
gctataaacacctgaagtttcatag

SEQ ID NO: 2143886 - DNA, 25 bp, Homo sapien
caagtttgctgtagatgcagttgtg

SEQ ID NO: 2143887 - DNA, 25 bp, Homo sapien
tgctgtagatgcagttgtgctataa

SEQ ID NO: 2143888 - DNA, 25 bp, Homo sapien
ttgtgctataaacacctgaagtttc

SEQ ID NO: 2143889 - DNA, 25 bp, Homo sapien
ggagacatagaacatgactttctgt

SEQ ID NO: 2143890 - DNA, 25 bp, Homo sapien
gaggagacatagaacatgactttct

SEQ ID NO: 2143891 - DNA, 25 bp, Homo sapien
gacatagaacatgactttctgtcct

SEQ ID NO: 2143892 - DNA, 25 bp, Homo sapien
ctgaggagacatagaacatgacttt

SEQ ID NO: 2143893 - DNA, 25 bp, Homo sapien
ctgggggtagttgtatgaggtaact

SEQ ID NO: 2143894 - DNA, 25 bp, Homo sapien
tgggggtagttgtatgaggtaactg

SEQ ID NO: 2143895 - DNA, 25 bp, Homo sapien
cttctgggggtagttgtatgaggta

SEQ ID NO: 2143896 - DNA, 25 bp, Homo sapien
tctgggggtagttgtatgaggtaac

SEQ ID NO: 2143897 - DNA, 25 bp, Homo sapien
tataaaagaggctcacaggagacta

SEQ ID NO: 2143898 - DNA, 25 bp, Homo sapien
gactatgagtaatctaaagccagca

SEQ ID NO: 2143899 - DNA, 25 bp, Homo sapien
caccagtggtctctatgtcaacaaa

SEQ ID NO: 2143900 - DNA, 25 bp, Homo sapien
taatccatgggctctgttctagatg

SEQ ID NO: 2143901 - DNA, 25 bp, Homo sapien
cattattggcacaggaagctgcaac

SEQ ID NO: 2143902 - DNA, 25 bp, Homo sapien
tggtactaatagcttgattagccgc

SEQ ID NO: 2143903 - DNA, 25 bp, Homo sapien
cctgccgtgtgtaggtggagataca

SEQ ID NO: 2143904 - DNA, 25 bp, Homo sapien
gattagccgctgcaccgttagataa

SEQ ID NO: 2143905 - DNA, 25 bp, Homo sapien
tccaaagtaagcatctgctaataac

SEQ ID NO: 2143906 - DNA, 25 bp, Homo sapien
gcttccaaagtaagcatctgctaat

SEQ ID NO: 2143907 - DNA, 25 bp, Homo sapien
aagtaagcatctgctaataacctac

SEQ ID NO: 2143908 - DNA, 25 bp, Homo sapien
aggcttccaaagtaagcatctgcta

SEQ ID NO: 2143909 - DNA, 25 bp, Homo sapien
ttgtgtagcatttgaccttaatcct

SEQ ID NO: 2143910 - DNA, 25 bp, Homo sapien
gctcttttctctatcctgatcaatt

SEQ ID NO: 2143911 - DNA, 25 bp, Homo sapien
tatatttgtgtagcatttgacctta

SEQ ID NO: 2143912 - DNA, 25 bp, Homo sapien
tctatcctgatcaattcagattcca

SEQ ID NO: 2143913 - DNA, 25 bp, Homo sapien
ggactgcttgaaacctggagatcca

SEQ ID NO: 2143914 - DNA, 25 bp, Homo sapien
cagcaggactgcttgaaacctggag

SEQ ID NO: 2143915 - DNA, 25 bp, Homo sapien
caggactgcttgaaacctggagatc

SEQ ID NO: 2143916 - DNA, 25 bp, Homo sapien
caaaaacacagtaattagccgagtg

SEQ ID NO: 2143917 - DNA, 25 bp, Homo sapien
gatttaatgcctaaaaggagactca

SEQ ID NO: 2143918 - DNA, 25 bp, Homo sapien
cctgccagagagacatatgaagaac

SEQ ID NO: 2143919 - DNA, 25 bp, Homo sapien
gcaatcatcacatcttgttacctgg

SEQ ID NO: 2143920 - DNA, 25 bp, Homo sapien
ggcagattagcagtcacttaaggat

SEQ ID NO: 2143921 - DNA, 25 bp, Homo sapien
taaaatggctcctccaacaaagctc

SEQ ID NO: 2143922 - DNA, 25 bp, Homo sapien
tagcactgaaaacgtatcatgccat

SEQ ID NO: 2143923 - DNA, 25 bp, Homo sapien
caactctacgcatttgtcaaagctc

SEQ ID NO: 2143924 - DNA, 25 bp, Homo sapien
taaacaactgtttaggagtgatgca

SEQ ID NO: 2143925 - DNA, 25 bp, Homo sapien
cagcatgaggaatagcagaatggca

SEQ ID NO: 2143926 - DNA, 25 bp, Homo sapien
atagcagaatggcatggataggatg

SEQ ID NO: 2143927 - DNA, 25 bp, Homo sapien
catggataggatggtgaggcaatca

SEQ ID NO: 2143928 - DNA, 25 bp, Homo sapien
ggcaccagcatgaggaatagcagaa

SEQ ID NO: 2143929 - DNA, 25 bp, Homo sapien
aggcaaatcactgccgcttggatca

SEQ ID NO: 2143930 - DNA, 25 bp, Homo sapien
gtggtggttgtaagtttgaagtctc

SEQ ID NO: 2143931 - DNA, 25 bp, Homo sapien
ttgtaagtttgaagtctctcccaca

SEQ ID NO: 2143932 - DNA, 25 bp, Homo sapien
cactgccgcttggatcacaggaata

SEQ ID NO: 2143933 - DNA, 25 bp, Homo sapien
gatgccaaggctagctacatttagg

SEQ ID NO: 2143934 - DNA, 25 bp, Homo sapien
cactgataatatggaaggctacgga

SEQ ID NO: 2143935 - DNA, 25 bp, Homo sapien
gctactcggccatgaaaacaaatgg

SEQ ID NO: 2143936 - DNA, 25 bp, Homo sapien
tacatctcgggtacaggtaggtaag

SEQ ID NO: 2143937 - DNA, 25 bp, Homo sapien
gctctacgtcggatttcataaggga

SEQ ID NO: 2143938 - DNA, 25 bp, Homo sapien
tctagatgaccccaagactggcgat

SEQ ID NO: 2143939 - DNA, 25 bp, Homo sapien
tactggcatggatgtggaactacag

SEQ ID NO: 2143940 - DNA, 25 bp, Homo sapien
cctgatataatggactgttacccaa

SEQ ID NO: 2143941 - DNA, 25 bp, Homo sapien
gcacagaaatagacctgcacttaaa

SEQ ID NO: 2143942 - DNA, 25 bp, Homo sapien
ccaaagtgatccaacgaggaaagga

SEQ ID NO: 2143943 - DNA, 25 bp, Homo sapien
aaatggtactgctggaatactggag

SEQ ID NO: 2143944 - DNA, 25 bp, Homo sapien
tactaaaaagacagtatagtactga

SEQ ID NO: 2143945 - DNA, 25 bp, Homo sapien
ctgcaatcctagattgaaatagtac

SEQ ID NO: 2143946 - DNA, 25 bp, Homo sapien
aactaaagcactgggaggctaaagc

SEQ ID NO: 2143947 - DNA, 25 bp, Homo sapien
tattttgagacagaacaccacagtg

SEQ ID NO: 2143948 - DNA, 25 bp, Homo sapien
caagagtctgattatcaaaacggtc

SEQ ID NO: 2143949 - DNA, 25 bp, Homo sapien
caccacagtgaaaagttagcatgta

SEQ ID NO: 2143950 - DNA, 25 bp, Homo sapien
gaatcgttcagaaggaatagtacca

SEQ ID NO: 2143951 - DNA, 25 bp, Homo sapien
aatgagttagaaaggagttcctctc

SEQ ID NO: 2143952 - DNA, 25 bp, Homo sapien
ttggaatcgttcagaaggaatagta

SEQ ID NO: 2143953 - DNA, 25 bp, Homo sapien
tagaaaggagttcctctctttctat

SEQ ID NO: 2143954 - DNA, 25 bp, Homo sapien
cacactgataggttctttttctgtg

SEQ ID NO: 2143955 - DNA, 25 bp, Homo sapien
atcaaattgtattcctcattctaga

SEQ ID NO: 2143956 - DNA, 25 bp, Homo sapien
gttcacactgataggttctttttct

SEQ ID NO: 2143957 - DNA, 25 bp, Homo sapien
cactgataggttctttttctgtgca

SEQ ID NO: 2143958 - DNA, 25 bp, Homo sapien
gagtgccagtagctgtggtaatagc

SEQ ID NO: 2143959 - DNA, 25 bp, Homo sapien
agtgccagtagctgtggtaatagca

SEQ ID NO: 2143960 - DNA, 25 bp, Homo sapien
cactgtagcattgaggaacggtttg

SEQ ID NO: 2143961 - DNA, 25 bp, Homo sapien
catttgctgatgcttccgcctgtat

SEQ ID NO: 2143962 - DNA, 25 bp, Homo sapien
aacggtttgatctaccagaggtggc

SEQ ID NO: 2143963 - DNA, 25 bp, Homo sapien
gataattctctacatgaagctgctg

SEQ ID NO: 2143964 - DNA, 25 bp, Homo sapien
gatggagcaatacagccaattggcc

SEQ ID NO: 2143965 - DNA, 25 bp, Homo sapien
taatagactgctccatgagggacag

SEQ ID NO: 2143966 - DNA, 25 bp, Homo sapien
gaataatctggcacaaccggaaggc

SEQ ID NO: 2143967 - DNA, 25 bp, Homo sapien
tatgctgtaccaactggatgccagg

SEQ ID NO: 2143968 - DNA, 25 bp, Homo sapien
aagtggaagttactccaattctgca

SEQ ID NO: 2143969 - DNA, 25 bp, Homo sapien
caatttccttagtcacagcccaaaa

SEQ ID NO: 2143970 - DNA, 25 bp, Homo sapien
ggtaccatcagctaatataaagctg

SEQ ID NO: 2143971 - DNA, 25 bp, Homo sapien
tctgcatggtttaatatgatgtgtg

SEQ ID NO: 2143972 - DNA, 25 bp, Homo sapien
agaaacgtgaagagctctttaattt

SEQ ID NO: 2143973 - DNA, 25 bp, Homo sapien
aagaaacgtgaagagctctttaatt

SEQ ID NO: 2143974 - DNA, 25 bp, Homo sapien
gacaccaattcaatacagtgcagta

SEQ ID NO: 2143975 - DNA, 25 bp, Homo sapien
ttttatttactgctaactgtgcaaa

SEQ ID NO: 2143976 - DNA, 25 bp, Homo sapien
cacttacatacatccagtattaaac

SEQ ID NO: 2143977 - DNA, 25 bp, Homo sapien
gcatatgggataaatctaaagcaga

SEQ ID NO: 2143978 - DNA, 25 bp, Homo sapien
tccaagaacgactgcagacttctgc

SEQ ID NO: 2143979 - DNA, 25 bp, Homo sapien
caggactcactccttgattattttt

SEQ ID NO: 2143980 - DNA, 25 bp, Homo sapien
tgcagcagtacaggttaccctcacc

SEQ ID NO: 2143981 - DNA, 25 bp, Homo sapien
tcccccaacaacaggagggccagga

SEQ ID NO: 2143982 - DNA, 25 bp, Homo sapien
tggttttcatcacaaaaaccatttc

SEQ ID NO: 2143983 - DNA, 25 bp, Homo sapien
ttcaacagtaaaaccgactcaatgt

SEQ ID NO: 2143984 - DNA, 25 bp, Homo sapien
tttcaacagtaaaaccgactcaatg

SEQ ID NO: 2143985 - DNA, 25 bp, Homo sapien
caacagtaaaaccgactcaatgttt

SEQ ID NO: 2143986 - DNA, 25 bp, Homo sapien
atttcaacagtaaaaccgactcaat

SEQ ID NO: 2143987 - DNA, 25 bp, Homo sapien
actcaaaagtggtggtgatcggcca

SEQ ID NO: 2143988 - DNA, 25 bp, Homo sapien
cagattttcttgtttccaagatccc

SEQ ID NO: 2143989 - DNA, 25 bp, Homo sapien
caccagcggccataagaaaaaaagt

SEQ ID NO: 2143990 - DNA, 25 bp, Homo sapien
tacaaaaggtctactcagtggcaag

SEQ ID NO: 2143991 - DNA, 25 bp, Homo sapien
tagaaagatttgactgggaagaagc

SEQ ID NO: 2143992 - DNA, 25 bp, Homo sapien
tgttatcttgatcagggcttgggtt

SEQ ID NO: 2143993 - DNA, 25 bp, Homo sapien
tcagaaccaagagtggttacccagg

SEQ ID NO: 2143994 - DNA, 25 bp, Homo sapien
gatttgtcaaacctcactgcatcca

SEQ ID NO: 2143995 - DNA, 25 bp, Homo sapien
aacagaggggaggattttggactca

SEQ ID NO: 2143996 - DNA, 25 bp, Homo sapien
gaggattttggactcataagaaccc

SEQ ID NO: 2143997 - DNA, 25 bp, Homo sapien
agaacccacggtggcagaagcaatg

SEQ ID NO: 2143998 - DNA, 25 bp, Homo sapien
tcataagaacccacggtggcagaag

SEQ ID NO: 2143999 - DNA, 25 bp, Homo sapien
tctgagtaccccaaatgaatgtgag

SEQ ID NO: 2144000 - DNA, 25 bp, Homo sapien
ctgtaaaagtgagaacgtgtctgtg

SEQ ID NO: 2144001 - DNA, 25 bp, Homo sapien
aatgaactgccatgacagcatcttc

SEQ ID NO: 2144002 - DNA, 25 bp, Homo sapien
catttgatggttctgcccttggccc

SEQ ID NO: 2144003 - DNA, 25 bp, Homo sapien
catgttccacctacattacagttgg

SEQ ID NO: 2144004 - DNA, 25 bp, Homo sapien
gctaagtcgtaaatacctgtctgca

SEQ ID NO: 2144005 - DNA, 25 bp, Homo sapien
ggcttatcacttccggacaccttgg

SEQ ID NO: 2144006 - DNA, 25 bp, Homo sapien
caagttacgcttctgtctactgaca

SEQ ID NO: 2144007 - DNA, 25 bp, Homo sapien
tctaggcatacaagctccagtctgt

SEQ ID NO: 2144008 - DNA, 25 bp, Homo sapien
tatttactgcgtgctaggaacaggc

SEQ ID NO: 2144009 - DNA, 25 bp, Homo sapien
caacgcagttaatcaggctgtcccg

SEQ ID NO: 2144010 - DNA, 25 bp, Homo sapien
gctgtcccgagttgcatagatggta

SEQ ID NO: 2144011 - DNA, 25 bp, Homo sapien
tcagatcttactatagccagtaact

SEQ ID NO: 2144012 - DNA, 25 bp, Homo sapien
cttctcctctggtataggggacgac

SEQ ID NO: 2144013 - DNA, 25 bp, Homo sapien
tctggtataggggacgactcattct

SEQ ID NO: 2144014 - DNA, 25 bp, Homo sapien
tcttactatagccagtaactgctgt

SEQ ID NO: 2144015 - DNA, 25 bp, Homo sapien
tcttaaaagccatccgagcattgag

SEQ ID NO: 2144016 - DNA, 25 bp, Homo sapien
cttaaaagccatccgagcattgagg

SEQ ID NO: 2144017 - DNA, 25 bp, Homo sapien
tgacttcttaaaagccatccgagca

SEQ ID NO: 2144018 - DNA, 25 bp, Homo sapien
cttcttaaaagccatccgagcattg

SEQ ID NO: 2144019 - DNA, 25 bp, Homo sapien
aatcagaggcatcaaccaagcccaa

SEQ ID NO: 2144020 - DNA, 25 bp, Homo sapien
ctaatcagaggcatcaaccaagccc

SEQ ID NO: 2144021 - DNA, 25 bp, Homo sapien
taatcagaggcatcaaccaagccca

SEQ ID NO: 2144022 - DNA, 25 bp, Homo sapien
tttattggacttcaccatagggcag

SEQ ID NO: 2144023 - DNA, 25 bp, Homo sapien
agatgtgctgactggtttattggac

SEQ ID NO: 2144024 - DNA, 25 bp, Homo sapien
gattcaagggcaatagcaaggacca

SEQ ID NO: 2144025 - DNA, 25 bp, Homo sapien
tagcaggtacttgataaagatgtgc

SEQ ID NO: 2144026 - DNA, 25 bp, Homo sapien
gaattgacaccctcaagaaaccagg

SEQ ID NO: 2144027 - DNA, 25 bp, Homo sapien
tatttataggataaaacgggaagca

SEQ ID NO: 2144028 - DNA, 25 bp, Homo sapien
caggaaacagactgcttgtaggctc

SEQ ID NO: 2144029 - DNA, 25 bp, Homo sapien
ggaagcaacccctgaattgacaccc

SEQ ID NO: 2144030 - DNA, 25 bp, Homo sapien
caagtggatcaaaggccaaaagtcc

SEQ ID NO: 2144031 - DNA, 25 bp, Homo sapien
gatcaaaggccaaaagtccccttga

SEQ ID NO: 2144032 - DNA, 25 bp, Homo sapien
atcaaaggccaaaagtccccttgag

SEQ ID NO: 2144033 - DNA, 25 bp, Homo sapien
cctgcagtctcctggtacttcagag

SEQ ID NO: 2144034 - DNA, 25 bp, Homo sapien
tagaggggaactgccccaaacaggc

SEQ ID NO: 2144035 - DNA, 25 bp, Homo sapien
aattctccctctagaggggaactgc

SEQ ID NO: 2144036 - DNA, 25 bp, Homo sapien
tcctgcagtctcctggtacttcaga

SEQ ID NO: 2144037 - DNA, 25 bp, Homo sapien
gagagggatgcggatatcaaggctc

SEQ ID NO: 2144038 - DNA, 25 bp, Homo sapien
cggcctattaaacaatttgcagact

SEQ ID NO: 2144039 - DNA, 25 bp, Homo sapien
gtttccaaacaggatgtgaacgctc

SEQ ID NO: 2144040 - DNA, 25 bp, Homo sapien
caaggctcggcctattaaacaattt

SEQ ID NO: 2144041 - DNA, 25 bp, Homo sapien
ctgttaaggttgaaacgatatgtct

SEQ ID NO: 2144042 - DNA, 25 bp, Homo sapien
gccttgtgaggctctactacttctc

SEQ ID NO: 2144043 - DNA, 25 bp, Homo sapien
tgtctaactatagcccctcctttgt

SEQ ID NO: 2144044 - DNA, 25 bp, Homo sapien
gttgctggccttgtgaggctctact

SEQ ID NO: 2144045 - DNA, 25 bp, Homo sapien
gctgttataatgaccatcaggcgga

SEQ ID NO: 2144046 - DNA, 25 bp, Homo sapien
cactaaaagctctagcaaatggact

SEQ ID NO: 2144047 - DNA, 25 bp, Homo sapien
ttttgatgatgttggtaaaccgcgc

SEQ ID NO: 2144048 - DNA, 25 bp, Homo sapien
tgtttgtactaatggtgaactgctg

SEQ ID NO: 2144049 - DNA, 25 bp, Homo sapien
tccatcaatgagtacatgaattaac

SEQ ID NO: 2144050 - DNA, 25 bp, Homo sapien
caatgagtacatgaattaacacaga

SEQ ID NO: 2144051 - DNA, 25 bp, Homo sapien
aagtccatcaatgagtacatgaatt

SEQ ID NO: 2144052 - DNA, 25 bp, Homo sapien
catcaatgagtacatgaattaacac

SEQ ID NO: 2144053 - DNA, 25 bp, Homo sapien
catcctctcttggtgtaagtattga

SEQ ID NO: 2144054 - DNA, 25 bp, Homo sapien
ggagatcaggtagcgaaggctcctc

SEQ ID NO: 2144055 - DNA, 25 bp, Homo sapien
gagtctaagtctgagagatcaggga

SEQ ID NO: 2144056 - DNA, 25 bp, Homo sapien
gttatccatgtctaacatagcctga

SEQ ID NO: 2144057 - DNA, 25 bp, Homo sapien
tacaatctgttcaggtgacccagga

SEQ ID NO: 2144058 - DNA, 25 bp, Homo sapien
tagtcccaagatgtgatagagttcg

SEQ ID NO: 2144059 - DNA, 25 bp, Homo sapien
tcaatcagcgatatccagtcagtgg

SEQ ID NO: 2144060 - DNA, 25 bp, Homo sapien
cattggagagcagtgaaattagtcc

SEQ ID NO: 2144061 - DNA, 25 bp, Homo sapien
gttaatgacatctttgattagagga

SEQ ID NO: 2144062 - DNA, 25 bp, Homo sapien
ccccttgtccaccttatatgaatat

SEQ ID NO: 2144063 - DNA, 25 bp, Homo sapien
ttagaggaatctgaaacactaaagt

SEQ ID NO: 2144064 - DNA, 25 bp, Homo sapien
agttatgtttcataactgtggcccc

SEQ ID NO: 2144065 - DNA, 25 bp, Homo sapien
acaacttgctaaatcttttaaagtg

SEQ ID NO: 2144066 - DNA, 25 bp, Homo sapien
taatgaggaataggacagagcagaa

SEQ ID NO: 2144067 - DNA, 25 bp, Homo sapien
cctgatgacaacttgctaaatcttt

SEQ ID NO: 2144068 - DNA, 25 bp, Homo sapien
attacttctccactctctagtgcca

SEQ ID NO: 2144069 - DNA, 25 bp, Homo sapien
taacagtgtttactcgctgctccat

SEQ ID NO: 2144070 - DNA, 25 bp, Homo sapien
tgagattactctttcctgtgtccaa

SEQ ID NO: 2144071 - DNA, 25 bp, Homo sapien
tcagacctacttcttccttagcctg

SEQ ID NO: 2144072 - DNA, 25 bp, Homo sapien
tgtttgtagctgctccctctaaatg

SEQ ID NO: 2144073 - DNA, 25 bp, Homo sapien
ccttggactgctgaacactgatttt

SEQ ID NO: 2144074 - DNA, 25 bp, Homo sapien
ctggtaatgtgaactgattagatgc

SEQ ID NO: 2144075 - DNA, 25 bp, Homo sapien
gagcaggaagctggtaatgtgaact

SEQ ID NO: 2144076 - DNA, 25 bp, Homo sapien
tcatttccacacgttccttggactg

SEQ ID NO: 2144077 - DNA, 25 bp, Homo sapien
aaggtctcaactcctcttctttatt

SEQ ID NO: 2144078 - DNA, 25 bp, Homo sapien
caaggtctcaactcctcttctttat

SEQ ID NO: 2144079 - DNA, 25 bp, Homo sapien
ttttgcactcttagacccaactgag

SEQ ID NO: 2144080 - DNA, 25 bp, Homo sapien
ttttcttttgcactcttagacccaa

SEQ ID NO: 2144081 - DNA, 25 bp, Homo sapien
tgagtgaaggtcagaactgcccttt

SEQ ID NO: 2144082 - DNA, 25 bp, Homo sapien
cactcttagacccaactgagttcat

SEQ ID NO: 2144083 - DNA, 25 bp, Homo sapien
gatgcttttccactatcagaggttt

SEQ ID NO: 2144084 - DNA, 25 bp, Homo sapien
aatttaaccctgcagatgcttttcc

SEQ ID NO: 2144085 - DNA, 25 bp, Homo sapien
gcagatgcttttccactatcagagg

SEQ ID NO: 2144086 - DNA, 25 bp, Homo sapien
tgcaaaatttaaccctgcagatgct

SEQ ID NO: 2144087 - DNA, 25 bp, Homo sapien
cttgatctgggctaccgtctccaaa

SEQ ID NO: 2144088 - DNA, 25 bp, Homo sapien
cacttccagggtgattggggcccta

SEQ ID NO: 2144089 - DNA, 25 bp, Homo sapien
tctccaaaccttcttgagggtgtgc

SEQ ID NO: 2144090 - DNA, 25 bp, Homo sapien
cattggcatgcatgcctgccgagag

SEQ ID NO: 2144091 - DNA, 25 bp, Homo sapien
agtatctctcttcttcgcaatgtgc

SEQ ID NO: 2144092 - DNA, 25 bp, Homo sapien
gtcagcaaatcagccttgtactcaa

SEQ ID NO: 2144093 - DNA, 25 bp, Homo sapien
aaaccaccaagtagatagtatctct

SEQ ID NO: 2144094 - DNA, 25 bp, Homo sapien
ccttgtcagcaaatcagccttgtac

SEQ ID NO: 2144095 - DNA, 25 bp, Homo sapien
ggttgcttgctagaacaaagtcatt

SEQ ID NO: 2144096 - DNA, 25 bp, Homo sapien
ggtataggatatgcatccaggtaca

SEQ ID NO: 2144097 - DNA, 25 bp, Homo sapien
gatattggccattaacagacacttg

SEQ ID NO: 2144098 - DNA, 25 bp, Homo sapien
gacacttgatagcttggtttactag

SEQ ID NO: 2144099 - DNA, 25 bp, Homo sapien
gagtgggcgagccaaaaaactcata

SEQ ID NO: 2144100 - DNA, 25 bp, Homo sapien
tacttcctagagtgggcgagccaaa

SEQ ID NO: 2144101 - DNA, 25 bp, Homo sapien
aattctgaacattcttacttcctag

SEQ ID NO: 2144102 - DNA, 25 bp, Homo sapien
gaacattcttacttcctagagtggg

SEQ ID NO: 2144103 - DNA, 25 bp, Homo sapien
gtggtaccggcaggaatgagtataa

SEQ ID NO: 2144104 - DNA, 25 bp, Homo sapien
taacaaatgcaattggtatagaggg

SEQ ID NO: 2144105 - DNA, 25 bp, Homo sapien
ctagccactggcatgaccactgtgg

SEQ ID NO: 2144106 - DNA, 25 bp, Homo sapien
tatagaggggaaagggagcatctcc

SEQ ID NO: 2144107 - DNA, 25 bp, Homo sapien
tgctctctgctagtgtgggagcaac

SEQ ID NO: 2144108 - DNA, 25 bp, Homo sapien
ttttgctctctgctagtgtgggagc

SEQ ID NO: 2144109 - DNA, 25 bp, Homo sapien
ttgctctctgctagtgtgggagcaa

SEQ ID NO: 2144110 - DNA, 25 bp, Homo sapien
tttgctctctgctagtgtgggagca

SEQ ID NO: 2144111 - DNA, 25 bp, Homo sapien
caaggcactggtccggaaatcggca

SEQ ID NO: 2144112 - DNA, 25 bp, Homo sapien
tttcaaggcactggtccggaaatcg

SEQ ID NO: 2144113 - DNA, 25 bp, Homo sapien
aggcactggtccggaaatcggcaaa

SEQ ID NO: 2144114 - DNA, 25 bp, Homo sapien
ttcaaggcactggtccggaaatcgg

SEQ ID NO: 2144115 - DNA, 25 bp, Homo sapien
ttcagaaataagaggagccacgttc

SEQ ID NO: 2144116 - DNA, 25 bp, Homo sapien
gagagagtcgagctataaaatgcct

SEQ ID NO: 2144117 - DNA, 25 bp, Homo sapien
ctaaaaccattgagaataagagaga

SEQ ID NO: 2144118 - DNA, 25 bp, Homo sapien
agaggagccacgttcataaaacaca

SEQ ID NO: 2144119 - DNA, 25 bp, Homo sapien
cagtctcgtcataggctgcacatag

SEQ ID NO: 2144120 - DNA, 25 bp, Homo sapien
ctcgtcataggctgcacatagagaa

SEQ ID NO: 2144121 - DNA, 25 bp, Homo sapien
ttataatccttaacactccagcttc

SEQ ID NO: 2144122 - DNA, 25 bp, Homo sapien
gcatctgtcagtctcgtcataggct

SEQ ID NO: 2144123 - DNA, 25 bp, Homo sapien
gattgcaacacggtcatttcatggg

SEQ ID NO: 2144124 - DNA, 25 bp, Homo sapien
tttcatgggcaccagtcagaaggct

SEQ ID NO: 2144125 - DNA, 25 bp, Homo sapien
tatcttcctttctcgcggatcctgc

SEQ ID NO: 2144126 - DNA, 25 bp, Homo sapien
gatcctgcatttaacggctgtcaca

SEQ ID NO: 2144127 - DNA, 25 bp, Homo sapien
gactgactggctattgtggcccaaa

SEQ ID NO: 2144128 - DNA, 25 bp, Homo sapien
tggcacaattggtagcagctctatg

SEQ ID NO: 2144129 - DNA, 25 bp, Homo sapien
tcagaggtgtatgaagctggcacaa

SEQ ID NO: 2144130 - DNA, 25 bp, Homo sapien
cacattgcaggagggaatatatctt

SEQ ID NO: 2144131 - DNA, 25 bp, Homo sapien
gctgtataattaccctgaaaggcca

SEQ ID NO: 2144132 - DNA, 25 bp, Homo sapien
tgaaaggccattctcacgatttcct

SEQ ID NO: 2144133 - DNA, 25 bp, Homo sapien
caaagctgaagctccggatatgtgt

SEQ ID NO: 2144134 - DNA, 25 bp, Homo sapien
tagttgagagggtggtaagatgccg

SEQ ID NO: 2144135 - DNA, 25 bp, Homo sapien
agctgtagcctccagacagatacgg

SEQ ID NO: 2144136 - DNA, 25 bp, Homo sapien
agacagatacggaagtcctgccacc

SEQ ID NO: 2144137 - DNA, 25 bp, Homo sapien
gagggcaaggctcttctgagactga

SEQ ID NO: 2144138 - DNA, 25 bp, Homo sapien
gagactgaatgccttccctctggcc

SEQ ID NO: 2144139 - DNA, 25 bp, Homo sapien
gggccagcagtaggtttcaagggct

SEQ ID NO: 2144140 - DNA, 25 bp, Homo sapien
gccagcagtaggtttcaagggctct

SEQ ID NO: 2144141 - DNA, 25 bp, Homo sapien
ccctggggccagcagtaggtttcaa

SEQ ID NO: 2144142 - DNA, 25 bp, Homo sapien
cagcagtaggtttcaagggctctga

SEQ ID NO: 2144143 - DNA, 25 bp, Homo sapien
ctcatctctggcaaagtggaagcat

SEQ ID NO: 2144144 - DNA, 25 bp, Homo sapien
gaagccagaacctcaagctctttgt

SEQ ID NO: 2144145 - DNA, 25 bp, Homo sapien
tcagaagccagaacctcaagctctt

SEQ ID NO: 2144146 - DNA, 25 bp, Homo sapien
agaacctcaagctctttgtttgccc

SEQ ID NO: 2144147 - DNA, 25 bp, Homo sapien
agcagtgctgactgggcccctcgca

SEQ ID NO: 2144148 - DNA, 25 bp, Homo sapien
tgggactcagacaagtatgcattcc

SEQ ID NO: 2144149 - DNA, 25 bp, Homo sapien
caagtatgcattccccttagaggct

SEQ ID NO: 2144150 - DNA, 25 bp, Homo sapien
agtatgcattccccttagaggcttc

SEQ ID NO: 2144151 - DNA, 25 bp, Homo sapien
cctgggactcagacaagtatgcatt

SEQ ID NO: 2144152 - DNA, 25 bp, Homo sapien
ccatgtgaattactctagaagtgct

SEQ ID NO: 2144153 - DNA, 25 bp, Homo sapien
ggaatatgtatgaaatggccctgtg

SEQ ID NO: 2144154 - DNA, 25 bp, Homo sapien
gcttggaaaatcgaacttggcggcg

SEQ ID NO: 2144155 - DNA, 25 bp, Homo sapien
gcggcgtcaatctgcacaaccatgt

SEQ ID NO: 2144156 - DNA, 25 bp, Homo sapien
tccttcaaacttaagaaatggccag

SEQ ID NO: 2144157 - DNA, 25 bp, Homo sapien
tggccagatttgtttgcctgtcttc

SEQ ID NO: 2144158 - DNA, 25 bp, Homo sapien
aacttaagaaatggccagatttgtt

SEQ ID NO: 2144159 - DNA, 25 bp, Homo sapien
gtcttgtatccttcaaacttaagaa

SEQ ID NO: 2144160 - DNA, 25 bp, Homo sapien
ctgcggcttccttccacccctggcc

SEQ ID NO: 2144161 - DNA, 25 bp, Homo sapien
aggggggagagatgagacggtggga

SEQ ID NO: 2144162 - DNA, 25 bp, Homo sapien
atgagacggtgggacggggcagcgg

SEQ ID NO: 2144163 - DNA, 25 bp, Homo sapien
gggagagatgagacggtgggacggg

SEQ ID NO: 2144164 - DNA, 25 bp, Homo sapien
cagcgggggttgacttggggctgcg

SEQ ID NO: 2144165 - DNA, 25 bp, Homo sapien
gaatattggactgcctcgggactag

SEQ ID NO: 2144166 - DNA, 25 bp, Homo sapien
aaaatttgtcttgcttggtgccccg

SEQ ID NO: 2144167 - DNA, 25 bp, Homo sapien
cattttcgggagcttacacttaggc

SEQ ID NO: 2144168 - DNA, 25 bp, Homo sapien
tgccccgagcgacttttccaaggta

SEQ ID NO: 2144169 - DNA, 25 bp, Homo sapien
gcctttggcgagatagctgatacat

SEQ ID NO: 2144170 - DNA, 25 bp, Homo sapien
tttcccaataggaatgactatacca

SEQ ID NO: 2144171 - DNA, 25 bp, Homo sapien
ccttgctcaataaaagtgggcttca

SEQ ID NO: 2144172 - DNA, 25 bp, Homo sapien
tagtgtagatgtaaagctgctgatg

SEQ ID NO: 2144173 - DNA, 25 bp, Homo sapien
tgaggacttgtcttaaatgcttatg

SEQ ID NO: 2144174 - DNA, 25 bp, Homo sapien
gaggacttgtcttaaatgcttatga

SEQ ID NO: 2144175 - DNA, 25 bp, Homo sapien
cttgaggacttgtcttaaatgctta

SEQ ID NO: 2144176 - DNA, 25 bp, Homo sapien
ggacttgtcttaaatgcttatgatc

SEQ ID NO: 2144177 - DNA, 25 bp, Homo sapien
tttgtttgagatgagagggtatcgt

SEQ ID NO: 2144178 - DNA, 25 bp, Homo sapien
ttgtttgagatgagagggtatcgtt

SEQ ID NO: 2144179 - DNA, 25 bp, Homo sapien
ttttgtttgagatgagagggtatcg

SEQ ID NO: 2144180 - DNA, 25 bp, Homo sapien
tgtttgagatgagagggtatcgttg

SEQ ID NO: 2144181 - DNA, 25 bp, Homo sapien
tggtatacagctttatacaagtcat

SEQ ID NO: 2144182 - DNA, 25 bp, Homo sapien
tataattattgagccatccaggaat

SEQ ID NO: 2144183 - DNA, 25 bp, Homo sapien
tgagtcgctaggctgtgtctgcttc

SEQ ID NO: 2144184 - DNA, 25 bp, Homo sapien
gtggcttaagtctcttgtcctgatg

SEQ ID NO: 2144185 - DNA, 25 bp, Homo sapien
tccaggaatttagactgagtcgcta

SEQ ID NO: 2144186 - DNA, 25 bp, Homo sapien
gttttcctcagccaaaagttctgca

SEQ ID NO: 2144187 - DNA, 25 bp, Homo sapien
gccactgggaacttcagcaggatga

SEQ ID NO: 2144188 - DNA, 25 bp, Homo sapien
ttcctcagccaaaagttctgcagcc

SEQ ID NO: 2144189 - DNA, 25 bp, Homo sapien
ctcagccaaaagttctgcagccact

SEQ ID NO: 2144190 - DNA, 25 bp, Homo sapien
gctatatggattctgagtgtctgaa

SEQ ID NO: 2144191 - DNA, 25 bp, Homo sapien
gacccaaacaatgagtgcaatagga

SEQ ID NO: 2144192 - DNA, 25 bp, Homo sapien
gtgaaggatagccatgaccgcgcga

SEQ ID NO: 2144193 - DNA, 25 bp, Homo sapien
gaccgcgcgaggcagtatctgatca

SEQ ID NO: 2144194 - DNA, 25 bp, Homo sapien
ctcctgtaatgtgactctgtctggc

SEQ ID NO: 2144195 - DNA, 25 bp, Homo sapien
cttcttccacagccacattgggtag

SEQ ID NO: 2144196 - DNA, 25 bp, Homo sapien
ccttcttccacagccacattgggta

SEQ ID NO: 2144197 - DNA, 25 bp, Homo sapien
gtaatgtgactctgtctggcccctt

SEQ ID NO: 2144198 - DNA, 25 bp, Homo sapien
gagctgggacttcaatgtcaatttt

SEQ ID NO: 2144199 - DNA, 25 bp, Homo sapien
tttacaagctgcatttagatgtcga

SEQ ID NO: 2144200 - DNA, 25 bp, Homo sapien
catttagatgtcgagcctccagagc

SEQ ID NO: 2144201 - DNA, 25 bp, Homo sapien
gctgcatttagatgtcgagcctcca

SEQ ID NO: 2144202 - DNA, 25 bp, Homo sapien
tcagacgaggccttctgctctgaac

SEQ ID NO: 2144203 - DNA, 25 bp, Homo sapien
cagacgaggccttctgctctgaact

SEQ ID NO: 2144204 - DNA, 25 bp, Homo sapien
tggaaacaggattcagaagctgttg

SEQ ID NO: 2144205 - DNA, 25 bp, Homo sapien
aattatctgcaagtttggaaacagg

SEQ ID NO: 2144206 - DNA, 25 bp, Homo sapien
tgcaagtttggaaacaggattcaga

SEQ ID NO: 2144207 - DNA, 25 bp, Homo sapien
tttggaaacaggattcagaagctgt

SEQ ID NO: 2144208 - DNA, 25 bp, Homo sapien
cacttgactgctattaggcagggaa

SEQ ID NO: 2144209 - DNA, 25 bp, Homo sapien
gggaattgagcagaggacaagctac

SEQ ID NO: 2144210 - DNA, 25 bp, Homo sapien
tatagttctagagtgaaggtggcac

SEQ ID NO: 2144211 - DNA, 25 bp, Homo sapien
tacgtgaggccaagagaatggttaa

SEQ ID NO: 2144212 - DNA, 25 bp, Homo sapien
ccaaactccaatatcagttgtttct

SEQ ID NO: 2144213 - DNA, 25 bp, Homo sapien
ttccaaactccaatatcagttgttt

SEQ ID NO: 2144214 - DNA, 25 bp, Homo sapien
caaactccaatatcagttgtttctt

SEQ ID NO: 2144215 - DNA, 25 bp, Homo sapien
tccaaactccaatatcagttgtttc

SEQ ID NO: 2144216 - DNA, 25 bp, Homo sapien
gcaaggagctctgcttccctccttc

SEQ ID NO: 2144217 - DNA, 25 bp, Homo sapien
cagccaaagcaaggagctctgcttc

SEQ ID NO: 2144218 - DNA, 25 bp, Homo sapien
ccagccaaagcaaggagctctgctt

SEQ ID NO: 2144219 - DNA, 25 bp, Homo sapien
aggagctctgcttccctccttccat

SEQ ID NO: 2144220 - DNA, 25 bp, Homo sapien
cagacagcactggaaccagcttcct

SEQ ID NO: 2144221 - DNA, 25 bp, Homo sapien
cattttccccttgagcgtagagttt

SEQ ID NO: 2144222 - DNA, 25 bp, Homo sapien
tgtgaacagacagcactggaaccag

SEQ ID NO: 2144223 - DNA, 25 bp, Homo sapien
gaacagacagcactggaaccagctt

SEQ ID NO: 2144224 - DNA, 25 bp, Homo sapien
agctgctcccacatacacttcgtag

SEQ ID NO: 2144225 - DNA, 25 bp, Homo sapien
aaatttaaacgaggttactgcatca

SEQ ID NO: 2144226 - DNA, 25 bp, Homo sapien
tttaaacgaggttactgcatcagaa

SEQ ID NO: 2144227 - DNA, 25 bp, Homo sapien
ccacatacacttcgtagaaaattta

SEQ ID NO: 2144228 - DNA, 25 bp, Homo sapien
gaaatgtgctctcattgggtgttac

SEQ ID NO: 2144229 - DNA, 25 bp, Homo sapien
ggaagaaatgtgctctcattgggtg

SEQ ID NO: 2144230 - DNA, 25 bp, Homo sapien
tggctttcaaggtgtaaaggaagaa

SEQ ID NO: 2144231 - DNA, 25 bp, Homo sapien
taaaggaagaaatgtgctctcattg

SEQ ID NO: 2144232 - DNA, 25 bp, Homo sapien
ctacactgcctctatcccattttgg

SEQ ID NO: 2144233 - DNA, 25 bp, Homo sapien
tgctctcttgcaactgtgtcagaaa

SEQ ID NO: 2144234 - DNA, 25 bp, Homo sapien
gattggagggtatctgtcattggct

SEQ ID NO: 2144235 - DNA, 25 bp, Homo sapien
gattcctggttattgaggattggag

SEQ ID NO: 2144236 - DNA, 25 bp, Homo sapien
aactgtgtcagaaagggttttgtgg

SEQ ID NO: 2144237 - DNA, 25 bp, Homo sapien
tcaacagcccacaacggacataagg

SEQ ID NO: 2144238 - DNA, 25 bp, Homo sapien
gagagcaagagcactcacgtcatca

SEQ ID NO: 2144239 - DNA, 25 bp, Homo sapien
gaattgtagtctgaggtgtcctgag

SEQ ID NO: 2144240 - DNA, 25 bp, Homo sapien
tcctgagagttctaacagtgacagc

SEQ ID NO: 2144241 - DNA, 25 bp, Homo sapien
aagaacaatgtcagacaccaaaaca

SEQ ID NO: 2144242 - DNA, 25 bp, Homo sapien
agaaaggtaagaacaatgtcagaca

SEQ ID NO: 2144243 - DNA, 25 bp, Homo sapien
gaacaatgtcagacaccaaaacaaa

SEQ ID NO: 2144244 - DNA, 25 bp, Homo sapien
aggtaagaacaatgtcagacaccaa

SEQ ID NO: 2144245 - DNA, 25 bp, Homo sapien
tcaataattcgaagtgttgttaaaa

SEQ ID NO: 2144246 - DNA, 25 bp, Homo sapien
gaatcaataattcgaagtgttgtta

SEQ ID NO: 2144247 - DNA, 25 bp, Homo sapien
tatataaggaatcaataattcgaag

SEQ ID NO: 2144248 - DNA, 25 bp, Homo sapien
aaggaatcaataattcgaagtgttg

SEQ ID NO: 2144249 - DNA, 25 bp, Homo sapien
ctggatcattaaaatgaagttgttg

SEQ ID NO: 2144250 - DNA, 25 bp, Homo sapien
ggatcattaaaatgaagttgttgtc

SEQ ID NO: 2144251 - DNA, 25 bp, Homo sapien
gctggatcattaaaatgaagttgtt

SEQ ID NO: 2144252 - DNA, 25 bp, Homo sapien
tggatcattaaaatgaagttgttgt

SEQ ID NO: 2144253 - DNA, 25 bp, Homo sapien
gctctctactacttcccaacctcta

SEQ ID NO: 2144254 - DNA, 25 bp, Homo sapien
atcacttctgctctctactacttcc

SEQ ID NO: 2144255 - DNA, 25 bp, Homo sapien
ttcccaacctctagacctatagctg

SEQ ID NO: 2144256 - DNA, 25 bp, Homo sapien
ccaacctctagacctatagctgctc

SEQ ID NO: 2144257 - DNA, 25 bp, Homo sapien
tatttggaagcccttggatagtcca

SEQ ID NO: 2144258 - DNA, 25 bp, Homo sapien
ggagctccatagtcttccacagatg

SEQ ID NO: 2144259 - DNA, 25 bp, Homo sapien
gggttgaattccactactatttgga

SEQ ID NO: 2144260 - DNA, 25 bp, Homo sapien
tatgaaggattctgaatgggagctc

SEQ ID NO: 2144261 - DNA, 25 bp, Homo sapien
ctgaggtaaggactccactgcccag

SEQ ID NO: 2144262 - DNA, 25 bp, Homo sapien
gaagacctgaggtaaggactccact

SEQ ID NO: 2144263 - DNA, 25 bp, Homo sapien
tgtgaagacctgaggtaaggactcc

SEQ ID NO: 2144264 - DNA, 25 bp, Homo sapien
tgtgtgctgtgaagacctgaggtaa

SEQ ID NO: 2144265 - DNA, 25 bp, Homo sapien
ttctcaaaattcagggacaatggtg

SEQ ID NO: 2144266 - DNA, 25 bp, Homo sapien
ctttcagcgtgcgaacaataagctg

SEQ ID NO: 2144267 - DNA, 25 bp, Homo sapien
gaacaataagctgaagatgcatgga

SEQ ID NO: 2144268 - DNA, 25 bp, Homo sapien
tgcatggagcaaggcgaatccttgc

SEQ ID NO: 2144269 - DNA, 25 bp, Homo sapien
gtcaccagagtcatggagcttagaa

SEQ ID NO: 2144270 - DNA, 25 bp, Homo sapien
aaatatacctcaacagtttcaaggg

SEQ ID NO: 2144271 - DNA, 25 bp, Homo sapien
ggattgattcacttgggccctgcag

SEQ ID NO: 2144272 - DNA, 25 bp, Homo sapien
gcagagccaggaccaatatgaaata

SEQ ID NO: 2144273 - DNA, 25 bp, Homo sapien
tcctttctgacgctttggttctgtt

SEQ ID NO: 2144274 - DNA, 25 bp, Homo sapien
ctcctttctgacgctttggttctgt

SEQ ID NO: 2144275 - DNA, 25 bp, Homo sapien
cctttctgacgctttggttctgttt

SEQ ID NO: 2144276 - DNA, 25 bp, Homo sapien
gctcctcgttttcttgctgtgtgag

SEQ ID NO: 2144277 - DNA, 25 bp, Homo sapien
tttcttgctgtgtgagccctgccct

SEQ ID NO: 2144278 - DNA, 25 bp, Homo sapien
tcctcgttttcttgctgtgtgagcc

SEQ ID NO: 2144279 - DNA, 25 bp, Homo sapien
gctgtgtgagccctgccctcgggac

SEQ ID NO: 2144280 - DNA, 25 bp, Homo sapien
gttctctgtgggctcaaaatgacag

SEQ ID NO: 2144281 - DNA, 25 bp, Homo sapien
tccccgttctctgtgggctcaaaat

SEQ ID NO: 2144282 - DNA, 25 bp, Homo sapien
tctctgtgggctcaaaatgacaggc

SEQ ID NO: 2144283 - DNA, 25 bp, Homo sapien
cccgttctctgtgggctcaaaatga

SEQ ID NO: 2144284 - DNA, 25 bp, Homo sapien
tgactgccaaggaatgagcgctagc

SEQ ID NO: 2144285 - DNA, 25 bp, Homo sapien
cattcatcctgaaggtcacggcaac

SEQ ID NO: 2144286 - DNA, 25 bp, Homo sapien
ttcggtgctcaaagggtctcggtgc

SEQ ID NO: 2144287 - DNA, 25 bp, Homo sapien
caactcgcgggaacaatgtgcaagt

SEQ ID NO: 2144288 - DNA, 25 bp, Homo sapien
tatgatacggtggaaggagccttct

SEQ ID NO: 2144289 - DNA, 25 bp, Homo sapien
ctatgatacggtggaaggagccttc

SEQ ID NO: 2144290 - DNA, 25 bp, Homo sapien
cggcacacctgaaggctgattcttg

SEQ ID NO: 2144291 - DNA, 25 bp, Homo sapien
aaatttgttcggcacacctgaaggc

SEQ ID NO: 2144292 - DNA, 25 bp, Homo sapien
cactgaaatttgttcggcacacctg

SEQ ID NO: 2144293 - DNA, 25 bp, Homo sapien
tgttcggcacacctgaaggctgatt

SEQ ID NO: 2144294 - DNA, 25 bp, Homo sapien
gctatcttttagaatgctgctaggg

SEQ ID NO: 2144295 - DNA, 25 bp, Homo sapien
tacttcatgtactagaaagtgcacc

SEQ ID NO: 2144296 - DNA, 25 bp, Homo sapien
gctgctagggaaatcgatggcactt

SEQ ID NO: 2144297 - DNA, 25 bp, Homo sapien
tattcccctatactaggattcagca

SEQ ID NO: 2144298 - DNA, 25 bp, Homo sapien
tacagatggcaaatccaaaggataa

SEQ ID NO: 2144299 - DNA, 25 bp, Homo sapien
gacactggttgttcctattttacag

SEQ ID NO: 2144300 - DNA, 25 bp, Homo sapien
tattgtctgccaagtcgtgactgag

SEQ ID NO: 2144301 - DNA, 25 bp, Homo sapien
taggtagaagctaatggcccagaag

SEQ ID NO: 2144302 - DNA, 25 bp, Homo sapien
tgttgtccgccactcaatgttgcct

SEQ ID NO: 2144303 - DNA, 25 bp, Homo sapien
taacagctgaattggagagatgcca

SEQ ID NO: 2144304 - DNA, 25 bp, Homo sapien
gcaagtagccaaagctgttagctgt

SEQ ID NO: 2144305 - DNA, 25 bp, Homo sapien
tcagagacggagtgtcatgagcaag

SEQ ID NO: 2144306 - DNA, 25 bp, Homo sapien
aaaggaaggctctacctgcatggta

SEQ ID NO: 2144307 - DNA, 25 bp, Homo sapien
gatgatgatttcgtgcacttctcca

SEQ ID NO: 2144308 - DNA, 25 bp, Homo sapien
cagtaaggtactcttgtcaggccca

SEQ ID NO: 2144309 - DNA, 25 bp, Homo sapien
tgccttttcgaactgaccactctga

SEQ ID NO: 2144310 - DNA, 25 bp, Homo sapien
gatcaggtctggaagattgtccatc

SEQ ID NO: 2144311 - DNA, 25 bp, Homo sapien
gtccatcatatcagtgacactctct

SEQ ID NO: 2144312 - DNA, 25 bp, Homo sapien
actgaatgcactgagtgatcaggtc

SEQ ID NO: 2144313 - DNA, 25 bp, Homo sapien
gattgtccatcatatcagtgacact

SEQ ID NO: 2144314 - DNA, 25 bp, Homo sapien
ttggatcaaggaagccaacaatggg

SEQ ID NO: 2144315 - DNA, 25 bp, Homo sapien
gcttggtgttggatcaaggaagcca

SEQ ID NO: 2144316 - DNA, 25 bp, Homo sapien
gctaaagagggcttggtgttggatc

SEQ ID NO: 2144317 - DNA, 25 bp, Homo sapien
atcaaggaagccaacaatgggagct

SEQ ID NO: 2144318 - DNA, 25 bp, Homo sapien
ttgctggcgggctcgtttggctggg

SEQ ID NO: 2144319 - DNA, 25 bp, Homo sapien
tttggcaaggcaatctcttgtgaag

SEQ ID NO: 2144320 - DNA, 25 bp, Homo sapien
tcttgtgaagtgaccagattggctg

SEQ ID NO: 2144321 - DNA, 25 bp, Homo sapien
tggctgcagtagaggcacaactgag

SEQ ID NO: 2144322 - DNA, 25 bp, Homo sapien
ttatttgtcgttgccggagctcgag

SEQ ID NO: 2144323 - DNA, 25 bp, Homo sapien
tgttatttgtcgttgccggagctcg

SEQ ID NO: 2144324 - DNA, 25 bp, Homo sapien
gctgtgttatttgtcgttgccggag

SEQ ID NO: 2144325 - DNA, 25 bp, Homo sapien
tgtgttatttgtcgttgccggagct

SEQ ID NO: 2144326 - DNA, 25 bp, Homo sapien
gaagcatggtccaaactctaggagg

SEQ ID NO: 2144327 - DNA, 25 bp, Homo sapien
tcttgggctcatttctaggcacaca

SEQ ID NO: 2144328 - DNA, 25 bp, Homo sapien
tgtatgtgccccaggatttttcaga

SEQ ID NO: 2144329 - DNA, 25 bp, Homo sapien
cccattggtcaggataaggttccca

SEQ ID NO: 2144330 - DNA, 25 bp, Homo sapien
gttctgtattaataaccctcttgat

SEQ ID NO: 2144331 - DNA, 25 bp, Homo sapien
ctgtattaataaccctcttgatggg

SEQ ID NO: 2144332 - DNA, 25 bp, Homo sapien
tattaataaccctcttgatgggtga

SEQ ID NO: 2144333 - DNA, 25 bp, Homo sapien
ttaataaccctcttgatgggtgact

SEQ ID NO: 2144334 - DNA, 25 bp, Homo sapien
ttactgcacactagtgcctgctaag

SEQ ID NO: 2144335 - DNA, 25 bp, Homo sapien
caagggttattaagttgcttgtcat

SEQ ID NO: 2144336 - DNA, 25 bp, Homo sapien
cacactagtgcctgctaagtccttg

SEQ ID NO: 2144337 - DNA, 25 bp, Homo sapien
gagctgcaagggttattaagttgct

SEQ ID NO: 2144338 - DNA, 25 bp, Homo sapien
gcctagaagactttgtgtgtttggt

SEQ ID NO: 2144339 - DNA, 25 bp, Homo sapien
cagcaagccacagcctagaagactt

SEQ ID NO: 2144340 - DNA, 25 bp, Homo sapien
gtgtgtttggtgcaatcatttttct

SEQ ID NO: 2144341 - DNA, 25 bp, Homo sapien
atgcgtcccagcaagccacagccta

SEQ ID NO: 2144342 - DNA, 25 bp, Homo sapien
ggttcatggcatagtctacaccccg

SEQ ID NO: 2144343 - DNA, 25 bp, Homo sapien
cagcatgctatgtgcgtgtggttca

SEQ ID NO: 2144344 - DNA, 25 bp, Homo sapien
tctttgaaaccagggacaagtcgtg

SEQ ID NO: 2144345 - DNA, 25 bp, Homo sapien
cagccatggttgacactgattccca

SEQ ID NO: 2144346 - DNA, 25 bp, Homo sapien
tgatagtcccgagatatactccttc

SEQ ID NO: 2144347 - DNA, 25 bp, Homo sapien
gatgtccttgggaccttccttgagc

SEQ ID NO: 2144348 - DNA, 25 bp, Homo sapien
ttgaggacaccttgacattggatgt

SEQ ID NO: 2144349 - DNA, 25 bp, Homo sapien
tatccaactcaagaattcctacctg

SEQ ID NO: 2144350 - DNA, 25 bp, Homo sapien
tcaatcacatcaatgactggtaggt

SEQ ID NO: 2144351 - DNA, 25 bp, Homo sapien
gactggtaggttgggcacaagcttc

SEQ ID NO: 2144352 - DNA, 25 bp, Homo sapien
tatggaacgagaatataggcatcac

SEQ ID NO: 2144353 - DNA, 25 bp, Homo sapien
tttctgggccccataccatcaatca

SEQ ID NO: 2144354 - DNA, 25 bp, Homo sapien
catttagtatttcataagagcccat

SEQ ID NO: 2144355 - DNA, 25 bp, Homo sapien
ccatttagtatttcataagagccca

SEQ ID NO: 2144356 - DNA, 25 bp, Homo sapien
tccatttagtatttcataagagccc

SEQ ID NO: 2144357 - DNA, 25 bp, Homo sapien
agtccatttagtatttcataagagc

SEQ ID NO: 2144358 - DNA, 25 bp, Homo sapien
caggtcgagtgcctaactatgggcc

SEQ ID NO: 2144359 - DNA, 25 bp, Homo sapien
ggtcgagtgcctaactatgggccca

SEQ ID NO: 2144360 - DNA, 25 bp, Homo sapien
tcgagtgcctaactatgggcccatt

SEQ ID NO: 2144361 - DNA, 25 bp, Homo sapien
gtgcctaactatgggcccattctga

SEQ ID NO: 2144362 - DNA, 25 bp, Homo sapien
catgttgatctgcacctggctctct

SEQ ID NO: 2144363 - DNA, 25 bp, Homo sapien
cctgtcatattggtggagagcatca

SEQ ID NO: 2144364 - DNA, 25 bp, Homo sapien
aattcttatgctatggagcttgacc

SEQ ID NO: 2144365 - DNA, 25 bp, Homo sapien
tggctgggcctattactgtgctgga

SEQ ID NO: 2144366 - DNA, 25 bp, Homo sapien
tgagtgctgacagtggctttccaaa

SEQ ID NO: 2144367 - DNA, 25 bp, Homo sapien
tcagtgggccatcagatcagcatgc

SEQ ID NO: 2144368 - DNA, 25 bp, Homo sapien
ttcctccggtagataacaggtagag

SEQ ID NO: 2144369 - DNA, 25 bp, Homo sapien
gatgtggatggaagatacatttccc

SEQ ID NO: 2144370 - DNA, 25 bp, Homo sapien
tccggtccataattttgatgcccac

SEQ ID NO: 2144371 - DNA, 25 bp, Homo sapien
tgctagatcccaccacaagcattgg

SEQ ID NO: 2144372 - DNA, 25 bp, Homo sapien
ggctaactccccatagctcatcatg

SEQ ID NO: 2144373 - DNA, 25 bp, Homo sapien
cataattttgatgcccacagcaatg

SEQ ID NO: 2144374 - DNA, 25 bp, Homo sapien
gcacatgctccctgaatgggggagc

SEQ ID NO: 2144375 - DNA, 25 bp, Homo sapien
tgaatgggggagccactctatcaga

SEQ ID NO: 2144376 - DNA, 25 bp, Homo sapien
ttggcttctaagctggcattctgca

SEQ ID NO: 2144377 - DNA, 25 bp, Homo sapien
cttctaagctggcattctgcacatg

SEQ ID NO: 2144378 - DNA, 25 bp, Homo sapien
ggctgctgttgacactcacgcccag

SEQ ID NO: 2144379 - DNA, 25 bp, Homo sapien
ccaggtgtagctgacaggctgtata

SEQ ID NO: 2144380 - DNA, 25 bp, Homo sapien
ctccttgaggagagcgcccaaagct

SEQ ID NO: 2144381 - DNA, 25 bp, Homo sapien
gtgtttttcagaggcagctaaaggt

SEQ ID NO: 2144382 - DNA, 25 bp, Homo sapien
gcagctaaaggtaaatctggagaaa

SEQ ID NO: 2144383 - DNA, 25 bp, Homo sapien
gagtagaacaataagttcaatccat

SEQ ID NO: 2144384 - DNA, 25 bp, Homo sapien
agtagaacaataagttcaatccata

SEQ ID NO: 2144385 - DNA, 25 bp, Homo sapien
gcatgtctgcgcaaagaaggcataa

SEQ ID NO: 2144386 - DNA, 25 bp, Homo sapien
ctgcatgtctgcgcaaagaaggcat

SEQ ID NO: 2144387 - DNA, 25 bp, Homo sapien
ttggtttcttgtggtcaccttcagc

SEQ ID NO: 2144388 - DNA, 25 bp, Homo sapien
tctctgcatgtctgcgcaaagaagg

SEQ ID NO: 2144389 - DNA, 25 bp, Homo sapien
tcaactggtccattatccttcattt

SEQ ID NO: 2144390 - DNA, 25 bp, Homo sapien
gtcactatagttaatccacatctca

SEQ ID NO: 2144391 - DNA, 25 bp, Homo sapien
ttgcctccctcaactggtccattat

SEQ ID NO: 2144392 - DNA, 25 bp, Homo sapien
cactatagttaatccacatctcacc

SEQ ID NO: 2144393 - DNA, 25 bp, Homo sapien
tatagtcagcaacatccttctcata

SEQ ID NO: 2144394 - DNA, 25 bp, Homo sapien
ttatagtcagcaacatccttctcat

SEQ ID NO: 2144395 - DNA, 25 bp, Homo sapien
atagtcagcaacatccttctcatac

SEQ ID NO: 2144396 - DNA, 25 bp, Homo sapien
cttatagtcagcaacatccttctca

SEQ ID NO: 2144397 - DNA, 25 bp, Homo sapien
caggcaattttagtgggaccctttg

SEQ ID NO: 2144398 - DNA, 25 bp, Homo sapien
tcctcctcatcttctttgtctttct

SEQ ID NO: 2144399 - DNA, 25 bp, Homo sapien
ctcctcatcttctttgtctttctct

SEQ ID NO: 2144400 - DNA, 25 bp, Homo sapien
tcctcatcttctttgtctttctctt

SEQ ID NO: 2144401 - DNA, 25 bp, Homo sapien
cttcctcctcatcttctttgtcttt

SEQ ID NO: 2144402 - DNA, 25 bp, Homo sapien
gctccggacatccaaccacttcatg

SEQ ID NO: 2144403 - DNA, 25 bp, Homo sapien
tcaggatgctccggacatccaacca

SEQ ID NO: 2144404 - DNA, 25 bp, Homo sapien
ccggacatccaaccacttcatgtaa

SEQ ID NO: 2144405 - DNA, 25 bp, Homo sapien
ggatgctccggacatccaaccactt

SEQ ID NO: 2144406 - DNA, 25 bp, Homo sapien
agcaaggagcatgaagagtttgtcg

SEQ ID NO: 2144407 - DNA, 25 bp, Homo sapien
tgccaagcaaggagcatgaagagtt

SEQ ID NO: 2144408 - DNA, 25 bp, Homo sapien
gcctcaatgccaagcaaggagcatg

SEQ ID NO: 2144409 - DNA, 25 bp, Homo sapien
cacagcagcacaccctgagctacag

SEQ ID NO: 2144410 - DNA, 25 bp, Homo sapien
gacgcagaggtttatcatatctttc

SEQ ID NO: 2144411 - DNA, 25 bp, Homo sapien
tcatatctttctgtttgagggcatc

SEQ ID NO: 2144412 - DNA, 25 bp, Homo sapien
ttatcatatctttctgtttgagggc

SEQ ID NO: 2144413 - DNA, 25 bp, Homo sapien
gcctgacgcagaggtttatcatatc

SEQ ID NO: 2144414 - DNA, 25 bp, Homo sapien
gaacattcttcttccaaggctggag

SEQ ID NO: 2144415 - DNA, 25 bp, Homo sapien
gctggagaggatcctctctagtatc

SEQ ID NO: 2144416 - DNA, 25 bp, Homo sapien
tctctttggaacattcttcttccaa

SEQ ID NO: 2144417 - DNA, 25 bp, Homo sapien
tccaaggctggagaggatcctctct

SEQ ID NO: 2144418 - DNA, 25 bp, Homo sapien
ttcaggatgctgatgctttcactga

SEQ ID NO: 2144419 - DNA, 25 bp, Homo sapien
tgctttcactgagaacaccaatgcc

SEQ ID NO: 2144420 - DNA, 25 bp, Homo sapien
tgctactgctctccacagatggctt

SEQ ID NO: 2144421 - DNA, 25 bp, Homo sapien
ttaaagatgtcttttgctactgctc

SEQ ID NO: 2144422 - DNA, 25 bp, Homo sapien
gttgccattgctacaactcctgagt

SEQ ID NO: 2144423 - DNA, 25 bp, Homo sapien
agggcattgttttggctcaggattc

SEQ ID NO: 2144424 - DNA, 25 bp, Homo sapien
tacaactcctgagtgggatcccatc

SEQ ID NO: 2144425 - DNA, 25 bp, Homo sapien
cattgttttggctcaggattctgaa

SEQ ID NO: 2144426 - DNA, 25 bp, Homo sapien
tgactccagtgtgggtgtgatttcc

SEQ ID NO: 2144427 - DNA, 25 bp, Homo sapien
caaaccttgccttgactccagtgtg

SEQ ID NO: 2144428 - DNA, 25 bp, Homo sapien
aaaccttgccttgactccagtgtgg

SEQ ID NO: 2144429 - DNA, 25 bp, Homo sapien
ataacccttgtgtttcctttcatca

SEQ ID NO: 2144430 - DNA, 25 bp, Homo sapien
catttctgttgctcacatcgacttt

SEQ ID NO: 2144431 - DNA, 25 bp, Homo sapien
tttcatcatttctacgtcccctctt

SEQ ID NO: 2144432 - DNA, 25 bp, Homo sapien
tctggggctttgatggcacttgtcc

SEQ ID NO: 2144433 - DNA, 25 bp, Homo sapien
gctcccatagtctcctcttctaaag

SEQ ID NO: 2144434 - DNA, 25 bp, Homo sapien
ccaaacaaggctcccatagtctcct

SEQ ID NO: 2144435 - DNA, 25 bp, Homo sapien
aaggctcccatagtctcctcttcta

SEQ ID NO: 2144436 - DNA, 25 bp, Homo sapien
ctggtagcccaaccaaacaaggctc

SEQ ID NO: 2144437 - DNA, 25 bp, Homo sapien
ggaaggaattccaagtgttacacaa

SEQ ID NO: 2144438 - DNA, 25 bp, Homo sapien
ctcagagagggattggtaagctcct

SEQ ID NO: 2144439 - DNA, 25 bp, Homo sapien
aaagctgagacagaacatcgacact

SEQ ID NO: 2144440 - DNA, 25 bp, Homo sapien
tcgacacttggttttgacgaaatag

SEQ ID NO: 2144441 - DNA, 25 bp, Homo sapien
tatggtaagattctggagtagatcg

SEQ ID NO: 2144442 - DNA, 25 bp, Homo sapien
caggtatggagctatggtaagattc

SEQ ID NO: 2144443 - DNA, 25 bp, Homo sapien
ctagatcaggacaggtatggagcta

SEQ ID NO: 2144444 - DNA, 25 bp, Homo sapien
agtagatcgaatttgctttggagtc

SEQ ID NO: 2144445 - DNA, 25 bp, Homo sapien
gaccttgtcagagaatccataaggg

SEQ ID NO: 2144446 - DNA, 25 bp, Homo sapien
taccagtttgggtaaggtatgagca

SEQ ID NO: 2144447 - DNA, 25 bp, Homo sapien
ttatggctaacaacacatcctggga

SEQ ID NO: 2144448 - DNA, 25 bp, Homo sapien
gtatgagcaggtaccaaaagatgtc

SEQ ID NO: 2144449 - DNA, 25 bp, Homo sapien
cctgctgtccttgcttcaccaacct

SEQ ID NO: 2144450 - DNA, 25 bp, Homo sapien
tcaatgcatggggacagaacgaaaa

SEQ ID NO: 2144451 - DNA, 25 bp, Homo sapien
catggggacagaacgaaaaaccaca

SEQ ID NO: 2144452 - DNA, 25 bp, Homo sapien
tgctgtccttgcttcaccaacctgc

SEQ ID NO: 2144453 - DNA, 25 bp, Homo sapien
taatcaaggtgctcaagctgcagcc

SEQ ID NO: 2144454 - DNA, 25 bp, Homo sapien
gatgagggatccagcgagaagcctt

SEQ ID NO: 2144455 - DNA, 25 bp, Homo sapien
ccagcgagaagccttcttttccaaa

SEQ ID NO: 2144456 - DNA, 25 bp, Homo sapien
ctaatcaaggtgctcaagctgcagc

SEQ ID NO: 2144457 - DNA, 25 bp, Homo sapien
aggtggctccactgatggaaaaatg

SEQ ID NO: 2144458 - DNA, 25 bp, Homo sapien
ggtggctccactgatggaaaaatgg

SEQ ID NO: 2144459 - DNA, 25 bp, Homo sapien
ctgatggaaaaatggaccaaggtag

SEQ ID NO: 2144460 - DNA, 25 bp, Homo sapien
aaaatggaccaaggtagtcctccat

SEQ ID NO: 2144461 - DNA, 25 bp, Homo sapien
ctactttgtatatcgttttccaaag

SEQ ID NO: 2144462 - DNA, 25 bp, Homo sapien
ttgtatatcgttttccaaagaagac

SEQ ID NO: 2144463 - DNA, 25 bp, Homo sapien
ctttgtatatcgttttccaaagaag

SEQ ID NO: 2144464 - DNA, 25 bp, Homo sapien
tccacaagaatgaatttgcccccaa

SEQ ID NO: 2144465 - DNA, 25 bp, Homo sapien
catggttataacacattggcagact

SEQ ID NO: 2144466 - DNA, 25 bp, Homo sapien
gcagcaagtagcaaacttcaggaga

SEQ ID NO: 2144467 - DNA, 25 bp, Homo sapien
tctgttcagtttccaatccccgata

SEQ ID NO: 2144468 - DNA, 25 bp, Homo sapien
tccacattgtgtggtagccatctct

SEQ ID NO: 2144469 - DNA, 25 bp, Homo sapien
gagagctgaggtttcgcaaaaacca

SEQ ID NO: 2144470 - DNA, 25 bp, Homo sapien
aagatcaactatgcaaagccagtgg

SEQ ID NO: 2144471 - DNA, 25 bp, Homo sapien
tggtggaagccctctatgataaata

SEQ ID NO: 2144472 - DNA, 25 bp, Homo sapien
tcaacttgaggaatacttaccgagc

SEQ ID NO: 2144473 - DNA, 25 bp, Homo sapien
tgttgcccaggtctctatattgccc

SEQ ID NO: 2144474 - DNA, 25 bp, Homo sapien
cagcatcgcatactatggccccgaa

SEQ ID NO: 2144475 - DNA, 25 bp, Homo sapien
tatattgcccactacttacaggcgt

SEQ ID NO: 2144476 - DNA, 25 bp, Homo sapien
ttggtctgcttcatttccgacctgg

SEQ ID NO: 2144477 - DNA, 25 bp, Homo sapien
tagcgatggaggcagattatatgtt

SEQ ID NO: 2144478 - DNA, 25 bp, Homo sapien
tgaggcatacagacagaggcataac

SEQ ID NO: 2144479 - DNA, 25 bp, Homo sapien
gtaaatctgtgttttgtgacctctc

SEQ ID NO: 2144480 - DNA, 25 bp, Homo sapien
taccattcatggagatgaggcatac

SEQ ID NO: 2144481 - DNA, 25 bp, Homo sapien
caatacagcctgtgttgtgtcatac

SEQ ID NO: 2144482 - DNA, 25 bp, Homo sapien
aacttgctttaggacacaagcagcc

SEQ ID NO: 2144483 - DNA, 25 bp, Homo sapien
tgtgtcatacatgatgcctgcaact

SEQ ID NO: 2144484 - DNA, 25 bp, Homo sapien
gcctgtaaaagcgatacaccctctc

SEQ ID NO: 2144485 - DNA, 25 bp, Homo sapien
tgtactatccataacagccttgaag

SEQ ID NO: 2144486 - DNA, 25 bp, Homo sapien
gactgaatacaatgtgcaccagttc

SEQ ID NO: 2144487 - DNA, 25 bp, Homo sapien
cactgtactatccataacagccttg

SEQ ID NO: 2144488 - DNA, 25 bp, Homo sapien
ttcagaaattcatgaaagttgtatt

SEQ ID NO: 2144489 - DNA, 25 bp, Homo sapien
gtgtgctgtcccatgtcctctcctt

SEQ ID NO: 2144490 - DNA, 25 bp, Homo sapien
acagaagagacttggaccacctgaa

SEQ ID NO: 2144491 - DNA, 25 bp, Homo sapien
ccacctgaagtgtgctgtcccatgt

SEQ ID NO: 2144492 - DNA, 25 bp, Homo sapien
gaagagacttggaccacctgaagtg

SEQ ID NO: 2144493 - DNA, 25 bp, Homo sapien
taaattcaaaacctggaatccgcag

SEQ ID NO: 2144494 - DNA, 25 bp, Homo sapien
aaaacctggaatccgcagggctaca

SEQ ID NO: 2144495 - DNA, 25 bp, Homo sapien
tgattaaattcaaaacctggaatcc

SEQ ID NO: 2144496 - DNA, 25 bp, Homo sapien
gaatccgcagggctacaaatgtgat

SEQ ID NO: 2144497 - DNA, 25 bp, Homo sapien
cagatctcagagatttctgtgacca

SEQ ID NO: 2144498 - DNA, 25 bp, Homo sapien
acagatctcagagatttctgtgacc

SEQ ID NO: 2144499 - DNA, 25 bp, Homo sapien
gttgtcaacattaggagactgtgca

SEQ ID NO: 2144500 - DNA, 25 bp, Homo sapien
catagcaacaggaagtcccaagcag

SEQ ID NO: 2144501 - DNA, 25 bp, Homo sapien
gcaacaggaagtcccaagcaggcaa

SEQ ID NO: 2144502 - DNA, 25 bp, Homo sapien
ctgtggcacatagcaacaggaagtc

SEQ ID NO: 2144503 - DNA, 25 bp, Homo sapien
gcacatagcaacaggaagtcccaag

SEQ ID NO: 2144504 - DNA, 25 bp, Homo sapien
tataagttccgatgggattgtagca

SEQ ID NO: 2144505 - DNA, 25 bp, Homo sapien
acagtctgaagttatccttttctca

SEQ ID NO: 2144506 - DNA, 25 bp, Homo sapien
tgtgggtacctcatacttggctcca

SEQ ID NO: 2144507 - DNA, 25 bp, Homo sapien
tagctccattagctcacagagtaaa

SEQ ID NO: 2144508 - DNA, 25 bp, Homo sapien
gcagttggtgcacaatacatttcca

SEQ ID NO: 2144509 - DNA, 25 bp, Homo sapien
gtcataaagcagttggtgcacaata

SEQ ID NO: 2144510 - DNA, 25 bp, Homo sapien
cttttcaactgctaccacagtcata

SEQ ID NO: 2144511 - DNA, 25 bp, Homo sapien
tttcaactgctaccacagtcataaa

SEQ ID NO: 2144512 - DNA, 25 bp, Homo sapien
tatagcagactttaatgcggtaggg

SEQ ID NO: 2144513 - DNA, 25 bp, Homo sapien
agcagactttaatgcggtagggcac

SEQ ID NO: 2144514 - DNA, 25 bp, Homo sapien
tagcagactttaatgcggtagggca

SEQ ID NO: 2144515 - DNA, 25 bp, Homo sapien
atagcagactttaatgcggtagggc

SEQ ID NO: 2144516 - DNA, 25 bp, Homo sapien
tttcttgagtaataaataccccaca

SEQ ID NO: 2144517 - DNA, 25 bp, Homo sapien
caggactttggactaggcaaagatt

SEQ ID NO: 2144518 - DNA, 25 bp, Homo sapien
caaagatttcttgagtaataaatac

SEQ ID NO: 2144519 - DNA, 25 bp, Homo sapien
cccacaagcacaggtaaccaaagca

SEQ ID NO: 2144520 - DNA, 25 bp, Homo sapien
tctttgctcatgatgtgtcaaattc

SEQ ID NO: 2144521 - DNA, 25 bp, Homo sapien
tgaccaataggtatgcattcctctt

SEQ ID NO: 2144522 - DNA, 25 bp, Homo sapien
ttttcagattgaatactatgtatcc

SEQ ID NO: 2144523 - DNA, 25 bp, Homo sapien
tcacaaagatctcctgaccaatagg

SEQ ID NO: 2144524 - DNA, 25 bp, Homo sapien
tagcagtgccttttccggaacaatg

SEQ ID NO: 2144525 - DNA, 25 bp, Homo sapien
tattggcaatcgatgatgagccact

SEQ ID NO: 2144526 - DNA, 25 bp, Homo sapien
gctattggcaatcgatgatgagcca

SEQ ID NO: 2144527 - DNA, 25 bp, Homo sapien
gatgagccactttagcagtgccttt

SEQ ID NO: 2144528 - DNA, 25 bp, Homo sapien
agactgacgctgcccgatcgcctcg

SEQ ID NO: 2144529 - DNA, 25 bp, Homo sapien
tgaagactgacgctgcccgatcgcc

SEQ ID NO: 2144530 - DNA, 25 bp, Homo sapien
actgacgctgcccgatcgcctcgga

SEQ ID NO: 2144531 - DNA, 25 bp, Homo sapien
tgacgctgcccgatcgcctcggaag

SEQ ID NO: 2144532 - DNA, 25 bp, Homo sapien
gtgaaggacaataaggcaaatgcat

SEQ ID NO: 2144533 - DNA, 25 bp, Homo sapien
gatcttttgtactggattcataaat

SEQ ID NO: 2144534 - DNA, 25 bp, Homo sapien
ttaaagatcttttgtactggattca

SEQ ID NO: 2144535 - DNA, 25 bp, Homo sapien
ttgtactggattcataaattagttg

SEQ ID NO: 2144536 - DNA, 25 bp, Homo sapien
tcataaattagttgcttttcagagc

SEQ ID NO: 2144537 - DNA, 25 bp, Homo sapien
cacttcactccttgatggatgggat

SEQ ID NO: 2144538 - DNA, 25 bp, Homo sapien
tagagctggcgtctccacttcactc

SEQ ID NO: 2144539 - DNA, 25 bp, Homo sapien
tgggatgtgcgtagatatttctcgg

SEQ ID NO: 2144540 - DNA, 25 bp, Homo sapien
tggatgggatgtgcgtagatatttc

SEQ ID NO: 2144541 - DNA, 25 bp, Homo sapien
gcaacagagcaggccccagttgagc

SEQ ID NO: 2144542 - DNA, 25 bp, Homo sapien
gcaggccccagttgagcagctgtat

SEQ ID NO: 2144543 - DNA, 25 bp, Homo sapien
cagagcaggccccagttgagcagct

SEQ ID NO: 2144544 - DNA, 25 bp, Homo sapien
ggccccagttgagcagctgtatcat

SEQ ID NO: 2144545 - DNA, 25 bp, Homo sapien
gatgggtctttaaaggcattgagaa

SEQ ID NO: 2144546 - DNA, 25 bp, Homo sapien
atgggtctttaaaggcattgagaaa

SEQ ID NO: 2144547 - DNA, 25 bp, Homo sapien
agatgggtctttaaaggcattgaga

SEQ ID NO: 2144548 - DNA, 25 bp, Homo sapien
tggcttcacttatctcaggagtaat

SEQ ID NO: 2144549 - DNA, 25 bp, Homo sapien
tctcaggagtaatgtacaaggtcat

SEQ ID NO: 2144550 - DNA, 25 bp, Homo sapien
cacttatctcaggagtaatgtacaa

SEQ ID NO: 2144551 - DNA, 25 bp, Homo sapien
tacttggcttcacttatctcaggag

SEQ ID NO: 2144552 - DNA, 25 bp, Homo sapien
tcatattgctaactttgttgatcta

SEQ ID NO: 2144553 - DNA, 25 bp, Homo sapien
ttttcacagccacgggcaattgttt

SEQ ID NO: 2144554 - DNA, 25 bp, Homo sapien
taactttgttgatctatcttggtca

SEQ ID NO: 2144555 - DNA, 25 bp, Homo sapien
tgttgatctatcttggtcattttca

SEQ ID NO: 2144556 - DNA, 25 bp, Homo sapien
caggatagatggctgtgaatgaatt

SEQ ID NO: 2144557 - DNA, 25 bp, Homo sapien
tccaactctaaaatcgatccataag

SEQ ID NO: 2144558 - DNA, 25 bp, Homo sapien
gtttcactcgattgaaagcaaggga

SEQ ID NO: 2144559 - DNA, 25 bp, Homo sapien
gaattgtgtctgaacgttgtttcac

SEQ ID NO: 2144560 - DNA, 25 bp, Homo sapien
tttcatgtgaacccgtttctttgct

SEQ ID NO: 2144561 - DNA, 25 bp, Homo sapien
ttttcatgtgaacccgtttctttgc

SEQ ID NO: 2144562 - DNA, 25 bp, Homo sapien
atgtgaacccgtttctttgcttggt

SEQ ID NO: 2144563 - DNA, 25 bp, Homo sapien
tcatgtgaacccgtttctttgcttg

SEQ ID NO: 2144564 - DNA, 25 bp, Homo sapien
tttgtgtcagcctacgatatgggtc

SEQ ID NO: 2144565 - DNA, 25 bp, Homo sapien
caggaatctggttggccctgctgat

SEQ ID NO: 2144566 - DNA, 25 bp, Homo sapien
cactgaacagtccttggattgattg

SEQ ID NO: 2144567 - DNA, 25 bp, Homo sapien
caatctgtcagtattcttaagtgaa

SEQ ID NO: 2144568 - DNA, 25 bp, Homo sapien
cagaggcttcagacagaacatataa

SEQ ID NO: 2144569 - DNA, 25 bp, Homo sapien
agaggcttcagacagaacatataaa

SEQ ID NO: 2144570 - DNA, 25 bp, Homo sapien
tgtaagatctgtctcaaggaagcac

SEQ ID NO: 2144571 - DNA, 25 bp, Homo sapien
ctaccatgtgggcatctgaaggaaa

SEQ ID NO: 2144572 - DNA, 25 bp, Homo sapien
aattagcaagtgactgaatcagctt

SEQ ID NO: 2144573 - DNA, 25 bp, Homo sapien
ctattgtcttcaaacactggtgggc

SEQ ID NO: 2144574 - DNA, 25 bp, Homo sapien
gggctagtcagtgtgccatattcac

SEQ ID NO: 2144575 - DNA, 25 bp, Homo sapien
tggaatatccaaagggtccctgatt

SEQ ID NO: 2144576 - DNA, 25 bp, Homo sapien
ttaacatgggagaattggacaagct

SEQ ID NO: 2144577 - DNA, 25 bp, Homo sapien
ggtgataatccaacaagctgtacac

SEQ ID NO: 2144578 - DNA, 25 bp, Homo sapien
cacgtattatacatcgcagaggcca

SEQ ID NO: 2144579 - DNA, 25 bp, Homo sapien
taaacatgatctcctctgatacagt

SEQ ID NO: 2144580 - DNA, 25 bp, Homo sapien
aaactgttcaaccaaagcatgctta

SEQ ID NO: 2144581 - DNA, 25 bp, Homo sapien
ttagttgttaactagctgagtgacc

SEQ ID NO: 2144582 - DNA, 25 bp, Homo sapien
tattctcactcataaattttccaaa

SEQ ID NO: 2144583 - DNA, 25 bp, Homo sapien
cttttattctcactcataaattttc

SEQ ID NO: 2144584 - DNA, 25 bp, Homo sapien
tttattctcactcataaattttcca

SEQ ID NO: 2144585 - DNA, 25 bp, Homo sapien
tcataaattttccaaaatcacacat

SEQ ID NO: 2144586 - DNA, 25 bp, Homo sapien
cataaatttgttggctgtttcgata

SEQ ID NO: 2144587 - DNA, 25 bp, Homo sapien
tcttggaagtaactagtacaaccca

SEQ ID NO: 2144588 - DNA, 25 bp, Homo sapien
tccttgtagatactggataccagtc

SEQ ID NO: 2144589 - DNA, 25 bp, Homo sapien
tatatgcggcttgccagttttctca

SEQ ID NO: 2144590 - DNA, 25 bp, Homo sapien
ccatggagtttgaccaccagggagt

SEQ ID NO: 2144591 - DNA, 25 bp, Homo sapien
atggagtttgaccaccagggagtga

SEQ ID NO: 2144592 - DNA, 25 bp, Homo sapien
catggagtttgaccaccagggagtg

SEQ ID NO: 2144593 - DNA, 25 bp, Homo sapien
tcccatggagtttgaccaccaggga

SEQ ID NO: 2144594 - DNA, 25 bp, Homo sapien
tatacacttgcctatccattcagat

SEQ ID NO: 2144595 - DNA, 25 bp, Homo sapien
gcatgtggaattgaggcttttccca

SEQ ID NO: 2144596 - DNA, 25 bp, Homo sapien
ggcttttcccatgctataaggagat

SEQ ID NO: 2144597 - DNA, 25 bp, Homo sapien
gattaggagcattttggcagagacc

SEQ ID NO: 2144598 - DNA, 25 bp, Homo sapien
gatcgagttaaattgtcattttgag

SEQ ID NO: 2144599 - DNA, 25 bp, Homo sapien
ctgatcgagttaaattgtcattttg

SEQ ID NO: 2144600 - DNA, 25 bp, Homo sapien
cgagttaaattgtcattttgagtca

SEQ ID NO: 2144601 - DNA, 25 bp, Homo sapien
caactgatcgagttaaattgtcatt

SEQ ID NO: 2144602 - DNA, 25 bp, Homo sapien
gaaatgtcagtctttgacttaatga

SEQ ID NO: 2144603 - DNA, 25 bp, Homo sapien
aaatgtcagtctttgacttaatgaa

SEQ ID NO: 2144604 - DNA, 25 bp, Homo sapien
atgaatctcaagcagagtattagct

SEQ ID NO: 2144605 - DNA, 25 bp, Homo sapien
gaatctcaagcagagtattagctca

SEQ ID NO: 2144606 - DNA, 25 bp, Homo sapien
caggataatatctgcagactgaagt

SEQ ID NO: 2144607 - DNA, 25 bp, Homo sapien
tgatttggcagagtaaaatatctgc

SEQ ID NO: 2144608 - DNA, 25 bp, Homo sapien
cagatagcaatgtgtgctgaattgc

SEQ ID NO: 2144609 - DNA, 25 bp, Homo sapien
ttttcctccacgatgagcagatagc

SEQ ID NO: 2144610 - DNA, 25 bp, Homo sapien
caatgtacaagtgccaataggtgac

SEQ ID NO: 2144611 - DNA, 25 bp, Homo sapien
cgtataacatcatccgagaaggtgg

SEQ ID NO: 2144612 - DNA, 25 bp, Homo sapien
taggtaggtagagcttccctgttcc

SEQ ID NO: 2144613 - DNA, 25 bp, Homo sapien
tgctctaattgccataaccagggta

SEQ ID NO: 2144614 - DNA, 25 bp, Homo sapien
gtggccaacttcctgactgacaatg

SEQ ID NO: 2144615 - DNA, 25 bp, Homo sapien
caaatggtccctggtaaatgctggt

SEQ ID NO: 2144616 - DNA, 25 bp, Homo sapien
tccaggccattgcacttagagcggg

SEQ ID NO: 2144617 - DNA, 25 bp, Homo sapien
gaactgcccaaagttctcagctgtg

SEQ ID NO: 2144618 - DNA, 25 bp, Homo sapien
ttcaccatggaaagcaggaccggag

SEQ ID NO: 2144619 - DNA, 25 bp, Homo sapien
cccacaccgtgagatcaccatatgt

SEQ ID NO: 2144620 - DNA, 25 bp, Homo sapien
cacaccgtgagatcaccatatgtac

SEQ ID NO: 2144621 - DNA, 25 bp, Homo sapien
tctccccacaccgtgagatcaccat

SEQ ID NO: 2144622 - DNA, 25 bp, Homo sapien
tccccacaccgtgagatcaccatat

SEQ ID NO: 2144623 - DNA, 25 bp, Homo sapien
tggatcctgaatctctgatactgct

SEQ ID NO: 2144624 - DNA, 25 bp, Homo sapien
acctaaacacaatcttggatcctga

SEQ ID NO: 2144625 - DNA, 25 bp, Homo sapien
ttggatcctgaatctctgatactgc

SEQ ID NO: 2144626 - DNA, 25 bp, Homo sapien
aacctaaacacaatcttggatcctg

SEQ ID NO: 2144627 - DNA, 25 bp, Homo sapien
catgacatagttgaatcaggttgag

SEQ ID NO: 2144628 - DNA, 25 bp, Homo sapien
agtcagaatgttcagatcttttctg

SEQ ID NO: 2144629 - DNA, 25 bp, Homo sapien
tacgtatttgctggctgacagttaa

SEQ ID NO: 2144630 - DNA, 25 bp, Homo sapien
ttttctgcccactgtttcatacgta

SEQ ID NO: 2144631 - DNA, 25 bp, Homo sapien
cctgtggcctatcttgggaaactcc

SEQ ID NO: 2144632 - DNA, 25 bp, Homo sapien
cagctctttgcatatatggaaaagt

SEQ ID NO: 2144633 - DNA, 25 bp, Homo sapien
ggaaactccatattttagaggtctc

SEQ ID NO: 2144634 - DNA, 25 bp, Homo sapien
cagtatagctgtattcctgtggcct

SEQ ID NO: 2144635 - DNA, 25 bp, Homo sapien
gctctcatacaaaagggtgaccatg

SEQ ID NO: 2144636 - DNA, 25 bp, Homo sapien
tcctctggcagatggattccatact

SEQ ID NO: 2144637 - DNA, 25 bp, Homo sapien
gaagtgccacagatatgaagtaagg

SEQ ID NO: 2144638 - DNA, 25 bp, Homo sapien
tcagaagcaaccaagcagctctcat

SEQ ID NO: 2144639 - DNA, 25 bp, Homo sapien
ttatttcaaagtccatgcacctggt

SEQ ID NO: 2144640 - DNA, 25 bp, Homo sapien
aaaccttgtgcaattccttcaggaa

SEQ ID NO: 2144641 - DNA, 25 bp, Homo sapien
agtccatgcacctggtaataattgc

SEQ ID NO: 2144642 - DNA, 25 bp, Homo sapien
taattgcattatgactggctctaat

SEQ ID NO: 2144643 - DNA, 25 bp, Homo sapien
attcaatcaatttgaaaccaatctc

SEQ ID NO: 2144644 - DNA, 25 bp, Homo sapien
tattcaatcaatttgaaaccaatct

SEQ ID NO: 2144645 - DNA, 25 bp, Homo sapien
gaatattggccaaggacgaagaaat

SEQ ID NO: 2144646 - DNA, 25 bp, Homo sapien
cagatgctaacaggaatattggcca

SEQ ID NO: 2144647 - DNA, 25 bp, Homo sapien
ggatttcggcagatgctaacaggaa

SEQ ID NO: 2144648 - DNA, 25 bp, Homo sapien
ctttggcgggatattatatggattt

SEQ ID NO: 2144649 - DNA, 25 bp, Homo sapien
aaacacagctggtatcccctgaggg

SEQ ID NO: 2144650 - DNA, 25 bp, Homo sapien
tctaatcaggttctttatgggtcct

SEQ ID NO: 2144651 - DNA, 25 bp, Homo sapien
tatgggtcctgaaacacagctggta

SEQ ID NO: 2144652 - DNA, 25 bp, Homo sapien
gtttctctaatcaggttctttatgg

SEQ ID NO: 2144653 - DNA, 25 bp, Homo sapien
tctgcaaggaatgctgaggatgatg

SEQ ID NO: 2144654 - DNA, 25 bp, Homo sapien
gatgaagctcatgacagcaatgcct

SEQ ID NO: 2144655 - DNA, 25 bp, Homo sapien
atcagtggtcataataagaaactgg

SEQ ID NO: 2144656 - DNA, 25 bp, Homo sapien
agtggtcataataagaaactggtac

SEQ ID NO: 2144657 - DNA, 25 bp, Homo sapien
cccctatcctcctaacagttaagtg

SEQ ID NO: 2144658 - DNA, 25 bp, Homo sapien
ctttattgtgctgccacaactcccg

SEQ ID NO: 2144659 - DNA, 25 bp, Homo sapien
gccacagagcttctacccctatcct

SEQ ID NO: 2144660 - DNA, 25 bp, Homo sapien
gctgctgttgtaagaatccatgcca

SEQ ID NO: 2144661 - DNA, 25 bp, Homo sapien
tctccagggctcttgtagtatcaag

SEQ ID NO: 2144662 - DNA, 25 bp, Homo sapien
tctttttgcagtgggcaagggtcca

SEQ ID NO: 2144663 - DNA, 25 bp, Homo sapien
cactgaacagttggaccaataggca

SEQ ID NO: 2144664 - DNA, 25 bp, Homo sapien
caataatcatatatctctccagggc

SEQ ID NO: 2144665 - DNA, 25 bp, Homo sapien
cctcctaaaatatgtggtcccatca

SEQ ID NO: 2144666 - DNA, 25 bp, Homo sapien
cgtcctcctaaaatatgtggtccca

SEQ ID NO: 2144667 - DNA, 25 bp, Homo sapien
ctgtacacgtcctcctaaaatatgt

SEQ ID NO: 2144668 - DNA, 25 bp, Homo sapien
tacacgtcctcctaaaatatgtggt

SEQ ID NO: 2144669 - DNA, 25 bp, Homo sapien
cattgcaccagttagtcaatggctc

SEQ ID NO: 2144670 - DNA, 25 bp, Homo sapien
ggctgcattgcaccagttagtcaat

SEQ ID NO: 2144671 - DNA, 25 bp, Homo sapien
atggctgcattgcaccagttagtca

SEQ ID NO: 2144672 - DNA, 25 bp, Homo sapien
tgcaccagttagtcaatggctctac

SEQ ID NO: 2144673 - DNA, 25 bp, Homo sapien
gatggtataggaccaccctgttacc

SEQ ID NO: 2144674 - DNA, 25 bp, Homo sapien
ctgcagttgatagtacacaagaatg

SEQ ID NO: 2144675 - DNA, 25 bp, Homo sapien
caagaatggtgagatggtataggac

SEQ ID NO: 2144676 - DNA, 25 bp, Homo sapien
gttgatagtacacaagaatggtgag

SEQ ID NO: 2144677 - DNA, 25 bp, Homo sapien
taggggctctgtacactgtgtctgg

SEQ ID NO: 2144678 - DNA, 25 bp, Homo sapien
acttgtggtccaggtaggatagtag

SEQ ID NO: 2144679 - DNA, 25 bp, Homo sapien
agatacttgtggtccaggtaggata

SEQ ID NO: 2144680 - DNA, 25 bp, Homo sapien
tggcaccaactcagaaaagtgtttc

SEQ ID NO: 2144681 - DNA, 25 bp, Homo sapien
aaatccttcagttggctgactgtca

SEQ ID NO: 2144682 - DNA, 25 bp, Homo sapien
actggataattgcaggaaccttggc

SEQ ID NO: 2144683 - DNA, 25 bp, Homo sapien
cagttccaagtggtgaacatatcct

SEQ ID NO: 2144684 - DNA, 25 bp, Homo sapien
actttatgtcactaatgtagttcag

SEQ ID NO: 2144685 - DNA, 25 bp, Homo sapien
aaattttatacccatcagcacctcc

SEQ ID NO: 2144686 - DNA, 25 bp, Homo sapien
acagtatggtcatctgtagtcacaa

SEQ ID NO: 2144687 - DNA, 25 bp, Homo sapien
tggaaaccacaattctattcttcgt

SEQ ID NO: 2144688 - DNA, 25 bp, Homo sapien
caatgttttacagtggctctctaga

SEQ ID NO: 2144689 - DNA, 25 bp, Homo sapien
ggcactacccctgacttataagaat

SEQ ID NO: 2144690 - DNA, 25 bp, Homo sapien
tttggtgaaatctcagggggtcagc

SEQ ID NO: 2144691 - DNA, 25 bp, Homo sapien
tgaacacagttcaccaccaccataa

SEQ ID NO: 2144692 - DNA, 25 bp, Homo sapien
tgagccttggcgctgggagaaccac

SEQ ID NO: 2144693 - DNA, 25 bp, Homo sapien
gatgaacaaatctcgctgtgtagaa

SEQ ID NO: 2144694 - DNA, 25 bp, Homo sapien
tgcagccctatttcagagacattag

SEQ ID NO: 2144695 - DNA, 25 bp, Homo sapien
tgagatgaccagcatatgcattgac

SEQ ID NO: 2144696 - DNA, 25 bp, Homo sapien
tctgcaccgtcctgtatgtataaca

SEQ ID NO: 2144697 - DNA, 25 bp, Homo sapien
caacagctgcatccgtagggtgcat

SEQ ID NO: 2144698 - DNA, 25 bp, Homo sapien
tgccaggagcatcacaagcaattta

SEQ ID NO: 2144699 - DNA, 25 bp, Homo sapien
gcaatttacaaggttgattccacag

SEQ ID NO: 2144700 - DNA, 25 bp, Homo sapien
gcatcacaagcaatttacaaggttg

SEQ ID NO: 2144701 - DNA, 25 bp, Homo sapien
ccacagagtgagaaagacgaacact

SEQ ID NO: 2144702 - DNA, 25 bp, Homo sapien
tgatggtaccgttaggattaaatcc

SEQ ID NO: 2144703 - DNA, 25 bp, Homo sapien
tgctacaagctgcttgatggtaccg

SEQ ID NO: 2144704 - DNA, 25 bp, Homo sapien
ggattaaatcctctgtagcagttac

SEQ ID NO: 2144705 - DNA, 25 bp, Homo sapien
taaatcctctgtagcagttacaaga

SEQ ID NO: 2144706 - DNA, 25 bp, Homo sapien
taacagacatcagagctttactcaa

SEQ ID NO: 2144707 - DNA, 25 bp, Homo sapien
ataacagacatcagagctttactca

SEQ ID NO: 2144708 - DNA, 25 bp, Homo sapien
acagacatcagagctttactcaagg

SEQ ID NO: 2144709 - DNA, 25 bp, Homo sapien
aacagacatcagagctttactcaag

SEQ ID NO: 2144710 - DNA, 25 bp, Homo sapien
taataccaacttcagttgctcagtg

SEQ ID NO: 2144711 - DNA, 25 bp, Homo sapien
gaaaatgtaggatgtagttttgctt

SEQ ID NO: 2144712 - DNA, 25 bp, Homo sapien
ctcagtgggtttgacctcagaagaa

SEQ ID NO: 2144713 - DNA, 25 bp, Homo sapien
catgtttcacatgagaagacaagta

SEQ ID NO: 2144714 - DNA, 25 bp, Homo sapien
tagggcactggttgattatggtatg

SEQ ID NO: 2144715 - DNA, 25 bp, Homo sapien
gaaaaccttgcaatgtgatacctgg

SEQ ID NO: 2144716 - DNA, 25 bp, Homo sapien
tgggtgagttgggacaccaattaga

SEQ ID NO: 2144717 - DNA, 25 bp, Homo sapien
tggtgctctccttatataccagagt

SEQ ID NO: 2144718 - DNA, 25 bp, Homo sapien
ttttcttctcagtttttgcttcttc

SEQ ID NO: 2144719 - DNA, 25 bp, Homo sapien
ttctcagtttttgcttcttctctcc

SEQ ID NO: 2144720 - DNA, 25 bp, Homo sapien
tcttctcagtttttgcttcttctct

SEQ ID NO: 2144721 - DNA, 25 bp, Homo sapien
ctaggagcctatatcctttttcttc

SEQ ID NO: 2144722 - DNA, 25 bp, Homo sapien
caaatttcactcgtgtctgtgtgaa

SEQ ID NO: 2144723 - DNA, 25 bp, Homo sapien
ggcaccaaatttcactcgtgtctgt

SEQ ID NO: 2144724 - DNA, 25 bp, Homo sapien
accaaatttcactcgtgtctgtgtg

SEQ ID NO: 2144725 - DNA, 25 bp, Homo sapien
gcaccaaatttcactcgtgtctgtg

SEQ ID NO: 2144726 - DNA, 25 bp, Homo sapien
gagttacttaaagcttggcgtctgt

SEQ ID NO: 2144727 - DNA, 25 bp, Homo sapien
gagagttacttaaagcttggcgtct

SEQ ID NO: 2144728 - DNA, 25 bp, Homo sapien
tacttaaagcttggcgtctgtgatg

SEQ ID NO: 2144729 - DNA, 25 bp, Homo sapien
gttacttaaagcttggcgtctgtga

SEQ ID NO: 2144730 - DNA, 25 bp, Homo sapien
gactttatatgctggcccacttccg

SEQ ID NO: 2144731 - DNA, 25 bp, Homo sapien
ccaaccgggtgacttgaaggacaag

SEQ ID NO: 2144732 - DNA, 25 bp, Homo sapien
tgaccctaagttgatcctaagactt

SEQ ID NO: 2144733 - DNA, 25 bp, Homo sapien
tgcagtgttgtatgcatgcccacct

SEQ ID NO: 2144734 - DNA, 25 bp, Homo sapien
ctgccccttgctgatcctgctgcca

SEQ ID NO: 2144735 - DNA, 25 bp, Homo sapien
ctggggaagatagccacattccttc

SEQ ID NO: 2144736 - DNA, 25 bp, Homo sapien
ccctgccccttgctgatcctgctgc

SEQ ID NO: 2144737 - DNA, 25 bp, Homo sapien
tggcactggggaagatagccacatt

SEQ ID NO: 2144738 - DNA, 25 bp, Homo sapien
agtgtttatctgtggcaacagtcat

SEQ ID NO: 2144739 - DNA, 25 bp, Homo sapien
tcttgcccagcttggcaagtatgag

SEQ ID NO: 2144740 - DNA, 25 bp, Homo sapien
aagtatgagcaggtcagaagatact

SEQ ID NO: 2144741 - DNA, 25 bp, Homo sapien
ggtcagaagatacttgaattacctt

SEQ ID NO: 2144742 - DNA, 25 bp, Homo sapien
tgagcaggtcagaagatacttgaat

SEQ ID NO: 2144743 - DNA, 25 bp, Homo sapien
ggtatattaggccttccttgatgtt

SEQ ID NO: 2144744 - DNA, 25 bp, Homo sapien
cttgatgtttggatactggacgtat

SEQ ID NO: 2144745 - DNA, 25 bp, Homo sapien
gacgtatttaactacattcattaac

SEQ ID NO: 2144746 - DNA, 25 bp, Homo sapien
ctttctccaggtatattaggccttc

SEQ ID NO: 2144747 - DNA, 25 bp, Homo sapien
ggtgtcagcgtaatggaaaagtcca

SEQ ID NO: 2144748 - DNA, 25 bp, Homo sapien
cacacttaaggattcctggctgagt

SEQ ID NO: 2144749 - DNA, 25 bp, Homo sapien
gaacttcggtcccatggtgtcagcg

SEQ ID NO: 2144750 - DNA, 25 bp, Homo sapien
gacaggtaccctgacatgtctcaca

SEQ ID NO: 2144751 - DNA, 25 bp, Homo sapien
ggcttgtgaattgccactcatccat

SEQ ID NO: 2144752 - DNA, 25 bp, Homo sapien
gaatttggcaagcaccaaggtggtg

SEQ ID NO: 2144753 - DNA, 25 bp, Homo sapien
ggttcttctggcttgtgaattgcca

SEQ ID NO: 2144754 - DNA, 25 bp, Homo sapien
tggaagcaggcccagataggttctt

SEQ ID NO: 2144755 - DNA, 25 bp, Homo sapien
tattaaccggttactctctggatct

SEQ ID NO: 2144756 - DNA, 25 bp, Homo sapien
ctattaaccggttactctctggatc

SEQ ID NO: 2144757 - DNA, 25 bp, Homo sapien
ttaaccggttactctctggatctac

SEQ ID NO: 2144758 - DNA, 25 bp, Homo sapien
attaaccggttactctctggatcta

SEQ ID NO: 2144759 - DNA, 25 bp, Homo sapien
tccttcaactgacacattgtgccac

SEQ ID NO: 2144760 - DNA, 25 bp, Homo sapien
gtctccttcaactgacacattgtgc

SEQ ID NO: 2144761 - DNA, 25 bp, Homo sapien
tctccttcaactgacacattgtgcc

SEQ ID NO: 2144762 - DNA, 25 bp, Homo sapien
ttcaactgacacattgtgccaccca

SEQ ID NO: 2144763 - DNA, 25 bp, Homo sapien
ttaaggctattgttccataaggaag

SEQ ID NO: 2144764 - DNA, 25 bp, Homo sapien
gagacccaatcggtcttcaactgtg

SEQ ID NO: 2144765 - DNA, 25 bp, Homo sapien
tgttgctttggtagcttaaggctat

SEQ ID NO: 2144766 - DNA, 25 bp, Homo sapien
tgtggcctgcgtataacagaatttg

SEQ ID NO: 2144767 - DNA, 25 bp, Homo sapien
acttccatgatcctggaaagtccaa

SEQ ID NO: 2144768 - DNA, 25 bp, Homo sapien
tacttccatgatcctggaaagtcca

SEQ ID NO: 2144769 - DNA, 25 bp, Homo sapien
taacacaccatgttgactcctgtct

SEQ ID NO: 2144770 - DNA, 25 bp, Homo sapien
tagatgggcccctgatttgtccaca

SEQ ID NO: 2144771 - DNA, 25 bp, Homo sapien
catctgagcctatcaagccagcttc

SEQ ID NO: 2144772 - DNA, 25 bp, Homo sapien
tataatatttctcttaaagagggcc

SEQ ID NO: 2144773 - DNA, 25 bp, Homo sapien
ggttacctcatcaataggtacagga

SEQ ID NO: 2144774 - DNA, 25 bp, Homo sapien
caataggtacaggaaaccctcctgt

SEQ ID NO: 2144775 - DNA, 25 bp, Homo sapien
cctgtttcccaaatgtaggactcca

SEQ ID NO: 2144776 - DNA, 25 bp, Homo sapien
tctgagtacttttggttacctcatc

SEQ ID NO: 2144777 - DNA, 25 bp, Homo sapien
tatatagcctacttatgttacataa

SEQ ID NO: 2144778 - DNA, 25 bp, Homo sapien
ttacagttgcctacaatgttgagtg

SEQ ID NO: 2144779 - DNA, 25 bp, Homo sapien
acagttgcctacaatgttgagtgca

SEQ ID NO: 2144780 - DNA, 25 bp, Homo sapien
aataggttttactatatagcctact

SEQ ID NO: 2144781 - DNA, 25 bp, Homo sapien
tatttattcacggtcacatctttgc

SEQ ID NO: 2144782 - DNA, 25 bp, Homo sapien
tttattcacggtcacatctttgcta

SEQ ID NO: 2144783 - DNA, 25 bp, Homo sapien
aatatttattcacggtcacatcttt

SEQ ID NO: 2144784 - DNA, 25 bp, Homo sapien
ggaatatttattcacggtcacatct

SEQ ID NO: 2144785 - DNA, 25 bp, Homo sapien
gcaatgctctgtccgctcttgatac

SEQ ID NO: 2144786 - DNA, 25 bp, Homo sapien
ctgagcaatgctctgtccgctcttg

SEQ ID NO: 2144787 - DNA, 25 bp, Homo sapien
acatctgagcaatgctctgtccgct

SEQ ID NO: 2144788 - DNA, 25 bp, Homo sapien
tctgagcaatgctctgtccgctctt

SEQ ID NO: 2144789 - DNA, 25 bp, Homo sapien
tggactcattgatgctcttctaatg

SEQ ID NO: 2144790 - DNA, 25 bp, Homo sapien
gactcattgatgctcttctaatgaa

SEQ ID NO: 2144791 - DNA, 25 bp, Homo sapien
ttctctggactcattgatgctcttc

SEQ ID NO: 2144792 - DNA, 25 bp, Homo sapien
tctggactcattgatgctcttctaa

SEQ ID NO: 2144793 - DNA, 25 bp, Homo sapien
tgttcaattttagcattgctggctc

SEQ ID NO: 2144794 - DNA, 25 bp, Homo sapien
gcattgctggctcttacccacttaa

SEQ ID NO: 2144795 - DNA, 25 bp, Homo sapien
cattttgaatgatgctgcaggtaag

SEQ ID NO: 2144796 - DNA, 25 bp, Homo sapien
catcatacctgagcttgcagtttct

SEQ ID NO: 2144797 - DNA, 25 bp, Homo sapien
ccaaggttataaagagtcacacagc

SEQ ID NO: 2144798 - DNA, 25 bp, Homo sapien
ggtaactggttctgagttaccactc

SEQ ID NO: 2144799 - DNA, 25 bp, Homo sapien
caggtaattggtaactggttctgag

SEQ ID NO: 2144800 - DNA, 25 bp, Homo sapien
aaacttggcaggtaattggtaactg

SEQ ID NO: 2144801 - DNA, 25 bp, Homo sapien
taactggttctgagttaccactctc

SEQ ID NO: 2144802 - DNA, 25 bp, Homo sapien
ctagctagtttgcaggataatgaca

SEQ ID NO: 2144803 - DNA, 25 bp, Homo sapien
tatattgtactggatggctgtggac

SEQ ID NO: 2144804 - DNA, 25 bp, Homo sapien
gataatgacaataagcccagatggt

SEQ ID NO: 2144805 - DNA, 25 bp, Homo sapien
taaaatatccattgtaacgtcaatt

SEQ ID NO: 2144806 - DNA, 25 bp, Homo sapien
tcacacaactgtgagtcctcagata

SEQ ID NO: 2144807 - DNA, 25 bp, Homo sapien
tttattcagaattatccaaatgcct

SEQ ID NO: 2144808 - DNA, 25 bp, Homo sapien
ttattcagaattatccaaatgcctt

SEQ ID NO: 2144809 - DNA, 25 bp, Homo sapien
ctttattcagaattatccaaatgcc

SEQ ID NO: 2144810 - DNA, 25 bp, Homo sapien
cgctataaagttggcggaggagccc

SEQ ID NO: 2144811 - DNA, 25 bp, Homo sapien
ctgattcttcacaagcgctataaag

SEQ ID NO: 2144812 - DNA, 25 bp, Homo sapien
tcttcacaagcgctataaagttggc

SEQ ID NO: 2144813 - DNA, 25 bp, Homo sapien
cacaagcgctataaagttggcggag

SEQ ID NO: 2144814 - DNA, 25 bp, Homo sapien
aatatcttatattggtagagtgtgt

SEQ ID NO: 2144815 - DNA, 25 bp, Homo sapien
taatatcttatattggtagagtgtg

SEQ ID NO: 2144816 - DNA, 25 bp, Homo sapien
atatcttatattggtagagtgtgtt

SEQ ID NO: 2144817 - DNA, 25 bp, Homo sapien
ttaatatcttatattggtagagtgt

SEQ ID NO: 2144818 - DNA, 25 bp, Homo sapien
gattttcccagatttatcccatcat

SEQ ID NO: 2144819 - DNA, 25 bp, Homo sapien
agatttatcccatcatccatgaatg

SEQ ID NO: 2144820 - DNA, 25 bp, Homo sapien
agctttattcgaagattttcccaga

SEQ ID NO: 2144821 - DNA, 25 bp, Homo sapien
taagctttattcgaagattttccca

SEQ ID NO: 2144822 - DNA, 25 bp, Homo sapien
ttaaaaagtctgacccttggtctga

SEQ ID NO: 2144823 - DNA, 25 bp, Homo sapien
gatcatgaaattctttaaggtcttc

SEQ ID NO: 2144824 - DNA, 25 bp, Homo sapien
ctattgagtcagatcatgaaattct

SEQ ID NO: 2144825 - DNA, 25 bp, Homo sapien
ctgagttgttcccatgtgtaccatc

SEQ ID NO: 2144826 - DNA, 25 bp, Homo sapien
tctgtttatcctgttgaatggctgt

SEQ ID NO: 2144827 - DNA, 25 bp, Homo sapien
cctgttgaatggctgtttgtacttc

SEQ ID NO: 2144828 - DNA, 25 bp, Homo sapien
ggttacacatttctgtttatcctgt

SEQ ID NO: 2144829 - DNA, 25 bp, Homo sapien
ttatcctgttgaatggctgtttgta

SEQ ID NO: 2144830 - DNA, 25 bp, Homo sapien
tgaatccttggtaattattatgcat

SEQ ID NO: 2144831 - DNA, 25 bp, Homo sapien
ttgaatccttggtaattattatgca

SEQ ID NO: 2144832 - DNA, 25 bp, Homo sapien
actgtgcctgtcacccaggaatgtc

SEQ ID NO: 2144833 - DNA, 25 bp, Homo sapien
gcctgtcacccaggaatgtcttttt

SEQ ID NO: 2144834 - DNA, 25 bp, Homo sapien
cctgtcacccaggaatgtcttttta

SEQ ID NO: 2144835 - DNA, 25 bp, Homo sapien
cactagtgctgaggaatgtaaccaa

SEQ ID NO: 2144836 - DNA, 25 bp, Homo sapien
acttccacaagcaagtcactagtgc

SEQ ID NO: 2144837 - DNA, 25 bp, Homo sapien
tgaggaatgtaaccaagtttgctgg

SEQ ID NO: 2144838 - DNA, 25 bp, Homo sapien
tttgctgggccttgtgagacctcac

SEQ ID NO: 2144839 - DNA, 25 bp, Homo sapien
atgccatactcatctacgaggataa

SEQ ID NO: 2144840 - DNA, 25 bp, Homo sapien
catactcatctacgaggataatgcc

SEQ ID NO: 2144841 - DNA, 25 bp, Homo sapien
ctcatctacgaggataatgccaagg

SEQ ID NO: 2144842 - DNA, 25 bp, Homo sapien
catctacgaggataatgccaaggta

SEQ ID NO: 2144843 - DNA, 25 bp, Homo sapien
atcccagtggtccacgttagtagaa

SEQ ID NO: 2144844 - DNA, 25 bp, Homo sapien
ggtccacgttagtagaagcaatggc

SEQ ID NO: 2144845 - DNA, 25 bp, Homo sapien
cgtctacagtgtcagagtgattatg

SEQ ID NO: 2144846 - DNA, 25 bp, Homo sapien
tggtggatagcctgaacaggtcgtc

SEQ ID NO: 2144847 - DNA, 25 bp, Homo sapien
acactactcgcgatgctctcactta

SEQ ID NO: 2144848 - DNA, 25 bp, Homo sapien
tcgcgatgctctcacttaagcttct

SEQ ID NO: 2144849 - DNA, 25 bp, Homo sapien
ggctgcgaccacactactcgcgatg

SEQ ID NO: 2144850 - DNA, 25 bp, Homo sapien
cttaagcttctaccaaccacaacac

SEQ ID NO: 2144851 - DNA, 25 bp, Homo sapien
cacatgaggtgttattccaaaggac

SEQ ID NO: 2144852 - DNA, 25 bp, Homo sapien
tatttggcttgttaggcgctggtcc

SEQ ID NO: 2144853 - DNA, 25 bp, Homo sapien
tcctctgagcgctggatacactggc

SEQ ID NO: 2144854 - DNA, 25 bp, Homo sapien
gcaatcctggaacctttctggccgg

SEQ ID NO: 2144855 - DNA, 25 bp, Homo sapien
ctgcctaaacttctggttgtcccaa

SEQ ID NO: 2144856 - DNA, 25 bp, Homo sapien
tttttttctgaaggctacctgccta

SEQ ID NO: 2144857 - DNA, 25 bp, Homo sapien
ctgctaacctgactgtatagccttg

SEQ ID NO: 2144858 - DNA, 25 bp, Homo sapien
tggttgtcccaatttctaccttcat

SEQ ID NO: 2144859 - DNA, 25 bp, Homo sapien
ggagttcaagagcagcatggacaat

SEQ ID NO: 2144860 - DNA, 25 bp, Homo sapien
tcaagagcagcatggacaatatagt

SEQ ID NO: 2144861 - DNA, 25 bp, Homo sapien
gttcaagagcagcatggacaatata

SEQ ID NO: 2144862 - DNA, 25 bp, Homo sapien
caagagcagcatggacaatatagtg

SEQ ID NO: 2144863 - DNA, 25 bp, Homo sapien
aatacactttcgctgagagtcatta

SEQ ID NO: 2144864 - DNA, 25 bp, Homo sapien
gagtcattaatagaagagcttttta

SEQ ID NO: 2144865 - DNA, 25 bp, Homo sapien
aatgaaaacaatacactttcgctga

SEQ ID NO: 2144866 - DNA, 25 bp, Homo sapien
gctgagagtcattaatagaagagct

SEQ ID NO: 2144867 - DNA, 25 bp, Homo sapien
tccttatgtacccaaagtttgctga

SEQ ID NO: 2144868 - DNA, 25 bp, Homo sapien
tagactaggagcaggcaaagtatgg

SEQ ID NO: 2144869 - DNA, 25 bp, Homo sapien
atggctccctcaatgttacaacaga

SEQ ID NO: 2144870 - DNA, 25 bp, Homo sapien
gagaaagtaccaagttccaaatatg

SEQ ID NO: 2144871 - DNA, 25 bp, Homo sapien
tcatgacaccctagcacctttcagt

SEQ ID NO: 2144872 - DNA, 25 bp, Homo sapien
gaacctgcaagtcccctctcagttt

SEQ ID NO: 2144873 - DNA, 25 bp, Homo sapien
tcattacattggaacctgcaagtcc

SEQ ID NO: 2144874 - DNA, 25 bp, Homo sapien
gagtgctccagtttgaatacagaga

SEQ ID NO: 2144875 - DNA, 25 bp, Homo sapien
ggatgatccaggaaaaggactttca

SEQ ID NO: 2144876 - DNA, 25 bp, Homo sapien
ccaggatgatccaggaaaaggactt

SEQ ID NO: 2144877 - DNA, 25 bp, Homo sapien
ggcgggcaggagtgggggttgcaag

SEQ ID NO: 2144878 - DNA, 25 bp, Homo sapien
gcgggcaggagtgggggttgcaagg

SEQ ID NO: 2144879 - DNA, 25 bp, Homo sapien
tcccacacagatgggacgcggctta

SEQ ID NO: 2144880 - DNA, 25 bp, Homo sapien
ggtcccacacagatgggacgcggct

SEQ ID NO: 2144881 - DNA, 25 bp, Homo sapien
cccacacagatgggacgcggcttag

SEQ ID NO: 2144882 - DNA, 25 bp, Homo sapien
ggggtcccacacagatgggacgcgg

SEQ ID NO: 2144883 - DNA, 25 bp, Homo sapien
ctttctatccatggcctttacaaat

SEQ ID NO: 2144884 - DNA, 25 bp, Homo sapien
tacaatgctcatcttggacttctct

SEQ ID NO: 2144885 - DNA, 25 bp, Homo sapien
gccttcttcagctttatggagtatt

SEQ ID NO: 2144886 - DNA, 25 bp, Homo sapien
caaatgctacaatgctcatcttgga

SEQ ID NO: 2144887 - DNA, 25 bp, Homo sapien
gttgcgtgcacatgcttcactccag

SEQ ID NO: 2144888 - DNA, 25 bp, Homo sapien
gccagttgcgtgcacatgcttcact

SEQ ID NO: 2144889 - DNA, 25 bp, Homo sapien
tgcacatgcttcactccagtagtca

SEQ ID NO: 2144890 - DNA, 25 bp, Homo sapien
aagccagagccagttgcgtgcacat

SEQ ID NO: 2144891 - DNA, 25 bp, Homo sapien
gtggtactgtttctacttgtgtgag

SEQ ID NO: 2144892 - DNA, 25 bp, Homo sapien
ggcaccaagtatgggtgtgcacagt

SEQ ID NO: 2144893 - DNA, 25 bp, Homo sapien
actgtttctacttgtgtgaggcacc

SEQ ID NO: 2144894 - DNA, 25 bp, Homo sapien
cttgtgtgaggcaccaagtatgggt

SEQ ID NO: 2144895 - DNA, 25 bp, Homo sapien
aaactctgactgcttatctaagaaa

SEQ ID NO: 2144896 - DNA, 25 bp, Homo sapien
taaactctgactgcttatctaagaa

SEQ ID NO: 2144897 - DNA, 25 bp, Homo sapien
aactctgactgcttatctaagaaag

SEQ ID NO: 2144898 - DNA, 25 bp, Homo sapien
actctgactgcttatctaagaaagc

SEQ ID NO: 2144899 - DNA, 25 bp, Homo sapien
agagcctgtaagactgagccggagc

SEQ ID NO: 2144900 - DNA, 25 bp, Homo sapien
cacgttagcctttgagcggcgctcg

SEQ ID NO: 2144901 - DNA, 25 bp, Homo sapien
tcgggtagaaacaagcaggcacgtt

SEQ ID NO: 2144902 - DNA, 25 bp, Homo sapien
gagaaagtttgctagccacgcggct

SEQ ID NO: 2144903 - DNA, 25 bp, Homo sapien
gaagagttcatatgcaatcggcagg

SEQ ID NO: 2144904 - DNA, 25 bp, Homo sapien
gctaggtttggctcttttcgctccg

SEQ ID NO: 2144905 - DNA, 25 bp, Homo sapien
cgacgactccgacgacaacgatgta

SEQ ID NO: 2144906 - DNA, 25 bp, Homo sapien
tactctaaacggacgaaggccatca

SEQ ID NO: 2144907 - DNA, 25 bp, Homo sapien
gcgcgataggaagcgccggcgagtc

SEQ ID NO: 2144908 - DNA, 25 bp, Homo sapien
agctcggcgcgataggaagcgccgg

SEQ ID NO: 2144909 - DNA, 25 bp, Homo sapien
cgccggcgagtcgacctcctttggg

SEQ ID NO: 2144910 - DNA, 25 bp, Homo sapien
tcggcgcgataggaagcgccggcga

SEQ ID NO: 2144911 - DNA, 25 bp, Homo sapien
aacctcgcgcctcggcggagggaga

SEQ ID NO: 2144912 - DNA, 25 bp, Homo sapien
actcggctgcaatcgcccagcggag

SEQ ID NO: 2144913 - DNA, 25 bp, Homo sapien
ccgcggcagtcggtgcgctgagctg

SEQ ID NO: 2144914 - DNA, 25 bp, Homo sapien
ccgcggcggcagctagacgagaaac

SEQ ID NO: 2144915 - DNA, 25 bp, Homo sapien
aagtcgcatactacccaacaggaag

SEQ ID NO: 2144916 - DNA, 25 bp, Homo sapien
caagtcgcatactacccaacaggaa

SEQ ID NO: 2144917 - DNA, 25 bp, Homo sapien
ctcaagtcgcatactacccaacagg

SEQ ID NO: 2144918 - DNA, 25 bp, Homo sapien
tcaagtcgcatactacccaacagga

SEQ ID NO: 2144919 - DNA, 25 bp, Homo sapien
tattcactgcgctgcctgtcataat

SEQ ID NO: 2144920 - DNA, 25 bp, Homo sapien
ttgcagttgggatcagtgcactcaa

SEQ ID NO: 2144921 - DNA, 25 bp, Homo sapien
agtctgcccaccatattcactgcgc

SEQ ID NO: 2144922 - DNA, 25 bp, Homo sapien
tcttagatttgcagttgggatcagt

SEQ ID NO: 2144923 - DNA, 25 bp, Homo sapien
tgtgcagatgtgctaaaaattctat

SEQ ID NO: 2144924 - DNA, 25 bp, Homo sapien
tctgaattaagcatgaggatttgtc

SEQ ID NO: 2144925 - DNA, 25 bp, Homo sapien
aatcaaaccgtacatctttctctga

SEQ ID NO: 2144926 - DNA, 25 bp, Homo sapien
cccctccaatcaaaccgtacatctt

SEQ ID NO: 2144927 - DNA, 25 bp, Homo sapien
ctttctctgaattaagcatgaggat

SEQ ID NO: 2144928 - DNA, 25 bp, Homo sapien
cttaaattgtaccagcatatagacc

SEQ ID NO: 2144929 - DNA, 25 bp, Homo sapien
taccagcatatagaccactggtgat

SEQ ID NO: 2144930 - DNA, 25 bp, Homo sapien
tcttgcttaaattgtaccagcatat

SEQ ID NO: 2144931 - DNA, 25 bp, Homo sapien
aattgtaccagcatatagaccactg

SEQ ID NO: 2144932 - DNA, 25 bp, Homo sapien
gatgctcgcgggtgttagctgataa

SEQ ID NO: 2144933 - DNA, 25 bp, Homo sapien
tttttgaaggatggcgtcagttggc

SEQ ID NO: 2144934 - DNA, 25 bp, Homo sapien
gatggcgtcagttggcctatgttat

SEQ ID NO: 2144935 - DNA, 25 bp, Homo sapien
cctatgttatagatgctcgcgggtg

SEQ ID NO: 2144936 - DNA, 25 bp, Homo sapien
aatgatgctgcttaggtgctcagcc

SEQ ID NO: 2144937 - DNA, 25 bp, Homo sapien
tgatgctgcttaggtgctcagccat

SEQ ID NO: 2144938 - DNA, 25 bp, Homo sapien
aaatgatgctgcttaggtgctcagc

SEQ ID NO: 2144939 - DNA, 25 bp, Homo sapien
caaatgatgctgcttaggtgctcag

SEQ ID NO: 2144940 - DNA, 25 bp, Homo sapien
aggagggagtgggtaggtgaccaga

SEQ ID NO: 2144941 - DNA, 25 bp, Homo sapien
tgaccagaaacatctcagaacccat

SEQ ID NO: 2144942 - DNA, 25 bp, Homo sapien
agtgggtaggtgaccagaaacatct

SEQ ID NO: 2144943 - DNA, 25 bp, Homo sapien
ggagtgggtaggtgaccagaaacat

SEQ ID NO: 2144944 - DNA, 25 bp, Homo sapien
ggggccccatgctctgtatagaaga

SEQ ID NO: 2144945 - DNA, 25 bp, Homo sapien
gggccccatgctctgtatagaagaa

SEQ ID NO: 2144946 - DNA, 25 bp, Homo sapien
tttgcaccgcttgatgcccagttgg

SEQ ID NO: 2144947 - DNA, 25 bp, Homo sapien
agtagcccacggtgtgactctccca

SEQ ID NO: 2144948 - DNA, 25 bp, Homo sapien
gggatttgcttttgcaccgcttgat

SEQ ID NO: 2144949 - DNA, 25 bp, Homo sapien
gtagcccacggtgtgactctcccag

SEQ ID NO: 2144950 - DNA, 25 bp, Homo sapien
tttccttcctgcacctgatccttta

SEQ ID NO: 2144951 - DNA, 25 bp, Homo sapien
atcctttacaatgactctgtaaggt

SEQ ID NO: 2144952 - DNA, 25 bp, Homo sapien
tctgcacgtcagtgtgagtttgcat

SEQ ID NO: 2144953 - DNA, 25 bp, Homo sapien
acgtcagtgtgagtttgcattttaa

SEQ ID NO: 2144954 - DNA, 25 bp, Homo sapien
taactgttctgcatagcattttcca

SEQ ID NO: 2144955 - DNA, 25 bp, Homo sapien
gctacacatgctaagtaactgttct

SEQ ID NO: 2144956 - DNA, 25 bp, Homo sapien
tttcccacttcgtatcttgctacac

SEQ ID NO: 2144957 - DNA, 25 bp, Homo sapien
tcgtatcttgctacacatgctaagt

SEQ ID NO: 2144958 - DNA, 25 bp, Homo sapien
tagcagaggacttcataaagttcat

SEQ ID NO: 2144959 - DNA, 25 bp, Homo sapien
ggcagtagagaagctattagcagag

SEQ ID NO: 2144960 - DNA, 25 bp, Homo sapien
gagaagctattagcagaggacttca

SEQ ID NO: 2144961 - DNA, 25 bp, Homo sapien
tctggcagtagagaagctattagca

SEQ ID NO: 2144962 - DNA, 25 bp, Homo sapien
cagtcagttgcccagatgtatttat

SEQ ID NO: 2144963 - DNA, 25 bp, Homo sapien
taacacagggtacttggatacatct

SEQ ID NO: 2144964 - DNA, 25 bp, Homo sapien
gatacatctggacagccgaatgaac

SEQ ID NO: 2144965 - DNA, 25 bp, Homo sapien
gaatgaactcttaactcctcgtctc

SEQ ID NO: 2144966 - DNA, 25 bp, Homo sapien
caatcacgttttctgctctcacact

SEQ ID NO: 2144967 - DNA, 25 bp, Homo sapien
tgctctcacactactttttattctt

SEQ ID NO: 2144968 - DNA, 25 bp, Homo sapien
caccctttggcactgaagaaagatt

SEQ ID NO: 2144969 - DNA, 25 bp, Homo sapien
aaagattggtcgtgtttcaatcacg

SEQ ID NO: 2144970 - DNA, 25 bp, Homo sapien
gagaagacgaaattaacaggctagg

SEQ ID NO: 2144971 - DNA, 25 bp, Homo sapien
taaaattgagaagacgaaattaaca

SEQ ID NO: 2144972 - DNA, 25 bp, Homo sapien
attaacaggctaggttcatcatatc

SEQ ID NO: 2144973 - DNA, 25 bp, Homo sapien
gacgaaattaacaggctaggttcat

SEQ ID NO: 2144974 - DNA, 25 bp, Homo sapien
aggaatgaatgcaccgcattcctca

SEQ ID NO: 2144975 - DNA, 25 bp, Homo sapien
ggaatgaatgcaccgcattcctcag

SEQ ID NO: 2144976 - DNA, 25 bp, Homo sapien
gcaccgcattcctcaggttcaccat

SEQ ID NO: 2144977 - DNA, 25 bp, Homo sapien
gaatgcaccgcattcctcaggttca

SEQ ID NO: 2144978 - DNA, 25 bp, Homo sapien
tatgatgacgattgaaagtgctggc

SEQ ID NO: 2144979 - DNA, 25 bp, Homo sapien
aatttgaagcgtccaccatcggagg

SEQ ID NO: 2144980 - DNA, 25 bp, Homo sapien
aagtgctggccagttttgtaccccg

SEQ ID NO: 2144981 - DNA, 25 bp, Homo sapien
tatagctgctactgggctcacagaa

SEQ ID NO: 2144982 - DNA, 25 bp, Homo sapien
caaggatgttgccacctattgtcat

SEQ ID NO: 2144983 - DNA, 25 bp, Homo sapien
gcttactgccatgatcacaaggatg

SEQ ID NO: 2144984 - DNA, 25 bp, Homo sapien
tagtcccactagcatatcagcaatg

SEQ ID NO: 2144985 - DNA, 25 bp, Homo sapien
caatggctagggacattaagaagta

SEQ ID NO: 2144986 - DNA, 25 bp, Homo sapien
tttatgacattatacgagattgaaa

SEQ ID NO: 2144987 - DNA, 25 bp, Homo sapien
tctgtcacacgatttgcttttttct

SEQ ID NO: 2144988 - DNA, 25 bp, Homo sapien
tatgatacatacatccaactccttc

SEQ ID NO: 2144989 - DNA, 25 bp, Homo sapien
caactccttctgtcacacgatttgc

SEQ ID NO: 2144990 - DNA, 25 bp, Homo sapien
agatactttgtagagttgtataaac

SEQ ID NO: 2144991 - DNA, 25 bp, Homo sapien
agttgtataaactatttgattgttc

SEQ ID NO: 2144992 - DNA, 25 bp, Homo sapien
gtataaactatttgattgttcatca

SEQ ID NO: 2144993 - DNA, 25 bp, Homo sapien
tgtagagttgtataaactatttgat

SEQ ID NO: 2144994 - DNA, 25 bp, Homo sapien
agtttctgctgaaaggcttgacatt

SEQ ID NO: 2144995 - DNA, 25 bp, Homo sapien
tctgctgaaaggcttgacattgatt

SEQ ID NO: 2144996 - DNA, 25 bp, Homo sapien
aaggcttgacattgattgatgcttc

SEQ ID NO: 2144997 - DNA, 25 bp, Homo sapien
gctgaaaggcttgacattgattgat

SEQ ID NO: 2144998 - DNA, 25 bp, Homo sapien
taaagaaatccagacggggcacaaa

SEQ ID NO: 2144999 - DNA, 25 bp, Homo sapien
gatccagcgatatagcgcagaggtg

SEQ ID NO: 2145000 - DNA, 25 bp, Homo sapien
tatctaggtagtggccagacataat

SEQ ID NO: 2145001 - DNA, 25 bp, Homo sapien
gcatgatggacgctgttgaaaataa

SEQ ID NO: 2145002 - DNA, 25 bp, Homo sapien
tgaaacggctatgctcaataggatt

SEQ ID NO: 2145003 - DNA, 25 bp, Homo sapien
aataggattacgtattgctacatac

SEQ ID NO: 2145004 - DNA, 25 bp, Homo sapien
gatggccttagtccgcgaattgaaa

SEQ ID NO: 2145005 - DNA, 25 bp, Homo sapien
tagaaattgcccaaacaatagcaat

SEQ ID NO: 2145006 - DNA, 25 bp, Homo sapien
gaaagctattcacggcataatcgat

SEQ ID NO: 2145007 - DNA, 25 bp, Homo sapien
ccaagaatcgtcctggctcagagaa

SEQ ID NO: 2145008 - DNA, 25 bp, Homo sapien
taactatattagagacacggttgtg

SEQ ID NO: 2145009 - DNA, 25 bp, Homo sapien
tcacatgaaacactagcagtatggc

SEQ ID NO: 2145010 - DNA, 25 bp, Homo sapien
aaatttgggtcgttgagcacgcacg

SEQ ID NO: 2145011 - DNA, 25 bp, Homo sapien
catcaaagcttgtcggcgcagaacg

SEQ ID NO: 2145012 - DNA, 25 bp, Homo sapien
tatgaagaaagctacgaaggaccca

SEQ ID NO: 2145013 - DNA, 25 bp, Homo sapien
tataccgggctcattgtcactggct

SEQ ID NO: 2145014 - DNA, 25 bp, Homo sapien
taaaacatgtgctatgagcttgccc

SEQ ID NO: 2145015 - DNA, 25 bp, Homo sapien
gcagcaggcccacgaatgaaatgat

SEQ ID NO: 2145016 - DNA, 25 bp, Homo sapien
tgtaccgtaggaaaagactgtgctg

SEQ ID NO: 2145017 - DNA, 25 bp, Homo sapien
taactgtcaagcgtaagaactagca

SEQ ID NO: 2145018 - DNA, 25 bp, Homo sapien
cattcgcaggtaggaaacttgacat

SEQ ID NO: 2145019 - DNA, 25 bp, Homo sapien
catgacttggagtctgaagctgact

SEQ ID NO: 2145020 - DNA, 25 bp, Homo sapien
gacattgctgctgtaagctttacag

SEQ ID NO: 2145021 - DNA, 25 bp, Homo sapien
cataagatcagccttggagagactt

SEQ ID NO: 2145022 - DNA, 25 bp, Homo sapien
tatatgtattgctaaagtgagaacc

SEQ ID NO: 2145023 - DNA, 25 bp, Homo sapien
ctgctgctcctatgctgtgcttggg

SEQ ID NO: 2145024 - DNA, 25 bp, Homo sapien
ctgctgctgctcctatgctgtgctt

SEQ ID NO: 2145025 - DNA, 25 bp, Homo sapien
tggatcactgctgagtttgggtccc

SEQ ID NO: 2145026 - DNA, 25 bp, Homo sapien
gcttgggggactggatcactgctga

SEQ ID NO: 2145027 - DNA, 25 bp, Homo sapien
ttctcttcaatttggtgtagaccat

SEQ ID NO: 2145028 - DNA, 25 bp, Homo sapien
ccaggtctgcatcaaatttggtttt

SEQ ID NO: 2145029 - DNA, 25 bp, Homo sapien
tttacaccttctcttcaatttggtg

SEQ ID NO: 2145030 - DNA, 25 bp, Homo sapien
aggtctgcatcaaatttggttttac

SEQ ID NO: 2145031 - DNA, 25 bp, Homo sapien
tccctttgctgccaatgacctctat

SEQ ID NO: 2145032 - DNA, 25 bp, Homo sapien
tctgagctccctttgctgccaatga

SEQ ID NO: 2145033 - DNA, 25 bp, Homo sapien
cattttgacagcacaggtagagttt

SEQ ID NO: 2145034 - DNA, 25 bp, Homo sapien
tagagtttgttgttctctcctctga

SEQ ID NO: 2145035 - DNA, 25 bp, Homo sapien
taacaagttcattatgtgttcgttc

SEQ ID NO: 2145036 - DNA, 25 bp, Homo sapien
tggtttcctgttgatagttcattaa

SEQ ID NO: 2145037 - DNA, 25 bp, Homo sapien
tgttgatagttcattaacaagttca

SEQ ID NO: 2145038 - DNA, 25 bp, Homo sapien
agttcattatgtgttcgttcctgtc

SEQ ID NO: 2145039 - DNA, 25 bp, Homo sapien
tgtccggagtgggaattgggctcct

SEQ ID NO: 2145040 - DNA, 25 bp, Homo sapien
gctcctgtggcttgaaggagtcagg

SEQ ID NO: 2145041 - DNA, 25 bp, Homo sapien
tagggttcatgacggcgctcaagag

SEQ ID NO: 2145042 - DNA, 25 bp, Homo sapien
ggtatgttggtcgtcttagggttca

SEQ ID NO: 2145043 - DNA, 25 bp, Homo sapien
ggtacatcatcaggtatctccaaag

SEQ ID NO: 2145044 - DNA, 25 bp, Homo sapien
tcccagcttgctggcagaggtacat

SEQ ID NO: 2145045 - DNA, 25 bp, Homo sapien
tggcagaggtacatcatcaggtatc

SEQ ID NO: 2145046 - DNA, 25 bp, Homo sapien
gcttgctggcagaggtacatcatca

SEQ ID NO: 2145047 - DNA, 25 bp, Homo sapien
tcatggcttgttcccctacagcagg

SEQ ID NO: 2145048 - DNA, 25 bp, Homo sapien
acctgaggccaagttcatactctgc

SEQ ID NO: 2145049 - DNA, 25 bp, Homo sapien
taatgttcatctgagagggcatggc

SEQ ID NO: 2145050 - DNA, 25 bp, Homo sapien
aagaagtttcgcttgccagaagatg

SEQ ID NO: 2145051 - DNA, 25 bp, Homo sapien
cattttattactgtatggcacaaga

SEQ ID NO: 2145052 - DNA, 25 bp, Homo sapien
ctttacagaatgctagtttaatgac

SEQ ID NO: 2145053 - DNA, 25 bp, Homo sapien
cacaagaaagaagtgacattgggta

SEQ ID NO: 2145054 - DNA, 25 bp, Homo sapien
gaaatgtttgtattggtcacagatc

SEQ ID NO: 2145055 - DNA, 25 bp, Homo sapien
cagcagttgaggaataggtttttac

SEQ ID NO: 2145056 - DNA, 25 bp, Homo sapien
tttagctatactcagagagcagcag

SEQ ID NO: 2145057 - DNA, 25 bp, Homo sapien
caaggacattttgataaaactgcca

SEQ ID NO: 2145058 - DNA, 25 bp, Homo sapien
tttgtgaatcctgtaaaccttgtga

SEQ ID NO: 2145059 - DNA, 25 bp, Homo sapien
gcttctctgggcgatccgcttccat

SEQ ID NO: 2145060 - DNA, 25 bp, Homo sapien
ttgatgatgtggccatacttgccaa

SEQ ID NO: 2145061 - DNA, 25 bp, Homo sapien
cttgatgatgtggccatacttgcca

SEQ ID NO: 2145062 - DNA, 25 bp, Homo sapien
catccaggtacttgccgttcatatc

SEQ ID NO: 2145063 - DNA, 25 bp, Homo sapien
cagccttggcgtctgcagggctttc

SEQ ID NO: 2145064 - DNA, 25 bp, Homo sapien
gttcatatctctggcggcagccttg

SEQ ID NO: 2145065 - DNA, 25 bp, Homo sapien
tacttgccgttcatatctctggcgg

SEQ ID NO: 2145066 - DNA, 25 bp, Homo sapien
ttggcgggacccatcggctgctctt

SEQ ID NO: 2145067 - DNA, 25 bp, Homo sapien
gctgctcttgaatgccggtttgatg

SEQ ID NO: 2145068 - DNA, 25 bp, Homo sapien
gtgagaaccttgagcgactgccgct

SEQ ID NO: 2145069 - DNA, 25 bp, Homo sapien
cctgtagggccacaggtcgaaatac

SEQ ID NO: 2145070 - DNA, 25 bp, Homo sapien
tctctgagcgcagggacaaaatccc

SEQ ID NO: 2145071 - DNA, 25 bp, Homo sapien
cactggagtggccataatagcggcg

SEQ ID NO: 2145072 - DNA, 25 bp, Homo sapien
tctcaagggacggtagtccgggaca

SEQ ID NO: 2145073 - DNA, 25 bp, Homo sapien
tgtgtactcatggtcgcgacccctg

SEQ ID NO: 2145074 - DNA, 25 bp, Homo sapien
tccgtagcggtcactccggctgtaa

SEQ ID NO: 2145075 - DNA, 25 bp, Homo sapien
cgagcggccttggtactcctcataa

SEQ ID NO: 2145076 - DNA, 25 bp, Homo sapien
actataggctttgggcgagtggtcc

SEQ ID NO: 2145077 - DNA, 25 bp, Homo sapien
tgtaaccgttactggaactgctgcg

SEQ ID NO: 2145078 - DNA, 25 bp, Homo sapien
tccgtagcagttgctctggccagaa

SEQ ID NO: 2145079 - DNA, 25 bp, Homo sapien
tgttggcatcgagtgagcgacctcc

SEQ ID NO: 2145080 - DNA, 25 bp, Homo sapien
tgtaggcttcggtgtagtggtcccc

SEQ ID NO: 2145081 - DNA, 25 bp, Homo sapien
gctccggccatgactgttgttggaa

SEQ ID NO: 2145082 - DNA, 25 bp, Homo sapien
cgtaactcttgatggaactgtcgcg

SEQ ID NO: 2145083 - DNA, 25 bp, Homo sapien
ggccgtaactcttgatggaactgtc

SEQ ID NO: 2145084 - DNA, 25 bp, Homo sapien
tcaggccgtaactcttgatggaact

SEQ ID NO: 2145085 - DNA, 25 bp, Homo sapien
actcttgatggaactgtcgcggccc

SEQ ID NO: 2145086 - DNA, 25 bp, Homo sapien
cgccgctgtaggcgtcaggcaagct

SEQ ID NO: 2145087 - DNA, 25 bp, Homo sapien
gtggtcgccgctgtaggcgtcaggc

SEQ ID NO: 2145088 - DNA, 25 bp, Homo sapien
gccgctgtaggcgtcaggcaagctg

SEQ ID NO: 2145089 - DNA, 25 bp, Homo sapien
ctgtcgtggtcgccgctgtaggcgt

SEQ ID NO: 2145090 - DNA, 25 bp, Homo sapien
tcgagtagcggtcgctccggccgta

SEQ ID NO: 2145091 - DNA, 25 bp, Homo sapien
cggtctcgacccctcgagtagcggt

SEQ ID NO: 2145092 - DNA, 25 bp, Homo sapien
tcgctccggccgtaactgttgctgg

SEQ ID NO: 2145093 - DNA, 25 bp, Homo sapien
gctccggccgtaactgttgctggat

SEQ ID NO: 2145094 - DNA, 25 bp, Homo sapien
cctgcagcctgaccggctgtaagaa

SEQ ID NO: 2145095 - DNA, 25 bp, Homo sapien
ccctgcagcctgaccggctgtaaga

SEQ ID NO: 2145096 - DNA, 25 bp, Homo sapien
ctcctacttatactagtccttgggt

SEQ ID NO: 2145097 - DNA, 25 bp, Homo sapien
aacaactcctacttatactagtcct

SEQ ID NO: 2145098 - DNA, 25 bp, Homo sapien
actcctacttatactagtccttggg

SEQ ID NO: 2145099 - DNA, 25 bp, Homo sapien
caactcctacttatactagtccttg

SEQ ID NO: 2145100 - DNA, 25 bp, Homo sapien
acagtaattttgaactcccagaatt

SEQ ID NO: 2145101 - DNA, 25 bp, Homo sapien
tgtaaacagtaattttgaactccca

SEQ ID NO: 2145102 - DNA, 25 bp, Homo sapien
taggatttcaaattacttgtaaaca

SEQ ID NO: 2145103 - DNA, 25 bp, Homo sapien
gatttcaaattacttgtaaacagta

SEQ ID NO: 2145104 - DNA, 25 bp, Homo sapien
ttggtgtgtttggtcgggcgcccaa

SEQ ID NO: 2145105 - DNA, 25 bp, Homo sapien
tggtcgggcgcccaaggctacgact

SEQ ID NO: 2145106 - DNA, 25 bp, Homo sapien
ccaaggctacgactgtgtctgggct

SEQ ID NO: 2145107 - DNA, 25 bp, Homo sapien
ttggatcatgccccgcacacacttg

SEQ ID NO: 2145108 - DNA, 25 bp, Homo sapien
tgagggcttgtttgtccttggagac

SEQ ID NO: 2145109 - DNA, 25 bp, Homo sapien
ttgagggcttgtttgtccttggaga

SEQ ID NO: 2145110 - DNA, 25 bp, Homo sapien
cttgagggcttgtttgtccttggag

SEQ ID NO: 2145111 - DNA, 25 bp, Homo sapien
tagcagcaactttcctcgtgatggc

SEQ ID NO: 2145112 - DNA, 25 bp, Homo sapien
catctgttgaggcagatgccagagc

SEQ ID NO: 2145113 - DNA, 25 bp, Homo sapien
tatcagtctctaatacttcaaagac

SEQ ID NO: 2145114 - DNA, 25 bp, Homo sapien
tgcagagggcatctgttgaggcaga

SEQ ID NO: 2145115 - DNA, 25 bp, Homo sapien
ccatcaggctccatccagtatcagt

SEQ ID NO: 2145116 - DNA, 25 bp, Homo sapien
tacagataactgcatagagctgccc

SEQ ID NO: 2145117 - DNA, 25 bp, Homo sapien
tgccctctggttagcagctgtggtt

SEQ ID NO: 2145118 - DNA, 25 bp, Homo sapien
ccttactgagcatgcacgtatctgc

SEQ ID NO: 2145119 - DNA, 25 bp, Homo sapien
tggcttaattgttgcgagactcaca

SEQ ID NO: 2145120 - DNA, 25 bp, Homo sapien
tatacctctattatagccgctgtga

SEQ ID NO: 2145121 - DNA, 25 bp, Homo sapien
tctttgtatcccagatcaggccttt

SEQ ID NO: 2145122 - DNA, 25 bp, Homo sapien
tatatttccttcaccctagtatgca

SEQ ID NO: 2145123 - DNA, 25 bp, Homo sapien
tttgttgccactccagtagctagta

SEQ ID NO: 2145124 - DNA, 25 bp, Homo sapien
gttttttatcagatatatcacttgc

SEQ ID NO: 2145125 - DNA, 25 bp, Homo sapien
gtgcccagcgtgagtcaggatttca

SEQ ID NO: 2145126 - DNA, 25 bp, Homo sapien
taagcaaaatgtctattaggaccct

SEQ ID NO: 2145127 - DNA, 25 bp, Homo sapien
tattctgttggttcatctactctga

SEQ ID NO: 2145128 - DNA, 25 bp, Homo sapien
ctgaacgtgaggggcgaatcaagca

SEQ ID NO: 2145129 - DNA, 25 bp, Homo sapien
acgtgaggggcgaatcaagcaatag

SEQ ID NO: 2145130 - DNA, 25 bp, Homo sapien
gggcgaatcaagcaataggggaggg

SEQ ID NO: 2145131 - DNA, 25 bp, Homo sapien
gaacgtgaggggcgaatcaagcaat

SEQ ID NO: 2145132 - DNA, 25 bp, Homo sapien
caccacccaagcaggtgacaggacg

SEQ ID NO: 2145133 - DNA, 25 bp, Homo sapien
tcagcacaccgtgaggagcctggac

SEQ ID NO: 2145134 - DNA, 25 bp, Homo sapien
ctgcgtggctgcgttgttggactct

SEQ ID NO: 2145135 - DNA, 25 bp, Homo sapien
agcctcagtggtcggaaactccgag

SEQ ID NO: 2145136 - DNA, 25 bp, Homo sapien
cagtgaagcaacttagagagttggg

SEQ ID NO: 2145137 - DNA, 25 bp, Homo sapien
tgtttctgttttgcagaacggaaac

SEQ ID NO: 2145138 - DNA, 25 bp, Homo sapien
cagcagaaccgggatttagcatcct

SEQ ID NO: 2145139 - DNA, 25 bp, Homo sapien
tatagttcgcctggtgtcgtttcgc

SEQ ID NO: 2145140 - DNA, 25 bp, Homo sapien
ttaggattggttaaagcaggacaaa

SEQ ID NO: 2145141 - DNA, 25 bp, Homo sapien
taggattggttaaagcaggacaaag

SEQ ID NO: 2145142 - DNA, 25 bp, Homo sapien
cagagaagctggtaagtgaccattt

SEQ ID NO: 2145143 - DNA, 25 bp, Homo sapien
aacagagaagctggtaagtgaccat

SEQ ID NO: 2145144 - DNA, 25 bp, Homo sapien
gaagctggtaagtgaccatttttga

SEQ ID NO: 2145145 - DNA, 25 bp, Homo sapien
gctggtaagtgaccatttttgatat

SEQ ID NO: 2145146 - DNA, 25 bp, Homo sapien
tcttaggaatatatgagctctttgt

SEQ ID NO: 2145147 - DNA, 25 bp, Homo sapien
cagctgtatatttaggcatactctg

SEQ ID NO: 2145148 - DNA, 25 bp, Homo sapien
tatatttaggcatactctgcaaatc

SEQ ID NO: 2145149 - DNA, 25 bp, Homo sapien
tatatgagctctttgttaataacct

SEQ ID NO: 2145150 - DNA, 25 bp, Homo sapien
aagtctcctatcaggagcttggctc

SEQ ID NO: 2145151 - DNA, 25 bp, Homo sapien
caagtctcctatcaggagcttggct

SEQ ID NO: 2145152 - DNA, 25 bp, Homo sapien
agtctcctatcaggagcttggctcg

SEQ ID NO: 2145153 - DNA, 25 bp, Homo sapien
agccccaaggggtggagcttggcgt

SEQ ID NO: 2145154 - DNA, 25 bp, Homo sapien
gatcctccaatcatagcctctccct

SEQ ID NO: 2145155 - DNA, 25 bp, Homo sapien
tctcccttcggtgttgctaagcccc

SEQ ID NO: 2145156 - DNA, 25 bp, Homo sapien
ggtggagcttggcgttacccctcac

SEQ ID NO: 2145157 - DNA, 25 bp, Homo sapien
cttccctgcatcatggcgccacaca

SEQ ID NO: 2145158 - DNA, 25 bp, Homo sapien
ctttttcagaaagcgttagcttccg

SEQ ID NO: 2145159 - DNA, 25 bp, Homo sapien
gcgttagcttccgaaacgaagccat

SEQ ID NO: 2145160 - DNA, 25 bp, Homo sapien
acctttttccgactgggatgatttg

SEQ ID NO: 2145161 - DNA, 25 bp, Homo sapien
tttggcggcactttttcagaaagcg

SEQ ID NO: 2145162 - DNA, 25 bp, Homo sapien
atccttaatccccacgcgcttctgg

SEQ ID NO: 2145163 - DNA, 25 bp, Homo sapien
ttaatccccacgcgcttctggtcag

SEQ ID NO: 2145164 - DNA, 25 bp, Homo sapien
tcagcaatccttaatccccacgcgc

SEQ ID NO: 2145165 - DNA, 25 bp, Homo sapien
atccccacgcgcttctggtcagcct

SEQ ID NO: 2145166 - DNA, 25 bp, Homo sapien
tgtcccttctaactctttatagatt

SEQ ID NO: 2145167 - DNA, 25 bp, Homo sapien
ttgtcccttctaactctttatagat

SEQ ID NO: 2145168 - DNA, 25 bp, Homo sapien
gtcccttctaactctttatagatta

SEQ ID NO: 2145169 - DNA, 25 bp, Homo sapien
gatggcgatgtctatgagcttttga

SEQ ID NO: 2145170 - DNA, 25 bp, Homo sapien
cgatgtctatgagcttttgattgct

SEQ ID NO: 2145171 - DNA, 25 bp, Homo sapien
tgaaggcgattcctttttactatgg

SEQ ID NO: 2145172 - DNA, 25 bp, Homo sapien
ctctccgatggcgatgtctatgagc

SEQ ID NO: 2145173 - DNA, 25 bp, Homo sapien
tgcccatttaaagggtgttgtccag

SEQ ID NO: 2145174 - DNA, 25 bp, Homo sapien
aaggctgcccatttaaagggtgttg

SEQ ID NO: 2145175 - DNA, 25 bp, Homo sapien
ggctgcccatttaaagggtgttgtc

SEQ ID NO: 2145176 - DNA, 25 bp, Homo sapien
gctgcccatttaaagggtgttgtcc

SEQ ID NO: 2145177 - DNA, 25 bp, Homo sapien
tcatgatttaagtcataatgatata

SEQ ID NO: 2145178 - DNA, 25 bp, Homo sapien
taagtcataatgatatattctcaag

SEQ ID NO: 2145179 - DNA, 25 bp, Homo sapien
tttaagtcataatgatatattctca

SEQ ID NO: 2145180 - DNA, 25 bp, Homo sapien
tgatttaagtcataatgatatattc

SEQ ID NO: 2145181 - DNA, 25 bp, Homo sapien
tgattggccatgagatctccctgac

SEQ ID NO: 2145182 - DNA, 25 bp, Homo sapien
tgcttgggcctcataattgtcactg

SEQ ID NO: 2145183 - DNA, 25 bp, Homo sapien
tgagtgtccacaagatctccctggc

SEQ ID NO: 2145184 - DNA, 25 bp, Homo sapien
tctctaagtggtttcgggatcgctc

SEQ ID NO: 2145185 - DNA, 25 bp, Homo sapien
cactaagtcaagttggaacgtccaa

SEQ ID NO: 2145186 - DNA, 25 bp, Homo sapien
gattagcttacctaccaggttggaa

SEQ ID NO: 2145187 - DNA, 25 bp, Homo sapien
tacatacggctcttccagggaaagc

SEQ ID NO: 2145188 - DNA, 25 bp, Homo sapien
taatgggacatcttgggtaactgga

SEQ ID NO: 2145189 - DNA, 25 bp, Homo sapien
acagctccctggccttgtatgcctg

SEQ ID NO: 2145190 - DNA, 25 bp, Homo sapien
gtgccccctgcaccgcggccacagc

SEQ ID NO: 2145191 - DNA, 25 bp, Homo sapien
ggccttgtatgcctgcctcgcgggt

SEQ ID NO: 2145192 - DNA, 25 bp, Homo sapien
gtatgcctgcctcgcgggtcgcctg

SEQ ID NO: 2145193 - DNA, 25 bp, Homo sapien
aatggtaattttgatcaagagatag

SEQ ID NO: 2145194 - DNA, 25 bp, Homo sapien
ttttgatcaagagataggcaaggat

SEQ ID NO: 2145195 - DNA, 25 bp, Homo sapien
ggcaaggatacttttttcgacatga

SEQ ID NO: 2145196 - DNA, 25 bp, Homo sapien
caaggatacttttttcgacatgaag

SEQ ID NO: 2145197 - DNA, 25 bp, Homo sapien
tattcctaatctgaactgcaccaaa

SEQ ID NO: 2145198 - DNA, 25 bp, Homo sapien
caaaatctaagcctgaacaccctgt

SEQ ID NO: 2145199 - DNA, 25 bp, Homo sapien
ccatggatgattgagcctcagaatg

SEQ ID NO: 2145200 - DNA, 25 bp, Homo sapien
gcctcagaatggcttatactattcc

SEQ ID NO: 2145201 - DNA, 25 bp, Homo sapien
ctggcggtcacatgagccgggaata

SEQ ID NO: 2145202 - DNA, 25 bp, Homo sapien
tgaatataccgtgaattggcctggg

SEQ ID NO: 2145203 - DNA, 25 bp, Homo sapien
catgagccgggaatattcagatgaa

SEQ ID NO: 2145204 - DNA, 25 bp, Homo sapien
gatgaatataccgtgaattggcctg

SEQ ID NO: 2145205 - DNA, 25 bp, Homo sapien
ccagcagtaagccatacagctgagt

SEQ ID NO: 2145206 - DNA, 25 bp, Homo sapien
gaatgaatggttgtactagtaggca

SEQ ID NO: 2145207 - DNA, 25 bp, Homo sapien
ccagctccagcagtaagccatacag

SEQ ID NO: 2145208 - DNA, 25 bp, Homo sapien
gcagtaagccatacagctgagttca

SEQ ID NO: 2145209 - DNA, 25 bp, Homo sapien
tcttcccacgttgtgttttagcagg

SEQ ID NO: 2145210 - DNA, 25 bp, Homo sapien
ctctgagtggctagccgagcttgcc

SEQ ID NO: 2145211 - DNA, 25 bp, Homo sapien
ttttagcaggcatcaacacgtcagc

SEQ ID NO: 2145212 - DNA, 25 bp, Homo sapien
caacacgtcagcaacttctgaaatg

SEQ ID NO: 2145213 - DNA, 25 bp, Homo sapien
atgcaccagcgggatgactaaaaca

SEQ ID NO: 2145214 - DNA, 25 bp, Homo sapien
accagcgggatgactaaaacatttc

SEQ ID NO: 2145215 - DNA, 25 bp, Homo sapien
catttcaaagctggggaactatttc

SEQ ID NO: 2145216 - DNA, 25 bp, Homo sapien
gcaccagcgggatgactaaaacatt

SEQ ID NO: 2145217 - DNA, 25 bp, Homo sapien
gatttctaggtgaatacaattgtag

SEQ ID NO: 2145218 - DNA, 25 bp, Homo sapien
tccacaggatctacagtgatatccc

SEQ ID NO: 2145219 - DNA, 25 bp, Homo sapien
taactagttgattaatggtgctaag

SEQ ID NO: 2145220 - DNA, 25 bp, Homo sapien
tctgctgttgtggaatgaggtagtc

SEQ ID NO: 2145221 - DNA, 25 bp, Homo sapien
gatgaaatcttaatctgatcaaagg

SEQ ID NO: 2145222 - DNA, 25 bp, Homo sapien
tgaaatcttaatctgatcaaaggtg

SEQ ID NO: 2145223 - DNA, 25 bp, Homo sapien
gaaatcttaatctgatcaaaggtga

SEQ ID NO: 2145224 - DNA, 25 bp, Homo sapien
ctggatgaaatcttaatctgatcaa

SEQ ID NO: 2145225 - DNA, 25 bp, Homo sapien
cattcacctaggtcttcgatagcct

SEQ ID NO: 2145226 - DNA, 25 bp, Homo sapien
cacctaggtcttcgatagcctccat

SEQ ID NO: 2145227 - DNA, 25 bp, Homo sapien
acattcacctaggtcttcgatagcc

SEQ ID NO: 2145228 - DNA, 25 bp, Homo sapien
ttcacctaggtcttcgatagcctcc

SEQ ID NO: 2145229 - DNA, 25 bp, Homo sapien
tagtctgtgcaaggttctgggctaa

SEQ ID NO: 2145230 - DNA, 25 bp, Homo sapien
tctgtgcaaggttctgggctaagcc

SEQ ID NO: 2145231 - DNA, 25 bp, Homo sapien
agtctgtgcaaggttctgggctaag

SEQ ID NO: 2145232 - DNA, 25 bp, Homo sapien
ttagtctgtgcaaggttctgggcta

SEQ ID NO: 2145233 - DNA, 25 bp, Homo sapien
tcttcaatagcattagagttagtgg

SEQ ID NO: 2145234 - DNA, 25 bp, Homo sapien
cctcttcaatagcattagagttagt

SEQ ID NO: 2145235 - DNA, 25 bp, Homo sapien
acctcttcaatagcattagagttag

SEQ ID NO: 2145236 - DNA, 25 bp, Homo sapien
ttcaatagcattagagttagtggaa

SEQ ID NO: 2145237 - DNA, 25 bp, Homo sapien
ccaccttgccgtatatttgtgtctg

SEQ ID NO: 2145238 - DNA, 25 bp, Homo sapien
gaggtcctgattaagctgtttggaa

SEQ ID NO: 2145239 - DNA, 25 bp, Homo sapien
ctgtcttcaagaggtcctgattaag

SEQ ID NO: 2145240 - DNA, 25 bp, Homo sapien
aaaggcccaccttgccgtatatttg

SEQ ID NO: 2145241 - DNA, 25 bp, Homo sapien
aagagggtgaagaagaagaagaata

SEQ ID NO: 2145242 - DNA, 25 bp, Homo sapien
tgaaaaagagggtgaagaagaagaa

SEQ ID NO: 2145243 - DNA, 25 bp, Homo sapien
aaagagggtgaagaagaagaagaat

SEQ ID NO: 2145244 - DNA, 25 bp, Homo sapien
ctgttgaaaaagagggtgaagaaga

SEQ ID NO: 2145245 - DNA, 25 bp, Homo sapien
gcacgtctttgttcattggtaagtg

SEQ ID NO: 2145246 - DNA, 25 bp, Homo sapien
tcattggtaagtgggtaaggaaatg

SEQ ID NO: 2145247 - DNA, 25 bp, Homo sapien
tttgacctgatgtattccaagcacg

SEQ ID NO: 2145248 - DNA, 25 bp, Homo sapien
tgatgtattccaagcacgtctttgt

SEQ ID NO: 2145249 - DNA, 25 bp, Homo sapien
tgtaccataaagatgtggttcccaa

SEQ ID NO: 2145250 - DNA, 25 bp, Homo sapien
aagatggcattaattactagcctcc

SEQ ID NO: 2145251 - DNA, 25 bp, Homo sapien
ttcaagatggcattaattactagcc

SEQ ID NO: 2145252 - DNA, 25 bp, Homo sapien
gcttgttgtaccataaagatgtggt

SEQ ID NO: 2145253 - DNA, 25 bp, Homo sapien
tgagcatatcatcacgggcaaggaa

SEQ ID NO: 2145254 - DNA, 25 bp, Homo sapien
tcataaactggccaacttgtgcaca

SEQ ID NO: 2145255 - DNA, 25 bp, Homo sapien
gataattgacttcatgttgggccaa

SEQ ID NO: 2145256 - DNA, 25 bp, Homo sapien
cattgacgaagtttgctctggcaca

SEQ ID NO: 2145257 - DNA, 25 bp, Homo sapien
tgttctaagctcttgactgcattgg

SEQ ID NO: 2145258 - DNA, 25 bp, Homo sapien
tgctactagagttttggttctccgt

SEQ ID NO: 2145259 - DNA, 25 bp, Homo sapien
aactaagctgcacaactgttctaag

SEQ ID NO: 2145260 - DNA, 25 bp, Homo sapien
tgcattggcttttgcgtgaccattt

SEQ ID NO: 2145261 - DNA, 25 bp, Homo sapien
ctccgggcttttgagaccttccagg

SEQ ID NO: 2145262 - DNA, 25 bp, Homo sapien
tccgggcttttgagaccttccaggc

SEQ ID NO: 2145263 - DNA, 25 bp, Homo sapien
cgggcttttgagaccttccaggcat

SEQ ID NO: 2145264 - DNA, 25 bp, Homo sapien
ccgggcttttgagaccttccaggca

SEQ ID NO: 2145265 - DNA, 25 bp, Homo sapien
tcaggcaacagtcgtgacaacttgc

SEQ ID NO: 2145266 - DNA, 25 bp, Homo sapien
tcccttcctctgagaaacctgcagc

SEQ ID NO: 2145267 - DNA, 25 bp, Homo sapien
cactgtcaggcaacagtcgtgacaa

SEQ ID NO: 2145268 - DNA, 25 bp, Homo sapien
caacagtcgtgacaacttgcagctg

SEQ ID NO: 2145269 - DNA, 25 bp, Homo sapien
gcttcacatatgcagggggccagaa

SEQ ID NO: 2145270 - DNA, 25 bp, Homo sapien
ggcttcacatatgcagggggccaga

SEQ ID NO: 2145271 - DNA, 25 bp, Homo sapien
gggcttcacatatgcagggggccag

SEQ ID NO: 2145272 - DNA, 25 bp, Homo sapien
gattgcagcgtaaggttggtctgtt

SEQ ID NO: 2145273 - DNA, 25 bp, Homo sapien
gtaaggttggtctgttttgtgacat

SEQ ID NO: 2145274 - DNA, 25 bp, Homo sapien
ggctggattgcagcgtaaggttggt

SEQ ID NO: 2145275 - DNA, 25 bp, Homo sapien
tgcagcgtaaggttggtctgttttg

SEQ ID NO: 2145276 - DNA, 25 bp, Homo sapien
cagcaacggtggatgcttctctttc

SEQ ID NO: 2145277 - DNA, 25 bp, Homo sapien
gaacaacttagagcaaaaccaccag

SEQ ID NO: 2145278 - DNA, 25 bp, Homo sapien
actctgtcttggaggccaccatctg

SEQ ID NO: 2145279 - DNA, 25 bp, Homo sapien
ttctcgtcctcacgcactgggtgat

SEQ ID NO: 2145280 - DNA, 25 bp, Homo sapien
tcttcccatggttgtatccaaggtt

SEQ ID NO: 2145281 - DNA, 25 bp, Homo sapien
gttctcttatcattggttgggtcct

SEQ ID NO: 2145282 - DNA, 25 bp, Homo sapien
gcttcagacagctgttctcttatca

SEQ ID NO: 2145283 - DNA, 25 bp, Homo sapien
cattggttgggtcctggtatattgt

SEQ ID NO: 2145284 - DNA, 25 bp, Homo sapien
tgcttcagacagctgttctcttatc

SEQ ID NO: 2145285 - DNA, 25 bp, Homo sapien
tgtggctctaaagccagcgctccct

SEQ ID NO: 2145286 - DNA, 25 bp, Homo sapien
caacttctgcacctcggaatctttg

SEQ ID NO: 2145287 - DNA, 25 bp, Homo sapien
cgaccaacgcactcagacaacttct

SEQ ID NO: 2145288 - DNA, 25 bp, Homo sapien
ttgcagctgtggctctaaagccagc

SEQ ID NO: 2145289 - DNA, 25 bp, Homo sapien
gggtcggcttaagccagccaggtca

SEQ ID NO: 2145290 - DNA, 25 bp, Homo sapien
tcatagggagactaggtgcgttcgc

SEQ ID NO: 2145291 - DNA, 25 bp, Homo sapien
cgacgccctcgctaaggacaaggga

SEQ ID NO: 2145292 - DNA, 25 bp, Homo sapien
caggtcacccgaggcgggcgtgtgg

SEQ ID NO: 2145293 - DNA, 25 bp, Homo sapien
agctttacaatggagacccacaaac

SEQ ID NO: 2145294 - DNA, 25 bp, Homo sapien
taaaatactgaatgcatgggttggc

SEQ ID NO: 2145295 - DNA, 25 bp, Homo sapien
tctgagtgtcaactaaagctggaac

SEQ ID NO: 2145296 - DNA, 25 bp, Homo sapien
tagttacgcttaatgataatttggc

SEQ ID NO: 2145297 - DNA, 25 bp, Homo sapien
tctgttctactagactggaggagta

SEQ ID NO: 2145298 - DNA, 25 bp, Homo sapien
caccgggcacggtctaaattcattt

SEQ ID NO: 2145299 - DNA, 25 bp, Homo sapien
tgtagccctagcacctaacagtctg

SEQ ID NO: 2145300 - DNA, 25 bp, Homo sapien
atatacttaagaactttgggcacgt

SEQ ID NO: 2145301 - DNA, 25 bp, Homo sapien
aatactgataaagtgggcctcacca

SEQ ID NO: 2145302 - DNA, 25 bp, Homo sapien
tcagtagacgaggacaaacacagtc

SEQ ID NO: 2145303 - DNA, 25 bp, Homo sapien
tcacaagggtgcaaaaaaccatgtc

SEQ ID NO: 2145304 - DNA, 25 bp, Homo sapien
gaagagttctcggacatgacaccaa

SEQ ID NO: 2145305 - DNA, 25 bp, Homo sapien
ttaagtctggcccaacacagaatcc

SEQ ID NO: 2145306 - DNA, 25 bp, Homo sapien
caacaatggttgctattttctacac

SEQ ID NO: 2145307 - DNA, 25 bp, Homo sapien
ggctgcaaaataccatggtctcata

SEQ ID NO: 2145308 - DNA, 25 bp, Homo sapien
tctccagagagagtttaattcagca

SEQ ID NO: 2145309 - DNA, 25 bp, Homo sapien
tttctttcctttctcgcagcactga

SEQ ID NO: 2145310 - DNA, 25 bp, Homo sapien
tcgcagcactgatagacagaacctt

SEQ ID NO: 2145311 - DNA, 25 bp, Homo sapien
ccgctgagagcaaacttgtttcttt

SEQ ID NO: 2145312 - DNA, 25 bp, Homo sapien
gctgagagcaaacttgtttctttcc

SEQ ID NO: 2145313 - DNA, 25 bp, Homo sapien
ggcacgcaatatcaccccagctaat

SEQ ID NO: 2145314 - DNA, 25 bp, Homo sapien
gagtgcagtgtcatggtaactgaag

SEQ ID NO: 2145315 - DNA, 25 bp, Homo sapien
gtgcagtgtcatggtaactgaagcc

SEQ ID NO: 2145316 - DNA, 25 bp, Homo sapien
attacaggcacgcaatatcacccca

SEQ ID NO: 2145317 - DNA, 25 bp, Homo sapien
tatatgtactacacccttgaaccca

SEQ ID NO: 2145318 - DNA, 25 bp, Homo sapien
tctcctgataatctcctgaagagcg

SEQ ID NO: 2145319 - DNA, 25 bp, Homo sapien
ccatgcaaaaggaggtcccaccttt

SEQ ID NO: 2145320 - DNA, 25 bp, Homo sapien
ccacctttttaggacagcattcaag

SEQ ID NO: 2145321 - DNA, 25 bp, Homo sapien
tctgagtggtagccatctcatccat

SEQ ID NO: 2145322 - DNA, 25 bp, Homo sapien
aatctgagtggtagccatctcatcc

SEQ ID NO: 2145323 - DNA, 25 bp, Homo sapien
aaatctgagtggtagccatctcatc

SEQ ID NO: 2145324 - DNA, 25 bp, Homo sapien
ctctttgagttcatcaagctcatct

SEQ ID NO: 2145325 - DNA, 25 bp, Homo sapien
aagatggaggtcaagtacagcagaa

SEQ ID NO: 2145326 - DNA, 25 bp, Homo sapien
tcactgtactagtggatttccaaag

SEQ ID NO: 2145327 - DNA, 25 bp, Homo sapien
tggacaagtttagagggtgagacca

SEQ ID NO: 2145328 - DNA, 25 bp, Homo sapien
taatgagttccagctaagggtagac

SEQ ID NO: 2145329 - DNA, 25 bp, Homo sapien
aagctaagccagaatccaagtggtt

SEQ ID NO: 2145330 - DNA, 25 bp, Homo sapien
gaatccaagtggttttgattttagc

SEQ ID NO: 2145331 - DNA, 25 bp, Homo sapien
caagtggttttgattttagctgctg

SEQ ID NO: 2145332 - DNA, 25 bp, Homo sapien
aaagctaagccagaatccaagtggt

SEQ ID NO: 2145333 - DNA, 25 bp, Homo sapien
tgaaagacagaagttagagtatttc

SEQ ID NO: 2145334 - DNA, 25 bp, Homo sapien
gaaagacagaagttagagtatttcc

SEQ ID NO: 2145335 - DNA, 25 bp, Homo sapien
tatatcctggtaatggcatattagc

SEQ ID NO: 2145336 - DNA, 25 bp, Homo sapien
tttctctcactttatatcctggtaa

SEQ ID NO: 2145337 - DNA, 25 bp, Homo sapien
gcatattagcttccttgaagagctc

SEQ ID NO: 2145338 - DNA, 25 bp, Homo sapien
ttccttgaagagctcatgaagttca

SEQ ID NO: 2145339 - DNA, 25 bp, Homo sapien
tattttcccatctttattcctgtca

SEQ ID NO: 2145340 - DNA, 25 bp, Homo sapien
ctttattcctgtcaccatccagcat

SEQ ID NO: 2145341 - DNA, 25 bp, Homo sapien
ttttcccatctttattcctgtcacc

SEQ ID NO: 2145342 - DNA, 25 bp, Homo sapien
ccatctttattcctgtcaccatcca

SEQ ID NO: 2145343 - DNA, 25 bp, Homo sapien
gccagtatggccctcgatcttctga

SEQ ID NO: 2145344 - DNA, 25 bp, Homo sapien
ccttaattgagggaagaagcaacaa

SEQ ID NO: 2145345 - DNA, 25 bp, Homo sapien
aaaatttcacttgctatggtgagcc

SEQ ID NO: 2145346 - DNA, 25 bp, Homo sapien
tagtaagatctagtcaaactcagcc

SEQ ID NO: 2145347 - DNA, 25 bp, Homo sapien
tcttaaagccctggtgttgccaaaa

SEQ ID NO: 2145348 - DNA, 25 bp, Homo sapien
tcatagttaactgctgctctgcgct

SEQ ID NO: 2145349 - DNA, 25 bp, Homo sapien
cctaaaatgtcctcacgaatgttgt

SEQ ID NO: 2145350 - DNA, 25 bp, Homo sapien
aacaaaaggctttggccataactgg

SEQ ID NO: 2145351 - DNA, 25 bp, Homo sapien
tacagtcatagtagtagtagcatct

SEQ ID NO: 2145352 - DNA, 25 bp, Homo sapien
tatgtccaagactgttctgggcagc

SEQ ID NO: 2145353 - DNA, 25 bp, Homo sapien
tagtctggtttgcaattaacacccc

SEQ ID NO: 2145354 - DNA, 25 bp, Homo sapien
tgggtgcggacagacatttggttaa

SEQ ID NO: 2145355 - DNA, 25 bp, Homo sapien
tccttcttatgcttggcaatgaaat

SEQ ID NO: 2145356 - DNA, 25 bp, Homo sapien
tatagaatgtctctgctatatatcc

SEQ ID NO: 2145357 - DNA, 25 bp, Homo sapien
gtctctgctatatatcctaatgcaa

SEQ ID NO: 2145358 - DNA, 25 bp, Homo sapien
tatgcttggcaatgaaatgcaaagt

SEQ ID NO: 2145359 - DNA, 25 bp, Homo sapien
gagcttacgcacacacttcaggcag

SEQ ID NO: 2145360 - DNA, 25 bp, Homo sapien
ttttgataacaacgcagctgctctg

SEQ ID NO: 2145361 - DNA, 25 bp, Homo sapien
tatgtgtcagagcaggcacgagcag

SEQ ID NO: 2145362 - DNA, 25 bp, Homo sapien
tgtgtcagaccgaaaggagtgcctt

SEQ ID NO: 2145363 - DNA, 25 bp, Homo sapien
atgctgtgttccttcgctggacaac

SEQ ID NO: 2145364 - DNA, 25 bp, Homo sapien
tgtgttccttcgctggacaactctg

SEQ ID NO: 2145365 - DNA, 25 bp, Homo sapien
gtgttccttcgctggacaactctga

SEQ ID NO: 2145366 - DNA, 25 bp, Homo sapien
aatgctgtgttccttcgctggacaa

SEQ ID NO: 2145367 - DNA, 25 bp, Homo sapien
ttagggttcattggtataacatgtc

SEQ ID NO: 2145368 - DNA, 25 bp, Homo sapien
tataacatgtctacaatcaggatca

SEQ ID NO: 2145369 - DNA, 25 bp, Homo sapien
caaagcacaattccatcaccaacag

SEQ ID NO: 2145370 - DNA, 25 bp, Homo sapien
aacagctttgaacaggtcatcggtg

SEQ ID NO: 2145371 - DNA, 25 bp, Homo sapien
agttcaatatgattatctcttatta

SEQ ID NO: 2145372 - DNA, 25 bp, Homo sapien
ctatgcctggctctaacatattaga

SEQ ID NO: 2145373 - DNA, 25 bp, Homo sapien
cataatactgccctaataaattttt

SEQ ID NO: 2145374 - DNA, 25 bp, Homo sapien
ttcaaatcttagttagttcaatatg

SEQ ID NO: 2145375 - DNA, 25 bp, Homo sapien
tttaccgagtgcctcaacaatgagc

SEQ ID NO: 2145376 - DNA, 25 bp, Homo sapien
tctagcctaagcaagatggtgaaac

SEQ ID NO: 2145377 - DNA, 25 bp, Homo sapien
ttaggtaggctatagtctgtgactc

SEQ ID NO: 2145378 - DNA, 25 bp, Homo sapien
cagacactatatttggtgctggcag

SEQ ID NO: 2145379 - DNA, 25 bp, Homo sapien
tgaatgatgaagggtgtaagtttct

SEQ ID NO: 2145380 - DNA, 25 bp, Homo sapien
tcaatggtatcaggaactgaaaggt

SEQ ID NO: 2145381 - DNA, 25 bp, Homo sapien
atgaagggtgtaagtttcttcttgt

SEQ ID NO: 2145382 - DNA, 25 bp, Homo sapien
atgatgaagggtgtaagtttcttct

SEQ ID NO: 2145383 - DNA, 25 bp, Homo sapien
tgcaagacagccaaattacacactt

SEQ ID NO: 2145384 - DNA, 25 bp, Homo sapien
gccaaattacacacttgcttcttga

SEQ ID NO: 2145385 - DNA, 25 bp, Homo sapien
aagacagccaaattacacacttgct

SEQ ID NO: 2145386 - DNA, 25 bp, Homo sapien
gacagccaaattacacacttgcttc

SEQ ID NO: 2145387 - DNA, 25 bp, Homo sapien
tcaatgtcagcgaacaaaccgatct

SEQ ID NO: 2145388 - DNA, 25 bp, Homo sapien
tgttcacaacatgacacccaatggc

SEQ ID NO: 2145389 - DNA, 25 bp, Homo sapien
aaagcagtcccaaaaccagatgagg

SEQ ID NO: 2145390 - DNA, 25 bp, Homo sapien
aaccgatcttaatgatctgccaaag

SEQ ID NO: 2145391 - DNA, 25 bp, Homo sapien
accatctcggagtaaagcagccaag

SEQ ID NO: 2145392 - DNA, 25 bp, Homo sapien
tccaaagtctcaccatctcggagta

SEQ ID NO: 2145393 - DNA, 25 bp, Homo sapien
gccagcccgagttttccaaatgaaa

SEQ ID NO: 2145394 - DNA, 25 bp, Homo sapien
tggagacaatttcataagttcctcc

SEQ ID NO: 2145395 - DNA, 25 bp, Homo sapien
gtcagtgacatctgatgaagatcct

SEQ ID NO: 2145396 - DNA, 25 bp, Homo sapien
agggcagggtcagttggtcttataa

SEQ ID NO: 2145397 - DNA, 25 bp, Homo sapien
gtagtacaggcaactcactgcttcc

SEQ ID NO: 2145398 - DNA, 25 bp, Homo sapien
tattccctgtgtaccaacatctgga

SEQ ID NO: 2145399 - DNA, 25 bp, Homo sapien
ttgtccttttggtgcgatttgattg

SEQ ID NO: 2145400 - DNA, 25 bp, Homo sapien
gaaacctgacatgttaatatctatc

SEQ ID NO: 2145401 - DNA, 25 bp, Homo sapien
aatatctatccgtggttcaccttcc

SEQ ID NO: 2145402 - DNA, 25 bp, Homo sapien
ccttttggtgcgatttgattgagaa

SEQ ID NO: 2145403 - DNA, 25 bp, Homo sapien
taatagagtccagtcaatatcctgg

SEQ ID NO: 2145404 - DNA, 25 bp, Homo sapien
tattaaacaggttagccacgaaagc

SEQ ID NO: 2145405 - DNA, 25 bp, Homo sapien
gcttgttgaagcatactctcagctc

SEQ ID NO: 2145406 - DNA, 25 bp, Homo sapien
ggttctctggcttagttagtgctgg

SEQ ID NO: 2145407 - DNA, 25 bp, Homo sapien
attgacaccaagagagttcatccag

SEQ ID NO: 2145408 - DNA, 25 bp, Homo sapien
acaccaagagagttcatccagttac

SEQ ID NO: 2145409 - DNA, 25 bp, Homo sapien
catccagttacggaaggttctttct

SEQ ID NO: 2145410 - DNA, 25 bp, Homo sapien
tgacaccaagagagttcatccagtt

SEQ ID NO: 2145411 - DNA, 25 bp, Homo sapien
tatattctatcacttacagttaacg

SEQ ID NO: 2145412 - DNA, 25 bp, Homo sapien
tcatgacattcgtaactgtttacaa

SEQ ID NO: 2145413 - DNA, 25 bp, Homo sapien
aatataaagtatttgctccctaggg

SEQ ID NO: 2145414 - DNA, 25 bp, Homo sapien
cagttaacgatcatgtaaaggaata

SEQ ID NO: 2145415 - DNA, 25 bp, Homo sapien
ctgtaagattaccagggcatcttgc

SEQ ID NO: 2145416 - DNA, 25 bp, Homo sapien
aagattaccagggcatcttgcaggt

SEQ ID NO: 2145417 - DNA, 25 bp, Homo sapien
gattaccagggcatcttgcaggtca

SEQ ID NO: 2145418 - DNA, 25 bp, Homo sapien
gtaagattaccagggcatcttgcag

SEQ ID NO: 2145419 - DNA, 25 bp, Homo sapien
ttcatgttggctcccagtttcgggt

SEQ ID NO: 2145420 - DNA, 25 bp, Homo sapien
tttattaaccttactccagtcaaca

SEQ ID NO: 2145421 - DNA, 25 bp, Homo sapien
ttattaaccttactccagtcaacag

SEQ ID NO: 2145422 - DNA, 25 bp, Homo sapien
ctttttcatgttggctcccagtttc

SEQ ID NO: 2145423 - DNA, 25 bp, Homo sapien
tcattcaggtcttgccctccaatgc

SEQ ID NO: 2145424 - DNA, 25 bp, Homo sapien
cagggagaatttagcaggatgcttc

SEQ ID NO: 2145425 - DNA, 25 bp, Homo sapien
ggatgcttccctaattcaacagcat

SEQ ID NO: 2145426 - DNA, 25 bp, Homo sapien
gccaaccagggagaatttagcagga

SEQ ID NO: 2145427 - DNA, 25 bp, Homo sapien
ggctggtgcccagtcataatgaatg

SEQ ID NO: 2145428 - DNA, 25 bp, Homo sapien
tagtggcttgctactgatctactct

SEQ ID NO: 2145429 - DNA, 25 bp, Homo sapien
tactattccaatagcggtaatggca

SEQ ID NO: 2145430 - DNA, 25 bp, Homo sapien
agcaggtccaacagcccactgtagg

SEQ ID NO: 2145431 - DNA, 25 bp, Homo sapien
gttcacccagttcacaatgatgtcg

SEQ ID NO: 2145432 - DNA, 25 bp, Homo sapien
cagcttcactcaacgttctgttcac

SEQ ID NO: 2145433 - DNA, 25 bp, Homo sapien
caagatcttccaggacattgagggt

SEQ ID NO: 2145434 - DNA, 25 bp, Homo sapien
gatgtcgtcattggctttctgacca

SEQ ID NO: 2145435 - DNA, 25 bp, Homo sapien
tgccaaactggagctgatcgtcttg

SEQ ID NO: 2145436 - DNA, 25 bp, Homo sapien
tggcatcaattaaatccacaactgc

SEQ ID NO: 2145437 - DNA, 25 bp, Homo sapien
ttagattgccactcttcacaaggtc

SEQ ID NO: 2145438 - DNA, 25 bp, Homo sapien
tcacaaggtcatagtttatacagcc

SEQ ID NO: 2145439 - DNA, 25 bp, Homo sapien
cactctaggcctttggtgaagaaga

SEQ ID NO: 2145440 - DNA, 25 bp, Homo sapien
tgtcagttaaggacaccacgtaaga

SEQ ID NO: 2145441 - DNA, 25 bp, Homo sapien
catgaagccaggtcacactctaggc

SEQ ID NO: 2145442 - DNA, 25 bp, Homo sapien
tagtaaggttttcatgggtcaccca

SEQ ID NO: 2145443 - DNA, 25 bp, Homo sapien
ttcagggagagcatacactctggct

SEQ ID NO: 2145444 - DNA, 25 bp, Homo sapien
gagagcatacactctggctccgatt

SEQ ID NO: 2145445 - DNA, 25 bp, Homo sapien
tacactctggctccgattcttctag

SEQ ID NO: 2145446 - DNA, 25 bp, Homo sapien
catacactctggctccgattcttct

SEQ ID NO: 2145447 - DNA, 25 bp, Homo sapien
tcattcccctgcccatcaaacatgc

SEQ ID NO: 2145448 - DNA, 25 bp, Homo sapien
agcatggctgttttattcagattgg

SEQ ID NO: 2145449 - DNA, 25 bp, Homo sapien
ggagcatggctgttttattcagatt

SEQ ID NO: 2145450 - DNA, 25 bp, Homo sapien
catggctgttttattcagattggtt

SEQ ID NO: 2145451 - DNA, 25 bp, Homo sapien
ggctgttttattcagattggttatt

SEQ ID NO: 2145452 - DNA, 25 bp, Homo sapien
aatacgctctgaccatagttctcga

SEQ ID NO: 2145453 - DNA, 25 bp, Homo sapien
caaatcccgtctaagttctgagcac

SEQ ID NO: 2145454 - DNA, 25 bp, Homo sapien
cctggaaatagctgacctgcgaatc

SEQ ID NO: 2145455 - DNA, 25 bp, Homo sapien
tacagcaatgggaaatgtcaagggc

SEQ ID NO: 2145456 - DNA, 25 bp, Homo sapien
gagttagagtaacataataccttgg

SEQ ID NO: 2145457 - DNA, 25 bp, Homo sapien
catcacttttcagagttagagtaac

SEQ ID NO: 2145458 - DNA, 25 bp, Homo sapien
cataataccttggaaactatagcaa

SEQ ID NO: 2145459 - DNA, 25 bp, Homo sapien
aaactatagcaaacagcttgacaaa

SEQ ID NO: 2145460 - DNA, 25 bp, Homo sapien
gtaaatgcctttatttgaactacta

SEQ ID NO: 2145461 - DNA, 25 bp, Homo sapien
gtccttaattcagtacctctaattc

SEQ ID NO: 2145462 - DNA, 25 bp, Homo sapien
aaaaaatcctgacaaacattggcat

SEQ ID NO: 2145463 - DNA, 25 bp, Homo sapien
ttcagtacctctaattcagctccca

SEQ ID NO: 2145464 - DNA, 25 bp, Homo sapien
aaacattggcatacttcctaagaga

SEQ ID NO: 2145465 - DNA, 25 bp, Homo sapien
acatcaacttctgcccgcagtgttc

SEQ ID NO: 2145466 - DNA, 25 bp, Homo sapien
gggacacattatggtgtccaccacc

SEQ ID NO: 2145467 - DNA, 25 bp, Homo sapien
tggtgggacacattatggtgtccac

SEQ ID NO: 2145468 - DNA, 25 bp, Homo sapien
ggctcacatcaacttctgcccgcag

SEQ ID NO: 2145469 - DNA, 25 bp, Homo sapien
tatacttacattcatcacctatgca

SEQ ID NO: 2145470 - DNA, 25 bp, Homo sapien
ggtcttagagatccccaaattggca

SEQ ID NO: 2145471 - DNA, 25 bp, Homo sapien
ctggtaagatctatacttacattca

SEQ ID NO: 2145472 - DNA, 25 bp, Homo sapien
gatggtgagctccttacaacaatag

SEQ ID NO: 2145473 - DNA, 25 bp, Homo sapien
ctcttcttgaagtcacattttttac

SEQ ID NO: 2145474 - DNA, 25 bp, Homo sapien
tttttcaaggacaacttccacaaga

SEQ ID NO: 2145475 - DNA, 25 bp, Homo sapien
caagaacacgtttttcactgggcat

SEQ ID NO: 2145476 - DNA, 25 bp, Homo sapien
tgctgcaagaacacgtttttcactg

SEQ ID NO: 2145477 - DNA, 25 bp, Homo sapien
caaggacaacttccacaagagctgc

SEQ ID NO: 2145478 - DNA, 25 bp, Homo sapien
cccggcatctggaatctgtcttaac

SEQ ID NO: 2145479 - DNA, 25 bp, Homo sapien
ctggaattggaggcacgagttcccg

SEQ ID NO: 2145480 - DNA, 25 bp, Homo sapien
aatctgtcttaacagtgcagtgaac

SEQ ID NO: 2145481 - DNA, 25 bp, Homo sapien
gaggcacgagttcccggcatctgga

SEQ ID NO: 2145482 - DNA, 25 bp, Homo sapien
gtgttggccacgtaggcaatgatgt

SEQ ID NO: 2145483 - DNA, 25 bp, Homo sapien
ccttcagtaacacgaggatgcagga

SEQ ID NO: 2145484 - DNA, 25 bp, Homo sapien
gccagtgttggccacgtaggcaatg

SEQ ID NO: 2145485 - DNA, 25 bp, Homo sapien
cagtgttggccacgtaggcaatgat

SEQ ID NO: 2145486 - DNA, 25 bp, Homo sapien
ttcacaaactccttgctgacttcct

SEQ ID NO: 2145487 - DNA, 25 bp, Homo sapien
acctttttgcccccaagcttcagtg

SEQ ID NO: 2145488 - DNA, 25 bp, Homo sapien
ctccttcacaaactccttgctgact

SEQ ID NO: 2145489 - DNA, 25 bp, Homo sapien
ttgttttcgggcgatgcagggcctg

SEQ ID NO: 2145490 - DNA, 25 bp, Homo sapien
gccctctcctgctgggcgatttcca

SEQ ID NO: 2145491 - DNA, 25 bp, Homo sapien
tggccctctcctgctgggcgatttc

SEQ ID NO: 2145492 - DNA, 25 bp, Homo sapien
ccctctcctgctgggcgatttccac

SEQ ID NO: 2145493 - DNA, 25 bp, Homo sapien
ttggccctctcctgctgggcgattt

SEQ ID NO: 2145494 - DNA, 25 bp, Homo sapien
tcctgtggcgctgtgggacacttac

SEQ ID NO: 2145495 - DNA, 25 bp, Homo sapien
tttcctgtggcgctgtgggacactt

SEQ ID NO: 2145496 - DNA, 25 bp, Homo sapien
cctttcctgtggcgctgtgggacac

SEQ ID NO: 2145497 - DNA, 25 bp, Homo sapien
ttcctgtggcgctgtgggacactta

SEQ ID NO: 2145498 - DNA, 25 bp, Homo sapien
cataaggtcatttcggaccttgaac

SEQ ID NO: 2145499 - DNA, 25 bp, Homo sapien
ctttgtgtgttccataaggtcattt

SEQ ID NO: 2145500 - DNA, 25 bp, Homo sapien
tgttccataaggtcatttcggacct

SEQ ID NO: 2145501 - DNA, 25 bp, Homo sapien
tttcggaccttgaacctgttgtaga

SEQ ID NO: 2145502 - DNA, 25 bp, Homo sapien
gtcaatacggcccaagctgtacttg

SEQ ID NO: 2145503 - DNA, 25 bp, Homo sapien
caagctgtacttgcccacgtcttcg

SEQ ID NO: 2145504 - DNA, 25 bp, Homo sapien
gtacttgcccacgtcttcgttcagg

SEQ ID NO: 2145505 - DNA, 25 bp, Homo sapien
aatacggcccaagctgtacttgccc

SEQ ID NO: 2145506 - DNA, 25 bp, Homo sapien
aactggtggcatcgattggctcata

SEQ ID NO: 2145507 - DNA, 25 bp, Homo sapien
tgatgaaactggtggcatcgattgg

SEQ ID NO: 2145508 - DNA, 25 bp, Homo sapien
cgattggctcataatcaacctgcac

SEQ ID NO: 2145509 - DNA, 25 bp, Homo sapien
tgaaactggtggcatcgattggctc

SEQ ID NO: 2145510 - DNA, 25 bp, Homo sapien
tgggaggcaatggatatggtcacag

SEQ ID NO: 2145511 - DNA, 25 bp, Homo sapien
gggaggcaatggatatggtcacagc

SEQ ID NO: 2145512 - DNA, 25 bp, Homo sapien
ggaggcaatggatatggtcacagcc

SEQ ID NO: 2145513 - DNA, 25 bp, Homo sapien
aatgccagggaagtatttcctcagc

SEQ ID NO: 2145514 - DNA, 25 bp, Homo sapien
tgccagggaagtatttcctcagcag

SEQ ID NO: 2145515 - DNA, 25 bp, Homo sapien
gccagggaagtatttcctcagcagt

SEQ ID NO: 2145516 - DNA, 25 bp, Homo sapien
gaatgccagggaagtatttcctcag

SEQ ID NO: 2145517 - DNA, 25 bp, Homo sapien
tggcaaaacatctccaagttttcaa

SEQ ID NO: 2145518 - DNA, 25 bp, Homo sapien
ataatggcaaaacatctccaagttt

SEQ ID NO: 2145519 - DNA, 25 bp, Homo sapien
ggcaaaacatctccaagttttcaaa

SEQ ID NO: 2145520 - DNA, 25 bp, Homo sapien
aatggcaaaacatctccaagttttc

SEQ ID NO: 2145521 - DNA, 25 bp, Homo sapien
gtttataatttgctcctgttctctc

SEQ ID NO: 2145522 - DNA, 25 bp, Homo sapien
tcagagccctgaggattagtttccc

SEQ ID NO: 2145523 - DNA, 25 bp, Homo sapien
gagccctgaggattagtttccctca

SEQ ID NO: 2145524 - DNA, 25 bp, Homo sapien
ggtttataatttgctcctgttctct

SEQ ID NO: 2145525 - DNA, 25 bp, Homo sapien
agtaaaggcaagctcagtatactcc

SEQ ID NO: 2145526 - DNA, 25 bp, Homo sapien
ctagtgccctgatttgtatgttctt

SEQ ID NO: 2145527 - DNA, 25 bp, Homo sapien
aaacaaacacactcctcttgcaaaa

SEQ ID NO: 2145528 - DNA, 25 bp, Homo sapien
tggcgccgatgctgcctaggtgggc

SEQ ID NO: 2145529 - DNA, 25 bp, Homo sapien
tgtcggggccaaaggagtgacagca

SEQ ID NO: 2145530 - DNA, 25 bp, Homo sapien
tgctgcctaggtgggcggcaatgtg

SEQ ID NO: 2145531 - DNA, 25 bp, Homo sapien
tgcttggtggcgccgatgctgccta

SEQ ID NO: 2145532 - DNA, 25 bp, Homo sapien
ttcagttttcaggatatgtgtacag

SEQ ID NO: 2145533 - DNA, 25 bp, Homo sapien
cttcagttttcaggatatgtgtaca

SEQ ID NO: 2145534 - DNA, 25 bp, Homo sapien
ttcaggatatgtgtacagggtccca

SEQ ID NO: 2145535 - DNA, 25 bp, Homo sapien
gttttcaggatatgtgtacagggtc

SEQ ID NO: 2145536 - DNA, 25 bp, Homo sapien
agcagcaatgagggccttgaagttc

SEQ ID NO: 2145537 - DNA, 25 bp, Homo sapien
ctgagcagcaatgagggccttgaag

SEQ ID NO: 2145538 - DNA, 25 bp, Homo sapien
tgagcagcaatgagggccttgaagt

SEQ ID NO: 2145539 - DNA, 25 bp, Homo sapien
gagcagcaatgagggccttgaagtt

SEQ ID NO: 2145540 - DNA, 25 bp, Homo sapien
agagcacacggacatgagcccctct

SEQ ID NO: 2145541 - DNA, 25 bp, Homo sapien
gagcacacggacatgagcccctctg

SEQ ID NO: 2145542 - DNA, 25 bp, Homo sapien
ggagagcacacggacatgagcccct

SEQ ID NO: 2145543 - DNA, 25 bp, Homo sapien
agcacacggacatgagcccctctgt

SEQ ID NO: 2145544 - DNA, 25 bp, Homo sapien
ctggggacactatattgctatcagc

SEQ ID NO: 2145545 - DNA, 25 bp, Homo sapien
cagaatctatcgtcaccttcaaatg

SEQ ID NO: 2145546 - DNA, 25 bp, Homo sapien
cacacagaatctatcgtcaccttca

SEQ ID NO: 2145547 - DNA, 25 bp, Homo sapien
ggggacactatattgctatcagcaa

SEQ ID NO: 2145548 - DNA, 25 bp, Homo sapien
cttcaagtgagcatccaacagcccc

SEQ ID NO: 2145549 - DNA, 25 bp, Homo sapien
tgagcatccaacagccccagaattt

SEQ ID NO: 2145550 - DNA, 25 bp, Homo sapien
ttcaagtgagcatccaacagcccca

SEQ ID NO: 2145551 - DNA, 25 bp, Homo sapien
atccaacagccccagaatttgcctc

SEQ ID NO: 2145552 - DNA, 25 bp, Homo sapien
tagttttgctttccccaagacagtg

SEQ ID NO: 2145553 - DNA, 25 bp, Homo sapien
gttttgctttccccaagacagtgca

SEQ ID NO: 2145554 - DNA, 25 bp, Homo sapien
ggcagaaagaaggttctaggacctg

SEQ ID NO: 2145555 - DNA, 25 bp, Homo sapien
atagttttgctttccccaagacagt

SEQ ID NO: 2145556 - DNA, 25 bp, Homo sapien
tcctttttaggctggctttccacaa

SEQ ID NO: 2145557 - DNA, 25 bp, Homo sapien
gagtgtgtctcattggagtacttga

SEQ ID NO: 2145558 - DNA, 25 bp, Homo sapien
gcagtccttatcaaagtgctcccag

SEQ ID NO: 2145559 - DNA, 25 bp, Homo sapien
cgtgaacgcttctctttccgtggtg

SEQ ID NO: 2145560 - DNA, 25 bp, Homo sapien
cttcagggaagcgacactctgagta

SEQ ID NO: 2145561 - DNA, 25 bp, Homo sapien
ttcagggaagcgacactctgagtac

SEQ ID NO: 2145562 - DNA, 25 bp, Homo sapien
aacattccagtgatgagattgcagc

SEQ ID NO: 2145563 - DNA, 25 bp, Homo sapien
ggaacattccagtgatgagattgca

SEQ ID NO: 2145564 - DNA, 25 bp, Homo sapien
tggaacattccagtgatgagattgc

SEQ ID NO: 2145565 - DNA, 25 bp, Homo sapien
gaacattccagtgatgagattgcag

SEQ ID NO: 2145566 - DNA, 25 bp, Homo sapien
attcttcctcagcttgtccagtcac

SEQ ID NO: 2145567 - DNA, 25 bp, Homo sapien
ggcattcttcctcagcttgtccagt

SEQ ID NO: 2145568 - DNA, 25 bp, Homo sapien
aggcattcttcctcagcttgtccag

SEQ ID NO: 2145569 - DNA, 25 bp, Homo sapien
ctggcgaaggcattcttcctcagct

SEQ ID NO: 2145570 - DNA, 25 bp, Homo sapien
tggcctcggaagacccagactccag

SEQ ID NO: 2145571 - DNA, 25 bp, Homo sapien
ctttaatgaccccttctccctgaag

SEQ ID NO: 2145572 - DNA, 25 bp, Homo sapien
gcagctaggtgatggcaacagatgt

SEQ ID NO: 2145573 - DNA, 25 bp, Homo sapien
gggcaggttcaggcagctaggtgat

SEQ ID NO: 2145574 - DNA, 25 bp, Homo sapien
gttcaggcagctaggtgatggcaac

SEQ ID NO: 2145575 - DNA, 25 bp, Homo sapien
gtcccgcagtcgcacctcagatatg

SEQ ID NO: 2145576 - DNA, 25 bp, Homo sapien
tgattgaggccacgcgccaacggga

SEQ ID NO: 2145577 - DNA, 25 bp, Homo sapien
ggaaaggcccagtccgctctacgtc

SEQ ID NO: 2145578 - DNA, 25 bp, Homo sapien
cacctcagatatggggtaggatgcc

SEQ ID NO: 2145579 - DNA, 25 bp, Homo sapien
gagtcttgaaggtgccacagcattc

SEQ ID NO: 2145580 - DNA, 25 bp, Homo sapien
aggctgtagtgagtcttgaaggtgc

SEQ ID NO: 2145581 - DNA, 25 bp, Homo sapien
agctactttggaggatgtgtttgga

SEQ ID NO: 2145582 - DNA, 25 bp, Homo sapien
cagctactttggaggatgtgtttgg

SEQ ID NO: 2145583 - DNA, 25 bp, Homo sapien
tacatgtcaccacagaacttatgtg

SEQ ID NO: 2145584 - DNA, 25 bp, Homo sapien
gaagcactgcaattccacaactttg

SEQ ID NO: 2145585 - DNA, 25 bp, Homo sapien
ggattctttgagctcggcagttcta

SEQ ID NO: 2145586 - DNA, 25 bp, Homo sapien
cacaactttgggacgtcacggtagg

SEQ ID NO: 2145587 - DNA, 25 bp, Homo sapien
tgtgttcccgcagcagacgttaggc

SEQ ID NO: 2145588 - DNA, 25 bp, Homo sapien
agcattcaacgcgactgtgttcccg

SEQ ID NO: 2145589 - DNA, 25 bp, Homo sapien
aaaatgccagcggaaagtccatggg

SEQ ID NO: 2145590 - DNA, 25 bp, Homo sapien
tagcagcttggcgtagtgtcttccc

SEQ ID NO: 2145591 - DNA, 25 bp, Homo sapien
tgggacttgcctcaccttggcttgg

SEQ ID NO: 2145592 - DNA, 25 bp, Homo sapien
ccaaggcagaaaaggtccagagggt

SEQ ID NO: 2145593 - DNA, 25 bp, Homo sapien
tgaatccagctagagagcgagccag

SEQ ID NO: 2145594 - DNA, 25 bp, Homo sapien
taccgttttgaaggcgcacgtgggc

SEQ ID NO: 2145595 - DNA, 25 bp, Homo sapien
gcatcctttgcaggacccggtctgg

SEQ ID NO: 2145596 - DNA, 25 bp, Homo sapien
tgttcaggagtctcccaagtgcgca

SEQ ID NO: 2145597 - DNA, 25 bp, Homo sapien
ctggcttctccgagggtgttcagga

SEQ ID NO: 2145598 - DNA, 25 bp, Homo sapien
gcttcgctcaattcaggagtggaga

SEQ ID NO: 2145599 - DNA, 25 bp, Homo sapien
tattccggaattgtgggttcacctg

SEQ ID NO: 2145600 - DNA, 25 bp, Homo sapien
gtgacccgtgagaatgcccaagtgc

SEQ ID NO: 2145601 - DNA, 25 bp, Homo sapien
tgttgtacgtgcagccttctgggca

SEQ ID NO: 2145602 - DNA, 25 bp, Homo sapien
ccggacgaggtcaacataggctttc

SEQ ID NO: 2145603 - DNA, 25 bp, Homo sapien
ctggcttctccgagggtgttcagga

SEQ ID NO: 2145604 - DNA, 25 bp, Homo sapien
gcatcctttgcaggacccggtctgg

SEQ ID NO: 2145605 - DNA, 25 bp, Homo sapien
tgttcaggagtctcccaagtgcgca

SEQ ID NO: 2145606 - DNA, 25 bp, Homo sapien
gcttcgctcaattcaggagtggaga

SEQ ID NO: 2145607 - DNA, 25 bp, Homo sapien
tcaggtggaacggaggaccatgaac

SEQ ID NO: 2145608 - DNA, 25 bp, Homo sapien
gaatgtctctttgcgtgacagtgcc

SEQ ID NO: 2145609 - DNA, 25 bp, Homo sapien
cctgaattgagcgaagcggtgccga

SEQ ID NO: 2145610 - DNA, 25 bp, Homo sapien
gcccttaaaggtgcgttgacgtgga

SEQ ID NO: 2145611 - DNA, 25 bp, Homo sapien
ggacagccaggacgcgggcgttccc

SEQ ID NO: 2145612 - DNA, 25 bp, Homo sapien
tggcaatcccggcacccttgtgtgt

SEQ ID NO: 2145613 - DNA, 25 bp, Homo sapien
gagagaagcagtcgccgcgggtcgg

SEQ ID NO: 2145614 - DNA, 25 bp, Homo sapien
agggctgcccaaagcgcccgagatg

SEQ ID NO: 2145615 - DNA, 25 bp, Homo sapien
acttcaggtgaacccacaattccgg

SEQ ID NO: 2145616 - DNA, 25 bp, Homo sapien
gggtttggcctcaaacttcaggtga

SEQ ID NO: 2145617 - DNA, 25 bp, Homo sapien
tgaacccacaattccggaatagcgg

SEQ ID NO: 2145618 - DNA, 25 bp, Homo sapien
caattccggaatagcgggaccggca

SEQ ID NO: 2145619 - DNA, 25 bp, Homo sapien
gaccaagaggtcaaaggcgactggc

SEQ ID NO: 2145620 - DNA, 25 bp, Homo sapien
tcaaaggcgactggcgtcccactga

SEQ ID NO: 2145621 - DNA, 25 bp, Homo sapien
cagcttgaccaagaggtcaaaggcg

SEQ ID NO: 2145622 - DNA, 25 bp, Homo sapien
gaggtcaaaggcgactggcgtccca

SEQ ID NO: 2145623 - DNA, 25 bp, Homo sapien
ggcctgccccgattctacctgaggg

SEQ ID NO: 2145624 - DNA, 25 bp, Homo sapien
agagtccgacgggtccttccttctg

SEQ ID NO: 2145625 - DNA, 25 bp, Homo sapien
cagcggacccttctggcgcggagca

SEQ ID NO: 2145626 - DNA, 25 bp, Homo sapien
cagaccgggtcctgcaaaggatgca

SEQ ID NO: 2145627 - DNA, 25 bp, Homo sapien
tgaacaccctcggagaagccagaaa

SEQ ID NO: 2145628 - DNA, 25 bp, Homo sapien
ccgggagatggctccgtctgctgct

SEQ ID NO: 2145629 - DNA, 25 bp, Homo sapien
aagccagaaagccccgggagatggc

SEQ ID NO: 2145630 - DNA, 25 bp, Homo sapien
ttgggagactcctgaacaccctcgg

SEQ ID NO: 2145631 - DNA, 25 bp, Homo sapien
ggtcacgcttaaatgtgcattgaag

SEQ ID NO: 2145632 - DNA, 25 bp, Homo sapien
gaatgtctctttgcatggcagtgtc

SEQ ID NO: 2145633 - DNA, 25 bp, Homo sapien
ggaccgcggtcacgcttaaatgtgc

SEQ ID NO: 2145634 - DNA, 25 bp, Homo sapien
ttcgtcacagcggaccgcggtcacg

SEQ ID NO: 2145635 - DNA, 25 bp, Homo sapien
caggcaacactcagctgaatgtcat

SEQ ID NO: 2145636 - DNA, 25 bp, Homo sapien
tcaggcaacactcagctgaatgtca

SEQ ID NO: 2145637 - DNA, 25 bp, Homo sapien
caacactcagctgaatgtcatcccg

SEQ ID NO: 2145638 - DNA, 25 bp, Homo sapien
cactcagctgaatgtcatcccgtac

SEQ ID NO: 2145639 - DNA, 25 bp, Homo sapien
tctgaaggcacccactcaggtgccc

SEQ ID NO: 2145640 - DNA, 25 bp, Homo sapien
tgagcctggttccctcgctttcaca

SEQ ID NO: 2145641 - DNA, 25 bp, Homo sapien
tccctcgctttcacaccaactctga

SEQ ID NO: 2145642 - DNA, 25 bp, Homo sapien
cctctgggacctgacaggccttgca

SEQ ID NO: 2145643 - DNA, 25 bp, Homo sapien
gatgccactccaacatgattgctca

SEQ ID NO: 2145644 - DNA, 25 bp, Homo sapien
ccacctgtactcagggagctgcgac

SEQ ID NO: 2145645 - DNA, 25 bp, Homo sapien
agctgcgactcagagtcaggagtcc

SEQ ID NO: 2145646 - DNA, 25 bp, Homo sapien
gattgctcatacagcaatacacagg

SEQ ID NO: 2145647 - DNA, 25 bp, Homo sapien
ccaagggagaagttcccgcctgtgg

SEQ ID NO: 2145648 - DNA, 25 bp, Homo sapien
cagagctggcccaaaagggccgaga

SEQ ID NO: 2145649 - DNA, 25 bp, Homo sapien
aggccagtctcccaagggagaagtt

SEQ ID NO: 2145650 - DNA, 25 bp, Homo sapien
agtgcagttggcgttttctcctcag

SEQ ID NO: 2145651 - DNA, 25 bp, Homo sapien
gagagcgctggggtgttcctccatc

SEQ ID NO: 2145652 - DNA, 25 bp, Homo sapien
tgagaaggggccacacttagcactg

SEQ ID NO: 2145653 - DNA, 25 bp, Homo sapien
ctgcagccattggtgccagtggttg

SEQ ID NO: 2145654 - DNA, 25 bp, Homo sapien
cacacttagcactggagttctgcag

SEQ ID NO: 2145655 - DNA, 25 bp, Homo sapien
agaatcctgatggcctagctgggtc

SEQ ID NO: 2145656 - DNA, 25 bp, Homo sapien
caagaatcctgatggcctagctggg

SEQ ID NO: 2145657 - DNA, 25 bp, Homo sapien
gcaagaatcctgatggcctagctgg

SEQ ID NO: 2145658 - DNA, 25 bp, Homo sapien
gagcaagaatcctgatggcctagct

SEQ ID NO: 2145659 - DNA, 25 bp, Homo sapien
taagaacgtgcccatgacaaagcct

SEQ ID NO: 2145660 - DNA, 25 bp, Homo sapien
tttgagccctcgataagttttccac

SEQ ID NO: 2145661 - DNA, 25 bp, Homo sapien
tctcaagtgaacctcaagggatgac

SEQ ID NO: 2145662 - DNA, 25 bp, Homo sapien
ccagtaaggtgggacaacaagaagt

SEQ ID NO: 2145663 - DNA, 25 bp, Homo sapien
tggtggtcttgcgtttagctgctgc

SEQ ID NO: 2145664 - DNA, 25 bp, Homo sapien
ggagcttgggtgtagtctgtttctt

SEQ ID NO: 2145665 - DNA, 25 bp, Homo sapien
ctgagagtagcgttcttggtcactg

SEQ ID NO: 2145666 - DNA, 25 bp, Homo sapien
gtgttcctgcagcatagttggtggt

SEQ ID NO: 2145667 - DNA, 25 bp, Homo sapien
gcagtggcttgggagtgctgtaggg

SEQ ID NO: 2145668 - DNA, 25 bp, Homo sapien
tggaagccccaaggatagatgccag

SEQ ID NO: 2145669 - DNA, 25 bp, Homo sapien
ctctctggaggttcgagggaagtgg

SEQ ID NO: 2145670 - DNA, 25 bp, Homo sapien
tggacaatgaggatgcctcgccggt

SEQ ID NO: 2145671 - DNA, 25 bp, Homo sapien
cttaaaggcacacattgacaggaag

SEQ ID NO: 2145672 - DNA, 25 bp, Homo sapien
taaaggcacacattgacaggaagtc

SEQ ID NO: 2145673 - DNA, 25 bp, Homo sapien
ttaaaggcacacattgacaggaagt

SEQ ID NO: 2145674 - DNA, 25 bp, Homo sapien
acacgttcagttgcatctcttatca

SEQ ID NO: 2145675 - DNA, 25 bp, Homo sapien
cacgttcagttgcatctcttatcat

SEQ ID NO: 2145676 - DNA, 25 bp, Homo sapien
aaatggagactatctgggtgacagc

SEQ ID NO: 2145677 - DNA, 25 bp, Homo sapien
taaagtatgggaagccaagagcacc

SEQ ID NO: 2145678 - DNA, 25 bp, Homo sapien
gaaggacccttcagactcggtgtgg

SEQ ID NO: 2145679 - DNA, 25 bp, Homo sapien
actagcgctgcgttctgtggccact

SEQ ID NO: 2145680 - DNA, 25 bp, Homo sapien
gcaacactcccttgttgtatccatg

SEQ ID NO: 2145681 - DNA, 25 bp, Homo sapien
cccttgttgtatccatgtcccagag

SEQ ID NO: 2145682 - DNA, 25 bp, Homo sapien
actcccttgttgtatccatgtccca

SEQ ID NO: 2145683 - DNA, 25 bp, Homo sapien
tcccatgcaacactcccttgttgta

SEQ ID NO: 2145684 - DNA, 25 bp, Homo sapien
tggttgcttggggaggattggcttg

SEQ ID NO: 2145685 - DNA, 25 bp, Homo sapien
ttgcttggggaggattggcttggga

SEQ ID NO: 2145686 - DNA, 25 bp, Homo sapien
ttgggagtgttatgggggaccaggc

SEQ ID NO: 2145687 - DNA, 25 bp, Homo sapien
gaggattggcttgggagtgttatgg

SEQ ID NO: 2145688 - DNA, 25 bp, Homo sapien
tcatcagtggccttatagtcacaca

SEQ ID NO: 2145689 - DNA, 25 bp, Homo sapien
tcagtggccttatagtcacacattt

SEQ ID NO: 2145690 - DNA, 25 bp, Homo sapien
catcagtggccttatagtcacacat

SEQ ID NO: 2145691 - DNA, 25 bp, Homo sapien
cagtggccttatagtcacacatttc

SEQ ID NO: 2145692 - DNA, 25 bp, Homo sapien
tctttgttgggttgggttgattcga

SEQ ID NO: 2145693 - DNA, 25 bp, Homo sapien
acattttcccacattacagcacatt

SEQ ID NO: 2145694 - DNA, 25 bp, Homo sapien
ttttcccacattacagcacatttca

SEQ ID NO: 2145695 - DNA, 25 bp, Homo sapien
cacattggtagaaaccatgaaaaac

SEQ ID NO: 2145696 - DNA, 25 bp, Homo sapien
taatatcttgctgatttgtagaact

SEQ ID NO: 2145697 - DNA, 25 bp, Homo sapien
ttaagatccttgtatgtctttttct

SEQ ID NO: 2145698 - DNA, 25 bp, Homo sapien
tatgagtcgctaaaagatatttttg

SEQ ID NO: 2145699 - DNA, 25 bp, Homo sapien
ttcccttcttatgagtcgctaaaag

SEQ ID NO: 2145700 - DNA, 25 bp, Homo sapien
tttctgtggactcttaaagtctatt

SEQ ID NO: 2145701 - DNA, 25 bp, Homo sapien
agcgtgtgcgccaaacagcagcatc

SEQ ID NO: 2145702 - DNA, 25 bp, Homo sapien
ggcagcgtgtgcgccaaacagcagc

SEQ ID NO: 2145703 - DNA, 25 bp, Homo sapien
ctaggcagcgtgtgcgccaaacagc

SEQ ID NO: 2145704 - DNA, 25 bp, Homo sapien
taggcagcgtgtgcgccaaacagca

SEQ ID NO: 2145705 - DNA, 25 bp, Homo sapien
ctatctgatgtggtaaatcagtgta

SEQ ID NO: 2145706 - DNA, 25 bp, Homo sapien
aatcagtgtatgatcttcatctgtg

SEQ ID NO: 2145707 - DNA, 25 bp, Homo sapien
ccaactgtaaatcacactcttatat

SEQ ID NO: 2145708 - DNA, 25 bp, Homo sapien
cagggccacaccaactgtaaatcac

SEQ ID NO: 2145709 - DNA, 25 bp, Homo sapien
caatgctgggcttattaagacccat

SEQ ID NO: 2145710 - DNA, 25 bp, Homo sapien
gacccataaccaagtatacattaat

SEQ ID NO: 2145711 - DNA, 25 bp, Homo sapien
ttcaatgctgggcttattaagaccc

SEQ ID NO: 2145712 - DNA, 25 bp, Homo sapien
ttaagacccataaccaagtatacat

SEQ ID NO: 2145713 - DNA, 25 bp, Homo sapien
gggcttacagcattggccatggaaa

SEQ ID NO: 2145714 - DNA, 25 bp, Homo sapien
tgcagttgcattgcgtcagaatcaa

SEQ ID NO: 2145715 - DNA, 25 bp, Homo sapien
tcctgccacgtgaatcgggcctggg

SEQ ID NO: 2145716 - DNA, 25 bp, Homo sapien
gactttggcagctaaggcagctcgc

SEQ ID NO: 2145717 - DNA, 25 bp, Homo sapien
ctgttgttgagcaaaagatggttga

SEQ ID NO: 2145718 - DNA, 25 bp, Homo sapien
ttgttgagcaaaagatggttgatca

SEQ ID NO: 2145719 - DNA, 25 bp, Homo sapien
gcactgttgttgagcaaaagatggt

SEQ ID NO: 2145720 - DNA, 25 bp, Homo sapien
ttggcactgttgttgagcaaaagat

SEQ ID NO: 2145721 - DNA, 25 bp, Homo sapien
ttaatcaccacatttacagactcgg

SEQ ID NO: 2145722 - DNA, 25 bp, Homo sapien
tgtggcagtacccaatgttaatcac

SEQ ID NO: 2145723 - DNA, 25 bp, Homo sapien
tacagactcggtcaccaggtctgga

SEQ ID NO: 2145724 - DNA, 25 bp, Homo sapien
ggcagtacccaatgttaatcaccac

SEQ ID NO: 2145725 - DNA, 25 bp, Homo sapien
ggtagtccagattcaagtaactgag

SEQ ID NO: 2145726 - DNA, 25 bp, Homo sapien
tggtgtcattgggatatacaatggc

SEQ ID NO: 2145727 - DNA, 25 bp, Homo sapien
tacaatggctgaatcatccagtggg

SEQ ID NO: 2145728 - DNA, 25 bp, Homo sapien
tcatgtgtccacaatgctggtgtca

SEQ ID NO: 2145729 - DNA, 25 bp, Homo sapien
tgtccagacagtcaagggggctata

SEQ ID NO: 2145730 - DNA, 25 bp, Homo sapien
ccttgagctttgcccagggcctgtc

SEQ ID NO: 2145731 - DNA, 25 bp, Homo sapien
cagggcctgtccagacagtcaaggg

SEQ ID NO: 2145732 - DNA, 25 bp, Homo sapien
ctctttaaccattggctgatacttt

SEQ ID NO: 2145733 - DNA, 25 bp, Homo sapien
ttttattatgtttgactgtgatcac

SEQ ID NO: 2145734 - DNA, 25 bp, Homo sapien
tgagctgtagttttattatgtttga

SEQ ID NO: 2145735 - DNA, 25 bp, Homo sapien
tagttttattatgtttgactgtgat

SEQ ID NO: 2145736 - DNA, 25 bp, Homo sapien
ctgagctgtagttttattatgtttg

SEQ ID NO: 2145737 - DNA, 25 bp, Homo sapien
gtaaaaggccttaaagttctctgca

SEQ ID NO: 2145738 - DNA, 25 bp, Homo sapien
gtttctgttgtagctaggtaaggtg

SEQ ID NO: 2145739 - DNA, 25 bp, Homo sapien
taaaaggccttaaagttctctgcaa

SEQ ID NO: 2145740 - DNA, 25 bp, Homo sapien
tctgttgtagctaggtaaggtggtc

SEQ ID NO: 2145741 - DNA, 25 bp, Homo sapien
taatccttgtgcgaggtacagctta

SEQ ID NO: 2145742 - DNA, 25 bp, Homo sapien
aatccttgtgcgaggtacagcttac

SEQ ID NO: 2145743 - DNA, 25 bp, Homo sapien
tctccttagtcataaaagggtattc

SEQ ID NO: 2145744 - DNA, 25 bp, Homo sapien
tgaccttgtagattgtttttctcct

SEQ ID NO: 2145745 - DNA, 25 bp, Homo sapien
ttgaccttgtagattgtttttctcc

SEQ ID NO: 2145746 - DNA, 25 bp, Homo sapien
ccttagtcataaaagggtattcaga

SEQ ID NO: 2145747 - DNA, 25 bp, Homo sapien
gagtctgagcctttacaacagactt

SEQ ID NO: 2145748 - DNA, 25 bp, Homo sapien
ttacaacagacttgccaaccttcat

SEQ ID NO: 2145749 - DNA, 25 bp, Homo sapien
atatcttgcagctcaagagtctgag

SEQ ID NO: 2145750 - DNA, 25 bp, Homo sapien
ccatatcttgcagctcaagagtctg

SEQ ID NO: 2145751 - DNA, 25 bp, Homo sapien
atagcaacttgtagggttggtggct

SEQ ID NO: 2145752 - DNA, 25 bp, Homo sapien
gaccttcaatccctcggatcttgac

SEQ ID NO: 2145753 - DNA, 25 bp, Homo sapien
gaagatactgtctgggctaaaaagc

SEQ ID NO: 2145754 - DNA, 25 bp, Homo sapien
gatgtatctattcgacgtcaagcaa

SEQ ID NO: 2145755 - DNA, 25 bp, Homo sapien
gggacgtaatagcaccagatctctg

SEQ ID NO: 2145756 - DNA, 25 bp, Homo sapien
tgaattctgtgcttactcgttctct

SEQ ID NO: 2145757 - DNA, 25 bp, Homo sapien
cagacgctgggacgtaatagcacca

SEQ ID NO: 2145758 - DNA, 25 bp, Homo sapien
tactcgttctctcagacgctgggac

SEQ ID NO: 2145759 - DNA, 25 bp, Homo sapien
tatcataaatcagcttgcttagtgc

SEQ ID NO: 2145760 - DNA, 25 bp, Homo sapien
gttatcataaatcagcttgcttagt

SEQ ID NO: 2145761 - DNA, 25 bp, Homo sapien
gcttgcttagtgcctaaacacactc

SEQ ID NO: 2145762 - DNA, 25 bp, Homo sapien
ttatcataaatcagcttgcttagtg

SEQ ID NO: 2145763 - DNA, 25 bp, Homo sapien
catagaactcttagaacacatacag

SEQ ID NO: 2145764 - DNA, 25 bp, Homo sapien
tatttcaaaagattagtcagggcag

SEQ ID NO: 2145765 - DNA, 25 bp, Homo sapien
cagagccatggcttgtaaaacaaga

SEQ ID NO: 2145766 - DNA, 25 bp, Homo sapien
ggacatccttgaatcattagcattt

SEQ ID NO: 2145767 - DNA, 25 bp, Homo sapien
tcagcagctcctagttcttatgcct

SEQ ID NO: 2145768 - DNA, 25 bp, Homo sapien
cagcagctcctagttcttatgcctt

SEQ ID NO: 2145769 - DNA, 25 bp, Homo sapien
cagagatgttcacaagcccgaagtg

SEQ ID NO: 2145770 - DNA, 25 bp, Homo sapien
taaatcagccacagcgaggttgaag

SEQ ID NO: 2145771 - DNA, 25 bp, Homo sapien
gcccgaagtgaagaccgctggtaat

SEQ ID NO: 2145772 - DNA, 25 bp, Homo sapien
cacactgcggagcttctgttggaac

SEQ ID NO: 2145773 - DNA, 25 bp, Homo sapien
gagcctcaaagcaagtagccatgtt

SEQ ID NO: 2145774 - DNA, 25 bp, Homo sapien
caaaacgttagttccgcctcagaga

SEQ ID NO: 2145775 - DNA, 25 bp, Homo sapien
taatcctggaacctggcagagatgc

SEQ ID NO: 2145776 - DNA, 25 bp, Homo sapien
gagatgctgagtccccaaaacgtta

SEQ ID NO: 2145777 - DNA, 25 bp, Homo sapien
tcggagctgaaactaagtagtatca

SEQ ID NO: 2145778 - DNA, 25 bp, Homo sapien
aaatggaggatacagatacaagaga

SEQ ID NO: 2145779 - DNA, 25 bp, Homo sapien
gtaataatcggagctgaaactaagt

SEQ ID NO: 2145780 - DNA, 25 bp, Homo sapien
ctaagtagtatcagtggagataaaa

SEQ ID NO: 2145781 - DNA, 25 bp, Homo sapien
attcctaaagcaagagttcacacat

SEQ ID NO: 2145782 - DNA, 25 bp, Homo sapien
tcaaagagaaaagcggacaagtaca

SEQ ID NO: 2145783 - DNA, 25 bp, Homo sapien
agaaaagcggacaagtacacttttg

SEQ ID NO: 2145784 - DNA, 25 bp, Homo sapien
tttcaaagagaaaagcggacaagta

SEQ ID NO: 2145785 - DNA, 25 bp, Homo sapien
gcggacaagtacacttttgtacata

SEQ ID NO: 2145786 - DNA, 25 bp, Homo sapien
tcttgttgatatgtgaggacaccag

SEQ ID NO: 2145787 - DNA, 25 bp, Homo sapien
tttctcttgttgatatgtgaggaca

SEQ ID NO: 2145788 - DNA, 25 bp, Homo sapien
ttgatatgtgaggacaccagacagt

SEQ ID NO: 2145789 - DNA, 25 bp, Homo sapien
ttgttgatatgtgaggacaccagac

SEQ ID NO: 2145790 - DNA, 25 bp, Homo sapien
taactttgccatactgaaatgaaaa

SEQ ID NO: 2145791 - DNA, 25 bp, Homo sapien
gaaatgaaaattgtttagctgccat

SEQ ID NO: 2145792 - DNA, 25 bp, Homo sapien
actgaaatgaaaattgtttagctgc

SEQ ID NO: 2145793 - DNA, 25 bp, Homo sapien
ctaactttgccatactgaaatgaaa

SEQ ID NO: 2145794 - DNA, 25 bp, Homo sapien
accccttctggtgatggacactctt

SEQ ID NO: 2145795 - DNA, 25 bp, Homo sapien
ggtgatggacactctttcctgtgca

SEQ ID NO: 2145796 - DNA, 25 bp, Homo sapien
cttgaccccttctggtgatggacac

SEQ ID NO: 2145797 - DNA, 25 bp, Homo sapien
ggacactctttcctgtgcactgtaa

SEQ ID NO: 2145798 - DNA, 25 bp, Homo sapien
cttctccactcttttgggcaattcc

SEQ ID NO: 2145799 - DNA, 25 bp, Homo sapien
tttaattgttccataatgcttttct

SEQ ID NO: 2145800 - DNA, 25 bp, Homo sapien
gaatgaattcagtgaaacattgtct

SEQ ID NO: 2145801 - DNA, 25 bp, Homo sapien
ggtaacatagcagagaatgaattca

SEQ ID NO: 2145802 - DNA, 25 bp, Homo sapien
gaagaaattccagttaaggtctgta

SEQ ID NO: 2145803 - DNA, 25 bp, Homo sapien
cagttaaggtctgtaagtttttcag

SEQ ID NO: 2145804 - DNA, 25 bp, Homo sapien
agaagaaattccagttaaggtctgt

SEQ ID NO: 2145805 - DNA, 25 bp, Homo sapien
aagaagaaattccagttaaggtctg

SEQ ID NO: 2145806 - DNA, 25 bp, Homo sapien
aatgtgcatgttcttactgtacaag

SEQ ID NO: 2145807 - DNA, 25 bp, Homo sapien
taatgtgcatgttcttactgtacaa

SEQ ID NO: 2145808 - DNA, 25 bp, Homo sapien
atgtgcatgttcttactgtacaagt

SEQ ID NO: 2145809 - DNA, 25 bp, Homo sapien
tagtaattcagtctccctattgcta

SEQ ID NO: 2145810 - DNA, 25 bp, Homo sapien
ttgttgtgcaatcagactccaaaac

SEQ ID NO: 2145811 - DNA, 25 bp, Homo sapien
taaaattctgtcatagtggataaaa

SEQ ID NO: 2145812 - DNA, 25 bp, Homo sapien
taagtgcaccgttgaagagtgttaa

SEQ ID NO: 2145813 - DNA, 25 bp, Homo sapien
ccagcactctagttgcaagggaatc

SEQ ID NO: 2145814 - DNA, 25 bp, Homo sapien
gaaatgcccagccataactcaggat

SEQ ID NO: 2145815 - DNA, 25 bp, Homo sapien
tgagcctggagccaaaaactctgcc

SEQ ID NO: 2145816 - DNA, 25 bp, Homo sapien
tacatggcatgtgaaccggcaggcc

SEQ ID NO: 2145817 - DNA, 25 bp, Homo sapien
agggtgtgtgacttccttactagaa

SEQ ID NO: 2145818 - DNA, 25 bp, Homo sapien
tgtgtgacttccttactagaaggca

SEQ ID NO: 2145819 - DNA, 25 bp, Homo sapien
catctttgggtgtctgccctccttt

SEQ ID NO: 2145820 - DNA, 25 bp, Homo sapien
catcatctttgggtgtctgccctcc

SEQ ID NO: 2145821 - DNA, 25 bp, Homo sapien
gccgtacatgtatccgctgaatcca

SEQ ID NO: 2145822 - DNA, 25 bp, Homo sapien
tagaagtcctaaccatcatgagaaa

SEQ ID NO: 2145823 - DNA, 25 bp, Homo sapien
aaaagataaaatcgggccaagcaca

SEQ ID NO: 2145824 - DNA, 25 bp, Homo sapien
taatagcaaagtagaccttaaggca

SEQ ID NO: 2145825 - DNA, 25 bp, Homo sapien
atgaatggtgaacattagcatgcat

SEQ ID NO: 2145826 - DNA, 25 bp, Homo sapien
gagcctgggagctaaatgaatggtg

SEQ ID NO: 2145827 - DNA, 25 bp, Homo sapien
aaatgaatggtgaacattagcatgc

SEQ ID NO: 2145828 - DNA, 25 bp, Homo sapien
gcctgggagctaaatgaatggtgaa

SEQ ID NO: 2145829 - DNA, 25 bp, Homo sapien
cagagtgtagcaatttcagggtata

SEQ ID NO: 2145830 - DNA, 25 bp, Homo sapien
ctagttggagtgcaaaattgcaaca

SEQ ID NO: 2145831 - DNA, 25 bp, Homo sapien
tgcaaaattgcaacagagtgtagca

SEQ ID NO: 2145832 - DNA, 25 bp, Homo sapien
tgcaacagagtgtagcaatttcagg

SEQ ID NO: 2145833 - DNA, 25 bp, Homo sapien
gagggaagggcggttctttgctgaa

SEQ ID NO: 2145834 - DNA, 25 bp, Homo sapien
tctactgctcactagtgctctctca

SEQ ID NO: 2145835 - DNA, 25 bp, Homo sapien
gaactccatgacctatggcccgtag

SEQ ID NO: 2145836 - DNA, 25 bp, Homo sapien
tgtcatctaaggtaatggctgggta

SEQ ID NO: 2145837 - DNA, 25 bp, Homo sapien
ccttttacagggattgctttgtgta

SEQ ID NO: 2145838 - DNA, 25 bp, Homo sapien
aacacaaacaaattattgagcaggt

SEQ ID NO: 2145839 - DNA, 25 bp, Homo sapien
gagcaggtttatgggaaattctaac

SEQ ID NO: 2145840 - DNA, 25 bp, Homo sapien
caaacaaattattgagcaggtttat

SEQ ID NO: 2145841 - DNA, 25 bp, Homo sapien
cccaggggtgggaacatttatgaag

SEQ ID NO: 2145842 - DNA, 25 bp, Homo sapien
tgtccagtagtgtcaattaccggaa

SEQ ID NO: 2145843 - DNA, 25 bp, Homo sapien
tcctacctgccagagtgagccacct

SEQ ID NO: 2145844 - DNA, 25 bp, Homo sapien
ccggaagggactaaagtgaggctct

SEQ ID NO: 2145845 - DNA, 25 bp, Homo sapien
ccttctccctgcacttgaagaaact

SEQ ID NO: 2145846 - DNA, 25 bp, Homo sapien
tctccctgcacttgaagaaactcgg

SEQ ID NO: 2145847 - DNA, 25 bp, Homo sapien
cctgcacttgaagaaactcgggcat

SEQ ID NO: 2145848 - DNA, 25 bp, Homo sapien
tccctgcacttgaagaaactcgggc

SEQ ID NO: 2145849 - DNA, 25 bp, Homo sapien
catcattttcaccaacatggaaatt

SEQ ID NO: 2145850 - DNA, 25 bp, Homo sapien
tcaccaacatggaaattctctgatg

SEQ ID NO: 2145851 - DNA, 25 bp, Homo sapien
catggaaattctctgatgaagccga

SEQ ID NO: 2145852 - DNA, 25 bp, Homo sapien
gaaattctctgatgaagccgacact

SEQ ID NO: 2145853 - DNA, 25 bp, Homo sapien
agataatccgattttttggaccagt

SEQ ID NO: 2145854 - DNA, 25 bp, Homo sapien
cacatttcctaatcccactgcgtat

SEQ ID NO: 2145855 - DNA, 25 bp, Homo sapien
gcgtatccaatcatagatagaagat

SEQ ID NO: 2145856 - DNA, 25 bp, Homo sapien
caccattgctgtaggtcagatatgg

SEQ ID NO: 2145857 - DNA, 25 bp, Homo sapien
gtaaaccagccaatgctaacataat

SEQ ID NO: 2145858 - DNA, 25 bp, Homo sapien
attgcataaggtatcaagaaggcgc

SEQ ID NO: 2145859 - DNA, 25 bp, Homo sapien
actgaaactggacctaagctagcaa

SEQ ID NO: 2145860 - DNA, 25 bp, Homo sapien
cccagtgaacactccagaaagaaca

SEQ ID NO: 2145861 - DNA, 25 bp, Homo sapien
caaacatgtagtaaagactataggc

SEQ ID NO: 2145862 - DNA, 25 bp, Homo sapien
gagatcaggaccattgtaattccca

SEQ ID NO: 2145863 - DNA, 25 bp, Homo sapien
tctgaccacgaagaacaatttttcc

SEQ ID NO: 2145864 - DNA, 25 bp, Homo sapien
gattgtcacaaaaatggagatcagg

SEQ ID NO: 2145865 - DNA, 25 bp, Homo sapien
tttattcactgtactcacattacag

SEQ ID NO: 2145866 - DNA, 25 bp, Homo sapien
cctttattcactgtactcacattac

SEQ ID NO: 2145867 - DNA, 25 bp, Homo sapien
ctttattcactgtactcacattaca

SEQ ID NO: 2145868 - DNA, 25 bp, Homo sapien
gctgccctggctgataaatttcact

SEQ ID NO: 2145869 - DNA, 25 bp, Homo sapien
gtaaaattgttgatgtctacccagc

SEQ ID NO: 2145870 - DNA, 25 bp, Homo sapien
tgttgatgtctacccagcttttatt

SEQ ID NO: 2145871 - DNA, 25 bp, Homo sapien
ttcactgccgttgatgcaggtaaaa

SEQ ID NO: 2145872 - DNA, 25 bp, Homo sapien
cttgccagacgatttgattccttta

SEQ ID NO: 2145873 - DNA, 25 bp, Homo sapien
gacaaagtgctaaataccaaacaat

SEQ ID NO: 2145874 - DNA, 25 bp, Homo sapien
acttgaccgttggagcgccacttta

SEQ ID NO: 2145875 - DNA, 25 bp, Homo sapien
tagtgctgctccaactatgagccaa

SEQ ID NO: 2145876 - DNA, 25 bp, Homo sapien
ttttgaagcaccctccagagttgca

SEQ ID NO: 2145877 - DNA, 25 bp, Homo sapien
cagagttgcacctcgtactaacagg

SEQ ID NO: 2145878 - DNA, 25 bp, Homo sapien
ttgactgggctccaatatagtatga

SEQ ID NO: 2145879 - DNA, 25 bp, Homo sapien
acaggatgagtaggaccacataggg

SEQ ID NO: 2145880 - DNA, 25 bp, Homo sapien
tacattcagccattatccgaaggca

SEQ ID NO: 2145881 - DNA, 25 bp, Homo sapien
tcatatctgataggacaagtcctct

SEQ ID NO: 2145882 - DNA, 25 bp, Homo sapien
caccagctggctatgagggttccca

SEQ ID NO: 2145883 - DNA, 25 bp, Homo sapien
gaaggtatccatctttgactatagg

SEQ ID NO: 2145884 - DNA, 25 bp, Homo sapien
ggccatgtgtcccaatatagaaaaa

SEQ ID NO: 2145885 - DNA, 25 bp, Homo sapien
tatgggccatgtgtcccaatataga

SEQ ID NO: 2145886 - DNA, 25 bp, Homo sapien
gatatatgggccatgtgtcccaata

SEQ ID NO: 2145887 - DNA, 25 bp, Homo sapien
tttccagatatatgggccatgtgtc

SEQ ID NO: 2145888 - DNA, 25 bp, Homo sapien
tatggaccaaaatggaccacctggg

SEQ ID NO: 2145889 - DNA, 25 bp, Homo sapien
ccacctgggagttgggctagagcct

SEQ ID NO: 2145890 - DNA, 25 bp, Homo sapien
gaagcaaactgagaatcgagaccca

SEQ ID NO: 2145891 - DNA, 25 bp, Homo sapien
gctagagcctctggataggcaatga

SEQ ID NO: 2145892 - DNA, 25 bp, Homo sapien
atcttgaattgttgttgtgatcgtt

SEQ ID NO: 2145893 - DNA, 25 bp, Homo sapien
tcttgaattgttgttgtgatcgttt

SEQ ID NO: 2145894 - DNA, 25 bp, Homo sapien
aatcttgaattgttgttgtgatcgt

SEQ ID NO: 2145895 - DNA, 25 bp, Homo sapien
aaatcttgaattgttgttgtgatcg

SEQ ID NO: 2145896 - DNA, 25 bp, Homo sapien
agcagcagcccaaagttatgggaac

SEQ ID NO: 2145897 - DNA, 25 bp, Homo sapien
ctgagtcacacagacgagaccaagg

SEQ ID NO: 2145898 - DNA, 25 bp, Homo sapien
agcccaaagttatgggaaccctcat

SEQ ID NO: 2145899 - DNA, 25 bp, Homo sapien
cacagacgagaccaaggagaaacaa

SEQ ID NO: 2145900 - DNA, 25 bp, Homo sapien
gcaattaaaatgccccatccagcac

SEQ ID NO: 2145901 - DNA, 25 bp, Homo sapien
aatccagatgattccaactagctcc

SEQ ID NO: 2145902 - DNA, 25 bp, Homo sapien
atccagatgattccaactagctcca

SEQ ID NO: 2145903 - DNA, 25 bp, Homo sapien
gcgtaattacaaaccagcaagctct

SEQ ID NO: 2145904 - DNA, 25 bp, Homo sapien
ggcgtaattacaaaccagcaagctc

SEQ ID NO: 2145905 - DNA, 25 bp, Homo sapien
taggcgtaattacaaaccagcaagc

SEQ ID NO: 2145906 - DNA, 25 bp, Homo sapien
ggataggcgtaattacaaaccagca

SEQ ID NO: 2145907 - DNA, 25 bp, Homo sapien
gaattgcgccataattaggtctatg

SEQ ID NO: 2145908 - DNA, 25 bp, Homo sapien
taggtctatgaaattgcaccaatga

SEQ ID NO: 2145909 - DNA, 25 bp, Homo sapien
atggaattgcgccataattaggtct

SEQ ID NO: 2145910 - DNA, 25 bp, Homo sapien
gaaaacaatcatacaccagcctaaa

SEQ ID NO: 2145911 - DNA, 25 bp, Homo sapien
cccagttagaagctggtctgcagca

SEQ ID NO: 2145912 - DNA, 25 bp, Homo sapien
tttctgctgccactaacagtaggta

SEQ ID NO: 2145913 - DNA, 25 bp, Homo sapien
tgttgttccaggtatggaccccagt

SEQ ID NO: 2145914 - DNA, 25 bp, Homo sapien
atttcatggtcagcctcttttttag

SEQ ID NO: 2145915 - DNA, 25 bp, Homo sapien
gatattctgataaacctacggactc

SEQ ID NO: 2145916 - DNA, 25 bp, Homo sapien
cataggctatgatgcttaaaccagt

SEQ ID NO: 2145917 - DNA, 25 bp, Homo sapien
gctccctgaagcctaggttaagaaa

SEQ ID NO: 2145918 - DNA, 25 bp, Homo sapien
tagagaggtggttcaattagaggcc

SEQ ID NO: 2145919 - DNA, 25 bp, Homo sapien
ctcccacgtgtctgtttgctaatct

SEQ ID NO: 2145920 - DNA, 25 bp, Homo sapien
cgtgtctgtttgctaatctcaccat

SEQ ID NO: 2145921 - DNA, 25 bp, Homo sapien
cccacgtgtctgtttgctaatctca

SEQ ID NO: 2145922 - DNA, 25 bp, Homo sapien
cacgtgtctgtttgctaatctcacc

SEQ ID NO: 2145923 - DNA, 25 bp, Homo sapien
atatcgccgctttcaggtaatggtg

SEQ ID NO: 2145924 - DNA, 25 bp, Homo sapien
tgtcttctggaaatatcgccgcttt

SEQ ID NO: 2145925 - DNA, 25 bp, Homo sapien
taatggtgaatgtaagggagatttg

SEQ ID NO: 2145926 - DNA, 25 bp, Homo sapien
ttcaggtaatggtgaatgtaaggga

SEQ ID NO: 2145927 - DNA, 25 bp, Homo sapien
gaaaattattatacaccagcctaga

SEQ ID NO: 2145928 - DNA, 25 bp, Homo sapien
aaaattattatacaccagcctagag

SEQ ID NO: 2145929 - DNA, 25 bp, Homo sapien
tagaaaattattatacaccagccta

SEQ ID NO: 2145930 - DNA, 25 bp, Homo sapien
aaattattatacaccagcctagagc

SEQ ID NO: 2145931 - DNA, 25 bp, Homo sapien
gctaggtctgagtacaggaaaagcc

SEQ ID NO: 2145932 - DNA, 25 bp, Homo sapien
cattagcagcagaccaatgtgctct

SEQ ID NO: 2145933 - DNA, 25 bp, Homo sapien
gggtacaatatctccacaaacctgt

SEQ ID NO: 2145934 - DNA, 25 bp, Homo sapien
gaaaagcctgatcttcttgttcaag

SEQ ID NO: 2145935 - DNA, 25 bp, Homo sapien
ctcttgactctgaagttgtgaccgc

SEQ ID NO: 2145936 - DNA, 25 bp, Homo sapien
tgactctgaagttgtgaccgctgtg

SEQ ID NO: 2145937 - DNA, 25 bp, Homo sapien
cgctgtgcatatgcccacacttcaa

SEQ ID NO: 2145938 - DNA, 25 bp, Homo sapien
aagttgtgaccgctgtgcatatgcc

SEQ ID NO: 2145939 - DNA, 25 bp, Homo sapien
tgattttctaccacctttccacgtg

SEQ ID NO: 2145940 - DNA, 25 bp, Homo sapien
ggaagctggcagagtttgaacaata

SEQ ID NO: 2145941 - DNA, 25 bp, Homo sapien
catttttgcacacgaacaatggtaa

SEQ ID NO: 2145942 - DNA, 25 bp, Homo sapien
tggcaaacatttgccactccatatg

SEQ ID NO: 2145943 - DNA, 25 bp, Homo sapien
attctataacctgatttaacatctc

SEQ ID NO: 2145944 - DNA, 25 bp, Homo sapien
tataacctgatttaacatctccaaa

SEQ ID NO: 2145945 - DNA, 25 bp, Homo sapien
tctataacctgatttaacatctcca

SEQ ID NO: 2145946 - DNA, 25 bp, Homo sapien
aatctattctataacctgatttaac

SEQ ID NO: 2145947 - DNA, 25 bp, Homo sapien
gcgtttgacttgaacgttttgtcaa

SEQ ID NO: 2145948 - DNA, 25 bp, Homo sapien
ctgcgtttgacttgaacgttttgtc

SEQ ID NO: 2145949 - DNA, 25 bp, Homo sapien
cgttttgtcaaatccttcccagatt

SEQ ID NO: 2145950 - DNA, 25 bp, Homo sapien
tgaacgttttgtcaaatccttccca

SEQ ID NO: 2145951 - DNA, 25 bp, Homo sapien
gcatcagaacggtcagtaaacaagg

SEQ ID NO: 2145952 - DNA, 25 bp, Homo sapien
cctgcatcagaacggtcagtaaaca

SEQ ID NO: 2145953 - DNA, 25 bp, Homo sapien
gcacctgcatcagaacggtcagtaa

SEQ ID NO: 2145954 - DNA, 25 bp, Homo sapien
ctctcctaattcatcagcacctgca

SEQ ID NO: 2145955 - DNA, 25 bp, Homo sapien
caagtagtactgtaatgggtttggc

SEQ ID NO: 2145956 - DNA, 25 bp, Homo sapien
ttggccaaatatcatctttgattac

SEQ ID NO: 2145957 - DNA, 25 bp, Homo sapien
tgggaaccaagtagtactgtaatgg

SEQ ID NO: 2145958 - DNA, 25 bp, Homo sapien
tagtactgtaatgggtttggccaaa

SEQ ID NO: 2145959 - DNA, 25 bp, Homo sapien
tcatccccttcttcatcaatatctt

SEQ ID NO: 2145960 - DNA, 25 bp, Homo sapien
tatcttctaatccttcctcctcttt

SEQ ID NO: 2145961 - DNA, 25 bp, Homo sapien
ccttctcctttttcatcatccatac

SEQ ID NO: 2145962 - DNA, 25 bp, Homo sapien
atcatcatcgtcttcttctccttct

SEQ ID NO: 2145963 - DNA, 25 bp, Homo sapien
actgtccatattcacttagagacac

SEQ ID NO: 2145964 - DNA, 25 bp, Homo sapien
cacttagagacacagtgtactctct

SEQ ID NO: 2145965 - DNA, 25 bp, Homo sapien
agaggaagaaagctagaattctatc

SEQ ID NO: 2145966 - DNA, 25 bp, Homo sapien
gaaagtagacagatacatgttgcta

SEQ ID NO: 2145967 - DNA, 25 bp, Homo sapien
aggcctgaccatatttttgcccttg

SEQ ID NO: 2145968 - DNA, 25 bp, Homo sapien
taggcctgaccatatttttgccctt

SEQ ID NO: 2145969 - DNA, 25 bp, Homo sapien
ctcattaggcctgaccatatttttg

SEQ ID NO: 2145970 - DNA, 25 bp, Homo sapien
attaggcctgaccatatttttgccc

SEQ ID NO: 2145971 - DNA, 25 bp, Homo sapien
actgtcatgttcagtaccttgatct

SEQ ID NO: 2145972 - DNA, 25 bp, Homo sapien
tcctcagagtgttggagctatcatc

SEQ ID NO: 2145973 - DNA, 25 bp, Homo sapien
tccaaacttgggcaatgctaacaac

SEQ ID NO: 2145974 - DNA, 25 bp, Homo sapien
cattctttagatgtaggttgacctg

SEQ ID NO: 2145975 - DNA, 25 bp, Homo sapien
taaagtataatgtgaaggacagtct

SEQ ID NO: 2145976 - DNA, 25 bp, Homo sapien
taagataatctttctggttataaga

SEQ ID NO: 2145977 - DNA, 25 bp, Homo sapien
aaacacagtgagcaactcttattct

SEQ ID NO: 2145978 - DNA, 25 bp, Homo sapien
cacagtgagcaactcttattcttac

SEQ ID NO: 2145979 - DNA, 25 bp, Homo sapien
agctagacggcattccctggtactg

SEQ ID NO: 2145980 - DNA, 25 bp, Homo sapien
gggcagctagacggcattccctggt

SEQ ID NO: 2145981 - DNA, 25 bp, Homo sapien
ctagacggcattccctggtactgcc

SEQ ID NO: 2145982 - DNA, 25 bp, Homo sapien
gcagctagacggcattccctggtac

SEQ ID NO: 2145983 - DNA, 25 bp, Homo sapien
tacgcttgtcgttttgcaaccagtg

SEQ ID NO: 2145984 - DNA, 25 bp, Homo sapien
cttagcttcctgttgacagatttca

SEQ ID NO: 2145985 - DNA, 25 bp, Homo sapien
tgagcagaattcagccttagcttcc

SEQ ID NO: 2145986 - DNA, 25 bp, Homo sapien
gatttcagtttgcaattgtacgctt

SEQ ID NO: 2145987 - DNA, 25 bp, Homo sapien
ctgcattgctgacctggtcgtcttc

SEQ ID NO: 2145988 - DNA, 25 bp, Homo sapien
tgctttccactggaactgtaagttc

SEQ ID NO: 2145989 - DNA, 25 bp, Homo sapien
gacctggtcgtcttctttagcagaa

SEQ ID NO: 2145990 - DNA, 25 bp, Homo sapien
cttgcccttgctttccactggaact

SEQ ID NO: 2145991 - DNA, 25 bp, Homo sapien
acttgtaaacattctctagcccggg

SEQ ID NO: 2145992 - DNA, 25 bp, Homo sapien
gaagcccacttgtaaacattctcta

SEQ ID NO: 2145993 - DNA, 25 bp, Homo sapien
ttctctgaagcccacttgtaaacat

SEQ ID NO: 2145994 - DNA, 25 bp, Homo sapien
ctagcccggggactttctccacttg

SEQ ID NO: 2145995 - DNA, 25 bp, Homo sapien
ctgagagaaaatgttggcggtacac

SEQ ID NO: 2145996 - DNA, 25 bp, Homo sapien
tccagatccataagttagttttcat

SEQ ID NO: 2145997 - DNA, 25 bp, Homo sapien
tgttggcggtacacagtctgcatag

SEQ ID NO: 2145998 - DNA, 25 bp, Homo sapien
tctgcatagagccaaaagcctctcc

SEQ ID NO: 2145999 - DNA, 25 bp, Homo sapien
taacttccgtaaatgcgttagcaaa

SEQ ID NO: 2146000 - DNA, 25 bp, Homo sapien
ccgtaaatgcgttagcaaattcctg

SEQ ID NO: 2146001 - DNA, 25 bp, Homo sapien
tctgtatttctgtaacttccgtaaa

SEQ ID NO: 2146002 - DNA, 25 bp, Homo sapien
tctgtaacttccgtaaatgcgttag

SEQ ID NO: 2146003 - DNA, 25 bp, Homo sapien
tcaagcttcttgatcagggcagacc

SEQ ID NO: 2146004 - DNA, 25 bp, Homo sapien
cagcacggcgtacaactctagagtc

SEQ ID NO: 2146005 - DNA, 25 bp, Homo sapien
tccccaggagtgatatagtgcacag

SEQ ID NO: 2146006 - DNA, 25 bp, Homo sapien
tagtgcacagccatgcaactgtggc

SEQ ID NO: 2146007 - DNA, 25 bp, Homo sapien
tatttccacaggatgatgaaagaga

SEQ ID NO: 2146008 - DNA, 25 bp, Homo sapien
ttgtgcactatttccacaggatgat

SEQ ID NO: 2146009 - DNA, 25 bp, Homo sapien
tgcactatttccacaggatgatgaa

SEQ ID NO: 2146010 - DNA, 25 bp, Homo sapien
cactatttccacaggatgatgaaag

SEQ ID NO: 2146011 - DNA, 25 bp, Homo sapien
tcaaaacctatgtaccactgtatca

SEQ ID NO: 2146012 - DNA, 25 bp, Homo sapien
tagtttttgaccagcttcaaccact

SEQ ID NO: 2146013 - DNA, 25 bp, Homo sapien
tttgtgcttctgtatttgaagggac

SEQ ID NO: 2146014 - DNA, 25 bp, Homo sapien
tgaagggacttcactagtttttgac

SEQ ID NO: 2146015 - DNA, 25 bp, Homo sapien
gtgggtctcgtcatccattccaggt

SEQ ID NO: 2146016 - DNA, 25 bp, Homo sapien
aattttaagtgggtctcgtcatcca

SEQ ID NO: 2146017 - DNA, 25 bp, Homo sapien
ttccaggtgcaaacccaaataacaa

SEQ ID NO: 2146018 - DNA, 25 bp, Homo sapien
ggcatcacaattctgtgctttggca

SEQ ID NO: 2146019 - DNA, 25 bp, Homo sapien
tcagcagatgtagacttttgaaagt

SEQ ID NO: 2146020 - DNA, 25 bp, Homo sapien
cagcagatgtagacttttgaaagtc

SEQ ID NO: 2146021 - DNA, 25 bp, Homo sapien
cagatgtagacttttgaaagtctct

SEQ ID NO: 2146022 - DNA, 25 bp, Homo sapien
atgtagacttttgaaagtctctcac

SEQ ID NO: 2146023 - DNA, 25 bp, Homo sapien
caaaagatgtaaaccagcaggtttt

SEQ ID NO: 2146024 - DNA, 25 bp, Homo sapien
acaagaggtgtaggacctgtttgga

SEQ ID NO: 2146025 - DNA, 25 bp, Homo sapien
tttgggttgagtgatgaaacaagag

SEQ ID NO: 2146026 - DNA, 25 bp, Homo sapien
ctctcttacagataagtttgggttg

SEQ ID NO: 2146027 - DNA, 25 bp, Homo sapien
aaacaagaggtgtaggacctgtttg

SEQ ID NO: 2146028 - DNA, 25 bp, Homo sapien
ccctctggatacataaaacagcctt

SEQ ID NO: 2146029 - DNA, 25 bp, Homo sapien
gtccctctggatacataaaacagcc

SEQ ID NO: 2146030 - DNA, 25 bp, Homo sapien
tccctctggatacataaaacagcct

SEQ ID NO: 2146031 - DNA, 25 bp, Homo sapien
tcaaagtgcaatgtgaagcagcaaa

SEQ ID NO: 2146032 - DNA, 25 bp, Homo sapien
cttcaaagtgcaatgtgaagcagca

SEQ ID NO: 2146033 - DNA, 25 bp, Homo sapien
ttcaaagtgcaatgtgaagcagcaa

SEQ ID NO: 2146034 - DNA, 25 bp, Homo sapien
ttaggcttgttagcggatgtatttc

SEQ ID NO: 2146035 - DNA, 25 bp, Homo sapien
cagactgcaactgttctccaaagtg

SEQ ID NO: 2146036 - DNA, 25 bp, Homo sapien
cagtctgtgtttcaccagactgcaa

SEQ ID NO: 2146037 - DNA, 25 bp, Homo sapien
gctggtaatactcagggacctgaac

SEQ ID NO: 2146038 - DNA, 25 bp, Homo sapien
tgagctgaatcattgtgaaggtgcc

SEQ ID NO: 2146039 - DNA, 25 bp, Homo sapien
caatacttcaggtatttgtgagctg

SEQ ID NO: 2146040 - DNA, 25 bp, Homo sapien
tcatctggatcgtatcctctttggg

SEQ ID NO: 2146041 - DNA, 25 bp, Homo sapien
gtaatcaatcatcatctggatcgta

SEQ ID NO: 2146042 - DNA, 25 bp, Homo sapien
tgcacctggccttacctgctaaaaa

SEQ ID NO: 2146043 - DNA, 25 bp, Homo sapien
gcacctggccttacctgctaaaaaa

SEQ ID NO: 2146044 - DNA, 25 bp, Homo sapien
tgagtttttcattctctctttttgc

SEQ ID NO: 2146045 - DNA, 25 bp, Homo sapien
agtttttcattctctctttttgcca

SEQ ID NO: 2146046 - DNA, 25 bp, Homo sapien
tctgagtttttcattctctcttttt

SEQ ID NO: 2146047 - DNA, 25 bp, Homo sapien
gtttttcattctctctttttgccat

SEQ ID NO: 2146048 - DNA, 25 bp, Homo sapien
tcttcagtaacttgttgcacaacat

SEQ ID NO: 2146049 - DNA, 25 bp, Homo sapien
tcatctatccggtaagtgtctgcta

SEQ ID NO: 2146050 - DNA, 25 bp, Homo sapien
cagtattaagaccaaattcttgagg

SEQ ID NO: 2146051 - DNA, 25 bp, Homo sapien
tgctatgtcctttgtcgtgagcttt

SEQ ID NO: 2146052 - DNA, 25 bp, Homo sapien
tatccggtaagtgtctgctatgtcc

SEQ ID NO: 2146053 - DNA, 25 bp, Homo sapien
tcaggggctgccacatgaagaagaa

SEQ ID NO: 2146054 - DNA, 25 bp, Homo sapien
ggggctgccacatgaagaagaatat

SEQ ID NO: 2146055 - DNA, 25 bp, Homo sapien
gggctgccacatgaagaagaatatc

SEQ ID NO: 2146056 - DNA, 25 bp, Homo sapien
caggggctgccacatgaagaagaat

SEQ ID NO: 2146057 - DNA, 25 bp, Homo sapien
ctgtttgagaataccatctggagcc

SEQ ID NO: 2146058 - DNA, 25 bp, Homo sapien
cctgctgtttgagaataccatctgg

SEQ ID NO: 2146059 - DNA, 25 bp, Homo sapien
gctgtttgagaataccatctggagc

SEQ ID NO: 2146060 - DNA, 25 bp, Homo sapien
tgctgtttgagaataccatctggag

SEQ ID NO: 2146061 - DNA, 25 bp, Homo sapien
tttttctctgttaaatggctccata

SEQ ID NO: 2146062 - DNA, 25 bp, Homo sapien
tatttttctctgttaaatggctcca

SEQ ID NO: 2146063 - DNA, 25 bp, Homo sapien
tctctgttaaatggctccataacaa

SEQ ID NO: 2146064 - DNA, 25 bp, Homo sapien
tttctctgttaaatggctccataac

SEQ ID NO: 2146065 - DNA, 25 bp, Homo sapien
gctggcattagcagcaatgattatg

SEQ ID NO: 2146066 - DNA, 25 bp, Homo sapien
ggcttaataatgctggcattagcag

SEQ ID NO: 2146067 - DNA, 25 bp, Homo sapien
cttgccaggcttaataatgctggca

SEQ ID NO: 2146068 - DNA, 25 bp, Homo sapien
tggcattagcagcaatgattatgtg

SEQ ID NO: 2146069 - DNA, 25 bp, Homo sapien
gggcagcataacttttgcagatctg

SEQ ID NO: 2146070 - DNA, 25 bp, Homo sapien
tccttgttgcctttgactggctgct

SEQ ID NO: 2146071 - DNA, 25 bp, Homo sapien
aagggcagcataacttttgcagatc

SEQ ID NO: 2146072 - DNA, 25 bp, Homo sapien
ggcagcataacttttgcagatctgc

SEQ ID NO: 2146073 - DNA, 25 bp, Homo sapien
tctctgcccgtttgtaaatctgtac

SEQ ID NO: 2146074 - DNA, 25 bp, Homo sapien
tccgatcatgtaggcatgctgtagc

SEQ ID NO: 2146075 - DNA, 25 bp, Homo sapien
ttaaagagtaatgcaagcttttgcc

SEQ ID NO: 2146076 - DNA, 25 bp, Homo sapien
tgctgtagcaggtgcaccaaggtct

SEQ ID NO: 2146077 - DNA, 25 bp, Homo sapien
tagacttggctaccacaatcagaaa

SEQ ID NO: 2146078 - DNA, 25 bp, Homo sapien
aaaagtcacacatagttggcagggc

SEQ ID NO: 2146079 - DNA, 25 bp, Homo sapien
tcagaaactgaaagtggtgattcca

SEQ ID NO: 2146080 - DNA, 25 bp, Homo sapien
ggtgattccaattgctgctaccaac

SEQ ID NO: 2146081 - DNA, 25 bp, Homo sapien
tctcagcctgcttatcaggatctcc

SEQ ID NO: 2146082 - DNA, 25 bp, Homo sapien
gcctgcttatcaggatctccatttg

SEQ ID NO: 2146083 - DNA, 25 bp, Homo sapien
tcagcctgcttatcaggatctccat

SEQ ID NO: 2146084 - DNA, 25 bp, Homo sapien
ctgcttatcaggatctccatttggg

SEQ ID NO: 2146085 - DNA, 25 bp, Homo sapien
taatgggtctgataatgcaatttcc

SEQ ID NO: 2146086 - DNA, 25 bp, Homo sapien
caggagtgggaagcactcagttatt

SEQ ID NO: 2146087 - DNA, 25 bp, Homo sapien
ggatttgtaaaactgatgggacagg

SEQ ID NO: 2146088 - DNA, 25 bp, Homo sapien
tcttgagcttaatatagtggttctc

SEQ ID NO: 2146089 - DNA, 25 bp, Homo sapien
taaatgaggaatcatgggctttgtg

SEQ ID NO: 2146090 - DNA, 25 bp, Homo sapien
aatgaggaatcatgggctttgtgga

SEQ ID NO: 2146091 - DNA, 25 bp, Homo sapien
ctttaaatgaggaatcatgggcttt

SEQ ID NO: 2146092 - DNA, 25 bp, Homo sapien
atgaggaatcatgggctttgtggaa

SEQ ID NO: 2146093 - DNA, 25 bp, Homo sapien
gaaatacaaactaccatcagagaat

SEQ ID NO: 2146094 - DNA, 25 bp, Homo sapien
aaaggggatatcatcactgatctca

SEQ ID NO: 2146095 - DNA, 25 bp, Homo sapien
aggggatatcatcactgatctcaca

SEQ ID NO: 2146096 - DNA, 25 bp, Homo sapien
ataaaggggatatcatcactgatct

SEQ ID NO: 2146097 - DNA, 25 bp, Homo sapien
ctgtaagtgcaaggaaccagtgaag

SEQ ID NO: 2146098 - DNA, 25 bp, Homo sapien
tgtctttccattagacctaaagccc

SEQ ID NO: 2146099 - DNA, 25 bp, Homo sapien
tggtttataaatttggccccagaga

SEQ ID NO: 2146100 - DNA, 25 bp, Homo sapien
aagccctggcggtcagcccatggtt

SEQ ID NO: 2146101 - DNA, 25 bp, Homo sapien
gatgaagagggtcaccagtagtgat

SEQ ID NO: 2146102 - DNA, 25 bp, Homo sapien
tgcgtatttttagttgccctgaaag

SEQ ID NO: 2146103 - DNA, 25 bp, Homo sapien
gctttaactccttaactgtgcgtat

SEQ ID NO: 2146104 - DNA, 25 bp, Homo sapien
tatggcttcgcttgtgctttaactc

SEQ ID NO: 2146105 - DNA, 25 bp, Homo sapien
acagcactaagtggttttttggaag

SEQ ID NO: 2146106 - DNA, 25 bp, Homo sapien
ctgttttacatgatataagacagcc

SEQ ID NO: 2146107 - DNA, 25 bp, Homo sapien
ttacatgatataagacagccctatg

SEQ ID NO: 2146108 - DNA, 25 bp, Homo sapien
ttttacatgatataagacagcccta

SEQ ID NO: 2146109 - DNA, 25 bp, Homo sapien
tgttttacatgatataagacagccc

SEQ ID NO: 2146110 - DNA, 25 bp, Homo sapien
gattccatattcaaatccaataatg

SEQ ID NO: 2146111 - DNA, 25 bp, Homo sapien
aaaattccagtaattggggatcctg

SEQ ID NO: 2146112 - DNA, 25 bp, Homo sapien
aatgacatccccctttagtgtagtt

SEQ ID NO: 2146113 - DNA, 25 bp, Homo sapien
taattggggatcctggttcataagt

SEQ ID NO: 2146114 - DNA, 25 bp, Homo sapien
ttaagatcgcttaactggttgagat

SEQ ID NO: 2146115 - DNA, 25 bp, Homo sapien
taagatcgcttaactggttgagata

SEQ ID NO: 2146116 - DNA, 25 bp, Homo sapien
aagatcgcttaactggttgagatac

SEQ ID NO: 2146117 - DNA, 25 bp, Homo sapien
accaggcaaactttgacattggaat

SEQ ID NO: 2146118 - DNA, 25 bp, Homo sapien
gaccaggcaaactttgacattggaa

SEQ ID NO: 2146119 - DNA, 25 bp, Homo sapien
aaggagtggctagattttgagttgc

SEQ ID NO: 2146120 - DNA, 25 bp, Homo sapien
tcatgtagattataggctcagtttc

SEQ ID NO: 2146121 - DNA, 25 bp, Homo sapien
tgagcatattgcttggctgggctag

SEQ ID NO: 2146122 - DNA, 25 bp, Homo sapien
tgtaaggtggccattttgttctgta

SEQ ID NO: 2146123 - DNA, 25 bp, Homo sapien
tggcactgtgagcagctagggaatt

SEQ ID NO: 2146124 - DNA, 25 bp, Homo sapien
taatcagacaaccatgagtgcatgc

SEQ ID NO: 2146125 - DNA, 25 bp, Homo sapien
tctgtgtcaccttgagtcccaaagg

SEQ ID NO: 2146126 - DNA, 25 bp, Homo sapien
ctagggaattggtatgcagggcttt

SEQ ID NO: 2146127 - DNA, 25 bp, Homo sapien
ttggggcagagggttatcatacttc

SEQ ID NO: 2146128 - DNA, 25 bp, Homo sapien
cactgcattagtggcttggcttggg

SEQ ID NO: 2146129 - DNA, 25 bp, Homo sapien
tctatagagcaactgttgttcttcc

SEQ ID NO: 2146130 - DNA, 25 bp, Homo sapien
catacttctcatgggtttggtgaag

SEQ ID NO: 2146131 - DNA, 25 bp, Homo sapien
tgtccctgggagttatcagcaaatt

SEQ ID NO: 2146132 - DNA, 25 bp, Homo sapien
ccacagacagagcttgtccctggga

SEQ ID NO: 2146133 - DNA, 25 bp, Homo sapien
gcttgtccctgggagttatcagcaa

SEQ ID NO: 2146134 - DNA, 25 bp, Homo sapien
gccacagacagagcttgtccctggg

SEQ ID NO: 2146135 - DNA, 25 bp, Homo sapien
tgtagatgggtttaaagtggatgta

SEQ ID NO: 2146136 - DNA, 25 bp, Homo sapien
aatggtaggtcatggacttaggctt

SEQ ID NO: 2146137 - DNA, 25 bp, Homo sapien
cttaggctttggaattgggttggca

SEQ ID NO: 2146138 - DNA, 25 bp, Homo sapien
agttgtagatgggtttaaagtggat

SEQ ID NO: 2146139 - DNA, 25 bp, Homo sapien
ccctaggattaagattccttgccct

SEQ ID NO: 2146140 - DNA, 25 bp, Homo sapien
cctaggattaagattccttgccctt

SEQ ID NO: 2146141 - DNA, 25 bp, Homo sapien
tccctaggattaagattccttgccc

SEQ ID NO: 2146142 - DNA, 25 bp, Homo sapien
gatgctgcttatgactaagccctac

SEQ ID NO: 2146143 - DNA, 25 bp, Homo sapien
tgagatgctgcttatgactaagccc

SEQ ID NO: 2146144 - DNA, 25 bp, Homo sapien
ctgagatgctgcttatgactaagcc

SEQ ID NO: 2146145 - DNA, 25 bp, Homo sapien
gagatgctgcttatgactaagccct

SEQ ID NO: 2146146 - DNA, 25 bp, Homo sapien
tcagaaacagccactattacattat

SEQ ID NO: 2146147 - DNA, 25 bp, Homo sapien
tagccaccttgattctgttctcaga

SEQ ID NO: 2146148 - DNA, 25 bp, Homo sapien
ctgtccactagccaccttgattctg

SEQ ID NO: 2146149 - DNA, 25 bp, Homo sapien
gaaacagccactattacattatttt

SEQ ID NO: 2146150 - DNA, 25 bp, Homo sapien
ccatgtcactatagcctgtattgcc

SEQ ID NO: 2146151 - DNA, 25 bp, Homo sapien
tgtcttctcccatgtcactatagcc

SEQ ID NO: 2146152 - DNA, 25 bp, Homo sapien
tggatcttagcttggcagtaggccc

SEQ ID NO: 2146153 - DNA, 25 bp, Homo sapien
taaaaatcacatgtggatcttagct

SEQ ID NO: 2146154 - DNA, 25 bp, Homo sapien
agaagttaagttcagagtgattgag

SEQ ID NO: 2146155 - DNA, 25 bp, Homo sapien
aagttaagttcagagtgattgaggc

SEQ ID NO: 2146156 - DNA, 25 bp, Homo sapien
gaagttaagttcagagtgattgagg

SEQ ID NO: 2146157 - DNA, 25 bp, Homo sapien
gagaagttaagttcagagtgattga

SEQ ID NO: 2146158 - DNA, 25 bp, Homo sapien
ccagaagttgggcttgtctttttag

SEQ ID NO: 2146159 - DNA, 25 bp, Homo sapien
aaaagatattctggggcattctgag

SEQ ID NO: 2146160 - DNA, 25 bp, Homo sapien
ttaccagatttgttaggcaaaggca

SEQ ID NO: 2146161 - DNA, 25 bp, Homo sapien
tagaacttctgatcaaaagatattc

SEQ ID NO: 2146162 - DNA, 25 bp, Homo sapien
gttcttggctttgtgtggtaattcc

SEQ ID NO: 2146163 - DNA, 25 bp, Homo sapien
tcgtagccaggcaataaccagtctc

SEQ ID NO: 2146164 - DNA, 25 bp, Homo sapien
tctgtgatttctagcagaggagttc

SEQ ID NO: 2146165 - DNA, 25 bp, Homo sapien
gtgaagcttctcttcgtagccaggc

SEQ ID NO: 2146166 - DNA, 25 bp, Homo sapien
tccccgagaccaggaactgttcctg

SEQ ID NO: 2146167 - DNA, 25 bp, Homo sapien
cttggaacagatctagaaagttcct

SEQ ID NO: 2146168 - DNA, 25 bp, Homo sapien
cttctgcttggaacagatctagaaa

SEQ ID NO: 2146169 - DNA, 25 bp, Homo sapien
catttttccccgagaccaggaactg

SEQ ID NO: 2146170 - DNA, 25 bp, Homo sapien
gaatggcacagacctgagtggttcc

SEQ ID NO: 2146171 - DNA, 25 bp, Homo sapien
tgtaaggcatatagtcagagacagg

SEQ ID NO: 2146172 - DNA, 25 bp, Homo sapien
tcaactggaacctatttgtaaggca

SEQ ID NO: 2146173 - DNA, 25 bp, Homo sapien
cagagacaggaaaagtttttgatta

SEQ ID NO: 2146174 - DNA, 25 bp, Homo sapien
acgtcagtcactgagaagtcttggc

SEQ ID NO: 2146175 - DNA, 25 bp, Homo sapien
ggtattgacgtcagtcactgagaag

SEQ ID NO: 2146176 - DNA, 25 bp, Homo sapien
ccaaattggtattgacgtcagtcac

SEQ ID NO: 2146177 - DNA, 25 bp, Homo sapien
ttccaaattggtattgacgtcagtc

SEQ ID NO: 2146178 - DNA, 25 bp, Homo sapien
taccatatccggtactgtagccact

SEQ ID NO: 2146179 - DNA, 25 bp, Homo sapien
aaactgttgcagaaactatagacac

SEQ ID NO: 2146180 - DNA, 25 bp, Homo sapien
gattccatagttgtcagttgctgag

SEQ ID NO: 2146181 - DNA, 25 bp, Homo sapien
gagacttcaaatagggtaagaccag

SEQ ID NO: 2146182 - DNA, 25 bp, Homo sapien
tggaatatcccactacttctaaggt

SEQ ID NO: 2146183 - DNA, 25 bp, Homo sapien
acttgaacatattcaaactctttgg

SEQ ID NO: 2146184 - DNA, 25 bp, Homo sapien
caaactctttggaatatcccactac

SEQ ID NO: 2146185 - DNA, 25 bp, Homo sapien
catattcaaactctttggaatatcc

SEQ ID NO: 2146186 - DNA, 25 bp, Homo sapien
aagtggtaacacaaccattctggaa

SEQ ID NO: 2146187 - DNA, 25 bp, Homo sapien
tattgggtgtaaggtatttgtcatc

SEQ ID NO: 2146188 - DNA, 25 bp, Homo sapien
gtgctcactaggcttcaagtaaaaa

SEQ ID NO: 2146189 - DNA, 25 bp, Homo sapien
ttacattagtaaacccaataagcca

SEQ ID NO: 2146190 - DNA, 25 bp, Homo sapien
tcgagcagcaagactattacttttt

SEQ ID NO: 2146191 - DNA, 25 bp, Homo sapien
catcgagcagcaagactattacttt

SEQ ID NO: 2146192 - DNA, 25 bp, Homo sapien
gcaaacatcgagcagcaagactatt

SEQ ID NO: 2146193 - DNA, 25 bp, Homo sapien
aacatcgagcagcaagactattact

SEQ ID NO: 2146194 - DNA, 25 bp, Homo sapien
ataggatattaaagtgggatttcat

SEQ ID NO: 2146195 - DNA, 25 bp, Homo sapien
aataggatattaaagtgggatttca

SEQ ID NO: 2146196 - DNA, 25 bp, Homo sapien
tattttacagattggaagcatcggt

SEQ ID NO: 2146197 - DNA, 25 bp, Homo sapien
tagtaccgtggtgacaacatgccat

SEQ ID NO: 2146198 - DNA, 25 bp, Homo sapien
ttctccgcggcagccactgctgtgt

SEQ ID NO: 2146199 - DNA, 25 bp, Homo sapien
aaatggaaaacgagctctcctgcta

SEQ ID NO: 2146200 - DNA, 25 bp, Homo sapien
tcccataatggcattcttgatttgt

SEQ ID NO: 2146201 - DNA, 25 bp, Homo sapien
ggcttttcccataatggcattcttg

SEQ ID NO: 2146202 - DNA, 25 bp, Homo sapien
tgaaacgggcttttcccataatggc

SEQ ID NO: 2146203 - DNA, 25 bp, Homo sapien
aaacgggcttttcccataatggcat

SEQ ID NO: 2146204 - DNA, 25 bp, Homo sapien
tgtgaggtatacagccagcaatgtt

SEQ ID NO: 2146205 - DNA, 25 bp, Homo sapien
agtactttagagttgctgcccaaca

SEQ ID NO: 2146206 - DNA, 25 bp, Homo sapien
aaggtcacagctccatcattcagct

SEQ ID NO: 2146207 - DNA, 25 bp, Homo sapien
tatccctttctcatcgattccctgg

SEQ ID NO: 2146208 - DNA, 25 bp, Homo sapien
taaaagggcttgttcgcattgggcc

SEQ ID NO: 2146209 - DNA, 25 bp, Homo sapien
tatattttgctcttgactgctcagc

SEQ ID NO: 2146210 - DNA, 25 bp, Homo sapien
gatttgagacatttccttaagccta

SEQ ID NO: 2146211 - DNA, 25 bp, Homo sapien
cattaccaggtattggtgatgtgca

SEQ ID NO: 2146212 - DNA, 25 bp, Homo sapien
gttcattatgtaaatattcttgata

SEQ ID NO: 2146213 - DNA, 25 bp, Homo sapien
attcttgatatttctcctccaccag

SEQ ID NO: 2146214 - DNA, 25 bp, Homo sapien
ttcttgatatttctcctccaccagt

SEQ ID NO: 2146215 - DNA, 25 bp, Homo sapien
attgttcattatgtaaatattcttg

SEQ ID NO: 2146216 - DNA, 25 bp, Homo sapien
gagatagtggttaatgatctgcatc

SEQ ID NO: 2146217 - DNA, 25 bp, Homo sapien
cctaacctatgcatgttaaaccatg

SEQ ID NO: 2146218 - DNA, 25 bp, Homo sapien
ctgcatcagttagccctcagagctg

SEQ ID NO: 2146219 - DNA, 25 bp, Homo sapien
ttgtagataagctcttccctttggg

SEQ ID NO: 2146220 - DNA, 25 bp, Homo sapien
cttttcaggtattttctattttcat

SEQ ID NO: 2146221 - DNA, 25 bp, Homo sapien
tcaggtattttctattttcatattc

SEQ ID NO: 2146222 - DNA, 25 bp, Homo sapien
tgttgcttttcaggtattttctatt

SEQ ID NO: 2146223 - DNA, 25 bp, Homo sapien
tatgttgcttttcaggtattttcta

SEQ ID NO: 2146224 - DNA, 25 bp, Homo sapien
tgtgaaaactcagtggcagtaaaat

SEQ ID NO: 2146225 - DNA, 25 bp, Homo sapien
ccagttatgtgtgaaaactcagtgg

SEQ ID NO: 2146226 - DNA, 25 bp, Homo sapien
ctccagttatgtgtgaaaactcagt

SEQ ID NO: 2146227 - DNA, 25 bp, Homo sapien
aaactcagtggcagtaaaatctaca

SEQ ID NO: 2146228 - DNA, 25 bp, Homo sapien
gtctctttaactgttaccgcacttg

SEQ ID NO: 2146229 - DNA, 25 bp, Homo sapien
gtccaggcagtccagtttgttaata

SEQ ID NO: 2146230 - DNA, 25 bp, Homo sapien
aactgttaccgcacttgattcatta

SEQ ID NO: 2146231 - DNA, 25 bp, Homo sapien
ctgttcggatagaatttgacatgtc

SEQ ID NO: 2146232 - DNA, 25 bp, Homo sapien
tgtactttgacgagttgttgccacc

SEQ ID NO: 2146233 - DNA, 25 bp, Homo sapien
tcttcatagggcatgcctactttgc

SEQ ID NO: 2146234 - DNA, 25 bp, Homo sapien
tgcttggtcccactaatggattgaa

SEQ ID NO: 2146235 - DNA, 25 bp, Homo sapien
aagagtctctatggtgccctcttca

SEQ ID NO: 2146236 - DNA, 25 bp, Homo sapien
taacgccgcatacctacaactatct

SEQ ID NO: 2146237 - DNA, 25 bp, Homo sapien
aacgccgcatacctacaactatctg

SEQ ID NO: 2146238 - DNA, 25 bp, Homo sapien
aataacgccgcatacctacaactat

SEQ ID NO: 2146239 - DNA, 25 bp, Homo sapien
gaaataacgccgcatacctacaact

SEQ ID NO: 2146240 - DNA, 25 bp, Homo sapien
ttccaggtcatagaaagtatatctg

SEQ ID NO: 2146241 - DNA, 25 bp, Homo sapien
tttcatacaaaggatatgggcttgt

SEQ ID NO: 2146242 - DNA, 25 bp, Homo sapien
tggtagacgcacatgaaatttatca

SEQ ID NO: 2146243 - DNA, 25 bp, Homo sapien
aaaggatatgggcttgttagtaatg

SEQ ID NO: 2146244 - DNA, 25 bp, Homo sapien
ctacatgatgcacaaggattaccct

SEQ ID NO: 2146245 - DNA, 25 bp, Homo sapien
tccaggtctacatgatgcacaagga

SEQ ID NO: 2146246 - DNA, 25 bp, Homo sapien
acatccaggtctacatgatgcacaa

SEQ ID NO: 2146247 - DNA, 25 bp, Homo sapien
catgatgcacaaggattaccctcat

SEQ ID NO: 2146248 - DNA, 25 bp, Homo sapien
ggttcattgatgtacaaccaaattt

SEQ ID NO: 2146249 - DNA, 25 bp, Homo sapien
tatacaggttcattgatgtacaacc

SEQ ID NO: 2146250 - DNA, 25 bp, Homo sapien
aaagtacagcacatatacaggttca

SEQ ID NO: 2146251 - DNA, 25 bp, Homo sapien
ctaaagtacagcacatatacaggtt

SEQ ID NO: 2146252 - DNA, 25 bp, Homo sapien
caggatgggagcttattagtgacac

SEQ ID NO: 2146253 - DNA, 25 bp, Homo sapien
tcattggtaagctttgagacaggat

SEQ ID NO: 2146254 - DNA, 25 bp, Homo sapien
cttctgaagctaaactcttggtatt

SEQ ID NO: 2146255 - DNA, 25 bp, Homo sapien
tattcgctctaacttcttgattccc

SEQ ID NO: 2146256 - DNA, 25 bp, Homo sapien
gtaactgagaacgtggtagcagctg

SEQ ID NO: 2146257 - DNA, 25 bp, Homo sapien
gaagtaactgagaacgtggtagcag

SEQ ID NO: 2146258 - DNA, 25 bp, Homo sapien
aactgagaacgtggtagcagctgca

SEQ ID NO: 2146259 - DNA, 25 bp, Homo sapien
aagtaactgagaacgtggtagcagc

SEQ ID NO: 2146260 - DNA, 25 bp, Homo sapien
catagataattgtataaattttcac

SEQ ID NO: 2146261 - DNA, 25 bp, Homo sapien
gctggtgcctcgcagcaggagggag

SEQ ID NO: 2146262 - DNA, 25 bp, Homo sapien
gcgactccctctttggccctcggag

SEQ ID NO: 2146263 - DNA, 25 bp, Homo sapien
gcaaggtgaggcagggtcctgaagt

SEQ ID NO: 2146264 - DNA, 25 bp, Homo sapien
cagagggtgcgaaggtgcgggtgct

SEQ ID NO: 2146265 - DNA, 25 bp, Homo sapien
cagctcctattcctgggaagcctgg

SEQ ID NO: 2146266 - DNA, 25 bp, Homo sapien
tcgggttagggtccgtgctctccgc

SEQ ID NO: 2146267 - DNA, 25 bp, Homo sapien
ttgaaaataactgcagcggcattcg

SEQ ID NO: 2146268 - DNA, 25 bp, Homo sapien
cctggtgaggtcaggcggaggctct

SEQ ID NO: 2146269 - DNA, 25 bp, Homo sapien
tagaagagcagtcccaccagagttt

SEQ ID NO: 2146270 - DNA, 25 bp, Homo sapien
atttatgtaacctctggcaacttgg

SEQ ID NO: 2146271 - DNA, 25 bp, Homo sapien
gaatcacaccgcttgggatcctgag

SEQ ID NO: 2146272 - DNA, 25 bp, Homo sapien
tagcagacgctcagtaaaatgttaa

SEQ ID NO: 2146273 - DNA, 25 bp, Homo sapien
tttagccccggggcgggatgtcaca

SEQ ID NO: 2146274 - DNA, 25 bp, Homo sapien
gccccggggcgggatgtcacaggca

SEQ ID NO: 2146275 - DNA, 25 bp, Homo sapien
cggggcgggatgtcacaggcagcat

SEQ ID NO: 2146276 - DNA, 25 bp, Homo sapien
cccggggcgggatgtcacaggcagc

SEQ ID NO: 2146277 - DNA, 25 bp, Homo sapien
ctgttgcggatgaaggtggcagaca

SEQ ID NO: 2146278 - DNA, 25 bp, Homo sapien
cggtgaacagctcggagagcgcttg

SEQ ID NO: 2146279 - DNA, 25 bp, Homo sapien
gtgaacagctcggagagcgcttgaa

SEQ ID NO: 2146280 - DNA, 25 bp, Homo sapien
ggcggtgaacagctcggagagcgct

SEQ ID NO: 2146281 - DNA, 25 bp, Homo sapien
gaacagctcggagagcgcttgaaca

SEQ ID NO: 2146282 - DNA, 25 bp, Homo sapien
tgtaccagtacaggaacgccttgcg

SEQ ID NO: 2146283 - DNA, 25 bp, Homo sapien
ccagtacaggaacgccttgcgccgg

SEQ ID NO: 2146284 - DNA, 25 bp, Homo sapien
gtacaggaacgccttgcgccggaac

SEQ ID NO: 2146285 - DNA, 25 bp, Homo sapien
taccagtacaggaacgccttgcgcc

SEQ ID NO: 2146286 - DNA, 25 bp, Homo sapien
ctggtactgctggtatttgaacacc

SEQ ID NO: 2146287 - DNA, 25 bp, Homo sapien
ggtactgctggtatttgaacaccag

SEQ ID NO: 2146288 - DNA, 25 bp, Homo sapien
tggtactgctggtatttgaacacca

SEQ ID NO: 2146289 - DNA, 25 bp, Homo sapien
gggagtgaataaagagttcacactg

SEQ ID NO: 2146290 - DNA, 25 bp, Homo sapien
tgggagtgaataaagagttcacact

SEQ ID NO: 2146291 - DNA, 25 bp, Homo sapien
tgaagaaggttgcaccttggccttc

SEQ ID NO: 2146292 - DNA, 25 bp, Homo sapien
acttaggtggcatgatgaggcagct

SEQ ID NO: 2146293 - DNA, 25 bp, Homo sapien
cagctggtgttagatgaacccagat

SEQ ID NO: 2146294 - DNA, 25 bp, Homo sapien
gatgaacccagattcaggatgactg

SEQ ID NO: 2146295 - DNA, 25 bp, Homo sapien
agccagggcagatgtgtcaccgact

SEQ ID NO: 2146296 - DNA, 25 bp, Homo sapien
agggcagatgtgtcaccgacttcat

SEQ ID NO: 2146297 - DNA, 25 bp, Homo sapien
gtcccttgagggcttcgatgaccag

SEQ ID NO: 2146298 - DNA, 25 bp, Homo sapien
tccggtcaccagttcccttggtgat

SEQ ID NO: 2146299 - DNA, 25 bp, Homo sapien
tggtgatgtcatatccagccttttt

SEQ ID NO: 2146300 - DNA, 25 bp, Homo sapien
cccttgagggcttcgatgaccaggg

SEQ ID NO: 2146301 - DNA, 25 bp, Homo sapien
cctctatgatgtcatgacagtggtg

SEQ ID NO: 2146302 - DNA, 25 bp, Homo sapien
ctctatgatgtcatgacagtggtgg

SEQ ID NO: 2146303 - DNA, 25 bp, Homo sapien
tgtaccactgttgatgtcctctatg

SEQ ID NO: 2146304 - DNA, 25 bp, Homo sapien
ccactgtaccactgttgatgtcctc

SEQ ID NO: 2146305 - DNA, 25 bp, Homo sapien
gtgtgcttcccgtgatattgcattc

SEQ ID NO: 2146306 - DNA, 25 bp, Homo sapien
cccagtgtgcttcccgtgatattgc

SEQ ID NO: 2146307 - DNA, 25 bp, Homo sapien
agcccagtgtgcttcccgtgatatt

SEQ ID NO: 2146308 - DNA, 25 bp, Homo sapien
tgcttcccgtgatattgcattccat

SEQ ID NO: 2146309 - DNA, 25 bp, Homo sapien
cttgctgaccccagcgtggcttgca

SEQ ID NO: 2146310 - DNA, 25 bp, Homo sapien
ctgccttctagtgaactgcaaatac

SEQ ID NO: 2146311 - DNA, 25 bp, Homo sapien
gttggcagcaccgaaacaccttgct

SEQ ID NO: 2146312 - DNA, 25 bp, Homo sapien
tgtccgaaccttcagctctggctgt

SEQ ID NO: 2146313 - DNA, 25 bp, Homo sapien
tggtaactaaaactccttggatgga

SEQ ID NO: 2146314 - DNA, 25 bp, Homo sapien
cttggtaactaaaactccttggatg

SEQ ID NO: 2146315 - DNA, 25 bp, Homo sapien
tctcaccgtaaagtaactctggaag

SEQ ID NO: 2146316 - DNA, 25 bp, Homo sapien
tctgacattctcaccgtaaagtaac

SEQ ID NO: 2146317 - DNA, 25 bp, Homo sapien
gacattctcaccgtaaagtaactct

SEQ ID NO: 2146318 - DNA, 25 bp, Homo sapien
cattctcaccgtaaagtaactctgg

SEQ ID NO: 2146319 - DNA, 25 bp, Homo sapien
atgactgggttaaatgttagctgat

SEQ ID NO: 2146320 - DNA, 25 bp, Homo sapien
caaggataggacctggcatcctcga

SEQ ID NO: 2146321 - DNA, 25 bp, Homo sapien
acctggcatcctcgagggagggctt

SEQ ID NO: 2146322 - DNA, 25 bp, Homo sapien
gtgtttgaacaaggataggacctgg

SEQ ID NO: 2146323 - DNA, 25 bp, Homo sapien
ctttccagctcctatttctggggct

SEQ ID NO: 2146324 - DNA, 25 bp, Homo sapien
tctttccagctcctatttctggggc

SEQ ID NO: 2146325 - DNA, 25 bp, Homo sapien
tctcttcttgcactctctttccagc

SEQ ID NO: 2146326 - DNA, 25 bp, Homo sapien
ggcttctctgcaggagcagcatgtg

SEQ ID NO: 2146327 - DNA, 25 bp, Homo sapien
cttctctgcaggagcagcatgtgca

SEQ ID NO: 2146328 - DNA, 25 bp, Homo sapien
ttctctgcaggagcagcatgtgcat

SEQ ID NO: 2146329 - DNA, 25 bp, Homo sapien
ccggcttctctgcaggagcagcatg

SEQ ID NO: 2146330 - DNA, 25 bp, Homo sapien
actggaccatgcttattggactata

SEQ ID NO: 2146331 - DNA, 25 bp, Homo sapien
ctgtcttgatctactttaaaacact

SEQ ID NO: 2146332 - DNA, 25 bp, Homo sapien
aacactggaccatgcttattggact

SEQ ID NO: 2146333 - DNA, 25 bp, Homo sapien
aggagccactgtcttgatctacttt

SEQ ID NO: 2146334 - DNA, 25 bp, Homo sapien
ctcactgacagcactaccttctctc

SEQ ID NO: 2146335 - DNA, 25 bp, Homo sapien
actgacagcactaccttctctccct

SEQ ID NO: 2146336 - DNA, 25 bp, Homo sapien
tcactgacagcactaccttctctcc

SEQ ID NO: 2146337 - DNA, 25 bp, Homo sapien
cactgacagcactaccttctctccc

SEQ ID NO: 2146338 - DNA, 25 bp, Homo sapien
gcagaaatgtaagatagtattcaca

SEQ ID NO: 2146339 - DNA, 25 bp, Homo sapien
cattatggattctaaagtaactctg

SEQ ID NO: 2146340 - DNA, 25 bp, Homo sapien
caacaacacttgttccattatggat

SEQ ID NO: 2146341 - DNA, 25 bp, Homo sapien
cattcatctcgttcaggcatgtcag

SEQ ID NO: 2146342 - DNA, 25 bp, Homo sapien
tatcatcaagaccatggactttatc

SEQ ID NO: 2146343 - DNA, 25 bp, Homo sapien
tgccagtaatcttaggtggcctttc

SEQ ID NO: 2146344 - DNA, 25 bp, Homo sapien
aataactatcatcaagaccatggac

SEQ ID NO: 2146345 - DNA, 25 bp, Homo sapien
ctgccagtaatcttaggtggccttt

SEQ ID NO: 2146346 - DNA, 25 bp, Homo sapien
caggttagggtagccagtaggcaaa

SEQ ID NO: 2146347 - DNA, 25 bp, Homo sapien
tagtactcctaagcaggttagggta

SEQ ID NO: 2146348 - DNA, 25 bp, Homo sapien
aagactgaagcggtccatggcacat

SEQ ID NO: 2146349 - DNA, 25 bp, Homo sapien
gggtagccagtaggcaaagactgaa

SEQ ID NO: 2146350 - DNA, 25 bp, Homo sapien
taatcgtacattcataattaccatg

SEQ ID NO: 2146351 - DNA, 25 bp, Homo sapien
ccaaatgttgtttaatcgtacattc

SEQ ID NO: 2146352 - DNA, 25 bp, Homo sapien
attaccatggtgttctttaaggagg

SEQ ID NO: 2146353 - DNA, 25 bp, Homo sapien
tacattcataattaccatggtgttc

SEQ ID NO: 2146354 - DNA, 25 bp, Homo sapien
tccagaagccttacagcattcttag

SEQ ID NO: 2146355 - DNA, 25 bp, Homo sapien
tatgagcatttagtctctcccaaaa

SEQ ID NO: 2146356 - DNA, 25 bp, Homo sapien
catagacctaaagccaaggatattc

SEQ ID NO: 2146357 - DNA, 25 bp, Homo sapien
agacttgttgctcggtcatccagaa

SEQ ID NO: 2146358 - DNA, 25 bp, Homo sapien
tgcttctgctcaaagggctgaactt

SEQ ID NO: 2146359 - DNA, 25 bp, Homo sapien
tgcaggacctcaacagcaagttttt

SEQ ID NO: 2146360 - DNA, 25 bp, Homo sapien
tggatctagtaatggaaaagcctca

SEQ ID NO: 2146361 - DNA, 25 bp, Homo sapien
gattcagcctatgttgtgcaagcca

SEQ ID NO: 2146362 - DNA, 25 bp, Homo sapien
caggaactgcccaaagacaacatag

SEQ ID NO: 2146363 - DNA, 25 bp, Homo sapien
ggaactgcccaaagacaacatagaa

SEQ ID NO: 2146364 - DNA, 25 bp, Homo sapien
tcaggaactgcccaaagacaacata

SEQ ID NO: 2146365 - DNA, 25 bp, Homo sapien
agccagctgtcaggatcccaccctc

SEQ ID NO: 2146366 - DNA, 25 bp, Homo sapien
tagttgcccgcaaaataccgacgcg

SEQ ID NO: 2146367 - DNA, 25 bp, Homo sapien
tggctcctcgcagtaagggaagaag

SEQ ID NO: 2146368 - DNA, 25 bp, Homo sapien
gcagacgatctgtagcgaggagact

SEQ ID NO: 2146369 - DNA, 25 bp, Homo sapien
cttcgggaatgaccggcaaagcggc

SEQ ID NO: 2146370 - DNA, 25 bp, Homo sapien
tggaggaagggtgactcttgtctcc

SEQ ID NO: 2146371 - DNA, 25 bp, Homo sapien
gtgagggggccggcgccgcctggag

SEQ ID NO: 2146372 - DNA, 25 bp, Homo sapien
cctggaggaagggtgactcttgtct

SEQ ID NO: 2146373 - DNA, 25 bp, Homo sapien
gaggaagggtgactcttgtctcctc

SEQ ID NO: 2146374 - DNA, 25 bp, Homo sapien
aattcctcggtgtcgctttccgacg

SEQ ID NO: 2146375 - DNA, 25 bp, Homo sapien
ggtgcacatcttcaggggcatcata

SEQ ID NO: 2146376 - DNA, 25 bp, Homo sapien
catcatagaattcctcggtgtcgct

SEQ ID NO: 2146377 - DNA, 25 bp, Homo sapien
gccccctaggtgcacatcttcaggg

SEQ ID NO: 2146378 - DNA, 25 bp, Homo sapien
tcctccagtgagacggggaggaaca

SEQ ID NO: 2146379 - DNA, 25 bp, Homo sapien
ggaggaacagcggtggcggacacag

SEQ ID NO: 2146380 - DNA, 25 bp, Homo sapien
tgagacggggaggaacagcggtggc

SEQ ID NO: 2146381 - DNA, 25 bp, Homo sapien
acagcggtggcggacacagcgggac

SEQ ID NO: 2146382 - DNA, 25 bp, Homo sapien
cctgcatgatctctttatactccct

SEQ ID NO: 2146383 - DNA, 25 bp, Homo sapien
tgcatgatctctttatactcccttc

SEQ ID NO: 2146384 - DNA, 25 bp, Homo sapien
ctgcatgatctctttatactccctt

SEQ ID NO: 2146385 - DNA, 25 bp, Homo sapien
cccaatctcccaaatagctagaact

SEQ ID NO: 2146386 - DNA, 25 bp, Homo sapien
ccaatctcccaaatagctagaacta

SEQ ID NO: 2146387 - DNA, 25 bp, Homo sapien
gccccaatctcccaaatagctagaa

SEQ ID NO: 2146388 - DNA, 25 bp, Homo sapien
cctgccccaatctcccaaatagcta

SEQ ID NO: 2146389 - DNA, 25 bp, Homo sapien
cagaagccttttgtcaggttgcaaa

SEQ ID NO: 2146390 - DNA, 25 bp, Homo sapien
aaattcctaacagactcctaaagag

SEQ ID NO: 2146391 - DNA, 25 bp, Homo sapien
ggaaatatcagagcaatctcacact

SEQ ID NO: 2146392 - DNA, 25 bp, Homo sapien
tcctgtcagtaggaagactcacttt

SEQ ID NO: 2146393 - DNA, 25 bp, Homo sapien
gaaggaatcagtgtgtagactaaac

SEQ ID NO: 2146394 - DNA, 25 bp, Homo sapien
catgaacccttctgcgaacaggaag

SEQ ID NO: 2146395 - DNA, 25 bp, Homo sapien
cactcattagctatagacagatcct

SEQ ID NO: 2146396 - DNA, 25 bp, Homo sapien
tcaaagagccagagaccataaacca

SEQ ID NO: 2146397 - DNA, 25 bp, Homo sapien
tgtgatgtcatgcaaacctttccca

SEQ ID NO: 2146398 - DNA, 25 bp, Homo sapien
tctcccctctagctgccctgtgatg

SEQ ID NO: 2146399 - DNA, 25 bp, Homo sapien
catatgattagtggcatcacacaga

SEQ ID NO: 2146400 - DNA, 25 bp, Homo sapien
tacttcatatgattagtggcatcac

SEQ ID NO: 2146401 - DNA, 25 bp, Homo sapien
acatactgatcttttgtggtgagaa

SEQ ID NO: 2146402 - DNA, 25 bp, Homo sapien
catagggcacctttaaatcaaatat

SEQ ID NO: 2146403 - DNA, 25 bp, Homo sapien
tactaattacaaatatggtaaatct

SEQ ID NO: 2146404 - DNA, 25 bp, Homo sapien
atttcaagagctaggcttccttgct

SEQ ID NO: 2146405 - DNA, 25 bp, Homo sapien
ttgaatgttgaaagcccaacttttc

SEQ ID NO: 2146406 - DNA, 25 bp, Homo sapien
cttgaatgttgaaagcccaactttt

SEQ ID NO: 2146407 - DNA, 25 bp, Homo sapien
ccaactttgtatgcagtgttctctg

SEQ ID NO: 2146408 - DNA, 25 bp, Homo sapien
aattcttgtacaggggactcatttc

SEQ ID NO: 2146409 - DNA, 25 bp, Homo sapien
catttccaactttgtatgcagtgtt

SEQ ID NO: 2146410 - DNA, 25 bp, Homo sapien
tttcaattcttgtacaggggactca

SEQ ID NO: 2146411 - DNA, 25 bp, Homo sapien
aatgaagctatttataagaacacag

SEQ ID NO: 2146412 - DNA, 25 bp, Homo sapien
agctatttataagaacacagtaaca

SEQ ID NO: 2146413 - DNA, 25 bp, Homo sapien
ctatttataagaacacagtaacagc

SEQ ID NO: 2146414 - DNA, 25 bp, Homo sapien
gaagctatttataagaacacagtaa

SEQ ID NO: 2146415 - DNA, 25 bp, Homo sapien
tctgttctagccacaataggactgg

SEQ ID NO: 2146416 - DNA, 25 bp, Homo sapien
cttgatctatggctaacagtccggg

SEQ ID NO: 2146417 - DNA, 25 bp, Homo sapien
acagtccgggtatattgctcagatc

SEQ ID NO: 2146418 - DNA, 25 bp, Homo sapien
tggcagtagcttgatcagagagttc

SEQ ID NO: 2146419 - DNA, 25 bp, Homo sapien
ggaacaggcttctttgtactagcca

SEQ ID NO: 2146420 - DNA, 25 bp, Homo sapien
tccacagcggcaaaatctttagtag

SEQ ID NO: 2146421 - DNA, 25 bp, Homo sapien
aggtgggcgtgctggaacaggcttc

SEQ ID NO: 2146422 - DNA, 25 bp, Homo sapien
tactagccactatatcaggctctgg

SEQ ID NO: 2146423 - DNA, 25 bp, Homo sapien
taataataacaacaataataacaac

SEQ ID NO: 2146424 - DNA, 25 bp, Homo sapien
gataataataacaacaataataaca

SEQ ID NO: 2146425 - DNA, 25 bp, Homo sapien
tgataataataacaacaataataac

SEQ ID NO: 2146426 - DNA, 25 bp, Homo sapien
agaatcagacgtaatattctctttg

SEQ ID NO: 2146427 - DNA, 25 bp, Homo sapien
cggttaggagagaatcagacgtaat

SEQ ID NO: 2146428 - DNA, 25 bp, Homo sapien
taggagagaatcagacgtaatattc

SEQ ID NO: 2146429 - DNA, 25 bp, Homo sapien
cttgcggttaggagagaatcagacg

SEQ ID NO: 2146430 - DNA, 25 bp, Homo sapien
gctgagaatccttaaccgtactttc

SEQ ID NO: 2146431 - DNA, 25 bp, Homo sapien
ctggtagcacttgccaaatcaagag

SEQ ID NO: 2146432 - DNA, 25 bp, Homo sapien
ctgggcggtaactattttatctcca

SEQ ID NO: 2146433 - DNA, 25 bp, Homo sapien
tatctccactggtagcacttgccaa

SEQ ID NO: 2146434 - DNA, 25 bp, Homo sapien
tctcccagagttggatctaggtctc

SEQ ID NO: 2146435 - DNA, 25 bp, Homo sapien
tctctgagggcccatcacttcacct

SEQ ID NO: 2146436 - DNA, 25 bp, Homo sapien
ctcatcagtaagctctctcccagag

SEQ ID NO: 2146437 - DNA, 25 bp, Homo sapien
ttcacctgctacagtctgcccatca

SEQ ID NO: 2146438 - DNA, 25 bp, Homo sapien
gtagagtgagaggattaatgcctgt

SEQ ID NO: 2146439 - DNA, 25 bp, Homo sapien
gtccttctcatgatgtgtagagtga

SEQ ID NO: 2146440 - DNA, 25 bp, Homo sapien
tctgcaagactcaaaggtatttctt

SEQ ID NO: 2146441 - DNA, 25 bp, Homo sapien
cagtatccaggttcttaatcattac

SEQ ID NO: 2146442 - DNA, 25 bp, Homo sapien
caccatcagtatctgttggctgaga

SEQ ID NO: 2146443 - DNA, 25 bp, Homo sapien
ccatcagtatctgttggctgagact

SEQ ID NO: 2146444 - DNA, 25 bp, Homo sapien
ccaccatcagtatctgttggctgag

SEQ ID NO: 2146445 - DNA, 25 bp, Homo sapien
cttccaccatcagtatctgttggct

SEQ ID NO: 2146446 - DNA, 25 bp, Homo sapien
gttcaccatattcctcagcaaggtg

SEQ ID NO: 2146447 - DNA, 25 bp, Homo sapien
ccatattcctcagcaaggtgctttg

SEQ ID NO: 2146448 - DNA, 25 bp, Homo sapien
atattcctcagcaaggtgctttgct

SEQ ID NO: 2146449 - DNA, 25 bp, Homo sapien
acgttcaccatattcctcagcaagg

SEQ ID NO: 2146450 - DNA, 25 bp, Homo sapien
tcatctctaacacttttaactttat

SEQ ID NO: 2146451 - DNA, 25 bp, Homo sapien
ttcatctctaacacttttaacttta

SEQ ID NO: 2146452 - DNA, 25 bp, Homo sapien
cttcatctctaacacttttaacttt

SEQ ID NO: 2146453 - DNA, 25 bp, Homo sapien
catctctaacacttttaactttatt

SEQ ID NO: 2146454 - DNA, 25 bp, Homo sapien
catcacttgatgaaggatcatcttg

SEQ ID NO: 2146455 - DNA, 25 bp, Homo sapien
cacttgatgaaggatcatcttgatc

SEQ ID NO: 2146456 - DNA, 25 bp, Homo sapien
ttcatcatcacttgatgaaggatca

SEQ ID NO: 2146457 - DNA, 25 bp, Homo sapien
gatgaaggatcatcttgatcagtat

SEQ ID NO: 2146458 - DNA, 25 bp, Homo sapien
tgttcaccactaagatcttgcacca

SEQ ID NO: 2146459 - DNA, 25 bp, Homo sapien
aaggtcctttgaaaccgtgtgctgc

SEQ ID NO: 2146460 - DNA, 25 bp, Homo sapien
cgtgtgctgctttgaatttaactgg

SEQ ID NO: 2146461 - DNA, 25 bp, Homo sapien
gatctgatcaaaatcataaggtcct

SEQ ID NO: 2146462 - DNA, 25 bp, Homo sapien
gaggcaagtaatcggccacagtgag

SEQ ID NO: 2146463 - DNA, 25 bp, Homo sapien
cactacattgtcttgtccagctgag

SEQ ID NO: 2146464 - DNA, 25 bp, Homo sapien
taaagcccatattctcactacattg

SEQ ID NO: 2146465 - DNA, 25 bp, Homo sapien
tcagtattgtatttcattcgcatat

SEQ ID NO: 2146466 - DNA, 25 bp, Homo sapien
ttagactttcctgagagggtgatgg

SEQ ID NO: 2146467 - DNA, 25 bp, Homo sapien
ccctgtatctgtatccgattttgat

SEQ ID NO: 2146468 - DNA, 25 bp, Homo sapien
tttgatgaacttagactttcctgag

SEQ ID NO: 2146469 - DNA, 25 bp, Homo sapien
gtatccgattttgatgaacttagac

SEQ ID NO: 2146470 - DNA, 25 bp, Homo sapien
ctaaacatttatgcacctaagactg

SEQ ID NO: 2146471 - DNA, 25 bp, Homo sapien
taaacatttatgcacctaagactgg

SEQ ID NO: 2146472 - DNA, 25 bp, Homo sapien
aacatttatgcacctaagactggag

SEQ ID NO: 2146473 - DNA, 25 bp, Homo sapien
catttatgcacctaagactggagct

SEQ ID NO: 2146474 - DNA, 25 bp, Homo sapien
ccgcgcctggctcaaaaaaatttat

SEQ ID NO: 2146475 - DNA, 25 bp, Homo sapien
gctcaaaaaaatttattcgagacag

SEQ ID NO: 2146476 - DNA, 25 bp, Homo sapien
cctggctcaaaaaaatttattcgag

SEQ ID NO: 2146477 - DNA, 25 bp, Homo sapien
tggctcaaaaaaatttattcgagac

SEQ ID NO: 2146478 - DNA, 25 bp, Homo sapien
taatatctaatccacactcaaatgt

SEQ ID NO: 2146479 - DNA, 25 bp, Homo sapien
ttgctgcagcattgaaagcaagatc

SEQ ID NO: 2146480 - DNA, 25 bp, Homo sapien
tatatacctctgataacccttcttt

SEQ ID NO: 2146481 - DNA, 25 bp, Homo sapien
gattaccgtgccattctcataccta

SEQ ID NO: 2146482 - DNA, 25 bp, Homo sapien
tcatcagggtcttcatcagttccac

SEQ ID NO: 2146483 - DNA, 25 bp, Homo sapien
tatatttgcaaaatggccgttgccg

SEQ ID NO: 2146484 - DNA, 25 bp, Homo sapien
gggtgcgtttttatcatcagggtct

SEQ ID NO: 2146485 - DNA, 25 bp, Homo sapien
tagaccatgaaagatcaaggagatc

SEQ ID NO: 2146486 - DNA, 25 bp, Homo sapien
tataaaaacttaacctatggcacac

SEQ ID NO: 2146487 - DNA, 25 bp, Homo sapien
cactatgaagtaggtacattgtggt

SEQ ID NO: 2146488 - DNA, 25 bp, Homo sapien
tcttcgcattatatagcaacactat

SEQ ID NO: 2146489 - DNA, 25 bp, Homo sapien
tggtgacattgatcgcatacttacg

SEQ ID NO: 2146490 - DNA, 25 bp, Homo sapien
aagattaccctataatgcagcatgg

SEQ ID NO: 2146491 - DNA, 25 bp, Homo sapien
taaatgcagcatcggaaagaacaaa

SEQ ID NO: 2146492 - DNA, 25 bp, Homo sapien
gcacctgtcacactctaggcaagaa

SEQ ID NO: 2146493 - DNA, 25 bp, Homo sapien
accagcagagaactaaggtgtgcct

SEQ ID NO: 2146494 - DNA, 25 bp, Homo sapien
gcaaaggcattctcttcgagaaatg

SEQ ID NO: 2146495 - DNA, 25 bp, Homo sapien
aacagcaaaggcattctcttcgaga

SEQ ID NO: 2146496 - DNA, 25 bp, Homo sapien
cattctcttcgagaaatgtgccata

SEQ ID NO: 2146497 - DNA, 25 bp, Homo sapien
aaggcattctcttcgagaaatgtgc

SEQ ID NO: 2146498 - DNA, 25 bp, Homo sapien
tgtagtccaattgccctctagagaa

SEQ ID NO: 2146499 - DNA, 25 bp, Homo sapien
ctgtagtccaattgccctctagaga

SEQ ID NO: 2146500 - DNA, 25 bp, Homo sapien
gtagtccaattgccctctagagaaa

SEQ ID NO: 2146501 - DNA, 25 bp, Homo sapien
agtccaattgccctctagagaaatc

SEQ ID NO: 2146502 - DNA, 25 bp, Homo sapien
tagaagaggtgaacaagtaaaaata

SEQ ID NO: 2146503 - DNA, 25 bp, Homo sapien
aaaaaaggcatcactaccctattct

SEQ ID NO: 2146504 - DNA, 25 bp, Homo sapien
cactcaatgtgtaccagtagaagag

SEQ ID NO: 2146505 - DNA, 25 bp, Homo sapien
gacaatctacaaataatgtaagctc

SEQ ID NO: 2146506 - DNA, 25 bp, Homo sapien
catccaaagacccacttagaaaata

SEQ ID NO: 2146507 - DNA, 25 bp, Homo sapien
aaaggcggagctttccatccaaaga

SEQ ID NO: 2146508 - DNA, 25 bp, Homo sapien
gccatcatatgtcccaatcactgca

SEQ ID NO: 2146509 - DNA, 25 bp, Homo sapien
gccacttttttgtcaggtatgttcc

SEQ ID NO: 2146510 - DNA, 25 bp, Homo sapien
tgttgcgccctctagtagatcggac

SEQ ID NO: 2146511 - DNA, 25 bp, Homo sapien
tccaaccttgttgcgccctctagta

SEQ ID NO: 2146512 - DNA, 25 bp, Homo sapien
cggacatgtatttgtgtatggtatt

SEQ ID NO: 2146513 - DNA, 25 bp, Homo sapien
gccctctagtagatcggacatgtat

SEQ ID NO: 2146514 - DNA, 25 bp, Homo sapien
aaacttgctttgatctggctgctgc

SEQ ID NO: 2146515 - DNA, 25 bp, Homo sapien
ctgctgctattgacgtaacccttat

SEQ ID NO: 2146516 - DNA, 25 bp, Homo sapien
tcatggatagtgacaaatctctcaa

SEQ ID NO: 2146517 - DNA, 25 bp, Homo sapien
cccttatacttcatggatagtgaca

SEQ ID NO: 2146518 - DNA, 25 bp, Homo sapien
ttggctctacaaccatgactttagg

SEQ ID NO: 2146519 - DNA, 25 bp, Homo sapien
catttgcagaacagggtcaattcga

SEQ ID NO: 2146520 - DNA, 25 bp, Homo sapien
gttttgaatacaagaccctgtgctg

SEQ ID NO: 2146521 - DNA, 25 bp, Homo sapien
tataggtggacaaggtacgtattgc

SEQ ID NO: 2146522 - DNA, 25 bp, Homo sapien
ggtactccagatataaacatactta

SEQ ID NO: 2146523 - DNA, 25 bp, Homo sapien
taaacttgcttaggtcatggtaggt

SEQ ID NO: 2146524 - DNA, 25 bp, Homo sapien
taataccttcccagaagtcattacg

SEQ ID NO: 2146525 - DNA, 25 bp, Homo sapien
tctctcctgactgaagtaaacttgc

SEQ ID NO: 2146526 - DNA, 25 bp, Homo sapien
cccttctgatttttcagattgcaca

SEQ ID NO: 2146527 - DNA, 25 bp, Homo sapien
tcagcatcttcacttttctcgttcc

SEQ ID NO: 2146528 - DNA, 25 bp, Homo sapien
caaagatggctgatgtaacaactgc

SEQ ID NO: 2146529 - DNA, 25 bp, Homo sapien
gattgcacatccaaagataacatca

SEQ ID NO: 2146530 - DNA, 25 bp, Homo sapien
gaaaaattagccctgcttcatttgg

SEQ ID NO: 2146531 - DNA, 25 bp, Homo sapien
cccttcctaatatgagcattgtata

SEQ ID NO: 2146532 - DNA, 25 bp, Homo sapien
aatagccacctatctcaagaagctg

SEQ ID NO: 2146533 - DNA, 25 bp, Homo sapien
tcaaagcatatatgctacaaatggc

SEQ ID NO: 2146534 - DNA, 25 bp, Homo sapien
tagaagacagaagctggatgtgatt

SEQ ID NO: 2146535 - DNA, 25 bp, Homo sapien
ttagaagacagaagctggatgtgat

SEQ ID NO: 2146536 - DNA, 25 bp, Homo sapien
gtatatggaatgtaaaaaggtagca

SEQ ID NO: 2146537 - DNA, 25 bp, Homo sapien
aatatgcaggggaagtatatggaat

SEQ ID NO: 2146538 - DNA, 25 bp, Homo sapien
ctgtggaatatgcaggggaagtata

SEQ ID NO: 2146539 - DNA, 25 bp, Homo sapien
agtatatggaatgtaaaaaggtagc

SEQ ID NO: 2146540 - DNA, 25 bp, Homo sapien
acagcagtgctgtgcagtagtagca

SEQ ID NO: 2146541 - DNA, 25 bp, Homo sapien
aaaatggtttcacttagatgtgcta

SEQ ID NO: 2146542 - DNA, 25 bp, Homo sapien
taccacccttttggcatatctcaca

SEQ ID NO: 2146543 - DNA, 25 bp, Homo sapien
gaaagttgtggacaggatgagtcac

SEQ ID NO: 2146544 - DNA, 25 bp, Homo sapien
ttttattaacaaacactttgattgc

SEQ ID NO: 2146545 - DNA, 25 bp, Homo sapien
gggtttcctagatcattaacactgc

SEQ ID NO: 2146546 - DNA, 25 bp, Homo sapien
aaaagtatgttagcctggaacacta

SEQ ID NO: 2146547 - DNA, 25 bp, Homo sapien
tttaatgcatgtaaccaaaaggcac

SEQ ID NO: 2146548 - DNA, 25 bp, Homo sapien
tctactctatcagcccagggtttcc

SEQ ID NO: 2146549 - DNA, 25 bp, Homo sapien
catgatcagggtttcattgccccag

SEQ ID NO: 2146550 - DNA, 25 bp, Homo sapien
gaaacattgtgctccagtgtggcaa

SEQ ID NO: 2146551 - DNA, 25 bp, Homo sapien
tagtaagaggccaaaagagccactg

SEQ ID NO: 2146552 - DNA, 25 bp, Homo sapien
ttaagctagaaacaagactatcccc

SEQ ID NO: 2146553 - DNA, 25 bp, Homo sapien
aaataaagtcatgtttaaacaagtg

SEQ ID NO: 2146554 - DNA, 25 bp, Homo sapien
tccttgatttactgaagtcaattaa

SEQ ID NO: 2146555 - DNA, 25 bp, Homo sapien
agtcaattaaaaataaagtcatgtt

SEQ ID NO: 2146556 - DNA, 25 bp, Homo sapien
attccttgatttactgaagtcaatt

SEQ ID NO: 2146557 - DNA, 25 bp, Homo sapien
cctcagccaggtgataagaacgtac

SEQ ID NO: 2146558 - DNA, 25 bp, Homo sapien
ttaaagtccacaaccccagctgaat

SEQ ID NO: 2146559 - DNA, 25 bp, Homo sapien
tgagaaattgtcacggctaagaggg

SEQ ID NO: 2146560 - DNA, 25 bp, Homo sapien
cccaggctggtgcttactgttaaga

SEQ ID NO: 2146561 - DNA, 25 bp, Homo sapien
tacctctcgctgccataccacttca

SEQ ID NO: 2146562 - DNA, 25 bp, Homo sapien
acctctcgctgccataccacttcat

SEQ ID NO: 2146563 - DNA, 25 bp, Homo sapien
cttctgtatctgcttcaacttgatc

SEQ ID NO: 2146564 - DNA, 25 bp, Homo sapien
tcctgtggattttgaggcttcccac

SEQ ID NO: 2146565 - DNA, 25 bp, Homo sapien
gatctcctgtggattttgaggcttc

SEQ ID NO: 2146566 - DNA, 25 bp, Homo sapien
tctgcttcaacttgatctcctgtgg

SEQ ID NO: 2146567 - DNA, 25 bp, Homo sapien
tgacacatggcaggttctctgagat

SEQ ID NO: 2146568 - DNA, 25 bp, Homo sapien
tgcaccatgttaggtgatgtcacat

SEQ ID NO: 2146569 - DNA, 25 bp, Homo sapien
ctctgattagtccacaggccaaagg

SEQ ID NO: 2146570 - DNA, 25 bp, Homo sapien
tgtaacagtgctacagtgcaccatg

SEQ ID NO: 2146571 - DNA, 25 bp, Homo sapien
aaactatctatgcctacatatgcct

SEQ ID NO: 2146572 - DNA, 25 bp, Homo sapien
tttagtgcttatcagacttgcttgg

SEQ ID NO: 2146573 - DNA, 25 bp, Homo sapien
caacccaggagttcttgaattttag

SEQ ID NO: 2146574 - DNA, 25 bp, Homo sapien
ttaactacagctgcttcaacccagg

SEQ ID NO: 2146575 - DNA, 25 bp, Homo sapien
tgtggccatgctccatactaacttt

SEQ ID NO: 2146576 - DNA, 25 bp, Homo sapien
tatgctaccccattatcagagtatc

SEQ ID NO: 2146577 - DNA, 25 bp, Homo sapien
gattagctggcaattatgtcctcct

SEQ ID NO: 2146578 - DNA, 25 bp, Homo sapien
tgactggcaaaaagatatgctaccc

SEQ ID NO: 2146579 - DNA, 25 bp, Homo sapien
caggggtgggatctcagttcaccgc

SEQ ID NO: 2146580 - DNA, 25 bp, Homo sapien
acaggcacatatcaccacgcttgac

SEQ ID NO: 2146581 - DNA, 25 bp, Homo sapien
ggcacatatcaccacgcttgactaa

SEQ ID NO: 2146582 - DNA, 25 bp, Homo sapien
gcacatatcaccacgcttgactaat

SEQ ID NO: 2146583 - DNA, 25 bp, Homo sapien
ttatgccagtcttcctcatccttca

SEQ ID NO: 2146584 - DNA, 25 bp, Homo sapien
tatgccagtcttcctcatccttcat

SEQ ID NO: 2146585 - DNA, 25 bp, Homo sapien
cttatgccagtcttcctcatccttc

SEQ ID NO: 2146586 - DNA, 25 bp, Homo sapien
caaaattggtcagaaagttggccag

SEQ ID NO: 2146587 - DNA, 25 bp, Homo sapien
aagttggccagagagctagaatttt

SEQ ID NO: 2146588 - DNA, 25 bp, Homo sapien
aattggtcagaaagttggccagaga

SEQ ID NO: 2146589 - DNA, 25 bp, Homo sapien
acaaaattggtcagaaagttggcca

SEQ ID NO: 2146590 - DNA, 25 bp, Homo sapien
tgtgtctttccggtagaggatattt

SEQ ID NO: 2146591 - DNA, 25 bp, Homo sapien
agctgtgtctttccggtagaggata

SEQ ID NO: 2146592 - DNA, 25 bp, Homo sapien
gctgtgtctttccggtagaggatat

SEQ ID NO: 2146593 - DNA, 25 bp, Homo sapien
aagctgtgtctttccggtagaggat

SEQ ID NO: 2146594 - DNA, 25 bp, Homo sapien
tgcttaagacagaaatagggacggg

SEQ ID NO: 2146595 - DNA, 25 bp, Homo sapien
gaagtactagtgaccctgtcagacc

SEQ ID NO: 2146596 - DNA, 25 bp, Homo sapien
taacagggtataaaacgaacatgct

SEQ ID NO: 2146597 - DNA, 25 bp, Homo sapien
tcaaagaacatctcataacagggta

SEQ ID NO: 2146598 - DNA, 25 bp, Homo sapien
tcccctagagggcccgagctccgat

SEQ ID NO: 2146599 - DNA, 25 bp, Homo sapien
tagagggcccgagctccgatcgcca

SEQ ID NO: 2146600 - DNA, 25 bp, Homo sapien
tccgatcgccaccagccgaagcagg

SEQ ID NO: 2146601 - DNA, 25 bp, Homo sapien
cgatcgccaccagccgaagcaggag

SEQ ID NO: 2146602 - DNA, 25 bp, Homo sapien
ctgctccctctgtttactcgccggc

SEQ ID NO: 2146603 - DNA, 25 bp, Homo sapien
tgctccctctgtttactcgccggcc

SEQ ID NO: 2146604 - DNA, 25 bp, Homo sapien
ctcggcgggcgggcggacctcggcg

SEQ ID NO: 2146605 - DNA, 25 bp, Homo sapien
caggcttgctgagccgtttggtgaa

SEQ ID NO: 2146606 - DNA, 25 bp, Homo sapien
tttggtgaatttgcgcacttcggcc

SEQ ID NO: 2146607 - DNA, 25 bp, Homo sapien
ccccgcacggcctcagacacgctct

SEQ ID NO: 2146608 - DNA, 25 bp, Homo sapien
tcagacacgctctgccggagctcag

SEQ ID NO: 2146609 - DNA, 25 bp, Homo sapien
cccagttgcaggaggaagtcgctct

SEQ ID NO: 2146610 - DNA, 25 bp, Homo sapien
cttgcctctggagcgctcgcgtgtc

SEQ ID NO: 2146611 - DNA, 25 bp, Homo sapien
actctgtcgcagaaccccgttgttt

SEQ ID NO: 2146612 - DNA, 25 bp, Homo sapien
gtggatgaccctgcgcccactctgt

SEQ ID NO: 2146613 - DNA, 25 bp, Homo sapien
tcagggtttgttcgcttgtccagga

SEQ ID NO: 2146614 - DNA, 25 bp, Homo sapien
tgtccaggaaactggcaacgagtgt

SEQ ID NO: 2146615 - DNA, 25 bp, Homo sapien
tttgttcgcttgtccaggaaactgg

SEQ ID NO: 2146616 - DNA, 25 bp, Homo sapien
ttattcagggtttgttcgcttgtcc

SEQ ID NO: 2146617 - DNA, 25 bp, Homo sapien
ctttgttcccctgcggcaccagtag

SEQ ID NO: 2146618 - DNA, 25 bp, Homo sapien
ggcggccataatacaacaggtttag

SEQ ID NO: 2146619 - DNA, 25 bp, Homo sapien
gtggcttctctaaagggcggccata

SEQ ID NO: 2146620 - DNA, 25 bp, Homo sapien
cagctactaggcgactcttccaggc

SEQ ID NO: 2146621 - DNA, 25 bp, Homo sapien
tggcattttaggcactagccatcat

SEQ ID NO: 2146622 - DNA, 25 bp, Homo sapien
cttatcctgctaccacaaaaccaga

SEQ ID NO: 2146623 - DNA, 25 bp, Homo sapien
cagccacacactatccttaacagaa

SEQ ID NO: 2146624 - DNA, 25 bp, Homo sapien
attttaggcactagccatcatgccc

SEQ ID NO: 2146625 - DNA, 25 bp, Homo sapien
gattgactgtggaatctggcatccc

SEQ ID NO: 2146626 - DNA, 25 bp, Homo sapien
ggacacctggagttcattacctgct

SEQ ID NO: 2146627 - DNA, 25 bp, Homo sapien
tgacctgtagacatatgaggccaca

SEQ ID NO: 2146628 - DNA, 25 bp, Homo sapien
gtttcccaatagagcgagatcatca

SEQ ID NO: 2146629 - DNA, 25 bp, Homo sapien
gcagaggcatgagctgttggctccc

SEQ ID NO: 2146630 - DNA, 25 bp, Homo sapien
ccttgagaaacacgggtctggcaga

SEQ ID NO: 2146631 - DNA, 25 bp, Homo sapien
gccaccattcctgtcaagcagcgtt

SEQ ID NO: 2146632 - DNA, 25 bp, Homo sapien
caagcagcgttttctgccttgagaa

SEQ ID NO: 2146633 - DNA, 25 bp, Homo sapien
caaagtctgtcatgtggtgcttcca

SEQ ID NO: 2146634 - DNA, 25 bp, Homo sapien
gagctccagggtatgctatttacaa

SEQ ID NO: 2146635 - DNA, 25 bp, Homo sapien
tagacgtggcttttgcaagagctcc

SEQ ID NO: 2146636 - DNA, 25 bp, Homo sapien
ttaaccactacagcagattctgcag

SEQ ID NO: 2146637 - DNA, 25 bp, Homo sapien
tgtcaggcagtggagctacaaagct

SEQ ID NO: 2146638 - DNA, 25 bp, Homo sapien
caaactcatgggctagagggagaga

SEQ ID NO: 2146639 - DNA, 25 bp, Homo sapien
caaaagtgaggcttgctgctctgtc

SEQ ID NO: 2146640 - DNA, 25 bp, Homo sapien
ataaaaatccccatggcaggcaagg

SEQ ID NO: 2146641 - DNA, 25 bp, Homo sapien
tggatctggcaatcggtctacccat

SEQ ID NO: 2146642 - DNA, 25 bp, Homo sapien
actggatctggcaatcggtctaccc

SEQ ID NO: 2146643 - DNA, 25 bp, Homo sapien
tccattagagaagctcagtaatcta

SEQ ID NO: 2146644 - DNA, 25 bp, Homo sapien
cagtaatctataaagcagccacaca

SEQ ID NO: 2146645 - DNA, 25 bp, Homo sapien
cctaagctgttgcttccaatttagc

SEQ ID NO: 2146646 - DNA, 25 bp, Homo sapien
ttagagagcttgtaatgtaattgga

SEQ ID NO: 2146647 - DNA, 25 bp, Homo sapien
taagctgttgcttccaatttagcat

SEQ ID NO: 2146648 - DNA, 25 bp, Homo sapien
aattggataaggatctttgcattcc

SEQ ID NO: 2146649 - DNA, 25 bp, Homo sapien
gagatcttgccttcctatcgccctg

SEQ ID NO: 2146650 - DNA, 25 bp, Homo sapien
ctatcgccctgatgatgctgaacat

SEQ ID NO: 2146651 - DNA, 25 bp, Homo sapien
ttgccttcctatcgccctgatgatg

SEQ ID NO: 2146652 - DNA, 25 bp, Homo sapien
caaagtgagatcttgccttcctatc

SEQ ID NO: 2146653 - DNA, 25 bp, Homo sapien
tggtttacttagtctcctaggcagg

SEQ ID NO: 2146654 - DNA, 25 bp, Homo sapien
tactgaaggagctttgcataactac

SEQ ID NO: 2146655 - DNA, 25 bp, Homo sapien
ttgactttgttatgaccatggcctg

SEQ ID NO: 2146656 - DNA, 25 bp, Homo sapien
tttaactagcagaacccaacttgcc

SEQ ID NO: 2146657 - DNA, 25 bp, Homo sapien
cgttgcttactcaggccactaagga

SEQ ID NO: 2146658 - DNA, 25 bp, Homo sapien
cagaatagattcagttgcagtccac

SEQ ID NO: 2146659 - DNA, 25 bp, Homo sapien
ggaaacaatggatcctcactgaggg

SEQ ID NO: 2146660 - DNA, 25 bp, Homo sapien
tcactgagggtcactaatagcatca

SEQ ID NO: 2146661 - DNA, 25 bp, Homo sapien
taagcattctgggtcttcacgccta

SEQ ID NO: 2146662 - DNA, 25 bp, Homo sapien
tcaattgcggaaaagttagggtggc

SEQ ID NO: 2146663 - DNA, 25 bp, Homo sapien
catacagttccggagcagtgctaag

SEQ ID NO: 2146664 - DNA, 25 bp, Homo sapien
cactgattggcctgcaaaggtgctt

SEQ ID NO: 2146665 - DNA, 25 bp, Homo sapien
tctcggagggggtcgctgtaaatct

SEQ ID NO: 2146666 - DNA, 25 bp, Homo sapien
tgggaacataagcagatctcggagg

SEQ ID NO: 2146667 - DNA, 25 bp, Homo sapien
gcaataacattctcatagtccaggg

SEQ ID NO: 2146668 - DNA, 25 bp, Homo sapien
atatatcttccattgggaacataag

SEQ ID NO: 2146669 - DNA, 25 bp, Homo sapien
tacagtagactgcaccgttctgcgt

SEQ ID NO: 2146670 - DNA, 25 bp, Homo sapien
atcttctggtacagtagactgcacc

SEQ ID NO: 2146671 - DNA, 25 bp, Homo sapien
tgcgttgacgacctatcaccgagat

SEQ ID NO: 2146672 - DNA, 25 bp, Homo sapien
gcaccgttctgcgttgacgacctat

SEQ ID NO: 2146673 - DNA, 25 bp, Homo sapien
tgtagtttaccacgtgccaatctgt

SEQ ID NO: 2146674 - DNA, 25 bp, Homo sapien
atacttgtagtttaccacgtgccaa

SEQ ID NO: 2146675 - DNA, 25 bp, Homo sapien
catggcaacattcgaaagtccccag

SEQ ID NO: 2146676 - DNA, 25 bp, Homo sapien
aacattcgaaagtccccagagaagt

SEQ ID NO: 2146677 - DNA, 25 bp, Homo sapien
cagtcttcatctatctcaaatacat

SEQ ID NO: 2146678 - DNA, 25 bp, Homo sapien
atacatgattaggaatcttttctgg

SEQ ID NO: 2146679 - DNA, 25 bp, Homo sapien
gtcttcatctatctcaaatacatga

SEQ ID NO: 2146680 - DNA, 25 bp, Homo sapien
acatgattaggaatcttttctggtc

SEQ ID NO: 2146681 - DNA, 25 bp, Homo sapien
agccttgttttatcacaccaccctt

SEQ ID NO: 2146682 - DNA, 25 bp, Homo sapien
caccacccttctgagaacataaaga

SEQ ID NO: 2146683 - DNA, 25 bp, Homo sapien
cttcatggttactgtgatggtacta

SEQ ID NO: 2146684 - DNA, 25 bp, Homo sapien
ttgctttatgcaaccagccttgttt

SEQ ID NO: 2146685 - DNA, 25 bp, Homo sapien
agccacagggcatcaaataagctca

SEQ ID NO: 2146686 - DNA, 25 bp, Homo sapien
cctagcaattccagagggaactgca

SEQ ID NO: 2146687 - DNA, 25 bp, Homo sapien
gaactgcaggccagtgtcaagccac

SEQ ID NO: 2146688 - DNA, 25 bp, Homo sapien
ctctctctaaaaggcaccaagatgc

SEQ ID NO: 2146689 - DNA, 25 bp, Homo sapien
gctctacatctgacacttctctcta

SEQ ID NO: 2146690 - DNA, 25 bp, Homo sapien
ttttaagctctacatctgacacttc

SEQ ID NO: 2146691 - DNA, 25 bp, Homo sapien
tctctaccctccacaatgctaatac

SEQ ID NO: 2146692 - DNA, 25 bp, Homo sapien
caatatctatttggtagccaggcgt

SEQ ID NO: 2146693 - DNA, 25 bp, Homo sapien
tgatttaaagccaagtctagtagga

SEQ ID NO: 2146694 - DNA, 25 bp, Homo sapien
aataattctaccgtatctgggcact

SEQ ID NO: 2146695 - DNA, 25 bp, Homo sapien
tctgggcactgaagagttcaactat

SEQ ID NO: 2146696 - DNA, 25 bp, Homo sapien
tgacactctcctacccactgagaaa

SEQ ID NO: 2146697 - DNA, 25 bp, Homo sapien
agcaaagcccacaggaacaggaaaa

SEQ ID NO: 2146698 - DNA, 25 bp, Homo sapien
aggttggggactgcctgatgagttc

SEQ ID NO: 2146699 - DNA, 25 bp, Homo sapien
gttggggactgcctgatgagttcat

SEQ ID NO: 2146700 - DNA, 25 bp, Homo sapien
caaagcccacaggaacaggaaaagg

SEQ ID NO: 2146701 - DNA, 25 bp, Homo sapien
ttgggtcaagtaaaaatatcgtctc

SEQ ID NO: 2146702 - DNA, 25 bp, Homo sapien
tgaacaacatcaatgcaggcgtcca

SEQ ID NO: 2146703 - DNA, 25 bp, Homo sapien
tatgaaccgtcaggaagttgggtca

SEQ ID NO: 2146704 - DNA, 25 bp, Homo sapien
tagatgcaacctttcgattcttttg

SEQ ID NO: 2146705 - DNA, 25 bp, Homo sapien
gtttcagcagccagataatggctat

SEQ ID NO: 2146706 - DNA, 25 bp, Homo sapien
tcaaagttatcaaccattcctccat

SEQ ID NO: 2146707 - DNA, 25 bp, Homo sapien
actgtcggtgttgatctgaataatc

SEQ ID NO: 2146708 - DNA, 25 bp, Homo sapien
agttcaaaagcatgacggcgcattt

SEQ ID NO: 2146709 - DNA, 25 bp, Homo sapien
tccggatgcatgctcctttccaaac

SEQ ID NO: 2146710 - DNA, 25 bp, Homo sapien
ttccggatgcatgctcctttccaaa

SEQ ID NO: 2146711 - DNA, 25 bp, Homo sapien
ctactgagtttgtttagttgttcag

SEQ ID NO: 2146712 - DNA, 25 bp, Homo sapien
attcaccaggaaacgtttattgcat

SEQ ID NO: 2146713 - DNA, 25 bp, Homo sapien
ttcaccaggaaacgtttattgcatt

SEQ ID NO: 2146714 - DNA, 25 bp, Homo sapien
ttgacaaaagctttgccctatcagc

SEQ ID NO: 2146715 - DNA, 25 bp, Homo sapien
cgctaataacagtcaacaccaaagt

SEQ ID NO: 2146716 - DNA, 25 bp, Homo sapien
gactatacatttcataagcgctaat

SEQ ID NO: 2146717 - DNA, 25 bp, Homo sapien
gacaaaagctttgccctatcagcaa

SEQ ID NO: 2146718 - DNA, 25 bp, Homo sapien
tgtaagattcgggtgaagagccctt

SEQ ID NO: 2146719 - DNA, 25 bp, Homo sapien
gcgtaactgagattcggcaattcca

SEQ ID NO: 2146720 - DNA, 25 bp, Homo sapien
gagccctttgggctaccgtcactgg

SEQ ID NO: 2146721 - DNA, 25 bp, Homo sapien
gttctttacatcaaataaggcaaga

SEQ ID NO: 2146722 - DNA, 25 bp, Homo sapien
ctggcttcgggtactgccgggaaca

SEQ ID NO: 2146723 - DNA, 25 bp, Homo sapien
agctgtgaggctgaacgggttggca

SEQ ID NO: 2146724 - DNA, 25 bp, Homo sapien
actgccgggaacatgctgtttgagc

SEQ ID NO: 2146725 - DNA, 25 bp, Homo sapien
aacgggttggcagactgcccgggct

SEQ ID NO: 2146726 - DNA, 25 bp, Homo sapien
gaagtgagtacatttctcgagtgga

SEQ ID NO: 2146727 - DNA, 25 bp, Homo sapien
ttggttgtgtatgcgaagtgagtac

SEQ ID NO: 2146728 - DNA, 25 bp, Homo sapien
tcacatctgttagtctccatagcgc

SEQ ID NO: 2146729 - DNA, 25 bp, Homo sapien
ggtgtcaccgttgctgctttgcctc

SEQ ID NO: 2146730 - DNA, 25 bp, Homo sapien
gatatagggttctgcacagtgtgta

SEQ ID NO: 2146731 - DNA, 25 bp, Homo sapien
ttgatatagggttctgcacagtgtg

SEQ ID NO: 2146732 - DNA, 25 bp, Homo sapien
tatagggttctgcacagtgtgtaat

SEQ ID NO: 2146733 - DNA, 25 bp, Homo sapien
ttttgatatagggttctgcacagtg

SEQ ID NO: 2146734 - DNA, 25 bp, Homo sapien
tgtccaaggcggctacacacttgtt

SEQ ID NO: 2146735 - DNA, 25 bp, Homo sapien
ttctgtattgtccaaggcggctaca

SEQ ID NO: 2146736 - DNA, 25 bp, Homo sapien
ccaagcgaagggcattctgtattgt

SEQ ID NO: 2146737 - DNA, 25 bp, Homo sapien
gcagcccaagcgaagggcattctgt

SEQ ID NO: 2146738 - DNA, 25 bp, Homo sapien
aggctggagcattaaaaatatgctg

SEQ ID NO: 2146739 - DNA, 25 bp, Homo sapien
agagcaacttgagaatgtcttcact

SEQ ID NO: 2146740 - DNA, 25 bp, Homo sapien
gagcaacttgagaatgtcttcactt

SEQ ID NO: 2146741 - DNA, 25 bp, Homo sapien
taatctgcagtttggtcttttctgg

SEQ ID NO: 2146742 - DNA, 25 bp, Homo sapien
cacattctactgtgatgtttagctg

SEQ ID NO: 2146743 - DNA, 25 bp, Homo sapien
actgtgatgtttagctgcccaggaa

SEQ ID NO: 2146744 - DNA, 25 bp, Homo sapien
gctgcccaggaataatctgcagttt

SEQ ID NO: 2146745 - DNA, 25 bp, Homo sapien
aaactcttcaacctccacagtaata

SEQ ID NO: 2146746 - DNA, 25 bp, Homo sapien
actcttcaacctccacagtaatatt

SEQ ID NO: 2146747 - DNA, 25 bp, Homo sapien
aactcttcaacctccacagtaatat

SEQ ID NO: 2146748 - DNA, 25 bp, Homo sapien
tttagggcactagcgtcactttcat

SEQ ID NO: 2146749 - DNA, 25 bp, Homo sapien
tagggcactagcgtcactttcatct

SEQ ID NO: 2146750 - DNA, 25 bp, Homo sapien
ctttagggcactagcgtcactttca

SEQ ID NO: 2146751 - DNA, 25 bp, Homo sapien
gggcactagcgtcactttcatctga

SEQ ID NO: 2146752 - DNA, 25 bp, Homo sapien
actctggattttggttgtgatgcga

SEQ ID NO: 2146753 - DNA, 25 bp, Homo sapien
gattttggttgtgatgcgagacaac

SEQ ID NO: 2146754 - DNA, 25 bp, Homo sapien
ctggattttggttgtgatgcgagac

SEQ ID NO: 2146755 - DNA, 25 bp, Homo sapien
gaactctggattttggttgtgatgc

SEQ ID NO: 2146756 - DNA, 25 bp, Homo sapien
tgatgtaggtgaatgggaagctcaa

SEQ ID NO: 2146757 - DNA, 25 bp, Homo sapien
ttgatgtaggtgaatgggaagctca

SEQ ID NO: 2146758 - DNA, 25 bp, Homo sapien
gtaggtgaatgggaagctcaatttt

SEQ ID NO: 2146759 - DNA, 25 bp, Homo sapien
atgtaggtgaatgggaagctcaatt

SEQ ID NO: 2146760 - DNA, 25 bp, Homo sapien
tgttcaacctgacatcctatgatcc

SEQ ID NO: 2146761 - DNA, 25 bp, Homo sapien
aaaccctccaatagttctactgtgg

SEQ ID NO: 2146762 - DNA, 25 bp, Homo sapien
tcaaggctttccaaaatctgatgcc

SEQ ID NO: 2146763 - DNA, 25 bp, Homo sapien
tgtgctccaggcttagtgaactact

SEQ ID NO: 2146764 - DNA, 25 bp, Homo sapien
cttgattctgcatcattcagattca

SEQ ID NO: 2146765 - DNA, 25 bp, Homo sapien
ttgattctgcatcattcagattcaa

SEQ ID NO: 2146766 - DNA, 25 bp, Homo sapien
tgtaaatggtagattctaagtggct

SEQ ID NO: 2146767 - DNA, 25 bp, Homo sapien
aatggtagattctaagtggctttta

SEQ ID NO: 2146768 - DNA, 25 bp, Homo sapien
ggtagattctaagtggcttttaatc

SEQ ID NO: 2146769 - DNA, 25 bp, Homo sapien
agtgtaaatggtagattctaagtgg

SEQ ID NO: 2146770 - DNA, 25 bp, Homo sapien
tatttaatgagctcccctggaactt

SEQ ID NO: 2146771 - DNA, 25 bp, Homo sapien
aatatttaatgagctcccctggaac

SEQ ID NO: 2146772 - DNA, 25 bp, Homo sapien
taaatatttaatgagctcccctgga

SEQ ID NO: 2146773 - DNA, 25 bp, Homo sapien
ttaaatatttaatgagctcccctgg

SEQ ID NO: 2146774 - DNA, 25 bp, Homo sapien
gtaagtgacatgtgggatacaagct

SEQ ID NO: 2146775 - DNA, 25 bp, Homo sapien
tacaagatgggcactattgttatcc

SEQ ID NO: 2146776 - DNA, 25 bp, Homo sapien
caaccaccctacaagatgggcacta

SEQ ID NO: 2146777 - DNA, 25 bp, Homo sapien
gacatgtgggatacaagctcagttt

SEQ ID NO: 2146778 - DNA, 25 bp, Homo sapien
gcagttgataggaacgtcatcttca

SEQ ID NO: 2146779 - DNA, 25 bp, Homo sapien
tatttgtgagaactcggaagagttg

SEQ ID NO: 2146780 - DNA, 25 bp, Homo sapien
gagttgcataagaattacaggtaga

SEQ ID NO: 2146781 - DNA, 25 bp, Homo sapien
catcttcatgggtcatatttgtgag

SEQ ID NO: 2146782 - DNA, 25 bp, Homo sapien
tatgaatgatcttagataactatcc

SEQ ID NO: 2146783 - DNA, 25 bp, Homo sapien
tagataactatccaagccttcttca

SEQ ID NO: 2146784 - DNA, 25 bp, Homo sapien
ctttgatacaatatgtaagagaacc

SEQ ID NO: 2146785 - DNA, 25 bp, Homo sapien
cttcatggcactttgatacaatatg

SEQ ID NO: 2146786 - DNA, 25 bp, Homo sapien
cagggtttcatgtatcagctgggcc

SEQ ID NO: 2146787 - DNA, 25 bp, Homo sapien
tagtagccagggtttcatgtatcag

SEQ ID NO: 2146788 - DNA, 25 bp, Homo sapien
tagccagggtttcatgtatcagctg

SEQ ID NO: 2146789 - DNA, 25 bp, Homo sapien
ggtttcatgtatcagctgggcctga

SEQ ID NO: 2146790 - DNA, 25 bp, Homo sapien
tctcttccaacaagtatgtggccat

SEQ ID NO: 2146791 - DNA, 25 bp, Homo sapien
tccgcataccgaatagtcacatggg

SEQ ID NO: 2146792 - DNA, 25 bp, Homo sapien
tgtaagacatgatgatatgtctcgg

SEQ ID NO: 2146793 - DNA, 25 bp, Homo sapien
gacatgatgatatgtctcgggaaat

SEQ ID NO: 2146794 - DNA, 25 bp, Homo sapien
gaatctccgcataccgaatagtcac

SEQ ID NO: 2146795 - DNA, 25 bp, Homo sapien
cacattctagctgccttgaactcac

SEQ ID NO: 2146796 - DNA, 25 bp, Homo sapien
aatcctctatccattagtgtcaaac

SEQ ID NO: 2146797 - DNA, 25 bp, Homo sapien
cctctatccattagtgtcaaacagc

SEQ ID NO: 2146798 - DNA, 25 bp, Homo sapien
aaatcctctatccattagtgtcaaa

SEQ ID NO: 2146799 - DNA, 25 bp, Homo sapien
tcctctatccattagtgtcaaacag

SEQ ID NO: 2146800 - DNA, 25 bp, Homo sapien
taggttttgcaaatgccattggcaa

SEQ ID NO: 2146801 - DNA, 25 bp, Homo sapien
gtaatgttcgtgattgcaaattgtt

SEQ ID NO: 2146802 - DNA, 25 bp, Homo sapien
attgcaaattgtttgcagaaattca

SEQ ID NO: 2146803 - DNA, 25 bp, Homo sapien
tgtaatgttcgtgattgcaaattgt

SEQ ID NO: 2146804 - DNA, 25 bp, Homo sapien
cactagcgctagcaaaacatggaaa

SEQ ID NO: 2146805 - DNA, 25 bp, Homo sapien
aaaacaaactcaaatgatggaaaat

SEQ ID NO: 2146806 - DNA, 25 bp, Homo sapien
aaacaaactcaaatgatggaaaatg

SEQ ID NO: 2146807 - DNA, 25 bp, Homo sapien
ctacactagcgctagcaaaacatgg

SEQ ID NO: 2146808 - DNA, 25 bp, Homo sapien
ctgaagtcaaacggtccaccgcaaa

SEQ ID NO: 2146809 - DNA, 25 bp, Homo sapien
tcaaacggtccaccgcaaatgaaaa

SEQ ID NO: 2146810 - DNA, 25 bp, Homo sapien
gaagtcaaacggtccaccgcaaatg

SEQ ID NO: 2146811 - DNA, 25 bp, Homo sapien
agtcaaacggtccaccgcaaatgaa

SEQ ID NO: 2146812 - DNA, 25 bp, Homo sapien
gaccaaccaagaagtgatgcttgca

SEQ ID NO: 2146813 - DNA, 25 bp, Homo sapien
gtgatgcttgcaatactcatctgat

SEQ ID NO: 2146814 - DNA, 25 bp, Homo sapien
gcaatggaagtttccctcagaagta

SEQ ID NO: 2146815 - DNA, 25 bp, Homo sapien
tcagaagtagaccaaccaagaagtg

SEQ ID NO: 2146816 - DNA, 25 bp, Homo sapien
tatcaaaagattctttataacagag

SEQ ID NO: 2146817 - DNA, 25 bp, Homo sapien
gctgtatatctgatctcataattgt

SEQ ID NO: 2146818 - DNA, 25 bp, Homo sapien
tctttataacagagatagctgtata

SEQ ID NO: 2146819 - DNA, 25 bp, Homo sapien
gctggtatcttgtgtcaaatgcatg

SEQ ID NO: 2146820 - DNA, 25 bp, Homo sapien
ttagccagaacccagcgataatgca

SEQ ID NO: 2146821 - DNA, 25 bp, Homo sapien
agttagccagaacccagcgataatg

SEQ ID NO: 2146822 - DNA, 25 bp, Homo sapien
gtagttagccagaacccagcgataa

SEQ ID NO: 2146823 - DNA, 25 bp, Homo sapien
tagccagaacccagcgataatgcat

SEQ ID NO: 2146824 - DNA, 25 bp, Homo sapien
tggtgagaatcccactggcaaaatc

SEQ ID NO: 2146825 - DNA, 25 bp, Homo sapien
ctttcatgtgaaaaggcagtggaga

SEQ ID NO: 2146826 - DNA, 25 bp, Homo sapien
aatatttaattctgcctctaggtgg

SEQ ID NO: 2146827 - DNA, 25 bp, Homo sapien
gtaacaatacctgcgtgtgtacaca

SEQ ID NO: 2146828 - DNA, 25 bp, Homo sapien
caagaatacaaggtatctcgacctg

SEQ ID NO: 2146829 - DNA, 25 bp, Homo sapien
ggtatctcgacctgctaatcgctgt

SEQ ID NO: 2146830 - DNA, 25 bp, Homo sapien
gctaatcgctgtatattttccaaaa

SEQ ID NO: 2146831 - DNA, 25 bp, Homo sapien
ggaggtacaattgtgctattttggc

SEQ ID NO: 2146832 - DNA, 25 bp, Homo sapien
cggtgtctttgtcagtgctcagact

SEQ ID NO: 2146833 - DNA, 25 bp, Homo sapien
gctcagactccctctattggcaggt

SEQ ID NO: 2146834 - DNA, 25 bp, Homo sapien
ttggcaggtgaagtaaagccacatg

SEQ ID NO: 2146835 - DNA, 25 bp, Homo sapien
cacatggaaactcatctctggatgc

SEQ ID NO: 2146836 - DNA, 25 bp, Homo sapien
tgtccattttgaaaagacccataag

SEQ ID NO: 2146837 - DNA, 25 bp, Homo sapien
agatatagccatgaatactgtgttt

SEQ ID NO: 2146838 - DNA, 25 bp, Homo sapien
ctgtgtttcattctcatatgccatg

SEQ ID NO: 2146839 - DNA, 25 bp, Homo sapien
gtgtttcattctcatatgccatgtg

SEQ ID NO: 2146840 - DNA, 25 bp, Homo sapien
ccatgaatactgtgtttcattctca

SEQ ID NO: 2146841 - DNA, 25 bp, Homo sapien
tactccttgtagaactctgtcgggt

SEQ ID NO: 2146842 - DNA, 25 bp, Homo sapien
ctactccttgtagaactctgtcggg

SEQ ID NO: 2146843 - DNA, 25 bp, Homo sapien
gaatgtttatgagctcctgaggtga

SEQ ID NO: 2146844 - DNA, 25 bp, Homo sapien
agctcctgaggtgatactttattcc

SEQ ID NO: 2146845 - DNA, 25 bp, Homo sapien
aagtataagaatgtttatgagctcc

SEQ ID NO: 2146846 - DNA, 25 bp, Homo sapien
gagctcctgaggtgatactttattc

SEQ ID NO: 2146847 - DNA, 25 bp, Homo sapien
ccatatatctaaagtgaaacaagca

SEQ ID NO: 2146848 - DNA, 25 bp, Homo sapien
ttcttttccccatatatctaaagtg

SEQ ID NO: 2146849 - DNA, 25 bp, Homo sapien
ttccccatatatctaaagtgaaaca

SEQ ID NO: 2146850 - DNA, 25 bp, Homo sapien
cttttccccatatatctaaagtgaa

SEQ ID NO: 2146851 - DNA, 25 bp, Homo sapien
gtttgcgattttcggtctattccga

SEQ ID NO: 2146852 - DNA, 25 bp, Homo sapien
tggtttgcgattttcggtctattcc

SEQ ID NO: 2146853 - DNA, 25 bp, Homo sapien
tgcgattttcggtctattccgaagt

SEQ ID NO: 2146854 - DNA, 25 bp, Homo sapien
cgattttcggtctattccgaagtgt

SEQ ID NO: 2146855 - DNA, 25 bp, Homo sapien
gaactctggcgatgtaactaggaaa

SEQ ID NO: 2146856 - DNA, 25 bp, Homo sapien
tgtgggaggccttctaagtcatgcc

SEQ ID NO: 2146857 - DNA, 25 bp, Homo sapien
aaaagagggctcacagtgtcatact

SEQ ID NO: 2146858 - DNA, 25 bp, Homo sapien
gctctgcaggacataattaggtgcc

SEQ ID NO: 2146859 - DNA, 25 bp, Homo sapien
tgtattgccttcaagaagtgcctgg

SEQ ID NO: 2146860 - DNA, 25 bp, Homo sapien
aaacttcagtagctgtattgccttc

SEQ ID NO: 2146861 - DNA, 25 bp, Homo sapien
ccttcaagaagtgcctggtggaaaa

SEQ ID NO: 2146862 - DNA, 25 bp, Homo sapien
tctagtactgttagggaaacttcag

SEQ ID NO: 2146863 - DNA, 25 bp, Homo sapien
tttcattaatgggttatggccatca

SEQ ID NO: 2146864 - DNA, 25 bp, Homo sapien
ctctcagtgaggcaaatacatgttt

SEQ ID NO: 2146865 - DNA, 25 bp, Homo sapien
gaaaagcaagatgtatatcaaacac

SEQ ID NO: 2146866 - DNA, 25 bp, Homo sapien
gtttcagcgacacttcagattgtcc

SEQ ID NO: 2146867 - DNA, 25 bp, Homo sapien
acaaaagtgcagatgcttcattcct

SEQ ID NO: 2146868 - DNA, 25 bp, Homo sapien
tgcttcattcctggttgagctaatc

SEQ ID NO: 2146869 - DNA, 25 bp, Homo sapien
agtgcagatgcttcattcctggttg

SEQ ID NO: 2146870 - DNA, 25 bp, Homo sapien
gcagatgcttcattcctggttgagc

SEQ ID NO: 2146871 - DNA, 25 bp, Homo sapien
gatcctccgcttagtgctacatcag

SEQ ID NO: 2146872 - DNA, 25 bp, Homo sapien
ctccgcttagtgctacatcagctat

SEQ ID NO: 2146873 - DNA, 25 bp, Homo sapien
atcttgatcctccgcttagtgctac

SEQ ID NO: 2146874 - DNA, 25 bp, Homo sapien
cttgatcctccgcttagtgctacat

SEQ ID NO: 2146875 - DNA, 25 bp, Homo sapien
tggctaagctatactggagatcaat

SEQ ID NO: 2146876 - DNA, 25 bp, Homo sapien
gctatactggagatcaattagcatt

SEQ ID NO: 2146877 - DNA, 25 bp, Homo sapien
taagctatactggagatcaattagc

SEQ ID NO: 2146878 - DNA, 25 bp, Homo sapien
tatactggagatcaattagcatttc

SEQ ID NO: 2146879 - DNA, 25 bp, Homo sapien
aactctgcaactagagctgctacat

SEQ ID NO: 2146880 - DNA, 25 bp, Homo sapien
caactagagctgctacatggacata

SEQ ID NO: 2146881 - DNA, 25 bp, Homo sapien
tagagctgctacatggacataacac

SEQ ID NO: 2146882 - DNA, 25 bp, Homo sapien
gctacatggacataacacatcgcag

SEQ ID NO: 2146883 - DNA, 25 bp, Homo sapien
ctggaaatggtcccttgtgggtgct

SEQ ID NO: 2146884 - DNA, 25 bp, Homo sapien
tgaacgctgaacatccgttaggaaa

SEQ ID NO: 2146885 - DNA, 25 bp, Homo sapien
gctgaacatccgttaggaaataatt

SEQ ID NO: 2146886 - DNA, 25 bp, Homo sapien
cgctgaacatccgttaggaaataat

SEQ ID NO: 2146887 - DNA, 25 bp, Homo sapien
aacgctgaacatccgttaggaaata

SEQ ID NO: 2146888 - DNA, 25 bp, Homo sapien
cagcgctgccagaataacagttgct

SEQ ID NO: 2146889 - DNA, 25 bp, Homo sapien
gatgcacttcaaacctgtagaactg

SEQ ID NO: 2146890 - DNA, 25 bp, Homo sapien
tcaaaatagagatcaccagcgctgc

SEQ ID NO: 2146891 - DNA, 25 bp, Homo sapien
taaagaacacttcccgactgatggt

SEQ ID NO: 2146892 - DNA, 25 bp, Homo sapien
tccacacattgttctagcaactcca

SEQ ID NO: 2146893 - DNA, 25 bp, Homo sapien
atccacacattgttctagcaactcc

SEQ ID NO: 2146894 - DNA, 25 bp, Homo sapien
cacattgttctagcaactccagcaa

SEQ ID NO: 2146895 - DNA, 25 bp, Homo sapien
taaagaatagaatcatgtctatgcc

SEQ ID NO: 2146896 - DNA, 25 bp, Homo sapien
tttgccagcacctttaggttctccg

SEQ ID NO: 2146897 - DNA, 25 bp, Homo sapien
tgggtaacatggaaatttgacagct

SEQ ID NO: 2146898 - DNA, 25 bp, Homo sapien
taggttctccgctaaattataaaga

SEQ ID NO: 2146899 - DNA, 25 bp, Homo sapien
gaagagttctataaacttgagtaag

SEQ ID NO: 2146900 - DNA, 25 bp, Homo sapien
agagttctataaacttgagtaagtt

SEQ ID NO: 2146901 - DNA, 25 bp, Homo sapien
aagagttctataaacttgagtaagt

SEQ ID NO: 2146902 - DNA, 25 bp, Homo sapien
tgaagagttctataaacttgagtaa

SEQ ID NO: 2146903 - DNA, 25 bp, Homo sapien
gacattctccgtaccaaacttttca

SEQ ID NO: 2146904 - DNA, 25 bp, Homo sapien
tgacattctccgtaccaaacttttc

SEQ ID NO: 2146905 - DNA, 25 bp, Homo sapien
attttgacattctccgtaccaaact

SEQ ID NO: 2146906 - DNA, 25 bp, Homo sapien
tctccgtaccaaacttttcaccata

SEQ ID NO: 2146907 - DNA, 25 bp, Homo sapien
ttcttctatacagccctgttttttg

SEQ ID NO: 2146908 - DNA, 25 bp, Homo sapien
ctatacagccctgttttttgcctga

SEQ ID NO: 2146909 - DNA, 25 bp, Homo sapien
ttctatacagccctgttttttgcct

SEQ ID NO: 2146910 - DNA, 25 bp, Homo sapien
ctgttcttctatacagccctgtttt

SEQ ID NO: 2146911 - DNA, 25 bp, Homo sapien
atcctcttcttcacgtaaggaaacg

SEQ ID NO: 2146912 - DNA, 25 bp, Homo sapien
gttggagctgaatcatgtccacgtc

SEQ ID NO: 2146913 - DNA, 25 bp, Homo sapien
tgaatcatgtccacgtcagtagagg

SEQ ID NO: 2146914 - DNA, 25 bp, Homo sapien
tcttcacgtaaggaaacgagtttga

SEQ ID NO: 2146915 - DNA, 25 bp, Homo sapien
tgcatatgctaatggaccagcattg

SEQ ID NO: 2146916 - DNA, 25 bp, Homo sapien
taggtggatacttgctagcttggct

SEQ ID NO: 2146917 - DNA, 25 bp, Homo sapien
gaaatttgactttagcccttcatgg

SEQ ID NO: 2146918 - DNA, 25 bp, Homo sapien
ttcaagtgcaatgctgcatgcttgt

SEQ ID NO: 2146919 - DNA, 25 bp, Homo sapien
ttgactttagcccttcatggtactc

SEQ ID NO: 2146920 - DNA, 25 bp, Homo sapien
gactttagcccttcatggtactcaa

SEQ ID NO: 2146921 - DNA, 25 bp, Homo sapien
tcatggataatgtcagataattctt

SEQ ID NO: 2146922 - DNA, 25 bp, Homo sapien
ggataatgtcagataattcttttac

SEQ ID NO: 2146923 - DNA, 25 bp, Homo sapien
tgctcatggataatgtcagataatt

SEQ ID NO: 2146924 - DNA, 25 bp, Homo sapien
ctgctcatggataatgtcagataat

SEQ ID NO: 2146925 - DNA, 25 bp, Homo sapien
aacagatggtcataacaagagctct

SEQ ID NO: 2146926 - DNA, 25 bp, Homo sapien
gcagatacctatgttccttccctgg

SEQ ID NO: 2146927 - DNA, 25 bp, Homo sapien
taaaaagcgagaggtaacacaatct

SEQ ID NO: 2146928 - DNA, 25 bp, Homo sapien
tggttctcagaatcatctatgggac

SEQ ID NO: 2146929 - DNA, 25 bp, Homo sapien
gaaatcagcatgattatcatgaagc

SEQ ID NO: 2146930 - DNA, 25 bp, Homo sapien
aagaatgtgtatatgaaattgcagg

SEQ ID NO: 2146931 - DNA, 25 bp, Homo sapien
catgattatcatgaagcaaaatagc

SEQ ID NO: 2146932 - DNA, 25 bp, Homo sapien
ttatcatgaagcaaaatagccactg

SEQ ID NO: 2146933 - DNA, 25 bp, Homo sapien
tacatgtaatgtgttgctcatccag

SEQ ID NO: 2146934 - DNA, 25 bp, Homo sapien
ccataacctcggtcacttgatgtac

SEQ ID NO: 2146935 - DNA, 25 bp, Homo sapien
aatacatgtaatgtgttgctcatcc

SEQ ID NO: 2146936 - DNA, 25 bp, Homo sapien
gggaaccataacctcggtcacttga

SEQ ID NO: 2146937 - DNA, 25 bp, Homo sapien
tccaggcactttcaagttgcttatt

SEQ ID NO: 2146938 - DNA, 25 bp, Homo sapien
agtctcattgtcacgtacatctgca

SEQ ID NO: 2146939 - DNA, 25 bp, Homo sapien
gtcagtctcattgtcacgtacatct

SEQ ID NO: 2146940 - DNA, 25 bp, Homo sapien
tcattgtcacgtacatctgcatttc

SEQ ID NO: 2146941 - DNA, 25 bp, Homo sapien
taaatatccgtgtattacggaaatg

SEQ ID NO: 2146942 - DNA, 25 bp, Homo sapien
caaggattcaaatgatctccccaat

SEQ ID NO: 2146943 - DNA, 25 bp, Homo sapien
tctcctcctaccaaggattagtatg

SEQ ID NO: 2146944 - DNA, 25 bp, Homo sapien
ccagccttgactactaattggcaag

SEQ ID NO: 2146945 - DNA, 25 bp, Homo sapien
tagatggccccagatgataaagctt

SEQ ID NO: 2146946 - DNA, 25 bp, Homo sapien
tcttgtatgtagaagggagacctac

SEQ ID NO: 2146947 - DNA, 25 bp, Homo sapien
tctgtgggatgtactgactgcaatc

SEQ ID NO: 2146948 - DNA, 25 bp, Homo sapien
gattacctagcgtcatcagatcata

SEQ ID NO: 2146949 - DNA, 25 bp, Homo sapien
gaaattggactcaagcttaactgca

SEQ ID NO: 2146950 - DNA, 25 bp, Homo sapien
taggcagccaaatcatataaatacg

SEQ ID NO: 2146951 - DNA, 25 bp, Homo sapien
tggtgacaactggttactaggaaaa

SEQ ID NO: 2146952 - DNA, 25 bp, Homo sapien
tacggtaacaataacaatcccatct

SEQ ID NO: 2146953 - DNA, 25 bp, Homo sapien
tccattacccctacctggatggagg

SEQ ID NO: 2146954 - DNA, 25 bp, Homo sapien
ccatccattacccctacctggatgg

SEQ ID NO: 2146955 - DNA, 25 bp, Homo sapien
gacccatccattacccctacctgga

SEQ ID NO: 2146956 - DNA, 25 bp, Homo sapien
tgacccatccattacccctacctgg

SEQ ID NO: 2146957 - DNA, 25 bp, Homo sapien
tgaaagggatagccacggagatcat

SEQ ID NO: 2146958 - DNA, 25 bp, Homo sapien
gaaagggatagccacggagatcatg

SEQ ID NO: 2146959 - DNA, 25 bp, Homo sapien
cttttggggaagagagtcaatgtaa

SEQ ID NO: 2146960 - DNA, 25 bp, Homo sapien
ttttggggaagagagtcaatgtaaa

SEQ ID NO: 2146961 - DNA, 25 bp, Homo sapien
ttggggaagagagtcaatgtaaagg

SEQ ID NO: 2146962 - DNA, 25 bp, Homo sapien
tttggggaagagagtcaatgtaaag

SEQ ID NO: 2146963 - DNA, 25 bp, Homo sapien
ttcccttgtctcttgaggttccgct

SEQ ID NO: 2146964 - DNA, 25 bp, Homo sapien
tctgctgacattgtcccatttgttc

SEQ ID NO: 2146965 - DNA, 25 bp, Homo sapien
caagctacatgcacaagctgcaatg

SEQ ID NO: 2146966 - DNA, 25 bp, Homo sapien
ctttcatccccaggcaagctacatg

SEQ ID NO: 2146967 - DNA, 25 bp, Homo sapien
ttggcttctggctgcgttgctatca

SEQ ID NO: 2146968 - DNA, 25 bp, Homo sapien
tggaattggccttgctctgttttcc

SEQ ID NO: 2146969 - DNA, 25 bp, Homo sapien
tgtgtcttagcatccaggtcccctc

SEQ ID NO: 2146970 - DNA, 25 bp, Homo sapien
cctctctggaattggccttgctctg

SEQ ID NO: 2146971 - DNA, 25 bp, Homo sapien
gctggtcccttagacaaaaatctca

SEQ ID NO: 2146972 - DNA, 25 bp, Homo sapien
cctgagtccaaaagggacacagaca

SEQ ID NO: 2146973 - DNA, 25 bp, Homo sapien
gagtcctctaagcaaaacctcacac

SEQ ID NO: 2146974 - DNA, 25 bp, Homo sapien
attccaagggcttagctaaaagtgc

SEQ ID NO: 2146975 - DNA, 25 bp, Homo sapien
actcaactgttttgacctttgccct

SEQ ID NO: 2146976 - DNA, 25 bp, Homo sapien
ctttgcccttctcactaagtcttcg

SEQ ID NO: 2146977 - DNA, 25 bp, Homo sapien
ctaagtcttcgtccatttctgtaac

SEQ ID NO: 2146978 - DNA, 25 bp, Homo sapien
ccttctcactaagtcttcgtccatt

SEQ ID NO: 2146979 - DNA, 25 bp, Homo sapien
atgaagacagatagaaggctttcca

SEQ ID NO: 2146980 - DNA, 25 bp, Homo sapien
caggaagaatgaagacagatagaag

SEQ ID NO: 2146981 - DNA, 25 bp, Homo sapien
agacagatagaaggctttccaggaa

SEQ ID NO: 2146982 - DNA, 25 bp, Homo sapien
gaagaatgaagacagatagaaggct

SEQ ID NO: 2146983 - DNA, 25 bp, Homo sapien
ttcgaagagcgtcttggattgaatc

SEQ ID NO: 2146984 - DNA, 25 bp, Homo sapien
tttcttcccgaccctgaacatcatg

SEQ ID NO: 2146985 - DNA, 25 bp, Homo sapien
taatctccgtgtagtgtgattcgaa

SEQ ID NO: 2146986 - DNA, 25 bp, Homo sapien
gaacatcatgcaacgatttttcaaa

SEQ ID NO: 2146987 - DNA, 25 bp, Homo sapien
ctctgctaacagaaagctgcagtca

SEQ ID NO: 2146988 - DNA, 25 bp, Homo sapien
tctgctaacagaaagctgcagtcag

SEQ ID NO: 2146989 - DNA, 25 bp, Homo sapien
gctctgctaacagaaagctgcagtc

SEQ ID NO: 2146990 - DNA, 25 bp, Homo sapien
ctgctaacagaaagctgcagtcagt

SEQ ID NO: 2146991 - DNA, 25 bp, Homo sapien
tgagcccttgtttgctagcgctgac

SEQ ID NO: 2146992 - DNA, 25 bp, Homo sapien
taccagccctacttcactgggtgga

SEQ ID NO: 2146993 - DNA, 25 bp, Homo sapien
gactccagggttagtaataccagcc

SEQ ID NO: 2146994 - DNA, 25 bp, Homo sapien
ctgcggaaaagagccttggcctggg

SEQ ID NO: 2146995 - DNA, 25 bp, Homo sapien
tgccagcacacttgcggggcctcgg

SEQ ID NO: 2146996 - DNA, 25 bp, Homo sapien
cgcgtccggtctctgaccgaacaaa

SEQ ID NO: 2146997 - DNA, 25 bp, Homo sapien
tcctccctccgcgtggcggagccgg

SEQ ID NO: 2146998 - DNA, 25 bp, Homo sapien
tgaccgaacaaaacttcttccacca

SEQ ID NO: 2146999 - DNA, 25 bp, Homo sapien
ctggagccttggcagtccccgcctc

SEQ ID NO: 2147000 - DNA, 25 bp, Homo sapien
ctccttcgctccctcttccacttcc

SEQ ID NO: 2147001 - DNA, 25 bp, Homo sapien
tctcgcctcggagcccggccgggct

SEQ ID NO: 2147002 - DNA, 25 bp, Homo sapien
cagcctctcgcctcggagcccggcc

SEQ ID NO: 2147003 - DNA, 25 bp, Homo sapien
ccccgccgccggcgcagagcagcag

SEQ ID NO: 2147004 - DNA, 25 bp, Homo sapien
cgcagagccgcgccggccactccat

SEQ ID NO: 2147005 - DNA, 25 bp, Homo sapien
agtgaagtctccctgcttgcttcct

SEQ ID NO: 2147006 - DNA, 25 bp, Homo sapien
tgtgcagaggttttcaacagagaca

SEQ ID NO: 2147007 - DNA, 25 bp, Homo sapien
gctccctcgggtggattccatgtcc

SEQ ID NO: 2147008 - DNA, 25 bp, Homo sapien
gagacactcaaatttgtcacaggtg

SEQ ID NO: 2147009 - DNA, 25 bp, Homo sapien
tagactacaatttgagctggctccc

SEQ ID NO: 2147010 - DNA, 25 bp, Homo sapien
ctttctcaactccagaattcctttc

SEQ ID NO: 2147011 - DNA, 25 bp, Homo sapien
aaagaaagggagttagcttcagcat

SEQ ID NO: 2147012 - DNA, 25 bp, Homo sapien
actccagaattcctttctcaaaaag

SEQ ID NO: 2147013 - DNA, 25 bp, Homo sapien
aaaagaaagggagttagcttcagca

SEQ ID NO: 2147014 - DNA, 25 bp, Homo sapien
cactctcattggtgctacactggga

SEQ ID NO: 2147015 - DNA, 25 bp, Homo sapien
aaccaaaatgctaggcttctcactc

SEQ ID NO: 2147016 - DNA, 25 bp, Homo sapien
tgcagacaaatcctctcattcaggg

SEQ ID NO: 2147017 - DNA, 25 bp, Homo sapien
tgaacgacgagtttccggagctatt

SEQ ID NO: 2147018 - DNA, 25 bp, Homo sapien
cacaagataagcttgtgactctcga

SEQ ID NO: 2147019 - DNA, 25 bp, Homo sapien
tcacaagataagcttgtgactctcg

SEQ ID NO: 2147020 - DNA, 25 bp, Homo sapien
ttcacaagataagcttgtgactctc

SEQ ID NO: 2147021 - DNA, 25 bp, Homo sapien
acaagataagcttgtgactctcgat

SEQ ID NO: 2147022 - DNA, 25 bp, Homo sapien
tagtgtcgggactggtattccttcc

SEQ ID NO: 2147023 - DNA, 25 bp, Homo sapien
caaatgcattgaagctcagtcacag

SEQ ID NO: 2147024 - DNA, 25 bp, Homo sapien
cagggagccaagaacacttcatgta

SEQ ID NO: 2147025 - DNA, 25 bp, Homo sapien
gtagctcaggttgtgccaaatgcat

SEQ ID NO: 2147026 - DNA, 25 bp, Homo sapien
actgctccatttgagtgttctacca

SEQ ID NO: 2147027 - DNA, 25 bp, Homo sapien
aactgctccatttgagtgttctacc

SEQ ID NO: 2147028 - DNA, 25 bp, Homo sapien
ctgctccatttgagtgttctaccat

SEQ ID NO: 2147029 - DNA, 25 bp, Homo sapien
ggccttctctaaagatgttttcaca

SEQ ID NO: 2147030 - DNA, 25 bp, Homo sapien
ctttggtcagatcaaaggaacaacc

SEQ ID NO: 2147031 - DNA, 25 bp, Homo sapien
tgcattatccttgaccattatttgg

SEQ ID NO: 2147032 - DNA, 25 bp, Homo sapien
ttatccttgaccattatttggacac

SEQ ID NO: 2147033 - DNA, 25 bp, Homo sapien
atgtggcagtatggagaggttggac

SEQ ID NO: 2147034 - DNA, 25 bp, Homo sapien
aatgtggcagtatggagaggttgga

SEQ ID NO: 2147035 - DNA, 25 bp, Homo sapien
cataaaataggcatctgctaataaa

SEQ ID NO: 2147036 - DNA, 25 bp, Homo sapien
catataggtcatcattgtggaagga

SEQ ID NO: 2147037 - DNA, 25 bp, Homo sapien
gtagaaaacattatgtgtctcagtt

SEQ ID NO: 2147038 - DNA, 25 bp, Homo sapien
cagtttggctgttattgacttctac

SEQ ID NO: 2147039 - DNA, 25 bp, Homo sapien
caccatgccttattttagacaagaa

SEQ ID NO: 2147040 - DNA, 25 bp, Homo sapien
ggcctttctaagaagcttacagatg

SEQ ID NO: 2147041 - DNA, 25 bp, Homo sapien
gctgatactatcataccataaatct

SEQ ID NO: 2147042 - DNA, 25 bp, Homo sapien
taaatggcttgaaacttgcagctga

SEQ ID NO: 2147043 - DNA, 25 bp, Homo sapien
gaaagccagggcaccaagaagatag

SEQ ID NO: 2147044 - DNA, 25 bp, Homo sapien
gaaggaaagccagggcaccaagaag

SEQ ID NO: 2147045 - DNA, 25 bp, Homo sapien
gagaaggaaagccagggcaccaaga

SEQ ID NO: 2147046 - DNA, 25 bp, Homo sapien
ctaagagaaggaaagccagggcacc

SEQ ID NO: 2147047 - DNA, 25 bp, Homo sapien
caaacttgccgaatcaacctgtaga

SEQ ID NO: 2147048 - DNA, 25 bp, Homo sapien
tagtttactggctcttcagagacca

SEQ ID NO: 2147049 - DNA, 25 bp, Homo sapien
ggctcttgttcaaatgtaaatcccc

SEQ ID NO: 2147050 - DNA, 25 bp, Homo sapien
tcaagttgcaaattgatgtccctcc

SEQ ID NO: 2147051 - DNA, 25 bp, Homo sapien
gattctcacatttagcctcttggac

SEQ ID NO: 2147052 - DNA, 25 bp, Homo sapien
tctggattctcacatttagcctctt

SEQ ID NO: 2147053 - DNA, 25 bp, Homo sapien
tggattctcacatttagcctcttgg

SEQ ID NO: 2147054 - DNA, 25 bp, Homo sapien
ttctggattctcacatttagcctct

SEQ ID NO: 2147055 - DNA, 25 bp, Homo sapien
tgttttgactcttattctgactgtg

SEQ ID NO: 2147056 - DNA, 25 bp, Homo sapien
tgtcatcctcatagcataacttatt

SEQ ID NO: 2147057 - DNA, 25 bp, Homo sapien
ggctccaattactccagagtttgtc

SEQ ID NO: 2147058 - DNA, 25 bp, Homo sapien
tctgactgtgttcaaagtatcagga

SEQ ID NO: 2147059 - DNA, 25 bp, Homo sapien
cctcttgggtagccaagaccacaag

SEQ ID NO: 2147060 - DNA, 25 bp, Homo sapien
gcctcttgggtagccaagaccacaa

SEQ ID NO: 2147061 - DNA, 25 bp, Homo sapien
tgcctcttgggtagccaagaccaca

SEQ ID NO: 2147062 - DNA, 25 bp, Homo sapien
gggtagccaagaccacaagcgtgca

SEQ ID NO: 2147063 - DNA, 25 bp, Homo sapien
aggatactagtcattagattaactg

SEQ ID NO: 2147064 - DNA, 25 bp, Homo sapien
ctgtccactttaatccagcatgacc

SEQ ID NO: 2147065 - DNA, 25 bp, Homo sapien
ccttgttgttccttggttgtagctg

SEQ ID NO: 2147066 - DNA, 25 bp, Homo sapien
gtcattagattaactgtccacttta

SEQ ID NO: 2147067 - DNA, 25 bp, Homo sapien
ccccacccgctcaggtaaatcagaa

SEQ ID NO: 2147068 - DNA, 25 bp, Homo sapien
caggggatgctcatggggtgggttt

SEQ ID NO: 2147069 - DNA, 25 bp, Homo sapien
tttccccacccgctcaggtaaatca

SEQ ID NO: 2147070 - DNA, 25 bp, Homo sapien
gaggggcccagccacgggaggcctc

SEQ ID NO: 2147071 - DNA, 25 bp, Homo sapien
agaagagctgcagcctaatgctggc

SEQ ID NO: 2147072 - DNA, 25 bp, Homo sapien
gggtcgccggtgtagttgtactcca

SEQ ID NO: 2147073 - DNA, 25 bp, Homo sapien
gccaggcccacgtagaagaagagct

SEQ ID NO: 2147074 - DNA, 25 bp, Homo sapien
taatgctggccaacagcagcggttg

SEQ ID NO: 2147075 - DNA, 25 bp, Homo sapien
cagatgggcagtggcacacagccct

SEQ ID NO: 2147076 - DNA, 25 bp, Homo sapien
tcagcacgtagtaggggtacacagg

SEQ ID NO: 2147077 - DNA, 25 bp, Homo sapien
ggtcagcacgtagtaggggtacaca

SEQ ID NO: 2147078 - DNA, 25 bp, Homo sapien
cgcatgagcagatgggcagtggcac

SEQ ID NO: 2147079 - DNA, 25 bp, Homo sapien
cattgactggatggtgcagcgtgct

SEQ ID NO: 2147080 - DNA, 25 bp, Homo sapien
actggatggtgcagcgtgctgggca

SEQ ID NO: 2147081 - DNA, 25 bp, Homo sapien
tcattgactggatggtgcagcgtgc

SEQ ID NO: 2147082 - DNA, 25 bp, Homo sapien
ttgactggatggtgcagcgtgctgg

SEQ ID NO: 2147083 - DNA, 25 bp, Homo sapien
tagcgcggcacctccacgtagggct

SEQ ID NO: 2147084 - DNA, 25 bp, Homo sapien
ggtgcagtgcggtagcgcggcacct

SEQ ID NO: 2147085 - DNA, 25 bp, Homo sapien
ctaccgggtgatgcaggtgcagtgc

SEQ ID NO: 2147086 - DNA, 25 bp, Homo sapien
tgacattgcagggtgcacgatgggc

SEQ ID NO: 2147087 - DNA, 25 bp, Homo sapien
tgccgttgaccagtggtgggttgca

SEQ ID NO: 2147088 - DNA, 25 bp, Homo sapien
ccgttgaccagtggtgggttgcaga

SEQ ID NO: 2147089 - DNA, 25 bp, Homo sapien
gccgttgaccagtggtgggttgcag

SEQ ID NO: 2147090 - DNA, 25 bp, Homo sapien
cgttgaccagtggtgggttgcagaa

SEQ ID NO: 2147091 - DNA, 25 bp, Homo sapien
ttgtcgtagaccagccagcgccagt

SEQ ID NO: 2147092 - DNA, 25 bp, Homo sapien
gtagaccagccagcgccagttgggc

SEQ ID NO: 2147093 - DNA, 25 bp, Homo sapien
ggtgctgtgccatggaaggccagtg

SEQ ID NO: 2147094 - DNA, 25 bp, Homo sapien
gctgagcttgtcgtagaccagccag

SEQ ID NO: 2147095 - DNA, 25 bp, Homo sapien
tacagcttgcggaacagcttgcgga

SEQ ID NO: 2147096 - DNA, 25 bp, Homo sapien
cttgcggaacagcttgcggaacgtg

SEQ ID NO: 2147097 - DNA, 25 bp, Homo sapien
atgtgcccgtacagcttgcggaaca

SEQ ID NO: 2147098 - DNA, 25 bp, Homo sapien
cccgtacagcttgcggaacagcttg

SEQ ID NO: 2147099 - DNA, 25 bp, Homo sapien
tgttgacacagtagacacaccgcgg

SEQ ID NO: 2147100 - DNA, 25 bp, Homo sapien
gtaggtgatgttgacacagtagaca

SEQ ID NO: 2147101 - DNA, 25 bp, Homo sapien
gatgttgacacagtagacacaccgc

SEQ ID NO: 2147102 - DNA, 25 bp, Homo sapien
ggtgatgttgacacagtagacacac

SEQ ID NO: 2147103 - DNA, 25 bp, Homo sapien
acataggcgatgcacaggaaggggt

SEQ ID NO: 2147104 - DNA, 25 bp, Homo sapien
gggagctgaccaccacataggcgat

SEQ ID NO: 2147105 - DNA, 25 bp, Homo sapien
accacataggcgatgcacaggaagg

SEQ ID NO: 2147106 - DNA, 25 bp, Homo sapien
gagggagctgaccaccacataggcg

SEQ ID NO: 2147107 - DNA, 25 bp, Homo sapien
ctggtaggtcctggtagctaatgta

SEQ ID NO: 2147108 - DNA, 25 bp, Homo sapien
tctggtaggtcctggtagctaatgt

SEQ ID NO: 2147109 - DNA, 25 bp, Homo sapien
tggtaggtcctggtagctaatgtag

SEQ ID NO: 2147110 - DNA, 25 bp, Homo sapien
caggagtactatgattgcacctgcg

SEQ ID NO: 2147111 - DNA, 25 bp, Homo sapien
tatgtagagtgtggaattgcgcttc

SEQ ID NO: 2147112 - DNA, 25 bp, Homo sapien
gcacctgcgacgatgactggaacaa

SEQ ID NO: 2147113 - DNA, 25 bp, Homo sapien
caatgagtaacatggttatgtagag

SEQ ID NO: 2147114 - DNA, 25 bp, Homo sapien
aggatcaggaattggagggaatata

SEQ ID NO: 2147115 - DNA, 25 bp, Homo sapien
gatcaggaattggagggaatataat

SEQ ID NO: 2147116 - DNA, 25 bp, Homo sapien
attctggtctccaaacatttcttta

SEQ ID NO: 2147117 - DNA, 25 bp, Homo sapien
tcattctggtctccaaacatttctt

SEQ ID NO: 2147118 - DNA, 25 bp, Homo sapien
agcctcccaaagtgacaattatttt

SEQ ID NO: 2147119 - DNA, 25 bp, Homo sapien
ttggtttgcttctcatagatgtcgt

SEQ ID NO: 2147120 - DNA, 25 bp, Homo sapien
ttttctatcagcactacagagtcgg

SEQ ID NO: 2147121 - DNA, 25 bp, Homo sapien
tcagcactacagagtcggtttcctc

SEQ ID NO: 2147122 - DNA, 25 bp, Homo sapien
gcttctcatagatgtcgtacttctt

SEQ ID NO: 2147123 - DNA, 25 bp, Homo sapien
tagatccctcaggaagttgtcacaa

SEQ ID NO: 2147124 - DNA, 25 bp, Homo sapien
tttgtcccctagtttgaagcctgct

SEQ ID NO: 2147125 - DNA, 25 bp, Homo sapien
tcggtgcgcgactcaacataaagac

SEQ ID NO: 2147126 - DNA, 25 bp, Homo sapien
aaagacctgtggctcttatgagctg

SEQ ID NO: 2147127 - DNA, 25 bp, Homo sapien
tgttaaaagagttttaatagccaca

SEQ ID NO: 2147128 - DNA, 25 bp, Homo sapien
tcctggacccatcttgtaaagaaag

SEQ ID NO: 2147129 - DNA, 25 bp, Homo sapien
tggttgaaactctaatacccaagga

SEQ ID NO: 2147130 - DNA, 25 bp, Homo sapien
tgttctacgtgaagataccacctca

SEQ ID NO: 2147131 - DNA, 25 bp, Homo sapien
tgctgaaaaccctcacatggaagtt

SEQ ID NO: 2147132 - DNA, 25 bp, Homo sapien
ggcaccatgcttctacacggccatg

SEQ ID NO: 2147133 - DNA, 25 bp, Homo sapien
tgtacccaaacctgtagagagtgag

SEQ ID NO: 2147134 - DNA, 25 bp, Homo sapien
tgccattgtcatgaaccccagcttc

SEQ ID NO: 2147135 - DNA, 25 bp, Homo sapien
aatgagcctactaatttcccacagg

SEQ ID NO: 2147136 - DNA, 25 bp, Homo sapien
ttactcaagctttcctataagaagt

SEQ ID NO: 2147137 - DNA, 25 bp, Homo sapien
tttactcaagctttcctataagaag

SEQ ID NO: 2147138 - DNA, 25 bp, Homo sapien
tattttactcaagctttcctataag

SEQ ID NO: 2147139 - DNA, 25 bp, Homo sapien
ttttactcaagctttcctataagaa

SEQ ID NO: 2147140 - DNA, 25 bp, Homo sapien
taacctgctaatatattcccttgtg

SEQ ID NO: 2147141 - DNA, 25 bp, Homo sapien
gtcccttcaagtgctgcttacaaag

SEQ ID NO: 2147142 - DNA, 25 bp, Homo sapien
ccactgcgtccagtcaaaaactgac

SEQ ID NO: 2147143 - DNA, 25 bp, Homo sapien
tcagaaaacataggcacaccggaac

SEQ ID NO: 2147144 - DNA, 25 bp, Homo sapien
gcatgccaagatttagctacagtat

SEQ ID NO: 2147145 - DNA, 25 bp, Homo sapien
gcataatgtgctattcatgtgagca

SEQ ID NO: 2147146 - DNA, 25 bp, Homo sapien
catgtgagcataagttacaccttca

SEQ ID NO: 2147147 - DNA, 25 bp, Homo sapien
aatatctagcacatccaaatgtcag

SEQ ID NO: 2147148 - DNA, 25 bp, Homo sapien
cctgcatgataaaagtgagaccctg

SEQ ID NO: 2147149 - DNA, 25 bp, Homo sapien
tatgtgcccatagtccgagctaatt

SEQ ID NO: 2147150 - DNA, 25 bp, Homo sapien
tgaagccgcggacccacgccgtgac

SEQ ID NO: 2147151 - DNA, 25 bp, Homo sapien
gcaacaacacatcggaataatgctt

SEQ ID NO: 2147152 - DNA, 25 bp, Homo sapien
tagaagcaacaacacatcggaataa

SEQ ID NO: 2147153 - DNA, 25 bp, Homo sapien
aaattttaatcatgtgtgaagatta

SEQ ID NO: 2147154 - DNA, 25 bp, Homo sapien
acaacacatcggaataatgctttca

SEQ ID NO: 2147155 - DNA, 25 bp, Homo sapien
cagcaacgctaggtggtaggtcctt

SEQ ID NO: 2147156 - DNA, 25 bp, Homo sapien
catgggagaaaaaagatacgaaaat

SEQ ID NO: 2147157 - DNA, 25 bp, Homo sapien
cagtccaggatgtccaatgtacaac

SEQ ID NO: 2147158 - DNA, 25 bp, Homo sapien
gagcctcaggtagatcaagttaaga

SEQ ID NO: 2147159 - DNA, 25 bp, Homo sapien
agaaacatcagctctgtgggacaat

SEQ ID NO: 2147160 - DNA, 25 bp, Homo sapien
gttggtttcatagtcacatggtctg

SEQ ID NO: 2147161 - DNA, 25 bp, Homo sapien
tgggttggtttcatagtcacatggt

SEQ ID NO: 2147162 - DNA, 25 bp, Homo sapien
catcagctctgtgggacaattgggt

SEQ ID NO: 2147163 - DNA, 25 bp, Homo sapien
tgcagcagccaaggagacaagagat

SEQ ID NO: 2147164 - DNA, 25 bp, Homo sapien
tcagatcccggatactttctgggag

SEQ ID NO: 2147165 - DNA, 25 bp, Homo sapien
tggcttctcactgtccggatgtggt

SEQ ID NO: 2147166 - DNA, 25 bp, Homo sapien
caggaagcagttggtttgtcagcca

SEQ ID NO: 2147167 - DNA, 25 bp, Homo sapien
tatttttctgggatagaggcccaac

SEQ ID NO: 2147168 - DNA, 25 bp, Homo sapien
taaacaaactgccactctttctcag

SEQ ID NO: 2147169 - DNA, 25 bp, Homo sapien
aacagcaggagttccatctaggtcc

SEQ ID NO: 2147170 - DNA, 25 bp, Homo sapien
cccaacagtacaattgctggaccat

SEQ ID NO: 2147171 - DNA, 25 bp, Homo sapien
gcacaaagtggaatagcatagacac

SEQ ID NO: 2147172 - DNA, 25 bp, Homo sapien
cgatctatattcgtcaaaagccttc

SEQ ID NO: 2147173 - DNA, 25 bp, Homo sapien
acactgatcataggaatgctgctcc

SEQ ID NO: 2147174 - DNA, 25 bp, Homo sapien
tctatattcgtcaaaagccttcttg

SEQ ID NO: 2147175 - DNA, 25 bp, Homo sapien
gcgggaagagcattagcacgtgcat

SEQ ID NO: 2147176 - DNA, 25 bp, Homo sapien
gggcgggaagagcattagcacgtgc

SEQ ID NO: 2147177 - DNA, 25 bp, Homo sapien
ggcgggaagagcattagcacgtgca

SEQ ID NO: 2147178 - DNA, 25 bp, Homo sapien
ctgagacaaaagagcgtgacgagcg

SEQ ID NO: 2147179 - DNA, 25 bp, Homo sapien
tccgctggtggacagcagatgctcc

SEQ ID NO: 2147180 - DNA, 25 bp, Homo sapien
ccttgcaggcggcaaagaactgaag

SEQ ID NO: 2147181 - DNA, 25 bp, Homo sapien
ctagtgcggccaatcagcgaagtgc

SEQ ID NO: 2147182 - DNA, 25 bp, Homo sapien
tcaagttcagatgcggctttgatgg

SEQ ID NO: 2147183 - DNA, 25 bp, Homo sapien
caagttcagatgcggctttgatggc

SEQ ID NO: 2147184 - DNA, 25 bp, Homo sapien
agtgccctccgtgagaaagctcctc

SEQ ID NO: 2147185 - DNA, 25 bp, Homo sapien
ctctccggggtacggtcaacctctg

SEQ ID NO: 2147186 - DNA, 25 bp, Homo sapien
caagagcgcgtctttatttcacttc

SEQ ID NO: 2147187 - DNA, 25 bp, Homo sapien
actctgaaacaagagcgcgtcttta

SEQ ID NO: 2147188 - DNA, 25 bp, Homo sapien
agagctacccgatgcctgcgtgcta

SEQ ID NO: 2147189 - DNA, 25 bp, Homo sapien
cagtcctccaagagggacggtaact

SEQ ID NO: 2147190 - DNA, 25 bp, Homo sapien
gagggacggtaactgttgcttcaaa

SEQ ID NO: 2147191 - DNA, 25 bp, Homo sapien
gctagcaaggtgctttttgcagcca

SEQ ID NO: 2147192 - DNA, 25 bp, Homo sapien
ggaggtggctctgccttcctatctc

SEQ ID NO: 2147193 - DNA, 25 bp, Homo sapien
gctctgccttcctatctcagcaggg

SEQ ID NO: 2147194 - DNA, 25 bp, Homo sapien
cttaatctgcaggtgggagaggaga

SEQ ID NO: 2147195 - DNA, 25 bp, Homo sapien
gagaggaggtggctctgccttccta

SEQ ID NO: 2147196 - DNA, 25 bp, Homo sapien
taagaagatgcctaggctttttaga

SEQ ID NO: 2147197 - DNA, 25 bp, Homo sapien
aagaagatgcctaggctttttagaa

SEQ ID NO: 2147198 - DNA, 25 bp, Homo sapien
agaagatgcctaggctttttagaaa

SEQ ID NO: 2147199 - DNA, 25 bp, Homo sapien
tataagaagatgcctaggcttttta

SEQ ID NO: 2147200 - DNA, 25 bp, Homo sapien
ttaagtctgagtcggaggtccctac

SEQ ID NO: 2147201 - DNA, 25 bp, Homo sapien
cattgactcagacctttttggacgc

SEQ ID NO: 2147202 - DNA, 25 bp, Homo sapien
tgccatgctggccattataggaccg

SEQ ID NO: 2147203 - DNA, 25 bp, Homo sapien
ggctgttaccgacacgtgcaatgat

SEQ ID NO: 2147204 - DNA, 25 bp, Homo sapien
cgttattcttatagccagaaccacc

SEQ ID NO: 2147205 - DNA, 25 bp, Homo sapien
catctccccaggaccgttattctta

SEQ ID NO: 2147206 - DNA, 25 bp, Homo sapien
tccccaggaccgttattcttatagc

SEQ ID NO: 2147207 - DNA, 25 bp, Homo sapien
ccctggaattgtggggggaatcaat

SEQ ID NO: 2147208 - DNA, 25 bp, Homo sapien
cagagaagtcattgtattcgccagg

SEQ ID NO: 2147209 - DNA, 25 bp, Homo sapien
ttcctcaccacaatacgaacagcgg

SEQ ID NO: 2147210 - DNA, 25 bp, Homo sapien
tctcagtatgggtcagctcctggag

SEQ ID NO: 2147211 - DNA, 25 bp, Homo sapien
gctcctggagagtgatgatcaaatt

SEQ ID NO: 2147212 - DNA, 25 bp, Homo sapien
cctccaatgtgctggtatccaagac

SEQ ID NO: 2147213 - DNA, 25 bp, Homo sapien
tccaccccaaaagatagccgctttg

SEQ ID NO: 2147214 - DNA, 25 bp, Homo sapien
aaaacagacccgtaggctgcaggga

SEQ ID NO: 2147215 - DNA, 25 bp, Homo sapien
aaggacagaggtcaggctatctccc

SEQ ID NO: 2147216 - DNA, 25 bp, Homo sapien
tgcacaagtggtccctcttggctct

SEQ ID NO: 2147217 - DNA, 25 bp, Homo sapien
gatgcaaggagtggccctcttgagt

SEQ ID NO: 2147218 - DNA, 25 bp, Homo sapien
gggtgcacaagtggtccctcttggc

SEQ ID NO: 2147219 - DNA, 25 bp, Homo sapien
tgtctgggggtgcacaagtggtccc

SEQ ID NO: 2147220 - DNA, 25 bp, Homo sapien
catgcgactgctcccggacttcagt

SEQ ID NO: 2147221 - DNA, 25 bp, Homo sapien
cccgggcatggcgaaacaagcaggc

SEQ ID NO: 2147222 - DNA, 25 bp, Homo sapien
gcctcctggtgaccgggaagctcat

SEQ ID NO: 2147223 - DNA, 25 bp, Homo sapien
ggacttcagtcgctttcgccgctgc

SEQ ID NO: 2147224 - DNA, 25 bp, Homo sapien
cagtggggatagaaaacagtgcagc

SEQ ID NO: 2147225 - DNA, 25 bp, Homo sapien
gggatagaaaacagtgcagccactt

SEQ ID NO: 2147226 - DNA, 25 bp, Homo sapien
gatagaaaacagtgcagccactttg

SEQ ID NO: 2147227 - DNA, 25 bp, Homo sapien
cactttggaaagcaatccagaagtt

SEQ ID NO: 2147228 - DNA, 25 bp, Homo sapien
aggggggagcctcctttcttagatg

SEQ ID NO: 2147229 - DNA, 25 bp, Homo sapien
gcctcctttcttagatgttttcctg

SEQ ID NO: 2147230 - DNA, 25 bp, Homo sapien
ctgcaagggaaggggggagcctcct

SEQ ID NO: 2147231 - DNA, 25 bp, Homo sapien
ggagcctcctttcttagatgttttc

SEQ ID NO: 2147232 - DNA, 25 bp, Homo sapien
tccagtatcagattgggcaagttct

SEQ ID NO: 2147233 - DNA, 25 bp, Homo sapien
gggcaagttcttgggctgagttcct

SEQ ID NO: 2147234 - DNA, 25 bp, Homo sapien
tccgaccagcgcttagatgtatact

SEQ ID NO: 2147235 - DNA, 25 bp, Homo sapien
tactgccgatatttgcctctctagt

SEQ ID NO: 2147236 - DNA, 25 bp, Homo sapien
tggtagcctgatgcgttcatggatg

SEQ ID NO: 2147237 - DNA, 25 bp, Homo sapien
tcacatcgggctttggtagcctgat

SEQ ID NO: 2147238 - DNA, 25 bp, Homo sapien
catggatgcaacagagatacaccta

SEQ ID NO: 2147239 - DNA, 25 bp, Homo sapien
gcctgatgcgttcatggatgcaaca

SEQ ID NO: 2147240 - DNA, 25 bp, Homo sapien
ttactttaggctgaggaaatccagg

SEQ ID NO: 2147241 - DNA, 25 bp, Homo sapien
aaaagagggattactttaggctgag

SEQ ID NO: 2147242 - DNA, 25 bp, Homo sapien
gagggattactttaggctgaggaaa

SEQ ID NO: 2147243 - DNA, 25 bp, Homo sapien
gattactttaggctgaggaaatcca

SEQ ID NO: 2147244 - DNA, 25 bp, Homo sapien
catgggcttccagttctctttttct

SEQ ID NO: 2147245 - DNA, 25 bp, Homo sapien
ttttctttgctacggtgtccttgga

SEQ ID NO: 2147246 - DNA, 25 bp, Homo sapien
ctctaggatgaagcgattaaggcac

SEQ ID NO: 2147247 - DNA, 25 bp, Homo sapien
gatgaagcgattaaggcacatgggc

SEQ ID NO: 2147248 - DNA, 25 bp, Homo sapien
tacacatgctggaggtaaggaagct

SEQ ID NO: 2147249 - DNA, 25 bp, Homo sapien
caagtcagacagttatgcacagagt

SEQ ID NO: 2147250 - DNA, 25 bp, Homo sapien
taaagccaggcacaataaaacgagg

SEQ ID NO: 2147251 - DNA, 25 bp, Homo sapien
cactatgagtcaggtcaggagcagc

SEQ ID NO: 2147252 - DNA, 25 bp, Homo sapien
gaaggcgaaggaagagcaagtaatt

SEQ ID NO: 2147253 - DNA, 25 bp, Homo sapien
gcgaaggaagagcaagtaatttcac

SEQ ID NO: 2147254 - DNA, 25 bp, Homo sapien
agtatgtgatgacggcaactaaggg

SEQ ID NO: 2147255 - DNA, 25 bp, Homo sapien
accagatctcacaagtatgtgatga

SEQ ID NO: 2147256 - DNA, 25 bp, Homo sapien
tattctctcacgctgaccagtcttg

SEQ ID NO: 2147257 - DNA, 25 bp, Homo sapien
catggacccggctgtcatggacact

SEQ ID NO: 2147258 - DNA, 25 bp, Homo sapien
cagggtgcccacagagacgtggtca

SEQ ID NO: 2147259 - DNA, 25 bp, Homo sapien
tcttggccttgagctgacttaacag

SEQ ID NO: 2147260 - DNA, 25 bp, Homo sapien
ctgaccacggcaccccagtggaaga

SEQ ID NO: 2147261 - DNA, 25 bp, Homo sapien
tgtgtgcttgccaccagcgacacca

SEQ ID NO: 2147262 - DNA, 25 bp, Homo sapien
ggaagagacgctgtgtgcttgccac

SEQ ID NO: 2147263 - DNA, 25 bp, Homo sapien
ctctccaactatgccggctggggga

SEQ ID NO: 2147264 - DNA, 25 bp, Homo sapien
tcactaaagcctgacagtgtctggt

SEQ ID NO: 2147265 - DNA, 25 bp, Homo sapien
agaggctgcagtgtccccgattgga

SEQ ID NO: 2147266 - DNA, 25 bp, Homo sapien
tggtcccagctagagacgtcactga

SEQ ID NO: 2147267 - DNA, 25 bp, Homo sapien
ggccaacccttgagagggaaaatca

SEQ ID NO: 2147268 - DNA, 25 bp, Homo sapien
gggcgccacatggacacatctgcca

SEQ ID NO: 2147269 - DNA, 25 bp, Homo sapien
catggccttcatgtacagcgatggc

SEQ ID NO: 2147270 - DNA, 25 bp, Homo sapien
cgtggccacaccgagctggacatgg

SEQ ID NO: 2147271 - DNA, 25 bp, Homo sapien
aacgcaggccgccttgggcatcctg

SEQ ID NO: 2147272 - DNA, 25 bp, Homo sapien
gtctatgctatcttgtccagactgg

SEQ ID NO: 2147273 - DNA, 25 bp, Homo sapien
gaagtggaagaccaatcctgcattg

SEQ ID NO: 2147274 - DNA, 25 bp, Homo sapien
aagcagggagaaatgagtctatgct

SEQ ID NO: 2147275 - DNA, 25 bp, Homo sapien
tggaagaccaatcctgcattggtgt

SEQ ID NO: 2147276 - DNA, 25 bp, Homo sapien
cactggtatctggaggcccaagtta

SEQ ID NO: 2147277 - DNA, 25 bp, Homo sapien
tccttgtaggctggtagatacccca

SEQ ID NO: 2147278 - DNA, 25 bp, Homo sapien
tgtaccatgtcagactggcctggag

SEQ ID NO: 2147279 - DNA, 25 bp, Homo sapien
tgtacccggcacaggtccttgtagg

SEQ ID NO: 2147280 - DNA, 25 bp, Homo sapien
ctggatgcagtgtgcaaagattgtc

SEQ ID NO: 2147281 - DNA, 25 bp, Homo sapien
tccttaggacctccgtgatggcttg

SEQ ID NO: 2147282 - DNA, 25 bp, Homo sapien
tcccttccttatagaaactggcagt

SEQ ID NO: 2147283 - DNA, 25 bp, Homo sapien
ggcagtgttcaatacttgacaattg

SEQ ID NO: 2147284 - DNA, 25 bp, Homo sapien
attgaccgtgtcatcgggtccacca

SEQ ID NO: 2147285 - DNA, 25 bp, Homo sapien
ttgaccgtgtcatcgggtccaccac

SEQ ID NO: 2147286 - DNA, 25 bp, Homo sapien
cacgtctggtactcttctcaattac

SEQ ID NO: 2147287 - DNA, 25 bp, Homo sapien
agaccttggatcacaaaccacacgt

SEQ ID NO: 2147288 - DNA, 25 bp, Homo sapien
cacaaaccacacgtctggtactctt

SEQ ID NO: 2147289 - DNA, 25 bp, Homo sapien
ctcagaccttggatcacaaaccaca

SEQ ID NO: 2147290 - DNA, 25 bp, Homo sapien
gcctggccatacacctcgctatttt

SEQ ID NO: 2147291 - DNA, 25 bp, Homo sapien
tgcctggccatacacctcgctattt

SEQ ID NO: 2147292 - DNA, 25 bp, Homo sapien
gtgcctggccatacacctcgctatt

SEQ ID NO: 2147293 - DNA, 25 bp, Homo sapien
tgtcaggttgccatgacagagctgt

SEQ ID NO: 2147294 - DNA, 25 bp, Homo sapien
tcctcttgtataccgagaagatcac

SEQ ID NO: 2147295 - DNA, 25 bp, Homo sapien
gttcctctacacataaaagccgcag

SEQ ID NO: 2147296 - DNA, 25 bp, Homo sapien
gattcagataaactgcaggtcaagt

SEQ ID NO: 2147297 - DNA, 25 bp, Homo sapien
tcggcatacactcagctctccatga

SEQ ID NO: 2147298 - DNA, 25 bp, Homo sapien
ggtctcaagagcccccatcggcata

SEQ ID NO: 2147299 - DNA, 25 bp, Homo sapien
cagctctccatgacgtgaggtgggt

SEQ ID NO: 2147300 - DNA, 25 bp, Homo sapien
tgggggagcatgggccttcatcttc

SEQ ID NO: 2147301 - DNA, 25 bp, Homo sapien
agggccctgtctttggggtcttctg

SEQ ID NO: 2147302 - DNA, 25 bp, Homo sapien
tgagggccctgtctttggggtcttc

SEQ ID NO: 2147303 - DNA, 25 bp, Homo sapien
ctgagggccctgtctttggggtctt

SEQ ID NO: 2147304 - DNA, 25 bp, Homo sapien
cctgagggccctgtctttggggtct

SEQ ID NO: 2147305 - DNA, 25 bp, Homo sapien
gaccaaatgtcaagggcgtggtggg

SEQ ID NO: 2147306 - DNA, 25 bp, Homo sapien
tgaagaccaaatgtcaagggcgtgg

SEQ ID NO: 2147307 - DNA, 25 bp, Homo sapien
ctgaagaccaaatgtcaagggcgtg

SEQ ID NO: 2147308 - DNA, 25 bp, Homo sapien
aagaccaaatgtcaagggcgtggtg

SEQ ID NO: 2147309 - DNA, 25 bp, Homo sapien
cacgagctgctcagccttactattg

SEQ ID NO: 2147310 - DNA, 25 bp, Homo sapien
gagctgctcagccttactattgctt

SEQ ID NO: 2147311 - DNA, 25 bp, Homo sapien
acgagctgctcagccttactattgc

SEQ ID NO: 2147312 - DNA, 25 bp, Homo sapien
cgagctgctcagccttactattgct

SEQ ID NO: 2147313 - DNA, 25 bp, Homo sapien
taagtggacttaatgcttccccacc

SEQ ID NO: 2147314 - DNA, 25 bp, Homo sapien
cctagggattgtcaggttctggaaa

SEQ ID NO: 2147315 - DNA, 25 bp, Homo sapien
tatcctatatcacctagcactgtgc

SEQ ID NO: 2147316 - DNA, 25 bp, Homo sapien
tgttaggaccataactacagggcga

SEQ ID NO: 2147317 - DNA, 25 bp, Homo sapien
atatatgtgtgtgtactgtcgtgta

SEQ ID NO: 2147318 - DNA, 25 bp, Homo sapien
atatgtgtgtgtactgtcgtgtatg

SEQ ID NO: 2147319 - DNA, 25 bp, Homo sapien
atatatatgtgtgtgtactgtcgtg

SEQ ID NO: 2147320 - DNA, 25 bp, Homo sapien
tgtgtgtgtactgtcgtgtatgtgt

SEQ ID NO: 2147321 - DNA, 25 bp, Homo sapien
ggtacaactgggcacgagcctcagc

SEQ ID NO: 2147322 - DNA, 25 bp, Homo sapien
gggtggccaactgcacactctttgt

SEQ ID NO: 2147323 - DNA, 25 bp, Homo sapien
cgacggtgtcctacacacttcctga

SEQ ID NO: 2147324 - DNA, 25 bp, Homo sapien
gagcctcagcgcctggtttacaatg

SEQ ID NO: 2147325 - DNA, 25 bp, Homo sapien
acagcccagtggcagaccgaatagc

SEQ ID NO: 2147326 - DNA, 25 bp, Homo sapien
agaaagtccgcgaatcccggcacag

SEQ ID NO: 2147327 - DNA, 25 bp, Homo sapien
tagcctccaggtttgtcgctcctga

SEQ ID NO: 2147328 - DNA, 25 bp, Homo sapien
cgcgagctgagagcgctattcagga

SEQ ID NO: 2147329 - DNA, 25 bp, Homo sapien
ctcgaggtgcacagtccgcagggtc

SEQ ID NO: 2147330 - DNA, 25 bp, Homo sapien
gtcttccgggacgcctaagactctc

SEQ ID NO: 2147331 - DNA, 25 bp, Homo sapien
tctgccagccgctgaccagcggccc

SEQ ID NO: 2147332 - DNA, 25 bp, Homo sapien
acagtccgcagggtcttccgggacg

SEQ ID NO: 2147333 - DNA, 25 bp, Homo sapien
gggagaaactcagtgtcttctcttg

SEQ ID NO: 2147334 - DNA, 25 bp, Homo sapien
ttctcttgggcttctcagtctccaa

SEQ ID NO: 2147335 - DNA, 25 bp, Homo sapien
gaaactcagtgtcttctcttgggct

SEQ ID NO: 2147336 - DNA, 25 bp, Homo sapien
gtggggagaaactcagtgtcttctc

SEQ ID NO: 2147337 - DNA, 25 bp, Homo sapien
cgccacgctgttcattggccggcgg

SEQ ID NO: 2147338 - DNA, 25 bp, Homo sapien
ccacgctgttcattggccggcggcg

SEQ ID NO: 2147339 - DNA, 25 bp, Homo sapien
tttgtgtttacacttcgccttattc

SEQ ID NO: 2147340 - DNA, 25 bp, Homo sapien
gtgtttacacttcgccttattcctc

SEQ ID NO: 2147341 - DNA, 25 bp, Homo sapien
gcctccgggagctccatgccggccg

SEQ ID NO: 2147342 - DNA, 25 bp, Homo sapien
ccgccgccatgccaccgagctcctg

SEQ ID NO: 2147343 - DNA, 25 bp, Homo sapien
cgccgccatgccaccgagctcctga

SEQ ID NO: 2147344 - DNA, 25 bp, Homo sapien
gccgccatgccaccgagctcctgac

SEQ ID NO: 2147345 - DNA, 25 bp, Homo sapien
caccgccgccatgccaccgagctcc

SEQ ID NO: 2147346 - DNA, 25 bp, Homo sapien
ccggggacacgaagcaaggagtggc

SEQ ID NO: 2147347 - DNA, 25 bp, Homo sapien
gaccggggacacgaagcaaggagtg

SEQ ID NO: 2147348 - DNA, 25 bp, Homo sapien
ctagggaccggggacacgaagcaag

SEQ ID NO: 2147349 - DNA, 25 bp, Homo sapien
ggggacacgaagcaaggagtggcag

SEQ ID NO: 2147350 - DNA, 25 bp, Homo sapien
agggacacgggaggagacgaggcgt

SEQ ID NO: 2147351 - DNA, 25 bp, Homo sapien
ggaagagggacacgggaggagacga

SEQ ID NO: 2147352 - DNA, 25 bp, Homo sapien
agagggacacgggaggagacgaggc

SEQ ID NO: 2147353 - DNA, 25 bp, Homo sapien
aagagggacacgggaggagacgagg

SEQ ID NO: 2147354 - DNA, 25 bp, Homo sapien
gcaggactttgctctccggcgttga

SEQ ID NO: 2147355 - DNA, 25 bp, Homo sapien
ttgaggtccccggagactgctcttg

SEQ ID NO: 2147356 - DNA, 25 bp, Homo sapien
ccatgtctacttgggccgctgatgc

SEQ ID NO: 2147357 - DNA, 25 bp, Homo sapien
ctcagcgggcaagctcagcatctgt

SEQ ID NO: 2147358 - DNA, 25 bp, Homo sapien
gatagaaacccatgacatttccggc

SEQ ID NO: 2147359 - DNA, 25 bp, Homo sapien
agcgcctcgccttgcgggactttct

SEQ ID NO: 2147360 - DNA, 25 bp, Homo sapien
gagagctgtctatacacctcgaggg

SEQ ID NO: 2147361 - DNA, 25 bp, Homo sapien
acctcgagggcttcacggattcgcc

SEQ ID NO: 2147362 - DNA, 25 bp, Homo sapien
cacagtttacaaaaggtgtggccac

SEQ ID NO: 2147363 - DNA, 25 bp, Homo sapien
tcggttgccctcgtgccggagttgc

SEQ ID NO: 2147364 - DNA, 25 bp, Homo sapien
catcaaggcggagagcttgaccccg

SEQ ID NO: 2147365 - DNA, 25 bp, Homo sapien
ctgagcaccacgttgactcgcagcg

SEQ ID NO: 2147366 - DNA, 25 bp, Homo sapien
acatgctcgtgggatggtttccgaa

SEQ ID NO: 2147367 - DNA, 25 bp, Homo sapien
aattcgggtgccctagtctagctgg

SEQ ID NO: 2147368 - DNA, 25 bp, Homo sapien
gcatctatttcagccgaggatcgtg

SEQ ID NO: 2147369 - DNA, 25 bp, Homo sapien
gattaaacacgtggagactccggcc

SEQ ID NO: 2147370 - DNA, 25 bp, Homo sapien
tgcttgcgtgcccattacttgctct

SEQ ID NO: 2147371 - DNA, 25 bp, Homo sapien
gatctgggatctagcttcctctgtg

SEQ ID NO: 2147372 - DNA, 25 bp, Homo sapien
ggtatggaatctgccttagagatct

SEQ ID NO: 2147373 - DNA, 25 bp, Homo sapien
gacaggagctagaagggtccccttc

SEQ ID NO: 2147374 - DNA, 25 bp, Homo sapien
tgagactccaaggtgaaataaatct

SEQ ID NO: 2147375 - DNA, 25 bp, Homo sapien
aatctgagaccgattgctataaagc

SEQ ID NO: 2147376 - DNA, 25 bp, Homo sapien
cccatcgggcggagcttacatgcta

SEQ ID NO: 2147377 - DNA, 25 bp, Homo sapien
tctgcatcatgcagtgcattctcat

SEQ ID NO: 2147378 - DNA, 25 bp, Homo sapien
ctcacaccactgagagctgtatcac

SEQ ID NO: 2147379 - DNA, 25 bp, Homo sapien
ggccaacccatatactctacctgct

SEQ ID NO: 2147380 - DNA, 25 bp, Homo sapien
ctgagagctgtatcacctgcaggat

SEQ ID NO: 2147381 - DNA, 25 bp, Homo sapien
accactgagagctgtatcacctgca

SEQ ID NO: 2147382 - DNA, 25 bp, Homo sapien
catcaagggatacacagtagagaaa

SEQ ID NO: 2147383 - DNA, 25 bp, Homo sapien
tttccatcaagggatacacagtaga

SEQ ID NO: 2147384 - DNA, 25 bp, Homo sapien
tccatcaagggatacacagtagaga

SEQ ID NO: 2147385 - DNA, 25 bp, Homo sapien
cttgcctagggtggctaaggcttgg

SEQ ID NO: 2147386 - DNA, 25 bp, Homo sapien
cactaaaggaagctccagtcccgtg

SEQ ID NO: 2147387 - DNA, 25 bp, Homo sapien
tgtttggagatccactaaaggaagc

SEQ ID NO: 2147388 - DNA, 25 bp, Homo sapien
tcctgcagtgtttggagatccacta

SEQ ID NO: 2147389 - DNA, 25 bp, Homo sapien
cagtgtttggagatccactaaagga

SEQ ID NO: 2147390 - DNA, 25 bp, Homo sapien
acagaagacttcactacttaagttt

SEQ ID NO: 2147391 - DNA, 25 bp, Homo sapien
ccgggactgatggtgaaaagaaact

SEQ ID NO: 2147392 - DNA, 25 bp, Homo sapien
caacagcttcaggatatcgggagaa

SEQ ID NO: 2147393 - DNA, 25 bp, Homo sapien
taacaaccttggtagattatggctg

SEQ ID NO: 2147394 - DNA, 25 bp, Homo sapien
tctagggtgaggtgccaacagcttc

SEQ ID NO: 2147395 - DNA, 25 bp, Homo sapien
acagccaaacgaagcgtcacgagcg

SEQ ID NO: 2147396 - DNA, 25 bp, Homo sapien
cacaaaacagccaaacgaagcgtca

SEQ ID NO: 2147397 - DNA, 25 bp, Homo sapien
aaacgaagcgtcacgagcgagctgg

SEQ ID NO: 2147398 - DNA, 25 bp, Homo sapien
aaacagccaaacgaagcgtcacgag

SEQ ID NO: 2147399 - DNA, 25 bp, Homo sapien
cttcaactcaactttctttccaaca

SEQ ID NO: 2147400 - DNA, 25 bp, Homo sapien
tcaaagaaaggtacaaatacctgtc

SEQ ID NO: 2147401 - DNA, 25 bp, Homo sapien
gggcctggaacccatctctcttgtg

SEQ ID NO: 2147402 - DNA, 25 bp, Homo sapien
cctctgccgggaaagccagggcctg

SEQ ID NO: 2147403 - DNA, 25 bp, Homo sapien
ctgcatttcagtccttttatgagag

SEQ ID NO: 2147404 - DNA, 25 bp, Homo sapien
tttcagtccttttatgagagcccag

SEQ ID NO: 2147405 - DNA, 25 bp, Homo sapien
catttcagtccttttatgagagccc

SEQ ID NO: 2147406 - DNA, 25 bp, Homo sapien
ttcagtccttttatgagagcccagg

SEQ ID NO: 2147407 - DNA, 25 bp, Homo sapien
gcaaagcaaagtttgggtggaaatc

SEQ ID NO: 2147408 - DNA, 25 bp, Homo sapien
aaggcattggccactcaggagtata

SEQ ID NO: 2147409 - DNA, 25 bp, Homo sapien
cactcaggagtatactgctttgcaa

SEQ ID NO: 2147410 - DNA, 25 bp, Homo sapien
gcaaagtttgggtggaaatccaatc

SEQ ID NO: 2147411 - DNA, 25 bp, Homo sapien
cccttcactttagctgggtccatca

SEQ ID NO: 2147412 - DNA, 25 bp, Homo sapien
cctcctgactagaacaatgtgggag

SEQ ID NO: 2147413 - DNA, 25 bp, Homo sapien
tgactagaacaatgtgggagctcca

SEQ ID NO: 2147414 - DNA, 25 bp, Homo sapien
actttagctgggtccatcagactgc

SEQ ID NO: 2147415 - DNA, 25 bp, Homo sapien
taggcatccccgtttcttcttggga

SEQ ID NO: 2147416 - DNA, 25 bp, Homo sapien
tggaggctttattaggcatccccgt

SEQ ID NO: 2147417 - DNA, 25 bp, Homo sapien
cttcttgggattcaatctggcaatg

SEQ ID NO: 2147418 - DNA, 25 bp, Homo sapien
agcagcttttggagaggtagcatcc

SEQ ID NO: 2147419 - DNA, 25 bp, Homo sapien
aatggggatgggggtagcaagaggc

SEQ ID NO: 2147420 - DNA, 25 bp, Homo sapien
tgcattcctagaatggggatggggg

SEQ ID NO: 2147421 - DNA, 25 bp, Homo sapien
tttcctcatcctgcattcctagaat

SEQ ID NO: 2147422 - DNA, 25 bp, Homo sapien
gggatgggggtagcaagaggctgac

SEQ ID NO: 2147423 - DNA, 25 bp, Homo sapien
tgagccaggccttcaaagctaaaac

SEQ ID NO: 2147424 - DNA, 25 bp, Homo sapien
tacagcaactcaatggactgagcca

SEQ ID NO: 2147425 - DNA, 25 bp, Homo sapien
gaaagatagcaagccacagctgctg

SEQ ID NO: 2147426 - DNA, 25 bp, Homo sapien
ttggcactgccaacctctcgtggaa

SEQ ID NO: 2147427 - DNA, 25 bp, Homo sapien
ctcatacatagagcgcattcaaggt

SEQ ID NO: 2147428 - DNA, 25 bp, Homo sapien
tgcaagtggtaaactgagagcaggt

SEQ ID NO: 2147429 - DNA, 25 bp, Homo sapien
tcaaggtcagatgcgtcgaaagatg

SEQ ID NO: 2147430 - DNA, 25 bp, Homo sapien
tttgtccccctgatcagtgggagga

SEQ ID NO: 2147431 - DNA, 25 bp, Homo sapien
tagcagaaaggtccagacaccagag

SEQ ID NO: 2147432 - DNA, 25 bp, Homo sapien
ccatgtgacaatcaacgttgtgatt

SEQ ID NO: 2147433 - DNA, 25 bp, Homo sapien
taaccaacccagcagtaggtcacta

SEQ ID NO: 2147434 - DNA, 25 bp, Homo sapien
gatttccattccgttagagctatgc

SEQ ID NO: 2147435 - DNA, 25 bp, Homo sapien
cccgttcagtattatgacaaaccca

SEQ ID NO: 2147436 - DNA, 25 bp, Homo sapien
gacaatctgagttcctctttactga

SEQ ID NO: 2147437 - DNA, 25 bp, Homo sapien
aacagtgacaatctgagttcctctt

SEQ ID NO: 2147438 - DNA, 25 bp, Homo sapien
cagttgtggtatctcctgttttatt

SEQ ID NO: 2147439 - DNA, 25 bp, Homo sapien
aagcaaaaagtatgcccgcaaggtg

SEQ ID NO: 2147440 - DNA, 25 bp, Homo sapien
gcaaaaagtatgcccgcaaggtgtt

SEQ ID NO: 2147441 - DNA, 25 bp, Homo sapien
ggtgttgtgactggctcatagaata

SEQ ID NO: 2147442 - DNA, 25 bp, Homo sapien
aaaaagtatgcccgcaaggtgttgt

SEQ ID NO: 2147443 - DNA, 25 bp, Homo sapien
gaccgtctttgcacaatggacactt

SEQ ID NO: 2147444 - DNA, 25 bp, Homo sapien
ctgtgaaagaccgtctttgcacaat

SEQ ID NO: 2147445 - DNA, 25 bp, Homo sapien
gacactttgcgttgtgatctaggca

SEQ ID NO: 2147446 - DNA, 25 bp, Homo sapien
tggacactttgcgttgtgatctagg

SEQ ID NO: 2147447 - DNA, 25 bp, Homo sapien
gctgggggtccagttgaacactgtc

SEQ ID NO: 2147448 - DNA, 25 bp, Homo sapien
tgaacactgtcttagtgcccaattc

SEQ ID NO: 2147449 - DNA, 25 bp, Homo sapien
gggggtccagttgaacactgtctta

SEQ ID NO: 2147450 - DNA, 25 bp, Homo sapien
aacactgtcttagtgcccaattcca

SEQ ID NO: 2147451 - DNA, 25 bp, Homo sapien
gggagcgcctgagtataaaactgtt

SEQ ID NO: 2147452 - DNA, 25 bp, Homo sapien
cgatgcatacccagggatgtttagg

SEQ ID NO: 2147453 - DNA, 25 bp, Homo sapien
tggactcaggctcaattgtcactgt

SEQ ID NO: 2147454 - DNA, 25 bp, Homo sapien
gaattgcttgctatggaaactaccc

SEQ ID NO: 2147455 - DNA, 25 bp, Homo sapien
tgctgtattttcttgatgccaagca

SEQ ID NO: 2147456 - DNA, 25 bp, Homo sapien
ttacatttttgctgtattttcttga

SEQ ID NO: 2147457 - DNA, 25 bp, Homo sapien
ttttgctgtattttcttgatgccaa

SEQ ID NO: 2147458 - DNA, 25 bp, Homo sapien
tacatttttgctgtattttcttgat

SEQ ID NO: 2147459 - DNA, 25 bp, Homo sapien
tggaaggaatttagctatgagctcc

SEQ ID NO: 2147460 - DNA, 25 bp, Homo sapien
cttctggaaggaatttagctatgag

SEQ ID NO: 2147461 - DNA, 25 bp, Homo sapien
tctggaaggaatttagctatgagct

SEQ ID NO: 2147462 - DNA, 25 bp, Homo sapien
ggaaggaatttagctatgagctcct

SEQ ID NO: 2147463 - DNA, 25 bp, Homo sapien
cagggcgtaccctcatcactggttt

SEQ ID NO: 2147464 - DNA, 25 bp, Homo sapien
tcttaagcccggttctggttgacac

SEQ ID NO: 2147465 - DNA, 25 bp, Homo sapien
cactttgaggtagaactgggtctta

SEQ ID NO: 2147466 - DNA, 25 bp, Homo sapien
cctgcctagggtcgtgaagtagact

SEQ ID NO: 2147467 - DNA, 25 bp, Homo sapien
gccaaactgtctcgtgcctgtctca

SEQ ID NO: 2147468 - DNA, 25 bp, Homo sapien
aacggtgggataggccatagtacac

SEQ ID NO: 2147469 - DNA, 25 bp, Homo sapien
ctttgacaggatctccaaggcacat

SEQ ID NO: 2147470 - DNA, 25 bp, Homo sapien
gcatctacgaatcatcaggcggtaa

SEQ ID NO: 2147471 - DNA, 25 bp, Homo sapien
gctcaagggacttctgcctattttc

SEQ ID NO: 2147472 - DNA, 25 bp, Homo sapien
attgagaatggagtcgagagactag

SEQ ID NO: 2147473 - DNA, 25 bp, Homo sapien
gctgtggctcaagggacttctgcct

SEQ ID NO: 2147474 - DNA, 25 bp, Homo sapien
gagactagatccttgatgagttctg

SEQ ID NO: 2147475 - DNA, 25 bp, Homo sapien
ccactgagcggccatcagcaaagaa

SEQ ID NO: 2147476 - DNA, 25 bp, Homo sapien
caatgtattcaatgtcggctgtgtt

SEQ ID NO: 2147477 - DNA, 25 bp, Homo sapien
tagccatcccgctggctctgatgga

SEQ ID NO: 2147478 - DNA, 25 bp, Homo sapien
gaagcgcctcttgcctatgctgtca

SEQ ID NO: 2147479 - DNA, 25 bp, Homo sapien
cagttatgtaatcccatgagctcag

SEQ ID NO: 2147480 - DNA, 25 bp, Homo sapien
tctccggcatgggaccaaagtgatt

SEQ ID NO: 2147481 - DNA, 25 bp, Homo sapien
gaggatcggcgtctttctccggcat

SEQ ID NO: 2147482 - DNA, 25 bp, Homo sapien
cacaatgatgcttgctgatagacac

SEQ ID NO: 2147483 - DNA, 25 bp, Homo sapien
taccattcagtctgtcctttaagga

SEQ ID NO: 2147484 - DNA, 25 bp, Homo sapien
ggaagaactgctaacatccaccagc

SEQ ID NO: 2147485 - DNA, 25 bp, Homo sapien
ccaggactcgtcgaataccattcag

SEQ ID NO: 2147486 - DNA, 25 bp, Homo sapien
agctgagctcggctttccaagggaa

SEQ ID NO: 2147487 - DNA, 25 bp, Homo sapien
tagttatgcagcatgtcaagaagca

SEQ ID NO: 2147488 - DNA, 25 bp, Homo sapien
gtgggagctcctcttcggcaatcca

SEQ ID NO: 2147489 - DNA, 25 bp, Homo sapien
cctctgctgtttatgtagttatgca

SEQ ID NO: 2147490 - DNA, 25 bp, Homo sapien
ctgggctcttaaacacctctgctgt

SEQ ID NO: 2147491 - DNA, 25 bp, Homo sapien
taaaacctgaaccatttggaatgag

SEQ ID NO: 2147492 - DNA, 25 bp, Homo sapien
gaaattatacagcaacattattagt

SEQ ID NO: 2147493 - DNA, 25 bp, Homo sapien
cacagtcattgatctatgaaagaaa

SEQ ID NO: 2147494 - DNA, 25 bp, Homo sapien
gaatgagacctcaagtcagtgaaat

SEQ ID NO: 2147495 - DNA, 25 bp, Homo sapien
ttttgagacgcaggtttgctcgttg

SEQ ID NO: 2147496 - DNA, 25 bp, Homo sapien
gagacgcaggtttgctcgttgccca

SEQ ID NO: 2147497 - DNA, 25 bp, Homo sapien
ttttttgagacgcaggtttgctcgt

SEQ ID NO: 2147498 - DNA, 25 bp, Homo sapien
ttgagacgcaggtttgctcgttgcc

SEQ ID NO: 2147499 - DNA, 25 bp, Homo sapien
cattataacactcccatacttgtgg

SEQ ID NO: 2147500 - DNA, 25 bp, Homo sapien
tacttgtggtactttacaggctgtc

SEQ ID NO: 2147501 - DNA, 25 bp, Homo sapien
taatttgcatgaaggtactaatggc

SEQ ID NO: 2147502 - DNA, 25 bp, Homo sapien
ctctcaccttaacagagtgatgggc

SEQ ID NO: 2147503 - DNA, 25 bp, Homo sapien
ttctagcccttattgaagcaggaaa

SEQ ID NO: 2147504 - DNA, 25 bp, Homo sapien
tagacctacatagggcactaccttc

SEQ ID NO: 2147505 - DNA, 25 bp, Homo sapien
aaatttctggtataggattgatccc

SEQ ID NO: 2147506 - DNA, 25 bp, Homo sapien
gattgatccctatctctgaccctca

SEQ ID NO: 2147507 - DNA, 25 bp, Homo sapien
caggtatgtgagatcacttggctca

SEQ ID NO: 2147508 - DNA, 25 bp, Homo sapien
ctcgcagggttggtatgagaaataa

SEQ ID NO: 2147509 - DNA, 25 bp, Homo sapien
gggataataactgctctcgcagggt

SEQ ID NO: 2147510 - DNA, 25 bp, Homo sapien
atcatctgggatgggtaaggttctc

SEQ ID NO: 2147511 - DNA, 25 bp, Homo sapien
tctctctggaggttaacttagcatg

SEQ ID NO: 2147512 - DNA, 25 bp, Homo sapien
aattgtcattctctgccccgctaag

SEQ ID NO: 2147513 - DNA, 25 bp, Homo sapien
ctgttgactgtaagagacctctggg

SEQ ID NO: 2147514 - DNA, 25 bp, Homo sapien
taaggtgggagctatcattctaaga

SEQ ID NO: 2147515 - DNA, 25 bp, Homo sapien
tacagtgcaagagtaaaatggctgc

SEQ ID NO: 2147516 - DNA, 25 bp, Homo sapien
gatgagctgaaacgtttttgtacag

SEQ ID NO: 2147517 - DNA, 25 bp, Homo sapien
aatggctgcttaccaaacaaatgga

SEQ ID NO: 2147518 - DNA, 25 bp, Homo sapien
tacaactgcataagatgatggaact

SEQ ID NO: 2147519 - DNA, 25 bp, Homo sapien
tactgaagctagttggataattctt

SEQ ID NO: 2147520 - DNA, 25 bp, Homo sapien
cctcgctgtcacatacatgggagtt

SEQ ID NO: 2147521 - DNA, 25 bp, Homo sapien
ctgcctcgctgtcacatacatggga

SEQ ID NO: 2147522 - DNA, 25 bp, Homo sapien
tttctattcagcttccaccgaagtg

SEQ ID NO: 2147523 - DNA, 25 bp, Homo sapien
aagtgcagcagacagtactcgtggc

SEQ ID NO: 2147524 - DNA, 25 bp, Homo sapien
cgtggcaggccttttgctgcaacaa

SEQ ID NO: 2147525 - DNA, 25 bp, Homo sapien
tggcgctgtgatgccaagtgcagca

SEQ ID NO: 2147526 - DNA, 25 bp, Homo sapien
gcccctctatgagctacagtgagag

SEQ ID NO: 2147527 - DNA, 25 bp, Homo sapien
tggctcctctcttgggttgtactct

SEQ ID NO: 2147528 - DNA, 25 bp, Homo sapien
ttagacaagaaccaaggattcctgc

SEQ ID NO: 2147529 - DNA, 25 bp, Homo sapien
taaacctttggcttgcattactaat

SEQ ID NO: 2147530 - DNA, 25 bp, Homo sapien
tgcattactaattgtcccttggaca

SEQ ID NO: 2147531 - DNA, 25 bp, Homo sapien
taaaatgttcagtcccattatcttc

SEQ ID NO: 2147532 - DNA, 25 bp, Homo sapien
tcttagtaaaatgttcagtcccatt

SEQ ID NO: 2147533 - DNA, 25 bp, Homo sapien
aaaatgttcagtcccattatcttca

SEQ ID NO: 2147534 - DNA, 25 bp, Homo sapien
gtgttcttagtaaaatgttcagtcc

SEQ ID NO: 2147535 - DNA, 25 bp, Homo sapien
agacactatccttaatgacagtggt

SEQ ID NO: 2147536 - DNA, 25 bp, Homo sapien
gaaatccaaagatgacagactgctc

SEQ ID NO: 2147537 - DNA, 25 bp, Homo sapien
tgatgaaatccaaagatgacagact

SEQ ID NO: 2147538 - DNA, 25 bp, Homo sapien
ctcttgcttgtttgactgatgaaat

SEQ ID NO: 2147539 - DNA, 25 bp, Homo sapien
tcttgcttgtttgactgatgaaatc

SEQ ID NO: 2147540 - DNA, 25 bp, Homo sapien
gactccggccacagtgttgccactg

SEQ ID NO: 2147541 - DNA, 25 bp, Homo sapien
tgtggcagacatgacgccagtcagt

SEQ ID NO: 2147542 - DNA, 25 bp, Homo sapien
tgcctcaactggagtggcgactagg

SEQ ID NO: 2147543 - DNA, 25 bp, Homo sapien
tggatcaggtcttgatcccctgtgg

SEQ ID NO: 2147544 - DNA, 25 bp, Homo sapien
tctgagtcttcctcggcgttcccac

SEQ ID NO: 2147545 - DNA, 25 bp, Homo sapien
ctgagtcttcctcggcgttcccacc

SEQ ID NO: 2147546 - DNA, 25 bp, Homo sapien
ctctgagtcttcctcggcgttccca

SEQ ID NO: 2147547 - DNA, 25 bp, Homo sapien
tgagtcttcctcggcgttcccaccc

SEQ ID NO: 2147548 - DNA, 25 bp, Homo sapien
gtccagaaactccatgcgaaagcct

SEQ ID NO: 2147549 - DNA, 25 bp, Homo sapien
agtgcggcgcctccgcatcaggcgg

SEQ ID NO: 2147550 - DNA, 25 bp, Homo sapien
ggccgccacgcatcctgatcaggat

SEQ ID NO: 2147551 - DNA, 25 bp, Homo sapien
gcggccgcgaccaagtcgaagttgt

SEQ ID NO: 2147552 - DNA, 25 bp, Homo sapien
tctgcagccggttcctctttggccg

SEQ ID NO: 2147553 - DNA, 25 bp, Homo sapien
ctgcggcctcctctgcgagctcctc

SEQ ID NO: 2147554 - DNA, 25 bp, Homo sapien
tgaggcctcctctgcgggctcttct

SEQ ID NO: 2147555 - DNA, 25 bp, Homo sapien
gccggttcctctgcggactcctcct

SEQ ID NO: 2147556 - DNA, 25 bp, Homo sapien
gatgttgggaccagacattcacaga

SEQ ID NO: 2147557 - DNA, 25 bp, Homo sapien
tacagatgttgggaccagacattca

SEQ ID NO: 2147558 - DNA, 25 bp, Homo sapien
aatatagcccaatttataaccagca

SEQ ID NO: 2147559 - DNA, 25 bp, Homo sapien
ccaatttataaccagcagcggcacc

SEQ ID NO: 2147560 - DNA, 25 bp, Homo sapien
catcccacttttcatgctgatattt

SEQ ID NO: 2147561 - DNA, 25 bp, Homo sapien
tcccacttttcatgctgatatttag

SEQ ID NO: 2147562 - DNA, 25 bp, Homo sapien
cttttcatgctgatatttagtgact

SEQ ID NO: 2147563 - DNA, 25 bp, Homo sapien
cacttttcatgctgatatttagtga

SEQ ID NO: 2147564 - DNA, 25 bp, Homo sapien
gacagtacagctctaaagacttgag

SEQ ID NO: 2147565 - DNA, 25 bp, Homo sapien
tgctcagcagccacaacgttactag

SEQ ID NO: 2147566 - DNA, 25 bp, Homo sapien
aatgaaggtatggtgggccaaaaca

SEQ ID NO: 2147567 - DNA, 25 bp, Homo sapien
tacagcacatatcaaacagactagc

SEQ ID NO: 2147568 - DNA, 25 bp, Homo sapien
agaagttcaaggctagctagctggc

SEQ ID NO: 2147569 - DNA, 25 bp, Homo sapien
aatcattccgtctatatcccacagc

SEQ ID NO: 2147570 - DNA, 25 bp, Homo sapien
aaatgccaatcattccgtctatatc

SEQ ID NO: 2147571 - DNA, 25 bp, Homo sapien
aagttcaaggctagctagctggccc

SEQ ID NO: 2147572 - DNA, 25 bp, Homo sapien
ctgggccccactccctctgaagaag

SEQ ID NO: 2147573 - DNA, 25 bp, Homo sapien
tggaaggttctggacttgcaggtcc

SEQ ID NO: 2147574 - DNA, 25 bp, Homo sapien
gttctggacttgcaggtccctgggc

SEQ ID NO: 2147575 - DNA, 25 bp, Homo sapien
ccccactccctctgaagaagcagca

SEQ ID NO: 2147576 - DNA, 25 bp, Homo sapien
tagaacccagtagatcagggaaagc

SEQ ID NO: 2147577 - DNA, 25 bp, Homo sapien
tttccataagcccaactgtcctggg

SEQ ID NO: 2147578 - DNA, 25 bp, Homo sapien
tcctcagatttgcactagaacccag

SEQ ID NO: 2147579 - DNA, 25 bp, Homo sapien
tcctctctagagtttgccatcaagc

SEQ ID NO: 2147580 - DNA, 25 bp, Homo sapien
cagttctccggaacccgagaccttg

SEQ ID NO: 2147581 - DNA, 25 bp, Homo sapien
acccgagaccttgcggcatacctag

SEQ ID NO: 2147582 - DNA, 25 bp, Homo sapien
tgcaaccagttctccggaacccgag

SEQ ID NO: 2147583 - DNA, 25 bp, Homo sapien
catagcatctgcaaccagttctccg

SEQ ID NO: 2147584 - DNA, 25 bp, Homo sapien
gggccaggattggaagtcgagcgta

SEQ ID NO: 2147585 - DNA, 25 bp, Homo sapien
gattggaagtcgagcgtattcccaa

SEQ ID NO: 2147586 - DNA, 25 bp, Homo sapien
ccaggattggaagtcgagcgtattc

SEQ ID NO: 2147587 - DNA, 25 bp, Homo sapien
ccaaggctgttgcagttgtctttgg

SEQ ID NO: 2147588 - DNA, 25 bp, Homo sapien
agcaggcaaggcacgtaaccggcca

SEQ ID NO: 2147589 - DNA, 25 bp, Homo sapien
tgagatcagaagacagcgagaggcc

SEQ ID NO: 2147590 - DNA, 25 bp, Homo sapien
agcctctaagggcatgcccacagcg

SEQ ID NO: 2147591 - DNA, 25 bp, Homo sapien
tatctggctggttattgcttcggcc

SEQ ID NO: 2147592 - DNA, 25 bp, Homo sapien
tagtatcttgttggctctcctccac

SEQ ID NO: 2147593 - DNA, 25 bp, Homo sapien
cccataatgtgaatttatgtcagac

SEQ ID NO: 2147594 - DNA, 25 bp, Homo sapien
catagtatcttgttggctctcctcc

SEQ ID NO: 2147595 - DNA, 25 bp, Homo sapien
ccaccctacttttttgcccataatg

SEQ ID NO: 2147596 - DNA, 25 bp, Homo sapien
caggctttggataaggctgcatgtg

SEQ ID NO: 2147597 - DNA, 25 bp, Homo sapien
tgggctaagtgaagtgtgagtgata

SEQ ID NO: 2147598 - DNA, 25 bp, Homo sapien
ggattttcaggttggagactgtgac

SEQ ID NO: 2147599 - DNA, 25 bp, Homo sapien
tccattttcaggctcctgaggacca

SEQ ID NO: 2147600 - DNA, 25 bp, Homo sapien
gatgctaaggaagcaggacagagac

SEQ ID NO: 2147601 - DNA, 25 bp, Homo sapien
agatgctaaggaagcaggacagaga

SEQ ID NO: 2147602 - DNA, 25 bp, Homo sapien
caggcacacagcaaggctctgagat

SEQ ID NO: 2147603 - DNA, 25 bp, Homo sapien
cagcaaggctctgagatgctaagga

SEQ ID NO: 2147604 - DNA, 25 bp, Homo sapien
caggcctaggctctttgtgttttga

SEQ ID NO: 2147605 - DNA, 25 bp, Homo sapien
aataatgcatcgattctttggcttg

SEQ ID NO: 2147606 - DNA, 25 bp, Homo sapien
cacttttgggtaccctctccgcagg

SEQ ID NO: 2147607 - DNA, 25 bp, Homo sapien
tgccattaacaccacttttgggtac

SEQ ID NO: 2147608 - DNA, 25 bp, Homo sapien
ccatatatgcttttcatcatcatgc

SEQ ID NO: 2147609 - DNA, 25 bp, Homo sapien
cattggctccaacagggttttcata

SEQ ID NO: 2147610 - DNA, 25 bp, Homo sapien
gtttctggagatttttcacattggc

SEQ ID NO: 2147611 - DNA, 25 bp, Homo sapien
tatgtctttccccacgggttgatgg

SEQ ID NO: 2147612 - DNA, 25 bp, Homo sapien
cccccaaaacctgtggctctttgca

SEQ ID NO: 2147613 - DNA, 25 bp, Homo sapien
tgtggctctttgcatatgtagtctc

SEQ ID NO: 2147614 - DNA, 25 bp, Homo sapien
tttgcatatgtagtctccagggtcc

SEQ ID NO: 2147615 - DNA, 25 bp, Homo sapien
ggctctttgcatatgtagtctccag

SEQ ID NO: 2147616 - DNA, 25 bp, Homo sapien
ttaacacatgggttcctggtttggc

SEQ ID NO: 2147617 - DNA, 25 bp, Homo sapien
tggtttggccccacaagcgtggcta

SEQ ID NO: 2147618 - DNA, 25 bp, Homo sapien
cacaagcgtggctattgccttggca

SEQ ID NO: 2147619 - DNA, 25 bp, Homo sapien
gtttggccccacaagcgtggctatt

SEQ ID NO: 2147620 - DNA, 25 bp, Homo sapien
aggaaaagtggacttgctgcatttc

SEQ ID NO: 2147621 - DNA, 25 bp, Homo sapien
gattgcatggaagaaccagctgctt

SEQ ID NO: 2147622 - DNA, 25 bp, Homo sapien
gcccttcctcatgactgccatattt

SEQ ID NO: 2147623 - DNA, 25 bp, Homo sapien
tctgtgcccttcctcatgactgcca

SEQ ID NO: 2147624 - DNA, 25 bp, Homo sapien
ccacaacccctggagtgcttgaagt

SEQ ID NO: 2147625 - DNA, 25 bp, Homo sapien
caacccctggagtgcttgaagtttg

SEQ ID NO: 2147626 - DNA, 25 bp, Homo sapien
acccacaacccctggagtgcttgaa

SEQ ID NO: 2147627 - DNA, 25 bp, Homo sapien
cacaacccctggagtgcttgaagtt

SEQ ID NO: 2147628 - DNA, 25 bp, Homo sapien
atatctttttcacagttaagtgggc

SEQ ID NO: 2147629 - DNA, 25 bp, Homo sapien
tatctttttcacagttaagtgggca

SEQ ID NO: 2147630 - DNA, 25 bp, Homo sapien
atctttttcacagttaagtgggcac

SEQ ID NO: 2147631 - DNA, 25 bp, Homo sapien
aaatatctttttcacagttaagtgg

SEQ ID NO: 2147632 - DNA, 25 bp, Homo sapien
tcaatttttcactgttcaaaataat

SEQ ID NO: 2147633 - DNA, 25 bp, Homo sapien
cttcaatttttcactgttcaaaata

SEQ ID NO: 2147634 - DNA, 25 bp, Homo sapien
aatctcttaagtgatgttcttcagt

SEQ ID NO: 2147635 - DNA, 25 bp, Homo sapien
tctcttaagtgatgttcttcagtat

SEQ ID NO: 2147636 - DNA, 25 bp, Homo sapien
atgacaagcttatccacagagtcat

SEQ ID NO: 2147637 - DNA, 25 bp, Homo sapien
ctgaatgacaagcttatccacagag

SEQ ID NO: 2147638 - DNA, 25 bp, Homo sapien
caagcttatccacagagtcatggtc

SEQ ID NO: 2147639 - DNA, 25 bp, Homo sapien
gacaagcttatccacagagtcatgg

SEQ ID NO: 2147640 - DNA, 25 bp, Homo sapien
atgaagccagtcgccatctcttgct

SEQ ID NO: 2147641 - DNA, 25 bp, Homo sapien
ctggatgaagccagtcgccatctct

SEQ ID NO: 2147642 - DNA, 25 bp, Homo sapien
accaccaccacagccgccaccaaaa

SEQ ID NO: 2147643 - DNA, 25 bp, Homo sapien
actgccacagctactgctgctactg

SEQ ID NO: 2147644 - DNA, 25 bp, Homo sapien
tgtttcctaatttaaatcttctgcc

SEQ ID NO: 2147645 - DNA, 25 bp, Homo sapien
gaaccgccatagccaccttggtttc

SEQ ID NO: 2147646 - DNA, 25 bp, Homo sapien
ttagaatgctttatactttccgcag

SEQ ID NO: 2147647 - DNA, 25 bp, Homo sapien
tttagaaaaagacctttattcagca

SEQ ID NO: 2147648 - DNA, 25 bp, Homo sapien
agaatgctttatactttccgcagaa

SEQ ID NO: 2147649 - DNA, 25 bp, Homo sapien
ttgttagaatgctttatactttccg

SEQ ID NO: 2147650 - DNA, 25 bp, Homo sapien
ctccctctgagcgagcgagtggcgc

SEQ ID NO: 2147651 - DNA, 25 bp, Homo sapien
agggatccggaactcgccactttct

SEQ ID NO: 2147652 - DNA, 25 bp, Homo sapien
tcctccctctgagcgagcgagtggc

SEQ ID NO: 2147653 - DNA, 25 bp, Homo sapien
ggttgggccgcgctaggcagggatc

SEQ ID NO: 2147654 - DNA, 25 bp, Homo sapien
gagcggcgacgtgaaaatctcatgc

SEQ ID NO: 2147655 - DNA, 25 bp, Homo sapien
ccgttgatggccatgagtatgcgcg

SEQ ID NO: 2147656 - DNA, 25 bp, Homo sapien
gaatttgcggcctttggtcacatcg

SEQ ID NO: 2147657 - DNA, 25 bp, Homo sapien
tccccgcgcacgatcttgtagagca

SEQ ID NO: 2147658 - DNA, 25 bp, Homo sapien
ctttattagacagtcaatttctctg

SEQ ID NO: 2147659 - DNA, 25 bp, Homo sapien
tattagacagtcaatttctctgtga

SEQ ID NO: 2147660 - DNA, 25 bp, Homo sapien
tagacagtcaatttctctgtgattt

SEQ ID NO: 2147661 - DNA, 25 bp, Homo sapien
ttattagacagtcaatttctctgtg

SEQ ID NO: 2147662 - DNA, 25 bp, Homo sapien
gtcagaaaggtcatcgtactcatcc

SEQ ID NO: 2147663 - DNA, 25 bp, Homo sapien
actcagagtctcctgctgggcagca

SEQ ID NO: 2147664 - DNA, 25 bp, Homo sapien
aaggcccctggatgcatctcttcca

SEQ ID NO: 2147665 - DNA, 25 bp, Homo sapien
aagtgaactgagactcccagtcact

SEQ ID NO: 2147666 - DNA, 25 bp, Homo sapien
gacctcagcccatagcataagccag

SEQ ID NO: 2147667 - DNA, 25 bp, Homo sapien
gattcaaagagaagctgtttcacag

SEQ ID NO: 2147668 - DNA, 25 bp, Homo sapien
aaatgcagacaccattgctgctggg

SEQ ID NO: 2147669 - DNA, 25 bp, Homo sapien
gctgctgggcacattataagcatca

SEQ ID NO: 2147670 - DNA, 25 bp, Homo sapien
agtttgcccacgtgatgatacttga

SEQ ID NO: 2147671 - DNA, 25 bp, Homo sapien
ccttcagcagtttgcccacgtgatg

SEQ ID NO: 2147672 - DNA, 25 bp, Homo sapien
tttccgggcactctcatcttttggt

SEQ ID NO: 2147673 - DNA, 25 bp, Homo sapien
tttttccgggcactctcatcttttg

SEQ ID NO: 2147674 - DNA, 25 bp, Homo sapien
tattgtaatcactatgttttaaaga

SEQ ID NO: 2147675 - DNA, 25 bp, Homo sapien
ttaaaaaacttatagcaagtgctca

SEQ ID NO: 2147676 - DNA, 25 bp, Homo sapien
aaatagatatacttccactgaatgc

SEQ ID NO: 2147677 - DNA, 25 bp, Homo sapien
gacagagtggactgttacaaatgat

SEQ ID NO: 2147678 - DNA, 25 bp, Homo sapien
agttgatcctttgctcttggtgcac

SEQ ID NO: 2147679 - DNA, 25 bp, Homo sapien
gttgtctttacagaacatcatgact

SEQ ID NO: 2147680 - DNA, 25 bp, Homo sapien
tgatcctttgctcttggtgcacatt

SEQ ID NO: 2147681 - DNA, 25 bp, Homo sapien
gaacatcatgactaaaagttgatcc

SEQ ID NO: 2147682 - DNA, 25 bp, Homo sapien
taaccattgccccaccatgaacatg

SEQ ID NO: 2147683 - DNA, 25 bp, Homo sapien
aaccacttgactagcgactgtactg

SEQ ID NO: 2147684 - DNA, 25 bp, Homo sapien
tatgtgagggcaaggacaacagtgc

SEQ ID NO: 2147685 - DNA, 25 bp, Homo sapien
ggacagcgcttaatccataccaaag

SEQ ID NO: 2147686 - DNA, 25 bp, Homo sapien
aaatgccctcggctctgtcctcaga

SEQ ID NO: 2147687 - DNA, 25 bp, Homo sapien
gagtaacgcctaggctcttccaggt

SEQ ID NO: 2147688 - DNA, 25 bp, Homo sapien
gggctgcgcaagagacccgagttcc

SEQ ID NO: 2147689 - DNA, 25 bp, Homo sapien
ccacgctgggccttcggtagggact

SEQ ID NO: 2147690 - DNA, 25 bp, Homo sapien
tgcgcgcggtgagctcgacgcgagc

SEQ ID NO: 2147691 - DNA, 25 bp, Homo sapien
cgcgcggtgagctcgacgcgagcca

SEQ ID NO: 2147692 - DNA, 25 bp, Homo sapien
gcgcggtgagctcgacgcgagccat

SEQ ID NO: 2147693 - DNA, 25 bp, Homo sapien
ctgcgcgcggtgagctcgacgcgag

SEQ ID NO: 2147694 - DNA, 25 bp, Homo sapien
tgatcaaagcctcgaaatcttcggg

SEQ ID NO: 2147695 - DNA, 25 bp, Homo sapien
gccagcgttgccctcttagcgagga

SEQ ID NO: 2147696 - DNA, 25 bp, Homo sapien
ggccaagtgagtttcagcctctaaa

SEQ ID NO: 2147697 - DNA, 25 bp, Homo sapien
tcctcaggagaaggcgattggccct

SEQ ID NO: 2147698 - DNA, 25 bp, Homo sapien
taatcatggcaaaatatgaagggga

SEQ ID NO: 2147699 - DNA, 25 bp, Homo sapien
gctatacaggagccatggctgggta

SEQ ID NO: 2147700 - DNA, 25 bp, Homo sapien
ctatacaggagccatggctgggtag

SEQ ID NO: 2147701 - DNA, 25 bp, Homo sapien
cttataatcatggcaaaatatgaag

SEQ ID NO: 2147702 - DNA, 25 bp, Homo sapien
ttcccatgggacttttattggctcc

SEQ ID NO: 2147703 - DNA, 25 bp, Homo sapien
tcccatgggacttttattggctcca

SEQ ID NO: 2147704 - DNA, 25 bp, Homo sapien
tagccgggcattagtaattacgaca

SEQ ID NO: 2147705 - DNA, 25 bp, Homo sapien
ggttgaggacatgtacccatgacac

SEQ ID NO: 2147706 - DNA, 25 bp, Homo sapien
tccataatcagtaggcaggtttgaa

SEQ ID NO: 2147707 - DNA, 25 bp, Homo sapien
tctgatctcttatggctcggttggt

SEQ ID NO: 2147708 - DNA, 25 bp, Homo sapien
tcctggttatttgagtactttaaca

SEQ ID NO: 2147709 - DNA, 25 bp, Homo sapien
cctggttatttgagtactttaacat

SEQ ID NO: 2147710 - DNA, 25 bp, Homo sapien
actcctcctggttatttgagtactt

SEQ ID NO: 2147711 - DNA, 25 bp, Homo sapien
tcctcctggttatttgagtacttta

SEQ ID NO: 2147712 - DNA, 25 bp, Homo sapien
cttactaatcagagtatcatttgat

SEQ ID NO: 2147713 - DNA, 25 bp, Homo sapien
cagtcttactaatcagagtatcatt

SEQ ID NO: 2147714 - DNA, 25 bp, Homo sapien
gtcttactaatcagagtatcatttg

SEQ ID NO: 2147715 - DNA, 25 bp, Homo sapien
tactaatcagagtatcatttgatac

SEQ ID NO: 2147716 - DNA, 25 bp, Homo sapien
gaggttgtggtgagcgaagaccgtg

SEQ ID NO: 2147717 - DNA, 25 bp, Homo sapien
gcactgtagcctgggcaacaagagt

SEQ ID NO: 2147718 - DNA, 25 bp, Homo sapien
tgtggtgagcgaagaccgtgccatt

SEQ ID NO: 2147719 - DNA, 25 bp, Homo sapien
gttgtggtgagcgaagaccgtgcca

SEQ ID NO: 2147720 - DNA, 25 bp, Homo sapien
cctcacatccagtacagtgtctggt

SEQ ID NO: 2147721 - DNA, 25 bp, Homo sapien
gtgtgcatctggagagcctttttca

SEQ ID NO: 2147722 - DNA, 25 bp, Homo sapien
caattcatgcaacctggtgcagagg

SEQ ID NO: 2147723 - DNA, 25 bp, Homo sapien
aatttgcacgcagtcacctcatggc

SEQ ID NO: 2147724 - DNA, 25 bp, Homo sapien
atgctgtagactggggttttatgta

SEQ ID NO: 2147725 - DNA, 25 bp, Homo sapien
ctgccagtgttcctcgatggtggtg

SEQ ID NO: 2147726 - DNA, 25 bp, Homo sapien
ccagtgttcctcgatggtggtggaa

SEQ ID NO: 2147727 - DNA, 25 bp, Homo sapien
tctgccagtgttcctcgatggtggt

SEQ ID NO: 2147728 - DNA, 25 bp, Homo sapien
gaccaacactcaattttccactgat

SEQ ID NO: 2147729 - DNA, 25 bp, Homo sapien
agaaatccagcactcaagtcccctt

SEQ ID NO: 2147730 - DNA, 25 bp, Homo sapien
cctccagaaatccagcactcaagtc

SEQ ID NO: 2147731 - DNA, 25 bp, Homo sapien
aacactcaattttccactgatctcc

SEQ ID NO: 2147732 - DNA, 25 bp, Homo sapien
caccaagagcgaatgagggctgtga

SEQ ID NO: 2147733 - DNA, 25 bp, Homo sapien
gcatcataatatggcagagggcatc

SEQ ID NO: 2147734 - DNA, 25 bp, Homo sapien
tacagatattaaaagaggctgggcg

SEQ ID NO: 2147735 - DNA, 25 bp, Homo sapien
cactggattctgcaccgggactgca

SEQ ID NO: 2147736 - DNA, 25 bp, Homo sapien
tcaggtccttggcagactgtgctgc

SEQ ID NO: 2147737 - DNA, 25 bp, Homo sapien
ctctggcagaagcttcacactctgg

SEQ ID NO: 2147738 - DNA, 25 bp, Homo sapien
ttcaggtccttggcagactgtgctg

SEQ ID NO: 2147739 - DNA, 25 bp, Homo sapien
ctggcagaagcttcacactctggct

SEQ ID NO: 2147740 - DNA, 25 bp, Homo sapien
taccaatttgtggatttacactgag

SEQ ID NO: 2147741 - DNA, 25 bp, Homo sapien
tattgaaacgggagagctgcccaga

SEQ ID NO: 2147742 - DNA, 25 bp, Homo sapien
tgcccatgagtagggtgctggtctc

SEQ ID NO: 2147743 - DNA, 25 bp, Homo sapien
ggttgattgcgaatccagaatacca

SEQ ID NO: 2147744 - DNA, 25 bp, Homo sapien
caagtttgtggctatgtatttatct

SEQ ID NO: 2147745 - DNA, 25 bp, Homo sapien
cctactgtgccatgtagtgtgttca

SEQ ID NO: 2147746 - DNA, 25 bp, Homo sapien
tgtaagctccaccagggtaggggat

SEQ ID NO: 2147747 - DNA, 25 bp, Homo sapien
cacccggccacaccctgtattttct

SEQ ID NO: 2147748 - DNA, 25 bp, Homo sapien
ggacggataaacgaactatggacat

SEQ ID NO: 2147749 - DNA, 25 bp, Homo sapien
ggcattgtgagcaaagtacgttttt

SEQ ID NO: 2147750 - DNA, 25 bp, Homo sapien
gtcacaggatctacgagttttccaa

SEQ ID NO: 2147751 - DNA, 25 bp, Homo sapien
agtcaccttccccataatccatttg

SEQ ID NO: 2147752 - DNA, 25 bp, Homo sapien
tggactctccagataggtagttcct

SEQ ID NO: 2147753 - DNA, 25 bp, Homo sapien
tgtgctgaagagatattgagttctt

SEQ ID NO: 2147754 - DNA, 25 bp, Homo sapien
gttagagcttgtttcatgttttcaa

SEQ ID NO: 2147755 - DNA, 25 bp, Homo sapien
ttagagcttgtttcatgttttcaag

SEQ ID NO: 2147756 - DNA, 25 bp, Homo sapien
ccagcaggctcagaaggctgactct

SEQ ID NO: 2147757 - DNA, 25 bp, Homo sapien
agccagcaggctcagaaggctgact

SEQ ID NO: 2147758 - DNA, 25 bp, Homo sapien
gcaggctcagaaggctgactcttga

SEQ ID NO: 2147759 - DNA, 25 bp, Homo sapien
ggctcagaaggctgactcttgataa

SEQ ID NO: 2147760 - DNA, 25 bp, Homo sapien
ttagctctgcagatccagaaattca

SEQ ID NO: 2147761 - DNA, 25 bp, Homo sapien
gcagatccagaaattcagctttatc

SEQ ID NO: 2147762 - DNA, 25 bp, Homo sapien
agaaattcagctttatcaggatacc

SEQ ID NO: 2147763 - DNA, 25 bp, Homo sapien
gctctgcagatccagaaattcagct

SEQ ID NO: 2147764 - DNA, 25 bp, Homo sapien
gcagtaccttggtgagggtccctgc

SEQ ID NO: 2147765 - DNA, 25 bp, Homo sapien
tggagagcatagtaggttaacaagc

SEQ ID NO: 2147766 - DNA, 25 bp, Homo sapien
catagtaggttaacaagctccaact

SEQ ID NO: 2147767 - DNA, 25 bp, Homo sapien
agtaggttaacaagctccaactttg

SEQ ID NO: 2147768 - DNA, 25 bp, Homo sapien
gagcatagtaggttaacaagctcca

SEQ ID NO: 2147769 - DNA, 25 bp, Homo sapien
gactgcagagttaactccagtaggg

SEQ ID NO: 2147770 - DNA, 25 bp, Homo sapien
gcagagttaactccagtagggacat

SEQ ID NO: 2147771 - DNA, 25 bp, Homo sapien
ctaggactgcagagttaactccagt

SEQ ID NO: 2147772 - DNA, 25 bp, Homo sapien
aactccagtagggacattttcagtg

SEQ ID NO: 2147773 - DNA, 25 bp, Homo sapien
ttcctaaatgttcagtgcgcccccg

SEQ ID NO: 2147774 - DNA, 25 bp, Homo sapien
gatatcatgggcatagtctccccag

SEQ ID NO: 2147775 - DNA, 25 bp, Homo sapien
tccccagttggcaaggctcgagtag

SEQ ID NO: 2147776 - DNA, 25 bp, Homo sapien
gctcgagtagcgactttcagttgcg

SEQ ID NO: 2147777 - DNA, 25 bp, Homo sapien
ccggaagaccgcgtggctcgggcct

SEQ ID NO: 2147778 - DNA, 25 bp, Homo sapien
tggggctctccggccacgggcggag

SEQ ID NO: 2147779 - DNA, 25 bp, Homo sapien
cgggcccggaagaccgcgtggctcg

SEQ ID NO: 2147780 - DNA, 25 bp, Homo sapien
ctggggctctccggccacgggcgga

SEQ ID NO: 2147781 - DNA, 25 bp, Homo sapien
tttggccgcctgtcagtcggccgtc

SEQ ID NO: 2147782 - DNA, 25 bp, Homo sapien
ggccgtcccgcctccacgtagccat

SEQ ID NO: 2147783 - DNA, 25 bp, Homo sapien
agcctttggccgcctgtcagtcggc

SEQ ID NO: 2147784 - DNA, 25 bp, Homo sapien
gcagcctttggccgcctgtcagtcg

SEQ ID NO: 2147785 - DNA, 25 bp, Homo sapien
agaggcgcaggcacgccaccgcgtt

SEQ ID NO: 2147786 - DNA, 25 bp, Homo sapien
cgccaccgcgttccccttccacagg

SEQ ID NO: 2147787 - DNA, 25 bp, Homo sapien
tgcaggggaagaggcgcaggcacgc

SEQ ID NO: 2147788 - DNA, 25 bp, Homo sapien
cgggcgtggcctcgcacgacgccaa

SEQ ID NO: 2147789 - DNA, 25 bp, Homo sapien
gtccccaggtgatcgacaagggggc

SEQ ID NO: 2147790 - DNA, 25 bp, Homo sapien
catagaggtggcccaccgccccgag

SEQ ID NO: 2147791 - DNA, 25 bp, Homo sapien
ccaggtgatcgacaagggggccgtc

SEQ ID NO: 2147792 - DNA, 25 bp, Homo sapien
ccatagaggtggcccaccgccccga

SEQ ID NO: 2147793 - DNA, 25 bp, Homo sapien
ctcggaccagggctgcggaccacaa

SEQ ID NO: 2147794 - DNA, 25 bp, Homo sapien
cggtccaatccggaaagcctctcgg

SEQ ID NO: 2147795 - DNA, 25 bp, Homo sapien
ttgcagggcggtaaccccaagagaa

SEQ ID NO: 2147796 - DNA, 25 bp, Homo sapien
ccaagagaacgtgaaaagcattggg

SEQ ID NO: 2147797 - DNA, 25 bp, Homo sapien
cttcaagctgtaggagtcttgactt

SEQ ID NO: 2147798 - DNA, 25 bp, Homo sapien
atcttcaagctgtaggagtcttgac

SEQ ID NO: 2147799 - DNA, 25 bp, Homo sapien
tcttcaagctgtaggagtcttgact

SEQ ID NO: 2147800 - DNA, 25 bp, Homo sapien
ggtggccactctatcgcccacgcag

SEQ ID NO: 2147801 - DNA, 25 bp, Homo sapien
tggccactctatcgcccacgcagaa

SEQ ID NO: 2147802 - DNA, 25 bp, Homo sapien
cgggtgcggtggccactctatcgcc

SEQ ID NO: 2147803 - DNA, 25 bp, Homo sapien
ggtgcggtggccactctatcgccca

SEQ ID NO: 2147804 - DNA, 25 bp, Homo sapien
gcccaggtcatctgtgaacagcaca

SEQ ID NO: 2147805 - DNA, 25 bp, Homo sapien
gatggagctccactgggaaatgtgg

SEQ ID NO: 2147806 - DNA, 25 bp, Homo sapien
gaaatgtggcccaggtcatctgtga

SEQ ID NO: 2147807 - DNA, 25 bp, Homo sapien
aggtcatctgtgaacagcacaacaa

SEQ ID NO: 2147808 - DNA, 25 bp, Homo sapien
atgttctgcatgatcaaccgggttt

SEQ ID NO: 2147809 - DNA, 25 bp, Homo sapien
caaccgggttttgatgaggtctgta

SEQ ID NO: 2147810 - DNA, 25 bp, Homo sapien
aggagccccctgtacgatggttcca

SEQ ID NO: 2147811 - DNA, 25 bp, Homo sapien
cccctgtacgatggttccagtatgt

SEQ ID NO: 2147812 - DNA, 25 bp, Homo sapien
tccaggttcatgtaaacaagaaggg

SEQ ID NO: 2147813 - DNA, 25 bp, Homo sapien
gagagaactgatctcggggtccgtt

SEQ ID NO: 2147814 - DNA, 25 bp, Homo sapien
ttctcttcacggtctcaaagggaaa

SEQ ID NO: 2147815 - DNA, 25 bp, Homo sapien
tgcatctttctcttcacggtctcaa

SEQ ID NO: 2147816 - DNA, 25 bp, Homo sapien
caaacactacaaagcattccacccc

SEQ ID NO: 2147817 - DNA, 25 bp, Homo sapien
ctttgctgttattacccgaccacaa

SEQ ID NO: 2147818 - DNA, 25 bp, Homo sapien
tgttattacccgaccacaaacacta

SEQ ID NO: 2147819 - DNA, 25 bp, Homo sapien
tattacccgaccacaaacactacaa

SEQ ID NO: 2147820 - DNA, 25 bp, Homo sapien
ggtaaggcacagtgaggaaaccaag

SEQ ID NO: 2147821 - DNA, 25 bp, Homo sapien
gacagggagcattagcaggctgcat

SEQ ID NO: 2147822 - DNA, 25 bp, Homo sapien
tatgttggtcctatccagtctgctt

SEQ ID NO: 2147823 - DNA, 25 bp, Homo sapien
gaaaccaagagtggcatccttgctg

SEQ ID NO: 2147824 - DNA, 25 bp, Homo sapien
tagtgctgaggtaagcgatggccca

SEQ ID NO: 2147825 - DNA, 25 bp, Homo sapien
caccttcaggctgtttagtgctgag

SEQ ID NO: 2147826 - DNA, 25 bp, Homo sapien
gataagcaccttcaggctgtttagt

SEQ ID NO: 2147827 - DNA, 25 bp, Homo sapien
gagtggcagctttgataagcacctt

SEQ ID NO: 2147828 - DNA, 25 bp, Homo sapien
tgtttagagagagcataatttccct

SEQ ID NO: 2147829 - DNA, 25 bp, Homo sapien
ggtaatttcatctggttcaagctaa

SEQ ID NO: 2147830 - DNA, 25 bp, Homo sapien
ggtttgaaccagatgaaattgctgt

SEQ ID NO: 2147831 - DNA, 25 bp, Homo sapien
aacacttacagtatatcatacttct

SEQ ID NO: 2147832 - DNA, 25 bp, Homo sapien
tagccctaccccttgaggctcaagg

SEQ ID NO: 2147833 - DNA, 25 bp, Homo sapien
taagctggcgaagccttgaactagg

SEQ ID NO: 2147834 - DNA, 25 bp, Homo sapien
aggaagctaagctggcgaagccttg

SEQ ID NO: 2147835 - DNA, 25 bp, Homo sapien
gcccctggcagtgagaaattcttag

SEQ ID NO: 2147836 - DNA, 25 bp, Homo sapien
ggaaaaagatgatcaggattacccc

SEQ ID NO: 2147837 - DNA, 25 bp, Homo sapien
tatttggaaggctcccatacgagga

SEQ ID NO: 2147838 - DNA, 25 bp, Homo sapien
gaaacttcttcttatgctctatata

SEQ ID NO: 2147839 - DNA, 25 bp, Homo sapien
ggtcactgttctagctctcaggaag

SEQ ID NO: 2147840 - DNA, 25 bp, Homo sapien
tccatgtgtgcacaggcctgaccca

SEQ ID NO: 2147841 - DNA, 25 bp, Homo sapien
gtgtgcacaggcctgacccaccccc

SEQ ID NO: 2147842 - DNA, 25 bp, Homo sapien
ccatgtgtgcacaggcctgacccac

SEQ ID NO: 2147843 - DNA, 25 bp, Homo sapien
atgtgtgcacaggcctgacccaccc

SEQ ID NO: 2147844 - DNA, 25 bp, Homo sapien
gctaagatgcactgaagcgtggaga

SEQ ID NO: 2147845 - DNA, 25 bp, Homo sapien
gtccgtgaaagcacaccaagttggg

SEQ ID NO: 2147846 - DNA, 25 bp, Homo sapien
tggttggggtccgtgaaagcacacc

SEQ ID NO: 2147847 - DNA, 25 bp, Homo sapien
aagggcttgagctaagatgcactga

SEQ ID NO: 2147848 - DNA, 25 bp, Homo sapien
ggtataaagcaacaggctcacactt

SEQ ID NO: 2147849 - DNA, 25 bp, Homo sapien
tggggtcaaagtccactggggtata

SEQ ID NO: 2147850 - DNA, 25 bp, Homo sapien
tccactggggtataaagcaacaggc

SEQ ID NO: 2147851 - DNA, 25 bp, Homo sapien
gctcacacttggttttatatttgat

SEQ ID NO: 2147852 - DNA, 25 bp, Homo sapien
ccagcctgaaggcttattctttaca

SEQ ID NO: 2147853 - DNA, 25 bp, Homo sapien
gcctgaaggcttattctttacaggg

SEQ ID NO: 2147854 - DNA, 25 bp, Homo sapien
tgaaggcttattctttacagggtga

SEQ ID NO: 2147855 - DNA, 25 bp, Homo sapien
aggcttattctttacagggtgagtg

SEQ ID NO: 2147856 - DNA, 25 bp, Homo sapien
aaaagaaactggctggatcagaggg

SEQ ID NO: 2147857 - DNA, 25 bp, Homo sapien
tgggaagaggtagggcatggacaga

SEQ ID NO: 2147858 - DNA, 25 bp, Homo sapien
aatagtgttaagatgggaagaggta

SEQ ID NO: 2147859 - DNA, 25 bp, Homo sapien
agggcacgtataggctaacagcatc

SEQ ID NO: 2147860 - DNA, 25 bp, Homo sapien
tttcacagggccgacttcagggctg

SEQ ID NO: 2147861 - DNA, 25 bp, Homo sapien
aaccaatggcctgcagacacctagg

SEQ ID NO: 2147862 - DNA, 25 bp, Homo sapien
gacacctagggacgactgtataaat

SEQ ID NO: 2147863 - DNA, 25 bp, Homo sapien
gacttgtgtataaggagggccaact

SEQ ID NO: 2147864 - DNA, 25 bp, Homo sapien
cacatccagagggcaatggataagc

SEQ ID NO: 2147865 - DNA, 25 bp, Homo sapien
ccagagggcaatggataagcctcgc

SEQ ID NO: 2147866 - DNA, 25 bp, Homo sapien
aattgtgcagtcgagtttcccacat

SEQ ID NO: 2147867 - DNA, 25 bp, Homo sapien
caagggaaagcgcgaacacagtccc

SEQ ID NO: 2147868 - DNA, 25 bp, Homo sapien
tctgcccattacagcctcaagagga

SEQ ID NO: 2147869 - DNA, 25 bp, Homo sapien
gctagtctgcccattacagcctcaa

SEQ ID NO: 2147870 - DNA, 25 bp, Homo sapien
cgtcgtaggcaaataagcaacagct

SEQ ID NO: 2147871 - DNA, 25 bp, Homo sapien
aagaggaacacagccgtcgtaggca

SEQ ID NO: 2147872 - DNA, 25 bp, Homo sapien
caagttcacgcgggagtaagtggca

SEQ ID NO: 2147873 - DNA, 25 bp, Homo sapien
aagttcacgcgggagtaagtggcaa

SEQ ID NO: 2147874 - DNA, 25 bp, Homo sapien
gttcacgcgggagtaagtggcaagg

SEQ ID NO: 2147875 - DNA, 25 bp, Homo sapien
agttcacgcgggagtaagtggcaag

SEQ ID NO: 2147876 - DNA, 25 bp, Homo sapien
cttccatgctgtgcacagattctga

SEQ ID NO: 2147877 - DNA, 25 bp, Homo sapien
gctgtgcacagattctgaagtgatg

SEQ ID NO: 2147878 - DNA, 25 bp, Homo sapien
tctaatcaggccttccatgctgtgc

SEQ ID NO: 2147879 - DNA, 25 bp, Homo sapien
cacagattctgaagtgatgcttcaa

SEQ ID NO: 2147880 - DNA, 25 bp, Homo sapien
ttggtgagaggataaacgccagtct

SEQ ID NO: 2147881 - DNA, 25 bp, Homo sapien
cttgaatctgggtctgtttgactca

SEQ ID NO: 2147882 - DNA, 25 bp, Homo sapien
ctcatgaaagaggtagtattatcgt

SEQ ID NO: 2147883 - DNA, 25 bp, Homo sapien
gaccatgacacaaagcatcaacttg

SEQ ID NO: 2147884 - DNA, 25 bp, Homo sapien
gacatggcctagcactgagtgcttt

SEQ ID NO: 2147885 - DNA, 25 bp, Homo sapien
agacatggcctagcactgagtgctt

SEQ ID NO: 2147886 - DNA, 25 bp, Homo sapien
tcaactttatcttgggtcactcttt

SEQ ID NO: 2147887 - DNA, 25 bp, Homo sapien
tgggtcactcttttgtgacccaaga

SEQ ID NO: 2147888 - DNA, 25 bp, Homo sapien
cttttcaactttatcttgggtcact

SEQ ID NO: 2147889 - DNA, 25 bp, Homo sapien
actcttttgtgacccaagataaagg

SEQ ID NO: 2147890 - DNA, 25 bp, Homo sapien
aatgtggacatctgattagcttagt

SEQ ID NO: 2147891 - DNA, 25 bp, Homo sapien
tctgattagcttagtgctctacagt

SEQ ID NO: 2147892 - DNA, 25 bp, Homo sapien
tagcttagtgctctacagtccagaa

SEQ ID NO: 2147893 - DNA, 25 bp, Homo sapien
ttaatgtggacatctgattagctta

SEQ ID NO: 2147894 - DNA, 25 bp, Homo sapien
agtcctcagtgacctacaaagagac

SEQ ID NO: 2147895 - DNA, 25 bp, Homo sapien
aagtcctcagtgacctacaaagaga

SEQ ID NO: 2147896 - DNA, 25 bp, Homo sapien
cataaagcaagtcctcagtgaccta

SEQ ID NO: 2147897 - DNA, 25 bp, Homo sapien
aagcaagtcctcagtgacctacaaa

SEQ ID NO: 2147898 - DNA, 25 bp, Homo sapien
tacctagctcttagagttgctatgg

SEQ ID NO: 2147899 - DNA, 25 bp, Homo sapien
acagtttaaatatccctatagttat

SEQ ID NO: 2147900 - DNA, 25 bp, Homo sapien
atgggagtgataatacctagctctt

SEQ ID NO: 2147901 - DNA, 25 bp, Homo sapien
gagtgccagcaacattataagtgtc

SEQ ID NO: 2147902 - DNA, 25 bp, Homo sapien
gtgagccactgcacccagtgagttc

SEQ ID NO: 2147903 - DNA, 25 bp, Homo sapien
aggcgtgagccactgcacccagtga

SEQ ID NO: 2147904 - DNA, 25 bp, Homo sapien
gcgtgagccactgcacccagtgagt

SEQ ID NO: 2147905 - DNA, 25 bp, Homo sapien
acaggcacgtgccacatcgcctggc

SEQ ID NO: 2147906 - DNA, 25 bp, Homo sapien
tgagcaggttcgtttctagtcctag

SEQ ID NO: 2147907 - DNA, 25 bp, Homo sapien
taagaagagcacaactctggagttg

SEQ ID NO: 2147908 - DNA, 25 bp, Homo sapien
acttacttggccctgtgaccctagg

SEQ ID NO: 2147909 - DNA, 25 bp, Homo sapien
taggcagcttatctaaccttcagag

SEQ ID NO: 2147910 - DNA, 25 bp, Homo sapien
taaatgtcctagtggaaggagccag

SEQ ID NO: 2147911 - DNA, 25 bp, Homo sapien
ctgggatgaggtgattgaaacatta

SEQ ID NO: 2147912 - DNA, 25 bp, Homo sapien
ggagccagggtctcaagtctacatt

SEQ ID NO: 2147913 - DNA, 25 bp, Homo sapien
ctacattctggatgctgggttcctg

SEQ ID NO: 2147914 - DNA, 25 bp, Homo sapien
actatctgccggaagcagtccactg

SEQ ID NO: 2147915 - DNA, 25 bp, Homo sapien
cttcagtaaattggctgtcaatcca

SEQ ID NO: 2147916 - DNA, 25 bp, Homo sapien
cagtaaattggctgtcaatccattc

SEQ ID NO: 2147917 - DNA, 25 bp, Homo sapien
cactatctgccggaagcagtccact

SEQ ID NO: 2147918 - DNA, 25 bp, Homo sapien
gaacctccacattaagtatctctgc

SEQ ID NO: 2147919 - DNA, 25 bp, Homo sapien
gacagacagtgtgcattcatgggcc

SEQ ID NO: 2147920 - DNA, 25 bp, Homo sapien
tgtgctacccattagtgctagaggg

SEQ ID NO: 2147921 - DNA, 25 bp, Homo sapien
taagatactccaccactgcacaggt

SEQ ID NO: 2147922 - DNA, 25 bp, Homo sapien
tttgataaagacagattctcttgca

SEQ ID NO: 2147923 - DNA, 25 bp, Homo sapien
caaaggtgctaaacataattccaaa

SEQ ID NO: 2147924 - DNA, 25 bp, Homo sapien
tgataaagacagattctcttgcaga

SEQ ID NO: 2147925 - DNA, 25 bp, Homo sapien
aactcaaaggtgctaaacataattc

SEQ ID NO: 2147926 - DNA, 25 bp, Homo sapien
ctggggctgcaaactctgatcgact

SEQ ID NO: 2147927 - DNA, 25 bp, Homo sapien
cgactcctggggtcaatttatagct

SEQ ID NO: 2147928 - DNA, 25 bp, Homo sapien
taattctcgtaattcctggggctgc

SEQ ID NO: 2147929 - DNA, 25 bp, Homo sapien
ggctgcaaactctgatcgactcctg

SEQ ID NO: 2147930 - DNA, 25 bp, Homo sapien
gaatctctaaagtggaacaatcctg

SEQ ID NO: 2147931 - DNA, 25 bp, Homo sapien
cagtggctgacctcacaacgtggta

SEQ ID NO: 2147932 - DNA, 25 bp, Homo sapien
gatacactcttgttgggaaaccttc

SEQ ID NO: 2147933 - DNA, 25 bp, Homo sapien
gatctgaggtggtgcatggccaaac

SEQ ID NO: 2147934 - DNA, 25 bp, Homo sapien
ctttgcatagttggctcattctcat

SEQ ID NO: 2147935 - DNA, 25 bp, Homo sapien
tctttgcatagttggctcattctca

SEQ ID NO: 2147936 - DNA, 25 bp, Homo sapien
gctgattgtggtcaattacttgtaa

SEQ ID NO: 2147937 - DNA, 25 bp, Homo sapien
ctgtagctgattgtggtcaattact

SEQ ID NO: 2147938 - DNA, 25 bp, Homo sapien
gtagctgattgtggtcaattacttg

SEQ ID NO: 2147939 - DNA, 25 bp, Homo sapien
tctgtagctgattgtggtcaattac

SEQ ID NO: 2147940 - DNA, 25 bp, Homo sapien
cactgggccaaaatcgaagtgtcgg

SEQ ID NO: 2147941 - DNA, 25 bp, Homo sapien
gaagtgtcggcaggcctgcatgcct

SEQ ID NO: 2147942 - DNA, 25 bp, Homo sapien
tctgtagtcacaagtctgacgtggg

SEQ ID NO: 2147943 - DNA, 25 bp, Homo sapien
gcagtggcgagtccagttcttctca

SEQ ID NO: 2147944 - DNA, 25 bp, Homo sapien
ctgcaggacgggactgggccgggaa

SEQ ID NO: 2147945 - DNA, 25 bp, Homo sapien
tgcaggacgggactgggccgggaac

SEQ ID NO: 2147946 - DNA, 25 bp, Homo sapien
tgggcgctaccgccgtcttggagat

SEQ ID NO: 2147947 - DNA, 25 bp, Homo sapien
gcgaaggacacagcggcatctgtca

SEQ ID NO: 2147948 - DNA, 25 bp, Homo sapien
ttgacccgctcgatgggcgctaccg

SEQ ID NO: 2147949 - DNA, 25 bp, Homo sapien
gctcgatgggcgctaccgccgtctt

SEQ ID NO: 2147950 - DNA, 25 bp, Homo sapien
tgggctcctggatcccaggacgtac

SEQ ID NO: 2147951 - DNA, 25 bp, Homo sapien
ttcctggttgggctcctggatccca

SEQ ID NO: 2147952 - DNA, 25 bp, Homo sapien
ctggttgggctcctggatcccagga

SEQ ID NO: 2147953 - DNA, 25 bp, Homo sapien
gttgggctcctggatcccaggacgt

SEQ ID NO: 2147954 - DNA, 25 bp, Homo sapien
ggccatgtctttagagttcgctccc

SEQ ID NO: 2147955 - DNA, 25 bp, Homo sapien
tctccttgccgcgaccttgaggtct

SEQ ID NO: 2147956 - DNA, 25 bp, Homo sapien
tcggagatgccgagagcctggtcct

SEQ ID NO: 2147957 - DNA, 25 bp, Homo sapien
ggacgtaaaaggcacacgcgcttcc

SEQ ID NO: 2147958 - DNA, 25 bp, Homo sapien
ggtcaccttggggaccgcagcctac

SEQ ID NO: 2147959 - DNA, 25 bp, Homo sapien
gagtcccacatagggcgcggtcacc

SEQ ID NO: 2147960 - DNA, 25 bp, Homo sapien
cgcagcctacgcctcaagtctcctg

SEQ ID NO: 2147961 - DNA, 25 bp, Homo sapien
caaacccaggttcagaggcattagg

SEQ ID NO: 2147962 - DNA, 25 bp, Homo sapien
ggaccacgcagtctataatgccttt

SEQ ID NO: 2147963 - DNA, 25 bp, Homo sapien
tgctccttgggaatacggaccacgc

SEQ ID NO: 2147964 - DNA, 25 bp, Homo sapien
gtattgcttatctgcagtgatctgc

SEQ ID NO: 2147965 - DNA, 25 bp, Homo sapien
cgcgccagaaggacagaactccctg

SEQ ID NO: 2147966 - DNA, 25 bp, Homo sapien
tttgaaggcgaagttaagagcctgg

SEQ ID NO: 2147967 - DNA, 25 bp, Homo sapien
cttgtatttatctttgaaggcgaag

SEQ ID NO: 2147968 - DNA, 25 bp, Homo sapien
gggaagtatctgatgacattggcca

SEQ ID NO: 2147969 - DNA, 25 bp, Homo sapien
aagagcctgggtggggaagtatctg

SEQ ID NO: 2147970 - DNA, 25 bp, Homo sapien
ctgcggcaccacccgatgccagatt

SEQ ID NO: 2147971 - DNA, 25 bp, Homo sapien
gcccctgcggcaccacccgatgcca

SEQ ID NO: 2147972 - DNA, 25 bp, Homo sapien
cctgcggcaccacccgatgccagat

SEQ ID NO: 2147973 - DNA, 25 bp, Homo sapien
ccctgcggcaccacccgatgccaga

SEQ ID NO: 2147974 - DNA, 25 bp, Homo sapien
aaccaggcagtcaccgaggcctcgg

SEQ ID NO: 2147975 - DNA, 25 bp, Homo sapien
agtcaccgaggcctcggaattccct

SEQ ID NO: 2147976 - DNA, 25 bp, Homo sapien
taggcggctcggtagatgataatac

SEQ ID NO: 2147977 - DNA, 25 bp, Homo sapien
gtcatagataccgaagtaggcggct

SEQ ID NO: 2147978 - DNA, 25 bp, Homo sapien
taggaaagagatgcttttaccaaaa

SEQ ID NO: 2147979 - DNA, 25 bp, Homo sapien
acatcccctaaacacgtcatctgta

SEQ ID NO: 2147980 - DNA, 25 bp, Homo sapien
ctgggaataggaaagagatgctttt

SEQ ID NO: 2147981 - DNA, 25 bp, Homo sapien
cctaaacacgtcatctgtacacaag

SEQ ID NO: 2147982 - DNA, 25 bp, Homo sapien
gcatcatcatgcggcggcgaacagt

SEQ ID NO: 2147983 - DNA, 25 bp, Homo sapien
atgcggcggcgaacagtgtcaaatg

SEQ ID NO: 2147984 - DNA, 25 bp, Homo sapien
atcatcatgcggcggcgaacagtgt

SEQ ID NO: 2147985 - DNA, 25 bp, Homo sapien
atcatgcggcggcgaacagtgtcaa

SEQ ID NO: 2147986 - DNA, 25 bp, Homo sapien
aagaataaagacatggagttagtga

SEQ ID NO: 2147987 - DNA, 25 bp, Homo sapien
tgcaaagaataaagacatggagtta

SEQ ID NO: 2147988 - DNA, 25 bp, Homo sapien
ctgcaaagaataaagacatggagtt

SEQ ID NO: 2147989 - DNA, 25 bp, Homo sapien
caaagaataaagacatggagttagt

SEQ ID NO: 2147990 - DNA, 25 bp, Homo sapien
gccagcagtcaagcgtgcctgtgta

SEQ ID NO: 2147991 - DNA, 25 bp, Homo sapien
ttcatcacgagcaatcttccgccag

SEQ ID NO: 2147992 - DNA, 25 bp, Homo sapien
atcttccgccagcagtcaagcgtgc

SEQ ID NO: 2147993 - DNA, 25 bp, Homo sapien
ttccgccagcagtcaagcgtgcctg

SEQ ID NO: 2147994 - DNA, 25 bp, Homo sapien
aaagcaccacccatgcctctgagaa

SEQ ID NO: 2147995 - DNA, 25 bp, Homo sapien
atgcctctgagaacattggaccatg

SEQ ID NO: 2147996 - DNA, 25 bp, Homo sapien
tatgtgtacttcttgatttcatcat

SEQ ID NO: 2147997 - DNA, 25 bp, Homo sapien
tcatcatacaagacaagcacaaaag

SEQ ID NO: 2147998 - DNA, 25 bp, Homo sapien
actgagaaactgacagccaggagtc

SEQ ID NO: 2147999 - DNA, 25 bp, Homo sapien
caggagtctgtcaagaatgctcaag

SEQ ID NO: 2148000 - DNA, 25 bp, Homo sapien
tataatacaacatgcctgttcacag

SEQ ID NO: 2148001 - DNA, 25 bp, Homo sapien
aacatgcctgttcacagggggaaaa

SEQ ID NO: 2148002 - DNA, 25 bp, Homo sapien
aaaaatacaattgagtcccatcatc

SEQ ID NO: 2148003 - DNA, 25 bp, Homo sapien
gcttcccattttcaaccagtaaata

SEQ ID NO: 2148004 - DNA, 25 bp, Homo sapien
ggtcagatgaatattattgcttccc

SEQ ID NO: 2148005 - DNA, 25 bp, Homo sapien
tgttatttatcaggagtgactgaaa

SEQ ID NO: 2148006 - DNA, 25 bp, Homo sapien
cgaatgtagcactcaaatatgcatt

SEQ ID NO: 2148007 - DNA, 25 bp, Homo sapien
ttcgaatgtagcactcaaatatgca

SEQ ID NO: 2148008 - DNA, 25 bp, Homo sapien
attcgaatgtagcactcaaatatgc

SEQ ID NO: 2148009 - DNA, 25 bp, Homo sapien
tattcgaatgtagcactcaaatatg

SEQ ID NO: 2148010 - DNA, 25 bp, Homo sapien
gatcattaatgcctggtcctaggtt

SEQ ID NO: 2148011 - DNA, 25 bp, Homo sapien
catctattgtaataaccataaaggg

SEQ ID NO: 2148012 - DNA, 25 bp, Homo sapien
ctacccaattgcaggaggcaccact

SEQ ID NO: 2148013 - DNA, 25 bp, Homo sapien
tcatctatgtcagctacccaattgc

SEQ ID NO: 2148014 - DNA, 25 bp, Homo sapien
tctccggcggtccggagcgcccgta

SEQ ID NO: 2148015 - DNA, 25 bp, Homo sapien
tccggagcgcccgtagcgcgctgct

SEQ ID NO: 2148016 - DNA, 25 bp, Homo sapien
cgtagcgcgctgcttccagtcactg

SEQ ID NO: 2148017 - DNA, 25 bp, Homo sapien
ctctgggaagacacccctcgtttct

SEQ ID NO: 2148018 - DNA, 25 bp, Homo sapien
gcctttggctaagaagagcaccatg

SEQ ID NO: 2148019 - DNA, 25 bp, Homo sapien
ttgttgccgggataccaaaggctct

SEQ ID NO: 2148020 - DNA, 25 bp, Homo sapien
gcaactgcccaatctgtcgcttgaa

SEQ ID NO: 2148021 - DNA, 25 bp, Homo sapien
ctgatgagggtctagtgaaagcaac

SEQ ID NO: 2148022 - DNA, 25 bp, Homo sapien
caccacatctgtgttgattgtctaa

SEQ ID NO: 2148023 - DNA, 25 bp, Homo sapien
cctactttgtgtgcgaagctcccca

SEQ ID NO: 2148024 - DNA, 25 bp, Homo sapien
tctgtgttgattgtctaacccattg

SEQ ID NO: 2148025 - DNA, 25 bp, Homo sapien
acatctgtgttcatcgtccaacacc

SEQ ID NO: 2148026 - DNA, 25 bp, Homo sapien
gtgcttgttcagatagctgaagcac

SEQ ID NO: 2148027 - DNA, 25 bp, Homo sapien
gatggcattgatatcctctttgtgc

SEQ ID NO: 2148028 - DNA, 25 bp, Homo sapien
cattgatatcctctttgtgcttgtt

SEQ ID NO: 2148029 - DNA, 25 bp, Homo sapien
gaaatggatggcattgatatcctct

SEQ ID NO: 2148030 - DNA, 25 bp, Homo sapien
actgggcctcacactctgctgtttc

SEQ ID NO: 2148031 - DNA, 25 bp, Homo sapien
ccactgggcctcacactctgctgtt

SEQ ID NO: 2148032 - DNA, 25 bp, Homo sapien
tcaggcccactgggcctcacactct

SEQ ID NO: 2148033 - DNA, 25 bp, Homo sapien
ggcccactgggcctcacactctgct

SEQ ID NO: 2148034 - DNA, 25 bp, Homo sapien
ttttctgtactcagtatagtcaatg

SEQ ID NO: 2148035 - DNA, 25 bp, Homo sapien
tagtcaatggtaccacattgcttta

SEQ ID NO: 2148036 - DNA, 25 bp, Homo sapien
ctgccacttgtgtcttccaaggttt

SEQ ID NO: 2148037 - DNA, 25 bp, Homo sapien
ctcagtatagtcaatggtaccacat

SEQ ID NO: 2148038 - DNA, 25 bp, Homo sapien
gggcctgaaaccactcagccccatc

SEQ ID NO: 2148039 - DNA, 25 bp, Homo sapien
atccttgccgatgcagacccatggg

SEQ ID NO: 2148040 - DNA, 25 bp, Homo sapien
gatgcagacccatgggaccagccct

SEQ ID NO: 2148041 - DNA, 25 bp, Homo sapien
tgccgatgcagacccatgggaccag

SEQ ID NO: 2148042 - DNA, 25 bp, Homo sapien
gatcagctcagtagccacagcaact

SEQ ID NO: 2148043 - DNA, 25 bp, Homo sapien
aggctgagacctttgatcagctcag

SEQ ID NO: 2148044 - DNA, 25 bp, Homo sapien
cagtagccacagcaactcttcctaa

SEQ ID NO: 2148045 - DNA, 25 bp, Homo sapien
ctctcctgtggactcttaccagccc

SEQ ID NO: 2148046 - DNA, 25 bp, Homo sapien
tgttgtcttgccctgcaaccctggg

SEQ ID NO: 2148047 - DNA, 25 bp, Homo sapien
tggccgagacaacagctggattccg

SEQ ID NO: 2148048 - DNA, 25 bp, Homo sapien
gctggattccggattgttgtcttgc

SEQ ID NO: 2148049 - DNA, 25 bp, Homo sapien
cagatgatggccgagacaacagctg

SEQ ID NO: 2148050 - DNA, 25 bp, Homo sapien
agggcacagcctgccaatctggcag

SEQ ID NO: 2148051 - DNA, 25 bp, Homo sapien
tagggcacagcctgccaatctggca

SEQ ID NO: 2148052 - DNA, 25 bp, Homo sapien
ctagggcacagcctgccaatctggc

SEQ ID NO: 2148053 - DNA, 25 bp, Homo sapien
ggcacagcctgccaatctggcagga

SEQ ID NO: 2148054 - DNA, 25 bp, Homo sapien
ctgtgcggctgagaaggtggtgctg

SEQ ID NO: 2148055 - DNA, 25 bp, Homo sapien
cctgagaatatcctgtgcggctgag

SEQ ID NO: 2148056 - DNA, 25 bp, Homo sapien
ggctgggagtgatttgctcttggca

SEQ ID NO: 2148057 - DNA, 25 bp, Homo sapien
tggcatcagcctgagaatatcctgt

SEQ ID NO: 2148058 - DNA, 25 bp, Homo sapien
tgcgcactgctacacgctgtgccta

SEQ ID NO: 2148059 - DNA, 25 bp, Homo sapien
ccacatgcgcactgctacacgctgt

SEQ ID NO: 2148060 - DNA, 25 bp, Homo sapien
tctgtccccacccacatgcgcactg

SEQ ID NO: 2148061 - DNA, 25 bp, Homo sapien
acatgcgcactgctacacgctgtgc

SEQ ID NO: 2148062 - DNA, 25 bp, Homo sapien
cgtcttgtacaaagagtgtccttca

SEQ ID NO: 2148063 - DNA, 25 bp, Homo sapien
gaatgaattgatgagtacaagcctg

SEQ ID NO: 2148064 - DNA, 25 bp, Homo sapien
tgtgtggaagctctcatcttgacgt

SEQ ID NO: 2148065 - DNA, 25 bp, Homo sapien
attgatgagtacaagcctggctgac

SEQ ID NO: 2148066 - DNA, 25 bp, Homo sapien
gccaccttgagcgagagttctggcg

SEQ ID NO: 2148067 - DNA, 25 bp, Homo sapien
ccagggacacttgcattgactctgg

SEQ ID NO: 2148068 - DNA, 25 bp, Homo sapien
agggacacttgcattgactctggaa

SEQ ID NO: 2148069 - DNA, 25 bp, Homo sapien
ctggcgacagattgacaacagtggc

SEQ ID NO: 2148070 - DNA, 25 bp, Homo sapien
ttggactcaaaatagcaggcagttg

SEQ ID NO: 2148071 - DNA, 25 bp, Homo sapien
gactcaaaatagcaggcagttgaaa

SEQ ID NO: 2148072 - DNA, 25 bp, Homo sapien
caaaatagcaggcagttgaaagcat

SEQ ID NO: 2148073 - DNA, 25 bp, Homo sapien
ctcaaaatagcaggcagttgaaagc

SEQ ID NO: 2148074 - DNA, 25 bp, Homo sapien
gaaagctgcaaccatctccacggta

SEQ ID NO: 2148075 - DNA, 25 bp, Homo sapien
ttgcaatcctcagggtttgataagc

SEQ ID NO: 2148076 - DNA, 25 bp, Homo sapien
ggcgtgcttccatctgcctagaaag

SEQ ID NO: 2148077 - DNA, 25 bp, Homo sapien
ctggccaacggtgtgtatcctggga

SEQ ID NO: 2148078 - DNA, 25 bp, Homo sapien
cctctctttcctgaagcctcaacct

SEQ ID NO: 2148079 - DNA, 25 bp, Homo sapien
ttcctgaagcctcaaccttcccctc

SEQ ID NO: 2148080 - DNA, 25 bp, Homo sapien
ctgaagcctcaaccttcccctcttt

SEQ ID NO: 2148081 - DNA, 25 bp, Homo sapien
ctctttcctgaagcctcaaccttcc

SEQ ID NO: 2148082 - DNA, 25 bp, Homo sapien
gaagcacccagaggaaccgcgctgc

SEQ ID NO: 2148083 - DNA, 25 bp, Homo sapien
ctctccgaagtcgagggtcggtctg

SEQ ID NO: 2148084 - DNA, 25 bp, Homo sapien
taagcaccaccccagtgtagacggg

SEQ ID NO: 2148085 - DNA, 25 bp, Homo sapien
gtcggtctggcgccggctaagcacc

SEQ ID NO: 2148086 - DNA, 25 bp, Homo sapien
ctcttgaagtcccgcatgaggcgcc

SEQ ID NO: 2148087 - DNA, 25 bp, Homo sapien
agtcccgcatgaggcgccgccgagc

SEQ ID NO: 2148088 - DNA, 25 bp, Homo sapien
tgaagtcccgcatgaggcgccgccg

SEQ ID NO: 2148089 - DNA, 25 bp, Homo sapien
cttgaagtcccgcatgaggcgccgc

SEQ ID NO: 2148090 - DNA, 25 bp, Homo sapien
cattatgttgttctcggacggagcc

SEQ ID NO: 2148091 - DNA, 25 bp, Homo sapien
cgctgactccggctggaggatcctc

SEQ ID NO: 2148092 - DNA, 25 bp, Homo sapien
gaaaatgaccgcgttccacaccatt

SEQ ID NO: 2148093 - DNA, 25 bp, Homo sapien
gttctcggacggagccccgctgact

SEQ ID NO: 2148094 - DNA, 25 bp, Homo sapien
catcctcaaacggggtcccttcagg

SEQ ID NO: 2148095 - DNA, 25 bp, Homo sapien
cctttagcagacagaggctaggcag

SEQ ID NO: 2148096 - DNA, 25 bp, Homo sapien
taagcaggagacacttccaggatga

SEQ ID NO: 2148097 - DNA, 25 bp, Homo sapien
caagcatacaatatccagaaccacc

SEQ ID NO: 2148098 - DNA, 25 bp, Homo sapien
ggtgcagttctagtcaagcatacaa

SEQ ID NO: 2148099 - DNA, 25 bp, Homo sapien
cagttgtacgcaagggattctcgca

SEQ ID NO: 2148100 - DNA, 25 bp, Homo sapien
tataaatgctatgtgaccgaaggaa

SEQ ID NO: 2148101 - DNA, 25 bp, Homo sapien
tagtactttcaggtaggcaggacac

SEQ ID NO: 2148102 - DNA, 25 bp, Homo sapien
taagaccatcttagagcagtgaggc

SEQ ID NO: 2148103 - DNA, 25 bp, Homo sapien
catccatcggtagcagactgttcaa

SEQ ID NO: 2148104 - DNA, 25 bp, Homo sapien
gaaccacaggccacagtgttccaga

SEQ ID NO: 2148105 - DNA, 25 bp, Homo sapien
taacataatacattggaaacagcaa

SEQ ID NO: 2148106 - DNA, 25 bp, Homo sapien
aaacagcaaaatcaactatgccact

SEQ ID NO: 2148107 - DNA, 25 bp, Homo sapien
aaggagtgatatggttgaactagag

SEQ ID NO: 2148108 - DNA, 25 bp, Homo sapien
ggggtatatgttctgcctaaagaca

SEQ ID NO: 2148109 - DNA, 25 bp, Homo sapien
aactagagggggtatatgttctgcc

SEQ ID NO: 2148110 - DNA, 25 bp, Homo sapien
taagtgactggtgtatggcaataag

SEQ ID NO: 2148111 - DNA, 25 bp, Homo sapien
gactcagctgaaggaggcaaaaccc

SEQ ID NO: 2148112 - DNA, 25 bp, Homo sapien
caagttgagtacctatattggtggc

SEQ ID NO: 2148113 - DNA, 25 bp, Homo sapien
tattggtggctcacaagttccttga

SEQ ID NO: 2148114 - DNA, 25 bp, Homo sapien
taagtgattacctagctaccaaaga

SEQ ID NO: 2148115 - DNA, 25 bp, Homo sapien
tagtaaagcaagacatagggaagcc

SEQ ID NO: 2148116 - DNA, 25 bp, Homo sapien
aaaactgggcagatgtaatagcaca

SEQ ID NO: 2148117 - DNA, 25 bp, Homo sapien
aagccagacctgaagatactatgta

SEQ ID NO: 2148118 - DNA, 25 bp, Homo sapien
tatggaatggacaaacatatgccca

SEQ ID NO: 2148119 - DNA, 25 bp, Homo sapien
tcaaaggcctatgttagtcagctgc

SEQ ID NO: 2148120 - DNA, 25 bp, Homo sapien
tgtcaacctaaggtagcaggaggcc

SEQ ID NO: 2148121 - DNA, 25 bp, Homo sapien
tgaaaacatccttaagaaactgggc

SEQ ID NO: 2148122 - DNA, 25 bp, Homo sapien
tacttacaaggcatggacaaactgg

SEQ ID NO: 2148123 - DNA, 25 bp, Homo sapien
tatcactttgttcagtagtactttg

SEQ ID NO: 2148124 - DNA, 25 bp, Homo sapien
atcactttgttcagtagtactttgt

SEQ ID NO: 2148125 - DNA, 25 bp, Homo sapien
cactttgttcagtagtactttgttt

SEQ ID NO: 2148126 - DNA, 25 bp, Homo sapien
gacaaatctaactgtaggtggttta

SEQ ID NO: 2148127 - DNA, 25 bp, Homo sapien
tagagacaaatctaactgtaggtgg

SEQ ID NO: 2148128 - DNA, 25 bp, Homo sapien
tctaactgtaggtggtttatttgga

SEQ ID NO: 2148129 - DNA, 25 bp, Homo sapien
caaatctaactgtaggtggtttatt

SEQ ID NO: 2148130 - DNA, 25 bp, Homo sapien
gacaataccgtatgcctggccttca

SEQ ID NO: 2148131 - DNA, 25 bp, Homo sapien
gaaaaggctgccctattatccagga

SEQ ID NO: 2148132 - DNA, 25 bp, Homo sapien
aacagggtccctagctatccacaga

SEQ ID NO: 2148133 - DNA, 25 bp, Homo sapien
caccaaatttgtaggctgtatcccc

SEQ ID NO: 2148134 - DNA, 25 bp, Homo sapien
taagaacaaagaagtaggtacatta

SEQ ID NO: 2148135 - DNA, 25 bp, Homo sapien
ctaagaacaaagaagtaggtacatt

SEQ ID NO: 2148136 - DNA, 25 bp, Homo sapien
tgttagaatggaagacacatcatag

SEQ ID NO: 2148137 - DNA, 25 bp, Homo sapien
caacggttctgaagtatgtccagac

SEQ ID NO: 2148138 - DNA, 25 bp, Homo sapien
tatgtccagacatatactaccatct

SEQ ID NO: 2148139 - DNA, 25 bp, Homo sapien
gacacatcataggttggactccaac

SEQ ID NO: 2148140 - DNA, 25 bp, Homo sapien
ttgggtcttaatggtctacttttca

SEQ ID NO: 2148141 - DNA, 25 bp, Homo sapien
catattaaaagttatagttcgtcac

SEQ ID NO: 2148142 - DNA, 25 bp, Homo sapien
agttatagttcgtcacattaaggaa

SEQ ID NO: 2148143 - DNA, 25 bp, Homo sapien
gactgtacccagctgacttgggtct

SEQ ID NO: 2148144 - DNA, 25 bp, Homo sapien
gttatgtgaatctgctagtagctag

SEQ ID NO: 2148145 - DNA, 25 bp, Homo sapien
tgtctttagcatacaaacccagagt

SEQ ID NO: 2148146 - DNA, 25 bp, Homo sapien
tattttataaggtagtgacactcaa

SEQ ID NO: 2148147 - DNA, 25 bp, Homo sapien
tgaattgtcctaagtacagctacat

SEQ ID NO: 2148148 - DNA, 25 bp, Homo sapien
gctttgttctactattgcagaaaca

SEQ ID NO: 2148149 - DNA, 25 bp, Homo sapien
gctgtttgctggactattgggattg

SEQ ID NO: 2148150 - DNA, 25 bp, Homo sapien
cagaaacacgcttttcatattcccg

SEQ ID NO: 2148151 - DNA, 25 bp, Homo sapien
catattcccgtttgttctcctggta

SEQ ID NO: 2148152 - DNA, 25 bp, Homo sapien
gtaaatgtaatgacaggagtaggga

SEQ ID NO: 2148153 - DNA, 25 bp, Homo sapien
ttcttatggccagcttctttaaact

SEQ ID NO: 2148154 - DNA, 25 bp, Homo sapien
ggaccagccaggatgaaacacttca

SEQ ID NO: 2148155 - DNA, 25 bp, Homo sapien
taacatcctggtcatcaagctaagc

SEQ ID NO: 2148156 - DNA, 25 bp, Homo sapien
gagtttattcacttagggcagcact

SEQ ID NO: 2148157 - DNA, 25 bp, Homo sapien
cagcttgcaaagagaggatgtgtca

SEQ ID NO: 2148158 - DNA, 25 bp, Homo sapien
cagattgcccagaagtatggtctta

SEQ ID NO: 2148159 - DNA, 25 bp, Homo sapien
aattcagggccgctcagcagaggag

SEQ ID NO: 2148160 - DNA, 25 bp, Homo sapien
tgccaagagagatattgaacagatc

SEQ ID NO: 2148161 - DNA, 25 bp, Homo sapien
tacgggagcctatctcagtgaaaga

SEQ ID NO: 2148162 - DNA, 25 bp, Homo sapien
gggagagtgcataaatcactagcta

SEQ ID NO: 2148163 - DNA, 25 bp, Homo sapien
tatcaggagtcttatcaattgttgt

SEQ ID NO: 2148164 - DNA, 25 bp, Homo sapien
cactagctaatgaaatgggtgtgag

SEQ ID NO: 2148165 - DNA, 25 bp, Homo sapien
tggctgggctcatgttgcaaaactg

SEQ ID NO: 2148166 - DNA, 25 bp, Homo sapien
atcttcaggtgggtaaaacttgtgt

SEQ ID NO: 2148167 - DNA, 25 bp, Homo sapien
tgttccaatacttgttgatgttaat

SEQ ID NO: 2148168 - DNA, 25 bp, Homo sapien
tcatcttcaggtgggtaaaacttgt

SEQ ID NO: 2148169 - DNA, 25 bp, Homo sapien
ctctcatcttcaggtgggtaaaact

SEQ ID NO: 2148170 - DNA, 25 bp, Homo sapien
caatggtagttggtgttaaaggctc

SEQ ID NO: 2148171 - DNA, 25 bp, Homo sapien
tcttggaagctagggaccaagtgca

SEQ ID NO: 2148172 - DNA, 25 bp, Homo sapien
ccaagtgcagtctttagatgggctt

SEQ ID NO: 2148173 - DNA, 25 bp, Homo sapien
gaagggccaatgaagactcttggaa

SEQ ID NO: 2148174 - DNA, 25 bp, Homo sapien
taatgattaggaggaactggttaca

SEQ ID NO: 2148175 - DNA, 25 bp, Homo sapien
actggttacaactgaagaagcctta

SEQ ID NO: 2148176 - DNA, 25 bp, Homo sapien
tcagaacccctaaatcggccctata

SEQ ID NO: 2148177 - DNA, 25 bp, Homo sapien
ctttgatagattgggagacgacttc

SEQ ID NO: 2148178 - DNA, 25 bp, Homo sapien
gatggctggaggacgtctgctgttg

SEQ ID NO: 2148179 - DNA, 25 bp, Homo sapien
agctgcctagctcgcggtccgtagt

SEQ ID NO: 2148180 - DNA, 25 bp, Homo sapien
cgcttgctagctgcctagctcgcgg

SEQ ID NO: 2148181 - DNA, 25 bp, Homo sapien
tcgcggtccgtagtcggcttcgtcc

SEQ ID NO: 2148182 - DNA, 25 bp, Homo sapien
taatgatgcacgatgcacagagcat

SEQ ID NO: 2148183 - DNA, 25 bp, Homo sapien
ctaatgatgcacgatgcacagagca

SEQ ID NO: 2148184 - DNA, 25 bp, Homo sapien
aatgatgcacgatgcacagagcatt

SEQ ID NO: 2148185 - DNA, 25 bp, Homo sapien
tggacttgaaactggctaacttgag

SEQ ID NO: 2148186 - DNA, 25 bp, Homo sapien
tcgtaattgggatacagtatggact

SEQ ID NO: 2148187 - DNA, 25 bp, Homo sapien
tttactacgtttccgcagtaagcta

SEQ ID NO: 2148188 - DNA, 25 bp, Homo sapien
ctgtgtaaacagtatctgtgttcgt

SEQ ID NO: 2148189 - DNA, 25 bp, Homo sapien
tgatgctgccaaagcacaagccagt

SEQ ID NO: 2148190 - DNA, 25 bp, Homo sapien
caaggttatgccaaatttccaggcc

SEQ ID NO: 2148191 - DNA, 25 bp, Homo sapien
tatgcttggaggtagaaacaaacca

SEQ ID NO: 2148192 - DNA, 25 bp, Homo sapien
tgagtgaccagagcaagtatgaagg

SEQ ID NO: 2148193 - DNA, 25 bp, Homo sapien
tgtcccaataaggtgaggccagtag

SEQ ID NO: 2148194 - DNA, 25 bp, Homo sapien
actgtcccaataaggtgaggccagt

SEQ ID NO: 2148195 - DNA, 25 bp, Homo sapien
cccaataaggtgaggccagtagcag

SEQ ID NO: 2148196 - DNA, 25 bp, Homo sapien
tcccaataaggtgaggccagtagca

SEQ ID NO: 2148197 - DNA, 25 bp, Homo sapien
cttcttgtgaggtatttcagcatct

SEQ ID NO: 2148198 - DNA, 25 bp, Homo sapien
tttcagcatctcggggggtaatttc

SEQ ID NO: 2148199 - DNA, 25 bp, Homo sapien
tatttcagcatctcggggggtaatt

SEQ ID NO: 2148200 - DNA, 25 bp, Homo sapien
gtatttcagcatctcggggggtaat

SEQ ID NO: 2148201 - DNA, 25 bp, Homo sapien
acataaggcccatgaaaccgggcca

SEQ ID NO: 2148202 - DNA, 25 bp, Homo sapien
cataaggcccatgaaaccgggccaa

SEQ ID NO: 2148203 - DNA, 25 bp, Homo sapien
tattgcactggggactcggggcagc

SEQ ID NO: 2148204 - DNA, 25 bp, Homo sapien
agcaaatcctgaagaggaagtccat

SEQ ID NO: 2148205 - DNA, 25 bp, Homo sapien
cagctggcaaaacatcctgcttgga

SEQ ID NO: 2148206 - DNA, 25 bp, Homo sapien
ggcaaaacatcctgcttggaagcaa

SEQ ID NO: 2148207 - DNA, 25 bp, Homo sapien
ttagtcaccaaactgattgccgcag

SEQ ID NO: 2148208 - DNA, 25 bp, Homo sapien
ttatcacacctacaaaatgaacaat

SEQ ID NO: 2148209 - DNA, 25 bp, Homo sapien
gcccccaggcaaccataaacatatg

SEQ ID NO: 2148210 - DNA, 25 bp, Homo sapien
tcacacctacaaaatgaacaataat

SEQ ID NO: 2148211 - DNA, 25 bp, Homo sapien
taaacatatgcctaatcttgtttca

SEQ ID NO: 2148212 - DNA, 25 bp, Homo sapien
ccttgtggattacggctctgtgagt

SEQ ID NO: 2148213 - DNA, 25 bp, Homo sapien
tcagtaaacattgattccgtggttc

SEQ ID NO: 2148214 - DNA, 25 bp, Homo sapien
acattgattccgtggttccatctgg

SEQ ID NO: 2148215 - DNA, 25 bp, Homo sapien
cttacaagctggctagctccttgtg

SEQ ID NO: 2148216 - DNA, 25 bp, Homo sapien
tgttggtgtaaagcccttttgggca

SEQ ID NO: 2148217 - DNA, 25 bp, Homo sapien
cagctggcggccaagcaatttgagg

SEQ ID NO: 2148218 - DNA, 25 bp, Homo sapien
ccaagcaatttgagggactggtgga

SEQ ID NO: 2148219 - DNA, 25 bp, Homo sapien
gagacgatcgtctgatagcagctga

SEQ ID NO: 2148220 - DNA, 25 bp, Homo sapien
tctttcccatgtccagatttaaggg

SEQ ID NO: 2148221 - DNA, 25 bp, Homo sapien
tcaaagcagactgacgccagctgca

SEQ ID NO: 2148222 - DNA, 25 bp, Homo sapien
aaagcagactgacgccagctgcaaa

SEQ ID NO: 2148223 - DNA, 25 bp, Homo sapien
agcagactgacgccagctgcaaagg

SEQ ID NO: 2148224 - DNA, 25 bp, Homo sapien
caaagcagactgacgccagctgcaa

SEQ ID NO: 2148225 - DNA, 25 bp, Homo sapien
tagacacaagtcagtaaaggtggtg

SEQ ID NO: 2148226 - DNA, 25 bp, Homo sapien
aagaatttaagttagacacaagtca

SEQ ID NO: 2148227 - DNA, 25 bp, Homo sapien
taagttagacacaagtcagtaaagg

SEQ ID NO: 2148228 - DNA, 25 bp, Homo sapien
caagtcagtaaaggtggtgctatgg

SEQ ID NO: 2148229 - DNA, 25 bp, Homo sapien
caaagggtccatagcttagctgctg

SEQ ID NO: 2148230 - DNA, 25 bp, Homo sapien
ggtgcaaccattggataggccagcc

SEQ ID NO: 2148231 - DNA, 25 bp, Homo sapien
cagtcactgacttcgcaaagggtcc

SEQ ID NO: 2148232 - DNA, 25 bp, Homo sapien
gaagctgcaatgtcagcccagccat

SEQ ID NO: 2148233 - DNA, 25 bp, Homo sapien
ctctgtagctcctgtcttagactca

SEQ ID NO: 2148234 - DNA, 25 bp, Homo sapien
tctgtagctcctgtcttagactcac

SEQ ID NO: 2148235 - DNA, 25 bp, Homo sapien
ttcaggaaatggctgcctctgtagc

SEQ ID NO: 2148236 - DNA, 25 bp, Homo sapien
ggaaatggctgcctctgtagctcct

SEQ ID NO: 2148237 - DNA, 25 bp, Homo sapien
tgcttcaacatcctgtgcgtgggtg

SEQ ID NO: 2148238 - DNA, 25 bp, Homo sapien
tccatagcaggaaattctattacag

SEQ ID NO: 2148239 - DNA, 25 bp, Homo sapien
tgaaggttgccgaactgtccccctg

SEQ ID NO: 2148240 - DNA, 25 bp, Homo sapien
gaataagtccgtcagccagggcttc

SEQ ID NO: 2148241 - DNA, 25 bp, Homo sapien
tgagagaaagatgcgcagctggaac

SEQ ID NO: 2148242 - DNA, 25 bp, Homo sapien
cctactcgggtgcttaagggactct

SEQ ID NO: 2148243 - DNA, 25 bp, Homo sapien
ccagaggagaaagtttagggacagc

SEQ ID NO: 2148244 - DNA, 25 bp, Homo sapien
cctagtatttggatgggaatggcca

SEQ ID NO: 2148245 - DNA, 25 bp, Homo sapien
actgaagagagtccggtttcagtgt

SEQ ID NO: 2148246 - DNA, 25 bp, Homo sapien
aagagagtccggtttcagtgtttct

SEQ ID NO: 2148247 - DNA, 25 bp, Homo sapien
gactgaagagagtccggtttcagtg

SEQ ID NO: 2148248 - DNA, 25 bp, Homo sapien
tgaagagagtccggtttcagtgttt

SEQ ID NO: 2148249 - DNA, 25 bp, Homo sapien
ccgatgattcatagtcttggagatt

SEQ ID NO: 2148250 - DNA, 25 bp, Homo sapien
agatttgcacggtctttcagacatc

SEQ ID NO: 2148251 - DNA, 25 bp, Homo sapien
tattccatcatgtatcactgaaccg

SEQ ID NO: 2148252 - DNA, 25 bp, Homo sapien
tgtatacaggttggttttcctgttg

SEQ ID NO: 2148253 - DNA, 25 bp, Homo sapien
caggcacctttttggttgtagttca

SEQ ID NO: 2148254 - DNA, 25 bp, Homo sapien
tgcctgaaagctaaatgctctgatg

SEQ ID NO: 2148255 - DNA, 25 bp, Homo sapien
tatatacaataaaactgcctgaaag

SEQ ID NO: 2148256 - DNA, 25 bp, Homo sapien
tctgatgacccaaattgtcaggcac

SEQ ID NO: 2148257 - DNA, 25 bp, Homo sapien
tggttcttatgacataatacagcgg

SEQ ID NO: 2148258 - DNA, 25 bp, Homo sapien
gcagcagaggaagctatcagctacc

SEQ ID NO: 2148259 - DNA, 25 bp, Homo sapien
cagctacctgattgtttcatcaaga

SEQ ID NO: 2148260 - DNA, 25 bp, Homo sapien
aatacagcggcatccttggcagcat

SEQ ID NO: 2148261 - DNA, 25 bp, Homo sapien
acaagtccgtcccatttgaatgaac

SEQ ID NO: 2148262 - DNA, 25 bp, Homo sapien
tgaatgaacaccacaaacggtttgg

SEQ ID NO: 2148263 - DNA, 25 bp, Homo sapien
acttggaagttcaattctggtgcac

SEQ ID NO: 2148264 - DNA, 25 bp, Homo sapien
tctggtgcacataatacaagtccgt

SEQ ID NO: 2148265 - DNA, 25 bp, Homo sapien
gctgcccgttgtgacccgggaccgc

SEQ ID NO: 2148266 - DNA, 25 bp, Homo sapien
acccgggaccgcacaggcaaagagg

SEQ ID NO: 2148267 - DNA, 25 bp, Homo sapien
cgttgccgaatgaatggccgtagga

SEQ ID NO: 2148268 - DNA, 25 bp, Homo sapien
aatgaatggccgtaggagccgccga

SEQ ID NO: 2148269 - DNA, 25 bp, Homo sapien
cgcctccctcgctgcagctgcggcc

SEQ ID NO: 2148270 - DNA, 25 bp, Homo sapien
tccctcgctgcagctgcggccccac

SEQ ID NO: 2148271 - DNA, 25 bp, Homo sapien
ctccctcgctgcagctgcggcccca

SEQ ID NO: 2148272 - DNA, 25 bp, Homo sapien
gcctccctcgctgcagctgcggccc

SEQ ID NO: 2148273 - DNA, 25 bp, Homo sapien
tggtgagggtcaaggagacctggcc

SEQ ID NO: 2148274 - DNA, 25 bp, Homo sapien
ctggtgagggtcaaggagacctggc

SEQ ID NO: 2148275 - DNA, 25 bp, Homo sapien
cttgggtgccagggccggggccgag

SEQ ID NO: 2148276 - DNA, 25 bp, Homo sapien
tcctgtgcagtagctcccgttgcgg

SEQ ID NO: 2148277 - DNA, 25 bp, Homo sapien
aggagcgatggcagcgaccgatata

SEQ ID NO: 2148278 - DNA, 25 bp, Homo sapien
tggtcgcgcccgaagtgtaacactt

SEQ ID NO: 2148279 - DNA, 25 bp, Homo sapien
gaccgatatagctcgccaggtggta

SEQ ID NO: 2148280 - DNA, 25 bp, Homo sapien
cccatctaagcaccttgggatctcg

SEQ ID NO: 2148281 - DNA, 25 bp, Homo sapien
ggcatcgagactccagcggccaagg

SEQ ID NO: 2148282 - DNA, 25 bp, Homo sapien
agacacgacagtggggcatcgagac

SEQ ID NO: 2148283 - DNA, 25 bp, Homo sapien
caccttgggatctcggtggaaagga

SEQ ID NO: 2148284 - DNA, 25 bp, Homo sapien
cgcccctccatttcgctccatagag

SEQ ID NO: 2148285 - DNA, 25 bp, Homo sapien
tgggtggtcttgctgagcgtctagg

SEQ ID NO: 2148286 - DNA, 25 bp, Homo sapien
tccatttcgctccatagagctgaga

SEQ ID NO: 2148287 - DNA, 25 bp, Homo sapien
tttcgctccatagagctgagaacct

SEQ ID NO: 2148288 - DNA, 25 bp, Homo sapien
gttctctcctctgcgccctattggc

SEQ ID NO: 2148289 - DNA, 25 bp, Homo sapien
ccctgccttcggaagttctctcctc

SEQ ID NO: 2148290 - DNA, 25 bp, Homo sapien
ctcctctgcgccctattggccgcct

SEQ ID NO: 2148291 - DNA, 25 bp, Homo sapien
tctgcgccctattggccgccttgtc

SEQ ID NO: 2148292 - DNA, 25 bp, Homo sapien
ggagggcgccaaggccggagaagtg

SEQ ID NO: 2148293 - DNA, 25 bp, Homo sapien
ccacgagagaggacccgcggaggtg

SEQ ID NO: 2148294 - DNA, 25 bp, Homo sapien
tggagaggtgcccacgagagaggac

SEQ ID NO: 2148295 - DNA, 25 bp, Homo sapien
cgccaaggccggagaagtggagagg

SEQ ID NO: 2148296 - DNA, 25 bp, Homo sapien
tttgaggagtggaatgtactgtccc

SEQ ID NO: 2148297 - DNA, 25 bp, Homo sapien
acaccagggaacctgcccttttgag

SEQ ID NO: 2148298 - DNA, 25 bp, Homo sapien
ggcctcgggcatgccaaatctgcca

SEQ ID NO: 2148299 - DNA, 25 bp, Homo sapien
ttgaggagtggaatgtactgtccct

SEQ ID NO: 2148300 - DNA, 25 bp, Homo sapien
gctgctccagccttgggcctttacg

SEQ ID NO: 2148301 - DNA, 25 bp, Homo sapien
agctgctccagccttgggcctttac

SEQ ID NO: 2148302 - DNA, 25 bp, Homo sapien
tgctccagccttgggcctttacggg

SEQ ID NO: 2148303 - DNA, 25 bp, Homo sapien
tcagctgctccagccttgggccttt

SEQ ID NO: 2148304 - DNA, 25 bp, Homo sapien
tagttcaggtcttcgaggttcagcg

SEQ ID NO: 2148305 - DNA, 25 bp, Homo sapien
tacggagcttcagtccgcgaggagt

SEQ ID NO: 2148306 - DNA, 25 bp, Homo sapien
ctgggccggtaagtacggagcttca

SEQ ID NO: 2148307 - DNA, 25 bp, Homo sapien
tatggatgagacaccaaggattccg

SEQ ID NO: 2148308 - DNA, 25 bp, Homo sapien
attatgcccctcttcagccactggt

SEQ ID NO: 2148309 - DNA, 25 bp, Homo sapien
tcaaccccattatgcccctcttcag

SEQ ID NO: 2148310 - DNA, 25 bp, Homo sapien
ccattatgcccctcttcagccactg

SEQ ID NO: 2148311 - DNA, 25 bp, Homo sapien
tatgcccctcttcagccactggttt

SEQ ID NO: 2148312 - DNA, 25 bp, Homo sapien
gatcactgttgctagaggagcagcc

SEQ ID NO: 2148313 - DNA, 25 bp, Homo sapien
tctcggctccaagtgggttcactct

SEQ ID NO: 2148314 - DNA, 25 bp, Homo sapien
catttgtaagcggacatgcccaaga

SEQ ID NO: 2148315 - DNA, 25 bp, Homo sapien
ggttcactctatgagcctggccggc

SEQ ID NO: 2148316 - DNA, 25 bp, Homo sapien
taggattccagtgcttctcgggaag

SEQ ID NO: 2148317 - DNA, 25 bp, Homo sapien
ccgctcctaggattccagtgcttct

SEQ ID NO: 2148318 - DNA, 25 bp, Homo sapien
ttccagtgcttctcgggaagctgtg

SEQ ID NO: 2148319 - DNA, 25 bp, Homo sapien
cggcagccgctcctaggattccagt

SEQ ID NO: 2148320 - DNA, 25 bp, Homo sapien
gtcccagtgtccagcgttagctgcc

SEQ ID NO: 2148321 - DNA, 25 bp, Homo sapien
agtgtccagcgttagctgcccttcc

SEQ ID NO: 2148322 - DNA, 25 bp, Homo sapien
ccagtgtccagcgttagctgccctt

SEQ ID NO: 2148323 - DNA, 25 bp, Homo sapien
ccgtcccagtgtccagcgttagctg

SEQ ID NO: 2148324 - DNA, 25 bp, Homo sapien
agaggccgtgggtgcccggttcgcg

SEQ ID NO: 2148325 - DNA, 25 bp, Homo sapien
ggctaccagtgtccgctctcgaggg

SEQ ID NO: 2148326 - DNA, 25 bp, Homo sapien
caccgcaggctctgcgaggtcggcg

SEQ ID NO: 2148327 - DNA, 25 bp, Homo sapien
tcggcgcgagagaggccgtgggtgc

SEQ ID NO: 2148328 - DNA, 25 bp, Homo sapien
cagagtgcatcagcgtgcctgggaa

SEQ ID NO: 2148329 - DNA, 25 bp, Homo sapien
tgatgaccatgtcgtggccctgaag

SEQ ID NO: 2148330 - DNA, 25 bp, Homo sapien
cggcgtagggcgaaatcgtgtacca

SEQ ID NO: 2148331 - DNA, 25 bp, Homo sapien
cgtgtaccagaatgagctcctcgtg

SEQ ID NO: 2148332 - DNA, 25 bp, Homo sapien
ggtgtccttcgccttggtccgcgac

SEQ ID NO: 2148333 - DNA, 25 bp, Homo sapien
gttgttcaggttggtgcacccgctg

SEQ ID NO: 2148334 - DNA, 25 bp, Homo sapien
ggtccgcgacgctgccactctcctg

SEQ ID NO: 2148335 - DNA, 25 bp, Homo sapien
cttgtctccacagccgtcgcgccca

SEQ ID NO: 2148336 - DNA, 25 bp, Homo sapien
tagctttggaactcggagccaggcc

SEQ ID NO: 2148337 - DNA, 25 bp, Homo sapien
cggaaaaggctatgcatttgcgcca

SEQ ID NO: 2148338 - DNA, 25 bp, Homo sapien
tccaggccggtggttacaggagacc

SEQ ID NO: 2148339 - DNA, 25 bp, Homo sapien
tgagacaagtacctgagtcggaccc

SEQ ID NO: 2148340 - DNA, 25 bp, Homo sapien
gatcatgttaccatatcaagctgaa

SEQ ID NO: 2148341 - DNA, 25 bp, Homo sapien
gatttcgacgtgttttcctctctga

SEQ ID NO: 2148342 - DNA, 25 bp, Homo sapien
tatgaacacgttggttggctggatt

SEQ ID NO: 2148343 - DNA, 25 bp, Homo sapien
tcaccactatctggagatttcgacg

SEQ ID NO: 2148344 - DNA, 25 bp, Homo sapien
ggattaagcgattcctggccaagaa

SEQ ID NO: 2148345 - DNA, 25 bp, Homo sapien
aaagcaaaatcgtcccattccccag

SEQ ID NO: 2148346 - DNA, 25 bp, Homo sapien
aggattaagcgattcctggccaaga

SEQ ID NO: 2148347 - DNA, 25 bp, Homo sapien
cgtcccattccccagtggattcgga

SEQ ID NO: 2148348 - DNA, 25 bp, Homo sapien
cgcttgtagcgaactcgttctggag

SEQ ID NO: 2148349 - DNA, 25 bp, Homo sapien
cgaaatcgtggcctgactgtgggct

SEQ ID NO: 2148350 - DNA, 25 bp, Homo sapien
cttggcgtggagaagcgaaccgcat

SEQ ID NO: 2148351 - DNA, 25 bp, Homo sapien
gcatgcgcaacgtggagggtaatca

SEQ ID NO: 2148352 - DNA, 25 bp, Homo sapien
agaaaatatccagttcggccactgt

SEQ ID NO: 2148353 - DNA, 25 bp, Homo sapien
atccagttcggccactgttgtcttt

SEQ ID NO: 2148354 - DNA, 25 bp, Homo sapien
tccagttcggccactgttgtctttc

SEQ ID NO: 2148355 - DNA, 25 bp, Homo sapien
aaatatccagttcggccactgttgt

SEQ ID NO: 2148356 - DNA, 25 bp, Homo sapien
gctgctcgccatggtaagtccatcg

SEQ ID NO: 2148357 - DNA, 25 bp, Homo sapien
tccgctgctcgccatggtaagtcca

SEQ ID NO: 2148358 - DNA, 25 bp, Homo sapien
gctcgccatggtaagtccatcggcc

SEQ ID NO: 2148359 - DNA, 25 bp, Homo sapien
ttcccaaaacccgaggccgctgcca

SEQ ID NO: 2148360 - DNA, 25 bp, Homo sapien
aaactccgcccatcggaagcgcctt

SEQ ID NO: 2148361 - DNA, 25 bp, Homo sapien
tcctaaactccgcccatcggaagcg

SEQ ID NO: 2148362 - DNA, 25 bp, Homo sapien
cctcctaaactccgcccatcggaag

SEQ ID NO: 2148363 - DNA, 25 bp, Homo sapien
ctaaactccgcccatcggaagcgcc

SEQ ID NO: 2148364 - DNA, 25 bp, Homo sapien
gccgaggtgagatcgcttgaagtca

SEQ ID NO: 2148365 - DNA, 25 bp, Homo sapien
taatcccagctactccagaggctga

SEQ ID NO: 2148366 - DNA, 25 bp, Homo sapien
aattagcgggcatggtggtaggtgt

SEQ ID NO: 2148367 - DNA, 25 bp, Homo sapien
tagcgggcatggtggtaggtgtctg

SEQ ID NO: 2148368 - DNA, 25 bp, Homo sapien
ccagcctaggcgacaagagcgagac

SEQ ID NO: 2148369 - DNA, 25 bp, Homo sapien
gcatctaatgtcctaaagtttaagg

SEQ ID NO: 2148370 - DNA, 25 bp, Homo sapien
tacatgagcttagcatgaagaatat

SEQ ID NO: 2148371 - DNA, 25 bp, Homo sapien
atagtcatgttacttctgcatctaa

SEQ ID NO: 2148372 - DNA, 25 bp, Homo sapien
ttgcttacatgagcttagcatgaag

SEQ ID NO: 2148373 - DNA, 25 bp, Homo sapien
cattacgtatgacacgagagaaaag

SEQ ID NO: 2148374 - DNA, 25 bp, Homo sapien
tgaggacttcattacgtatgacacg

SEQ ID NO: 2148375 - DNA, 25 bp, Homo sapien
tatgacacgagagaaaagtaagagc

SEQ ID NO: 2148376 - DNA, 25 bp, Homo sapien
gtcaagtgaggacttcattacgtat

SEQ ID NO: 2148377 - DNA, 25 bp, Homo sapien
taattttgtagcaaccaatagagcc

SEQ ID NO: 2148378 - DNA, 25 bp, Homo sapien
gggtgaatgcctactggtttcccat

SEQ ID NO: 2148379 - DNA, 25 bp, Homo sapien
tcccgtttgatgagaggcgtgagca

SEQ ID NO: 2148380 - DNA, 25 bp, Homo sapien
tttgctgtgatagaaaaggactctc

SEQ ID NO: 2148381 - DNA, 25 bp, Homo sapien
tttgatactgaattaacctctttgg

SEQ ID NO: 2148382 - DNA, 25 bp, Homo sapien
ttttgtccaccagagaacgatcagt

SEQ ID NO: 2148383 - DNA, 25 bp, Homo sapien
tgagtaactttagcaaacagctgtg

SEQ ID NO: 2148384 - DNA, 25 bp, Homo sapien
tctgccttcgctagcatgcctttgt

SEQ ID NO: 2148385 - DNA, 25 bp, Homo sapien
tacttctgtatccagtgtcctaaag

SEQ ID NO: 2148386 - DNA, 25 bp, Homo sapien
gaaggatagaacacactttcgttga

SEQ ID NO: 2148387 - DNA, 25 bp, Homo sapien
tgtttgcttatatgagcttagcgta

SEQ ID NO: 2148388 - DNA, 25 bp, Homo sapien
gatgataagtgttgacattgggtag

SEQ ID NO: 2148389 - DNA, 25 bp, Homo sapien
tttgagcgcagccagaagatccagg

SEQ ID NO: 2148390 - DNA, 25 bp, Homo sapien
gctgcactgtggttcgaccggaaaa

SEQ ID NO: 2148391 - DNA, 25 bp, Homo sapien
caaggatacgtctatgggcaatgcc

SEQ ID NO: 2148392 - DNA, 25 bp, Homo sapien
tccaatgatacagaagacccgtgac

SEQ ID NO: 2148393 - DNA, 25 bp, Homo sapien
gtccggggagaatctcgaaccacat

SEQ ID NO: 2148394 - DNA, 25 bp, Homo sapien
agtccggggagaatctcgaaccaca

SEQ ID NO: 2148395 - DNA, 25 bp, Homo sapien
gatgtacgcagtagccagtcctgga

SEQ ID NO: 2148396 - DNA, 25 bp, Homo sapien
cttgcccccgttagtgaacctgtgg

SEQ ID NO: 2148397 - DNA, 25 bp, Homo sapien
ccccgttagtgaacctgtggatgta

SEQ ID NO: 2148398 - DNA, 25 bp, Homo sapien
gaacctgtggatgtacgcagtagcc

SEQ ID NO: 2148399 - DNA, 25 bp, Homo sapien
cagactccagtgatacccaaaatga

SEQ ID NO: 2148400 - DNA, 25 bp, Homo sapien
aacgatcaactccagagatgcgcct

SEQ ID NO: 2148401 - DNA, 25 bp, Homo sapien
ctttgacacatagtaacgatcaact

SEQ ID NO: 2148402 - DNA, 25 bp, Homo sapien
gatgcgcctatctctttccatcaga

SEQ ID NO: 2148403 - DNA, 25 bp, Homo sapien
tgacctgtagatgtaaccaaataac

SEQ ID NO: 2148404 - DNA, 25 bp, Homo sapien
taaatgggtaattgcgataactagc

SEQ ID NO: 2148405 - DNA, 25 bp, Homo sapien
cattatactccaaaatgacctgtag

SEQ ID NO: 2148406 - DNA, 25 bp, Homo sapien
gtggtacgatcctagttcactggag

SEQ ID NO: 2148407 - DNA, 25 bp, Homo sapien
gtctgttcccatcaaagatatgcca

SEQ ID NO: 2148408 - DNA, 25 bp, Homo sapien
caagcaactctttaccacctggatc

SEQ ID NO: 2148409 - DNA, 25 bp, Homo sapien
gacagcagcatattgctttatatga

SEQ ID NO: 2148410 - DNA, 25 bp, Homo sapien
ccagtgtcattaaatggcattgtta

SEQ ID NO: 2148411 - DNA, 25 bp, Homo sapien
taaccttctagcaggggtagatggc

SEQ ID NO: 2148412 - DNA, 25 bp, Homo sapien
cattgcatgctacataatacactgt

SEQ ID NO: 2148413 - DNA, 25 bp, Homo sapien
ctagcaggggtagatggccataact

SEQ ID NO: 2148414 - DNA, 25 bp, Homo sapien
taagcactacataacacattgcatg

SEQ ID NO: 2148415 - DNA, 25 bp, Homo sapien
taaaaatgtaggggatgatccctgc

SEQ ID NO: 2148416 - DNA, 25 bp, Homo sapien
cataaaaatgtaggggatgatccct

SEQ ID NO: 2148417 - DNA, 25 bp, Homo sapien
acataaaaatgtaggggatgatccc

SEQ ID NO: 2148418 - DNA, 25 bp, Homo sapien
gacataaaaatgtaggggatgatcc

SEQ ID NO: 2148419 - DNA, 25 bp, Homo sapien
tatacagctgtgtagctgtgacagt

SEQ ID NO: 2148420 - DNA, 25 bp, Homo sapien
acagctgtgtagctgtgacagtcgt

SEQ ID NO: 2148421 - DNA, 25 bp, Homo sapien
tacagctgtgtagctgtgacagtcg

SEQ ID NO: 2148422 - DNA, 25 bp, Homo sapien
atacagctgtgtagctgtgacagtc

SEQ ID NO: 2148423 - DNA, 25 bp, Homo sapien
aaaacatcaggattctagtcccagc

SEQ ID NO: 2148424 - DNA, 25 bp, Homo sapien
tcaaatctgaggtacagcacctggc

SEQ ID NO: 2148425 - DNA, 25 bp, Homo sapien
caatacactaggttgggagtcaaaa

SEQ ID NO: 2148426 - DNA, 25 bp, Homo sapien
tgcatacaagacagaagaacccgtt

SEQ ID NO: 2148427 - DNA, 25 bp, Homo sapien
cttagagcagagcaagcagcaagag

SEQ ID NO: 2148428 - DNA, 25 bp, Homo sapien
cttcttggtgagaatggccagcttc

SEQ ID NO: 2148429 - DNA, 25 bp, Homo sapien
tggccagcttcagtcctatccattc

SEQ ID NO: 2148430 - DNA, 25 bp, Homo sapien
ccagcttcagtcctatccattcagc

SEQ ID NO: 2148431 - DNA, 25 bp, Homo sapien
gcttcttggtgagaatggccagctt

SEQ ID NO: 2148432 - DNA, 25 bp, Homo sapien
tcatgtctcaaaggccaccagactg

SEQ ID NO: 2148433 - DNA, 25 bp, Homo sapien
tgttcaccccatgttcatgaagttg

SEQ ID NO: 2148434 - DNA, 25 bp, Homo sapien
gaagttgcagcccacaatcagaggc

SEQ ID NO: 2148435 - DNA, 25 bp, Homo sapien
agggccctgatacacaatcttctgg

SEQ ID NO: 2148436 - DNA, 25 bp, Homo sapien
gaaagttgcccttctatacaaacga

SEQ ID NO: 2148437 - DNA, 25 bp, Homo sapien
ttccaaactactccctgctcggatg

SEQ ID NO: 2148438 - DNA, 25 bp, Homo sapien
tcatgcagcgccgaggacaagttct

SEQ ID NO: 2148439 - DNA, 25 bp, Homo sapien
ctcggatgctagtgcaggtatgagt

SEQ ID NO: 2148440 - DNA, 25 bp, Homo sapien
tgcagcgccgaggacaagttcttcc

SEQ ID NO: 2148441 - DNA, 25 bp, Homo sapien
agccccttactgaaacgcacaaatt

SEQ ID NO: 2148442 - DNA, 25 bp, Homo sapien
cagccaagccccttactgaaacgca

SEQ ID NO: 2148443 - DNA, 25 bp, Homo sapien
tctaggttgagaggccttttgaatc

SEQ ID NO: 2148444 - DNA, 25 bp, Homo sapien
gggctctctaggttgagaggccttt

SEQ ID NO: 2148445 - DNA, 25 bp, Homo sapien
tcacagctggtatgtattgggcatc

SEQ ID NO: 2148446 - DNA, 25 bp, Homo sapien
tggtgataagcctcacagctggtat

SEQ ID NO: 2148447 - DNA, 25 bp, Homo sapien
gggcatccctatgatatgccagtca

SEQ ID NO: 2148448 - DNA, 25 bp, Homo sapien
gaagaacagtggtgataagcctcac

SEQ ID NO: 2148449 - DNA, 25 bp, Homo sapien
ctagcttctcttcagccgaagatga

SEQ ID NO: 2148450 - DNA, 25 bp, Homo sapien
tctcttcagccgaagatgagcttac

SEQ ID NO: 2148451 - DNA, 25 bp, Homo sapien
cttctcttcagccgaagatgagctt

SEQ ID NO: 2148452 - DNA, 25 bp, Homo sapien
agcttctcttcagccgaagatgagc

SEQ ID NO: 2148453 - DNA, 25 bp, Homo sapien
attctctcagtagcttctctcagat

SEQ ID NO: 2148454 - DNA, 25 bp, Homo sapien
attgccagatggaatgtttgcaagt

SEQ ID NO: 2148455 - DNA, 25 bp, Homo sapien
tagcttctctcagattgccagatgg

SEQ ID NO: 2148456 - DNA, 25 bp, Homo sapien
tttgcttggaacaggagcagtggta

SEQ ID NO: 2148457 - DNA, 25 bp, Homo sapien
gcttgttgaattttgagtctcactc

SEQ ID NO: 2148458 - DNA, 25 bp, Homo sapien
ttgttgaattttgagtctcactcat

SEQ ID NO: 2148459 - DNA, 25 bp, Homo sapien
ggcttgttgaattttgagtctcact

SEQ ID NO: 2148460 - DNA, 25 bp, Homo sapien
cttgttgaattttgagtctcactca

SEQ ID NO: 2148461 - DNA, 25 bp, Homo sapien
ggcttgcggctttgttatcctcatc

SEQ ID NO: 2148462 - DNA, 25 bp, Homo sapien
tattcggcattgtttggcttgcggc

SEQ ID NO: 2148463 - DNA, 25 bp, Homo sapien
tcaaccagagctagagctacttgag

SEQ ID NO: 2148464 - DNA, 25 bp, Homo sapien
tacttgagtcaattcatcctcgtag

SEQ ID NO: 2148465 - DNA, 25 bp, Homo sapien
agtgaattcaccgtgagtcatccac

SEQ ID NO: 2148466 - DNA, 25 bp, Homo sapien
tgaattcaccgtgagtcatccactt

SEQ ID NO: 2148467 - DNA, 25 bp, Homo sapien
aattcaccgtgagtcatccacttga

SEQ ID NO: 2148468 - DNA, 25 bp, Homo sapien
cacagtgaattcaccgtgagtcatc

SEQ ID NO: 2148469 - DNA, 25 bp, Homo sapien
tctgctgagagtctctttattgttc

SEQ ID NO: 2148470 - DNA, 25 bp, Homo sapien
gctgagagtctctttattgttcttc

SEQ ID NO: 2148471 - DNA, 25 bp, Homo sapien
cttcacaccggtgtaccatgctgga

SEQ ID NO: 2148472 - DNA, 25 bp, Homo sapien
accggtgtaccatgctggagtggtc

SEQ ID NO: 2148473 - DNA, 25 bp, Homo sapien
tacaaactctacgccatgtgcccag

SEQ ID NO: 2148474 - DNA, 25 bp, Homo sapien
ctacaaactctacgccatgtgccca

SEQ ID NO: 2148475 - DNA, 25 bp, Homo sapien
acaaactctacgccatgtgcccagc

SEQ ID NO: 2148476 - DNA, 25 bp, Homo sapien
caaactctacgccatgtgcccagca

SEQ ID NO: 2148477 - DNA, 25 bp, Homo sapien
tggttttggagaccttcatggtgaa

SEQ ID NO: 2148478 - DNA, 25 bp, Homo sapien
ggtcagcagttgagatactccagtg

SEQ ID NO: 2148479 - DNA, 25 bp, Homo sapien
aagtaggtaccagcagagattcgtg

SEQ ID NO: 2148480 - DNA, 25 bp, Homo sapien
gaagctgtgaattaagtctttcctc

SEQ ID NO: 2148481 - DNA, 25 bp, Homo sapien
aactgttagcccagaccagtcatac

SEQ ID NO: 2148482 - DNA, 25 bp, Homo sapien
aaagagaaggacaactgttagccca

SEQ ID NO: 2148483 - DNA, 25 bp, Homo sapien
ttagcccagaccagtcataccaact

SEQ ID NO: 2148484 - DNA, 25 bp, Homo sapien
aagagaaggacaactgttagcccag

SEQ ID NO: 2148485 - DNA, 25 bp, Homo sapien
acataagaaacaacaatgggtgcat

SEQ ID NO: 2148486 - DNA, 25 bp, Homo sapien
ctacataagaaacaacaatgggtgc

SEQ ID NO: 2148487 - DNA, 25 bp, Homo sapien
tacataagaaacaacaatgggtgca

SEQ ID NO: 2148488 - DNA, 25 bp, Homo sapien
cataagaaacaacaatgggtgcatc

SEQ ID NO: 2148489 - DNA, 25 bp, Homo sapien
ctgtgaactaatgcttggtggtcac

SEQ ID NO: 2148490 - DNA, 25 bp, Homo sapien
atatttggcatcagtaagattcttc

SEQ ID NO: 2148491 - DNA, 25 bp, Homo sapien
ttctcgaaagcgaaccattcctggt

SEQ ID NO: 2148492 - DNA, 25 bp, Homo sapien
tcagacacgattgaataagaagggg

SEQ ID NO: 2148493 - DNA, 25 bp, Homo sapien
tgactccatgaaactatatttggca

SEQ ID NO: 2148494 - DNA, 25 bp, Homo sapien
ggtttgacgtgctgtattgtatttt

SEQ ID NO: 2148495 - DNA, 25 bp, Homo sapien
attctgtggtttgacgtgctgtatt

SEQ ID NO: 2148496 - DNA, 25 bp, Homo sapien
ctgtggtttgacgtgctgtattgta

SEQ ID NO: 2148497 - DNA, 25 bp, Homo sapien
ttgacgtgctgtattgtatttttaa

SEQ ID NO: 2148498 - DNA, 25 bp, Homo sapien
tattatgagctgtagaactgttgcc

SEQ ID NO: 2148499 - DNA, 25 bp, Homo sapien
caatgattgtatccttcccgtgtca

SEQ ID NO: 2148500 - DNA, 25 bp, Homo sapien
ctggttactctgctaatgtgatgga

SEQ ID NO: 2148501 - DNA, 25 bp, Homo sapien
gcagtgaggcttaactcccagtaaa

SEQ ID NO: 2148502 - DNA, 25 bp, Homo sapien
agattttctgattgtccagaagaca

SEQ ID NO: 2148503 - DNA, 25 bp, Homo sapien
gaacaagattctggccagttttcga

SEQ ID NO: 2148504 - DNA, 25 bp, Homo sapien
tctgagaaagctttacagtgctact

SEQ ID NO: 2148505 - DNA, 25 bp, Homo sapien
gaccaaagggaaggatgacaaataa

SEQ ID NO: 2148506 - DNA, 25 bp, Homo sapien
aggccaagtatgcttcttctacaac

SEQ ID NO: 2148507 - DNA, 25 bp, Homo sapien
aaaggccaagtatgcttcttctaca

SEQ ID NO: 2148508 - DNA, 25 bp, Homo sapien
aaggccaagtatgcttcttctacaa

SEQ ID NO: 2148509 - DNA, 25 bp, Homo sapien
caaaaggccaagtatgcttcttcta

SEQ ID NO: 2148510 - DNA, 25 bp, Homo sapien
tctcttgaaggtattaagtgtcctt

SEQ ID NO: 2148511 - DNA, 25 bp, Homo sapien
gtccttgtgttcacactttcaggcc

SEQ ID NO: 2148512 - DNA, 25 bp, Homo sapien
gaaaggtaatcgacctctcttgaag

SEQ ID NO: 2148513 - DNA, 25 bp, Homo sapien
ccttgagaggttgatgcaatttgta

SEQ ID NO: 2148514 - DNA, 25 bp, Homo sapien
taacagcaggtactgattgcaatgt

SEQ ID NO: 2148515 - DNA, 25 bp, Homo sapien
tgtccactagacttacatccaggag

SEQ ID NO: 2148516 - DNA, 25 bp, Homo sapien
catcttgttaccaagcatagcgtta

SEQ ID NO: 2148517 - DNA, 25 bp, Homo sapien
cccaatggtccactgtcaggatact

SEQ ID NO: 2148518 - DNA, 25 bp, Homo sapien
ctgctctgagttccggctcgtggac

SEQ ID NO: 2148519 - DNA, 25 bp, Homo sapien
gctcctgctctgagttccggctcgt

SEQ ID NO: 2148520 - DNA, 25 bp, Homo sapien
tcctgctctgagttccggctcgtgg

SEQ ID NO: 2148521 - DNA, 25 bp, Homo sapien
tggggtccttcggctcctgctctga

SEQ ID NO: 2148522 - DNA, 25 bp, Homo sapien
tacagccttcgcatctggaaaggag

SEQ ID NO: 2148523 - DNA, 25 bp, Homo sapien
ccgccgcgcttctggttatccttga

SEQ ID NO: 2148524 - DNA, 25 bp, Homo sapien
tcaggtgcaacctgctgaacgcact

SEQ ID NO: 2148525 - DNA, 25 bp, Homo sapien
gggctgaagagacgccgctaatatt

SEQ ID NO: 2148526 - DNA, 25 bp, Homo sapien
caaaggtattcaaggactgaggcag

SEQ ID NO: 2148527 - DNA, 25 bp, Homo sapien
actcacatccatgcagattgcaagc

SEQ ID NO: 2148528 - DNA, 25 bp, Homo sapien
gacaaaggtattcaaggactgaggc

SEQ ID NO: 2148529 - DNA, 25 bp, Homo sapien
tcacatccatgcagattgcaagctg

SEQ ID NO: 2148530 - DNA, 25 bp, Homo sapien
ggcactaattcgatattcaaacaag

SEQ ID NO: 2148531 - DNA, 25 bp, Homo sapien
ttaacagagtagaggtaccactaga

SEQ ID NO: 2148532 - DNA, 25 bp, Homo sapien
tatgctagtcattccagttatctcc

SEQ ID NO: 2148533 - DNA, 25 bp, Homo sapien
gagcacgtcgtctgtgtcagggaca

SEQ ID NO: 2148534 - DNA, 25 bp, Homo sapien
tggttgttgctacaatctgccagga

SEQ ID NO: 2148535 - DNA, 25 bp, Homo sapien
cctacccataggatgttagatcaga

SEQ ID NO: 2148536 - DNA, 25 bp, Homo sapien
tcagaggagattacacacatttgca

SEQ ID NO: 2148537 - DNA, 25 bp, Homo sapien
tataccacttatcgcaagctgtctg

SEQ ID NO: 2148538 - DNA, 25 bp, Homo sapien
catgggaacaccttgcttgtttcag

SEQ ID NO: 2148539 - DNA, 25 bp, Homo sapien
tctggcatctagcatgggaacacct

SEQ ID NO: 2148540 - DNA, 25 bp, Homo sapien
cacgggtaaacctgtctctggcatc

SEQ ID NO: 2148541 - DNA, 25 bp, Homo sapien
atcctataccatggacaagaactgc

SEQ ID NO: 2148542 - DNA, 25 bp, Homo sapien
caccttccttgttgaaagtgagtaa

SEQ ID NO: 2148543 - DNA, 25 bp, Homo sapien
actccaactcgccttccctgttgga

SEQ ID NO: 2148544 - DNA, 25 bp, Homo sapien
accttagatatcgaccaaatttggg

SEQ ID NO: 2148545 - DNA, 25 bp, Homo sapien
aactcaccttccttgttgaaagtga

SEQ ID NO: 2148546 - DNA, 25 bp, Homo sapien
aatcattcttgatcctcccaatgac

SEQ ID NO: 2148547 - DNA, 25 bp, Homo sapien
caacaccaagcaattaaggcgaagt

SEQ ID NO: 2148548 - DNA, 25 bp, Homo sapien
ccttacatatctgtggggacaaatc

SEQ ID NO: 2148549 - DNA, 25 bp, Homo sapien
gagccctgtgttccaacgggagaag

SEQ ID NO: 2148550 - DNA, 25 bp, Homo sapien
tatcctggtatgtcagacttgtggc

SEQ ID NO: 2148551 - DNA, 25 bp, Homo sapien
gggtttttatcctggtatgtcagac

SEQ ID NO: 2148552 - DNA, 25 bp, Homo sapien
tttttatcctggtatgtcagacttg

SEQ ID NO: 2148553 - DNA, 25 bp, Homo sapien
tttatcctggtatgtcagacttgtg

SEQ ID NO: 2148554 - DNA, 25 bp, Homo sapien
ggacctgcagcaaagcttataagtg

SEQ ID NO: 2148555 - DNA, 25 bp, Homo sapien
ccaaatttggtacagcttaagacta

SEQ ID NO: 2148556 - DNA, 25 bp, Homo sapien
ctaaggtacccctcattaatgacag

SEQ ID NO: 2148557 - DNA, 25 bp, Homo sapien
caaggacatacaagacaagagggaa

SEQ ID NO: 2148558 - DNA, 25 bp, Homo sapien
taaactgggaaaggatatgtctccc

SEQ ID NO: 2148559 - DNA, 25 bp, Homo sapien
tagtaagggtcgaaaacctagctgc

SEQ ID NO: 2148560 - DNA, 25 bp, Homo sapien
tatgtgatgtctcgatgtgcttcca

SEQ ID NO: 2148561 - DNA, 25 bp, Homo sapien
tccaaataatcccaggttgggtgca

SEQ ID NO: 2148562 - DNA, 25 bp, Homo sapien
tcagactgaaacatttggtagccta

SEQ ID NO: 2148563 - DNA, 25 bp, Homo sapien
tatttacagtaagtcgcgcatgtca

SEQ ID NO: 2148564 - DNA, 25 bp, Homo sapien
gcatgtcagtgtacattccgtctgg

SEQ ID NO: 2148565 - DNA, 25 bp, Homo sapien
tgagatctcctatactcagttggca

SEQ ID NO: 2148566 - DNA, 25 bp, Homo sapien
tattcgaactaatgctccaaagagc

SEQ ID NO: 2148567 - DNA, 25 bp, Homo sapien
agcataaactctttggttaagaatt

SEQ ID NO: 2148568 - DNA, 25 bp, Homo sapien
gggattattcgaactaatgctccaa

SEQ ID NO: 2148569 - DNA, 25 bp, Homo sapien
cacttccatgtggaggcatcctggg

SEQ ID NO: 2148570 - DNA, 25 bp, Homo sapien
tggaaatttcccattaccagaggga

SEQ ID NO: 2148571 - DNA, 25 bp, Homo sapien
ggcatctcctttatttgtggcatga

SEQ ID NO: 2148572 - DNA, 25 bp, Homo sapien
gagggaacatgacaatccacggaaa

SEQ ID NO: 2148573 - DNA, 25 bp, Homo sapien
aaaatgcggtaaggaaagctcagct

SEQ ID NO: 2148574 - DNA, 25 bp, Homo sapien
tagggtgtagtcagcaaagctgcaa

SEQ ID NO: 2148575 - DNA, 25 bp, Homo sapien
tcctcagggtaataactaggcccga

SEQ ID NO: 2148576 - DNA, 25 bp, Homo sapien
actaggcccgagtagggtgtagtca

SEQ ID NO: 2148577 - DNA, 25 bp, Homo sapien
tcagctttcctcagggtaataacta

SEQ ID NO: 2148578 - DNA, 25 bp, Homo sapien
catgcccatctccaagatcccgatc

SEQ ID NO: 2148579 - DNA, 25 bp, Homo sapien
tgctggaactctgaacaagcagccc

SEQ ID NO: 2148580 - DNA, 25 bp, Homo sapien
gcctttgctggaactctgaacaagc

SEQ ID NO: 2148581 - DNA, 25 bp, Homo sapien
ctccaagatcccgatcccagcactg

SEQ ID NO: 2148582 - DNA, 25 bp, Homo sapien
atccccggtccggacaagaagtgca

SEQ ID NO: 2148583 - DNA, 25 bp, Homo sapien
tccccggtccggacaagaagtgcaa

SEQ ID NO: 2148584 - DNA, 25 bp, Homo sapien
cattaagttcttcccggtcctcgat

SEQ ID NO: 2148585 - DNA, 25 bp, Homo sapien
gtgcgataacggtgccatcttggct

SEQ ID NO: 2148586 - DNA, 25 bp, Homo sapien
gctgttgatgaaacggtgcgcctcc

SEQ ID NO: 2148587 - DNA, 25 bp, Homo sapien
tcctgggctgaagtttcagtccctg

SEQ ID NO: 2148588 - DNA, 25 bp, Homo sapien
tgaaagctgcacaaagataatcggc

SEQ ID NO: 2148589 - DNA, 25 bp, Homo sapien
ttgcctgagttcactggagcacctg

SEQ ID NO: 2148590 - DNA, 25 bp, Homo sapien
cggctgtcgcaggaaaaggtagttt

SEQ ID NO: 2148591 - DNA, 25 bp, Homo sapien
gttaggggccgcaaactgaaagctg

SEQ ID NO: 2148592 - DNA, 25 bp, Homo sapien
cacgtccgggtatggaacgagttga

SEQ ID NO: 2148593 - DNA, 25 bp, Homo sapien
gcggctgctcctagtttacatctgg

SEQ ID NO: 2148594 - DNA, 25 bp, Homo sapien
tacatctggacggtattttgccctc

SEQ ID NO: 2148595 - DNA, 25 bp, Homo sapien
tggccactgccactgacgagtttct

SEQ ID NO: 2148596 - DNA, 25 bp, Homo sapien
ccctaggtagcttttggctcagaaa

SEQ ID NO: 2148597 - DNA, 25 bp, Homo sapien
cccctaggtagcttttggctcagaa

SEQ ID NO: 2148598 - DNA, 25 bp, Homo sapien
ctaggtagcttttggctcagaaagg

SEQ ID NO: 2148599 - DNA, 25 bp, Homo sapien
aacccctaggtagcttttggctcag

SEQ ID NO: 2148600 - DNA, 25 bp, Homo sapien
gactggtttcaagagccttggcaga

SEQ ID NO: 2148601 - DNA, 25 bp, Homo sapien
gccatgggcaagagtgaaagtgaaa

SEQ ID NO: 2148602 - DNA, 25 bp, Homo sapien
ctagaaagcacgaccactagtgtga

SEQ ID NO: 2148603 - DNA, 25 bp, Homo sapien
gaccactagtgtgagcggtaggact

SEQ ID NO: 2148604 - DNA, 25 bp, Homo sapien
gggatgccatgtggggcagagggcc

SEQ ID NO: 2148605 - DNA, 25 bp, Homo sapien
ggggatgccatgtggggcagagggc

SEQ ID NO: 2148606 - DNA, 25 bp, Homo sapien
atgccatgtggggcagagggccacc

SEQ ID NO: 2148607 - DNA, 25 bp, Homo sapien
ctaaggggatgccatgtggggcaga

SEQ ID NO: 2148608 - DNA, 25 bp, Homo sapien
tgggtagctgccataattggcggac

SEQ ID NO: 2148609 - DNA, 25 bp, Homo sapien
cacagcttgtcatacccataggggt

SEQ ID NO: 2148610 - DNA, 25 bp, Homo sapien
tagctgccataattggcggaccaga

SEQ ID NO: 2148611 - DNA, 25 bp, Homo sapien
taattggcggaccagaagacagaag

SEQ ID NO: 2148612 - DNA, 25 bp, Homo sapien
gaatcgcataaaaccgggaggtgga

SEQ ID NO: 2148613 - DNA, 25 bp, Homo sapien
gagaatcgcataaaaccgggaggtg

SEQ ID NO: 2148614 - DNA, 25 bp, Homo sapien
cctgggcgacagagggagactccat

SEQ ID NO: 2148615 - DNA, 25 bp, Homo sapien
gcaggagaatcgcataaaaccggga

SEQ ID NO: 2148616 - DNA, 25 bp, Homo sapien
ccatgtacggatttccaccaaaatt

SEQ ID NO: 2148617 - DNA, 25 bp, Homo sapien
ggcagaggagtgtgctccctcatga

SEQ ID NO: 2148618 - DNA, 25 bp, Homo sapien
ccagaagagaacgtatccatgtacg

SEQ ID NO: 2148619 - DNA, 25 bp, Homo sapien
gaacgtatccatgtacggatttcca

SEQ ID NO: 2148620 - DNA, 25 bp, Homo sapien
tttactccagatcgccagccagttt

SEQ ID NO: 2148621 - DNA, 25 bp, Homo sapien
cctggttcacgtggatgtgaggatc

SEQ ID NO: 2148622 - DNA, 25 bp, Homo sapien
ttttttcgtcgatttgggcacagag

SEQ ID NO: 2148623 - DNA, 25 bp, Homo sapien
gatcttaattccatatccctgaggc

SEQ ID NO: 2148624 - DNA, 25 bp, Homo sapien
gggagcaactggtgggagtggagct

SEQ ID NO: 2148625 - DNA, 25 bp, Homo sapien
gtgggagtggagcttagcctttttc

SEQ ID NO: 2148626 - DNA, 25 bp, Homo sapien
tgtgagattcaacccccacaatggg

SEQ ID NO: 2148627 - DNA, 25 bp, Homo sapien
tgtgtgagattcaacccccacaatg

SEQ ID NO: 2148628 - DNA, 25 bp, Homo sapien
aatttttgctgcatattctggggct

SEQ ID NO: 2148629 - DNA, 25 bp, Homo sapien
tatataatttttgctgcatattctg

SEQ ID NO: 2148630 - DNA, 25 bp, Homo sapien
ataatttttgctgcatattctgggg

SEQ ID NO: 2148631 - DNA, 25 bp, Homo sapien
agtatataatttttgctgcatattc

SEQ ID NO: 2148632 - DNA, 25 bp, Homo sapien
gtgtcaattagagggccgaggcata

SEQ ID NO: 2148633 - DNA, 25 bp, Homo sapien
taaaggacgtagtcccatgtaccac

SEQ ID NO: 2148634 - DNA, 25 bp, Homo sapien
tttccacaaggtatgacagagcaag

SEQ ID NO: 2148635 - DNA, 25 bp, Homo sapien
gcgtcttggctgcaggtgatcacaa

SEQ ID NO: 2148636 - DNA, 25 bp, Homo sapien
tggacctgcagtgatttcccttctt

SEQ ID NO: 2148637 - DNA, 25 bp, Homo sapien
gtggacctgcagtgatttcccttct

SEQ ID NO: 2148638 - DNA, 25 bp, Homo sapien
cagtgtatccacttagagacctcct

SEQ ID NO: 2148639 - DNA, 25 bp, Homo sapien
ggtgtctagactcagcaacagtgta

SEQ ID NO: 2148640 - DNA, 25 bp, Homo sapien
gtcgccgcctgcaacgttcttctgg

SEQ ID NO: 2148641 - DNA, 25 bp, Homo sapien
gtgctagaactgtgagtcgccgcct

SEQ ID NO: 2148642 - DNA, 25 bp, Homo sapien
accctgagtggtgtggatggagctg

SEQ ID NO: 2148643 - DNA, 25 bp, Homo sapien
gtggatggagctgtgcacttctgca

SEQ ID NO: 2148644 - DNA, 25 bp, Homo sapien
atggagctgtgcacttctgcagatt

SEQ ID NO: 2148645 - DNA, 25 bp, Homo sapien
gtgtggatggagctgtgcacttctg

SEQ ID NO: 2148646 - DNA, 25 bp, Homo sapien
cctgtagttctttctcgtcgtcgac

SEQ ID NO: 2148647 - DNA, 25 bp, Homo sapien
cagggctgagcaagctggtcatata

SEQ ID NO: 2148648 - DNA, 25 bp, Homo sapien
tcatatactggctacactggtccgg

SEQ ID NO: 2148649 - DNA, 25 bp, Homo sapien
ttctcgtcgtcgactgcagggctga

SEQ ID NO: 2148650 - DNA, 25 bp, Homo sapien
cagtggtagtgcaggggtatcatcc

SEQ ID NO: 2148651 - DNA, 25 bp, Homo sapien
ttcctgagttcgcaaaagcatgtgt

SEQ ID NO: 2148652 - DNA, 25 bp, Homo sapien
cgcaaaagcatgtgtcccatcaagg

SEQ ID NO: 2148653 - DNA, 25 bp, Homo sapien
ggtatcatccagtctactcgcctct

SEQ ID NO: 2148654 - DNA, 25 bp, Homo sapien
gctgtcctcaacgttgccatcgctg

SEQ ID NO: 2148655 - DNA, 25 bp, Homo sapien
tccttcccataggtggccaggaact

SEQ ID NO: 2148656 - DNA, 25 bp, Homo sapien
ccctgtgggcgcgaatactgctgcc

SEQ ID NO: 2148657 - DNA, 25 bp, Homo sapien
tttgacctcttcagtaagcgacagc

SEQ ID NO: 2148658 - DNA, 25 bp, Homo sapien
ctgcactgcgagttcagtcacattc

SEQ ID NO: 2148659 - DNA, 25 bp, Homo sapien
gagttcagtcacattcatgcttctt

SEQ ID NO: 2148660 - DNA, 25 bp, Homo sapien
gcgagttcagtcacattcatgcttc

SEQ ID NO: 2148661 - DNA, 25 bp, Homo sapien
cactgcgagttcagtcacattcatg

SEQ ID NO: 2148662 - DNA, 25 bp, Homo sapien
tccaaataggcaactctgaacacgt

SEQ ID NO: 2148663 - DNA, 25 bp, Homo sapien
cacgttcagtagtaatgtggaggag

SEQ ID NO: 2148664 - DNA, 25 bp, Homo sapien
tcccaaagcgggagtgtccaaatag

SEQ ID NO: 2148665 - DNA, 25 bp, Homo sapien
tactcgagcagaagatcccaatctc

SEQ ID NO: 2148666 - DNA, 25 bp, Homo sapien
catcccgctgatgaacaagggtgcc

SEQ ID NO: 2148667 - DNA, 25 bp, Homo sapien
caagggtgccgttatggcctcagct

SEQ ID NO: 2148668 - DNA, 25 bp, Homo sapien
gaagtaatcatctctcatcccgctg

SEQ ID NO: 2148669 - DNA, 25 bp, Homo sapien
tcagctgcggttaccatgacaggct

SEQ ID NO: 2148670 - DNA, 25 bp, Homo sapien
aacgtttaatagacatttgatgaac

SEQ ID NO: 2148671 - DNA, 25 bp, Homo sapien
gaatctggctcaaagacactctggc

SEQ ID NO: 2148672 - DNA, 25 bp, Homo sapien
gatggggtgctatgcaaaatatgaa

SEQ ID NO: 2148673 - DNA, 25 bp, Homo sapien
ttgagaacttactgaccccatgtga

SEQ ID NO: 2148674 - DNA, 25 bp, Homo sapien
ccttgcaaaaccctcacaccaaatg

SEQ ID NO: 2148675 - DNA, 25 bp, Homo sapien
ccaaatgcaattgcgtggctgaagc

SEQ ID NO: 2148676 - DNA, 25 bp, Homo sapien
tgaagcttgacacccacaattgtga

SEQ ID NO: 2148677 - DNA, 25 bp, Homo sapien
cagcctgacagaaagttcatgctca

SEQ ID NO: 2148678 - DNA, 25 bp, Homo sapien
gtaaaaaggctcaggcttaagacag

SEQ ID NO: 2148679 - DNA, 25 bp, Homo sapien
cctgcaggcctttgaaggaaagcat

SEQ ID NO: 2148680 - DNA, 25 bp, Homo sapien
ctttggaggaggttgattactttct

SEQ ID NO: 2148681 - DNA, 25 bp, Homo sapien
ttagaggtaaaaaggctcaggctta

SEQ ID NO: 2148682 - DNA, 25 bp, Homo sapien
cctttttgatgtggcgggtaggcct

SEQ ID NO: 2148683 - DNA, 25 bp, Homo sapien
tttggagttgacctttttgatgtgg

SEQ ID NO: 2148684 - DNA, 25 bp, Homo sapien
tggcgggtaggcctgtggaatttct

SEQ ID NO: 2148685 - DNA, 25 bp, Homo sapien
ttgacctttttgatgtggcgggtag

SEQ ID NO: 2148686 - DNA, 25 bp, Homo sapien
tggtgttggcggtcatgattttgac

SEQ ID NO: 2148687 - DNA, 25 bp, Homo sapien
cttaattgcttggtgttggcggtca

SEQ ID NO: 2148688 - DNA, 25 bp, Homo sapien
ggtcatgattttgactcctggttaa

SEQ ID NO: 2148689 - DNA, 25 bp, Homo sapien
aattgcttggtgttggcggtcatga

SEQ ID NO: 2148690 - DNA, 25 bp, Homo sapien
tcaccatcatcagtagtattctagc

SEQ ID NO: 2148691 - DNA, 25 bp, Homo sapien
tgtggcactagaaggttcatagcgg

SEQ ID NO: 2148692 - DNA, 25 bp, Homo sapien
gatcggctttctgggtgtcagacca

SEQ ID NO: 2148693 - DNA, 25 bp, Homo sapien
tagctctggagcttacgtgttcacc

SEQ ID NO: 2148694 - DNA, 25 bp, Homo sapien
tcatccccaactcccctacctatcc

SEQ ID NO: 2148695 - DNA, 25 bp, Homo sapien
ctggtaatcaaccttctactatgtc

SEQ ID NO: 2148696 - DNA, 25 bp, Homo sapien
tcaagtgatcattctttgtattaca

SEQ ID NO: 2148697 - DNA, 25 bp, Homo sapien
taatcaaccttctactatgtccatg

SEQ ID NO: 2148698 - DNA, 25 bp, Homo sapien
tctatagctttccttacatctctct

SEQ ID NO: 2148699 - DNA, 25 bp, Homo sapien
tacctctttatttctatagctttcc

SEQ ID NO: 2148700 - DNA, 25 bp, Homo sapien
gatgggatttcgcacttttgcctag

SEQ ID NO: 2148701 - DNA, 25 bp, Homo sapien
aggctcaggcgatccaatcctcctg

SEQ ID NO: 2148702 - DNA, 25 bp, Homo sapien
tgcttcctctgatattgccccagtt

SEQ ID NO: 2148703 - DNA, 25 bp, Homo sapien
tgttgcaccatactctgtggcctga

SEQ ID NO: 2148704 - DNA, 25 bp, Homo sapien
taagcatgtcagtgccatactcaaa

SEQ ID NO: 2148705 - DNA, 25 bp, Homo sapien
tcagtagttctccatagccctcagg

SEQ ID NO: 2148706 - DNA, 25 bp, Homo sapien
gcttcatctttcagcccgcttctga

SEQ ID NO: 2148707 - DNA, 25 bp, Homo sapien
agcgagtccgcttcatctttcagcc

SEQ ID NO: 2148708 - DNA, 25 bp, Homo sapien
cttgccttcagcgagtccgcttcat

SEQ ID NO: 2148709 - DNA, 25 bp, Homo sapien
ggagcccacttgccttcagcgagtc

SEQ ID NO: 2148710 - DNA, 25 bp, Homo sapien
cagttgtggtcgcattctcaagagc

SEQ ID NO: 2148711 - DNA, 25 bp, Homo sapien
tcttgttctctgactggggaatgga

SEQ ID NO: 2148712 - DNA, 25 bp, Homo sapien
gaatggaatgggctcagccaaggct

SEQ ID NO: 2148713 - DNA, 25 bp, Homo sapien
gctggggcgcaactctcactggaac

SEQ ID NO: 2148714 - DNA, 25 bp, Homo sapien
gaaatgttttgccaacgtactcgca

SEQ ID NO: 2148715 - DNA, 25 bp, Homo sapien
gaatgtcccgttttcgaggctgcag

SEQ ID NO: 2148716 - DNA, 25 bp, Homo sapien
gctgcagtagctccggtgtccggtt

SEQ ID NO: 2148717 - DNA, 25 bp, Homo sapien
ttggagcaaaggcaacggatactgc

SEQ ID NO: 2148718 - DNA, 25 bp, Homo sapien
tctgtgcggatttagaccctggcga

SEQ ID NO: 2148719 - DNA, 25 bp, Homo sapien
cagagtgcgcccaatattatagaac

SEQ ID NO: 2148720 - DNA, 25 bp, Homo sapien
tcaatgcggaaccaaaggatgagcg

SEQ ID NO: 2148721 - DNA, 25 bp, Homo sapien
taaggaagacctagtctctgtgcgg

SEQ ID NO: 2148722 - DNA, 25 bp, Homo sapien
gatcgggtaagacagtcgcaagcaa

SEQ ID NO: 2148723 - DNA, 25 bp, Homo sapien
tcgcaagcaattggatggaagggaa

SEQ ID NO: 2148724 - DNA, 25 bp, Homo sapien
gaagggaagcgagtcgttttcatcg

SEQ ID NO: 2148725 - DNA, 25 bp, Homo sapien
tctgccttcggttctttccgcaagg

SEQ ID NO: 2148726 - DNA, 25 bp, Homo sapien
gaaggctgggagtcccccaacaaga

SEQ ID NO: 2148727 - DNA, 25 bp, Homo sapien
tgccccttctttaaacgtcgctcca

SEQ ID NO: 2148728 - DNA, 25 bp, Homo sapien
tccagtctgggtcgacgtcgacgcg

SEQ ID NO: 2148729 - DNA, 25 bp, Homo sapien
tcctcctccggacgcgcggaaggct

SEQ ID NO: 2148730 - DNA, 25 bp, Homo sapien
aatgcaaacgcaggcgcggcccagg

SEQ ID NO: 2148731 - DNA, 25 bp, Homo sapien
cggagaaggcaagcgcgctccttcg

SEQ ID NO: 2148732 - DNA, 25 bp, Homo sapien
gacggagaaggcaagcgcgctcctt

SEQ ID NO: 2148733 - DNA, 25 bp, Homo sapien
ccagggacggagaaggcaagcgcgc

SEQ ID NO: 2148734 - DNA, 25 bp, Homo sapien
gctgagcctccgactctgccgcttc

SEQ ID NO: 2148735 - DNA, 25 bp, Homo sapien
acacaaagaaagagccggaggagct

SEQ ID NO: 2148736 - DNA, 25 bp, Homo sapien
gccctcgcggctcgtcccctccttc

SEQ ID NO: 2148737 - DNA, 25 bp, Homo sapien
cgctccccggcccacacaaagaaag

SEQ ID NO: 2148738 - DNA, 25 bp, Homo sapien
gacagaagtcgatattaagtggaaa

SEQ ID NO: 2148739 - DNA, 25 bp, Homo sapien
ctttggacagtttgccaaaaaccag

SEQ ID NO: 2148740 - DNA, 25 bp, Homo sapien
aatacgggcatttcgacagaagtcg

SEQ ID NO: 2148741 - DNA, 25 bp, Homo sapien
accagggcttccgaaatacgggcat

SEQ ID NO: 2148742 - DNA, 25 bp, Homo sapien
taaaggcattcatcatcagaaaggg

SEQ ID NO: 2148743 - DNA, 25 bp, Homo sapien
cataaaggcattcatcatcagaaag

SEQ ID NO: 2148744 - DNA, 25 bp, Homo sapien
aaggcattcatcatcagaaagggtg

SEQ ID NO: 2148745 - DNA, 25 bp, Homo sapien
ggcattcatcatcagaaagggtgac

SEQ ID NO: 2148746 - DNA, 25 bp, Homo sapien
aaagctcagcgcgtgcaatactgtg

SEQ ID NO: 2148747 - DNA, 25 bp, Homo sapien
tatgcagaatctacaccctggagcc

SEQ ID NO: 2148748 - DNA, 25 bp, Homo sapien
gaatattagatacatgcacctccac

SEQ ID NO: 2148749 - DNA, 25 bp, Homo sapien
ggaacaagtgtccaatttcatggct

SEQ ID NO: 2148750 - DNA, 25 bp, Homo sapien
tcacagaagagtccatggccacgtt

SEQ ID NO: 2148751 - DNA, 25 bp, Homo sapien
gatgcttttaacctgtgacaatggg

SEQ ID NO: 2148752 - DNA, 25 bp, Homo sapien
agcagactgccagagtactgaatgt

SEQ ID NO: 2148753 - DNA, 25 bp, Homo sapien
cacgttgctcattcaaggagttcag

SEQ ID NO: 2148754 - DNA, 25 bp, Homo sapien
tcaggaggtaaaggctcagtattac

SEQ ID NO: 2148755 - DNA, 25 bp, Homo sapien
aatcaggaggtaaaggctcagtatt

SEQ ID NO: 2148756 - DNA, 25 bp, Homo sapien
gaatcaggaggtaaaggctcagtat

SEQ ID NO: 2148757 - DNA, 25 bp, Homo sapien
agaatcaggaggtaaaggctcagta

SEQ ID NO: 2148758 - DNA, 25 bp, Homo sapien
cctgggttagattggacctgtgcca

SEQ ID NO: 2148759 - DNA, 25 bp, Homo sapien
tgtgttattactcggcaaagtctcc

SEQ ID NO: 2148760 - DNA, 25 bp, Homo sapien
cctttgtgggcagaatctcggagca

SEQ ID NO: 2148761 - DNA, 25 bp, Homo sapien
tataataggcattatagtagcccca

SEQ ID NO: 2148762 - DNA, 25 bp, Homo sapien
tagatgttttgatcctacgcctgga

SEQ ID NO: 2148763 - DNA, 25 bp, Homo sapien
caaagatgtattactgacggccgag

SEQ ID NO: 2148764 - DNA, 25 bp, Homo sapien
gataccttcgctcccctgtgtgatg

SEQ ID NO: 2148765 - DNA, 25 bp, Homo sapien
taccttctcacagtaacggcacgga

SEQ ID NO: 2148766 - DNA, 25 bp, Homo sapien
tagtaagactctggtattataaatt

SEQ ID NO: 2148767 - DNA, 25 bp, Homo sapien
ttagtaagactctggtattataaat

SEQ ID NO: 2148768 - DNA, 25 bp, Homo sapien
aaaaatatcttcccaggtcattggc

SEQ ID NO: 2148769 - DNA, 25 bp, Homo sapien
agtaagactctggtattataaattc

SEQ ID NO: 2148770 - DNA, 25 bp, Homo sapien
gacttcctagtggagattctacgca

SEQ ID NO: 2148771 - DNA, 25 bp, Homo sapien
ggactagcagattacacaacccaag

SEQ ID NO: 2148772 - DNA, 25 bp, Homo sapien
caaggtttcatatagttgaccagcc

SEQ ID NO: 2148773 - DNA, 25 bp, Homo sapien
gaccctgagacacatgcaagtaaga

SEQ ID NO: 2148774 - DNA, 25 bp, Homo sapien
tatttttgccacaagaagctctaag

SEQ ID NO: 2148775 - DNA, 25 bp, Homo sapien
tcatgacagggaagattgtacaagt

SEQ ID NO: 2148776 - DNA, 25 bp, Homo sapien
taatatcaggccatggttaatgaaa

SEQ ID NO: 2148777 - DNA, 25 bp, Homo sapien
gaacttaaagtcatgacagggaaga

SEQ ID NO: 2148778 - DNA, 25 bp, Homo sapien
atgatgtcattgcaaacaacttcta

SEQ ID NO: 2148779 - DNA, 25 bp, Homo sapien
gcatgatgtcattgcaaacaacttc

SEQ ID NO: 2148780 - DNA, 25 bp, Homo sapien
catgatgtcattgcaaacaacttct

SEQ ID NO: 2148781 - DNA, 25 bp, Homo sapien
cttctaaattgtggagttgtttcct

SEQ ID NO: 2148782 - DNA, 25 bp, Homo sapien
tgtagtcgtcccctggttcccaatg

SEQ ID NO: 2148783 - DNA, 25 bp, Homo sapien
ctggttcccaatgaagacctcagtt

SEQ ID NO: 2148784 - DNA, 25 bp, Homo sapien
gactagaagggcctactattctatc

SEQ ID NO: 2148785 - DNA, 25 bp, Homo sapien
ctactattctatccttccttttctg

SEQ ID NO: 2148786 - DNA, 25 bp, Homo sapien
ggttgagatctatatttatccctta

SEQ ID NO: 2148787 - DNA, 25 bp, Homo sapien
tagtggttgagatctatatttatcc

SEQ ID NO: 2148788 - DNA, 25 bp, Homo sapien
gtggttgagatctatatttatccct

SEQ ID NO: 2148789 - DNA, 25 bp, Homo sapien
ttgagatctatatttatcccttagc

SEQ ID NO: 2148790 - DNA, 25 bp, Homo sapien
ttcagtgggcaaagacgcagcagag

SEQ ID NO: 2148791 - DNA, 25 bp, Homo sapien
cagaggcaggcaatcgggtgagagt

SEQ ID NO: 2148792 - DNA, 25 bp, Homo sapien
caatcgggtgagagttctggagctt

SEQ ID NO: 2148793 - DNA, 25 bp, Homo sapien
gcttctgctggtacaggagacactg

SEQ ID NO: 2148794 - DNA, 25 bp, Homo sapien
gagtctgtagcgataactgtaagga

SEQ ID NO: 2148795 - DNA, 25 bp, Homo sapien
atggagcccttctggaccggagttg

SEQ ID NO: 2148796 - DNA, 25 bp, Homo sapien
ttctggaccggagttgccttctcat

SEQ ID NO: 2148797 - DNA, 25 bp, Homo sapien
gtagcgataactgtaaggaaaggat

SEQ ID NO: 2148798 - DNA, 25 bp, Homo sapien
aatgtacaatggtgcatcccaccag

SEQ ID NO: 2148799 - DNA, 25 bp, Homo sapien
catacatgttgttacaagaggtgga

SEQ ID NO: 2148800 - DNA, 25 bp, Homo sapien
ttggagatgcttcaaatttccactt

SEQ ID NO: 2148801 - DNA, 25 bp, Homo sapien
aaatgactcaatatttggagatgct

SEQ ID NO: 2148802 - DNA, 25 bp, Homo sapien
tggaacagtgacaaaacacaatacc

SEQ ID NO: 2148803 - DNA, 25 bp, Homo sapien
ctggaacagtgacaaaacacaatac

SEQ ID NO: 2148804 - DNA, 25 bp, Homo sapien
tcttcatctgctaagtagttctggt

SEQ ID NO: 2148805 - DNA, 25 bp, Homo sapien
ctaagtagttctggttcgcttcatc

SEQ ID NO: 2148806 - DNA, 25 bp, Homo sapien
tcatctgctaagtagttctggttcg

SEQ ID NO: 2148807 - DNA, 25 bp, Homo sapien
tctgctaagtagttctggttcgctt

SEQ ID NO: 2148808 - DNA, 25 bp, Homo sapien
ttcttcctcctcctccgatttgggc

SEQ ID NO: 2148809 - DNA, 25 bp, Homo sapien
tcttcttcctcctcctccgatttgg

SEQ ID NO: 2148810 - DNA, 25 bp, Homo sapien
cttcctcctcctccgatttgggcac

SEQ ID NO: 2148811 - DNA, 25 bp, Homo sapien
ctgaccttgaccctcttcctcctcc

SEQ ID NO: 2148812 - DNA, 25 bp, Homo sapien
ctctctggatcccacaggtattcac

SEQ ID NO: 2148813 - DNA, 25 bp, Homo sapien
ccttctctctggatcccacaggtat

SEQ ID NO: 2148814 - DNA, 25 bp, Homo sapien
ctgttcgggccagaaacatccttct

SEQ ID NO: 2148815 - DNA, 25 bp, Homo sapien
ctggatcccacaggtattcactcat

SEQ ID NO: 2148816 - DNA, 25 bp, Homo sapien
catccagcgtatggtaaaggagccc

SEQ ID NO: 2148817 - DNA, 25 bp, Homo sapien
gatggaatctgtccacagtctaggc

SEQ ID NO: 2148818 - DNA, 25 bp, Homo sapien
cattgcaactgatgttgagcccagt

SEQ ID NO: 2148819 - DNA, 25 bp, Homo sapien
tggcattgggactattgggacttac

SEQ ID NO: 2148820 - DNA, 25 bp, Homo sapien
gaaatagtgtgtacatgcagagggt

SEQ ID NO: 2148821 - DNA, 25 bp, Homo sapien
tacccgctccgtgaaggttggtata

SEQ ID NO: 2148822 - DNA, 25 bp, Homo sapien
tgcagagggtgatcacagcagccaa

SEQ ID NO: 2148823 - DNA, 25 bp, Homo sapien
tggtatatagggactgatggtcaga

SEQ ID NO: 2148824 - DNA, 25 bp, Homo sapien
ctggcaatgaaaacaggtcttggat

SEQ ID NO: 2148825 - DNA, 25 bp, Homo sapien
tttgtattgattcccatgaaaccat

SEQ ID NO: 2148826 - DNA, 25 bp, Homo sapien
ggtcttggatatattaacccattct

SEQ ID NO: 2148827 - DNA, 25 bp, Homo sapien
ttttttgtattgattcccatgaaac

SEQ ID NO: 2148828 - DNA, 25 bp, Homo sapien
gctatgggcgaagggtctgatcata

SEQ ID NO: 2148829 - DNA, 25 bp, Homo sapien
gaaagccatttaggctaatcacata

SEQ ID NO: 2148830 - DNA, 25 bp, Homo sapien
gctgccaagtgtcgggttcagaaac

SEQ ID NO: 2148831 - DNA, 25 bp, Homo sapien
tcagaaacgttgaagttgaagttaa

SEQ ID NO: 2148832 - DNA, 25 bp, Homo sapien
aaagagctttccactattcagacga

SEQ ID NO: 2148833 - DNA, 25 bp, Homo sapien
gttagtaagactgggattcctgggc

SEQ ID NO: 2148834 - DNA, 25 bp, Homo sapien
gatgcaaagtaaggacagaccatga

SEQ ID NO: 2148835 - DNA, 25 bp, Homo sapien
gacaacatacaatcacacactagag

SEQ ID NO: 2148836 - DNA, 25 bp, Homo sapien
tcttagcagggaatccggcaatata

SEQ ID NO: 2148837 - DNA, 25 bp, Homo sapien
aaaactagtgcttttcctagcattt

SEQ ID NO: 2148838 - DNA, 25 bp, Homo sapien
catcatcatcaggtcagaattggta

SEQ ID NO: 2148839 - DNA, 25 bp, Homo sapien
tatatttgcaatcgcttgcaagcat

SEQ ID NO: 2148840 - DNA, 25 bp, Homo sapien
tcctgactagtcacttcagcccagt

SEQ ID NO: 2148841 - DNA, 25 bp, Homo sapien
tggcatcaggtgcccaacagccttc

SEQ ID NO: 2148842 - DNA, 25 bp, Homo sapien
ctggcatcaggtgcccaacagcctt

SEQ ID NO: 2148843 - DNA, 25 bp, Homo sapien
aagtcttcctgactagtcacttcag

SEQ ID NO: 2148844 - DNA, 25 bp, Homo sapien
atcttggatgaagtactgccccggg

SEQ ID NO: 2148845 - DNA, 25 bp, Homo sapien
gaaggagcgcttaaattggcaggcc

SEQ ID NO: 2148846 - DNA, 25 bp, Homo sapien
aaaagttgggtcctccagaccagag

SEQ ID NO: 2148847 - DNA, 25 bp, Homo sapien
gggctgtccagtagagtatccaaaa

SEQ ID NO: 2148848 - DNA, 25 bp, Homo sapien
aggatctccaagctcaggacgaaag

SEQ ID NO: 2148849 - DNA, 25 bp, Homo sapien
ggatctccaagctcaggacgaaagc

SEQ ID NO: 2148850 - DNA, 25 bp, Homo sapien
agtcagtttgccgtagtaagggtag

SEQ ID NO: 2148851 - DNA, 25 bp, Homo sapien
tagtagcggaggtcaaaagaagccg

SEQ ID NO: 2148852 - DNA, 25 bp, Homo sapien
gactctgggtagtaactgatggatc

SEQ ID NO: 2148853 - DNA, 25 bp, Homo sapien
taactgatggatcggatgtcatttt

SEQ ID NO: 2148854 - DNA, 25 bp, Homo sapien
gatgacatcatttatgacgcctttg

SEQ ID NO: 2148855 - DNA, 25 bp, Homo sapien
ggcactgcttggttcttcaccacgt

SEQ ID NO: 2148856 - DNA, 25 bp, Homo sapien
cctgcccacaaaacgatcattgatg

SEQ ID NO: 2148857 - DNA, 25 bp, Homo sapien
cattgccaccaagggggatgtgtag

SEQ ID NO: 2148858 - DNA, 25 bp, Homo sapien
tttctatgttcagggtaaagattac

SEQ ID NO: 2148859 - DNA, 25 bp, Homo sapien
aagtttctatgttcagggtaaagat

SEQ ID NO: 2148860 - DNA, 25 bp, Homo sapien
taagtttctatgttcagggtaaaga

SEQ ID NO: 2148861 - DNA, 25 bp, Homo sapien
gtttctatgttcagggtaaagatta

SEQ ID NO: 2148862 - DNA, 25 bp, Homo sapien
gacggtcttcatctctatcccagaa

SEQ ID NO: 2148863 - DNA, 25 bp, Homo sapien
tttaaacttgcttcggaccctgaga

SEQ ID NO: 2148864 - DNA, 25 bp, Homo sapien
tacgctacagggagattaccagcag

SEQ ID NO: 2148865 - DNA, 25 bp, Homo sapien
gcctttagacgattacaccagagag

SEQ ID NO: 2148866 - DNA, 25 bp, Homo sapien
tatatcgtataacttctccacttgc

SEQ ID NO: 2148867 - DNA, 25 bp, Homo sapien
tcttcactaccagacagtcagttcc

SEQ ID NO: 2148868 - DNA, 25 bp, Homo sapien
cttgcttgtcttcactaccagacag

SEQ ID NO: 2148869 - DNA, 25 bp, Homo sapien
ctatatcgtataacttctccacttg

SEQ ID NO: 2148870 - DNA, 25 bp, Homo sapien
tttctaaattgcaagccgggtgcgg

SEQ ID NO: 2148871 - DNA, 25 bp, Homo sapien
tcacatagtggttgccaagtgccct

SEQ ID NO: 2148872 - DNA, 25 bp, Homo sapien
gacctggagtcagatgcaatgcaag

SEQ ID NO: 2148873 - DNA, 25 bp, Homo sapien
gatggtactttctggtaagcagcag

SEQ ID NO: 2148874 - DNA, 25 bp, Homo sapien
tatgcatataaatacccaaacctcc

SEQ ID NO: 2148875 - DNA, 25 bp, Homo sapien
tccttcctcccaacatatgcatata

SEQ ID NO: 2148876 - DNA, 25 bp, Homo sapien
gaactttgtgaagtagtgtttccat

SEQ ID NO: 2148877 - DNA, 25 bp, Homo sapien
ctagattgcaactgaagaactttgt

SEQ ID NO: 2148878 - DNA, 25 bp, Homo sapien
ctgcaggttttgccaggccaacacc

SEQ ID NO: 2148879 - DNA, 25 bp, Homo sapien
tgcaggttttgccaggccaacaccc

SEQ ID NO: 2148880 - DNA, 25 bp, Homo sapien
tccacagtaagggtctgagttggag

SEQ ID NO: 2148881 - DNA, 25 bp, Homo sapien
taagggtctgagttggagccactac

SEQ ID NO: 2148882 - DNA, 25 bp, Homo sapien
gatgcctgacaggtgcttctcccca

SEQ ID NO: 2148883 - DNA, 25 bp, Homo sapien
agtggaagttttgatggcaagagcc

SEQ ID NO: 2148884 - DNA, 25 bp, Homo sapien
caacagtggatcagacagtacgact

SEQ ID NO: 2148885 - DNA, 25 bp, Homo sapien
ccttgctaagcatataaactggaaa

SEQ ID NO: 2148886 - DNA, 25 bp, Homo sapien
aaaatcagcttgtgaccttgctaag

SEQ ID NO: 2148887 - DNA, 25 bp, Homo sapien
ccttttgggtatgagactaatatca

SEQ ID NO: 2148888 - DNA, 25 bp, Homo sapien
gcccttgttgaagcatattccatgg

SEQ ID NO: 2148889 - DNA, 25 bp, Homo sapien
gcagtgaagcatagcaactaggctc

SEQ ID NO: 2148890 - DNA, 25 bp, Homo sapien
tgagctagataatcagcccttgttg

SEQ ID NO: 2148891 - DNA, 25 bp, Homo sapien
tattccatggtataagagtagcaca

SEQ ID NO: 2148892 - DNA, 25 bp, Homo sapien
catcaacgtgcaatgttttaaggtc

SEQ ID NO: 2148893 - DNA, 25 bp, Homo sapien
ggtctcaagcaccatcatgctggat

SEQ ID NO: 2148894 - DNA, 25 bp, Homo sapien
tccttgtgcccatagcggtgggagc

SEQ ID NO: 2148895 - DNA, 25 bp, Homo sapien
ggtctatcttaagaagccctggcca

SEQ ID NO: 2148896 - DNA, 25 bp, Homo sapien
tcaagtgtggaattggaaaccattc

SEQ ID NO: 2148897 - DNA, 25 bp, Homo sapien
tgagatgggttctcgatatgctgcc

SEQ ID NO: 2148898 - DNA, 25 bp, Homo sapien
catgctcaactaaggacacagatat

SEQ ID NO: 2148899 - DNA, 25 bp, Homo sapien
catctacataatcagtcaagtgtgg

SEQ ID NO: 2148900 - DNA, 25 bp, Homo sapien
gaaaacctttatggctcaagatcag

SEQ ID NO: 2148901 - DNA, 25 bp, Homo sapien
tatgcagccatatatggaaggttcc

SEQ ID NO: 2148902 - DNA, 25 bp, Homo sapien
tctcttagagctacagcgagctgca

SEQ ID NO: 2148903 - DNA, 25 bp, Homo sapien
cacacatatataggcagttgcatgc

SEQ ID NO: 2148904 - DNA, 25 bp, Homo sapien
tatgctggatatcagactctgtaac

SEQ ID NO: 2148905 - DNA, 25 bp, Homo sapien
catgcaatactggtcaacttaaggt

SEQ ID NO: 2148906 - DNA, 25 bp, Homo sapien
caagagtgttcgctggatgatgaca

SEQ ID NO: 2148907 - DNA, 25 bp, Homo sapien
caatacgtgatctctgttacaaaag

SEQ ID NO: 2148908 - DNA, 25 bp, Homo sapien
ttcttatatgtgcaacaaagagcag

SEQ ID NO: 2148909 - DNA, 25 bp, Homo sapien
tgtttcagtgtctggagcatttcag

SEQ ID NO: 2148910 - DNA, 25 bp, Homo sapien
tacctttgatctaagggttcagcct

SEQ ID NO: 2148911 - DNA, 25 bp, Homo sapien
ttcaatgtgacacaaggaaagtatt

SEQ ID NO: 2148912 - DNA, 25 bp, Homo sapien
gacatacacgaatttatccagagga

SEQ ID NO: 2148913 - DNA, 25 bp, Homo sapien
tggcatgccctacataaatgcttgg

SEQ ID NO: 2148914 - DNA, 25 bp, Homo sapien
cagcaaaccaggcaaagggcaacct

SEQ ID NO: 2148915 - DNA, 25 bp, Homo sapien
catggcactgtgacatataatggaa

SEQ ID NO: 2148916 - DNA, 25 bp, Homo sapien
caatgctaggcactgctggcagtac

SEQ ID NO: 2148917 - DNA, 25 bp, Homo sapien
agaccaaggtgcctcttgtttggca

SEQ ID NO: 2148918 - DNA, 25 bp, Homo sapien
tcagacaaagaaggttgagagacac

SEQ ID NO: 2148919 - DNA, 25 bp, Homo sapien
ggcaaactacagtagtagaaggcat

SEQ ID NO: 2148920 - DNA, 25 bp, Homo sapien
tgctccgcccagtagggaaaccgaa

SEQ ID NO: 2148921 - DNA, 25 bp, Homo sapien
caaacgcaagagacacaaaaggcca

SEQ ID NO: 2148922 - DNA, 25 bp, Homo sapien
tagtggctttgctgaacaaggtcgc

SEQ ID NO: 2148923 - DNA, 25 bp, Homo sapien
caatgtttcgccctgatcgctgtgt

SEQ ID NO: 2148924 - DNA, 25 bp, Homo sapien
ggattgcaagctactcctggcgcca

SEQ ID NO: 2148925 - DNA, 25 bp, Homo sapien
taaaagggcagcacttcatcgttct

SEQ ID NO: 2148926 - DNA, 25 bp, Homo sapien
ctggaggaatgcctagaaagctgcc

SEQ ID NO: 2148927 - DNA, 25 bp, Homo sapien
catcgttcttttcgcgcagaggcca

SEQ ID NO: 2148928 - DNA, 25 bp, Homo sapien
caccagatgagtaggttcgctgaag

SEQ ID NO: 2148929 - DNA, 25 bp, Homo sapien
ctactgccagcgaagtccgaagcgc

SEQ ID NO: 2148930 - DNA, 25 bp, Homo sapien
tactgccagctactgccagcgaagt

SEQ ID NO: 2148931 - DNA, 25 bp, Homo sapien
gtgcaggttcatgctcgcataaagg

SEQ ID NO: 2148932 - DNA, 25 bp, Homo sapien
tgccaacccaggacaggtactaagc

SEQ ID NO: 2148933 - DNA, 25 bp, Homo sapien
aacaattgtgtttatgccaatcaaa

SEQ ID NO: 2148934 - DNA, 25 bp, Homo sapien
caattgtgtttatgccaatcaaagt

SEQ ID NO: 2148935 - DNA, 25 bp, Homo sapien
tgtgtttatgccaatcaaagtcatt

SEQ ID NO: 2148936 - DNA, 25 bp, Homo sapien
ttgtgtttatgccaatcaaagtcat

SEQ ID NO: 2148937 - DNA, 25 bp, Homo sapien
agttatcatgtattaatcttctgaa

SEQ ID NO: 2148938 - DNA, 25 bp, Homo sapien
atcttctgaatgtgcttcttttaaa

SEQ ID NO: 2148939 - DNA, 25 bp, Homo sapien
ctttattgaggcatcagtgacatat

SEQ ID NO: 2148940 - DNA, 25 bp, Homo sapien
gaggcatcagtgacatataataaac

SEQ ID NO: 2148941 - DNA, 25 bp, Homo sapien
tgttggagccgttaggaagattacc

SEQ ID NO: 2148942 - DNA, 25 bp, Homo sapien
gcatcaacttgcacactggtgtcta

SEQ ID NO: 2148943 - DNA, 25 bp, Homo sapien
tgagctcagctgacaagcaaatgca

SEQ ID NO: 2148944 - DNA, 25 bp, Homo sapien
cataccggaccatcaacaacagtgt

SEQ ID NO: 2148945 - DNA, 25 bp, Homo sapien
gaaatcgagttctcttagccactgg

SEQ ID NO: 2148946 - DNA, 25 bp, Homo sapien
tgctaaaaccctagatacaaaggtc

SEQ ID NO: 2148947 - DNA, 25 bp, Homo sapien
gccactggacacctagttttcagga

SEQ ID NO: 2148948 - DNA, 25 bp, Homo sapien
caggcttcctaggatttagcattcc

SEQ ID NO: 2148949 - DNA, 25 bp, Homo sapien
ttttactaccgatgaccaaatgaag

SEQ ID NO: 2148950 - DNA, 25 bp, Homo sapien
aacgtacctggtcttcatgaattcc

SEQ ID NO: 2148951 - DNA, 25 bp, Homo sapien
ttgcatagaatgttggccttgcagc

SEQ ID NO: 2148952 - DNA, 25 bp, Homo sapien
tcatatgcagtagccagtggataaa

SEQ ID NO: 2148953 - DNA, 25 bp, Homo sapien
tttgaaggaagcacatctcatatat

SEQ ID NO: 2148954 - DNA, 25 bp, Homo sapien
catctcatatatgagcataaaaacc

SEQ ID NO: 2148955 - DNA, 25 bp, Homo sapien
aggaagcacatctcatatatgagca

SEQ ID NO: 2148956 - DNA, 25 bp, Homo sapien
atctcatatatgagcataaaaaccc

SEQ ID NO: 2148957 - DNA, 25 bp, Homo sapien
gaagataagtagatgtgccgagaac

SEQ ID NO: 2148958 - DNA, 25 bp, Homo sapien
cttagagaagtaccggaagtgcaca

SEQ ID NO: 2148959 - DNA, 25 bp, Homo sapien
gagactctgtgctgtaaagcccagc

SEQ ID NO: 2148960 - DNA, 25 bp, Homo sapien
gaagccctttctatgtgcaggacac

SEQ ID NO: 2148961 - DNA, 25 bp, Homo sapien
taccgatacagaagaagctgcgttt

SEQ ID NO: 2148962 - DNA, 25 bp, Homo sapien
ttacaacccagggattcggcatccc

SEQ ID NO: 2148963 - DNA, 25 bp, Homo sapien
gagagagaagactttgattccacct

SEQ ID NO: 2148964 - DNA, 25 bp, Homo sapien
gctgcgttttgaagacaccctggag

SEQ ID NO: 2148965 - DNA, 25 bp, Homo sapien
tccagcagcgggcataatggcatga

SEQ ID NO: 2148966 - DNA, 25 bp, Homo sapien
taacatagggacattcctctccagc

SEQ ID NO: 2148967 - DNA, 25 bp, Homo sapien
cagccttgggtctgtggtgccttga

SEQ ID NO: 2148968 - DNA, 25 bp, Homo sapien
gagaaacaatttataccggcaccga

SEQ ID NO: 2148969 - DNA, 25 bp, Homo sapien
ttgtggtgagccaaggtagtgccat

SEQ ID NO: 2148970 - DNA, 25 bp, Homo sapien
gccattgcactctagcctgggcaac

SEQ ID NO: 2148971 - DNA, 25 bp, Homo sapien
gtgccattgcactctagcctgggca

SEQ ID NO: 2148972 - DNA, 25 bp, Homo sapien
tagtgccattgcactctagcctggg

SEQ ID NO: 2148973 - DNA, 25 bp, Homo sapien
ttctatcgtagacccaaaggacgga

SEQ ID NO: 2148974 - DNA, 25 bp, Homo sapien
gcccgtaggagttcaagccattgta

SEQ ID NO: 2148975 - DNA, 25 bp, Homo sapien
cactatacagatatgggagaggact

SEQ ID NO: 2148976 - DNA, 25 bp, Homo sapien
gaggctactacctctaaagacggtg

SEQ ID NO: 2148977 - DNA, 25 bp, Homo sapien
ttacccaagccagcaatggcggaac

SEQ ID NO: 2148978 - DNA, 25 bp, Homo sapien
tacccaagccagcaatggcggaaca

SEQ ID NO: 2148979 - DNA, 25 bp, Homo sapien
ccttacccaagccagcaatggcgga

SEQ ID NO: 2148980 - DNA, 25 bp, Homo sapien
acccaagccagcaatggcggaacag

SEQ ID NO: 2148981 - DNA, 25 bp, Homo sapien
ttctctagtcacactaacctacttg

SEQ ID NO: 2148982 - DNA, 25 bp, Homo sapien
tcttctctagtcacactaacctact

SEQ ID NO: 2148983 - DNA, 25 bp, Homo sapien
ctgactcttctctagtcacactaac

SEQ ID NO: 2148984 - DNA, 25 bp, Homo sapien
gactcttctctagtcacactaacct

SEQ ID NO: 2148985 - DNA, 25 bp, Homo sapien
atagaagtgacccctgaaaatatag

SEQ ID NO: 2148986 - DNA, 25 bp, Homo sapien
aactatagaagtgacccctgaaaat

SEQ ID NO: 2148987 - DNA, 25 bp, Homo sapien
ctatagaagtgacccctgaaaatat

SEQ ID NO: 2148988 - DNA, 25 bp, Homo sapien
tagaagtgacccctgaaaatatagt

SEQ ID NO: 2148989 - DNA, 25 bp, Homo sapien
ggcatctggttcacagcctttcttc

SEQ ID NO: 2148990 - DNA, 25 bp, Homo sapien
ctggcatctggttcacagcctttct

SEQ ID NO: 2148991 - DNA, 25 bp, Homo sapien
tcattcatcaaagatgctggcatct

SEQ ID NO: 2148992 - DNA, 25 bp, Homo sapien
ctttgctctcctgtactcattcatc

SEQ ID NO: 2148993 - DNA, 25 bp, Homo sapien
tgccctggctggagtacactggcag

SEQ ID NO: 2148994 - DNA, 25 bp, Homo sapien
gcccggctaattttgcactttagta

SEQ ID NO: 2148995 - DNA, 25 bp, Homo sapien
tggctggagtacactggcaggatct

SEQ ID NO: 2148996 - DNA, 25 bp, Homo sapien
cctggctggagtacactggcaggat

SEQ ID NO: 2148997 - DNA, 25 bp, Homo sapien
aaatcacttgagctctgtgcttgtc

SEQ ID NO: 2148998 - DNA, 25 bp, Homo sapien
ttgagctctgtgcttgtcttctcat

SEQ ID NO: 2148999 - DNA, 25 bp, Homo sapien
tcacttgagctctgtgcttgtcttc

SEQ ID NO: 2149000 - DNA, 25 bp, Homo sapien
gcaaatcacttgagctctgtgcttg

SEQ ID NO: 2149001 - DNA, 25 bp, Homo sapien
ttataaacagcaataggccaggcac

SEQ ID NO: 2149002 - DNA, 25 bp, Homo sapien
acattataaacagcaataggccagg

SEQ ID NO: 2149003 - DNA, 25 bp, Homo sapien
taaatacattataaacagcaatagg

SEQ ID NO: 2149004 - DNA, 25 bp, Homo sapien
aatacattataaacagcaataggcc

SEQ ID NO: 2149005 - DNA, 25 bp, Homo sapien
tggcaactctcaaatcaccctggga

SEQ ID NO: 2149006 - DNA, 25 bp, Homo sapien
ggagtatgatcggtggcgctttcta

SEQ ID NO: 2149007 - DNA, 25 bp, Homo sapien
tgtgtaggtagttaacttggtgtcc

SEQ ID NO: 2149008 - DNA, 25 bp, Homo sapien
gattcttatgaaggtatttcttctg

SEQ ID NO: 2149009 - DNA, 25 bp, Homo sapien
ctagaaatgtcatctgggaggtaga

SEQ ID NO: 2149010 - DNA, 25 bp, Homo sapien
agaaatgtcatctgggaggtagaac

SEQ ID NO: 2149011 - DNA, 25 bp, Homo sapien
tagaaatgtcatctgggaggtagaa

SEQ ID NO: 2149012 - DNA, 25 bp, Homo sapien
tggatcctttccttcaaggaagtgg

SEQ ID NO: 2149013 - DNA, 25 bp, Homo sapien
tgggtctcacccaagtcctattgta

SEQ ID NO: 2149014 - DNA, 25 bp, Homo sapien
cattctgtagtatgccaattggatt

SEQ ID NO: 2149015 - DNA, 25 bp, Homo sapien
cagaatttcagctcgatgctttcaa

SEQ ID NO: 2149016 - DNA, 25 bp, Homo sapien
cactatgactgcactgggtcagacc

SEQ ID NO: 2149017 - DNA, 25 bp, Homo sapien
tatggcacttgcgtcagttacgggt

SEQ ID NO: 2149018 - DNA, 25 bp, Homo sapien
tctggactccacgtaggcgcttttg

SEQ ID NO: 2149019 - DNA, 25 bp, Homo sapien
cgcgctttacggctctcagtcaaat

SEQ ID NO: 2149020 - DNA, 25 bp, Homo sapien
caaccggttcctcagcagttggagg

SEQ ID NO: 2149021 - DNA, 25 bp, Homo sapien
cacgaggaaggccggcactgacagt

SEQ ID NO: 2149022 - DNA, 25 bp, Homo sapien
tcacacgaggaaggccggcactgac

SEQ ID NO: 2149023 - DNA, 25 bp, Homo sapien
ggaaggccggcactgacagtcggag

SEQ ID NO: 2149024 - DNA, 25 bp, Homo sapien
gaggaaggccggcactgacagtcgg

SEQ ID NO: 2149025 - DNA, 25 bp, Homo sapien
tgaatttgcaggggtccggcagatc

SEQ ID NO: 2149026 - DNA, 25 bp, Homo sapien
tgtgagcagccgatggaggccacag

SEQ ID NO: 2149027 - DNA, 25 bp, Homo sapien
cctttgtgagcagccgatggaggcc

SEQ ID NO: 2149028 - DNA, 25 bp, Homo sapien
ctttgtgagcagccgatggaggcca

SEQ ID NO: 2149029 - DNA, 25 bp, Homo sapien
ttgtgagcagccgatggaggccaca

SEQ ID NO: 2149030 - DNA, 25 bp, Homo sapien
taatctggcagctaggcaataggca

SEQ ID NO: 2149031 - DNA, 25 bp, Homo sapien
tatgcctctaaatcacagtgcacgg

SEQ ID NO: 2149032 - DNA, 25 bp, Homo sapien
caataggcatgacaggccgcttgct

SEQ ID NO: 2149033 - DNA, 25 bp, Homo sapien
tgcacggatgtgattggtagaaccc

SEQ ID NO: 2149034 - DNA, 25 bp, Homo sapien
tcggactattttgacaggatctttc

SEQ ID NO: 2149035 - DNA, 25 bp, Homo sapien
catgatttgattaagccatggttca

SEQ ID NO: 2149036 - DNA, 25 bp, Homo sapien
catcggactattttgacaggatctt

SEQ ID NO: 2149037 - DNA, 25 bp, Homo sapien
ccatggttcaatacctggaaattgc

SEQ ID NO: 2149038 - DNA, 25 bp, Homo sapien
aaagagtaattctccatttactgta

SEQ ID NO: 2149039 - DNA, 25 bp, Homo sapien
tttgtgaagtaatcttagggttgga

SEQ ID NO: 2149040 - DNA, 25 bp, Homo sapien
catttactgtaaggatttctatatg

SEQ ID NO: 2149041 - DNA, 25 bp, Homo sapien
tgaagtaatcttagggttggataaa

SEQ ID NO: 2149042 - DNA, 25 bp, Homo sapien
gtattcccaaatgcatatttctgtt

SEQ ID NO: 2149043 - DNA, 25 bp, Homo sapien
aataaataatgagtcaattatcaga

SEQ ID NO: 2149044 - DNA, 25 bp, Homo sapien
cagaagtcactctaaactctttttg

SEQ ID NO: 2149045 - DNA, 25 bp, Homo sapien
gtgtcttatctgattaaatgcatat

SEQ ID NO: 2149046 - DNA, 25 bp, Homo sapien
aagcctggacacatgatatttgctc

SEQ ID NO: 2149047 - DNA, 25 bp, Homo sapien
taagcctggacacatgatatttgct

SEQ ID NO: 2149048 - DNA, 25 bp, Homo sapien
agcctggacacatgatatttgctcc

SEQ ID NO: 2149049 - DNA, 25 bp, Homo sapien
ttctcttggatggtacacctttcgc

SEQ ID NO: 2149050 - DNA, 25 bp, Homo sapien
gatggtacacctttcgcagtaatga

SEQ ID NO: 2149051 - DNA, 25 bp, Homo sapien
cacctttcgcagtaatgataagagc

SEQ ID NO: 2149052 - DNA, 25 bp, Homo sapien
gtacatctaatgttctcttggatgg

SEQ ID NO: 2149053 - DNA, 25 bp, Homo sapien
tccccatcaagggaagggtgtcaaa

SEQ ID NO: 2149054 - DNA, 25 bp, Homo sapien
cttcatgactccaacacatagagca

SEQ ID NO: 2149055 - DNA, 25 bp, Homo sapien
caacacatagagcatgctgttttcc

SEQ ID NO: 2149056 - DNA, 25 bp, Homo sapien
cttctgcagacatcttcatgactcc

SEQ ID NO: 2149057 - DNA, 25 bp, Homo sapien
tctgcagacatcttcatgactccaa

SEQ ID NO: 2149058 - DNA, 25 bp, Homo sapien
gaagctagcagtaaaacatcttccc

SEQ ID NO: 2149059 - DNA, 25 bp, Homo sapien
aagctagcagtaaaacatcttccct

SEQ ID NO: 2149060 - DNA, 25 bp, Homo sapien
agctagcagtaaaacatcttccctc

SEQ ID NO: 2149061 - DNA, 25 bp, Homo sapien
atggatattttcaatgccaattcct

SEQ ID NO: 2149062 - DNA, 25 bp, Homo sapien
tggatattttcaatgccaattcctt

SEQ ID NO: 2149063 - DNA, 25 bp, Homo sapien
aatggatattttcaatgccaattcc

SEQ ID NO: 2149064 - DNA, 25 bp, Homo sapien
agcataaccacaggcattatcttca

SEQ ID NO: 2149065 - DNA, 25 bp, Homo sapien
ttattcagcataaccacaggcatta

SEQ ID NO: 2149066 - DNA, 25 bp, Homo sapien
aatatccatatttagcccaagtgca

SEQ ID NO: 2149067 - DNA, 25 bp, Homo sapien
acagatacagcacaatatccatatt

SEQ ID NO: 2149068 - DNA, 25 bp, Homo sapien
cacacacgagaatgagcactgctgg

SEQ ID NO: 2149069 - DNA, 25 bp, Homo sapien
ctgggtcccctggagtaatagaata

SEQ ID NO: 2149070 - DNA, 25 bp, Homo sapien
tctagaggtctaccataaaatggca

SEQ ID NO: 2149071 - DNA, 25 bp, Homo sapien
tgagtttgcttacttaccagatacc

SEQ ID NO: 2149072 - DNA, 25 bp, Homo sapien
gttcttactaaagcaggtccatgtc

SEQ ID NO: 2149073 - DNA, 25 bp, Homo sapien
tagtggggacccaaatccagatgtt

SEQ ID NO: 2149074 - DNA, 25 bp, Homo sapien
ggtccatgtccctcatattccactt

SEQ ID NO: 2149075 - DNA, 25 bp, Homo sapien
tacattatttaaggagtctagtggg

SEQ ID NO: 2149076 - DNA, 25 bp, Homo sapien
gagattttggcagagataagcattc

SEQ ID NO: 2149077 - DNA, 25 bp, Homo sapien
tcagggcacctctatgggctaggaa

SEQ ID NO: 2149078 - DNA, 25 bp, Homo sapien
ctatttatactttcgtggaccagga

SEQ ID NO: 2149079 - DNA, 25 bp, Homo sapien
gagatgacttacaaatgagttcctg

SEQ ID NO: 2149080 - DNA, 25 bp, Homo sapien
gagtgacatccctgattaacagtga

SEQ ID NO: 2149081 - DNA, 25 bp, Homo sapien
gagaagcaggctctctatccctgta

SEQ ID NO: 2149082 - DNA, 25 bp, Homo sapien
cattaagcacagtatctaaagatgc

SEQ ID NO: 2149083 - DNA, 25 bp, Homo sapien
tctcacgaatataggtaaactaagt

SEQ ID NO: 2149084 - DNA, 25 bp, Homo sapien
gatcaggccattatgtcaccggaca

SEQ ID NO: 2149085 - DNA, 25 bp, Homo sapien
tgctagaagagaactgatcaggcca

SEQ ID NO: 2149086 - DNA, 25 bp, Homo sapien
tgatttgggtacgacagggaacctg

SEQ ID NO: 2149087 - DNA, 25 bp, Homo sapien
gatgctgaatcacggcaactccaag

SEQ ID NO: 2149088 - DNA, 25 bp, Homo sapien
cataaattatattccctaaggccag

SEQ ID NO: 2149089 - DNA, 25 bp, Homo sapien
ggccagactcttaaacagacagatg

SEQ ID NO: 2149090 - DNA, 25 bp, Homo sapien
cagacagatgaacctaatagtctca

SEQ ID NO: 2149091 - DNA, 25 bp, Homo sapien
agacattccagtgaatcatctcctg

SEQ ID NO: 2149092 - DNA, 25 bp, Homo sapien
tttcccatcgtggaacagagtcttg

SEQ ID NO: 2149093 - DNA, 25 bp, Homo sapien
ggtcacaaatcacctggcttgaaag

SEQ ID NO: 2149094 - DNA, 25 bp, Homo sapien
tccactttgctaagagggaaacaga

SEQ ID NO: 2149095 - DNA, 25 bp, Homo sapien
taataggaaaatcagacctcaggac

SEQ ID NO: 2149096 - DNA, 25 bp, Homo sapien
ggcgcccaccactgcgtccggttaa

SEQ ID NO: 2149097 - DNA, 25 bp, Homo sapien
caggcgcccaccactgcgtccggtt

SEQ ID NO: 2149098 - DNA, 25 bp, Homo sapien
gcgcccaccactgcgtccggttaat

SEQ ID NO: 2149099 - DNA, 25 bp, Homo sapien
aggcgcccaccactgcgtccggtta

SEQ ID NO: 2149100 - DNA, 25 bp, Homo sapien
gcaaaatgtagattaggcccctcaa

SEQ ID NO: 2149101 - DNA, 25 bp, Homo sapien
ctgacttttagcaagccccaggcca

SEQ ID NO: 2149102 - DNA, 25 bp, Homo sapien
gatagcataggtctaagcaagtcca

SEQ ID NO: 2149103 - DNA, 25 bp, Homo sapien
tctcagtggccacatatggatgggc

SEQ ID NO: 2149104 - DNA, 25 bp, Homo sapien
tatcatttcaatatataatcaacag

SEQ ID NO: 2149105 - DNA, 25 bp, Homo sapien
tcatttcaatatataatcaacagga

SEQ ID NO: 2149106 - DNA, 25 bp, Homo sapien
ttcaatatataatcaacaggaaaga

SEQ ID NO: 2149107 - DNA, 25 bp, Homo sapien
catttcaatatataatcaacaggaa

SEQ ID NO: 2149108 - DNA, 25 bp, Homo sapien
gggtcctagttatatctgctacaac

SEQ ID NO: 2149109 - DNA, 25 bp, Homo sapien
tctgaacagtaggtggtccagtccc

SEQ ID NO: 2149110 - DNA, 25 bp, Homo sapien
tcctgtgactctgttagccagaaca

SEQ ID NO: 2149111 - DNA, 25 bp, Homo sapien
tgtcatccaattggcaactgttcca

SEQ ID NO: 2149112 - DNA, 25 bp, Homo sapien
aacgagaggaattctgctccaaaat

SEQ ID NO: 2149113 - DNA, 25 bp, Homo sapien
aaaagattggcaaacgagaggaatt

SEQ ID NO: 2149114 - DNA, 25 bp, Homo sapien
gattggcaaacgagaggaattctgc

SEQ ID NO: 2149115 - DNA, 25 bp, Homo sapien
ggcaaacgagaggaattctgctcca

SEQ ID NO: 2149116 - DNA, 25 bp, Homo sapien
atctgtgcgatgtttctatacctca

SEQ ID NO: 2149117 - DNA, 25 bp, Homo sapien
tctgtgcgatgtttctatacctcat

SEQ ID NO: 2149118 - DNA, 25 bp, Homo sapien
gtgaaggcaacgtgtttgttgccca

SEQ ID NO: 2149119 - DNA, 25 bp, Homo sapien
tataatacatggagccaaggagcag

SEQ ID NO: 2149120 - DNA, 25 bp, Homo sapien
tgttgcccagggttataatacatgg

SEQ ID NO: 2149121 - DNA, 25 bp, Homo sapien
tccaaatgtggagtcctgaggatgc

SEQ ID NO: 2149122 - DNA, 25 bp, Homo sapien
tcagagacatgatgggtccaaggtc

SEQ ID NO: 2149123 - DNA, 25 bp, Homo sapien
cagcagagagcacgtaagttaagtg

SEQ ID NO: 2149124 - DNA, 25 bp, Homo sapien
tgtttatgtctgatatcttcctctg

SEQ ID NO: 2149125 - DNA, 25 bp, Homo sapien
cttcctctgacacaccagcagagag

SEQ ID NO: 2149126 - DNA, 25 bp, Homo sapien
caaacctggagttccgaagagcggt

SEQ ID NO: 2149127 - DNA, 25 bp, Homo sapien
caggtccaaacctggagttccgaag

SEQ ID NO: 2149128 - DNA, 25 bp, Homo sapien
gagttccgaagagcggtatgtttca

SEQ ID NO: 2149129 - DNA, 25 bp, Homo sapien
cctggagttccgaagagcggtatgt

SEQ ID NO: 2149130 - DNA, 25 bp, Homo sapien
aaaagatctcccccattctactggc

SEQ ID NO: 2149131 - DNA, 25 bp, Homo sapien
gcatggaacagcgtgtccccaaaag

SEQ ID NO: 2149132 - DNA, 25 bp, Homo sapien
tggaacagcgtgtccccaaaagatc

SEQ ID NO: 2149133 - DNA, 25 bp, Homo sapien
gcagagcatggaacagcgtgtcccc

SEQ ID NO: 2149134 - DNA, 25 bp, Homo sapien
taaaagcaccctgcccctagggcag

SEQ ID NO: 2149135 - DNA, 25 bp, Homo sapien
caaatatcataaaagcaccctgccc

SEQ ID NO: 2149136 - DNA, 25 bp, Homo sapien
tatcataaaagcaccctgcccctag

SEQ ID NO: 2149137 - DNA, 25 bp, Homo sapien
cagcaggcctgagccagaaactgtg

SEQ ID NO: 2149138 - DNA, 25 bp, Homo sapien
tgattctgtgatttattgctctaca

SEQ ID NO: 2149139 - DNA, 25 bp, Homo sapien
agctgcaaggatgcatttaatgatt

SEQ ID NO: 2149140 - DNA, 25 bp, Homo sapien
tacagaggatattctcagccatcat

SEQ ID NO: 2149141 - DNA, 25 bp, Homo sapien
tgtgatttattgctctacagaggat

SEQ ID NO: 2149142 - DNA, 25 bp, Homo sapien
gaaacaccaccgcccgcacccgagc

SEQ ID NO: 2149143 - DNA, 25 bp, Homo sapien
cctgaaacaccaccgcccgcacccg

SEQ ID NO: 2149144 - DNA, 25 bp, Homo sapien
tgaaacaccaccgcccgcacccgag

SEQ ID NO: 2149145 - DNA, 25 bp, Homo sapien
ctgaaacaccaccgcccgcacccga

SEQ ID NO: 2149146 - DNA, 25 bp, Homo sapien
tgagggaagacaaccactttgtcct

SEQ ID NO: 2149147 - DNA, 25 bp, Homo sapien
ttgagggaagacaaccactttgtcc

SEQ ID NO: 2149148 - DNA, 25 bp, Homo sapien
cttgagggaagacaaccactttgtc

SEQ ID NO: 2149149 - DNA, 25 bp, Homo sapien
cagcacttcgtaggccgcatagtcg

SEQ ID NO: 2149150 - DNA, 25 bp, Homo sapien
tcgtccagcacttcgtaggccgcat

SEQ ID NO: 2149151 - DNA, 25 bp, Homo sapien
tcgcagctcggggtcgtccagcact

SEQ ID NO: 2149152 - DNA, 25 bp, Homo sapien
tcgtaggccgcatagtcgcggacgc

SEQ ID NO: 2149153 - DNA, 25 bp, Homo sapien
tgaggtacacttgcgggatggtggg

SEQ ID NO: 2149154 - DNA, 25 bp, Homo sapien
ttgaggtacacttgcgggatggtgg

SEQ ID NO: 2149155 - DNA, 25 bp, Homo sapien
cacttgcgggatggtgggccagttg

SEQ ID NO: 2149156 - DNA, 25 bp, Homo sapien
gtacacttgcgggatggtgggccag

SEQ ID NO: 2149157 - DNA, 25 bp, Homo sapien
ctaaaagggtggagcggatccccag

SEQ ID NO: 2149158 - DNA, 25 bp, Homo sapien
catctaaaagggtggagcggatccc

SEQ ID NO: 2149159 - DNA, 25 bp, Homo sapien
ttttcatctaaaagggtggagcgga

SEQ ID NO: 2149160 - DNA, 25 bp, Homo sapien
ggagcggatccccagctttttcagt

SEQ ID NO: 2149161 - DNA, 25 bp, Homo sapien
aaagtgtggtgcatggactctgggt

SEQ ID NO: 2149162 - DNA, 25 bp, Homo sapien
aagtgtggtgcatggactctgggtg

SEQ ID NO: 2149163 - DNA, 25 bp, Homo sapien
ccagggccactgatcattcccagaa

SEQ ID NO: 2149164 - DNA, 25 bp, Homo sapien
taccaatcggagctttcagacctcc

SEQ ID NO: 2149165 - DNA, 25 bp, Homo sapien
tttatcaggcttaaagggctaagcc

SEQ ID NO: 2149166 - DNA, 25 bp, Homo sapien
cccacaagctaccaatcggagcttt

SEQ ID NO: 2149167 - DNA, 25 bp, Homo sapien
aagtttccctggctttatcaggctt

SEQ ID NO: 2149168 - DNA, 25 bp, Homo sapien
cactttggttgaggaggacactcag

SEQ ID NO: 2149169 - DNA, 25 bp, Homo sapien
tttggttgaggaggacactcagtat

SEQ ID NO: 2149170 - DNA, 25 bp, Homo sapien
tcactttggttgaggaggacactca

SEQ ID NO: 2149171 - DNA, 25 bp, Homo sapien
ctttggttgaggaggacactcagta

SEQ ID NO: 2149172 - DNA, 25 bp, Homo sapien
ccatctgtctttcacttgaatccgc

SEQ ID NO: 2149173 - DNA, 25 bp, Homo sapien
aaaaactacttttgccaagcattga

SEQ ID NO: 2149174 - DNA, 25 bp, Homo sapien
catctgtctttcacttgaatccgca

SEQ ID NO: 2149175 - DNA, 25 bp, Homo sapien
actacttttgccaagcattgatgct

SEQ ID NO: 2149176 - DNA, 25 bp, Homo sapien
aaaccagacaagatccaagcccaca

SEQ ID NO: 2149177 - DNA, 25 bp, Homo sapien
taaaagtatgttctcaactgaaaac

SEQ ID NO: 2149178 - DNA, 25 bp, Homo sapien
catcttacggttctgcttccttggt

SEQ ID NO: 2149179 - DNA, 25 bp, Homo sapien
ctgcttgccttgtactgcttcccca

SEQ ID NO: 2149180 - DNA, 25 bp, Homo sapien
gaagaaggcagaattccacgtgtga

SEQ ID NO: 2149181 - DNA, 25 bp, Homo sapien
gcttgagttactccagtcagatgga

SEQ ID NO: 2149182 - DNA, 25 bp, Homo sapien
tgcttgatagcaccgaatattgaac

SEQ ID NO: 2149183 - DNA, 25 bp, Homo sapien
tattgaactcgtagcgtgttggagc

SEQ ID NO: 2149184 - DNA, 25 bp, Homo sapien
caggtactacggtccttggtagaag

SEQ ID NO: 2149185 - DNA, 25 bp, Homo sapien
cgctaaccaggtactacggtccttg

SEQ ID NO: 2149186 - DNA, 25 bp, Homo sapien
atcgctaaccaggtactacggtcct

SEQ ID NO: 2149187 - DNA, 25 bp, Homo sapien
taccaatgataatactattttgagc

SEQ ID NO: 2149188 - DNA, 25 bp, Homo sapien
ccaatgataatactattttgagcag

SEQ ID NO: 2149189 - DNA, 25 bp, Homo sapien
attaccaatgataatactattttga

SEQ ID NO: 2149190 - DNA, 25 bp, Homo sapien
caatgataatactattttgagcagg

SEQ ID NO: 2149191 - DNA, 25 bp, Homo sapien
gcagaatctaccttctcaaacccta

SEQ ID NO: 2149192 - DNA, 25 bp, Homo sapien
catccgggtcagacaagatacagac

SEQ ID NO: 2149193 - DNA, 25 bp, Homo sapien
caccccttcctctatgaatgcagaa

SEQ ID NO: 2149194 - DNA, 25 bp, Homo sapien
tacttcttgggacacatcatccggg

SEQ ID NO: 2149195 - DNA, 25 bp, Homo sapien
aaccaggggaaatgattcatgacat

SEQ ID NO: 2149196 - DNA, 25 bp, Homo sapien
aggggaaatgattcatgacatgtgg

SEQ ID NO: 2149197 - DNA, 25 bp, Homo sapien
accaggggaaatgattcatgacatg

SEQ ID NO: 2149198 - DNA, 25 bp, Homo sapien
ccaggggaaatgattcatgacatgt

SEQ ID NO: 2149199 - DNA, 25 bp, Homo sapien
gaacaggtgcgctttctcagactcc

SEQ ID NO: 2149200 - DNA, 25 bp, Homo sapien
aggaggggtgcgtgacggtcgcgga

SEQ ID NO: 2149201 - DNA, 25 bp, Homo sapien
cagactccccgcgactaggaaggaa

SEQ ID NO: 2149202 - DNA, 25 bp, Homo sapien
cggtcgcggaacaggtgcgctttct

SEQ ID NO: 2149203 - DNA, 25 bp, Homo sapien
ttgatgatccgcaggatgccgcgca

SEQ ID NO: 2149204 - DNA, 25 bp, Homo sapien
gactcagcacatggttgcagggctt

SEQ ID NO: 2149205 - DNA, 25 bp, Homo sapien
cacggccagtagcagagatgcgtcc

SEQ ID NO: 2149206 - DNA, 25 bp, Homo sapien
tttaccagtaacacaggcgtgtgca

SEQ ID NO: 2149207 - DNA, 25 bp, Homo sapien
tctgggtgcgttggatttggtcaac

SEQ ID NO: 2149208 - DNA, 25 bp, Homo sapien
tccaagatgcttccttcatagggct

SEQ ID NO: 2149209 - DNA, 25 bp, Homo sapien
gttcctttgggtcaataccatctgg

SEQ ID NO: 2149210 - DNA, 25 bp, Homo sapien
ggcagctgggatcagtatgtcacag

SEQ ID NO: 2149211 - DNA, 25 bp, Homo sapien
tctggagttgttggcccattggcac

SEQ ID NO: 2149212 - DNA, 25 bp, Homo sapien
gagcaagtggtagttagaatccctt

SEQ ID NO: 2149213 - DNA, 25 bp, Homo sapien
aagtaagatactgtcactcctccag

SEQ ID NO: 2149214 - DNA, 25 bp, Homo sapien
ggcccattggcaccttcagcaatga

SEQ ID NO: 2149215 - DNA, 25 bp, Homo sapien
catggctgtgtgcataatttgcctg

SEQ ID NO: 2149216 - DNA, 25 bp, Homo sapien
tcatggctgtgtgcataatttgcct

SEQ ID NO: 2149217 - DNA, 25 bp, Homo sapien
cagccatatggaggaggctttttat

SEQ ID NO: 2149218 - DNA, 25 bp, Homo sapien
atttttataggcattcactgagtca

SEQ ID NO: 2149219 - DNA, 25 bp, Homo sapien
aggctgcacagccatatggaggagg

SEQ ID NO: 2149220 - DNA, 25 bp, Homo sapien
ctgcacagccatatggaggaggctt

SEQ ID NO: 2149221 - DNA, 25 bp, Homo sapien
gtttgctggacaacaatacgtgaat

SEQ ID NO: 2149222 - DNA, 25 bp, Homo sapien
gctggacaacaatacgtgaatgata

SEQ ID NO: 2149223 - DNA, 25 bp, Homo sapien
acgtgaatgataagctacaaatgaa

SEQ ID NO: 2149224 - DNA, 25 bp, Homo sapien
cgtgaatgataagctacaaatgaaa

SEQ ID NO: 2149225 - DNA, 25 bp, Homo sapien
gaaatggagaagtaccagttcactc

SEQ ID NO: 2149226 - DNA, 25 bp, Homo sapien
taagttaaatatgtccaggccaaaa

SEQ ID NO: 2149227 - DNA, 25 bp, Homo sapien
tgtctgaactacagcaagctactcc

SEQ ID NO: 2149228 - DNA, 25 bp, Homo sapien
agttcactctaggttttagcaccag

SEQ ID NO: 2149229 - DNA, 25 bp, Homo sapien
aaacctggaaatcctactctggatg

SEQ ID NO: 2149230 - DNA, 25 bp, Homo sapien
gataaggaagctgcgtctcacagag

SEQ ID NO: 2149231 - DNA, 25 bp, Homo sapien
tgctctacgaaacactgaaacctgg

SEQ ID NO: 2149232 - DNA, 25 bp, Homo sapien
tgttgagccaatatgctccctcatg

SEQ ID NO: 2149233 - DNA, 25 bp, Homo sapien
tcttcgtgatacaaaagtgcaaggt

SEQ ID NO: 2149234 - DNA, 25 bp, Homo sapien
aaatgctaggcctcttgtaccaaag

SEQ ID NO: 2149235 - DNA, 25 bp, Homo sapien
catcggaagaacatgccatctagga

SEQ ID NO: 2149236 - DNA, 25 bp, Homo sapien
gacaaaacagcctttcatcggaaga

SEQ ID NO: 2149237 - DNA, 25 bp, Homo sapien
gaatgtgctgactttgaaagacccc

SEQ ID NO: 2149238 - DNA, 25 bp, Homo sapien
catgcatagtttccggatggtagga

SEQ ID NO: 2149239 - DNA, 25 bp, Homo sapien
acaaagtctagaaatggtgaatcat

SEQ ID NO: 2149240 - DNA, 25 bp, Homo sapien
tatccatttcctcacaaagtctaga

SEQ ID NO: 2149241 - DNA, 25 bp, Homo sapien
caccaaagattctatgacattactt

SEQ ID NO: 2149242 - DNA, 25 bp, Homo sapien
accaaagattctatgacattacttt

SEQ ID NO: 2149243 - DNA, 25 bp, Homo sapien
caggcaagactggatgccttagagc

SEQ ID NO: 2149244 - DNA, 25 bp, Homo sapien
gactggatgccttagagccttgttg

SEQ ID NO: 2149245 - DNA, 25 bp, Homo sapien
ttttatatcaggcaagactggatgc

SEQ ID NO: 2149246 - DNA, 25 bp, Homo sapien
tgccttagagccttgttggcctggg

SEQ ID NO: 2149247 - DNA, 25 bp, Homo sapien
gatttttcttgttccttaattctca

SEQ ID NO: 2149248 - DNA, 25 bp, Homo sapien
atttttcttgttccttaattctcat

SEQ ID NO: 2149249 - DNA, 25 bp, Homo sapien
ctaaagggcaacagttgtggctgtc

SEQ ID NO: 2149250 - DNA, 25 bp, Homo sapien
aatctaaagggcaacagttgtggct

SEQ ID NO: 2149251 - DNA, 25 bp, Homo sapien
aagagcctggtgtctaacttggaaa

SEQ ID NO: 2149252 - DNA, 25 bp, Homo sapien
agagctttacttttggtcctcagac

SEQ ID NO: 2149253 - DNA, 25 bp, Homo sapien
agcaagtttagaactatccactatg

SEQ ID NO: 2149254 - DNA, 25 bp, Homo sapien
cccagcactatgaagggacacaaag

SEQ ID NO: 2149255 - DNA, 25 bp, Homo sapien
cagcactatgaagggacacaaagga

SEQ ID NO: 2149256 - DNA, 25 bp, Homo sapien
tagaactatccactatgttcccagc

SEQ ID NO: 2149257 - DNA, 25 bp, Homo sapien
gcttgtaagtggtgtaaatgtggct

SEQ ID NO: 2149258 - DNA, 25 bp, Homo sapien
tgtaaatgtggctaggcaaaaccaa

SEQ ID NO: 2149259 - DNA, 25 bp, Homo sapien
taagtggtgtaaatgtggctaggca

SEQ ID NO: 2149260 - DNA, 25 bp, Homo sapien
ttttgctaggcttgtaagtggtgta

SEQ ID NO: 2149261 - DNA, 25 bp, Homo sapien
tgaatcactcagcataacagctggg

SEQ ID NO: 2149262 - DNA, 25 bp, Homo sapien
ttgaaacaaggcacccataaccatg

SEQ ID NO: 2149263 - DNA, 25 bp, Homo sapien
tcagagataactttgcaggaacaac

SEQ ID NO: 2149264 - DNA, 25 bp, Homo sapien
gcaagccagcacgattagacactga

SEQ ID NO: 2149265 - DNA, 25 bp, Homo sapien
aaagtcaagtcaaggacatcaatcc

SEQ ID NO: 2149266 - DNA, 25 bp, Homo sapien
gatagaggcttgacatctgagcaca

SEQ ID NO: 2149267 - DNA, 25 bp, Homo sapien
agatgacacacaagccagtcaaaca

SEQ ID NO: 2149268 - DNA, 25 bp, Homo sapien
gacagagttggtcaaaacgtgtctt

SEQ ID NO: 2149269 - DNA, 25 bp, Homo sapien
tccatagctactgagactgacatct

SEQ ID NO: 2149270 - DNA, 25 bp, Homo sapien
tatatacctccagactcccaggagc

SEQ ID NO: 2149271 - DNA, 25 bp, Homo sapien
aatatgcaggttagtctctccccac

SEQ ID NO: 2149272 - DNA, 25 bp, Homo sapien
caaggccttgccaattgctagcttc

SEQ ID NO: 2149273 - DNA, 25 bp, Homo sapien
ggtggaagggtgttggtgttgtgcc

SEQ ID NO: 2149274 - DNA, 25 bp, Homo sapien
tggtgttgtgcctgcactccactgg

SEQ ID NO: 2149275 - DNA, 25 bp, Homo sapien
ctatggaaagtatggactaaaattc

SEQ ID NO: 2149276 - DNA, 25 bp, Homo sapien
ttgtgcctgcactccactggataca

SEQ ID NO: 2149277 - DNA, 25 bp, Homo sapien
tatttcttagattcattccaataca

SEQ ID NO: 2149278 - DNA, 25 bp, Homo sapien
agctgatatttcttagattcattcc

SEQ ID NO: 2149279 - DNA, 25 bp, Homo sapien
gatatttcttagattcattccaata

SEQ ID NO: 2149280 - DNA, 25 bp, Homo sapien
ctgatatttcttagattcattccaa

SEQ ID NO: 2149281 - DNA, 25 bp, Homo sapien
aaactccctattgtggacttgggca

SEQ ID NO: 2149282 - DNA, 25 bp, Homo sapien
tctaaggaattctgaacaggattac

SEQ ID NO: 2149283 - DNA, 25 bp, Homo sapien
ctacagaacatctaaggaattctga

SEQ ID NO: 2149284 - DNA, 25 bp, Homo sapien
gacttgggcatagattcctccttcc

SEQ ID NO: 2149285 - DNA, 25 bp, Homo sapien
tcaagtgtagaagtacgtgagcatc

SEQ ID NO: 2149286 - DNA, 25 bp, Homo sapien
tatcagcacaccactctacagtttg

SEQ ID NO: 2149287 - DNA, 25 bp, Homo sapien
gactttctgagtatgagcacttttg

SEQ ID NO: 2149288 - DNA, 25 bp, Homo sapien
caccagttaagacagttatctcaca

SEQ ID NO: 2149289 - DNA, 25 bp, Homo sapien
tctatcttgattcttaggttgctcc

SEQ ID NO: 2149290 - DNA, 25 bp, Homo sapien
tatcttgattcttaggttgctccag

SEQ ID NO: 2149291 - DNA, 25 bp, Homo sapien
cttgattcttaggttgctccaggat

SEQ ID NO: 2149292 - DNA, 25 bp, Homo sapien
tttctatcttgattcttaggttgct

SEQ ID NO: 2149293 - DNA, 25 bp, Homo sapien
caactgaggaacctggtacatctat

SEQ ID NO: 2149294 - DNA, 25 bp, Homo sapien
gtattctcatatactaccagtggga

SEQ ID NO: 2149295 - DNA, 25 bp, Homo sapien
acatctatctcatcagggctggttg

SEQ ID NO: 2149296 - DNA, 25 bp, Homo sapien
tatgaatcaaaagcttaaaagtgcc

SEQ ID NO: 2149297 - DNA, 25 bp, Homo sapien
gaactgtatcgagtttttcctccac

SEQ ID NO: 2149298 - DNA, 25 bp, Homo sapien
cctagaactgtatcgagtttttcct

SEQ ID NO: 2149299 - DNA, 25 bp, Homo sapien
ctcttctgcaaacctgttgtcccct

SEQ ID NO: 2149300 - DNA, 25 bp, Homo sapien
tagaactgtatcgagtttttcctcc

SEQ ID NO: 2149301 - DNA, 25 bp, Homo sapien
gatgtacccacaaagagagctttgt

SEQ ID NO: 2149302 - DNA, 25 bp, Homo sapien
ctgggttagatgtacccacaaagag

SEQ ID NO: 2149303 - DNA, 25 bp, Homo sapien
tagatgtacccacaaagagagcttt

SEQ ID NO: 2149304 - DNA, 25 bp, Homo sapien
gttagatgtacccacaaagagagct

SEQ ID NO: 2149305 - DNA, 25 bp, Homo sapien
tatgaggatagagggactggtttcc

SEQ ID NO: 2149306 - DNA, 25 bp, Homo sapien
cttgagagagtgactaagtttcctt

SEQ ID NO: 2149307 - DNA, 25 bp, Homo sapien
ccataggccacaaattgagtaacaa

SEQ ID NO: 2149308 - DNA, 25 bp, Homo sapien
gtgttttagctgtacaacttgagag

SEQ ID NO: 2149309 - DNA, 25 bp, Homo sapien
cttcccatgttcaattctggtggta

SEQ ID NO: 2149310 - DNA, 25 bp, Homo sapien
caattctggtggtaccatagtaagg

SEQ ID NO: 2149311 - DNA, 25 bp, Homo sapien
accatagtaaggagaggatgtttcc

SEQ ID NO: 2149312 - DNA, 25 bp, Homo sapien
tctggtggtaccatagtaaggagag

SEQ ID NO: 2149313 - DNA, 25 bp, Homo sapien
ggtatgttatctgaactcccatgaa

SEQ ID NO: 2149314 - DNA, 25 bp, Homo sapien
tgtgaggaggtatgttatctgaact

SEQ ID NO: 2149315 - DNA, 25 bp, Homo sapien
taactggaagggcaacaaggtgagc

SEQ ID NO: 2149316 - DNA, 25 bp, Homo sapien
tcctctgtgtcttctataactggaa

SEQ ID NO: 2149317 - DNA, 25 bp, Homo sapien
tgttgaatttcatcgagtttcctca

SEQ ID NO: 2149318 - DNA, 25 bp, Homo sapien
gtcaaatgcattttcactccagaat

SEQ ID NO: 2149319 - DNA, 25 bp, Homo sapien
tgcattcttctctatgtcaaatgca

SEQ ID NO: 2149320 - DNA, 25 bp, Homo sapien
gaattcttctgttaagagactctaa

SEQ ID NO: 2149321 - DNA, 25 bp, Homo sapien
aatacttatcttgcatctctggaac

SEQ ID NO: 2149322 - DNA, 25 bp, Homo sapien
gtgttgcaaatgtcatcagattttc

SEQ ID NO: 2149323 - DNA, 25 bp, Homo sapien
ttttgggcttattagtgttgcaaat

SEQ ID NO: 2149324 - DNA, 25 bp, Homo sapien
tattttaatcttgggttctatatat

SEQ ID NO: 2149325 - DNA, 25 bp, Homo sapien
ctcacagcacggctgatttccagtc

SEQ ID NO: 2149326 - DNA, 25 bp, Homo sapien
atgctcacagcacggctgatttcca

SEQ ID NO: 2149327 - DNA, 25 bp, Homo sapien
ttccagtcagtactctccttagact

SEQ ID NO: 2149328 - DNA, 25 bp, Homo sapien
tactctccttagactaaaatatcta

SEQ ID NO: 2149329 - DNA, 25 bp, Homo sapien
ttttgctaataggcttctctccccc

SEQ ID NO: 2149330 - DNA, 25 bp, Homo sapien
ttctctccccctgaaacagtgtaag

SEQ ID NO: 2149331 - DNA, 25 bp, Homo sapien
aaatttgtgggcaagattcttctca

SEQ ID NO: 2149332 - DNA, 25 bp, Homo sapien
aatttgtgggcaagattcttctcaa

SEQ ID NO: 2149333 - DNA, 25 bp, Homo sapien
ttttgtgctccaatatctcccttac

SEQ ID NO: 2149334 - DNA, 25 bp, Homo sapien
tcccaattttgtgctccaatatctc

SEQ ID NO: 2149335 - DNA, 25 bp, Homo sapien
ccaattttgtgctccaatatctccc

SEQ ID NO: 2149336 - DNA, 25 bp, Homo sapien
caattttgtgctccaatatctccct

SEQ ID NO: 2149337 - DNA, 25 bp, Homo sapien
cataacaatgaggtgagtcgctggg

SEQ ID NO: 2149338 - DNA, 25 bp, Homo sapien
gatacatccatgttatacaaccata

SEQ ID NO: 2149339 - DNA, 25 bp, Homo sapien
tatcctgatttgatgaagtgctatc

SEQ ID NO: 2149340 - DNA, 25 bp, Homo sapien
taaatgaattcactatgatacatcc

SEQ ID NO: 2149341 - DNA, 25 bp, Homo sapien
tggactaatacagcgacattaaaca

SEQ ID NO: 2149342 - DNA, 25 bp, Homo sapien
ccgttagacttctcccatgattgta

SEQ ID NO: 2149343 - DNA, 25 bp, Homo sapien
tgtacacacaacaaggcactttttg

SEQ ID NO: 2149344 - DNA, 25 bp, Homo sapien
gacataaactgattgtaaaggcaca

SEQ ID NO: 2149345 - DNA, 25 bp, Homo sapien
ctgcataaccttgaagagtctcttc

SEQ ID NO: 2149346 - DNA, 25 bp, Homo sapien
aatctgcataaccttgaagagtctc

SEQ ID NO: 2149347 - DNA, 25 bp, Homo sapien
gcataaccttgaagagtctcttcat

SEQ ID NO: 2149348 - DNA, 25 bp, Homo sapien
tctgcataaccttgaagagtctctt

SEQ ID NO: 2149349 - DNA, 25 bp, Homo sapien
ctgtacaagctttaaacttctgata

SEQ ID NO: 2149350 - DNA, 25 bp, Homo sapien
gtacaagctttaaacttctgataaa

SEQ ID NO: 2149351 - DNA, 25 bp, Homo sapien
tgtacaagctttaaacttctgataa

SEQ ID NO: 2149352 - DNA, 25 bp, Homo sapien
tacaagctttaaacttctgataaaa

SEQ ID NO: 2149353 - DNA, 25 bp, Homo sapien
ggcaagagtaagttctcacctatca

SEQ ID NO: 2149354 - DNA, 25 bp, Homo sapien
gcaaaacatccttagtagttacaca

SEQ ID NO: 2149355 - DNA, 25 bp, Homo sapien
gattcaaagcatgcaactacagaaa

SEQ ID NO: 2149356 - DNA, 25 bp, Homo sapien
aaaagcaaggcccacctacatcctg

SEQ ID NO: 2149357 - DNA, 25 bp, Homo sapien
tctgtatctttagtgcttttaccat

SEQ ID NO: 2149358 - DNA, 25 bp, Homo sapien
ttcaataatgttcacgtttttctgt

SEQ ID NO: 2149359 - DNA, 25 bp, Homo sapien
cacgtttttctgtatctttagtgct

SEQ ID NO: 2149360 - DNA, 25 bp, Homo sapien
atgttcacgtttttctgtatcttta

SEQ ID NO: 2149361 - DNA, 25 bp, Homo sapien
agttctatcttctctgactttcctt

SEQ ID NO: 2149362 - DNA, 25 bp, Homo sapien
caaagttctatcttctctgactttc

SEQ ID NO: 2149363 - DNA, 25 bp, Homo sapien
actccaaagttctatcttctctgac

SEQ ID NO: 2149364 - DNA, 25 bp, Homo sapien
ccactccaaagttctatcttctctg

SEQ ID NO: 2149365 - DNA, 25 bp, Homo sapien
cagggctttgacagcactattagca

SEQ ID NO: 2149366 - DNA, 25 bp, Homo sapien
ttagtgaaagccaggtaagcagaat

SEQ ID NO: 2149367 - DNA, 25 bp, Homo sapien
ttcaaaaagacccacagtctcacag

SEQ ID NO: 2149368 - DNA, 25 bp, Homo sapien
gctaatgaagcaggagatgtaaaat

SEQ ID NO: 2149369 - DNA, 25 bp, Homo sapien
tatcagtggcctgtcagatgcctcc

SEQ ID NO: 2149370 - DNA, 25 bp, Homo sapien
tccatgacaacaaacaccttgtggg

SEQ ID NO: 2149371 - DNA, 25 bp, Homo sapien
attatctgcctagaccaatgcccag

SEQ ID NO: 2149372 - DNA, 25 bp, Homo sapien
caaaaagattaccttcaccagggtg

SEQ ID NO: 2149373 - DNA, 25 bp, Homo sapien
tcttgagcccttcagagacctgggt

SEQ ID NO: 2149374 - DNA, 25 bp, Homo sapien
tatcagaaaaagaggtagccaccgt

SEQ ID NO: 2149375 - DNA, 25 bp, Homo sapien
tcactttggagtagctagaggtcac

SEQ ID NO: 2149376 - DNA, 25 bp, Homo sapien
gccaccgtagaggtagacatgaaga

SEQ ID NO: 2149377 - DNA, 25 bp, Homo sapien
gatggctgcatgaatctgtgaaaat

SEQ ID NO: 2149378 - DNA, 25 bp, Homo sapien
tgatggctgcatgaatctgtgaaaa

SEQ ID NO: 2149379 - DNA, 25 bp, Homo sapien
tagtgatggctgcatgaatctgtga

SEQ ID NO: 2149380 - DNA, 25 bp, Homo sapien
tcaaataggcaaataggtataccac

SEQ ID NO: 2149381 - DNA, 25 bp, Homo sapien
acatagctctcggatcttactaggc

SEQ ID NO: 2149382 - DNA, 25 bp, Homo sapien
taggtataccacatagctctcggat

SEQ ID NO: 2149383 - DNA, 25 bp, Homo sapien
tactaggctcatgagctttttcaaa

SEQ ID NO: 2149384 - DNA, 25 bp, Homo sapien
ccagtatcaaattgaaattgaggca

SEQ ID NO: 2149385 - DNA, 25 bp, Homo sapien
taacagggaaatcaccactgacccc

SEQ ID NO: 2149386 - DNA, 25 bp, Homo sapien
gacaaattcacaggcgaattctgcc

SEQ ID NO: 2149387 - DNA, 25 bp, Homo sapien
tagaccaatagctagactaatgaaa

SEQ ID NO: 2149388 - DNA, 25 bp, Homo sapien
tgtatgtcaaaagatcccatgccat

SEQ ID NO: 2149389 - DNA, 25 bp, Homo sapien
cagaagggaataagatccgctgacc

SEQ ID NO: 2149390 - DNA, 25 bp, Homo sapien
tctgcagaggtggttaattggatcc

SEQ ID NO: 2149391 - DNA, 25 bp, Homo sapien
gcagtatttcagaggttgcacagcc

SEQ ID NO: 2149392 - DNA, 25 bp, Homo sapien
tgaactctgcttgctctcagcctga

SEQ ID NO: 2149393 - DNA, 25 bp, Homo sapien
gattacagcttacatgcagtgccat

SEQ ID NO: 2149394 - DNA, 25 bp, Homo sapien
cagattatcccgagagcagttgact

SEQ ID NO: 2149395 - DNA, 25 bp, Homo sapien
gatacagctgggattagatcaacct

SEQ ID NO: 2149396 - DNA, 25 bp, Homo sapien
ctcacacttgtgataatggctgtaa

SEQ ID NO: 2149397 - DNA, 25 bp, Homo sapien
cctttcatagtcaacccacaactga

SEQ ID NO: 2149398 - DNA, 25 bp, Homo sapien
ctcatggtggaagttagaaggaaac

SEQ ID NO: 2149399 - DNA, 25 bp, Homo sapien
cccaacagtgttgcacagatgatta

SEQ ID NO: 2149400 - DNA, 25 bp, Homo sapien
aatttgattatcctaaggccaggca

SEQ ID NO: 2149401 - DNA, 25 bp, Homo sapien
gacccagatgatcctggttaacacg

SEQ ID NO: 2149402 - DNA, 25 bp, Homo sapien
ttgattatcctaaggccaggcacgg

SEQ ID NO: 2149403 - DNA, 25 bp, Homo sapien
cacgaggtcgggagacccagatgat

SEQ ID NO: 2149404 - DNA, 25 bp, Homo sapien
cataagagcctattgtatgatcata

SEQ ID NO: 2149405 - DNA, 25 bp, Homo sapien
tatgatcataactgcaacttattca

SEQ ID NO: 2149406 - DNA, 25 bp, Homo sapien
gaggtttatctaaattgataggtgg

SEQ ID NO: 2149407 - DNA, 25 bp, Homo sapien
tgataggtggagctgcataagagcc

SEQ ID NO: 2149408 - DNA, 25 bp, Homo sapien
ttaccaaaagcagccgtcttgtctg

SEQ ID NO: 2149409 - DNA, 25 bp, Homo sapien
ttaattaccaaaagcagccgtcttg

SEQ ID NO: 2149410 - DNA, 25 bp, Homo sapien
catctttaattaccaaaagcagccg

SEQ ID NO: 2149411 - DNA, 25 bp, Homo sapien
ccaaaagcagccgtcttgtctgcat

SEQ ID NO: 2149412 - DNA, 25 bp, Homo sapien
agcttttagttgctgcttgttgatc

SEQ ID NO: 2149413 - DNA, 25 bp, Homo sapien
ttgatcctgtgtgataattcatcaa

SEQ ID NO: 2149414 - DNA, 25 bp, Homo sapien
gatcctgtgtgataattcatcaaat

SEQ ID NO: 2149415 - DNA, 25 bp, Homo sapien
ttttagttgctgcttgttgatcctg

SEQ ID NO: 2149416 - DNA, 25 bp, Homo sapien
tctctttagcatttacgctaaggca

SEQ ID NO: 2149417 - DNA, 25 bp, Homo sapien
cagttcttgtggtgataagttttca

SEQ ID NO: 2149418 - DNA, 25 bp, Homo sapien
ttcagcactctgaatgttccattct

SEQ ID NO: 2149419 - DNA, 25 bp, Homo sapien
ttgtttgggaaagtatctccatatt

SEQ ID NO: 2149420 - DNA, 25 bp, Homo sapien
tttcaatagatggcagcgagggagc

SEQ ID NO: 2149421 - DNA, 25 bp, Homo sapien
agatggcagcgagggagctgctctg

SEQ ID NO: 2149422 - DNA, 25 bp, Homo sapien
caatagatggcagcgagggagctgc

SEQ ID NO: 2149423 - DNA, 25 bp, Homo sapien
tagatggcagcgagggagctgctct

SEQ ID NO: 2149424 - DNA, 25 bp, Homo sapien
aatagataaaaggctaagcagagac

SEQ ID NO: 2149425 - DNA, 25 bp, Homo sapien
taatagataaaaggctaagcagaga

SEQ ID NO: 2149426 - DNA, 25 bp, Homo sapien
gtaatagataaaaggctaagcagag

SEQ ID NO: 2149427 - DNA, 25 bp, Homo sapien
ctgtaatagataaaaggctaagcag

SEQ ID NO: 2149428 - DNA, 25 bp, Homo sapien
ttaagtgtcttagcaacttgaagca

SEQ ID NO: 2149429 - DNA, 25 bp, Homo sapien
tggtgctgatgccctcttcttcaac

SEQ ID NO: 2149430 - DNA, 25 bp, Homo sapien
gtgtcttagcaacttgaagcatttt

SEQ ID NO: 2149431 - DNA, 25 bp, Homo sapien
cttgaagcattttggtgctgatgcc

SEQ ID NO: 2149432 - DNA, 25 bp, Homo sapien
tatccttttaggaagagaattggac

SEQ ID NO: 2149433 - DNA, 25 bp, Homo sapien
aagaacatccatgtcttcaatagca

SEQ ID NO: 2149434 - DNA, 25 bp, Homo sapien
cagattcaggtgagtgtatgtataa

SEQ ID NO: 2149435 - DNA, 25 bp, Homo sapien
tatgtataagaaagagtcaactgtc

SEQ ID NO: 2149436 - DNA, 25 bp, Homo sapien
ttgtgcctgaggaaagtctctgtca

SEQ ID NO: 2149437 - DNA, 25 bp, Homo sapien
tgtgaggcaagacaaaagaaggatc

SEQ ID NO: 2149438 - DNA, 25 bp, Homo sapien
gattaacttgattgccacagcactg

SEQ ID NO: 2149439 - DNA, 25 bp, Homo sapien
aagaaggatctgatatagtccatcc

SEQ ID NO: 2149440 - DNA, 25 bp, Homo sapien
aaatattttaccgtgtcagagcact

SEQ ID NO: 2149441 - DNA, 25 bp, Homo sapien
taggtaatacatggttatgcacccc

SEQ ID NO: 2149442 - DNA, 25 bp, Homo sapien
cagtatttctactggaccaataggt

SEQ ID NO: 2149443 - DNA, 25 bp, Homo sapien
ggaaaatattttaccgtgtcagagc

SEQ ID NO: 2149444 - DNA, 25 bp, Homo sapien
aggtataggagaaggataaaggcca

SEQ ID NO: 2149445 - DNA, 25 bp, Homo sapien
ggagaaggataaaggccagcaggaa

SEQ ID NO: 2149446 - DNA, 25 bp, Homo sapien
gagaaggataaaggccagcaggaaa

SEQ ID NO: 2149447 - DNA, 25 bp, Homo sapien
ctgttaggtataggagaaggataaa

SEQ ID NO: 2149448 - DNA, 25 bp, Homo sapien
taaaatgtcttgagtggagataaat

SEQ ID NO: 2149449 - DNA, 25 bp, Homo sapien
ataaaatgtcttgagtggagataaa

SEQ ID NO: 2149450 - DNA, 25 bp, Homo sapien
tgaataaaatgtcttgagtggagat

SEQ ID NO: 2149451 - DNA, 25 bp, Homo sapien
agtaaaagtctatactacagctgcc

SEQ ID NO: 2149452 - DNA, 25 bp, Homo sapien
cagtaaaagtctatactacagctgc

SEQ ID NO: 2149453 - DNA, 25 bp, Homo sapien
ctatactacagctgccaagctcata

SEQ ID NO: 2149454 - DNA, 25 bp, Homo sapien
actacagctgccaagctcatactgc

SEQ ID NO: 2149455 - DNA, 25 bp, Homo sapien
cttgcttttttccatttcctgtcat

SEQ ID NO: 2149456 - DNA, 25 bp, Homo sapien
ctagggtggagggtagtcgtagcac

SEQ ID NO: 2149457 - DNA, 25 bp, Homo sapien
acaggcactcctgttgccacattgg

SEQ ID NO: 2149458 - DNA, 25 bp, Homo sapien
cgtagcactgatgccgagggcacag

SEQ ID NO: 2149459 - DNA, 25 bp, Homo sapien
tcctgttgccacattggtaatgatg

SEQ ID NO: 2149460 - DNA, 25 bp, Homo sapien
tgacttttcctaacatcattgtaag

SEQ ID NO: 2149461 - DNA, 25 bp, Homo sapien
cctaacatcattgtaagtgctatca

SEQ ID NO: 2149462 - DNA, 25 bp, Homo sapien
cttttcctaacatcattgtaagtgc

SEQ ID NO: 2149463 - DNA, 25 bp, Homo sapien
cattgtaagtgctatcaatacacat

SEQ ID NO: 2149464 - DNA, 25 bp, Homo sapien
caggtttactgcactctcctgcctc

SEQ ID NO: 2149465 - DNA, 25 bp, Homo sapien
ctcccaggtttactgcactctcctg

SEQ ID NO: 2149466 - DNA, 25 bp, Homo sapien
agcctcagatatttctttatggcag

SEQ ID NO: 2149467 - DNA, 25 bp, Homo sapien
tgcctcccaggtttactgcactctc

SEQ ID NO: 2149468 - DNA, 25 bp, Homo sapien
gctcatgtactcttgtggtccccac

SEQ ID NO: 2149469 - DNA, 25 bp, Homo sapien
tgctagttagcaccacggcaaggtt

SEQ ID NO: 2149470 - DNA, 25 bp, Homo sapien
gtagtcatcagctagaggccacatt

SEQ ID NO: 2149471 - DNA, 25 bp, Homo sapien
caaggtcataccatgctagggaaag

SEQ ID NO: 2149472 - DNA, 25 bp, Homo sapien
ttcagtctcattcgttgctttgtca

SEQ ID NO: 2149473 - DNA, 25 bp, Homo sapien
tgctttgtcatcaactggatctctt

SEQ ID NO: 2149474 - DNA, 25 bp, Homo sapien
tttgttgacattcagtctcattcgt

SEQ ID NO: 2149475 - DNA, 25 bp, Homo sapien
tgtcatcaactggatctcttatttc

SEQ ID NO: 2149476 - DNA, 25 bp, Homo sapien
ctttctaatctgtcctcaggtgaat

SEQ ID NO: 2149477 - DNA, 25 bp, Homo sapien
tctaatctgtcctcaggtgaataaa

SEQ ID NO: 2149478 - DNA, 25 bp, Homo sapien
aatctgtcctcaggtgaataaatac

SEQ ID NO: 2149479 - DNA, 25 bp, Homo sapien
ctaatctgtcctcaggtgaataaat

SEQ ID NO: 2149480 - DNA, 25 bp, Homo sapien
attaagcagttgggctgaagtaaaa

SEQ ID NO: 2149481 - DNA, 25 bp, Homo sapien
aatttctatcgggaaattaagcagt

SEQ ID NO: 2149482 - DNA, 25 bp, Homo sapien
taagcagttgggctgaagtaaaaag

SEQ ID NO: 2149483 - DNA, 25 bp, Homo sapien
taggtgcattctatttggaaggcaa

SEQ ID NO: 2149484 - DNA, 25 bp, Homo sapien
gggaacttctgcctatacttcagag

SEQ ID NO: 2149485 - DNA, 25 bp, Homo sapien
catagagaatctctactcaggcagt

SEQ ID NO: 2149486 - DNA, 25 bp, Homo sapien
tgtgtggaaacacctagatgtccag

SEQ ID NO: 2149487 - DNA, 25 bp, Homo sapien
catccgcccgacctcaagatgttaa

SEQ ID NO: 2149488 - DNA, 25 bp, Homo sapien
tacttcgtgtctcaaatactgattc

SEQ ID NO: 2149489 - DNA, 25 bp, Homo sapien
ttttcaatgtctgccaaaagttact

SEQ ID NO: 2149490 - DNA, 25 bp, Homo sapien
gccaaaagttacttcgtgtctcaaa

SEQ ID NO: 2149491 - DNA, 25 bp, Homo sapien
gtgcctttttcaatgtctgccaaaa

SEQ ID NO: 2149492 - DNA, 25 bp, Homo sapien
tgagacaatacatgggagtcacggc

SEQ ID NO: 2149493 - DNA, 25 bp, Homo sapien
caatacatgggagtcacggcactgt

SEQ ID NO: 2149494 - DNA, 25 bp, Homo sapien
ggagtcacggcactgttgtccatta

SEQ ID NO: 2149495 - DNA, 25 bp, Homo sapien
cacggcactgttgtccattatcttt

SEQ ID NO: 2149496 - DNA, 25 bp, Homo sapien
agagcacaataaagttcaactatca

SEQ ID NO: 2149497 - DNA, 25 bp, Homo sapien
aagtttgcagaagggtttattgctt

SEQ ID NO: 2149498 - DNA, 25 bp, Homo sapien
taaagttcaactatcatacttctac

SEQ ID NO: 2149499 - DNA, 25 bp, Homo sapien
ttgctttttctagagcacaataaag

SEQ ID NO: 2149500 - DNA, 25 bp, Homo sapien
tatcaaaaattcgtgataagcacag

SEQ ID NO: 2149501 - DNA, 25 bp, Homo sapien
agccaccttgctctaattcatccaa

SEQ ID NO: 2149502 - DNA, 25 bp, Homo sapien
ctgatggtaagccaccttgctctaa

SEQ ID NO: 2149503 - DNA, 25 bp, Homo sapien
tgcattatcaaaaattcgtgataag

SEQ ID NO: 2149504 - DNA, 25 bp, Homo sapien
taattgggtacagcattgaagagct

SEQ ID NO: 2149505 - DNA, 25 bp, Homo sapien
attgggctgtgctgtaattgggtac

SEQ ID NO: 2149506 - DNA, 25 bp, Homo sapien
cagatgtgtcttggccatagtacag

SEQ ID NO: 2149507 - DNA, 25 bp, Homo sapien
gaagagctgctttgcctattattta

SEQ ID NO: 2149508 - DNA, 25 bp, Homo sapien
ctgctctaattgtttgctcagagta

SEQ ID NO: 2149509 - DNA, 25 bp, Homo sapien
taagacttgcctgtagatgttcttc

SEQ ID NO: 2149510 - DNA, 25 bp, Homo sapien
tccattaaccctctttgcaaggtac

SEQ ID NO: 2149511 - DNA, 25 bp, Homo sapien
taaccctctttgcaaggtactcacc

SEQ ID NO: 2149512 - DNA, 25 bp, Homo sapien
accttgtatctcaagaaggctgtga

SEQ ID NO: 2149513 - DNA, 25 bp, Homo sapien
aaccttgtatctcaagaaggctgtg

SEQ ID NO: 2149514 - DNA, 25 bp, Homo sapien
cagatgcctcgaagggtttccccat

SEQ ID NO: 2149515 - DNA, 25 bp, Homo sapien
aaagatggtcttgaaagtccagatg

SEQ ID NO: 2149516 - DNA, 25 bp, Homo sapien
aagggtttccccatatcccacaatg

SEQ ID NO: 2149517 - DNA, 25 bp, Homo sapien
tgaaagtccagatgcctcgaagggt

SEQ ID NO: 2149518 - DNA, 25 bp, Homo sapien
ttatagaaacgccttttgcactcac

SEQ ID NO: 2149519 - DNA, 25 bp, Homo sapien
tcgagcctcttctgggcccagtcca

SEQ ID NO: 2149520 - DNA, 25 bp, Homo sapien
gatcagtttgccgtccatgataggg

SEQ ID NO: 2149521 - DNA, 25 bp, Homo sapien
tttgccgtccatgatagggtagccc

SEQ ID NO: 2149522 - DNA, 25 bp, Homo sapien
tagcctttctgaccagcgtgtgaca

SEQ ID NO: 2149523 - DNA, 25 bp, Homo sapien
actttgccacagtggacaaagccac

SEQ ID NO: 2149524 - DNA, 25 bp, Homo sapien
gccacccagagagttgatgctcttg

SEQ ID NO: 2149525 - DNA, 25 bp, Homo sapien
agtcattggtcactttgccacagtg

SEQ ID NO: 2149526 - DNA, 25 bp, Homo sapien
tcactttgccacagtggacaaagcc

SEQ ID NO: 2149527 - DNA, 25 bp, Homo sapien
gacttgcagagggtgagcacttgct

SEQ ID NO: 2149528 - DNA, 25 bp, Homo sapien
cctgccatttggtctggaccagcaa

SEQ ID NO: 2149529 - DNA, 25 bp, Homo sapien
agagcctgccatttggtctggacca

SEQ ID NO: 2149530 - DNA, 25 bp, Homo sapien
gccatttggtctggaccagcaagga

SEQ ID NO: 2149531 - DNA, 25 bp, Homo sapien
gtggtctcacgaatgctttcttctt

SEQ ID NO: 2149532 - DNA, 25 bp, Homo sapien
cttcttcctttgcaatttggtcttt

SEQ ID NO: 2149533 - DNA, 25 bp, Homo sapien
tgaggtttgcacttctcctgcaatg

SEQ ID NO: 2149534 - DNA, 25 bp, Homo sapien
atttcatcatcgcttttctttccaa

SEQ ID NO: 2149535 - DNA, 25 bp, Homo sapien
tacaacctgattcatactgcttact

SEQ ID NO: 2149536 - DNA, 25 bp, Homo sapien
catactgcttactttgtcagtaatc

SEQ ID NO: 2149537 - DNA, 25 bp, Homo sapien
cagttggtttctgagtcagccagaa

SEQ ID NO: 2149538 - DNA, 25 bp, Homo sapien
agagattggttatgttcttgataac

SEQ ID NO: 2149539 - DNA, 25 bp, Homo sapien
gataacagttggtttctgagtcagc

SEQ ID NO: 2149540 - DNA, 25 bp, Homo sapien
ctgtactggggaagagattggttat

SEQ ID NO: 2149541 - DNA, 25 bp, Homo sapien
catgggaacctttcttcttgtcgtc

SEQ ID NO: 2149542 - DNA, 25 bp, Homo sapien
tcttgtcgtcatgattcagagtagg

SEQ ID NO: 2149543 - DNA, 25 bp, Homo sapien
tggtcatgatctctccatgggaacc

SEQ ID NO: 2149544 - DNA, 25 bp, Homo sapien
gcagaggcaaaaaggtattggtcat

SEQ ID NO: 2149545 - DNA, 25 bp, Homo sapien
ccttttagtgacatcactagtcctc

SEQ ID NO: 2149546 - DNA, 25 bp, Homo sapien
aaccttttagtgacatcactagtcc

SEQ ID NO: 2149547 - DNA, 25 bp, Homo sapien
agtgacatcactagtcctcttccag

SEQ ID NO: 2149548 - DNA, 25 bp, Homo sapien
tttagtgacatcactagtcctcttc

SEQ ID NO: 2149549 - DNA, 25 bp, Homo sapien
tgtcactgtatgtgagatgggtctg

SEQ ID NO: 2149550 - DNA, 25 bp, Homo sapien
tcactgtatgtgagatgggtctgtg

SEQ ID NO: 2149551 - DNA, 25 bp, Homo sapien
ttttgtcagcaattagaatagcaac

SEQ ID NO: 2149552 - DNA, 25 bp, Homo sapien
tggtttaacgtttgttttgtcagca

SEQ ID NO: 2149553 - DNA, 25 bp, Homo sapien
tttcatccggatgtagaggctaata

SEQ ID NO: 2149554 - DNA, 25 bp, Homo sapien
catacacgcacataccaagaggtta

SEQ ID NO: 2149555 - DNA, 25 bp, Homo sapien
ttttgcgtctacctactccgtgggc

SEQ ID NO: 2149556 - DNA, 25 bp, Homo sapien
gactctcatccaacatttcatccgg

SEQ ID NO: 2149557 - DNA, 25 bp, Homo sapien
caacttctctgggtgactgtcggtg

SEQ ID NO: 2149558 - DNA, 25 bp, Homo sapien
agctgtgatgaaggcactgctggct

SEQ ID NO: 2149559 - DNA, 25 bp, Homo sapien
tgtacgcatccagttcggaccccaa

SEQ ID NO: 2149560 - DNA, 25 bp, Homo sapien
ggtccagggccctgtacgcatccag

SEQ ID NO: 2149561 - DNA, 25 bp, Homo sapien
gttctgaaatcttcatcgactttct

SEQ ID NO: 2149562 - DNA, 25 bp, Homo sapien
ccagttctgaaatcttcatcgactt

SEQ ID NO: 2149563 - DNA, 25 bp, Homo sapien
cttcatcgactttctactgctttca

SEQ ID NO: 2149564 - DNA, 25 bp, Homo sapien
gaaatcttcatcgactttctactgc

SEQ ID NO: 2149565 - DNA, 25 bp, Homo sapien
atactgcgggccagctttatgctca

SEQ ID NO: 2149566 - DNA, 25 bp, Homo sapien
actcctctagtaataagctataaaa

SEQ ID NO: 2149567 - DNA, 25 bp, Homo sapien
gcagttgcagtgaggcaacacaata

SEQ ID NO: 2149568 - DNA, 25 bp, Homo sapien
ctctctcagtgaaagagaacaatca

SEQ ID NO: 2149569 - DNA, 25 bp, Homo sapien
tcttcctgcagccaagaatatgctt

SEQ ID NO: 2149570 - DNA, 25 bp, Homo sapien
gtaggctcagggaatcatgatccat

SEQ ID NO: 2149571 - DNA, 25 bp, Homo sapien
tcatgatccatacttggagttgaac

SEQ ID NO: 2149572 - DNA, 25 bp, Homo sapien
ctagagccctccttttcacctggtt

SEQ ID NO: 2149573 - DNA, 25 bp, Homo sapien
tctttgcatcagaaccttgatggcc

SEQ ID NO: 2149574 - DNA, 25 bp, Homo sapien
ttctttgcatcagaaccttgatggc

SEQ ID NO: 2149575 - DNA, 25 bp, Homo sapien
tttgcatcagaaccttgatggccat

SEQ ID NO: 2149576 - DNA, 25 bp, Homo sapien
ttttctttgcatcagaaccttgatg

SEQ ID NO: 2149577 - DNA, 25 bp, Homo sapien
gtagccattctataactgcagcatt

SEQ ID NO: 2149578 - DNA, 25 bp, Homo sapien
tgagatcagctcattccagtacttt

SEQ ID NO: 2149579 - DNA, 25 bp, Homo sapien
gaagctgcttgaactgtagccattc

SEQ ID NO: 2149580 - DNA, 25 bp, Homo sapien
tgaaaaatgaaattccgtagcgatg

SEQ ID NO: 2149581 - DNA, 25 bp, Homo sapien
caggcagagactcttaggactggct

SEQ ID NO: 2149582 - DNA, 25 bp, Homo sapien
tactgtgtctacctctatcgtagca

SEQ ID NO: 2149583 - DNA, 25 bp, Homo sapien
cacaccttgtaggagatgtctctca

SEQ ID NO: 2149584 - DNA, 25 bp, Homo sapien
actgatgccctctacactgtgagct

SEQ ID NO: 2149585 - DNA, 25 bp, Homo sapien
tattccttcacgtatatttcccaaa

SEQ ID NO: 2149586 - DNA, 25 bp, Homo sapien
tcttgtatttggatagctagagctc

SEQ ID NO: 2149587 - DNA, 25 bp, Homo sapien
ggattattccttcacgtatatttcc

SEQ ID NO: 2149588 - DNA, 25 bp, Homo sapien
ggtttggacatttaacatagaccca

SEQ ID NO: 2149589 - DNA, 25 bp, Homo sapien
caggtatagtgaatttgtgctgaca

SEQ ID NO: 2149590 - DNA, 25 bp, Homo sapien
acactgtgggcggtccgagacttta

SEQ ID NO: 2149591 - DNA, 25 bp, Homo sapien
ggtggcctcatgtcgtcatggagaa

SEQ ID NO: 2149592 - DNA, 25 bp, Homo sapien
catggagaatgcctctttcaagtaa

SEQ ID NO: 2149593 - DNA, 25 bp, Homo sapien
catacaccttgctggaaaaggccaa

SEQ ID NO: 2149594 - DNA, 25 bp, Homo sapien
caatcgttttcttcccttgatggac

SEQ ID NO: 2149595 - DNA, 25 bp, Homo sapien
cattgagccttcctgtgacacagca

SEQ ID NO: 2149596 - DNA, 25 bp, Homo sapien
gctccaagtggatgaataggctctt

SEQ ID NO: 2149597 - DNA, 25 bp, Homo sapien
cttgtgaacagaaggtggctagaca

SEQ ID NO: 2149598 - DNA, 25 bp, Homo sapien
gtttctgcttggaatataaactttc

SEQ ID NO: 2149599 - DNA, 25 bp, Homo sapien
gaatagcaagccagcacatcaacag

SEQ ID NO: 2149600 - DNA, 25 bp, Homo sapien
tgcgtggtccaatgtgataattaca

SEQ ID NO: 2149601 - DNA, 25 bp, Homo sapien
tgacaacagcacctgactgattgat

SEQ ID NO: 2149602 - DNA, 25 bp, Homo sapien
tgtgacaacagcacctgactgattg

SEQ ID NO: 2149603 - DNA, 25 bp, Homo sapien
gtgacaacagcacctgactgattga

SEQ ID NO: 2149604 - DNA, 25 bp, Homo sapien
acaacagcacctgactgattgataa

SEQ ID NO: 2149605 - DNA, 25 bp, Homo sapien
attttcagatgtatccctgccagag

SEQ ID NO: 2149606 - DNA, 25 bp, Homo sapien
gattttcagatgtatccctgccaga

SEQ ID NO: 2149607 - DNA, 25 bp, Homo sapien
ttttcagatgtatccctgccagagg

SEQ ID NO: 2149608 - DNA, 25 bp, Homo sapien
cttccatcagcagtagggggcagtt

SEQ ID NO: 2149609 - DNA, 25 bp, Homo sapien
tccatcagcagtagggggcagttca

SEQ ID NO: 2149610 - DNA, 25 bp, Homo sapien
ttcttccatcagcagtagggggcag

SEQ ID NO: 2149611 - DNA, 25 bp, Homo sapien
ccatcagcagtagggggcagttcat

SEQ ID NO: 2149612 - DNA, 25 bp, Homo sapien
tctggatttgaaagaccgcattttg

SEQ ID NO: 2149613 - DNA, 25 bp, Homo sapien
aaagaccgcattttgcttgggaaca

SEQ ID NO: 2149614 - DNA, 25 bp, Homo sapien
catctgtaaatttgtctgctcttgt

SEQ ID NO: 2149615 - DNA, 25 bp, Homo sapien
tttgaaagaccgcattttgcttggg

SEQ ID NO: 2149616 - DNA, 25 bp, Homo sapien
tagtcccatctgagccttcatcaag

SEQ ID NO: 2149617 - DNA, 25 bp, Homo sapien
tcaagtgtccgtagacaccatcagg

SEQ ID NO: 2149618 - DNA, 25 bp, Homo sapien
taccctcattgctcctttaggttga

SEQ ID NO: 2149619 - DNA, 25 bp, Homo sapien
tattgtgctcatgtgaattactcag

SEQ ID NO: 2149620 - DNA, 25 bp, Homo sapien
ctttctttctctagcttcccagtgc

SEQ ID NO: 2149621 - DNA, 25 bp, Homo sapien
cgtctttctttctctagcttcccag

SEQ ID NO: 2149622 - DNA, 25 bp, Homo sapien
tttctttctctagcttcccagtgcc

SEQ ID NO: 2149623 - DNA, 25 bp, Homo sapien
ctttctctagcttcccagtgcccat

SEQ ID NO: 2149624 - DNA, 25 bp, Homo sapien
tagattgcccttaatggagaagcag

SEQ ID NO: 2149625 - DNA, 25 bp, Homo sapien
tgagagagtccattttgctaagttg

SEQ ID NO: 2149626 - DNA, 25 bp, Homo sapien
gctttcatagagcaacgtcgtagtg

SEQ ID NO: 2149627 - DNA, 25 bp, Homo sapien
tacccagaagacttattaggcagaa

SEQ ID NO: 2149628 - DNA, 25 bp, Homo sapien
ttcacaccaatctggaaggcgggtt

SEQ ID NO: 2149629 - DNA, 25 bp, Homo sapien
cacaccaatctggaaggcgggttca

SEQ ID NO: 2149630 - DNA, 25 bp, Homo sapien
tcttcacaccaatctggaaggcggg

SEQ ID NO: 2149631 - DNA, 25 bp, Homo sapien
caccaatctggaaggcgggttcatt

SEQ ID NO: 2149632 - DNA, 25 bp, Homo sapien
agcatgggcgcaactcaggagtcgt

SEQ ID NO: 2149633 - DNA, 25 bp, Homo sapien
tactctctctcttattcgctcgctc

SEQ ID NO: 2149634 - DNA, 25 bp, Homo sapien
aaagaattcgctggctcttacaccc

SEQ ID NO: 2149635 - DNA, 25 bp, Homo sapien
cttaacttgctctcgctcactcttc

SEQ ID NO: 2149636 - DNA, 25 bp, Homo sapien
tgctgatggtgttggggaatcctcc

SEQ ID NO: 2149637 - DNA, 25 bp, Homo sapien
cctccgtgagaatgacccaaaagcc

SEQ ID NO: 2149638 - DNA, 25 bp, Homo sapien
gggaatcctccgtgagaatgaccca

SEQ ID NO: 2149639 - DNA, 25 bp, Homo sapien
gaagaccgcccggagcacgctttgc

SEQ ID NO: 2149640 - DNA, 25 bp, Homo sapien
aaagccttgccggggcagtggtctc

SEQ ID NO: 2149641 - DNA, 25 bp, Homo sapien
agcctggaccgacggctggctcgct

SEQ ID NO: 2149642 - DNA, 25 bp, Homo sapien
accgacggctggctcgcttgcgctt

SEQ ID NO: 2149643 - DNA, 25 bp, Homo sapien
tctcgggtgagggagagcctggacc

SEQ ID NO: 2149644 - DNA, 25 bp, Homo sapien
atctctgcccggtcccggccccagt

SEQ ID NO: 2149645 - DNA, 25 bp, Homo sapien
cagtcccagttcccaggccacgcag

SEQ ID NO: 2149646 - DNA, 25 bp, Homo sapien
caccatctctgcccggtcccggccc

SEQ ID NO: 2149647 - DNA, 25 bp, Homo sapien
caggccacgcaggacagggacccac

SEQ ID NO: 2149648 - DNA, 25 bp, Homo sapien
cagccacctcgttgaggctcagatt

SEQ ID NO: 2149649 - DNA, 25 bp, Homo sapien
caggagacccctctcttgtcccaga

SEQ ID NO: 2149650 - DNA, 25 bp, Homo sapien
agaccagccacctcgttgaggctca

SEQ ID NO: 2149651 - DNA, 25 bp, Homo sapien
gagacccctctcttgtcccagaggc

SEQ ID NO: 2149652 - DNA, 25 bp, Homo sapien
agcagcgagccgaaaagcctcgact

SEQ ID NO: 2149653 - DNA, 25 bp, Homo sapien
tgggagatccaaagtgggctccacc

SEQ ID NO: 2149654 - DNA, 25 bp, Homo sapien
tccggtgctcctctcggctcggaaa

SEQ ID NO: 2149655 - DNA, 25 bp, Homo sapien
agacagtcggcatcaccctgggaca

SEQ ID NO: 2149656 - DNA, 25 bp, Homo sapien
tagacttgtaaatacgacagaagcc

SEQ ID NO: 2149657 - DNA, 25 bp, Homo sapien
ggttctttcttagtcggcagccttc

SEQ ID NO: 2149658 - DNA, 25 bp, Homo sapien
aattcgtggtctgcgtgacttcgcc

SEQ ID NO: 2149659 - DNA, 25 bp, Homo sapien
ccggatacctctcaatgatactggg

SEQ ID NO: 2149660 - DNA, 25 bp, Homo sapien
tggaggaatccaagtgatctacgtg

SEQ ID NO: 2149661 - DNA, 25 bp, Homo sapien
tctacgtggtaattcaaatggaagg

SEQ ID NO: 2149662 - DNA, 25 bp, Homo sapien
gcatttgtcacggaaaaactattgg

SEQ ID NO: 2149663 - DNA, 25 bp, Homo sapien
tctggttggtgttgtataactgcac

SEQ ID NO: 2149664 - DNA, 25 bp, Homo sapien
caagaaagatgcaaatgaggtcccc

SEQ ID NO: 2149665 - DNA, 25 bp, Homo sapien
tgaaaccggatggattagagcccct

SEQ ID NO: 2149666 - DNA, 25 bp, Homo sapien
tacaactaaggatttcagaaccggc

SEQ ID NO: 2149667 - DNA, 25 bp, Homo sapien
aacctgtgcccttggagagaccctt

SEQ ID NO: 2149668 - DNA, 25 bp, Homo sapien
acagcaaagccacacgatgggacac

SEQ ID NO: 2149669 - DNA, 25 bp, Homo sapien
cctgaaagccttaggactattgaat

SEQ ID NO: 2149670 - DNA, 25 bp, Homo sapien
tgccctgaaagccttaggactattg

SEQ ID NO: 2149671 - DNA, 25 bp, Homo sapien
gatgggacacatcagtcccttggtg

SEQ ID NO: 2149672 - DNA, 25 bp, Homo sapien
tgcaaacagtgcgtaatccacaagc

SEQ ID NO: 2149673 - DNA, 25 bp, Homo sapien
tgcactacaagtgcacagcagaaag

SEQ ID NO: 2149674 - DNA, 25 bp, Homo sapien
gtgtgctaatgagctgacactgcag

SEQ ID NO: 2149675 - DNA, 25 bp, Homo sapien
caatttttgcaatgacagtgcggag

SEQ ID NO: 2149676 - DNA, 25 bp, Homo sapien
cgtttagagtacaattccgtggtga

SEQ ID NO: 2149677 - DNA, 25 bp, Homo sapien
ttaagccaatgcgtttagagtacaa

SEQ ID NO: 2149678 - DNA, 25 bp, Homo sapien
ccaatgcgtttagagtacaattccg

SEQ ID NO: 2149679 - DNA, 25 bp, Homo sapien
tagagtacaattccgtggtgaataa

SEQ ID NO: 2149680 - DNA, 25 bp, Homo sapien
tcctgcaaggtaacaggtggtaatc

SEQ ID NO: 2149681 - DNA, 25 bp, Homo sapien
ctgtcttggaaagccccctctgagg

SEQ ID NO: 2149682 - DNA, 25 bp, Homo sapien
tattcccttccagatagcacgcttg

SEQ ID NO: 2149683 - DNA, 25 bp, Homo sapien
gaaatattaatgactgataaggatt

SEQ ID NO: 2149684 - DNA, 25 bp, Homo sapien
atcagaagggtatgacttcggtcaa

SEQ ID NO: 2149685 - DNA, 25 bp, Homo sapien
tgaaatcacctattgcagcaaacac

SEQ ID NO: 2149686 - DNA, 25 bp, Homo sapien
gcagcaggcccactaccatcagaag

SEQ ID NO: 2149687 - DNA, 25 bp, Homo sapien
agggtatgacttcggtcaaaggcag

SEQ ID NO: 2149688 - DNA, 25 bp, Homo sapien
cctttctggggagctacaaagatga

SEQ ID NO: 2149689 - DNA, 25 bp, Homo sapien
cccctttctggggagctacaaagat

SEQ ID NO: 2149690 - DNA, 25 bp, Homo sapien
ccctttctggggagctacaaagatg

SEQ ID NO: 2149691 - DNA, 25 bp, Homo sapien
ctttctggggagctacaaagatgaa

SEQ ID NO: 2149692 - DNA, 25 bp, Homo sapien
tctgctgggcgcttattaatgacct

SEQ ID NO: 2149693 - DNA, 25 bp, Homo sapien
tctgaccttgctgagggcctccgca

SEQ ID NO: 2149694 - DNA, 25 bp, Homo sapien
tcttctgatctgctgggcgcttatt

SEQ ID NO: 2149695 - DNA, 25 bp, Homo sapien
ccagcattctgaccttgctgagggc

SEQ ID NO: 2149696 - DNA, 25 bp, Homo sapien
gagataacagaaggtagtaaagtaa

SEQ ID NO: 2149697 - DNA, 25 bp, Homo sapien
aaatctgtggtgttactttagtaca

SEQ ID NO: 2149698 - DNA, 25 bp, Homo sapien
tgcaaaacatggtggaaaagacccc

SEQ ID NO: 2149699 - DNA, 25 bp, Homo sapien
tgtttgttgacaatgagcagaaatt

SEQ ID NO: 2149700 - DNA, 25 bp, Homo sapien
gtatgcatgccagcataaaatgaat

SEQ ID NO: 2149701 - DNA, 25 bp, Homo sapien
ctgtatgcatgccagcataaaatga

SEQ ID NO: 2149702 - DNA, 25 bp, Homo sapien
tgtatgcatgccagcataaaatgaa

SEQ ID NO: 2149703 - DNA, 25 bp, Homo sapien
tatctgagctgccatcagtgatgca

SEQ ID NO: 2149704 - DNA, 25 bp, Homo sapien
gaaatgcgacgatatctgagctgcc

SEQ ID NO: 2149705 - DNA, 25 bp, Homo sapien
taattcaggaaatgcgacgatatct

SEQ ID NO: 2149706 - DNA, 25 bp, Homo sapien
tgacgggatataattcaggaaatgc

SEQ ID NO: 2149707 - DNA, 25 bp, Homo sapien
ggaaggcagccaacattctgaggag

SEQ ID NO: 2149708 - DNA, 25 bp, Homo sapien
ctggggaaggcagccaacattctga

SEQ ID NO: 2149709 - DNA, 25 bp, Homo sapien
tggggaaggcagccaacattctgag

SEQ ID NO: 2149710 - DNA, 25 bp, Homo sapien
gggaaggcagccaacattctgagga

SEQ ID NO: 2149711 - DNA, 25 bp, Homo sapien
ccttgatgtacactgtccaggccac

SEQ ID NO: 2149712 - DNA, 25 bp, Homo sapien
cttcaagattgaggaaagagggtga

SEQ ID NO: 2149713 - DNA, 25 bp, Homo sapien
cttgatgtacactgtccaggccaca

SEQ ID NO: 2149714 - DNA, 25 bp, Homo sapien
aaagggggcacttcaagattgagga

SEQ ID NO: 2149715 - DNA, 25 bp, Homo sapien
gcagagctgtccaattgttttccct

SEQ ID NO: 2149716 - DNA, 25 bp, Homo sapien
gtgcagcagcccatgatctttgcag

SEQ ID NO: 2149717 - DNA, 25 bp, Homo sapien
ggcagagctgtccaattgttttccc

SEQ ID NO: 2149718 - DNA, 25 bp, Homo sapien
cggcagagctgtccaattgttttcc

SEQ ID NO: 2149719 - DNA, 25 bp, Homo sapien
cccagatacaataggcccagttttg

SEQ ID NO: 2149720 - DNA, 25 bp, Homo sapien
tacaataggcccagttttggcgggc

SEQ ID NO: 2149721 - DNA, 25 bp, Homo sapien
atacaataggcccagttttggcggg

SEQ ID NO: 2149722 - DNA, 25 bp, Homo sapien
agatacaataggcccagttttggcg

SEQ ID NO: 2149723 - DNA, 25 bp, Homo sapien
ctttgcggcataacaggaattggtg

SEQ ID NO: 2149724 - DNA, 25 bp, Homo sapien
gggagatcttctttgcggcataaca

SEQ ID NO: 2149725 - DNA, 25 bp, Homo sapien
caggaattggtgaacaagattcttt

SEQ ID NO: 2149726 - DNA, 25 bp, Homo sapien
tcttctttgcggcataacaggaatt

SEQ ID NO: 2149727 - DNA, 25 bp, Homo sapien
tccagagggtagtttcttctgtctc

SEQ ID NO: 2149728 - DNA, 25 bp, Homo sapien
tgctcactcagttgagaactcaaga

SEQ ID NO: 2149729 - DNA, 25 bp, Homo sapien
aatgttcctttattaacctctcttg

SEQ ID NO: 2149730 - DNA, 25 bp, Homo sapien
agtgctgacttgtgatcttgttctc

SEQ ID NO: 2149731 - DNA, 25 bp, Homo sapien
ggcacctttcctattgaaatctgct

SEQ ID NO: 2149732 - DNA, 25 bp, Homo sapien
cacctttcctattgaaatctgctct

SEQ ID NO: 2149733 - DNA, 25 bp, Homo sapien
ttgggcacctttcctattgaaatct

SEQ ID NO: 2149734 - DNA, 25 bp, Homo sapien
tgggcacctttcctattgaaatctg

SEQ ID NO: 2149735 - DNA, 25 bp, Homo sapien
tcagaagagagtaactacactaaaa

SEQ ID NO: 2149736 - DNA, 25 bp, Homo sapien
cagaagagagtaactacactaaaac

SEQ ID NO: 2149737 - DNA, 25 bp, Homo sapien
aatgatgctgacatcatagtgctgt

SEQ ID NO: 2149738 - DNA, 25 bp, Homo sapien
gctgacatcatagtgctgtactgta

SEQ ID NO: 2149739 - DNA, 25 bp, Homo sapien
tgctgcagttttgttggctttgcaa

SEQ ID NO: 2149740 - DNA, 25 bp, Homo sapien
gagtttgcagctgacctatgctgca

SEQ ID NO: 2149741 - DNA, 25 bp, Homo sapien
cagctgacctatgctgcagttttgt

SEQ ID NO: 2149742 - DNA, 25 bp, Homo sapien
tggaaacagggctcatgtcgtccat

SEQ ID NO: 2149743 - DNA, 25 bp, Homo sapien
ccatcttttgaaggtcgtggacgtt

SEQ ID NO: 2149744 - DNA, 25 bp, Homo sapien
gatcccctgaggtgatgtgacaggg

SEQ ID NO: 2149745 - DNA, 25 bp, Homo sapien
agggggctggcccatcatgcccata

SEQ ID NO: 2149746 - DNA, 25 bp, Homo sapien
gattccttccagatcagtgggaaca

SEQ ID NO: 2149747 - DNA, 25 bp, Homo sapien
cagatcagtgggaacactccagctg

SEQ ID NO: 2149748 - DNA, 25 bp, Homo sapien
gctgttcatgcttgcttgttgggct

SEQ ID NO: 2149749 - DNA, 25 bp, Homo sapien
ggaacactccagctgttcatgcttg

SEQ ID NO: 2149750 - DNA, 25 bp, Homo sapien
tcaaggacattcttgacaaagggcc

SEQ ID NO: 2149751 - DNA, 25 bp, Homo sapien
taaaactcctgcgtatctgttggct

SEQ ID NO: 2149752 - DNA, 25 bp, Homo sapien
gctcagtgccatgaaagagtccagt

SEQ ID NO: 2149753 - DNA, 25 bp, Homo sapien
gaatggaataggcaggctcagtgcc

SEQ ID NO: 2149754 - DNA, 25 bp, Homo sapien
tgaaatggccccataaaatgtctcc

SEQ ID NO: 2149755 - DNA, 25 bp, Homo sapien
agtgaacagctgaaatggccccata

SEQ ID NO: 2149756 - DNA, 25 bp, Homo sapien
ccataaaatgtctccttcatatcct

SEQ ID NO: 2149757 - DNA, 25 bp, Homo sapien
gaacagctgaaatggccccataaaa

SEQ ID NO: 2149758 - DNA, 25 bp, Homo sapien
tggggcagatccctgtcaaccaggt

SEQ ID NO: 2149759 - DNA, 25 bp, Homo sapien
cctgcttaagccagagtcatagggc

SEQ ID NO: 2149760 - DNA, 25 bp, Homo sapien
gccagagtcatagggccagtttgta

SEQ ID NO: 2149761 - DNA, 25 bp, Homo sapien
ggtcagttagccttccactactggg

SEQ ID NO: 2149762 - DNA, 25 bp, Homo sapien
gcagaggacccatctcattcttttt

SEQ ID NO: 2149763 - DNA, 25 bp, Homo sapien
acttcctgcagaggacccatctcat

SEQ ID NO: 2149764 - DNA, 25 bp, Homo sapien
tttatcacttcctgcagaggaccca

SEQ ID NO: 2149765 - DNA, 25 bp, Homo sapien
ctgcagaggacccatctcattcttt

SEQ ID NO: 2149766 - DNA, 25 bp, Homo sapien
agctgctttgattgggaacagatgg

SEQ ID NO: 2149767 - DNA, 25 bp, Homo sapien
gatggtctagctcgaatctaagaac

SEQ ID NO: 2149768 - DNA, 25 bp, Homo sapien
gctcgaatctaagaacaaagccctc

SEQ ID NO: 2149769 - DNA, 25 bp, Homo sapien
gattgggaacagatggtctagctcg

SEQ ID NO: 2149770 - DNA, 25 bp, Homo sapien
tcatgcgaagcagacataacaggca

SEQ ID NO: 2149771 - DNA, 25 bp, Homo sapien
ttccattcatgcgaagcagacataa

SEQ ID NO: 2149772 - DNA, 25 bp, Homo sapien
aatgtggtgtgatttaaggggtcct

SEQ ID NO: 2149773 - DNA, 25 bp, Homo sapien
gcgaagcagacataacaggcataat

SEQ ID NO: 2149774 - DNA, 25 bp, Homo sapien
gcctatcctgcccatgtgtaattgg

SEQ ID NO: 2149775 - DNA, 25 bp, Homo sapien
ttgggaaagttctatcttgatcctt

SEQ ID NO: 2149776 - DNA, 25 bp, Homo sapien
ccatgtgtaattgggaaagttctat

SEQ ID NO: 2149777 - DNA, 25 bp, Homo sapien
gagtcacaggggttaggtggctgcc

SEQ ID NO: 2149778 - DNA, 25 bp, Homo sapien
tagatgatttaaggctctgggcagg

SEQ ID NO: 2149779 - DNA, 25 bp, Homo sapien
ccttcaggttacataatgtcttagc

SEQ ID NO: 2149780 - DNA, 25 bp, Homo sapien
ggcaggccatgggaagactgtcctt

SEQ ID NO: 2149781 - DNA, 25 bp, Homo sapien
gtcttagccacagttatgttattat

SEQ ID NO: 2149782 - DNA, 25 bp, Homo sapien
cagaatagcgcccttcaaggctggg

SEQ ID NO: 2149783 - DNA, 25 bp, Homo sapien
caaactgcacatctgcgtcagtggg

SEQ ID NO: 2149784 - DNA, 25 bp, Homo sapien
gaagctaggcgtaacaaaggatgtg

SEQ ID NO: 2149785 - DNA, 25 bp, Homo sapien
ggcatacacccctctcgagaactgg

SEQ ID NO: 2149786 - DNA, 25 bp, Homo sapien
tttatttattggaagcaaagggcac

SEQ ID NO: 2149787 - DNA, 25 bp, Homo sapien
tacatgaatatctaaagagcagagc

SEQ ID NO: 2149788 - DNA, 25 bp, Homo sapien
ctgaggaagtttgaacacaattaca

SEQ ID NO: 2149789 - DNA, 25 bp, Homo sapien
caaagggcacataagctgaggaagt

SEQ ID NO: 2149790 - DNA, 25 bp, Homo sapien
tttctttctgtgttcaggaaagtct

SEQ ID NO: 2149791 - DNA, 25 bp, Homo sapien
tgacaacctgcagatttttctttct

SEQ ID NO: 2149792 - DNA, 25 bp, Homo sapien
ttttctttctgtgttcaggaaagtc

SEQ ID NO: 2149793 - DNA, 25 bp, Homo sapien
caatgacaacctgcagatttttctt

SEQ ID NO: 2149794 - DNA, 25 bp, Homo sapien
agaaggcaaatggacacaatcagaa

SEQ ID NO: 2149795 - DNA, 25 bp, Homo sapien
cacaatcagaattggagccatctgt

SEQ ID NO: 2149796 - DNA, 25 bp, Homo sapien
tggacacaatcagaattggagccat

SEQ ID NO: 2149797 - DNA, 25 bp, Homo sapien
ccatctgtttccttcgtacgtcttt

SEQ ID NO: 2149798 - DNA, 25 bp, Homo sapien
cactttttggctaaggcatcatgtg

SEQ ID NO: 2149799 - DNA, 25 bp, Homo sapien
tcctctccaattcatattctgtcct

SEQ ID NO: 2149800 - DNA, 25 bp, Homo sapien
tcatgtgtagccatactgatgccag

SEQ ID NO: 2149801 - DNA, 25 bp, Homo sapien
gctctcctctccaattcatattctg

SEQ ID NO: 2149802 - DNA, 25 bp, Homo sapien
ctacagagacttcagttggaggtga

SEQ ID NO: 2149803 - DNA, 25 bp, Homo sapien
tacagagacttcagttggaggtgaa

SEQ ID NO: 2149804 - DNA, 25 bp, Homo sapien
acagagacttcagttggaggtgaag

SEQ ID NO: 2149805 - DNA, 25 bp, Homo sapien
aattagcctctgttctactgctgag

SEQ ID NO: 2149806 - DNA, 25 bp, Homo sapien
tgtggagtcgacaaagcaggacagc

SEQ ID NO: 2149807 - DNA, 25 bp, Homo sapien
gttagcaccagagaattaatcagat

SEQ ID NO: 2149808 - DNA, 25 bp, Homo sapien
taatcagatcgtttgtggagtcgac

SEQ ID NO: 2149809 - DNA, 25 bp, Homo sapien
gagaactacctataacagttctcac

SEQ ID NO: 2149810 - DNA, 25 bp, Homo sapien
taactgagaactacctataacagtt

SEQ ID NO: 2149811 - DNA, 25 bp, Homo sapien
actgagaactacctataacagttct

SEQ ID NO: 2149812 - DNA, 25 bp, Homo sapien
tgagaactacctataacagttctca

SEQ ID NO: 2149813 - DNA, 25 bp, Homo sapien
tatgagaaacgctgcctttggcgat

SEQ ID NO: 2149814 - DNA, 25 bp, Homo sapien
tggagtatgagaaacgctgcctttg

SEQ ID NO: 2149815 - DNA, 25 bp, Homo sapien
ggactggagtatgagaaacgctgcc

SEQ ID NO: 2149816 - DNA, 25 bp, Homo sapien
gagtatgagaaacgctgcctttggc

SEQ ID NO: 2149817 - DNA, 25 bp, Homo sapien
ttcaaattctcagtaatatttgcat

SEQ ID NO: 2149818 - DNA, 25 bp, Homo sapien
aattctcagtaatatttgcatgatc

SEQ ID NO: 2149819 - DNA, 25 bp, Homo sapien
caaattctcagtaatatttgcatga

SEQ ID NO: 2149820 - DNA, 25 bp, Homo sapien
tattcaaattctcagtaatatttgc

SEQ ID NO: 2149821 - DNA, 25 bp, Homo sapien
ttcttagggaaaactccccatctgc

SEQ ID NO: 2149822 - DNA, 25 bp, Homo sapien
ccaagctgtcctacttttaaaggca

SEQ ID NO: 2149823 - DNA, 25 bp, Homo sapien
tgtttgacaacccccttaggccata

SEQ ID NO: 2149824 - DNA, 25 bp, Homo sapien
aatgctttggaatcttcttagggaa

SEQ ID NO: 2149825 - DNA, 25 bp, Homo sapien
taaaatacgtatcactgaacagatc

SEQ ID NO: 2149826 - DNA, 25 bp, Homo sapien
gattgagatagtgggaaacgaagat

SEQ ID NO: 2149827 - DNA, 25 bp, Homo sapien
agatcatctgattgagatagtggga

SEQ ID NO: 2149828 - DNA, 25 bp, Homo sapien
cttaaaatacgtatcactgaacaga

SEQ ID NO: 2149829 - DNA, 25 bp, Homo sapien
gcatcttaatccctttgaaatccgt

SEQ ID NO: 2149830 - DNA, 25 bp, Homo sapien
cctttgaaatccgtaatttccagct

SEQ ID NO: 2149831 - DNA, 25 bp, Homo sapien
ctcattcggcatcttaatccctttg

SEQ ID NO: 2149832 - DNA, 25 bp, Homo sapien
ttgaaatccgtaatttccagctctg

SEQ ID NO: 2149833 - DNA, 25 bp, Homo sapien
ttgcattgtcagctgaaaggaaatt

SEQ ID NO: 2149834 - DNA, 25 bp, Homo sapien
agaaaacatgcccaaatagatatgt

SEQ ID NO: 2149835 - DNA, 25 bp, Homo sapien
ttcattgagtgaaagtaaacttgct

SEQ ID NO: 2149836 - DNA, 25 bp, Homo sapien
gaagaccatctggagtagatttact

SEQ ID NO: 2149837 - DNA, 25 bp, Homo sapien
taaatttcccttgcatattgtggcc

SEQ ID NO: 2149838 - DNA, 25 bp, Homo sapien
tattgtggccaagtaaagcaatgga

SEQ ID NO: 2149839 - DNA, 25 bp, Homo sapien
tcttgcaatgtctttggtctccatg

SEQ ID NO: 2149840 - DNA, 25 bp, Homo sapien
gggctttaaatccaaacttatgcca

SEQ ID NO: 2149841 - DNA, 25 bp, Homo sapien
tttgtccatgaaacttcctttactg

SEQ ID NO: 2149842 - DNA, 25 bp, Homo sapien
ctttgtccatgaaacttcctttact

SEQ ID NO: 2149843 - DNA, 25 bp, Homo sapien
attttcgtgtgggttgttgatgtgc

SEQ ID NO: 2149844 - DNA, 25 bp, Homo sapien
gcagcagtgactcagccggtcatta

SEQ ID NO: 2149845 - DNA, 25 bp, Homo sapien
gggtgtatgcaggaagaagatcaca

SEQ ID NO: 2149846 - DNA, 25 bp, Homo sapien
tcacaaatgagacccaagcacttgg

SEQ ID NO: 2149847 - DNA, 25 bp, Homo sapien
aagagcacgcttcagggagatggca

SEQ ID NO: 2149848 - DNA, 25 bp, Homo sapien
cctttagtgtaagcaggctacaatt

SEQ ID NO: 2149849 - DNA, 25 bp, Homo sapien
taagcaggctacaattcggaatttt

SEQ ID NO: 2149850 - DNA, 25 bp, Homo sapien
ttagtgtaagcaggctacaattcgg

SEQ ID NO: 2149851 - DNA, 25 bp, Homo sapien
agtgtaagcaggctacaattcggaa

SEQ ID NO: 2149852 - DNA, 25 bp, Homo sapien
tgcttccataatcgcttggaggatg

SEQ ID NO: 2149853 - DNA, 25 bp, Homo sapien
gttaatcctttcgacttcgcagtca

SEQ ID NO: 2149854 - DNA, 25 bp, Homo sapien
ttcgcagtcaatcaagtatcgcttt

SEQ ID NO: 2149855 - DNA, 25 bp, Homo sapien
tcaatgatgcgcctgaattcttgga

SEQ ID NO: 2149856 - DNA, 25 bp, Homo sapien
tctcctttgagaaattatgggacag

SEQ ID NO: 2149857 - DNA, 25 bp, Homo sapien
cattgtcagcatgtaatgggtctta

SEQ ID NO: 2149858 - DNA, 25 bp, Homo sapien
caaaacttggtgagtactgtcctga

SEQ ID NO: 2149859 - DNA, 25 bp, Homo sapien
tatgggacagtgataacttgttgcc

SEQ ID NO: 2149860 - DNA, 25 bp, Homo sapien
taaaattttagagggcatgtagtac

SEQ ID NO: 2149861 - DNA, 25 bp, Homo sapien
ttagagggcatgtagtacatacacc

SEQ ID NO: 2149862 - DNA, 25 bp, Homo sapien
gtataaaattttagagggcatgtag

SEQ ID NO: 2149863 - DNA, 25 bp, Homo sapien
aattttagagggcatgtagtacata

SEQ ID NO: 2149864 - DNA, 25 bp, Homo sapien
aagaaatgctaccttcacatcatcc

SEQ ID NO: 2149865 - DNA, 25 bp, Homo sapien
taagaaatgctaccttcacatcatc

SEQ ID NO: 2149866 - DNA, 25 bp, Homo sapien
agaaatgctaccttcacatcatcca

SEQ ID NO: 2149867 - DNA, 25 bp, Homo sapien
ctttttcagacttcggataggatga

SEQ ID NO: 2149868 - DNA, 25 bp, Homo sapien
tcagacttcggataggatgaaaggg

SEQ ID NO: 2149869 - DNA, 25 bp, Homo sapien
ttctttttcagacttcggataggat

SEQ ID NO: 2149870 - DNA, 25 bp, Homo sapien
ggctcctgaccatcttctttttcag

SEQ ID NO: 2149871 - DNA, 25 bp, Homo sapien
aattaaatgatatgtctttgaggac

SEQ ID NO: 2149872 - DNA, 25 bp, Homo sapien
ttcatacttcttagagtgcacatca

SEQ ID NO: 2149873 - DNA, 25 bp, Homo sapien
catcccaattaaatgatatgtcttt

SEQ ID NO: 2149874 - DNA, 25 bp, Homo sapien
gagtgcacatcatccagtacagttg

SEQ ID NO: 2149875 - DNA, 25 bp, Homo sapien
gtgctgcgaggttagtgtaagccat

SEQ ID NO: 2149876 - DNA, 25 bp, Homo sapien
gtggtgctgcgaggttagtgtaagc

SEQ ID NO: 2149877 - DNA, 25 bp, Homo sapien
cacagactgtggtgctgcgaggtta

SEQ ID NO: 2149878 - DNA, 25 bp, Homo sapien
gcacagactgtggtgctgcgaggtt

SEQ ID NO: 2149879 - DNA, 25 bp, Homo sapien
gatcctactgatgtgagctacagga

SEQ ID NO: 2149880 - DNA, 25 bp, Homo sapien
cctactgatgtgagctacaggagcc

SEQ ID NO: 2149881 - DNA, 25 bp, Homo sapien
ggagccctcaccacaaaaagtgtca

SEQ ID NO: 2149882 - DNA, 25 bp, Homo sapien
caggagccctcaccacaaaaagtgt

SEQ ID NO: 2149883 - DNA, 25 bp, Homo sapien
ttagcgagcatgtagtgataacctc

SEQ ID NO: 2149884 - DNA, 25 bp, Homo sapien
ctcttgagtgtttccctaggatcac

SEQ ID NO: 2149885 - DNA, 25 bp, Homo sapien
tagtgataacctcttgagtgtttcc

SEQ ID NO: 2149886 - DNA, 25 bp, Homo sapien
caggttagcgagcatgtagtgataa

SEQ ID NO: 2149887 - DNA, 25 bp, Homo sapien
tgtctttgccagatagagctcagta

SEQ ID NO: 2149888 - DNA, 25 bp, Homo sapien
gggaagttccatgtaaatgtacaaa

SEQ ID NO: 2149889 - DNA, 25 bp, Homo sapien
gattgttaccaggggaagttccatg

SEQ ID NO: 2149890 - DNA, 25 bp, Homo sapien
atgtacaaagatgtctttgccagat

SEQ ID NO: 2149891 - DNA, 25 bp, Homo sapien
gggatgtccacttctagcctgagta

SEQ ID NO: 2149892 - DNA, 25 bp, Homo sapien
tctctgggttgtactcctggtgaaa

SEQ ID NO: 2149893 - DNA, 25 bp, Homo sapien
tctttccgggatttcaacaagctag

SEQ ID NO: 2149894 - DNA, 25 bp, Homo sapien
cctctgagaggtcttcgttaaagca

SEQ ID NO: 2149895 - DNA, 25 bp, Homo sapien
ggctgcttgactgacagattgtaca

SEQ ID NO: 2149896 - DNA, 25 bp, Homo sapien
catgatggctaattctgggactaac

SEQ ID NO: 2149897 - DNA, 25 bp, Homo sapien
gactaacgttgacaaacagcgccat

SEQ ID NO: 2149898 - DNA, 25 bp, Homo sapien
gactgacagattgtacacatgatgg

SEQ ID NO: 2149899 - DNA, 25 bp, Homo sapien
attgtctccaactctggtaccagta

SEQ ID NO: 2149900 - DNA, 25 bp, Homo sapien
attcctccacttaaagggtcagcaa

SEQ ID NO: 2149901 - DNA, 25 bp, Homo sapien
gtctccaactctggtaccagtatca

SEQ ID NO: 2149902 - DNA, 25 bp, Homo sapien
taaagggtcagcaattgtctccaac

SEQ ID NO: 2149903 - DNA, 25 bp, Homo sapien
ttagaacataaaaaatgtcggaaca

SEQ ID NO: 2149904 - DNA, 25 bp, Homo sapien
caaagaaagggaaagtagagaacag

SEQ ID NO: 2149905 - DNA, 25 bp, Homo sapien
tagaacataaaaaatgtcggaacaa

SEQ ID NO: 2149906 - DNA, 25 bp, Homo sapien
gggaaagtagagaacagaagaagaa

SEQ ID NO: 2149907 - DNA, 25 bp, Homo sapien
agcagagctggccagcgaatcttcg

SEQ ID NO: 2149908 - DNA, 25 bp, Homo sapien
gccagcgaatcttcgacaggaattg

SEQ ID NO: 2149909 - DNA, 25 bp, Homo sapien
gagctggccagcgaatcttcgacag

SEQ ID NO: 2149910 - DNA, 25 bp, Homo sapien
gctggccagcgaatcttcgacagga

SEQ ID NO: 2149911 - DNA, 25 bp, Homo sapien
gattcaggtgggaatattttcccaa

SEQ ID NO: 2149912 - DNA, 25 bp, Homo sapien
ttcaggtgggaatattttcccaagc

SEQ ID NO: 2149913 - DNA, 25 bp, Homo sapien
agattcaggtgggaatattttccca

SEQ ID NO: 2149914 - DNA, 25 bp, Homo sapien
agagattcaggtgggaatattttcc

SEQ ID NO: 2149915 - DNA, 25 bp, Homo sapien
aaattccactctttaagtgaccact

SEQ ID NO: 2149916 - DNA, 25 bp, Homo sapien
ttgctaaattccactctttaagtga

SEQ ID NO: 2149917 - DNA, 25 bp, Homo sapien
aattccactctttaagtgaccactg

SEQ ID NO: 2149918 - DNA, 25 bp, Homo sapien
gctaaattccactctttaagtgacc

SEQ ID NO: 2149919 - DNA, 25 bp, Homo sapien
tgttagagtgctaaggataatgtga

SEQ ID NO: 2149920 - DNA, 25 bp, Homo sapien
gttagagtgctaaggataatgtgaa

SEQ ID NO: 2149921 - DNA, 25 bp, Homo sapien
ctgttagagtgctaaggataatgtg

SEQ ID NO: 2149922 - DNA, 25 bp, Homo sapien
catgattgtgggaagttgtatgttc

SEQ ID NO: 2149923 - DNA, 25 bp, Homo sapien
cattgaaaggatcatgattgtggga

SEQ ID NO: 2149924 - DNA, 25 bp, Homo sapien
gatcatgattgtgggaagttgtatg

SEQ ID NO: 2149925 - DNA, 25 bp, Homo sapien
aaaggatcatgattgtgggaagttg

SEQ ID NO: 2149926 - DNA, 25 bp, Homo sapien
tctttccagtaaaatatcagtaaaa

SEQ ID NO: 2149927 - DNA, 25 bp, Homo sapien
ctctttccagtaaaatatcagtaaa

SEQ ID NO: 2149928 - DNA, 25 bp, Homo sapien
gactctttccagtaaaatatcagta

SEQ ID NO: 2149929 - DNA, 25 bp, Homo sapien
actctttccagtaaaatatcagtaa

SEQ ID NO: 2149930 - DNA, 25 bp, Homo sapien
gaaccatagggttttcattgttgac

SEQ ID NO: 2149931 - DNA, 25 bp, Homo sapien
ccagcgctgtatgaactgctgaacc

SEQ ID NO: 2149932 - DNA, 25 bp, Homo sapien
tggaaacctgtaatgttggctcccc

SEQ ID NO: 2149933 - DNA, 25 bp, Homo sapien
gcattcttggcttcagggaattccc

SEQ ID NO: 2149934 - DNA, 25 bp, Homo sapien
ggcaagcctgaattcgattcattct

SEQ ID NO: 2149935 - DNA, 25 bp, Homo sapien
ttacaatcaaatggctcaaggcaat

SEQ ID NO: 2149936 - DNA, 25 bp, Homo sapien
tacctattgttctatgcagtcaccc

SEQ ID NO: 2149937 - DNA, 25 bp, Homo sapien
tctacagtgatagttcttacctcat

SEQ ID NO: 2149938 - DNA, 25 bp, Homo sapien
gagctctctcaatatcaattccttg

SEQ ID NO: 2149939 - DNA, 25 bp, Homo sapien
tatgaccagtattgcgtcgtgtgtc

SEQ ID NO: 2149940 - DNA, 25 bp, Homo sapien
gcctcctcaggtagcggaaagcttc

SEQ ID NO: 2149941 - DNA, 25 bp, Homo sapien
cacagcaggatttgctaagcagtct

SEQ ID NO: 2149942 - DNA, 25 bp, Homo sapien
tcatcctgtagaatagcatgagtgt

SEQ ID NO: 2149943 - DNA, 25 bp, Homo sapien
ctagaaatgtatcatgttcctgcat

SEQ ID NO: 2149944 - DNA, 25 bp, Homo sapien
gcttcttaagtagacctagaaatgt

SEQ ID NO: 2149945 - DNA, 25 bp, Homo sapien
gcagcattaggcaaaagcttcttaa

SEQ ID NO: 2149946 - DNA, 25 bp, Homo sapien
taaaaatctgcatgatgggaaaatg

SEQ ID NO: 2149947 - DNA, 25 bp, Homo sapien
cataaaactacacttagggcatttg

SEQ ID NO: 2149948 - DNA, 25 bp, Homo sapien
ggcatttgttaaggaactgacataa

SEQ ID NO: 2149949 - DNA, 25 bp, Homo sapien
gctcttcaaaattgtacagtgctac

SEQ ID NO: 2149950 - DNA, 25 bp, Homo sapien
aactagggtaatgtattctaaactg

SEQ ID NO: 2149951 - DNA, 25 bp, Homo sapien
tagggtaatgtattctaaactgagt

SEQ ID NO: 2149952 - DNA, 25 bp, Homo sapien
ctagggtaatgtattctaaactgag

SEQ ID NO: 2149953 - DNA, 25 bp, Homo sapien
gggtaatgtattctaaactgagttc

SEQ ID NO: 2149954 - DNA, 25 bp, Homo sapien
gatggtataatttgtcctacgtcca

SEQ ID NO: 2149955 - DNA, 25 bp, Homo sapien
cctacgtccataagtgtcaaattga

SEQ ID NO: 2149956 - DNA, 25 bp, Homo sapien
gactttcatttcatacacatcgatg

SEQ ID NO: 2149957 - DNA, 25 bp, Homo sapien
tacacatcgatggtataatttgtcc

SEQ ID NO: 2149958 - DNA, 25 bp, Homo sapien
gatgcactgtcattgctgatttgct

SEQ ID NO: 2149959 - DNA, 25 bp, Homo sapien
tactatggtccgattctctgaggat

SEQ ID NO: 2149960 - DNA, 25 bp, Homo sapien
tttcatactcattccagtagccagc

SEQ ID NO: 2149961 - DNA, 25 bp, Homo sapien
cagaatggtagtcactactatggtc

SEQ ID NO: 2149962 - DNA, 25 bp, Homo sapien
ccagaagcaagataaaaggattact

SEQ ID NO: 2149963 - DNA, 25 bp, Homo sapien
accagaagcaagataaaaggattac

SEQ ID NO: 2149964 - DNA, 25 bp, Homo sapien
cagaagcaagataaaaggattactc

SEQ ID NO: 2149965 - DNA, 25 bp, Homo sapien
agacaagttccccaaccatgccgtt

SEQ ID NO: 2149966 - DNA, 25 bp, Homo sapien
tatttcccgtcaccaacgatggaca

SEQ ID NO: 2149967 - DNA, 25 bp, Homo sapien
tggatcccttgcaccatatttcccg

SEQ ID NO: 2149968 - DNA, 25 bp, Homo sapien
ggctatttcataggctaggtctaca

SEQ ID NO: 2149969 - DNA, 25 bp, Homo sapien
tatcaggctttggattcctgattac

SEQ ID NO: 2149970 - DNA, 25 bp, Homo sapien
ttatcaggctttggattcctgatta

SEQ ID NO: 2149971 - DNA, 25 bp, Homo sapien
gactacgaatgagcaggagcttgtc

SEQ ID NO: 2149972 - DNA, 25 bp, Homo sapien
catgagactacgaatgagcaggagc

SEQ ID NO: 2149973 - DNA, 25 bp, Homo sapien
aatgagcaggagcttgtcagacacc

SEQ ID NO: 2149974 - DNA, 25 bp, Homo sapien
caggagcttgtcagacaccatttta

SEQ ID NO: 2149975 - DNA, 25 bp, Homo sapien
gaacagtaatgcctcaataccccta

SEQ ID NO: 2149976 - DNA, 25 bp, Homo sapien
tagggaagtctgatatagagtatat

SEQ ID NO: 2149977 - DNA, 25 bp, Homo sapien
tatatcatatatgaagtgaaaacac

SEQ ID NO: 2149978 - DNA, 25 bp, Homo sapien
tcagaacagtaatgcctcaataccc

SEQ ID NO: 2149979 - DNA, 25 bp, Homo sapien
taatcccttgaaaataggcactagg

SEQ ID NO: 2149980 - DNA, 25 bp, Homo sapien
agtgcactgcacaattaacttaggc

SEQ ID NO: 2149981 - DNA, 25 bp, Homo sapien
gtaagtcatagtctgaagccaggcc

SEQ ID NO: 2149982 - DNA, 25 bp, Homo sapien
cagtgtagcactcacatggattgaa

SEQ ID NO: 2149983 - DNA, 25 bp, Homo sapien
agcagtttaattcttaggtgtttgc

SEQ ID NO: 2149984 - DNA, 25 bp, Homo sapien
gtttaattcttaggtgtttgctgtc

SEQ ID NO: 2149985 - DNA, 25 bp, Homo sapien
tttaattcttaggtgtttgctgtct

SEQ ID NO: 2149986 - DNA, 25 bp, Homo sapien
cagtttaattcttaggtgtttgctg

SEQ ID NO: 2149987 - DNA, 25 bp, Homo sapien
ggtgctggccttttgtcttctgaga

SEQ ID NO: 2149988 - DNA, 25 bp, Homo sapien
cacttgactgaaaattcttgtggag

SEQ ID NO: 2149989 - DNA, 25 bp, Homo sapien
ctgagacacattggcttagagcaac

SEQ ID NO: 2149990 - DNA, 25 bp, Homo sapien
aaaagtggtagcattcagtgggttc

SEQ ID NO: 2149991 - DNA, 25 bp, Homo sapien
aaaagaaaacatatatgacttttag

SEQ ID NO: 2149992 - DNA, 25 bp, Homo sapien
gaaaacatatatgacttttagagac

SEQ ID NO: 2149993 - DNA, 25 bp, Homo sapien
aaaacatatatgacttttagagaca

SEQ ID NO: 2149994 - DNA, 25 bp, Homo sapien
aagaaaacatatatgacttttagag

SEQ ID NO: 2149995 - DNA, 25 bp, Homo sapien
ccaatgttatagtgagtggagcaac

SEQ ID NO: 2149996 - DNA, 25 bp, Homo sapien
taaggactgaacctgctgactagga

SEQ ID NO: 2149997 - DNA, 25 bp, Homo sapien
gagatgcccaggctcatgaatggct

SEQ ID NO: 2149998 - DNA, 25 bp, Homo sapien
tacgctgactccaatgtaagcaaag

SEQ ID NO: 2149999 - DNA, 25 bp, Homo sapien
gcagccattctagaggatgtatgga

SEQ ID NO: 2150000 - DNA, 25 bp, Homo sapien
gatgtatggaagcatctcattgtgg

SEQ ID NO: 2150001 - DNA, 25 bp, Homo sapien
ccactactagtggatgaaagttcca

SEQ ID NO: 2150002 - DNA, 25 bp, Homo sapien
cattgtcatcagcacttggtattgc

SEQ ID NO: 2150003 - DNA, 25 bp, Homo sapien
ggttgtgtgccctatttctgggttg

SEQ ID NO: 2150004 - DNA, 25 bp, Homo sapien
aatatttgttactctaggctagtgt

SEQ ID NO: 2150005 - DNA, 25 bp, Homo sapien
catatggtggaaaacatagagctca

SEQ ID NO: 2150006 - DNA, 25 bp, Homo sapien
tattggaggagggatcacccatatg

SEQ ID NO: 2150007 - DNA, 25 bp, Homo sapien
tacattttaaaggaggatctacgtg

SEQ ID NO: 2150008 - DNA, 25 bp, Homo sapien
gaataagtaaccatgtcccaaagac

SEQ ID NO: 2150009 - DNA, 25 bp, Homo sapien
gatctacgtgtcaactaatctggac

SEQ ID NO: 2150010 - DNA, 25 bp, Homo sapien
aaagacagtggtcatacatcagcag

SEQ ID NO: 2150011 - DNA, 25 bp, Homo sapien
aaatccagacccagaggggccagat

SEQ ID NO: 2150012 - DNA, 25 bp, Homo sapien
aacaaaaacaaatccagacccagag

SEQ ID NO: 2150013 - DNA, 25 bp, Homo sapien
aacaaatccagacccagaggggcca

SEQ ID NO: 2150014 - DNA, 25 bp, Homo sapien
caaaaacaaatccagacccagaggg

SEQ ID NO: 2150015 - DNA, 25 bp, Homo sapien
tcagcactctctatgggagaaacca

SEQ ID NO: 2150016 - DNA, 25 bp, Homo sapien
tccagggtcccatatgcaatttcag

SEQ ID NO: 2150017 - DNA, 25 bp, Homo sapien
aaagcagcgagattggcagtatagg

SEQ ID NO: 2150018 - DNA, 25 bp, Homo sapien
cagtctgtttagctaagtcttcagc

SEQ ID NO: 2150019 - DNA, 25 bp, Homo sapien
ggctcaattaactgcagagcactta

SEQ ID NO: 2150020 - DNA, 25 bp, Homo sapien
tgctctcctttgataacattcccac

SEQ ID NO: 2150021 - DNA, 25 bp, Homo sapien
aatatcagcaggctcaattaactgc

SEQ ID NO: 2150022 - DNA, 25 bp, Homo sapien
agcaggctcaattaactgcagagca

SEQ ID NO: 2150023 - DNA, 25 bp, Homo sapien
caagtaaaaatgtctgcagggcaat

SEQ ID NO: 2150024 - DNA, 25 bp, Homo sapien
gtattagtatagagtgagcacggga

SEQ ID NO: 2150025 - DNA, 25 bp, Homo sapien
ggccctaggctgtcttatgttatta

SEQ ID NO: 2150026 - DNA, 25 bp, Homo sapien
tggcagctttactcaggacaagtaa

SEQ ID NO: 2150027 - DNA, 25 bp, Homo sapien
ttggagctgctgtctaaggaaatca

SEQ ID NO: 2150028 - DNA, 25 bp, Homo sapien
caggtgtctcttctagcagcatgca

SEQ ID NO: 2150029 - DNA, 25 bp, Homo sapien
tatgtgcttctacgtctggttggga

SEQ ID NO: 2150030 - DNA, 25 bp, Homo sapien
tttcctgacggaacaggtccctctg

SEQ ID NO: 2150031 - DNA, 25 bp, Homo sapien
aatgttttgggtgtttatgcatata

SEQ ID NO: 2150032 - DNA, 25 bp, Homo sapien
tggcaagagaatactatgttatatg

SEQ ID NO: 2150033 - DNA, 25 bp, Homo sapien
atgtttattgaaccactgttaacac

SEQ ID NO: 2150034 - DNA, 25 bp, Homo sapien
aaaagtaaatctatacttatttgag

SEQ ID NO: 2150035 - DNA, 25 bp, Homo sapien
aagtttctagatggtcttcaagggc

SEQ ID NO: 2150036 - DNA, 25 bp, Homo sapien
caccttggaagcacctaaagtttct

SEQ ID NO: 2150037 - DNA, 25 bp, Homo sapien
cagctctaaattgtgcatattgaag

SEQ ID NO: 2150038 - DNA, 25 bp, Homo sapien
agatggccggcaggccaccttggaa

SEQ ID NO: 2150039 - DNA, 25 bp, Homo sapien
ttaataaaatccatatggttggtta

SEQ ID NO: 2150040 - DNA, 25 bp, Homo sapien
taataaaatccatatggttggttac

SEQ ID NO: 2150041 - DNA, 25 bp, Homo sapien
gaagggcattatctggatcagagga

SEQ ID NO: 2150042 - DNA, 25 bp, Homo sapien
gggcattatctggatcagaggagaa

SEQ ID NO: 2150043 - DNA, 25 bp, Homo sapien
cattatctggatcagaggagaagaa

SEQ ID NO: 2150044 - DNA, 25 bp, Homo sapien
aggaagggcattatctggatcagag

SEQ ID NO: 2150045 - DNA, 25 bp, Homo sapien
cttcagcctcaaaactgcttgtcag

SEQ ID NO: 2150046 - DNA, 25 bp, Homo sapien
ttgtggagaaagtggatttcctgcc

SEQ ID NO: 2150047 - DNA, 25 bp, Homo sapien
aactgcttgtcagtgttgtggagaa

SEQ ID NO: 2150048 - DNA, 25 bp, Homo sapien
gtttctccacctgaaggcaatctgc

SEQ ID NO: 2150049 - DNA, 25 bp, Homo sapien
gatggtaataggacccaccttatag

SEQ ID NO: 2150050 - DNA, 25 bp, Homo sapien
ggagaagccacctagtcaccaatgc

SEQ ID NO: 2150051 - DNA, 25 bp, Homo sapien
cattagagaagtagtcagatagcca

SEQ ID NO: 2150052 - DNA, 25 bp, Homo sapien
cagcagttgttaagagtatagatcc

SEQ ID NO: 2150053 - DNA, 25 bp, Homo sapien
tctggcatttgcgtgtcctggcata

SEQ ID NO: 2150054 - DNA, 25 bp, Homo sapien
tggctctcgattttgaacagttggg

SEQ ID NO: 2150055 - DNA, 25 bp, Homo sapien
ggagcgttctggtaagtattatttc

SEQ ID NO: 2150056 - DNA, 25 bp, Homo sapien
tgcagttttgtctggcaaacacact

SEQ ID NO: 2150057 - DNA, 25 bp, Homo sapien
tcccctctcactaaggcactggaat

SEQ ID NO: 2150058 - DNA, 25 bp, Homo sapien
aaatcccctctcactaaggcactgg

SEQ ID NO: 2150059 - DNA, 25 bp, Homo sapien
ccctctcactaaggcactggaatta

SEQ ID NO: 2150060 - DNA, 25 bp, Homo sapien
tctcactaaggcactggaattagtg

SEQ ID NO: 2150061 - DNA, 25 bp, Homo sapien
ctctttgattgctgatacaggttaa

SEQ ID NO: 2150062 - DNA, 25 bp, Homo sapien
ggtttattcctttaggtaatgatgc

SEQ ID NO: 2150063 - DNA, 25 bp, Homo sapien
ggtaatgatgcatttctaggagaat

SEQ ID NO: 2150064 - DNA, 25 bp, Homo sapien
ttcatcatttacttgagctctttga

SEQ ID NO: 2150065 - DNA, 25 bp, Homo sapien
tgcaccaaagagataagaattctta

SEQ ID NO: 2150066 - DNA, 25 bp, Homo sapien
gcaccaaagagataagaattcttag

SEQ ID NO: 2150067 - DNA, 25 bp, Homo sapien
accaaagagataagaattcttagag

SEQ ID NO: 2150068 - DNA, 25 bp, Homo sapien
ctgcaccaaagagataagaattctt

SEQ ID NO: 2150069 - DNA, 25 bp, Homo sapien
ttctcgtacacagcaattttggatc

SEQ ID NO: 2150070 - DNA, 25 bp, Homo sapien
cttggactttcgcactcgggccact

SEQ ID NO: 2150071 - DNA, 25 bp, Homo sapien
ttttggtaaacacagatggctccgc

SEQ ID NO: 2150072 - DNA, 25 bp, Homo sapien
cattcatggttgactccagcaggaa

SEQ ID NO: 2150073 - DNA, 25 bp, Homo sapien
caaaatgcatcagggtaggtggaat

SEQ ID NO: 2150074 - DNA, 25 bp, Homo sapien
aacaaaatgcatcagggtaggtgga

SEQ ID NO: 2150075 - DNA, 25 bp, Homo sapien
gacaacaaaatgcatcagggtaggt

SEQ ID NO: 2150076 - DNA, 25 bp, Homo sapien
caacaaaatgcatcagggtaggtgg

SEQ ID NO: 2150077 - DNA, 25 bp, Homo sapien
taaatttcacagaacgtggagctat

SEQ ID NO: 2150078 - DNA, 25 bp, Homo sapien
aggagcacaagaggacaaattggct

SEQ ID NO: 2150079 - DNA, 25 bp, Homo sapien
gcacaagaggacaaattggctaaat

SEQ ID NO: 2150080 - DNA, 25 bp, Homo sapien
ttcacagaacgtggagctataaaaa

SEQ ID NO: 2150081 - DNA, 25 bp, Homo sapien
acataacttgtaagaaaatgcacaa

SEQ ID NO: 2150082 - DNA, 25 bp, Homo sapien
aaacataacttgtaagaaaatgcac

SEQ ID NO: 2150083 - DNA, 25 bp, Homo sapien
tgaaacgataaaacataacttgtaa

SEQ ID NO: 2150084 - DNA, 25 bp, Homo sapien
cttgaaacgataaaacataacttgt

SEQ ID NO: 2150085 - DNA, 25 bp, Homo sapien
ttgctcattcagttttaatactgcc

SEQ ID NO: 2150086 - DNA, 25 bp, Homo sapien
ctctcctttgtcgtaccaccatttg

SEQ ID NO: 2150087 - DNA, 25 bp, Homo sapien
taatactgccaggttaacagcattt

SEQ ID NO: 2150088 - DNA, 25 bp, Homo sapien
tttcaatttgtccaagaggccttgc

SEQ ID NO: 2150089 - DNA, 25 bp, Homo sapien
cggttgtggtgacattgaggctgac

SEQ ID NO: 2150090 - DNA, 25 bp, Homo sapien
ccggttgtggtgacattgaggctga

SEQ ID NO: 2150091 - DNA, 25 bp, Homo sapien
catcatggctttcataaggcaacca

SEQ ID NO: 2150092 - DNA, 25 bp, Homo sapien
agggcattgaaacccacatcatggc

SEQ ID NO: 2150093 - DNA, 25 bp, Homo sapien
cataaggcaaccaaactggtgggta

SEQ ID NO: 2150094 - DNA, 25 bp, Homo sapien
gcctagggcattgaaacccacatca

SEQ ID NO: 2150095 - DNA, 25 bp, Homo sapien
tgaaccaagaacatggctaaggaga

SEQ ID NO: 2150096 - DNA, 25 bp, Homo sapien
gaaccaagaacatggctaaggagaa

SEQ ID NO: 2150097 - DNA, 25 bp, Homo sapien
ctgaaccaagaacatggctaaggag

SEQ ID NO: 2150098 - DNA, 25 bp, Homo sapien
aaccaagaacatggctaaggagaag

SEQ ID NO: 2150099 - DNA, 25 bp, Homo sapien
cctgtctgttggtctgtggttggga

SEQ ID NO: 2150100 - DNA, 25 bp, Homo sapien
aaagttttggcttgcctgtctgttg

SEQ ID NO: 2150101 - DNA, 25 bp, Homo sapien
gaagtgcaaccattgtctctgaaga

SEQ ID NO: 2150102 - DNA, 25 bp, Homo sapien
ggagcagaagtgcaaccattgtctc

SEQ ID NO: 2150103 - DNA, 25 bp, Homo sapien
caaacccatattatatttgcagact

SEQ ID NO: 2150104 - DNA, 25 bp, Homo sapien
ccaaacccatattatatttgcagac

SEQ ID NO: 2150105 - DNA, 25 bp, Homo sapien
taagcaatcgttgggtatgcagcac

SEQ ID NO: 2150106 - DNA, 25 bp, Homo sapien
tatctgaaaacttctgggcacttgg

SEQ ID NO: 2150107 - DNA, 25 bp, Homo sapien
gaatgtgtaatgtctcatgccaggg

SEQ ID NO: 2150108 - DNA, 25 bp, Homo sapien
taaaacattgccttagtggagatcc

SEQ ID NO: 2150109 - DNA, 25 bp, Homo sapien
aggaacttctgctaagacccaggaa

SEQ ID NO: 2150110 - DNA, 25 bp, Homo sapien
tcctcgatcccaaaccagagtcttg

SEQ ID NO: 2150111 - DNA, 25 bp, Homo sapien
gccatcgatctgtaatgattcttgc

SEQ ID NO: 2150112 - DNA, 25 bp, Homo sapien
ccagagtcttgaggattcacaggaa

SEQ ID NO: 2150113 - DNA, 25 bp, Homo sapien
cttcaggcttttcattcctgtggct

SEQ ID NO: 2150114 - DNA, 25 bp, Homo sapien
tcaggcttttcattcctgtggctct

SEQ ID NO: 2150115 - DNA, 25 bp, Homo sapien
ttcattcctgtggctctttctgtag

SEQ ID NO: 2150116 - DNA, 25 bp, Homo sapien
cattcctgtggctctttctgtagct

SEQ ID NO: 2150117 - DNA, 25 bp, Homo sapien
ctttcagagattgtgtataaccttc

SEQ ID NO: 2150118 - DNA, 25 bp, Homo sapien
tttcagagattgtgtataaccttct

SEQ ID NO: 2150119 - DNA, 25 bp, Homo sapien
cacttctgatcaatggggatcagcc

SEQ ID NO: 2150120 - DNA, 25 bp, Homo sapien
tgatcaatggggatcagcctcatgt

SEQ ID NO: 2150121 - DNA, 25 bp, Homo sapien
caatggggatcagcctcatgtgcca

SEQ ID NO: 2150122 - DNA, 25 bp, Homo sapien
atggggatcagcctcatgtgccaag

SEQ ID NO: 2150123 - DNA, 25 bp, Homo sapien
tcttaagacaaagacatgagtcagc

SEQ ID NO: 2150124 - DNA, 25 bp, Homo sapien
tttgctgagtagagccgtcttaaga

SEQ ID NO: 2150125 - DNA, 25 bp, Homo sapien
tgtactcacctcaatagagaacaga

SEQ ID NO: 2150126 - DNA, 25 bp, Homo sapien
tcgtggaaattagtcaggcactctc

SEQ ID NO: 2150127 - DNA, 25 bp, Homo sapien
caggtttaatgatcaccctaagaag

SEQ ID NO: 2150128 - DNA, 25 bp, Homo sapien
caaataactatcaatctagcaaggg

SEQ ID NO: 2150129 - DNA, 25 bp, Homo sapien
gggcagggaatatggctcatgtatt

SEQ ID NO: 2150130 - DNA, 25 bp, Homo sapien
gagctgtgttctgtacattctccaa

SEQ ID NO: 2150131 - DNA, 25 bp, Homo sapien
tttgagtatccagacctcctgtgag

SEQ ID NO: 2150132 - DNA, 25 bp, Homo sapien
tagtggcttccacgaactggctagt

SEQ ID NO: 2150133 - DNA, 25 bp, Homo sapien
gagcaatagttttcaaccagaggcc

SEQ ID NO: 2150134 - DNA, 25 bp, Homo sapien
aaaacccaggctcagtacatcggtg

SEQ ID NO: 2150135 - DNA, 25 bp, Homo sapien
tacagcaacgctatatttaccaggg

SEQ ID NO: 2150136 - DNA, 25 bp, Homo sapien
cagagtaattttagacactgcaggc

SEQ ID NO: 2150137 - DNA, 25 bp, Homo sapien
cagggcctgcccatatcgctttgag

SEQ ID NO: 2150138 - DNA, 25 bp, Homo sapien
aaactatagaaagcgataaagcagg

SEQ ID NO: 2150139 - DNA, 25 bp, Homo sapien
cacgtgggaaataacataaataaca

SEQ ID NO: 2150140 - DNA, 25 bp, Homo sapien
tcacgtgggaaataacataaataac

SEQ ID NO: 2150141 - DNA, 25 bp, Homo sapien
acgtgggaaataacataaataacat

SEQ ID NO: 2150142 - DNA, 25 bp, Homo sapien
cttcacgtgggaaataacataaata

SEQ ID NO: 2150143 - DNA, 25 bp, Homo sapien
ttcaatactgcaaggtttacaggcg

SEQ ID NO: 2150144 - DNA, 25 bp, Homo sapien
tttcaatactgcaaggtttacaggc

SEQ ID NO: 2150145 - DNA, 25 bp, Homo sapien
tcaatactgcaaggtttacaggcgt

SEQ ID NO: 2150146 - DNA, 25 bp, Homo sapien
caatactgcaaggtttacaggcgtt

SEQ ID NO: 2150147 - DNA, 25 bp, Homo sapien
caacaattgatgtcatgtggcaggc

SEQ ID NO: 2150148 - DNA, 25 bp, Homo sapien
tgcagtaggccagattgagtttcct

SEQ ID NO: 2150149 - DNA, 25 bp, Homo sapien
tcataactgttctatagagtcaaca

SEQ ID NO: 2150150 - DNA, 25 bp, Homo sapien
tacaaaaagaccttcagcgactgac

SEQ ID NO: 2150151 - DNA, 25 bp, Homo sapien
agagaaatgaacaacgtgattagat

SEQ ID NO: 2150152 - DNA, 25 bp, Homo sapien
gagaaatgaacaacgtgattagatc

SEQ ID NO: 2150153 - DNA, 25 bp, Homo sapien
gaaatgaacaacgtgattagatctt

SEQ ID NO: 2150154 - DNA, 25 bp, Homo sapien
atgaacaacgtgattagatcttggg

SEQ ID NO: 2150155 - DNA, 25 bp, Homo sapien
cagacctccgacaagtatatagaaa

SEQ ID NO: 2150156 - DNA, 25 bp, Homo sapien
ccagacctccgacaagtatatagaa

SEQ ID NO: 2150157 - DNA, 25 bp, Homo sapien
tatatagaaaacgcctgccacattg

SEQ ID NO: 2150158 - DNA, 25 bp, Homo sapien
agtatatagaaaacgcctgccacat

SEQ ID NO: 2150159 - DNA, 25 bp, Homo sapien
ggtgttctttgtgagtttcatgcgt

SEQ ID NO: 2150160 - DNA, 25 bp, Homo sapien
gactctgcccgtgatttgtaacaga

SEQ ID NO: 2150161 - DNA, 25 bp, Homo sapien
tctctgtatgtagcataattctgag

SEQ ID NO: 2150162 - DNA, 25 bp, Homo sapien
gagtttcatgcgtttggactctgcc

SEQ ID NO: 2150163 - DNA, 25 bp, Homo sapien
tctctagaatctttctactcctggg

SEQ ID NO: 2150164 - DNA, 25 bp, Homo sapien
tgagaaatctagaccctcaggcccc

SEQ ID NO: 2150165 - DNA, 25 bp, Homo sapien
agaatctttctactcctgggaccag

SEQ ID NO: 2150166 - DNA, 25 bp, Homo sapien
cctgctggatcaggatctatatttt

SEQ ID NO: 2150167 - DNA, 25 bp, Homo sapien
catatgtatcgcagaagcttggaga

SEQ ID NO: 2150168 - DNA, 25 bp, Homo sapien
cagaaagaataaagtctccccctgt

SEQ ID NO: 2150169 - DNA, 25 bp, Homo sapien
tccttggcacccctaagtcctgagt

SEQ ID NO: 2150170 - DNA, 25 bp, Homo sapien
gcttggagaagttttgtatctggca

SEQ ID NO: 2150171 - DNA, 25 bp, Homo sapien
gaaatctggctcaggatccttgaag

SEQ ID NO: 2150172 - DNA, 25 bp, Homo sapien
ccacgttttcggtgatttcctctca

SEQ ID NO: 2150173 - DNA, 25 bp, Homo sapien
catgcccgacaccaaggagagtgaa

SEQ ID NO: 2150174 - DNA, 25 bp, Homo sapien
catcagcaatattcgtgtcatgccc

SEQ ID NO: 2150175 - DNA, 25 bp, Homo sapien
tctcagagtgttccataaggcactg

SEQ ID NO: 2150176 - DNA, 25 bp, Homo sapien
cattgtcgcgagtctcagagtgttc

SEQ ID NO: 2150177 - DNA, 25 bp, Homo sapien
atgatggtttgcattgtcgcgagtc

SEQ ID NO: 2150178 - DNA, 25 bp, Homo sapien
ggtttgcattgtcgcgagtctcaga

SEQ ID NO: 2150179 - DNA, 25 bp, Homo sapien
tctgcagtggtatcaaagaatggct

SEQ ID NO: 2150180 - DNA, 25 bp, Homo sapien
gatcctagaagaaatgccagtccgt

SEQ ID NO: 2150181 - DNA, 25 bp, Homo sapien
catacttagcagagaaagccgagct

SEQ ID NO: 2150182 - DNA, 25 bp, Homo sapien
tctccgtggtgtacacttgaaaggc

SEQ ID NO: 2150183 - DNA, 25 bp, Homo sapien
tagcccatggagcagtggagcgatc

SEQ ID NO: 2150184 - DNA, 25 bp, Homo sapien
caggcaacagctagtaggacagacc

SEQ ID NO: 2150185 - DNA, 25 bp, Homo sapien
gactgttctgatgatgccaacggca

SEQ ID NO: 2150186 - DNA, 25 bp, Homo sapien
cacatgcagtccgatggagagccat

SEQ ID NO: 2150187 - DNA, 25 bp, Homo sapien
ctaagcatctaagggtcacacttgg

SEQ ID NO: 2150188 - DNA, 25 bp, Homo sapien
ggaaacttcccaatgcacgttatcg

SEQ ID NO: 2150189 - DNA, 25 bp, Homo sapien
cgttatcgatgagagcaaactactg

SEQ ID NO: 2150190 - DNA, 25 bp, Homo sapien
gaatgcgagctcctagtttttgcag

SEQ ID NO: 2150191 - DNA, 25 bp, Homo sapien
catttcgttggaacgatacttcttc

SEQ ID NO: 2150192 - DNA, 25 bp, Homo sapien
ttctggaaacatttcgttggaacga

SEQ ID NO: 2150193 - DNA, 25 bp, Homo sapien
aacatttcgttggaacgatacttct

SEQ ID NO: 2150194 - DNA, 25 bp, Homo sapien
tggaaacatttcgttggaacgatac

SEQ ID NO: 2150195 - DNA, 25 bp, Homo sapien
tcccgcgctgggacattatagcatt

SEQ ID NO: 2150196 - DNA, 25 bp, Homo sapien
gaggctctgtagtttatgcccacac

SEQ ID NO: 2150197 - DNA, 25 bp, Homo sapien
tcccatagcttgaagttagtagcag

SEQ ID NO: 2150198 - DNA, 25 bp, Homo sapien
tgttcacacagcgtgagcttcccgc

SEQ ID NO: 2150199 - DNA, 25 bp, Homo sapien
gtgatttgggacccttggctagcat

SEQ ID NO: 2150200 - DNA, 25 bp, Homo sapien
gagtgatttgggacccttggctagc

SEQ ID NO: 2150201 - DNA, 25 bp, Homo sapien
ggagtgatttgggacccttggctag

SEQ ID NO: 2150202 - DNA, 25 bp, Homo sapien
agtgatttgggacccttggctagca

SEQ ID NO: 2150203 - DNA, 25 bp, Homo sapien
taaactgaacatgcaaactccccac

SEQ ID NO: 2150204 - DNA, 25 bp, Homo sapien
tataaactgaacatgcaaactcccc

SEQ ID NO: 2150205 - DNA, 25 bp, Homo sapien
catatgcttgggtatatataaactg

SEQ ID NO: 2150206 - DNA, 25 bp, Homo sapien
tatatataaactgaacatgcaaact

SEQ ID NO: 2150207 - DNA, 25 bp, Homo sapien
tagtcagaggtcttagattcaagtc

SEQ ID NO: 2150208 - DNA, 25 bp, Homo sapien
aggagccttacctcatggtcactgc

SEQ ID NO: 2150209 - DNA, 25 bp, Homo sapien
ggtcactgccacctcaggaccatgg

SEQ ID NO: 2150210 - DNA, 25 bp, Homo sapien
cattaccaaacgcagaggagcctta

SEQ ID NO: 2150211 - DNA, 25 bp, Homo sapien
tctcattgtggtttttcatgtgtct

SEQ ID NO: 2150212 - DNA, 25 bp, Homo sapien
ggttgtataaatgtcttctcaagtg

SEQ ID NO: 2150213 - DNA, 25 bp, Homo sapien
ctcattgtggtttttcatgtgtctg

SEQ ID NO: 2150214 - DNA, 25 bp, Homo sapien
ctgttggttgtataaatgtcttctc

SEQ ID NO: 2150215 - DNA, 25 bp, Homo sapien
gagagcgacggcggcgcggcggcgc

SEQ ID NO: 2150216 - DNA, 25 bp, Homo sapien
ccttcggctggagctcggcgagcga

SEQ ID NO: 2150217 - DNA, 25 bp, Homo sapien
ggctggagctcggcgagcgagaggc

SEQ ID NO: 2150218 - DNA, 25 bp, Homo sapien
cttctccttcggctggagctcggcg

SEQ ID NO: 2150219 - DNA, 25 bp, Homo sapien
gctggagctcggcgagcgagaggcg

SEQ ID NO: 2150220 - DNA, 25 bp, Homo sapien
ccactggtcggtttgcgggcagtcc

SEQ ID NO: 2150221 - DNA, 25 bp, Homo sapien
ctgggtgcttaccactggtcggttt

SEQ ID NO: 2150222 - DNA, 25 bp, Homo sapien
cttaccactggtcggtttgcgggca

SEQ ID NO: 2150223 - DNA, 25 bp, Homo sapien
ggtgcttaccactggtcggtttgcg

SEQ ID NO: 2150224 - DNA, 25 bp, Homo sapien
ttcacggagcgccacagtaccaggc

SEQ ID NO: 2150225 - DNA, 25 bp, Homo sapien
cttctgaacgtctaatttcacggag

SEQ ID NO: 2150226 - DNA, 25 bp, Homo sapien
atttcacggagcgccacagtaccag

SEQ ID NO: 2150227 - DNA, 25 bp, Homo sapien
taatttcacggagcgccacagtacc

SEQ ID NO: 2150228 - DNA, 25 bp, Homo sapien
tcctgcaaagcaccgatagctgcgc

SEQ ID NO: 2150229 - DNA, 25 bp, Homo sapien
caccgatagctgcgctctggaagcg

SEQ ID NO: 2150230 - DNA, 25 bp, Homo sapien
gttctccacgtatgcggcgtgctag

SEQ ID NO: 2150231 - DNA, 25 bp, Homo sapien
cacgtatgcggcgtgctagctggat

SEQ ID NO: 2150232 - DNA, 25 bp, Homo sapien
caatgacaggaagaagatatttttt

SEQ ID NO: 2150233 - DNA, 25 bp, Homo sapien
ctaccaatgacaggaagaagatatt

SEQ ID NO: 2150234 - DNA, 25 bp, Homo sapien
taccaatgacaggaagaagatattt

SEQ ID NO: 2150235 - DNA, 25 bp, Homo sapien
aaatgtttcccatcatagtggattc

SEQ ID NO: 2150236 - DNA, 25 bp, Homo sapien
tcccctatttttccactcgcaatca

SEQ ID NO: 2150237 - DNA, 25 bp, Homo sapien
cccctatttttccactcgcaatcat

SEQ ID NO: 2150238 - DNA, 25 bp, Homo sapien
ccctatttttccactcgcaatcata

SEQ ID NO: 2150239 - DNA, 25 bp, Homo sapien
cagacttctttcatagcagtcacca

SEQ ID NO: 2150240 - DNA, 25 bp, Homo sapien
gaactcagtttttccactaaggcca

SEQ ID NO: 2150241 - DNA, 25 bp, Homo sapien
caaatcgttcgtcatttctctgaac

SEQ ID NO: 2150242 - DNA, 25 bp, Homo sapien
gaagtttctggcaagtagagcctgc

SEQ ID NO: 2150243 - DNA, 25 bp, Homo sapien
gcatcaagcactcacaaattggtag

SEQ ID NO: 2150244 - DNA, 25 bp, Homo sapien
tacagatagaaagtcaggtgtggac

SEQ ID NO: 2150245 - DNA, 25 bp, Homo sapien
tgtggactcaagtacccatagacaa

SEQ ID NO: 2150246 - DNA, 25 bp, Homo sapien
tacataatatggtgcctggcccgca

SEQ ID NO: 2150247 - DNA, 25 bp, Homo sapien
tgccaaagccagatgcagaatagtt

SEQ ID NO: 2150248 - DNA, 25 bp, Homo sapien
tggcctagagtctgtgagcatgcac

SEQ ID NO: 2150249 - DNA, 25 bp, Homo sapien
tgctggagcccgtaattacctgcag

SEQ ID NO: 2150250 - DNA, 25 bp, Homo sapien
aattaatatccctagagcaagctgg

SEQ ID NO: 2150251 - DNA, 25 bp, Homo sapien
ctccagattatcctgttttctatct

SEQ ID NO: 2150252 - DNA, 25 bp, Homo sapien
cctctggacactcttgtctgttctc

SEQ ID NO: 2150253 - DNA, 25 bp, Homo sapien
taaatagacaggattgagctctttg

SEQ ID NO: 2150254 - DNA, 25 bp, Homo sapien
gacaggattgagctctttgtccttt

SEQ ID NO: 2150255 - DNA, 25 bp, Homo sapien
gcaccaaagtcatagaggagctctc

SEQ ID NO: 2150256 - DNA, 25 bp, Homo sapien
ccactctgtggagtagtgttgagag

SEQ ID NO: 2150257 - DNA, 25 bp, Homo sapien
cctcccaaaacttggccctgatctg

SEQ ID NO: 2150258 - DNA, 25 bp, Homo sapien
gccggcctgcaggtgcatgatctcc

SEQ ID NO: 2150259 - DNA, 25 bp, Homo sapien
gcctgcaggtgcatgatctcctgca

SEQ ID NO: 2150260 - DNA, 25 bp, Homo sapien
tgatctggctgccacactggccggc

SEQ ID NO: 2150261 - DNA, 25 bp, Homo sapien
cactgtccctatagtatgtgcctgt

SEQ ID NO: 2150262 - DNA, 25 bp, Homo sapien
agtacacgttgatcctttccggttg

SEQ ID NO: 2150263 - DNA, 25 bp, Homo sapien
tccggttgcaggtcactgtccctat

SEQ ID NO: 2150264 - DNA, 25 bp, Homo sapien
gatcctttccggttgcaggtcactg

SEQ ID NO: 2150265 - DNA, 25 bp, Homo sapien
tagtgccccttcacccagttgttgc

SEQ ID NO: 2150266 - DNA, 25 bp, Homo sapien
agttgttgccggctctggactggcc

SEQ ID NO: 2150267 - DNA, 25 bp, Homo sapien
ttgtccggccgaaagatctgaccga

SEQ ID NO: 2150268 - DNA, 25 bp, Homo sapien
aggggccggaaaggatagagtccat

SEQ ID NO: 2150269 - DNA, 25 bp, Homo sapien
ttgaaggcagtcgcagttctaggcc

SEQ ID NO: 2150270 - DNA, 25 bp, Homo sapien
cttgaaggcagtcgcagttctaggc

SEQ ID NO: 2150271 - DNA, 25 bp, Homo sapien
agccttgaaggcagtcgcagttcta

SEQ ID NO: 2150272 - DNA, 25 bp, Homo sapien
gccttgaaggcagtcgcagttctag

SEQ ID NO: 2150273 - DNA, 25 bp, Homo sapien
cgtgccaccccccagcaagtgcgtc

SEQ ID NO: 2150274 - DNA, 25 bp, Homo sapien
tgatgagcagtgtgcccatcccgga

SEQ ID NO: 2150275 - DNA, 25 bp, Homo sapien
gtgcccatcccggaccccgtgccac

SEQ ID NO: 2150276 - DNA, 25 bp, Homo sapien
tgccaccccccagcaagtgcgtcag

SEQ ID NO: 2150277 - DNA, 25 bp, Homo sapien
atgatgcggtctgggaactcctcac

SEQ ID NO: 2150278 - DNA, 25 bp, Homo sapien
gttcatgatgcggtctgggaactcc

SEQ ID NO: 2150279 - DNA, 25 bp, Homo sapien
tgcggtctgggaactcctcacggat

SEQ ID NO: 2150280 - DNA, 25 bp, Homo sapien
ggtctgggaactcctcacggatctt

SEQ ID NO: 2150281 - DNA, 25 bp, Homo sapien
ggtgcacagacagtgtggcattgta

SEQ ID NO: 2150282 - DNA, 25 bp, Homo sapien
gcacagacagtgtggcattgtaggg

SEQ ID NO: 2150283 - DNA, 25 bp, Homo sapien
tgcacagacagtgtggcattgtagg

SEQ ID NO: 2150284 - DNA, 25 bp, Homo sapien
ctggtgcacagacagtgtggcattg

SEQ ID NO: 2150285 - DNA, 25 bp, Homo sapien
gatgtcatagagtgccccattgttg

SEQ ID NO: 2150286 - DNA, 25 bp, Homo sapien
acaggcaggtggtgactctgctcat

SEQ ID NO: 2150287 - DNA, 25 bp, Homo sapien
tggtgactctgctcatggtggctga

SEQ ID NO: 2150288 - DNA, 25 bp, Homo sapien
tgactctgctcatggtggctgacac

SEQ ID NO: 2150289 - DNA, 25 bp, Homo sapien
cacaggcaggtggtgactctgctca

SEQ ID NO: 2150290 - DNA, 25 bp, Homo sapien
ggcatgaagaagtgcgggcaaggaa

SEQ ID NO: 2150291 - DNA, 25 bp, Homo sapien
tgaagaagtgcgggcaaggaaaggg

SEQ ID NO: 2150292 - DNA, 25 bp, Homo sapien
ctggtcaggggtgcgaagccaggca

SEQ ID NO: 2150293 - DNA, 25 bp, Homo sapien
catgaagaagtgcgggcaaggaaag

SEQ ID NO: 2150294 - DNA, 25 bp, Homo sapien
tagcggccatgtcgcgggttgcaca

SEQ ID NO: 2150295 - DNA, 25 bp, Homo sapien
gccatgtcgcgggttgcacatggcc

SEQ ID NO: 2150296 - DNA, 25 bp, Homo sapien
cggccatgtcgcgggttgcacatgg

SEQ ID NO: 2150297 - DNA, 25 bp, Homo sapien
ggtagcggccatgtcgcgggttgca

SEQ ID NO: 2150298 - DNA, 25 bp, Homo sapien
ttgttgctgatgaaagttgcggcta

SEQ ID NO: 2150299 - DNA, 25 bp, Homo sapien
aagttgcggctatcttcaggccgtg

SEQ ID NO: 2150300 - DNA, 25 bp, Homo sapien
tggccgtgaactgcgcagagatgca

SEQ ID NO: 2150301 - DNA, 25 bp, Homo sapien
ccttgcaccacaacatggccgtgaa

SEQ ID NO: 2150302 - DNA, 25 bp, Homo sapien
gcaagcatcaccgctgtctaattcc

SEQ ID NO: 2150303 - DNA, 25 bp, Homo sapien
tgtgcaagcatcaccgctgtctaat

SEQ ID NO: 2150304 - DNA, 25 bp, Homo sapien
gtgcaagcatcaccgctgtctaatt

SEQ ID NO: 2150305 - DNA, 25 bp, Homo sapien
ggatgccaaagctccgtgcgtcact

SEQ ID NO: 2150306 - DNA, 25 bp, Homo sapien
ctgccaagagactgacatccagtat

SEQ ID NO: 2150307 - DNA, 25 bp, Homo sapien
tctttccacttgctcttgtggttgc

SEQ ID NO: 2150308 - DNA, 25 bp, Homo sapien
gtcagaagatgagtacacaccacca

SEQ ID NO: 2150309 - DNA, 25 bp, Homo sapien
gctagacttgtctaggtgctgcccc

SEQ ID NO: 2150310 - DNA, 25 bp, Homo sapien
tcttgaaggattggaacatctggta

SEQ ID NO: 2150311 - DNA, 25 bp, Homo sapien
tctcaaagtggtacgattacacatg

SEQ ID NO: 2150312 - DNA, 25 bp, Homo sapien
cctttagaatagagcaagggccttt

SEQ ID NO: 2150313 - DNA, 25 bp, Homo sapien
ttctattctatagaaaggacagctc

SEQ ID NO: 2150314 - DNA, 25 bp, Homo sapien
ctgtacctggccgatagtttatttt

SEQ ID NO: 2150315 - DNA, 25 bp, Homo sapien
tggaaccgtctatttacaggctact

SEQ ID NO: 2150316 - DNA, 25 bp, Homo sapien
tctggctgttgactgctactttcta

SEQ ID NO: 2150317 - DNA, 25 bp, Homo sapien
tgtgcgactttcagctactctgggc

SEQ ID NO: 2150318 - DNA, 25 bp, Homo sapien
catctaaatcggatgaaagcagtac

SEQ ID NO: 2150319 - DNA, 25 bp, Homo sapien
cagttgccagtgtgcaaaatgggcc

SEQ ID NO: 2150320 - DNA, 25 bp, Homo sapien
tactctgggcagttgaaaagtagaa

SEQ ID NO: 2150321 - DNA, 25 bp, Homo sapien
tagcagtagagtaaccagttggtcc

SEQ ID NO: 2150322 - DNA, 25 bp, Homo sapien
taaaccagtcaaacgaaagaagctg

SEQ ID NO: 2150323 - DNA, 25 bp, Homo sapien
caattggtcaccctacttagcagtc

SEQ ID NO: 2150324 - DNA, 25 bp, Homo sapien
aagctgcagcatcagttctcacatg

SEQ ID NO: 2150325 - DNA, 25 bp, Homo sapien
tctttgaagttaatctagttctggc

SEQ ID NO: 2150326 - DNA, 25 bp, Homo sapien
actgtgcccaactaaatagcctttt

SEQ ID NO: 2150327 - DNA, 25 bp, Homo sapien
tttctttgaagttaatctagttctg

SEQ ID NO: 2150328 - DNA, 25 bp, Homo sapien
tttgaagttaatctagttctggcag

SEQ ID NO: 2150329 - DNA, 25 bp, Homo sapien
tattttagctattggagaatatcca

SEQ ID NO: 2150330 - DNA, 25 bp, Homo sapien
gcatgatatttgtgagaaatcttat

SEQ ID NO: 2150331 - DNA, 25 bp, Homo sapien
gaaatcttattgtcactataccttg

SEQ ID NO: 2150332 - DNA, 25 bp, Homo sapien
gagaagagaatgaaggttatgccaa

SEQ ID NO: 2150333 - DNA, 25 bp, Homo sapien
ttaggaatttcgtgaggatatgccc

SEQ ID NO: 2150334 - DNA, 25 bp, Homo sapien
tatgaaaccctaatacttgctgtgt

SEQ ID NO: 2150335 - DNA, 25 bp, Homo sapien
ttttaagtttcacagaagagtgtta

SEQ ID NO: 2150336 - DNA, 25 bp, Homo sapien
tatgccctccattcttgctgatgta

SEQ ID NO: 2150337 - DNA, 25 bp, Homo sapien
gaatctctagaagtaccttctcggg

SEQ ID NO: 2150338 - DNA, 25 bp, Homo sapien
gtcttcaacattcaaaccccgcaaa

SEQ ID NO: 2150339 - DNA, 25 bp, Homo sapien
tattagacataaccaagaactggtg

SEQ ID NO: 2150340 - DNA, 25 bp, Homo sapien
tagtgtagttagtgtatcacctcaa

SEQ ID NO: 2150341 - DNA, 25 bp, Homo sapien
tgaagtccaaggagggcgaaccgtc

SEQ ID NO: 2150342 - DNA, 25 bp, Homo sapien
gcgccgcgaagaacccggtttggca

SEQ ID NO: 2150343 - DNA, 25 bp, Homo sapien
cgttggactccgcagtttggagctt

SEQ ID NO: 2150344 - DNA, 25 bp, Homo sapien
agtgtggcagggattgccgctttcc

SEQ ID NO: 2150345 - DNA, 25 bp, Homo sapien
tccgggcttctgctactagtgagag

SEQ ID NO: 2150346 - DNA, 25 bp, Homo sapien
aaagaactgggagaaatcagggaga

SEQ ID NO: 2150347 - DNA, 25 bp, Homo sapien
ggccagggcgtcagctgcactctca

SEQ ID NO: 2150348 - DNA, 25 bp, Homo sapien
tcccgcagagtggataaagaactgg

SEQ ID NO: 2150349 - DNA, 25 bp, Homo sapien
ggcattcctcgtgggcggtgctccc

SEQ ID NO: 2150350 - DNA, 25 bp, Homo sapien
ctcgtgggcggtgctcccctttgac

SEQ ID NO: 2150351 - DNA, 25 bp, Homo sapien
tcccggcattcctcgtgggcggtgc

SEQ ID NO: 2150352 - DNA, 25 bp, Homo sapien
agctcccggcattcctcgtgggcgg

SEQ ID NO: 2150353 - DNA, 25 bp, Homo sapien
ctaatgggaagtaaggccgaagact

SEQ ID NO: 2150354 - DNA, 25 bp, Homo sapien
caacccgtgtagtaacctcgcaaag

SEQ ID NO: 2150355 - DNA, 25 bp, Homo sapien
cgaagacttcggagggcgcaacccg

SEQ ID NO: 2150356 - DNA, 25 bp, Homo sapien
ggcccgcgagtctccacgtcgttgg

SEQ ID NO: 2150357 - DNA, 25 bp, Homo sapien
ggcctgtggatggcatttctctgtt

SEQ ID NO: 2150358 - DNA, 25 bp, Homo sapien
ttggcctgtggatggcatttctctg

SEQ ID NO: 2150359 - DNA, 25 bp, Homo sapien
ttgttggcctgtggatggcatttct

SEQ ID NO: 2150360 - DNA, 25 bp, Homo sapien
tgttggcctgtggatggcatttctc

SEQ ID NO: 2150361 - DNA, 25 bp, Homo sapien
gagatggcagtacagtccagctttg

SEQ ID NO: 2150362 - DNA, 25 bp, Homo sapien
ggcagtacagtccagctttggctcg

SEQ ID NO: 2150363 - DNA, 25 bp, Homo sapien
gggcggagacgctcttcacctctca

SEQ ID NO: 2150364 - DNA, 25 bp, Homo sapien
cgggcggagacgctcttcacctctc

SEQ ID NO: 2150365 - DNA, 25 bp, Homo sapien
cagaaagtgcacatcgacagggaac

SEQ ID NO: 2150366 - DNA, 25 bp, Homo sapien
tgttaaccgaccctgtgaaagtcgc

SEQ ID NO: 2150367 - DNA, 25 bp, Homo sapien
ggtcctgagactgactaccactgtg

SEQ ID NO: 2150368 - DNA, 25 bp, Homo sapien
gaaagtcgcccttctagctgtgctt

SEQ ID NO: 2150369 - DNA, 25 bp, Homo sapien
ggtaagctcatccttatggttctcc

SEQ ID NO: 2150370 - DNA, 25 bp, Homo sapien
tgaaagttccaaccagtacagaaat

SEQ ID NO: 2150371 - DNA, 25 bp, Homo sapien
aaccagtacagaaatggtggtaagc

SEQ ID NO: 2150372 - DNA, 25 bp, Homo sapien
aatggtggtaagctcatccttatgg

SEQ ID NO: 2150373 - DNA, 25 bp, Homo sapien
gttcttatctgaggttctcagctgg

SEQ ID NO: 2150374 - DNA, 25 bp, Homo sapien
agctgcagtgattgccgcccgggcc

SEQ ID NO: 2150375 - DNA, 25 bp, Homo sapien
tgaagctcccactgatggcatgacc

SEQ ID NO: 2150376 - DNA, 25 bp, Homo sapien
ctgggtgtagttcttatctgaggtt

SEQ ID NO: 2150377 - DNA, 25 bp, Homo sapien
ggtaagtgatgtcaccacttggggg

SEQ ID NO: 2150378 - DNA, 25 bp, Homo sapien
gtaagtgatgtcaccacttgggggc

SEQ ID NO: 2150379 - DNA, 25 bp, Homo sapien
tggtaagtgatgtcaccacttgggg

SEQ ID NO: 2150380 - DNA, 25 bp, Homo sapien
aggcgtgagccactacacccggcca

SEQ ID NO: 2150381 - DNA, 25 bp, Homo sapien
gtgagccactacacccggccaacac

SEQ ID NO: 2150382 - DNA, 25 bp, Homo sapien
aggcgtgcaccaccaggctcagtta

SEQ ID NO: 2150383 - DNA, 25 bp, Homo sapien
cgtgagccactacacccggccaaca

SEQ ID NO: 2150384 - DNA, 25 bp, Homo sapien
gaaactattataggcagaaggtgaa

SEQ ID NO: 2150385 - DNA, 25 bp, Homo sapien
cctcgtccgtgtgctgaagcctgct

SEQ ID NO: 2150386 - DNA, 25 bp, Homo sapien
ttgctgttatagatacagctgcttg

SEQ ID NO: 2150387 - DNA, 25 bp, Homo sapien
gtagatataaagcctcaccagagtg

SEQ ID NO: 2150388 - DNA, 25 bp, Homo sapien
atgccaggggaccgccacggaatat

SEQ ID NO: 2150389 - DNA, 25 bp, Homo sapien
tgccaggggaccgccacggaatata

SEQ ID NO: 2150390 - DNA, 25 bp, Homo sapien
ccgccacggaatatacctttatctc

SEQ ID NO: 2150391 - DNA, 25 bp, Homo sapien
gaccgccacggaatatacctttatc

SEQ ID NO: 2150392 - DNA, 25 bp, Homo sapien
gccctcataggaagtgcccctgcta

SEQ ID NO: 2150393 - DNA, 25 bp, Homo sapien
tctggaacaccacttaaacaaaggc

SEQ ID NO: 2150394 - DNA, 25 bp, Homo sapien
ttacccagtacagcatgcactctgg

SEQ ID NO: 2150395 - DNA, 25 bp, Homo sapien
tctgctgtgggttgccttacccagt

SEQ ID NO: 2150396 - DNA, 25 bp, Homo sapien
actaccatgggtaatgacggcagtg

SEQ ID NO: 2150397 - DNA, 25 bp, Homo sapien
ttctgaaactaccatgggtaatgac

SEQ ID NO: 2150398 - DNA, 25 bp, Homo sapien
ggagagtaagtttatactctgagtt

SEQ ID NO: 2150399 - DNA, 25 bp, Homo sapien
ccatgggtaatgacggcagtgactg

SEQ ID NO: 2150400 - DNA, 25 bp, Homo sapien
tgctcttctttgccttgaacgttct

SEQ ID NO: 2150401 - DNA, 25 bp, Homo sapien
gctcttctttgccttgaacgttctt

SEQ ID NO: 2150402 - DNA, 25 bp, Homo sapien
ctcttctttgccttgaacgttcttt

SEQ ID NO: 2150403 - DNA, 25 bp, Homo sapien
cagtgagcacctcgtagtctccgcc

SEQ ID NO: 2150404 - DNA, 25 bp, Homo sapien
tcagccttaaggatggtttttccca

SEQ ID NO: 2150405 - DNA, 25 bp, Homo sapien
tcttctttcagccttaaggatggtt

SEQ ID NO: 2150406 - DNA, 25 bp, Homo sapien
gtgagcacctcgtagtctccgcccc

SEQ ID NO: 2150407 - DNA, 25 bp, Homo sapien
gggcgtccctcgatgagcgccacgc

SEQ ID NO: 2150408 - DNA, 25 bp, Homo sapien
cacttgggccgggcgtccctcgatg

SEQ ID NO: 2150409 - DNA, 25 bp, Homo sapien
tcgatgagcgccacgccggctccgg

SEQ ID NO: 2150410 - DNA, 25 bp, Homo sapien
ttgggccgggcgtccctcgatgagc

SEQ ID NO: 2150411 - DNA, 25 bp, Homo sapien
tccctcacgcgcctctaccggccgg

SEQ ID NO: 2150412 - DNA, 25 bp, Homo sapien
cacgcgcctctaccggccggcccat

SEQ ID NO: 2150413 - DNA, 25 bp, Homo sapien
cttcgtctccctcacgcgcctctac

SEQ ID NO: 2150414 - DNA, 25 bp, Homo sapien
tcgtctccctcacgcgcctctaccg

SEQ ID NO: 2150415 - DNA, 25 bp, Homo sapien
ggaaatgccaactccgctctgcggc

SEQ ID NO: 2150416 - DNA, 25 bp, Homo sapien
cgcggcgatcggctcggtccaaggg

SEQ ID NO: 2150417 - DNA, 25 bp, Homo sapien
cgcgccaggacagccggcccgaact

SEQ ID NO: 2150418 - DNA, 25 bp, Homo sapien
ggcgcggcccgagccccaatctgga

SEQ ID NO: 2150419 - DNA, 25 bp, Homo sapien
acaacatatttcatgagtgtccgca

SEQ ID NO: 2150420 - DNA, 25 bp, Homo sapien
tccttcatcccatcattttagctac

SEQ ID NO: 2150421 - DNA, 25 bp, Homo sapien
tgtccgcatgtacccaaatactatc

SEQ ID NO: 2150422 - DNA, 25 bp, Homo sapien
tgtgctacaaaccaaatttaaacga

SEQ ID NO: 2150423 - DNA, 25 bp, Homo sapien
tatatgtactgccaaagcgagcacc

SEQ ID NO: 2150424 - DNA, 25 bp, Homo sapien
ctaggactctatatccaggatggtt

SEQ ID NO: 2150425 - DNA, 25 bp, Homo sapien
actctatatccaggatggttctagc

SEQ ID NO: 2150426 - DNA, 25 bp, Homo sapien
ggactctatatccaggatggttcta

SEQ ID NO: 2150427 - DNA, 25 bp, Homo sapien
taggactctatatccaggatggttc

SEQ ID NO: 2150428 - DNA, 25 bp, Homo sapien
caggcataaatcagggttgccccag

SEQ ID NO: 2150429 - DNA, 25 bp, Homo sapien
caaactagagtatatggtaacccta

SEQ ID NO: 2150430 - DNA, 25 bp, Homo sapien
taaccctagttatgaggcaaacctg

SEQ ID NO: 2150431 - DNA, 25 bp, Homo sapien
ccgttaggttatgagaagggtatca

SEQ ID NO: 2150432 - DNA, 25 bp, Homo sapien
tataggagctaacaaattatccact

SEQ ID NO: 2150433 - DNA, 25 bp, Homo sapien
caaggcatcaaagttgtttttacaa

SEQ ID NO: 2150434 - DNA, 25 bp, Homo sapien
aaatactagagttcgacattaccac

SEQ ID NO: 2150435 - DNA, 25 bp, Homo sapien
tacacgaccgctaagaaacattcta

SEQ ID NO: 2150436 - DNA, 25 bp, Homo sapien
cttgaaaataggacttgtccacctt

SEQ ID NO: 2150437 - DNA, 25 bp, Homo sapien
tctcttgaaaataggacttgtccac

SEQ ID NO: 2150438 - DNA, 25 bp, Homo sapien
cttctcttgaaaataggacttgtcc

SEQ ID NO: 2150439 - DNA, 25 bp, Homo sapien
ctcttgaaaataggacttgtccacc

SEQ ID NO: 2150440 - DNA, 25 bp, Homo sapien
taaagaaaccctgctcgtgccagtg

SEQ ID NO: 2150441 - DNA, 25 bp, Homo sapien
cactatacatggcagggttcctcgg

SEQ ID NO: 2150442 - DNA, 25 bp, Homo sapien
gcatgacaactaaagcaccgcacgg

SEQ ID NO: 2150443 - DNA, 25 bp, Homo sapien
tgctgaaacaggactaccacttgga

SEQ ID NO: 2150444 - DNA, 25 bp, Homo sapien
gtgaaagcactttactttatcacct

SEQ ID NO: 2150445 - DNA, 25 bp, Homo sapien
gggcttccaatcagttagccctcct

SEQ ID NO: 2150446 - DNA, 25 bp, Homo sapien
atgttgttcccaagggtcttcactg

SEQ ID NO: 2150447 - DNA, 25 bp, Homo sapien
tgttcccaagggtcttcactgggct

SEQ ID NO: 2150448 - DNA, 25 bp, Homo sapien
cttctgttctaacagatatttgcac

SEQ ID NO: 2150449 - DNA, 25 bp, Homo sapien
cagacactcctcaagtgaatgagtt

SEQ ID NO: 2150450 - DNA, 25 bp, Homo sapien
tgtttatatattcttgtcccttctg

SEQ ID NO: 2150451 - DNA, 25 bp, Homo sapien
atattcttgtcccttctgttctaac

SEQ ID NO: 2150452 - DNA, 25 bp, Homo sapien
caattcttctagttagtgatggtgt

SEQ ID NO: 2150453 - DNA, 25 bp, Homo sapien
gatggtgttttctcagtagttctta

SEQ ID NO: 2150454 - DNA, 25 bp, Homo sapien
gttagtgatggtgttttctcagtag

SEQ ID NO: 2150455 - DNA, 25 bp, Homo sapien
tctagttagtgatggtgttttctca

SEQ ID NO: 2150456 - DNA, 25 bp, Homo sapien
agcattcactagatctgcaaccaga

SEQ ID NO: 2150457 - DNA, 25 bp, Homo sapien
gcttcttgtaccataggattttgga

SEQ ID NO: 2150458 - DNA, 25 bp, Homo sapien
actcatcttgcatactgtctttctg

SEQ ID NO: 2150459 - DNA, 25 bp, Homo sapien
gaaactgaaccccattcgtatagct

SEQ ID NO: 2150460 - DNA, 25 bp, Homo sapien
taaagaaacggcactataagctgat

SEQ ID NO: 2150461 - DNA, 25 bp, Homo sapien
gggaatgggactaggtatacagata

SEQ ID NO: 2150462 - DNA, 25 bp, Homo sapien
gagttcacaaagtagattcagggag

SEQ ID NO: 2150463 - DNA, 25 bp, Homo sapien
gagaaaacgtactcaaggcagagga

SEQ ID NO: 2150464 - DNA, 25 bp, Homo sapien
aaagtaatgactgtgtagcacatgg

SEQ ID NO: 2150465 - DNA, 25 bp, Homo sapien
gccaactaaaacactgccatgtaca

SEQ ID NO: 2150466 - DNA, 25 bp, Homo sapien
caaatgctaatggaattcaatcctg

SEQ ID NO: 2150467 - DNA, 25 bp, Homo sapien
tttcctacttggtagcaaatgctaa

SEQ ID NO: 2150468 - DNA, 25 bp, Homo sapien
agttcacatcacacattcaatcagg

SEQ ID NO: 2150469 - DNA, 25 bp, Homo sapien
gcgtttgaacatgcctaagccttta

SEQ ID NO: 2150470 - DNA, 25 bp, Homo sapien
aaatttgcaatgttttagccgggcg

SEQ ID NO: 2150471 - DNA, 25 bp, Homo sapien
gaatctcaacatggaaagctgtcac

SEQ ID NO: 2150472 - DNA, 25 bp, Homo sapien
ttttaatgaagtgcggctcccagaa

SEQ ID NO: 2150473 - DNA, 25 bp, Homo sapien
cttcaaactatgtcccagtcagggc

SEQ ID NO: 2150474 - DNA, 25 bp, Homo sapien
ccacagatatgaagggctggctata

SEQ ID NO: 2150475 - DNA, 25 bp, Homo sapien
gaactggatactctctaaggtcact

SEQ ID NO: 2150476 - DNA, 25 bp, Homo sapien
cagcaggaactttacatacatggtc

SEQ ID NO: 2150477 - DNA, 25 bp, Homo sapien
ttcacgaccccctaggacctgagga

SEQ ID NO: 2150478 - DNA, 25 bp, Homo sapien
tgaggacgcttaagtcccttagata

SEQ ID NO: 2150479 - DNA, 25 bp, Homo sapien
gaagatacaattgtcccttgctatc

SEQ ID NO: 2150480 - DNA, 25 bp, Homo sapien
ggtcaacaccgcgaaaccagtcact

SEQ ID NO: 2150481 - DNA, 25 bp, Homo sapien
gattcaaagtagaatctgaccaccc

SEQ ID NO: 2150482 - DNA, 25 bp, Homo sapien
tcagtcagtcaggttaaaatataac

SEQ ID NO: 2150483 - DNA, 25 bp, Homo sapien
cccaaacattaatgtagcatttgtc

SEQ ID NO: 2150484 - DNA, 25 bp, Homo sapien
tacaattagatcagtcagtcaggtt

SEQ ID NO: 2150485 - DNA, 25 bp, Homo sapien
tgctgttatctagtgccttcttcat

SEQ ID NO: 2150486 - DNA, 25 bp, Homo sapien
tgagggaagtcttgctgttatctag

SEQ ID NO: 2150487 - DNA, 25 bp, Homo sapien
gaagtcttgctgttatctagtgcct

SEQ ID NO: 2150488 - DNA, 25 bp, Homo sapien
gtcttgctgttatctagtgccttct

SEQ ID NO: 2150489 - DNA, 25 bp, Homo sapien
gcttaagaagtcttcgtttctgttc

SEQ ID NO: 2150490 - DNA, 25 bp, Homo sapien
gttcgtagattcataaaatagtgtt

SEQ ID NO: 2150491 - DNA, 25 bp, Homo sapien
ctgttatagaagttcgtagattcat

SEQ ID NO: 2150492 - DNA, 25 bp, Homo sapien
tgcttaagaagtcttcgtttctgtt

SEQ ID NO: 2150493 - DNA, 25 bp, Homo sapien
ctatcccctccaaagcgccgctttt

SEQ ID NO: 2150494 - DNA, 25 bp, Homo sapien
gagaaaaactcgaggagggcctatc

SEQ ID NO: 2150495 - DNA, 25 bp, Homo sapien
tcgaggagggcctatcccctccaaa

SEQ ID NO: 2150496 - DNA, 25 bp, Homo sapien
aggagggcctatcccctccaaagcg

SEQ ID NO: 2150497 - DNA, 25 bp, Homo sapien
tttgtttgtttcgaatccagtgtat

SEQ ID NO: 2150498 - DNA, 25 bp, Homo sapien
ttgtttcgaatccagtgtattggac

SEQ ID NO: 2150499 - DNA, 25 bp, Homo sapien
ctaaggtggcagcccagtcgggcat

SEQ ID NO: 2150500 - DNA, 25 bp, Homo sapien
aggctggctgggttcgctccgggac

SEQ ID NO: 2150501 - DNA, 25 bp, Homo sapien
gctgggttcgctccgggactcgttc

SEQ ID NO: 2150502 - DNA, 25 bp, Homo sapien
gggccgtgggaatccagaggctggc

SEQ ID NO: 2150503 - DNA, 25 bp, Homo sapien
ctgggccgtgggaatccagaggctg

SEQ ID NO: 2150504 - DNA, 25 bp, Homo sapien
ggcggtaggaatgtccggcggagcc

SEQ ID NO: 2150505 - DNA, 25 bp, Homo sapien
gcggacccgatcgagccgcggttct

SEQ ID NO: 2150506 - DNA, 25 bp, Homo sapien
gatcgagccgcggttcttctgtctt

SEQ ID NO: 2150507 - DNA, 25 bp, Homo sapien
ccgcggttcttctgtctttagtggg

SEQ ID NO: 2150508 - DNA, 25 bp, Homo sapien
ggtaaacaaggtgccgtgcccgcgc

SEQ ID NO: 2150509 - DNA, 25 bp, Homo sapien
atcgtggccgactgactcccgggtt

SEQ ID NO: 2150510 - DNA, 25 bp, Homo sapien
ggttcagcgtctccgacgccgcccg

SEQ ID NO: 2150511 - DNA, 25 bp, Homo sapien
cgcgccgccgagtggggtaaacaag

SEQ ID NO: 2150512 - DNA, 25 bp, Homo sapien
ttggaggcgaatggaacgcgcaggc

SEQ ID NO: 2150513 - DNA, 25 bp, Homo sapien
aggcgaatggaacgcgcaggcgcca

SEQ ID NO: 2150514 - DNA, 25 bp, Homo sapien
gcaggcgccatctgtcggccacgaa

SEQ ID NO: 2150515 - DNA, 25 bp, Homo sapien
atggaacgcgcaggcgccatctgtc

SEQ ID NO: 2150516 - DNA, 25 bp, Homo sapien
tttggtggcgcttcgggattgtttg

SEQ ID NO: 2150517 - DNA, 25 bp, Homo sapien
aagctcccgcggttctagagcggtg

SEQ ID NO: 2150518 - DNA, 25 bp, Homo sapien
tcagggacggaagctcccgcggttc

SEQ ID NO: 2150519 - DNA, 25 bp, Homo sapien
ttgaaagtggcggtcggatccggcg

SEQ ID NO: 2150520 - DNA, 25 bp, Homo sapien
ctttctcaggccgggggcttcttca

SEQ ID NO: 2150521 - DNA, 25 bp, Homo sapien
gaggcagcaacgagactgttcgcct

SEQ ID NO: 2150522 - DNA, 25 bp, Homo sapien
cttctttctcaggccgggggcttct

SEQ ID NO: 2150523 - DNA, 25 bp, Homo sapien
tcccccctcagcgtacacagaggca

SEQ ID NO: 2150524 - DNA, 25 bp, Homo sapien
tcacggtgggccaagcgccctccgg

SEQ ID NO: 2150525 - DNA, 25 bp, Homo sapien
aaacttctagaagcttcgcctccgc

SEQ ID NO: 2150526 - DNA, 25 bp, Homo sapien
ctcacggtgggccaagcgccctccg

SEQ ID NO: 2150527 - DNA, 25 bp, Homo sapien
agaagcttcgcctccgccattttat

SEQ ID NO: 2150528 - DNA, 25 bp, Homo sapien
tccagttcgggctctcctaggctta

SEQ ID NO: 2150529 - DNA, 25 bp, Homo sapien
tcttcagcgagggtagtcgaaaaga

SEQ ID NO: 2150530 - DNA, 25 bp, Homo sapien
gaaaaggaacctaaatctactgcta

SEQ ID NO: 2150531 - DNA, 25 bp, Homo sapien
cctaggcttaggagcctgccggaga

SEQ ID NO: 2150532 - DNA, 25 bp, Homo sapien
ccgtcacatgaatgttgttccctct

SEQ ID NO: 2150533 - DNA, 25 bp, Homo sapien
gggcccgtcacatgaatgttgttcc

SEQ ID NO: 2150534 - DNA, 25 bp, Homo sapien
gcagaggggcccgtcacatgaatgt

SEQ ID NO: 2150535 - DNA, 25 bp, Homo sapien
gaggggcccgtcacatgaatgttgt

SEQ ID NO: 2150536 - DNA, 25 bp, Homo sapien
gatggagagatcgatgccaatcgcc

SEQ ID NO: 2150537 - DNA, 25 bp, Homo sapien
agggatggagagatcgatgccaatc

SEQ ID NO: 2150538 - DNA, 25 bp, Homo sapien
ggagagatcgatgccaatcgccttc

SEQ ID NO: 2150539 - DNA, 25 bp, Homo sapien
gaagtcgggcctcggaagggatgga

SEQ ID NO: 2150540 - DNA, 25 bp, Homo sapien
caatttagaaaattgttgcccgaag

SEQ ID NO: 2150541 - DNA, 25 bp, Homo sapien
cagccaatttagaaaattgttgccc

SEQ ID NO: 2150542 - DNA, 25 bp, Homo sapien
cccagccaatttagaaaattgttgc

SEQ ID NO: 2150543 - DNA, 25 bp, Homo sapien
gccaatttagaaaattgttgcccga

SEQ ID NO: 2150544 - DNA, 25 bp, Homo sapien
caacaaacagccttccactcccgcc

SEQ ID NO: 2150545 - DNA, 25 bp, Homo sapien
tgagaaagacagtgcgggtgggggt

SEQ ID NO: 2150546 - DNA, 25 bp, Homo sapien
cccaacaaacagccttccactcccg

SEQ ID NO: 2150547 - DNA, 25 bp, Homo sapien
cttgagaaagacagtgcgggtgggg

SEQ ID NO: 2150548 - DNA, 25 bp, Homo sapien
tggggcaaggatcagctcagttcgt

SEQ ID NO: 2150549 - DNA, 25 bp, Homo sapien
ctggggcaaggatcagctcagttcg

SEQ ID NO: 2150550 - DNA, 25 bp, Homo sapien
gggcaaggatcagctcagttcgtgc

SEQ ID NO: 2150551 - DNA, 25 bp, Homo sapien
ggggcaaggatcagctcagttcgtg

SEQ ID NO: 2150552 - DNA, 25 bp, Homo sapien
agtcgaccccgagcaagaataaaag

SEQ ID NO: 2150553 - DNA, 25 bp, Homo sapien
aatcgccgtccgcagatctccggat

SEQ ID NO: 2150554 - DNA, 25 bp, Homo sapien
ccccgagcaagaataaaagtgtgga

SEQ ID NO: 2150555 - DNA, 25 bp, Homo sapien
tgtggagtgaaaacgcacaggctgc

SEQ ID NO: 2150556 - DNA, 25 bp, Homo sapien
aactacttgatgctgtttcccacac

SEQ ID NO: 2150557 - DNA, 25 bp, Homo sapien
caaagttttgcggaactacttgatg

SEQ ID NO: 2150558 - DNA, 25 bp, Homo sapien
tgcggaactacttgatgctgtttcc

SEQ ID NO: 2150559 - DNA, 25 bp, Homo sapien
gttttgcggaactacttgatgctgt

SEQ ID NO: 2150560 - DNA, 25 bp, Homo sapien
cagaaaagtgctgcgaggacagtaa

SEQ ID NO: 2150561 - DNA, 25 bp, Homo sapien
ggaatgacgcacttcggtaacccga

SEQ ID NO: 2150562 - DNA, 25 bp, Homo sapien
gcagaggttggaccgcactaggttt

SEQ ID NO: 2150563 - DNA, 25 bp, Homo sapien
tacagacagaattaggagaccgcct

SEQ ID NO: 2150564 - DNA, 25 bp, Homo sapien
tatggaaatgtttaacagcacgcac

SEQ ID NO: 2150565 - DNA, 25 bp, Homo sapien
caaggctaaatttcctatgcaagta

SEQ ID NO: 2150566 - DNA, 25 bp, Homo sapien
ccccaagactgtaagacaatctgga

SEQ ID NO: 2150567 - DNA, 25 bp, Homo sapien
gccaagcattgtgtaatcacttaca

SEQ ID NO: 2150568 - DNA, 25 bp, Homo sapien
tctcataatggtttcaatgaactaa

SEQ ID NO: 2150569 - DNA, 25 bp, Homo sapien
tagcccagcccattaatcttatata

SEQ ID NO: 2150570 - DNA, 25 bp, Homo sapien
caagctatatcttgtctcataatgg

SEQ ID NO: 2150571 - DNA, 25 bp, Homo sapien
tagtcactacacaggccacaaattc

SEQ ID NO: 2150572 - DNA, 25 bp, Homo sapien
ccatagtaacttagaaaactgcttc

SEQ ID NO: 2150573 - DNA, 25 bp, Homo sapien
actgctcccggcagaaacctatttt

SEQ ID NO: 2150574 - DNA, 25 bp, Homo sapien
caatgaacagtagcactttatgcac

SEQ ID NO: 2150575 - DNA, 25 bp, Homo sapien
tcaaaaagtacatattccgcagggc

SEQ ID NO: 2150576 - DNA, 25 bp, Homo sapien
gggaggctagtggaatatgaaaacc

SEQ ID NO: 2150577 - DNA, 25 bp, Homo sapien
cacaaactggaatcataatgctgcc

SEQ ID NO: 2150578 - DNA, 25 bp, Homo sapien
gacttagaccagtttacctgaacag

SEQ ID NO: 2150579 - DNA, 25 bp, Homo sapien
gaacactacctatggagacaatgct

SEQ ID NO: 2150580 - DNA, 25 bp, Homo sapien
gcatcacgtgggtgcttaaaaggtt

SEQ ID NO: 2150581 - DNA, 25 bp, Homo sapien
cacattattgtccactgatcagcag

SEQ ID NO: 2150582 - DNA, 25 bp, Homo sapien
tgggattacacctattgtacagctg

SEQ ID NO: 2150583 - DNA, 25 bp, Homo sapien
taaaagtacactgccaagatgaaga

SEQ ID NO: 2150584 - DNA, 25 bp, Homo sapien
tctacccaagttagcttttacacaa

SEQ ID NO: 2150585 - DNA, 25 bp, Homo sapien
agcattatttctacccaagttagct

SEQ ID NO: 2150586 - DNA, 25 bp, Homo sapien
aagtagaattatgagtcatttttca

SEQ ID NO: 2150587 - DNA, 25 bp, Homo sapien
tataagatactcatctccagcatta

SEQ ID NO: 2150588 - DNA, 25 bp, Homo sapien
taaattccataagggcaagaaccag

SEQ ID NO: 2150589 - DNA, 25 bp, Homo sapien
tacacacggcactctgtgcttaacg

SEQ ID NO: 2150590 - DNA, 25 bp, Homo sapien
catttccatgtggtaggtggccagg

SEQ ID NO: 2150591 - DNA, 25 bp, Homo sapien
ctcacccagcggcattgcattttta

SEQ ID NO: 2150592 - DNA, 25 bp, Homo sapien
tcataatttataaggccctctcagg

SEQ ID NO: 2150593 - DNA, 25 bp, Homo sapien
tctcaggttaaacttaagtttgtca

SEQ ID NO: 2150594 - DNA, 25 bp, Homo sapien
taaacttaagtttgtcagtcacatt

SEQ ID NO: 2150595 - DNA, 25 bp, Homo sapien
cttaagtttgtcagtcacattcaca

SEQ ID NO: 2150596 - DNA, 25 bp, Homo sapien
aattaggcatacatggggacacaca

SEQ ID NO: 2150597 - DNA, 25 bp, Homo sapien
gggagatcctgtctgagagagacag

SEQ ID NO: 2150598 - DNA, 25 bp, Homo sapien
ggagatcctgtctgagagagacagg

SEQ ID NO: 2150599 - DNA, 25 bp, Homo sapien
aaaattaggcatacatggggacaca

SEQ ID NO: 2150600 - DNA, 25 bp, Homo sapien
acagttattaccaagtattatgtac

SEQ ID NO: 2150601 - DNA, 25 bp, Homo sapien
tgttataagtaatagtacattctaa

SEQ ID NO: 2150602 - DNA, 25 bp, Homo sapien
tgtaaacaagtaacacagttattac

SEQ ID NO: 2150603 - DNA, 25 bp, Homo sapien
atgcctggccacaatttgttataag

SEQ ID NO: 2150604 - DNA, 25 bp, Homo sapien
cttttcattaagaattatatttcag

SEQ ID NO: 2150605 - DNA, 25 bp, Homo sapien
gggcacggtggctcacgcctgtaat

SEQ ID NO: 2150606 - DNA, 25 bp, Homo sapien
cccagcactttgagaggccaaggag

SEQ ID NO: 2150607 - DNA, 25 bp, Homo sapien
ttcattaagaattatatttcaggct

SEQ ID NO: 2150608 - DNA, 25 bp, Homo sapien
cctgaatgccgcaatattgtcctct

SEQ ID NO: 2150609 - DNA, 25 bp, Homo sapien
ttgtctcttgagttgccttaacctg

SEQ ID NO: 2150610 - DNA, 25 bp, Homo sapien
gaatgccgcaatattgtcctctcat

SEQ ID NO: 2150611 - DNA, 25 bp, Homo sapien
gagttgccttaacctgaatgccgca

SEQ ID NO: 2150612 - DNA, 25 bp, Homo sapien
tgttaaaacgtgaactactagctgg

SEQ ID NO: 2150613 - DNA, 25 bp, Homo sapien
aaacgtgaactactagctgggcatg

SEQ ID NO: 2150614 - DNA, 25 bp, Homo sapien
ctctgttaaaacgtgaactactagc

SEQ ID NO: 2150615 - DNA, 25 bp, Homo sapien
tgtactctgttaaaacgtgaactac

SEQ ID NO: 2150616 - DNA, 25 bp, Homo sapien
agtgaatttagtactcggtggccac

SEQ ID NO: 2150617 - DNA, 25 bp, Homo sapien
tcccaagtgaatttagtactcggtg

SEQ ID NO: 2150618 - DNA, 25 bp, Homo sapien
cccaagtgaatttagtactcggtgg

SEQ ID NO: 2150619 - DNA, 25 bp, Homo sapien
caagtgaatttagtactcggtggcc

SEQ ID NO: 2150620 - DNA, 25 bp, Homo sapien
ggaacacctcaatgtcagaaatata

SEQ ID NO: 2150621 - DNA, 25 bp, Homo sapien
tcatatatttacgtgggtaaaatgg

SEQ ID NO: 2150622 - DNA, 25 bp, Homo sapien
gtgggtaaaatggtggcttgccttc

SEQ ID NO: 2150623 - DNA, 25 bp, Homo sapien
cttctggaacacctcaatgtcagaa

SEQ ID NO: 2150624 - DNA, 25 bp, Homo sapien
tgtagtagattaaaatcagttggta

SEQ ID NO: 2150625 - DNA, 25 bp, Homo sapien
gtagattaaaatcagttggtatttc

SEQ ID NO: 2150626 - DNA, 25 bp, Homo sapien
aatcagttggtatttctggagctgc

SEQ ID NO: 2150627 - DNA, 25 bp, Homo sapien
gattaaaatcagttggtatttctgg

SEQ ID NO: 2150628 - DNA, 25 bp, Homo sapien
ttccttcgatatcttcaaaatctgt

SEQ ID NO: 2150629 - DNA, 25 bp, Homo sapien
ttggttttttccttcgatatcttca

SEQ ID NO: 2150630 - DNA, 25 bp, Homo sapien
tggttttttccttcgatatcttcaa

SEQ ID NO: 2150631 - DNA, 25 bp, Homo sapien
gatatcttcaaaatctgtgtcagaa

SEQ ID NO: 2150632 - DNA, 25 bp, Homo sapien
cgtaaacttctgtattgttaagact

SEQ ID NO: 2150633 - DNA, 25 bp, Homo sapien
tttcactttggtcatcgtaaacttc

SEQ ID NO: 2150634 - DNA, 25 bp, Homo sapien
tggtcatcgtaaacttctgtattgt

SEQ ID NO: 2150635 - DNA, 25 bp, Homo sapien
tttttcaaagtatgtcatgagacaa

SEQ ID NO: 2150636 - DNA, 25 bp, Homo sapien
tgatgaccattcattcggtttggac

SEQ ID NO: 2150637 - DNA, 25 bp, Homo sapien
cattcattcggtttggaccagaagg

SEQ ID NO: 2150638 - DNA, 25 bp, Homo sapien
ttctgttggtgatgaccattcattc

SEQ ID NO: 2150639 - DNA, 25 bp, Homo sapien
cattcggtttggaccagaaggaggt

SEQ ID NO: 2150640 - DNA, 25 bp, Homo sapien
tattaggtcactcaaccaggaattc

SEQ ID NO: 2150641 - DNA, 25 bp, Homo sapien
caggaattccatatgggtagaagac

SEQ ID NO: 2150642 - DNA, 25 bp, Homo sapien
ggtttagccaacattagaaagccta

SEQ ID NO: 2150643 - DNA, 25 bp, Homo sapien
gaaaattgagacctcatagccatgg

SEQ ID NO: 2150644 - DNA, 25 bp, Homo sapien
caagaagtgctatatctcggtcatg

SEQ ID NO: 2150645 - DNA, 25 bp, Homo sapien
tgtatgattctatccaatcatctac

SEQ ID NO: 2150646 - DNA, 25 bp, Homo sapien
aagttgataaggtcaagaagtgcta

SEQ ID NO: 2150647 - DNA, 25 bp, Homo sapien
ggtcatgcttgtatgattctatcca

SEQ ID NO: 2150648 - DNA, 25 bp, Homo sapien
tgcatatgtctaaacatttctgctg

SEQ ID NO: 2150649 - DNA, 25 bp, Homo sapien
tctgcatatgtctaaacatttctgc

SEQ ID NO: 2150650 - DNA, 25 bp, Homo sapien
tatctcagagttctgcatatgtcta

SEQ ID NO: 2150651 - DNA, 25 bp, Homo sapien
ctcagagttctgcatatgtctaaac

SEQ ID NO: 2150652 - DNA, 25 bp, Homo sapien
cagccatggtaagtggataatctcc

SEQ ID NO: 2150653 - DNA, 25 bp, Homo sapien
tatattgacattgccgtactaacac

SEQ ID NO: 2150654 - DNA, 25 bp, Homo sapien
agggtgcttgtatgtcgaaatgctc

SEQ ID NO: 2150655 - DNA, 25 bp, Homo sapien
gtactaacacgccaatgaattcaca

SEQ ID NO: 2150656 - DNA, 25 bp, Homo sapien
tcaaatctaagacaatatgcagaaa

SEQ ID NO: 2150657 - DNA, 25 bp, Homo sapien
tcatctcaaatctaagacaatatgc

SEQ ID NO: 2150658 - DNA, 25 bp, Homo sapien
gaatctttttcatctcaaatctaag

SEQ ID NO: 2150659 - DNA, 25 bp, Homo sapien
tctcaaatctaagacaatatgcaga

SEQ ID NO: 2150660 - DNA, 25 bp, Homo sapien
ctctttccgcttttgtagcaggagt

SEQ ID NO: 2150661 - DNA, 25 bp, Homo sapien
gtgtattatccatattaatgctaag

SEQ ID NO: 2150662 - DNA, 25 bp, Homo sapien
ggagttctagcctctcattggctcg

SEQ ID NO: 2150663 - DNA, 25 bp, Homo sapien
cattggctcgttttccaatcatttt

SEQ ID NO: 2150664 - DNA, 25 bp, Homo sapien
gaaaacagtattgttggcacggata

SEQ ID NO: 2150665 - DNA, 25 bp, Homo sapien
ccaagttggtcacacaatagcctaa

SEQ ID NO: 2150666 - DNA, 25 bp, Homo sapien
taatactagtccacgcaggttgaaa

SEQ ID NO: 2150667 - DNA, 25 bp, Homo sapien
gacaacttgtcagactaaccccagt

SEQ ID NO: 2150668 - DNA, 25 bp, Homo sapien
cactcctttaaatattgcattcatc

SEQ ID NO: 2150669 - DNA, 25 bp, Homo sapien
tctatgtacaaacactcctttaaat

SEQ ID NO: 2150670 - DNA, 25 bp, Homo sapien
gtacaaacactcctttaaatattgc

SEQ ID NO: 2150671 - DNA, 25 bp, Homo sapien
cggtatctatgtacaaacactcctt

SEQ ID NO: 2150672 - DNA, 25 bp, Homo sapien
caatgcaaatagctcgaatttcagc

SEQ ID NO: 2150673 - DNA, 25 bp, Homo sapien
agctcgaatttcagctatcgcatca

SEQ ID NO: 2150674 - DNA, 25 bp, Homo sapien
aatctcttcaatgcaaatagctcga

SEQ ID NO: 2150675 - DNA, 25 bp, Homo sapien
aatagctcgaatttcagctatcgca

SEQ ID NO: 2150676 - DNA, 25 bp, Homo sapien
tccagtttggaattaagctctttgt

SEQ ID NO: 2150677 - DNA, 25 bp, Homo sapien
taagacatttgagtcttacttcacc

SEQ ID NO: 2150678 - DNA, 25 bp, Homo sapien
tgttataataaagcccttgtagagc

SEQ ID NO: 2150679 - DNA, 25 bp, Homo sapien
gcccttgtagagcagtaagacattt

SEQ ID NO: 2150680 - DNA, 25 bp, Homo sapien
caagggtcatagacacaattctatc

SEQ ID NO: 2150681 - DNA, 25 bp, Homo sapien
tgcttgtactgcaacatcatattct

SEQ ID NO: 2150682 - DNA, 25 bp, Homo sapien
gagtgagtaattttattgcttgtac

SEQ ID NO: 2150683 - DNA, 25 bp, Homo sapien
catattctttgtcaagggtcataga

SEQ ID NO: 2150684 - DNA, 25 bp, Homo sapien
cggtgagctgaataaaccagatgat

SEQ ID NO: 2150685 - DNA, 25 bp, Homo sapien
tactggccggtgagctgaataaacc

SEQ ID NO: 2150686 - DNA, 25 bp, Homo sapien
acaatcttctgcagtgagaacttct

SEQ ID NO: 2150687 - DNA, 25 bp, Homo sapien
tgctactgctactggccggtgagct

SEQ ID NO: 2150688 - DNA, 25 bp, Homo sapien
atcctcctctggatctctacgactg

SEQ ID NO: 2150689 - DNA, 25 bp, Homo sapien
cctcctctggatctctacgactgaa

SEQ ID NO: 2150690 - DNA, 25 bp, Homo sapien
ctctggatctctacgactgaagagc

SEQ ID NO: 2150691 - DNA, 25 bp, Homo sapien
tcctctggatctctacgactgaaga

SEQ ID NO: 2150692 - DNA, 25 bp, Homo sapien
cagtaacaagctattcatacattcc

SEQ ID NO: 2150693 - DNA, 25 bp, Homo sapien
tccactaagtggctcttccagtaac

SEQ ID NO: 2150694 - DNA, 25 bp, Homo sapien
agtcccacatgctatccacaaggta

SEQ ID NO: 2150695 - DNA, 25 bp, Homo sapien
gcagctcagtagcacagtcccacat

SEQ ID NO: 2150696 - DNA, 25 bp, Homo sapien
gcattatttcaatcagagcactctc

SEQ ID NO: 2150697 - DNA, 25 bp, Homo sapien
agcattatttcaatcagagcactct

SEQ ID NO: 2150698 - DNA, 25 bp, Homo sapien
attcagccgcttgtctaatggtaca

SEQ ID NO: 2150699 - DNA, 25 bp, Homo sapien
tctaatggtacaaagcattatttca

SEQ ID NO: 2150700 - DNA, 25 bp, Homo sapien
tgtcctatcatccaactgtgtcttc

SEQ ID NO: 2150701 - DNA, 25 bp, Homo sapien
cagtgatttttgtcctatcatccaa

SEQ ID NO: 2150702 - DNA, 25 bp, Homo sapien
caaaaagctcagtgatttttgtcct

SEQ ID NO: 2150703 - DNA, 25 bp, Homo sapien
ctatcatccaactgtgtcttcttct

SEQ ID NO: 2150704 - DNA, 25 bp, Homo sapien
ggcaactgcaacaagttagtcacct

SEQ ID NO: 2150705 - DNA, 25 bp, Homo sapien
tttctaatcgtccagtggtatatat

SEQ ID NO: 2150706 - DNA, 25 bp, Homo sapien
caaatcaaagtactgaggcaactgc

SEQ ID NO: 2150707 - DNA, 25 bp, Homo sapien
aatcgtccagtggtatatatttcca

SEQ ID NO: 2150708 - DNA, 25 bp, Homo sapien
cagagtgcatggtaagttttagaac

SEQ ID NO: 2150709 - DNA, 25 bp, Homo sapien
gcttctctacaatattccggatctg

SEQ ID NO: 2150710 - DNA, 25 bp, Homo sapien
cagaaaatcttcaagaagccggtta

SEQ ID NO: 2150711 - DNA, 25 bp, Homo sapien
tctgtcgcaataaggcatccaaatg

SEQ ID NO: 2150712 - DNA, 25 bp, Homo sapien
taactaagaatgtaatcatcgtaca

SEQ ID NO: 2150713 - DNA, 25 bp, Homo sapien
taagcccggaataacaatatacacc

SEQ ID NO: 2150714 - DNA, 25 bp, Homo sapien
catcgtacatcaacatatttgcaca

SEQ ID NO: 2150715 - DNA, 25 bp, Homo sapien
cacaaagtccatatgatcttacagc

SEQ ID NO: 2150716 - DNA, 25 bp, Homo sapien
catcatcttcatcaggttcttcacc

SEQ ID NO: 2150717 - DNA, 25 bp, Homo sapien
ctgatatgcatcatcttcatcaggt

SEQ ID NO: 2150718 - DNA, 25 bp, Homo sapien
tgcatcatcttcatcaggttcttca

SEQ ID NO: 2150719 - DNA, 25 bp, Homo sapien
tatgcatcatcttcatcaggttctt

SEQ ID NO: 2150720 - DNA, 25 bp, Homo sapien
agcagtgatcctcttcaatgttgac

SEQ ID NO: 2150721 - DNA, 25 bp, Homo sapien
gctcaggcatgtctccattttcgat

SEQ ID NO: 2150722 - DNA, 25 bp, Homo sapien
tttcaagagtttgtaattacaagca

SEQ ID NO: 2150723 - DNA, 25 bp, Homo sapien
catgtctccattttcgattccagtt

SEQ ID NO: 2150724 - DNA, 25 bp, Homo sapien
cagttttcaagagtttgtaattaca

SEQ ID NO: 2150725 - DNA, 25 bp, Homo sapien
tacatagtgagtacactgcagtgcg

SEQ ID NO: 2150726 - DNA, 25 bp, Homo sapien
agttgccaaaggattacatagtgag

SEQ ID NO: 2150727 - DNA, 25 bp, Homo sapien
cagttatcttagcaagttgccaaag

SEQ ID NO: 2150728 - DNA, 25 bp, Homo sapien
gtacactgcagtgcgtgaataacaa

SEQ ID NO: 2150729 - DNA, 25 bp, Homo sapien
taccagagcataagaagatctaggg

SEQ ID NO: 2150730 - DNA, 25 bp, Homo sapien
tatgtactaatagctggcgctggca

SEQ ID NO: 2150731 - DNA, 25 bp, Homo sapien
gattatgccaccttcaaatgtgaac

SEQ ID NO: 2150732 - DNA, 25 bp, Homo sapien
aggttatcccaaaacaataccagag

SEQ ID NO: 2150733 - DNA, 25 bp, Homo sapien
caccgttcctactacaagcttaaca

SEQ ID NO: 2150734 - DNA, 25 bp, Homo sapien
tacatggtaatatagtcaccgttcc

SEQ ID NO: 2150735 - DNA, 25 bp, Homo sapien
cataggtgagcaattatacatggta

SEQ ID NO: 2150736 - DNA, 25 bp, Homo sapien
ttttaacttccaacataggtgagca

SEQ ID NO: 2150737 - DNA, 25 bp, Homo sapien
tgttgacatatctgacaaaatactc

SEQ ID NO: 2150738 - DNA, 25 bp, Homo sapien
gtttctttaaacgcagcaagtcctc

SEQ ID NO: 2150739 - DNA, 25 bp, Homo sapien
ttgtttctttaaacgcagcaagtcc

SEQ ID NO: 2150740 - DNA, 25 bp, Homo sapien
tgtttctttaaacgcagcaagtcct

SEQ ID NO: 2150741 - DNA, 25 bp, Homo sapien
ccctcctgacataatctgatggctg

SEQ ID NO: 2150742 - DNA, 25 bp, Homo sapien
gactgcaatgaagaatcaggggtat

SEQ ID NO: 2150743 - DNA, 25 bp, Homo sapien
taatggctctaacatgtcacgccct

SEQ ID NO: 2150744 - DNA, 25 bp, Homo sapien
gggtatacactaatggctctaacat

SEQ ID NO: 2150745 - DNA, 25 bp, Homo sapien
tctccaccacagtatatacaattag

SEQ ID NO: 2150746 - DNA, 25 bp, Homo sapien
tacaattagcttacaaaatgctgca

SEQ ID NO: 2150747 - DNA, 25 bp, Homo sapien
tgtgcagagcttcaattttactggc

SEQ ID NO: 2150748 - DNA, 25 bp, Homo sapien
tatactgtttgaagatatctgcagc

SEQ ID NO: 2150749 - DNA, 25 bp, Homo sapien
tagcacactgaattttgtctatctg

SEQ ID NO: 2150750 - DNA, 25 bp, Homo sapien
ctgttgcagactgagaataagggtc

SEQ ID NO: 2150751 - DNA, 25 bp, Homo sapien
ctgagaataagggtcttagcacact

SEQ ID NO: 2150752 - DNA, 25 bp, Homo sapien
cactgaattttgtctatctgccttg

SEQ ID NO: 2150753 - DNA, 25 bp, Homo sapien
aacgtcgagcaagttcttttatgcc

SEQ ID NO: 2150754 - DNA, 25 bp, Homo sapien
tgccactaaatgtagaggatgatct

SEQ ID NO: 2150755 - DNA, 25 bp, Homo sapien
tgttttcaactgatcaagtccaaaa

SEQ ID NO: 2150756 - DNA, 25 bp, Homo sapien
aagttaaagcaaaacgtcgagcaag

SEQ ID NO: 2150757 - DNA, 25 bp, Homo sapien
tggctctccccttgcggattaggct

SEQ ID NO: 2150758 - DNA, 25 bp, Homo sapien
ccaaatttaaaggtggatggctctc

SEQ ID NO: 2150759 - DNA, 25 bp, Homo sapien
tccccttgcggattaggctctttaa

SEQ ID NO: 2150760 - DNA, 25 bp, Homo sapien
cttttgtcttgtcgaagtagtttag

SEQ ID NO: 2150761 - DNA, 25 bp, Homo sapien
ccccggctgctgattccactaatga

SEQ ID NO: 2150762 - DNA, 25 bp, Homo sapien
accaccagctagcaaagaatttcgg

SEQ ID NO: 2150763 - DNA, 25 bp, Homo sapien
cacacatcctctcttcggagtgaca

SEQ ID NO: 2150764 - DNA, 25 bp, Homo sapien
gaatttcggtaagacatcagtggaa

SEQ ID NO: 2150765 - DNA, 25 bp, Homo sapien
aaactaacagtttgctactcctggg

SEQ ID NO: 2150766 - DNA, 25 bp, Homo sapien
cgactgaaccctattaatctgctga

SEQ ID NO: 2150767 - DNA, 25 bp, Homo sapien
aatctgctgatatttgacctacaaa

SEQ ID NO: 2150768 - DNA, 25 bp, Homo sapien
agacatcgcacccagtcgactgaac

SEQ ID NO: 2150769 - DNA, 25 bp, Homo sapien
tatcctcaggccgtaatcttttggg

SEQ ID NO: 2150770 - DNA, 25 bp, Homo sapien
tcagtctgcattggataaacactca

SEQ ID NO: 2150771 - DNA, 25 bp, Homo sapien
ttttgggctctctcataatagtgga

SEQ ID NO: 2150772 - DNA, 25 bp, Homo sapien
tgttctctgcttaaccacatactgt

SEQ ID NO: 2150773 - DNA, 25 bp, Homo sapien
agctaacatccatgttacctgcgtg

SEQ ID NO: 2150774 - DNA, 25 bp, Homo sapien
atggcatgctgaagattagttcgca

SEQ ID NO: 2150775 - DNA, 25 bp, Homo sapien
cctgctgttgccttgcttcctcttg

SEQ ID NO: 2150776 - DNA, 25 bp, Homo sapien
catgctgaagattagttcgcagttt

SEQ ID NO: 2150777 - DNA, 25 bp, Homo sapien
tatgggagcatagatgaccaaagct

SEQ ID NO: 2150778 - DNA, 25 bp, Homo sapien
ttttacgtgccaagcactgataggc

SEQ ID NO: 2150779 - DNA, 25 bp, Homo sapien
tgaaacatcttgcatgccatgagct

SEQ ID NO: 2150780 - DNA, 25 bp, Homo sapien
gaaatgatactaaaacgtggcaggg

SEQ ID NO: 2150781 - DNA, 25 bp, Homo sapien
tctggaatatatggaccggcgacta

SEQ ID NO: 2150782 - DNA, 25 bp, Homo sapien
caagaaatcagttgtaggatccagc

SEQ ID NO: 2150783 - DNA, 25 bp, Homo sapien
gaaaatgctttagagtcccatgcaa

SEQ ID NO: 2150784 - DNA, 25 bp, Homo sapien
taggatcttaggaactggtgtaatg

SEQ ID NO: 2150785 - DNA, 25 bp, Homo sapien
taatatctaggcagcagtatgtggc

SEQ ID NO: 2150786 - DNA, 25 bp, Homo sapien
aatgtcgtgactattaatatctagg

SEQ ID NO: 2150787 - DNA, 25 bp, Homo sapien
caagatctgaactaatgtcgtgact

SEQ ID NO: 2150788 - DNA, 25 bp, Homo sapien
aagtcaagatctgaactaatgtcgt

SEQ ID NO: 2150789 - DNA, 25 bp, Homo sapien
ttccattaggcttgtgccacgccga

SEQ ID NO: 2150790 - DNA, 25 bp, Homo sapien
tctatatccatggtgtcaaaatcca

SEQ ID NO: 2150791 - DNA, 25 bp, Homo sapien
tccattccctcattaagatcctcaa

SEQ ID NO: 2150792 - DNA, 25 bp, Homo sapien
tctgaggacatcataacatcttcca

SEQ ID NO: 2150793 - DNA, 25 bp, Homo sapien
gattcatccataattgaagctggat

SEQ ID NO: 2150794 - DNA, 25 bp, Homo sapien
gctggatcaaagaaatcaggcttca

SEQ ID NO: 2150795 - DNA, 25 bp, Homo sapien
tcaaagaaatcaggcttcagttctg

SEQ ID NO: 2150796 - DNA, 25 bp, Homo sapien
taattgaagctggatcaaagaaatc

SEQ ID NO: 2150797 - DNA, 25 bp, Homo sapien
accgcaggtatgcatcttcatgccc

SEQ ID NO: 2150798 - DNA, 25 bp, Homo sapien
gaccgcaggtatgcatcttcatgcc

SEQ ID NO: 2150799 - DNA, 25 bp, Homo sapien
tggccaaagtgaatggaacagaact

SEQ ID NO: 2150800 - DNA, 25 bp, Homo sapien
tgatgctttctatatactccaactg

SEQ ID NO: 2150801 - DNA, 25 bp, Homo sapien
tctggcacaggttccttggaaaggg

SEQ ID NO: 2150802 - DNA, 25 bp, Homo sapien
tatcaaagccagatgtaatgagctg

SEQ ID NO: 2150803 - DNA, 25 bp, Homo sapien
gagaaaatctcgttaaaagtcattc

SEQ ID NO: 2150804 - DNA, 25 bp, Homo sapien
agtaggaaccttggattaattatgc

SEQ ID NO: 2150805 - DNA, 25 bp, Homo sapien
catcaggactaatcaagatgctact

SEQ ID NO: 2150806 - DNA, 25 bp, Homo sapien
cactaatgtctagataataccctaa

SEQ ID NO: 2150807 - DNA, 25 bp, Homo sapien
taagcatgtttgagactggttacct

SEQ ID NO: 2150808 - DNA, 25 bp, Homo sapien
aaggacaagcaaactttcagggttg

SEQ ID NO: 2150809 - DNA, 25 bp, Homo sapien
gagaattcatatctgtaccaaatgc

SEQ ID NO: 2150810 - DNA, 25 bp, Homo sapien
tcaatgcacttgatcttggtaagca

SEQ ID NO: 2150811 - DNA, 25 bp, Homo sapien
tatacagtcctctcagcagttctag

SEQ ID NO: 2150812 - DNA, 25 bp, Homo sapien
gctgcctaagcctcgcaaaatgagt

SEQ ID NO: 2150813 - DNA, 25 bp, Homo sapien
tgttttaaacgatgtctagctgcct

SEQ ID NO: 2150814 - DNA, 25 bp, Homo sapien
caagaactgagagacgactgacaat

SEQ ID NO: 2150815 - DNA, 25 bp, Homo sapien
aaatataaactgatggtattctcta

SEQ ID NO: 2150816 - DNA, 25 bp, Homo sapien
taaaagatgtgataatagatataaa

SEQ ID NO: 2150817 - DNA, 25 bp, Homo sapien
taaactgatggtattctctataaat

SEQ ID NO: 2150818 - DNA, 25 bp, Homo sapien
ctgatggtattctctataaattatt

SEQ ID NO: 2150819 - DNA, 25 bp, Homo sapien
gaggcaataattaatagcttaccaa

SEQ ID NO: 2150820 - DNA, 25 bp, Homo sapien
attgaggcaataattaatagcttac

SEQ ID NO: 2150821 - DNA, 25 bp, Homo sapien
aggctctgaaattgaggcaataatt

SEQ ID NO: 2150822 - DNA, 25 bp, Homo sapien
aggcaataattaatagcttaccaac

SEQ ID NO: 2150823 - DNA, 25 bp, Homo sapien
ctaggccaagctgtaaagggcccat

SEQ ID NO: 2150824 - DNA, 25 bp, Homo sapien
ctatctgtgtgtctaggcaaaacat

SEQ ID NO: 2150825 - DNA, 25 bp, Homo sapien
caaaacatatacattaatccacggt

SEQ ID NO: 2150826 - DNA, 25 bp, Homo sapien
ctctaggccaagctgtaaagggccc

SEQ ID NO: 2150827 - DNA, 25 bp, Homo sapien
tatagagtctgttagcaaaatagtc

SEQ ID NO: 2150828 - DNA, 25 bp, Homo sapien
cagcaggtggtatagagtctgttag

SEQ ID NO: 2150829 - DNA, 25 bp, Homo sapien
gcatgtagtttagtgtgcctttgat

SEQ ID NO: 2150830 - DNA, 25 bp, Homo sapien
aaatctgcatgtagtttagtgtgcc

SEQ ID NO: 2150831 - DNA, 25 bp, Homo sapien
ttagaggcatccaagctagccacat

SEQ ID NO: 2150832 - DNA, 25 bp, Homo sapien
tgctgttgatatgctgtcttagagg

SEQ ID NO: 2150833 - DNA, 25 bp, Homo sapien
tatcttcacatatgtctgtctgctg

SEQ ID NO: 2150834 - DNA, 25 bp, Homo sapien
tgtcttagaggcatccaagctagcc

SEQ ID NO: 2150835 - DNA, 25 bp, Homo sapien
catgctgagtatacccaaggaagtg

SEQ ID NO: 2150836 - DNA, 25 bp, Homo sapien
cactgtttcatgctgagtataccca

SEQ ID NO: 2150837 - DNA, 25 bp, Homo sapien
caaccaccacgtcatctatttgaga

SEQ ID NO: 2150838 - DNA, 25 bp, Homo sapien
tacccaaggaagtgatcaaccacca

SEQ ID NO: 2150839 - DNA, 25 bp, Homo sapien
aatgagttctgagtggcaaaagatt

SEQ ID NO: 2150840 - DNA, 25 bp, Homo sapien
atgagttctgagtggcaaaagatta

SEQ ID NO: 2150841 - DNA, 25 bp, Homo sapien
tgagttctgagtggcaaaagattat

SEQ ID NO: 2150842 - DNA, 25 bp, Homo sapien
gccaatgagaccatgttttgctgac

SEQ ID NO: 2150843 - DNA, 25 bp, Homo sapien
caatgagaccatgttttgctgacat

SEQ ID NO: 2150844 - DNA, 25 bp, Homo sapien
ccaatgagaccatgttttgctgaca

SEQ ID NO: 2150845 - DNA, 25 bp, Homo sapien
agccaatgagaccatgttttgctga

SEQ ID NO: 2150846 - DNA, 25 bp, Homo sapien
gcattcaagttgaattgcgcatgaa

SEQ ID NO: 2150847 - DNA, 25 bp, Homo sapien
ttctaaagccatgtttgtcaaaagc

SEQ ID NO: 2150848 - DNA, 25 bp, Homo sapien
tcctttgttcataatggtggcattc

SEQ ID NO: 2150849 - DNA, 25 bp, Homo sapien
gaattgcgcatgaaattgtcttgct

SEQ ID NO: 2150850 - DNA, 25 bp, Homo sapien
tgcctaaattgtcggacaaactttc

SEQ ID NO: 2150851 - DNA, 25 bp, Homo sapien
aaattgtcggacaaactttcttgat

SEQ ID NO: 2150852 - DNA, 25 bp, Homo sapien
cctgcctaaattgtcggacaaactt

SEQ ID NO: 2150853 - DNA, 25 bp, Homo sapien
ctaaattgtcggacaaactttcttg

SEQ ID NO: 2150854 - DNA, 25 bp, Homo sapien
gccccaccagtagagaacattagat

SEQ ID NO: 2150855 - DNA, 25 bp, Homo sapien
actgccacggaattcttctgcatga

SEQ ID NO: 2150856 - DNA, 25 bp, Homo sapien
caggtaactttaacccactgccacg

SEQ ID NO: 2150857 - DNA, 25 bp, Homo sapien
ggtagtgtagaagccaactccagcc

SEQ ID NO: 2150858 - DNA, 25 bp, Homo sapien
ggcactattaaatcccctgaaaatg

SEQ ID NO: 2150859 - DNA, 25 bp, Homo sapien
agtacacaggtaccacacgcagcat

SEQ ID NO: 2150860 - DNA, 25 bp, Homo sapien
tccaaaaccaaatgccacatcctgg

SEQ ID NO: 2150861 - DNA, 25 bp, Homo sapien
actggcagctcaattccgatacaaa

SEQ ID NO: 2150862 - DNA, 25 bp, Homo sapien
aaaactgataccactgatgaaaatg

SEQ ID NO: 2150863 - DNA, 25 bp, Homo sapien
gataccactgatgaaaatgggatga

SEQ ID NO: 2150864 - DNA, 25 bp, Homo sapien
cagacttcactgatgaagagaaaac

SEQ ID NO: 2150865 - DNA, 25 bp, Homo sapien
tcagacttcactgatgaagagaaaa

SEQ ID NO: 2150866 - DNA, 25 bp, Homo sapien
tatagataccagagcatatgtccct

SEQ ID NO: 2150867 - DNA, 25 bp, Homo sapien
tatgcttctactgtgctcgcaatgc

SEQ ID NO: 2150868 - DNA, 25 bp, Homo sapien
tctctgctagactgaagcaggcagg

SEQ ID NO: 2150869 - DNA, 25 bp, Homo sapien
gtggccacattttgcagccagctga

SEQ ID NO: 2150870 - DNA, 25 bp, Homo sapien
caaacctgacctctccaccaaacat

SEQ ID NO: 2150871 - DNA, 25 bp, Homo sapien
accttccatggggtggtaacgtgca

SEQ ID NO: 2150872 - DNA, 25 bp, Homo sapien
ttcttcaccaccagcagcaagtttt

SEQ ID NO: 2150873 - DNA, 25 bp, Homo sapien
ttcttcttcaccaccagcagcaagt

SEQ ID NO: 2150874 - DNA, 25 bp, Homo sapien
tcttcttcttcaccaccagcagcaa

SEQ ID NO: 2150875 - DNA, 25 bp, Homo sapien
tcatcttcttcttcaccaccagcag

SEQ ID NO: 2150876 - DNA, 25 bp, Homo sapien
ttccattctggttgagacttttcca

SEQ ID NO: 2150877 - DNA, 25 bp, Homo sapien
gctgccgtccatgaggacttcattg

SEQ ID NO: 2150878 - DNA, 25 bp, Homo sapien
tgggccgctgccgtccatgaggact

SEQ ID NO: 2150879 - DNA, 25 bp, Homo sapien
aggccacgtaaaaggctgggccgct

SEQ ID NO: 2150880 - DNA, 25 bp, Homo sapien
tcattgtggcggaagccgctggcat

SEQ ID NO: 2150881 - DNA, 25 bp, Homo sapien
gccacaatggcctgaaggctgtcct

SEQ ID NO: 2150882 - DNA, 25 bp, Homo sapien
tcggccacaatggcctgaaggctgt

SEQ ID NO: 2150883 - DNA, 25 bp, Homo sapien
gagtcggccacaatggcctgaaggc

SEQ ID NO: 2150884 - DNA, 25 bp, Homo sapien
ctgagagtcggccacaatggcctga

SEQ ID NO: 2150885 - DNA, 25 bp, Homo sapien
ggtacaggccctcttgatggcgcgc

SEQ ID NO: 2150886 - DNA, 25 bp, Homo sapien
ctcgtggccactcgcacgctcaaag

SEQ ID NO: 2150887 - DNA, 25 bp, Homo sapien
cacgctcaaagccaaagcgctccag

SEQ ID NO: 2150888 - DNA, 25 bp, Homo sapien
aggccctcttgatggcgcgcggcac

SEQ ID NO: 2150889 - DNA, 25 bp, Homo sapien
agcccaggaggtcgcctggcgctcc

SEQ ID NO: 2150890 - DNA, 25 bp, Homo sapien
gctgcagctgggacgttagagccca

SEQ ID NO: 2150891 - DNA, 25 bp, Homo sapien
gcgctcctccgcatgcctttgcagc

SEQ ID NO: 2150892 - DNA, 25 bp, Homo sapien
gcctggcgctcctccgcatgccttt

SEQ ID NO: 2150893 - DNA, 25 bp, Homo sapien
cgaggtgcagctgtgttgccgccac

SEQ ID NO: 2150894 - DNA, 25 bp, Homo sapien
cagcctgcgcgaggtgcagctgtgt

SEQ ID NO: 2150895 - DNA, 25 bp, Homo sapien
cctgcgcgaggtgcagctgtgttgc

SEQ ID NO: 2150896 - DNA, 25 bp, Homo sapien
ctgcagggcagcctgcgcgaggtgc

SEQ ID NO: 2150897 - DNA, 25 bp, Homo sapien
gactctctgacagcgggttgtggca

SEQ ID NO: 2150898 - DNA, 25 bp, Homo sapien
atttgtggctcctgcgaaacaccag

SEQ ID NO: 2150899 - DNA, 25 bp, Homo sapien
gcattagcatgtgtccccatggcca

SEQ ID NO: 2150900 - DNA, 25 bp, Homo sapien
gaaacctctcgatctggagcagcct

SEQ ID NO: 2150901 - DNA, 25 bp, Homo sapien
ttttggtttcttggccttctgcctc

SEQ ID NO: 2150902 - DNA, 25 bp, Homo sapien
tctgaggttgccatttctttgggct

SEQ ID NO: 2150903 - DNA, 25 bp, Homo sapien
tttggtttcttggccttctgcctct

SEQ ID NO: 2150904 - DNA, 25 bp, Homo sapien
ttggtttcttggccttctgcctctg

SEQ ID NO: 2150905 - DNA, 25 bp, Homo sapien
caggccgtacgccatgaaaaattaa

SEQ ID NO: 2150906 - DNA, 25 bp, Homo sapien
cctccactctcaaatggcacacagg

SEQ ID NO: 2150907 - DNA, 25 bp, Homo sapien
ctttcttgcatttatagcaggccgt

SEQ ID NO: 2150908 - DNA, 25 bp, Homo sapien
gctgggatcccgagactttattcac

SEQ ID NO: 2150909 - DNA, 25 bp, Homo sapien
ctgctgcagccagtaagtctgcagt

SEQ ID NO: 2150910 - DNA, 25 bp, Homo sapien
ccagtaagtctgcagtcagtctcac

SEQ ID NO: 2150911 - DNA, 25 bp, Homo sapien
tggaagatcttctaatggaacaggt

SEQ ID NO: 2150912 - DNA, 25 bp, Homo sapien
ttggtggggctgagatacaaaaaca

SEQ ID NO: 2150913 - DNA, 25 bp, Homo sapien
gaagcaccccaacaacaggatgttg

SEQ ID NO: 2150914 - DNA, 25 bp, Homo sapien
caacacagggttcatacagagaggg

SEQ ID NO: 2150915 - DNA, 25 bp, Homo sapien
aactgtgcaagggagatgccgctgc

SEQ ID NO: 2150916 - DNA, 25 bp, Homo sapien
ggttcgatcgagcttgccaagggct

SEQ ID NO: 2150917 - DNA, 25 bp, Homo sapien
gattttgccatgatacacagccact

SEQ ID NO: 2150918 - DNA, 25 bp, Homo sapien
gctgattttgccatgatacacagcc

SEQ ID NO: 2150919 - DNA, 25 bp, Homo sapien
ggcaagcaggagcttctcgccggtt

SEQ ID NO: 2150920 - DNA, 25 bp, Homo sapien
atccagcccagtggcaagcaggagc

SEQ ID NO: 2150921 - DNA, 25 bp, Homo sapien
ggagcgaaggtaaactgtggaccac

SEQ ID NO: 2150922 - DNA, 25 bp, Homo sapien
atttcaccacccgaaatggcattct

SEQ ID NO: 2150923 - DNA, 25 bp, Homo sapien
tcccggagcgaaggtaaactgtgga

SEQ ID NO: 2150924 - DNA, 25 bp, Homo sapien
tcaccacccgaaatggcattctctg

SEQ ID NO: 2150925 - DNA, 25 bp, Homo sapien
cctggtgtgaatggtacataaaact

SEQ ID NO: 2150926 - DNA, 25 bp, Homo sapien
gaacaacctggtgtgaatggtacat

SEQ ID NO: 2150927 - DNA, 25 bp, Homo sapien
tctgaacaacctggtgtgaatggta

SEQ ID NO: 2150928 - DNA, 25 bp, Homo sapien
caacctggtgtgaatggtacataaa

SEQ ID NO: 2150929 - DNA, 25 bp, Homo sapien
cacctagccaggacatgcactgaac

SEQ ID NO: 2150930 - DNA, 25 bp, Homo sapien
cagagtgtcatgcttgacttgatga

SEQ ID NO: 2150931 - DNA, 25 bp, Homo sapien
tgtcatgcttgacttgatgatcaca

SEQ ID NO: 2150932 - DNA, 25 bp, Homo sapien
caatgtgtttacaagcagagtgtca

SEQ ID NO: 2150933 - DNA, 25 bp, Homo sapien
tgggacactcggtatgtataaatgt

SEQ ID NO: 2150934 - DNA, 25 bp, Homo sapien
ctgtctgggacactcggtatgtata

SEQ ID NO: 2150935 - DNA, 25 bp, Homo sapien
ctcagcactccaagaacctgtttct

SEQ ID NO: 2150936 - DNA, 25 bp, Homo sapien
gtatgtataaatgtaaccgtgatac

SEQ ID NO: 2150937 - DNA, 25 bp, Homo sapien
tcaaacctctaagggtatacaggcc

SEQ ID NO: 2150938 - DNA, 25 bp, Homo sapien
cagtgcacggctagttcagtcctca

SEQ ID NO: 2150939 - DNA, 25 bp, Homo sapien
tatgagccaagcttcaggcatcagc

SEQ ID NO: 2150940 - DNA, 25 bp, Homo sapien
tccctgcaagaggagctaatgagct

SEQ ID NO: 2150941 - DNA, 25 bp, Homo sapien
tatcttttatgtaccccaggtgctg

SEQ ID NO: 2150942 - DNA, 25 bp, Homo sapien
atcttttatgtaccccaggtgctgt

SEQ ID NO: 2150943 - DNA, 25 bp, Homo sapien
atatcttttatgtaccccaggtgct

SEQ ID NO: 2150944 - DNA, 25 bp, Homo sapien
atgccttgatctggcttctgaaatg

SEQ ID NO: 2150945 - DNA, 25 bp, Homo sapien
tacaatgccttgatctggcttctga

SEQ ID NO: 2150946 - DNA, 25 bp, Homo sapien
ttacaatgccttgatctggcttctg

SEQ ID NO: 2150947 - DNA, 25 bp, Homo sapien
caatgccttgatctggcttctgaaa

SEQ ID NO: 2150948 - DNA, 25 bp, Homo sapien
tgtacttctagctgaggacttcttc

SEQ ID NO: 2150949 - DNA, 25 bp, Homo sapien
ttgtgtacttctagctgaggacttc

SEQ ID NO: 2150950 - DNA, 25 bp, Homo sapien
tgtgtacttctagctgaggacttct

SEQ ID NO: 2150951 - DNA, 25 bp, Homo sapien
cttgtgtacttctagctgaggactt

SEQ ID NO: 2150952 - DNA, 25 bp, Homo sapien
ttcaggcagacatcaggatcttctc

SEQ ID NO: 2150953 - DNA, 25 bp, Homo sapien
tcatggggctttcaggcagacatca

SEQ ID NO: 2150954 - DNA, 25 bp, Homo sapien
ggctttcaggcagacatcaggatct

SEQ ID NO: 2150955 - DNA, 25 bp, Homo sapien
gcagacatcaggatcttctcttatc

SEQ ID NO: 2150956 - DNA, 25 bp, Homo sapien
cattacaggactacaatggctttag

SEQ ID NO: 2150957 - DNA, 25 bp, Homo sapien
aatgcatttgtagctcaccgaactg

SEQ ID NO: 2150958 - DNA, 25 bp, Homo sapien
tcagctttgacgacatgctagatgc

SEQ ID NO: 2150959 - DNA, 25 bp, Homo sapien
aaagctcctcactatgtacaaaagt

SEQ ID NO: 2150960 - DNA, 25 bp, Homo sapien
tcatatggcccatggaccagagtat

SEQ ID NO: 2150961 - DNA, 25 bp, Homo sapien
aagaccagatctacctacacacggg

SEQ ID NO: 2150962 - DNA, 25 bp, Homo sapien
gttttctcgtccaacaagacagtga

SEQ ID NO: 2150963 - DNA, 25 bp, Homo sapien
tctgtgagccctgtagcaaagtgac

SEQ ID NO: 2150964 - DNA, 25 bp, Homo sapien
aattgtgttataatggtctgagcca

SEQ ID NO: 2150965 - DNA, 25 bp, Homo sapien
ctctggctgcagttaaatggtcttt

SEQ ID NO: 2150966 - DNA, 25 bp, Homo sapien
gaaaagtgactggatactgtacagg

SEQ ID NO: 2150967 - DNA, 25 bp, Homo sapien
tctgtataacaacaggtagaggttc

SEQ ID NO: 2150968 - DNA, 25 bp, Homo sapien
aatattcactttatgagacagagcg

SEQ ID NO: 2150969 - DNA, 25 bp, Homo sapien
cactttcaatttgccgagccatgca

SEQ ID NO: 2150970 - DNA, 25 bp, Homo sapien
tttgcgtcaccaaagactgcctgtt

SEQ ID NO: 2150971 - DNA, 25 bp, Homo sapien
caatatccagaaagaacccaaggtt

SEQ ID NO: 2150972 - DNA, 25 bp, Homo sapien
tatgcagaactgaactttaggtggc

SEQ ID NO: 2150973 - DNA, 25 bp, Homo sapien
tcttgtagctatagagccccacagc

SEQ ID NO: 2150974 - DNA, 25 bp, Homo sapien
aatttgagcaactacccaggctgag

SEQ ID NO: 2150975 - DNA, 25 bp, Homo sapien
tctcccctggatggaagaccaaaca

SEQ ID NO: 2150976 - DNA, 25 bp, Homo sapien
tctgtatgttttgatccagggccat

SEQ ID NO: 2150977 - DNA, 25 bp, Homo sapien
caaagttgtaggaattacccgctga

SEQ ID NO: 2150978 - DNA, 25 bp, Homo sapien
cttatccactttgagcaatctttcc

SEQ ID NO: 2150979 - DNA, 25 bp, Homo sapien
gatgtgtacatctgcctgttgttct

SEQ ID NO: 2150980 - DNA, 25 bp, Homo sapien
aggcaactgtcatttcctgatggca

SEQ ID NO: 2150981 - DNA, 25 bp, Homo sapien
tgtttcttcgacactcagtctggaa

SEQ ID NO: 2150982 - DNA, 25 bp, Homo sapien
cctgaagggattcgttggagcatat

SEQ ID NO: 2150983 - DNA, 25 bp, Homo sapien
ggcttgtatctctgcaccaaaggat

SEQ ID NO: 2150984 - DNA, 25 bp, Homo sapien
actctagagtcagcgagggccatca

SEQ ID NO: 2150985 - DNA, 25 bp, Homo sapien
caggtgccaggcatcgatcatttcc

SEQ ID NO: 2150986 - DNA, 25 bp, Homo sapien
tcctggtcagcaaggtagcaattca

SEQ ID NO: 2150987 - DNA, 25 bp, Homo sapien
gaacaggcgtgttcggatcatcgca

SEQ ID NO: 2150988 - DNA, 25 bp, Homo sapien
ccatagttgtgcaggaaggaaggta

SEQ ID NO: 2150989 - DNA, 25 bp, Homo sapien
tccatagttgtgcaggaaggaaggt

SEQ ID NO: 2150990 - DNA, 25 bp, Homo sapien
atccatagttgtgcaggaaggaagg

SEQ ID NO: 2150991 - DNA, 25 bp, Homo sapien
catccatagttgtgcaggaaggaag

SEQ ID NO: 2150992 - DNA, 25 bp, Homo sapien
tgtcagatgggtctaacacgggtag

SEQ ID NO: 2150993 - DNA, 25 bp, Homo sapien
cactttgaggtgtttgtctagagca

SEQ ID NO: 2150994 - DNA, 25 bp, Homo sapien
taggagatacacaagcaagatggac

SEQ ID NO: 2150995 - DNA, 25 bp, Homo sapien
ggaaatcctgttgacctactgccca

SEQ ID NO: 2150996 - DNA, 25 bp, Homo sapien
ctcacttcttatccgggtcatttct

SEQ ID NO: 2150997 - DNA, 25 bp, Homo sapien
cttcttatccgggtcatttctattt

SEQ ID NO: 2150998 - DNA, 25 bp, Homo sapien
caacctcacttcttatccgggtcat

SEQ ID NO: 2150999 - DNA, 25 bp, Homo sapien
cctcacttcttatccgggtcatttc

SEQ ID NO: 2151000 - DNA, 25 bp, Homo sapien
tggatcctacagtttagtcagagag

SEQ ID NO: 2151001 - DNA, 25 bp, Homo sapien
tagcttctggcttcacagttcatac

SEQ ID NO: 2151002 - DNA, 25 bp, Homo sapien
gactgtacaatagggacctaacttg

SEQ ID NO: 2151003 - DNA, 25 bp, Homo sapien
gatgtggtccttgcacaaatggatc

SEQ ID NO: 2151004 - DNA, 25 bp, Homo sapien
cataactgttgttcgggaaagaggc

SEQ ID NO: 2151005 - DNA, 25 bp, Homo sapien
taacgggtttaatctcattccactc

SEQ ID NO: 2151006 - DNA, 25 bp, Homo sapien
gactattacacagcattctaacggg

SEQ ID NO: 2151007 - DNA, 25 bp, Homo sapien
ccatgggagatggtctcatcataac

SEQ ID NO: 2151008 - DNA, 25 bp, Homo sapien
cctttgtgtgaataaagctgagctc

SEQ ID NO: 2151009 - DNA, 25 bp, Homo sapien
gctgagctccttagcaattttagag

SEQ ID NO: 2151010 - DNA, 25 bp, Homo sapien
tttgtgtgaataaagctgagctcct

SEQ ID NO: 2151011 - DNA, 25 bp, Homo sapien
tgaataaagctgagctccttagcaa

SEQ ID NO: 2151012 - DNA, 25 bp, Homo sapien
tggtgaaattgcttcccacgggagt

SEQ ID NO: 2151013 - DNA, 25 bp, Homo sapien
caccatctgggtaatgtacttcgta

SEQ ID NO: 2151014 - DNA, 25 bp, Homo sapien
ccacgggagttagttgaaagcctga

SEQ ID NO: 2151015 - DNA, 25 bp, Homo sapien
catcatggccactgaagtatcggtc

SEQ ID NO: 2151016 - DNA, 25 bp, Homo sapien
ggcccagtgaataaagcatcagata

SEQ ID NO: 2151017 - DNA, 25 bp, Homo sapien
gcagcttggcccagtgaataaagca

SEQ ID NO: 2151018 - DNA, 25 bp, Homo sapien
aagccagttttgcttgcagcttggc

SEQ ID NO: 2151019 - DNA, 25 bp, Homo sapien
tgtgagggaattatttgaaagccag

SEQ ID NO: 2151020 - DNA, 25 bp, Homo sapien
taaatggaatgctatttgcacctct

SEQ ID NO: 2151021 - DNA, 25 bp, Homo sapien
atgagaatgatgattggaatgatat

SEQ ID NO: 2151022 - DNA, 25 bp, Homo sapien
gacagcatgagcgtgagtatgtgtt

SEQ ID NO: 2151023 - DNA, 25 bp, Homo sapien
catgagcgtgagtatgtgtttgatt

SEQ ID NO: 2151024 - DNA, 25 bp, Homo sapien
gcatgagcgtgagtatgtgtttgat

SEQ ID NO: 2151025 - DNA, 25 bp, Homo sapien
cagcatgagcgtgagtatgtgtttg

SEQ ID NO: 2151026 - DNA, 25 bp, Homo sapien
aaattgaaccagagatacaaagagg

SEQ ID NO: 2151027 - DNA, 25 bp, Homo sapien
gatttacagccaaattgaaccagag

SEQ ID NO: 2151028 - DNA, 25 bp, Homo sapien
cagccaaattgaaccagagatacaa

SEQ ID NO: 2151029 - DNA, 25 bp, Homo sapien
ttacagccaaattgaaccagagata

SEQ ID NO: 2151030 - DNA, 25 bp, Homo sapien
ttaaaaatatataacttgcttcagg

SEQ ID NO: 2151031 - DNA, 25 bp, Homo sapien
catgaaatatgatgcacaagtaaaa

SEQ ID NO: 2151032 - DNA, 25 bp, Homo sapien
gaaatatgatgcacaagtaaaagaa

SEQ ID NO: 2151033 - DNA, 25 bp, Homo sapien
aaaatatataacttgcttcaggaat

SEQ ID NO: 2151034 - DNA, 25 bp, Homo sapien
ggatcacagcctcttgcaacctgag

SEQ ID NO: 2151035 - DNA, 25 bp, Homo sapien
tcccctgcaatttgcaggatcacag

SEQ ID NO: 2151036 - DNA, 25 bp, Homo sapien
cctgagtcgacccaattatttctga

SEQ ID NO: 2151037 - DNA, 25 bp, Homo sapien
gatcaccaagtatctcacatgttca

SEQ ID NO: 2151038 - DNA, 25 bp, Homo sapien
tgttcactcaactcattatctttct

SEQ ID NO: 2151039 - DNA, 25 bp, Homo sapien
ttgttgttcactcaactcattatct

SEQ ID NO: 2151040 - DNA, 25 bp, Homo sapien
tcaactcattatctttctgggcaga

SEQ ID NO: 2151041 - DNA, 25 bp, Homo sapien
gattttccacgaaatgcttctacag

SEQ ID NO: 2151042 - DNA, 25 bp, Homo sapien
tttccatagcccacccttacatatt

SEQ ID NO: 2151043 - DNA, 25 bp, Homo sapien
tgtcatgagcctttccatagcccac

SEQ ID NO: 2151044 - DNA, 25 bp, Homo sapien
atgctgtcatgagcctttccatagc

SEQ ID NO: 2151045 - DNA, 25 bp, Homo sapien
catagcccacccttacatattttaa

SEQ ID NO: 2151046 - DNA, 25 bp, Homo sapien
gaaagtacatttaaggcgttcatca

SEQ ID NO: 2151047 - DNA, 25 bp, Homo sapien
catcactgcgggtttgttcatgctt

SEQ ID NO: 2151048 - DNA, 25 bp, Homo sapien
caagctcggacaaggcaaaaatgat

SEQ ID NO: 2151049 - DNA, 25 bp, Homo sapien
caaaaatgatactctgaatgacagc

SEQ ID NO: 2151050 - DNA, 25 bp, Homo sapien
tgcttgacacccaccgatgtcgttt

SEQ ID NO: 2151051 - DNA, 25 bp, Homo sapien
tgacacccaccgatgtcgtttttct

SEQ ID NO: 2151052 - DNA, 25 bp, Homo sapien
ttcccaatcaaagaaaagcaggtca

SEQ ID NO: 2151053 - DNA, 25 bp, Homo sapien
cttcccaatcaaagaaaagcaggtc

SEQ ID NO: 2151054 - DNA, 25 bp, Homo sapien
tctggcatggcacattgtacaaatg

SEQ ID NO: 2151055 - DNA, 25 bp, Homo sapien
gatgtttatctcaacctgcctattg

SEQ ID NO: 2151056 - DNA, 25 bp, Homo sapien
tgttcatcatgacaccgtttctgcc

SEQ ID NO: 2151057 - DNA, 25 bp, Homo sapien
tgatagtgccatatcctagtgtgcg

SEQ ID NO: 2151058 - DNA, 25 bp, Homo sapien
tcctgtctcttttgtacttgtggct

SEQ ID NO: 2151059 - DNA, 25 bp, Homo sapien
cctgtctcttttgtacttgtggctg

SEQ ID NO: 2151060 - DNA, 25 bp, Homo sapien
cttcctgtctcttttgtacttgtgg

SEQ ID NO: 2151061 - DNA, 25 bp, Homo sapien
tgtctcttttgtacttgtggctgtc

SEQ ID NO: 2151062 - DNA, 25 bp, Homo sapien
ccagaattgattcagtgagtaaagt

SEQ ID NO: 2151063 - DNA, 25 bp, Homo sapien
ccagttaggtagtgagcaagtgcca

SEQ ID NO: 2151064 - DNA, 25 bp, Homo sapien
gaagagttctataagagcaagctca

SEQ ID NO: 2151065 - DNA, 25 bp, Homo sapien
tcttcaagtcgttattcatgtccag

SEQ ID NO: 2151066 - DNA, 25 bp, Homo sapien
ttatccttgactgacactgaccatg

SEQ ID NO: 2151067 - DNA, 25 bp, Homo sapien
tcagagcatagttcctgtttgtcca

SEQ ID NO: 2151068 - DNA, 25 bp, Homo sapien
ctgaccatgcactaagaatgtggat

SEQ ID NO: 2151069 - DNA, 25 bp, Homo sapien
tccagccgggccaactctgcattat

SEQ ID NO: 2151070 - DNA, 25 bp, Homo sapien
ttctgtgaaacctctcacactctgt

SEQ ID NO: 2151071 - DNA, 25 bp, Homo sapien
tgtgctctggctaccaaacagacat

SEQ ID NO: 2151072 - DNA, 25 bp, Homo sapien
ccaaacagacatgcacagcgtttct

SEQ ID NO: 2151073 - DNA, 25 bp, Homo sapien
cacagcgtttctcggcatggctacc

SEQ ID NO: 2151074 - DNA, 25 bp, Homo sapien
tattcattatgtttccaatagccat

SEQ ID NO: 2151075 - DNA, 25 bp, Homo sapien
ttccctggagccagtaatgaattat

SEQ ID NO: 2151076 - DNA, 25 bp, Homo sapien
taatgaattattagtgggtcagtaa

SEQ ID NO: 2151077 - DNA, 25 bp, Homo sapien
taagattgtaataatccattgcatt

SEQ ID NO: 2151078 - DNA, 25 bp, Homo sapien
ctggctgtggaaatccagatggaga

SEQ ID NO: 2151079 - DNA, 25 bp, Homo sapien
ctgtggaaatccagatggagacagc

SEQ ID NO: 2151080 - DNA, 25 bp, Homo sapien
ggctgtggaaatccagatggagaca

SEQ ID NO: 2151081 - DNA, 25 bp, Homo sapien
tgtggaaatccagatggagacagca

SEQ ID NO: 2151082 - DNA, 25 bp, Homo sapien
ctagagcggccctgaggcacaatag

SEQ ID NO: 2151083 - DNA, 25 bp, Homo sapien
ggagtaggagcccacttcgatagtg

SEQ ID NO: 2151084 - DNA, 25 bp, Homo sapien
tatggccaggatatctagcttgttc

SEQ ID NO: 2151085 - DNA, 25 bp, Homo sapien
gcttgttcggtggttcatacactgt

SEQ ID NO: 2151086 - DNA, 25 bp, Homo sapien
gcttaatggtgtgggtacaagttga

SEQ ID NO: 2151087 - DNA, 25 bp, Homo sapien
ggtacaagttgatttgtcagctcac

SEQ ID NO: 2151088 - DNA, 25 bp, Homo sapien
tgtgggtacaagttgatttgtcagc

SEQ ID NO: 2151089 - DNA, 25 bp, Homo sapien
ttacagttgcttaatggtgtgggta

SEQ ID NO: 2151090 - DNA, 25 bp, Homo sapien
ttaaaagcctccataaaagtctgca

SEQ ID NO: 2151091 - DNA, 25 bp, Homo sapien
aagcctccataaaagtctgcagccc

SEQ ID NO: 2151092 - DNA, 25 bp, Homo sapien
tctgacagcgttgggtttctccatt

SEQ ID NO: 2151093 - DNA, 25 bp, Homo sapien
gggtctgtcctcagtcaagacacct

SEQ ID NO: 2151094 - DNA, 25 bp, Homo sapien
tgttctacttttcctatggcagctg

SEQ ID NO: 2151095 - DNA, 25 bp, Homo sapien
ttctacttttcctatggcagctgtc

SEQ ID NO: 2151096 - DNA, 25 bp, Homo sapien
tttgttctacttttcctatggcagc

SEQ ID NO: 2151097 - DNA, 25 bp, Homo sapien
gtttgttctacttttcctatggcag

SEQ ID NO: 2151098 - DNA, 25 bp, Homo sapien
tatagcacataatagtgtatcttct

SEQ ID NO: 2151099 - DNA, 25 bp, Homo sapien
atcttctttctccagcgtaggccac

SEQ ID NO: 2151100 - DNA, 25 bp, Homo sapien
gccacctcagattcaacacctttaa

SEQ ID NO: 2151101 - DNA, 25 bp, Homo sapien
ccagcgtaggccacagaaaatgttt

SEQ ID NO: 2151102 - DNA, 25 bp, Homo sapien
ttcactgctcattaacaccttcttg

SEQ ID NO: 2151103 - DNA, 25 bp, Homo sapien
ttcactaagaaatccacacatgtag

SEQ ID NO: 2151104 - DNA, 25 bp, Homo sapien
gaatctgtggagagattatgttcac

SEQ ID NO: 2151105 - DNA, 25 bp, Homo sapien
agtttctacccttttcagcaactct

SEQ ID NO: 2151106 - DNA, 25 bp, Homo sapien
cagttttactatttagccaggaatc

SEQ ID NO: 2151107 - DNA, 25 bp, Homo sapien
tcatgtctcgtagcatctgctgtct

SEQ ID NO: 2151108 - DNA, 25 bp, Homo sapien
ctatgttaagtaggagacaatgtcg

SEQ ID NO: 2151109 - DNA, 25 bp, Homo sapien
catctgctgtctatgttaagtagga

SEQ ID NO: 2151110 - DNA, 25 bp, Homo sapien
gagacaatgtcgtctgccaagattc

SEQ ID NO: 2151111 - DNA, 25 bp, Homo sapien
gccattccataaagatttaggccaa

SEQ ID NO: 2151112 - DNA, 25 bp, Homo sapien
cataaagatttaggccaattctgtc

SEQ ID NO: 2151113 - DNA, 25 bp, Homo sapien
aaagatttaggccaattctgtctct

SEQ ID NO: 2151114 - DNA, 25 bp, Homo sapien
ttccataaagatttaggccaattct

SEQ ID NO: 2151115 - DNA, 25 bp, Homo sapien
aagagttggaatgaacagtatctca

SEQ ID NO: 2151116 - DNA, 25 bp, Homo sapien
tgaacagtatctcagggccatagac

SEQ ID NO: 2151117 - DNA, 25 bp, Homo sapien
tttgtcgatacttgacatttggttt

SEQ ID NO: 2151118 - DNA, 25 bp, Homo sapien
gtttgtcgatacttgacatttggtt

SEQ ID NO: 2151119 - DNA, 25 bp, Homo sapien
atctgtgtttgtcgatacttgacat

SEQ ID NO: 2151120 - DNA, 25 bp, Homo sapien
tgtgtttgtcgatacttgacatttg

SEQ ID NO: 2151121 - DNA, 25 bp, Homo sapien
gcctgatgccaaccagagttctcct

SEQ ID NO: 2151122 - DNA, 25 bp, Homo sapien
tgtttgtcccttagcactgtgctgg

SEQ ID NO: 2151123 - DNA, 25 bp, Homo sapien
caggatcagccgcactcttcagagt

SEQ ID NO: 2151124 - DNA, 25 bp, Homo sapien
cctgcctaatgagggggaatctaga

SEQ ID NO: 2151125 - DNA, 25 bp, Homo sapien
attcatagaaaactgcaggtatagc

SEQ ID NO: 2151126 - DNA, 25 bp, Homo sapien
gtgaactggattgggccacgtgtca

SEQ ID NO: 2151127 - DNA, 25 bp, Homo sapien
tggattgggccacgtgtcaactgcc

SEQ ID NO: 2151128 - DNA, 25 bp, Homo sapien
ttgggccacgtgtcaactgccagaa

SEQ ID NO: 2151129 - DNA, 25 bp, Homo sapien
actggattgggccacgtgtcaactg

SEQ ID NO: 2151130 - DNA, 25 bp, Homo sapien
tgttctcgtttctggcaatgcaaga

SEQ ID NO: 2151131 - DNA, 25 bp, Homo sapien
tcgaagagccatttggtactgttcc

SEQ ID NO: 2151132 - DNA, 25 bp, Homo sapien
ggccctgtccatttgagatttccca

SEQ ID NO: 2151133 - DNA, 25 bp, Homo sapien
tgcaagaaacaaccattcgaagagc

SEQ ID NO: 2151134 - DNA, 25 bp, Homo sapien
cttaaatgtatctctcaaacaagag

SEQ ID NO: 2151135 - DNA, 25 bp, Homo sapien
ttttatcatattttggacagactta

SEQ ID NO: 2151136 - DNA, 25 bp, Homo sapien
ggacagacttaaatgtatctctcaa

SEQ ID NO: 2151137 - DNA, 25 bp, Homo sapien
tatcatattttggacagacttaaat

SEQ ID NO: 2151138 - DNA, 25 bp, Homo sapien
caaaggtcatgccaagaaaggcagt

SEQ ID NO: 2151139 - DNA, 25 bp, Homo sapien
cagaaaaatgttaccctcgcctcct

SEQ ID NO: 2151140 - DNA, 25 bp, Homo sapien
tgtctccgttctattctctggtatc

SEQ ID NO: 2151141 - DNA, 25 bp, Homo sapien
tttaagacatcaaaagtcagtgttg

SEQ ID NO: 2151142 - DNA, 25 bp, Homo sapien
tgctgatatattttgtatctgtcca

SEQ ID NO: 2151143 - DNA, 25 bp, Homo sapien
tatgctgatatattttgtatctgtc

SEQ ID NO: 2151144 - DNA, 25 bp, Homo sapien
caccaaacatacttttatgctgata

SEQ ID NO: 2151145 - DNA, 25 bp, Homo sapien
gatatattttgtatctgtccagcat

SEQ ID NO: 2151146 - DNA, 25 bp, Homo sapien
aggacatccatgctcctcggcactg

SEQ ID NO: 2151147 - DNA, 25 bp, Homo sapien
gaggacatccatgctcctcggcact

SEQ ID NO: 2151148 - DNA, 25 bp, Homo sapien
aactctattactcctttcatataac

SEQ ID NO: 2151149 - DNA, 25 bp, Homo sapien
cataagggtctttacaacacacatt

SEQ ID NO: 2151150 - DNA, 25 bp, Homo sapien
tataacacataagggtctttacaac

SEQ ID NO: 2151151 - DNA, 25 bp, Homo sapien
cagctgtcactgtgcttgcattatt

SEQ ID NO: 2151152 - DNA, 25 bp, Homo sapien
atgtctttgatgtcaatcctaattc

SEQ ID NO: 2151153 - DNA, 25 bp, Homo sapien
gaaatgtctttgatgtcaatcctaa

SEQ ID NO: 2151154 - DNA, 25 bp, Homo sapien
gtctttgatgtcaatcctaattctg

SEQ ID NO: 2151155 - DNA, 25 bp, Homo sapien
ctttgatgtcaatcctaattctgct

SEQ ID NO: 2151156 - DNA, 25 bp, Homo sapien
cagaagtgccttcccaaagggccat

SEQ ID NO: 2151157 - DNA, 25 bp, Homo sapien
tggttttatgtctacctgagggcag

SEQ ID NO: 2151158 - DNA, 25 bp, Homo sapien
ctgtgaaatggctttcttggtttta

SEQ ID NO: 2151159 - DNA, 25 bp, Homo sapien
ggttttatgtctacctgagggcagg

SEQ ID NO: 2151160 - DNA, 25 bp, Homo sapien
cttggttttatgtctacctgagggc

SEQ ID NO: 2151161 - DNA, 25 bp, Homo sapien
gctcagcacacacaacagagttcca

SEQ ID NO: 2151162 - DNA, 25 bp, Homo sapien
gggtagccaaccttctaacatgagg

SEQ ID NO: 2151163 - DNA, 25 bp, Homo sapien
ggctgcactgttacatggcagctca

SEQ ID NO: 2151164 - DNA, 25 bp, Homo sapien
tagttagggtcaaatgggtagccaa

SEQ ID NO: 2151165 - DNA, 25 bp, Homo sapien
ggtgctactcagaatcgatagagac

SEQ ID NO: 2151166 - DNA, 25 bp, Homo sapien
ttttgtaacgatctgtgcaatcatg

SEQ ID NO: 2151167 - DNA, 25 bp, Homo sapien
gaatttttggtaacagctgtttgca

SEQ ID NO: 2151168 - DNA, 25 bp, Homo sapien
gaaggcacattatctcaggatcaaa

SEQ ID NO: 2151169 - DNA, 25 bp, Homo sapien
caaattacaaggtccattctctgat

SEQ ID NO: 2151170 - DNA, 25 bp, Homo sapien
agaggagatggaaccgatagcattc

SEQ ID NO: 2151171 - DNA, 25 bp, Homo sapien
atgtgctgtagagggcagaactgcc

SEQ ID NO: 2151172 - DNA, 25 bp, Homo sapien
gatggaaccgatagcattcagttta

SEQ ID NO: 2151173 - DNA, 25 bp, Homo sapien
ctttagctgatacatacatcccttg

SEQ ID NO: 2151174 - DNA, 25 bp, Homo sapien
atttgaggatctttagctgatacat

SEQ ID NO: 2151175 - DNA, 25 bp, Homo sapien
ttctttattgggcaggcaagcagcc

SEQ ID NO: 2151176 - DNA, 25 bp, Homo sapien
tctttattgggcaggcaagcagcca

SEQ ID NO: 2151177 - DNA, 25 bp, Homo sapien
cctgtttgaaactagaatgtgatca

SEQ ID NO: 2151178 - DNA, 25 bp, Homo sapien
gcagttagcttagcaccagatggtg

SEQ ID NO: 2151179 - DNA, 25 bp, Homo sapien
gaacaggtcattagtgaaaactcca

SEQ ID NO: 2151180 - DNA, 25 bp, Homo sapien
gatggtgccctagtgagttctgtat

SEQ ID NO: 2151181 - DNA, 25 bp, Homo sapien
gggctaaaggtatcaggccaaacca

SEQ ID NO: 2151182 - DNA, 25 bp, Homo sapien
agtggttgatgtgagaaatccagcc

SEQ ID NO: 2151183 - DNA, 25 bp, Homo sapien
cttggagagcaaacttggggctaaa

SEQ ID NO: 2151184 - DNA, 25 bp, Homo sapien
gacagaatgatgcatgatcttggag

SEQ ID NO: 2151185 - DNA, 25 bp, Homo sapien
caagcttctcttgagttcctgacag

SEQ ID NO: 2151186 - DNA, 25 bp, Homo sapien
tccttgaaacaagcggtaactgaat

SEQ ID NO: 2151187 - DNA, 25 bp, Homo sapien
gtaactgaatattactaagacagtt

SEQ ID NO: 2151188 - DNA, 25 bp, Homo sapien
tgagaaaactgcagttggggaactc

SEQ ID NO: 2151189 - DNA, 25 bp, Homo sapien
tttcctctcagaatcacagtagcaa

SEQ ID NO: 2151190 - DNA, 25 bp, Homo sapien
tcagaatcacagtagcaaagtaggg

SEQ ID NO: 2151191 - DNA, 25 bp, Homo sapien
gaattgctgtctgtgagtttttgcc

SEQ ID NO: 2151192 - DNA, 25 bp, Homo sapien
gctgtctgtgagtttttgccttacg

SEQ ID NO: 2151193 - DNA, 25 bp, Homo sapien
tttacctgaaggaacatgaactgct

SEQ ID NO: 2151194 - DNA, 25 bp, Homo sapien
cctgaaggaacatgaactgctccat

SEQ ID NO: 2151195 - DNA, 25 bp, Homo sapien
catccttaaaaataccctggggcat

SEQ ID NO: 2151196 - DNA, 25 bp, Homo sapien
tgctccatccttaaaaataccctgg

SEQ ID NO: 2151197 - DNA, 25 bp, Homo sapien
ggctttgtagagcagttgagacact

SEQ ID NO: 2151198 - DNA, 25 bp, Homo sapien
gctttgtagagcagttgagacactg

SEQ ID NO: 2151199 - DNA, 25 bp, Homo sapien
gttgagacactggatcttgaggaag

SEQ ID NO: 2151200 - DNA, 25 bp, Homo sapien
cagttgagacactggatcttgagga

SEQ ID NO: 2151201 - DNA, 25 bp, Homo sapien
tgccatctttaaaaggaatggggtc

SEQ ID NO: 2151202 - DNA, 25 bp, Homo sapien
attgccatctttaaaaggaatgggg

SEQ ID NO: 2151203 - DNA, 25 bp, Homo sapien
catctttaaaaggaatggggtcatt

SEQ ID NO: 2151204 - DNA, 25 bp, Homo sapien
aaaggaatggggtcatttttcagct

SEQ ID NO: 2151205 - DNA, 25 bp, Homo sapien
taaactgtaagtgtggtaactgctt

SEQ ID NO: 2151206 - DNA, 25 bp, Homo sapien
tttttgtccctgagagcctaaactg

SEQ ID NO: 2151207 - DNA, 25 bp, Homo sapien
tctgagaaaatcttggcctccatta

SEQ ID NO: 2151208 - DNA, 25 bp, Homo sapien
tgagaaaatcttggcctccattaag

SEQ ID NO: 2151209 - DNA, 25 bp, Homo sapien
tagatatccatatcaggtccctcca

SEQ ID NO: 2151210 - DNA, 25 bp, Homo sapien
agagagaattcagtcctccttccct

SEQ ID NO: 2151211 - DNA, 25 bp, Homo sapien
ttctgtggaccacttgtgctccctc

SEQ ID NO: 2151212 - DNA, 25 bp, Homo sapien
ctacagcgatttgtgaggtccctga

SEQ ID NO: 2151213 - DNA, 25 bp, Homo sapien
tgaaaccatccaagtgcgtaacctg

SEQ ID NO: 2151214 - DNA, 25 bp, Homo sapien
gatgacttcagactccaatgctttc

SEQ ID NO: 2151215 - DNA, 25 bp, Homo sapien
tctggcacctttcatgagcattgag

SEQ ID NO: 2151216 - DNA, 25 bp, Homo sapien
gactccaatgctttcaatctggcac

SEQ ID NO: 2151217 - DNA, 25 bp, Homo sapien
ggacccctttatctcttgtgaattg

SEQ ID NO: 2151218 - DNA, 25 bp, Homo sapien
gaatgttcttatattcacaaccctc

SEQ ID NO: 2151219 - DNA, 25 bp, Homo sapien
tgtgaattgcacaatgaatgttctt

SEQ ID NO: 2151220 - DNA, 25 bp, Homo sapien
tcatactcctccaggtatactcttc

SEQ ID NO: 2151221 - DNA, 25 bp, Homo sapien
cggcagcttcgggttgagcagatct

SEQ ID NO: 2151222 - DNA, 25 bp, Homo sapien
actcgccgtcggcagcttcgggttg

SEQ ID NO: 2151223 - DNA, 25 bp, Homo sapien
tctgtgtcgccactgggagagtagg

SEQ ID NO: 2151224 - DNA, 25 bp, Homo sapien
gggctggtttgcagctcgtactcgc

SEQ ID NO: 2151225 - DNA, 25 bp, Homo sapien
gagccgtcggtgttgactttaacca

SEQ ID NO: 2151226 - DNA, 25 bp, Homo sapien
ttaaccatgcgctccaatgtgcggg

SEQ ID NO: 2151227 - DNA, 25 bp, Homo sapien
tcatccagagacttggtccccgaga

SEQ ID NO: 2151228 - DNA, 25 bp, Homo sapien
gatagtcattacaacccaggcggtg

SEQ ID NO: 2151229 - DNA, 25 bp, Homo sapien
ggatggcggctcctggctgttagcg

SEQ ID NO: 2151230 - DNA, 25 bp, Homo sapien
ccaaggactacaggcgaacttcgcc

SEQ ID NO: 2151231 - DNA, 25 bp, Homo sapien
tacaggcgaacttcgccccgaggct

SEQ ID NO: 2151232 - DNA, 25 bp, Homo sapien
ttagcggccggttgagtccgctctg

SEQ ID NO: 2151233 - DNA, 25 bp, Homo sapien
tgccagcagccggaggagagcaatg

SEQ ID NO: 2151234 - DNA, 25 bp, Homo sapien
taatgtggatttacagtcgtttccc

SEQ ID NO: 2151235 - DNA, 25 bp, Homo sapien
cggcagctcgaacagtaatgtggat

SEQ ID NO: 2151236 - DNA, 25 bp, Homo sapien
tttcccgcaggagtcggccgagacg

SEQ ID NO: 2151237 - DNA, 25 bp, Homo sapien
cgcgaccagccttagagcgcggcgg

SEQ ID NO: 2151238 - DNA, 25 bp, Homo sapien
tagcggagaaacattttttgcacca

SEQ ID NO: 2151239 - DNA, 25 bp, Homo sapien
gcaggttttttggtctcgagtagcg

SEQ ID NO: 2151240 - DNA, 25 bp, Homo sapien
acattttttgcaccaccgcgaccag

SEQ ID NO: 2151241 - DNA, 25 bp, Homo sapien
tcggacagatgttagccgctggaga

SEQ ID NO: 2151242 - DNA, 25 bp, Homo sapien
tggagagtgcctccatgcgaagcgc

SEQ ID NO: 2151243 - DNA, 25 bp, Homo sapien
taaggcttctgacgcgagtttctgg

SEQ ID NO: 2151244 - DNA, 25 bp, Homo sapien
gagcatgcccagtcggactactaag

SEQ ID NO: 2151245 - DNA, 25 bp, Homo sapien
ttgaaagagtaatgacatttgccct

SEQ ID NO: 2151246 - DNA, 25 bp, Homo sapien
gagtaatgacatttgcccttcttat

SEQ ID NO: 2151247 - DNA, 25 bp, Homo sapien
tgcctttgcttttgaaagagtaatg

SEQ ID NO: 2151248 - DNA, 25 bp, Homo sapien
cctttgcttttgaaagagtaatgac

SEQ ID NO: 2151249 - DNA, 25 bp, Homo sapien
gctgccgccgttcctgaggacttca

SEQ ID NO: 2151250 - DNA, 25 bp, Homo sapien
gatcacatcatcatggcggaacccg

SEQ ID NO: 2151251 - DNA, 25 bp, Homo sapien
ggtacaggccctcttaatggcacgg

SEQ ID NO: 2151252 - DNA, 25 bp, Homo sapien
catcggatagacctgcatggatctc

SEQ ID NO: 2151253 - DNA, 25 bp, Homo sapien
tgttctgcatttaaagtcccggcca

SEQ ID NO: 2151254 - DNA, 25 bp, Homo sapien
cagaagaggttgcatgccctggacc

SEQ ID NO: 2151255 - DNA, 25 bp, Homo sapien
tagaggtgttgagtatggcagtccc

SEQ ID NO: 2151256 - DNA, 25 bp, Homo sapien
caaagaccaggtggatagatccctg

SEQ ID NO: 2151257 - DNA, 25 bp, Homo sapien
aaggagaccacctcctggtgcacca

SEQ ID NO: 2151258 - DNA, 25 bp, Homo sapien
tggtgcaccactggatctttcttca

SEQ ID NO: 2151259 - DNA, 25 bp, Homo sapien
tctttcttcaggctgtgactgttgc

SEQ ID NO: 2151260 - DNA, 25 bp, Homo sapien
tgactgttgctgtcccctaggggga

SEQ ID NO: 2151261 - DNA, 25 bp, Homo sapien
gctcttgctaaacctcagtgaggct

SEQ ID NO: 2151262 - DNA, 25 bp, Homo sapien
ggctcttgctaaacctcagtgaggc

SEQ ID NO: 2151263 - DNA, 25 bp, Homo sapien
tggctcttgctaaacctcagtgagg

SEQ ID NO: 2151264 - DNA, 25 bp, Homo sapien
ccttgttccgtggaaaattcatggc

SEQ ID NO: 2151265 - DNA, 25 bp, Homo sapien
tcatggcattacaccatgggcaggc

SEQ ID NO: 2151266 - DNA, 25 bp, Homo sapien
catttagagcacaccttgttccgtg

SEQ ID NO: 2151267 - DNA, 25 bp, Homo sapien
ggcccaattcactgggctggagcat

SEQ ID NO: 2151268 - DNA, 25 bp, Homo sapien
ccttgcagcagttgccttgggtaag

SEQ ID NO: 2151269 - DNA, 25 bp, Homo sapien
taggcccagaaaatccctgacaaac

SEQ ID NO: 2151270 - DNA, 25 bp, Homo sapien
gattgaaggcagatctaaccaacca

SEQ ID NO: 2151271 - DNA, 25 bp, Homo sapien
taacccaatttatcctcccaagaga

SEQ ID NO: 2151272 - DNA, 25 bp, Homo sapien
cacatgctggcatggccattatttg

SEQ ID NO: 2151273 - DNA, 25 bp, Homo sapien
aatcatgtggaaggtgcctaggtgc

SEQ ID NO: 2151274 - DNA, 25 bp, Homo sapien
aatgtgatcttcattagaatgtatt

SEQ ID NO: 2151275 - DNA, 25 bp, Homo sapien
tctgcactgtgagcagtaaatcatg

SEQ ID NO: 2151276 - DNA, 25 bp, Homo sapien
agtttaactctactccctctggtgg

SEQ ID NO: 2151277 - DNA, 25 bp, Homo sapien
tacacagccctttgttgcgttgcta

SEQ ID NO: 2151278 - DNA, 25 bp, Homo sapien
tgtaaaatgtcagcctgaggctatg

SEQ ID NO: 2151279 - DNA, 25 bp, Homo sapien
tagtctgttaagaagtacacagccc

SEQ ID NO: 2151280 - DNA, 25 bp, Homo sapien
gaccctcaaagatatcacggtgaat

SEQ ID NO: 2151281 - DNA, 25 bp, Homo sapien
ccctcaaagatatcacggtgaatat

SEQ ID NO: 2151282 - DNA, 25 bp, Homo sapien
tgaccctcaaagatatcacggtgaa

SEQ ID NO: 2151283 - DNA, 25 bp, Homo sapien
tcaaagatatcacggtgaatattca

SEQ ID NO: 2151284 - DNA, 25 bp, Homo sapien
caatagacaggttagagctttctga

SEQ ID NO: 2151285 - DNA, 25 bp, Homo sapien
tagacattgtttgtcattgcgcatc

SEQ ID NO: 2151286 - DNA, 25 bp, Homo sapien
ttgtcattgcgcatccttacaatgg

SEQ ID NO: 2151287 - DNA, 25 bp, Homo sapien
tagccccatgaccaccactatatag

SEQ ID NO: 2151288 - DNA, 25 bp, Homo sapien
ttcctttgcatcagttctctgccat

SEQ ID NO: 2151289 - DNA, 25 bp, Homo sapien
agaataattcgggtattcctttgca

SEQ ID NO: 2151290 - DNA, 25 bp, Homo sapien
cccatatgcagcaaataacaagcac

SEQ ID NO: 2151291 - DNA, 25 bp, Homo sapien
gatattctcttatcccatatgcagc

SEQ ID NO: 2151292 - DNA, 25 bp, Homo sapien
gagaaggcagcactagtgtcagcca

SEQ ID NO: 2151293 - DNA, 25 bp, Homo sapien
agaaggcagcactagtgtcagccat

SEQ ID NO: 2151294 - DNA, 25 bp, Homo sapien
acacagtaatcatctggtagctcag

SEQ ID NO: 2151295 - DNA, 25 bp, Homo sapien
tctggtagctcagtaatagttacat

SEQ ID NO: 2151296 - DNA, 25 bp, Homo sapien
agtagacacagtaatcatctggtag

SEQ ID NO: 2151297 - DNA, 25 bp, Homo sapien
gctcagtaatagttacatcccttct

SEQ ID NO: 2151298 - DNA, 25 bp, Homo sapien
taataatccatgacggaggtttcat

SEQ ID NO: 2151299 - DNA, 25 bp, Homo sapien
tggctttaataatccatgacggagg

SEQ ID NO: 2151300 - DNA, 25 bp, Homo sapien
gctttaataatccatgacggaggtt

SEQ ID NO: 2151301 - DNA, 25 bp, Homo sapien
cttggctttaataatccatgacgga

SEQ ID NO: 2151302 - DNA, 25 bp, Homo sapien
agtaaaaaggcactgaatatagaag

SEQ ID NO: 2151303 - DNA, 25 bp, Homo sapien
aaaaggcactgaatatagaaggcat

SEQ ID NO: 2151304 - DNA, 25 bp, Homo sapien
taaaaaggcactgaatatagaaggc

SEQ ID NO: 2151305 - DNA, 25 bp, Homo sapien
aaaaaggcactgaatatagaaggca

SEQ ID NO: 2151306 - DNA, 25 bp, Homo sapien
tcagtaaaaacttttactggcaaga

SEQ ID NO: 2151307 - DNA, 25 bp, Homo sapien
tccacaatagcagaaatacactcag

SEQ ID NO: 2151308 - DNA, 25 bp, Homo sapien
atcatcatccacaatagcagaaata

SEQ ID NO: 2151309 - DNA, 25 bp, Homo sapien
catccacaatagcagaaatacactc

SEQ ID NO: 2151310 - DNA, 25 bp, Homo sapien
caggctatcaacctccaaaagttca

SEQ ID NO: 2151311 - DNA, 25 bp, Homo sapien
cataaaaacactaactagcctgtgc

SEQ ID NO: 2151312 - DNA, 25 bp, Homo sapien
tcttattccaacagcagttagatgt

SEQ ID NO: 2151313 - DNA, 25 bp, Homo sapien
cattttgctaaaggtctctgtttcc

SEQ ID NO: 2151314 - DNA, 25 bp, Homo sapien
ctgattgtcgagttgctgcagattc

SEQ ID NO: 2151315 - DNA, 25 bp, Homo sapien
gattgtcgagttgctgcagattcat

SEQ ID NO: 2151316 - DNA, 25 bp, Homo sapien
tgattgtcgagttgctgcagattca

SEQ ID NO: 2151317 - DNA, 25 bp, Homo sapien
tgttgacaaaggagacacgacagag

SEQ ID NO: 2151318 - DNA, 25 bp, Homo sapien
tctgctctagaacacgctctctggt

SEQ ID NO: 2151319 - DNA, 25 bp, Homo sapien
gagagatatccatccaataggttga

SEQ ID NO: 2151320 - DNA, 25 bp, Homo sapien
gagacctggttttgatcagagaagc

SEQ ID NO: 2151321 - DNA, 25 bp, Homo sapien
agtttgcaggccattgcaaatggcc

SEQ ID NO: 2151322 - DNA, 25 bp, Homo sapien
aggccattgcaaatggccatagcca

SEQ ID NO: 2151323 - DNA, 25 bp, Homo sapien
tgcaggccattgcaaatggccatag

SEQ ID NO: 2151324 - DNA, 25 bp, Homo sapien
tttgcaggccattgcaaatggccat

SEQ ID NO: 2151325 - DNA, 25 bp, Homo sapien
gggattgaggttgagttcaacagca

SEQ ID NO: 2151326 - DNA, 25 bp, Homo sapien
tgaggttgagttcaacagcatgaac

SEQ ID NO: 2151327 - DNA, 25 bp, Homo sapien
gattgaggttgagttcaacagcatg

SEQ ID NO: 2151328 - DNA, 25 bp, Homo sapien
ttgagttcaacagcatgaactcccc

SEQ ID NO: 2151329 - DNA, 25 bp, Homo sapien
cactggtggcagaatttaaacattc

SEQ ID NO: 2151330 - DNA, 25 bp, Homo sapien
tatttcggccagaaactctgtagat

SEQ ID NO: 2151331 - DNA, 25 bp, Homo sapien
taaacattcgcttggttgcagattg

SEQ ID NO: 2151332 - DNA, 25 bp, Homo sapien
aactacatggcttaaatatttcggc

SEQ ID NO: 2151333 - DNA, 25 bp, Homo sapien
cagtggaataggtagtctgaagatt

SEQ ID NO: 2151334 - DNA, 25 bp, Homo sapien
agacaggaactgacttgctttataa

SEQ ID NO: 2151335 - DNA, 25 bp, Homo sapien
gaagatttaccaaaccaatagacag

SEQ ID NO: 2151336 - DNA, 25 bp, Homo sapien
cagccataggtccaagatcatcagt

SEQ ID NO: 2151337 - DNA, 25 bp, Homo sapien
gtcaggtgatctagtctcttatgca

SEQ ID NO: 2151338 - DNA, 25 bp, Homo sapien
gatagtatagataacactgttgtct

SEQ ID NO: 2151339 - DNA, 25 bp, Homo sapien
gatacctttgccttgtggcagggag

SEQ ID NO: 2151340 - DNA, 25 bp, Homo sapien
tccacaggtgtatgaagcatctgat

SEQ ID NO: 2151341 - DNA, 25 bp, Homo sapien
ctagcttcattattggggtgatatt

SEQ ID NO: 2151342 - DNA, 25 bp, Homo sapien
agcttcattattggggtgatattgg

SEQ ID NO: 2151343 - DNA, 25 bp, Homo sapien
ttcattattggggtgatattggctt

SEQ ID NO: 2151344 - DNA, 25 bp, Homo sapien
cctagcttcattattggggtgatat

SEQ ID NO: 2151345 - DNA, 25 bp, Homo sapien
aatatgggttagaaaatctcagtgc

SEQ ID NO: 2151346 - DNA, 25 bp, Homo sapien
ccaaatatgggttagaaaatctcag

SEQ ID NO: 2151347 - DNA, 25 bp, Homo sapien
tatgggttagaaaatctcagtgcct

SEQ ID NO: 2151348 - DNA, 25 bp, Homo sapien
atccaaatatgggttagaaaatctc

SEQ ID NO: 2151349 - DNA, 25 bp, Homo sapien
tgcctgaagcttttgaaccagcacc

SEQ ID NO: 2151350 - DNA, 25 bp, Homo sapien
taccctctgtagattgcattaagtg

SEQ ID NO: 2151351 - DNA, 25 bp, Homo sapien
tcctttatcattaccctctgtagat

SEQ ID NO: 2151352 - DNA, 25 bp, Homo sapien
gcattaagtgccagaattcatgtaa

SEQ ID NO: 2151353 - DNA, 25 bp, Homo sapien
ttctaatgttttgtgttgtccctgg

SEQ ID NO: 2151354 - DNA, 25 bp, Homo sapien
ggtgtgaagatctctgtttctaatg

SEQ ID NO: 2151355 - DNA, 25 bp, Homo sapien
agctttttagaggtgtgaagatctc

SEQ ID NO: 2151356 - DNA, 25 bp, Homo sapien
gtgttgtccctggactgatcatgga

SEQ ID NO: 2151357 - DNA, 25 bp, Homo sapien
aaagaagattacatggacggtggtg

SEQ ID NO: 2151358 - DNA, 25 bp, Homo sapien
ctgaaagaagattacatggacggtg

SEQ ID NO: 2151359 - DNA, 25 bp, Homo sapien
gacggtggtgggcagtttgagatct

SEQ ID NO: 2151360 - DNA, 25 bp, Homo sapien
tatcaaagtttatattcggaatcat

SEQ ID NO: 2151361 - DNA, 25 bp, Homo sapien
ctgacccttgttgcctatcaaatca

SEQ ID NO: 2151362 - DNA, 25 bp, Homo sapien
tgttgcctatcaaatcaagctgctt

SEQ ID NO: 2151363 - DNA, 25 bp, Homo sapien
gacccttgttgcctatcaaatcaag

SEQ ID NO: 2151364 - DNA, 25 bp, Homo sapien
ccttgttgcctatcaaatcaagctg

SEQ ID NO: 2151365 - DNA, 25 bp, Homo sapien
cgcgcaccgtgtggaagcagggtga

SEQ ID NO: 2151366 - DNA, 25 bp, Homo sapien
tgcgcgcaccgtgtggaagcagggt

SEQ ID NO: 2151367 - DNA, 25 bp, Homo sapien
gcaccgtgtggaagcagggtgaggc

SEQ ID NO: 2151368 - DNA, 25 bp, Homo sapien
ggtgcgcgcaccgtgtggaagcagg

SEQ ID NO: 2151369 - DNA, 25 bp, Homo sapien
taagacatagttcccatgctcaaaa

SEQ ID NO: 2151370 - DNA, 25 bp, Homo sapien
caacttctgatagggattgagcata

SEQ ID NO: 2151371 - DNA, 25 bp, Homo sapien
gtcctctgcttaaggttttgccaag

SEQ ID NO: 2151372 - DNA, 25 bp, Homo sapien
tagttcagaagtccaagcacatgtt

SEQ ID NO: 2151373 - DNA, 25 bp, Homo sapien
tgttgaagggaaacactttctccca

SEQ ID NO: 2151374 - DNA, 25 bp, Homo sapien
gcctgttgaagggaaacactttctc

SEQ ID NO: 2151375 - DNA, 25 bp, Homo sapien
tgaatccctccaagacgcttctggc

SEQ ID NO: 2151376 - DNA, 25 bp, Homo sapien
tgtgcggcaccaagtgtaatacgct

SEQ ID NO: 2151377 - DNA, 25 bp, Homo sapien
cacagtggctgaacgccaggcaggt

SEQ ID NO: 2151378 - DNA, 25 bp, Homo sapien
aatacgctgtttgtggtggacgtgc

SEQ ID NO: 2151379 - DNA, 25 bp, Homo sapien
tttgccatttagtcactttgcaaag

SEQ ID NO: 2151380 - DNA, 25 bp, Homo sapien
cattttgccatttagtcactttgca

SEQ ID NO: 2151381 - DNA, 25 bp, Homo sapien
ccatttagtcactttgcaaagttct

SEQ ID NO: 2151382 - DNA, 25 bp, Homo sapien
tgccatttagtcactttgcaaagtt

SEQ ID NO: 2151383 - DNA, 25 bp, Homo sapien
cagcatatgcctttagttgtgccat

SEQ ID NO: 2151384 - DNA, 25 bp, Homo sapien
gacagcatatgcctttagttgtgcc

SEQ ID NO: 2151385 - DNA, 25 bp, Homo sapien
cccatctgacagcatatgcctttag

SEQ ID NO: 2151386 - DNA, 25 bp, Homo sapien
tctgacagcatatgcctttagttgt

SEQ ID NO: 2151387 - DNA, 25 bp, Homo sapien
tccttagaacaatgatagaccaaag

SEQ ID NO: 2151388 - DNA, 25 bp, Homo sapien
tagaacaatgatagaccaaagctgg

SEQ ID NO: 2151389 - DNA, 25 bp, Homo sapien
cttttccttagaacaatgatagacc

SEQ ID NO: 2151390 - DNA, 25 bp, Homo sapien
caatgatagaccaaagctggaagca

SEQ ID NO: 2151391 - DNA, 25 bp, Homo sapien
gctttctcaccagtgtagtatgtgg

SEQ ID NO: 2151392 - DNA, 25 bp, Homo sapien
tctcatccagatgaaacggcatcct

SEQ ID NO: 2151393 - DNA, 25 bp, Homo sapien
gcttggaagcttgaccattattctc

SEQ ID NO: 2151394 - DNA, 25 bp, Homo sapien
ttctacattatgaaagcttggaagc

SEQ ID NO: 2151395 - DNA, 25 bp, Homo sapien
tttgcttatgtgccagtttattgtt

SEQ ID NO: 2151396 - DNA, 25 bp, Homo sapien
ctgctgtggatgaaagatcttgatt

SEQ ID NO: 2151397 - DNA, 25 bp, Homo sapien
ctgtggatgaaagatcttgatttga

SEQ ID NO: 2151398 - DNA, 25 bp, Homo sapien
ttgcttatgtgccagtttattgttc

SEQ ID NO: 2151399 - DNA, 25 bp, Homo sapien
aactattttgaatgtcttcccactc

SEQ ID NO: 2151400 - DNA, 25 bp, Homo sapien
taaactattttgaatgtcttcccac

SEQ ID NO: 2151401 - DNA, 25 bp, Homo sapien
tttgaatgtcttcccactctttgac

SEQ ID NO: 2151402 - DNA, 25 bp, Homo sapien
atgtcttcccactctttgaccacat

SEQ ID NO: 2151403 - DNA, 25 bp, Homo sapien
ctcctcctgaggctcgggaatccgg

SEQ ID NO: 2151404 - DNA, 25 bp, Homo sapien
gtggtcaccacgacatggggcagac

SEQ ID NO: 2151405 - DNA, 25 bp, Homo sapien
gggatgaagccccaagtgaccctgt

SEQ ID NO: 2151406 - DNA, 25 bp, Homo sapien
gatggtgcaaatcatggccccagcc

SEQ ID NO: 2151407 - DNA, 25 bp, Homo sapien
ttaataacaatgagagagccattaa

SEQ ID NO: 2151408 - DNA, 25 bp, Homo sapien
tttaataacaatgagagagccatta

SEQ ID NO: 2151409 - DNA, 25 bp, Homo sapien
ccactagagacctcaacagctctga

SEQ ID NO: 2151410 - DNA, 25 bp, Homo sapien
cacactggtgattgatgtctccagc

SEQ ID NO: 2151411 - DNA, 25 bp, Homo sapien
gctggtggccccagatttttgccac

SEQ ID NO: 2151412 - DNA, 25 bp, Homo sapien
aaccagaggaaccactagagacctc

SEQ ID NO: 2151413 - DNA, 25 bp, Homo sapien
gttctggtccttgccgacgtgttca

SEQ ID NO: 2151414 - DNA, 25 bp, Homo sapien
gccctgatccctgtagcaatgcatg

SEQ ID NO: 2151415 - DNA, 25 bp, Homo sapien
tgttcactcatgttgctagcactcc

SEQ ID NO: 2151416 - DNA, 25 bp, Homo sapien
tatgtgcatgtaggcagccagccct

SEQ ID NO: 2151417 - DNA, 25 bp, Homo sapien
cccagcacagccaatgcatgagtgc

SEQ ID NO: 2151418 - DNA, 25 bp, Homo sapien
gacccagcacagccaatgcatgagt

SEQ ID NO: 2151419 - DNA, 25 bp, Homo sapien
acccagcacagccaatgcatgagtg

SEQ ID NO: 2151420 - DNA, 25 bp, Homo sapien
gaacgctgcacgttttgctgccaag

SEQ ID NO: 2151421 - DNA, 25 bp, Homo sapien
gctgccaagggctactggttttacc

SEQ ID NO: 2151422 - DNA, 25 bp, Homo sapien
catcattgcaaatcctagtggcctg

SEQ ID NO: 2151423 - DNA, 25 bp, Homo sapien
taaggaaaccaacagctagcacagc

SEQ ID NO: 2151424 - DNA, 25 bp, Homo sapien
cttgtgaattggaggagtgtcttct

SEQ ID NO: 2151425 - DNA, 25 bp, Homo sapien
gactctgctttatcttttctcccac

SEQ ID NO: 2151426 - DNA, 25 bp, Homo sapien
tgatctgtattccaggtatagaagc

SEQ ID NO: 2151427 - DNA, 25 bp, Homo sapien
ttccaggtatagaagctgactctgc

SEQ ID NO: 2151428 - DNA, 25 bp, Homo sapien
tctgtattccaggtatagaagctga

SEQ ID NO: 2151429 - DNA, 25 bp, Homo sapien
ccggagtagtaagttacaatatggg

SEQ ID NO: 2151430 - DNA, 25 bp, Homo sapien
cggagtagtaagttacaatatggga

SEQ ID NO: 2151431 - DNA, 25 bp, Homo sapien
gggtattccagataggccaagaaag

SEQ ID NO: 2151432 - DNA, 25 bp, Homo sapien
ggtattccagataggccaagaaagt

SEQ ID NO: 2151433 - DNA, 25 bp, Homo sapien
gtattccagataggccaagaaagtg

SEQ ID NO: 2151434 - DNA, 25 bp, Homo sapien
gcggcccggcgatcctaacgaggtc

SEQ ID NO: 2151435 - DNA, 25 bp, Homo sapien
gacctcgttaggatcgccgggccgc

SEQ ID NO: 2151436 - DNA, 25 bp, Homo sapien
aggatagggagcagctaaataggtt

SEQ ID NO: 2151437 - DNA, 25 bp, Homo sapien
gatggtgctaataattaggctgtga

SEQ ID NO: 2151438 - DNA, 25 bp, Homo sapien
gggtcggaggagaaggatagggagc

SEQ ID NO: 2151439 - DNA, 25 bp, Homo sapien
taattaggctgtgagtggttgtgtt

SEQ ID NO: 2151440 - DNA, 25 bp, Homo sapien
acagatgttccatagtcatatccca

SEQ ID NO: 2151441 - DNA, 25 bp, Homo sapien
ctagtacccaacttcaacagatgtt

SEQ ID NO: 2151442 - DNA, 25 bp, Homo sapien
gtacccaacttcaacagatgttcca

SEQ ID NO: 2151443 - DNA, 25 bp, Homo sapien
caacttcaacagatgttccatagtc

SEQ ID NO: 2151444 - DNA, 25 bp, Homo sapien
atgacaagaatgtgcattgtcacca

SEQ ID NO: 2151445 - DNA, 25 bp, Homo sapien
aaatgacaagaatgtgcattgtcac

SEQ ID NO: 2151446 - DNA, 25 bp, Homo sapien
aatgacaagaatgtgcattgtcacc

SEQ ID NO: 2151447 - DNA, 25 bp, Homo sapien
cttgatccctctctggcatcgtcat

SEQ ID NO: 2151448 - DNA, 25 bp, Homo sapien
catccgacagtatcagaaacagcat

SEQ ID NO: 2151449 - DNA, 25 bp, Homo sapien
ctctctggcatcgtcatccgacagt

SEQ ID NO: 2151450 - DNA, 25 bp, Homo sapien
tctggcatcgtcatccgacagtatc

SEQ ID NO: 2151451 - DNA, 25 bp, Homo sapien
caggaaagacatttatcaaagcagg

SEQ ID NO: 2151452 - DNA, 25 bp, Homo sapien
ggaaagacatttatcaaagcaggaa

SEQ ID NO: 2151453 - DNA, 25 bp, Homo sapien
tcaggaaagacatttatcaaagcag

SEQ ID NO: 2151454 - DNA, 25 bp, Homo sapien
aggaaagacatttatcaaagcagga

SEQ ID NO: 2151455 - DNA, 25 bp, Homo sapien
cagacggtcacatccagacactgaa

SEQ ID NO: 2151456 - DNA, 25 bp, Homo sapien
tcagacggtcacatccagacactga

SEQ ID NO: 2151457 - DNA, 25 bp, Homo sapien
agacggtcacatccagacactgaaa

SEQ ID NO: 2151458 - DNA, 25 bp, Homo sapien
tttctggtttacaaggccagagtat

SEQ ID NO: 2151459 - DNA, 25 bp, Homo sapien
gagtattgaattatactacaaggac

SEQ ID NO: 2151460 - DNA, 25 bp, Homo sapien
ggtttacaaggccagagtattgaat

SEQ ID NO: 2151461 - DNA, 25 bp, Homo sapien
ggccagagtattgaattatactaca

SEQ ID NO: 2151462 - DNA, 25 bp, Homo sapien
tgatgttgtgcagacccgtctagac

SEQ ID NO: 2151463 - DNA, 25 bp, Homo sapien
gtttatgatgttgtgcagacccgtc

SEQ ID NO: 2151464 - DNA, 25 bp, Homo sapien
tttatgatgttgtgcagacccgtct

SEQ ID NO: 2151465 - DNA, 25 bp, Homo sapien
tatgatgttgtgcagacccgtctag

SEQ ID NO: 2151466 - DNA, 25 bp, Homo sapien
aacttgagcaggagtagagactttc

SEQ ID NO: 2151467 - DNA, 25 bp, Homo sapien
acttgagcaggagtagagactttct

SEQ ID NO: 2151468 - DNA, 25 bp, Homo sapien
caacttgagcaggagtagagacttt

SEQ ID NO: 2151469 - DNA, 25 bp, Homo sapien
tgaggtggtggagataacccactga

SEQ ID NO: 2151470 - DNA, 25 bp, Homo sapien
acgttttcaatacaagccatgaaga

SEQ ID NO: 2151471 - DNA, 25 bp, Homo sapien
ctaggtctggagaaatgactcctgc

SEQ ID NO: 2151472 - DNA, 25 bp, Homo sapien
tttcctgaggtggtggagataaccc

SEQ ID NO: 2151473 - DNA, 25 bp, Homo sapien
ttgtccacagatactaccaagggtg

SEQ ID NO: 2151474 - DNA, 25 bp, Homo sapien
tcagcggtacttgaggttgacccca

SEQ ID NO: 2151475 - DNA, 25 bp, Homo sapien
cattgacggaaggtctcagcggtac

SEQ ID NO: 2151476 - DNA, 25 bp, Homo sapien
tgtggcaaagctacatgcaaccttg

SEQ ID NO: 2151477 - DNA, 25 bp, Homo sapien
ggtacaaggtttcaaatagggcaca

SEQ ID NO: 2151478 - DNA, 25 bp, Homo sapien
taggccttggccaattatgcatggg

SEQ ID NO: 2151479 - DNA, 25 bp, Homo sapien
tactggaagacaacgggataggcct

SEQ ID NO: 2151480 - DNA, 25 bp, Homo sapien
tattcgtgtatttccgggcggcacc

SEQ ID NO: 2151481 - DNA, 25 bp, Homo sapien
ccagtttggcatagggaatgtgaga

SEQ ID NO: 2151482 - DNA, 25 bp, Homo sapien
tgtctaggccagtttggtggattaa

SEQ ID NO: 2151483 - DNA, 25 bp, Homo sapien
gtggattaatgaaacctaaaccaga

SEQ ID NO: 2151484 - DNA, 25 bp, Homo sapien
tgatgtgtttgtttgtctaggccag

SEQ ID NO: 2151485 - DNA, 25 bp, Homo sapien
caacttttcattacatctcttgagc

SEQ ID NO: 2151486 - DNA, 25 bp, Homo sapien
catctcttgagcaggtggtcacatt

SEQ ID NO: 2151487 - DNA, 25 bp, Homo sapien
gagcaggtggtcacattgtccatca

SEQ ID NO: 2151488 - DNA, 25 bp, Homo sapien
cattacatctcttgagcaggtggtc

SEQ ID NO: 2151489 - DNA, 25 bp, Homo sapien
gctaacatggcaatgtctggcttgg

SEQ ID NO: 2151490 - DNA, 25 bp, Homo sapien
atgacagtgttaagacttcttctat

SEQ ID NO: 2151491 - DNA, 25 bp, Homo sapien
ttatacacaaatttggctaacatgg

SEQ ID NO: 2151492 - DNA, 25 bp, Homo sapien
ttctattatacacaaatttggctaa

SEQ ID NO: 2151493 - DNA, 25 bp, Homo sapien
cctggccatacagccagggaagcaa

SEQ ID NO: 2151494 - DNA, 25 bp, Homo sapien
ttcctggccatacagccagggaagc

SEQ ID NO: 2151495 - DNA, 25 bp, Homo sapien
tgattttcactgtgaaggcccaagt

SEQ ID NO: 2151496 - DNA, 25 bp, Homo sapien
ctgattttcactgtgaaggcccaag

SEQ ID NO: 2151497 - DNA, 25 bp, Homo sapien
tgagggttaaaatcatctaactttg

SEQ ID NO: 2151498 - DNA, 25 bp, Homo sapien
ttaaaatcatctaactttggagttc

SEQ ID NO: 2151499 - DNA, 25 bp, Homo sapien
taagtcatgtattgtggtaacatat

SEQ ID NO: 2151500 - DNA, 25 bp, Homo sapien
ttgatcctggcatcatgatattaac

SEQ ID NO: 2151501 - DNA, 25 bp, Homo sapien
gttcttgtaagtcatgtattgtggt

SEQ ID NO: 2151502 - DNA, 25 bp, Homo sapien
tttgatcctggcatcatgatattaa

SEQ ID NO: 2151503 - DNA, 25 bp, Homo sapien
tcgggagtgggtcccctgccgcgtc

SEQ ID NO: 2151504 - DNA, 25 bp, Homo sapien
gacgcggcaggggacccactcccga

SEQ ID NO: 2151505 - DNA, 25 bp, Homo sapien
tgtaagcactgcctctcacatcacc

SEQ ID NO: 2151506 - DNA, 25 bp, Homo sapien
cttcctgtaagcactgcctctcaca

SEQ ID NO: 2151507 - DNA, 25 bp, Homo sapien
cctgtaagcactgcctctcacatca

SEQ ID NO: 2151508 - DNA, 25 bp, Homo sapien
taagcactgcctctcacatcaccct

SEQ ID NO: 2151509 - DNA, 25 bp, Homo sapien
tcccacattatgaatatcaggttct

SEQ ID NO: 2151510 - DNA, 25 bp, Homo sapien
cacattatgaatatcaggttctgca

SEQ ID NO: 2151511 - DNA, 25 bp, Homo sapien
tcatcccacattatgaatatcaggt

SEQ ID NO: 2151512 - DNA, 25 bp, Homo sapien
cattatgaatatcaggttctgcacc

SEQ ID NO: 2151513 - DNA, 25 bp, Homo sapien
ttgatgttgtcagagttagtgcaaa

SEQ ID NO: 2151514 - DNA, 25 bp, Homo sapien
atttgatgttgtcagagttagtgca

SEQ ID NO: 2151515 - DNA, 25 bp, Homo sapien
tttgatgttgtcagagttagtgcaa

SEQ ID NO: 2151516 - DNA, 25 bp, Homo sapien
tttgctatactgatacttcacaagg

SEQ ID NO: 2151517 - DNA, 25 bp, Homo sapien
tgctatactgatacttcacaaggtt

SEQ ID NO: 2151518 - DNA, 25 bp, Homo sapien
ttctttgctatactgatacttcaca

SEQ ID NO: 2151519 - DNA, 25 bp, Homo sapien
tctttctttgctatactgatacttc

SEQ ID NO: 2151520 - DNA, 25 bp, Homo sapien
catcgaaagggtttatgatagtatc

SEQ ID NO: 2151521 - DNA, 25 bp, Homo sapien
tttatatgcatcgaaagggtttatg

SEQ ID NO: 2151522 - DNA, 25 bp, Homo sapien
tcattacctgcaataataaactcca

SEQ ID NO: 2151523 - DNA, 25 bp, Homo sapien
caaaaagtttatatgcatcgaaagg

SEQ ID NO: 2151524 - DNA, 25 bp, Homo sapien
tgtcttcactaatctggaattttgc

SEQ ID NO: 2151525 - DNA, 25 bp, Homo sapien
tcactaatctggaattttgctccat

SEQ ID NO: 2151526 - DNA, 25 bp, Homo sapien
ttgctccatcagttatctcttttct

SEQ ID NO: 2151527 - DNA, 25 bp, Homo sapien
actctgtcttcactaatctggaatt

SEQ ID NO: 2151528 - DNA, 25 bp, Homo sapien
tgtaaatggactaaatgctccaatt

SEQ ID NO: 2151529 - DNA, 25 bp, Homo sapien
aaagagcaaaatcaccagcgaacat

SEQ ID NO: 2151530 - DNA, 25 bp, Homo sapien
ctaaagagcaaaatcaccagcgaac

SEQ ID NO: 2151531 - DNA, 25 bp, Homo sapien
agagcaaaatcaccagcgaacatca

SEQ ID NO: 2151532 - DNA, 25 bp, Homo sapien
tgaatgcagacgaagcactgaacca

SEQ ID NO: 2151533 - DNA, 25 bp, Homo sapien
ctgaattgtgagtaaatgtggacct

SEQ ID NO: 2151534 - DNA, 25 bp, Homo sapien
ttcttctgaatgcagacgaagcact

SEQ ID NO: 2151535 - DNA, 25 bp, Homo sapien
tgtgagtaaatgtggacctagagtc

SEQ ID NO: 2151536 - DNA, 25 bp, Homo sapien
gaacccttaacaactgtctagtcaa

SEQ ID NO: 2151537 - DNA, 25 bp, Homo sapien
cagtccccaggtggatcaattggat

SEQ ID NO: 2151538 - DNA, 25 bp, Homo sapien
gcacacagaacccttaacaactgtc

SEQ ID NO: 2151539 - DNA, 25 bp, Homo sapien
gcccttttcatgacagaatctgcac

SEQ ID NO: 2151540 - DNA, 25 bp, Homo sapien
tgtcagtccctcgtttttaatgcag

SEQ ID NO: 2151541 - DNA, 25 bp, Homo sapien
tgaaggtgatgtcagtccctcgttt

SEQ ID NO: 2151542 - DNA, 25 bp, Homo sapien
ggtgatgtcagtccctcgtttttaa

SEQ ID NO: 2151543 - DNA, 25 bp, Homo sapien
aatagagttctctaaaattacagac

SEQ ID NO: 2151544 - DNA, 25 bp, Homo sapien
ttgtgtcgcagtgattctggtaagt

SEQ ID NO: 2151545 - DNA, 25 bp, Homo sapien
ccggtaatcattcaggttgttcaat

SEQ ID NO: 2151546 - DNA, 25 bp, Homo sapien
tgctttagttgtgtcgcagtgattc

SEQ ID NO: 2151547 - DNA, 25 bp, Homo sapien
tattacccggtaatcattcaggttg

SEQ ID NO: 2151548 - DNA, 25 bp, Homo sapien
ctaattgtgtgaagaaagtcactgg

SEQ ID NO: 2151549 - DNA, 25 bp, Homo sapien
gtcactggtagcttgatgggaataa

SEQ ID NO: 2151550 - DNA, 25 bp, Homo sapien
taattgtgtgaagaaagtcactggt

SEQ ID NO: 2151551 - DNA, 25 bp, Homo sapien
actggtagcttgatgggaataacat

SEQ ID NO: 2151552 - DNA, 25 bp, Homo sapien
ttcaagttctgatatgtcctggaat

SEQ ID NO: 2151553 - DNA, 25 bp, Homo sapien
tgatatgtcctggaattgttttttt

SEQ ID NO: 2151554 - DNA, 25 bp, Homo sapien
ctgatatgtcctggaattgtttttt

SEQ ID NO: 2151555 - DNA, 25 bp, Homo sapien
aagttctgatatgtcctggaattgt

SEQ ID NO: 2151556 - DNA, 25 bp, Homo sapien
aagatctggagaacttaatttccct

SEQ ID NO: 2151557 - DNA, 25 bp, Homo sapien
cttaatttcccttcttcaacctgct

SEQ ID NO: 2151558 - DNA, 25 bp, Homo sapien
tggagaacttaatttcccttcttca

SEQ ID NO: 2151559 - DNA, 25 bp, Homo sapien
taatttcccttcttcaacctgctta

SEQ ID NO: 2151560 - DNA, 25 bp, Homo sapien
atctaaagaagattctgagcctgac

SEQ ID NO: 2151561 - DNA, 25 bp, Homo sapien
caagtattgcaataggatttgaagg

SEQ ID NO: 2151562 - DNA, 25 bp, Homo sapien
gattatacagtttcactgggatgaa

SEQ ID NO: 2151563 - DNA, 25 bp, Homo sapien
tagttgaaactagaagaacttcaag

SEQ ID NO: 2151564 - DNA, 25 bp, Homo sapien
agataaacggttgttcttctctgca

SEQ ID NO: 2151565 - DNA, 25 bp, Homo sapien
ctccctgaagagataaacggttgtt

SEQ ID NO: 2151566 - DNA, 25 bp, Homo sapien
gctgatagcctgctcagttttagta

SEQ ID NO: 2151567 - DNA, 25 bp, Homo sapien
aggttctgttatcaatataattgca

SEQ ID NO: 2151568 - DNA, 25 bp, Homo sapien
gatgcacgtaggcaattaaagccga

SEQ ID NO: 2151569 - DNA, 25 bp, Homo sapien
taagtgcagcctaaagtgtttcacc

SEQ ID NO: 2151570 - DNA, 25 bp, Homo sapien
cagtaatacagaacttcaggtcagt

SEQ ID NO: 2151571 - DNA, 25 bp, Homo sapien
ttaaagccgaaaattatctaagtgc

SEQ ID NO: 2151572 - DNA, 25 bp, Homo sapien
tatagtttctcgcattcatccaagg

SEQ ID NO: 2151573 - DNA, 25 bp, Homo sapien
caaagggctgatcaactggtttctg

SEQ ID NO: 2151574 - DNA, 25 bp, Homo sapien
gaaaaaatcccgacatgaaagctaa

SEQ ID NO: 2151575 - DNA, 25 bp, Homo sapien
tgttgccatcaatagcgtaaatccc

SEQ ID NO: 2151576 - DNA, 25 bp, Homo sapien
aaatgacagttgattccagcaaaat

SEQ ID NO: 2151577 - DNA, 25 bp, Homo sapien
gagaacctctgaaatgacagttgat

SEQ ID NO: 2151578 - DNA, 25 bp, Homo sapien
gacagttgattccagcaaaatggtc

SEQ ID NO: 2151579 - DNA, 25 bp, Homo sapien
ctgagaacctctgaaatgacagttg

SEQ ID NO: 2151580 - DNA, 25 bp, Homo sapien
gcccaggcatactgtgcactctaat

SEQ ID NO: 2151581 - DNA, 25 bp, Homo sapien
taacagaacatcaagcattatacag

SEQ ID NO: 2151582 - DNA, 25 bp, Homo sapien
tcatgtcactctccgaatgtccagt

SEQ ID NO: 2151583 - DNA, 25 bp, Homo sapien
gactgcttctatatctgtagcactg

SEQ ID NO: 2151584 - DNA, 25 bp, Homo sapien
tatgtatttcaacccttctaacttc

SEQ ID NO: 2151585 - DNA, 25 bp, Homo sapien
atttcaacccttctaacttcagctg

SEQ ID NO: 2151586 - DNA, 25 bp, Homo sapien
gctgatccagcttttcattttgact

SEQ ID NO: 2151587 - DNA, 25 bp, Homo sapien
tcaacccttctaacttcagctgatc

SEQ ID NO: 2151588 - DNA, 25 bp, Homo sapien
gattttcagctagaacggttatcag

SEQ ID NO: 2151589 - DNA, 25 bp, Homo sapien
aattggactatatttctccacaggg

SEQ ID NO: 2151590 - DNA, 25 bp, Homo sapien
ctccgatgggagtgaaaaagttgca

SEQ ID NO: 2151591 - DNA, 25 bp, Homo sapien
gaatagaggacaattctccgatggg

SEQ ID NO: 2151592 - DNA, 25 bp, Homo sapien
tatttgtgcgtttattactggctgg

SEQ ID NO: 2151593 - DNA, 25 bp, Homo sapien
ttgtgcgtttattactggctggcat

SEQ ID NO: 2151594 - DNA, 25 bp, Homo sapien
tcttcaatatttgtgcgtttattac

SEQ ID NO: 2151595 - DNA, 25 bp, Homo sapien
caatatttgtgcgtttattactggc

SEQ ID NO: 2151596 - DNA, 25 bp, Homo sapien
cagaaggggagcatgtgcttgcccc

SEQ ID NO: 2151597 - DNA, 25 bp, Homo sapien
aaggggagcatgtgcttgccccact

SEQ ID NO: 2151598 - DNA, 25 bp, Homo sapien
tcccgcctgcactcagaggcctcct

SEQ ID NO: 2151599 - DNA, 25 bp, Homo sapien
acttcttcccgcctgcactcagagg

SEQ ID NO: 2151600 - DNA, 25 bp, Homo sapien
tgagagatttcgtaaacactagacc

SEQ ID NO: 2151601 - DNA, 25 bp, Homo sapien
gaatagtcaacaccgtaattgtggt

SEQ ID NO: 2151602 - DNA, 25 bp, Homo sapien
gacctatcagtggaaaccttacagg

SEQ ID NO: 2151603 - DNA, 25 bp, Homo sapien
tggagaccatatccttcaagcctga

SEQ ID NO: 2151604 - DNA, 25 bp, Homo sapien
tcttgcttgcaaactcatcagaaat

SEQ ID NO: 2151605 - DNA, 25 bp, Homo sapien
tcagacctttctcttgcttgcaaac

SEQ ID NO: 2151606 - DNA, 25 bp, Homo sapien
tctcttgcttgcaaactcatcagaa

SEQ ID NO: 2151607 - DNA, 25 bp, Homo sapien
tcatcagaaatacaggcaaccatct

SEQ ID NO: 2151608 - DNA, 25 bp, Homo sapien
tggacatttagattggttcctagtc

SEQ ID NO: 2151609 - DNA, 25 bp, Homo sapien
tggctgggtttctttacaaaattga

SEQ ID NO: 2151610 - DNA, 25 bp, Homo sapien
atgggatggctgggtttctttacaa

SEQ ID NO: 2151611 - DNA, 25 bp, Homo sapien
acatttagattggttcctagtcttt

SEQ ID NO: 2151612 - DNA, 25 bp, Homo sapien
gcaaagtttgtgagagctggatgaa

SEQ ID NO: 2151613 - DNA, 25 bp, Homo sapien
tgtctctgatcaagtgcattgcaat

SEQ ID NO: 2151614 - DNA, 25 bp, Homo sapien
gactttagcatcatcggtgcctgca

SEQ ID NO: 2151615 - DNA, 25 bp, Homo sapien
tcaatgcgaattactacagagatgg

SEQ ID NO: 2151616 - DNA, 25 bp, Homo sapien
aagcctacattgtaatccaagtaca

SEQ ID NO: 2151617 - DNA, 25 bp, Homo sapien
taatccaagtacacctcaaccttct

SEQ ID NO: 2151618 - DNA, 25 bp, Homo sapien
ctttctttagctacctctcctccat

SEQ ID NO: 2151619 - DNA, 25 bp, Homo sapien
tacattgtaatccaagtacacctca

SEQ ID NO: 2151620 - DNA, 25 bp, Homo sapien
tgaaatatccagtgtagtatgtcac

SEQ ID NO: 2151621 - DNA, 25 bp, Homo sapien
catgttgcaataacagaggtaatat

SEQ ID NO: 2151622 - DNA, 25 bp, Homo sapien
tcttttagggtactcatttgggcca

SEQ ID NO: 2151623 - DNA, 25 bp, Homo sapien
agttgaaaatgcgtgtgaaatatcc

SEQ ID NO: 2151624 - DNA, 25 bp, Homo sapien
gttgctgacacaaatagtctatgcc

SEQ ID NO: 2151625 - DNA, 25 bp, Homo sapien
tgacacaaatagtctatgccccttt

SEQ ID NO: 2151626 - DNA, 25 bp, Homo sapien
tgctgacacaaatagtctatgcccc

SEQ ID NO: 2151627 - DNA, 25 bp, Homo sapien
gctgacacaaatagtctatgcccct

SEQ ID NO: 2151628 - DNA, 25 bp, Homo sapien
gtgagctgcaggtacctttgatgca

SEQ ID NO: 2151629 - DNA, 25 bp, Homo sapien
ccctgccacattggtaacagcgtgt

SEQ ID NO: 2151630 - DNA, 25 bp, Homo sapien
ctgcaggtacctttgatgcagctgt

SEQ ID NO: 2151631 - DNA, 25 bp, Homo sapien
attggtaacagcgtgtgagctgcag

SEQ ID NO: 2151632 - DNA, 25 bp, Homo sapien
aacttccaaaaaatgatctaattct

SEQ ID NO: 2151633 - DNA, 25 bp, Homo sapien
tttgtcatagcttttatcgaagtgt

SEQ ID NO: 2151634 - DNA, 25 bp, Homo sapien
tcaaaactagagataacttttgtca

SEQ ID NO: 2151635 - DNA, 25 bp, Homo sapien
agtgttcatcaaaactagagataac

SEQ ID NO: 2151636 - DNA, 25 bp, Homo sapien
agcgtccaccctaggccactggttt

SEQ ID NO: 2151637 - DNA, 25 bp, Homo sapien
atggcttcttgagcgtccaccctag

SEQ ID NO: 2151638 - DNA, 25 bp, Homo sapien
cactgtcatacttccatggcttctt

SEQ ID NO: 2151639 - DNA, 25 bp, Homo sapien
caccctaggccactggtttcagtct

SEQ ID NO: 2151640 - DNA, 25 bp, Homo sapien
ttatgattataattggagagatggc

SEQ ID NO: 2151641 - DNA, 25 bp, Homo sapien
taattggagagatggctagagtttc

SEQ ID NO: 2151642 - DNA, 25 bp, Homo sapien
gatggctagagtttctagccgtata

SEQ ID NO: 2151643 - DNA, 25 bp, Homo sapien
gagagatggctagagtttctagccg

SEQ ID NO: 2151644 - DNA, 25 bp, Homo sapien
gaatgctgagcatacagagggaaag

SEQ ID NO: 2151645 - DNA, 25 bp, Homo sapien
ctgaatgctgagcatacagagggaa

SEQ ID NO: 2151646 - DNA, 25 bp, Homo sapien
aatgctgagcatacagagggaaagc

SEQ ID NO: 2151647 - DNA, 25 bp, Homo sapien
tgctgagcatacagagggaaagcca

SEQ ID NO: 2151648 - DNA, 25 bp, Homo sapien
cccaaatactgtatcatctattcca

SEQ ID NO: 2151649 - DNA, 25 bp, Homo sapien
ccaaatactgtatcatctattccac

SEQ ID NO: 2151650 - DNA, 25 bp, Homo sapien
ttcccaaatactgtatcatctattc

SEQ ID NO: 2151651 - DNA, 25 bp, Homo sapien
ttattcccaaatactgtatcatcta

SEQ ID NO: 2151652 - DNA, 25 bp, Homo sapien
tgtgtgtccaccaagctttgatttt

SEQ ID NO: 2151653 - DNA, 25 bp, Homo sapien
gcatgtgtgtccaccaagctttgat

SEQ ID NO: 2151654 - DNA, 25 bp, Homo sapien
agcatgtgtgtccaccaagctttga

SEQ ID NO: 2151655 - DNA, 25 bp, Homo sapien
catgtgtgtccaccaagctttgatt

SEQ ID NO: 2151656 - DNA, 25 bp, Homo sapien
ggctaatctatgtctccatggttct

SEQ ID NO: 2151657 - DNA, 25 bp, Homo sapien
ggttctagtatacttcccaagataa

SEQ ID NO: 2151658 - DNA, 25 bp, Homo sapien
tgatcagcataacgtttacactggg

SEQ ID NO: 2151659 - DNA, 25 bp, Homo sapien
cccaagataatactatccaacattg

SEQ ID NO: 2151660 - DNA, 25 bp, Homo sapien
ctgagcagtttcaaacaaatgtggg

SEQ ID NO: 2151661 - DNA, 25 bp, Homo sapien
ctctctgagcagtttcaaacaaatg

SEQ ID NO: 2151662 - DNA, 25 bp, Homo sapien
gcagtttcaaacaaatgtgggttac

SEQ ID NO: 2151663 - DNA, 25 bp, Homo sapien
gagcagtttcaaacaaatgtgggtt

SEQ ID NO: 2151664 - DNA, 25 bp, Homo sapien
taaataacatcaacgggaagctgtg

SEQ ID NO: 2151665 - DNA, 25 bp, Homo sapien
gcatactctacaaggctttggtaaa

SEQ ID NO: 2151666 - DNA, 25 bp, Homo sapien
tcctctttgctagtgggtgtacttt

SEQ ID NO: 2151667 - DNA, 25 bp, Homo sapien
ggaagctgtgcaacatcgccttgga

SEQ ID NO: 2151668 - DNA, 25 bp, Homo sapien
tttgtagcagggagggacatcataa

SEQ ID NO: 2151669 - DNA, 25 bp, Homo sapien
ttgcactgtccacatctatgagggt

SEQ ID NO: 2151670 - DNA, 25 bp, Homo sapien
tagcagggagggacatcataaagca

SEQ ID NO: 2151671 - DNA, 25 bp, Homo sapien
catctatgagggttactccctgcct

SEQ ID NO: 2151672 - DNA, 25 bp, Homo sapien
gcactctgccgctgcctgtgttaca

SEQ ID NO: 2151673 - DNA, 25 bp, Homo sapien
cagcactctgccgctgcctgtgtta

SEQ ID NO: 2151674 - DNA, 25 bp, Homo sapien
ggcagcactctgccgctgcctgtgt

SEQ ID NO: 2151675 - DNA, 25 bp, Homo sapien
agcactctgccgctgcctgtgttac

SEQ ID NO: 2151676 - DNA, 25 bp, Homo sapien
gagggcaatcatccctgaaattgtt

SEQ ID NO: 2151677 - DNA, 25 bp, Homo sapien
acagagggcaatcatccctgaaatt

SEQ ID NO: 2151678 - DNA, 25 bp, Homo sapien
agagggcaatcatccctgaaattgt

SEQ ID NO: 2151679 - DNA, 25 bp, Homo sapien
cagagggcaatcatccctgaaattg

SEQ ID NO: 2151680 - DNA, 25 bp, Homo sapien
tagttgcttgaagacccctgccctc

SEQ ID NO: 2151681 - DNA, 25 bp, Homo sapien
ctagttgcttgaagacccctgccct

SEQ ID NO: 2151682 - DNA, 25 bp, Homo sapien
ctttggagtagagtgtaggtagcat

SEQ ID NO: 2151683 - DNA, 25 bp, Homo sapien
ctctttggagtagagtgtaggtagc

SEQ ID NO: 2151684 - DNA, 25 bp, Homo sapien
tctttggagtagagtgtaggtagca

SEQ ID NO: 2151685 - DNA, 25 bp, Homo sapien
ggctctttggagtagagtgtaggta

SEQ ID NO: 2151686 - DNA, 25 bp, Homo sapien
cacgatttaatagtacttgttgcca

SEQ ID NO: 2151687 - DNA, 25 bp, Homo sapien
ttgacacgatttaatagtacttgtt

SEQ ID NO: 2151688 - DNA, 25 bp, Homo sapien
gacacgatttaatagtacttgttgc

SEQ ID NO: 2151689 - DNA, 25 bp, Homo sapien
acgatttaatagtacttgttgccat

SEQ ID NO: 2151690 - DNA, 25 bp, Homo sapien
tattctcaaacttgactcacccctt

SEQ ID NO: 2151691 - DNA, 25 bp, Homo sapien
tgcttcccaaatttggattgcttgc

SEQ ID NO: 2151692 - DNA, 25 bp, Homo sapien
gggatgtggcctacacctctctgct

SEQ ID NO: 2151693 - DNA, 25 bp, Homo sapien
cagatctatggagataggatgaggc

SEQ ID NO: 2151694 - DNA, 25 bp, Homo sapien
ttttcttccggcaatctctgtccat

SEQ ID NO: 2151695 - DNA, 25 bp, Homo sapien
caaacactcagagacactccatatt

SEQ ID NO: 2151696 - DNA, 25 bp, Homo sapien
tcacatctgagttcatgtcatgtct

SEQ ID NO: 2151697 - DNA, 25 bp, Homo sapien
ttatttcacatctgagttcatgtca

SEQ ID NO: 2151698 - DNA, 25 bp, Homo sapien
gagttcatgtcatgtctcttacatc

SEQ ID NO: 2151699 - DNA, 25 bp, Homo sapien
tgagttcatgtcatgtctcttacat

SEQ ID NO: 2151700 - DNA, 25 bp, Homo sapien
caaacccgatagaaggattgtattc

SEQ ID NO: 2151701 - DNA, 25 bp, Homo sapien
tagaaggattgtattcctacgttca

SEQ ID NO: 2151702 - DNA, 25 bp, Homo sapien
caatcacacttctagttgtccaaac

SEQ ID NO: 2151703 - DNA, 25 bp, Homo sapien
tagttgtccaaacccgatagaagga

SEQ ID NO: 2151704 - DNA, 25 bp, Homo sapien
cctcacatcatagatctctggaaca

SEQ ID NO: 2151705 - DNA, 25 bp, Homo sapien
ctctggaacattggtcacggtcatc

SEQ ID NO: 2151706 - DNA, 25 bp, Homo sapien
cattggtcacggtcatcacagttgc

SEQ ID NO: 2151707 - DNA, 25 bp, Homo sapien
tctatgctcagttctcctcacatca

SEQ ID NO: 2151708 - DNA, 25 bp, Homo sapien
tgaggactgcccacttgacaatctt

SEQ ID NO: 2151709 - DNA, 25 bp, Homo sapien
agccccacacgagctgcctgctgtg

SEQ ID NO: 2151710 - DNA, 25 bp, Homo sapien
tgacaatcttccctttatggatcat

SEQ ID NO: 2151711 - DNA, 25 bp, Homo sapien
gctgtgcagcaaagctgacccacca

SEQ ID NO: 2151712 - DNA, 25 bp, Homo sapien
ccagggagatctcactgccggtgat

SEQ ID NO: 2151713 - DNA, 25 bp, Homo sapien
tccagggagatctcactgccggtga

SEQ ID NO: 2151714 - DNA, 25 bp, Homo sapien
ctccagggagatctcactgccggtg

SEQ ID NO: 2151715 - DNA, 25 bp, Homo sapien
agggagatctcactgccggtgatgg

SEQ ID NO: 2151716 - DNA, 25 bp, Homo sapien
agaaagcctgtgtcagtgcctgggt

SEQ ID NO: 2151717 - DNA, 25 bp, Homo sapien
cagaaagcctgtgtcagtgcctggg

SEQ ID NO: 2151718 - DNA, 25 bp, Homo sapien
gccagaaagcctgtgtcagtgcctg

SEQ ID NO: 2151719 - DNA, 25 bp, Homo sapien
ttgaagtgaatgccaaaagatggcc

SEQ ID NO: 2151720 - DNA, 25 bp, Homo sapien
ttcatgcccaggtcatagatggtct

SEQ ID NO: 2151721 - DNA, 25 bp, Homo sapien
tcatgcccaggtcatagatggtctc

SEQ ID NO: 2151722 - DNA, 25 bp, Homo sapien
gtcactggtctataaatctgggtct

SEQ ID NO: 2151723 - DNA, 25 bp, Homo sapien
cccattcctgtcactggtctataaa

SEQ ID NO: 2151724 - DNA, 25 bp, Homo sapien
cccattgctttgtcaatagtgatca

SEQ ID NO: 2151725 - DNA, 25 bp, Homo sapien
aaaggagtggcccaacttggagatc

SEQ ID NO: 2151726 - DNA, 25 bp, Homo sapien
ggcccaacttggagatctttcccat

SEQ ID NO: 2151727 - DNA, 25 bp, Homo sapien
catgtcaccagcgtggatcttgtct

SEQ ID NO: 2151728 - DNA, 25 bp, Homo sapien
gggacacagtatgcaccttgcattt

SEQ ID NO: 2151729 - DNA, 25 bp, Homo sapien
gatgatgttgatcttgtgcaaggga

SEQ ID NO: 2151730 - DNA, 25 bp, Homo sapien
tttctggagcttcccatatgggggc

SEQ ID NO: 2151731 - DNA, 25 bp, Homo sapien
aagccatgcgtgtgggagttgatga

SEQ ID NO: 2151732 - DNA, 25 bp, Homo sapien
ggagtgatgcaagttgaaaatgctt

SEQ ID NO: 2151733 - DNA, 25 bp, Homo sapien
tcatctctgtgggatagactcagat

SEQ ID NO: 2151734 - DNA, 25 bp, Homo sapien
tgggatagactcagatggcattgga

SEQ ID NO: 2151735 - DNA, 25 bp, Homo sapien
ctcagatggcattggagtgatgcaa

SEQ ID NO: 2151736 - DNA, 25 bp, Homo sapien
tggatcccgctgtggtgccttcctg

SEQ ID NO: 2151737 - DNA, 25 bp, Homo sapien
cgtcaccatgcgcatgcatggatcc

SEQ ID NO: 2151738 - DNA, 25 bp, Homo sapien
ggatcccgctgtggtgccttcctgc

SEQ ID NO: 2151739 - DNA, 25 bp, Homo sapien
atgcgcatgcatggatcccgctgtg

SEQ ID NO: 2151740 - DNA, 25 bp, Homo sapien
ttgtatgacgtcaagatcagttggg

SEQ ID NO: 2151741 - DNA, 25 bp, Homo sapien
ttagtgaagcgtgctattgtatgac

SEQ ID NO: 2151742 - DNA, 25 bp, Homo sapien
gaggcaacatagagtctgttcccaa

SEQ ID NO: 2151743 - DNA, 25 bp, Homo sapien
atatatttccgggaaatttcagagg

SEQ ID NO: 2151744 - DNA, 25 bp, Homo sapien
tgagtgaactaaaacccagtaattc

SEQ ID NO: 2151745 - DNA, 25 bp, Homo sapien
gcatatccggacctgaaacatgaca

SEQ ID NO: 2151746 - DNA, 25 bp, Homo sapien
catgacagtgtcctgctaaggcctt

SEQ ID NO: 2151747 - DNA, 25 bp, Homo sapien
taatctatgcagagctccctttgca

SEQ ID NO: 2151748 - DNA, 25 bp, Homo sapien
ctttgtatgaaaaggattgcactgc

SEQ ID NO: 2151749 - DNA, 25 bp, Homo sapien
gtatgaaaaggattgcactgcatca

SEQ ID NO: 2151750 - DNA, 25 bp, Homo sapien
tgtatatccatgagcatacacattc

SEQ ID NO: 2151751 - DNA, 25 bp, Homo sapien
gtatatccatgagcatacacattct

SEQ ID NO: 2151752 - DNA, 25 bp, Homo sapien
agcaccaaagcttcgttatcaagta

SEQ ID NO: 2151753 - DNA, 25 bp, Homo sapien
aagcaccaaagcttcgttatcaagt

SEQ ID NO: 2151754 - DNA, 25 bp, Homo sapien
gcaccaaagcttcgttatcaagtac

SEQ ID NO: 2151755 - DNA, 25 bp, Homo sapien
tcattaaagtttcccaagacgatgt

SEQ ID NO: 2151756 - DNA, 25 bp, Homo sapien
taattataagaatttggagagggac

SEQ ID NO: 2151757 - DNA, 25 bp, Homo sapien
ggtgcctgtcttccctatgatactc

SEQ ID NO: 2151758 - DNA, 25 bp, Homo sapien
cagaagtcacagctagtttaaaggg

SEQ ID NO: 2151759 - DNA, 25 bp, Homo sapien
tgaataggatgtgaagttctacatt

SEQ ID NO: 2151760 - DNA, 25 bp, Homo sapien
tttgaataggatgtgaagttctaca

SEQ ID NO: 2151761 - DNA, 25 bp, Homo sapien
ttgaataggatgtgaagttctacat

SEQ ID NO: 2151762 - DNA, 25 bp, Homo sapien
tcacttcccttgaagattgtcaatg

SEQ ID NO: 2151763 - DNA, 25 bp, Homo sapien
gacttgaagatgtcccttttgggaa

SEQ ID NO: 2151764 - DNA, 25 bp, Homo sapien
gaagacttgaagatgtcccttttgg

SEQ ID NO: 2151765 - DNA, 25 bp, Homo sapien
ggaatgcagatacttgaaacagttc

SEQ ID NO: 2151766 - DNA, 25 bp, Homo sapien
gtacagattgtataacaccttttga

SEQ ID NO: 2151767 - DNA, 25 bp, Homo sapien
gtgttgtgcctcatctgtcacaaca

SEQ ID NO: 2151768 - DNA, 25 bp, Homo sapien
ttggaaggaactcacaattgtgtac

SEQ ID NO: 2151769 - DNA, 25 bp, Homo sapien
ctgaaaatgaggttggataaagctg

SEQ ID NO: 2151770 - DNA, 25 bp, Homo sapien
ttcagaagaaaacgttttatcagtc

SEQ ID NO: 2151771 - DNA, 25 bp, Homo sapien
cagaagaaaacgttttatcagtcat

SEQ ID NO: 2151772 - DNA, 25 bp, Homo sapien
tcagaagaaaacgttttatcagtca

SEQ ID NO: 2151773 - DNA, 25 bp, Homo sapien
cccatcaggatatgggtcacaaagt

SEQ ID NO: 2151774 - DNA, 25 bp, Homo sapien
caaccctcggaagacttcttggcaa

SEQ ID NO: 2151775 - DNA, 25 bp, Homo sapien
ctcggaagacttcttggcaaacatt

SEQ ID NO: 2151776 - DNA, 25 bp, Homo sapien
ccctcggaagacttcttggcaaaca

SEQ ID NO: 2151777 - DNA, 25 bp, Homo sapien
cctcggaagacttcttggcaaacat

SEQ ID NO: 2151778 - DNA, 25 bp, Homo sapien
aatctcattaattgcctggcccagg

SEQ ID NO: 2151779 - DNA, 25 bp, Homo sapien
atctcattaattgcctggcccaggt

SEQ ID NO: 2151780 - DNA, 25 bp, Homo sapien
tctcattaattgcctggcccaggtc

SEQ ID NO: 2151781 - DNA, 25 bp, Homo sapien
gaagccaggcactttggctgttagt

SEQ ID NO: 2151782 - DNA, 25 bp, Homo sapien
gcaattcaaaaatcttatggtccag

SEQ ID NO: 2151783 - DNA, 25 bp, Homo sapien
ggtacatcaggacatcctgcatcta

SEQ ID NO: 2151784 - DNA, 25 bp, Homo sapien
gcatctaggttatttgactgaggtc

SEQ ID NO: 2151785 - DNA, 25 bp, Homo sapien
tgctcctacccattctctgaattgt

SEQ ID NO: 2151786 - DNA, 25 bp, Homo sapien
gaattgtggatcaccgtgcatccac

SEQ ID NO: 2151787 - DNA, 25 bp, Homo sapien
tcctgctgctcctacccattctctg

SEQ ID NO: 2151788 - DNA, 25 bp, Homo sapien
tgaattgtggatcaccgtgcatcca

SEQ ID NO: 2151789 - DNA, 25 bp, Homo sapien
ctaatagctggactctctactatac

SEQ ID NO: 2151790 - DNA, 25 bp, Homo sapien
tcaggactgagaaaaagtgtacaac

SEQ ID NO: 2151791 - DNA, 25 bp, Homo sapien
aagtgtacaactctaagagttctcc

SEQ ID NO: 2151792 - DNA, 25 bp, Homo sapien
ctctacggcaaagggacagatgact

SEQ ID NO: 2151793 - DNA, 25 bp, Homo sapien
tggcattgcagtccactcctctacg

SEQ ID NO: 2151794 - DNA, 25 bp, Homo sapien
tctgtgtcaccaagctacgtgaagg

SEQ ID NO: 2151795 - DNA, 25 bp, Homo sapien
tgggtcccttgaggatccttcagcc

SEQ ID NO: 2151796 - DNA, 25 bp, Homo sapien
tacgtgaaggttgcccaagatttag

SEQ ID NO: 2151797 - DNA, 25 bp, Homo sapien
tatgctttgacgtacatgggtccct

SEQ ID NO: 2151798 - DNA, 25 bp, Homo sapien
cagctccattgaactgtggagacac

SEQ ID NO: 2151799 - DNA, 25 bp, Homo sapien
gatggttttctacatcctagttcat

SEQ ID NO: 2151800 - DNA, 25 bp, Homo sapien
agtgggatggttttctacatcctag

SEQ ID NO: 2151801 - DNA, 25 bp, Homo sapien
ttcatcagctccattgaactgtgga

SEQ ID NO: 2151802 - DNA, 25 bp, Homo sapien
gagatagaagaataaagaggcagca

SEQ ID NO: 2151803 - DNA, 25 bp, Homo sapien
catcagagatagaagaataaagagg

SEQ ID NO: 2151804 - DNA, 25 bp, Homo sapien
agatagaagaataaagaggcagcac

SEQ ID NO: 2151805 - DNA, 25 bp, Homo sapien
tcagagatagaagaataaagaggca

SEQ ID NO: 2151806 - DNA, 25 bp, Homo sapien
ataagtcaaaagtggccgtcagcct

SEQ ID NO: 2151807 - DNA, 25 bp, Homo sapien
tttgctgtgttataaaggtggagcc

SEQ ID NO: 2151808 - DNA, 25 bp, Homo sapien
gacattgcattccacaatcctgcca

SEQ ID NO: 2151809 - DNA, 25 bp, Homo sapien
ggagcctcagagtatacacgttgga

SEQ ID NO: 2151810 - DNA, 25 bp, Homo sapien
ttggttctataggtgtgaaatagcc

SEQ ID NO: 2151811 - DNA, 25 bp, Homo sapien
tgcatctctaacaagtctccacttc

SEQ ID NO: 2151812 - DNA, 25 bp, Homo sapien
tagccttgaaagatagcctctttca

SEQ ID NO: 2151813 - DNA, 25 bp, Homo sapien
cttcatgcatctctaacaagtctcc

SEQ ID NO: 2151814 - DNA, 25 bp, Homo sapien
tcacattgaggtcatttgtgcacat

SEQ ID NO: 2151815 - DNA, 25 bp, Homo sapien
ctgtggcattttgacttgttcttca

SEQ ID NO: 2151816 - DNA, 25 bp, Homo sapien
cttgttcttcacattgaggtcattt

SEQ ID NO: 2151817 - DNA, 25 bp, Homo sapien
tggcattttgacttgttcttcacat

SEQ ID NO: 2151818 - DNA, 25 bp, Homo sapien
gttctgcaaagcccccccgaagagc

SEQ ID NO: 2151819 - DNA, 25 bp, Homo sapien
agcccagggacaggtaaatgatgga

SEQ ID NO: 2151820 - DNA, 25 bp, Homo sapien
cagacccttagccatccccgtggcc

SEQ ID NO: 2151821 - DNA, 25 bp, Homo sapien
aaatgatggagtaggtggtggagtg

SEQ ID NO: 2151822 - DNA, 25 bp, Homo sapien
tcctaccagacccttagccatcccc

SEQ ID NO: 2151823 - DNA, 25 bp, Homo sapien
gtccccagtctgtgacctaggatcc

SEQ ID NO: 2151824 - DNA, 25 bp, Homo sapien
tctgtgacctaggatcccttctcca

SEQ ID NO: 2151825 - DNA, 25 bp, Homo sapien
cccagtctgtgacctaggatccctt

SEQ ID NO: 2151826 - DNA, 25 bp, Homo sapien
agtctgtgacctaggatcccttctc

SEQ ID NO: 2151827 - DNA, 25 bp, Homo sapien
tgcagaatgacgtgggtattgtcca

SEQ ID NO: 2151828 - DNA, 25 bp, Homo sapien
agaatgacgtgggtattgtccacag

SEQ ID NO: 2151829 - DNA, 25 bp, Homo sapien
ctgcagaatgacgtgggtattgtcc

SEQ ID NO: 2151830 - DNA, 25 bp, Homo sapien
tgacgtgggtattgtccacagaatt

SEQ ID NO: 2151831 - DNA, 25 bp, Homo sapien
actggtatcatcagtgagcttgcgg

SEQ ID NO: 2151832 - DNA, 25 bp, Homo sapien
ggtatcatcagtgagcttgcggagc

SEQ ID NO: 2151833 - DNA, 25 bp, Homo sapien
acactggtatcatcagtgagcttgc

SEQ ID NO: 2151834 - DNA, 25 bp, Homo sapien
tgacactggtatcatcagtgagctt

SEQ ID NO: 2151835 - DNA, 25 bp, Homo sapien
ctggtcttgcagaggtcctgagatt

SEQ ID NO: 2151836 - DNA, 25 bp, Homo sapien
ccagaactggtaatctgggctttta

SEQ ID NO: 2151837 - DNA, 25 bp, Homo sapien
gaactggtaatctgggcttttaggc

SEQ ID NO: 2151838 - DNA, 25 bp, Homo sapien
acccagaactggtaatctgggcttt

SEQ ID NO: 2151839 - DNA, 25 bp, Homo sapien
ctcagcaactccgatctcagcagcc

SEQ ID NO: 2151840 - DNA, 25 bp, Homo sapien
cagcaactccgatctcagcagcctg

SEQ ID NO: 2151841 - DNA, 25 bp, Homo sapien
agcaactccgatctcagcagcctgc

SEQ ID NO: 2151842 - DNA, 25 bp, Homo sapien
tcagcaactccgatctcagcagcct

SEQ ID NO: 2151843 - DNA, 25 bp, Homo sapien
cccactgagttgcttcatctgcatg

SEQ ID NO: 2151844 - DNA, 25 bp, Homo sapien
ccgtgtctgtgctagctcagactcc

SEQ ID NO: 2151845 - DNA, 25 bp, Homo sapien
ggtgtagtgggcctctgcttccctc

SEQ ID NO: 2151846 - DNA, 25 bp, Homo sapien
tctgcccgtgtctgtgctagctcag

SEQ ID NO: 2151847 - DNA, 25 bp, Homo sapien
tcccccaggtagtggtaggtggtga

SEQ ID NO: 2151848 - DNA, 25 bp, Homo sapien
caagattgaagtccttccttcttcc

SEQ ID NO: 2151849 - DNA, 25 bp, Homo sapien
aggtggtgatctcagcctccagctt

SEQ ID NO: 2151850 - DNA, 25 bp, Homo sapien
tggtgatctcagcctccagcttgac

SEQ ID NO: 2151851 - DNA, 25 bp, Homo sapien
gtttcggacaccactttgtggtcca

SEQ ID NO: 2151852 - DNA, 25 bp, Homo sapien
ttcggacaccactttgtggtccact

SEQ ID NO: 2151853 - DNA, 25 bp, Homo sapien
cattggtttcggacaccactttgtg

SEQ ID NO: 2151854 - DNA, 25 bp, Homo sapien
tggtttcggacaccactttgtggtc

SEQ ID NO: 2151855 - DNA, 25 bp, Homo sapien
caaggaagactaccacaaggcacct

SEQ ID NO: 2151856 - DNA, 25 bp, Homo sapien
caggaatgtttagaacaccaagcag

SEQ ID NO: 2151857 - DNA, 25 bp, Homo sapien
acaaggcacctaataatcaaactcc

SEQ ID NO: 2151858 - DNA, 25 bp, Homo sapien
ggtcaagggtaatgaaaggatccta

SEQ ID NO: 2151859 - DNA, 25 bp, Homo sapien
taatcttagtaatgattccttgatc

SEQ ID NO: 2151860 - DNA, 25 bp, Homo sapien
taatgattccttgatcagctgtgtc

SEQ ID NO: 2151861 - DNA, 25 bp, Homo sapien
tcttagtaatgattccttgatcagc

SEQ ID NO: 2151862 - DNA, 25 bp, Homo sapien
agcctttaatcttagtaatgattcc

SEQ ID NO: 2151863 - DNA, 25 bp, Homo sapien
cagcactgaaaatatcctgggcttc

SEQ ID NO: 2151864 - DNA, 25 bp, Homo sapien
cctgggcttctttgacagcaagatg

SEQ ID NO: 2151865 - DNA, 25 bp, Homo sapien
gacagcaagatgtctaaatgcttcc

SEQ ID NO: 2151866 - DNA, 25 bp, Homo sapien
tcctgggcttctttgacagcaagat

SEQ ID NO: 2151867 - DNA, 25 bp, Homo sapien
atgtctattcgagatccaagaagga

SEQ ID NO: 2151868 - DNA, 25 bp, Homo sapien
gcttcagcttgtggccttgcagatt

SEQ ID NO: 2151869 - DNA, 25 bp, Homo sapien
atatacatgtctattcgagatccaa

SEQ ID NO: 2151870 - DNA, 25 bp, Homo sapien
tacatgtctattcgagatccaagaa

SEQ ID NO: 2151871 - DNA, 25 bp, Homo sapien
ccgcttcattgtctggtgctgctgc

SEQ ID NO: 2151872 - DNA, 25 bp, Homo sapien
ctttgatgaagagcggtaccacagg

SEQ ID NO: 2151873 - DNA, 25 bp, Homo sapien
taacagatgtctggcagtgactgct

SEQ ID NO: 2151874 - DNA, 25 bp, Homo sapien
taccacagggtacgatgttcctctg

SEQ ID NO: 2151875 - DNA, 25 bp, Homo sapien
gttcctctgcaaacaagaagaccct

SEQ ID NO: 2151876 - DNA, 25 bp, Homo sapien
cagtgaattgtgtgaggaatcggca

SEQ ID NO: 2151877 - DNA, 25 bp, Homo sapien
gctagtacaatatgatcccacctct

SEQ ID NO: 2151878 - DNA, 25 bp, Homo sapien
caaaatccacatgatttccacaaga

SEQ ID NO: 2151879 - DNA, 25 bp, Homo sapien
cacaagagtcgctatgctagtacaa

SEQ ID NO: 2151880 - DNA, 25 bp, Homo sapien
agattttttgagttgtggcatccca

SEQ ID NO: 2151881 - DNA, 25 bp, Homo sapien
tggcatcccatgtcaaagaccttga

SEQ ID NO: 2151882 - DNA, 25 bp, Homo sapien
tttctggtgacaagtggattcccga

SEQ ID NO: 2151883 - DNA, 25 bp, Homo sapien
tcaaagagaagcacggagtgtcccc

SEQ ID NO: 2151884 - DNA, 25 bp, Homo sapien
aaatggagaaatgttatgagggagc

SEQ ID NO: 2151885 - DNA, 25 bp, Homo sapien
gacaggagggttaggggatggcaat

SEQ ID NO: 2151886 - DNA, 25 bp, Homo sapien
agaaatgttatgagggagcaaagca

SEQ ID NO: 2151887 - DNA, 25 bp, Homo sapien
gcaatggagggggtgaaacagacca

SEQ ID NO: 2151888 - DNA, 25 bp, Homo sapien
agaagttgggggccttgttgtcata

SEQ ID NO: 2151889 - DNA, 25 bp, Homo sapien
ggagaagttgggggccttgttgtca

SEQ ID NO: 2151890 - DNA, 25 bp, Homo sapien
ttgggggccttgttgtcatagtgac

SEQ ID NO: 2151891 - DNA, 25 bp, Homo sapien
aagttgggggccttgttgtcatagt

SEQ ID NO: 2151892 - DNA, 25 bp, Homo sapien
ggaagtgttgttgatgagggcttgc

SEQ ID NO: 2151893 - DNA, 25 bp, Homo sapien
aagtgttgttgatgagggcttgcat

SEQ ID NO: 2151894 - DNA, 25 bp, Homo sapien
ctagtggaagtgttgttgatgaggg

SEQ ID NO: 2151895 - DNA, 25 bp, Homo sapien
gtggaagtgttgttgatgagggctt

SEQ ID NO: 2151896 - DNA, 25 bp, Homo sapien
cagaatgcaaaggggacaaaataaa

SEQ ID NO: 2151897 - DNA, 25 bp, Homo sapien
aaaatggagagttgtgtttgtccaa

SEQ ID NO: 2151898 - DNA, 25 bp, Homo sapien
tgtgtttgtccaagcatgggttttg

SEQ ID NO: 2151899 - DNA, 25 bp, Homo sapien
aggcaaaaccagcagaatgcaaagg

SEQ ID NO: 2151900 - DNA, 25 bp, Homo sapien
caggtgatcatcagttacaggtctc

SEQ ID NO: 2151901 - DNA, 25 bp, Homo sapien
tctatgctgttcaggtgatcatcag

SEQ ID NO: 2151902 - DNA, 25 bp, Homo sapien
ttgatgcaagacctgatctatgctg

SEQ ID NO: 2151903 - DNA, 25 bp, Homo sapien
tcagttacaggtctctcttggcaac

SEQ ID NO: 2151904 - DNA, 25 bp, Homo sapien
ccgtgttagctaaaggcagaatgta

SEQ ID NO: 2151905 - DNA, 25 bp, Homo sapien
ggatttctcctcacttatttcagct

SEQ ID NO: 2151906 - DNA, 25 bp, Homo sapien
cataagtaattgctgccgtgttagc

SEQ ID NO: 2151907 - DNA, 25 bp, Homo sapien
agagtttatgtgtagccctaggagc

SEQ ID NO: 2151908 - DNA, 25 bp, Homo sapien
gggagagaaaatccttgtagatgat

SEQ ID NO: 2151909 - DNA, 25 bp, Homo sapien
gtagatgattagctttcaataaggg

SEQ ID NO: 2151910 - DNA, 25 bp, Homo sapien
ggccactggatttaaagtgatagtt

SEQ ID NO: 2151911 - DNA, 25 bp, Homo sapien
tcctcatatggtatcagtgggagag

SEQ ID NO: 2151912 - DNA, 25 bp, Homo sapien
gcagaagtcaataggcttgttgtaa

SEQ ID NO: 2151913 - DNA, 25 bp, Homo sapien
tcaataggcttgttgtaagcaggca

SEQ ID NO: 2151914 - DNA, 25 bp, Homo sapien
gagaaggtaggatgatttaaaaatc

SEQ ID NO: 2151915 - DNA, 25 bp, Homo sapien
agtcctgtttgcagaagtcaatagg

SEQ ID NO: 2151916 - DNA, 25 bp, Homo sapien
ttttttctgtgaatcctcaactgtc

SEQ ID NO: 2151917 - DNA, 25 bp, Homo sapien
tctgtgaatcctcaactgtctccat

SEQ ID NO: 2151918 - DNA, 25 bp, Homo sapien
aattttttctgtgaatcctcaactg

SEQ ID NO: 2151919 - DNA, 25 bp, Homo sapien
tttctgtgaatcctcaactgtctcc

SEQ ID NO: 2151920 - DNA, 25 bp, Homo sapien
ctcccatttccttggacctccacaa

SEQ ID NO: 2151921 - DNA, 25 bp, Homo sapien
tcccatttccttggacctccacaag

SEQ ID NO: 2151922 - DNA, 25 bp, Homo sapien
tctcccatttccttggacctccaca

SEQ ID NO: 2151923 - DNA, 25 bp, Homo sapien
tcatggtacatagggagatctggaa

SEQ ID NO: 2151924 - DNA, 25 bp, Homo sapien
taaagagagtccaaaggatgtactg

SEQ ID NO: 2151925 - DNA, 25 bp, Homo sapien
gacctcctcttaatgtccagacaaa

SEQ ID NO: 2151926 - DNA, 25 bp, Homo sapien
tgtactgagtttgaacaagcctctg

SEQ ID NO: 2151927 - DNA, 25 bp, Homo sapien
ccagtctggtcacgtaggatgttgc

SEQ ID NO: 2151928 - DNA, 25 bp, Homo sapien
ttgcttaacctggaggtctgagcct

SEQ ID NO: 2151929 - DNA, 25 bp, Homo sapien
cgaggcctttcgcttgggagagttt

SEQ ID NO: 2151930 - DNA, 25 bp, Homo sapien
tctggatgtgataatcagggaaggt

SEQ ID NO: 2151931 - DNA, 25 bp, Homo sapien
gcaataatcctattatccccttcca

SEQ ID NO: 2151932 - DNA, 25 bp, Homo sapien
taatccttgacatccagttgtgtag

SEQ ID NO: 2151933 - DNA, 25 bp, Homo sapien
tgtgtagactgtacttccaaaatct

SEQ ID NO: 2151934 - DNA, 25 bp, Homo sapien
catccaagctcaggccactgcaata

SEQ ID NO: 2151935 - DNA, 25 bp, Homo sapien
ctaaacacaaatgcccgtaggtgta

SEQ ID NO: 2151936 - DNA, 25 bp, Homo sapien
gcacctaatcttgtggctctaaaca

SEQ ID NO: 2151937 - DNA, 25 bp, Homo sapien
aatgcccgtaggtgtagcttgtgag

SEQ ID NO: 2151938 - DNA, 25 bp, Homo sapien
aagcacctaatcttgtggctctaaa

SEQ ID NO: 2151939 - DNA, 25 bp, Homo sapien
aagccagaatttgctaggtttggcc

SEQ ID NO: 2151940 - DNA, 25 bp, Homo sapien
agccagaatttgctaggtttggcca

SEQ ID NO: 2151941 - DNA, 25 bp, Homo sapien
gccagaatttgctaggtttggccat

SEQ ID NO: 2151942 - DNA, 25 bp, Homo sapien
taagccagaatttgctaggtttggc

SEQ ID NO: 2151943 - DNA, 25 bp, Homo sapien
gctcagttgcaaaaagctcctggca

SEQ ID NO: 2151944 - DNA, 25 bp, Homo sapien
ctgtaggaagctcataagctcagtt

SEQ ID NO: 2151945 - DNA, 25 bp, Homo sapien
agctcataagctcagttgcaaaaag

SEQ ID NO: 2151946 - DNA, 25 bp, Homo sapien
cataagctcagttgcaaaaagctcc

SEQ ID NO: 2151947 - DNA, 25 bp, Homo sapien
cagagaaaatgttctgagtaggagc

SEQ ID NO: 2151948 - DNA, 25 bp, Homo sapien
tctgagtaggagcaagttacgtctc

SEQ ID NO: 2151949 - DNA, 25 bp, Homo sapien
cccaatgaatgtgaaaagttgcaaa

SEQ ID NO: 2151950 - DNA, 25 bp, Homo sapien
gcaagttacgtctcccaatgaatgt

SEQ ID NO: 2151951 - DNA, 25 bp, Homo sapien
ggagcctcagattgcgccctaaatc

SEQ ID NO: 2151952 - DNA, 25 bp, Homo sapien
tcatcctctgctttcactattgcag

SEQ ID NO: 2151953 - DNA, 25 bp, Homo sapien
aggtgctcccatgccatttcatcct

SEQ ID NO: 2151954 - DNA, 25 bp, Homo sapien
taaatcccaatctcccatccggtgg

SEQ ID NO: 2151955 - DNA, 25 bp, Homo sapien
aggcagacacgaaaaccgcggtaat

SEQ ID NO: 2151956 - DNA, 25 bp, Homo sapien
agatgagaacagaggcagacacgaa

SEQ ID NO: 2151957 - DNA, 25 bp, Homo sapien
tccaacagggttgctgcttaggctc

SEQ ID NO: 2151958 - DNA, 25 bp, Homo sapien
gactgcctagggtggatctttcatc

SEQ ID NO: 2151959 - DNA, 25 bp, Homo sapien
cctctggagtatggcagatggggag

SEQ ID NO: 2151960 - DNA, 25 bp, Homo sapien
caccattgctgctgaggtgcagtca

SEQ ID NO: 2151961 - DNA, 25 bp, Homo sapien
gaaatgctctgcttagtctcctctg

SEQ ID NO: 2151962 - DNA, 25 bp, Homo sapien
gggatgagagtcctgctcagaaatg

SEQ ID NO: 2151963 - DNA, 25 bp, Homo sapien
actcctggttaatttcacagggcta

SEQ ID NO: 2151964 - DNA, 25 bp, Homo sapien
gcaatgctgacagtccagtgcagat

SEQ ID NO: 2151965 - DNA, 25 bp, Homo sapien
tataacaacttgctgactttctgca

SEQ ID NO: 2151966 - DNA, 25 bp, Homo sapien
tttcacagggctagtaagctcctct

SEQ ID NO: 2151967 - DNA, 25 bp, Homo sapien
gattctttcatttgcgagcttgagg

SEQ ID NO: 2151968 - DNA, 25 bp, Homo sapien
tttcatttgcgagcttgagggtggc

SEQ ID NO: 2151969 - DNA, 25 bp, Homo sapien
attctttcatttgcgagcttgaggg

SEQ ID NO: 2151970 - DNA, 25 bp, Homo sapien
tctttcatttgcgagcttgagggtg

SEQ ID NO: 2151971 - DNA, 25 bp, Homo sapien
tatagagacgctctccaacatttcc

SEQ ID NO: 2151972 - DNA, 25 bp, Homo sapien
tattggtggtgaggaagtcatttga

SEQ ID NO: 2151973 - DNA, 25 bp, Homo sapien
catttgatttttatccgacttggag

SEQ ID NO: 2151974 - DNA, 25 bp, Homo sapien
cagcctcataaacccagtgcatata

SEQ ID NO: 2151975 - DNA, 25 bp, Homo sapien
tatctctgactatggaaatcttgct

SEQ ID NO: 2151976 - DNA, 25 bp, Homo sapien
tcttgcttatccctagagtcccagc

SEQ ID NO: 2151977 - DNA, 25 bp, Homo sapien
tccaatcccaacagatgtggcctct

SEQ ID NO: 2151978 - DNA, 25 bp, Homo sapien
gctccaatcccaacagatgtggcct

SEQ ID NO: 2151979 - DNA, 25 bp, Homo sapien
tgtagtttgaaaaatcctcctatgc

SEQ ID NO: 2151980 - DNA, 25 bp, Homo sapien
gactgaaatcagtgcaaactcttcc

SEQ ID NO: 2151981 - DNA, 25 bp, Homo sapien
tgcttgacatatctaccaggttttg

SEQ ID NO: 2151982 - DNA, 25 bp, Homo sapien
cctcattattggctgcactgaaaca

SEQ ID NO: 2151983 - DNA, 25 bp, Homo sapien
gtgcaacccttttgctgcgttctta

SEQ ID NO: 2151984 - DNA, 25 bp, Homo sapien
tgcaacccttttgctgcgttcttag

SEQ ID NO: 2151985 - DNA, 25 bp, Homo sapien
ttccttcctttagattggaatccat

SEQ ID NO: 2151986 - DNA, 25 bp, Homo sapien
ctgcttccttcctttagattggaat

SEQ ID NO: 2151987 - DNA, 25 bp, Homo sapien
gcttccttcctttagattggaatcc

SEQ ID NO: 2151988 - DNA, 25 bp, Homo sapien
cttgtcagaagtttcagtcctgctt

SEQ ID NO: 2151989 - DNA, 25 bp, Homo sapien
ttgaagtaaaaccaatatcactatc

SEQ ID NO: 2151990 - DNA, 25 bp, Homo sapien
cccaaagcccattgccagaccatga

SEQ ID NO: 2151991 - DNA, 25 bp, Homo sapien
cccccaaagcccattgccagaccat

SEQ ID NO: 2151992 - DNA, 25 bp, Homo sapien
ctcccccaaagcccattgccagacc

SEQ ID NO: 2151993 - DNA, 25 bp, Homo sapien
ccaaagcccattgccagaccatgag

SEQ ID NO: 2151994 - DNA, 25 bp, Homo sapien
tccagtaacctttgggcagagggca

SEQ ID NO: 2151995 - DNA, 25 bp, Homo sapien
ttgagctatttccaacttgtgagga

SEQ ID NO: 2151996 - DNA, 25 bp, Homo sapien
caacttgtgaggatctccatgttac

SEQ ID NO: 2151997 - DNA, 25 bp, Homo sapien
caggatgaggtattgagctatttcc

SEQ ID NO: 2151998 - DNA, 25 bp, Homo sapien
tggattcctcttttcggcagacccg

SEQ ID NO: 2151999 - DNA, 25 bp, Homo sapien
ttcctcacttgtaaccagaaagttg

SEQ ID NO: 2152000 - DNA, 25 bp, Homo sapien
gtagatctcactctctggcatcttg

SEQ ID NO: 2152001 - DNA, 25 bp, Homo sapien
ctcacttgtaaccagaaagttggga

SEQ ID NO: 2152002 - DNA, 25 bp, Homo sapien
cagtagtcccggtggagtcactcat

SEQ ID NO: 2152003 - DNA, 25 bp, Homo sapien
ccaggcctctcaaacgcatcggtgt

SEQ ID NO: 2152004 - DNA, 25 bp, Homo sapien
gcttcagtagtcccggtggagtcac

SEQ ID NO: 2152005 - DNA, 25 bp, Homo sapien
tcaaacgcatcggtgtttcctgctt

SEQ ID NO: 2152006 - DNA, 25 bp, Homo sapien
ccagctcagtgctcccaacactcag

SEQ ID NO: 2152007 - DNA, 25 bp, Homo sapien
atttgtggaccatactctgccacct

SEQ ID NO: 2152008 - DNA, 25 bp, Homo sapien
cagctcagtgctcccaacactcagt

SEQ ID NO: 2152009 - DNA, 25 bp, Homo sapien
ggcaccaccagagcattgggagctg

SEQ ID NO: 2152010 - DNA, 25 bp, Homo sapien
aggcaccaccagagcattgggagct

SEQ ID NO: 2152011 - DNA, 25 bp, Homo sapien
gattaagtacagctcccttggtgtc

SEQ ID NO: 2152012 - DNA, 25 bp, Homo sapien
gctcctttaagatggcaccaaagtc

SEQ ID NO: 2152013 - DNA, 25 bp, Homo sapien
gttttgactgttggttcttataaca

SEQ ID NO: 2152014 - DNA, 25 bp, Homo sapien
ttagagctcataagacaaagcctgg

SEQ ID NO: 2152015 - DNA, 25 bp, Homo sapien
cccttgaatcttttggtactgtctt

SEQ ID NO: 2152016 - DNA, 25 bp, Homo sapien
ttttccaattcttgccacctggtcc

SEQ ID NO: 2152017 - DNA, 25 bp, Homo sapien
ttgccacctggtcccagtaggatgg

SEQ ID NO: 2152018 - DNA, 25 bp, Homo sapien
tcccagtaggatggaagttttggcc

SEQ ID NO: 2152019 - DNA, 25 bp, Homo sapien
gattcagcgcagtttggcattatcc

SEQ ID NO: 2152020 - DNA, 25 bp, Homo sapien
gccgaagaagaattcacctatgtaa

SEQ ID NO: 2152021 - DNA, 25 bp, Homo sapien
tctgtccaggattcagcgcagtttg

SEQ ID NO: 2152022 - DNA, 25 bp, Homo sapien
gcattatccatgacttgatgccgaa

SEQ ID NO: 2152023 - DNA, 25 bp, Homo sapien
tgtaggctctttacttggcagtttc

SEQ ID NO: 2152024 - DNA, 25 bp, Homo sapien
ctgtaggctctttacttggcagttt

SEQ ID NO: 2152025 - DNA, 25 bp, Homo sapien
aggctctttacttggcagtttcttt

SEQ ID NO: 2152026 - DNA, 25 bp, Homo sapien
gtaggctctttacttggcagtttct

SEQ ID NO: 2152027 - DNA, 25 bp, Homo sapien
tcaaataggcgcaaccactctggac

SEQ ID NO: 2152028 - DNA, 25 bp, Homo sapien
tcctcttacactgtatagaaacaca

SEQ ID NO: 2152029 - DNA, 25 bp, Homo sapien
gatgccatggcccaaatggttgaga

SEQ ID NO: 2152030 - DNA, 25 bp, Homo sapien
gcctgattctgtatgggtactgctg

SEQ ID NO: 2152031 - DNA, 25 bp, Homo sapien
ctgatgatcattggcttcacttcgc

SEQ ID NO: 2152032 - DNA, 25 bp, Homo sapien
cgtgaaggttggttgaagccttctt

SEQ ID NO: 2152033 - DNA, 25 bp, Homo sapien
gctgatgatcattggcttcacttcg

SEQ ID NO: 2152034 - DNA, 25 bp, Homo sapien
gttaaagtgagaggcgtgaaggttg

SEQ ID NO: 2152035 - DNA, 25 bp, Homo sapien
acaatgaaatccagcaaatgtaaat

SEQ ID NO: 2152036 - DNA, 25 bp, Homo sapien
gacgatgcagtgagcaaaatcccaa

SEQ ID NO: 2152037 - DNA, 25 bp, Homo sapien
acgatgcagtgagcaaaatcccaag

SEQ ID NO: 2152038 - DNA, 25 bp, Homo sapien
caatgaaatccagcaaatgtaaatt

SEQ ID NO: 2152039 - DNA, 25 bp, Homo sapien
tgacctatcgccacggtgaggagca

SEQ ID NO: 2152040 - DNA, 25 bp, Homo sapien
tcaccataagacaattgacctatcg

SEQ ID NO: 2152041 - DNA, 25 bp, Homo sapien
gccgaaaggactttgtcaagctgga

SEQ ID NO: 2152042 - DNA, 25 bp, Homo sapien
aaagcctcaaacaaagcggctgccg

SEQ ID NO: 2152043 - DNA, 25 bp, Homo sapien
tgtggaatcttgcaaggacaaagag

SEQ ID NO: 2152044 - DNA, 25 bp, Homo sapien
tctggctaatgtggaatcttgcaag

SEQ ID NO: 2152045 - DNA, 25 bp, Homo sapien
tctggccatggccaaaattagctgg

SEQ ID NO: 2152046 - DNA, 25 bp, Homo sapien
tggataattctttgaatctggctaa

SEQ ID NO: 2152047 - DNA, 25 bp, Homo sapien
tgcaaatttgtctgtggcaagcatt

SEQ ID NO: 2152048 - DNA, 25 bp, Homo sapien
tgtttgcaaatttgtctgtggcaag

SEQ ID NO: 2152049 - DNA, 25 bp, Homo sapien
gaaatcatgtcgaaatactgtctcc

SEQ ID NO: 2152050 - DNA, 25 bp, Homo sapien
tggtttgatttgttggcgtcagttg

SEQ ID NO: 2152051 - DNA, 25 bp, Homo sapien
catattctaactgggcagcatgcct

SEQ ID NO: 2152052 - DNA, 25 bp, Homo sapien
tatgttccaccctacaaggcctggg

SEQ ID NO: 2152053 - DNA, 25 bp, Homo sapien
ccctcagaccctgttaggtgaatga

SEQ ID NO: 2152054 - DNA, 25 bp, Homo sapien
gcctggtagagaacttatcaagcgt

SEQ ID NO: 2152055 - DNA, 25 bp, Homo sapien
ggttggctcatgggtacatctgcaa

SEQ ID NO: 2152056 - DNA, 25 bp, Homo sapien
tcacaatgagaagttgaccttttgc

SEQ ID NO: 2152057 - DNA, 25 bp, Homo sapien
ggagacttgctatttggttggctca

SEQ ID NO: 2152058 - DNA, 25 bp, Homo sapien
gaatgaatgtgagtctgtaactgga

SEQ ID NO: 2152059 - DNA, 25 bp, Homo sapien
tcatcaggctagctttagacatccc

SEQ ID NO: 2152060 - DNA, 25 bp, Homo sapien
tcaggctagctttagacatccccat

SEQ ID NO: 2152061 - DNA, 25 bp, Homo sapien
tcttcatcaggctagctttagacat

SEQ ID NO: 2152062 - DNA, 25 bp, Homo sapien
tgcttcttcatcaggctagctttag

SEQ ID NO: 2152063 - DNA, 25 bp, Homo sapien
tgggccctggatgtttgagaaatga

SEQ ID NO: 2152064 - DNA, 25 bp, Homo sapien
catttatcaccctaattgtggcagg

SEQ ID NO: 2152065 - DNA, 25 bp, Homo sapien
caggcagagtgcgtgtcactgccat

SEQ ID NO: 2152066 - DNA, 25 bp, Homo sapien
gaaggccatctgtcagtattctcca

SEQ ID NO: 2152067 - DNA, 25 bp, Homo sapien
tgatcttgataagaaacgggaagaa

SEQ ID NO: 2152068 - DNA, 25 bp, Homo sapien
cctagattgatcttgataagaaacg

SEQ ID NO: 2152069 - DNA, 25 bp, Homo sapien
aatgccttctgaggattttgattag

SEQ ID NO: 2152070 - DNA, 25 bp, Homo sapien
gcccagcctagattgatcttgataa

SEQ ID NO: 2152071 - DNA, 25 bp, Homo sapien
ggattcctgatccatcaatgtgaca

SEQ ID NO: 2152072 - DNA, 25 bp, Homo sapien
cttttggttggttggaggatccact

SEQ ID NO: 2152073 - DNA, 25 bp, Homo sapien
tcctagaacccctgaattctttata

SEQ ID NO: 2152074 - DNA, 25 bp, Homo sapien
aaattgcctgcatattctatccctg

SEQ ID NO: 2152075 - DNA, 25 bp, Homo sapien
gccaccctatgctgcttataacaga

SEQ ID NO: 2152076 - DNA, 25 bp, Homo sapien
tggaaagagcattgcgataagccac

SEQ ID NO: 2152077 - DNA, 25 bp, Homo sapien
tgctcaggtaatgaccattcaaggt

SEQ ID NO: 2152078 - DNA, 25 bp, Homo sapien
tacagtctctatatgttcactcaaa

SEQ ID NO: 2152079 - DNA, 25 bp, Homo sapien
tcaattagaaggctagtgaaaacag

SEQ ID NO: 2152080 - DNA, 25 bp, Homo sapien
taagatgtatcccactaggaatgga

SEQ ID NO: 2152081 - DNA, 25 bp, Homo sapien
taggaatggaaggtcaaatagctgc

SEQ ID NO: 2152082 - DNA, 25 bp, Homo sapien
catcatgggtgtttaggatagttct

SEQ ID NO: 2152083 - DNA, 25 bp, Homo sapien
taagctcatcaaccaggtaaatcat

SEQ ID NO: 2152084 - DNA, 25 bp, Homo sapien
cagttccttgttctaagctcatcaa

SEQ ID NO: 2152085 - DNA, 25 bp, Homo sapien
tccttgttctaagctcatcaaccag

SEQ ID NO: 2152086 - DNA, 25 bp, Homo sapien
ctaagctcatcaaccaggtaaatca

SEQ ID NO: 2152087 - DNA, 25 bp, Homo sapien
agaagcagtatggtcagagctatgc

SEQ ID NO: 2152088 - DNA, 25 bp, Homo sapien
tcctctgtagtcagccatatcccgt

SEQ ID NO: 2152089 - DNA, 25 bp, Homo sapien
tagtcagccatatcccgtgaagaag

SEQ ID NO: 2152090 - DNA, 25 bp, Homo sapien
tatcccgtgaagaagcagtatggtc

SEQ ID NO: 2152091 - DNA, 25 bp, Homo sapien
caaactatgctgtaccaccacagaa

SEQ ID NO: 2152092 - DNA, 25 bp, Homo sapien
acagaaccctcttacagggccaggc

SEQ ID NO: 2152093 - DNA, 25 bp, Homo sapien
aactatgctgtaccaccacagaacc

SEQ ID NO: 2152094 - DNA, 25 bp, Homo sapien
taccaccacagaaccctcttacagg

SEQ ID NO: 2152095 - DNA, 25 bp, Homo sapien
taacaagccctcaagattttcatgt

SEQ ID NO: 2152096 - DNA, 25 bp, Homo sapien
tgtttcgggtaacaagccctcaaga

SEQ ID NO: 2152097 - DNA, 25 bp, Homo sapien
tcttcctcattggaattctgtaccc

SEQ ID NO: 2152098 - DNA, 25 bp, Homo sapien
ttcttcctcattggaattctgtacc

SEQ ID NO: 2152099 - DNA, 25 bp, Homo sapien
ctaattgagcgtttcagattccagg

SEQ ID NO: 2152100 - DNA, 25 bp, Homo sapien
gtatgcacaacaaggtatgacaaga

SEQ ID NO: 2152101 - DNA, 25 bp, Homo sapien
tatgacaagaatgctctttgctgcc

SEQ ID NO: 2152102 - DNA, 25 bp, Homo sapien
taactgaataagaagggttcagccc

SEQ ID NO: 2152103 - DNA, 25 bp, Homo sapien
aatcccagtgcccatcaacggtgga

SEQ ID NO: 2152104 - DNA, 25 bp, Homo sapien
tacgggcaagtggacaagttaagac

SEQ ID NO: 2152105 - DNA, 25 bp, Homo sapien
tgttggtaagcgtgtaaatttgtcc

SEQ ID NO: 2152106 - DNA, 25 bp, Homo sapien
gaacccctgagtggttaacctgaca

SEQ ID NO: 2152107 - DNA, 25 bp, Homo sapien
cagtggcacttgaccttgggtctgt

SEQ ID NO: 2152108 - DNA, 25 bp, Homo sapien
gggtcagaatcaagttccaaagtgg

SEQ ID NO: 2152109 - DNA, 25 bp, Homo sapien
ggtctgtggcacctgatgctgaggg

SEQ ID NO: 2152110 - DNA, 25 bp, Homo sapien
cagaatcaagttccaaagtggtttg

SEQ ID NO: 2152111 - DNA, 25 bp, Homo sapien
tgatgtatcagggaacaatttgagc

SEQ ID NO: 2152112 - DNA, 25 bp, Homo sapien
ccaatgtgattgatgtatcagggaa

SEQ ID NO: 2152113 - DNA, 25 bp, Homo sapien
tagctaaggcactgtaactcagttc

SEQ ID NO: 2152114 - DNA, 25 bp, Homo sapien
tgaatttcgtgtttgcttgagcatg

SEQ ID NO: 2152115 - DNA, 25 bp, Homo sapien
ccttttgggacctgttgtctgtcaa

SEQ ID NO: 2152116 - DNA, 25 bp, Homo sapien
gtcaaaacttccttgccctgtgttc

SEQ ID NO: 2152117 - DNA, 25 bp, Homo sapien
attccttttgggacctgttgtctgt

SEQ ID NO: 2152118 - DNA, 25 bp, Homo sapien
actgtcaaaacttccttgccctgtg

SEQ ID NO: 2152119 - DNA, 25 bp, Homo sapien
tgtgtttgttcccactagttgttca

SEQ ID NO: 2152120 - DNA, 25 bp, Homo sapien
tagttgttcaaacgcacagtgtgta

SEQ ID NO: 2152121 - DNA, 25 bp, Homo sapien
tgaagagccacaacagtagcaggga

SEQ ID NO: 2152122 - DNA, 25 bp, Homo sapien
ggaatgcaggtgtcaaagcaagcca

SEQ ID NO: 2152123 - DNA, 25 bp, Homo sapien
tacaagggagaaccttgcaaacacg

SEQ ID NO: 2152124 - DNA, 25 bp, Homo sapien
cacctatgctacaagggagaacctt

SEQ ID NO: 2152125 - DNA, 25 bp, Homo sapien
gaaccttgcaaacacgagttatacc

SEQ ID NO: 2152126 - DNA, 25 bp, Homo sapien
aacacgagttataccctctggcctc

SEQ ID NO: 2152127 - DNA, 25 bp, Homo sapien
ctacacctttcaggcgagccaggcc

SEQ ID NO: 2152128 - DNA, 25 bp, Homo sapien
aggtccgtgattctcctccaggttt

SEQ ID NO: 2152129 - DNA, 25 bp, Homo sapien
tacacctttcaggcgagccaggccc

SEQ ID NO: 2152130 - DNA, 25 bp, Homo sapien
ccctacacctttcaggcgagccagg

SEQ ID NO: 2152131 - DNA, 25 bp, Homo sapien
gtgtgcaatgagcatcttctatggg

SEQ ID NO: 2152132 - DNA, 25 bp, Homo sapien
tggcctgacagttgtgtttctctca

SEQ ID NO: 2152133 - DNA, 25 bp, Homo sapien
taaaggtactatcccacaaagacga

SEQ ID NO: 2152134 - DNA, 25 bp, Homo sapien
gtcactggcatgctctaaaactggc

SEQ ID NO: 2152135 - DNA, 25 bp, Homo sapien
cagctgctcagaatggccttattaa

SEQ ID NO: 2152136 - DNA, 25 bp, Homo sapien
taagtttggccagaaagtcactctg

SEQ ID NO: 2152137 - DNA, 25 bp, Homo sapien
gtggtaattctttgcacagcctaag

SEQ ID NO: 2152138 - DNA, 25 bp, Homo sapien
tctacaagacagagcgatggaatcc

SEQ ID NO: 2152139 - DNA, 25 bp, Homo sapien
acaggggtttctctgatagacccag

SEQ ID NO: 2152140 - DNA, 25 bp, Homo sapien
ggagaatagcactgtatagtttaga

SEQ ID NO: 2152141 - DNA, 25 bp, Homo sapien
catggacacaagaagctatttggtg

SEQ ID NO: 2152142 - DNA, 25 bp, Homo sapien
acacaagaagctatttggtgaggtg

SEQ ID NO: 2152143 - DNA, 25 bp, Homo sapien
gagaatagcactgtatagtttagaa

SEQ ID NO: 2152144 - DNA, 25 bp, Homo sapien
tccatgtccagcaagagctagtgca

SEQ ID NO: 2152145 - DNA, 25 bp, Homo sapien
tcagggatatccatcaagggcacaa

SEQ ID NO: 2152146 - DNA, 25 bp, Homo sapien
cagttcggataaatggccagcctca

SEQ ID NO: 2152147 - DNA, 25 bp, Homo sapien
aagccagcatgttgggatgatccca

SEQ ID NO: 2152148 - DNA, 25 bp, Homo sapien
gatttctgaccctatggagctcata

SEQ ID NO: 2152149 - DNA, 25 bp, Homo sapien
cactgtgtgctggtctaggcttata

SEQ ID NO: 2152150 - DNA, 25 bp, Homo sapien
caaatagttggtcatgcaagccagc

SEQ ID NO: 2152151 - DNA, 25 bp, Homo sapien
gccagcttatgtccaaagtcgtgaa

SEQ ID NO: 2152152 - DNA, 25 bp, Homo sapien
agccttttagttttagatagacttg

SEQ ID NO: 2152153 - DNA, 25 bp, Homo sapien
aatactttattgccgtggtagacag

SEQ ID NO: 2152154 - DNA, 25 bp, Homo sapien
tttattgccgtggtagacagtcttt

SEQ ID NO: 2152155 - DNA, 25 bp, Homo sapien
tattgccgtggtagacagtcttttc

SEQ ID NO: 2152156 - DNA, 25 bp, Homo sapien
tactttattgccgtggtagacagtc

SEQ ID NO: 2152157 - DNA, 25 bp, Homo sapien
ccaggtgccactgaaaacagcagcc

SEQ ID NO: 2152158 - DNA, 25 bp, Homo sapien
agtgtgtcacccttgaagaccattt

SEQ ID NO: 2152159 - DNA, 25 bp, Homo sapien
gcctatccctttattgctggttgta

SEQ ID NO: 2152160 - DNA, 25 bp, Homo sapien
ttaagtaatgcctatccctttattg

SEQ ID NO: 2152161 - DNA, 25 bp, Homo sapien
taatgcctatccctttattgctggt

SEQ ID NO: 2152162 - DNA, 25 bp, Homo sapien
atccctttattgctggttgtagcac

SEQ ID NO: 2152163 - DNA, 25 bp, Homo sapien
aacatatatcctgttggcttctgga

SEQ ID NO: 2152164 - DNA, 25 bp, Homo sapien
gtgtaactggccacatatcaaccat

SEQ ID NO: 2152165 - DNA, 25 bp, Homo sapien
tctgtgcatactgccagcatgattt

SEQ ID NO: 2152166 - DNA, 25 bp, Homo sapien
gaattttgctactaacatatatcct

SEQ ID NO: 2152167 - DNA, 25 bp, Homo sapien
tctggagcagtcgaatctttgggtc

SEQ ID NO: 2152168 - DNA, 25 bp, Homo sapien
tagaatctgtaaaactccagtaacc

SEQ ID NO: 2152169 - DNA, 25 bp, Homo sapien
cagagccacttccattgtagaacag

SEQ ID NO: 2152170 - DNA, 25 bp, Homo sapien
tttgggtcatattgcaccaggtagg

SEQ ID NO: 2152171 - DNA, 25 bp, Homo sapien
ttctcagataaattttccaaatgtc

SEQ ID NO: 2152172 - DNA, 25 bp, Homo sapien
tggccttcaatctccaaccaggctg

SEQ ID NO: 2152173 - DNA, 25 bp, Homo sapien
aagccagagttgaaggaagctggcc

SEQ ID NO: 2152174 - DNA, 25 bp, Homo sapien
ccatttcttcgatcaaagccagagt

SEQ ID NO: 2152175 - DNA, 25 bp, Homo sapien
tctgtgggctggaatagtccaatgc

SEQ ID NO: 2152176 - DNA, 25 bp, Homo sapien
tagaaactgtaagttgacagccaga

SEQ ID NO: 2152177 - DNA, 25 bp, Homo sapien
cccaggaactgagggtagaaactgt

SEQ ID NO: 2152178 - DNA, 25 bp, Homo sapien
ctgtaagttgacagccagagaaaat

SEQ ID NO: 2152179 - DNA, 25 bp, Homo sapien
caggtatgaaagcagattaatacaa

SEQ ID NO: 2152180 - DNA, 25 bp, Homo sapien
tgtaccactatggtgggatgctgct

SEQ ID NO: 2152181 - DNA, 25 bp, Homo sapien
gatatgaacaataagaaatttcttc

SEQ ID NO: 2152182 - DNA, 25 bp, Homo sapien
ttcctccagatacctcagatcatct

SEQ ID NO: 2152183 - DNA, 25 bp, Homo sapien
gccatgtgaggtgtcagtgtgcccc

SEQ ID NO: 2152184 - DNA, 25 bp, Homo sapien
catgtgaggtgtcagtgtgcccctg

SEQ ID NO: 2152185 - DNA, 25 bp, Homo sapien
caggtctgttggagtacccggccat

SEQ ID NO: 2152186 - DNA, 25 bp, Homo sapien
cggccatgtgaggtgtcagtgtgcc

SEQ ID NO: 2152187 - DNA, 25 bp, Homo sapien
tatgtctcagaggttcacccaaggt

SEQ ID NO: 2152188 - DNA, 25 bp, Homo sapien
tctattcccctcttaccatgctggt

SEQ ID NO: 2152189 - DNA, 25 bp, Homo sapien
tcagtcggctggtgattaatcctgc

SEQ ID NO: 2152190 - DNA, 25 bp, Homo sapien
tgatgtagtacctgggtatcactgc

SEQ ID NO: 2152191 - DNA, 25 bp, Homo sapien
agatttactcctgttaaagaatgcc

SEQ ID NO: 2152192 - DNA, 25 bp, Homo sapien
actgctgcaagtaatggggaaattg

SEQ ID NO: 2152193 - DNA, 25 bp, Homo sapien
ttagatttactcctgttaaagaatg

SEQ ID NO: 2152194 - DNA, 25 bp, Homo sapien
caagtaatggggaaattgtagatgt

SEQ ID NO: 2152195 - DNA, 25 bp, Homo sapien
tacttagtaaatcaaacggactctc

SEQ ID NO: 2152196 - DNA, 25 bp, Homo sapien
taaatgttccacatgcaataaagtg

SEQ ID NO: 2152197 - DNA, 25 bp, Homo sapien
tcattcaaatcaggagccaacacat

SEQ ID NO: 2152198 - DNA, 25 bp, Homo sapien
ttctggtagaggagacgctgtgtca

SEQ ID NO: 2152199 - DNA, 25 bp, Homo sapien
tgaagacagtatgtccagtaagcct

SEQ ID NO: 2152200 - DNA, 25 bp, Homo sapien
gatagatgaagacagtatgtccagt

SEQ ID NO: 2152201 - DNA, 25 bp, Homo sapien
gccttgtggaaaatatctggtccca

SEQ ID NO: 2152202 - DNA, 25 bp, Homo sapien
cagtatgtccagtaagccttgtgga

SEQ ID NO: 2152203 - DNA, 25 bp, Homo sapien
tcttttgcaacaggctgaaaactcc

SEQ ID NO: 2152204 - DNA, 25 bp, Homo sapien
tcttcttttgcaacaggctgaaaac

SEQ ID NO: 2152205 - DNA, 25 bp, Homo sapien
tgcaacaggctgaaaactccaatag

SEQ ID NO: 2152206 - DNA, 25 bp, Homo sapien
ttttgcaacaggctgaaaactccaa

SEQ ID NO: 2152207 - DNA, 25 bp, Homo sapien
ctttgagtaaatcttcagggtctcc

SEQ ID NO: 2152208 - DNA, 25 bp, Homo sapien
tttgttccactcaaaggtatctttg

SEQ ID NO: 2152209 - DNA, 25 bp, Homo sapien
ggtatctttgagtaaatcttcaggg

SEQ ID NO: 2152210 - DNA, 25 bp, Homo sapien
caaaggtatctttgagtaaatcttc

SEQ ID NO: 2152211 - DNA, 25 bp, Homo sapien
gggtatgacattctctattcttctt

SEQ ID NO: 2152212 - DNA, 25 bp, Homo sapien
gctcctctggcgttactttctagcc

SEQ ID NO: 2152213 - DNA, 25 bp, Homo sapien
ctttctagataggtgggtaggagta

SEQ ID NO: 2152214 - DNA, 25 bp, Homo sapien
ggtaggagtattaggtgtagatgca

SEQ ID NO: 2152215 - DNA, 25 bp, Homo sapien
actgaaaagctagccaagcagagga

SEQ ID NO: 2152216 - DNA, 25 bp, Homo sapien
tattgtcaactgctatacatacgca

SEQ ID NO: 2152217 - DNA, 25 bp, Homo sapien
ggaaaccaaactaataatgtggctg

SEQ ID NO: 2152218 - DNA, 25 bp, Homo sapien
tagaggaaacccatattgacataat

SEQ ID NO: 2152219 - DNA, 25 bp, Homo sapien
ttcctttcagggtaaatgcaccaca

SEQ ID NO: 2152220 - DNA, 25 bp, Homo sapien
cccacagcccttgtttagaaaatgt

SEQ ID NO: 2152221 - DNA, 25 bp, Homo sapien
ccacagcccttgtttagaaaatgta

SEQ ID NO: 2152222 - DNA, 25 bp, Homo sapien
ggtaaatgcaccacaagtcaaggca

SEQ ID NO: 2152223 - DNA, 25 bp, Homo sapien
gggaagcacgtaggcatcaaagact

SEQ ID NO: 2152224 - DNA, 25 bp, Homo sapien
agcacgtaggcatcaaagactctcg

SEQ ID NO: 2152225 - DNA, 25 bp, Homo sapien
gaagcacgtaggcatcaaagactct

SEQ ID NO: 2152226 - DNA, 25 bp, Homo sapien
aagcacgtaggcatcaaagactctc

SEQ ID NO: 2152227 - DNA, 25 bp, Homo sapien
gtgggggaagtggagcagcacccgc

SEQ ID NO: 2152228 - DNA, 25 bp, Homo sapien
tggtgggggaagtggagcagcaccc

SEQ ID NO: 2152229 - DNA, 25 bp, Homo sapien
gggaagtggagcagcacccgcaggt

SEQ ID NO: 2152230 - DNA, 25 bp, Homo sapien
gctttggtgggggaagtggagcagc

SEQ ID NO: 2152231 - DNA, 25 bp, Homo sapien
cattgtaggtaagtgactcgactga

SEQ ID NO: 2152232 - DNA, 25 bp, Homo sapien
gccgccttcacgtttttgaatggga

SEQ ID NO: 2152233 - DNA, 25 bp, Homo sapien
gactcgactgacttggctacaactg

SEQ ID NO: 2152234 - DNA, 25 bp, Homo sapien
agatcatcttctgcatcgggtcaca

SEQ ID NO: 2152235 - DNA, 25 bp, Homo sapien
ggaccttggccatagtcatctctgt

SEQ ID NO: 2152236 - DNA, 25 bp, Homo sapien
tccaccgttgggcaaagatgttcca

SEQ ID NO: 2152237 - DNA, 25 bp, Homo sapien
tgaaattcaaatgcttgagtcatct

SEQ ID NO: 2152238 - DNA, 25 bp, Homo sapien
tctggtctcatagtggtttgatctc

SEQ ID NO: 2152239 - DNA, 25 bp, Homo sapien
tcttttctattgagtctgggcttgt

SEQ ID NO: 2152240 - DNA, 25 bp, Homo sapien
tgtgttactgcatactgtgattagc

SEQ ID NO: 2152241 - DNA, 25 bp, Homo sapien
tatttgatactgtgcttgctgtcag

SEQ ID NO: 2152242 - DNA, 25 bp, Homo sapien
aattgtttctttgaggtcatctaaa

SEQ ID NO: 2152243 - DNA, 25 bp, Homo sapien
gaaggtgaaatcctaaagcctagaa

SEQ ID NO: 2152244 - DNA, 25 bp, Homo sapien
cctagatttaacattgttgggccat

SEQ ID NO: 2152245 - DNA, 25 bp, Homo sapien
caaatgctaattgccagttccagtg

SEQ ID NO: 2152246 - DNA, 25 bp, Homo sapien
cattgggttatatagtttgttgggc

SEQ ID NO: 2152247 - DNA, 25 bp, Homo sapien
caagatgtccggtgagaagaaagtc

SEQ ID NO: 2152248 - DNA, 25 bp, Homo sapien
cacatagggaactgaaaggctctga

SEQ ID NO: 2152249 - DNA, 25 bp, Homo sapien
tagtggttcacagtgcacataggga

SEQ ID NO: 2152250 - DNA, 25 bp, Homo sapien
ctgacagtgaaatataggtagtggc

SEQ ID NO: 2152251 - DNA, 25 bp, Homo sapien
ttctatagtcacagtaacacttcta

SEQ ID NO: 2152252 - DNA, 25 bp, Homo sapien
tatttgctgcttatggagtgtagtc

SEQ ID NO: 2152253 - DNA, 25 bp, Homo sapien
gagtgtagtctaggaaatttcataa

SEQ ID NO: 2152254 - DNA, 25 bp, Homo sapien
agttgcgcatcactacgaccggcta

SEQ ID NO: 2152255 - DNA, 25 bp, Homo sapien
gacagagtagtataatgagccccga

SEQ ID NO: 2152256 - DNA, 25 bp, Homo sapien
cctgtttctaacaaccatcaaccag

SEQ ID NO: 2152257 - DNA, 25 bp, Homo sapien
agccccgaagtacttatcacctgtt

SEQ ID NO: 2152258 - DNA, 25 bp, Homo sapien
gtcctgttctgtctatatccccagt

SEQ ID NO: 2152259 - DNA, 25 bp, Homo sapien
cattgggacactaaaaggttggcct

SEQ ID NO: 2152260 - DNA, 25 bp, Homo sapien
tcacaaatgtcatgggtctaatgcg

SEQ ID NO: 2152261 - DNA, 25 bp, Homo sapien
tgccagtttataagcaaccctaaag

SEQ ID NO: 2152262 - DNA, 25 bp, Homo sapien
cctaatttgccagctatagcagacc

SEQ ID NO: 2152263 - DNA, 25 bp, Homo sapien
tttggagtggtcaaagtccatgcca

SEQ ID NO: 2152264 - DNA, 25 bp, Homo sapien
cggaattaaaccaagggtcgcattg

SEQ ID NO: 2152265 - DNA, 25 bp, Homo sapien
tcgcattgagccagcattccctggt

SEQ ID NO: 2152266 - DNA, 25 bp, Homo sapien
gtccatgccatagtggtcattaaaa

SEQ ID NO: 2152267 - DNA, 25 bp, Homo sapien
aatcggagaattccccaaagcccag

SEQ ID NO: 2152268 - DNA, 25 bp, Homo sapien
tccacgccctaaatcggagaattcc

SEQ ID NO: 2152269 - DNA, 25 bp, Homo sapien
ttcttccacgccctaaatcggagaa

SEQ ID NO: 2152270 - DNA, 25 bp, Homo sapien
ctcttctttcttccacgccctaaat

SEQ ID NO: 2152271 - DNA, 25 bp, Homo sapien
ccgggagcggggagctgggagctga

SEQ ID NO: 2152272 - DNA, 25 bp, Homo sapien
gagccgggagcggggagctgggagc

SEQ ID NO: 2152273 - DNA, 25 bp, Homo sapien
agcggggagctgggagctgagaatc

SEQ ID NO: 2152274 - DNA, 25 bp, Homo sapien
gcgccgggcgccgggcgccgggagc

SEQ ID NO: 2152275 - DNA, 25 bp, Homo sapien
ctcggctgcgtgtcgtttgaggaac

SEQ ID NO: 2152276 - DNA, 25 bp, Homo sapien
tcggctgcgtgtcgtttgaggaaca

SEQ ID NO: 2152277 - DNA, 25 bp, Homo sapien
agcaggacagcggactgcgggccga

SEQ ID NO: 2152278 - DNA, 25 bp, Homo sapien
atccgacgacactggctcccgcgtc

SEQ ID NO: 2152279 - DNA, 25 bp, Homo sapien
cccggccctgcgcggcctcccctct

SEQ ID NO: 2152280 - DNA, 25 bp, Homo sapien
tcccctctcccttctctccggcgga

SEQ ID NO: 2152281 - DNA, 25 bp, Homo sapien
ccggccctgcgcggcctcccctctc

SEQ ID NO: 2152282 - DNA, 25 bp, Homo sapien
cctctcccttctctccggcggatac

SEQ ID NO: 2152283 - DNA, 25 bp, Homo sapien
caagggtctccttcggaagcgcggt

SEQ ID NO: 2152284 - DNA, 25 bp, Homo sapien
tcaagggtctccttcggaagcgcgg

SEQ ID NO: 2152285 - DNA, 25 bp, Homo sapien
gcactgcggggcgaagggggtcttc

SEQ ID NO: 2152286 - DNA, 25 bp, Homo sapien
ggaggagtggtgcactgcggggcga

SEQ ID NO: 2152287 - DNA, 25 bp, Homo sapien
gctagggtcagggcgcagggctccc

SEQ ID NO: 2152288 - DNA, 25 bp, Homo sapien
atattgcccgttcctctgggctagg

SEQ ID NO: 2152289 - DNA, 25 bp, Homo sapien
tcatattgcccgttcctctgggcta

SEQ ID NO: 2152290 - DNA, 25 bp, Homo sapien
tcccggagaggacccttcatctcca

SEQ ID NO: 2152291 - DNA, 25 bp, Homo sapien
gctatttataggaatgatatcttga

SEQ ID NO: 2152292 - DNA, 25 bp, Homo sapien
cttctcatgcaactggattattaac

SEQ ID NO: 2152293 - DNA, 25 bp, Homo sapien
tgttagaagctatgtcaatcaaaag

SEQ ID NO: 2152294 - DNA, 25 bp, Homo sapien
tagaagctatgtcaatcaaaagagt

SEQ ID NO: 2152295 - DNA, 25 bp, Homo sapien
gaagctatgtcaatcaaaagagttt

SEQ ID NO: 2152296 - DNA, 25 bp, Homo sapien
agctatgtcaatcaaaagagtttct

SEQ ID NO: 2152297 - DNA, 25 bp, Homo sapien
aaactaatgccgaaaattaggtgct

SEQ ID NO: 2152298 - DNA, 25 bp, Homo sapien
tggacatagcaacacatggctaatg

SEQ ID NO: 2152299 - DNA, 25 bp, Homo sapien
cccctatgagccagtaactagaact

SEQ ID NO: 2152300 - DNA, 25 bp, Homo sapien
gaagcggccacaacaaaactaatgc

SEQ ID NO: 2152301 - DNA, 25 bp, Homo sapien
tcaaagcggcgctctctgatccagt

SEQ ID NO: 2152302 - DNA, 25 bp, Homo sapien
cagggatttcaaagcggcgctctct

SEQ ID NO: 2152303 - DNA, 25 bp, Homo sapien
ctgagaggaacttcaaacagtgttc

SEQ ID NO: 2152304 - DNA, 25 bp, Homo sapien
cagtgttcctcatcagggatttcaa

SEQ ID NO: 2152305 - DNA, 25 bp, Homo sapien
tctggtaccagctagatgagtcctt

SEQ ID NO: 2152306 - DNA, 25 bp, Homo sapien
cagaaggtttgtccttagtgtctaa

SEQ ID NO: 2152307 - DNA, 25 bp, Homo sapien
tctggaacaagaagctgtgactgag

SEQ ID NO: 2152308 - DNA, 25 bp, Homo sapien
ttttgctctggaacaagaagctgtg

SEQ ID NO: 2152309 - DNA, 25 bp, Homo sapien
gggttcccgatgaatcccagtaggc

SEQ ID NO: 2152310 - DNA, 25 bp, Homo sapien
ttattcactgaaaagggtggaggtg

SEQ ID NO: 2152311 - DNA, 25 bp, Homo sapien
aatcccagtaggctgattttgtgaa

SEQ ID NO: 2152312 - DNA, 25 bp, Homo sapien
cccgatgaatcccagtaggctgatt

SEQ ID NO: 2152313 - DNA, 25 bp, Homo sapien
ccgcatggtgttggtcactttgggc

SEQ ID NO: 2152314 - DNA, 25 bp, Homo sapien
tatgtttgatgagaccctcccgctg

SEQ ID NO: 2152315 - DNA, 25 bp, Homo sapien
tgggctgctccttgttagaagcttc

SEQ ID NO: 2152316 - DNA, 25 bp, Homo sapien
gtatttggtacaaagagcttccgca

SEQ ID NO: 2152317 - DNA, 25 bp, Homo sapien
ggagactggccattcacattccaag

SEQ ID NO: 2152318 - DNA, 25 bp, Homo sapien
ccaatgcagtagatatcaggaggat

SEQ ID NO: 2152319 - DNA, 25 bp, Homo sapien
tctaacccgctatctggagactggc

SEQ ID NO: 2152320 - DNA, 25 bp, Homo sapien
gatcacagttcagccaaggttctaa

SEQ ID NO: 2152321 - DNA, 25 bp, Homo sapien
tacagccatggaccattcttgttcc

SEQ ID NO: 2152322 - DNA, 25 bp, Homo sapien
catggaccattcttgttccttcaca

SEQ ID NO: 2152323 - DNA, 25 bp, Homo sapien
tcttatacttggctttggaatgcaa

SEQ ID NO: 2152324 - DNA, 25 bp, Homo sapien
tctctacagccatggaccattcttg

SEQ ID NO: 2152325 - DNA, 25 bp, Homo sapien
gttccaactgtttctgtagcaatat

SEQ ID NO: 2152326 - DNA, 25 bp, Homo sapien
taagaagcatcatcccaacaaggcg

SEQ ID NO: 2152327 - DNA, 25 bp, Homo sapien
gtagcaatatcacgaatgtatcgac

SEQ ID NO: 2152328 - DNA, 25 bp, Homo sapien
ttccccatgattccagttccaactg

SEQ ID NO: 2152329 - DNA, 25 bp, Homo sapien
catgatgttcaactgcgggagggtc

SEQ ID NO: 2152330 - DNA, 25 bp, Homo sapien
cagccagatgggaattgacaatgca

SEQ ID NO: 2152331 - DNA, 25 bp, Homo sapien
gaaatacaaatctcacagctacccc

SEQ ID NO: 2152332 - DNA, 25 bp, Homo sapien
aagtcctccacgtgtgcagccagat

SEQ ID NO: 2152333 - DNA, 25 bp, Homo sapien
cacatttaatctctacactatccaa

SEQ ID NO: 2152334 - DNA, 25 bp, Homo sapien
tagccactactcaaaggctacaggt

SEQ ID NO: 2152335 - DNA, 25 bp, Homo sapien
tatccaaactcctgtagccactact

SEQ ID NO: 2152336 - DNA, 25 bp, Homo sapien
tcaaaggctacaggtgagttaacca

SEQ ID NO: 2152337 - DNA, 25 bp, Homo sapien
taagacttttcacctcattggcatc

SEQ ID NO: 2152338 - DNA, 25 bp, Homo sapien
ggcatcaggcatgcaaagtctataa

SEQ ID NO: 2152339 - DNA, 25 bp, Homo sapien
catgcaaagtctataattcaaatct

SEQ ID NO: 2152340 - DNA, 25 bp, Homo sapien
ttcaagagtctctgaaggtctttct

SEQ ID NO: 2152341 - DNA, 25 bp, Homo sapien
ttttctgtgtgcgctgaatatttag

SEQ ID NO: 2152342 - DNA, 25 bp, Homo sapien
taagtggggatgaacttgatttccc

SEQ ID NO: 2152343 - DNA, 25 bp, Homo sapien
ccttcattgaagtcaacaaaagctt

SEQ ID NO: 2152344 - DNA, 25 bp, Homo sapien
tggaatcccaccggtctgttttaga

SEQ ID NO: 2152345 - DNA, 25 bp, Homo sapien
cccaatatggaagagggcgctaaca

SEQ ID NO: 2152346 - DNA, 25 bp, Homo sapien
acaccaggctggaacccggcatttc

SEQ ID NO: 2152347 - DNA, 25 bp, Homo sapien
tctccaaagaattcggtcacaccag

SEQ ID NO: 2152348 - DNA, 25 bp, Homo sapien
catgtgactccgataattaagctga

SEQ ID NO: 2152349 - DNA, 25 bp, Homo sapien
ttccggtaccttcgttcatccacaa

SEQ ID NO: 2152350 - DNA, 25 bp, Homo sapien
ttctgtccatgatgcgtacactatc

SEQ ID NO: 2152351 - DNA, 25 bp, Homo sapien
tttccggtaccttcgttcatccaca

SEQ ID NO: 2152352 - DNA, 25 bp, Homo sapien
tgatgcgtacactatcttcaaagac

SEQ ID NO: 2152353 - DNA, 25 bp, Homo sapien
ggcagggaacctgtccattgttgct

SEQ ID NO: 2152354 - DNA, 25 bp, Homo sapien
tcaaaaggttcagcccgaagccatg

SEQ ID NO: 2152355 - DNA, 25 bp, Homo sapien
tccttttgtagttgccgaaacttca

SEQ ID NO: 2152356 - DNA, 25 bp, Homo sapien
ccatggcttgcagtactggctgtca

SEQ ID NO: 2152357 - DNA, 25 bp, Homo sapien
tccaggtgaaggacgagaatatctt

SEQ ID NO: 2152358 - DNA, 25 bp, Homo sapien
cccgagttcaggatggttacagagt

SEQ ID NO: 2152359 - DNA, 25 bp, Homo sapien
ggattggtcttttcatacggcacag

SEQ ID NO: 2152360 - DNA, 25 bp, Homo sapien
gaagtaatctttgcctcgatccagg

SEQ ID NO: 2152361 - DNA, 25 bp, Homo sapien
aacagagtgagaaggtattaaagat

SEQ ID NO: 2152362 - DNA, 25 bp, Homo sapien
tactatacctgaggaatcatttcag

SEQ ID NO: 2152363 - DNA, 25 bp, Homo sapien
gatttccgatttccagattagggaa

SEQ ID NO: 2152364 - DNA, 25 bp, Homo sapien
tgtttactgctccacagtaatgcag

SEQ ID NO: 2152365 - DNA, 25 bp, Homo sapien
tgtcgaaccaggctctcaaaaaagt

SEQ ID NO: 2152366 - DNA, 25 bp, Homo sapien
ctgtcgaaccaggctctcaaaaaag

SEQ ID NO: 2152367 - DNA, 25 bp, Homo sapien
agtctcctaagcagcatcccagatt

SEQ ID NO: 2152368 - DNA, 25 bp, Homo sapien
tgggcccaacagtggccatctggaa

SEQ ID NO: 2152369 - DNA, 25 bp, Homo sapien
tgtgcagttctagacttcagtgccc

SEQ ID NO: 2152370 - DNA, 25 bp, Homo sapien
gaaagaatatggctgtgggcccaac

SEQ ID NO: 2152371 - DNA, 25 bp, Homo sapien
tcaaacacacttaaggacagccggc

SEQ ID NO: 2152372 - DNA, 25 bp, Homo sapien
gggaaactctcataaccaccaatgg

SEQ ID NO: 2152373 - DNA, 25 bp, Homo sapien
tctgatatgggaaagcctagggaca

SEQ ID NO: 2152374 - DNA, 25 bp, Homo sapien
tagggacaaattccagggaccacag

SEQ ID NO: 2152375 - DNA, 25 bp, Homo sapien
cactctgctaactctctggaccaaa

SEQ ID NO: 2152376 - DNA, 25 bp, Homo sapien
gatgcctccaaacttgccatataga

SEQ ID NO: 2152377 - DNA, 25 bp, Homo sapien
ggaccaaatgcagcacgtgtactga

SEQ ID NO: 2152378 - DNA, 25 bp, Homo sapien
gaacatggactgctcttaacaggga

SEQ ID NO: 2152379 - DNA, 25 bp, Homo sapien
gaatagctcagccaagatttctagg

SEQ ID NO: 2152380 - DNA, 25 bp, Homo sapien
tagtaaaggcacctgaaggcaccct

SEQ ID NO: 2152381 - DNA, 25 bp, Homo sapien
agagaccacatacactacagccgag

SEQ ID NO: 2152382 - DNA, 25 bp, Homo sapien
aatcccagtggagagaaccatgacc

SEQ ID NO: 2152383 - DNA, 25 bp, Homo sapien
ttcaaaggtgacactgagaaccagt

SEQ ID NO: 2152384 - DNA, 25 bp, Homo sapien
cgagtcccatagttaaaggatgtcc

SEQ ID NO: 2152385 - DNA, 25 bp, Homo sapien
gagaaccagtgctccggtgatacag

SEQ ID NO: 2152386 - DNA, 25 bp, Homo sapien
gtggagtccatacagcactggtgac

SEQ ID NO: 2152387 - DNA, 25 bp, Homo sapien
ctaatagatggaaaagtatgagaat

SEQ ID NO: 2152388 - DNA, 25 bp, Homo sapien
ttggtgtataacttaaagtccttca

SEQ ID NO: 2152389 - DNA, 25 bp, Homo sapien
taaagtccttcaaattctggtcatg

SEQ ID NO: 2152390 - DNA, 25 bp, Homo sapien
ctcagaataaagactttggtgtata

SEQ ID NO: 2152391 - DNA, 25 bp, Homo sapien
ttgaataggtgatctactagaagcc

SEQ ID NO: 2152392 - DNA, 25 bp, Homo sapien
ctggtgacaggcgtatttgaatagg

SEQ ID NO: 2152393 - DNA, 25 bp, Homo sapien
tagaagccagatctccttgggaacc

SEQ ID NO: 2152394 - DNA, 25 bp, Homo sapien
tgggaacctgaaggggtctctcact

SEQ ID NO: 2152395 - DNA, 25 bp, Homo sapien
gtagcctcttgacaagcagcagaag

SEQ ID NO: 2152396 - DNA, 25 bp, Homo sapien
ttgtagcctcttgacaagcagcaga

SEQ ID NO: 2152397 - DNA, 25 bp, Homo sapien
aaggcagagtccaaacagaataacc

SEQ ID NO: 2152398 - DNA, 25 bp, Homo sapien
cacattcaaatgctagtactactga

SEQ ID NO: 2152399 - DNA, 25 bp, Homo sapien
tggtatccagacaatcaatgatctg

SEQ ID NO: 2152400 - DNA, 25 bp, Homo sapien
tatccagacaatcaatgatctgctg

SEQ ID NO: 2152401 - DNA, 25 bp, Homo sapien
ggtatccagacaatcaatgatctgc

SEQ ID NO: 2152402 - DNA, 25 bp, Homo sapien
atccagacaatcaatgatctgctgg

SEQ ID NO: 2152403 - DNA, 25 bp, Homo sapien
cttcttaagctttggtcgcaaagga

SEQ ID NO: 2152404 - DNA, 25 bp, Homo sapien
tcttaagctttggtcgcaaaggata

SEQ ID NO: 2152405 - DNA, 25 bp, Homo sapien
ttcttaagctttggtcgcaaaggat

SEQ ID NO: 2152406 - DNA, 25 bp, Homo sapien
cttaagctttggtcgcaaaggatac

SEQ ID NO: 2152407 - DNA, 25 bp, Homo sapien
cagatccggggatcataagcagagt

SEQ ID NO: 2152408 - DNA, 25 bp, Homo sapien
cagctcgtaacagatgactggctct

SEQ ID NO: 2152409 - DNA, 25 bp, Homo sapien
aagcagagtcaagacatcgctgata

SEQ ID NO: 2152410 - DNA, 25 bp, Homo sapien
gctgatacagctcgtaacagatgac

SEQ ID NO: 2152411 - DNA, 25 bp, Homo sapien
cacggcacctaccaagctgaatggt

SEQ ID NO: 2152412 - DNA, 25 bp, Homo sapien
tcccatttccgtaggcatgtagcca

SEQ ID NO: 2152413 - DNA, 25 bp, Homo sapien
tagtctataatccaacccttgcagg

SEQ ID NO: 2152414 - DNA, 25 bp, Homo sapien
ggccgtgctgtttggtccctgtcca

SEQ ID NO: 2152415 - DNA, 25 bp, Homo sapien
gcattgacgctattgtattcagaga

SEQ ID NO: 2152416 - DNA, 25 bp, Homo sapien
gaaaacatttctatggcatctcgga

SEQ ID NO: 2152417 - DNA, 25 bp, Homo sapien
gagttctcgaaggaatgccatcaag

SEQ ID NO: 2152418 - DNA, 25 bp, Homo sapien
tgccatcaagtaacggaaaacattt

SEQ ID NO: 2152419 - DNA, 25 bp, Homo sapien
caggagaagactagtgaagagagta

SEQ ID NO: 2152420 - DNA, 25 bp, Homo sapien
ctgtcttgccataaggttgggtgga

SEQ ID NO: 2152421 - DNA, 25 bp, Homo sapien
aggcctcaggagaagactagtgaag

SEQ ID NO: 2152422 - DNA, 25 bp, Homo sapien
acgctggcggtcacttggagtctgt

SEQ ID NO: 2152423 - DNA, 25 bp, Homo sapien
ttcgctcccaagcagaaagcccaga

SEQ ID NO: 2152424 - DNA, 25 bp, Homo sapien
gctcccaagcagaaagcccagaagg

SEQ ID NO: 2152425 - DNA, 25 bp, Homo sapien
cccaagcagaaagcccagaaggaac

SEQ ID NO: 2152426 - DNA, 25 bp, Homo sapien
ttagtcttcttcgctcccaagcaga

SEQ ID NO: 2152427 - DNA, 25 bp, Homo sapien
taagagaatatggttccacccagtg

SEQ ID NO: 2152428 - DNA, 25 bp, Homo sapien
ggtctcagagacacccaggattagt

SEQ ID NO: 2152429 - DNA, 25 bp, Homo sapien
gaaatacttggagcccgagatcgtc

SEQ ID NO: 2152430 - DNA, 25 bp, Homo sapien
taggcctagaatgggaagatctcag

SEQ ID NO: 2152431 - DNA, 25 bp, Homo sapien
gctggttgtagagcccagagtcagt

SEQ ID NO: 2152432 - DNA, 25 bp, Homo sapien
aacactggatatggtgactgggagc

SEQ ID NO: 2152433 - DNA, 25 bp, Homo sapien
gcctgcctgaggtacaagacttcct

SEQ ID NO: 2152434 - DNA, 25 bp, Homo sapien
agcaatagctctagatgggcctgcc

SEQ ID NO: 2152435 - DNA, 25 bp, Homo sapien
catacctccagatctgtggcaccag

SEQ ID NO: 2152436 - DNA, 25 bp, Homo sapien
ccttgcggagatgacaaacctgttc

SEQ ID NO: 2152437 - DNA, 25 bp, Homo sapien
gaaatgtcacagagtcaatgcccag

SEQ ID NO: 2152438 - DNA, 25 bp, Homo sapien
ctctcaatcaggaaagggtttagcc

SEQ ID NO: 2152439 - DNA, 25 bp, Homo sapien
tccaggatgagctgaaaaaaggtcg

SEQ ID NO: 2152440 - DNA, 25 bp, Homo sapien
taccttagaggacttggcaattaca

SEQ ID NO: 2152441 - DNA, 25 bp, Homo sapien
ggtcgaggcagtacaccaacttagt

SEQ ID NO: 2152442 - DNA, 25 bp, Homo sapien
tgtggtatgaccctaccccagtgtc

SEQ ID NO: 2152443 - DNA, 25 bp, Homo sapien
cctttggtatgtagtgtgttaaaat

SEQ ID NO: 2152444 - DNA, 25 bp, Homo sapien
gcaacaacatcctttggtatgtagt

SEQ ID NO: 2152445 - DNA, 25 bp, Homo sapien
cacttactctctgcaaggcattgtg

SEQ ID NO: 2152446 - DNA, 25 bp, Homo sapien
atttattagccaaacatcattgaac

SEQ ID NO: 2152447 - DNA, 25 bp, Homo sapien
tcaaatggcctttacaagtgtgctt

SEQ ID NO: 2152448 - DNA, 25 bp, Homo sapien
gtcaagatgggacctttgctgccca

SEQ ID NO: 2152449 - DNA, 25 bp, Homo sapien
tgcctccgaggtgcacagtcaagat

SEQ ID NO: 2152450 - DNA, 25 bp, Homo sapien
gcccgtggacatgccttagaactcc

SEQ ID NO: 2152451 - DNA, 25 bp, Homo sapien
ccctgccaagatggttcatgactgt

SEQ ID NO: 2152452 - DNA, 25 bp, Homo sapien
tctcccatgtcagggaactctgaag

SEQ ID NO: 2152453 - DNA, 25 bp, Homo sapien
cttgtcctgttcaagaggactggct

SEQ ID NO: 2152454 - DNA, 25 bp, Homo sapien
ggaagaagtagtggccaaatagctt

SEQ ID NO: 2152455 - DNA, 25 bp, Homo sapien
gggctgtgtatcgaatgccacatgg

SEQ ID NO: 2152456 - DNA, 25 bp, Homo sapien
tgccacatgggtttccccactccct

SEQ ID NO: 2152457 - DNA, 25 bp, Homo sapien
tagagctcagactgcatagtttagc

SEQ ID NO: 2152458 - DNA, 25 bp, Homo sapien
tgcatagtttagcactgggctgtgt

SEQ ID NO: 2152459 - DNA, 25 bp, Homo sapien
aatgagatctcagaattggaatgaa

SEQ ID NO: 2152460 - DNA, 25 bp, Homo sapien
atgagatctcagaattggaatgaaa

SEQ ID NO: 2152461 - DNA, 25 bp, Homo sapien
tgctggtggatgtatatccacagga

SEQ ID NO: 2152462 - DNA, 25 bp, Homo sapien
cctgagtgagaagcaaaacaggctt

SEQ ID NO: 2152463 - DNA, 25 bp, Homo sapien
agtgagaagcaaaacaggcttgtcc

SEQ ID NO: 2152464 - DNA, 25 bp, Homo sapien
gcttttctgctggtggatgtatatc

SEQ ID NO: 2152465 - DNA, 25 bp, Homo sapien
caaccctcgggtagcagatacatgt

SEQ ID NO: 2152466 - DNA, 25 bp, Homo sapien
tgtgacacacataactcgctggcga

SEQ ID NO: 2152467 - DNA, 25 bp, Homo sapien
tgagcaactactgggtgtaaggccc

SEQ ID NO: 2152468 - DNA, 25 bp, Homo sapien
tcgctggcgaagagtcaagtccctc

SEQ ID NO: 2152469 - DNA, 25 bp, Homo sapien
gtctaggtctggtgctttggtcaac

SEQ ID NO: 2152470 - DNA, 25 bp, Homo sapien
aactgagaaagggtctaggtctggt

SEQ ID NO: 2152471 - DNA, 25 bp, Homo sapien
agggtctaggtctggtgctttggtc

SEQ ID NO: 2152472 - DNA, 25 bp, Homo sapien
agaaagggtctaggtctggtgcttt

SEQ ID NO: 2152473 - DNA, 25 bp, Homo sapien
gggaagaatttggagcaacttcgga

SEQ ID NO: 2152474 - DNA, 25 bp, Homo sapien
gaagaatttggagcaacttcggaaa

SEQ ID NO: 2152475 - DNA, 25 bp, Homo sapien
ggaagaatttggagcaacttcggaa

SEQ ID NO: 2152476 - DNA, 25 bp, Homo sapien
cctctgaggacttgtgacgtgggcc

SEQ ID NO: 2152477 - DNA, 25 bp, Homo sapien
cccgagaacaatggggagttgacag

SEQ ID NO: 2152478 - DNA, 25 bp, Homo sapien
tcatgagccaaaggaatgccggaga

SEQ ID NO: 2152479 - DNA, 25 bp, Homo sapien
ccccagaagccccgagaacaatggg

SEQ ID NO: 2152480 - DNA, 25 bp, Homo sapien
aggtcaagcatctgaagaggtgaag

SEQ ID NO: 2152481 - DNA, 25 bp, Homo sapien
ttaggtcaagcatctgaagaggtga

SEQ ID NO: 2152482 - DNA, 25 bp, Homo sapien
taggtcaagcatctgaagaggtgaa

SEQ ID NO: 2152483 - DNA, 25 bp, Homo sapien
tacagccccttgattgatagtcaag

SEQ ID NO: 2152484 - DNA, 25 bp, Homo sapien
tgatagtcaaggaattctcactcat

SEQ ID NO: 2152485 - DNA, 25 bp, Homo sapien
aatttgggttacagccccttgattg

SEQ ID NO: 2152486 - DNA, 25 bp, Homo sapien
ctcacaacttcaaccttaatttggg

SEQ ID NO: 2152487 - DNA, 25 bp, Homo sapien
cacaacactccctcactgggcctag

SEQ ID NO: 2152488 - DNA, 25 bp, Homo sapien
tcactgggcctagagtcccactgac

SEQ ID NO: 2152489 - DNA, 25 bp, Homo sapien
gcccacgtggatgctccccacaaca

SEQ ID NO: 2152490 - DNA, 25 bp, Homo sapien
gtggatgctccccacaacactccct

SEQ ID NO: 2152491 - DNA, 25 bp, Homo sapien
caggcctggatggaaactcttttac

SEQ ID NO: 2152492 - DNA, 25 bp, Homo sapien
caaatgttgcccaaagtgggctgga

SEQ ID NO: 2152493 - DNA, 25 bp, Homo sapien
tggactccagctgaaaggccttgcc

SEQ ID NO: 2152494 - DNA, 25 bp, Homo sapien
tgccaaggctggataaaagcagctc

SEQ ID NO: 2152495 - DNA, 25 bp, Homo sapien
gccaatacttggcactagtgcccat

SEQ ID NO: 2152496 - DNA, 25 bp, Homo sapien
tgccaatacttggcactagtgccca

SEQ ID NO: 2152497 - DNA, 25 bp, Homo sapien
ctgccaatacttggcactagtgccc

SEQ ID NO: 2152498 - DNA, 25 bp, Homo sapien
cagcatgaatctgcggctctgcgtg

SEQ ID NO: 2152499 - DNA, 25 bp, Homo sapien
gctctgcgtgcaggcgctcctgctg

SEQ ID NO: 2152500 - DNA, 25 bp, Homo sapien
caaggagcagcatgaatctgcggct

SEQ ID NO: 2152501 - DNA, 25 bp, Homo sapien
aatctgcggctctgcgtgcaggcgc

SEQ ID NO: 2152502 - DNA, 25 bp, Homo sapien
ttatggagagggcaaagtcactgtg

SEQ ID NO: 2152503 - DNA, 25 bp, Homo sapien
agcaggcccgtagagcacagtgtgc

SEQ ID NO: 2152504 - DNA, 25 bp, Homo sapien
taccaatgacaggtacagccatagc

SEQ ID NO: 2152505 - DNA, 25 bp, Homo sapien
cagagctgcgttccttgcctcatgg

SEQ ID NO: 2152506 - DNA, 25 bp, Homo sapien
ccgcttcttccccagctctcctgta

SEQ ID NO: 2152507 - DNA, 25 bp, Homo sapien
gcttcttccccagctctcctgtatc

SEQ ID NO: 2152508 - DNA, 25 bp, Homo sapien
ttcttccccagctctcctgtatcat

SEQ ID NO: 2152509 - DNA, 25 bp, Homo sapien
agtcagagccgcttcttccccagct

SEQ ID NO: 2152510 - DNA, 25 bp, Homo sapien
tacaagtctgctgctttgcacaact

SEQ ID NO: 2152511 - DNA, 25 bp, Homo sapien
ggtacaagtctgctgctttgcacaa

SEQ ID NO: 2152512 - DNA, 25 bp, Homo sapien
tggtacaagtctgctgctttgcaca

SEQ ID NO: 2152513 - DNA, 25 bp, Homo sapien
gtacaagtctgctgctttgcacaac

SEQ ID NO: 2152514 - DNA, 25 bp, Homo sapien
ttgccatcctcattgcgggctttaa

SEQ ID NO: 2152515 - DNA, 25 bp, Homo sapien
tcattgcgggctttaactcatcagc

SEQ ID NO: 2152516 - DNA, 25 bp, Homo sapien
gctttaactcatcagccctgggcct

SEQ ID NO: 2152517 - DNA, 25 bp, Homo sapien
cctcattgcgggctttaactcatca

SEQ ID NO: 2152518 - DNA, 25 bp, Homo sapien
tttcaaggaaacaccaatgtggctc

SEQ ID NO: 2152519 - DNA, 25 bp, Homo sapien
gatgtactgatgaacgactctccac

SEQ ID NO: 2152520 - DNA, 25 bp, Homo sapien
actggtcagttggtcagtgcaggca

SEQ ID NO: 2152521 - DNA, 25 bp, Homo sapien
ggctgagctgggaaccacctcttct

SEQ ID NO: 2152522 - DNA, 25 bp, Homo sapien
caactggtattttggaggcgacagc

SEQ ID NO: 2152523 - DNA, 25 bp, Homo sapien
agtaggagaaaacctcaactggtat

SEQ ID NO: 2152524 - DNA, 25 bp, Homo sapien
ggcattgtcaacttggccctgcgcc

SEQ ID NO: 2152525 - DNA, 25 bp, Homo sapien
agcagtagttgccactctgtctcca

SEQ ID NO: 2152526 - DNA, 25 bp, Homo sapien
ctggaagagaagctgcgaggcacca

SEQ ID NO: 2152527 - DNA, 25 bp, Homo sapien
cctgagagggactgccattgagacc

SEQ ID NO: 2152528 - DNA, 25 bp, Homo sapien
cacggtacaggaagtcatgatcggg

SEQ ID NO: 2152529 - DNA, 25 bp, Homo sapien
aaatagggtggagtaagagccctgc

SEQ ID NO: 2152530 - DNA, 25 bp, Homo sapien
tgcaaggaatcatcagattccaaat

SEQ ID NO: 2152531 - DNA, 25 bp, Homo sapien
aattatttgcaattggtgcatttcc

SEQ ID NO: 2152532 - DNA, 25 bp, Homo sapien
tatttgcaattggtgcatttccttg

SEQ ID NO: 2152533 - DNA, 25 bp, Homo sapien
gttgcaaggaatcatcagattccaa

SEQ ID NO: 2152534 - DNA, 25 bp, Homo sapien
agctgagctgaagggccaacccccg

SEQ ID NO: 2152535 - DNA, 25 bp, Homo sapien
cctggcatccagcactgctgaaata

SEQ ID NO: 2152536 - DNA, 25 bp, Homo sapien
tgaaatagcagttgttagagcaaag

SEQ ID NO: 2152537 - DNA, 25 bp, Homo sapien
gctgaagggccaacccccgaagcaa

SEQ ID NO: 2152538 - DNA, 25 bp, Homo sapien
tctggtcttttgttttggagggctc

SEQ ID NO: 2152539 - DNA, 25 bp, Homo sapien
tgcccgaggcggactgtgcaagttc

SEQ ID NO: 2152540 - DNA, 25 bp, Homo sapien
ggtggagagtgcttctctggtcttt

SEQ ID NO: 2152541 - DNA, 25 bp, Homo sapien
cagatgccggcgctgggtggatgga

SEQ ID NO: 2152542 - DNA, 25 bp, Homo sapien
ggggcagcagccccagtgagcccgg

SEQ ID NO: 2152543 - DNA, 25 bp, Homo sapien
aggaggaccagccaggggcagcagc

SEQ ID NO: 2152544 - DNA, 25 bp, Homo sapien
gaggaggaccagccaggggcagcag

SEQ ID NO: 2152545 - DNA, 25 bp, Homo sapien
ccaggggcagcagccccagtgagcc

SEQ ID NO: 2152546 - DNA, 25 bp, Homo sapien
gggtcatttggggaccagctagttc

SEQ ID NO: 2152547 - DNA, 25 bp, Homo sapien
cagggtcatttggggaccagctagt

SEQ ID NO: 2152548 - DNA, 25 bp, Homo sapien
cgggagaaaaatccagggtcatttg

SEQ ID NO: 2152549 - DNA, 25 bp, Homo sapien
ctagaagccgggagaaaaatccagg

SEQ ID NO: 2152550 - DNA, 25 bp, Homo sapien
tgccctccaaggtccactggctttg

SEQ ID NO: 2152551 - DNA, 25 bp, Homo sapien
tggtggaacagtttctcacatcctg

SEQ ID NO: 2152552 - DNA, 25 bp, Homo sapien
ccctccaaggtccactggctttgtg

SEQ ID NO: 2152553 - DNA, 25 bp, Homo sapien
gggttggtggaacagtttctcacat

SEQ ID NO: 2152554 - DNA, 25 bp, Homo sapien
cctgggatgatgtaggctgagagat

SEQ ID NO: 2152555 - DNA, 25 bp, Homo sapien
catctgctggcggagggctgtgagt

SEQ ID NO: 2152556 - DNA, 25 bp, Homo sapien
gacattgtggtattgaccacagtaa

SEQ ID NO: 2152557 - DNA, 25 bp, Homo sapien
gctgtgagtgacattgtggtattga

SEQ ID NO: 2152558 - DNA, 25 bp, Homo sapien
ctctcgtcatgttggccgatgtact

SEQ ID NO: 2152559 - DNA, 25 bp, Homo sapien
gcctctcgtcatgttggccgatgta

SEQ ID NO: 2152560 - DNA, 25 bp, Homo sapien
cgtcatgttggccgatgtactcgtt

SEQ ID NO: 2152561 - DNA, 25 bp, Homo sapien
tctcgtcatgttggccgatgtactc

SEQ ID NO: 2152562 - DNA, 25 bp, Homo sapien
tgcagaccctgtaaagcctgtaatc

SEQ ID NO: 2152563 - DNA, 25 bp, Homo sapien
cctgtaaagcctgtaatccacgcac

SEQ ID NO: 2152564 - DNA, 25 bp, Homo sapien
accctgtaaagcctgtaatccacgc

SEQ ID NO: 2152565 - DNA, 25 bp, Homo sapien
agaccctgtaaagcctgtaatccac

SEQ ID NO: 2152566 - DNA, 25 bp, Homo sapien
tgatagggaggctaaaccagaggct

SEQ ID NO: 2152567 - DNA, 25 bp, Homo sapien
gactttcagcagaagtgaggtcaac

SEQ ID NO: 2152568 - DNA, 25 bp, Homo sapien
cagaacagagaaacttgcaggtgag

SEQ ID NO: 2152569 - DNA, 25 bp, Homo sapien
ggctcagcgtaaagactcggtggct

SEQ ID NO: 2152570 - DNA, 25 bp, Homo sapien
tcagcctgagtccagtagcgactgt

SEQ ID NO: 2152571 - DNA, 25 bp, Homo sapien
actgtcggtccagacagctgctttc

SEQ ID NO: 2152572 - DNA, 25 bp, Homo sapien
cagttgcagtccatctgccgctcag

SEQ ID NO: 2152573 - DNA, 25 bp, Homo sapien
ttccttatggagctcccagttgcag

SEQ ID NO: 2152574 - DNA, 25 bp, Homo sapien
caggtgacaataggagtggtgccaa

SEQ ID NO: 2152575 - DNA, 25 bp, Homo sapien
ggtcaaaacccacacgccctccagc

SEQ ID NO: 2152576 - DNA, 25 bp, Homo sapien
gaggagccaggtgacaataggagtg

SEQ ID NO: 2152577 - DNA, 25 bp, Homo sapien
aacccacacgccctccagcaggaat

SEQ ID NO: 2152578 - DNA, 25 bp, Homo sapien
tgagtcaccctcgttagcatggaca

SEQ ID NO: 2152579 - DNA, 25 bp, Homo sapien
tgctctatctttatagtcccaccgc

SEQ ID NO: 2152580 - DNA, 25 bp, Homo sapien
aacattctgcaactacaatttcaaa

SEQ ID NO: 2152581 - DNA, 25 bp, Homo sapien
tttctttatatcctagggaagctga

SEQ ID NO: 2152582 - DNA, 25 bp, Homo sapien
gggccagatcataactctcccaggt

SEQ ID NO: 2152583 - DNA, 25 bp, Homo sapien
ggccagatcataactctcccaggtg

SEQ ID NO: 2152584 - DNA, 25 bp, Homo sapien
agggccagatcataactctcccagg

SEQ ID NO: 2152585 - DNA, 25 bp, Homo sapien
gattggttgtgatggacaccagctg

SEQ ID NO: 2152586 - DNA, 25 bp, Homo sapien
tgatccccataccaggtccacaaga

SEQ ID NO: 2152587 - DNA, 25 bp, Homo sapien
gttgatttggaaccggtggcctctc

SEQ ID NO: 2152588 - DNA, 25 bp, Homo sapien
taccaggtccacaagattggttgtg

SEQ ID NO: 2152589 - DNA, 25 bp, Homo sapien
ttgctacaagttgggaaggaaactg

SEQ ID NO: 2152590 - DNA, 25 bp, Homo sapien
gcgttgctacaagttgggaaggaaa

SEQ ID NO: 2152591 - DNA, 25 bp, Homo sapien
tgctacaagttgggaaggaaactgg

SEQ ID NO: 2152592 - DNA, 25 bp, Homo sapien
ctgcgttgctacaagttgggaagga

SEQ ID NO: 2152593 - DNA, 25 bp, Homo sapien
aatcagtaggctggtcctggtcagg

SEQ ID NO: 2152594 - DNA, 25 bp, Homo sapien
caggactttagttacgacttacagg

SEQ ID NO: 2152595 - DNA, 25 bp, Homo sapien
cttgcatgcggaaagggatctcttg

SEQ ID NO: 2152596 - DNA, 25 bp, Homo sapien
cattggctcattcagaattcccagg

SEQ ID NO: 2152597 - DNA, 25 bp, Homo sapien
tcctcaagcgccgacagaaggacgg

SEQ ID NO: 2152598 - DNA, 25 bp, Homo sapien
gcttcggacgccagatactttctcc

SEQ ID NO: 2152599 - DNA, 25 bp, Homo sapien
ttctgcatctggcttcggacgccag

SEQ ID NO: 2152600 - DNA, 25 bp, Homo sapien
agtcgggaccttttgatgcttctgc

SEQ ID NO: 2152601 - DNA, 25 bp, Homo sapien
cttggttcccacgggctgtggccat

SEQ ID NO: 2152602 - DNA, 25 bp, Homo sapien
tggccatggagttctcaagaattgg

SEQ ID NO: 2152603 - DNA, 25 bp, Homo sapien
cacatggttatttggggaagagcta

SEQ ID NO: 2152604 - DNA, 25 bp, Homo sapien
gaattggtgggcacatggttatttg

SEQ ID NO: 2152605 - DNA, 25 bp, Homo sapien
agtctgtgagcagcgtgtaggaata

SEQ ID NO: 2152606 - DNA, 25 bp, Homo sapien
gttataggggatgtcactggctcga

SEQ ID NO: 2152607 - DNA, 25 bp, Homo sapien
atgtcactggctcgaaggttgaaga

SEQ ID NO: 2152608 - DNA, 25 bp, Homo sapien
tgagcagcgtgtaggaatagaagaa

SEQ ID NO: 2152609 - DNA, 25 bp, Homo sapien
tcacatctcccaatgagtaggcctg

SEQ ID NO: 2152610 - DNA, 25 bp, Homo sapien
cctggatgctgtcacgaacttggct

SEQ ID NO: 2152611 - DNA, 25 bp, Homo sapien
tcaaggtttcggagctaaagcgact

SEQ ID NO: 2152612 - DNA, 25 bp, Homo sapien
gaacttggctgtaatcctcgatttg

SEQ ID NO: 2152613 - DNA, 25 bp, Homo sapien
tcatcactggggagtaggtgtctgt

SEQ ID NO: 2152614 - DNA, 25 bp, Homo sapien
tcactggggagtaggtgtctgtcac

SEQ ID NO: 2152615 - DNA, 25 bp, Homo sapien
agtaggtgtctgtcacgagtttctc

SEQ ID NO: 2152616 - DNA, 25 bp, Homo sapien
gggagtaggtgtctgtcacgagttt

SEQ ID NO: 2152617 - DNA, 25 bp, Homo sapien
cctcggaacttgtccacgatctctg

SEQ ID NO: 2152618 - DNA, 25 bp, Homo sapien
cagccagaccaagtaccggatcaca

SEQ ID NO: 2152619 - DNA, 25 bp, Homo sapien
aagtaccggatcacagccacagcgt

SEQ ID NO: 2152620 - DNA, 25 bp, Homo sapien
tcggaacttgtccacgatctctgcc

SEQ ID NO: 2152621 - DNA, 25 bp, Homo sapien
actgggtccggaggagaactgttct

SEQ ID NO: 2152622 - DNA, 25 bp, Homo sapien
ctgggtccggaggagaactgttctt

SEQ ID NO: 2152623 - DNA, 25 bp, Homo sapien
caaaactgggtccggaggagaactg

SEQ ID NO: 2152624 - DNA, 25 bp, Homo sapien
tgggtccggaggagaactgttcttc

SEQ ID NO: 2152625 - DNA, 25 bp, Homo sapien
ccagcaggtacatctcatctgagga

SEQ ID NO: 2152626 - DNA, 25 bp, Homo sapien
ccagagtccagcaggtacatctcat

SEQ ID NO: 2152627 - DNA, 25 bp, Homo sapien
gagtccagcaggtacatctcatctg

SEQ ID NO: 2152628 - DNA, 25 bp, Homo sapien
gtccagcaggtacatctcatctgag

SEQ ID NO: 2152629 - DNA, 25 bp, Homo sapien
gggtgccccagtggactgttctggt

SEQ ID NO: 2152630 - DNA, 25 bp, Homo sapien
gccccagtggactgttctggtgatg

SEQ ID NO: 2152631 - DNA, 25 bp, Homo sapien
aaggcagagggggtgccccagtgga

SEQ ID NO: 2152632 - DNA, 25 bp, Homo sapien
cagtggactgttctggtgatgtctg

SEQ ID NO: 2152633 - DNA, 25 bp, Homo sapien
gaggtgatatggaggacgggaggag

SEQ ID NO: 2152634 - DNA, 25 bp, Homo sapien
agccagaggagtatccagctgcttg

SEQ ID NO: 2152635 - DNA, 25 bp, Homo sapien
gaggagccagaggagtatccagctg

SEQ ID NO: 2152636 - DNA, 25 bp, Homo sapien
gagaggaagaggtgatatggaggac

SEQ ID NO: 2152637 - DNA, 25 bp, Homo sapien
tagcagcgggaaagatgagcctgga

SEQ ID NO: 2152638 - DNA, 25 bp, Homo sapien
aatatttcctatcagcacacgggtg

SEQ ID NO: 2152639 - DNA, 25 bp, Homo sapien
cctatcagcacacgggtgtatgcct

SEQ ID NO: 2152640 - DNA, 25 bp, Homo sapien
gagcctggacaggtcaatatttcct

SEQ ID NO: 2152641 - DNA, 25 bp, Homo sapien
ggaagttgccaatgccgtggcctgt

SEQ ID NO: 2152642 - DNA, 25 bp, Homo sapien
ccatgaccataattgagaccagcat

SEQ ID NO: 2152643 - DNA, 25 bp, Homo sapien
agcatcccacaaggctctgcgggca

SEQ ID NO: 2152644 - DNA, 25 bp, Homo sapien
cgtggcctgtcccatgaccataatt

SEQ ID NO: 2152645 - DNA, 25 bp, Homo sapien
catgcccttggccatagcgatgttg

SEQ ID NO: 2152646 - DNA, 25 bp, Homo sapien
tggccatagcgatgttgttggactg

SEQ ID NO: 2152647 - DNA, 25 bp, Homo sapien
gatgttgttggactggaatcccact

SEQ ID NO: 2152648 - DNA, 25 bp, Homo sapien
tagcgatgttgttggactggaatcc

SEQ ID NO: 2152649 - DNA, 25 bp, Homo sapien
cacgagagccacatcttcgagacgg

SEQ ID NO: 2152650 - DNA, 25 bp, Homo sapien
tctccatccttatagtaaccaggtt

SEQ ID NO: 2152651 - DNA, 25 bp, Homo sapien
agccacatcttcgagacggatccca

SEQ ID NO: 2152652 - DNA, 25 bp, Homo sapien
cgagacggatcccaaattctccatc

SEQ ID NO: 2152653 - DNA, 25 bp, Homo sapien
tccagcccatcctggtggcagttta

SEQ ID NO: 2152654 - DNA, 25 bp, Homo sapien
ccagcccatcctggtggcagtttac

SEQ ID NO: 2152655 - DNA, 25 bp, Homo sapien
ctccagcccatcctggtggcagttt

SEQ ID NO: 2152656 - DNA, 25 bp, Homo sapien
cctggctaggcctgagccttctaga

SEQ ID NO: 2152657 - DNA, 25 bp, Homo sapien
aatagaagccgggtaagcaggacag

SEQ ID NO: 2152658 - DNA, 25 bp, Homo sapien
ctccacccggaggacacaaggagct

SEQ ID NO: 2152659 - DNA, 25 bp, Homo sapien
agctgggcctcatcaaccctggaca

SEQ ID NO: 2152660 - DNA, 25 bp, Homo sapien
ccacttcaaaggtcaggtagctccc

SEQ ID NO: 2152661 - DNA, 25 bp, Homo sapien
gaggttccggtcatagggcacaaat

SEQ ID NO: 2152662 - DNA, 25 bp, Homo sapien
cgggagacagcaggctgacatcgat

SEQ ID NO: 2152663 - DNA, 25 bp, Homo sapien
gacatcgatgaggttccggtcatag

SEQ ID NO: 2152664 - DNA, 25 bp, Homo sapien
gtgtgtctgcaggtgccaccagtgt

SEQ ID NO: 2152665 - DNA, 25 bp, Homo sapien
caccagtgtggaccctcctggagga

SEQ ID NO: 2152666 - DNA, 25 bp, Homo sapien
gggaggaatgccccagtgtgtgtct

SEQ ID NO: 2152667 - DNA, 25 bp, Homo sapien
gactggaaagttctagaagctctgg

SEQ ID NO: 2152668 - DNA, 25 bp, Homo sapien
ggtctggtagtagcgattcaggtac

SEQ ID NO: 2152669 - DNA, 25 bp, Homo sapien
cttctcccggatggtctggtagtag

SEQ ID NO: 2152670 - DNA, 25 bp, Homo sapien
cggatggtctggtagtagcgattca

SEQ ID NO: 2152671 - DNA, 25 bp, Homo sapien
tggtagtagcgattcaggtactgga

SEQ ID NO: 2152672 - DNA, 25 bp, Homo sapien
tgctgttgaagccactcgaactcct

SEQ ID NO: 2152673 - DNA, 25 bp, Homo sapien
gaagccactcgaactcctctagtag

SEQ ID NO: 2152674 - DNA, 25 bp, Homo sapien
gccactcgaactcctctagtagctg

SEQ ID NO: 2152675 - DNA, 25 bp, Homo sapien
gttgaagccactcgaactcctctag

SEQ ID NO: 2152676 - DNA, 25 bp, Homo sapien
gatggcaagggtggagaccactaac

SEQ ID NO: 2152677 - DNA, 25 bp, Homo sapien
ggatggcaagggtggagaccactaa

SEQ ID NO: 2152678 - DNA, 25 bp, Homo sapien
tctgtgctaggttataggttaggcc

SEQ ID NO: 2152679 - DNA, 25 bp, Homo sapien
ggttaggcctactgagatcacagaa

SEQ ID NO: 2152680 - DNA, 25 bp, Homo sapien
tctccataggtcttggagaaggagg

SEQ ID NO: 2152681 - DNA, 25 bp, Homo sapien
caaaggtttctaggcaatgggccag

SEQ ID NO: 2152682 - DNA, 25 bp, Homo sapien
aacgtcttagcaggatgtggaccca

SEQ ID NO: 2152683 - DNA, 25 bp, Homo sapien
tcaaagggctcctcgaatgccaggg

SEQ ID NO: 2152684 - DNA, 25 bp, Homo sapien
tctagaatagtgacgggttccggct

SEQ ID NO: 2152685 - DNA, 25 bp, Homo sapien
ttacttggcatggagcctacccagg

SEQ ID NO: 2152686 - DNA, 25 bp, Homo sapien
acaatacctttttagacaggctgga

SEQ ID NO: 2152687 - DNA, 25 bp, Homo sapien
tacaatacctttttagacaggctgg

SEQ ID NO: 2152688 - DNA, 25 bp, Homo sapien
ttacaatacctttttagacaggctg

SEQ ID NO: 2152689 - DNA, 25 bp, Homo sapien
caatacctttttagacaggctggag

SEQ ID NO: 2152690 - DNA, 25 bp, Homo sapien
tgtgcgctgcttggcaaaggtgcca

SEQ ID NO: 2152691 - DNA, 25 bp, Homo sapien
ccaccaactgtgcgctgcttggcaa

SEQ ID NO: 2152692 - DNA, 25 bp, Homo sapien
caccaactgtgcgctgcttggcaaa

SEQ ID NO: 2152693 - DNA, 25 bp, Homo sapien
gatggtaaccatcacaggtcaccct

SEQ ID NO: 2152694 - DNA, 25 bp, Homo sapien
agcagactaggcctgatggtttcag

SEQ ID NO: 2152695 - DNA, 25 bp, Homo sapien
tcagtaaggcttggtcagggctgga

SEQ ID NO: 2152696 - DNA, 25 bp, Homo sapien
gatgcaagcactggtgatggtaacc

SEQ ID NO: 2152697 - DNA, 25 bp, Homo sapien
agtacctgtctttgtggggtgagca

SEQ ID NO: 2152698 - DNA, 25 bp, Homo sapien
gcaggtgagggagcaaattatttag

SEQ ID NO: 2152699 - DNA, 25 bp, Homo sapien
tattagtagtacctgtctttgtggg

SEQ ID NO: 2152700 - DNA, 25 bp, Homo sapien
caaacagaggcccatctttggatac

SEQ ID NO: 2152701 - DNA, 25 bp, Homo sapien
ccgacttaagctgcttgctcagttc

SEQ ID NO: 2152702 - DNA, 25 bp, Homo sapien
gcttctatgtctcttgaggtccgca

SEQ ID NO: 2152703 - DNA, 25 bp, Homo sapien
gaatctctgctacgtgaccctgtgg

SEQ ID NO: 2152704 - DNA, 25 bp, Homo sapien
ttgccgaccatgttgccaaaccagg

SEQ ID NO: 2152705 - DNA, 25 bp, Homo sapien
caccttgtcaagagtgcatccctca

SEQ ID NO: 2152706 - DNA, 25 bp, Homo sapien
ctctctgatcagtgggcccctcccc

SEQ ID NO: 2152707 - DNA, 25 bp, Homo sapien
ctctgatcagtgggcccctccccca

SEQ ID NO: 2152708 - DNA, 25 bp, Homo sapien
tctctgatcagtgggcccctccccc

SEQ ID NO: 2152709 - DNA, 25 bp, Homo sapien
tctgatcagtgggcccctcccccat

SEQ ID NO: 2152710 - DNA, 25 bp, Homo sapien
ggaaaaggcagcgagagggaggtga

SEQ ID NO: 2152711 - DNA, 25 bp, Homo sapien
cttgggaaaaggcagcgagagggag

SEQ ID NO: 2152712 - DNA, 25 bp, Homo sapien
aaaaggcagcgagagggaggtgagg

SEQ ID NO: 2152713 - DNA, 25 bp, Homo sapien
tgggaaaaggcagcgagagggaggt

SEQ ID NO: 2152714 - DNA, 25 bp, Homo sapien
tagcaagcgcggtaactggttaagg

SEQ ID NO: 2152715 - DNA, 25 bp, Homo sapien
cagaaccttcaaaggcggccagcaa

SEQ ID NO: 2152716 - DNA, 25 bp, Homo sapien
aagcaggtcgcagaatcttccgggc

SEQ ID NO: 2152717 - DNA, 25 bp, Homo sapien
ggcagcgacagaagatcacacacta

SEQ ID NO: 2152718 - DNA, 25 bp, Homo sapien
tataaccatcgtccctacagtcatc

SEQ ID NO: 2152719 - DNA, 25 bp, Homo sapien
gccatcactcctacagccatcagta

SEQ ID NO: 2152720 - DNA, 25 bp, Homo sapien
atcagtacacctaaagccatcatca

SEQ ID NO: 2152721 - DNA, 25 bp, Homo sapien
tcctacagccatcagtacacctaaa

SEQ ID NO: 2152722 - DNA, 25 bp, Homo sapien
actgcccgggggcacggcatgaacc

SEQ ID NO: 2152723 - DNA, 25 bp, Homo sapien
gggcacggcatgaaccgagccttca

SEQ ID NO: 2152724 - DNA, 25 bp, Homo sapien
gacctactcttacagcaatcgcagc

SEQ ID NO: 2152725 - DNA, 25 bp, Homo sapien
tgcgggccatggacacccggcagca

SEQ ID NO: 2152726 - DNA, 25 bp, Homo sapien
tgctctcctaggtgtcaagatgcag

SEQ ID NO: 2152727 - DNA, 25 bp, Homo sapien
cgtccctgctctcctaggtgtcaag

SEQ ID NO: 2152728 - DNA, 25 bp, Homo sapien
accctgggagactccgtccctgctc

SEQ ID NO: 2152729 - DNA, 25 bp, Homo sapien
taggtgtcaagatgcagaggcctct

SEQ ID NO: 2152730 - DNA, 25 bp, Homo sapien
cattggagggcttgcggcgcagcat

SEQ ID NO: 2152731 - DNA, 25 bp, Homo sapien
gcattggagggcttgcggcgcagca

SEQ ID NO: 2152732 - DNA, 25 bp, Homo sapien
gcagagtgtgtggaggcaagctcat

SEQ ID NO: 2152733 - DNA, 25 bp, Homo sapien
cttctggaagcttggcttctggggg

SEQ ID NO: 2152734 - DNA, 25 bp, Homo sapien
ctggggctagcagagtgtgtggagg

SEQ ID NO: 2152735 - DNA, 25 bp, Homo sapien
gggctagcagagtgtgtggaggcaa

SEQ ID NO: 2152736 - DNA, 25 bp, Homo sapien
gaatcttttatgctcatcagactct

SEQ ID NO: 2152737 - DNA, 25 bp, Homo sapien
tggctggaaggtcactcattccaca

SEQ ID NO: 2152738 - DNA, 25 bp, Homo sapien
acagctatctgggtctgccccacgg

SEQ ID NO: 2152739 - DNA, 25 bp, Homo sapien
gctgatgggttgaatcttttatgct

SEQ ID NO: 2152740 - DNA, 25 bp, Homo sapien
agcatccatgagcacatcgcccagt

SEQ ID NO: 2152741 - DNA, 25 bp, Homo sapien
tccatgagcacatcgcccagtgtgt

SEQ ID NO: 2152742 - DNA, 25 bp, Homo sapien
agtgtgtaactgagcaaatccctcc

SEQ ID NO: 2152743 - DNA, 25 bp, Homo sapien
catcgcccagtgtgtaactgagcaa

SEQ ID NO: 2152744 - DNA, 25 bp, Homo sapien
ctcaatcgggcctcagacttagcct

SEQ ID NO: 2152745 - DNA, 25 bp, Homo sapien
cagttcctcaagtttggtccccaga

SEQ ID NO: 2152746 - DNA, 25 bp, Homo sapien
ttcctcaagtttggtccccagaatc

SEQ ID NO: 2152747 - DNA, 25 bp, Homo sapien
gcttcacacctcaatcgggcctcag

SEQ ID NO: 2152748 - DNA, 25 bp, Homo sapien
tcgctcaccacgggggagctgggtt

SEQ ID NO: 2152749 - DNA, 25 bp, Homo sapien
tggatttggcaaaatccttgaagct

SEQ ID NO: 2152750 - DNA, 25 bp, Homo sapien
gttatcatccagattaaactccttc

SEQ ID NO: 2152751 - DNA, 25 bp, Homo sapien
tggcaaaatccttgaagctgctgga

SEQ ID NO: 2152752 - DNA, 25 bp, Homo sapien
tttttgccactcttcccagcatctt

SEQ ID NO: 2152753 - DNA, 25 bp, Homo sapien
tcctgttcatggttcgggaaatcac

SEQ ID NO: 2152754 - DNA, 25 bp, Homo sapien
catggttcgggaaatcactgccctc

SEQ ID NO: 2152755 - DNA, 25 bp, Homo sapien
atctcttctgacagggccttcacca

SEQ ID NO: 2152756 - DNA, 25 bp, Homo sapien
gctgagcaccggaagttcatgctcc

SEQ ID NO: 2152757 - DNA, 25 bp, Homo sapien
gagcaccggaagttcatgctcctct

SEQ ID NO: 2152758 - DNA, 25 bp, Homo sapien
ctgttgatgcctggcggctgagcac

SEQ ID NO: 2152759 - DNA, 25 bp, Homo sapien
cctggcggctgagcaccggaagttc

SEQ ID NO: 2152760 - DNA, 25 bp, Homo sapien
cacagaaaggccctgtgtactgggg

SEQ ID NO: 2152761 - DNA, 25 bp, Homo sapien
tgcccggccacagaaaggccctgtg

SEQ ID NO: 2152762 - DNA, 25 bp, Homo sapien
ggcaggtggttcctccccgaagctg

SEQ ID NO: 2152763 - DNA, 25 bp, Homo sapien
tggttcctccccgaagctgccagaa

SEQ ID NO: 2152764 - DNA, 25 bp, Homo sapien
gcagtttcagcgagtcgtggtcata

SEQ ID NO: 2152765 - DNA, 25 bp, Homo sapien
ctgcagtttcagcgagtcgtggtca

SEQ ID NO: 2152766 - DNA, 25 bp, Homo sapien
cagtttcagcgagtcgtggtcatag

SEQ ID NO: 2152767 - DNA, 25 bp, Homo sapien
gtttcagcgagtcgtggtcataggg

SEQ ID NO: 2152768 - DNA, 25 bp, Homo sapien
gggtcttaggcttgggcctcttgcc

SEQ ID NO: 2152769 - DNA, 25 bp, Homo sapien
ttgccattgagtaggcccagccacg

SEQ ID NO: 2152770 - DNA, 25 bp, Homo sapien
ttgcccttgctctgtcggcggctgg

SEQ ID NO: 2152771 - DNA, 25 bp, Homo sapien
tccagcagctcatgcagggtcttag

SEQ ID NO: 2152772 - DNA, 25 bp, Homo sapien
catgatgttcagctcattgaggtgt

SEQ ID NO: 2152773 - DNA, 25 bp, Homo sapien
gaggtgtgtttctcgcagctctttg

SEQ ID NO: 2152774 - DNA, 25 bp, Homo sapien
ccagtgtctggtagccattgagcag

SEQ ID NO: 2152775 - DNA, 25 bp, Homo sapien
cagcttggcccggtgctgtggatcc

SEQ ID NO: 2152776 - DNA, 25 bp, Homo sapien
tgtccaccttgggttccgacactgt

SEQ ID NO: 2152777 - DNA, 25 bp, Homo sapien
caaagcagcctgagtcgcgcgggat

SEQ ID NO: 2152778 - DNA, 25 bp, Homo sapien
tgccagctctgcgtcatcgcgcccg

SEQ ID NO: 2152779 - DNA, 25 bp, Homo sapien
gggttccgacactgtgtgtgccact

SEQ ID NO: 2152780 - DNA, 25 bp, Homo sapien
tagccggcagtcctagatgtagtgg

SEQ ID NO: 2152781 - DNA, 25 bp, Homo sapien
aagaagtgtgtccacttagccggca

SEQ ID NO: 2152782 - DNA, 25 bp, Homo sapien
cacagctggcttccgagaggcaatt

SEQ ID NO: 2152783 - DNA, 25 bp, Homo sapien
gaccatctgtaatcagccttgtgag

SEQ ID NO: 2152784 - DNA, 25 bp, Homo sapien
ctctcatatttacacccaacccctt

SEQ ID NO: 2152785 - DNA, 25 bp, Homo sapien
cctctcatatttacacccaacccct

SEQ ID NO: 2152786 - DNA, 25 bp, Homo sapien
tctcatatttacacccaaccccttc

SEQ ID NO: 2152787 - DNA, 25 bp, Homo sapien
catgtttattgctaccagctggtct

SEQ ID NO: 2152788 - DNA, 25 bp, Homo sapien
tgtttattgctaccagctggtctcc

SEQ ID NO: 2152789 - DNA, 25 bp, Homo sapien
ttattgctaccagctggtctccctc

SEQ ID NO: 2152790 - DNA, 25 bp, Homo sapien
tacccatgtttattgctaccagctg

SEQ ID NO: 2152791 - DNA, 25 bp, Homo sapien
aaaggtgacttcagaggaaaggcca

SEQ ID NO: 2152792 - DNA, 25 bp, Homo sapien
aaatctccccctcttagatcctgga

SEQ ID NO: 2152793 - DNA, 25 bp, Homo sapien
gcctttcttcacacgggtgaaggtc

SEQ ID NO: 2152794 - DNA, 25 bp, Homo sapien
gatggcactgctttagtgggtacag

SEQ ID NO: 2152795 - DNA, 25 bp, Homo sapien
tctttgtccataggtatttgtgcac

SEQ ID NO: 2152796 - DNA, 25 bp, Homo sapien
gagagtcagcttgccctccaaagtg

SEQ ID NO: 2152797 - DNA, 25 bp, Homo sapien
gcctttggagaagcattgtagcata

SEQ ID NO: 2152798 - DNA, 25 bp, Homo sapien
gtggctgtttctgcacttatgtggc

SEQ ID NO: 2152799 - DNA, 25 bp, Homo sapien
gaagattgactgcatgctagggtta

SEQ ID NO: 2152800 - DNA, 25 bp, Homo sapien
acagaggacttatatatagtcgggc

SEQ ID NO: 2152801 - DNA, 25 bp, Homo sapien
gaaattgcagtaccaaccctcgtaa

SEQ ID NO: 2152802 - DNA, 25 bp, Homo sapien
ctgatatgaggctggttgttggatt

SEQ ID NO: 2152803 - DNA, 25 bp, Homo sapien
cacctctggctatggtaaccacact

SEQ ID NO: 2152804 - DNA, 25 bp, Homo sapien
tatgtggctatatttcctagagcac

SEQ ID NO: 2152805 - DNA, 25 bp, Homo sapien
tatcccctcagactccctgtgtgag

SEQ ID NO: 2152806 - DNA, 25 bp, Homo sapien
cagaggccctgaatgcacaaatggg

SEQ ID NO: 2152807 - DNA, 25 bp, Homo sapien
atttctgaactcaaggcagtggcag

SEQ ID NO: 2152808 - DNA, 25 bp, Homo sapien
ttgacatttctcgtagactacccag

SEQ ID NO: 2152809 - DNA, 25 bp, Homo sapien
tggtctttagtcacccagttgcaca

SEQ ID NO: 2152810 - DNA, 25 bp, Homo sapien
cacgtgctgagtccagaggcagtca

SEQ ID NO: 2152811 - DNA, 25 bp, Homo sapien
ggtgacaagtgtgaaactgtgtctc

SEQ ID NO: 2152812 - DNA, 25 bp, Homo sapien
gggtgacaagtgtgaaactgtgtct

SEQ ID NO: 2152813 - DNA, 25 bp, Homo sapien
tgggtgacaagtgtgaaactgtgtc

SEQ ID NO: 2152814 - DNA, 25 bp, Homo sapien
tcaaaacctacttgtacgccagtgt

SEQ ID NO: 2152815 - DNA, 25 bp, Homo sapien
ctggaagtccaagatagaggtgcga

SEQ ID NO: 2152816 - DNA, 25 bp, Homo sapien
tcaggcagtcttctgtcattagaca

SEQ ID NO: 2152817 - DNA, 25 bp, Homo sapien
tctgtgctcacacactactggtgtc

SEQ ID NO: 2152818 - DNA, 25 bp, Homo sapien
cagaactgcatgcacttagtggagt

SEQ ID NO: 2152819 - DNA, 25 bp, Homo sapien
gggcctcccattgcagcatctgtga

SEQ ID NO: 2152820 - DNA, 25 bp, Homo sapien
gaccaccgcctcgtatcaagaattt

SEQ ID NO: 2152821 - DNA, 25 bp, Homo sapien
ctgttacacatgcaagatcttccgg

SEQ ID NO: 2152822 - DNA, 25 bp, Homo sapien
ttgataccaattttgtagtactgat

SEQ ID NO: 2152823 - DNA, 25 bp, Homo sapien
tcatcacagagtatgtacttcctaa

SEQ ID NO: 2152824 - DNA, 25 bp, Homo sapien
aaagaccaatacctttgataccaat

SEQ ID NO: 2152825 - DNA, 25 bp, Homo sapien
tgcttcgtggtcatcacagagtatg

SEQ ID NO: 2152826 - DNA, 25 bp, Homo sapien
cctgattatggttactttgggtcca

SEQ ID NO: 2152827 - DNA, 25 bp, Homo sapien
tcttcgcctttgagtgagtttcggt

SEQ ID NO: 2152828 - DNA, 25 bp, Homo sapien
atgatggcccggcaaaagggcattt

SEQ ID NO: 2152829 - DNA, 25 bp, Homo sapien
gactttaacgtcctcttgagcgatg

SEQ ID NO: 2152830 - DNA, 25 bp, Homo sapien
ctctcgtgtaatcgcaaaacccatt

SEQ ID NO: 2152831 - DNA, 25 bp, Homo sapien
aatcgcaaaacccattttggagcag

SEQ ID NO: 2152832 - DNA, 25 bp, Homo sapien
tcgtgtaatcgcaaaacccattttg

SEQ ID NO: 2152833 - DNA, 25 bp, Homo sapien
ttcttctctcgtgtaatcgcaaaac

SEQ ID NO: 2152834 - DNA, 25 bp, Homo sapien
tgtgcgtgtggatgtggcgcgcgtc

SEQ ID NO: 2152835 - DNA, 25 bp, Homo sapien
tggcgcgcgtcccaacctgcctggg

SEQ ID NO: 2152836 - DNA, 25 bp, Homo sapien
tgagtgtgtacgagcgtgtggctgc

SEQ ID NO: 2152837 - DNA, 25 bp, Homo sapien
gtggtccgcggcgtggcggagtcag

SEQ ID NO: 2152838 - DNA, 25 bp, Homo sapien
gggcattccgtggttcattcttttg

SEQ ID NO: 2152839 - DNA, 25 bp, Homo sapien
tctatgtcagtgatagcagcccagg

SEQ ID NO: 2152840 - DNA, 25 bp, Homo sapien
atcaattcgttctacacacacatgc

SEQ ID NO: 2152841 - DNA, 25 bp, Homo sapien
taagaatactagctcatcatgcgtg

SEQ ID NO: 2152842 - DNA, 25 bp, Homo sapien
ctctctaccccagtcagcaggatgg

SEQ ID NO: 2152843 - DNA, 25 bp, Homo sapien
ataggacctaaagccatcccaggca

SEQ ID NO: 2152844 - DNA, 25 bp, Homo sapien
gtccagagatgaagtcaaattggga

SEQ ID NO: 2152845 - DNA, 25 bp, Homo sapien
aggacctaaagccatcccaggcaga

SEQ ID NO: 2152846 - DNA, 25 bp, Homo sapien
aattgggaaccagtgggagcagcca

SEQ ID NO: 2152847 - DNA, 25 bp, Homo sapien
cacttctcatatggggccgttgcca

SEQ ID NO: 2152848 - DNA, 25 bp, Homo sapien
ctcctcacttctcatatggggccgt

SEQ ID NO: 2152849 - DNA, 25 bp, Homo sapien
ctcacttctcatatggggccgttgc

SEQ ID NO: 2152850 - DNA, 25 bp, Homo sapien
tcctcacttctcatatggggccgtt

SEQ ID NO: 2152851 - DNA, 25 bp, Homo sapien
gcctttacctcctttctattccaca

SEQ ID NO: 2152852 - DNA, 25 bp, Homo sapien
caaagccccaattttcctgagcttt

SEQ ID NO: 2152853 - DNA, 25 bp, Homo sapien
agtgcatgatctgggcccattgcag

SEQ ID NO: 2152854 - DNA, 25 bp, Homo sapien
tggagtgcatgatctgggcccattg

SEQ ID NO: 2152855 - DNA, 25 bp, Homo sapien
ggagtgcatgatctgggcccattgc

SEQ ID NO: 2152856 - DNA, 25 bp, Homo sapien
gagtgcatgatctgggcccattgca

SEQ ID NO: 2152857 - DNA, 25 bp, Homo sapien
tcctccttagaaaccatattcccag

SEQ ID NO: 2152858 - DNA, 25 bp, Homo sapien
ccagaccggatcagcagacatttgt

SEQ ID NO: 2152859 - DNA, 25 bp, Homo sapien
aaaactaatgttccgagtagtagca

SEQ ID NO: 2152860 - DNA, 25 bp, Homo sapien
gcatggaacagtgaccactcttgtt

SEQ ID NO: 2152861 - DNA, 25 bp, Homo sapien
catcaccattccctgggtggttcat

SEQ ID NO: 2152862 - DNA, 25 bp, Homo sapien
actttgtcctcattcacttcatcac

SEQ ID NO: 2152863 - DNA, 25 bp, Homo sapien
catcactttgtcctcattcacttca

SEQ ID NO: 2152864 - DNA, 25 bp, Homo sapien
cacttcatcaccattccctgggtgg

SEQ ID NO: 2152865 - DNA, 25 bp, Homo sapien
tatctaaggtcttcagggtattagc

SEQ ID NO: 2152866 - DNA, 25 bp, Homo sapien
tggctatctaaggtcttcagggtat

SEQ ID NO: 2152867 - DNA, 25 bp, Homo sapien
gctatctaaggtcttcagggtatta

SEQ ID NO: 2152868 - DNA, 25 bp, Homo sapien
gtggctatctaaggtcttcagggta

SEQ ID NO: 2152869 - DNA, 25 bp, Homo sapien
tgaggtagcaaagcacttgggagct

SEQ ID NO: 2152870 - DNA, 25 bp, Homo sapien
tagcttggcttgtttaaggtgtcca

SEQ ID NO: 2152871 - DNA, 25 bp, Homo sapien
caatattcaggagcacccgtgtcct

SEQ ID NO: 2152872 - DNA, 25 bp, Homo sapien
cacagaacccaagcctgaggtagca

SEQ ID NO: 2152873 - DNA, 25 bp, Homo sapien
tggggacaggtacagggagtgcatg

SEQ ID NO: 2152874 - DNA, 25 bp, Homo sapien
tcatctatggggacaggtacaggga

SEQ ID NO: 2152875 - DNA, 25 bp, Homo sapien
tacagggagtgcatggggtgccatt

SEQ ID NO: 2152876 - DNA, 25 bp, Homo sapien
agggagtgcatggggtgccattgcc

SEQ ID NO: 2152877 - DNA, 25 bp, Homo sapien
tgttgttgcaacatgaccacactgg

SEQ ID NO: 2152878 - DNA, 25 bp, Homo sapien
gagttggttccatgaaccctgagaa

SEQ ID NO: 2152879 - DNA, 25 bp, Homo sapien
tcaggacccctaaaatcacagggat

SEQ ID NO: 2152880 - DNA, 25 bp, Homo sapien
cacagatttcacataggatgggtct

SEQ ID NO: 2152881 - DNA, 25 bp, Homo sapien
tcagaaaaacgttgatgggagacag

SEQ ID NO: 2152882 - DNA, 25 bp, Homo sapien
tgatgggagacagcccatctcagtg

SEQ ID NO: 2152883 - DNA, 25 bp, Homo sapien
tttctgcttggctagttgctaggga

SEQ ID NO: 2152884 - DNA, 25 bp, Homo sapien
tctgcttggctagttgctagggagc

SEQ ID NO: 2152885 - DNA, 25 bp, Homo sapien
cattggcactgatacctgactggga

SEQ ID NO: 2152886 - DNA, 25 bp, Homo sapien
gagatctcgctagtcttcatggcaa

SEQ ID NO: 2152887 - DNA, 25 bp, Homo sapien
tcatggcaagaccactgttgagcat

SEQ ID NO: 2152888 - DNA, 25 bp, Homo sapien
tgttattcacagcagagttggcccc

SEQ ID NO: 2152889 - DNA, 25 bp, Homo sapien
catggaccaagaacggaagccgaag

SEQ ID NO: 2152890 - DNA, 25 bp, Homo sapien
agccgaaggaaagcaatttccgtgc

SEQ ID NO: 2152891 - DNA, 25 bp, Homo sapien
gaaggaaagcaatttccgtgcgggc

SEQ ID NO: 2152892 - DNA, 25 bp, Homo sapien
cttctctcacatggaccaagaacgg

SEQ ID NO: 2152893 - DNA, 25 bp, Homo sapien
tctctgcaagccggttcgcagtcat

SEQ ID NO: 2152894 - DNA, 25 bp, Homo sapien
gcactgcctgcgcagaggattaaat

SEQ ID NO: 2152895 - DNA, 25 bp, Homo sapien
gccaaaacgtggtggatgactccaa

SEQ ID NO: 2152896 - DNA, 25 bp, Homo sapien
gggagtttataacgcctgcactgcc

SEQ ID NO: 2152897 - DNA, 25 bp, Homo sapien
gggcacaaaacatcacaggagccaa

SEQ ID NO: 2152898 - DNA, 25 bp, Homo sapien
ttcctgttggctcaaagccagaagg

SEQ ID NO: 2152899 - DNA, 25 bp, Homo sapien
cttcctgttggctcaaagccagaag

SEQ ID NO: 2152900 - DNA, 25 bp, Homo sapien
tttccatcaagggaactgattgctt

SEQ ID NO: 2152901 - DNA, 25 bp, Homo sapien
ctattctttccatcaagggaactga

SEQ ID NO: 2152902 - DNA, 25 bp, Homo sapien
ttgcttccagaagcttttgatgctt

SEQ ID NO: 2152903 - DNA, 25 bp, Homo sapien
agaagcttttgatgctttctctctc

SEQ ID NO: 2152904 - DNA, 25 bp, Homo sapien
gggttgggagagacaaacacttctc

SEQ ID NO: 2152905 - DNA, 25 bp, Homo sapien
ttgggagagacaaacacttctctct

SEQ ID NO: 2152906 - DNA, 25 bp, Homo sapien
taggcaaaacgatataataggaatg

SEQ ID NO: 2152907 - DNA, 25 bp, Homo sapien
gaaattaggcaaaacgatataatag

SEQ ID NO: 2152908 - DNA, 25 bp, Homo sapien
tagcctcagacctctcagccaattt

SEQ ID NO: 2152909 - DNA, 25 bp, Homo sapien
cttcagaactgacattgaactctga

SEQ ID NO: 2152910 - DNA, 25 bp, Homo sapien
gacattgaactctgacaccttcaga

SEQ ID NO: 2152911 - DNA, 25 bp, Homo sapien
cttcagactagcctcagacctctca

SEQ ID NO: 2152912 - DNA, 25 bp, Homo sapien
gggcctttcatgaccaaccgatcta

SEQ ID NO: 2152913 - DNA, 25 bp, Homo sapien
ctctcttattgtctcccttcattag

SEQ ID NO: 2152914 - DNA, 25 bp, Homo sapien
agccacttagttgctttactgcatc

SEQ ID NO: 2152915 - DNA, 25 bp, Homo sapien
cctttgtgctagctgttccttggcc

SEQ ID NO: 2152916 - DNA, 25 bp, Homo sapien
ggtcaaactttctggtcagaccaag

SEQ ID NO: 2152917 - DNA, 25 bp, Homo sapien
gaagcctcagtagaaaatgccagta

SEQ ID NO: 2152918 - DNA, 25 bp, Homo sapien
caatataatgtagggagaagcctca

SEQ ID NO: 2152919 - DNA, 25 bp, Homo sapien
acattcatccccaaacgtgttaggg

SEQ ID NO: 2152920 - DNA, 25 bp, Homo sapien
tcagaggtaactccactgtcttctt

SEQ ID NO: 2152921 - DNA, 25 bp, Homo sapien
tcacagtggccaaagaagatgaagt

SEQ ID NO: 2152922 - DNA, 25 bp, Homo sapien
tgaagttttaacaggctcaagcaga

SEQ ID NO: 2152923 - DNA, 25 bp, Homo sapien
gatttgactctactcagttgctttt

SEQ ID NO: 2152924 - DNA, 25 bp, Homo sapien
tgcctgccggttcttcaggacgaca

SEQ ID NO: 2152925 - DNA, 25 bp, Homo sapien
cttgtgcggttttattgaatgctac

SEQ ID NO: 2152926 - DNA, 25 bp, Homo sapien
ggacttgtgcggttttattgaatgc

SEQ ID NO: 2152927 - DNA, 25 bp, Homo sapien
gccggttcttcaggacgacagggtc

SEQ ID NO: 2152928 - DNA, 25 bp, Homo sapien
ggtggaatcaaacttttcactacat

SEQ ID NO: 2152929 - DNA, 25 bp, Homo sapien
gcaaacttatgcaagtggttacttc

SEQ ID NO: 2152930 - DNA, 25 bp, Homo sapien
taaaaatgatcagatggggcacggg

SEQ ID NO: 2152931 - DNA, 25 bp, Homo sapien
gacagtgtgtagtagcatgctaccc

SEQ ID NO: 2152932 - DNA, 25 bp, Homo sapien
acaggggtcagtaaagggtctgtca

SEQ ID NO: 2152933 - DNA, 25 bp, Homo sapien
caggggtcagtaaagggtctgtcac

SEQ ID NO: 2152934 - DNA, 25 bp, Homo sapien
aggggtcagtaaagggtctgtcact

SEQ ID NO: 2152935 - DNA, 25 bp, Homo sapien
cacaggggtcagtaaagggtctgtc

SEQ ID NO: 2152936 - DNA, 25 bp, Homo sapien
tcgagccttggcctcatagtaggac

SEQ ID NO: 2152937 - DNA, 25 bp, Homo sapien
gagccttggcctcatagtaggactg

SEQ ID NO: 2152938 - DNA, 25 bp, Homo sapien
agagcccgagccctctgaagctctg

SEQ ID NO: 2152939 - DNA, 25 bp, Homo sapien
ttcgagccttggcctcatagtagga

SEQ ID NO: 2152940 - DNA, 25 bp, Homo sapien
gctggattaaccttccgcagctgct

SEQ ID NO: 2152941 - DNA, 25 bp, Homo sapien
ttcccactgttttggtgcttaaggc

SEQ ID NO: 2152942 - DNA, 25 bp, Homo sapien
tttgacttggcccatttcccactgt

SEQ ID NO: 2152943 - DNA, 25 bp, Homo sapien
ccactgttttggtgcttaaggctca

SEQ ID NO: 2152944 - DNA, 25 bp, Homo sapien
tccaggtcatatttggccataattg

SEQ ID NO: 2152945 - DNA, 25 bp, Homo sapien
gggattcggcccatctgcattcatc

SEQ ID NO: 2152946 - DNA, 25 bp, Homo sapien
gattcggcccatctgcattcatctg

SEQ ID NO: 2152947 - DNA, 25 bp, Homo sapien
ggattcggcccatctgcattcatct

SEQ ID NO: 2152948 - DNA, 25 bp, Homo sapien
tcagaaactccatgggcctcaagct

SEQ ID NO: 2152949 - DNA, 25 bp, Homo sapien
cagaaactccatgggcctcaagctc

SEQ ID NO: 2152950 - DNA, 25 bp, Homo sapien
tgtacgcactcttgcaagtccccag

SEQ ID NO: 2152951 - DNA, 25 bp, Homo sapien
gaaaatgtgcctgaaccacgttgca

SEQ ID NO: 2152952 - DNA, 25 bp, Homo sapien
gctcaagagaaagccactagggtcc

SEQ ID NO: 2152953 - DNA, 25 bp, Homo sapien
tctcttcagggatccagtgtacgca

SEQ ID NO: 2152954 - DNA, 25 bp, Homo sapien
gatccactgtataactgggactgtg

SEQ ID NO: 2152955 - DNA, 25 bp, Homo sapien
gatgtagctcacactttcactggca

SEQ ID NO: 2152956 - DNA, 25 bp, Homo sapien
tgcttgtaaaaaccctatccaggat

SEQ ID NO: 2152957 - DNA, 25 bp, Homo sapien
gtggcttaagttcctcgtgcagtaa

SEQ ID NO: 2152958 - DNA, 25 bp, Homo sapien
tgagatagtactctcaattcagaca

SEQ ID NO: 2152959 - DNA, 25 bp, Homo sapien
tctgagatagtactctcaattcaga

SEQ ID NO: 2152960 - DNA, 25 bp, Homo sapien
ctgagatagtactctcaattcagac

SEQ ID NO: 2152961 - DNA, 25 bp, Homo sapien
cttcacggagggagattgtgtggtt

SEQ ID NO: 2152962 - DNA, 25 bp, Homo sapien
cttccagcgtctgtactctctctgg

SEQ ID NO: 2152963 - DNA, 25 bp, Homo sapien
cagcgtctgtactctctctggtctc

SEQ ID NO: 2152964 - DNA, 25 bp, Homo sapien
ggaggttctgtaggtcgatcatttg

SEQ ID NO: 2152965 - DNA, 25 bp, Homo sapien
tgcctatggtttctctcctcttcat

SEQ ID NO: 2152966 - DNA, 25 bp, Homo sapien
tatggtttctctcctcttcatcttc

SEQ ID NO: 2152967 - DNA, 25 bp, Homo sapien
cctatggtttctctcctcttcatct

SEQ ID NO: 2152968 - DNA, 25 bp, Homo sapien
ctgcctatggtttctctcctcttca

SEQ ID NO: 2152969 - DNA, 25 bp, Homo sapien
ggtccacgtcctttggcttactcgc

SEQ ID NO: 2152970 - DNA, 25 bp, Homo sapien
tggcttactcgcctccacagcttcc

SEQ ID NO: 2152971 - DNA, 25 bp, Homo sapien
ccaggtagtgtcaggtccacgtcct

SEQ ID NO: 2152972 - DNA, 25 bp, Homo sapien
tagtgtcaggtccacgtcctttggc

SEQ ID NO: 2152973 - DNA, 25 bp, Homo sapien
catttggcaaattcttatcttttct

SEQ ID NO: 2152974 - DNA, 25 bp, Homo sapien
tctcattgataatcacatttggcaa

SEQ ID NO: 2152975 - DNA, 25 bp, Homo sapien
gcagctgcgtggatgttgcgcttct

SEQ ID NO: 2152976 - DNA, 25 bp, Homo sapien
atcttttcttggaggaccctcaggg

SEQ ID NO: 2152977 - DNA, 25 bp, Homo sapien
cattgctcccatctgcccttaggaa

SEQ ID NO: 2152978 - DNA, 25 bp, Homo sapien
cctatctagctacaggagctccagg

SEQ ID NO: 2152979 - DNA, 25 bp, Homo sapien
gactgagaggtcaaggcgtcccatt

SEQ ID NO: 2152980 - DNA, 25 bp, Homo sapien
gactgcaagaatccagaccattgtg

SEQ ID NO: 2152981 - DNA, 25 bp, Homo sapien
gaatgatttggtatgaggcaggcct

SEQ ID NO: 2152982 - DNA, 25 bp, Homo sapien
ggcagctttcatcaggtactgtttt

SEQ ID NO: 2152983 - DNA, 25 bp, Homo sapien
tgcagttgtatactgtaatggcagc

SEQ ID NO: 2152984 - DNA, 25 bp, Homo sapien
tacaggccacggttccacatgatga

SEQ ID NO: 2152985 - DNA, 25 bp, Homo sapien
tgaggaagaccggtagcccacgtct

SEQ ID NO: 2152986 - DNA, 25 bp, Homo sapien
tcttcagctgttttttgtgacgtgt

SEQ ID NO: 2152987 - DNA, 25 bp, Homo sapien
cagctgttttttgtgacgtgtggtg

SEQ ID NO: 2152988 - DNA, 25 bp, Homo sapien
tcagctgttttttgtgacgtgtggt

SEQ ID NO: 2152989 - DNA, 25 bp, Homo sapien
ttcagctgttttttgtgacgtgtgg

SEQ ID NO: 2152990 - DNA, 25 bp, Homo sapien
cagagtaaaactggaccaaaggaag

SEQ ID NO: 2152991 - DNA, 25 bp, Homo sapien
gcccatgtgaactgtcatatagcaa

SEQ ID NO: 2152992 - DNA, 25 bp, Homo sapien
actacactttcaatcaatggtgagg

SEQ ID NO: 2152993 - DNA, 25 bp, Homo sapien
ggctctttccgtatatttcttgcca

SEQ ID NO: 2152994 - DNA, 25 bp, Homo sapien
cttgttaggaaactcagctgcaggg

SEQ ID NO: 2152995 - DNA, 25 bp, Homo sapien
aagaagggacaacataagggagcgc

SEQ ID NO: 2152996 - DNA, 25 bp, Homo sapien
accacgctggccacgaaggcgaagg

SEQ ID NO: 2152997 - DNA, 25 bp, Homo sapien
ggatggacagtcagcgagggaaggg

SEQ ID NO: 2152998 - DNA, 25 bp, Homo sapien
ggagggacttagagagggacaagaa

SEQ ID NO: 2152999 - DNA, 25 bp, Homo sapien
gacaactgatcgaggcaggactcaa

SEQ ID NO: 2153000 - DNA, 25 bp, Homo sapien
caaactcaggtctcgttggctccaa

SEQ ID NO: 2153001 - DNA, 25 bp, Homo sapien
caaacacttacgatgtggcaggctc

SEQ ID NO: 2153002 - DNA, 25 bp, Homo sapien
taacccaggcctcttaggcaggtgc

SEQ ID NO: 2153003 - DNA, 25 bp, Homo sapien
agagggctaggagactgtccatgaa

SEQ ID NO: 2153004 - DNA, 25 bp, Homo sapien
gagagagagaaccactctcctggaa

SEQ ID NO: 2153005 - DNA, 25 bp, Homo sapien
ggagtgtagggctggcaagtgaaga

SEQ ID NO: 2153006 - DNA, 25 bp, Homo sapien
ccatttggttgaaaacaggccttct

SEQ ID NO: 2153007 - DNA, 25 bp, Homo sapien
tgtgtatacaagccagtagcgtcat

SEQ ID NO: 2153008 - DNA, 25 bp, Homo sapien
cttgtgtatacaagccagtagcgtc

SEQ ID NO: 2153009 - DNA, 25 bp, Homo sapien
ttgtgtatacaagccagtagcgtca

SEQ ID NO: 2153010 - DNA, 25 bp, Homo sapien
gaaggctgtagatctaagggcaccc

SEQ ID NO: 2153011 - DNA, 25 bp, Homo sapien
caaaggctagggatatcacttgaga

SEQ ID NO: 2153012 - DNA, 25 bp, Homo sapien
aagggcacccttctcaacgttgtag

SEQ ID NO: 2153013 - DNA, 25 bp, Homo sapien
gaccaaagtcttgtaggaaggctgt

SEQ ID NO: 2153014 - DNA, 25 bp, Homo sapien
gacagctgcaaacctatgggcttct

SEQ ID NO: 2153015 - DNA, 25 bp, Homo sapien
tgggtgagccgagcacattcaatga

SEQ ID NO: 2153016 - DNA, 25 bp, Homo sapien
cacacggctcgctggaatgagccgg

SEQ ID NO: 2153017 - DNA, 25 bp, Homo sapien
tgcagaccgagagacggagaagagc

SEQ ID NO: 2153018 - DNA, 25 bp, Homo sapien
gggcattctattggcacaacccgtc

SEQ ID NO: 2153019 - DNA, 25 bp, Homo sapien
gtatacgactagttccaatattagc

SEQ ID NO: 2153020 - DNA, 25 bp, Homo sapien
agttccagccaaccatcacgagagg

SEQ ID NO: 2153021 - DNA, 25 bp, Homo sapien
gcaagggaggatctagacaacagcc

SEQ ID NO: 2153022 - DNA, 25 bp, Homo sapien
cgtggcccagcatagagcttccagc

SEQ ID NO: 2153023 - DNA, 25 bp, Homo sapien
gacaccccagtgtagccatcttgtc

SEQ ID NO: 2153024 - DNA, 25 bp, Homo sapien
acttctcaaaccaaccacccacaga

SEQ ID NO: 2153025 - DNA, 25 bp, Homo sapien
acagacaccccagtgtagccatctt

SEQ ID NO: 2153026 - DNA, 25 bp, Homo sapien
gccccgtaggtaagtagtgcacagt

SEQ ID NO: 2153027 - DNA, 25 bp, Homo sapien
gcagaccgcactccatgaatacttt

SEQ ID NO: 2153028 - DNA, 25 bp, Homo sapien
gacaagtaggcattcacgaggagca

SEQ ID NO: 2153029 - DNA, 25 bp, Homo sapien
ccatctgagagcaggcaccttgtca

SEQ ID NO: 2153030 - DNA, 25 bp, Homo sapien
atttatctggcgaaacgaaggttgg

SEQ ID NO: 2153031 - DNA, 25 bp, Homo sapien
tcatttatctggcgaaacgaaggtt

SEQ ID NO: 2153032 - DNA, 25 bp, Homo sapien
ttcctggttgaagctctagctcctc

SEQ ID NO: 2153033 - DNA, 25 bp, Homo sapien
atttcctggttgaagctctagctcc

SEQ ID NO: 2153034 - DNA, 25 bp, Homo sapien
ttgtgcgcgtgaggcggccagagcc

SEQ ID NO: 2153035 - DNA, 25 bp, Homo sapien
gtgaggcggccagagcccgggaagc

SEQ ID NO: 2153036 - DNA, 25 bp, Homo sapien
actccgcggaagctggccttcgctg

SEQ ID NO: 2153037 - DNA, 25 bp, Homo sapien
gaagcccgggcacaaactccgcgga

SEQ ID NO: 2153038 - DNA, 25 bp, Homo sapien
ggtgcggcacaatcgcagactgtgt

SEQ ID NO: 2153039 - DNA, 25 bp, Homo sapien
gcggcccccactacgagagcagaat

SEQ ID NO: 2153040 - DNA, 25 bp, Homo sapien
cagaatccagatgctaagaggtggg

SEQ ID NO: 2153041 - DNA, 25 bp, Homo sapien
tgtgtctttcctcgcttttcccgga

SEQ ID NO: 2153042 - DNA, 25 bp, Homo sapien
gggcgacccgagttggactggtggc

SEQ ID NO: 2153043 - DNA, 25 bp, Homo sapien
ttccctccaaggctagccgtccttc

SEQ ID NO: 2153044 - DNA, 25 bp, Homo sapien
ggctagccgtccttcgccacgccga

SEQ ID NO: 2153045 - DNA, 25 bp, Homo sapien
ccgagttggactggtggctactttc

SEQ ID NO: 2153046 - DNA, 25 bp, Homo sapien
tccccttcttagcgttgccccctca

SEQ ID NO: 2153047 - DNA, 25 bp, Homo sapien
cagtatccccttcttagcgttgccc

SEQ ID NO: 2153048 - DNA, 25 bp, Homo sapien
gggctcagcaaagcggaggagagac

SEQ ID NO: 2153049 - DNA, 25 bp, Homo sapien
gccgcggcgagcgaaagagtgaggg

SEQ ID NO: 2153050 - DNA, 25 bp, Homo sapien
agggagggctcagcaaagcggagga

SEQ ID NO: 2153051 - DNA, 25 bp, Homo sapien
agcagccgcggcgagcgaaagagtg

SEQ ID NO: 2153052 - DNA, 25 bp, Homo sapien
ccttctcctctctctcggcggcggc

SEQ ID NO: 2153053 - DNA, 25 bp, Homo sapien
cttctcctctctctcggcggcggcg

SEQ ID NO: 2153054 - DNA, 25 bp, Homo sapien
ggcggcggcggtcggactctaggaa

SEQ ID NO: 2153055 - DNA, 25 bp, Homo sapien
ggcggcggcggcggtcggactctag

SEQ ID NO: 2153056 - DNA, 25 bp, Homo sapien
gccacccgcctaatactgccccgat

SEQ ID NO: 2153057 - DNA, 25 bp, Homo sapien
taatactgccccgatctgatgcccc

SEQ ID NO: 2153058 - DNA, 25 bp, Homo sapien
acccgcctaatactgccccgatctg

SEQ ID NO: 2153059 - DNA, 25 bp, Homo sapien
gcctaatactgccccgatctgatgc

SEQ ID NO: 2153060 - DNA, 25 bp, Homo sapien
cagggagcgctacgtccggggacac

SEQ ID NO: 2153061 - DNA, 25 bp, Homo sapien
cgagcggccgcagggaaaagaagga

SEQ ID NO: 2153062 - DNA, 25 bp, Homo sapien
gctacgtccggggacacgaagagga

SEQ ID NO: 2153063 - DNA, 25 bp, Homo sapien
gggcaagccgagcggccgcagggaa

SEQ ID NO: 2153064 - DNA, 25 bp, Homo sapien
gcccagccgggaagaagactctctt

SEQ ID NO: 2153065 - DNA, 25 bp, Homo sapien
ttggatcgtggcgaacgagtctcac

SEQ ID NO: 2153066 - DNA, 25 bp, Homo sapien
agaagactctcttggatcgtggcga

SEQ ID NO: 2153067 - DNA, 25 bp, Homo sapien
gatcgtggcgaacgagtctcacctg

SEQ ID NO: 2153068 - DNA, 25 bp, Homo sapien
ggtgcacttctccacaaaacttgga

SEQ ID NO: 2153069 - DNA, 25 bp, Homo sapien
ctctgcgatcatagtcatatacggt

SEQ ID NO: 2153070 - DNA, 25 bp, Homo sapien
catagtcatatacggtgcacttctc

SEQ ID NO: 2153071 - DNA, 25 bp, Homo sapien
tatacggtgcacttctccacaaaac

SEQ ID NO: 2153072 - DNA, 25 bp, Homo sapien
catagactctttgggtacttccatg

SEQ ID NO: 2153073 - DNA, 25 bp, Homo sapien
ttgcccagatacattaattctggta

SEQ ID NO: 2153074 - DNA, 25 bp, Homo sapien
tagcatggaccccttcatagactct

SEQ ID NO: 2153075 - DNA, 25 bp, Homo sapien
gaaggctaggtagttgccggcatat

SEQ ID NO: 2153076 - DNA, 25 bp, Homo sapien
ataggacctgctgtggccactcccc

SEQ ID NO: 2153077 - DNA, 25 bp, Homo sapien
accagataggacctgctgtggccac

SEQ ID NO: 2153078 - DNA, 25 bp, Homo sapien
caccagataggacctgctgtggcca

SEQ ID NO: 2153079 - DNA, 25 bp, Homo sapien
cagataggacctgctgtggccactc

SEQ ID NO: 2153080 - DNA, 25 bp, Homo sapien
gaatccggtcagaactggtccagtt

SEQ ID NO: 2153081 - DNA, 25 bp, Homo sapien
tctcctcgttgatgccacacatgcg

SEQ ID NO: 2153082 - DNA, 25 bp, Homo sapien
ttgatgccacacatgcgaatccggt

SEQ ID NO: 2153083 - DNA, 25 bp, Homo sapien
tccagttgtgcacgccgctgtagag

SEQ ID NO: 2153084 - DNA, 25 bp, Homo sapien
tctggtgacgaggtactgctcactg

SEQ ID NO: 2153085 - DNA, 25 bp, Homo sapien
ccctctggtgacgaggtactgctca

SEQ ID NO: 2153086 - DNA, 25 bp, Homo sapien
ctctggtgacgaggtactgctcact

SEQ ID NO: 2153087 - DNA, 25 bp, Homo sapien
tggtgacgaggtactgctcactgga

SEQ ID NO: 2153088 - DNA, 25 bp, Homo sapien
ccacagtctgacagttgttaatgag

SEQ ID NO: 2153089 - DNA, 25 bp, Homo sapien
catctgaaaagagatagcatggcag

SEQ ID NO: 2153090 - DNA, 25 bp, Homo sapien
caagtgctagctggcaaaaggtcat

SEQ ID NO: 2153091 - DNA, 25 bp, Homo sapien
tagcatggcagatcaggccactcac

SEQ ID NO: 2153092 - DNA, 25 bp, Homo sapien
tgaccaagggttatgaaagccaaat

SEQ ID NO: 2153093 - DNA, 25 bp, Homo sapien
caagactatgctaggcggtctcaac

SEQ ID NO: 2153094 - DNA, 25 bp, Homo sapien
tgaaaatacacacgtgaggcaggtg

SEQ ID NO: 2153095 - DNA, 25 bp, Homo sapien
tcatgaggtgagaaagcgctgacca

SEQ ID NO: 2153096 - DNA, 25 bp, Homo sapien
aacaccagcaagcatgaaggagcag

SEQ ID NO: 2153097 - DNA, 25 bp, Homo sapien
taaacagtcaatggattgaaacaac

SEQ ID NO: 2153098 - DNA, 25 bp, Homo sapien
ggagcagtgccttctctaaaaatga

SEQ ID NO: 2153099 - DNA, 25 bp, Homo sapien
aatttaaacagtcaatggattgaaa

SEQ ID NO: 2153100 - DNA, 25 bp, Homo sapien
tgacacctcgaaagcagaatccctg

SEQ ID NO: 2153101 - DNA, 25 bp, Homo sapien
gaatccctgccgtcgaaggcagctg

SEQ ID NO: 2153102 - DNA, 25 bp, Homo sapien
ccccgaaggcgctgcaaaatgtcat

SEQ ID NO: 2153103 - DNA, 25 bp, Homo sapien
agaaccacagaaccaggccaagcaa

SEQ ID NO: 2153104 - DNA, 25 bp, Homo sapien
cctttaaaaggcagttggactggca

SEQ ID NO: 2153105 - DNA, 25 bp, Homo sapien
tcagggatccagaaggggctaaccg

SEQ ID NO: 2153106 - DNA, 25 bp, Homo sapien
aagtgggagggctccactgctggaa

SEQ ID NO: 2153107 - DNA, 25 bp, Homo sapien
gcaagggggatcaccacgggcctct

SEQ ID NO: 2153108 - DNA, 25 bp, Homo sapien
gacatgagaaccactgaatgcctca

SEQ ID NO: 2153109 - DNA, 25 bp, Homo sapien
tgagaaccactgaatgcctcaaaag

SEQ ID NO: 2153110 - DNA, 25 bp, Homo sapien
aaaggggagacatgagaaccactga

SEQ ID NO: 2153111 - DNA, 25 bp, Homo sapien
aaaatgaccatccaggatgtacagg

SEQ ID NO: 2153112 - DNA, 25 bp, Homo sapien
aaagtgctggcagtcgcctgtcgtt

SEQ ID NO: 2153113 - DNA, 25 bp, Homo sapien
aactgctgctgacacaaaactcctg

SEQ ID NO: 2153114 - DNA, 25 bp, Homo sapien
gcagtcgcctgtcgttgactcctca

SEQ ID NO: 2153115 - DNA, 25 bp, Homo sapien
gcctgtcgttgactcctcatcagaa

SEQ ID NO: 2153116 - DNA, 25 bp, Homo sapien
gctccctgcagatggtgcaagtgtc

SEQ ID NO: 2153117 - DNA, 25 bp, Homo sapien
ggatagcatgcacatctcagccagc

SEQ ID NO: 2153118 - DNA, 25 bp, Homo sapien
cgacaggatagcatgcacatctcag

SEQ ID NO: 2153119 - DNA, 25 bp, Homo sapien
caggatagcatgcacatctcagcca

SEQ ID NO: 2153120 - DNA, 25 bp, Homo sapien
caaagcctttactccggcgggtgag

SEQ ID NO: 2153121 - DNA, 25 bp, Homo sapien
ggagctggaaccgaagtggcaactt

SEQ ID NO: 2153122 - DNA, 25 bp, Homo sapien
tgtcagatgcgggaagcttgagccc

SEQ ID NO: 2153123 - DNA, 25 bp, Homo sapien
caacttggactggaacaagccctga

SEQ ID NO: 2153124 - DNA, 25 bp, Homo sapien
gggcctgaagggggagcagaagctg

SEQ ID NO: 2153125 - DNA, 25 bp, Homo sapien
cgggcctgaagggggagcagaagct

SEQ ID NO: 2153126 - DNA, 25 bp, Homo sapien
aagggggagcagaagctggcacagg

SEQ ID NO: 2153127 - DNA, 25 bp, Homo sapien
ggggagcagaagctggcacaggcac

SEQ ID NO: 2153128 - DNA, 25 bp, Homo sapien
tggcatgggagccagaaccggagtg

SEQ ID NO: 2153129 - DNA, 25 bp, Homo sapien
tgcaggcaccggtgtaggagcaaag

SEQ ID NO: 2153130 - DNA, 25 bp, Homo sapien
agcgagaaccaaggtcggagctgaa

SEQ ID NO: 2153131 - DNA, 25 bp, Homo sapien
agctgaaactgggactgaaagcggg

SEQ ID NO: 2153132 - DNA, 25 bp, Homo sapien
tgaaaggacagggggactttttgca

SEQ ID NO: 2153133 - DNA, 25 bp, Homo sapien
cagggggactttttgcatagctggt

SEQ ID NO: 2153134 - DNA, 25 bp, Homo sapien
ggacagggggactttttgcatagct

SEQ ID NO: 2153135 - DNA, 25 bp, Homo sapien
aaggacagggggactttttgcatag

SEQ ID NO: 2153136 - DNA, 25 bp, Homo sapien
cataaggcttggcagcaatccggca

SEQ ID NO: 2153137 - DNA, 25 bp, Homo sapien
gcagctcaggcatcttaggcaggtt

SEQ ID NO: 2153138 - DNA, 25 bp, Homo sapien
ccgaaacaacgctggtgggcctgat

SEQ ID NO: 2153139 - DNA, 25 bp, Homo sapien
tgtcgtgaggtagcaaaggcagctc

SEQ ID NO: 2153140 - DNA, 25 bp, Homo sapien
caggccaacccgcaagttagcacat

SEQ ID NO: 2153141 - DNA, 25 bp, Homo sapien
caacccgcaagttagcacatttgtg

SEQ ID NO: 2153142 - DNA, 25 bp, Homo sapien
gccaacccgcaagttagcacatttg

SEQ ID NO: 2153143 - DNA, 25 bp, Homo sapien
ggccaacccgcaagttagcacattt

SEQ ID NO: 2153144 - DNA, 25 bp, Homo sapien
cgtggctgtcggctcgttttcctgg

SEQ ID NO: 2153145 - DNA, 25 bp, Homo sapien
tttcctgaatctgaagcccccctgg

SEQ ID NO: 2153146 - DNA, 25 bp, Homo sapien
tcccctgactccattgtgctctttt

SEQ ID NO: 2153147 - DNA, 25 bp, Homo sapien
cttccggtgcttgtgctttcccctg

SEQ ID NO: 2153148 - DNA, 25 bp, Homo sapien
cagaaggcagaaatgttacaatcaa

SEQ ID NO: 2153149 - DNA, 25 bp, Homo sapien
gaaggcagaaatgttacaatcaaag

SEQ ID NO: 2153150 - DNA, 25 bp, Homo sapien
tggagtgatgtgtggtttggggaca

SEQ ID NO: 2153151 - DNA, 25 bp, Homo sapien
ggacagaaggcagaaatgttacaat

SEQ ID NO: 2153152 - DNA, 25 bp, Homo sapien
ccacaggaataaagtcacggaaact

SEQ ID NO: 2153153 - DNA, 25 bp, Homo sapien
cagactgactgcgcgtgcgggtgct

SEQ ID NO: 2153154 - DNA, 25 bp, Homo sapien
gtcacggaaactgctctttgctttc

SEQ ID NO: 2153155 - DNA, 25 bp, Homo sapien
ggaataaagtcacggaaactgctct

SEQ ID NO: 2153156 - DNA, 25 bp, Homo sapien
gatgggatgtacagaggatggtcag

SEQ ID NO: 2153157 - DNA, 25 bp, Homo sapien
gggatgtacagaggatggtcaggta

SEQ ID NO: 2153158 - DNA, 25 bp, Homo sapien
tgggatgtacagaggatggtcaggt

SEQ ID NO: 2153159 - DNA, 25 bp, Homo sapien
tggatgggatgtacagaggatggtc

SEQ ID NO: 2153160 - DNA, 25 bp, Homo sapien
gtcactgtctgccatgccagcaaag

SEQ ID NO: 2153161 - DNA, 25 bp, Homo sapien
ctggcttcccatgtcactgtctgcc

SEQ ID NO: 2153162 - DNA, 25 bp, Homo sapien
catgccagcaaaggagctacagatg

SEQ ID NO: 2153163 - DNA, 25 bp, Homo sapien
tgtctgccatgccagcaaaggagct

SEQ ID NO: 2153164 - DNA, 25 bp, Homo sapien
tcgggctcgccacaggtgccttcgg

SEQ ID NO: 2153165 - DNA, 25 bp, Homo sapien
tccagggcatttctcgggctcgcca

SEQ ID NO: 2153166 - DNA, 25 bp, Homo sapien
gcatttctcgggctcgccacaggtg

SEQ ID NO: 2153167 - DNA, 25 bp, Homo sapien
tggctgcgatactgggtgtcccgtt

SEQ ID NO: 2153168 - DNA, 25 bp, Homo sapien
cttcagcaggccctcctcctcttct

SEQ ID NO: 2153169 - DNA, 25 bp, Homo sapien
ctcctcctcctcattggtgtcccac

SEQ ID NO: 2153170 - DNA, 25 bp, Homo sapien
gcaggccctcctcctcttcttcctc

SEQ ID NO: 2153171 - DNA, 25 bp, Homo sapien
ttcctcctcctcctcattggtgtcc

SEQ ID NO: 2153172 - DNA, 25 bp, Homo sapien
attttcggctcttctgccgtcttcg

SEQ ID NO: 2153173 - DNA, 25 bp, Homo sapien
ttcggctcttctgccgtcttcgttt

SEQ ID NO: 2153174 - DNA, 25 bp, Homo sapien
tgatattttcggctcttctgccgtc

SEQ ID NO: 2153175 - DNA, 25 bp, Homo sapien
cagtctgatattttcggctcttctg

SEQ ID NO: 2153176 - DNA, 25 bp, Homo sapien
ccctttccgccgctgctcgtcttct

SEQ ID NO: 2153177 - DNA, 25 bp, Homo sapien
ctttccgccgctgctcgtcttcttg

SEQ ID NO: 2153178 - DNA, 25 bp, Homo sapien
ttccgccgctgctcgtcttcttgct

SEQ ID NO: 2153179 - DNA, 25 bp, Homo sapien
tttccgccgctgctcgtcttcttgc

SEQ ID NO: 2153180 - DNA, 25 bp, Homo sapien
tctctgggtcccgaagcctttggct

SEQ ID NO: 2153181 - DNA, 25 bp, Homo sapien
ctggagatcatagcaccgggtttct

SEQ ID NO: 2153182 - DNA, 25 bp, Homo sapien
cctttggctggcgtagagatgcccg

SEQ ID NO: 2153183 - DNA, 25 bp, Homo sapien
gcaggccaatccgaactcattcaat

SEQ ID NO: 2153184 - DNA, 25 bp, Homo sapien
tttgccaaattcctgcacgaagatg

SEQ ID NO: 2153185 - DNA, 25 bp, Homo sapien
cctgcacgaagatgccatcatcaga

SEQ ID NO: 2153186 - DNA, 25 bp, Homo sapien
aaattcctgcacgaagatgccatca

SEQ ID NO: 2153187 - DNA, 25 bp, Homo sapien
ttggcctttgccaaattcctgcacg

SEQ ID NO: 2153188 - DNA, 25 bp, Homo sapien
accagcaacatctctaatttagcca

SEQ ID NO: 2153189 - DNA, 25 bp, Homo sapien
tgggtgaaaatcaagtcactggtgt

SEQ ID NO: 2153190 - DNA, 25 bp, Homo sapien
actggtgtcactagaacacaccagc

SEQ ID NO: 2153191 - DNA, 25 bp, Homo sapien
ggtgtcactagaacacaccagcaac

SEQ ID NO: 2153192 - DNA, 25 bp, Homo sapien
aggaggaagtcttctgcttacgggc

SEQ ID NO: 2153193 - DNA, 25 bp, Homo sapien
aggaagtcttctgcttacgggcctt

SEQ ID NO: 2153194 - DNA, 25 bp, Homo sapien
gggaggaggaagtcttctgcttacg

SEQ ID NO: 2153195 - DNA, 25 bp, Homo sapien
gaagtcttctgcttacgggccttta

SEQ ID NO: 2153196 - DNA, 25 bp, Homo sapien
caagagaaggttcctgttcctgagg

SEQ ID NO: 2153197 - DNA, 25 bp, Homo sapien
ttgttgggcaagagaaggttcctgt

SEQ ID NO: 2153198 - DNA, 25 bp, Homo sapien
gactttgttgggcaagagaaggttc

SEQ ID NO: 2153199 - DNA, 25 bp, Homo sapien
tgggcaagagaaggttcctgttcct

SEQ ID NO: 2153200 - DNA, 25 bp, Homo sapien
gaaaccgtttggtgaatccgagatc

SEQ ID NO: 2153201 - DNA, 25 bp, Homo sapien
gacggttgccatgtgcttggtcttg

SEQ ID NO: 2153202 - DNA, 25 bp, Homo sapien
ttggtcttgcactttcgttttcctg

SEQ ID NO: 2153203 - DNA, 25 bp, Homo sapien
tggctcttccaggttatttgggagg

SEQ ID NO: 2153204 - DNA, 25 bp, Homo sapien
gggtttcactaagccaagccaggaa

SEQ ID NO: 2153205 - DNA, 25 bp, Homo sapien
agagagcagcagcgaggcaagttgc

SEQ ID NO: 2153206 - DNA, 25 bp, Homo sapien
tcactaagccaagccaggaaccaaa

SEQ ID NO: 2153207 - DNA, 25 bp, Homo sapien
cagggtttcactaagccaagccagg

SEQ ID NO: 2153208 - DNA, 25 bp, Homo sapien
ttgggagatcgtgtcttctgctggc

SEQ ID NO: 2153209 - DNA, 25 bp, Homo sapien
gcatttttgttcactatgagccgac

SEQ ID NO: 2153210 - DNA, 25 bp, Homo sapien
tctgagctggcacttcgggacttag

SEQ ID NO: 2153211 - DNA, 25 bp, Homo sapien
gacttagagggtgtacatggttctg

SEQ ID NO: 2153212 - DNA, 25 bp, Homo sapien
cttatagccaagacgcgccgccctc

SEQ ID NO: 2153213 - DNA, 25 bp, Homo sapien
tatagccaagacgcgccgccctctg

SEQ ID NO: 2153214 - DNA, 25 bp, Homo sapien
ttatagccaagacgcgccgccctct

SEQ ID NO: 2153215 - DNA, 25 bp, Homo sapien
atagccaagacgcgccgccctctgc

SEQ ID NO: 2153216 - DNA, 25 bp, Homo sapien
gcccctctgcgagaggcgaaaatga

SEQ ID NO: 2153217 - DNA, 25 bp, Homo sapien
gcctcgcccctcaaacatgatcctg

SEQ ID NO: 2153218 - DNA, 25 bp, Homo sapien
cctcaaacatgatcctggcccctct

SEQ ID NO: 2153219 - DNA, 25 bp, Homo sapien
tgatcctggcccctctgcgagaggc

SEQ ID NO: 2153220 - DNA, 25 bp, Homo sapien
gatgttcaggatgtcggtccagccc

SEQ ID NO: 2153221 - DNA, 25 bp, Homo sapien
agccccgggaacaagcctcatgcag

SEQ ID NO: 2153222 - DNA, 25 bp, Homo sapien
gctgtgtagccagcattgtcacggt

SEQ ID NO: 2153223 - DNA, 25 bp, Homo sapien
tgtcacggtgattcacatcttcact

SEQ ID NO: 2153224 - DNA, 25 bp, Homo sapien
ttcagttcagggaactgaaggccct

SEQ ID NO: 2153225 - DNA, 25 bp, Homo sapien
tcagggaactgaaggccctgggtga

SEQ ID NO: 2153226 - DNA, 25 bp, Homo sapien
ggaactgaaggccctgggtgactcc

SEQ ID NO: 2153227 - DNA, 25 bp, Homo sapien
cagggaactgaaggccctgggtgac

SEQ ID NO: 2153228 - DNA, 25 bp, Homo sapien
actgagaaagcgcttcatggtgtcg

SEQ ID NO: 2153229 - DNA, 25 bp, Homo sapien
tgggatcggccccataggacagcag

SEQ ID NO: 2153230 - DNA, 25 bp, Homo sapien
ggttgtcattgaccaccgcatcatg

SEQ ID NO: 2153231 - DNA, 25 bp, Homo sapien
tctgacccgagtaggtagccagtgt

SEQ ID NO: 2153232 - DNA, 25 bp, Homo sapien
caagcaaactgagattcttgagctc

SEQ ID NO: 2153233 - DNA, 25 bp, Homo sapien
ttttcaagcaaactgagattcttga

SEQ ID NO: 2153234 - DNA, 25 bp, Homo sapien
agcaaactgagattcttgagctctt

SEQ ID NO: 2153235 - DNA, 25 bp, Homo sapien
caaactgagattcttgagctctttg

SEQ ID NO: 2153236 - DNA, 25 bp, Homo sapien
ggagccctgtgcaccctaaagggat

SEQ ID NO: 2153237 - DNA, 25 bp, Homo sapien
tcctcccgccaaaaatggagccctg

SEQ ID NO: 2153238 - DNA, 25 bp, Homo sapien
gccctgtgcaccctaaagggattct

SEQ ID NO: 2153239 - DNA, 25 bp, Homo sapien
gcaccctaaagggattctccttcat

SEQ ID NO: 2153240 - DNA, 25 bp, Homo sapien
aggtccattggctttcacgacaaat

SEQ ID NO: 2153241 - DNA, 25 bp, Homo sapien
ttcacgacaaatccaactgtaccat

SEQ ID NO: 2153242 - DNA, 25 bp, Homo sapien
ctgaacaaaaagtaggtccattggc

SEQ ID NO: 2153243 - DNA, 25 bp, Homo sapien
ggctttcacgacaaatccaactgta

SEQ ID NO: 2153244 - DNA, 25 bp, Homo sapien
cggccctgaagatccgagaggtgat

SEQ ID NO: 2153245 - DNA, 25 bp, Homo sapien
caggatacaccgggatcaccctctg

SEQ ID NO: 2153246 - DNA, 25 bp, Homo sapien
gcccggccctgaagatccgagaggt

SEQ ID NO: 2153247 - DNA, 25 bp, Homo sapien
tctgcccggccctgaagatccgaga

SEQ ID NO: 2153248 - DNA, 25 bp, Homo sapien
ttgggaggtaaatgacaaggccaca

SEQ ID NO: 2153249 - DNA, 25 bp, Homo sapien
ccgaagaaaagaaatgcgctaagca

SEQ ID NO: 2153250 - DNA, 25 bp, Homo sapien
ccctagtcagggatgcggtttgccg

SEQ ID NO: 2153251 - DNA, 25 bp, Homo sapien
cggtttgccggttccatggctcaca

SEQ ID NO: 2153252 - DNA, 25 bp, Homo sapien
tccatcggatcgtctccttcttgat

SEQ ID NO: 2153253 - DNA, 25 bp, Homo sapien
ccaggaggattatgtaggaggtcac

SEQ ID NO: 2153254 - DNA, 25 bp, Homo sapien
gaggttgtagcaagggagaagaggc

SEQ ID NO: 2153255 - DNA, 25 bp, Homo sapien
tgtctgagagttcaaacatgaaatc

SEQ ID NO: 2153256 - DNA, 25 bp, Homo sapien
gatagtcaatgtccatggagcctgc

SEQ ID NO: 2153257 - DNA, 25 bp, Homo sapien
gattctagcagttcataggcccaag

SEQ ID NO: 2153258 - DNA, 25 bp, Homo sapien
ggatcctgacactcagtcaccgtgg

SEQ ID NO: 2153259 - DNA, 25 bp, Homo sapien
acatgactactctgggctaaaaggg

SEQ ID NO: 2153260 - DNA, 25 bp, Homo sapien
tctggaatgcattagacaagttttt

SEQ ID NO: 2153261 - DNA, 25 bp, Homo sapien
ggctctggaatgcattagacaagtt

SEQ ID NO: 2153262 - DNA, 25 bp, Homo sapien
gaccagtctttcctccgactcccgc

SEQ ID NO: 2153263 - DNA, 25 bp, Homo sapien
gaatgcattagacaagttttttctc

SEQ ID NO: 2153264 - DNA, 25 bp, Homo sapien
gcctgtagaactcggccttgggcat

SEQ ID NO: 2153265 - DNA, 25 bp, Homo sapien
catcggaaaagaggaaccagttgca

SEQ ID NO: 2153266 - DNA, 25 bp, Homo sapien
tgatttcaaagtgcgggaaccgggc

SEQ ID NO: 2153267 - DNA, 25 bp, Homo sapien
aaccgggcctgaaagatcctcgagg

SEQ ID NO: 2153268 - DNA, 25 bp, Homo sapien
gagccgaagtaggtctggctcgtac

SEQ ID NO: 2153269 - DNA, 25 bp, Homo sapien
caactgttgcaagactggaattcca

SEQ ID NO: 2153270 - DNA, 25 bp, Homo sapien
aactgttgcaagactggaattccac

SEQ ID NO: 2153271 - DNA, 25 bp, Homo sapien
tcaactgttgcaagactggaattcc

SEQ ID NO: 2153272 - DNA, 25 bp, Homo sapien
cttgttggtccgtattattgcctca

SEQ ID NO: 2153273 - DNA, 25 bp, Homo sapien
tggcattgataaggcggcttcttgt

SEQ ID NO: 2153274 - DNA, 25 bp, Homo sapien
caaaaacagtccagtcgctaatgct

SEQ ID NO: 2153275 - DNA, 25 bp, Homo sapien
attctgcagtctggtgctcggtcgg

SEQ ID NO: 2153276 - DNA, 25 bp, Homo sapien
gacatggagttcaactttccacccc

SEQ ID NO: 2153277 - DNA, 25 bp, Homo sapien
aatgacgacgacagggagatgagaa

SEQ ID NO: 2153278 - DNA, 25 bp, Homo sapien
gggacctcttgtcctcagacatgga

SEQ ID NO: 2153279 - DNA, 25 bp, Homo sapien
cccatcagcaaccacgataacaatg

SEQ ID NO: 2153280 - DNA, 25 bp, Homo sapien
ggtttggtcttggtcatgaacaagg

SEQ ID NO: 2153281 - DNA, 25 bp, Homo sapien
caagttgtctcaaatcgtcacagtg

SEQ ID NO: 2153282 - DNA, 25 bp, Homo sapien
gaaagtccctcaatacaacaagttg

SEQ ID NO: 2153283 - DNA, 25 bp, Homo sapien
cgtcacagtgatacagacttatcag

SEQ ID NO: 2153284 - DNA, 25 bp, Homo sapien
catgttcccccaccccattccacct

SEQ ID NO: 2153285 - DNA, 25 bp, Homo sapien
ccattccacctcaccccctccccag

SEQ ID NO: 2153286 - DNA, 25 bp, Homo sapien
tgttcccccaccccattccacctca

SEQ ID NO: 2153287 - DNA, 25 bp, Homo sapien
attccacctcaccccctccccagtg

SEQ ID NO: 2153288 - DNA, 25 bp, Homo sapien
aaactcgtattgtgcactctgaggg

SEQ ID NO: 2153289 - DNA, 25 bp, Homo sapien
ccttgcctaggaaacagctgacgcc

SEQ ID NO: 2153290 - DNA, 25 bp, Homo sapien
tcacatccggcagtgagtcccagag

SEQ ID NO: 2153291 - DNA, 25 bp, Homo sapien
gctgacgcctggatttcacatccgg

SEQ ID NO: 2153292 - DNA, 25 bp, Homo sapien
aggtagggataccactcagccccag

SEQ ID NO: 2153293 - DNA, 25 bp, Homo sapien
ggtagggataccactcagccccagg

SEQ ID NO: 2153294 - DNA, 25 bp, Homo sapien
caggtagggataccactcagcccca

SEQ ID NO: 2153295 - DNA, 25 bp, Homo sapien
gtagggataccactcagccccaggc

SEQ ID NO: 2153296 - DNA, 25 bp, Homo sapien
gagcctctagagaacagattgtccc

SEQ ID NO: 2153297 - DNA, 25 bp, Homo sapien
tgttcaaaaccaactgggcagtatg

SEQ ID NO: 2153298 - DNA, 25 bp, Homo sapien
caagtgtttttgactccacagccag

SEQ ID NO: 2153299 - DNA, 25 bp, Homo sapien
gccagaatatacacccaaatgcgaa

SEQ ID NO: 2153300 - DNA, 25 bp, Homo sapien
aatttagccggccgccgaatgcgct

SEQ ID NO: 2153301 - DNA, 25 bp, Homo sapien
gctgctccggagcttcgaactttcc

SEQ ID NO: 2153302 - DNA, 25 bp, Homo sapien
tgtccccggatggttctggccgcca

SEQ ID NO: 2153303 - DNA, 25 bp, Homo sapien
aaagccctccgctgctccggagctt

SEQ ID NO: 2153304 - DNA, 25 bp, Homo sapien
aaaagaggcagttgcctccagctct

SEQ ID NO: 2153305 - DNA, 25 bp, Homo sapien
tcttgtactccaaaagaggcagttg

SEQ ID NO: 2153306 - DNA, 25 bp, Homo sapien
gggcgggacaagaagttattctgac

SEQ ID NO: 2153307 - DNA, 25 bp, Homo sapien
ttctgacggtcacaggcctttctga

SEQ ID NO: 2153308 - DNA, 25 bp, Homo sapien
ccagctgtgcgttgctgtcaccagg

SEQ ID NO: 2153309 - DNA, 25 bp, Homo sapien
tccagggactgcctcgccactattt

SEQ ID NO: 2153310 - DNA, 25 bp, Homo sapien
tgcttgccagctgtgcgttgctgtc

SEQ ID NO: 2153311 - DNA, 25 bp, Homo sapien
aggtgccacgtgcaactcccgaact

SEQ ID NO: 2153312 - DNA, 25 bp, Homo sapien
taggaacgctttgatgcgcatgcac

SEQ ID NO: 2153313 - DNA, 25 bp, Homo sapien
tgtatgtctccgtggatcagccaca

SEQ ID NO: 2153314 - DNA, 25 bp, Homo sapien
ggtacaagtttgatcctccgaatct

SEQ ID NO: 2153315 - DNA, 25 bp, Homo sapien
tctaattccctttgttcatgccgag

SEQ ID NO: 2153316 - DNA, 25 bp, Homo sapien
ccatctgagagtcccatccctgaga

SEQ ID NO: 2153317 - DNA, 25 bp, Homo sapien
ggtcctcacacaatacaacccccac

SEQ ID NO: 2153318 - DNA, 25 bp, Homo sapien
tgctggtcctcacacaatacaaccc

SEQ ID NO: 2153319 - DNA, 25 bp, Homo sapien
tccatctgagagtcccatccctgag

SEQ ID NO: 2153320 - DNA, 25 bp, Homo sapien
gaggccacgctctctggtgggtggc

SEQ ID NO: 2153321 - DNA, 25 bp, Homo sapien
agaggccacgctctctggtgggtgg

SEQ ID NO: 2153322 - DNA, 25 bp, Homo sapien
gtgctgacgaaaacagggtatgtgg

SEQ ID NO: 2153323 - DNA, 25 bp, Homo sapien
ggggtgctgacgaaaacagggtatg

SEQ ID NO: 2153324 - DNA, 25 bp, Homo sapien
cagtgatggggtggaggagcagagc

SEQ ID NO: 2153325 - DNA, 25 bp, Homo sapien
gaagtggagaagctccagtgatggg

SEQ ID NO: 2153326 - DNA, 25 bp, Homo sapien
tgatggggtggaggagcagagctgg

SEQ ID NO: 2153327 - DNA, 25 bp, Homo sapien
ctggaagtggagaagctccagtgat

SEQ ID NO: 2153328 - DNA, 25 bp, Homo sapien
gagcccaggggaccaaagacgtggc

SEQ ID NO: 2153329 - DNA, 25 bp, Homo sapien
tccacacactcagaaccgagcccag

SEQ ID NO: 2153330 - DNA, 25 bp, Homo sapien
acactcagaaccgagcccaggggac

SEQ ID NO: 2153331 - DNA, 25 bp, Homo sapien
gcccaggggaccaaagacgtggcgc

SEQ ID NO: 2153332 - DNA, 25 bp, Homo sapien
cattctcacgaaggcagctgaggct

SEQ ID NO: 2153333 - DNA, 25 bp, Homo sapien
cgtctccacgcttgggacacatgca

SEQ ID NO: 2153334 - DNA, 25 bp, Homo sapien
gaggaactgacaactgagcttgcgg

SEQ ID NO: 2153335 - DNA, 25 bp, Homo sapien
catatacctacagtgcgcttgcaca

SEQ ID NO: 2153336 - DNA, 25 bp, Homo sapien
cacggagactgtggacgtggctttc

SEQ ID NO: 2153337 - DNA, 25 bp, Homo sapien
gagactgtggacgtggctttcacat

SEQ ID NO: 2153338 - DNA, 25 bp, Homo sapien
tccacggagactgtggacgtggctt

SEQ ID NO: 2153339 - DNA, 25 bp, Homo sapien
gactgtggacgtggctttcacattg

SEQ ID NO: 2153340 - DNA, 25 bp, Homo sapien
tgctcttgtgcctgaagtactgtcc

SEQ ID NO: 2153341 - DNA, 25 bp, Homo sapien
ttggccagtggcagaagggcgcatt

SEQ ID NO: 2153342 - DNA, 25 bp, Homo sapien
gatgctggagtactgctcttgtgcc

SEQ ID NO: 2153343 - DNA, 25 bp, Homo sapien
ccttctgtgaaagggatgctggagt

SEQ ID NO: 2153344 - DNA, 25 bp, Homo sapien
atccccaagtgctctgtgacattct

SEQ ID NO: 2153345 - DNA, 25 bp, Homo sapien
tgacattcttctcagaaatcaacat

SEQ ID NO: 2153346 - DNA, 25 bp, Homo sapien
tccatccccaagtgctctgtgacat

SEQ ID NO: 2153347 - DNA, 25 bp, Homo sapien
tccctgcaggcacctccatccccaa

SEQ ID NO: 2153348 - DNA, 25 bp, Homo sapien
aggctgcttacagctgttctgaccc

SEQ ID NO: 2153349 - DNA, 25 bp, Homo sapien
gagccagcatcacatagttctggcc

SEQ ID NO: 2153350 - DNA, 25 bp, Homo sapien
actgggcagagaggtccaaagcctc

SEQ ID NO: 2153351 - DNA, 25 bp, Homo sapien
gcatcacatagttctggcctgtccc

SEQ ID NO: 2153352 - DNA, 25 bp, Homo sapien
ggacaagcaggtactcccctcaggg

SEQ ID NO: 2153353 - DNA, 25 bp, Homo sapien
agctgtgaagccgtattcactccag

SEQ ID NO: 2153354 - DNA, 25 bp, Homo sapien
cctatctggagggaactggttcctc

SEQ ID NO: 2153355 - DNA, 25 bp, Homo sapien
ccagcttgcaggagtggacaagcag

SEQ ID NO: 2153356 - DNA, 25 bp, Homo sapien
aaagcagcttgcataaggttggacc

SEQ ID NO: 2153357 - DNA, 25 bp, Homo sapien
ggagccatcaaccagaggaccttag

SEQ ID NO: 2153358 - DNA, 25 bp, Homo sapien
tggacctgccatgcatactcagtga

SEQ ID NO: 2153359 - DNA, 25 bp, Homo sapien
gaccttagcttgtgcatggccttca

SEQ ID NO: 2153360 - DNA, 25 bp, Homo sapien
ctaagtacagaagagccgaggaggc

SEQ ID NO: 2153361 - DNA, 25 bp, Homo sapien
ttagcagcaccacgtctcattcctg

SEQ ID NO: 2153362 - DNA, 25 bp, Homo sapien
agccgaggaggcactccaggtcaaa

SEQ ID NO: 2153363 - DNA, 25 bp, Homo sapien
gcactccaggtcaaagttagcttcc

SEQ ID NO: 2153364 - DNA, 25 bp, Homo sapien
gctttgatcccgtggattttactac

SEQ ID NO: 2153365 - DNA, 25 bp, Homo sapien
ggagatgaaatgggctttgatcccg

SEQ ID NO: 2153366 - DNA, 25 bp, Homo sapien
gaaatgggctttgatcccgtggatt

SEQ ID NO: 2153367 - DNA, 25 bp, Homo sapien
gatgaaatgggctttgatcccgtgg

SEQ ID NO: 2153368 - DNA, 25 bp, Homo sapien
agagattttcataattgttccccac

SEQ ID NO: 2153369 - DNA, 25 bp, Homo sapien
tccccagggttctgggatttctctg

SEQ ID NO: 2153370 - DNA, 25 bp, Homo sapien
ttttcataattgttccccactccac

SEQ ID NO: 2153371 - DNA, 25 bp, Homo sapien
agcttcaggtggaggaaagagattt

SEQ ID NO: 2153372 - DNA, 25 bp, Homo sapien
ccaaaatagagacctcttggcaggg

SEQ ID NO: 2153373 - DNA, 25 bp, Homo sapien
agtttccgtgtgagccagccgccag

SEQ ID NO: 2153374 - DNA, 25 bp, Homo sapien
gccggagtttccgtgtgagccagcc

SEQ ID NO: 2153375 - DNA, 25 bp, Homo sapien
tatgatgtggagaactggatcgcca

SEQ ID NO: 2153376 - DNA, 25 bp, Homo sapien
aagtggaatggattccccgagtcgg

SEQ ID NO: 2153377 - DNA, 25 bp, Homo sapien
ccccgccgcgcgtgtgatggagaac

SEQ ID NO: 2153378 - DNA, 25 bp, Homo sapien
tgggttccgtgacggggccgatcat

SEQ ID NO: 2153379 - DNA, 25 bp, Homo sapien
cgtgtgatggagaacccgggctccc

SEQ ID NO: 2153380 - DNA, 25 bp, Homo sapien
gaaaagtttgcttgagggcggaatc

SEQ ID NO: 2153381 - DNA, 25 bp, Homo sapien
gatggcgccggttcttcgagccttg

SEQ ID NO: 2153382 - DNA, 25 bp, Homo sapien
gagtcgcggagtgtcgcgagccgcc

SEQ ID NO: 2153383 - DNA, 25 bp, Homo sapien
gagccactcggcctcaggtacgtcg

SEQ ID NO: 2153384 - DNA, 25 bp, Homo sapien
tcctttcgccggcgccgagttcctg

SEQ ID NO: 2153385 - DNA, 25 bp, Homo sapien
tccacttctcctttcgccggcgccg

SEQ ID NO: 2153386 - DNA, 25 bp, Homo sapien
tttcgccggcgccgagttcctggcg

SEQ ID NO: 2153387 - DNA, 25 bp, Homo sapien
cccggagcggggaccacggagacag

SEQ ID NO: 2153388 - DNA, 25 bp, Homo sapien
ggcccaaaggcgtcaagcaagtctc

SEQ ID NO: 2153389 - DNA, 25 bp, Homo sapien
gcaagtctccacttgcacgggccga

SEQ ID NO: 2153390 - DNA, 25 bp, Homo sapien
agggcgcggaacgagcagagagctc

SEQ ID NO: 2153391 - DNA, 25 bp, Homo sapien
tcaataatgtggagcgcagggcttg

SEQ ID NO: 2153392 - DNA, 25 bp, Homo sapien
cgaagacaattgaaagccggtgatc

SEQ ID NO: 2153393 - DNA, 25 bp, Homo sapien
tgctgtccagctcgaagacaattga

SEQ ID NO: 2153394 - DNA, 25 bp, Homo sapien
attgaaagccggtgatcttctgaag

SEQ ID NO: 2153395 - DNA, 25 bp, Homo sapien
agcgcctcctgtgtcggcatcatcc

SEQ ID NO: 2153396 - DNA, 25 bp, Homo sapien
tgtgttgacaatcttggtccgcctg

SEQ ID NO: 2153397 - DNA, 25 bp, Homo sapien
gcttgatggctacttgtgtccccat

SEQ ID NO: 2153398 - DNA, 25 bp, Homo sapien
tatataatacgtagagccccgtgca

SEQ ID NO: 2153399 - DNA, 25 bp, Homo sapien
ccggcaaaacctccctgtgttgaca

SEQ ID NO: 2153400 - DNA, 25 bp, Homo sapien
gccctctcctgatgccacggcgctg

SEQ ID NO: 2153401 - DNA, 25 bp, Homo sapien
ggacctgagcggtgagctcttcccc

SEQ ID NO: 2153402 - DNA, 25 bp, Homo sapien
gatgccacggcgctggcttcttctc

SEQ ID NO: 2153403 - DNA, 25 bp, Homo sapien
agcaggacctgagcggtgagctctt

SEQ ID NO: 2153404 - DNA, 25 bp, Homo sapien
ggctcccatgagacttagaacgcat

SEQ ID NO: 2153405 - DNA, 25 bp, Homo sapien
cgggcggctcctaacttcagcaaag

SEQ ID NO: 2153406 - DNA, 25 bp, Homo sapien
tcttgacccgcaggcagtagaatgg

SEQ ID NO: 2153407 - DNA, 25 bp, Homo sapien
ccgacatgagaggtagaggctctgc

SEQ ID NO: 2153408 - DNA, 25 bp, Homo sapien
tgctcctccttggacgacagttccc

SEQ ID NO: 2153409 - DNA, 25 bp, Homo sapien
aggccgcgtgccagcgaggaaagct

SEQ ID NO: 2153410 - DNA, 25 bp, Homo sapien
gcagaggagccgatatctcctcctc

SEQ ID NO: 2153411 - DNA, 25 bp, Homo sapien
ggcagggcgcgggacaaggcttggg

SEQ ID NO: 2153412 - DNA, 25 bp, Homo sapien
cagctctatctgattagggccccac

SEQ ID NO: 2153413 - DNA, 25 bp, Homo sapien
gaaaacttgatctgaggtggcttag

SEQ ID NO: 2153414 - DNA, 25 bp, Homo sapien
tgagcaagggaactccggtgtcttc

SEQ ID NO: 2153415 - DNA, 25 bp, Homo sapien
caaggtcacacagggttcagtttct

SEQ ID NO: 2153416 - DNA, 25 bp, Homo sapien
aaaccttcagggcattgggatacac

SEQ ID NO: 2153417 - DNA, 25 bp, Homo sapien
gaagccaaaagataggatatacctg

SEQ ID NO: 2153418 - DNA, 25 bp, Homo sapien
tctagacagatggttctcaatgtgt

SEQ ID NO: 2153419 - DNA, 25 bp, Homo sapien
tgggatacactctcaagtttgaaaa

SEQ ID NO: 2153420 - DNA, 25 bp, Homo sapien
ggccgtgcaccaaagtatgacatca

SEQ ID NO: 2153421 - DNA, 25 bp, Homo sapien
tgaaccctagtacagcattgtgaag

SEQ ID NO: 2153422 - DNA, 25 bp, Homo sapien
tcatgtgaatcgagtagagaaccag

SEQ ID NO: 2153423 - DNA, 25 bp, Homo sapien
cgcgcccggcgataacctgaatttt

SEQ ID NO: 2153424 - DNA, 25 bp, Homo sapien
gccagctagtgcatgcgcaaatcct

SEQ ID NO: 2153425 - DNA, 25 bp, Homo sapien
cagcgtctttgcgagcttgcggcca

SEQ ID NO: 2153426 - DNA, 25 bp, Homo sapien
tcccgaatagcggtcgccgaaatgt

SEQ ID NO: 2153427 - DNA, 25 bp, Homo sapien
gaaaaccggctacctagagccagcg

SEQ ID NO: 2153428 - DNA, 25 bp, Homo sapien
aggagagtggacgagccgcgagcct

SEQ ID NO: 2153429 - DNA, 25 bp, Homo sapien
tgtgtgcgccctcggaccggatgct

SEQ ID NO: 2153430 - DNA, 25 bp, Homo sapien
tcgaggcgagcgagctctgtgcgtg

SEQ ID NO: 2153431 - DNA, 25 bp, Homo sapien
accggatgctctggcgaaggaccct

SEQ ID NO: 2153432 - DNA, 25 bp, Homo sapien
caaagagaacgtccacgttcgtgcg

SEQ ID NO: 2153433 - DNA, 25 bp, Homo sapien
cccttgagggctccacacaaagaga

SEQ ID NO: 2153434 - DNA, 25 bp, Homo sapien
ccccttgagggctccacacaaagag

SEQ ID NO: 2153435 - DNA, 25 bp, Homo sapien
ccacacaaagagaacgtccacgttc

SEQ ID NO: 2153436 - DNA, 25 bp, Homo sapien
tactggtccagcgacgagtcgagct

SEQ ID NO: 2153437 - DNA, 25 bp, Homo sapien
gatgcgaatctgcacgtactggtcc

SEQ ID NO: 2153438 - DNA, 25 bp, Homo sapien
cgttggagtccccaatcacgattat

SEQ ID NO: 2153439 - DNA, 25 bp, Homo sapien
cacgccgatggtggcttcagtcttg

SEQ ID NO: 2153440 - DNA, 25 bp, Homo sapien
ggacgaagcccttggcagtcatctc

SEQ ID NO: 2153441 - DNA, 25 bp, Homo sapien
ctcggactgtcacactggacttttc

SEQ ID NO: 2153442 - DNA, 25 bp, Homo sapien
ttttctctctctcgcaaaggacgaa

SEQ ID NO: 2153443 - DNA, 25 bp, Homo sapien
tctctctcgcaaaggacgaagccct

SEQ ID NO: 2153444 - DNA, 25 bp, Homo sapien
cacagctgacctgcagtttgtcttg

SEQ ID NO: 2153445 - DNA, 25 bp, Homo sapien
gccacagctgacctgcagtttgtct

SEQ ID NO: 2153446 - DNA, 25 bp, Homo sapien
gctgacctgcagtttgtcttgtccc

SEQ ID NO: 2153447 - DNA, 25 bp, Homo sapien
tagccacagctgacctgcagtttgt

SEQ ID NO: 2153448 - DNA, 25 bp, Homo sapien
aagcaggctgctcgcagcagaaaat

SEQ ID NO: 2153449 - DNA, 25 bp, Homo sapien
aaccagtggtgtggcctcagaacca

SEQ ID NO: 2153450 - DNA, 25 bp, Homo sapien
cagcagaaaatagaagaaccagtgg

SEQ ID NO: 2153451 - DNA, 25 bp, Homo sapien
aaatagaagaaccagtggtgtggcc

SEQ ID NO: 2153452 - DNA, 25 bp, Homo sapien
caacactattgggagccttgaagct

SEQ ID NO: 2153453 - DNA, 25 bp, Homo sapien
ttcataattgcgtatgccgcccaaa

SEQ ID NO: 2153454 - DNA, 25 bp, Homo sapien
ctgccactagcaggaacacgggtgg

SEQ ID NO: 2153455 - DNA, 25 bp, Homo sapien
gaggctccgaatttaaactgcaggc

SEQ ID NO: 2153456 - DNA, 25 bp, Homo sapien
gaagaagtctgaatccctaccagcc

SEQ ID NO: 2153457 - DNA, 25 bp, Homo sapien
tcagtaggaagacagcaggcatagc

SEQ ID NO: 2153458 - DNA, 25 bp, Homo sapien
caagcagtctggcatcctagatatg

SEQ ID NO: 2153459 - DNA, 25 bp, Homo sapien
gagaacgtctgactgtgatcacaca

SEQ ID NO: 2153460 - DNA, 25 bp, Homo sapien
tttctgcatcagaccacactcgtca

SEQ ID NO: 2153461 - DNA, 25 bp, Homo sapien
gcagcagacacattatcaaaaggca

SEQ ID NO: 2153462 - DNA, 25 bp, Homo sapien
tctccagcaagactgtaagcagtct

SEQ ID NO: 2153463 - DNA, 25 bp, Homo sapien
aattgtctcgtcagtgctcttggca

SEQ ID NO: 2153464 - DNA, 25 bp, Homo sapien
gaatctctgttgcactttgagtctg

SEQ ID NO: 2153465 - DNA, 25 bp, Homo sapien
attcttcaaggttaagctcacgcct

SEQ ID NO: 2153466 - DNA, 25 bp, Homo sapien
ttaagctcacgcctcaggcttcttc

SEQ ID NO: 2153467 - DNA, 25 bp, Homo sapien
tcaaaccttcgccaacttcccttca

SEQ ID NO: 2153468 - DNA, 25 bp, Homo sapien
ggtggagtcagaaaagggaacatga

SEQ ID NO: 2153469 - DNA, 25 bp, Homo sapien
cagagaggagaaaacatggttctgt

SEQ ID NO: 2153470 - DNA, 25 bp, Homo sapien
tggagtcagaaaagggaacatgaac

SEQ ID NO: 2153471 - DNA, 25 bp, Homo sapien
agtcagaaaagggaacatgaacaga

SEQ ID NO: 2153472 - DNA, 25 bp, Homo sapien
tcagcatcacgatacagcagggatt

SEQ ID NO: 2153473 - DNA, 25 bp, Homo sapien
tacgttgcggtagtaatgctcgacc

SEQ ID NO: 2153474 - DNA, 25 bp, Homo sapien
tttcagggctaagttggagggcacc

SEQ ID NO: 2153475 - DNA, 25 bp, Homo sapien
tgctcgaccatgcttttgcggaaac

SEQ ID NO: 2153476 - DNA, 25 bp, Homo sapien
ggaaacaagcaggtgtcagcattat

SEQ ID NO: 2153477 - DNA, 25 bp, Homo sapien
gtgtcagcattatgcaggcacagaa

SEQ ID NO: 2153478 - DNA, 25 bp, Homo sapien
caagcaggtgtcagcattatgcagg

SEQ ID NO: 2153479 - DNA, 25 bp, Homo sapien
ttttgatatcaatttgtatggaaac

SEQ ID NO: 2153480 - DNA, 25 bp, Homo sapien
tatttgaccacctgaaaaagcttaa

SEQ ID NO: 2153481 - DNA, 25 bp, Homo sapien
tctctgattttgaaacccttctgca

SEQ ID NO: 2153482 - DNA, 25 bp, Homo sapien
tggccacaccatagttcacctcatg

SEQ ID NO: 2153483 - DNA, 25 bp, Homo sapien
tcatcaacaaacttggagaggctgc

SEQ ID NO: 2153484 - DNA, 25 bp, Homo sapien
gaatccacacactgtaccttttttg

SEQ ID NO: 2153485 - DNA, 25 bp, Homo sapien
taagatactagattgcagaatccac

SEQ ID NO: 2153486 - DNA, 25 bp, Homo sapien
caatccaaggtatgcactggtttcc

SEQ ID NO: 2153487 - DNA, 25 bp, Homo sapien
tacaatacctagtagtacagtgtgg

SEQ ID NO: 2153488 - DNA, 25 bp, Homo sapien
tgctgtagttgatactaataggcat

SEQ ID NO: 2153489 - DNA, 25 bp, Homo sapien
tctgctgtagttgatactaataggc

SEQ ID NO: 2153490 - DNA, 25 bp, Homo sapien
ctgctgtagttgatactaataggca

SEQ ID NO: 2153491 - DNA, 25 bp, Homo sapien
ttgatgtttctacagcagtacagat

SEQ ID NO: 2153492 - DNA, 25 bp, Homo sapien
gcagtacagattccattataatcgt

SEQ ID NO: 2153493 - DNA, 25 bp, Homo sapien
gtttctacagcagtacagattccat

SEQ ID NO: 2153494 - DNA, 25 bp, Homo sapien
tacagcagtacagattccattataa

SEQ ID NO: 2153495 - DNA, 25 bp, Homo sapien
gggattccgaactttcaggcatcag

SEQ ID NO: 2153496 - DNA, 25 bp, Homo sapien
tctctgtcacagaaatcgtgctcta

SEQ ID NO: 2153497 - DNA, 25 bp, Homo sapien
caaccttgttctggccaaagggact

SEQ ID NO: 2153498 - DNA, 25 bp, Homo sapien
cgttattgtctagaggataagagcc

SEQ ID NO: 2153499 - DNA, 25 bp, Homo sapien
tggtgccttcgcattgacagtaggg

SEQ ID NO: 2153500 - DNA, 25 bp, Homo sapien
gggccacaactggtgccttcgcatt

SEQ ID NO: 2153501 - DNA, 25 bp, Homo sapien
gactgagacccttggtgggagaagg

SEQ ID NO: 2153502 - DNA, 25 bp, Homo sapien
ttctctagtgccaggggccacaact

SEQ ID NO: 2153503 - DNA, 25 bp, Homo sapien
ttgttctgtacacctggagtaacgc

SEQ ID NO: 2153504 - DNA, 25 bp, Homo sapien
cttcagcatgttctttaggtcactg

SEQ ID NO: 2153505 - DNA, 25 bp, Homo sapien
ggtcactgatggattgactgttttg

SEQ ID NO: 2153506 - DNA, 25 bp, Homo sapien
ctgtacacctggagtaacgcaccat

SEQ ID NO: 2153507 - DNA, 25 bp, Homo sapien
tctcagttaagaatgcttgtctcag

SEQ ID NO: 2153508 - DNA, 25 bp, Homo sapien
gagaagcctcgggtataactgacat

SEQ ID NO: 2153509 - DNA, 25 bp, Homo sapien
tcttgatgtctcagttaagaatgct

SEQ ID NO: 2153510 - DNA, 25 bp, Homo sapien
ctgctgagaagcctcgggtataact

SEQ ID NO: 2153511 - DNA, 25 bp, Homo sapien
cagaagatgccaagagtccgacccc

SEQ ID NO: 2153512 - DNA, 25 bp, Homo sapien
tagccaatgtgctatgacgtccgat

SEQ ID NO: 2153513 - DNA, 25 bp, Homo sapien
ccgatttttgagctatgacgtccga

SEQ ID NO: 2153514 - DNA, 25 bp, Homo sapien
tgctggaaggggaaaccgcaaagcc

SEQ ID NO: 2153515 - DNA, 25 bp, Homo sapien
gaagcggcagagttctaaaggcgag

SEQ ID NO: 2153516 - DNA, 25 bp, Homo sapien
aaacaaaggcgcgaaataagaggcg

SEQ ID NO: 2153517 - DNA, 25 bp, Homo sapien
aaaggcgagggtcggaaccactgca

SEQ ID NO: 2153518 - DNA, 25 bp, Homo sapien
caaaggcgcgaaataagaggcggaa

SEQ ID NO: 2153519 - DNA, 25 bp, Homo sapien
gcattgaaaccaacggaagtaacca

SEQ ID NO: 2153520 - DNA, 25 bp, Homo sapien
gctcatcggacgactgggaagctga

SEQ ID NO: 2153521 - DNA, 25 bp, Homo sapien
gaagtaaccaaagcgttgcttcggc

SEQ ID NO: 2153522 - DNA, 25 bp, Homo sapien
agcgccaacccggaagcattgaaac

SEQ ID NO: 2153523 - DNA, 25 bp, Homo sapien
ccggccccgcgcggcctggcgcggc

SEQ ID NO: 2153524 - DNA, 25 bp, Homo sapien
ctcccaggccgggaaccaggccagc

SEQ ID NO: 2153525 - DNA, 25 bp, Homo sapien
cctcccaggccgggaaccaggccag

SEQ ID NO: 2153526 - DNA, 25 bp, Homo sapien
gccccgcgcggcctggcgcggccca

SEQ ID NO: 2153527 - DNA, 25 bp, Homo sapien
ctgaggggagagagagaccagagga

SEQ ID NO: 2153528 - DNA, 25 bp, Homo sapien
tgaggggagagagagaccagaggac

SEQ ID NO: 2153529 - DNA, 25 bp, Homo sapien
gcagggttcaatcgaagaagtaaaa

SEQ ID NO: 2153530 - DNA, 25 bp, Homo sapien
agaagtaaaaccaccgatgccagaa

SEQ ID NO: 2153531 - DNA, 25 bp, Homo sapien
gtcgaggaagcagggttcaatcgaa

SEQ ID NO: 2153532 - DNA, 25 bp, Homo sapien
tcagagcgagctcgtggagagaagg

SEQ ID NO: 2153533 - DNA, 25 bp, Homo sapien
gggtagcaggatcttgccagttcct

SEQ ID NO: 2153534 - DNA, 25 bp, Homo sapien
ggtagcaggatcttgccagttcctc

SEQ ID NO: 2153535 - DNA, 25 bp, Homo sapien
gccgccgttgcaaacttcaccctta

SEQ ID NO: 2153536 - DNA, 25 bp, Homo sapien
gccgttgcaaacttcacccttagaa

SEQ ID NO: 2153537 - DNA, 25 bp, Homo sapien
aatcacggccgccgttgcaaacttc

SEQ ID NO: 2153538 - DNA, 25 bp, Homo sapien
atcacggccgccgttgcaaacttca

SEQ ID NO: 2153539 - DNA, 25 bp, Homo sapien
cccaagatctggtcaggaaactctg

SEQ ID NO: 2153540 - DNA, 25 bp, Homo sapien
aagatctggtcaggaaactctgggt

SEQ ID NO: 2153541 - DNA, 25 bp, Homo sapien
caagatctggtcaggaaactctggg

SEQ ID NO: 2153542 - DNA, 25 bp, Homo sapien
ccaagatctggtcaggaaactctgg

SEQ ID NO: 2153543 - DNA, 25 bp, Homo sapien
agttaatctctctatgcctccactt

SEQ ID NO: 2153544 - DNA, 25 bp, Homo sapien
ggcaagttaatctctctatgcctcc

SEQ ID NO: 2153545 - DNA, 25 bp, Homo sapien
ttgggcaagttaatctctctatgcc

SEQ ID NO: 2153546 - DNA, 25 bp, Homo sapien
caagttaatctctctatgcctccac

SEQ ID NO: 2153547 - DNA, 25 bp, Homo sapien
gcaaggccgccatatacaaagggtt

SEQ ID NO: 2153548 - DNA, 25 bp, Homo sapien
actcagccacgatagaggcaaggcc

SEQ ID NO: 2153549 - DNA, 25 bp, Homo sapien
cgatagaggcaaggccgccatatac

SEQ ID NO: 2153550 - DNA, 25 bp, Homo sapien
agccacgatagaggcaaggccgcca

SEQ ID NO: 2153551 - DNA, 25 bp, Homo sapien
tctataccgtataatgcagatttgt

SEQ ID NO: 2153552 - DNA, 25 bp, Homo sapien
catctataccgtataatgcagattt

SEQ ID NO: 2153553 - DNA, 25 bp, Homo sapien
ccgtataatgcagatttgtcatttc

SEQ ID NO: 2153554 - DNA, 25 bp, Homo sapien
tataccgtataatgcagatttgtca

SEQ ID NO: 2153555 - DNA, 25 bp, Homo sapien
agatgcgaaacagcgcatggaacat

SEQ ID NO: 2153556 - DNA, 25 bp, Homo sapien
tgcgaaacagcgcatggaacatccc

SEQ ID NO: 2153557 - DNA, 25 bp, Homo sapien
gcgaaacagcgcatggaacatccct

SEQ ID NO: 2153558 - DNA, 25 bp, Homo sapien
tacagatgcgaaacagcgcatggaa

SEQ ID NO: 2153559 - DNA, 25 bp, Homo sapien
ttgtcttagcaacgcaggagcaatt

SEQ ID NO: 2153560 - DNA, 25 bp, Homo sapien
atgatgcttgtcttagcaacgcagg

SEQ ID NO: 2153561 - DNA, 25 bp, Homo sapien
ttctaaacgttctacgaataagcgc

SEQ ID NO: 2153562 - DNA, 25 bp, Homo sapien
tacgaataagcgcttcaagctttgg

SEQ ID NO: 2153563 - DNA, 25 bp, Homo sapien
aaatgccttacagttgaagtcctct

SEQ ID NO: 2153564 - DNA, 25 bp, Homo sapien
gcatgatttcaacaatccctttgag

SEQ ID NO: 2153565 - DNA, 25 bp, Homo sapien
tattccaagttagaacaagctcact

SEQ ID NO: 2153566 - DNA, 25 bp, Homo sapien
cacatgccttttttgttgataggaa

SEQ ID NO: 2153567 - DNA, 25 bp, Homo sapien
gaaaggctttccagctgtccccaaa

SEQ ID NO: 2153568 - DNA, 25 bp, Homo sapien
tgtccccaaacatccaacagcccca

SEQ ID NO: 2153569 - DNA, 25 bp, Homo sapien
agctgtccccaaacatccaacagcc

SEQ ID NO: 2153570 - DNA, 25 bp, Homo sapien
cgaaaggctttccagctgtccccaa

SEQ ID NO: 2153571 - DNA, 25 bp, Homo sapien
aacatcggtgggattggctatagtg

SEQ ID NO: 2153572 - DNA, 25 bp, Homo sapien
tagaacatcggtgggattggctata

SEQ ID NO: 2153573 - DNA, 25 bp, Homo sapien
ctttagaacatcggtgggattggct

SEQ ID NO: 2153574 - DNA, 25 bp, Homo sapien
gaacatcggtgggattggctatagt

SEQ ID NO: 2153575 - DNA, 25 bp, Homo sapien
gacccctggtgccttcttgttggta

SEQ ID NO: 2153576 - DNA, 25 bp, Homo sapien
ggtatatatcgataaagcttccaat

SEQ ID NO: 2153577 - DNA, 25 bp, Homo sapien
ccttggaacaagcttccttgagcct

SEQ ID NO: 2153578 - DNA, 25 bp, Homo sapien
tcatgctcccttggaacaagcttcc

SEQ ID NO: 2153579 - DNA, 25 bp, Homo sapien
atacatcatcgtgttagtacagaac

SEQ ID NO: 2153580 - DNA, 25 bp, Homo sapien
tacatcatcgtgttagtacagaact

SEQ ID NO: 2153581 - DNA, 25 bp, Homo sapien
cacacagccggtaacagcttttgaa

SEQ ID NO: 2153582 - DNA, 25 bp, Homo sapien
agcacacagccggtaacagcttttg

SEQ ID NO: 2153583 - DNA, 25 bp, Homo sapien
acagccggtaacagcttttgaacat

SEQ ID NO: 2153584 - DNA, 25 bp, Homo sapien
acagcacacagccggtaacagcttt

SEQ ID NO: 2153585 - DNA, 25 bp, Homo sapien
caatggcgagatctggtggacgtca

SEQ ID NO: 2153586 - DNA, 25 bp, Homo sapien
tagacatatcaagcaagtgtaccct

SEQ ID NO: 2153587 - DNA, 25 bp, Homo sapien
gctatgctcctgtgaaaaaatctcc

SEQ ID NO: 2153588 - DNA, 25 bp, Homo sapien
gaatctaatcaagccaatggaccct

SEQ ID NO: 2153589 - DNA, 25 bp, Homo sapien
agttaaaattgtatcgcccatcatt

SEQ ID NO: 2153590 - DNA, 25 bp, Homo sapien
aaaattgtatcgcccatcattcctg

SEQ ID NO: 2153591 - DNA, 25 bp, Homo sapien
gaatttaggccatacgtaccagtta

SEQ ID NO: 2153592 - DNA, 25 bp, Homo sapien
aatagacctctgataggctgctgta

SEQ ID NO: 2153593 - DNA, 25 bp, Homo sapien
ttagacaatgttcccaagtacccaa

SEQ ID NO: 2153594 - DNA, 25 bp, Homo sapien
gaagttctgataataggagagacaa

SEQ ID NO: 2153595 - DNA, 25 bp, Homo sapien
aatgcatttgagtaacaaaattatc

SEQ ID NO: 2153596 - DNA, 25 bp, Homo sapien
caaatgcatttgagtaacaaaatta

SEQ ID NO: 2153597 - DNA, 25 bp, Homo sapien
aaatgcatttgagtaacaaaattat

SEQ ID NO: 2153598 - DNA, 25 bp, Homo sapien
tctaaagagacatcattcaaaggct

SEQ ID NO: 2153599 - DNA, 25 bp, Homo sapien
tggcacttggcctttcgttacaatc

SEQ ID NO: 2153600 - DNA, 25 bp, Homo sapien
tcctaagtagaaagtatcatgcacc

SEQ ID NO: 2153601 - DNA, 25 bp, Homo sapien
taagtagatcgaccccactttcact

SEQ ID NO: 2153602 - DNA, 25 bp, Homo sapien
ccctctggttcatcatgcgagttcg

SEQ ID NO: 2153603 - DNA, 25 bp, Homo sapien
tcatcatgcgagttcgaaccacatc

SEQ ID NO: 2153604 - DNA, 25 bp, Homo sapien
tcgaaccacatcaaccgggttggag

SEQ ID NO: 2153605 - DNA, 25 bp, Homo sapien
atcaaccgggttggaggccagagcc

SEQ ID NO: 2153606 - DNA, 25 bp, Homo sapien
ttatagagtgcaaaaaagccctcat

SEQ ID NO: 2153607 - DNA, 25 bp, Homo sapien
cctttatagagtgcaaaaaagccct

SEQ ID NO: 2153608 - DNA, 25 bp, Homo sapien
ctttatagagtgcaaaaaagccctc

SEQ ID NO: 2153609 - DNA, 25 bp, Homo sapien
tttatagagtgcaaaaaagccctca

SEQ ID NO: 2153610 - DNA, 25 bp, Homo sapien
ccttcccatagcctagaattatctg

SEQ ID NO: 2153611 - DNA, 25 bp, Homo sapien
ttccttcccatagcctagaattatc

SEQ ID NO: 2153612 - DNA, 25 bp, Homo sapien
tccttcccatagcctagaattatct

SEQ ID NO: 2153613 - DNA, 25 bp, Homo sapien
cttcccatagcctagaattatctgg

SEQ ID NO: 2153614 - DNA, 25 bp, Homo sapien
tctttagctgctcgtatgtaataaa

SEQ ID NO: 2153615 - DNA, 25 bp, Homo sapien
ttagctgctcgtatgtaataaaaaa

SEQ ID NO: 2153616 - DNA, 25 bp, Homo sapien
ctttagctgctcgtatgtaataaaa

SEQ ID NO: 2153617 - DNA, 25 bp, Homo sapien
cctctttagctgctcgtatgtaata

SEQ ID NO: 2153618 - DNA, 25 bp, Homo sapien
ttcaatgtcacccatcagtatccat

SEQ ID NO: 2153619 - DNA, 25 bp, Homo sapien
gagaaccgaggtctgtaacacatat

SEQ ID NO: 2153620 - DNA, 25 bp, Homo sapien
gtctggggctaaccaattacattta

SEQ ID NO: 2153621 - DNA, 25 bp, Homo sapien
gaaagcaggccgttttcaatgtcac

SEQ ID NO: 2153622 - DNA, 25 bp, Homo sapien
aattcataatgtgaagttcccattg

SEQ ID NO: 2153623 - DNA, 25 bp, Homo sapien
tctaaattcataatgtgaagttccc

SEQ ID NO: 2153624 - DNA, 25 bp, Homo sapien
ttcataatgtgaagttcccattggc

SEQ ID NO: 2153625 - DNA, 25 bp, Homo sapien
cataatgtgaagttcccattggcat

SEQ ID NO: 2153626 - DNA, 25 bp, Homo sapien
gcactcaggaatcagcgcccgggaa

SEQ ID NO: 2153627 - DNA, 25 bp, Homo sapien
actcaggaatcagcgcccgggaaag

SEQ ID NO: 2153628 - DNA, 25 bp, Homo sapien
ttcatctcctcgggttcgcgctcag

SEQ ID NO: 2153629 - DNA, 25 bp, Homo sapien
gttcgcgctcagcactcaggaatca

SEQ ID NO: 2153630 - DNA, 25 bp, Homo sapien
gctctaccacaccagtcccggtgga

SEQ ID NO: 2153631 - DNA, 25 bp, Homo sapien
aactaggggacgagctgttccagtc

SEQ ID NO: 2153632 - DNA, 25 bp, Homo sapien
aagtaagtgcgaaccggccggagct

SEQ ID NO: 2153633 - DNA, 25 bp, Homo sapien
aaaagcagacaagtaagtgcgaacc

SEQ ID NO: 2153634 - DNA, 25 bp, Homo sapien
ttgatcagcttcaccttagttaaag

SEQ ID NO: 2153635 - DNA, 25 bp, Homo sapien
cgagcaggagaatctggagagcact

SEQ ID NO: 2153636 - DNA, 25 bp, Homo sapien
gatgtaacacggattcccgggcaga

SEQ ID NO: 2153637 - DNA, 25 bp, Homo sapien
aatgctatagttctgcctgttgcgc

SEQ ID NO: 2153638 - DNA, 25 bp, Homo sapien
tttcctcagcagtataatgggtcag

SEQ ID NO: 2153639 - DNA, 25 bp, Homo sapien
ccttcagtcagttcataaggaagcc

SEQ ID NO: 2153640 - DNA, 25 bp, Homo sapien
tgtgagaacacacagatgatgtccc

SEQ ID NO: 2153641 - DNA, 25 bp, Homo sapien
tcagtcagttcataaggaagccctc

SEQ ID NO: 2153642 - DNA, 25 bp, Homo sapien
agatgatgtccccttcagtcagttc

SEQ ID NO: 2153643 - DNA, 25 bp, Homo sapien
tcctgggactgatctagaacagaag

SEQ ID NO: 2153644 - DNA, 25 bp, Homo sapien
tagtttgcaagagcccaaggagtcc

SEQ ID NO: 2153645 - DNA, 25 bp, Homo sapien
aatagactaggatccccaagatgcc

SEQ ID NO: 2153646 - DNA, 25 bp, Homo sapien
caaagtactctgtcgactcaggagg

SEQ ID NO: 2153647 - DNA, 25 bp, Homo sapien
ccaatcgtatgacgccacacaggta

SEQ ID NO: 2153648 - DNA, 25 bp, Homo sapien
tgtgctttgccccaatcgtatgacg

SEQ ID NO: 2153649 - DNA, 25 bp, Homo sapien
ccacacaggtaagggccagaagggc

SEQ ID NO: 2153650 - DNA, 25 bp, Homo sapien
gaagggccctgtgaccatgggttac

SEQ ID NO: 2153651 - DNA, 25 bp, Homo sapien
tgaaatgctgctgctaacacctcag

SEQ ID NO: 2153652 - DNA, 25 bp, Homo sapien
tcactaaccttacactcatcgagaa

SEQ ID NO: 2153653 - DNA, 25 bp, Homo sapien
gcagagattgcctttgctcactaac

SEQ ID NO: 2153654 - DNA, 25 bp, Homo sapien
cagaatgaagaatatacaggtctcc

SEQ ID NO: 2153655 - DNA, 25 bp, Homo sapien
gttgcccaggttctctatcacagcc

SEQ ID NO: 2153656 - DNA, 25 bp, Homo sapien
agccttcttctcacgggtattgccc

SEQ ID NO: 2153657 - DNA, 25 bp, Homo sapien
tctcacgggtattgcccaattcctt

SEQ ID NO: 2153658 - DNA, 25 bp, Homo sapien
tgggttgcccaggttctctatcaca

SEQ ID NO: 2153659 - DNA, 25 bp, Homo sapien
caaagagttaatatccttcatacat

SEQ ID NO: 2153660 - DNA, 25 bp, Homo sapien
gatattcaacctgtaatacaataca

SEQ ID NO: 2153661 - DNA, 25 bp, Homo sapien
aaatacttgtagaagaaagttggca

SEQ ID NO: 2153662 - DNA, 25 bp, Homo sapien
aagggctcatgtaaaatcaacaaga

SEQ ID NO: 2153663 - DNA, 25 bp, Homo sapien
aataagtccatagtacaggctgagc

SEQ ID NO: 2153664 - DNA, 25 bp, Homo sapien
ggcttgaaggaactcatgttgaccc

SEQ ID NO: 2153665 - DNA, 25 bp, Homo sapien
ttatgtttagatctgggtcccagcc

SEQ ID NO: 2153666 - DNA, 25 bp, Homo sapien
tacatatgacagtagcccaagagct

SEQ ID NO: 2153667 - DNA, 25 bp, Homo sapien
ggacaatacggccagacccctgtct

SEQ ID NO: 2153668 - DNA, 25 bp, Homo sapien
aaagcagaaattaggctcggcatgg

SEQ ID NO: 2153669 - DNA, 25 bp, Homo sapien
ccgaggccataggatcacttgatgc

SEQ ID NO: 2153670 - DNA, 25 bp, Homo sapien
agcagatggcagttaatagagataa

SEQ ID NO: 2153671 - DNA, 25 bp, Homo sapien
tttcttgtcccgcacgagattaatg

SEQ ID NO: 2153672 - DNA, 25 bp, Homo sapien
agttttcttgtcccgcacgagatta

SEQ ID NO: 2153673 - DNA, 25 bp, Homo sapien
tcccagttttcttgtcccgcacgag

SEQ ID NO: 2153674 - DNA, 25 bp, Homo sapien
ccagttttcttgtcccgcacgagat

SEQ ID NO: 2153675 - DNA, 25 bp, Homo sapien
attgtcgacggccagaattgtgctc

SEQ ID NO: 2153676 - DNA, 25 bp, Homo sapien
gacggccagaattgtgctcctctgg

SEQ ID NO: 2153677 - DNA, 25 bp, Homo sapien
cttgatcccattaaaattgtcgacg

SEQ ID NO: 2153678 - DNA, 25 bp, Homo sapien
ccattaaaattgtcgacggccagaa

SEQ ID NO: 2153679 - DNA, 25 bp, Homo sapien
atgatttgaactacatcctttacct

SEQ ID NO: 2153680 - DNA, 25 bp, Homo sapien
gccctcataccaaactgtcaaacta

SEQ ID NO: 2153681 - DNA, 25 bp, Homo sapien
ctaagcaagacaggcgatgcttcag

SEQ ID NO: 2153682 - DNA, 25 bp, Homo sapien
gacaggcgatgcttcagtgaagaca

SEQ ID NO: 2153683 - DNA, 25 bp, Homo sapien
ttctcctggagttgtctggtcacat

SEQ ID NO: 2153684 - DNA, 25 bp, Homo sapien
cctggagttgtctggtcacatcatc

SEQ ID NO: 2153685 - DNA, 25 bp, Homo sapien
gttgtctggtcacatcatctatttc

SEQ ID NO: 2153686 - DNA, 25 bp, Homo sapien
ggagttgtctggtcacatcatctat

SEQ ID NO: 2153687 - DNA, 25 bp, Homo sapien
tcttcagagctctcagacaaacttg

SEQ ID NO: 2153688 - DNA, 25 bp, Homo sapien
agctctcagacaaacttggtgaggg

SEQ ID NO: 2153689 - DNA, 25 bp, Homo sapien
tcagagctctcagacaaacttggtg

SEQ ID NO: 2153690 - DNA, 25 bp, Homo sapien
catcttcagagctctcagacaaact

SEQ ID NO: 2153691 - DNA, 25 bp, Homo sapien
ccctttcacacttgagttgattatc

SEQ ID NO: 2153692 - DNA, 25 bp, Homo sapien
tcccctttcacacttgagttgatta

SEQ ID NO: 2153693 - DNA, 25 bp, Homo sapien
ttcccctttcacacttgagttgatt

SEQ ID NO: 2153694 - DNA, 25 bp, Homo sapien
ctttcacacttgagttgattatcaa

SEQ ID NO: 2153695 - DNA, 25 bp, Homo sapien
ctctgcctgtacctcccggtcggct

SEQ ID NO: 2153696 - DNA, 25 bp, Homo sapien
tctgcctgtacctcccggtcggctt

SEQ ID NO: 2153697 - DNA, 25 bp, Homo sapien
tgcctgtacctcccggtcggctttc

SEQ ID NO: 2153698 - DNA, 25 bp, Homo sapien
ctgtacctcccggtcggctttctct

SEQ ID NO: 2153699 - DNA, 25 bp, Homo sapien
tacagggacaatggatggtgcaaac

SEQ ID NO: 2153700 - DNA, 25 bp, Homo sapien
tatctagctgttgaaactgcagccc

SEQ ID NO: 2153701 - DNA, 25 bp, Homo sapien
ggatacatactctggtacagggaca

SEQ ID NO: 2153702 - DNA, 25 bp, Homo sapien
gaacgcccattataccagctagaat

SEQ ID NO: 2153703 - DNA, 25 bp, Homo sapien
gggagctcttgtttaatggctacag

SEQ ID NO: 2153704 - DNA, 25 bp, Homo sapien
gacagaggcaatggttacacaacac

SEQ ID NO: 2153705 - DNA, 25 bp, Homo sapien
ggaactagacagaggcaatggttac

SEQ ID NO: 2153706 - DNA, 25 bp, Homo sapien
ggagctcttgtttaatggctacagg

SEQ ID NO: 2153707 - DNA, 25 bp, Homo sapien
aagcagacgaaatgacttaacccgg

SEQ ID NO: 2153708 - DNA, 25 bp, Homo sapien
gggttcagcattagccagtttcagg

SEQ ID NO: 2153709 - DNA, 25 bp, Homo sapien
cctgcatgtctaaccgagggtccaa

SEQ ID NO: 2153710 - DNA, 25 bp, Homo sapien
tatgatggctgatgtagcagggctc

SEQ ID NO: 2153711 - DNA, 25 bp, Homo sapien
tatattaccagagcgaaccacaagg

SEQ ID NO: 2153712 - DNA, 25 bp, Homo sapien
ggagaatacctacacccagatcaag

SEQ ID NO: 2153713 - DNA, 25 bp, Homo sapien
aaccacaaggtctgaaggacagcca

SEQ ID NO: 2153714 - DNA, 25 bp, Homo sapien
tggaacatggtgtccctaggagcaa

SEQ ID NO: 2153715 - DNA, 25 bp, Homo sapien
tagtcagactgtggtcaccttgccc

SEQ ID NO: 2153716 - DNA, 25 bp, Homo sapien
gcatacaggcagttgaatcacagct

SEQ ID NO: 2153717 - DNA, 25 bp, Homo sapien
tcagatggacgctacgcatacaggc

SEQ ID NO: 2153718 - DNA, 25 bp, Homo sapien
taatgagcaaagtggccaatgcccc

SEQ ID NO: 2153719 - DNA, 25 bp, Homo sapien
ttagatgatgaccacgttacttctt

SEQ ID NO: 2153720 - DNA, 25 bp, Homo sapien
gatgaccacgttacttctttcaaag

SEQ ID NO: 2153721 - DNA, 25 bp, Homo sapien
tgaccacgttacttctttcaaagag

SEQ ID NO: 2153722 - DNA, 25 bp, Homo sapien
gatgatgaccacgttacttctttca

SEQ ID NO: 2153723 - DNA, 25 bp, Homo sapien
gggccaaatctcttccactggggct

SEQ ID NO: 2153724 - DNA, 25 bp, Homo sapien
tggggccaaatctcttccactgggg

SEQ ID NO: 2153725 - DNA, 25 bp, Homo sapien
ggggccaaatctcttccactggggc

SEQ ID NO: 2153726 - DNA, 25 bp, Homo sapien
ggatcaatatggctgtcacactgga

SEQ ID NO: 2153727 - DNA, 25 bp, Homo sapien
cctcaggatcaatatggctgtcaca

SEQ ID NO: 2153728 - DNA, 25 bp, Homo sapien
tcaggatcaatatggctgtcacact

SEQ ID NO: 2153729 - DNA, 25 bp, Homo sapien
caggatcaatatggctgtcacactg

SEQ ID NO: 2153730 - DNA, 25 bp, Homo sapien
agggccatcctgtgcacggtaggat

SEQ ID NO: 2153731 - DNA, 25 bp, Homo sapien
catccctctacccatgccagaaaca

SEQ ID NO: 2153732 - DNA, 25 bp, Homo sapien
acagaatccattgtggagggccatc

SEQ ID NO: 2153733 - DNA, 25 bp, Homo sapien
gcggcgcgcagctctaaaggtaatt

SEQ ID NO: 2153734 - DNA, 25 bp, Homo sapien
gttaaaatctttggcggtcaggaca

SEQ ID NO: 2153735 - DNA, 25 bp, Homo sapien
tcatcggcgttgaggtgcacgtaag

SEQ ID NO: 2153736 - DNA, 25 bp, Homo sapien
aactgggctcccatgtttcaggtac

SEQ ID NO: 2153737 - DNA, 25 bp, Homo sapien
gctttagcgcctccaaattaaggac

SEQ ID NO: 2153738 - DNA, 25 bp, Homo sapien
caaacaattggcttgacatgtggcc

SEQ ID NO: 2153739 - DNA, 25 bp, Homo sapien
gagggctttctatcagtcatcagtg

SEQ ID NO: 2153740 - DNA, 25 bp, Homo sapien
gttatagcacttcgtccagcactga

SEQ ID NO: 2153741 - DNA, 25 bp, Homo sapien
aatacaaagcaacgtttcaggcagc

SEQ ID NO: 2153742 - DNA, 25 bp, Homo sapien
acaacagtcaatcccaacctctgtg

SEQ ID NO: 2153743 - DNA, 25 bp, Homo sapien
atatagggttcacagatagggattc

SEQ ID NO: 2153744 - DNA, 25 bp, Homo sapien
tctgtgttcaggaattggactgagg

SEQ ID NO: 2153745 - DNA, 25 bp, Homo sapien
tccagctactgaaacttgacatgca

SEQ ID NO: 2153746 - DNA, 25 bp, Homo sapien
tccgcgagtgggagggaacgaggcg

SEQ ID NO: 2153747 - DNA, 25 bp, Homo sapien
gctttcagccccttagctctgggca

SEQ ID NO: 2153748 - DNA, 25 bp, Homo sapien
tcgagaggtagaactggtaacccag

SEQ ID NO: 2153749 - DNA, 25 bp, Homo sapien
aacgaggcgggttcttgactgctca

SEQ ID NO: 2153750 - DNA, 25 bp, Homo sapien
tggccccaaatgagggtctccggaa

SEQ ID NO: 2153751 - DNA, 25 bp, Homo sapien
gtggccccaaatgagggtctccgga

SEQ ID NO: 2153752 - DNA, 25 bp, Homo sapien
agcgtctggccccctggggactgaa

SEQ ID NO: 2153753 - DNA, 25 bp, Homo sapien
gcgtctggccccctggggactgaag

SEQ ID NO: 2153754 - DNA, 25 bp, Homo sapien
ctgatcaggacctaaagcgtgaagg

SEQ ID NO: 2153755 - DNA, 25 bp, Homo sapien
tgaatgaggagaaacgaggaccgcc

SEQ ID NO: 2153756 - DNA, 25 bp, Homo sapien
gacctaaagcgtgaagggtgtgaat

SEQ ID NO: 2153757 - DNA, 25 bp, Homo sapien
aggagaaacgaggaccgcctgctac

SEQ ID NO: 2153758 - DNA, 25 bp, Homo sapien
cccttgaggacgtcagctctccagc

SEQ ID NO: 2153759 - DNA, 25 bp, Homo sapien
ctccgagggtgacgccccttgagga

SEQ ID NO: 2153760 - DNA, 25 bp, Homo sapien
tccgagggtgacgccccttgaggac

SEQ ID NO: 2153761 - DNA, 25 bp, Homo sapien
gagggtgacgccccttgaggacgtc

SEQ ID NO: 2153762 - DNA, 25 bp, Homo sapien
tgccatataaggatgaggaaccagg

SEQ ID NO: 2153763 - DNA, 25 bp, Homo sapien
tcttctttacagacattggggcagc

SEQ ID NO: 2153764 - DNA, 25 bp, Homo sapien
ggacaggattgccatataaggatga

SEQ ID NO: 2153765 - DNA, 25 bp, Homo sapien
gaaccaggggcaaggtagcctcttc

SEQ ID NO: 2153766 - DNA, 25 bp, Homo sapien
gactgccaaggcctgagtgggcggg

SEQ ID NO: 2153767 - DNA, 25 bp, Homo sapien
ggtgactgccaaggcctgagtgggc

SEQ ID NO: 2153768 - DNA, 25 bp, Homo sapien
ctgccaaggcctgagtgggcgggac

SEQ ID NO: 2153769 - DNA, 25 bp, Homo sapien
caggtgactgccaaggcctgagtgg

SEQ ID NO: 2153770 - DNA, 25 bp, Homo sapien
gagagggcggggctgctatccaatt

SEQ ID NO: 2153771 - DNA, 25 bp, Homo sapien
cccagggctgagagggcggggctgc

SEQ ID NO: 2153772 - DNA, 25 bp, Homo sapien
gggctgagagggcggggctgctatc

SEQ ID NO: 2153773 - DNA, 25 bp, Homo sapien
gctgagagggcggggctgctatcca

SEQ ID NO: 2153774 - DNA, 25 bp, Homo sapien
gagtgaggtcatccccaggattcca

SEQ ID NO: 2153775 - DNA, 25 bp, Homo sapien
catccaagactgatggagcggagct

SEQ ID NO: 2153776 - DNA, 25 bp, Homo sapien
ccatagctgagagagccgggtttcc

SEQ ID NO: 2153777 - DNA, 25 bp, Homo sapien
gatcctgagaattaggccactgcca

SEQ ID NO: 2153778 - DNA, 25 bp, Homo sapien
gctgagacggtggtgctgccatcca

SEQ ID NO: 2153779 - DNA, 25 bp, Homo sapien
cctgaggggtaggagccacctctat

SEQ ID NO: 2153780 - DNA, 25 bp, Homo sapien
cagagtaccagaggatagagccgcg

SEQ ID NO: 2153781 - DNA, 25 bp, Homo sapien
tatgattccaataggcgaggccact

SEQ ID NO: 2153782 - DNA, 25 bp, Homo sapien
tgagggagtggagtcaccaccagga

SEQ ID NO: 2153783 - DNA, 25 bp, Homo sapien
gagggagtggagtcaccaccaggat

SEQ ID NO: 2153784 - DNA, 25 bp, Homo sapien
ctgagggagtggagtcaccaccagg

SEQ ID NO: 2153785 - DNA, 25 bp, Homo sapien
agggagtggagtcaccaccaggatt

SEQ ID NO: 2153786 - DNA, 25 bp, Homo sapien
cagatggcgggaccactgcctagtt

SEQ ID NO: 2153787 - DNA, 25 bp, Homo sapien
ggtcatcaccatggttccagatggc

SEQ ID NO: 2153788 - DNA, 25 bp, Homo sapien
ccatggttccagatggcgggaccac

SEQ ID NO: 2153789 - DNA, 25 bp, Homo sapien
accactgcctagttctgagagggtg

SEQ ID NO: 2153790 - DNA, 25 bp, Homo sapien
gtggggtcatcaccagggttccaga

SEQ ID NO: 2153791 - DNA, 25 bp, Homo sapien
ctgagggggtggggtcatcaccagg

SEQ ID NO: 2153792 - DNA, 25 bp, Homo sapien
tgagggggtggggtcatcaccaggg

SEQ ID NO: 2153793 - DNA, 25 bp, Homo sapien
gggtggggtcatcaccagggttcca

SEQ ID NO: 2153794 - DNA, 25 bp, Homo sapien
tcaacagggttccagatagcgggac

SEQ ID NO: 2153795 - DNA, 25 bp, Homo sapien
tcaaaagggttccagatagtgggaa

SEQ ID NO: 2153796 - DNA, 25 bp, Homo sapien
aacaggattccagagggtggtccca

SEQ ID NO: 2153797 - DNA, 25 bp, Homo sapien
atagcgggaccactgcccactgctg

SEQ ID NO: 2153798 - DNA, 25 bp, Homo sapien
ccaaggctgagggggtgtggtcatc

SEQ ID NO: 2153799 - DNA, 25 bp, Homo sapien
aaggctgagggggtgtggtcatcac

SEQ ID NO: 2153800 - DNA, 25 bp, Homo sapien
caaggctgagggggtgtggtcatca

SEQ ID NO: 2153801 - DNA, 25 bp, Homo sapien
tgaggggaggtcaccagtagggttc

SEQ ID NO: 2153802 - DNA, 25 bp, Homo sapien
gaggtcaccagtagggttccagagc

SEQ ID NO: 2153803 - DNA, 25 bp, Homo sapien
agggttccagagcacgggtccactg

SEQ ID NO: 2153804 - DNA, 25 bp, Homo sapien
gcacagggccactgcccaaggctgc

SEQ ID NO: 2153805 - DNA, 25 bp, Homo sapien
gcacagggccactgcccaaggctga

SEQ ID NO: 2153806 - DNA, 25 bp, Homo sapien
gcagggttccagatggtaggcccac

SEQ ID NO: 2153807 - DNA, 25 bp, Homo sapien
aaggctgagagggtgatgtggccac

SEQ ID NO: 2153808 - DNA, 25 bp, Homo sapien
agctgctgcaatgagatcaccacca

SEQ ID NO: 2153809 - DNA, 25 bp, Homo sapien
tagggttctagagagtaagtttgct

SEQ ID NO: 2153810 - DNA, 25 bp, Homo sapien
tctagagagtaagtttgctggcagg

SEQ ID NO: 2153811 - DNA, 25 bp, Homo sapien
ggttctagagagtaagtttgctggc

SEQ ID NO: 2153812 - DNA, 25 bp, Homo sapien
agggggcaaggtcatcaccaggatt

SEQ ID NO: 2153813 - DNA, 25 bp, Homo sapien
gttggcagaagcctttgctccttct

SEQ ID NO: 2153814 - DNA, 25 bp, Homo sapien
catacatcagacactgttggcagaa

SEQ ID NO: 2153815 - DNA, 25 bp, Homo sapien
gacactgttggcagaagcctttgct

SEQ ID NO: 2153816 - DNA, 25 bp, Homo sapien
tacatcagacactgttggcagaagc

SEQ ID NO: 2153817 - DNA, 25 bp, Homo sapien
ggctccctaatgtcggctaaactaa

SEQ ID NO: 2153818 - DNA, 25 bp, Homo sapien
cctaatgtcggctaaactaaggaca

SEQ ID NO: 2153819 - DNA, 25 bp, Homo sapien
tcttcagtggctccctaatgtcggc

SEQ ID NO: 2153820 - DNA, 25 bp, Homo sapien
tgtcggctaaactaaggacaaactc

SEQ ID NO: 2153821 - DNA, 25 bp, Homo sapien
tattcccacactgaaactctattag

SEQ ID NO: 2153822 - DNA, 25 bp, Homo sapien
tattagattccacattgacagcccc

SEQ ID NO: 2153823 - DNA, 25 bp, Homo sapien
ggttgcttctgacccctaatattcc

SEQ ID NO: 2153824 - DNA, 25 bp, Homo sapien
cctacttcttctagccaatttatgg

SEQ ID NO: 2153825 - DNA, 25 bp, Homo sapien
agtgaataatccaaacttgacagta

SEQ ID NO: 2153826 - DNA, 25 bp, Homo sapien
gggcagtccatagggcagtttggca

SEQ ID NO: 2153827 - DNA, 25 bp, Homo sapien
agtctgttggcgctgaacccttgtc

SEQ ID NO: 2153828 - DNA, 25 bp, Homo sapien
aagtgatatgagatgagagtagagc

SEQ ID NO: 2153829 - DNA, 25 bp, Homo sapien
cctggactgcattctaatcctcctg

SEQ ID NO: 2153830 - DNA, 25 bp, Homo sapien
ttcctggactgcattctaatcctcc

SEQ ID NO: 2153831 - DNA, 25 bp, Homo sapien
tggactgcattctaatcctcctgag

SEQ ID NO: 2153832 - DNA, 25 bp, Homo sapien
gactgcattctaatcctcctgagct

SEQ ID NO: 2153833 - DNA, 25 bp, Homo sapien
tctccttgatctcaatgcagtcttc

SEQ ID NO: 2153834 - DNA, 25 bp, Homo sapien
tgcagtcttcatagcatgctgttag

SEQ ID NO: 2153835 - DNA, 25 bp, Homo sapien
catctaactttcagtagcattccaa

SEQ ID NO: 2153836 - DNA, 25 bp, Homo sapien
tgatctcaatgcagtcttcatagca

SEQ ID NO: 2153837 - DNA, 25 bp, Homo sapien
agtggtctgcaccttgggtccattc

SEQ ID NO: 2153838 - DNA, 25 bp, Homo sapien
cctgaatataaacgtgcttgctaag

SEQ ID NO: 2153839 - DNA, 25 bp, Homo sapien
cctagcagattcacttgcagccttc

SEQ ID NO: 2153840 - DNA, 25 bp, Homo sapien
cagctcttatctacccctagcagat

SEQ ID NO: 2153841 - DNA, 25 bp, Homo sapien
cagtccagattcaatgggaggagcc

SEQ ID NO: 2153842 - DNA, 25 bp, Homo sapien
gaactgagtatccacttccagaatg

SEQ ID NO: 2153843 - DNA, 25 bp, Homo sapien
gtcaagcagtgactaaagccagtcc

SEQ ID NO: 2153844 - DNA, 25 bp, Homo sapien
tgttgggtgtcagctaggagctcca

SEQ ID NO: 2153845 - DNA, 25 bp, Homo sapien
tagttattagattgcacagtcacag

SEQ ID NO: 2153846 - DNA, 25 bp, Homo sapien
taagcctgaagttgagggttccatc

SEQ ID NO: 2153847 - DNA, 25 bp, Homo sapien
cagtcacagaggtattaagcctgaa

SEQ ID NO: 2153848 - DNA, 25 bp, Homo sapien
gaagccatcgagctattttcccttt

SEQ ID NO: 2153849 - DNA, 25 bp, Homo sapien
tcaagcaggaaatgactggagttgg

SEQ ID NO: 2153850 - DNA, 25 bp, Homo sapien
gcaggaaatgactggagttggagcc

SEQ ID NO: 2153851 - DNA, 25 bp, Homo sapien
cttcaagcaggaaatgactggagtt

SEQ ID NO: 2153852 - DNA, 25 bp, Homo sapien
caagcaggaaatgactggagttgga

SEQ ID NO: 2153853 - DNA, 25 bp, Homo sapien
tttccaatagcaactcagcagaccc

SEQ ID NO: 2153854 - DNA, 25 bp, Homo sapien
tcacagcagaggaacgctgctggct

SEQ ID NO: 2153855 - DNA, 25 bp, Homo sapien
cacacaaatgcgcaaggagcaggag

SEQ ID NO: 2153856 - DNA, 25 bp, Homo sapien
caatagcaactcagcagaccctgtc

SEQ ID NO: 2153857 - DNA, 25 bp, Homo sapien
tcttgtctctgtagggattatctcc

SEQ ID NO: 2153858 - DNA, 25 bp, Homo sapien
tgtggaacctcgagaaatacaaggc

SEQ ID NO: 2153859 - DNA, 25 bp, Homo sapien
tcatgttcacccatttggagcaagc

SEQ ID NO: 2153860 - DNA, 25 bp, Homo sapien
tacttgcaccgtcttgataataagg

SEQ ID NO: 2153861 - DNA, 25 bp, Homo sapien
gcccaaagaccaggacgagaaccca

SEQ ID NO: 2153862 - DNA, 25 bp, Homo sapien
caaagaccaggacgagaacccacct

SEQ ID NO: 2153863 - DNA, 25 bp, Homo sapien
cagcccaaagaccaggacgagaacc

SEQ ID NO: 2153864 - DNA, 25 bp, Homo sapien
ccaagtgatctttgactgccatgga

SEQ ID NO: 2153865 - DNA, 25 bp, Homo sapien
aattccaagtgatctttgactgcca

SEQ ID NO: 2153866 - DNA, 25 bp, Homo sapien
gcacaattccaagtgatctttgact

SEQ ID NO: 2153867 - DNA, 25 bp, Homo sapien
ttccaagtgatctttgactgccatg

SEQ ID NO: 2153868 - DNA, 25 bp, Homo sapien
tgtagaatataaaccccacgaaggc

SEQ ID NO: 2153869 - DNA, 25 bp, Homo sapien
gggtcagaggtctagaaagcaaagc

SEQ ID NO: 2153870 - DNA, 25 bp, Homo sapien
taagcttcagatacatgtagccaac

SEQ ID NO: 2153871 - DNA, 25 bp, Homo sapien
caactgcctactagactattctggg

SEQ ID NO: 2153872 - DNA, 25 bp, Homo sapien
aataatccccgctaaattgtcctgt

SEQ ID NO: 2153873 - DNA, 25 bp, Homo sapien
gatatgcatcaacctcaattctctc

SEQ ID NO: 2153874 - DNA, 25 bp, Homo sapien
tcctctgatgagcttaggtggaatt

SEQ ID NO: 2153875 - DNA, 25 bp, Homo sapien
ttccccacgtggtttggcgaattca

SEQ ID NO: 2153876 - DNA, 25 bp, Homo sapien
gtgacttcgctgtatgggaagctca

SEQ ID NO: 2153877 - DNA, 25 bp, Homo sapien
ttgccaagtgacttcgctgtatggg

SEQ ID NO: 2153878 - DNA, 25 bp, Homo sapien
acttcgctgtatgggaagctcatag

SEQ ID NO: 2153879 - DNA, 25 bp, Homo sapien
caagtgacttcgctgtatgggaagc

SEQ ID NO: 2153880 - DNA, 25 bp, Homo sapien
cacttcgagtaaaatgcatccctcc

SEQ ID NO: 2153881 - DNA, 25 bp, Homo sapien
gaataacaatgtcctgccccagact

SEQ ID NO: 2153882 - DNA, 25 bp, Homo sapien
cattggtatccattagctttctttg

SEQ ID NO: 2153883 - DNA, 25 bp, Homo sapien
gcatccctcctgattcattggtatc

SEQ ID NO: 2153884 - DNA, 25 bp, Homo sapien
tacaatactgtcagcagattgaaga

SEQ ID NO: 2153885 - DNA, 25 bp, Homo sapien
ttacaatactgtcagcagattgaag

SEQ ID NO: 2153886 - DNA, 25 bp, Homo sapien
atagagttatgttggctatttgtac

SEQ ID NO: 2153887 - DNA, 25 bp, Homo sapien
tatggctcccatcttttgttacccc

SEQ ID NO: 2153888 - DNA, 25 bp, Homo sapien
caattgagactatttgtatggctcc

SEQ ID NO: 2153889 - DNA, 25 bp, Homo sapien
gcatctgtattcttcagggatactg

SEQ ID NO: 2153890 - DNA, 25 bp, Homo sapien
tccacatctccaaaactagcaaaag

SEQ ID NO: 2153891 - DNA, 25 bp, Homo sapien
tacccaaagttgaatgtctagcaag

SEQ ID NO: 2153892 - DNA, 25 bp, Homo sapien
tctagcaagtggtttacccaggcct

SEQ ID NO: 2153893 - DNA, 25 bp, Homo sapien
ataggtaagaataagaggagcaggc

SEQ ID NO: 2153894 - DNA, 25 bp, Homo sapien
tgtaaaacattggtgcagactaggg

SEQ ID NO: 2153895 - DNA, 25 bp, Homo sapien
cagaaactatgggccaaaatgagag

SEQ ID NO: 2153896 - DNA, 25 bp, Homo sapien
gcagaaactatgggccaaaatgaga

SEQ ID NO: 2153897 - DNA, 25 bp, Homo sapien
tggactgttattccctgccgttcca

SEQ ID NO: 2153898 - DNA, 25 bp, Homo sapien
ttattccctgccgttccacgacatt

SEQ ID NO: 2153899 - DNA, 25 bp, Homo sapien
aatcctggactgttattccctgccg

SEQ ID NO: 2153900 - DNA, 25 bp, Homo sapien
ttaagaatcctggactgttattccc

SEQ ID NO: 2153901 - DNA, 25 bp, Homo sapien
ctggttgttttgcagatccgttatt

SEQ ID NO: 2153902 - DNA, 25 bp, Homo sapien
aagtaagaattaactactgccattt

SEQ ID NO: 2153903 - DNA, 25 bp, Homo sapien
tgtagattgccttggtaatatgaac

SEQ ID NO: 2153904 - DNA, 25 bp, Homo sapien
ttgcagatccgttattcctttcttc

SEQ ID NO: 2153905 - DNA, 25 bp, Homo sapien
ctgtctccaataagctctccatcaa

SEQ ID NO: 2153906 - DNA, 25 bp, Homo sapien
tactcaaatgagctgtctccaataa

SEQ ID NO: 2153907 - DNA, 25 bp, Homo sapien
ttagtaactgaaattataagaatcc

SEQ ID NO: 2153908 - DNA, 25 bp, Homo sapien
ctattacattttagtttagtaactg

SEQ ID NO: 2153909 - DNA, 25 bp, Homo sapien
gtaactgaaattataagaatccgca

SEQ ID NO: 2153910 - DNA, 25 bp, Homo sapien
taactgaaattataagaatccgcat

SEQ ID NO: 2153911 - DNA, 25 bp, Homo sapien
agaatttgtagttcttgatacagca

SEQ ID NO: 2153912 - DNA, 25 bp, Homo sapien
aaaagtagaatttgtagttcttgat

SEQ ID NO: 2153913 - DNA, 25 bp, Homo sapien
aagtagaatttgtagttcttgatac

SEQ ID NO: 2153914 - DNA, 25 bp, Homo sapien
gtagaatttgtagttcttgatacag

SEQ ID NO: 2153915 - DNA, 25 bp, Homo sapien
gagtggcttgtcatgactgttttta

SEQ ID NO: 2153916 - DNA, 25 bp, Homo sapien
gattttgacagttccaattatccaa

SEQ ID NO: 2153917 - DNA, 25 bp, Homo sapien
tcttattgattttgacagttccaat

SEQ ID NO: 2153918 - DNA, 25 bp, Homo sapien
cagttccaattatccaaacaggcat

SEQ ID NO: 2153919 - DNA, 25 bp, Homo sapien
cctagcagaagatgccggattacat

SEQ ID NO: 2153920 - DNA, 25 bp, Homo sapien
acaaaatgttcattaaatccctgcc

SEQ ID NO: 2153921 - DNA, 25 bp, Homo sapien
agatgccggattacatgtattcaaa

SEQ ID NO: 2153922 - DNA, 25 bp, Homo sapien
tcctggtggtagaatgggatttgct

SEQ ID NO: 2153923 - DNA, 25 bp, Homo sapien
ggtagaatacagtgtcgacaattgc

SEQ ID NO: 2153924 - DNA, 25 bp, Homo sapien
gtgtcgacaattgcctctcttcccc

SEQ ID NO: 2153925 - DNA, 25 bp, Homo sapien
acatcaggtagaatacagtgtcgac

SEQ ID NO: 2153926 - DNA, 25 bp, Homo sapien
ccttgtaacatcaggtagaatacag

SEQ ID NO: 2153927 - DNA, 25 bp, Homo sapien
aatcaacagcctgcctattccatat

SEQ ID NO: 2153928 - DNA, 25 bp, Homo sapien
aaaatcaacagcctgcctattccat

SEQ ID NO: 2153929 - DNA, 25 bp, Homo sapien
aagcaacttgtaaaaatcaacagcc

SEQ ID NO: 2153930 - DNA, 25 bp, Homo sapien
agcaacttgtaaaaatcaacagcct

SEQ ID NO: 2153931 - DNA, 25 bp, Homo sapien
ttatgtcatagacacttttatacat

SEQ ID NO: 2153932 - DNA, 25 bp, Homo sapien
tgagggttggctgttaagtcttgat

SEQ ID NO: 2153933 - DNA, 25 bp, Homo sapien
actaaatttaaatgcgagctgcact

SEQ ID NO: 2153934 - DNA, 25 bp, Homo sapien
gctgcactctgcatttctcatcagt

SEQ ID NO: 2153935 - DNA, 25 bp, Homo sapien
catattggcttgctgttgagggttg

SEQ ID NO: 2153936 - DNA, 25 bp, Homo sapien
attggaagttccatattaaacttgg

SEQ ID NO: 2153937 - DNA, 25 bp, Homo sapien
cctacgtagttggaagctctggcta

SEQ ID NO: 2153938 - DNA, 25 bp, Homo sapien
gctctggctaacatccctcactgtg

SEQ ID NO: 2153939 - DNA, 25 bp, Homo sapien
ttttctaggaataggcactctgaat

SEQ ID NO: 2153940 - DNA, 25 bp, Homo sapien
tagtgcctggaccaacagctgctga

SEQ ID NO: 2153941 - DNA, 25 bp, Homo sapien
ttggttggttctgctaagtgttgga

SEQ ID NO: 2153942 - DNA, 25 bp, Homo sapien
taagtgttggaaagttgtgcttgct

SEQ ID NO: 2153943 - DNA, 25 bp, Homo sapien
acagcaggtttgtgtagtctccctg

SEQ ID NO: 2153944 - DNA, 25 bp, Homo sapien
cctatgctccgttgctgaagctcag

SEQ ID NO: 2153945 - DNA, 25 bp, Homo sapien
taagtgaagtggatggaagtgctac

SEQ ID NO: 2153946 - DNA, 25 bp, Homo sapien
agctcagttgctcggctggagctga

SEQ ID NO: 2153947 - DNA, 25 bp, Homo sapien
aagtgtccgtcattggagatggatg

SEQ ID NO: 2153948 - DNA, 25 bp, Homo sapien
cagtgaagaaaatcaggagacgtca

SEQ ID NO: 2153949 - DNA, 25 bp, Homo sapien
caggtgaaaccaaaccttgctgtgt

SEQ ID NO: 2153950 - DNA, 25 bp, Homo sapien
ccttgtcagctttcagacaggtgaa

SEQ ID NO: 2153951 - DNA, 25 bp, Homo sapien
gggatattggcaatcccagcctggc

SEQ ID NO: 2153952 - DNA, 25 bp, Homo sapien
tccatagacagcacttgatgctgat

SEQ ID NO: 2153953 - DNA, 25 bp, Homo sapien
cagagctagtgccagaggaagaatc

SEQ ID NO: 2153954 - DNA, 25 bp, Homo sapien
tatttcacctagtgtcgtgcaaggc

SEQ ID NO: 2153955 - DNA, 25 bp, Homo sapien
ctttttcattaactcttggatgact

SEQ ID NO: 2153956 - DNA, 25 bp, Homo sapien
gccggcccgattttccgcggctgta

SEQ ID NO: 2153957 - DNA, 25 bp, Homo sapien
taaggactagcgcttcggtagccgg

SEQ ID NO: 2153958 - DNA, 25 bp, Homo sapien
gtcagagaggcagaaagccccggtg

SEQ ID NO: 2153959 - DNA, 25 bp, Homo sapien
tttccgcggctgtataaggactagc

SEQ ID NO: 2153960 - DNA, 25 bp, Homo sapien
gacaaagtatcccattgccacactt

SEQ ID NO: 2153961 - DNA, 25 bp, Homo sapien
cttaattctttttgctcgggaagag

SEQ ID NO: 2153962 - DNA, 25 bp, Homo sapien
aagtatcccattgccacactttcaa

SEQ ID NO: 2153963 - DNA, 25 bp, Homo sapien
ttttgctcgggaagagttgctcttc

SEQ ID NO: 2153964 - DNA, 25 bp, Homo sapien
gcaccagagaatgcgaaaagcccat

SEQ ID NO: 2153965 - DNA, 25 bp, Homo sapien
gaactgcccaatttcctagatccca

SEQ ID NO: 2153966 - DNA, 25 bp, Homo sapien
caaacttcccagaggcgtttgaatt

SEQ ID NO: 2153967 - DNA, 25 bp, Homo sapien
aaaagcccataagctctgcaccaaa

SEQ ID NO: 2153968 - DNA, 25 bp, Homo sapien
tgctcctcaagtacctcatactgat

SEQ ID NO: 2153969 - DNA, 25 bp, Homo sapien
cctcatactgattctccattgaaga

SEQ ID NO: 2153970 - DNA, 25 bp, Homo sapien
gattctccattgaagatggtggtag

SEQ ID NO: 2153971 - DNA, 25 bp, Homo sapien
tcaagtacctcatactgattctcca

SEQ ID NO: 2153972 - DNA, 25 bp, Homo sapien
gacattttggacacacgtttcttgt

SEQ ID NO: 2153973 - DNA, 25 bp, Homo sapien
caagatcagcaatagctcttaagag

SEQ ID NO: 2153974 - DNA, 25 bp, Homo sapien
ggacacacgtttcttgtccactgtc

SEQ ID NO: 2153975 - DNA, 25 bp, Homo sapien
tcagggttgcgggacaagatcagca

SEQ ID NO: 2153976 - DNA, 25 bp, Homo sapien
gtttctccagctggatgtacaagct

SEQ ID NO: 2153977 - DNA, 25 bp, Homo sapien
tttctccagctggatgtacaagctg

SEQ ID NO: 2153978 - DNA, 25 bp, Homo sapien
ctagacctggtaaaatagagcaaga

SEQ ID NO: 2153979 - DNA, 25 bp, Homo sapien
gagcaagatacagatctacacagac

SEQ ID NO: 2153980 - DNA, 25 bp, Homo sapien
aaaatagagcaagatacagatctac

SEQ ID NO: 2153981 - DNA, 25 bp, Homo sapien
gacctggtaaaatagagcaagatac

SEQ ID NO: 2153982 - DNA, 25 bp, Homo sapien
gctgtggcttgttatgaattcttct

SEQ ID NO: 2153983 - DNA, 25 bp, Homo sapien
catcgacaggtccttttggactgga

SEQ ID NO: 2153984 - DNA, 25 bp, Homo sapien
tccagatactgtgtatgctgtggct

SEQ ID NO: 2153985 - DNA, 25 bp, Homo sapien
attcagtggctcatcgacaggtcct

SEQ ID NO: 2153986 - DNA, 25 bp, Homo sapien
gacaattgtgcggttatgagaggaa

SEQ ID NO: 2153987 - DNA, 25 bp, Homo sapien
gcagatgcgctgtgccctggtgaaa

SEQ ID NO: 2153988 - DNA, 25 bp, Homo sapien
ggccgtgtcaggtgtagatccagct

SEQ ID NO: 2153989 - DNA, 25 bp, Homo sapien
ttgcctgccaagctcgacaattgtg

SEQ ID NO: 2153990 - DNA, 25 bp, Homo sapien
gaatcacttatctctatgggcacag

SEQ ID NO: 2153991 - DNA, 25 bp, Homo sapien
cactcagcactaaggaagaccacaa

SEQ ID NO: 2153992 - DNA, 25 bp, Homo sapien
cgggtcattgagtaccagcagctct

SEQ ID NO: 2153993 - DNA, 25 bp, Homo sapien
cacaaactggaggaattcgaatcac

SEQ ID NO: 2153994 - DNA, 25 bp, Homo sapien
tctggactctcagccaatgccaagc

SEQ ID NO: 2153995 - DNA, 25 bp, Homo sapien
tgttttcgtctagggctgatgggta

SEQ ID NO: 2153996 - DNA, 25 bp, Homo sapien
caatgccaagccatcagccaacagg

SEQ ID NO: 2153997 - DNA, 25 bp, Homo sapien
tctcttcattgtcatccctgactga

SEQ ID NO: 2153998 - DNA, 25 bp, Homo sapien
gaatgtgtgtctgcttcccaacatg

SEQ ID NO: 2153999 - DNA, 25 bp, Homo sapien
gcttcccaacatgagcctcaggctc

SEQ ID NO: 2154000 - DNA, 25 bp, Homo sapien
gtgtgtctgcttcccaacatgagcc

SEQ ID NO: 2154001 - DNA, 25 bp, Homo sapien
tctgcttcccaacatgagcctcagg

SEQ ID NO: 2154002 - DNA, 25 bp, Homo sapien
tgtgcaggggcacataacaagttat

SEQ ID NO: 2154003 - DNA, 25 bp, Homo sapien
tgaggatgtaggagtccttagtgcc

SEQ ID NO: 2154004 - DNA, 25 bp, Homo sapien
aggatgtaggagtccttagtgcccc

SEQ ID NO: 2154005 - DNA, 25 bp, Homo sapien
tctgaggatgtaggagtccttagtg

SEQ ID NO: 2154006 - DNA, 25 bp, Homo sapien
gcgagtaaaacgcagaattcccctc

SEQ ID NO: 2154007 - DNA, 25 bp, Homo sapien
gagaaagttggcctgcgagtaaaac

SEQ ID NO: 2154008 - DNA, 25 bp, Homo sapien
tggcctgcgagtaaaacgcagaatt

SEQ ID NO: 2154009 - DNA, 25 bp, Homo sapien
gggctggctttggtgacccagaaaa

SEQ ID NO: 2154010 - DNA, 25 bp, Homo sapien
tgcctgggaacctttgtactgaggg

SEQ ID NO: 2154011 - DNA, 25 bp, Homo sapien
gccccgagtagctccaagtctgatt

SEQ ID NO: 2154012 - DNA, 25 bp, Homo sapien
caagaagtcccatatctgagagtaa

SEQ ID NO: 2154013 - DNA, 25 bp, Homo sapien
tccgcagcgaagagggagatgctct

SEQ ID NO: 2154014 - DNA, 25 bp, Homo sapien
cttgccccacgcgaagggaggcaga

SEQ ID NO: 2154015 - DNA, 25 bp, Homo sapien
gaagagaggccgctggtcccgcagc

SEQ ID NO: 2154016 - DNA, 25 bp, Homo sapien
agccccttgccccacgcgaagggag

SEQ ID NO: 2154017 - DNA, 25 bp, Homo sapien
ccagaagagaggccgctggtcccgc

SEQ ID NO: 2154018 - DNA, 25 bp, Homo sapien
ctaagagtgtttcggtcaccggaca

SEQ ID NO: 2154019 - DNA, 25 bp, Homo sapien
gtgtttcggtcaccggacacctcga

SEQ ID NO: 2154020 - DNA, 25 bp, Homo sapien
ggacacctcgagcatgtcacgaagg

SEQ ID NO: 2154021 - DNA, 25 bp, Homo sapien
gcacccagctaagagtgtttcggtc

SEQ ID NO: 2154022 - DNA, 25 bp, Homo sapien
ctgagtgcccggcagctcgcagtta

SEQ ID NO: 2154023 - DNA, 25 bp, Homo sapien
tcgcagttaacctttgcgtcgtccc

SEQ ID NO: 2154024 - DNA, 25 bp, Homo sapien
ggcagctcgcagttaacctttgcgt

SEQ ID NO: 2154025 - DNA, 25 bp, Homo sapien
tgcccggcagctcgcagttaacctt

SEQ ID NO: 2154026 - DNA, 25 bp, Homo sapien
ggctcaaaggccgaggcgaaaaggc

SEQ ID NO: 2154027 - DNA, 25 bp, Homo sapien
aggccgaggcgaaaaggcagtccag

SEQ ID NO: 2154028 - DNA, 25 bp, Homo sapien
tccagtatccacgccatgacccgcg

SEQ ID NO: 2154029 - DNA, 25 bp, Homo sapien
aaggccgaggcgaaaaggcagtcca

SEQ ID NO: 2154030 - DNA, 25 bp, Homo sapien
cttgagttgcgggacgccgctcctg

SEQ ID NO: 2154031 - DNA, 25 bp, Homo sapien
taccgccgagccattagcgcgattg

SEQ ID NO: 2154032 - DNA, 25 bp, Homo sapien
ttagcgcgattgctcgcggttcccg

SEQ ID NO: 2154033 - DNA, 25 bp, Homo sapien
cccggcaaagctggtgatttatgcg

SEQ ID NO: 2154034 - DNA, 25 bp, Homo sapien
gctttggctgctttacagaagtcca

SEQ ID NO: 2154035 - DNA, 25 bp, Homo sapien
ccagggtcccttcagctttagagct

SEQ ID NO: 2154036 - DNA, 25 bp, Homo sapien
ttgtatgtaaagtgcgccccagggt

SEQ ID NO: 2154037 - DNA, 25 bp, Homo sapien
cagaagtccaattgtttgaggccaa

SEQ ID NO: 2154038 - DNA, 25 bp, Homo sapien
tgactacaggcagcggcaatggata

SEQ ID NO: 2154039 - DNA, 25 bp, Homo sapien
tatacgaaaacatttgggcaccagt

SEQ ID NO: 2154040 - DNA, 25 bp, Homo sapien
gcaccagtttggtctgctgacacat

SEQ ID NO: 2154041 - DNA, 25 bp, Homo sapien
tatggcatcactagaattttggtcc

SEQ ID NO: 2154042 - DNA, 25 bp, Homo sapien
ctttcaaccttctcaaggtgccagt

SEQ ID NO: 2154043 - DNA, 25 bp, Homo sapien
gctttcaaccttctcaaggtgccag

SEQ ID NO: 2154044 - DNA, 25 bp, Homo sapien
tgctttcaaccttctcaaggtgcca

SEQ ID NO: 2154045 - DNA, 25 bp, Homo sapien
ttgctttcaaccttctcaaggtgcc

SEQ ID NO: 2154046 - DNA, 25 bp, Homo sapien
ctggaatcggatgattatcaaggct

SEQ ID NO: 2154047 - DNA, 25 bp, Homo sapien
atccaattgtcactggacctggtgg

SEQ ID NO: 2154048 - DNA, 25 bp, Homo sapien
ggctgcatcatccaattgtcactgg

SEQ ID NO: 2154049 - DNA, 25 bp, Homo sapien
tgattatcaaggctgcatcatccaa

SEQ ID NO: 2154050 - DNA, 25 bp, Homo sapien
caaagggggcatgattctggggcac

SEQ ID NO: 2154051 - DNA, 25 bp, Homo sapien
tctggggcacagtgcccttgctgcc

SEQ ID NO: 2154052 - DNA, 25 bp, Homo sapien
gaaggcggacaacaacagcaaaggg

SEQ ID NO: 2154053 - DNA, 25 bp, Homo sapien
aaaatgaaggcggacaacaacagca

SEQ ID NO: 2154054 - DNA, 25 bp, Homo sapien
agttcgtggtaagcagtctcttgca

SEQ ID NO: 2154055 - DNA, 25 bp, Homo sapien
cagagaggctgtgtatcgataccat

SEQ ID NO: 2154056 - DNA, 25 bp, Homo sapien
gaggaaatgtctggccacgagttcg

SEQ ID NO: 2154057 - DNA, 25 bp, Homo sapien
gataccatcttcgtcctgcggtcgg

SEQ ID NO: 2154058 - DNA, 25 bp, Homo sapien
tcgccctttgcttcgctcaattcaa

SEQ ID NO: 2154059 - DNA, 25 bp, Homo sapien
aattcaagctgcgttcgcggtgcgc

SEQ ID NO: 2154060 - DNA, 25 bp, Homo sapien
cactccgaatctggcatcagtggct

SEQ ID NO: 2154061 - DNA, 25 bp, Homo sapien
cctgcgctgcggtaggagaagcggc

SEQ ID NO: 2154062 - DNA, 25 bp, Homo sapien
cacttatccaaggtgttcggacggt

SEQ ID NO: 2154063 - DNA, 25 bp, Homo sapien
aaggtgttcggacggtcaataggca

SEQ ID NO: 2154064 - DNA, 25 bp, Homo sapien
tatccaaggtgttcggacggtcaat

SEQ ID NO: 2154065 - DNA, 25 bp, Homo sapien
accacttatccaaggtgttcggacg

SEQ ID NO: 2154066 - DNA, 25 bp, Homo sapien
ctacagctactgcgccatttcctga

SEQ ID NO: 2154067 - DNA, 25 bp, Homo sapien
tgagaggaccgccccaagcacctac

SEQ ID NO: 2154068 - DNA, 25 bp, Homo sapien
cagctactgcgccatttcctgatat

SEQ ID NO: 2154069 - DNA, 25 bp, Homo sapien
ctgagaggaccgccccaagcaccta

SEQ ID NO: 2154070 - DNA, 25 bp, Homo sapien
caaagagggcgatttcttcgggttg

SEQ ID NO: 2154071 - DNA, 25 bp, Homo sapien
cttgaaacaaagagggcgatttctt

SEQ ID NO: 2154072 - DNA, 25 bp, Homo sapien
atttcttcgggttgatctgtgtggg

SEQ ID NO: 2154073 - DNA, 25 bp, Homo sapien
agagggcgatttcttcgggttgatc

SEQ ID NO: 2154074 - DNA, 25 bp, Homo sapien
gaggctcgaggtccctgccttaaat

SEQ ID NO: 2154075 - DNA, 25 bp, Homo sapien
ggagctagccaaaaagaccccgcag

SEQ ID NO: 2154076 - DNA, 25 bp, Homo sapien
cccgcagtggtttggcgaaaggact

SEQ ID NO: 2154077 - DNA, 25 bp, Homo sapien
cgacgaggctcgaggtccctgcctt

SEQ ID NO: 2154078 - DNA, 25 bp, Homo sapien
gaatgagaaacgtcaaagcctcgca

SEQ ID NO: 2154079 - DNA, 25 bp, Homo sapien
aagaatgagaaacgtcaaagcctcg

SEQ ID NO: 2154080 - DNA, 25 bp, Homo sapien
gaaagaatgagaaacgtcaaagcct

SEQ ID NO: 2154081 - DNA, 25 bp, Homo sapien
tgagaaacgtcaaagcctcgcagcg

SEQ ID NO: 2154082 - DNA, 25 bp, Homo sapien
tccaggctaatgccaaatgtcttgt

SEQ ID NO: 2154083 - DNA, 25 bp, Homo sapien
tcagttcaagatgcttgcggcgggt

SEQ ID NO: 2154084 - DNA, 25 bp, Homo sapien
tgcttgcggcgggtaaactcgttca

SEQ ID NO: 2154085 - DNA, 25 bp, Homo sapien
tgcggcgggtaaactcgttcaccag

SEQ ID NO: 2154086 - DNA, 25 bp, Homo sapien
gaccggtggcttcttcaacctgcat

SEQ ID NO: 2154087 - DNA, 25 bp, Homo sapien
ggcaaggtgggctcattccgcctgc

SEQ ID NO: 2154088 - DNA, 25 bp, Homo sapien
aaaaagcgccggatgcggccaaaca

SEQ ID NO: 2154089 - DNA, 25 bp, Homo sapien
gcagcctgaccggtggcttcttcaa

SEQ ID NO: 2154090 - DNA, 25 bp, Homo sapien
gaagtcgttggccaattggaaagga

SEQ ID NO: 2154091 - DNA, 25 bp, Homo sapien
tggatcccagaagtcgttggccaat

SEQ ID NO: 2154092 - DNA, 25 bp, Homo sapien
tcgcaatcggattgagactcatctt

SEQ ID NO: 2154093 - DNA, 25 bp, Homo sapien
ttggcagcaagcctcaacaacctgg

SEQ ID NO: 2154094 - DNA, 25 bp, Homo sapien
gtaaaaatccccactgcgcttaagc

SEQ ID NO: 2154095 - DNA, 25 bp, Homo sapien
cgctgcacggagtattcaagggtaa

SEQ ID NO: 2154096 - DNA, 25 bp, Homo sapien
cactcgctgcacggagtattcaagg

SEQ ID NO: 2154097 - DNA, 25 bp, Homo sapien
ctcgctgcacggagtattcaagggt

SEQ ID NO: 2154098 - DNA, 25 bp, Homo sapien
tccttgaggagtgcagccacatcat

SEQ ID NO: 2154099 - DNA, 25 bp, Homo sapien
gaatgacatgtacagatcatctggc

SEQ ID NO: 2154100 - DNA, 25 bp, Homo sapien
tccttcatgtcacggaaaaactcct

SEQ ID NO: 2154101 - DNA, 25 bp, Homo sapien
tacatccagaccttgatcaaattct

SEQ ID NO: 2154102 - DNA, 25 bp, Homo sapien
catcaggtagaccagcaactgcagg

SEQ ID NO: 2154103 - DNA, 25 bp, Homo sapien
cagtgattttatgcagggccttcag

SEQ ID NO: 2154104 - DNA, 25 bp, Homo sapien
tcaatgccaattgagtcctcgcagt

SEQ ID NO: 2154105 - DNA, 25 bp, Homo sapien
gcagacgctccagggtatcactgtg

SEQ ID NO: 2154106 - DNA, 25 bp, Homo sapien
gaggacatcccagttatcaatcatg

SEQ ID NO: 2154107 - DNA, 25 bp, Homo sapien
cattgacagaagcaacatagtgatc

SEQ ID NO: 2154108 - DNA, 25 bp, Homo sapien
caccaaggccaagttagtggaagtc

SEQ ID NO: 2154109 - DNA, 25 bp, Homo sapien
tcaatcatggcacggaccacattga

SEQ ID NO: 2154110 - DNA, 25 bp, Homo sapien
tggacttccacacgcgcttagcaac

SEQ ID NO: 2154111 - DNA, 25 bp, Homo sapien
cgggctggacttccacacgcgctta

SEQ ID NO: 2154112 - DNA, 25 bp, Homo sapien
tcctcaagttcctgcgtctgataaa

SEQ ID NO: 2154113 - DNA, 25 bp, Homo sapien
tcctgcgtctgataaaatcaagtgc

SEQ ID NO: 2154114 - DNA, 25 bp, Homo sapien
ccactggatcagaaagtagtgcatc

SEQ ID NO: 2154115 - DNA, 25 bp, Homo sapien
cctcttccatctttatgcgtgcact

SEQ ID NO: 2154116 - DNA, 25 bp, Homo sapien
tcatcagaaggcttgctttgagcaa

SEQ ID NO: 2154117 - DNA, 25 bp, Homo sapien
gaaagtagtgcatcctcttccatct

SEQ ID NO: 2154118 - DNA, 25 bp, Homo sapien
tgaccttcagcaagggcctgacctc

SEQ ID NO: 2154119 - DNA, 25 bp, Homo sapien
cttcaacaagggactgaccttcagc

SEQ ID NO: 2154120 - DNA, 25 bp, Homo sapien
gcctgacctccagcagggaactgac

SEQ ID NO: 2154121 - DNA, 25 bp, Homo sapien
caagggactgaccttcagcaagggc

SEQ ID NO: 2154122 - DNA, 25 bp, Homo sapien
gactactccttgattaagatattca

SEQ ID NO: 2154123 - DNA, 25 bp, Homo sapien
tcatcttcagcaacgacctggcctt

SEQ ID NO: 2154124 - DNA, 25 bp, Homo sapien
cccaaagactactccttgattaaga

SEQ ID NO: 2154125 - DNA, 25 bp, Homo sapien
catcttcctcaaggggctcatcttc

SEQ ID NO: 2154126 - DNA, 25 bp, Homo sapien
cattatctgaagcatctgcgtggtc

SEQ ID NO: 2154127 - DNA, 25 bp, Homo sapien
tgggattacatcaagatagggagct

SEQ ID NO: 2154128 - DNA, 25 bp, Homo sapien
ggcttcatagtctgggatttcttca

SEQ ID NO: 2154129 - DNA, 25 bp, Homo sapien
ctccagggttcaggatttcttgcac

SEQ ID NO: 2154130 - DNA, 25 bp, Homo sapien
ttcaaaatcaaggtcttcctcagag

SEQ ID NO: 2154131 - DNA, 25 bp, Homo sapien
tcaaaatcaaggtcttcctcagagt

SEQ ID NO: 2154132 - DNA, 25 bp, Homo sapien
cttcaaaatcaaggtcttcctcaga

SEQ ID NO: 2154133 - DNA, 25 bp, Homo sapien
tcatgatttgggatttcatgtccac

SEQ ID NO: 2154134 - DNA, 25 bp, Homo sapien
cttggaaccacataaagagctgaga

SEQ ID NO: 2154135 - DNA, 25 bp, Homo sapien
tcttcatgatttgggatttcatgtc

SEQ ID NO: 2154136 - DNA, 25 bp, Homo sapien
attcttcatgatttgggatttcatg

SEQ ID NO: 2154137 - DNA, 25 bp, Homo sapien
tcaagactgggatcttcttcagggt

SEQ ID NO: 2154138 - DNA, 25 bp, Homo sapien
cttcaagactgggatcttcttcagg

SEQ ID NO: 2154139 - DNA, 25 bp, Homo sapien
ttcaagactgggatcttcttcaggg

SEQ ID NO: 2154140 - DNA, 25 bp, Homo sapien
ttttcagggcctgtgactacatgga

SEQ ID NO: 2154141 - DNA, 25 bp, Homo sapien
tggtttccactaacatcagaggctt

SEQ ID NO: 2154142 - DNA, 25 bp, Homo sapien
tttgggactccactcacatctgagg

SEQ ID NO: 2154143 - DNA, 25 bp, Homo sapien
tatctacagggaatgcaacatctgc

SEQ ID NO: 2154144 - DNA, 25 bp, Homo sapien
tataagaatactacagcctgacagc

SEQ ID NO: 2154145 - DNA, 25 bp, Homo sapien
gggaatggacaataccaccagggag

SEQ ID NO: 2154146 - DNA, 25 bp, Homo sapien
gacagataccctgcgctcagaggga

SEQ ID NO: 2154147 - DNA, 25 bp, Homo sapien
tctgaatctaggaccactgtgggaa

SEQ ID NO: 2154148 - DNA, 25 bp, Homo sapien
agggttacccgctccttcctcatcg

SEQ ID NO: 2154149 - DNA, 25 bp, Homo sapien
ggaacgggcagtgccggaaggcaca

SEQ ID NO: 2154150 - DNA, 25 bp, Homo sapien
agcaatgggcggtcttgctccggaa

SEQ ID NO: 2154151 - DNA, 25 bp, Homo sapien
tcttgctccggaatgggagggttac

SEQ ID NO: 2154152 - DNA, 25 bp, Homo sapien
aaagaagtagctgacgccagttttg

SEQ ID NO: 2154153 - DNA, 25 bp, Homo sapien
gtagctgacgccagttttggcctcc

SEQ ID NO: 2154154 - DNA, 25 bp, Homo sapien
aggaaagaagtagctgacgccagtt

SEQ ID NO: 2154155 - DNA, 25 bp, Homo sapien
agaagtagctgacgccagttttggc

SEQ ID NO: 2154156 - DNA, 25 bp, Homo sapien
ttgctgacaagagggtgtaaacacc

SEQ ID NO: 2154157 - DNA, 25 bp, Homo sapien
tgacccgagcatcaggtggaactcc

SEQ ID NO: 2154158 - DNA, 25 bp, Homo sapien
tccctgttggcgtgacctgagcaaa

SEQ ID NO: 2154159 - DNA, 25 bp, Homo sapien
ggagcttgggcatgacacagaaaca

SEQ ID NO: 2154160 - DNA, 25 bp, Homo sapien
agcagttgtcatccataatatcagc

SEQ ID NO: 2154161 - DNA, 25 bp, Homo sapien
gcagttgttacccattaaatgatca

SEQ ID NO: 2154162 - DNA, 25 bp, Homo sapien
tgtgtgttaccagagcatgtcccac

SEQ ID NO: 2154163 - DNA, 25 bp, Homo sapien
cattttatggaccttagcagttgtc

SEQ ID NO: 2154164 - DNA, 25 bp, Homo sapien
tcagagacttggataggaggataaa

SEQ ID NO: 2154165 - DNA, 25 bp, Homo sapien
taaggtgggttcatgtgaagcttca

SEQ ID NO: 2154166 - DNA, 25 bp, Homo sapien
cttcaggaagaagttgacaacattg

SEQ ID NO: 2154167 - DNA, 25 bp, Homo sapien
tctaggtgagggtaacagaagaaac

SEQ ID NO: 2154168 - DNA, 25 bp, Homo sapien
gaacccttgcctcggtgagcagagg

SEQ ID NO: 2154169 - DNA, 25 bp, Homo sapien
tggctcttcccccatatggtcatct

SEQ ID NO: 2154170 - DNA, 25 bp, Homo sapien
cagaacccttgcctcggtgagcaga

SEQ ID NO: 2154171 - DNA, 25 bp, Homo sapien
cccatatctgtgtcaggggaacaga

SEQ ID NO: 2154172 - DNA, 25 bp, Homo sapien
gataaactcggtcaccaccgtagtg

SEQ ID NO: 2154173 - DNA, 25 bp, Homo sapien
gatggctacataggtaaccccaaac

SEQ ID NO: 2154174 - DNA, 25 bp, Homo sapien
tgaggtctccaaaccccagtatgat

SEQ ID NO: 2154175 - DNA, 25 bp, Homo sapien
gggactcaattctttgaggtctcca

SEQ ID NO: 2154176 - DNA, 25 bp, Homo sapien
tttccgtcaacaggtccaccagcat

SEQ ID NO: 2154177 - DNA, 25 bp, Homo sapien
agtgtgaggtctccgtcgagtgctc

SEQ ID NO: 2154178 - DNA, 25 bp, Homo sapien
gcatgagaggttcaccaaaaagaac

SEQ ID NO: 2154179 - DNA, 25 bp, Homo sapien
aatgttggttgtataacagatctcc

SEQ ID NO: 2154180 - DNA, 25 bp, Homo sapien
ttaataatgcatgggctgatggata

SEQ ID NO: 2154181 - DNA, 25 bp, Homo sapien
ggctgatggatagccagatacccat

SEQ ID NO: 2154182 - DNA, 25 bp, Homo sapien
gctgcccaggaccaaaaataagtag

SEQ ID NO: 2154183 - DNA, 25 bp, Homo sapien
catcatataacatcattgccagtaa

SEQ ID NO: 2154184 - DNA, 25 bp, Homo sapien
gactcatgcagactaggttgaccag

SEQ ID NO: 2154185 - DNA, 25 bp, Homo sapien
gggcacagcatagaccaggatcaag

SEQ ID NO: 2154186 - DNA, 25 bp, Homo sapien
caaatttgataccatagcagcctgg

SEQ ID NO: 2154187 - DNA, 25 bp, Homo sapien
taaatggttaacctcatcgccaccg

SEQ ID NO: 2154188 - DNA, 25 bp, Homo sapien
tggatggagtcggagctccttagcc

SEQ ID NO: 2154189 - DNA, 25 bp, Homo sapien
gatctttctggagtccaaacacgat

SEQ ID NO: 2154190 - DNA, 25 bp, Homo sapien
ggagtccaaacacgatcctgtcctt

SEQ ID NO: 2154191 - DNA, 25 bp, Homo sapien
ctgtttatcatcctccttggttccc

SEQ ID NO: 2154192 - DNA, 25 bp, Homo sapien
gctcatgagtcagtgggcgctcgtc

SEQ ID NO: 2154193 - DNA, 25 bp, Homo sapien
tcccatcgtctacagcttgaaaagc

SEQ ID NO: 2154194 - DNA, 25 bp, Homo sapien
cattaaaaaggttgcgaggaggctc

SEQ ID NO: 2154195 - DNA, 25 bp, Homo sapien
tgtgtttagtgtcttcttccttgag

SEQ ID NO: 2154196 - DNA, 25 bp, Homo sapien
ctatatagttgccttgctggggaac

SEQ ID NO: 2154197 - DNA, 25 bp, Homo sapien
cattttgagcattaattctgattgg

SEQ ID NO: 2154198 - DNA, 25 bp, Homo sapien
ctctttactgattgaggatctttta

SEQ ID NO: 2154199 - DNA, 25 bp, Homo sapien
gagcattaattctgattggccggaa

SEQ ID NO: 2154200 - DNA, 25 bp, Homo sapien
tcttttagaacctccagccatcatt

SEQ ID NO: 2154201 - DNA, 25 bp, Homo sapien
gaagggtgcaaagcactctagctgc

SEQ ID NO: 2154202 - DNA, 25 bp, Homo sapien
gcaaagcactctagctgctgaccag

SEQ ID NO: 2154203 - DNA, 25 bp, Homo sapien
ctagctgctgaccagtggcagttca

SEQ ID NO: 2154204 - DNA, 25 bp, Homo sapien
ggtgcaaagcactctagctgctgac

SEQ ID NO: 2154205 - DNA, 25 bp, Homo sapien
tgtctgccctgatccacctcttctg

SEQ ID NO: 2154206 - DNA, 25 bp, Homo sapien
tgataaaatacccacagtacttctt

SEQ ID NO: 2154207 - DNA, 25 bp, Homo sapien
tgctgtcctcactccaatcgcaggc

SEQ ID NO: 2154208 - DNA, 25 bp, Homo sapien
cctggctccatgataaaatacccac

SEQ ID NO: 2154209 - DNA, 25 bp, Homo sapien
ctatatcaagtctgttcgaagaaaa

SEQ ID NO: 2154210 - DNA, 25 bp, Homo sapien
tcaagtctgttcgaagaaaaacaac

SEQ ID NO: 2154211 - DNA, 25 bp, Homo sapien
tatcaagtctgttcgaagaaaaaca

SEQ ID NO: 2154212 - DNA, 25 bp, Homo sapien
atatcaagtctgttcgaagaaaaac

SEQ ID NO: 2154213 - DNA, 25 bp, Homo sapien
gcaggaacagcgcttcagctctgct

SEQ ID NO: 2154214 - DNA, 25 bp, Homo sapien
gaaggcaggaacagcgcttcagctc

SEQ ID NO: 2154215 - DNA, 25 bp, Homo sapien
catgctaaaagcaagcagggcggct

SEQ ID NO: 2154216 - DNA, 25 bp, Homo sapien
tcacatgctaaaagcaagcagggcg

SEQ ID NO: 2154217 - DNA, 25 bp, Homo sapien
agacgctgggaccttggcgagcata

SEQ ID NO: 2154218 - DNA, 25 bp, Homo sapien
cccaaactgtaggagacgctgggac

SEQ ID NO: 2154219 - DNA, 25 bp, Homo sapien
ggcgagcataggaggaaaggtagga

SEQ ID NO: 2154220 - DNA, 25 bp, Homo sapien
aactgtaggagacgctgggaccttg

SEQ ID NO: 2154221 - DNA, 25 bp, Homo sapien
gtgctctctgttaaacagctcccac

SEQ ID NO: 2154222 - DNA, 25 bp, Homo sapien
tagggagcattagaagttcctgagt

SEQ ID NO: 2154223 - DNA, 25 bp, Homo sapien
gaagacctggtagggagcattagaa

SEQ ID NO: 2154224 - DNA, 25 bp, Homo sapien
cacacattaggggacttaataaggg

SEQ ID NO: 2154225 - DNA, 25 bp, Homo sapien
tacttttcattaaaggctctgtcaa

SEQ ID NO: 2154226 - DNA, 25 bp, Homo sapien
taatgtatcggtgtcccggacaatc

SEQ ID NO: 2154227 - DNA, 25 bp, Homo sapien
tagctttaatgtatcggtgtcccgg

SEQ ID NO: 2154228 - DNA, 25 bp, Homo sapien
ggtgtcccggacaatcttccttgtc

SEQ ID NO: 2154229 - DNA, 25 bp, Homo sapien
tcggtgtcccggacaatcttccttg

SEQ ID NO: 2154230 - DNA, 25 bp, Homo sapien
tggtgaggacaaaggttccatattt

SEQ ID NO: 2154231 - DNA, 25 bp, Homo sapien
gtgttctggtgaggacaaaggttcc

SEQ ID NO: 2154232 - DNA, 25 bp, Homo sapien
ccatgggtgaaacagccccctgtgt

SEQ ID NO: 2154233 - DNA, 25 bp, Homo sapien
gttctggtgaggacaaaggttccat

SEQ ID NO: 2154234 - DNA, 25 bp, Homo sapien
gctgatgataactggtggcttgctc

SEQ ID NO: 2154235 - DNA, 25 bp, Homo sapien
aactggtggcttgctccctttcata

SEQ ID NO: 2154236 - DNA, 25 bp, Homo sapien
cagttatcactgttgcgacagtggg

SEQ ID NO: 2154237 - DNA, 25 bp, Homo sapien
tggcttgctccctttcataacacat

SEQ ID NO: 2154238 - DNA, 25 bp, Homo sapien
cagctctctgaactcgctgggggct

SEQ ID NO: 2154239 - DNA, 25 bp, Homo sapien
agctctctgaactcgctgggggctg

SEQ ID NO: 2154240 - DNA, 25 bp, Homo sapien
tcagctctctgaactcgctgggggc

SEQ ID NO: 2154241 - DNA, 25 bp, Homo sapien
gctctctgaactcgctgggggctgc

SEQ ID NO: 2154242 - DNA, 25 bp, Homo sapien
ggcttttgtagcaagaattctgaga

SEQ ID NO: 2154243 - DNA, 25 bp, Homo sapien
gatcattgccttaatagaagacaca

SEQ ID NO: 2154244 - DNA, 25 bp, Homo sapien
tctgcctgttcagggatgcttgaag

SEQ ID NO: 2154245 - DNA, 25 bp, Homo sapien
gctgaccaccaatatatctgcctgt

SEQ ID NO: 2154246 - DNA, 25 bp, Homo sapien
aaaatggctggcgtaaacctggcat

SEQ ID NO: 2154247 - DNA, 25 bp, Homo sapien
ggaaaatggctggcgtaaacctggc

SEQ ID NO: 2154248 - DNA, 25 bp, Homo sapien
gaaaatggctggcgtaaacctggca

SEQ ID NO: 2154249 - DNA, 25 bp, Homo sapien
tctcaggcttaaggggaactccact

SEQ ID NO: 2154250 - DNA, 25 bp, Homo sapien
cgtataaccagacttggtctccagt

SEQ ID NO: 2154251 - DNA, 25 bp, Homo sapien
agtggcctctcaggcttaaggggaa

SEQ ID NO: 2154252 - DNA, 25 bp, Homo sapien
ctacagcgtataaccagacttggtc

SEQ ID NO: 2154253 - DNA, 25 bp, Homo sapien
tctacatggtccttgtggtttggca

SEQ ID NO: 2154254 - DNA, 25 bp, Homo sapien
tatagcttgttgtgcaatggaggaa

SEQ ID NO: 2154255 - DNA, 25 bp, Homo sapien
cattagcagaattgaaattcactca

SEQ ID NO: 2154256 - DNA, 25 bp, Homo sapien
ttgacactgtcgctccaaaataagg

SEQ ID NO: 2154257 - DNA, 25 bp, Homo sapien
aatccaaatttaaatcctatcttcg

SEQ ID NO: 2154258 - DNA, 25 bp, Homo sapien
tctccatgccctgtttgtccaagtt

SEQ ID NO: 2154259 - DNA, 25 bp, Homo sapien
aaatgtaaatccgaccacatcagcc

SEQ ID NO: 2154260 - DNA, 25 bp, Homo sapien
gaatccatcccggattttgtgaaat

SEQ ID NO: 2154261 - DNA, 25 bp, Homo sapien
ctttgcctttctgctcaatttccat

SEQ ID NO: 2154262 - DNA, 25 bp, Homo sapien
agatgggtttcctcacgttggccgg

SEQ ID NO: 2154263 - DNA, 25 bp, Homo sapien
tgcgcctggctagcattcccttttc

SEQ ID NO: 2154264 - DNA, 25 bp, Homo sapien
ggcagcctttgcatacgtcatagca

SEQ ID NO: 2154265 - DNA, 25 bp, Homo sapien
gcaaatgcatttaggaattgctcat

SEQ ID NO: 2154266 - DNA, 25 bp, Homo sapien
ctctgagtggcagcctttgcatacg

SEQ ID NO: 2154267 - DNA, 25 bp, Homo sapien
tacgtcatagcaaatgcatttagga

SEQ ID NO: 2154268 - DNA, 25 bp, Homo sapien
catagtgaccagatacgtgcataga

SEQ ID NO: 2154269 - DNA, 25 bp, Homo sapien
cagcatgaagataaactgctgctct

SEQ ID NO: 2154270 - DNA, 25 bp, Homo sapien
aatttagagacagtagttcaatttc

SEQ ID NO: 2154271 - DNA, 25 bp, Homo sapien
gttcaatttccttggtgcatggttc

SEQ ID NO: 2154272 - DNA, 25 bp, Homo sapien
gacgttagtgaaagatagattggca

SEQ ID NO: 2154273 - DNA, 25 bp, Homo sapien
tagtggttgtgatgcagacgttagt

SEQ ID NO: 2154274 - DNA, 25 bp, Homo sapien
gtgagcatcactgacaacggccagg

SEQ ID NO: 2154275 - DNA, 25 bp, Homo sapien
gaattctggctttgaatatctgcca

SEQ ID NO: 2154276 - DNA, 25 bp, Homo sapien
caatgatgaacccatagaagacctg

SEQ ID NO: 2154277 - DNA, 25 bp, Homo sapien
atgatgaacccatagaagacctggg

SEQ ID NO: 2154278 - DNA, 25 bp, Homo sapien
aatgatgaacccatagaagacctgg

SEQ ID NO: 2154279 - DNA, 25 bp, Homo sapien
tgatgaacccatagaagacctgggg

SEQ ID NO: 2154280 - DNA, 25 bp, Homo sapien
gataaatgatttgatcaagtgagtt

SEQ ID NO: 2154281 - DNA, 25 bp, Homo sapien
tacatgatagcagctacctcatccc

SEQ ID NO: 2154282 - DNA, 25 bp, Homo sapien
gatagcagctacctcatccctttct

SEQ ID NO: 2154283 - DNA, 25 bp, Homo sapien
gatttgatcaagtgagttacagttg

SEQ ID NO: 2154284 - DNA, 25 bp, Homo sapien
agtggtctcctcagtgctcctttca

SEQ ID NO: 2154285 - DNA, 25 bp, Homo sapien
gtgctcctttcatgtcctcgttcct

SEQ ID NO: 2154286 - DNA, 25 bp, Homo sapien
aaaaccttgtctgctgagtggtctc

SEQ ID NO: 2154287 - DNA, 25 bp, Homo sapien
tcctttcatgtcctcgttccttaga

SEQ ID NO: 2154288 - DNA, 25 bp, Homo sapien
ttaatacgagaatctctatggcagg

SEQ ID NO: 2154289 - DNA, 25 bp, Homo sapien
ggttaatacgagaatctctatggca

SEQ ID NO: 2154290 - DNA, 25 bp, Homo sapien
ctaaaaggttaatacgagaatctct

SEQ ID NO: 2154291 - DNA, 25 bp, Homo sapien
aaaggttaatacgagaatctctatg

SEQ ID NO: 2154292 - DNA, 25 bp, Homo sapien
aactgcatatgtttgtcctacaaca

SEQ ID NO: 2154293 - DNA, 25 bp, Homo sapien
caagaatcttgagtagttcagaagg

SEQ ID NO: 2154294 - DNA, 25 bp, Homo sapien
tctgtcatcaacttggtaagtgagt

SEQ ID NO: 2154295 - DNA, 25 bp, Homo sapien
tgtctgtcatcaacttggtaagtga

SEQ ID NO: 2154296 - DNA, 25 bp, Homo sapien
gaggtaaacttccagatgacttgca

SEQ ID NO: 2154297 - DNA, 25 bp, Homo sapien
caatataggtaatgtccttttggac

SEQ ID NO: 2154298 - DNA, 25 bp, Homo sapien
gtaatgtccttttggaccttcagca

SEQ ID NO: 2154299 - DNA, 25 bp, Homo sapien
taaatccctatccttcttgaggtaa

SEQ ID NO: 2154300 - DNA, 25 bp, Homo sapien
tttggatgagctcttgaccagtcat

SEQ ID NO: 2154301 - DNA, 25 bp, Homo sapien
tttcactgggtgcttcatttggatg

SEQ ID NO: 2154302 - DNA, 25 bp, Homo sapien
tagttgaatctaaaggttttcttgc

SEQ ID NO: 2154303 - DNA, 25 bp, Homo sapien
catcattgtcactttcttgaggatc

SEQ ID NO: 2154304 - DNA, 25 bp, Homo sapien
ggtgtgatagccatgaagaggcaca

SEQ ID NO: 2154305 - DNA, 25 bp, Homo sapien
tgatagccatgaagaggcacaccat

SEQ ID NO: 2154306 - DNA, 25 bp, Homo sapien
tgtgatagccatgaagaggcacacc

SEQ ID NO: 2154307 - DNA, 25 bp, Homo sapien
tggtgtgatagccatgaagaggcac

SEQ ID NO: 2154308 - DNA, 25 bp, Homo sapien
ggcaacctgccacctcgagcaactt

SEQ ID NO: 2154309 - DNA, 25 bp, Homo sapien
ctgcccaaagccaatgagctcagtt

SEQ ID NO: 2154310 - DNA, 25 bp, Homo sapien
tgccacctcgagcaactttgcttaa

SEQ ID NO: 2154311 - DNA, 25 bp, Homo sapien
tgcccaaagccaatgagctcagttt

SEQ ID NO: 2154312 - DNA, 25 bp, Homo sapien
tgttgacttcggagaaggagattgt

SEQ ID NO: 2154313 - DNA, 25 bp, Homo sapien
aaggagattgtactgagatagggac

SEQ ID NO: 2154314 - DNA, 25 bp, Homo sapien
gaaggagattgtactgagataggga

SEQ ID NO: 2154315 - DNA, 25 bp, Homo sapien
gagaaggagattgtactgagatagg

SEQ ID NO: 2154316 - DNA, 25 bp, Homo sapien
tgctcataatattcctgtattatcc

SEQ ID NO: 2154317 - DNA, 25 bp, Homo sapien
agtgatggctcctatttcatttaat

SEQ ID NO: 2154318 - DNA, 25 bp, Homo sapien
tatccttggaatcagtagtctgtgg

SEQ ID NO: 2154319 - DNA, 25 bp, Homo sapien
tgtggaatcagtagtgatggctcct

SEQ ID NO: 2154320 - DNA, 25 bp, Homo sapien
gagactggcatgcattaatgatgga

SEQ ID NO: 2154321 - DNA, 25 bp, Homo sapien
taatgatggatggttaataaggtct

SEQ ID NO: 2154322 - DNA, 25 bp, Homo sapien
tttgcattttgtcaaggagactggc

SEQ ID NO: 2154323 - DNA, 25 bp, Homo sapien
taaggtctatcatttgggtggagta

SEQ ID NO: 2154324 - DNA, 25 bp, Homo sapien
aagttgtcgttggaaaactgtcatc

SEQ ID NO: 2154325 - DNA, 25 bp, Homo sapien
agtgagacacccaaatagcatcttg

SEQ ID NO: 2154326 - DNA, 25 bp, Homo sapien
gccaagttgctgtaggagacagtga

SEQ ID NO: 2154327 - DNA, 25 bp, Homo sapien
catcttatagaagccagttgcaagg

SEQ ID NO: 2154328 - DNA, 25 bp, Homo sapien
attatcttctgagagcttcagggac

SEQ ID NO: 2154329 - DNA, 25 bp, Homo sapien
aataattatcttctgagagcttcag

SEQ ID NO: 2154330 - DNA, 25 bp, Homo sapien
tcttctgagagcttcagggacctca

SEQ ID NO: 2154331 - DNA, 25 bp, Homo sapien
cttctgagagcttcagggacctcat

SEQ ID NO: 2154332 - DNA, 25 bp, Homo sapien
tgaaacactgctgtgacattgtcca

SEQ ID NO: 2154333 - DNA, 25 bp, Homo sapien
gaaaaacgtgtctctccattgagga

SEQ ID NO: 2154334 - DNA, 25 bp, Homo sapien
cccaacaatgtgctgaggtaaatta

SEQ ID NO: 2154335 - DNA, 25 bp, Homo sapien
ggtagagaaacaatgcaccaaagcc

SEQ ID NO: 2154336 - DNA, 25 bp, Homo sapien
tgctgatagcaaccacacggtcata

SEQ ID NO: 2154337 - DNA, 25 bp, Homo sapien
tggcagtgagcacaagtgatgtccc

SEQ ID NO: 2154338 - DNA, 25 bp, Homo sapien
ccccatgaggtagcaaccaagcaga

SEQ ID NO: 2154339 - DNA, 25 bp, Homo sapien
gaacaggtcagcttaatgagggaga

SEQ ID NO: 2154340 - DNA, 25 bp, Homo sapien
catagcaattcgtatgtaggagagg

SEQ ID NO: 2154341 - DNA, 25 bp, Homo sapien
tgccctggagtgagcgaatccttat

SEQ ID NO: 2154342 - DNA, 25 bp, Homo sapien
gagcgaatccttatgatagccatag

SEQ ID NO: 2154343 - DNA, 25 bp, Homo sapien
tatgatagccatagcaattcgtatg

SEQ ID NO: 2154344 - DNA, 25 bp, Homo sapien
catatacatggagatggctgaccca

SEQ ID NO: 2154345 - DNA, 25 bp, Homo sapien
gccacatgtggtaaaggccttgagc

SEQ ID NO: 2154346 - DNA, 25 bp, Homo sapien
cactgagataaacttgtcctggtca

SEQ ID NO: 2154347 - DNA, 25 bp, Homo sapien
gacccatagaagattgtcaccacgg

SEQ ID NO: 2154348 - DNA, 25 bp, Homo sapien
cattatcaataaccagaatatccat

SEQ ID NO: 2154349 - DNA, 25 bp, Homo sapien
tgccattatcaataaccagaatatc

SEQ ID NO: 2154350 - DNA, 25 bp, Homo sapien
tatcaataaccagaatatccatttt

SEQ ID NO: 2154351 - DNA, 25 bp, Homo sapien
tcaataaccagaatatccattttgt

SEQ ID NO: 2154352 - DNA, 25 bp, Homo sapien
cataggagtgtgaagccacccatca

SEQ ID NO: 2154353 - DNA, 25 bp, Homo sapien
taccatggtgcgataaaaggcaatc

SEQ ID NO: 2154354 - DNA, 25 bp, Homo sapien
tgagactgctaccaacaaatgtgat

SEQ ID NO: 2154355 - DNA, 25 bp, Homo sapien
gatggttgtacaaacccaccaggat

SEQ ID NO: 2154356 - DNA, 25 bp, Homo sapien
cgcaggggattggagatcacaacaa

SEQ ID NO: 2154357 - DNA, 25 bp, Homo sapien
taatgatgatgtagcgcaggggatt

SEQ ID NO: 2154358 - DNA, 25 bp, Homo sapien
gattggagatcacaacaaatctctc

SEQ ID NO: 2154359 - DNA, 25 bp, Homo sapien
tagcgcaggggattggagatcacaa

SEQ ID NO: 2154360 - DNA, 25 bp, Homo sapien
cacaatgtgagcataggcgaagagg

SEQ ID NO: 2154361 - DNA, 25 bp, Homo sapien
ggacaaggtgaatatgccgatgact

SEQ ID NO: 2154362 - DNA, 25 bp, Homo sapien
tgggattcccttgactgaggtttca

SEQ ID NO: 2154363 - DNA, 25 bp, Homo sapien
caagtacatgtaggtggctgtccca

SEQ ID NO: 2154364 - DNA, 25 bp, Homo sapien
ttcaaaaaaaatacagagatgactt

SEQ ID NO: 2154365 - DNA, 25 bp, Homo sapien
caaaaaaaatacagagatgacttta

SEQ ID NO: 2154366 - DNA, 25 bp, Homo sapien
tttcaaaaaaaatacagagatgact

SEQ ID NO: 2154367 - DNA, 25 bp, Homo sapien
tcaaaaaaaatacagagatgacttt

SEQ ID NO: 2154368 - DNA, 25 bp, Homo sapien
ttgaaaatatatctgagatctgcat

SEQ ID NO: 2154369 - DNA, 25 bp, Homo sapien
tagttgaaaatatatctgagatctg

SEQ ID NO: 2154370 - DNA, 25 bp, Homo sapien
tattcgtagttgaaaatatatctga

SEQ ID NO: 2154371 - DNA, 25 bp, Homo sapien
ctattcgtagttgaaaatatatctg

SEQ ID NO: 2154372 - DNA, 25 bp, Homo sapien
gattcaggtgaggtagagctcttca

SEQ ID NO: 2154373 - DNA, 25 bp, Homo sapien
gagctcttcaaagaaatttccacac

SEQ ID NO: 2154374 - DNA, 25 bp, Homo sapien
tacttggcccagaatgatgttataa

SEQ ID NO: 2154375 - DNA, 25 bp, Homo sapien
ctgattccatatcgataataagaga

SEQ ID NO: 2154376 - DNA, 25 bp, Homo sapien
gggtttgaagatgggaatcaatctg

SEQ ID NO: 2154377 - DNA, 25 bp, Homo sapien
tggagcagatatctaagaaggatac

SEQ ID NO: 2154378 - DNA, 25 bp, Homo sapien
cagggtgacagagtagatgaacaat

SEQ ID NO: 2154379 - DNA, 25 bp, Homo sapien
tagcagttcaccagaaccgtgggtg

SEQ ID NO: 2154380 - DNA, 25 bp, Homo sapien
cagccactgttatttgttccttggg

SEQ ID NO: 2154381 - DNA, 25 bp, Homo sapien
aggcagccactgttatttgttcctt

SEQ ID NO: 2154382 - DNA, 25 bp, Homo sapien
gccactgttatttgttccttgggca

SEQ ID NO: 2154383 - DNA, 25 bp, Homo sapien
cactgttatttgttccttgggcatt

SEQ ID NO: 2154384 - DNA, 25 bp, Homo sapien
ctgaagactgtcacatatcagcaca

SEQ ID NO: 2154385 - DNA, 25 bp, Homo sapien
ttaatgggtcatgccatctaagaaa

SEQ ID NO: 2154386 - DNA, 25 bp, Homo sapien
acctggagcaatatttaatgggtca

SEQ ID NO: 2154387 - DNA, 25 bp, Homo sapien
cacagaatgcacagtaggctttttc

SEQ ID NO: 2154388 - DNA, 25 bp, Homo sapien
aaacattccgttgatcccacagtcc

SEQ ID NO: 2154389 - DNA, 25 bp, Homo sapien
gtcctggaaacattccgttgatccc

SEQ ID NO: 2154390 - DNA, 25 bp, Homo sapien
gagaaagtcatctttaaagaagcct

SEQ ID NO: 2154391 - DNA, 25 bp, Homo sapien
tgagaaagtcatctttaaagaagcc

SEQ ID NO: 2154392 - DNA, 25 bp, Homo sapien
cacaaatgactaatctccaagaaga

SEQ ID NO: 2154393 - DNA, 25 bp, Homo sapien
ggacagcaacagagaagtgcacctc

SEQ ID NO: 2154394 - DNA, 25 bp, Homo sapien
gcacctcattcataacagaagcatt

SEQ ID NO: 2154395 - DNA, 25 bp, Homo sapien
agcattttgcagttggcgacacccc

SEQ ID NO: 2154396 - DNA, 25 bp, Homo sapien
aactgtatacagacccgattgctca

SEQ ID NO: 2154397 - DNA, 25 bp, Homo sapien
ccataataactagcaggaattgcaa

SEQ ID NO: 2154398 - DNA, 25 bp, Homo sapien
gagataagagatttcaacaaacctg

SEQ ID NO: 2154399 - DNA, 25 bp, Homo sapien
gaaggcatgggtccagattcccaag

SEQ ID NO: 2154400 - DNA, 25 bp, Homo sapien
tttcaagtacatgcagatggctgcc

SEQ ID NO: 2154401 - DNA, 25 bp, Homo sapien
ggagaaagcttcacgcctagcctcc

SEQ ID NO: 2154402 - DNA, 25 bp, Homo sapien
gatggctgccccataaaatatggtg

SEQ ID NO: 2154403 - DNA, 25 bp, Homo sapien
tgggttccctttgactgaggtttca

SEQ ID NO: 2154404 - DNA, 25 bp, Homo sapien
ttccaaggtggctgcctccttcttc

SEQ ID NO: 2154405 - DNA, 25 bp, Homo sapien
cttctccccttcagggttttctgct

SEQ ID NO: 2154406 - DNA, 25 bp, Homo sapien
ctgcctccttcttctccccttcagg

SEQ ID NO: 2154407 - DNA, 25 bp, Homo sapien
cttccaaggtggctgcctccttctt

SEQ ID NO: 2154408 - DNA, 25 bp, Homo sapien
cttggagtgggaatagtgagtggaa

SEQ ID NO: 2154409 - DNA, 25 bp, Homo sapien
tcaatctccatggtctgggcttgga

SEQ ID NO: 2154410 - DNA, 25 bp, Homo sapien
ggcttggagtgggaatagtgagtgg

SEQ ID NO: 2154411 - DNA, 25 bp, Homo sapien
caggtcaatctccatggtctgggct

SEQ ID NO: 2154412 - DNA, 25 bp, Homo sapien
atcttttgatgataaactacaactc

SEQ ID NO: 2154413 - DNA, 25 bp, Homo sapien
ttgattacaaatcggatctggtgac

SEQ ID NO: 2154414 - DNA, 25 bp, Homo sapien
aaggaaggagcagaatgcggagcac

SEQ ID NO: 2154415 - DNA, 25 bp, Homo sapien
agtcataaagccctaaatagtaggg

SEQ ID NO: 2154416 - DNA, 25 bp, Homo sapien
cactgatactcctcgagttatatta

SEQ ID NO: 2154417 - DNA, 25 bp, Homo sapien
atccactgatactcctcgagttata

SEQ ID NO: 2154418 - DNA, 25 bp, Homo sapien
ctcgagttatattatgtttcatgtc

SEQ ID NO: 2154419 - DNA, 25 bp, Homo sapien
tactcctcgagttatattatgtttc

SEQ ID NO: 2154420 - DNA, 25 bp, Homo sapien
gagtcattatgaatttcaaccctgc

SEQ ID NO: 2154421 - DNA, 25 bp, Homo sapien
atataatcttcaggaggatcttgag

SEQ ID NO: 2154422 - DNA, 25 bp, Homo sapien
cattggtctatacgaggatgaacgt

SEQ ID NO: 2154423 - DNA, 25 bp, Homo sapien
ttttctataccagccaatgccattt

SEQ ID NO: 2154424 - DNA, 25 bp, Homo sapien
caagagagccaaagacccgtagtaa

SEQ ID NO: 2154425 - DNA, 25 bp, Homo sapien
ttattgtgcgcggatactgatgcca

SEQ ID NO: 2154426 - DNA, 25 bp, Homo sapien
gaggctttaaaagagacctggacat

SEQ ID NO: 2154427 - DNA, 25 bp, Homo sapien
ctgggagtccttgcttagtctcgtt

SEQ ID NO: 2154428 - DNA, 25 bp, Homo sapien
gcaggtgtggtctggtaaaaggtgg

SEQ ID NO: 2154429 - DNA, 25 bp, Homo sapien
aaggtggaagagggttcgcctccat

SEQ ID NO: 2154430 - DNA, 25 bp, Homo sapien
tggggcaggtgtggtctggtaaaag

SEQ ID NO: 2154431 - DNA, 25 bp, Homo sapien
tgttggggcaggtgtggtctggtaa

SEQ ID NO: 2154432 - DNA, 25 bp, Homo sapien
gacacaagttggcattcctaccctt

SEQ ID NO: 2154433 - DNA, 25 bp, Homo sapien
ttcatagcatccgaagccgtgagca

SEQ ID NO: 2154434 - DNA, 25 bp, Homo sapien
ctagcgctacttggcttttctggga

SEQ ID NO: 2154435 - DNA, 25 bp, Homo sapien
gagcatttcctccacgtaaacccta

SEQ ID NO: 2154436 - DNA, 25 bp, Homo sapien
gaggaaccaagtttccgctccacga

SEQ ID NO: 2154437 - DNA, 25 bp, Homo sapien
caatgtccctgtctcttttcaggcc

SEQ ID NO: 2154438 - DNA, 25 bp, Homo sapien
tttcaggccttagaggaaaaggcag

SEQ ID NO: 2154439 - DNA, 25 bp, Homo sapien
cacagggaggctttccgagaaggac

SEQ ID NO: 2154440 - DNA, 25 bp, Homo sapien
actgtgttccttgtgagcgatattg

SEQ ID NO: 2154441 - DNA, 25 bp, Homo sapien
gtgttccttgtgagcgatattgatg

SEQ ID NO: 2154442 - DNA, 25 bp, Homo sapien
cttcccttggaataactgtgttcct

SEQ ID NO: 2154443 - DNA, 25 bp, Homo sapien
taactgtgttccttgtgagcgatat

SEQ ID NO: 2154444 - DNA, 25 bp, Homo sapien
tggaagaggcttgggctccatgctc

SEQ ID NO: 2154445 - DNA, 25 bp, Homo sapien
cttctcgtctaaggccttaaaagag

SEQ ID NO: 2154446 - DNA, 25 bp, Homo sapien
cagagtccctgccttctcgtctaag

SEQ ID NO: 2154447 - DNA, 25 bp, Homo sapien
gacgtggacattggcggtaccttgc

SEQ ID NO: 2154448 - DNA, 25 bp, Homo sapien
tacatgggtcgtcttgtgaggacta

SEQ ID NO: 2154449 - DNA, 25 bp, Homo sapien
acatgggtcgtcttgtgaggactac

SEQ ID NO: 2154450 - DNA, 25 bp, Homo sapien
ttacatgggtcgtcttgtgaggact

SEQ ID NO: 2154451 - DNA, 25 bp, Homo sapien
ggctctttgtctatgtgtggcgttt

SEQ ID NO: 2154452 - DNA, 25 bp, Homo sapien
gagaagagggctacgtaacaggact

SEQ ID NO: 2154453 - DNA, 25 bp, Homo sapien
catccatgtttggtggctctttgtc

SEQ ID NO: 2154454 - DNA, 25 bp, Homo sapien
gagcactactgccatcacgaggaag

SEQ ID NO: 2154455 - DNA, 25 bp, Homo sapien
aggccccgccctacgtcttcctgtg

SEQ ID NO: 2154456 - DNA, 25 bp, Homo sapien
gtgtgtttgaatgggtgccttcagt

SEQ ID NO: 2154457 - DNA, 25 bp, Homo sapien
gctgctggttcactacaagcccctc

SEQ ID NO: 2154458 - DNA, 25 bp, Homo sapien
tgcccacacttggaggaaccgaggc

SEQ ID NO: 2154459 - DNA, 25 bp, Homo sapien
tacgccattacggtgttctcctgag

SEQ ID NO: 2154460 - DNA, 25 bp, Homo sapien
gatgctagttcgagaaagcctgctg

SEQ ID NO: 2154461 - DNA, 25 bp, Homo sapien
cccaaagacccgtagcaagatgcta

SEQ ID NO: 2154462 - DNA, 25 bp, Homo sapien
taaacctgttgtttgtgcgcggtac

SEQ ID NO: 2154463 - DNA, 25 bp, Homo sapien
gatgccacggaaattactggtcctg

SEQ ID NO: 2154464 - DNA, 25 bp, Homo sapien
ctataggtggcgttttctcagacag

SEQ ID NO: 2154465 - DNA, 25 bp, Homo sapien
gatcaagattcctgatggaggcagg

SEQ ID NO: 2154466 - DNA, 25 bp, Homo sapien
taagaccagctgactaccaactggg

SEQ ID NO: 2154467 - DNA, 25 bp, Homo sapien
gaatagcgcctagagcaaagtcagt

SEQ ID NO: 2154468 - DNA, 25 bp, Homo sapien
cagtttcgtagcatccaaagccgtg

SEQ ID NO: 2154469 - DNA, 25 bp, Homo sapien
gctaagagtggaataagtttacaca

SEQ ID NO: 2154470 - DNA, 25 bp, Homo sapien
ggtgagtggatcacacctcggttta

SEQ ID NO: 2154471 - DNA, 25 bp, Homo sapien
ttaggtagccatagtttctggtgtc

SEQ ID NO: 2154472 - DNA, 25 bp, Homo sapien
aatagtttcatagcgtccaaagccg

SEQ ID NO: 2154473 - DNA, 25 bp, Homo sapien
tagttggcttttctcgtacaatact

SEQ ID NO: 2154474 - DNA, 25 bp, Homo sapien
gagctcctggagcaaagttagttgg

SEQ ID NO: 2154475 - DNA, 25 bp, Homo sapien
cagacctgtcccaacaggtagccca

SEQ ID NO: 2154476 - DNA, 25 bp, Homo sapien
gacctgtcccaacaggtagcccaca

SEQ ID NO: 2154477 - DNA, 25 bp, Homo sapien
gaccagacctgtcccaacaggtagc

SEQ ID NO: 2154478 - DNA, 25 bp, Homo sapien
cagaccagacctgtcccaacaggta

SEQ ID NO: 2154479 - DNA, 25 bp, Homo sapien
cctctcaaagacacatgtaggctct

SEQ ID NO: 2154480 - DNA, 25 bp, Homo sapien
cttatgggcatctctttgctgttcc

SEQ ID NO: 2154481 - DNA, 25 bp, Homo sapien
gacacatgtaggctcttatgggcat

SEQ ID NO: 2154482 - DNA, 25 bp, Homo sapien
cagcagaaaccctctcaaagacaca

SEQ ID NO: 2154483 - DNA, 25 bp, Homo sapien
caggaagtcgtgggtcggggcctca

SEQ ID NO: 2154484 - DNA, 25 bp, Homo sapien
aggaagtcgtgggtcggggcctcag

SEQ ID NO: 2154485 - DNA, 25 bp, Homo sapien
gaactggaatttggcggtatcttgg

SEQ ID NO: 2154486 - DNA, 25 bp, Homo sapien
gattgggctccagactaggtcttgt

SEQ ID NO: 2154487 - DNA, 25 bp, Homo sapien
agaactggaatttggcggtatcttg

SEQ ID NO: 2154488 - DNA, 25 bp, Homo sapien
gactaggtcttgttgccttctcctc

SEQ ID NO: 2154489 - DNA, 25 bp, Homo sapien
gcctgggccatcggcttcccttgtg

SEQ ID NO: 2154490 - DNA, 25 bp, Homo sapien
actggcctgggccatcggcttccct

SEQ ID NO: 2154491 - DNA, 25 bp, Homo sapien
tggcctgggccatcggcttcccttg

SEQ ID NO: 2154492 - DNA, 25 bp, Homo sapien
ggactggcctgggccatcggcttcc

SEQ ID NO: 2154493 - DNA, 25 bp, Homo sapien
gggattctcgcaggagccacagcta

SEQ ID NO: 2154494 - DNA, 25 bp, Homo sapien
gccacagctaacaaggcttcccata

SEQ ID NO: 2154495 - DNA, 25 bp, Homo sapien
gagggcaagaaatgcccgcgtcctc

SEQ ID NO: 2154496 - DNA, 25 bp, Homo sapien
caaggcttcccataacaggacccag

SEQ ID NO: 2154497 - DNA, 25 bp, Homo sapien
catcggtcaccattagatatgcagg

SEQ ID NO: 2154498 - DNA, 25 bp, Homo sapien
ccaaggagtccgtgcatgaggaaaa

SEQ ID NO: 2154499 - DNA, 25 bp, Homo sapien
tgatacaaggttcaagtcccaagga

SEQ ID NO: 2154500 - DNA, 25 bp, Homo sapien
gaggcttggctatctgtctccatca

SEQ ID NO: 2154501 - DNA, 25 bp, Homo sapien
tcgcttcacttctccatacatggct

SEQ ID NO: 2154502 - DNA, 25 bp, Homo sapien
cacttctccatacatggctgttata

SEQ ID NO: 2154503 - DNA, 25 bp, Homo sapien
ccatacatggctgttatagcaggta

SEQ ID NO: 2154504 - DNA, 25 bp, Homo sapien
tgtgacctcgcttcacttctccata

SEQ ID NO: 2154505 - DNA, 25 bp, Homo sapien
aacctttgatggagtacgtgtttgg

SEQ ID NO: 2154506 - DNA, 25 bp, Homo sapien
acctttgatggagtacgtgtttggg

SEQ ID NO: 2154507 - DNA, 25 bp, Homo sapien
ctttgatggagtacgtgtttgggtc

SEQ ID NO: 2154508 - DNA, 25 bp, Homo sapien
gatggagtacgtgtttgggtcacag

SEQ ID NO: 2154509 - DNA, 25 bp, Homo sapien
tcactgaggaatgatttccactggt

SEQ ID NO: 2154510 - DNA, 25 bp, Homo sapien
ttcactgaggaatgatttccactgg

SEQ ID NO: 2154511 - DNA, 25 bp, Homo sapien
cagggaggcattcagggcacacaca

SEQ ID NO: 2154512 - DNA, 25 bp, Homo sapien
ctggcagggaggcattcagggcaca

SEQ ID NO: 2154513 - DNA, 25 bp, Homo sapien
aggcattcagggcacacacagccga

SEQ ID NO: 2154514 - DNA, 25 bp, Homo sapien
gaggcattcagggcacacacagccg

SEQ ID NO: 2154515 - DNA, 25 bp, Homo sapien
aggccagaccgagcccttcatgctt

SEQ ID NO: 2154516 - DNA, 25 bp, Homo sapien
tcccttcggaacgtggctgccgagg

SEQ ID NO: 2154517 - DNA, 25 bp, Homo sapien
ctactccaccctgtgggttcagctg

SEQ ID NO: 2154518 - DNA, 25 bp, Homo sapien
cataaaggcttcactgcgctcctgc

SEQ ID NO: 2154519 - DNA, 25 bp, Homo sapien
gtggagatgaacattcacactgtgg

SEQ ID NO: 2154520 - DNA, 25 bp, Homo sapien
acgcagtaacagcaacaccaaagct

SEQ ID NO: 2154521 - DNA, 25 bp, Homo sapien
ctacgcagtaacagcaacaccaaag

SEQ ID NO: 2154522 - DNA, 25 bp, Homo sapien
tacgcagtaacagcaacaccaaagc

SEQ ID NO: 2154523 - DNA, 25 bp, Homo sapien
gctggcttttggagaacgatgccta

SEQ ID NO: 2154524 - DNA, 25 bp, Homo sapien
cactaggacactgaaaaagtcagca

SEQ ID NO: 2154525 - DNA, 25 bp, Homo sapien
gatgcctaattccacatcggagact

SEQ ID NO: 2154526 - DNA, 25 bp, Homo sapien
tatagtttagtaagctctccaaagg

SEQ ID NO: 2154527 - DNA, 25 bp, Homo sapien
gctgtcattgtaaacacatattgaa

SEQ ID NO: 2154528 - DNA, 25 bp, Homo sapien
taaggacagtgtttatgtctctgtt

SEQ ID NO: 2154529 - DNA, 25 bp, Homo sapien
catctgttcaaacagtacttcagta

SEQ ID NO: 2154530 - DNA, 25 bp, Homo sapien
gcaacattgcatgagatgagctatt

SEQ ID NO: 2154531 - DNA, 25 bp, Homo sapien
tatgaagtaatactagtcgagtttc

SEQ ID NO: 2154532 - DNA, 25 bp, Homo sapien
gaagtaatactagtcgagtttcagg

SEQ ID NO: 2154533 - DNA, 25 bp, Homo sapien
gaaattatgaagtaatactagtcga

SEQ ID NO: 2154534 - DNA, 25 bp, Homo sapien
aatactagtcgagtttcaggatgca

SEQ ID NO: 2154535 - DNA, 25 bp, Homo sapien
taaagattagaggaaccaggtccag

SEQ ID NO: 2154536 - DNA, 25 bp, Homo sapien
accaggtccaggaggtttagcactg

SEQ ID NO: 2154537 - DNA, 25 bp, Homo sapien
atcatgaaatcagaagacagcagcc

SEQ ID NO: 2154538 - DNA, 25 bp, Homo sapien
ggtagactctatgtttgggaatccc

SEQ ID NO: 2154539 - DNA, 25 bp, Homo sapien
caccctctagcttggttaacagtaa

SEQ ID NO: 2154540 - DNA, 25 bp, Homo sapien
tgtcatctggttttctggctacaga

SEQ ID NO: 2154541 - DNA, 25 bp, Homo sapien
catagtcagtatgtcctgcttagtg

SEQ ID NO: 2154542 - DNA, 25 bp, Homo sapien
gcttagtgcccaaaatatcagacaa

SEQ ID NO: 2154543 - DNA, 25 bp, Homo sapien
aagggtgtacttgagcacgcaagag

SEQ ID NO: 2154544 - DNA, 25 bp, Homo sapien
acccccgtaactatggaatattgat

SEQ ID NO: 2154545 - DNA, 25 bp, Homo sapien
tgaagggtgtacttgagcacgcaag

SEQ ID NO: 2154546 - DNA, 25 bp, Homo sapien
tcacaggatccacagaacccccgta

SEQ ID NO: 2154547 - DNA, 25 bp, Homo sapien
tagtcccgtaaattttgctgccgta

SEQ ID NO: 2154548 - DNA, 25 bp, Homo sapien
tgctgtctacaaaagctgtttcatc

SEQ ID NO: 2154549 - DNA, 25 bp, Homo sapien
ttctttaaggatacagacaagtact

SEQ ID NO: 2154550 - DNA, 25 bp, Homo sapien
gctatgcctctctttagagccttag

SEQ ID NO: 2154551 - DNA, 25 bp, Homo sapien
tcccacatactccttataaacactt

SEQ ID NO: 2154552 - DNA, 25 bp, Homo sapien
ctggttcaggcaaggttcaggaatc

SEQ ID NO: 2154553 - DNA, 25 bp, Homo sapien
ttcaggcaaggttcaggaatctgag

SEQ ID NO: 2154554 - DNA, 25 bp, Homo sapien
tcaggcaaggttcaggaatctgaga

SEQ ID NO: 2154555 - DNA, 25 bp, Homo sapien
ggttcaggcaaggttcaggaatctg

SEQ ID NO: 2154556 - DNA, 25 bp, Homo sapien
attgagtactggctatgtggaaacc

SEQ ID NO: 2154557 - DNA, 25 bp, Homo sapien
gaaactggtgctagatttctggcaa

SEQ ID NO: 2154558 - DNA, 25 bp, Homo sapien
caaatagctttaggcccatggagtc

SEQ ID NO: 2154559 - DNA, 25 bp, Homo sapien
tggcaaaaggaactgagcaacatct

SEQ ID NO: 2154560 - DNA, 25 bp, Homo sapien
tagttgtccaggaaaactcagaatg

SEQ ID NO: 2154561 - DNA, 25 bp, Homo sapien
gagtctagacagctgacagttgtag

SEQ ID NO: 2154562 - DNA, 25 bp, Homo sapien
ttgggaatgcagtaggatgaagaaa

SEQ ID NO: 2154563 - DNA, 25 bp, Homo sapien
ctcagaatgatctacatcagggtga

SEQ ID NO: 2154564 - DNA, 25 bp, Homo sapien
ataacctctgacaaccatttcctgc

SEQ ID NO: 2154565 - DNA, 25 bp, Homo sapien
tcctgcttggcagcatagggaagag

SEQ ID NO: 2154566 - DNA, 25 bp, Homo sapien
tgcacaataacctctgacaaccatt

SEQ ID NO: 2154567 - DNA, 25 bp, Homo sapien
ggagtgtgggtgatcgacttgtcat

SEQ ID NO: 2154568 - DNA, 25 bp, Homo sapien
gacatcactgatgaccaagtcaaag

SEQ ID NO: 2154569 - DNA, 25 bp, Homo sapien
tcagaatacaagtttgagggcaaga

SEQ ID NO: 2154570 - DNA, 25 bp, Homo sapien
tcactgatgaccaagtcaaaggtca

SEQ ID NO: 2154571 - DNA, 25 bp, Homo sapien
atacaagtttgagggcaagacatca

SEQ ID NO: 2154572 - DNA, 25 bp, Homo sapien
tggttgcccaatcactgtatacaga

SEQ ID NO: 2154573 - DNA, 25 bp, Homo sapien
tgtatacagaagagccaactgaatt

SEQ ID NO: 2154574 - DNA, 25 bp, Homo sapien
tgtagcctcttgataccactttcgg

SEQ ID NO: 2154575 - DNA, 25 bp, Homo sapien
tctgacttgagagatttgtagcctc

SEQ ID NO: 2154576 - DNA, 25 bp, Homo sapien
cccaggcttgttgaagcggtgtaca

SEQ ID NO: 2154577 - DNA, 25 bp, Homo sapien
cagtgtcagcactaaggttaccatg

SEQ ID NO: 2154578 - DNA, 25 bp, Homo sapien
aaagtgggtgcttctccggatggag

SEQ ID NO: 2154579 - DNA, 25 bp, Homo sapien
agcactaaggttaccatgggcccag

SEQ ID NO: 2154580 - DNA, 25 bp, Homo sapien
agaatcagactgttgacctttagat

SEQ ID NO: 2154581 - DNA, 25 bp, Homo sapien
gatgccttggacctaaggtgaaggc

SEQ ID NO: 2154582 - DNA, 25 bp, Homo sapien
tgccttggacctaaggtgaaggccc

SEQ ID NO: 2154583 - DNA, 25 bp, Homo sapien
tagatgccttggacctaaggtgaag

SEQ ID NO: 2154584 - DNA, 25 bp, Homo sapien
accctgagggtatgagggcgcccca

SEQ ID NO: 2154585 - DNA, 25 bp, Homo sapien
cgccccagatgcggccacgttgcag

SEQ ID NO: 2154586 - DNA, 25 bp, Homo sapien
gcgtgcgaggctggggcacacgcag

SEQ ID NO: 2154587 - DNA, 25 bp, Homo sapien
tgggaaaccctgagggtatgagggc

SEQ ID NO: 2154588 - DNA, 25 bp, Homo sapien
gggacccggagacctgggacatggc

SEQ ID NO: 2154589 - DNA, 25 bp, Homo sapien
ctccaggcagcgaagaggtttggct

SEQ ID NO: 2154590 - DNA, 25 bp, Homo sapien
aagctggagactctcccggcacgcg

SEQ ID NO: 2154591 - DNA, 25 bp, Homo sapien
tcccggcacgcggagaggagaaccc

SEQ ID NO: 2154592 - DNA, 25 bp, Homo sapien
agccacccgcctgctcgcctggcct

SEQ ID NO: 2154593 - DNA, 25 bp, Homo sapien
cagccacccgcctgctcgcctggcc

SEQ ID NO: 2154594 - DNA, 25 bp, Homo sapien
cacccgcctgctcgcctggcctggg

SEQ ID NO: 2154595 - DNA, 25 bp, Homo sapien
gccacccgcctgctcgcctggcctg

SEQ ID NO: 2154596 - DNA, 25 bp, Homo sapien
acgccgagcgctgtgagtggtggtg

SEQ ID NO: 2154597 - DNA, 25 bp, Homo sapien
cttcctgaacgccgagcgctgtgag

SEQ ID NO: 2154598 - DNA, 25 bp, Homo sapien
ctcttcctgaacgccgagcgctgtg

SEQ ID NO: 2154599 - DNA, 25 bp, Homo sapien
tcctgaacgccgagcgctgtgagtg

SEQ ID NO: 2154600 - DNA, 25 bp, Homo sapien
gcgccttgggttcggactggctcct

SEQ ID NO: 2154601 - DNA, 25 bp, Homo sapien
gcggccctcccaggcttttcgatcg

SEQ ID NO: 2154602 - DNA, 25 bp, Homo sapien
ttgggttcggactggctcctccctc

SEQ ID NO: 2154603 - DNA, 25 bp, Homo sapien
tgcggcggtggcgccttgggttcgg

SEQ ID NO: 2154604 - DNA, 25 bp, Homo sapien
gaggcgaatgctgcctcgctccgct

SEQ ID NO: 2154605 - DNA, 25 bp, Homo sapien
ggaggcgaatgctgcctcgctccgc

SEQ ID NO: 2154606 - DNA, 25 bp, Homo sapien
aggcgaatgctgcctcgctccgctt

SEQ ID NO: 2154607 - DNA, 25 bp, Homo sapien
cttggacagccaccggcgagtgggc

SEQ ID NO: 2154608 - DNA, 25 bp, Homo sapien
cacttggacagccaccggcgagtgg

SEQ ID NO: 2154609 - DNA, 25 bp, Homo sapien
ggcacttggacagccaccggcgagt

SEQ ID NO: 2154610 - DNA, 25 bp, Homo sapien
caggcacttggacagccaccggcga

SEQ ID NO: 2154611 - DNA, 25 bp, Homo sapien
ggcgggggcggcctgcgcttcctca

SEQ ID NO: 2154612 - DNA, 25 bp, Homo sapien
gcgggggcggcctgcgcttcctcac

SEQ ID NO: 2154613 - DNA, 25 bp, Homo sapien
cggcgggggcggcctgcgcttcctc

SEQ ID NO: 2154614 - DNA, 25 bp, Homo sapien
gcggcgggggcggcctgcgcttcct

SEQ ID NO: 2154615 - DNA, 25 bp, Homo sapien
ctggccatagtgaccggccctgccc

SEQ ID NO: 2154616 - DNA, 25 bp, Homo sapien
tggccatagtgaccggccctgccct

SEQ ID NO: 2154617 - DNA, 25 bp, Homo sapien
ccttgtcgccggtgcccagcaccga

SEQ ID NO: 2154618 - DNA, 25 bp, Homo sapien
tggggccgtcccttgtcgccggtgc

SEQ ID NO: 2154619 - DNA, 25 bp, Homo sapien
caacatttggtgtaacgtggcaaaa

SEQ ID NO: 2154620 - DNA, 25 bp, Homo sapien
ggaaaattcctctagttacacacta

SEQ ID NO: 2154621 - DNA, 25 bp, Homo sapien
gagtttgaactggacgaaatcctgg

SEQ ID NO: 2154622 - DNA, 25 bp, Homo sapien
ttcagctactggtatggaaaattcc

SEQ ID NO: 2154623 - DNA, 25 bp, Homo sapien
tatgattgacccattgaaatagcct

SEQ ID NO: 2154624 - DNA, 25 bp, Homo sapien
gaaatagcctctgtagccaggcgca

SEQ ID NO: 2154625 - DNA, 25 bp, Homo sapien
ggaaggcccattgcatctgtataac

SEQ ID NO: 2154626 - DNA, 25 bp, Homo sapien
cagcctggacaaccactaaacattg

SEQ ID NO: 2154627 - DNA, 25 bp, Homo sapien
tttcattttgtgtgccctttgagaa

SEQ ID NO: 2154628 - DNA, 25 bp, Homo sapien
ttcattttgtgtgccctttgagaag

SEQ ID NO: 2154629 - DNA, 25 bp, Homo sapien
tcattttgtgtgccctttgagaagc

SEQ ID NO: 2154630 - DNA, 25 bp, Homo sapien
gttttcattttgtgtgccctttgag

SEQ ID NO: 2154631 - DNA, 25 bp, Homo sapien
tctctgcagaaagtagagaaatttc

SEQ ID NO: 2154632 - DNA, 25 bp, Homo sapien
ctctgcagaaagtagagaaatttcc

SEQ ID NO: 2154633 - DNA, 25 bp, Homo sapien
tctgcagaaagtagagaaatttccc

SEQ ID NO: 2154634 - DNA, 25 bp, Homo sapien
tttcctccttaatcaaatatatatt

SEQ ID NO: 2154635 - DNA, 25 bp, Homo sapien
gaaagtggctgcagaataatttccc

SEQ ID NO: 2154636 - DNA, 25 bp, Homo sapien
tcttttaccaagacattgtatttca

SEQ ID NO: 2154637 - DNA, 25 bp, Homo sapien
caaaaacttgagtgccatcattatt

SEQ ID NO: 2154638 - DNA, 25 bp, Homo sapien
tgagtgccatcattattgatttcct

SEQ ID NO: 2154639 - DNA, 25 bp, Homo sapien
gtgccatcattattgatttccttgg

SEQ ID NO: 2154640 - DNA, 25 bp, Homo sapien
caacgacttgctgggtacggttatc

SEQ ID NO: 2154641 - DNA, 25 bp, Homo sapien
tcttcggcttcctcaaggtctatga

SEQ ID NO: 2154642 - DNA, 25 bp, Homo sapien
ttgtgaacagttcttctggatcagc

SEQ ID NO: 2154643 - DNA, 25 bp, Homo sapien
cccaatgcgctctaattttgtgaac

SEQ ID NO: 2154644 - DNA, 25 bp, Homo sapien
gacacgaatcctgacttctaactct

SEQ ID NO: 2154645 - DNA, 25 bp, Homo sapien
taccaaccagttttctgctatgtag

SEQ ID NO: 2154646 - DNA, 25 bp, Homo sapien
ttcacatttcaacagacacgaatcc

SEQ ID NO: 2154647 - DNA, 25 bp, Homo sapien
ttttaccaaccagttttctgctatg

SEQ ID NO: 2154648 - DNA, 25 bp, Homo sapien
gacatcctgtgtaagaacaacccat

SEQ ID NO: 2154649 - DNA, 25 bp, Homo sapien
tgcatgtctcaaggaaatcactaca

SEQ ID NO: 2154650 - DNA, 25 bp, Homo sapien
gataacacagttccctgatggcaca

SEQ ID NO: 2154651 - DNA, 25 bp, Homo sapien
ccagcttacagtgaggtcttagtta

SEQ ID NO: 2154652 - DNA, 25 bp, Homo sapien
tgaaccaccgcccaggtattccatt

SEQ ID NO: 2154653 - DNA, 25 bp, Homo sapien
cagtgctgaaccaccgcccaggtat

SEQ ID NO: 2154654 - DNA, 25 bp, Homo sapien
gtgctgaaccaccgcccaggtattc

SEQ ID NO: 2154655 - DNA, 25 bp, Homo sapien
gctgaaccaccgcccaggtattcca

SEQ ID NO: 2154656 - DNA, 25 bp, Homo sapien
gtgggaatctaaagtcagagcagag

SEQ ID NO: 2154657 - DNA, 25 bp, Homo sapien
tgggaatctaaagtcagagcagagg

SEQ ID NO: 2154658 - DNA, 25 bp, Homo sapien
ctcataaagcacaaacagtggactg

SEQ ID NO: 2154659 - DNA, 25 bp, Homo sapien
ggtagcaatctggaactcatcaaat

SEQ ID NO: 2154660 - DNA, 25 bp, Homo sapien
tagcaatctggaactcatcaaatgg

SEQ ID NO: 2154661 - DNA, 25 bp, Homo sapien
gcaatctggaactcatcaaatggac

SEQ ID NO: 2154662 - DNA, 25 bp, Homo sapien
atctggaactcatcaaatggaccag

SEQ ID NO: 2154663 - DNA, 25 bp, Homo sapien
cttttatgtctcggtgaattttctt

SEQ ID NO: 2154664 - DNA, 25 bp, Homo sapien
ttttctgaatgcagatagtccagac

SEQ ID NO: 2154665 - DNA, 25 bp, Homo sapien
tttctgaatgcagatagtccagacc

SEQ ID NO: 2154666 - DNA, 25 bp, Homo sapien
aaatcagcaagtttaacatctcctt

SEQ ID NO: 2154667 - DNA, 25 bp, Homo sapien
catctccttgttctgagagcaagac

SEQ ID NO: 2154668 - DNA, 25 bp, Homo sapien
gagtcataagctgactgttgaataa

SEQ ID NO: 2154669 - DNA, 25 bp, Homo sapien
tttgagtcataagctgactgttgaa

SEQ ID NO: 2154670 - DNA, 25 bp, Homo sapien
acaagcccaaaacagtttgtacagg

SEQ ID NO: 2154671 - DNA, 25 bp, Homo sapien
caagcccaaaacagtttgtacaggt

SEQ ID NO: 2154672 - DNA, 25 bp, Homo sapien
aatagcagtaattcccaatgaccaa

SEQ ID NO: 2154673 - DNA, 25 bp, Homo sapien
catatcggagttaggtggctctccc

SEQ ID NO: 2154674 - DNA, 25 bp, Homo sapien
tgatggatctttgttcaggcaagca

SEQ ID NO: 2154675 - DNA, 25 bp, Homo sapien
tctcccttggctagttcaatagcag

SEQ ID NO: 2154676 - DNA, 25 bp, Homo sapien
gaatcagagccctcggaatcagatt

SEQ ID NO: 2154677 - DNA, 25 bp, Homo sapien
gatctatcagttcagtcagataaga

SEQ ID NO: 2154678 - DNA, 25 bp, Homo sapien
gagccctcggaatcagattcatcat

SEQ ID NO: 2154679 - DNA, 25 bp, Homo sapien
catctcttaaaacgatctatcagtt

SEQ ID NO: 2154680 - DNA, 25 bp, Homo sapien
gcaaaaataccaaatcaatgcaggt

SEQ ID NO: 2154681 - DNA, 25 bp, Homo sapien
caaaaataccaaatcaatgcaggta

SEQ ID NO: 2154682 - DNA, 25 bp, Homo sapien
ctccattcaggatgagtattgtttt

SEQ ID NO: 2154683 - DNA, 25 bp, Homo sapien
cattcaggatgagtattgttttccc

SEQ ID NO: 2154684 - DNA, 25 bp, Homo sapien
attcaggatgagtattgttttccct

SEQ ID NO: 2154685 - DNA, 25 bp, Homo sapien
ccattcaggatgagtattgttttcc

SEQ ID NO: 2154686 - DNA, 25 bp, Homo sapien
atcaggcttctttcgtacggtggta

SEQ ID NO: 2154687 - DNA, 25 bp, Homo sapien
gatcaggcttctttcgtacggtggt

SEQ ID NO: 2154688 - DNA, 25 bp, Homo sapien
tcaggcttctttcgtacggtggtaa

SEQ ID NO: 2154689 - DNA, 25 bp, Homo sapien
gaaaaactgtatgaagagtaagtaa

SEQ ID NO: 2154690 - DNA, 25 bp, Homo sapien
caaacacagtgaggcagacaggcat

SEQ ID NO: 2154691 - DNA, 25 bp, Homo sapien
tgacaaatgaagcatactacaaaca

SEQ ID NO: 2154692 - DNA, 25 bp, Homo sapien
tatcatctcactacatggtttgaaa

SEQ ID NO: 2154693 - DNA, 25 bp, Homo sapien
tcagggtttgcacaagatcttgctc

SEQ ID NO: 2154694 - DNA, 25 bp, Homo sapien
ttcagcaaatgcaggtgtgattatc

SEQ ID NO: 2154695 - DNA, 25 bp, Homo sapien
tcagcaaatgcaggtgtgattatca

SEQ ID NO: 2154696 - DNA, 25 bp, Homo sapien
cagcaaatgcaggtgtgattatcat

SEQ ID NO: 2154697 - DNA, 25 bp, Homo sapien
ttcaatcgcctgattcctgctagcg

SEQ ID NO: 2154698 - DNA, 25 bp, Homo sapien
cgggacaggcggcttcagccacagc

SEQ ID NO: 2154699 - DNA, 25 bp, Homo sapien
ttttatctgtgatgccgggacaggc

SEQ ID NO: 2154700 - DNA, 25 bp, Homo sapien
cacagcaatacttttctcgagttct

SEQ ID NO: 2154701 - DNA, 25 bp, Homo sapien
gtttgttccatctcgatcccagtgg

SEQ ID NO: 2154702 - DNA, 25 bp, Homo sapien
gtcacagagtttgttccatctcgat

SEQ ID NO: 2154703 - DNA, 25 bp, Homo sapien
tgttccatctcgatcccagtggcat

SEQ ID NO: 2154704 - DNA, 25 bp, Homo sapien
cagagtttgttccatctcgatccca

SEQ ID NO: 2154705 - DNA, 25 bp, Homo sapien
ttagggggattcgtctgctgaacac

SEQ ID NO: 2154706 - DNA, 25 bp, Homo sapien
ccagttcagaacttaggcaggcata

SEQ ID NO: 2154707 - DNA, 25 bp, Homo sapien
taatcattgagctgcctggaatatc

SEQ ID NO: 2154708 - DNA, 25 bp, Homo sapien
cactggagtatgcttcacctagaaa

SEQ ID NO: 2154709 - DNA, 25 bp, Homo sapien
tgtaaaacatgaagccagactaact

SEQ ID NO: 2154710 - DNA, 25 bp, Homo sapien
gctttggagctataggtgggtggcg

SEQ ID NO: 2154711 - DNA, 25 bp, Homo sapien
catttgaggccatggcggaagagat

SEQ ID NO: 2154712 - DNA, 25 bp, Homo sapien
gggaatctctgtggaaaatttcagt

SEQ ID NO: 2154713 - DNA, 25 bp, Homo sapien
cgtttggctgtttgttcaagtctgc

SEQ ID NO: 2154714 - DNA, 25 bp, Homo sapien
tgctctgtggaagaatgctttgtaa

SEQ ID NO: 2154715 - DNA, 25 bp, Homo sapien
aagtagcaaccatggtgttacccag

SEQ ID NO: 2154716 - DNA, 25 bp, Homo sapien
caaagcatgtgatcccttttgctct

SEQ ID NO: 2154717 - DNA, 25 bp, Homo sapien
tacccagagaggcaatagcattggc

SEQ ID NO: 2154718 - DNA, 25 bp, Homo sapien
cctacacccacggaatctcgttgat

SEQ ID NO: 2154719 - DNA, 25 bp, Homo sapien
acccacggaatctcgttgattacta

SEQ ID NO: 2154720 - DNA, 25 bp, Homo sapien
gtcctacacccacggaatctcgttg

SEQ ID NO: 2154721 - DNA, 25 bp, Homo sapien
tacacccacggaatctcgttgatta

SEQ ID NO: 2154722 - DNA, 25 bp, Homo sapien
ctatgaatttttgactgtagaaaat

SEQ ID NO: 2154723 - DNA, 25 bp, Homo sapien
gggcagaaaggaggagccaagttgg

SEQ ID NO: 2154724 - DNA, 25 bp, Homo sapien
cagaaaggaggagccaagttggcca

SEQ ID NO: 2154725 - DNA, 25 bp, Homo sapien
tttgactgtagaaaattcagggcag

SEQ ID NO: 2154726 - DNA, 25 bp, Homo sapien
aatcacggtggaaggcaaggaggag

SEQ ID NO: 2154727 - DNA, 25 bp, Homo sapien
cacggtggaaggcaaggaggagaaa

SEQ ID NO: 2154728 - DNA, 25 bp, Homo sapien
gaaggcaaggaggagaaagtcacgt

SEQ ID NO: 2154729 - DNA, 25 bp, Homo sapien
acggtggaaggcaaggaggagaaag

SEQ ID NO: 2154730 - DNA, 25 bp, Homo sapien
tccatgtctcatgtctgggtcacgc

SEQ ID NO: 2154731 - DNA, 25 bp, Homo sapien
gactccatgtctcatgtctgggtca

SEQ ID NO: 2154732 - DNA, 25 bp, Homo sapien
tctcatgtctgggtcacgctgatgc

SEQ ID NO: 2154733 - DNA, 25 bp, Homo sapien
atgtctcatgtctgggtcacgctga

SEQ ID NO: 2154734 - DNA, 25 bp, Homo sapien
atacaatggaggtatggacatttgg

SEQ ID NO: 2154735 - DNA, 25 bp, Homo sapien
tatggacatttggtaaatataaccg

SEQ ID NO: 2154736 - DNA, 25 bp, Homo sapien
tgggagtacagttgaagatgaggtt

SEQ ID NO: 2154737 - DNA, 25 bp, Homo sapien
agatgaggtttagatgggaacacag

SEQ ID NO: 2154738 - DNA, 25 bp, Homo sapien
taagacgaccctgcagtccacctgt

SEQ ID NO: 2154739 - DNA, 25 bp, Homo sapien
cttgtcattttgtaagacgaccctg

SEQ ID NO: 2154740 - DNA, 25 bp, Homo sapien
tttgtaagacgaccctgcagtccac

SEQ ID NO: 2154741 - DNA, 25 bp, Homo sapien
tcattttgtaagacgaccctgcagt

SEQ ID NO: 2154742 - DNA, 25 bp, Homo sapien
tatcatggatctaatgtactgtaac

SEQ ID NO: 2154743 - DNA, 25 bp, Homo sapien
catctatttaggagttgttcaaatc

SEQ ID NO: 2154744 - DNA, 25 bp, Homo sapien
gtactgtaactttatcagtgaaagg

SEQ ID NO: 2154745 - DNA, 25 bp, Homo sapien
tctcaaataacaagtacaaacattg

SEQ ID NO: 2154746 - DNA, 25 bp, Homo sapien
tatattacctcgtaccagtgcttca

SEQ ID NO: 2154747 - DNA, 25 bp, Homo sapien
gaatgcttagcacgtttaccatacg

SEQ ID NO: 2154748 - DNA, 25 bp, Homo sapien
catttacagcattgaattgcggcag

SEQ ID NO: 2154749 - DNA, 25 bp, Homo sapien
tagttatgacctatttagcaatgcc

SEQ ID NO: 2154750 - DNA, 25 bp, Homo sapien
cagatgctgctttggagaactttac

SEQ ID NO: 2154751 - DNA, 25 bp, Homo sapien
tgtctctattacagcatgttgccat

SEQ ID NO: 2154752 - DNA, 25 bp, Homo sapien
ggtctttggccttcaagatccatcg

SEQ ID NO: 2154753 - DNA, 25 bp, Homo sapien
tatttaagtgcataaggtctttggc

SEQ ID NO: 2154754 - DNA, 25 bp, Homo sapien
tatgggaatctctaatctgaggcta

SEQ ID NO: 2154755 - DNA, 25 bp, Homo sapien
ctttcaatttgggtcacaggcctcg

SEQ ID NO: 2154756 - DNA, 25 bp, Homo sapien
taacacctgtttatctgcgtggctc

SEQ ID NO: 2154757 - DNA, 25 bp, Homo sapien
aaatttgtggttgtccttgctcacc

SEQ ID NO: 2154758 - DNA, 25 bp, Homo sapien
caagtattgattaacttacacgaca

SEQ ID NO: 2154759 - DNA, 25 bp, Homo sapien
aaataatctcgggtaaatagagcac

SEQ ID NO: 2154760 - DNA, 25 bp, Homo sapien
ttggagccgattatctgttgcacag

SEQ ID NO: 2154761 - DNA, 25 bp, Homo sapien
gaagttgcttgctcaattcaacaag

SEQ ID NO: 2154762 - DNA, 25 bp, Homo sapien
cccctccgtgctggaaattctggac

SEQ ID NO: 2154763 - DNA, 25 bp, Homo sapien
ttctggacaccgcaggaactgagca

SEQ ID NO: 2154764 - DNA, 25 bp, Homo sapien
gatttctaccgcaaagagatcgaag

SEQ ID NO: 2154765 - DNA, 25 bp, Homo sapien
gaactgagcagtttgcctccatgag

SEQ ID NO: 2154766 - DNA, 25 bp, Homo sapien
gaggggttggcaaatctgcccttac

SEQ ID NO: 2154767 - DNA, 25 bp, Homo sapien
ggtgagactcatgagggaatacaag

SEQ ID NO: 2154768 - DNA, 25 bp, Homo sapien
tcatgagggaatacaaggtagtggt

SEQ ID NO: 2154769 - DNA, 25 bp, Homo sapien
caaggtagtggtgttagggagtgga

SEQ ID NO: 2154770 - DNA, 25 bp, Homo sapien
tgatctttccccccctctggtagga

SEQ ID NO: 2154771 - DNA, 25 bp, Homo sapien
gtctagccgcgccacagctagcggg

SEQ ID NO: 2154772 - DNA, 25 bp, Homo sapien
caccttccgcctcgtctagccgcgc

SEQ ID NO: 2154773 - DNA, 25 bp, Homo sapien
agttcgcagatttccgcccaccttc

SEQ ID NO: 2154774 - DNA, 25 bp, Homo sapien
aactggaacggagccctcaggcctg

SEQ ID NO: 2154775 - DNA, 25 bp, Homo sapien
ctgggctgcgcgagcaggaagcggg

SEQ ID NO: 2154776 - DNA, 25 bp, Homo sapien
cgcccgggcagcggtaactggaacg

SEQ ID NO: 2154777 - DNA, 25 bp, Homo sapien
tccgacgtccgcctcgccgcagggt

SEQ ID NO: 2154778 - DNA, 25 bp, Homo sapien
gggcagcggagagacagaggagcca

SEQ ID NO: 2154779 - DNA, 25 bp, Homo sapien
agacagaggagccagcgggtggcca

SEQ ID NO: 2154780 - DNA, 25 bp, Homo sapien
catggccttggcgtgacagagcctc

SEQ ID NO: 2154781 - DNA, 25 bp, Homo sapien
gagccagcgggtggccatggccttg

SEQ ID NO: 2154782 - DNA, 25 bp, Homo sapien
cgccacccggctcgccccgaagagg

SEQ ID NO: 2154783 - DNA, 25 bp, Homo sapien
agtctcggggaactggggcacctca

SEQ ID NO: 2154784 - DNA, 25 bp, Homo sapien
gcacctcagccagtgtgtcagggaa

SEQ ID NO: 2154785 - DNA, 25 bp, Homo sapien
caccggaagtgatcccgtccagtct

SEQ ID NO: 2154786 - DNA, 25 bp, Homo sapien
tctgccgtgtagtggttggaatcaa

SEQ ID NO: 2154787 - DNA, 25 bp, Homo sapien
tgtcaggcacggctaagtaaaacgc

SEQ ID NO: 2154788 - DNA, 25 bp, Homo sapien
tagtattcgctggtaaagtcaaggc

SEQ ID NO: 2154789 - DNA, 25 bp, Homo sapien
tcaaggcggatctaccagacggtaa

SEQ ID NO: 2154790 - DNA, 25 bp, Homo sapien
ttcagcatgtaagagccagccaagc

SEQ ID NO: 2154791 - DNA, 25 bp, Homo sapien
tagaaacttagaatctaacaccaga

SEQ ID NO: 2154792 - DNA, 25 bp, Homo sapien
tctaacaccagagttactacttgct

SEQ ID NO: 2154793 - DNA, 25 bp, Homo sapien
tgttatacataatcaacgattaaaa

SEQ ID NO: 2154794 - DNA, 25 bp, Homo sapien
cactgacatatgaataatgttcccc

SEQ ID NO: 2154795 - DNA, 25 bp, Homo sapien
tatagaaggtagattgatacactga

SEQ ID NO: 2154796 - DNA, 25 bp, Homo sapien
gaattattattttcgtgccacttgc

SEQ ID NO: 2154797 - DNA, 25 bp, Homo sapien
atagcatttattgaggctttataat

SEQ ID NO: 2154798 - DNA, 25 bp, Homo sapien
caagtagattgcctgagcgcagaag

SEQ ID NO: 2154799 - DNA, 25 bp, Homo sapien
gataggctcagactaacttaggttt

SEQ ID NO: 2154800 - DNA, 25 bp, Homo sapien
gctttctgtggaacaaggtggctaa

SEQ ID NO: 2154801 - DNA, 25 bp, Homo sapien
caacaacaaattaccagggattctg

SEQ ID NO: 2154802 - DNA, 25 bp, Homo sapien
ggttcatatcaatggaccgaatggg

SEQ ID NO: 2154803 - DNA, 25 bp, Homo sapien
acccttgcacagagaagctcatcag

SEQ ID NO: 2154804 - DNA, 25 bp, Homo sapien
cgtctaagacattcaatgaagtggt

SEQ ID NO: 2154805 - DNA, 25 bp, Homo sapien
tggggacattgctccaaaaaggcac

SEQ ID NO: 2154806 - DNA, 25 bp, Homo sapien
gaaatgtctaccttactgcccttca

SEQ ID NO: 2154807 - DNA, 25 bp, Homo sapien
tgtcagttatctacaaagggttccc

SEQ ID NO: 2154808 - DNA, 25 bp, Homo sapien
tcataatgtgacagagcctggctca

SEQ ID NO: 2154809 - DNA, 25 bp, Homo sapien
gtccctcgtcatgttttagtcaaag

SEQ ID NO: 2154810 - DNA, 25 bp, Homo sapien
taatgggtgtaccaattggcatctc

SEQ ID NO: 2154811 - DNA, 25 bp, Homo sapien
ggagtgacatgatcaactttgtaat

SEQ ID NO: 2154812 - DNA, 25 bp, Homo sapien
tccttgatggttagcaatgttgaca

SEQ ID NO: 2154813 - DNA, 25 bp, Homo sapien
cattgtgtgggttgtcgtttgactc

SEQ ID NO: 2154814 - DNA, 25 bp, Homo sapien
tctctgttaggcagatcaagtaggg

SEQ ID NO: 2154815 - DNA, 25 bp, Homo sapien
gggcagatcacctttaccaaatcag

SEQ ID NO: 2154816 - DNA, 25 bp, Homo sapien
tatatattcggatcacccatgggtt

SEQ ID NO: 2154817 - DNA, 25 bp, Homo sapien
tgactaagctgaatcaaggtcaggt

SEQ ID NO: 2154818 - DNA, 25 bp, Homo sapien
aaatatatgcctgaggcaaaagcag

SEQ ID NO: 2154819 - DNA, 25 bp, Homo sapien
tgcctgaacttgagggtttttccaa

SEQ ID NO: 2154820 - DNA, 25 bp, Homo sapien
ttctagttttagctgctttgcctga

SEQ ID NO: 2154821 - DNA, 25 bp, Homo sapien
ttctgccacttctagttttagctgc

SEQ ID NO: 2154822 - DNA, 25 bp, Homo sapien
ttctaccagaggtacgaggaggagc

SEQ ID NO: 2154823 - DNA, 25 bp, Homo sapien
gaattctaccagaggtacgaggagg

SEQ ID NO: 2154824 - DNA, 25 bp, Homo sapien
accagaggtacgaggaggagctggt

SEQ ID NO: 2154825 - DNA, 25 bp, Homo sapien
taccagaggtacgaggaggagctgg

SEQ ID NO: 2154826 - DNA, 25 bp, Homo sapien
tattgaatctcggattgttcttaac

SEQ ID NO: 2154827 - DNA, 25 bp, Homo sapien
tcctccactttgcattcagctattg

SEQ ID NO: 2154828 - DNA, 25 bp, Homo sapien
tcagctattgaatctcggattgttc

SEQ ID NO: 2154829 - DNA, 25 bp, Homo sapien
tttgcattcagctattgaatctcgg

SEQ ID NO: 2154830 - DNA, 25 bp, Homo sapien
tcctatcaaaggacccagatttcac

SEQ ID NO: 2154831 - DNA, 25 bp, Homo sapien
tcatcagtcatcctatcaaaggacc

SEQ ID NO: 2154832 - DNA, 25 bp, Homo sapien
gtcatcctatcaaaggacccagatt

SEQ ID NO: 2154833 - DNA, 25 bp, Homo sapien
tatcaaaggacccagatttcaccat

SEQ ID NO: 2154834 - DNA, 25 bp, Homo sapien
tagctcttttggatccacttttgct

SEQ ID NO: 2154835 - DNA, 25 bp, Homo sapien
tatgactacttagctcttttggatc

SEQ ID NO: 2154836 - DNA, 25 bp, Homo sapien
tgactacttagctcttttggatcca

SEQ ID NO: 2154837 - DNA, 25 bp, Homo sapien
tacttagctcttttggatccacttt

SEQ ID NO: 2154838 - DNA, 25 bp, Homo sapien
taatctgtatttggccaggaaatct

SEQ ID NO: 2154839 - DNA, 25 bp, Homo sapien
actgtggtctcttgaatgctagata

SEQ ID NO: 2154840 - DNA, 25 bp, Homo sapien
cacttcagtatggtaattgttctcc

SEQ ID NO: 2154841 - DNA, 25 bp, Homo sapien
tactcaaaatcgaagattctcttgg

SEQ ID NO: 2154842 - DNA, 25 bp, Homo sapien
tattcttggagtagatattagacat

SEQ ID NO: 2154843 - DNA, 25 bp, Homo sapien
ttgtttttcatgtatcctgtattct

SEQ ID NO: 2154844 - DNA, 25 bp, Homo sapien
gctgttgctgaactgtactcctgta

SEQ ID NO: 2154845 - DNA, 25 bp, Homo sapien
ctactgatgtaaatgctgttgctga

SEQ ID NO: 2154846 - DNA, 25 bp, Homo sapien
ttcaaaagtgatggaaggctgccac

SEQ ID NO: 2154847 - DNA, 25 bp, Homo sapien
tttgttttccaccatccttaggatg

SEQ ID NO: 2154848 - DNA, 25 bp, Homo sapien
tccttaggatgctcatctaacactg

SEQ ID NO: 2154849 - DNA, 25 bp, Homo sapien
aggtatgtgattccactcctctgca

SEQ ID NO: 2154850 - DNA, 25 bp, Homo sapien
gcagtcagcatgcttgcagagacct

SEQ ID NO: 2154851 - DNA, 25 bp, Homo sapien
cccatagaggttcaatgtagttttc

SEQ ID NO: 2154852 - DNA, 25 bp, Homo sapien
gaagacgatgattaacccatagagg

SEQ ID NO: 2154853 - DNA, 25 bp, Homo sapien
tatagtaagtggttattgatgtgcc

SEQ ID NO: 2154854 - DNA, 25 bp, Homo sapien
aaaaaatcatagtgtaactggatga

SEQ ID NO: 2154855 - DNA, 25 bp, Homo sapien
ctggatgaataccagcaacagcacc

SEQ ID NO: 2154856 - DNA, 25 bp, Homo sapien
tgtaactggatgaataccagcaaca

SEQ ID NO: 2154857 - DNA, 25 bp, Homo sapien
tcattaaaaactggacttgagggaa

SEQ ID NO: 2154858 - DNA, 25 bp, Homo sapien
cctcatgatagcaacttatcaggcc

SEQ ID NO: 2154859 - DNA, 25 bp, Homo sapien
aggcaaaaccagatgtaaaccaagt

SEQ ID NO: 2154860 - DNA, 25 bp, Homo sapien
tagcaacttatcaggcctgtttcct

SEQ ID NO: 2154861 - DNA, 25 bp, Homo sapien
ccagatgtaaaccaagtttgtcttg

SEQ ID NO: 2154862 - DNA, 25 bp, Homo sapien
caaaaatgcgaatctggaacttctc

SEQ ID NO: 2154863 - DNA, 25 bp, Homo sapien
cctccaaaatgcaatagctcattcc

SEQ ID NO: 2154864 - DNA, 25 bp, Homo sapien
ttttcaagttatagtgctgtagtgc

SEQ ID NO: 2154865 - DNA, 25 bp, Homo sapien
tgctgtagtgcttgtttatgtttaa

SEQ ID NO: 2154866 - DNA, 25 bp, Homo sapien
ctcaactgcagacgctttgattttt

SEQ ID NO: 2154867 - DNA, 25 bp, Homo sapien
taataccaacaggagcacaatatgt

SEQ ID NO: 2154868 - DNA, 25 bp, Homo sapien
tgtgtacaattagaacagacttctg

SEQ ID NO: 2154869 - DNA, 25 bp, Homo sapien
aagtgaggcccctgttactgagggt

SEQ ID NO: 2154870 - DNA, 25 bp, Homo sapien
taacatagcgagatctgaaccctgg

SEQ ID NO: 2154871 - DNA, 25 bp, Homo sapien
ttttgagggaaagcacaatggagct

SEQ ID NO: 2154872 - DNA, 25 bp, Homo sapien
atcaccatggcctgaatgaccccag

SEQ ID NO: 2154873 - DNA, 25 bp, Homo sapien
ggcactgactagaatatcaccatgg

SEQ ID NO: 2154874 - DNA, 25 bp, Homo sapien
gagtctagtataccaagtcaatgca

SEQ ID NO: 2154875 - DNA, 25 bp, Homo sapien
gtagagtatgcagcgaagttttccc

SEQ ID NO: 2154876 - DNA, 25 bp, Homo sapien
tctccaataaaggaactcgggatct

SEQ ID NO: 2154877 - DNA, 25 bp, Homo sapien
gacagcatagtagccagtctgaagg

SEQ ID NO: 2154878 - DNA, 25 bp, Homo sapien
aaagagcttgatgactccggcgttc

SEQ ID NO: 2154879 - DNA, 25 bp, Homo sapien
gaatggcgacagctaaggccctgaa

SEQ ID NO: 2154880 - DNA, 25 bp, Homo sapien
ggctctgtgtatcatgctgaggact

SEQ ID NO: 2154881 - DNA, 25 bp, Homo sapien
gcccacacaaagcagaggtgtctag

SEQ ID NO: 2154882 - DNA, 25 bp, Homo sapien
tgtgtgaggaaactcaagatcccca

SEQ ID NO: 2154883 - DNA, 25 bp, Homo sapien
tgtcaacaacttacatgccatgcat

SEQ ID NO: 2154884 - DNA, 25 bp, Homo sapien
gacacttaggatgaatactggtcag

SEQ ID NO: 2154885 - DNA, 25 bp, Homo sapien
gccatgcattgcacagttatcaaaa

SEQ ID NO: 2154886 - DNA, 25 bp, Homo sapien
cagggaattatcactggtacaagat

SEQ ID NO: 2154887 - DNA, 25 bp, Homo sapien
ccttggatttaacgaagggtcatca

SEQ ID NO: 2154888 - DNA, 25 bp, Homo sapien
tgtagtccatggattaatttccagc

SEQ ID NO: 2154889 - DNA, 25 bp, Homo sapien
tgctcagtgatgaaggcagcaccat

SEQ ID NO: 2154890 - DNA, 25 bp, Homo sapien
tcatatcatgttggtatgcagctgt

SEQ ID NO: 2154891 - DNA, 25 bp, Homo sapien
gtagttcttatccatgacatgcatg

SEQ ID NO: 2154892 - DNA, 25 bp, Homo sapien
ggtaattgacctatgtgcattgtgc

SEQ ID NO: 2154893 - DNA, 25 bp, Homo sapien
ccatgtctgcacaagagctttgtag

SEQ ID NO: 2154894 - DNA, 25 bp, Homo sapien
gaccagtcacacagggtaaagatga

SEQ ID NO: 2154895 - DNA, 25 bp, Homo sapien
ggtaattcctaccattgaaaatctc

SEQ ID NO: 2154896 - DNA, 25 bp, Homo sapien
ggtagacattatgactaaagaactt

SEQ ID NO: 2154897 - DNA, 25 bp, Homo sapien
gattgggcagtgccttgaagtggaa

SEQ ID NO: 2154898 - DNA, 25 bp, Homo sapien
gaatagaaacttgttattgtaaaga

SEQ ID NO: 2154899 - DNA, 25 bp, Homo sapien
atgcttgagactgaaagtgttttcg

SEQ ID NO: 2154900 - DNA, 25 bp, Homo sapien
agagatgtatcccttcgtgtgatgg

SEQ ID NO: 2154901 - DNA, 25 bp, Homo sapien
aacattttcttaagcgatatacagg

SEQ ID NO: 2154902 - DNA, 25 bp, Homo sapien
ggctgcattggctaacagagatgta

SEQ ID NO: 2154903 - DNA, 25 bp, Homo sapien
cgttgagtgcatgaactttactctg

SEQ ID NO: 2154904 - DNA, 25 bp, Homo sapien
tgtgctgtgggctccttaagtaaac

SEQ ID NO: 2154905 - DNA, 25 bp, Homo sapien
ttgttcttccacagtacgttgagtg

SEQ ID NO: 2154906 - DNA, 25 bp, Homo sapien
gctgtgggctccttaagtaaaccaa

SEQ ID NO: 2154907 - DNA, 25 bp, Homo sapien
caagttagcaacagagttgaatttg

SEQ ID NO: 2154908 - DNA, 25 bp, Homo sapien
cactttgatttggatagccattttt

SEQ ID NO: 2154909 - DNA, 25 bp, Homo sapien
tttttagagcaaggacctaccgtgc

SEQ ID NO: 2154910 - DNA, 25 bp, Homo sapien
gtgcccaagggcttttatgcttccc

SEQ ID NO: 2154911 - DNA, 25 bp, Homo sapien
taaggatgctgttacatcagctctg

SEQ ID NO: 2154912 - DNA, 25 bp, Homo sapien
ttttccgtctaggtcccttgcactc

SEQ ID NO: 2154913 - DNA, 25 bp, Homo sapien
tttactatagtctctaaggatgctg

SEQ ID NO: 2154914 - DNA, 25 bp, Homo sapien
ttaattgacattgctactgtctggg

SEQ ID NO: 2154915 - DNA, 25 bp, Homo sapien
tccacggagagaggaccattcatta

SEQ ID NO: 2154916 - DNA, 25 bp, Homo sapien
agtccaaatccacggagagaggacc

SEQ ID NO: 2154917 - DNA, 25 bp, Homo sapien
caggaagcgaccaggctgcttttct

SEQ ID NO: 2154918 - DNA, 25 bp, Homo sapien
attaaatgccaggaagcgaccaggc

SEQ ID NO: 2154919 - DNA, 25 bp, Homo sapien
agtatgcacccctgctaaaggctct

SEQ ID NO: 2154920 - DNA, 25 bp, Homo sapien
tatctaatgatttcaggaacctcgc

SEQ ID NO: 2154921 - DNA, 25 bp, Homo sapien
ggaacctcgctttaaaatggcggca

SEQ ID NO: 2154922 - DNA, 25 bp, Homo sapien
attttataccccagagcggccgact

SEQ ID NO: 2154923 - DNA, 25 bp, Homo sapien
cattgcattgtgcaatggcacagcc

SEQ ID NO: 2154924 - DNA, 25 bp, Homo sapien
ccattgcattgtgcaatggcacagc

SEQ ID NO: 2154925 - DNA, 25 bp, Homo sapien
ccagggggttctgtccttggaccat

SEQ ID NO: 2154926 - DNA, 25 bp, Homo sapien
aaagagcaagtatctggtaattgac

SEQ ID NO: 2154927 - DNA, 25 bp, Homo sapien
atgcttctcattgtaatgctttgtc

SEQ ID NO: 2154928 - DNA, 25 bp, Homo sapien
ggaaagagcaagtatctggtaattg

SEQ ID NO: 2154929 - DNA, 25 bp, Homo sapien
cttctcattgtaatgctttgtctgg

SEQ ID NO: 2154930 - DNA, 25 bp, Homo sapien
tctcattgcattttaggcaggcagt

SEQ ID NO: 2154931 - DNA, 25 bp, Homo sapien
ttccttcaaagtagtctcattgcat

SEQ ID NO: 2154932 - DNA, 25 bp, Homo sapien
acagtagatcagcttgttccctaat

SEQ ID NO: 2154933 - DNA, 25 bp, Homo sapien
caggcagtggtcattacacagtaga

SEQ ID NO: 2154934 - DNA, 25 bp, Homo sapien
cagaaaaccgagagctaaaatggag

SEQ ID NO: 2154935 - DNA, 25 bp, Homo sapien
agaaaaccgagagctaaaatggagg

SEQ ID NO: 2154936 - DNA, 25 bp, Homo sapien
gaaaaccgagagctaaaatggagga

SEQ ID NO: 2154937 - DNA, 25 bp, Homo sapien
aaaaccgagagctaaaatggaggag

SEQ ID NO: 2154938 - DNA, 25 bp, Homo sapien
tcttgcccaattactagtgcgttta

SEQ ID NO: 2154939 - DNA, 25 bp, Homo sapien
ccaattactagtgcgtttaagcagt

SEQ ID NO: 2154940 - DNA, 25 bp, Homo sapien
gcccaattactagtgcgtttaagca

SEQ ID NO: 2154941 - DNA, 25 bp, Homo sapien
tttcttgcccaattactagtgcgtt

SEQ ID NO: 2154942 - DNA, 25 bp, Homo sapien
taaacgccacatcgcttagtgacat

SEQ ID NO: 2154943 - DNA, 25 bp, Homo sapien
tccactggatgatcagcaacagctg

SEQ ID NO: 2154944 - DNA, 25 bp, Homo sapien
gctgcaacaggaagattactatgga

SEQ ID NO: 2154945 - DNA, 25 bp, Homo sapien
tatcaggtgaaaccataaacgccac

SEQ ID NO: 2154946 - DNA, 25 bp, Homo sapien
taatttactatttgtctccctccac

SEQ ID NO: 2154947 - DNA, 25 bp, Homo sapien
tactatttgtctccctccacatagc

SEQ ID NO: 2154948 - DNA, 25 bp, Homo sapien
ctccacatagcatccttctcatcat

SEQ ID NO: 2154949 - DNA, 25 bp, Homo sapien
gaaaatgcttctccatagaatttgc

SEQ ID NO: 2154950 - DNA, 25 bp, Homo sapien
aggtcgttgcgctcactcagcacaa

SEQ ID NO: 2154951 - DNA, 25 bp, Homo sapien
tggaactggtttgtgatctctgaag

SEQ ID NO: 2154952 - DNA, 25 bp, Homo sapien
tagtactggataccaccaaattggt

SEQ ID NO: 2154953 - DNA, 25 bp, Homo sapien
aaatagtttgctttgacgtaggtcg

SEQ ID NO: 2154954 - DNA, 25 bp, Homo sapien
aatctaatctagacactgcgttggg

SEQ ID NO: 2154955 - DNA, 25 bp, Homo sapien
tgagaataccgttctcttgcacttc

SEQ ID NO: 2154956 - DNA, 25 bp, Homo sapien
gatttttcccaatctaatctagaca

SEQ ID NO: 2154957 - DNA, 25 bp, Homo sapien
gcgttggggtcggtttctgcttcaa

SEQ ID NO: 2154958 - DNA, 25 bp, Homo sapien
ttcttgacattttgagtaatgatcc

SEQ ID NO: 2154959 - DNA, 25 bp, Homo sapien
tcttgacattttgagtaatgatccc

SEQ ID NO: 2154960 - DNA, 25 bp, Homo sapien
tgacattttgagtaatgatcccctt

SEQ ID NO: 2154961 - DNA, 25 bp, Homo sapien
cttgacattttgagtaatgatcccc

SEQ ID NO: 2154962 - DNA, 25 bp, Homo sapien
ggccccatatctggggccaatcttg

SEQ ID NO: 2154963 - DNA, 25 bp, Homo sapien
gattttcctacaggccccatatctg

SEQ ID NO: 2154964 - DNA, 25 bp, Homo sapien
ctgattttcctacaggccccatatc

SEQ ID NO: 2154965 - DNA, 25 bp, Homo sapien
agactctgattttcctacaggcccc

SEQ ID NO: 2154966 - DNA, 25 bp, Homo sapien
cgtttccattggatcagtggtctcc

SEQ ID NO: 2154967 - DNA, 25 bp, Homo sapien
aatggactgaaagcaaattctgggt

SEQ ID NO: 2154968 - DNA, 25 bp, Homo sapien
gaatctctcgagtgtgtatcccctg

SEQ ID NO: 2154969 - DNA, 25 bp, Homo sapien
gaagcaccatggagcatttggaaaa

SEQ ID NO: 2154970 - DNA, 25 bp, Homo sapien
cttgtgtgttgcatacagcattggc

SEQ ID NO: 2154971 - DNA, 25 bp, Homo sapien
gcatacggtgtcctcgtctctgtcc

SEQ ID NO: 2154972 - DNA, 25 bp, Homo sapien
cattttccatggcaatcacagtttc

SEQ ID NO: 2154973 - DNA, 25 bp, Homo sapien
tagttaatggatgcatacggtgtcc

SEQ ID NO: 2154974 - DNA, 25 bp, Homo sapien
ttaactatccttctgtcttcagcct

SEQ ID NO: 2154975 - DNA, 25 bp, Homo sapien
taactatccttctgtcttcagcctc

SEQ ID NO: 2154976 - DNA, 25 bp, Homo sapien
cttaactatccttctgtcttcagcc

SEQ ID NO: 2154977 - DNA, 25 bp, Homo sapien
tcttaactatccttctgtcttcagc

SEQ ID NO: 2154978 - DNA, 25 bp, Homo sapien
tgcctggaatgcctacactccaagg

SEQ ID NO: 2154979 - DNA, 25 bp, Homo sapien
ggtgaaaggagcatgtccagaagac

SEQ ID NO: 2154980 - DNA, 25 bp, Homo sapien
gaatgcctacactccaaggttctct

SEQ ID NO: 2154981 - DNA, 25 bp, Homo sapien
agcatgtccagaagaccctattaag

SEQ ID NO: 2154982 - DNA, 25 bp, Homo sapien
cttcctctgaacctccggaatgggt

SEQ ID NO: 2154983 - DNA, 25 bp, Homo sapien
tttctggacttctcttaggggacgc

SEQ ID NO: 2154984 - DNA, 25 bp, Homo sapien
ctgaacctccggaatgggttttctg

SEQ ID NO: 2154985 - DNA, 25 bp, Homo sapien
gacgctgttcatctggctttatcat

SEQ ID NO: 2154986 - DNA, 25 bp, Homo sapien
cttgaggttctgaggactgactgct

SEQ ID NO: 2154987 - DNA, 25 bp, Homo sapien
ttctgaggactgactgctaaatgag

SEQ ID NO: 2154988 - DNA, 25 bp, Homo sapien
aggactgactgctaaatgagaaatg

SEQ ID NO: 2154989 - DNA, 25 bp, Homo sapien
cctcttcagtgtaggtttgaagcag

SEQ ID NO: 2154990 - DNA, 25 bp, Homo sapien
tctgcagtatctgtagtaaagtacc

SEQ ID NO: 2154991 - DNA, 25 bp, Homo sapien
aatgagctctcagtgtatgcgctga

SEQ ID NO: 2154992 - DNA, 25 bp, Homo sapien
cgctgatgtgagtaaagtatctgca

SEQ ID NO: 2154993 - DNA, 25 bp, Homo sapien
tccacagagcctaccaaagtacaaa

SEQ ID NO: 2154994 - DNA, 25 bp, Homo sapien
cagggcacaatctccatttattagt

SEQ ID NO: 2154995 - DNA, 25 bp, Homo sapien
gtcacaccaaaaaccacagggcaca

SEQ ID NO: 2154996 - DNA, 25 bp, Homo sapien
tttattagtccctgatgtataatta

SEQ ID NO: 2154997 - DNA, 25 bp, Homo sapien
cacaccaaaaaccacagggcacaat

SEQ ID NO: 2154998 - DNA, 25 bp, Homo sapien
gaaactcagtccagaaagagcaccc

SEQ ID NO: 2154999 - DNA, 25 bp, Homo sapien
tgtggtgaatggctcgagttctccg

SEQ ID NO: 2155000 - DNA, 25 bp, Homo sapien
gaagttgcttcaaccctgtggtgaa

SEQ ID NO: 2155001 - DNA, 25 bp, Homo sapien
gagttctccgtaagctctctctcca

SEQ ID NO: 2155002 - DNA, 25 bp, Homo sapien
tgtttccaaggtttgacataagctg

SEQ ID NO: 2155003 - DNA, 25 bp, Homo sapien
cctgatgagattaagcaggccttcc

SEQ ID NO: 2155004 - DNA, 25 bp, Homo sapien
cacggacttcccatgtaacattatg

SEQ ID NO: 2155005 - DNA, 25 bp, Homo sapien
gatagtatctcccaaagacttttag

SEQ ID NO: 2155006 - DNA, 25 bp, Homo sapien
caccgctcgagtctggtgctgttgt

SEQ ID NO: 2155007 - DNA, 25 bp, Homo sapien
gctcgagtctggtgctgttgtctca

SEQ ID NO: 2155008 - DNA, 25 bp, Homo sapien
gctgtgcaccgctcgagtctggtgc

SEQ ID NO: 2155009 - DNA, 25 bp, Homo sapien
tcgagtctggtgctgttgtctcatt

SEQ ID NO: 2155010 - DNA, 25 bp, Homo sapien
ccaagtggcggatgggtttggttga

SEQ ID NO: 2155011 - DNA, 25 bp, Homo sapien
tcattgtagctagcgagagaggatg

SEQ ID NO: 2155012 - DNA, 25 bp, Homo sapien
ttataccaagtggcggatgggtttg

SEQ ID NO: 2155013 - DNA, 25 bp, Homo sapien
gagtcattgtagctagcgagagagg

SEQ ID NO: 2155014 - DNA, 25 bp, Homo sapien
acctcccgtcctgtcccattgagct

SEQ ID NO: 2155015 - DNA, 25 bp, Homo sapien
attcggattcttccagccatcattt

SEQ ID NO: 2155016 - DNA, 25 bp, Homo sapien
ggtttctcctctgatagggctgtct

SEQ ID NO: 2155017 - DNA, 25 bp, Homo sapien
ccgataccatatctgttgttaaaga

SEQ ID NO: 2155018 - DNA, 25 bp, Homo sapien
ttctgattggtcagttccgatacca

SEQ ID NO: 2155019 - DNA, 25 bp, Homo sapien
catgtcgtttgctgttggtttctcc

SEQ ID NO: 2155020 - DNA, 25 bp, Homo sapien
tcataggactggagatcaaaccaat

SEQ ID NO: 2155021 - DNA, 25 bp, Homo sapien
tctggatctagaaggctctgaagtc

SEQ ID NO: 2155022 - DNA, 25 bp, Homo sapien
caaaagcaaggatcaggttggaatc

SEQ ID NO: 2155023 - DNA, 25 bp, Homo sapien
tcaaaccaatataggatcattcctc

SEQ ID NO: 2155024 - DNA, 25 bp, Homo sapien
acaccttcatgtagacagttgtctg

SEQ ID NO: 2155025 - DNA, 25 bp, Homo sapien
gacagttgtctgcagcccacaaaac

SEQ ID NO: 2155026 - DNA, 25 bp, Homo sapien
aatggtgctacaccttcatgtagac

SEQ ID NO: 2155027 - DNA, 25 bp, Homo sapien
tcatgtagacagttgtctgcagccc

SEQ ID NO: 2155028 - DNA, 25 bp, Homo sapien
ctcatagccaagcacttgaattctg

SEQ ID NO: 2155029 - DNA, 25 bp, Homo sapien
ttccttgtgtattcaagtgcttggc

SEQ ID NO: 2155030 - DNA, 25 bp, Homo sapien
gagctactacctctgttccttgtgt

SEQ ID NO: 2155031 - DNA, 25 bp, Homo sapien
tcaagtgcttggcactcatagccaa

SEQ ID NO: 2155032 - DNA, 25 bp, Homo sapien
gaatgagtcacatactctagcttct

SEQ ID NO: 2155033 - DNA, 25 bp, Homo sapien
catgggccctgctggaatgagtcac

SEQ ID NO: 2155034 - DNA, 25 bp, Homo sapien
cattttggattctgtctatatgtaa

SEQ ID NO: 2155035 - DNA, 25 bp, Homo sapien
tggattctgtctatatgtaatttga

SEQ ID NO: 2155036 - DNA, 25 bp, Homo sapien
taaagccctctgtggttacgaagga

SEQ ID NO: 2155037 - DNA, 25 bp, Homo sapien
ctagagagtagcttggatgtcacag

SEQ ID NO: 2155038 - DNA, 25 bp, Homo sapien
gcccttaggcaggaagaaactccca

SEQ ID NO: 2155039 - DNA, 25 bp, Homo sapien
aggcagccccagcaaccttaggtgg

SEQ ID NO: 2155040 - DNA, 25 bp, Homo sapien
tagcaattcagcaagttcaacttca

SEQ ID NO: 2155041 - DNA, 25 bp, Homo sapien
cactacttcagtgtctatcagcttt

SEQ ID NO: 2155042 - DNA, 25 bp, Homo sapien
aggggccgtccccactacttcagtg

SEQ ID NO: 2155043 - DNA, 25 bp, Homo sapien
acaattagcaattcagcaagttcaa

SEQ ID NO: 2155044 - DNA, 25 bp, Homo sapien
attcagaatattgacaagacttcat

SEQ ID NO: 2155045 - DNA, 25 bp, Homo sapien
gattcagaatattgacaagacttca

SEQ ID NO: 2155046 - DNA, 25 bp, Homo sapien
ctgattcagaatattgacaagactt

SEQ ID NO: 2155047 - DNA, 25 bp, Homo sapien
tgattcagaatattgacaagacttc

SEQ ID NO: 2155048 - DNA, 25 bp, Homo sapien
gattctgggcacgtacaagcctctt

SEQ ID NO: 2155049 - DNA, 25 bp, Homo sapien
catcccccatcagtgtgacaatgat

SEQ ID NO: 2155050 - DNA, 25 bp, Homo sapien
ttctgggcacgtacaagcctctttc

SEQ ID NO: 2155051 - DNA, 25 bp, Homo sapien
atgatgattctgggcacgtacaagc

SEQ ID NO: 2155052 - DNA, 25 bp, Homo sapien
gagcccgcatcctagcctgccttac

SEQ ID NO: 2155053 - DNA, 25 bp, Homo sapien
atggagcccgcatcctagcctgcct

SEQ ID NO: 2155054 - DNA, 25 bp, Homo sapien
tggagcccgcatcctagcctgcctt

SEQ ID NO: 2155055 - DNA, 25 bp, Homo sapien
ctatggagcccgcatcctagcctgc

SEQ ID NO: 2155056 - DNA, 25 bp, Homo sapien
gctgctgcagcgggcacttgcctgc

SEQ ID NO: 2155057 - DNA, 25 bp, Homo sapien
gctgcagcgggcacttgcctgccct

SEQ ID NO: 2155058 - DNA, 25 bp, Homo sapien
tgctgcagcgggcacttgcctgccc

SEQ ID NO: 2155059 - DNA, 25 bp, Homo sapien
cagctgctgcagcgggcacttgcct

SEQ ID NO: 2155060 - DNA, 25 bp, Homo sapien
gatttgtcaatgtcatgggaaagca

SEQ ID NO: 2155061 - DNA, 25 bp, Homo sapien
tcatgggaaagcaacaggcaggaag

SEQ ID NO: 2155062 - DNA, 25 bp, Homo sapien
agtcacagacccactcggatttgtc

SEQ ID NO: 2155063 - DNA, 25 bp, Homo sapien
gacccactcggatttgtcaatgtca

SEQ ID NO: 2155064 - DNA, 25 bp, Homo sapien
gaattctatggctttaatacgtggc

SEQ ID NO: 2155065 - DNA, 25 bp, Homo sapien
ggccgaggcctggaattctatggct

SEQ ID NO: 2155066 - DNA, 25 bp, Homo sapien
tctatggctttaatacgtggctcca

SEQ ID NO: 2155067 - DNA, 25 bp, Homo sapien
cctggaattctatggctttaatacg

SEQ ID NO: 2155068 - DNA, 25 bp, Homo sapien
gccaaacaccagaagtagatcattg

SEQ ID NO: 2155069 - DNA, 25 bp, Homo sapien
cttagtggttgccaaacaccagaag

SEQ ID NO: 2155070 - DNA, 25 bp, Homo sapien
caaacaccagaagtagatcattgtc

SEQ ID NO: 2155071 - DNA, 25 bp, Homo sapien
aacaccagaagtagatcattgtcat

SEQ ID NO: 2155072 - DNA, 25 bp, Homo sapien
gtgtgtctccacacgcattctttaa

SEQ ID NO: 2155073 - DNA, 25 bp, Homo sapien
tccttgaggtgtttgtgatcttcct

SEQ ID NO: 2155074 - DNA, 25 bp, Homo sapien
tgtgtctccacacgcattctttaaa

SEQ ID NO: 2155075 - DNA, 25 bp, Homo sapien
tctttaaagcttagtgctaatgttc

SEQ ID NO: 2155076 - DNA, 25 bp, Homo sapien
cattacccaagcacacatagcatgt

SEQ ID NO: 2155077 - DNA, 25 bp, Homo sapien
tatcatcaatgaggtatgaagcatg

SEQ ID NO: 2155078 - DNA, 25 bp, Homo sapien
cagagtggattgaactgctgctaaa

SEQ ID NO: 2155079 - DNA, 25 bp, Homo sapien
cagcctgagttgccaccagtttttc

SEQ ID NO: 2155080 - DNA, 25 bp, Homo sapien
ttcccagaatcctcttgctaaggac

SEQ ID NO: 2155081 - DNA, 25 bp, Homo sapien
tcctcttgctaaggacaagcaggca

SEQ ID NO: 2155082 - DNA, 25 bp, Homo sapien
tcggggactactgaagttttctggc

SEQ ID NO: 2155083 - DNA, 25 bp, Homo sapien
taaggacaagcaggcaggctaatcg

SEQ ID NO: 2155084 - DNA, 25 bp, Homo sapien
tatataaagggcttggcattgcagc

SEQ ID NO: 2155085 - DNA, 25 bp, Homo sapien
taatcagtctgcagttcggcagtct

SEQ ID NO: 2155086 - DNA, 25 bp, Homo sapien
caaccctatgacttagctttgagct

SEQ ID NO: 2155087 - DNA, 25 bp, Homo sapien
gcatcttcccatcaacttcgtagct

SEQ ID NO: 2155088 - DNA, 25 bp, Homo sapien
cgaacatctgtaactgggcagggct

SEQ ID NO: 2155089 - DNA, 25 bp, Homo sapien
caagtagagagcctcggatctggaa

SEQ ID NO: 2155090 - DNA, 25 bp, Homo sapien
ggctgtcatcaagcagccctgttga

SEQ ID NO: 2155091 - DNA, 25 bp, Homo sapien
gaaatgtctcttttacctggcctcc

SEQ ID NO: 2155092 - DNA, 25 bp, Homo sapien
tgtgacatgaccctcctaggagctg

SEQ ID NO: 2155093 - DNA, 25 bp, Homo sapien
tatagggatccttgtgtgctgtcac

SEQ ID NO: 2155094 - DNA, 25 bp, Homo sapien
gaggctttcctttgggcactaatgg

SEQ ID NO: 2155095 - DNA, 25 bp, Homo sapien
tccacaagggcgagatttccaaatg

SEQ ID NO: 2155096 - DNA, 25 bp, Homo sapien
cctggagggctgttacactgatttc

SEQ ID NO: 2155097 - DNA, 25 bp, Homo sapien
tatgtggtgcccctgagtatgggct

SEQ ID NO: 2155098 - DNA, 25 bp, Homo sapien
caactggctcactagattgttccaa

SEQ ID NO: 2155099 - DNA, 25 bp, Homo sapien
ggctaggtaactctgcaggccccat

SEQ ID NO: 2155100 - DNA, 25 bp, Homo sapien
caattggtactgaggaatggttccc

SEQ ID NO: 2155101 - DNA, 25 bp, Homo sapien
tatttcccaacactgctttgcaaca

SEQ ID NO: 2155102 - DNA, 25 bp, Homo sapien
ctccaattggtactgaggaatggtt

SEQ ID NO: 2155103 - DNA, 25 bp, Homo sapien
gaaagagagcctatttcccaacact

SEQ ID NO: 2155104 - DNA, 25 bp, Homo sapien
attgtactgggccttactcttctcc

SEQ ID NO: 2155105 - DNA, 25 bp, Homo sapien
tcctccatggtcttggtttgcccag

SEQ ID NO: 2155106 - DNA, 25 bp, Homo sapien
catgaggagagattgtactgggcct

SEQ ID NO: 2155107 - DNA, 25 bp, Homo sapien
tccttttgtcttagctagagcatga

SEQ ID NO: 2155108 - DNA, 25 bp, Homo sapien
tatagtcgttttgcctttttaggca

SEQ ID NO: 2155109 - DNA, 25 bp, Homo sapien
tggtcccatgtccatcctagtgggc

SEQ ID NO: 2155110 - DNA, 25 bp, Homo sapien
cctgtatgatccaatccaaaggccc

SEQ ID NO: 2155111 - DNA, 25 bp, Homo sapien
tagtgggccctgtatgatccaatcc

SEQ ID NO: 2155112 - DNA, 25 bp, Homo sapien
tcttcttgcatccacgtttttgact

SEQ ID NO: 2155113 - DNA, 25 bp, Homo sapien
tcttcttcttgcatccacgtttttg

SEQ ID NO: 2155114 - DNA, 25 bp, Homo sapien
cacgtttttgactgtgtctttgcat

SEQ ID NO: 2155115 - DNA, 25 bp, Homo sapien
ttgcatccacgtttttgactgtgtc

SEQ ID NO: 2155116 - DNA, 25 bp, Homo sapien
ggtcccagtgttgttagcagctgat

SEQ ID NO: 2155117 - DNA, 25 bp, Homo sapien
tgtgctttaacgcctctatctccac

SEQ ID NO: 2155118 - DNA, 25 bp, Homo sapien
ttgttagcagctgattcataggtgc

SEQ ID NO: 2155119 - DNA, 25 bp, Homo sapien
gcaagtaaaccaaattcgaaatgct

SEQ ID NO: 2155120 - DNA, 25 bp, Homo sapien
tagaaatagggctggaaattggatg

SEQ ID NO: 2155121 - DNA, 25 bp, Homo sapien
ggattagaaatagggctggaaattg

SEQ ID NO: 2155122 - DNA, 25 bp, Homo sapien
aggtgagtaacattgatattgtctt

SEQ ID NO: 2155123 - DNA, 25 bp, Homo sapien
aatggattagaaatagggctggaaa

SEQ ID NO: 2155124 - DNA, 25 bp, Homo sapien
gtttctccaccttcctagctttgat

SEQ ID NO: 2155125 - DNA, 25 bp, Homo sapien
ttctccaccttcctagctttgatga

SEQ ID NO: 2155126 - DNA, 25 bp, Homo sapien
accttcctagctttgatgatctgca

SEQ ID NO: 2155127 - DNA, 25 bp, Homo sapien
tccaccttcctagctttgatgatct

SEQ ID NO: 2155128 - DNA, 25 bp, Homo sapien
tctttgaatgtgcttcgggagattc

SEQ ID NO: 2155129 - DNA, 25 bp, Homo sapien
tgcttcgggagattcacacttctcc

SEQ ID NO: 2155130 - DNA, 25 bp, Homo sapien
aatgtgcttcgggagattcacactt

SEQ ID NO: 2155131 - DNA, 25 bp, Homo sapien
ctaagcaggggtctttgaatgtgct

SEQ ID NO: 2155132 - DNA, 25 bp, Homo sapien
tgtcatcagaagagttagcagggct

SEQ ID NO: 2155133 - DNA, 25 bp, Homo sapien
tccaagcaggtagcaaatgggctcc

SEQ ID NO: 2155134 - DNA, 25 bp, Homo sapien
aacagggaccattaacagggtgact

SEQ ID NO: 2155135 - DNA, 25 bp, Homo sapien
gaccacccaggaagagagatcatgt

SEQ ID NO: 2155136 - DNA, 25 bp, Homo sapien
cagggttttccgtacgctgactaat

SEQ ID NO: 2155137 - DNA, 25 bp, Homo sapien
tcacgggggttgttctttgttcatc

SEQ ID NO: 2155138 - DNA, 25 bp, Homo sapien
ttttccgtacgctgactaatgctta

SEQ ID NO: 2155139 - DNA, 25 bp, Homo sapien
tacgctgactaatgcttacagctgg

SEQ ID NO: 2155140 - DNA, 25 bp, Homo sapien
tggatggaaagagtgcaaaaacacc

SEQ ID NO: 2155141 - DNA, 25 bp, Homo sapien
cttggatggaaagagtgcaaaaaca

SEQ ID NO: 2155142 - DNA, 25 bp, Homo sapien
gatggaaagagtgcaaaaacaccat

SEQ ID NO: 2155143 - DNA, 25 bp, Homo sapien
ttggatggaaagagtgcaaaaacac

SEQ ID NO: 2155144 - DNA, 25 bp, Homo sapien
tgaggaaccccagtaagtatgagaa

SEQ ID NO: 2155145 - DNA, 25 bp, Homo sapien
ggtctggccagacccgaaaggttca

SEQ ID NO: 2155146 - DNA, 25 bp, Homo sapien
catgcttggagtaataatggttagg

SEQ ID NO: 2155147 - DNA, 25 bp, Homo sapien
actgtggaggacttgaatggcaatg

SEQ ID NO: 2155148 - DNA, 25 bp, Homo sapien
tcaggctctaagctgttgggctcag

SEQ ID NO: 2155149 - DNA, 25 bp, Homo sapien
tcagtactggtcgtgtggttcatca

SEQ ID NO: 2155150 - DNA, 25 bp, Homo sapien
ttacttagctgaggatacatttctt

SEQ ID NO: 2155151 - DNA, 25 bp, Homo sapien
gttgggctcagttttacttagctga

SEQ ID NO: 2155152 - DNA, 25 bp, Homo sapien
cgtctgtctgtccgcagggtggcct

SEQ ID NO: 2155153 - DNA, 25 bp, Homo sapien
agggtggcctgcgtgatggttggca

SEQ ID NO: 2155154 - DNA, 25 bp, Homo sapien
tctgtctgtccgcagggtggcctgc

SEQ ID NO: 2155155 - DNA, 25 bp, Homo sapien
gcctgcgtgatggttggcagagcgt

SEQ ID NO: 2155156 - DNA, 25 bp, Homo sapien
ccacagaaaggctttccgctccggc

SEQ ID NO: 2155157 - DNA, 25 bp, Homo sapien
cacagaaaggctttccgctccggcc

SEQ ID NO: 2155158 - DNA, 25 bp, Homo sapien
ctgagaccgtccaggtgagtgcgcg

SEQ ID NO: 2155159 - DNA, 25 bp, Homo sapien
tgcgcgccggtagtcgagcgggacc

SEQ ID NO: 2155160 - DNA, 25 bp, Homo sapien
gagtgcgcgccggtagtcgagcggg

SEQ ID NO: 2155161 - DNA, 25 bp, Homo sapien
gtccaggtgagtgcgcgccggtagt

SEQ ID NO: 2155162 - DNA, 25 bp, Homo sapien
ggtagacttcgacatcaagggcgat

SEQ ID NO: 2155163 - DNA, 25 bp, Homo sapien
gacccgtaccgctcggaggatgaga

SEQ ID NO: 2155164 - DNA, 25 bp, Homo sapien
cagctgtgtgccctccgtggtggac

SEQ ID NO: 2155165 - DNA, 25 bp, Homo sapien
gatgacctgatcgtgttcctgcaca

SEQ ID NO: 2155166 - DNA, 25 bp, Homo sapien
ctatttgccgtgatcgtcctccaat

SEQ ID NO: 2155167 - DNA, 25 bp, Homo sapien
atttgccgtgatcgtcctccaatac

SEQ ID NO: 2155168 - DNA, 25 bp, Homo sapien
tatttgccgtgatcgtcctccaata

SEQ ID NO: 2155169 - DNA, 25 bp, Homo sapien
cggatgaccaagcgggcgcgggcgc

SEQ ID NO: 2155170 - DNA, 25 bp, Homo sapien
ggatgaccaagcgggcgcgggcgcc

SEQ ID NO: 2155171 - DNA, 25 bp, Homo sapien
ggtagagaagggcgtaagtttcagc

SEQ ID NO: 2155172 - DNA, 25 bp, Homo sapien
agagaagggcgtaagtttcagctgc

SEQ ID NO: 2155173 - DNA, 25 bp, Homo sapien
gaagggcgtaagtttcagctgccat

SEQ ID NO: 2155174 - DNA, 25 bp, Homo sapien
agaagggcgtaagtttcagctgcca

SEQ ID NO: 2155175 - DNA, 25 bp, Homo sapien
tctccaaagaatttcggccccatgg

SEQ ID NO: 2155176 - DNA, 25 bp, Homo sapien
catggccaggtacgttctaggtgaa

SEQ ID NO: 2155177 - DNA, 25 bp, Homo sapien
tgaaaaccgggtcgcgcctccaggc

SEQ ID NO: 2155178 - DNA, 25 bp, Homo sapien
tgctccgtgcgatcttctccaaaga

SEQ ID NO: 2155179 - DNA, 25 bp, Homo sapien
ccgcttttcgcgctgctgtcccggg

SEQ ID NO: 2155180 - DNA, 25 bp, Homo sapien
tggacaagccccgaaaggcgtcttc

SEQ ID NO: 2155181 - DNA, 25 bp, Homo sapien
acgttctcaggcgacgctgggactg

SEQ ID NO: 2155182 - DNA, 25 bp, Homo sapien
gcgccgcaggcggatgcacgttctc

SEQ ID NO: 2155183 - DNA, 25 bp, Homo sapien
ggaaaagctccaatttgcgcctttg

SEQ ID NO: 2155184 - DNA, 25 bp, Homo sapien
ccgcttccgctggagaatggaaatt

SEQ ID NO: 2155185 - DNA, 25 bp, Homo sapien
aatggaaattggcaaagagagacgg

SEQ ID NO: 2155186 - DNA, 25 bp, Homo sapien
ccccgcttccgctggagaatggaaa

SEQ ID NO: 2155187 - DNA, 25 bp, Homo sapien
tgttaaaccctgcattcctggtcca

SEQ ID NO: 2155188 - DNA, 25 bp, Homo sapien
gcctttcggacactggagcttgagg

SEQ ID NO: 2155189 - DNA, 25 bp, Homo sapien
taaaccctgcattcctggtccagca

SEQ ID NO: 2155190 - DNA, 25 bp, Homo sapien
agagcctttcggacactggagcttg

SEQ ID NO: 2155191 - DNA, 25 bp, Homo sapien
cagcaagggagatactgggagagcc

SEQ ID NO: 2155192 - DNA, 25 bp, Homo sapien
cccaggactcagctcgtggtctgca

SEQ ID NO: 2155193 - DNA, 25 bp, Homo sapien
aacactgctgccaaccggtgcccct

SEQ ID NO: 2155194 - DNA, 25 bp, Homo sapien
aacaggaaacggatggagcagagct

SEQ ID NO: 2155195 - DNA, 25 bp, Homo sapien
tgtcccagatccgttgtgaggtgct

SEQ ID NO: 2155196 - DNA, 25 bp, Homo sapien
cccagatccgttgtgaggtgctgtg

SEQ ID NO: 2155197 - DNA, 25 bp, Homo sapien
ttctgtcccagatccgttgtgaggt

SEQ ID NO: 2155198 - DNA, 25 bp, Homo sapien
tctgtcccagatccgttgtgaggtg

SEQ ID NO: 2155199 - DNA, 25 bp, Homo sapien
tgtggactagtctctgttgaagata

SEQ ID NO: 2155200 - DNA, 25 bp, Homo sapien
tcgatggtaagttctctgagaatgt

SEQ ID NO: 2155201 - DNA, 25 bp, Homo sapien
caggctcttgcatattaggtgtatt

SEQ ID NO: 2155202 - DNA, 25 bp, Homo sapien
ttccttatatcgatggtaagttctc

SEQ ID NO: 2155203 - DNA, 25 bp, Homo sapien
aataccggggagtgagcctgagacc

SEQ ID NO: 2155204 - DNA, 25 bp, Homo sapien
gctttgcaaaggcactccggttact

SEQ ID NO: 2155205 - DNA, 25 bp, Homo sapien
gataaaagaacagcctgtggcactg

SEQ ID NO: 2155206 - DNA, 25 bp, Homo sapien
ctgtggcactgaccaagagcctttg

SEQ ID NO: 2155207 - DNA, 25 bp, Homo sapien
tgtcagtgctactgaagtcatcatt

SEQ ID NO: 2155208 - DNA, 25 bp, Homo sapien
caaagaaccttcattgtaagttgga

SEQ ID NO: 2155209 - DNA, 25 bp, Homo sapien
aaatatagtacattgtcagtgctac

SEQ ID NO: 2155210 - DNA, 25 bp, Homo sapien
agtcatcattgatttcgcagctatg

SEQ ID NO: 2155211 - DNA, 25 bp, Homo sapien
ggagtttgagattcctccaaatatt

SEQ ID NO: 2155212 - DNA, 25 bp, Homo sapien
atggagggagtttgagattcctcca

SEQ ID NO: 2155213 - DNA, 25 bp, Homo sapien
tattttccacatttttgtcatccat

SEQ ID NO: 2155214 - DNA, 25 bp, Homo sapien
gagattcctccaaatattttccaca

SEQ ID NO: 2155215 - DNA, 25 bp, Homo sapien
caacgccgtttgtctatggggttat

SEQ ID NO: 2155216 - DNA, 25 bp, Homo sapien
cttttccaacgccgtttgtctatgg

SEQ ID NO: 2155217 - DNA, 25 bp, Homo sapien
gccgtttgtctatggggttataggc

SEQ ID NO: 2155218 - DNA, 25 bp, Homo sapien
ccttttccaacgccgtttgtctatg

SEQ ID NO: 2155219 - DNA, 25 bp, Homo sapien
cctctggtgcatactggatatcctt

SEQ ID NO: 2155220 - DNA, 25 bp, Homo sapien
ttaggccaccagtatgtcctctggt

SEQ ID NO: 2155221 - DNA, 25 bp, Homo sapien
tttgatcagggcctacccagaaggc

SEQ ID NO: 2155222 - DNA, 25 bp, Homo sapien
gatatccttgggcacggttggtgcc

SEQ ID NO: 2155223 - DNA, 25 bp, Homo sapien
aatgggtccttctaaacgtgtctgt

SEQ ID NO: 2155224 - DNA, 25 bp, Homo sapien
agctgtgtcatatgtcctccatatc

SEQ ID NO: 2155225 - DNA, 25 bp, Homo sapien
ctcagtagacttctgctgttggttg

SEQ ID NO: 2155226 - DNA, 25 bp, Homo sapien
acgtgtctgtctttatcaggccaac

SEQ ID NO: 2155227 - DNA, 25 bp, Homo sapien
ccaaaagggcattacctctgttaca

SEQ ID NO: 2155228 - DNA, 25 bp, Homo sapien
gatagaattggtggccttacaagga

SEQ ID NO: 2155229 - DNA, 25 bp, Homo sapien
tgcaggaccctgattataccccttt

SEQ ID NO: 2155230 - DNA, 25 bp, Homo sapien
tatttccacgtagagaaaacaagtc

SEQ ID NO: 2155231 - DNA, 25 bp, Homo sapien
attcctggcacacttagctctaagc

SEQ ID NO: 2155232 - DNA, 25 bp, Homo sapien
gattcctggcacacttagctctaag

SEQ ID NO: 2155233 - DNA, 25 bp, Homo sapien
agattcctggcacacttagctctaa

SEQ ID NO: 2155234 - DNA, 25 bp, Homo sapien
tcctggcacacttagctctaagcat

SEQ ID NO: 2155235 - DNA, 25 bp, Homo sapien
tgtatgtcactactaagttctctgt

SEQ ID NO: 2155236 - DNA, 25 bp, Homo sapien
agttctctgttcgttgcttctgcaa

SEQ ID NO: 2155237 - DNA, 25 bp, Homo sapien
cactactaagttctctgttcgttgc

SEQ ID NO: 2155238 - DNA, 25 bp, Homo sapien
gccaaaatgtatgtcactactaagt

SEQ ID NO: 2155239 - DNA, 25 bp, Homo sapien
tcttttgctgtaatagttcatgtgc

SEQ ID NO: 2155240 - DNA, 25 bp, Homo sapien
tatcgtcttttgctgtaatagttca

SEQ ID NO: 2155241 - DNA, 25 bp, Homo sapien
tttgctgtaatagttcatgtgccct

SEQ ID NO: 2155242 - DNA, 25 bp, Homo sapien
tgctgtaatagttcatgtgccctac

SEQ ID NO: 2155243 - DNA, 25 bp, Homo sapien
cttctttgtagtatatctgaaaatg

SEQ ID NO: 2155244 - DNA, 25 bp, Homo sapien
ccttctttgtagtatatctgaaaat

SEQ ID NO: 2155245 - DNA, 25 bp, Homo sapien
tggtgattctttcctgtctagcttc

SEQ ID NO: 2155246 - DNA, 25 bp, Homo sapien
tccattttcgctgtgaattctgcaa

SEQ ID NO: 2155247 - DNA, 25 bp, Homo sapien
ttttgctgctatagggtttgctggc

SEQ ID NO: 2155248 - DNA, 25 bp, Homo sapien
ctgagctggtataggttttgctgct

SEQ ID NO: 2155249 - DNA, 25 bp, Homo sapien
ggtgatgggtgcagctcctttccat

SEQ ID NO: 2155250 - DNA, 25 bp, Homo sapien
tggttctctgaccacttttgttgtc

SEQ ID NO: 2155251 - DNA, 25 bp, Homo sapien
ggttctctgaccacttttgttgtct

SEQ ID NO: 2155252 - DNA, 25 bp, Homo sapien
taaaaggctttaagatgtggttctc

SEQ ID NO: 2155253 - DNA, 25 bp, Homo sapien
aggctttaagatgtggttctctgac

SEQ ID NO: 2155254 - DNA, 25 bp, Homo sapien
gtgagctttggcttgagctcttctc

SEQ ID NO: 2155255 - DNA, 25 bp, Homo sapien
gctctccttgcatgggtccttctgg

SEQ ID NO: 2155256 - DNA, 25 bp, Homo sapien
tgatgacggggcaaggacttcagta

SEQ ID NO: 2155257 - DNA, 25 bp, Homo sapien
tgatatagtgattgatgacggggca

SEQ ID NO: 2155258 - DNA, 25 bp, Homo sapien
gccaaatgcatgactaggaatacta

SEQ ID NO: 2155259 - DNA, 25 bp, Homo sapien
gcatgcagaggaaataccaagatgt

SEQ ID NO: 2155260 - DNA, 25 bp, Homo sapien
ctggaaaacagtagagggttagctt

SEQ ID NO: 2155261 - DNA, 25 bp, Homo sapien
tagcttcagagtgccatttgctgtt

SEQ ID NO: 2155262 - DNA, 25 bp, Homo sapien
tttctttgtagttgatcacagccat

SEQ ID NO: 2155263 - DNA, 25 bp, Homo sapien
ttgtagttgatcacagccatccatg

SEQ ID NO: 2155264 - DNA, 25 bp, Homo sapien
ttgatcacagccatccatgtggctt

SEQ ID NO: 2155265 - DNA, 25 bp, Homo sapien
ggagtactcagataggttttctttg

SEQ ID NO: 2155266 - DNA, 25 bp, Homo sapien
aagcgtccctggatgaagattccca

SEQ ID NO: 2155267 - DNA, 25 bp, Homo sapien
taagcgtccctggatgaagattccc

SEQ ID NO: 2155268 - DNA, 25 bp, Homo sapien
agcgtccctggatgaagattcccaa

SEQ ID NO: 2155269 - DNA, 25 bp, Homo sapien
ttaagcgtccctggatgaagattcc

SEQ ID NO: 2155270 - DNA, 25 bp, Homo sapien
ccaatgaaaccagatactggatttc

SEQ ID NO: 2155271 - DNA, 25 bp, Homo sapien
gccaagaaaaccaatgaaaccagat

SEQ ID NO: 2155272 - DNA, 25 bp, Homo sapien
caccctagcaggagtaaactgctga

SEQ ID NO: 2155273 - DNA, 25 bp, Homo sapien
tgagtgcagataccacgcagtgcat

SEQ ID NO: 2155274 - DNA, 25 bp, Homo sapien
tgcagcactttagaagacatcgcat

SEQ ID NO: 2155275 - DNA, 25 bp, Homo sapien
ctttaatggctatagtggaactgca

SEQ ID NO: 2155276 - DNA, 25 bp, Homo sapien
cactttagaagacatcgcatttgca

SEQ ID NO: 2155277 - DNA, 25 bp, Homo sapien
catctttaatggctatagtggaact

SEQ ID NO: 2155278 - DNA, 25 bp, Homo sapien
tccccgctcatattcgccgatgatg

SEQ ID NO: 2155279 - DNA, 25 bp, Homo sapien
tataaaataaagacctcggctgagg

SEQ ID NO: 2155280 - DNA, 25 bp, Homo sapien
tatcacattgtcatctggttcagag

SEQ ID NO: 2155281 - DNA, 25 bp, Homo sapien
ctttggattagtgcaggtcagccac

SEQ ID NO: 2155282 - DNA, 25 bp, Homo sapien
ccctcctatttcgtcagctccttga

SEQ ID NO: 2155283 - DNA, 25 bp, Homo sapien
tcctatttcgtcagctccttgaggg

SEQ ID NO: 2155284 - DNA, 25 bp, Homo sapien
ctcctatttcgtcagctccttgagg

SEQ ID NO: 2155285 - DNA, 25 bp, Homo sapien
cctcctatttcgtcagctccttgag

SEQ ID NO: 2155286 - DNA, 25 bp, Homo sapien
cttatcttccgaaatgactcttcaa

SEQ ID NO: 2155287 - DNA, 25 bp, Homo sapien
gctgtgctcgaaataccaaactgat

SEQ ID NO: 2155288 - DNA, 25 bp, Homo sapien
caagtccctctcattgctcttatct

SEQ ID NO: 2155289 - DNA, 25 bp, Homo sapien
gccactgagctgtgctcgaaatacc

SEQ ID NO: 2155290 - DNA, 25 bp, Homo sapien
ggtgtgttcacgacggcaggttcca

SEQ ID NO: 2155291 - DNA, 25 bp, Homo sapien
ggacaacaacgatgacgacctcagt

SEQ ID NO: 2155292 - DNA, 25 bp, Homo sapien
caacattgcgattgggatgctggcc

SEQ ID NO: 2155293 - DNA, 25 bp, Homo sapien
tgctctgccgaagaccttaaaatgg

SEQ ID NO: 2155294 - DNA, 25 bp, Homo sapien
acaaataattctaggataacaggcc

SEQ ID NO: 2155295 - DNA, 25 bp, Homo sapien
gaaagatacaaataattctaggata

SEQ ID NO: 2155296 - DNA, 25 bp, Homo sapien
tacaaataattctaggataacaggc

SEQ ID NO: 2155297 - DNA, 25 bp, Homo sapien
aaagatacaaataattctaggataa

SEQ ID NO: 2155298 - DNA, 25 bp, Homo sapien
tggtagcagcaagagagcccattac

SEQ ID NO: 2155299 - DNA, 25 bp, Homo sapien
ctggtagcagcaagagagcccatta

SEQ ID NO: 2155300 - DNA, 25 bp, Homo sapien
cactacattgcacccaactctaatg

SEQ ID NO: 2155301 - DNA, 25 bp, Homo sapien
taactgatcccggtgttttcaacac

SEQ ID NO: 2155302 - DNA, 25 bp, Homo sapien
gtgcaaacccccaagtacaaatctg

SEQ ID NO: 2155303 - DNA, 25 bp, Homo sapien
tggaatttgcagaacattggcaacc

SEQ ID NO: 2155304 - DNA, 25 bp, Homo sapien
ggagaacattgtgggtattgctgct

SEQ ID NO: 2155305 - DNA, 25 bp, Homo sapien
ccccaggagaacattgtgggtattg

SEQ ID NO: 2155306 - DNA, 25 bp, Homo sapien
ctgtacagcattgtttcttgtccag

SEQ ID NO: 2155307 - DNA, 25 bp, Homo sapien
tgaaccccaggagaacattgtgggt

SEQ ID NO: 2155308 - DNA, 25 bp, Homo sapien
gccccaaaatggcactaaacgatgt

SEQ ID NO: 2155309 - DNA, 25 bp, Homo sapien
ggtatatcatcttaatggccaatgg

SEQ ID NO: 2155310 - DNA, 25 bp, Homo sapien
cttttcgaggctttcttaatggtga

SEQ ID NO: 2155311 - DNA, 25 bp, Homo sapien
tccccaccgtgactgacattttcag

SEQ ID NO: 2155312 - DNA, 25 bp, Homo sapien
ctttgatatcctctgtcattttgga

SEQ ID NO: 2155313 - DNA, 25 bp, Homo sapien
ctttcagcttttgggacaaggtaag

SEQ ID NO: 2155314 - DNA, 25 bp, Homo sapien
catagggagtagacaaaattccttt

SEQ ID NO: 2155315 - DNA, 25 bp, Homo sapien
tgatatcctctgtcattttggaaaa

SEQ ID NO: 2155316 - DNA, 25 bp, Homo sapien
catctgctctgccagcagttgtcct

SEQ ID NO: 2155317 - DNA, 25 bp, Homo sapien
tgtcctgtcccagtaagtaccttcc

SEQ ID NO: 2155318 - DNA, 25 bp, Homo sapien
ttgtcctgtcccagtaagtaccttc

SEQ ID NO: 2155319 - DNA, 25 bp, Homo sapien
tggagttgccttttgtgaggctaga

SEQ ID NO: 2155320 - DNA, 25 bp, Homo sapien
catgtgtgcatcagcctattggagt

SEQ ID NO: 2155321 - DNA, 25 bp, Homo sapien
ctctgcatgtgtgcatcagcctatt

SEQ ID NO: 2155322 - DNA, 25 bp, Homo sapien
tgcatgtgtgcatcagcctattgga

SEQ ID NO: 2155323 - DNA, 25 bp, Homo sapien
gtcatgtggatcctgcctagagttt

SEQ ID NO: 2155324 - DNA, 25 bp, Homo sapien
tgtggatcctgcctagagtttccca

SEQ ID NO: 2155325 - DNA, 25 bp, Homo sapien
tggaccccagttattttgactgtgg

SEQ ID NO: 2155326 - DNA, 25 bp, Homo sapien
ctggtggaccccagttattttgact

SEQ ID NO: 2155327 - DNA, 25 bp, Homo sapien
tgtcagtgtggacgtgtttttcatt

SEQ ID NO: 2155328 - DNA, 25 bp, Homo sapien
ccatgaccaaattccttaatagaaa

SEQ ID NO: 2155329 - DNA, 25 bp, Homo sapien
gaaaacagtctatttctgtcagtgt

SEQ ID NO: 2155330 - DNA, 25 bp, Homo sapien
taattgttcccatgaccaaattcct

SEQ ID NO: 2155331 - DNA, 25 bp, Homo sapien
ttcctccttattagaccgtggctct

SEQ ID NO: 2155332 - DNA, 25 bp, Homo sapien
gaagtttgtcaaagggtggcagaaa

SEQ ID NO: 2155333 - DNA, 25 bp, Homo sapien
ctatcagcaacctgtggcccttcag

SEQ ID NO: 2155334 - DNA, 25 bp, Homo sapien
gctctaatgagatggtgagcatatt

SEQ ID NO: 2155335 - DNA, 25 bp, Homo sapien
cagtcattcggaccctcggacctaa

SEQ ID NO: 2155336 - DNA, 25 bp, Homo sapien
tctgactttggaggaccagccttca

SEQ ID NO: 2155337 - DNA, 25 bp, Homo sapien
gcgagcagtcattcggaccctcgga

SEQ ID NO: 2155338 - DNA, 25 bp, Homo sapien
gaccctcggacctaagtgagtctcc

SEQ ID NO: 2155339 - DNA, 25 bp, Homo sapien
gtccacctgcaatcgggaccacggg

SEQ ID NO: 2155340 - DNA, 25 bp, Homo sapien
aaggaggtccacctgcaatcgggac

SEQ ID NO: 2155341 - DNA, 25 bp, Homo sapien
gcaatcgggaccacggggcagtatt

SEQ ID NO: 2155342 - DNA, 25 bp, Homo sapien
ggaggtccacctgcaatcgggacca

SEQ ID NO: 2155343 - DNA, 25 bp, Homo sapien
cctgccagcaggttaccagcttctg

SEQ ID NO: 2155344 - DNA, 25 bp, Homo sapien
ctgccagcaggttaccagcttctgg

SEQ ID NO: 2155345 - DNA, 25 bp, Homo sapien
tatggacggcactacgttcataagc

SEQ ID NO: 2155346 - DNA, 25 bp, Homo sapien
ttagctctgcatatggacggcacta

SEQ ID NO: 2155347 - DNA, 25 bp, Homo sapien
cggcactacgttcataagcatccag

SEQ ID NO: 2155348 - DNA, 25 bp, Homo sapien
tctgcatatggacggcactacgttc

SEQ ID NO: 2155349 - DNA, 25 bp, Homo sapien
aaatcccgaggaatttgcaggtgga

SEQ ID NO: 2155350 - DNA, 25 bp, Homo sapien
gtgtccagcagcgagctaggcaatt

SEQ ID NO: 2155351 - DNA, 25 bp, Homo sapien
aaagctgggcagttcacccctagca

SEQ ID NO: 2155352 - DNA, 25 bp, Homo sapien
gaatacagaatcattgacttgtaca

SEQ ID NO: 2155353 - DNA, 25 bp, Homo sapien
gacacggagttggtgtggagttgca

SEQ ID NO: 2155354 - DNA, 25 bp, Homo sapien
aggacacggagttggtgtggagttg

SEQ ID NO: 2155355 - DNA, 25 bp, Homo sapien
ggtcacaaaggacacggagttggtg

SEQ ID NO: 2155356 - DNA, 25 bp, Homo sapien
tcacaaaggacacggagttggtgtg

SEQ ID NO: 2155357 - DNA, 25 bp, Homo sapien
tggcgcaggaacccgagggaatctc

SEQ ID NO: 2155358 - DNA, 25 bp, Homo sapien
ttccagattggcgttccaggtgtca

SEQ ID NO: 2155359 - DNA, 25 bp, Homo sapien
cagattggcgttccaggtgtcactg

SEQ ID NO: 2155360 - DNA, 25 bp, Homo sapien
cccctttccagattggcgttccagg

SEQ ID NO: 2155361 - DNA, 25 bp, Homo sapien
gcagtcttactacagcagctttgtg

SEQ ID NO: 2155362 - DNA, 25 bp, Homo sapien
ccagcctcactaatggtggacttca

SEQ ID NO: 2155363 - DNA, 25 bp, Homo sapien
tgctgtgctcacagcaaaaatttca

SEQ ID NO: 2155364 - DNA, 25 bp, Homo sapien
ttttagctctaagcccctgaatggg

SEQ ID NO: 2155365 - DNA, 25 bp, Homo sapien
acttgccagtggacttccactgcca

SEQ ID NO: 2155366 - DNA, 25 bp, Homo sapien
ccattaaggacttagacctaacttg

SEQ ID NO: 2155367 - DNA, 25 bp, Homo sapien
aggacttagacctaacttgccagtg

SEQ ID NO: 2155368 - DNA, 25 bp, Homo sapien
ccagtggacttccactgccatttcg

SEQ ID NO: 2155369 - DNA, 25 bp, Homo sapien
cttggccaagactgttcaggggttg

SEQ ID NO: 2155370 - DNA, 25 bp, Homo sapien
tcaggggttggtagtatcgactgtc

SEQ ID NO: 2155371 - DNA, 25 bp, Homo sapien
tagtatcgactgtcgtgtgctgtca

SEQ ID NO: 2155372 - DNA, 25 bp, Homo sapien
cgactgtcgtgtgctgtcatgggtt

SEQ ID NO: 2155373 - DNA, 25 bp, Homo sapien
gctgcatttatgagacctggccact

SEQ ID NO: 2155374 - DNA, 25 bp, Homo sapien
tgagggctagctgcatttatgagac

SEQ ID NO: 2155375 - DNA, 25 bp, Homo sapien
ggctagctgcatttatgagacctgg

SEQ ID NO: 2155376 - DNA, 25 bp, Homo sapien
cttggatgagggctagctgcattta

SEQ ID NO: 2155377 - DNA, 25 bp, Homo sapien
aagaaacacaagaggtatccctggg

SEQ ID NO: 2155378 - DNA, 25 bp, Homo sapien
gaaagaaacacaagaggtatccctg

SEQ ID NO: 2155379 - DNA, 25 bp, Homo sapien
tatccctggggtctacttccccaga

SEQ ID NO: 2155380 - DNA, 25 bp, Homo sapien
tccccagacatcatcctgcagggac

SEQ ID NO: 2155381 - DNA, 25 bp, Homo sapien
gccagagtcattccagagatcccag

SEQ ID NO: 2155382 - DNA, 25 bp, Homo sapien
gatgtcttaggccactctattctgc

SEQ ID NO: 2155383 - DNA, 25 bp, Homo sapien
tgaattctggccagtcacatgcaca

SEQ ID NO: 2155384 - DNA, 25 bp, Homo sapien
caaacattgcttctaggtgccccac

SEQ ID NO: 2155385 - DNA, 25 bp, Homo sapien
ttccacactcagtaaagcactggct

SEQ ID NO: 2155386 - DNA, 25 bp, Homo sapien
tggtttggattgtaagagtaagggc

SEQ ID NO: 2155387 - DNA, 25 bp, Homo sapien
tattccttggatgctacaggttgcc

SEQ ID NO: 2155388 - DNA, 25 bp, Homo sapien
gatgctacaggttgccttccacact

SEQ ID NO: 2155389 - DNA, 25 bp, Homo sapien
agaggggtgcacattggaaagttca

SEQ ID NO: 2155390 - DNA, 25 bp, Homo sapien
gtgcacattggaaagttcagggtga

SEQ ID NO: 2155391 - DNA, 25 bp, Homo sapien
acattggaaagttcagggtgacttc

SEQ ID NO: 2155392 - DNA, 25 bp, Homo sapien
ctgagctgtcttgcaggtcaaggga

SEQ ID NO: 2155393 - DNA, 25 bp, Homo sapien
aagaggttgtttgtgttattgttca

SEQ ID NO: 2155394 - DNA, 25 bp, Homo sapien
taattttattagaagtagccagtta

SEQ ID NO: 2155395 - DNA, 25 bp, Homo sapien
gaagtagccagttatttattaaagc

SEQ ID NO: 2155396 - DNA, 25 bp, Homo sapien
gaatattgggggctgttgtaaacag

SEQ ID NO: 2155397 - DNA, 25 bp, Homo sapien
ggaatgtgctttctgtacgtggcag

SEQ ID NO: 2155398 - DNA, 25 bp, Homo sapien
gtggcagccctgatgatttgacaat

SEQ ID NO: 2155399 - DNA, 25 bp, Homo sapien
tacaaaagtctccttttgctagcac

SEQ ID NO: 2155400 - DNA, 25 bp, Homo sapien
aagtctccttttgctagcacatcaa

SEQ ID NO: 2155401 - DNA, 25 bp, Homo sapien
gggccaaccctattaatgtcgcatg

SEQ ID NO: 2155402 - DNA, 25 bp, Homo sapien
tacagaagagccaattgatagccaa

SEQ ID NO: 2155403 - DNA, 25 bp, Homo sapien
tcagatatcccgcaaacaagggcct

SEQ ID NO: 2155404 - DNA, 25 bp, Homo sapien
acaagggcctccgtggctcgtatca

SEQ ID NO: 2155405 - DNA, 25 bp, Homo sapien
ggctggagttatatagcaacctgca

SEQ ID NO: 2155406 - DNA, 25 bp, Homo sapien
taattggcagtcttaagccctccag

SEQ ID NO: 2155407 - DNA, 25 bp, Homo sapien
taccttgcaggattagtggacctag

SEQ ID NO: 2155408 - DNA, 25 bp, Homo sapien
tattaaggtcagatgactccaggct

SEQ ID NO: 2155409 - DNA, 25 bp, Homo sapien
gatactttcaatttgtgagcatccg

SEQ ID NO: 2155410 - DNA, 25 bp, Homo sapien
tgtgggccagatttctgaagtgctg

SEQ ID NO: 2155411 - DNA, 25 bp, Homo sapien
gtctcaagcttgtctgtgggccaga

SEQ ID NO: 2155412 - DNA, 25 bp, Homo sapien
tcttaggtcctgtgacaggcattac

SEQ ID NO: 2155413 - DNA, 25 bp, Homo sapien
ctctcattggttactgtgggatcag

SEQ ID NO: 2155414 - DNA, 25 bp, Homo sapien
gcactgctgccaagtattatcttta

SEQ ID NO: 2155415 - DNA, 25 bp, Homo sapien
tttcaaaccgataagcacagcactg

SEQ ID NO: 2155416 - DNA, 25 bp, Homo sapien
tgggatcaggaaaaactaggagctt

SEQ ID NO: 2155417 - DNA, 25 bp, Homo sapien
gcaatggatgggagcttgagggagc

SEQ ID NO: 2155418 - DNA, 25 bp, Homo sapien
ctgttctttgtagtgggagacagct

SEQ ID NO: 2155419 - DNA, 25 bp, Homo sapien
aatggatgggagcttgagggagccc

SEQ ID NO: 2155420 - DNA, 25 bp, Homo sapien
gctgtgcaatggatgggagcttgag

SEQ ID NO: 2155421 - DNA, 25 bp, Homo sapien
ttttcagcagcattcgtgtctagat

SEQ ID NO: 2155422 - DNA, 25 bp, Homo sapien
agttgattatgtgttctctttacca

SEQ ID NO: 2155423 - DNA, 25 bp, Homo sapien
tgtttggaacagtgagtattcttag

SEQ ID NO: 2155424 - DNA, 25 bp, Homo sapien
cattcgtgtctagatatctttggaa

SEQ ID NO: 2155425 - DNA, 25 bp, Homo sapien
gcccaaccttttgtagtctgagaaa

SEQ ID NO: 2155426 - DNA, 25 bp, Homo sapien
catgcactgtagtgcttagtgctgg

SEQ ID NO: 2155427 - DNA, 25 bp, Homo sapien
ccacagagtctcacaagctggcctg

SEQ ID NO: 2155428 - DNA, 25 bp, Homo sapien
gctggctgtagtggagcccaacctt

SEQ ID NO: 2155429 - DNA, 25 bp, Homo sapien
tcatttgagcgacaattgttctggg

SEQ ID NO: 2155430 - DNA, 25 bp, Homo sapien
tttaagacagactctagttatctca

SEQ ID NO: 2155431 - DNA, 25 bp, Homo sapien
gtataaaagggtcataacctctctc

SEQ ID NO: 2155432 - DNA, 25 bp, Homo sapien
cataacctctctcagaggaggcaaa

SEQ ID NO: 2155433 - DNA, 25 bp, Homo sapien
tataggacggctctcaaagctgtgc

SEQ ID NO: 2155434 - DNA, 25 bp, Homo sapien
aaagtttcatcctggctgtcttcag

SEQ ID NO: 2155435 - DNA, 25 bp, Homo sapien
gctgccgaggattaggagaaccctg

SEQ ID NO: 2155436 - DNA, 25 bp, Homo sapien
ctgctgtctgtccattagctgcacg

SEQ ID NO: 2155437 - DNA, 25 bp, Homo sapien
tttcaggctatcaggtccaacagca

SEQ ID NO: 2155438 - DNA, 25 bp, Homo sapien
gcccgaaatctaacacccatgagtg

SEQ ID NO: 2155439 - DNA, 25 bp, Homo sapien
ggtgctggccacatgtatatttcat

SEQ ID NO: 2155440 - DNA, 25 bp, Homo sapien
tccaacagcagtatgtacccacggt

SEQ ID NO: 2155441 - DNA, 25 bp, Homo sapien
caagatgcagctgtatagattaatt

SEQ ID NO: 2155442 - DNA, 25 bp, Homo sapien
cccaatggaaacacaattgggacat

SEQ ID NO: 2155443 - DNA, 25 bp, Homo sapien
caattgggacatacaagatgcagct

SEQ ID NO: 2155444 - DNA, 25 bp, Homo sapien
aaacacaattgggacatacaagatg

SEQ ID NO: 2155445 - DNA, 25 bp, Homo sapien
ggtcctggaaagaaatcatccaacg

SEQ ID NO: 2155446 - DNA, 25 bp, Homo sapien
tttgaaagatccatggcttgcttta

SEQ ID NO: 2155447 - DNA, 25 bp, Homo sapien
tattttgacaggtggttggtgaaag

SEQ ID NO: 2155448 - DNA, 25 bp, Homo sapien
ggaaagaaatcatccaacggcttct

SEQ ID NO: 2155449 - DNA, 25 bp, Homo sapien
catgcaggacggagaatgatgacac

SEQ ID NO: 2155450 - DNA, 25 bp, Homo sapien
caaatgtaggtcttttattccccag

SEQ ID NO: 2155451 - DNA, 25 bp, Homo sapien
tacaggtagagaaatccatgcagga

SEQ ID NO: 2155452 - DNA, 25 bp, Homo sapien
aaatgtggcctctgctaaggagcaa

SEQ ID NO: 2155453 - DNA, 25 bp, Homo sapien
tgtatatatgggtcctacctcccta

SEQ ID NO: 2155454 - DNA, 25 bp, Homo sapien
tggaacgcaaccgatcagaggctga

SEQ ID NO: 2155455 - DNA, 25 bp, Homo sapien
tctcaggatgactggcatacatgca

SEQ ID NO: 2155456 - DNA, 25 bp, Homo sapien
tctaggaagtcagagtgattcagcc

SEQ ID NO: 2155457 - DNA, 25 bp, Homo sapien
tacctgggagcccttattctcatat

SEQ ID NO: 2155458 - DNA, 25 bp, Homo sapien
tgacaccagacagcttgtccgcttt

SEQ ID NO: 2155459 - DNA, 25 bp, Homo sapien
caatcttgagccataaatgtgcctg

SEQ ID NO: 2155460 - DNA, 25 bp, Homo sapien
tgtgcactaccacatgtcactaggc

SEQ ID NO: 2155461 - DNA, 25 bp, Homo sapien
gtctaaattactggtgtagcagcag

SEQ ID NO: 2155462 - DNA, 25 bp, Homo sapien
caaaattgggcattgctgacagctc

SEQ ID NO: 2155463 - DNA, 25 bp, Homo sapien
taatatcaccaactgagcagtgccc

SEQ ID NO: 2155464 - DNA, 25 bp, Homo sapien
ccttcggtccctatggctaatatca

SEQ ID NO: 2155465 - DNA, 25 bp, Homo sapien
ttttgtcagtcagaaggacttcaca

SEQ ID NO: 2155466 - DNA, 25 bp, Homo sapien
acaatagacttgtactcttcactgg

SEQ ID NO: 2155467 - DNA, 25 bp, Homo sapien
cattaggatcttgagcgttttgtca

SEQ ID NO: 2155468 - DNA, 25 bp, Homo sapien
gacttcacagggcaacaatagactt

SEQ ID NO: 2155469 - DNA, 25 bp, Homo sapien
aactcttgggcttgcaatgaaacac

SEQ ID NO: 2155470 - DNA, 25 bp, Homo sapien
ctgggaaacactagctaactcttgg

SEQ ID NO: 2155471 - DNA, 25 bp, Homo sapien
gggaaacactagctaactcttgggc

SEQ ID NO: 2155472 - DNA, 25 bp, Homo sapien
cactagctaactcttgggcttgcaa

SEQ ID NO: 2155473 - DNA, 25 bp, Homo sapien
cgatgattgatagaccctgaaaagt

SEQ ID NO: 2155474 - DNA, 25 bp, Homo sapien
tgctctcctcactcagtgctccacc

SEQ ID NO: 2155475 - DNA, 25 bp, Homo sapien
gaccctgaaaagtcaggtcaatgta

SEQ ID NO: 2155476 - DNA, 25 bp, Homo sapien
tgaaggaagttatccccggcgatga

SEQ ID NO: 2155477 - DNA, 25 bp, Homo sapien
cctccggtctgtttgggccttgaga

SEQ ID NO: 2155478 - DNA, 25 bp, Homo sapien
attcctccggtctgtttgggccttg

SEQ ID NO: 2155479 - DNA, 25 bp, Homo sapien
agcttttattcctccggtctgtttg

SEQ ID NO: 2155480 - DNA, 25 bp, Homo sapien
tccggtctgtttgggccttgagacg

SEQ ID NO: 2155481 - DNA, 25 bp, Homo sapien
ggagagttacttcaagggcgatgta

SEQ ID NO: 2155482 - DNA, 25 bp, Homo sapien
tacttcaagggcgatgtagaagaaa

SEQ ID NO: 2155483 - DNA, 25 bp, Homo sapien
cttcaagggcgatgtagaagaaaaa

SEQ ID NO: 2155484 - DNA, 25 bp, Homo sapien
gagttacttcaagggcgatgtagaa

SEQ ID NO: 2155485 - DNA, 25 bp, Homo sapien
cagaggtgggtttccacgttctcca

SEQ ID NO: 2155486 - DNA, 25 bp, Homo sapien
cgttctccacatgtcctactctccg

SEQ ID NO: 2155487 - DNA, 25 bp, Homo sapien
ggctgatttggatgatggaggtgta

SEQ ID NO: 2155488 - DNA, 25 bp, Homo sapien
cagcagctaagcttatgcctttcaa

SEQ ID NO: 2155489 - DNA, 25 bp, Homo sapien
gaaatgtaatcgtatccctcaactg

SEQ ID NO: 2155490 - DNA, 25 bp, Homo sapien
tatggctacagttgcaaaaacccaa

SEQ ID NO: 2155491 - DNA, 25 bp, Homo sapien
cattcattagtaacctagggctcat

SEQ ID NO: 2155492 - DNA, 25 bp, Homo sapien
tctgccatgttaccaacgagaaagc

SEQ ID NO: 2155493 - DNA, 25 bp, Homo sapien
ggaacgttcattccccgctgaagct

SEQ ID NO: 2155494 - DNA, 25 bp, Homo sapien
gtttggctgctagaacatggttacc

SEQ ID NO: 2155495 - DNA, 25 bp, Homo sapien
tccgaaggacaacgagataagcacc

SEQ ID NO: 2155496 - DNA, 25 bp, Homo sapien
gcaccctgtggtcttcctcgataaa

SEQ ID NO: 2155497 - DNA, 25 bp, Homo sapien
caaattcaggtttccgaggacagtc

SEQ ID NO: 2155498 - DNA, 25 bp, Homo sapien
ctaggttagagcaggaggaaatctc

SEQ ID NO: 2155499 - DNA, 25 bp, Homo sapien
ggaaatctcatgagcacattcagga

SEQ ID NO: 2155500 - DNA, 25 bp, Homo sapien
gctgctcagtgactctcagtacgta

SEQ ID NO: 2155501 - DNA, 25 bp, Homo sapien
catgtctatgcccaaaggtagagtt

SEQ ID NO: 2155502 - DNA, 25 bp, Homo sapien
atcagctccgcttccttgcaggtaa

SEQ ID NO: 2155503 - DNA, 25 bp, Homo sapien
tgaagagctgatgcattcctggttg

SEQ ID NO: 2155504 - DNA, 25 bp, Homo sapien
agctcctgagaaccatgtctatgcc

SEQ ID NO: 2155505 - DNA, 25 bp, Homo sapien
gaaaagctttcccatcaagttatag

SEQ ID NO: 2155506 - DNA, 25 bp, Homo sapien
tcccatcaagttatagttaatgccc

SEQ ID NO: 2155507 - DNA, 25 bp, Homo sapien
ccaatagtgaaaagctttcccatca

SEQ ID NO: 2155508 - DNA, 25 bp, Homo sapien
atagttaatgcccagcatctgagaa

SEQ ID NO: 2155509 - DNA, 25 bp, Homo sapien
ctggaaacaatgaggactcagaaca

SEQ ID NO: 2155510 - DNA, 25 bp, Homo sapien
tggaaacaatgaggactcagaacat

SEQ ID NO: 2155511 - DNA, 25 bp, Homo sapien
tgtgttatgagcaaactgattgtaa

SEQ ID NO: 2155512 - DNA, 25 bp, Homo sapien
tctctgtgttatgagcaaactgatt

SEQ ID NO: 2155513 - DNA, 25 bp, Homo sapien
tctgtgttatgagcaaactgattgt

SEQ ID NO: 2155514 - DNA, 25 bp, Homo sapien
gatctctgtgttatgagcaaactga

SEQ ID NO: 2155515 - DNA, 25 bp, Homo sapien
aggatatcacatgtgggaatggctg

SEQ ID NO: 2155516 - DNA, 25 bp, Homo sapien
caggatatcacatgtgggaatggct

SEQ ID NO: 2155517 - DNA, 25 bp, Homo sapien
ggatatcacatgtgggaatggctgc

SEQ ID NO: 2155518 - DNA, 25 bp, Homo sapien
ttgaatctggttggctaaggcatct

SEQ ID NO: 2155519 - DNA, 25 bp, Homo sapien
aaaagagtctaatttcccacaagtg

SEQ ID NO: 2155520 - DNA, 25 bp, Homo sapien
atctttggtgaattaatgttgtccc

SEQ ID NO: 2155521 - DNA, 25 bp, Homo sapien
gacaacattatgcaagtccccatga

SEQ ID NO: 2155522 - DNA, 25 bp, Homo sapien
ttctgtctgtgttagtcatgataat

SEQ ID NO: 2155523 - DNA, 25 bp, Homo sapien
gtaattctgtctgtgttagtcatga

SEQ ID NO: 2155524 - DNA, 25 bp, Homo sapien
aattctgtctgtgttagtcatgata

SEQ ID NO: 2155525 - DNA, 25 bp, Homo sapien
aggtaattctgtctgtgttagtcat

SEQ ID NO: 2155526 - DNA, 25 bp, Homo sapien
ttgcatttgacatcacagttgttag

SEQ ID NO: 2155527 - DNA, 25 bp, Homo sapien
acatcacagttgttagagaaaatgc

SEQ ID NO: 2155528 - DNA, 25 bp, Homo sapien
ttgacatcacagttgttagagaaaa

SEQ ID NO: 2155529 - DNA, 25 bp, Homo sapien
catttgacatcacagttgttagaga

SEQ ID NO: 2155530 - DNA, 25 bp, Homo sapien
tagttccctatagctggtatttccc

SEQ ID NO: 2155531 - DNA, 25 bp, Homo sapien
tgtgtctctttcatccacgcataca

SEQ ID NO: 2155532 - DNA, 25 bp, Homo sapien
ctttcatccacgcatacagcagatt

SEQ ID NO: 2155533 - DNA, 25 bp, Homo sapien
agcggcgtgcttttgggacatagtt

SEQ ID NO: 2155534 - DNA, 25 bp, Homo sapien
gatgaataacagtatggacaattag

SEQ ID NO: 2155535 - DNA, 25 bp, Homo sapien
tttctttggaaagcgataggacggc

SEQ ID NO: 2155536 - DNA, 25 bp, Homo sapien
aaagcgataggacggcacaagaggt

SEQ ID NO: 2155537 - DNA, 25 bp, Homo sapien
gacggcacaagaggttgaaatagtt

SEQ ID NO: 2155538 - DNA, 25 bp, Homo sapien
cgattaccagtgctttcaggtcatt

SEQ ID NO: 2155539 - DNA, 25 bp, Homo sapien
tgaactctcttctatgtagccgatt

SEQ ID NO: 2155540 - DNA, 25 bp, Homo sapien
tctatgtagccgattaccagtgctt

SEQ ID NO: 2155541 - DNA, 25 bp, Homo sapien
ctttgtacaattctgtctaagatcc

SEQ ID NO: 2155542 - DNA, 25 bp, Homo sapien
ttgtactcgacagtgcctcttctct

SEQ ID NO: 2155543 - DNA, 25 bp, Homo sapien
ttcaccaagacgctctgccttgtac

SEQ ID NO: 2155544 - DNA, 25 bp, Homo sapien
gacgctctgccttgtactcgacagt

SEQ ID NO: 2155545 - DNA, 25 bp, Homo sapien
ttctctccaccttagcacccctgtg

SEQ ID NO: 2155546 - DNA, 25 bp, Homo sapien
tttactcaagcatgtgctgacaagg

SEQ ID NO: 2155547 - DNA, 25 bp, Homo sapien
aattatggcagctccttatagctgg

SEQ ID NO: 2155548 - DNA, 25 bp, Homo sapien
cacatgttatatataagacctcgct

SEQ ID NO: 2155549 - DNA, 25 bp, Homo sapien
tttcactagaacagtctccaagaac

SEQ ID NO: 2155550 - DNA, 25 bp, Homo sapien
tgtttgtagatccctttgatgcatc

SEQ ID NO: 2155551 - DNA, 25 bp, Homo sapien
tttctgcgagtctaattcttctccc

SEQ ID NO: 2155552 - DNA, 25 bp, Homo sapien
tatgtttgtagatccctttgatgca

SEQ ID NO: 2155553 - DNA, 25 bp, Homo sapien
atgtttgtagatccctttgatgcat

SEQ ID NO: 2155554 - DNA, 25 bp, Homo sapien
cagatacagccaaaaggcagcaagg

SEQ ID NO: 2155555 - DNA, 25 bp, Homo sapien
taagagaagaaaccctatacacagg

SEQ ID NO: 2155556 - DNA, 25 bp, Homo sapien
caagagagctttgtggcgatgctgc

SEQ ID NO: 2155557 - DNA, 25 bp, Homo sapien
cttaaagggcaagtccaagaatctt

SEQ ID NO: 2155558 - DNA, 25 bp, Homo sapien
atgctgctgggagccttgtagacca

SEQ ID NO: 2155559 - DNA, 25 bp, Homo sapien
ttgtagtttggatagttaccgtgtc

SEQ ID NO: 2155560 - DNA, 25 bp, Homo sapien
ctttgtagtttggatagttaccgtg

SEQ ID NO: 2155561 - DNA, 25 bp, Homo sapien
tgtagtttggatagttaccgtgtcg

SEQ ID NO: 2155562 - DNA, 25 bp, Homo sapien
tttcctgtcttaggcactctaaatt

SEQ ID NO: 2155563 - DNA, 25 bp, Homo sapien
tagtttttcctgtcttaggcactct

SEQ ID NO: 2155564 - DNA, 25 bp, Homo sapien
cctgtcttaggcactctaaatttct

SEQ ID NO: 2155565 - DNA, 25 bp, Homo sapien
tcttaggcactctaaatttctgtct

SEQ ID NO: 2155566 - DNA, 25 bp, Homo sapien
tgacatctggtgtggtcttgtacat

SEQ ID NO: 2155567 - DNA, 25 bp, Homo sapien
caaaatgagttctgaatccaaatac

SEQ ID NO: 2155568 - DNA, 25 bp, Homo sapien
aatacaaagatgacatctggtgtgg

SEQ ID NO: 2155569 - DNA, 25 bp, Homo sapien
aaagatgacatctggtgtggtcttg

SEQ ID NO: 2155570 - DNA, 25 bp, Homo sapien
cagcaccaacattggcctttgcggt

SEQ ID NO: 2155571 - DNA, 25 bp, Homo sapien
tctttattgggttcttgcattcctt

SEQ ID NO: 2155572 - DNA, 25 bp, Homo sapien
ctgactttctttattgggttcttgc

SEQ ID NO: 2155573 - DNA, 25 bp, Homo sapien
gactttctttattgggttcttgcat

SEQ ID NO: 2155574 - DNA, 25 bp, Homo sapien
ccacaatggccgcagataacatatt

SEQ ID NO: 2155575 - DNA, 25 bp, Homo sapien
ggccgcagataacatattgcagccc

SEQ ID NO: 2155576 - DNA, 25 bp, Homo sapien
ttttagtttataaatcctctcatga

SEQ ID NO: 2155577 - DNA, 25 bp, Homo sapien
tagtttataaatcctctcatgaaaa

SEQ ID NO: 2155578 - DNA, 25 bp, Homo sapien
aattcattacttgtgacagtatcca

SEQ ID NO: 2155579 - DNA, 25 bp, Homo sapien
taattcattacttgtgacagtatcc

SEQ ID NO: 2155580 - DNA, 25 bp, Homo sapien
atctaattcattacttgtgacagta

SEQ ID NO: 2155581 - DNA, 25 bp, Homo sapien
ctaattcattacttgtgacagtatc

SEQ ID NO: 2155582 - DNA, 25 bp, Homo sapien
cagaggagttgtaacctgaatgcta

SEQ ID NO: 2155583 - DNA, 25 bp, Homo sapien
ggagttgtaacctgaatgctaggtt

SEQ ID NO: 2155584 - DNA, 25 bp, Homo sapien
tgcagaggagttgtaacctgaatgc

SEQ ID NO: 2155585 - DNA, 25 bp, Homo sapien
tttgcagaggagttgtaacctgaat

SEQ ID NO: 2155586 - DNA, 25 bp, Homo sapien
cctatggggatttttagcattcatc

SEQ ID NO: 2155587 - DNA, 25 bp, Homo sapien
gactcatgaataaagggcagtgtga

SEQ ID NO: 2155588 - DNA, 25 bp, Homo sapien
gtcttcacagaagactcatgaataa

SEQ ID NO: 2155589 - DNA, 25 bp, Homo sapien
tcttttgctcggatttagtgctgaa

SEQ ID NO: 2155590 - DNA, 25 bp, Homo sapien
gaccaagttgaacacacaggttttg

SEQ ID NO: 2155591 - DNA, 25 bp, Homo sapien
aagcagaccaagttgaacacacagg

SEQ ID NO: 2155592 - DNA, 25 bp, Homo sapien
aaattgattcacagccaagcagacc

SEQ ID NO: 2155593 - DNA, 25 bp, Homo sapien
aatcatatcccccagatgttcggat

SEQ ID NO: 2155594 - DNA, 25 bp, Homo sapien
cggttctggttagcattgaccgaaa

SEQ ID NO: 2155595 - DNA, 25 bp, Homo sapien
gtctcggttctggttagcattgacc

SEQ ID NO: 2155596 - DNA, 25 bp, Homo sapien
cattcagaattgtctcggttctggt

SEQ ID NO: 2155597 - DNA, 25 bp, Homo sapien
ttctggttagcattgaccgaaaact

SEQ ID NO: 2155598 - DNA, 25 bp, Homo sapien
gctagttgggctaatgagttggtca

SEQ ID NO: 2155599 - DNA, 25 bp, Homo sapien
tggtcaattgttgcagactcataca

SEQ ID NO: 2155600 - DNA, 25 bp, Homo sapien
ctaatggtgggtaaacgagaagagc

SEQ ID NO: 2155601 - DNA, 25 bp, Homo sapien
tagttgttcaggaaagctaatggtg

SEQ ID NO: 2155602 - DNA, 25 bp, Homo sapien
tgctgcaaggaacttaaggacaccc

SEQ ID NO: 2155603 - DNA, 25 bp, Homo sapien
aagtcagggctggtgccacctaagt

SEQ ID NO: 2155604 - DNA, 25 bp, Homo sapien
ttggaagtcagggctggtgccacct

SEQ ID NO: 2155605 - DNA, 25 bp, Homo sapien
ctgcaaggaacttaaggacaccctt

SEQ ID NO: 2155606 - DNA, 25 bp, Homo sapien
caagaagctgcggctcctgaaaggc

SEQ ID NO: 2155607 - DNA, 25 bp, Homo sapien
caatggtgggaagattaacataaga

SEQ ID NO: 2155608 - DNA, 25 bp, Homo sapien
gtaaccacaagaagctgcggctcct

SEQ ID NO: 2155609 - DNA, 25 bp, Homo sapien
cagagcaatggtgggaagattaaca

SEQ ID NO: 2155610 - DNA, 25 bp, Homo sapien
aggaaatggtaccacgcgtgtgcag

SEQ ID NO: 2155611 - DNA, 25 bp, Homo sapien
cccacaggcgtttgcaggaaatggt

SEQ ID NO: 2155612 - DNA, 25 bp, Homo sapien
gaaatggtaccacgcgtgtgcagaa

SEQ ID NO: 2155613 - DNA, 25 bp, Homo sapien
ctcccacaggcgtttgcaggaaatg

SEQ ID NO: 2155614 - DNA, 25 bp, Homo sapien
tgtagaagtagagatcaggcatgac

SEQ ID NO: 2155615 - DNA, 25 bp, Homo sapien
atctctgtagaagtagagatcaggc

SEQ ID NO: 2155616 - DNA, 25 bp, Homo sapien
cttcaggatctctgtagaagtagag

SEQ ID NO: 2155617 - DNA, 25 bp, Homo sapien
ctattctttttcagtctcttcagga

SEQ ID NO: 2155618 - DNA, 25 bp, Homo sapien
cattcactttgaaattcctccttca

SEQ ID NO: 2155619 - DNA, 25 bp, Homo sapien
gtccattcactttgaaattcctcct

SEQ ID NO: 2155620 - DNA, 25 bp, Homo sapien
tccattcactttgaaattcctcctt

SEQ ID NO: 2155621 - DNA, 25 bp, Homo sapien
cagtccattcactttgaaattcctc

SEQ ID NO: 2155622 - DNA, 25 bp, Homo sapien
ctgttaagtcttcgcctgcttccgg

SEQ ID NO: 2155623 - DNA, 25 bp, Homo sapien
ttaagtcttcgcctgcttccggagc

SEQ ID NO: 2155624 - DNA, 25 bp, Homo sapien
taccttcctgttaagtcttcgcctg

SEQ ID NO: 2155625 - DNA, 25 bp, Homo sapien
tcctgttaagtcttcgcctgcttcc

SEQ ID NO: 2155626 - DNA, 25 bp, Homo sapien
tctacctggcgttctttgagaggca

SEQ ID NO: 2155627 - DNA, 25 bp, Homo sapien
tactctaacaagcattgagcgatgg

SEQ ID NO: 2155628 - DNA, 25 bp, Homo sapien
ttttatggctacatcgactgacttc

SEQ ID NO: 2155629 - DNA, 25 bp, Homo sapien
gcattgagcgatggcaggcaaactt

SEQ ID NO: 2155630 - DNA, 25 bp, Homo sapien
tagtaagatggccaggctatctgcc

SEQ ID NO: 2155631 - DNA, 25 bp, Homo sapien
aattctgccaaagcccctcgtgtag

SEQ ID NO: 2155632 - DNA, 25 bp, Homo sapien
aagaccatgtaattactgaccccgg

SEQ ID NO: 2155633 - DNA, 25 bp, Homo sapien
tagagcagttagacagcctagacag

SEQ ID NO: 2155634 - DNA, 25 bp, Homo sapien
cttgaggcttgaatagtatcatgga

SEQ ID NO: 2155635 - DNA, 25 bp, Homo sapien
tgccattgataaatgttagaggctc

SEQ ID NO: 2155636 - DNA, 25 bp, Homo sapien
ttagaggctctaatcttctctttct

SEQ ID NO: 2155637 - DNA, 25 bp, Homo sapien
aacaattgtgtcagactcctcattc

SEQ ID NO: 2155638 - DNA, 25 bp, Homo sapien
gaagttttctttgagagtggttgtg

SEQ ID NO: 2155639 - DNA, 25 bp, Homo sapien
tgagagtggttgtgtcccatcttct

SEQ ID NO: 2155640 - DNA, 25 bp, Homo sapien
tctttgagagtggttgtgtcccatc

SEQ ID NO: 2155641 - DNA, 25 bp, Homo sapien
ctttgagagtggttgtgtcccatct

SEQ ID NO: 2155642 - DNA, 25 bp, Homo sapien
ccagccaaccttctgattataattc

SEQ ID NO: 2155643 - DNA, 25 bp, Homo sapien
gccagccaaccttctgattataatt

SEQ ID NO: 2155644 - DNA, 25 bp, Homo sapien
tgccagccaaccttctgattataat

SEQ ID NO: 2155645 - DNA, 25 bp, Homo sapien
cagccaaccttctgattataattca

SEQ ID NO: 2155646 - DNA, 25 bp, Homo sapien
tgtcttagtggaacttccattcatt

SEQ ID NO: 2155647 - DNA, 25 bp, Homo sapien
gtcttagtggaacttccattcattt

SEQ ID NO: 2155648 - DNA, 25 bp, Homo sapien
tctctctggtacttgggaggtgcct

SEQ ID NO: 2155649 - DNA, 25 bp, Homo sapien
ttctctctggtacttgggaggtgcc

SEQ ID NO: 2155650 - DNA, 25 bp, Homo sapien
tctggccctctactggatggaagca

SEQ ID NO: 2155651 - DNA, 25 bp, Homo sapien
taagtgtgggtataccgccctctgg

SEQ ID NO: 2155652 - DNA, 25 bp, Homo sapien
ccggtcctgacatgccaatttgaca

SEQ ID NO: 2155653 - DNA, 25 bp, Homo sapien
ggtgccgaaagctggagttctgaac

SEQ ID NO: 2155654 - DNA, 25 bp, Homo sapien
aaaggacgatttcattaggcagccc

SEQ ID NO: 2155655 - DNA, 25 bp, Homo sapien
ggctccctcccctagtgtgtataga

SEQ ID NO: 2155656 - DNA, 25 bp, Homo sapien
tggagtccgtcttggctctggcaag

SEQ ID NO: 2155657 - DNA, 25 bp, Homo sapien
tgttagaaggaaacgtggctccctc

SEQ ID NO: 2155658 - DNA, 25 bp, Homo sapien
ggctatgaccactttatgtgaatta

SEQ ID NO: 2155659 - DNA, 25 bp, Homo sapien
tagcaaagcgtaagcagactctctg

SEQ ID NO: 2155660 - DNA, 25 bp, Homo sapien
tgtagtttttcatggctatgaccac

SEQ ID NO: 2155661 - DNA, 25 bp, Homo sapien
tttaatatctaatcctagcaaagcg

SEQ ID NO: 2155662 - DNA, 25 bp, Homo sapien
gctacagccagtgttatcggaatgg

SEQ ID NO: 2155663 - DNA, 25 bp, Homo sapien
tcttcggagtacataggacagggta

SEQ ID NO: 2155664 - DNA, 25 bp, Homo sapien
taatgctgcatatagtgtttccacc

SEQ ID NO: 2155665 - DNA, 25 bp, Homo sapien
ggtctattgatctttgctacagcca

SEQ ID NO: 2155666 - DNA, 25 bp, Homo sapien
tcgacatccgaaagtgtcccctgaa

SEQ ID NO: 2155667 - DNA, 25 bp, Homo sapien
gaaagtgtcccctgaaagcacagct

SEQ ID NO: 2155668 - DNA, 25 bp, Homo sapien
ttctccagtgacctcgacatccgaa

SEQ ID NO: 2155669 - DNA, 25 bp, Homo sapien
tgtcccctgaaagcacagctgtctg

SEQ ID NO: 2155670 - DNA, 25 bp, Homo sapien
tcagttttcggaaaccacatcagca

SEQ ID NO: 2155671 - DNA, 25 bp, Homo sapien
caaggagccccgcaaagtatgtgtg

SEQ ID NO: 2155672 - DNA, 25 bp, Homo sapien
cagggtggggaactatttctgacaa

SEQ ID NO: 2155673 - DNA, 25 bp, Homo sapien
ttttcggaaaccacatcagcagatt

SEQ ID NO: 2155674 - DNA, 25 bp, Homo sapien
ctctctactagggagcaccttacgt

SEQ ID NO: 2155675 - DNA, 25 bp, Homo sapien
tactagggagcaccttacgtgaatc

SEQ ID NO: 2155676 - DNA, 25 bp, Homo sapien
ggagcaccttacgtgaatctgcttt

SEQ ID NO: 2155677 - DNA, 25 bp, Homo sapien
tagggagcaccttacgtgaatctgc

SEQ ID NO: 2155678 - DNA, 25 bp, Homo sapien
atttgggaggatgtaacttggtcac

SEQ ID NO: 2155679 - DNA, 25 bp, Homo sapien
tgtaacttggtcaccataatttggc

SEQ ID NO: 2155680 - DNA, 25 bp, Homo sapien
gaggatgtaacttggtcaccataat

SEQ ID NO: 2155681 - DNA, 25 bp, Homo sapien
aacttggtcaccataatttggcttg

SEQ ID NO: 2155682 - DNA, 25 bp, Homo sapien
catcttcccgaaacagaaagtccgt

SEQ ID NO: 2155683 - DNA, 25 bp, Homo sapien
tcaccatcattactattactcttgc

SEQ ID NO: 2155684 - DNA, 25 bp, Homo sapien
caggacaaagcaccatagtcatcac

SEQ ID NO: 2155685 - DNA, 25 bp, Homo sapien
gaaagtccgtactctgcacctgact

SEQ ID NO: 2155686 - DNA, 25 bp, Homo sapien
gaatacgttggcatattgtatggtt

SEQ ID NO: 2155687 - DNA, 25 bp, Homo sapien
ccttttgtataattgcactaagaga

SEQ ID NO: 2155688 - DNA, 25 bp, Homo sapien
ctgaataaagaattccagtcgtgca

SEQ ID NO: 2155689 - DNA, 25 bp, Homo sapien
tttggagtggaagtaacatcttttg

SEQ ID NO: 2155690 - DNA, 25 bp, Homo sapien
tcagcatgcatgcttcaatgctgct

SEQ ID NO: 2155691 - DNA, 25 bp, Homo sapien
gtgaagattgtgtatctcctagttc

SEQ ID NO: 2155692 - DNA, 25 bp, Homo sapien
tattcttgcagtctatcagcatgca

SEQ ID NO: 2155693 - DNA, 25 bp, Homo sapien
gcttttgtttggtatggccacttca

SEQ ID NO: 2155694 - DNA, 25 bp, Homo sapien
tggagattctgcctaaggaaagaag

SEQ ID NO: 2155695 - DNA, 25 bp, Homo sapien
ttgggaccctaagcggagaagttgc

SEQ ID NO: 2155696 - DNA, 25 bp, Homo sapien
taccccgtggtaaccaggatgatct

SEQ ID NO: 2155697 - DNA, 25 bp, Homo sapien
gagtaggtaaagactattgtcaccc

SEQ ID NO: 2155698 - DNA, 25 bp, Homo sapien
ccattcttcaagagtagagtagaca

SEQ ID NO: 2155699 - DNA, 25 bp, Homo sapien
ggtctattggctgaacattaaccac

SEQ ID NO: 2155700 - DNA, 25 bp, Homo sapien
catatttacgcatctttctgttggc

SEQ ID NO: 2155701 - DNA, 25 bp, Homo sapien
tctgttggcatgtaggaatgattgc

SEQ ID NO: 2155702 - DNA, 25 bp, Homo sapien
ttcctaattctatgatgggaaattt

SEQ ID NO: 2155703 - DNA, 25 bp, Homo sapien
cctaattctatgatgggaaatttct

SEQ ID NO: 2155704 - DNA, 25 bp, Homo sapien
taattctatgatgggaaatttcttc

SEQ ID NO: 2155705 - DNA, 25 bp, Homo sapien
actttcctaattctatgatgggaaa

SEQ ID NO: 2155706 - DNA, 25 bp, Homo sapien
ggaaacctggactctatacatggaa

SEQ ID NO: 2155707 - DNA, 25 bp, Homo sapien
gatgtagtccaacaaagccacagta

SEQ ID NO: 2155708 - DNA, 25 bp, Homo sapien
tatctcccaggttacggaggtggtg

SEQ ID NO: 2155709 - DNA, 25 bp, Homo sapien
ggtaacatcaagcaccctaactgcg

SEQ ID NO: 2155710 - DNA, 25 bp, Homo sapien
tctcaggaaggtatttgacttgtgg

SEQ ID NO: 2155711 - DNA, 25 bp, Homo sapien
ctgagcaatgatgggtcttttcctt

SEQ ID NO: 2155712 - DNA, 25 bp, Homo sapien
gagcaatgatgggtcttttccttga

SEQ ID NO: 2155713 - DNA, 25 bp, Homo sapien
gacttgtggctgtaacttgccctga

SEQ ID NO: 2155714 - DNA, 25 bp, Homo sapien
ggcagaatagcacggtatccttata

SEQ ID NO: 2155715 - DNA, 25 bp, Homo sapien
tctttttccacagcaacccggagat

SEQ ID NO: 2155716 - DNA, 25 bp, Homo sapien
tactcatcggttacaaatgggaggg

SEQ ID NO: 2155717 - DNA, 25 bp, Homo sapien
cgtgagcatgtttggagagactacc

SEQ ID NO: 2155718 - DNA, 25 bp, Homo sapien
gctgttgtaatccagttgttcccat

SEQ ID NO: 2155719 - DNA, 25 bp, Homo sapien
cagctgttgtaatccagttgttccc

SEQ ID NO: 2155720 - DNA, 25 bp, Homo sapien
ctccaatcctttgacctgctggctg

SEQ ID NO: 2155721 - DNA, 25 bp, Homo sapien
ctttgacctgctggctgggttgtac

SEQ ID NO: 2155722 - DNA, 25 bp, Homo sapien
tagctgcttgtatagcatccgtgga

SEQ ID NO: 2155723 - DNA, 25 bp, Homo sapien
attgattggctaattgcttgtggtc

SEQ ID NO: 2155724 - DNA, 25 bp, Homo sapien
gcgatttcaagtcagattgattggc

SEQ ID NO: 2155725 - DNA, 25 bp, Homo sapien
catccgtggaggtaattagcacttc

SEQ ID NO: 2155726 - DNA, 25 bp, Homo sapien
tgtgttttagaatcctattcattgc

SEQ ID NO: 2155727 - DNA, 25 bp, Homo sapien
tgggagaagactgctgacaatatgg

SEQ ID NO: 2155728 - DNA, 25 bp, Homo sapien
ttagaatcctattcattgctgacac

SEQ ID NO: 2155729 - DNA, 25 bp, Homo sapien
gactgctgacaatatgggtaagctc

SEQ ID NO: 2155730 - DNA, 25 bp, Homo sapien
gaggctctgtcaacataactgcgtc

SEQ ID NO: 2155731 - DNA, 25 bp, Homo sapien
ccattcataactgtcagtgtcagag

SEQ ID NO: 2155732 - DNA, 25 bp, Homo sapien
ttagctttaatcagtttagtggtgg

SEQ ID NO: 2155733 - DNA, 25 bp, Homo sapien
gcgtcaatcaggttagctttaatca

SEQ ID NO: 2155734 - DNA, 25 bp, Homo sapien
tcatctccagttgaaagttggtggc

SEQ ID NO: 2155735 - DNA, 25 bp, Homo sapien
cagttgaaagttggtggcacgattg

SEQ ID NO: 2155736 - DNA, 25 bp, Homo sapien
aaggagccagtagctggtctggaac

SEQ ID NO: 2155737 - DNA, 25 bp, Homo sapien
ttggtggcacgattgttattttctc

SEQ ID NO: 2155738 - DNA, 25 bp, Homo sapien
cagctaacatctagactaccagcaa

SEQ ID NO: 2155739 - DNA, 25 bp, Homo sapien
cattctgacagggtgtgaatgagtc

SEQ ID NO: 2155740 - DNA, 25 bp, Homo sapien
ccagttcagcaatggagtgtaatga

SEQ ID NO: 2155741 - DNA, 25 bp, Homo sapien
caaatgcacccctgggtttcatgcc

SEQ ID NO: 2155742 - DNA, 25 bp, Homo sapien
ctcagttgtctcatttatcatatgc

SEQ ID NO: 2155743 - DNA, 25 bp, Homo sapien
tcagttgtctcatttatcatatgca

SEQ ID NO: 2155744 - DNA, 25 bp, Homo sapien
tattggtggaggatataaaatcatc

SEQ ID NO: 2155745 - DNA, 25 bp, Homo sapien
ttcctcatctctcctcaaacgttac

SEQ ID NO: 2155746 - DNA, 25 bp, Homo sapien
aaatcatcagattcacactcacctt

SEQ ID NO: 2155747 - DNA, 25 bp, Homo sapien
tagtattggtggaggatataaaatc

SEQ ID NO: 2155748 - DNA, 25 bp, Homo sapien
tactcttacccaaggagactctttc

SEQ ID NO: 2155749 - DNA, 25 bp, Homo sapien
taaatttagattagctactcttacc

SEQ ID NO: 2155750 - DNA, 25 bp, Homo sapien
tttagattagctactcttacccaag

SEQ ID NO: 2155751 - DNA, 25 bp, Homo sapien
gattagctactcttacccaaggaga

SEQ ID NO: 2155752 - DNA, 25 bp, Homo sapien
tcagctacagggaattttagaagcc

SEQ ID NO: 2155753 - DNA, 25 bp, Homo sapien
aaaacctttttgcaggatctgtagg

SEQ ID NO: 2155754 - DNA, 25 bp, Homo sapien
cacctggtctttgtggtttgctgaa

SEQ ID NO: 2155755 - DNA, 25 bp, Homo sapien
tcaaggcagtggtgcacttgcaatc

SEQ ID NO: 2155756 - DNA, 25 bp, Homo sapien
tgagttactactttggttaagccat

SEQ ID NO: 2155757 - DNA, 25 bp, Homo sapien
gtgagttactactttggttaagcca

SEQ ID NO: 2155758 - DNA, 25 bp, Homo sapien
cattggtgagttactactttggtta

SEQ ID NO: 2155759 - DNA, 25 bp, Homo sapien
tggtgagttactactttggttaagc

SEQ ID NO: 2155760 - DNA, 25 bp, Homo sapien
ctgacctaaatgtttctgcccaata

SEQ ID NO: 2155761 - DNA, 25 bp, Homo sapien
tctgcccaataatgtctacatgtgt

SEQ ID NO: 2155762 - DNA, 25 bp, Homo sapien
tttctgcccaataatgtctacatgt

SEQ ID NO: 2155763 - DNA, 25 bp, Homo sapien
gcccaataatgtctacatgtgtcat

SEQ ID NO: 2155764 - DNA, 25 bp, Homo sapien
taaatgccacagcactagagcacgt

SEQ ID NO: 2155765 - DNA, 25 bp, Homo sapien
tcaataacagcgcttctcactcggg

SEQ ID NO: 2155766 - DNA, 25 bp, Homo sapien
tagagcacgttagtatagacactcg

SEQ ID NO: 2155767 - DNA, 25 bp, Homo sapien
tattccccaagatggcataaatgcc

SEQ ID NO: 2155768 - DNA, 25 bp, Homo sapien
cactgccaggcttgccgagtcctgg

SEQ ID NO: 2155769 - DNA, 25 bp, Homo sapien
ttttgcagcggctgggtagcagcac

SEQ ID NO: 2155770 - DNA, 25 bp, Homo sapien
tagcagcacgtctcttgctcctcag

SEQ ID NO: 2155771 - DNA, 25 bp, Homo sapien
cagcgcccaggtagctgcgaggaaa

SEQ ID NO: 2155772 - DNA, 25 bp, Homo sapien
tcatttgtcaaatgttcaatgcagg

SEQ ID NO: 2155773 - DNA, 25 bp, Homo sapien
tcaaatgttcaatgcaggcgcaggc

SEQ ID NO: 2155774 - DNA, 25 bp, Homo sapien
tttgtcaaatgttcaatgcaggcgc

SEQ ID NO: 2155775 - DNA, 25 bp, Homo sapien
tgtcaaatgttcaatgcaggcgcag

SEQ ID NO: 2155776 - DNA, 25 bp, Homo sapien
cctgaaattccgctattagagtcat

SEQ ID NO: 2155777 - DNA, 25 bp, Homo sapien
caaccgggcctgaaagcacagaatc

SEQ ID NO: 2155778 - DNA, 25 bp, Homo sapien
aagtgaacactagctcaatcagcac

SEQ ID NO: 2155779 - DNA, 25 bp, Homo sapien
ttatctaaatgcttccaaccgggcc

SEQ ID NO: 2155780 - DNA, 25 bp, Homo sapien
tgaagagtaaggatgaatcactggc

SEQ ID NO: 2155781 - DNA, 25 bp, Homo sapien
ctcccatggcggcagctgttgaaca

SEQ ID NO: 2155782 - DNA, 25 bp, Homo sapien
tgggcccaagacaaacaatgtgtgc

SEQ ID NO: 2155783 - DNA, 25 bp, Homo sapien
tgtggccatgtgcacggctgtgtat

SEQ ID NO: 2155784 - DNA, 25 bp, Homo sapien
tatgctgcttttggagccatggaac

SEQ ID NO: 2155785 - DNA, 25 bp, Homo sapien
ggatatggggagaggagaacatcac

SEQ ID NO: 2155786 - DNA, 25 bp, Homo sapien
gagggatatggggagaggagaacat

SEQ ID NO: 2155787 - DNA, 25 bp, Homo sapien
ctgagggatatggggagaggagaac

SEQ ID NO: 2155788 - DNA, 25 bp, Homo sapien
gggatatggggagaggagaacatca

SEQ ID NO: 2155789 - DNA, 25 bp, Homo sapien
agagtggagttcagggcagaagata

SEQ ID NO: 2155790 - DNA, 25 bp, Homo sapien
gagagtggagttcagggcagaagat

SEQ ID NO: 2155791 - DNA, 25 bp, Homo sapien
tgagagtggagttcagggcagaaga

SEQ ID NO: 2155792 - DNA, 25 bp, Homo sapien
tttagagctctgttcctttggttta

SEQ ID NO: 2155793 - DNA, 25 bp, Homo sapien
ttagagctctgttcctttggtttaa

SEQ ID NO: 2155794 - DNA, 25 bp, Homo sapien
cacggagccaaattctgcctgggat

SEQ ID NO: 2155795 - DNA, 25 bp, Homo sapien
gcaagcatctcagccgggtctatta

SEQ ID NO: 2155796 - DNA, 25 bp, Homo sapien
cattgggatcagtgtgcctggcgcc

SEQ ID NO: 2155797 - DNA, 25 bp, Homo sapien
aaagcatagtccctggtctgaggac

SEQ ID NO: 2155798 - DNA, 25 bp, Homo sapien
gcaaacctttggtaatctggcactc

SEQ ID NO: 2155799 - DNA, 25 bp, Homo sapien
aaagctggcattgtggcaaacctgg

SEQ ID NO: 2155800 - DNA, 25 bp, Homo sapien
gtggcaaacctggcaatgaactcat

SEQ ID NO: 2155801 - DNA, 25 bp, Homo sapien
tggcactcccaaaagctggcattgt

SEQ ID NO: 2155802 - DNA, 25 bp, Homo sapien
ttctggcaactcagcttcacgggtt

SEQ ID NO: 2155803 - DNA, 25 bp, Homo sapien
attctggcaactcagcttcacgggt

SEQ ID NO: 2155804 - DNA, 25 bp, Homo sapien
gattctggcaactcagcttcacggg

SEQ ID NO: 2155805 - DNA, 25 bp, Homo sapien
tttttgacttgaactgactgactgg

SEQ ID NO: 2155806 - DNA, 25 bp, Homo sapien
cagatatatacagctcttgatagcc

SEQ ID NO: 2155807 - DNA, 25 bp, Homo sapien
tagacagagtttgagtcaatccaga

SEQ ID NO: 2155808 - DNA, 25 bp, Homo sapien
cccaagccaattggtgtgtgtagac

SEQ ID NO: 2155809 - DNA, 25 bp, Homo sapien
gagggcttgatggactgctatccga

SEQ ID NO: 2155810 - DNA, 25 bp, Homo sapien
ggttgtttatgcacacacaaggccc

SEQ ID NO: 2155811 - DNA, 25 bp, Homo sapien
gacttcatccttgccacagaaggcg

SEQ ID NO: 2155812 - DNA, 25 bp, Homo sapien
acagaaggcgtcaccctctggaggg

SEQ ID NO: 2155813 - DNA, 25 bp, Homo sapien
taaacctaaagactcagccacagcg

SEQ ID NO: 2155814 - DNA, 25 bp, Homo sapien
cagcgatggcaatgaatgcttccat

SEQ ID NO: 2155815 - DNA, 25 bp, Homo sapien
taaagactcagccacagcgatggca

SEQ ID NO: 2155816 - DNA, 25 bp, Homo sapien
ccacagcgatggcaatgaatgcttc

SEQ ID NO: 2155817 - DNA, 25 bp, Homo sapien
tctccagtaggacgtaatcttgcca

SEQ ID NO: 2155818 - DNA, 25 bp, Homo sapien
catctccagtaggacgtaatcttgc

SEQ ID NO: 2155819 - DNA, 25 bp, Homo sapien
cagtaggacgtaatcttgccagcta

SEQ ID NO: 2155820 - DNA, 25 bp, Homo sapien
tccagtaggacgtaatcttgccagc

SEQ ID NO: 2155821 - DNA, 25 bp, Homo sapien
gtagcgattagatctttttccctcc

SEQ ID NO: 2155822 - DNA, 25 bp, Homo sapien
gtaggaggttggagtaatgattaac

SEQ ID NO: 2155823 - DNA, 25 bp, Homo sapien
taatgattaactctcgttagggaaa

SEQ ID NO: 2155824 - DNA, 25 bp, Homo sapien
caagtaatccccattcaaggctgca

SEQ ID NO: 2155825 - DNA, 25 bp, Homo sapien
tccttgagtttctctctgcctgagc

SEQ ID NO: 2155826 - DNA, 25 bp, Homo sapien
tgagtttctctctgcctgagcccat

SEQ ID NO: 2155827 - DNA, 25 bp, Homo sapien
ttgagtttctctctgcctgagccca

SEQ ID NO: 2155828 - DNA, 25 bp, Homo sapien
tctccttgagtttctctctgcctga

SEQ ID NO: 2155829 - DNA, 25 bp, Homo sapien
gcttaaggcatagattggctgtctc

SEQ ID NO: 2155830 - DNA, 25 bp, Homo sapien
tctcatggtcccaggaggagttgat

SEQ ID NO: 2155831 - DNA, 25 bp, Homo sapien
ttgagctcaagctgcgacgacatgg

SEQ ID NO: 2155832 - DNA, 25 bp, Homo sapien
caaaatcgcctgactcccttcaggg

SEQ ID NO: 2155833 - DNA, 25 bp, Homo sapien
cagtagttaggtagctcagctcttc

SEQ ID NO: 2155834 - DNA, 25 bp, Homo sapien
ttaagttgggagtcctccacccagc

SEQ ID NO: 2155835 - DNA, 25 bp, Homo sapien
cctttctgttcgtcacagtagttag

SEQ ID NO: 2155836 - DNA, 25 bp, Homo sapien
gggtgccgatgcgtgcttgtaattc

SEQ ID NO: 2155837 - DNA, 25 bp, Homo sapien
agagtatggcagtgaatgctcctcc

SEQ ID NO: 2155838 - DNA, 25 bp, Homo sapien
ctgccaggagtccaaagtcaaaaga

SEQ ID NO: 2155839 - DNA, 25 bp, Homo sapien
caataagtcgcgttttcccaaagca

SEQ ID NO: 2155840 - DNA, 25 bp, Homo sapien
gaagactgccaggagtccaaagtca

SEQ ID NO: 2155841 - DNA, 25 bp, Homo sapien
gcaacaagcctacttattaatctat

SEQ ID NO: 2155842 - DNA, 25 bp, Homo sapien
tctgcaacaagcctacttattaatc

SEQ ID NO: 2155843 - DNA, 25 bp, Homo sapien
ctttctgcaacaagcctacttatta

SEQ ID NO: 2155844 - DNA, 25 bp, Homo sapien
tgcaacaagcctacttattaatcta

SEQ ID NO: 2155845 - DNA, 25 bp, Homo sapien
caaagagatcgtaactggttgtgat

SEQ ID NO: 2155846 - DNA, 25 bp, Homo sapien
agttttgctctaaactggatgggcc

SEQ ID NO: 2155847 - DNA, 25 bp, Homo sapien
ccccattctccatattctaaggtgc

SEQ ID NO: 2155848 - DNA, 25 bp, Homo sapien
tccatattctaaggtgctgattgga

SEQ ID NO: 2155849 - DNA, 25 bp, Homo sapien
atttcctggatttgccctcctgctt

SEQ ID NO: 2155850 - DNA, 25 bp, Homo sapien
ttgccacatgcatgcctcttcagtg

SEQ ID NO: 2155851 - DNA, 25 bp, Homo sapien
tctgctcccacctccggttgtacac

SEQ ID NO: 2155852 - DNA, 25 bp, Homo sapien
aaggctgggatcactttgccacatg

SEQ ID NO: 2155853 - DNA, 25 bp, Homo sapien
tcaagaagcttcaagtgtggataca

SEQ ID NO: 2155854 - DNA, 25 bp, Homo sapien
tgtgaataaggggtgggacatgaag

SEQ ID NO: 2155855 - DNA, 25 bp, Homo sapien
taaggggtgggacatgaagataatt

SEQ ID NO: 2155856 - DNA, 25 bp, Homo sapien
aataaggggtgggacatgaagataa

SEQ ID NO: 2155857 - DNA, 25 bp, Homo sapien
ggtgggacatgaagataattgtttt

SEQ ID NO: 2155858 - DNA, 25 bp, Homo sapien
tgctccagcataccgctgaagctta

SEQ ID NO: 2155859 - DNA, 25 bp, Homo sapien
cgctgaagcttaatgctggttacag

SEQ ID NO: 2155860 - DNA, 25 bp, Homo sapien
acatataatgtaacaaattcttgga

SEQ ID NO: 2155861 - DNA, 25 bp, Homo sapien
ttaatacgcaggtttctggtacata

SEQ ID NO: 2155862 - DNA, 25 bp, Homo sapien
ctgtgcagtaaactgcgccttctgc

SEQ ID NO: 2155863 - DNA, 25 bp, Homo sapien
tgtgcagtaaactgcgccttctgct

SEQ ID NO: 2155864 - DNA, 25 bp, Homo sapien
gtgcagtaaactgcgccttctgctg

SEQ ID NO: 2155865 - DNA, 25 bp, Homo sapien
aatctgggcaaaccgactggtgatg

SEQ ID NO: 2155866 - DNA, 25 bp, Homo sapien
cagctggagagacaattttcagtgc

SEQ ID NO: 2155867 - DNA, 25 bp, Homo sapien
aaaccgactggtgatggcaagagtg

SEQ ID NO: 2155868 - DNA, 25 bp, Homo sapien
cacatttatcccaacataactccat

SEQ ID NO: 2155869 - DNA, 25 bp, Homo sapien
cagacttgataacagcctgatgctg

SEQ ID NO: 2155870 - DNA, 25 bp, Homo sapien
acagacttgataacagcctgatgct

SEQ ID NO: 2155871 - DNA, 25 bp, Homo sapien
agacttgataacagcctgatgctga

SEQ ID NO: 2155872 - DNA, 25 bp, Homo sapien
gacttgataacagcctgatgctgat

SEQ ID NO: 2155873 - DNA, 25 bp, Homo sapien
tcgggggctccatagggtgactaac

SEQ ID NO: 2155874 - DNA, 25 bp, Homo sapien
ctttggagtctagcagatggaaacc

SEQ ID NO: 2155875 - DNA, 25 bp, Homo sapien
gatgtgggcctactgttaatattta

SEQ ID NO: 2155876 - DNA, 25 bp, Homo sapien
tactgagagggatggctgctgcctt

SEQ ID NO: 2155877 - DNA, 25 bp, Homo sapien
aactttggtgaatgatcagattgtt

SEQ ID NO: 2155878 - DNA, 25 bp, Homo sapien
aaatcctttctctagttgctgctat

SEQ ID NO: 2155879 - DNA, 25 bp, Homo sapien
aaaaaatcctttctctagttgctgc

SEQ ID NO: 2155880 - DNA, 25 bp, Homo sapien
ctttggtgaatgatcagattgttac

SEQ ID NO: 2155881 - DNA, 25 bp, Homo sapien
caaaggcgtacagggaaggacttct

SEQ ID NO: 2155882 - DNA, 25 bp, Homo sapien
taggtaagggtgtgagagacgcggg

SEQ ID NO: 2155883 - DNA, 25 bp, Homo sapien
acgcgcgggctgctcgcggacttca

SEQ ID NO: 2155884 - DNA, 25 bp, Homo sapien
cttcaacgggagcattaggtaaggg

SEQ ID NO: 2155885 - DNA, 25 bp, Homo sapien
ggcccgtgcgggatccccgcgctct

SEQ ID NO: 2155886 - DNA, 25 bp, Homo sapien
ggagctgggtcccgcgcgcggtttc

SEQ ID NO: 2155887 - DNA, 25 bp, Homo sapien
gaagggagcccttcgttggggcagc

SEQ ID NO: 2155888 - DNA, 25 bp, Homo sapien
cgcggtttcccgagcgggtggctgg

SEQ ID NO: 2155889 - DNA, 25 bp, Homo sapien
ccccggagcgctcgagctgcgcgct

SEQ ID NO: 2155890 - DNA, 25 bp, Homo sapien
cgctcgagctgcgcgctgggacact

SEQ ID NO: 2155891 - DNA, 25 bp, Homo sapien
agcgctcgagctgcgcgctgggaca

SEQ ID NO: 2155892 - DNA, 25 bp, Homo sapien
ggagcgctcgagctgcgcgctggga

SEQ ID NO: 2155893 - DNA, 25 bp, Homo sapien
gtgggcctcgtcgtctgtctccggt

SEQ ID NO: 2155894 - DNA, 25 bp, Homo sapien
acaaggtggtagtgagtgcgccatc

SEQ ID NO: 2155895 - DNA, 25 bp, Homo sapien
ccaggcgcgcctttaattaaggact

SEQ ID NO: 2155896 - DNA, 25 bp, Homo sapien
atcctggcccggatgccggtggcac

SEQ ID NO: 2155897 - DNA, 25 bp, Homo sapien
ctggtaacaatggtggaaagggagg

SEQ ID NO: 2155898 - DNA, 25 bp, Homo sapien
tcttctgggctttgggctgccacaa

SEQ ID NO: 2155899 - DNA, 25 bp, Homo sapien
tgggctttgggctgccacaatcacc

SEQ ID NO: 2155900 - DNA, 25 bp, Homo sapien
tcctcttctgggctttgggctgcca

SEQ ID NO: 2155901 - DNA, 25 bp, Homo sapien
atggcgcccttgtcctcttctgggc

SEQ ID NO: 2155902 - DNA, 25 bp, Homo sapien
gagctactactgtgcaccagtgcac

SEQ ID NO: 2155903 - DNA, 25 bp, Homo sapien
tggttttcgttgcatccaccgctga

SEQ ID NO: 2155904 - DNA, 25 bp, Homo sapien
gactcgcgttggagaaatgattgtg

SEQ ID NO: 2155905 - DNA, 25 bp, Homo sapien
caggttggactctttcgcgggccag

SEQ ID NO: 2155906 - DNA, 25 bp, Homo sapien
ctgttgcatgaaaaaggggaggaag

SEQ ID NO: 2155907 - DNA, 25 bp, Homo sapien
ttgcatgaaaaaggggaggaagccc

SEQ ID NO: 2155908 - DNA, 25 bp, Homo sapien
gttgcatgaaaaaggggaggaagcc

SEQ ID NO: 2155909 - DNA, 25 bp, Homo sapien
gcatgaaaaaggggaggaagcccac

SEQ ID NO: 2155910 - DNA, 25 bp, Homo sapien
tcacgcagacgtgccagggtaggct

SEQ ID NO: 2155911 - DNA, 25 bp, Homo sapien
tcgggctgcgtagtttccagaaagt

SEQ ID NO: 2155912 - DNA, 25 bp, Homo sapien
aaaggtcgaaagttgcattgcagtc

SEQ ID NO: 2155913 - DNA, 25 bp, Homo sapien
tgcagtcggtgcaatctcacaggag

SEQ ID NO: 2155914 - DNA, 25 bp, Homo sapien
tgtttactcattgacccgggagctc

SEQ ID NO: 2155915 - DNA, 25 bp, Homo sapien
gatcacatgatattatcttcgcgcc

SEQ ID NO: 2155916 - DNA, 25 bp, Homo sapien
gcagctgtaggacacaattaattat

SEQ ID NO: 2155917 - DNA, 25 bp, Homo sapien
tttttactccaggttttgctccagc

SEQ ID NO: 2155918 - DNA, 25 bp, Homo sapien
ttttgcaaatgctgacaccctaaag

SEQ ID NO: 2155919 - DNA, 25 bp, Homo sapien
atgctgacaccctaaaggtggtatt

SEQ ID NO: 2155920 - DNA, 25 bp, Homo sapien
tttgcaaatgctgacaccctaaagg

SEQ ID NO: 2155921 - DNA, 25 bp, Homo sapien
aatgctgacaccctaaaggtggtat

SEQ ID NO: 2155922 - DNA, 25 bp, Homo sapien
ctgtatgccagtagtatcatcatag

SEQ ID NO: 2155923 - DNA, 25 bp, Homo sapien
tgtatgccagtagtatcatcatagt

SEQ ID NO: 2155924 - DNA, 25 bp, Homo sapien
tatgccagtagtatcatcatagtaa

SEQ ID NO: 2155925 - DNA, 25 bp, Homo sapien
atgccagtagtatcatcatagtaat

SEQ ID NO: 2155926 - DNA, 25 bp, Homo sapien
tggcacttaatatactcttgatgca

SEQ ID NO: 2155927 - DNA, 25 bp, Homo sapien
taatttggcacttaatatactcttg

SEQ ID NO: 2155928 - DNA, 25 bp, Homo sapien
taatatactcttgatgcaatgtttc

SEQ ID NO: 2155929 - DNA, 25 bp, Homo sapien
ttttaatttggcacttaatatactc

SEQ ID NO: 2155930 - DNA, 25 bp, Homo sapien
aaagcctggccggaggactgagcat

SEQ ID NO: 2155931 - DNA, 25 bp, Homo sapien
tgccgtctggagagcccgaacctct

SEQ ID NO: 2155932 - DNA, 25 bp, Homo sapien
caacgagcctgcccgatttaaaggg

SEQ ID NO: 2155933 - DNA, 25 bp, Homo sapien
tggcgtcccgcagtcaaagcctggc

SEQ ID NO: 2155934 - DNA, 25 bp, Homo sapien
ctccccagtcccgacctagtcgctg

SEQ ID NO: 2155935 - DNA, 25 bp, Homo sapien
cagtcccgacctagtcgctggcggg

SEQ ID NO: 2155936 - DNA, 25 bp, Homo sapien
agtcccgacctagtcgctggcgggc

SEQ ID NO: 2155937 - DNA, 25 bp, Homo sapien
cccagtcccgacctagtcgctggcg

SEQ ID NO: 2155938 - DNA, 25 bp, Homo sapien
taggggagattccccattctccacc

SEQ ID NO: 2155939 - DNA, 25 bp, Homo sapien
ctataggggagattccccattctcc

SEQ ID NO: 2155940 - DNA, 25 bp, Homo sapien
caaaagaaggacccaaatgaactgt

SEQ ID NO: 2155941 - DNA, 25 bp, Homo sapien
tataggggagattccccattctcca

SEQ ID NO: 2155942 - DNA, 25 bp, Homo sapien
ggctcacgggtgaagaatctaaaca

SEQ ID NO: 2155943 - DNA, 25 bp, Homo sapien
gacttccttatgactaactctgcca

SEQ ID NO: 2155944 - DNA, 25 bp, Homo sapien
ttaaagtgactaaaacatcagggct

SEQ ID NO: 2155945 - DNA, 25 bp, Homo sapien
gctggctctctctctaactcactga

SEQ ID NO: 2155946 - DNA, 25 bp, Homo sapien
gaagcatccgtctctgtttcttgaa

SEQ ID NO: 2155947 - DNA, 25 bp, Homo sapien
tgttcagaagaagattcaggctcag

SEQ ID NO: 2155948 - DNA, 25 bp, Homo sapien
gacactgagctctccgcggatcttt

SEQ ID NO: 2155949 - DNA, 25 bp, Homo sapien
ggagcacatttccaacctcggtttg

SEQ ID NO: 2155950 - DNA, 25 bp, Homo sapien
tccccagtaaagtggtcaaggatac

SEQ ID NO: 2155951 - DNA, 25 bp, Homo sapien
taaacactgatttggctcaatgact

SEQ ID NO: 2155952 - DNA, 25 bp, Homo sapien
ttaagtaatacgcaaagaaaataca

SEQ ID NO: 2155953 - DNA, 25 bp, Homo sapien
ggctcaatgacttgcctactggaag

SEQ ID NO: 2155954 - DNA, 25 bp, Homo sapien
tgaaaataacatcctattacatata

SEQ ID NO: 2155955 - DNA, 25 bp, Homo sapien
ttgcttacgagatcacaaaattgct

SEQ ID NO: 2155956 - DNA, 25 bp, Homo sapien
tattcacgtgccaaagacatatttg

SEQ ID NO: 2155957 - DNA, 25 bp, Homo sapien
tgccaaagacatatttgcttacgag

SEQ ID NO: 2155958 - DNA, 25 bp, Homo sapien
cagatggaaaaatattcacgtgcca

SEQ ID NO: 2155959 - DNA, 25 bp, Homo sapien
tgtagtctatgggaaccgtggccag

SEQ ID NO: 2155960 - DNA, 25 bp, Homo sapien
tatgggaaccgtggccaggtcaaag

SEQ ID NO: 2155961 - DNA, 25 bp, Homo sapien
tagtctatgggaaccgtggccaggt

SEQ ID NO: 2155962 - DNA, 25 bp, Homo sapien
tctatgggaaccgtggccaggtcaa

SEQ ID NO: 2155963 - DNA, 25 bp, Homo sapien
acagtctttccagtattaagctgca

SEQ ID NO: 2155964 - DNA, 25 bp, Homo sapien
cagtctttccagtattaagctgcat

SEQ ID NO: 2155965 - DNA, 25 bp, Homo sapien
gaactgggcaaagctattataaatg

SEQ ID NO: 2155966 - DNA, 25 bp, Homo sapien
actgggcaaagctattataaatgag

SEQ ID NO: 2155967 - DNA, 25 bp, Homo sapien
aactgggcaaagctattataaatga

SEQ ID NO: 2155968 - DNA, 25 bp, Homo sapien
tttaaggaagttcctatcttctaga

SEQ ID NO: 2155969 - DNA, 25 bp, Homo sapien
cagtgccattatcagcaagtttaag

SEQ ID NO: 2155970 - DNA, 25 bp, Homo sapien
tcctatcttctagatccaatgccaa

SEQ ID NO: 2155971 - DNA, 25 bp, Homo sapien
tcttggtgccatggcttgccctgag

SEQ ID NO: 2155972 - DNA, 25 bp, Homo sapien
tcttgccatatgtctctgccagcac

SEQ ID NO: 2155973 - DNA, 25 bp, Homo sapien
tttcttgccatatgtctctgccagc

SEQ ID NO: 2155974 - DNA, 25 bp, Homo sapien
ttcttgccatatgtctctgccagca

SEQ ID NO: 2155975 - DNA, 25 bp, Homo sapien
cctttcttgccatatgtctctgcca

SEQ ID NO: 2155976 - DNA, 25 bp, Homo sapien
tcatgagcggcaagccattccagtg

SEQ ID NO: 2155977 - DNA, 25 bp, Homo sapien
catgagcggcaagccattccagtgt

SEQ ID NO: 2155978 - DNA, 25 bp, Homo sapien
ttccagtgtccgacaagaaatgctt

SEQ ID NO: 2155979 - DNA, 25 bp, Homo sapien
gcaagccattccagtgtccgacaag

SEQ ID NO: 2155980 - DNA, 25 bp, Homo sapien
gctcccggcaggtcaaagtagttgt

SEQ ID NO: 2155981 - DNA, 25 bp, Homo sapien
aagagctcccggcaggtcaaagtag

SEQ ID NO: 2155982 - DNA, 25 bp, Homo sapien
tcccggcaggtcaaagtagttgtaa

SEQ ID NO: 2155983 - DNA, 25 bp, Homo sapien
gagctcccggcaggtcaaagtagtt

SEQ ID NO: 2155984 - DNA, 25 bp, Homo sapien
aaggtctgcaaaatcattcccgagg

SEQ ID NO: 2155985 - DNA, 25 bp, Homo sapien
cattcccgaggatatattcgcagag

SEQ ID NO: 2155986 - DNA, 25 bp, Homo sapien
gtctgcaaaatcattcccgaggata

SEQ ID NO: 2155987 - DNA, 25 bp, Homo sapien
aaaaaggtctgcaaaatcattcccg

SEQ ID NO: 2155988 - DNA, 25 bp, Homo sapien
caattactatagtgatgagccagga

SEQ ID NO: 2155989 - DNA, 25 bp, Homo sapien
atctgaatgcatgccgtaataaaca

SEQ ID NO: 2155990 - DNA, 25 bp, Homo sapien
tgcatgccgtaataaacaaccttgg

SEQ ID NO: 2155991 - DNA, 25 bp, Homo sapien
tactatagtgatgagccaggaaaat

SEQ ID NO: 2155992 - DNA, 25 bp, Homo sapien
ttctcaggcctctgactccttgcac

SEQ ID NO: 2155993 - DNA, 25 bp, Homo sapien
ctagaggctctgacttctcaggcct

SEQ ID NO: 2155994 - DNA, 25 bp, Homo sapien
tagaggctctgacttctcaggcctc

SEQ ID NO: 2155995 - DNA, 25 bp, Homo sapien
tgacttctcaggcctctgactcctt

SEQ ID NO: 2155996 - DNA, 25 bp, Homo sapien
gagcctcattttttagatgaagtat

SEQ ID NO: 2155997 - DNA, 25 bp, Homo sapien
gatgaagtatttagaggctttacct

SEQ ID NO: 2155998 - DNA, 25 bp, Homo sapien
aaaaggagcctcattttttagatga

SEQ ID NO: 2155999 - DNA, 25 bp, Homo sapien
gaggctttacctttggtccctcata

SEQ ID NO: 2156000 - DNA, 25 bp, Homo sapien
gacactgttacccaagtgtgtgggc

SEQ ID NO: 2156001 - DNA, 25 bp, Homo sapien
gaatctgctacaaagactgtccagt

SEQ ID NO: 2156002 - DNA, 25 bp, Homo sapien
aatttagacagcaggaagactgcag

SEQ ID NO: 2156003 - DNA, 25 bp, Homo sapien
taatttctgagtatgccaggaacag

SEQ ID NO: 2156004 - DNA, 25 bp, Homo sapien
taaactaaggatgctaggagtacct

SEQ ID NO: 2156005 - DNA, 25 bp, Homo sapien
ggtatggtatagacacagctcagga

SEQ ID NO: 2156006 - DNA, 25 bp, Homo sapien
taaatatctactgaagtgaggccct

SEQ ID NO: 2156007 - DNA, 25 bp, Homo sapien
gatcgggagccctgacttctaatca

SEQ ID NO: 2156008 - DNA, 25 bp, Homo sapien
ctgacaaaatgcaatgcctatgcag

SEQ ID NO: 2156009 - DNA, 25 bp, Homo sapien
aaaatgcaatgcctatgcagtatgc

SEQ ID NO: 2156010 - DNA, 25 bp, Homo sapien
aatgcaatgcctatgcagtatgcca

SEQ ID NO: 2156011 - DNA, 25 bp, Homo sapien
gacaaaatgcaatgcctatgcagta

SEQ ID NO: 2156012 - DNA, 25 bp, Homo sapien
cagctgaagccgcacagccacagcg

SEQ ID NO: 2156013 - DNA, 25 bp, Homo sapien
tgttcgcgcgcggaccttctattct

SEQ ID NO: 2156014 - DNA, 25 bp, Homo sapien
cctgtacgactgaaggcggcaggcc

SEQ ID NO: 2156015 - DNA, 25 bp, Homo sapien
agccacagcgcatgtgcagaaacca

SEQ ID NO: 2156016 - DNA, 25 bp, Homo sapien
agagcgttgatacgtcccgagcgcg

SEQ ID NO: 2156017 - DNA, 25 bp, Homo sapien
acagagcgttgatacgtcccgagcg

SEQ ID NO: 2156018 - DNA, 25 bp, Homo sapien
acgacccacagagcgttgatacgtc

SEQ ID NO: 2156019 - DNA, 25 bp, Homo sapien
cccacagagcgttgatacgtcccga

SEQ ID NO: 2156020 - DNA, 25 bp, Homo sapien
tcattcgaggagagacgggctcgcg

SEQ ID NO: 2156021 - DNA, 25 bp, Homo sapien
gaggagagacgggctcgcggagcgc

SEQ ID NO: 2156022 - DNA, 25 bp, Homo sapien
ttcgaggagagacgggctcgcggag

SEQ ID NO: 2156023 - DNA, 25 bp, Homo sapien
aggagagacgggctcgcggagcgcc

SEQ ID NO: 2156024 - DNA, 25 bp, Homo sapien
agagaagcgccaatgagggtaaaga

SEQ ID NO: 2156025 - DNA, 25 bp, Homo sapien
gctctgtcgccggaggttgtttcct

SEQ ID NO: 2156026 - DNA, 25 bp, Homo sapien
agagaaagaagtcggtctcggttct

SEQ ID NO: 2156027 - DNA, 25 bp, Homo sapien
aagtcggtctcggttctccagcagt

SEQ ID NO: 2156028 - DNA, 25 bp, Homo sapien
cttctcccgccggggagagaatggg

SEQ ID NO: 2156029 - DNA, 25 bp, Homo sapien
cgcctacaatgagcggcgcttctgg

SEQ ID NO: 2156030 - DNA, 25 bp, Homo sapien
tccgccaagcgcctacaatgagcgg

SEQ ID NO: 2156031 - DNA, 25 bp, Homo sapien
aaagcgagaccaccaagagtcccct

SEQ ID NO: 2156032 - DNA, 25 bp, Homo sapien
gggtccctgacaataaagcgagacc

SEQ ID NO: 2156033 - DNA, 25 bp, Homo sapien
tccacgcagaatatcaaaacgaatg

SEQ ID NO: 2156034 - DNA, 25 bp, Homo sapien
cagcaggttcctttccgtcgtaaag

SEQ ID NO: 2156035 - DNA, 25 bp, Homo sapien
gatctccctctaatcaagcgctaaa

SEQ ID NO: 2156036 - DNA, 25 bp, Homo sapien
tacacataaagtaccggatcctctc

SEQ ID NO: 2156037 - DNA, 25 bp, Homo sapien
gagaagcattcgttcaccaacaaga

SEQ ID NO: 2156038 - DNA, 25 bp, Homo sapien
ttcccaaatcaacaggactaagcag

SEQ ID NO: 2156039 - DNA, 25 bp, Homo sapien
gatccaggttgccacaacacacgtc

SEQ ID NO: 2156040 - DNA, 25 bp, Homo sapien
cagctgtatgctaggaaggtaatat

SEQ ID NO: 2156041 - DNA, 25 bp, Homo sapien
taagccactctaagccccaagaaat

SEQ ID NO: 2156042 - DNA, 25 bp, Homo sapien
cagagaataagaagggcgacaatgt

SEQ ID NO: 2156043 - DNA, 25 bp, Homo sapien
tatacatattcatgaaagttgttaa

SEQ ID NO: 2156044 - DNA, 25 bp, Homo sapien
tttgacctaggttttaatatacaca

SEQ ID NO: 2156045 - DNA, 25 bp, Homo sapien
tttaaattgcctttagaatgccact

SEQ ID NO: 2156046 - DNA, 25 bp, Homo sapien
tttagaatgccactttaagtctcaa

SEQ ID NO: 2156047 - DNA, 25 bp, Homo sapien
ccttgtctctatttgacttacaaaa

SEQ ID NO: 2156048 - DNA, 25 bp, Homo sapien
gatattagtaactgtccacattcct

SEQ ID NO: 2156049 - DNA, 25 bp, Homo sapien
ccacatttgcgctgtcttgtaggcc

SEQ ID NO: 2156050 - DNA, 25 bp, Homo sapien
catgcacttatggtgcgctgccacc

SEQ ID NO: 2156051 - DNA, 25 bp, Homo sapien
taagagtctcatgaatcgtttcaag

SEQ ID NO: 2156052 - DNA, 25 bp, Homo sapien
ctcatgaatcgtttcaaggtctctg

SEQ ID NO: 2156053 - DNA, 25 bp, Homo sapien
gtctctgttgctgccggtatactta

SEQ ID NO: 2156054 - DNA, 25 bp, Homo sapien
cattcatgtgttattaagagtctca

SEQ ID NO: 2156055 - DNA, 25 bp, Homo sapien
tggacatcttcaatagaaaatccac

SEQ ID NO: 2156056 - DNA, 25 bp, Homo sapien
tccttttggacatcttcaatagaaa

SEQ ID NO: 2156057 - DNA, 25 bp, Homo sapien
gtgtgatgataccaaagcagatgaa

SEQ ID NO: 2156058 - DNA, 25 bp, Homo sapien
tcattatcagagtgtgatgatacca

SEQ ID NO: 2156059 - DNA, 25 bp, Homo sapien
aacccggccttggattttgctggct

SEQ ID NO: 2156060 - DNA, 25 bp, Homo sapien
tacgggaacattactctaacgcagc

SEQ ID NO: 2156061 - DNA, 25 bp, Homo sapien
tatcctaaagcaaatcccaaatgtc

SEQ ID NO: 2156062 - DNA, 25 bp, Homo sapien
taacgcagcttcagaaaagctcctg

SEQ ID NO: 2156063 - DNA, 25 bp, Homo sapien
cagaaatcagcacagtaacgtgaag

SEQ ID NO: 2156064 - DNA, 25 bp, Homo sapien
gaaatcagcacagtaacgtgaagaa

SEQ ID NO: 2156065 - DNA, 25 bp, Homo sapien
aatcagcacagtaacgtgaagaaac

SEQ ID NO: 2156066 - DNA, 25 bp, Homo sapien
tcagaaatcagcacagtaacgtgaa

SEQ ID NO: 2156067 - DNA, 25 bp, Homo sapien
tgatccttgtggctgacatgaacct

SEQ ID NO: 2156068 - DNA, 25 bp, Homo sapien
gctgacatgaaccttggaaaattgc

SEQ ID NO: 2156069 - DNA, 25 bp, Homo sapien
ccttgtggctgacatgaaccttgga

SEQ ID NO: 2156070 - DNA, 25 bp, Homo sapien
cctcctttgatccttgtggctgaca

SEQ ID NO: 2156071 - DNA, 25 bp, Homo sapien
cttttgaatttaatggataattcat

SEQ ID NO: 2156072 - DNA, 25 bp, Homo sapien
tatcatgcaatgcacagtggtagtg

SEQ ID NO: 2156073 - DNA, 25 bp, Homo sapien
tgcacagtggtagtggtatgtcctg

SEQ ID NO: 2156074 - DNA, 25 bp, Homo sapien
gaaggtttctctcgtatttgagctt

SEQ ID NO: 2156075 - DNA, 25 bp, Homo sapien
tcacatcacaaccaattgttgctcc

SEQ ID NO: 2156076 - DNA, 25 bp, Homo sapien
ttttcttgtgttttcggcaatagac

SEQ ID NO: 2156077 - DNA, 25 bp, Homo sapien
cagttttcttgtgttttcggcaata

SEQ ID NO: 2156078 - DNA, 25 bp, Homo sapien
tttcttgtgttttcggcaatagacc

SEQ ID NO: 2156079 - DNA, 25 bp, Homo sapien
cttcggagttatgtgcagttttctt

SEQ ID NO: 2156080 - DNA, 25 bp, Homo sapien
gcaggagaatcgcttgaacccagga

SEQ ID NO: 2156081 - DNA, 25 bp, Homo sapien
ttagccaagcgtagtggcgggtgct

SEQ ID NO: 2156082 - DNA, 25 bp, Homo sapien
aatcccagctactcaggaggccgag

SEQ ID NO: 2156083 - DNA, 25 bp, Homo sapien
gccaagcgtagtggcgggtgcttgt

SEQ ID NO: 2156084 - DNA, 25 bp, Homo sapien
aagtaagtattgagccacagatggc

SEQ ID NO: 2156085 - DNA, 25 bp, Homo sapien
ctttcaaggtccacaatgagtataa

SEQ ID NO: 2156086 - DNA, 25 bp, Homo sapien
taaaccatgatcgtaaaggagaaca

SEQ ID NO: 2156087 - DNA, 25 bp, Homo sapien
tgttctggagactagtgcagtacaa

SEQ ID NO: 2156088 - DNA, 25 bp, Homo sapien
ttgtgatgggaaaattgaattgcta

SEQ ID NO: 2156089 - DNA, 25 bp, Homo sapien
tttgtgatgggaaaattgaattgct

SEQ ID NO: 2156090 - DNA, 25 bp, Homo sapien
tccggactaccacagtaaagcaagt

SEQ ID NO: 2156091 - DNA, 25 bp, Homo sapien
tcaagatatcgtgggtttggttccg

SEQ ID NO: 2156092 - DNA, 25 bp, Homo sapien
ccattgtcatctaaggaagagcaca

SEQ ID NO: 2156093 - DNA, 25 bp, Homo sapien
tacatggtgcgaagaccacaatatg

SEQ ID NO: 2156094 - DNA, 25 bp, Homo sapien
gaaatttgagaactgcatttctcag

SEQ ID NO: 2156095 - DNA, 25 bp, Homo sapien
gagaactgcatttctcagtaatctg

SEQ ID NO: 2156096 - DNA, 25 bp, Homo sapien
cagtaatctgaaaagaatttctacc

SEQ ID NO: 2156097 - DNA, 25 bp, Homo sapien
gcagaaatttgagaactgcatttct

SEQ ID NO: 2156098 - DNA, 25 bp, Homo sapien
tcttggccttcctttgcgacttttc

SEQ ID NO: 2156099 - DNA, 25 bp, Homo sapien
gatgtggacctggtatcttctgaca

SEQ ID NO: 2156100 - DNA, 25 bp, Homo sapien
acttttaggtgatgagggctccagt

SEQ ID NO: 2156101 - DNA, 25 bp, Homo sapien
catttcatctgttccatgggaggat

SEQ ID NO: 2156102 - DNA, 25 bp, Homo sapien
tatatgcagttttcctcgtgcttca

SEQ ID NO: 2156103 - DNA, 25 bp, Homo sapien
catgcacttataatgggcagctgcc

SEQ ID NO: 2156104 - DNA, 25 bp, Homo sapien
gcaaaatccacatttaggcctggtg

SEQ ID NO: 2156105 - DNA, 25 bp, Homo sapien
gccttcttggcattaaatatatgca

SEQ ID NO: 2156106 - DNA, 25 bp, Homo sapien
gatgttgttgtgagctggactgtgc

SEQ ID NO: 2156107 - DNA, 25 bp, Homo sapien
tctttttcctcgtttaatctcctga

SEQ ID NO: 2156108 - DNA, 25 bp, Homo sapien
tgactggataaatttgggatgtact

SEQ ID NO: 2156109 - DNA, 25 bp, Homo sapien
caaatcaagtgtaatgttgcataac

SEQ ID NO: 2156110 - DNA, 25 bp, Homo sapien
agcaaatcaagtgtaatgttgcata

SEQ ID NO: 2156111 - DNA, 25 bp, Homo sapien
ttgggatgtactctaaatttaaagc

SEQ ID NO: 2156112 - DNA, 25 bp, Homo sapien
gtaacatcagcatcctttattatat

SEQ ID NO: 2156113 - DNA, 25 bp, Homo sapien
tatatactttgctttaacatacgaa

SEQ ID NO: 2156114 - DNA, 25 bp, Homo sapien
aatatatactttgctttaacatacg

SEQ ID NO: 2156115 - DNA, 25 bp, Homo sapien
ttcagtaacatcagcatcctttatt

SEQ ID NO: 2156116 - DNA, 25 bp, Homo sapien
tggtaagtcttaacacaggctttta

SEQ ID NO: 2156117 - DNA, 25 bp, Homo sapien
cttgtactccacagtggtaatggta

SEQ ID NO: 2156118 - DNA, 25 bp, Homo sapien
tgtatttagctttgtcttgtactcc

SEQ ID NO: 2156119 - DNA, 25 bp, Homo sapien
aattcctcgtgacatattttcaatg

SEQ ID NO: 2156120 - DNA, 25 bp, Homo sapien
tacaggtagggcttagacatgaaca

SEQ ID NO: 2156121 - DNA, 25 bp, Homo sapien
cagcacaggtaagtggaagacccat

SEQ ID NO: 2156122 - DNA, 25 bp, Homo sapien
tatccaccccacagtgattctgagg

SEQ ID NO: 2156123 - DNA, 25 bp, Homo sapien
cacagaatactagacccggaagtca

SEQ ID NO: 2156124 - DNA, 25 bp, Homo sapien
ctgcatggcagagttaaagttgaca

SEQ ID NO: 2156125 - DNA, 25 bp, Homo sapien
cctccatccttatgcaactaatgag

SEQ ID NO: 2156126 - DNA, 25 bp, Homo sapien
cataatcacataaacgtctaagaga

SEQ ID NO: 2156127 - DNA, 25 bp, Homo sapien
aacaccacagaatcctatcatggag

SEQ ID NO: 2156128 - DNA, 25 bp, Homo sapien
ggacacagtggacaacaataacaac

SEQ ID NO: 2156129 - DNA, 25 bp, Homo sapien
aatcatctaggaattcacatgttac

SEQ ID NO: 2156130 - DNA, 25 bp, Homo sapien
caataacaactgactttaatctagt

SEQ ID NO: 2156131 - DNA, 25 bp, Homo sapien
tagggagaatctgtacacttcaaat

SEQ ID NO: 2156132 - DNA, 25 bp, Homo sapien
cccgttaactcatcatttatatcag

SEQ ID NO: 2156133 - DNA, 25 bp, Homo sapien
cgttaactcatcatttatatcaggt

SEQ ID NO: 2156134 - DNA, 25 bp, Homo sapien
tcccacgaccggccctggtatgtga

SEQ ID NO: 2156135 - DNA, 25 bp, Homo sapien
cccatcccacgaccggccctggtat

SEQ ID NO: 2156136 - DNA, 25 bp, Homo sapien
ttactctctcgttcctcatcttctt

SEQ ID NO: 2156137 - DNA, 25 bp, Homo sapien
cttttcctcggcttttactctctcg

SEQ ID NO: 2156138 - DNA, 25 bp, Homo sapien
tcggcttttactctctcgttcctca

SEQ ID NO: 2156139 - DNA, 25 bp, Homo sapien
ttcctcggcttttactctctcgttc

SEQ ID NO: 2156140 - DNA, 25 bp, Homo sapien
aaaacaactactatgcaagcctaca

SEQ ID NO: 2156141 - DNA, 25 bp, Homo sapien
cagtgtgtattgtatcctgacaaca

SEQ ID NO: 2156142 - DNA, 25 bp, Homo sapien
tatggttacaaaatcagctagttaa

SEQ ID NO: 2156143 - DNA, 25 bp, Homo sapien
tttgacattacaactacacttattg

SEQ ID NO: 2156144 - DNA, 25 bp, Homo sapien
caaactcagccttctagtgagggct

SEQ ID NO: 2156145 - DNA, 25 bp, Homo sapien
tgaagtccttagcaagcggtaaccc

SEQ ID NO: 2156146 - DNA, 25 bp, Homo sapien
aattaccatgtgctgccaccagtgg

SEQ ID NO: 2156147 - DNA, 25 bp, Homo sapien
tccatgctggtcagtgagaacaact

SEQ ID NO: 2156148 - DNA, 25 bp, Homo sapien
cttgagaggaacaggtttcggacat

SEQ ID NO: 2156149 - DNA, 25 bp, Homo sapien
cagggcacttgagaggaacaggttt

SEQ ID NO: 2156150 - DNA, 25 bp, Homo sapien
gtactgtgcgccaatatgtgaagtg

SEQ ID NO: 2156151 - DNA, 25 bp, Homo sapien
gccaatatgtgaagtgttccacaca

SEQ ID NO: 2156152 - DNA, 25 bp, Homo sapien
taaaatgctgctctatcagctgcag

SEQ ID NO: 2156153 - DNA, 25 bp, Homo sapien
tataccttggtctaacttcagcgct

SEQ ID NO: 2156154 - DNA, 25 bp, Homo sapien
cagggcaacccactactaaagctag

SEQ ID NO: 2156155 - DNA, 25 bp, Homo sapien
gctatggtagtatcaggcagaccac

SEQ ID NO: 2156156 - DNA, 25 bp, Homo sapien
ggatatatgtaaggctggagagaac

SEQ ID NO: 2156157 - DNA, 25 bp, Homo sapien
tgagaaatctagaggtactgacacc

SEQ ID NO: 2156158 - DNA, 25 bp, Homo sapien
taaaaaagacgaggtgcagaactgt

SEQ ID NO: 2156159 - DNA, 25 bp, Homo sapien
atggacggctggcaatttttatcaa

SEQ ID NO: 2156160 - DNA, 25 bp, Homo sapien
gtcctgaactgagctacatatgact

SEQ ID NO: 2156161 - DNA, 25 bp, Homo sapien
aaaacagtacacagccccttcaggt

SEQ ID NO: 2156162 - DNA, 25 bp, Homo sapien
tcataggagttcttcaacaaaacag

SEQ ID NO: 2156163 - DNA, 25 bp, Homo sapien
acatatgactctggacaccgggcag

SEQ ID NO: 2156164 - DNA, 25 bp, Homo sapien
gaatagtctcagaacctcaggagga

SEQ ID NO: 2156165 - DNA, 25 bp, Homo sapien
cagaactattttagcctagaggcag

SEQ ID NO: 2156166 - DNA, 25 bp, Homo sapien
tgctccagtgcacctaagactcagg

SEQ ID NO: 2156167 - DNA, 25 bp, Homo sapien
aaatctagttgtggttgcctgggaa

SEQ ID NO: 2156168 - DNA, 25 bp, Homo sapien
tggttcctcaatcctactggccaca

SEQ ID NO: 2156169 - DNA, 25 bp, Homo sapien
taaaatgttacatttggttcctcaa

SEQ ID NO: 2156170 - DNA, 25 bp, Homo sapien
tacatttggttcctcaatcctactg

SEQ ID NO: 2156171 - DNA, 25 bp, Homo sapien
aatgttacatttggttcctcaatcc

SEQ ID NO: 2156172 - DNA, 25 bp, Homo sapien
gcgggctgactgctcaggaggagga

SEQ ID NO: 2156173 - DNA, 25 bp, Homo sapien
aagccggtggcggagcagaggagga

SEQ ID NO: 2156174 - DNA, 25 bp, Homo sapien
cgccgcgcgggaaagccgagaggtt

SEQ ID NO: 2156175 - DNA, 25 bp, Homo sapien
aaagccgagaggttcgcctgagggc

SEQ ID NO: 2156176 - DNA, 25 bp, Homo sapien
cacgacgccagggctgcgggtcgcc

SEQ ID NO: 2156177 - DNA, 25 bp, Homo sapien
cgacgccagggctgcgggtcgccat

SEQ ID NO: 2156178 - DNA, 25 bp, Homo sapien
acgacgccagggctgcgggtcgcca

SEQ ID NO: 2156179 - DNA, 25 bp, Homo sapien
cgcactgcggatcccgcgcctcagg

SEQ ID NO: 2156180 - DNA, 25 bp, Homo sapien
ctcgcgtgacgtaaagccgaacccg

SEQ ID NO: 2156181 - DNA, 25 bp, Homo sapien
cgagcccgcactgcggatcccgcgc

SEQ ID NO: 2156182 - DNA, 25 bp, Homo sapien
tccctgccgccctcgcgtgacgtaa

SEQ ID NO: 2156183 - DNA, 25 bp, Homo sapien
aaacattttcaggtaggtggaccag

SEQ ID NO: 2156184 - DNA, 25 bp, Homo sapien
ctgtgggacaacttcagcccctgtg

SEQ ID NO: 2156185 - DNA, 25 bp, Homo sapien
tgtgggacaacttcagcccctgtgc

SEQ ID NO: 2156186 - DNA, 25 bp, Homo sapien
ggccaggaggctggttgcaaacatt

SEQ ID NO: 2156187 - DNA, 25 bp, Homo sapien
ctgtccataattagtccatgaggaa

SEQ ID NO: 2156188 - DNA, 25 bp, Homo sapien
ctcagcataatgattaggtatgcaa

SEQ ID NO: 2156189 - DNA, 25 bp, Homo sapien
aaataaatcaaggtcataacctggt

SEQ ID NO: 2156190 - DNA, 25 bp, Homo sapien
aatgattaggtatgcaaaataaatc

SEQ ID NO: 2156191 - DNA, 25 bp, Homo sapien
tgtaatccagcaggtcagcaaagaa

SEQ ID NO: 2156192 - DNA, 25 bp, Homo sapien
taggaatggatctatcactatttct

SEQ ID NO: 2156193 - DNA, 25 bp, Homo sapien
tcacatctcgagcaagacgttcagt

SEQ ID NO: 2156194 - DNA, 25 bp, Homo sapien
caaagaatttatagccccccttgag

SEQ ID NO: 2156195 - DNA, 25 bp, Homo sapien
taaaaatgtgaacataaggcgagtt

SEQ ID NO: 2156196 - DNA, 25 bp, Homo sapien
tcagttacctgataaggactacatc

SEQ ID NO: 2156197 - DNA, 25 bp, Homo sapien
cctgtctatggtctcgattcaataa

SEQ ID NO: 2156198 - DNA, 25 bp, Homo sapien
caagggaccaaccttgactactaca

SEQ ID NO: 2156199 - DNA, 25 bp, Homo sapien
tgtaaagtttccttatgccacagat

SEQ ID NO: 2156200 - DNA, 25 bp, Homo sapien
tgtaagggctggtctatatcacacc

SEQ ID NO: 2156201 - DNA, 25 bp, Homo sapien
ccctgtacgattcccatgagtcaag

SEQ ID NO: 2156202 - DNA, 25 bp, Homo sapien
tatgtccctcaaaagtctagcccag

SEQ ID NO: 2156203 - DNA, 25 bp, Homo sapien
ggtagtattataacagccacccatc

SEQ ID NO: 2156204 - DNA, 25 bp, Homo sapien
tatgtatatgtatatccttatgtac

SEQ ID NO: 2156205 - DNA, 25 bp, Homo sapien
tgtatatccttatgtacacacacaa

SEQ ID NO: 2156206 - DNA, 25 bp, Homo sapien
tatatgtatatccttatgtacacac

SEQ ID NO: 2156207 - DNA, 25 bp, Homo sapien
tgtatatgtatatccttatgtacac

SEQ ID NO: 2156208 - DNA, 25 bp, Homo sapien
ttatgtcccctgttgactggtcatt

SEQ ID NO: 2156209 - DNA, 25 bp, Homo sapien
gatcatctccaccaattacttttat

SEQ ID NO: 2156210 - DNA, 25 bp, Homo sapien
tgagagatcatctccaccaattact

SEQ ID NO: 2156211 - DNA, 25 bp, Homo sapien
tttatgtcccctgttgactggtcat

SEQ ID NO: 2156212 - DNA, 25 bp, Homo sapien
tactaattgactcggtatgaagtgc

SEQ ID NO: 2156213 - DNA, 25 bp, Homo sapien
ttttactacatgacctagggaacga

SEQ ID NO: 2156214 - DNA, 25 bp, Homo sapien
ccaaattagagtcccacagaggcag

SEQ ID NO: 2156215 - DNA, 25 bp, Homo sapien
gggaacgataattaacctagactgc

SEQ ID NO: 2156216 - DNA, 25 bp, Homo sapien
ccaggactggattttgtaggtgcag

SEQ ID NO: 2156217 - DNA, 25 bp, Homo sapien
tagggagttatgatgttgtccttca

SEQ ID NO: 2156218 - DNA, 25 bp, Homo sapien
gaatctatatcatctggccctcagc

SEQ ID NO: 2156219 - DNA, 25 bp, Homo sapien
taggtgcaggatcaatgacagcaaa

SEQ ID NO: 2156220 - DNA, 25 bp, Homo sapien
tttggattatactgcctgaccaagg

SEQ ID NO: 2156221 - DNA, 25 bp, Homo sapien
ctttggattatactgcctgaccaag

SEQ ID NO: 2156222 - DNA, 25 bp, Homo sapien
taagtcttatatgagattacattac

SEQ ID NO: 2156223 - DNA, 25 bp, Homo sapien
cattacttttcgaagataaaatgac

SEQ ID NO: 2156224 - DNA, 25 bp, Homo sapien
tatccttaaaaagaagcaatcactt

SEQ ID NO: 2156225 - DNA, 25 bp, Homo sapien
gcaatcacttaatcccccttcaaat

SEQ ID NO: 2156226 - DNA, 25 bp, Homo sapien
gtgcaatggctcgcccaactcacca

SEQ ID NO: 2156227 - DNA, 25 bp, Homo sapien
caatggctcgcccaactcaccacaa

SEQ ID NO: 2156228 - DNA, 25 bp, Homo sapien
agtgcaatggctcgcccaactcacc

SEQ ID NO: 2156229 - DNA, 25 bp, Homo sapien
aatggctcgcccaactcaccacaac

SEQ ID NO: 2156230 - DNA, 25 bp, Homo sapien
aatgtgacatataacatacagagag

SEQ ID NO: 2156231 - DNA, 25 bp, Homo sapien
taattacaaaatgtgacatataaca

SEQ ID NO: 2156232 - DNA, 25 bp, Homo sapien
caaaatgtgacatataacatacaga

SEQ ID NO: 2156233 - DNA, 25 bp, Homo sapien
tacaaaatgtgacatataacataca

SEQ ID NO: 2156234 - DNA, 25 bp, Homo sapien
cttcgtggggtccttttcaccagca

SEQ ID NO: 2156235 - DNA, 25 bp, Homo sapien
agtctggcttatatccaacacttcg

SEQ ID NO: 2156236 - DNA, 25 bp, Homo sapien
tcgtggggtccttttcaccagcaag

SEQ ID NO: 2156237 - DNA, 25 bp, Homo sapien
tggcttatatccaacacttcgtggg

SEQ ID NO: 2156238 - DNA, 25 bp, Homo sapien
tagtcaagggcatatcctacaacaa

SEQ ID NO: 2156239 - DNA, 25 bp, Homo sapien
gcatatcctacaacaaacttgtctg

SEQ ID NO: 2156240 - DNA, 25 bp, Homo sapien
attcaaatccctgaagtattcatta

SEQ ID NO: 2156241 - DNA, 25 bp, Homo sapien
gaagtattcattatagtcaagggca

SEQ ID NO: 2156242 - DNA, 25 bp, Homo sapien
aacactattagttgtcagggttctt

SEQ ID NO: 2156243 - DNA, 25 bp, Homo sapien
gatagtactactgtattttagatca

SEQ ID NO: 2156244 - DNA, 25 bp, Homo sapien
tcttactaaacagagatagtactac

SEQ ID NO: 2156245 - DNA, 25 bp, Homo sapien
ttacatataagaacactattagttg

SEQ ID NO: 2156246 - DNA, 25 bp, Homo sapien
ttccagtttcactaatgacacaaac

SEQ ID NO: 2156247 - DNA, 25 bp, Homo sapien
tttccagtttcactaatgacacaaa

SEQ ID NO: 2156248 - DNA, 25 bp, Homo sapien
ccgcccaaagggaactgatagtcta

SEQ ID NO: 2156249 - DNA, 25 bp, Homo sapien
gatggccacagaactagaacattga

SEQ ID NO: 2156250 - DNA, 25 bp, Homo sapien
aataaacagtttaggaatgcagcaa

SEQ ID NO: 2156251 - DNA, 25 bp, Homo sapien
gatacatgcaaaaagctctactaag

SEQ ID NO: 2156252 - DNA, 25 bp, Homo sapien
ctgcatatataaaaattaaaatacc

SEQ ID NO: 2156253 - DNA, 25 bp, Homo sapien
tgcatatataaaaattaaaatacca

SEQ ID NO: 2156254 - DNA, 25 bp, Homo sapien
gcatatataaaaattaaaataccaa

SEQ ID NO: 2156255 - DNA, 25 bp, Homo sapien
gtcaacattactgaaacactactaa

SEQ ID NO: 2156256 - DNA, 25 bp, Homo sapien
agattcactggtaataatttgaaca

SEQ ID NO: 2156257 - DNA, 25 bp, Homo sapien
gaactgctgacaaagattcactggt

SEQ ID NO: 2156258 - DNA, 25 bp, Homo sapien
gatgtgaaaattgactgcttcttac

SEQ ID NO: 2156259 - DNA, 25 bp, Homo sapien
ctatgcataggtttttttaaagaga

SEQ ID NO: 2156260 - DNA, 25 bp, Homo sapien
tgcggtaacgcttcggacaaaaaga

SEQ ID NO: 2156261 - DNA, 25 bp, Homo sapien
tctagttagtcgatctgttacaggc

SEQ ID NO: 2156262 - DNA, 25 bp, Homo sapien
aagagccacatttcccactgttgaa

SEQ ID NO: 2156263 - DNA, 25 bp, Homo sapien
tgttacaggcatacggaactacttt

SEQ ID NO: 2156264 - DNA, 25 bp, Homo sapien
ttgtgaaccttgtttaaccacacag

SEQ ID NO: 2156265 - DNA, 25 bp, Homo sapien
ttaaccacacagaacacatgaatag

SEQ ID NO: 2156266 - DNA, 25 bp, Homo sapien
gaaccttgtttaaccacacagaaca

SEQ ID NO: 2156267 - DNA, 25 bp, Homo sapien
cttgtttaaccacacagaacacatg

SEQ ID NO: 2156268 - DNA, 25 bp, Homo sapien
taagtgccacaaaattagagacatt

SEQ ID NO: 2156269 - DNA, 25 bp, Homo sapien
gccaaagatgctgaccacagtagag

SEQ ID NO: 2156270 - DNA, 25 bp, Homo sapien
gagtgcctggcccatacgtagtatt

SEQ ID NO: 2156271 - DNA, 25 bp, Homo sapien
tatgtatccccggtagccagaagag

SEQ ID NO: 2156272 - DNA, 25 bp, Homo sapien
taggcttatcctgataccgtatttt

SEQ ID NO: 2156273 - DNA, 25 bp, Homo sapien
gtcaccttcttatttaggcttatcc

SEQ ID NO: 2156274 - DNA, 25 bp, Homo sapien
atgctgaacgatccacagcaaatgt

SEQ ID NO: 2156275 - DNA, 25 bp, Homo sapien
gaacgatccacagcaaatgtcacct

SEQ ID NO: 2156276 - DNA, 25 bp, Homo sapien
ccagagcccaagtggagtaaggagg

SEQ ID NO: 2156277 - DNA, 25 bp, Homo sapien
tggcaagacggtgtcagacatgagc

SEQ ID NO: 2156278 - DNA, 25 bp, Homo sapien
gccgggtcatgagggcatctacaca

SEQ ID NO: 2156279 - DNA, 25 bp, Homo sapien
acaggggccgctcggcatgcaaagc

SEQ ID NO: 2156280 - DNA, 25 bp, Homo sapien
ggaggggccacccagtgtggcatac

SEQ ID NO: 2156281 - DNA, 25 bp, Homo sapien
gtggaggggccacccagtgtggcat

SEQ ID NO: 2156282 - DNA, 25 bp, Homo sapien
agtgtggcatacagagcctgaggag

SEQ ID NO: 2156283 - DNA, 25 bp, Homo sapien
gggtgaagagatcatccgtgtggag

SEQ ID NO: 2156284 - DNA, 25 bp, Homo sapien
agagcgggtgctccatccaggttga

SEQ ID NO: 2156285 - DNA, 25 bp, Homo sapien
tgcaaatccgcaggaagcaccaaga

SEQ ID NO: 2156286 - DNA, 25 bp, Homo sapien
tgaccaccccactcatactgaacct

SEQ ID NO: 2156287 - DNA, 25 bp, Homo sapien
tactgaacctcgtctgacctcctgc

SEQ ID NO: 2156288 - DNA, 25 bp, Homo sapien
taaaactctaggcattgaaaaccac

SEQ ID NO: 2156289 - DNA, 25 bp, Homo sapien
ccacccaagtgtcccaaatagaagg

SEQ ID NO: 2156290 - DNA, 25 bp, Homo sapien
tcactcagtgtaatattatacatcc

SEQ ID NO: 2156291 - DNA, 25 bp, Homo sapien
tgatctgtaagtccaaggaatcctc

SEQ ID NO: 2156292 - DNA, 25 bp, Homo sapien
caggagcccttcgtgacttcaaaag

SEQ ID NO: 2156293 - DNA, 25 bp, Homo sapien
agggctaattcgctttctgtgcaaa

SEQ ID NO: 2156294 - DNA, 25 bp, Homo sapien
ggcgggacctgagctgtcgatttca

SEQ ID NO: 2156295 - DNA, 25 bp, Homo sapien
gagttgcccgcctgagagcttaaca

SEQ ID NO: 2156296 - DNA, 25 bp, Homo sapien
taagtcttaggccatcgcctgcggt

SEQ ID NO: 2156297 - DNA, 25 bp, Homo sapien
ggagcagcgagacccaagattgcat

SEQ ID NO: 2156298 - DNA, 25 bp, Homo sapien
tctctgcatatgtgactggacgtga

SEQ ID NO: 2156299 - DNA, 25 bp, Homo sapien
aagattgcatcaaacgtttgccccg

SEQ ID NO: 2156300 - DNA, 25 bp, Homo sapien
cactacgttgttccaagattcatcc

SEQ ID NO: 2156301 - DNA, 25 bp, Homo sapien
aaaaaattgagagccacactttcgg

SEQ ID NO: 2156302 - DNA, 25 bp, Homo sapien
ttgagagccacactttcggctccac

SEQ ID NO: 2156303 - DNA, 25 bp, Homo sapien
gctctgcttttcacccactacgttg

SEQ ID NO: 2156304 - DNA, 25 bp, Homo sapien
gcgccgtcccggcagctcaaaggac

SEQ ID NO: 2156305 - DNA, 25 bp, Homo sapien
gctcaaaggacaccgccagaggacc

SEQ ID NO: 2156306 - DNA, 25 bp, Homo sapien
cgccgtcccggcagctcaaaggaca

SEQ ID NO: 2156307 - DNA, 25 bp, Homo sapien
tgcgccgtcccggcagctcaaagga

SEQ ID NO: 2156308 - DNA, 25 bp, Homo sapien
agcgctgcacccaagcggtctgaga

SEQ ID NO: 2156309 - DNA, 25 bp, Homo sapien
ggcctctctacctgagagcttggtg

SEQ ID NO: 2156310 - DNA, 25 bp, Homo sapien
ggtactccctgtaagcaccgagcaa

SEQ ID NO: 2156311 - DNA, 25 bp, Homo sapien
acagatctgcactcaaacgcatggg

SEQ ID NO: 2156312 - DNA, 25 bp, Homo sapien
gctcccagcattatgaaacaccagt

SEQ ID NO: 2156313 - DNA, 25 bp, Homo sapien
attgcaggagggtgcataaacaggt

SEQ ID NO: 2156314 - DNA, 25 bp, Homo sapien
gcattatgaaacaccagtagcggag

SEQ ID NO: 2156315 - DNA, 25 bp, Homo sapien
tgcaggagggtgcataaacaggttt

SEQ ID NO: 2156316 - DNA, 25 bp, Homo sapien
ctattgctgaataacggattacccc

SEQ ID NO: 2156317 - DNA, 25 bp, Homo sapien
cattgtgtcacaggttttacgggtc

SEQ ID NO: 2156318 - DNA, 25 bp, Homo sapien
gctcactcaagtggctgatggcagg

SEQ ID NO: 2156319 - DNA, 25 bp, Homo sapien
tgaggtcagatatccgcttataaac

SEQ ID NO: 2156320 - DNA, 25 bp, Homo sapien
gatggagctctacaatatcctgttt

SEQ ID NO: 2156321 - DNA, 25 bp, Homo sapien
tagtgttaatccctatgatggagct

SEQ ID NO: 2156322 - DNA, 25 bp, Homo sapien
gaaatacattatcaagggacgagtg

SEQ ID NO: 2156323 - DNA, 25 bp, Homo sapien
tatacacctactacaacccacattt

SEQ ID NO: 2156324 - DNA, 25 bp, Homo sapien
gagggaaccggggatggggatgata

SEQ ID NO: 2156325 - DNA, 25 bp, Homo sapien
atggagctcatggagctagagagta

SEQ ID NO: 2156326 - DNA, 25 bp, Homo sapien
atcaaaacaatggagctcatggagc

SEQ ID NO: 2156327 - DNA, 25 bp, Homo sapien
gatggggatgataaataggtacaaa

SEQ ID NO: 2156328 - DNA, 25 bp, Homo sapien
tattgtgagaccaaagccggaggat

SEQ ID NO: 2156329 - DNA, 25 bp, Homo sapien
gaccaaagccggaggattgattgag

SEQ ID NO: 2156330 - DNA, 25 bp, Homo sapien
tgtgagaccaaagccggaggattga

SEQ ID NO: 2156331 - DNA, 25 bp, Homo sapien
aacatattgtgagaccaaagccgga

SEQ ID NO: 2156332 - DNA, 25 bp, Homo sapien
cagcaggctgagatgtgaggatcct

SEQ ID NO: 2156333 - DNA, 25 bp, Homo sapien
atgtgaggatcctttgaagtttgag

SEQ ID NO: 2156334 - DNA, 25 bp, Homo sapien
ctgagatgtgaggatcctttgaagt

SEQ ID NO: 2156335 - DNA, 25 bp, Homo sapien
gtgaggatcctttgaagtttgaggc

SEQ ID NO: 2156336 - DNA, 25 bp, Homo sapien
ttcagtgaatcatgccacaagctga

SEQ ID NO: 2156337 - DNA, 25 bp, Homo sapien
tcagtgaatcatgccacaagctgag

SEQ ID NO: 2156338 - DNA, 25 bp, Homo sapien
tggctgatgtaagtttccaaatgct

SEQ ID NO: 2156339 - DNA, 25 bp, Homo sapien
atggctgatgtaagtttccaaatgc

SEQ ID NO: 2156340 - DNA, 25 bp, Homo sapien
aacacattgaggacaagggcacatc

SEQ ID NO: 2156341 - DNA, 25 bp, Homo sapien
taagactggtgttctcctcatccaa

SEQ ID NO: 2156342 - DNA, 25 bp, Homo sapien
tgagcaagccagctgatagcacttt

SEQ ID NO: 2156343 - DNA, 25 bp, Homo sapien
cacttcaggtcactcaatgatgagc

SEQ ID NO: 2156344 - DNA, 25 bp, Homo sapien
aaataatgccaacagcacactgggt

SEQ ID NO: 2156345 - DNA, 25 bp, Homo sapien
catgaaaacatttgtggggtattcc

SEQ ID NO: 2156346 - DNA, 25 bp, Homo sapien
gccaacagcacactgggtaacaatg

SEQ ID NO: 2156347 - DNA, 25 bp, Homo sapien
actgggtaacaatgtaggctcttcc

SEQ ID NO: 2156348 - DNA, 25 bp, Homo sapien
cttaagaagatccaaagctctttcc

SEQ ID NO: 2156349 - DNA, 25 bp, Homo sapien
agttatgatggtcgtctgtgccatc

SEQ ID NO: 2156350 - DNA, 25 bp, Homo sapien
tcatcatttctaattgcatggggca

SEQ ID NO: 2156351 - DNA, 25 bp, Homo sapien
ctgtacctatagtttccagctttct

SEQ ID NO: 2156352 - DNA, 25 bp, Homo sapien
tgcctactgtacctatagtttccag

SEQ ID NO: 2156353 - DNA, 25 bp, Homo sapien
tggagtaacgttatcattttcaggt

SEQ ID NO: 2156354 - DNA, 25 bp, Homo sapien
tttgcaatctggagtaacgttatca

SEQ ID NO: 2156355 - DNA, 25 bp, Homo sapien
gggagtttgcaatctggagtaacgt

SEQ ID NO: 2156356 - DNA, 25 bp, Homo sapien
gcaatctggagtaacgttatcattt

SEQ ID NO: 2156357 - DNA, 25 bp, Homo sapien
gaaagcagctgtggttaaagcagag

SEQ ID NO: 2156358 - DNA, 25 bp, Homo sapien
aaggatgactaaacacaagaatttc

SEQ ID NO: 2156359 - DNA, 25 bp, Homo sapien
aagcagagcttgctgactcagccca

SEQ ID NO: 2156360 - DNA, 25 bp, Homo sapien
tgtagtaaggatgactaaacacaag

SEQ ID NO: 2156361 - DNA, 25 bp, Homo sapien
tgccttccctcctaaaccaagcttc

SEQ ID NO: 2156362 - DNA, 25 bp, Homo sapien
cctctgccttccctcctaaaccaag

SEQ ID NO: 2156363 - DNA, 25 bp, Homo sapien
tctgccttccctcctaaaccaagct

SEQ ID NO: 2156364 - DNA, 25 bp, Homo sapien
ccctcctaaaccaagcttcttccat

SEQ ID NO: 2156365 - DNA, 25 bp, Homo sapien
ttagggttaaagattgaggcagtgc

SEQ ID NO: 2156366 - DNA, 25 bp, Homo sapien
tgctggccttcaggaaaagtgcaag

SEQ ID NO: 2156367 - DNA, 25 bp, Homo sapien
cctgtggaaaagcagtgcctcgcct

SEQ ID NO: 2156368 - DNA, 25 bp, Homo sapien
cagtgcctcgccttggttagggtta

SEQ ID NO: 2156369 - DNA, 25 bp, Homo sapien
agatcggattgtgtcaaaggtctgg

SEQ ID NO: 2156370 - DNA, 25 bp, Homo sapien
cccagatcagtgaagttctccctga

SEQ ID NO: 2156371 - DNA, 25 bp, Homo sapien
cctgaagactgaagatcggattgtg

SEQ ID NO: 2156372 - DNA, 25 bp, Homo sapien
agatcagtgaagttctccctgaaga

SEQ ID NO: 2156373 - DNA, 25 bp, Homo sapien
tctcttcgtggtatgtgctgcctgc

SEQ ID NO: 2156374 - DNA, 25 bp, Homo sapien
ctcttcgtggtatgtgctgcctgcc

SEQ ID NO: 2156375 - DNA, 25 bp, Homo sapien
tctgaccgaaatgtatcagcaattt

SEQ ID NO: 2156376 - DNA, 25 bp, Homo sapien
ctggggacagtctgaccgaaatgta

SEQ ID NO: 2156377 - DNA, 25 bp, Homo sapien
gggacagtctgaccgaaatgtatca

SEQ ID NO: 2156378 - DNA, 25 bp, Homo sapien
cagtctgaccgaaatgtatcagcaa

SEQ ID NO: 2156379 - DNA, 25 bp, Homo sapien
tatctccagcatagctcatgaggga

SEQ ID NO: 2156380 - DNA, 25 bp, Homo sapien
ccctatctccagcatagctcatgag

SEQ ID NO: 2156381 - DNA, 25 bp, Homo sapien
cagcatagctcatgagggactccat

SEQ ID NO: 2156382 - DNA, 25 bp, Homo sapien
tcatgagggactccatgtgagcgct

SEQ ID NO: 2156383 - DNA, 25 bp, Homo sapien
cctcttgtttccaatctcatctgaa

SEQ ID NO: 2156384 - DNA, 25 bp, Homo sapien
tgtttccaatctcatctgaaacacc

SEQ ID NO: 2156385 - DNA, 25 bp, Homo sapien
tcttgtttccaatctcatctgaaac

SEQ ID NO: 2156386 - DNA, 25 bp, Homo sapien
ctcctcttgtttccaatctcatctg

SEQ ID NO: 2156387 - DNA, 25 bp, Homo sapien
agagttagagtctgcaggctgcccc

SEQ ID NO: 2156388 - DNA, 25 bp, Homo sapien
tagagttagagtctgcaggctgccc

SEQ ID NO: 2156389 - DNA, 25 bp, Homo sapien
gcttctttatttcaaagcagcttcc

SEQ ID NO: 2156390 - DNA, 25 bp, Homo sapien
cagcttcctgcatgaaagccttttc

SEQ ID NO: 2156391 - DNA, 25 bp, Homo sapien
gacatggctcactatctgaaagctt

SEQ ID NO: 2156392 - DNA, 25 bp, Homo sapien
aggacatggctcactatctgaaagc

SEQ ID NO: 2156393 - DNA, 25 bp, Homo sapien
tactttccatagctttgcttctcag

SEQ ID NO: 2156394 - DNA, 25 bp, Homo sapien
catggctcactatctgaaagcttca

SEQ ID NO: 2156395 - DNA, 25 bp, Homo sapien
cccacggagtataaagtggatgtgt

SEQ ID NO: 2156396 - DNA, 25 bp, Homo sapien
ttctctcccacggagtataaagtgg

SEQ ID NO: 2156397 - DNA, 25 bp, Homo sapien
ttgtgataatggttggccatttgga

SEQ ID NO: 2156398 - DNA, 25 bp, Homo sapien
tgttttgtgataatggttggccatt

SEQ ID NO: 2156399 - DNA, 25 bp, Homo sapien
taggaagaagcccaagtctcacagt

SEQ ID NO: 2156400 - DNA, 25 bp, Homo sapien
aagaagcccaagtctcacagtttgg

SEQ ID NO: 2156401 - DNA, 25 bp, Homo sapien
agcccaagtctcacagtttgggata

SEQ ID NO: 2156402 - DNA, 25 bp, Homo sapien
ccaagtctcacagtttgggatagat

SEQ ID NO: 2156403 - DNA, 25 bp, Homo sapien
gatttcagtcgagaaacaggaacaa

SEQ ID NO: 2156404 - DNA, 25 bp, Homo sapien
ggcttcttgccgttgggcttcgtga

SEQ ID NO: 2156405 - DNA, 25 bp, Homo sapien
agtgttcaaactgaacgtggccttc

SEQ ID NO: 2156406 - DNA, 25 bp, Homo sapien
cttgaggtccacgttcatctttggc

SEQ ID NO: 2156407 - DNA, 25 bp, Homo sapien
caataaagacaacatgcttctcact

SEQ ID NO: 2156408 - DNA, 25 bp, Homo sapien
tcctctgagcaataaagacaacatg

SEQ ID NO: 2156409 - DNA, 25 bp, Homo sapien
tgagcaataaagacaacatgcttct

SEQ ID NO: 2156410 - DNA, 25 bp, Homo sapien
gagcaataaagacaacatgcttctc

SEQ ID NO: 2156411 - DNA, 25 bp, Homo sapien
acaaacttcactagggttggccgca

SEQ ID NO: 2156412 - DNA, 25 bp, Homo sapien
ttcactagggttggccgcaaaccac

SEQ ID NO: 2156413 - DNA, 25 bp, Homo sapien
ctgggagcagttgcctgtagaacca

SEQ ID NO: 2156414 - DNA, 25 bp, Homo sapien
cagttgcctgtagaaccagagaaca

SEQ ID NO: 2156415 - DNA, 25 bp, Homo sapien
tccactaatggtgctagttaaaggc

SEQ ID NO: 2156416 - DNA, 25 bp, Homo sapien
tgccatacgcagttggagaaccagg

SEQ ID NO: 2156417 - DNA, 25 bp, Homo sapien
aggactgcactgacagatggaagct

SEQ ID NO: 2156418 - DNA, 25 bp, Homo sapien
ggcagtgctgccatacgcagttgga

SEQ ID NO: 2156419 - DNA, 25 bp, Homo sapien
ctgtgggctgtgtagttgctgctgt

SEQ ID NO: 2156420 - DNA, 25 bp, Homo sapien
gctgtggctttgagctccctcttca

SEQ ID NO: 2156421 - DNA, 25 bp, Homo sapien
ttcttctgtgggctgtgtagttgct

SEQ ID NO: 2156422 - DNA, 25 bp, Homo sapien
ctgtggctttgagctccctcttcat

SEQ ID NO: 2156423 - DNA, 25 bp, Homo sapien
agaacaatgccgaaggccccacgtt

SEQ ID NO: 2156424 - DNA, 25 bp, Homo sapien
ggcctaacagatcctgctgtgggtg

SEQ ID NO: 2156425 - DNA, 25 bp, Homo sapien
aaggccccacgttgggaggcagcct

SEQ ID NO: 2156426 - DNA, 25 bp, Homo sapien
tgcccttgtggatgggtattcaggc

SEQ ID NO: 2156427 - DNA, 25 bp, Homo sapien
tacccaacagatgtgtagcttcaaa

SEQ ID NO: 2156428 - DNA, 25 bp, Homo sapien
caagattttggtgttcaagtaggcc

SEQ ID NO: 2156429 - DNA, 25 bp, Homo sapien
ggccatatcctaaatggctcccaag

SEQ ID NO: 2156430 - DNA, 25 bp, Homo sapien
tcttgtgtttcactccgtagggaat

SEQ ID NO: 2156431 - DNA, 25 bp, Homo sapien
ccatggcaagaccaggatccaataa

SEQ ID NO: 2156432 - DNA, 25 bp, Homo sapien
acacccgtgggtgctagagaagttg

SEQ ID NO: 2156433 - DNA, 25 bp, Homo sapien
aaatatcacggtgtcggcaacagac

SEQ ID NO: 2156434 - DNA, 25 bp, Homo sapien
acacaggagacacccgtgggtgcta

SEQ ID NO: 2156435 - DNA, 25 bp, Homo sapien
ggtgtcggcaacagacacaggagac

SEQ ID NO: 2156436 - DNA, 25 bp, Homo sapien
aaatggaggactgtccagaaggaga

SEQ ID NO: 2156437 - DNA, 25 bp, Homo sapien
aggactgtccagaaggagatgcccc

SEQ ID NO: 2156438 - DNA, 25 bp, Homo sapien
gaaatgcaggaaatggaggactgtc

SEQ ID NO: 2156439 - DNA, 25 bp, Homo sapien
gcaggaaatggaggactgtccagaa

SEQ ID NO: 2156440 - DNA, 25 bp, Homo sapien
tatgtgttataacgtacataactga

SEQ ID NO: 2156441 - DNA, 25 bp, Homo sapien
cataactgagtagtgtattggcagg

SEQ ID NO: 2156442 - DNA, 25 bp, Homo sapien
ggttcatgggtgagatcacttttga

SEQ ID NO: 2156443 - DNA, 25 bp, Homo sapien
cacttttgaacttggtgagatatgg

SEQ ID NO: 2156444 - DNA, 25 bp, Homo sapien
gtagcttacacccaaaatagtcagg

SEQ ID NO: 2156445 - DNA, 25 bp, Homo sapien
tagtcaggcctgctcaaggagatgc

SEQ ID NO: 2156446 - DNA, 25 bp, Homo sapien
ataggaaattgccaggtgctcagct

SEQ ID NO: 2156447 - DNA, 25 bp, Homo sapien
gaggtatgcctgaaacgctgacagc

SEQ ID NO: 2156448 - DNA, 25 bp, Homo sapien
caatgaacatgcaagtgtgtgtgtc

SEQ ID NO: 2156449 - DNA, 25 bp, Homo sapien
gattgctggacaaataaatggtagt

SEQ ID NO: 2156450 - DNA, 25 bp, Homo sapien
gatatgtactcattaatgggattgc

SEQ ID NO: 2156451 - DNA, 25 bp, Homo sapien
tgtgtgtgtcattttggtagaacat

SEQ ID NO: 2156452 - DNA, 25 bp, Homo sapien
ctttcacccctggatcagagtgcat

SEQ ID NO: 2156453 - DNA, 25 bp, Homo sapien
ctctcatatggagccttcaggtcct

SEQ ID NO: 2156454 - DNA, 25 bp, Homo sapien
gtgcttgtgctttcacccctggatc

SEQ ID NO: 2156455 - DNA, 25 bp, Homo sapien
gtgctttcacccctggatcagagtg

SEQ ID NO: 2156456 - DNA, 25 bp, Homo sapien
aacagccctagctattcctgaggcc

SEQ ID NO: 2156457 - DNA, 25 bp, Homo sapien
gcctttaagcttttgctccatctgg

SEQ ID NO: 2156458 - DNA, 25 bp, Homo sapien
tttcacatgaccagttctctgagga

SEQ ID NO: 2156459 - DNA, 25 bp, Homo sapien
tcttgccctttgaggatccaaagcc

SEQ ID NO: 2156460 - DNA, 25 bp, Homo sapien
atttggagtattgcactgccagggc

SEQ ID NO: 2156461 - DNA, 25 bp, Homo sapien
cagctgtgccggccagacaacaaat

SEQ ID NO: 2156462 - DNA, 25 bp, Homo sapien
tgacctctttcaggggagcttccca

SEQ ID NO: 2156463 - DNA, 25 bp, Homo sapien
gttgaagggcgccagagccttctca

SEQ ID NO: 2156464 - DNA, 25 bp, Homo sapien
tagcaaagcttcgatttccaaggat

SEQ ID NO: 2156465 - DNA, 25 bp, Homo sapien
catagggaaagatgcaagcaagttc

SEQ ID NO: 2156466 - DNA, 25 bp, Homo sapien
atggatttctcgtgatcaatcttgt

SEQ ID NO: 2156467 - DNA, 25 bp, Homo sapien
tctcgtgatcaatcttgtggtgtcc

SEQ ID NO: 2156468 - DNA, 25 bp, Homo sapien
aacacaatgcccttcgggatactcc

SEQ ID NO: 2156469 - DNA, 25 bp, Homo sapien
taagccaaactagctttttcgtcga

SEQ ID NO: 2156470 - DNA, 25 bp, Homo sapien
ttccaactgcccatgcaatgtcaga

SEQ ID NO: 2156471 - DNA, 25 bp, Homo sapien
gcatggttagagcttccagatctcc

SEQ ID NO: 2156472 - DNA, 25 bp, Homo sapien
ttttcgtcgacctcagcatggttag

SEQ ID NO: 2156473 - DNA, 25 bp, Homo sapien
gggatagcattgaaggcaggctctc

SEQ ID NO: 2156474 - DNA, 25 bp, Homo sapien
cttgggatagcattgaaggcaggct

SEQ ID NO: 2156475 - DNA, 25 bp, Homo sapien
cctcactagtgtaggcataggagcg

SEQ ID NO: 2156476 - DNA, 25 bp, Homo sapien
ctagtgtaggcataggagcgatgtt

SEQ ID NO: 2156477 - DNA, 25 bp, Homo sapien
ggcctgctttagacagccatacatg

SEQ ID NO: 2156478 - DNA, 25 bp, Homo sapien
tgcacctgtgactgtttgaaatccc

SEQ ID NO: 2156479 - DNA, 25 bp, Homo sapien
tgagggaatttaggcctgctctcca

SEQ ID NO: 2156480 - DNA, 25 bp, Homo sapien
ctgcatgagggtggaaaaaggctct

SEQ ID NO: 2156481 - DNA, 25 bp, Homo sapien
aggctgtgcagccacagtcctgtgc

SEQ ID NO: 2156482 - DNA, 25 bp, Homo sapien
tcgtactccatgctccaggctgtgc

SEQ ID NO: 2156483 - DNA, 25 bp, Homo sapien
ttcgtactccatgctccaggctgtg

SEQ ID NO: 2156484 - DNA, 25 bp, Homo sapien
cagccacagtcctgtgctctcagtg

SEQ ID NO: 2156485 - DNA, 25 bp, Homo sapien
tcttagctttcttatcagcagagca

SEQ ID NO: 2156486 - DNA, 25 bp, Homo sapien
ctttcttatcagcagagcaatgtgt

SEQ ID NO: 2156487 - DNA, 25 bp, Homo sapien
gctttcttatcagcagagcaatgtg

SEQ ID NO: 2156488 - DNA, 25 bp, Homo sapien
tagctttcttatcagcagagcaatg

SEQ ID NO: 2156489 - DNA, 25 bp, Homo sapien
ctagctggtgaagtgtttctttgaa

SEQ ID NO: 2156490 - DNA, 25 bp, Homo sapien
gaatcttccctgtaagcatccatct

SEQ ID NO: 2156491 - DNA, 25 bp, Homo sapien
tctttgaatcttccctgtaagcatc

SEQ ID NO: 2156492 - DNA, 25 bp, Homo sapien
gctggtgaagtgtttctttgaatct

SEQ ID NO: 2156493 - DNA, 25 bp, Homo sapien
tcccctcatgactactgaagtagtc

SEQ ID NO: 2156494 - DNA, 25 bp, Homo sapien
ccctcatgactactgaagtagtctg

SEQ ID NO: 2156495 - DNA, 25 bp, Homo sapien
catgactactgaagtagtctggggt

SEQ ID NO: 2156496 - DNA, 25 bp, Homo sapien
ctcatgactactgaagtagtctggg

SEQ ID NO: 2156497 - DNA, 25 bp, Homo sapien
tatgaagcttgtcccctagtatgcc

SEQ ID NO: 2156498 - DNA, 25 bp, Homo sapien
gggacacttggccatcatttttagg

SEQ ID NO: 2156499 - DNA, 25 bp, Homo sapien
ccaatggtgtgagaactaggagaca

SEQ ID NO: 2156500 - DNA, 25 bp, Homo sapien
gctctcatctgggaaaagtctctac

SEQ ID NO: 2156501 - DNA, 25 bp, Homo sapien
cgcagagtctccagtagcatgctcc

SEQ ID NO: 2156502 - DNA, 25 bp, Homo sapien
gctggctaaaggcagcgctaccgca

SEQ ID NO: 2156503 - DNA, 25 bp, Homo sapien
cctcagacccgctggctaaaggcag

SEQ ID NO: 2156504 - DNA, 25 bp, Homo sapien
taaaggcagcgctaccgcagagtct

SEQ ID NO: 2156505 - DNA, 25 bp, Homo sapien
cagggctcaccgtaagtctggtggt

SEQ ID NO: 2156506 - DNA, 25 bp, Homo sapien
caagcaggccttattacaaatggaa

SEQ ID NO: 2156507 - DNA, 25 bp, Homo sapien
tgaatacaggattcacccaagcaag

SEQ ID NO: 2156508 - DNA, 25 bp, Homo sapien
tccatgaccatgagtagttgtacca

SEQ ID NO: 2156509 - DNA, 25 bp, Homo sapien
gagaagcaccgatcccagggctgag

SEQ ID NO: 2156510 - DNA, 25 bp, Homo sapien
ccaggccaatgccatcgaggaaggc

SEQ ID NO: 2156511 - DNA, 25 bp, Homo sapien
tggcccagcggaggttcccgcttct

SEQ ID NO: 2156512 - DNA, 25 bp, Homo sapien
tgtagattttggtcttggccccaac

SEQ ID NO: 2156513 - DNA, 25 bp, Homo sapien
atatcccagtctgctgcgtctgtcc

SEQ ID NO: 2156514 - DNA, 25 bp, Homo sapien
ttgacaattaggctactcctctctt

SEQ ID NO: 2156515 - DNA, 25 bp, Homo sapien
gacaattaggctactcctctctttg

SEQ ID NO: 2156516 - DNA, 25 bp, Homo sapien
tcctctctttgcatatcccagtctg

SEQ ID NO: 2156517 - DNA, 25 bp, Homo sapien
tctgccgcctttgacaatcagttgg

SEQ ID NO: 2156518 - DNA, 25 bp, Homo sapien
tcagccctggcaactcatggtaagc

SEQ ID NO: 2156519 - DNA, 25 bp, Homo sapien
aacaaaaactacaatctgccgcctt

SEQ ID NO: 2156520 - DNA, 25 bp, Homo sapien
ggaatttaatctgtcaccgccgcga

SEQ ID NO: 2156521 - DNA, 25 bp, Homo sapien
tagcagccctaacatcagtgaacac

SEQ ID NO: 2156522 - DNA, 25 bp, Homo sapien
gaaccgcctatctcccatgatcggg

SEQ ID NO: 2156523 - DNA, 25 bp, Homo sapien
agaggagaaagctcttaggcgagta

SEQ ID NO: 2156524 - DNA, 25 bp, Homo sapien
ggcctctaacgatgagaagatcccc

SEQ ID NO: 2156525 - DNA, 25 bp, Homo sapien
ttctcaaggctttccggctcccgtc

SEQ ID NO: 2156526 - DNA, 25 bp, Homo sapien
ggctcccgtccacacaaggacaagt

SEQ ID NO: 2156527 - DNA, 25 bp, Homo sapien
cgaggaataagttctcaaggctttc

SEQ ID NO: 2156528 - DNA, 25 bp, Homo sapien
gtccgggtcgaggaataagttctca

SEQ ID NO: 2156529 - DNA, 25 bp, Homo sapien
ccaagtccattgatcaaaggggcac

SEQ ID NO: 2156530 - DNA, 25 bp, Homo sapien
tctcagaatgttgccgtctgcggta

SEQ ID NO: 2156531 - DNA, 25 bp, Homo sapien
tcggcagcgacttgaaacctagttt

SEQ ID NO: 2156532 - DNA, 25 bp, Homo sapien
ccgtctgcggtagtggaactcggca

SEQ ID NO: 2156533 - DNA, 25 bp, Homo sapien
gaataacttctctgactatgcccta

SEQ ID NO: 2156534 - DNA, 25 bp, Homo sapien
tactcaagtattagagggccaagga

SEQ ID NO: 2156535 - DNA, 25 bp, Homo sapien
aaaatatgccctcagatcatctggg

SEQ ID NO: 2156536 - DNA, 25 bp, Homo sapien
tctgacagactagagtccctggact

SEQ ID NO: 2156537 - DNA, 25 bp, Homo sapien
gcaagctgtgcaaaggtagaaatta

SEQ ID NO: 2156538 - DNA, 25 bp, Homo sapien
acatacagccttggttggctgggcc

SEQ ID NO: 2156539 - DNA, 25 bp, Homo sapien
aaacaagtctccatataaggtaagg

SEQ ID NO: 2156540 - DNA, 25 bp, Homo sapien
agatttcaaatacctaaacagcaag

SEQ ID NO: 2156541 - DNA, 25 bp, Homo sapien
gcgtcgattcctaaatgttgttctg

SEQ ID NO: 2156542 - DNA, 25 bp, Homo sapien
cagagagcgtcgattcctaaatgtt

SEQ ID NO: 2156543 - DNA, 25 bp, Homo sapien
aattcttaacatgtcagcttgcaac

SEQ ID NO: 2156544 - DNA, 25 bp, Homo sapien
catgtcagcttgcaacacctgtgaa

SEQ ID NO: 2156545 - DNA, 25 bp, Homo sapien
acaggcatggcaacttcagagttct

SEQ ID NO: 2156546 - DNA, 25 bp, Homo sapien
aaggaacaggcatggcaacttcaga

SEQ ID NO: 2156547 - DNA, 25 bp, Homo sapien
tcagaagaggtctttgggcttctgt

SEQ ID NO: 2156548 - DNA, 25 bp, Homo sapien
tgggagaaggcatagtctcaaggtc

SEQ ID NO: 2156549 - DNA, 25 bp, Homo sapien
catccggcttgagcagaagtgccag

SEQ ID NO: 2156550 - DNA, 25 bp, Homo sapien
agtgacatccggcttgagcagaagt

SEQ ID NO: 2156551 - DNA, 25 bp, Homo sapien
gggatggagaagtgacgcagtgaca

SEQ ID NO: 2156552 - DNA, 25 bp, Homo sapien
gacgcagtgacatccggcttgagca

SEQ ID NO: 2156553 - DNA, 25 bp, Homo sapien
catgggctagatgtgcagggcataa

SEQ ID NO: 2156554 - DNA, 25 bp, Homo sapien
gaaggaaccaagagtatcagcacca

SEQ ID NO: 2156555 - DNA, 25 bp, Homo sapien
caggcaaaggcttaggatttcccac

SEQ ID NO: 2156556 - DNA, 25 bp, Homo sapien
tcagcaccaaggaatgatgtcatgg

SEQ ID NO: 2156557 - DNA, 25 bp, Homo sapien
ctgatggaaccatgaaagggaggag

SEQ ID NO: 2156558 - DNA, 25 bp, Homo sapien
tgaaggcggctgatggaaccatgaa

SEQ ID NO: 2156559 - DNA, 25 bp, Homo sapien
tgatgaaggcggctgatggaaccat

SEQ ID NO: 2156560 - DNA, 25 bp, Homo sapien
aaggcggctgatggaaccatgaaag

SEQ ID NO: 2156561 - DNA, 25 bp, Homo sapien
aaacttaatattacacgtgacctca

SEQ ID NO: 2156562 - DNA, 25 bp, Homo sapien
gaattactgaaacataggtattttc

SEQ ID NO: 2156563 - DNA, 25 bp, Homo sapien
tattacacgtgacctcacttagaat

SEQ ID NO: 2156564 - DNA, 25 bp, Homo sapien
cgtgacctcacttagaattactgaa

SEQ ID NO: 2156565 - DNA, 25 bp, Homo sapien
tcactccaaggtatatcacccacca

SEQ ID NO: 2156566 - DNA, 25 bp, Homo sapien
caaggtatatcacccaccaaaaagg

SEQ ID NO: 2156567 - DNA, 25 bp, Homo sapien
tatatcacccaccaaaaaggaaatc

SEQ ID NO: 2156568 - DNA, 25 bp, Homo sapien
tatcacccaccaaaaaggaaatcag

SEQ ID NO: 2156569 - DNA, 25 bp, Homo sapien
caaaaagtcacccatacgtatagga

SEQ ID NO: 2156570 - DNA, 25 bp, Homo sapien
tgcagtactcttggcattatgcata

SEQ ID NO: 2156571 - DNA, 25 bp, Homo sapien
tgcataattacttacagtcatccct

SEQ ID NO: 2156572 - DNA, 25 bp, Homo sapien
ggccttctggaacccgaggatacaa

SEQ ID NO: 2156573 - DNA, 25 bp, Homo sapien
cagctaacaacaacagttgagaaga

SEQ ID NO: 2156574 - DNA, 25 bp, Homo sapien
cctgcttaataggaaaggtgtaaca

SEQ ID NO: 2156575 - DNA, 25 bp, Homo sapien
tcctatgtaggaataataactgtgt

SEQ ID NO: 2156576 - DNA, 25 bp, Homo sapien
gatgtctcagtctctttaatactta

SEQ ID NO: 2156577 - DNA, 25 bp, Homo sapien
aggcatgcctcaccaggtctggcta

SEQ ID NO: 2156578 - DNA, 25 bp, Homo sapien
ttacaggcatgcctcaccaggtctg

SEQ ID NO: 2156579 - DNA, 25 bp, Homo sapien
tacaggcatgcctcaccaggtctgg

SEQ ID NO: 2156580 - DNA, 25 bp, Homo sapien
cacaccagctggagtgagtgcagtg

SEQ ID NO: 2156581 - DNA, 25 bp, Homo sapien
ccagacggggcagcggggcagagac

SEQ ID NO: 2156582 - DNA, 25 bp, Homo sapien
tctcagacggggcggttgccaggcg

SEQ ID NO: 2156583 - DNA, 25 bp, Homo sapien
gggatggcggccgggaagaggcgct

SEQ ID NO: 2156584 - DNA, 25 bp, Homo sapien
gatgggatggcggccgggaagaggc

SEQ ID NO: 2156585 - DNA, 25 bp, Homo sapien
caccattctcccgattcagcctcct

SEQ ID NO: 2156586 - DNA, 25 bp, Homo sapien
acaggtgcccaccaccacgcccagc

SEQ ID NO: 2156587 - DNA, 25 bp, Homo sapien
ttcacaccattctcccgattcagcc

SEQ ID NO: 2156588 - DNA, 25 bp, Homo sapien
cactgtgcccggacttttttttgag

SEQ ID NO: 2156589 - DNA, 25 bp, Homo sapien
tctggcataagaacagatgcatacc

SEQ ID NO: 2156590 - DNA, 25 bp, Homo sapien
aaagctggaggattcatactttctg

SEQ ID NO: 2156591 - DNA, 25 bp, Homo sapien
catagtcaaaacagtgtagttctgg

SEQ ID NO: 2156592 - DNA, 25 bp, Homo sapien
gctggaggattcatactttctgatt

SEQ ID NO: 2156593 - DNA, 25 bp, Homo sapien
gagaagaaactagtccacaatagct

SEQ ID NO: 2156594 - DNA, 25 bp, Homo sapien
caatgagtagtgagatctggagtaa

SEQ ID NO: 2156595 - DNA, 25 bp, Homo sapien
gatgttcaccagaaacttaacagtg

SEQ ID NO: 2156596 - DNA, 25 bp, Homo sapien
taaatgtctatcagggtaagtttgc

SEQ ID NO: 2156597 - DNA, 25 bp, Homo sapien
tcacaccaaagatctattatttatg

SEQ ID NO: 2156598 - DNA, 25 bp, Homo sapien
gatatgcaggaactgattagatgaa

SEQ ID NO: 2156599 - DNA, 25 bp, Homo sapien
tattgcttcacaaattatcacacca

SEQ ID NO: 2156600 - DNA, 25 bp, Homo sapien
cattacagtacatcagatatgcagg

SEQ ID NO: 2156601 - DNA, 25 bp, Homo sapien
cccaagagtgacttatctgtatctc

SEQ ID NO: 2156602 - DNA, 25 bp, Homo sapien
tcccaagagtgacttatctgtatct

SEQ ID NO: 2156603 - DNA, 25 bp, Homo sapien
gaagaagccattgaggatactggag

SEQ ID NO: 2156604 - DNA, 25 bp, Homo sapien
gatactggagttaaatcaatgcact

SEQ ID NO: 2156605 - DNA, 25 bp, Homo sapien
aaatcaatgcactttagagaggatg

SEQ ID NO: 2156606 - DNA, 25 bp, Homo sapien
gtcttcttgatggaagaagccattg

SEQ ID NO: 2156607 - DNA, 25 bp, Homo sapien
ggacttgaaggcgaaccagtgcaac

SEQ ID NO: 2156608 - DNA, 25 bp, Homo sapien
gcataggactgggaataggacttga

SEQ ID NO: 2156609 - DNA, 25 bp, Homo sapien
gaaccagtgcaactcacacaagttt

SEQ ID NO: 2156610 - DNA, 25 bp, Homo sapien
cacacaagtttgtaatgatggagag

SEQ ID NO: 2156611 - DNA, 25 bp, Homo sapien
taatggtccaaggatacttggtcta

SEQ ID NO: 2156612 - DNA, 25 bp, Homo sapien
tccaaggatacttggtctaataatg

SEQ ID NO: 2156613 - DNA, 25 bp, Homo sapien
tctaataatgttggtaggattttga

SEQ ID NO: 2156614 - DNA, 25 bp, Homo sapien
ctttttaatggtccaaggatacttg

SEQ ID NO: 2156615 - DNA, 25 bp, Homo sapien
agaaagcatgttggttgtgccttgg

SEQ ID NO: 2156616 - DNA, 25 bp, Homo sapien
tgacagttgggaagtatcagaagaa

SEQ ID NO: 2156617 - DNA, 25 bp, Homo sapien
ggttgatattgaaatgccatttcac

SEQ ID NO: 2156618 - DNA, 25 bp, Homo sapien
catgttggttgtgccttggaaaatc

SEQ ID NO: 2156619 - DNA, 25 bp, Homo sapien
gatttcagctgacgaattaccagaa

SEQ ID NO: 2156620 - DNA, 25 bp, Homo sapien
caaatgagaaccagtatcagaaggt

SEQ ID NO: 2156621 - DNA, 25 bp, Homo sapien
agttgaaagtttgtctactagaaca

SEQ ID NO: 2156622 - DNA, 25 bp, Homo sapien
cacaggagagtttgtgacagtgccg

SEQ ID NO: 2156623 - DNA, 25 bp, Homo sapien
gaaaagccctgacatattaagcctg

SEQ ID NO: 2156624 - DNA, 25 bp, Homo sapien
gggaacaactggaagcacatgattt

SEQ ID NO: 2156625 - DNA, 25 bp, Homo sapien
caatccttggatcagtatggtataa

SEQ ID NO: 2156626 - DNA, 25 bp, Homo sapien
tacacaagaattatacacgcaagtt

SEQ ID NO: 2156627 - DNA, 25 bp, Homo sapien
attacagtgagttgtggtatcctag

SEQ ID NO: 2156628 - DNA, 25 bp, Homo sapien
ggatcctcccaatacacaagctcaa

SEQ ID NO: 2156629 - DNA, 25 bp, Homo sapien
taacagaatggagaaccaactatgg

SEQ ID NO: 2156630 - DNA, 25 bp, Homo sapien
gaatccctgagtctgagcatattac

SEQ ID NO: 2156631 - DNA, 25 bp, Homo sapien
ttataaggccatatgacgacacagg

SEQ ID NO: 2156632 - DNA, 25 bp, Homo sapien
gatgtatccgtaagccaaggattgc

SEQ ID NO: 2156633 - DNA, 25 bp, Homo sapien
tgatcttaggctggtagcctccaga

SEQ ID NO: 2156634 - DNA, 25 bp, Homo sapien
ggcaaccaacccaggtgactccttg

SEQ ID NO: 2156635 - DNA, 25 bp, Homo sapien
tttcctgatctgaggacccaactca

SEQ ID NO: 2156636 - DNA, 25 bp, Homo sapien
gaatatcagtgaatcattagggtaa

SEQ ID NO: 2156637 - DNA, 25 bp, Homo sapien
gagcactgctcttttataagattat

SEQ ID NO: 2156638 - DNA, 25 bp, Homo sapien
gaggacccaactcattactacagtg

SEQ ID NO: 2156639 - DNA, 25 bp, Homo sapien
gcaagtttccgggattcctatatga

SEQ ID NO: 2156640 - DNA, 25 bp, Homo sapien
ccatggtcatcaagtctccctttag

SEQ ID NO: 2156641 - DNA, 25 bp, Homo sapien
gaaatctccaactgcacatatgtag

SEQ ID NO: 2156642 - DNA, 25 bp, Homo sapien
cccaaaaggctgacatgagcattta

SEQ ID NO: 2156643 - DNA, 25 bp, Homo sapien
gtatcaaggtctggaaactatctca

SEQ ID NO: 2156644 - DNA, 25 bp, Homo sapien
gataggattcagagtacagtcacac

SEQ ID NO: 2156645 - DNA, 25 bp, Homo sapien
tgtggcattccctaggacaaattag

SEQ ID NO: 2156646 - DNA, 25 bp, Homo sapien
tcacactgaactgggaagtattccg

SEQ ID NO: 2156647 - DNA, 25 bp, Homo sapien
gttctaaaggaaggtaggcatctgt

SEQ ID NO: 2156648 - DNA, 25 bp, Homo sapien
tgtttaaccatgtgaggagcctaag

SEQ ID NO: 2156649 - DNA, 25 bp, Homo sapien
tgtaaacacaaatgtatgcctgagg

SEQ ID NO: 2156650 - DNA, 25 bp, Homo sapien
cctgcctgacttacccagactggga

SEQ ID NO: 2156651 - DNA, 25 bp, Homo sapien
caactggaaggaaatcggcagggtt

SEQ ID NO: 2156652 - DNA, 25 bp, Homo sapien
gcgtcccgggatagcctcagcttta

SEQ ID NO: 2156653 - DNA, 25 bp, Homo sapien
tcggcagggttggagcgaggcgtcc

SEQ ID NO: 2156654 - DNA, 25 bp, Homo sapien
ggttgccccagcgagcaactggaag

SEQ ID NO: 2156655 - DNA, 25 bp, Homo sapien
tttcctctactcaggctaccttatg

SEQ ID NO: 2156656 - DNA, 25 bp, Homo sapien
ctcaggctaccttatgaaggaaagt

SEQ ID NO: 2156657 - DNA, 25 bp, Homo sapien
gacatgcattatttcctctactcag

SEQ ID NO: 2156658 - DNA, 25 bp, Homo sapien
gagtgccttctgtgttctagtcact

SEQ ID NO: 2156659 - DNA, 25 bp, Homo sapien
tgctgattgagtttagatgccagcc

SEQ ID NO: 2156660 - DNA, 25 bp, Homo sapien
cttcaaatcttccttattgaattta

SEQ ID NO: 2156661 - DNA, 25 bp, Homo sapien
tcttcaaatcttccttattgaattt

SEQ ID NO: 2156662 - DNA, 25 bp, Homo sapien
ttttgctgattgagtttagatgcca

SEQ ID NO: 2156663 - DNA, 25 bp, Homo sapien
tctggcaagttgaaagatctgcagg

SEQ ID NO: 2156664 - DNA, 25 bp, Homo sapien
tgtcccagattgaagatcatcacgc

SEQ ID NO: 2156665 - DNA, 25 bp, Homo sapien
ggtgaatagacaacctggaggccca

SEQ ID NO: 2156666 - DNA, 25 bp, Homo sapien
actcagggaagggtcagcttttttg

SEQ ID NO: 2156667 - DNA, 25 bp, Homo sapien
tacagaactgtgatgggtaggagcc

SEQ ID NO: 2156668 - DNA, 25 bp, Homo sapien
aacatggctggagaacaagcaggcg

SEQ ID NO: 2156669 - DNA, 25 bp, Homo sapien
gctgtagctgcatcgtcacaggcag

SEQ ID NO: 2156670 - DNA, 25 bp, Homo sapien
tcctggacaagctgaaaaagacctt

SEQ ID NO: 2156671 - DNA, 25 bp, Homo sapien
ggcatacagtgtaaggctggacctg

SEQ ID NO: 2156672 - DNA, 25 bp, Homo sapien
aaacaccggagaaaaactcttgatg

SEQ ID NO: 2156673 - DNA, 25 bp, Homo sapien
ggagaaaaactcttgatgctccttg

SEQ ID NO: 2156674 - DNA, 25 bp, Homo sapien
cgtagcgcagggcatacagtgtaag

SEQ ID NO: 2156675 - DNA, 25 bp, Homo sapien
tgggctgctgctgatccgagctgcg

SEQ ID NO: 2156676 - DNA, 25 bp, Homo sapien
cagagggatggacgcgggaaagtac

SEQ ID NO: 2156677 - DNA, 25 bp, Homo sapien
ctcaccgaccgtgggacagagggat

SEQ ID NO: 2156678 - DNA, 25 bp, Homo sapien
agctgcgctgcaaggcggaagccct

SEQ ID NO: 2156679 - DNA, 25 bp, Homo sapien
gaaggcgccgtaagagccgcgggtc

SEQ ID NO: 2156680 - DNA, 25 bp, Homo sapien
tcccctgcgggcgcgacagccgcac

SEQ ID NO: 2156681 - DNA, 25 bp, Homo sapien
agaaggcgccgtaagagccgcgggt

SEQ ID NO: 2156682 - DNA, 25 bp, Homo sapien
gccgtaagagccgcgggtcccctgc

SEQ ID NO: 2156683 - DNA, 25 bp, Homo sapien
gagaatcaccgaggccagaatatag

SEQ ID NO: 2156684 - DNA, 25 bp, Homo sapien
ttgagaatcaccgaggccagaatat

SEQ ID NO: 2156685 - DNA, 25 bp, Homo sapien
cgttgagaatcaccgaggccagaat

SEQ ID NO: 2156686 - DNA, 25 bp, Homo sapien
aaagaagttcttgcgcagccgccag

SEQ ID NO: 2156687 - DNA, 25 bp, Homo sapien
gaatgagtggcaagtctgcatgcag

SEQ ID NO: 2156688 - DNA, 25 bp, Homo sapien
cgtgcttgtttagagattacacccc

SEQ ID NO: 2156689 - DNA, 25 bp, Homo sapien
gactccagagtcttgatccatgtgc

SEQ ID NO: 2156690 - DNA, 25 bp, Homo sapien
tgttcaaaaccatgccacatctgag

SEQ ID NO: 2156691 - DNA, 25 bp, Homo sapien
caaaacttggcttatgaaccgcacc

SEQ ID NO: 2156692 - DNA, 25 bp, Homo sapien
tcaaactggagacttgtggtaagcc

SEQ ID NO: 2156693 - DNA, 25 bp, Homo sapien
tgacagacagacattagtacccagt

SEQ ID NO: 2156694 - DNA, 25 bp, Homo sapien
tagatacccttatttgtcctggagc

SEQ ID NO: 2156695 - DNA, 25 bp, Homo sapien
actccagtgtcagcttggactacta

SEQ ID NO: 2156696 - DNA, 25 bp, Homo sapien
ggactactagttctgcagtcaacat

SEQ ID NO: 2156697 - DNA, 25 bp, Homo sapien
ggcctgttgtagactccactccagt

SEQ ID NO: 2156698 - DNA, 25 bp, Homo sapien
tgttgtagactccactccagtgtca

SEQ ID NO: 2156699 - DNA, 25 bp, Homo sapien
ggacaacaatgcacatcaaaggctg

SEQ ID NO: 2156700 - DNA, 25 bp, Homo sapien
gatatgtgcatatagtgcccactgg

SEQ ID NO: 2156701 - DNA, 25 bp, Homo sapien
tatagtgcccactggcaaacgtcac

SEQ ID NO: 2156702 - DNA, 25 bp, Homo sapien
ctttggagcagcatacctggaggac

SEQ ID NO: 2156703 - DNA, 25 bp, Homo sapien
actggcaaacgtcacacatggatga

SEQ ID NO: 2156704 - DNA, 25 bp, Homo sapien
tggcaaacgtcacacatggatgatg

SEQ ID NO: 2156705 - DNA, 25 bp, Homo sapien
cttgtctgttggtgaaggcgttgct

SEQ ID NO: 2156706 - DNA, 25 bp, Homo sapien
gcaaacgtcacacatggatgatggg

SEQ ID NO: 2156707 - DNA, 25 bp, Homo sapien
agtttccctgtttataagctgttgc

SEQ ID NO: 2156708 - DNA, 25 bp, Homo sapien
caaggctgtaggtgtcagtttccct

SEQ ID NO: 2156709 - DNA, 25 bp, Homo sapien
ctcaaggctgtaggtgtcagtttcc

SEQ ID NO: 2156710 - DNA, 25 bp, Homo sapien
ataagctgttgccacttggtgatct

SEQ ID NO: 2156711 - DNA, 25 bp, Homo sapien
agagcaatctgagggagatatctga

SEQ ID NO: 2156712 - DNA, 25 bp, Homo sapien
agcacacagtctttcatatctgtag

SEQ ID NO: 2156713 - DNA, 25 bp, Homo sapien
aagcaactgcgagtgtttctgggaa

SEQ ID NO: 2156714 - DNA, 25 bp, Homo sapien
tatctgagaagcaactgcgagtgtt

SEQ ID NO: 2156715 - DNA, 25 bp, Homo sapien
aaaacctgatcttgacattgtgcca

SEQ ID NO: 2156716 - DNA, 25 bp, Homo sapien
actcttgcagtaacagtcagcagca

SEQ ID NO: 2156717 - DNA, 25 bp, Homo sapien
tctgaaggtaatttaaggccatgtc

SEQ ID NO: 2156718 - DNA, 25 bp, Homo sapien
tgaaaagattgtgggagtgctactc

SEQ ID NO: 2156719 - DNA, 25 bp, Homo sapien
gcttaactcctttatactacctgga

SEQ ID NO: 2156720 - DNA, 25 bp, Homo sapien
tacacactgacagaccactgacagc

SEQ ID NO: 2156721 - DNA, 25 bp, Homo sapien
tcaagggacctgttaccttcagcga

SEQ ID NO: 2156722 - DNA, 25 bp, Homo sapien
caacaaaataacttgtatcttctgc

SEQ ID NO: 2156723 - DNA, 25 bp, Homo sapien
agggtccgctgtgttactggccgcc

SEQ ID NO: 2156724 - DNA, 25 bp, Homo sapien
ggtccgctgtgttactggccgccgc

SEQ ID NO: 2156725 - DNA, 25 bp, Homo sapien
tccgctgtgttactggccgccgcca

SEQ ID NO: 2156726 - DNA, 25 bp, Homo sapien
cgctgtgttactggccgccgccagg

SEQ ID NO: 2156727 - DNA, 25 bp, Homo sapien
gcatgggacaaggaatagatatacc

SEQ ID NO: 2156728 - DNA, 25 bp, Homo sapien
tggcgcactaatgacctccaggcct

SEQ ID NO: 2156729 - DNA, 25 bp, Homo sapien
gaacttacaggctttgctctccaag

SEQ ID NO: 2156730 - DNA, 25 bp, Homo sapien
catagctgagggtttgcgaaggaac

SEQ ID NO: 2156731 - DNA, 25 bp, Homo sapien
tatgacccatatggaacttctgacc

SEQ ID NO: 2156732 - DNA, 25 bp, Homo sapien
caactgcgttgaaagtatctatggc

SEQ ID NO: 2156733 - DNA, 25 bp, Homo sapien
tgtttcggaaatatgggtgctactc

SEQ ID NO: 2156734 - DNA, 25 bp, Homo sapien
tctgccaatagtctaactgaacggg

SEQ ID NO: 2156735 - DNA, 25 bp, Homo sapien
cccctgagatgaccactattctgaa

SEQ ID NO: 2156736 - DNA, 25 bp, Homo sapien
caatcacacctattagcatggctga

SEQ ID NO: 2156737 - DNA, 25 bp, Homo sapien
tgtagcagacaaaatggcaatcccc

SEQ ID NO: 2156738 - DNA, 25 bp, Homo sapien
gaatacagaatgttagccacttggg

SEQ ID NO: 2156739 - DNA, 25 bp, Homo sapien
gatatgcaattcagaaatagaccca

SEQ ID NO: 2156740 - DNA, 25 bp, Homo sapien
caaaagcacaattctcataagcaaa

SEQ ID NO: 2156741 - DNA, 25 bp, Homo sapien
gaccaactgtagatgaatagaactg

SEQ ID NO: 2156742 - DNA, 25 bp, Homo sapien
ttgaaaccttggattagacaaagat

SEQ ID NO: 2156743 - DNA, 25 bp, Homo sapien
tagtttaactcgacttgtaagtgat

SEQ ID NO: 2156744 - DNA, 25 bp, Homo sapien
gtagtacatgttgtatatataccac

SEQ ID NO: 2156745 - DNA, 25 bp, Homo sapien
cctcatagtttaactcgacttgtaa

SEQ ID NO: 2156746 - DNA, 25 bp, Homo sapien
catcctcatagtttaactcgacttg

SEQ ID NO: 2156747 - DNA, 25 bp, Homo sapien
cgctggacgtcaatgggctccaccc

SEQ ID NO: 2156748 - DNA, 25 bp, Homo sapien
tgctcctcgcttcgctggacgtcaa

SEQ ID NO: 2156749 - DNA, 25 bp, Homo sapien
cgctgctcctcgcttcgctggacgt

SEQ ID NO: 2156750 - DNA, 25 bp, Homo sapien
ctggacgtcaatgggctccacccgg

SEQ ID NO: 2156751 - DNA, 25 bp, Homo sapien
ggaatcgggttcctccagcgacgcg

SEQ ID NO: 2156752 - DNA, 25 bp, Homo sapien
gggaatcgggttcctccagcgacgc

SEQ ID NO: 2156753 - DNA, 25 bp, Homo sapien
agggaatcgggttcctccagcgacg

SEQ ID NO: 2156754 - DNA, 25 bp, Homo sapien
ttctcgtccacgaacatgtaggagc

SEQ ID NO: 2156755 - DNA, 25 bp, Homo sapien
gttctcgtccacgaacatgtaggag

SEQ ID NO: 2156756 - DNA, 25 bp, Homo sapien
tgttctcgtccacgaacatgtagga

SEQ ID NO: 2156757 - DNA, 25 bp, Homo sapien
gtgttctcgtccacgaacatgtagg

SEQ ID NO: 2156758 - DNA, 25 bp, Homo sapien
tgaggcgggtgatgaggaacgtcac

SEQ ID NO: 2156759 - DNA, 25 bp, Homo sapien
gtgaggcgggtgatgaggaacgtca

SEQ ID NO: 2156760 - DNA, 25 bp, Homo sapien
cttcttgatgtaggggatcacccac

SEQ ID NO: 2156761 - DNA, 25 bp, Homo sapien
tgatgtaggggatcacccactgcag

SEQ ID NO: 2156762 - DNA, 25 bp, Homo sapien
ctagaagtcctcgtcctcctcccat

SEQ ID NO: 2156763 - DNA, 25 bp, Homo sapien
acatcgcggcggctcgagggggagg

SEQ ID NO: 2156764 - DNA, 25 bp, Homo sapien
gcgaccctggcggcggccagtaaca

SEQ ID NO: 2156765 - DNA, 25 bp, Homo sapien
ggagggcgccggtggcgaccctggc

SEQ ID NO: 2156766 - DNA, 25 bp, Homo sapien
ggcggccagtaacacagcggaccct

SEQ ID NO: 2156767 - DNA, 25 bp, Homo sapien
tggaacaaaggcaagcactacgcgg

SEQ ID NO: 2156768 - DNA, 25 bp, Homo sapien
acaaaggcaagcactacgcgggagg

SEQ ID NO: 2156769 - DNA, 25 bp, Homo sapien
gaacaaaggcaagcactacgcggga

SEQ ID NO: 2156770 - DNA, 25 bp, Homo sapien
aggcaagcactacgcgggagggaac

SEQ ID NO: 2156771 - DNA, 25 bp, Homo sapien
ggcggcggctcgctccagagtgagg

SEQ ID NO: 2156772 - DNA, 25 bp, Homo sapien
ctggaaggagagggcggcggctcgc

SEQ ID NO: 2156773 - DNA, 25 bp, Homo sapien
agagggcggcggctcgctccagagt

SEQ ID NO: 2156774 - DNA, 25 bp, Homo sapien
tggaaggagagggcggcggctcgct

SEQ ID NO: 2156775 - DNA, 25 bp, Homo sapien
caggacagcgtccaaatgtacatgg

SEQ ID NO: 2156776 - DNA, 25 bp, Homo sapien
agcccagcttgcagctggagcgcag

SEQ ID NO: 2156777 - DNA, 25 bp, Homo sapien
tgatgtagtcgtctggcagtctggt

SEQ ID NO: 2156778 - DNA, 25 bp, Homo sapien
tctgtgggcagaatgatgtagtcgt

SEQ ID NO: 2156779 - DNA, 25 bp, Homo sapien
cggccagctgtctggatcactgtcc

SEQ ID NO: 2156780 - DNA, 25 bp, Homo sapien
cagcccagatacctccgaggtgagt

SEQ ID NO: 2156781 - DNA, 25 bp, Homo sapien
ccagcccagatacctccgaggtgag

SEQ ID NO: 2156782 - DNA, 25 bp, Homo sapien
cagctgtctggatcactgtccaggg

SEQ ID NO: 2156783 - DNA, 25 bp, Homo sapien
aatactgcgttatgggcaaaactaa

SEQ ID NO: 2156784 - DNA, 25 bp, Homo sapien
gaatactgcgttatgggcaaaacta

SEQ ID NO: 2156785 - DNA, 25 bp, Homo sapien
cagaatactgcgttatgggcaaaac

SEQ ID NO: 2156786 - DNA, 25 bp, Homo sapien
tcagaatactgcgttatgggcaaaa

SEQ ID NO: 2156787 - DNA, 25 bp, Homo sapien
ccaggtagtgtattagagcagagca

SEQ ID NO: 2156788 - DNA, 25 bp, Homo sapien
ttactgtgttgaacaaaaggcacac

SEQ ID NO: 2156789 - DNA, 25 bp, Homo sapien
acacatcagagagacagttgcaaac

SEQ ID NO: 2156790 - DNA, 25 bp, Homo sapien
aaaagactttctccaggtagtgtat

SEQ ID NO: 2156791 - DNA, 25 bp, Homo sapien
gcactgaaccatccaaaggctactt

SEQ ID NO: 2156792 - DNA, 25 bp, Homo sapien
tatctatagaagcaggcaggtcatc

SEQ ID NO: 2156793 - DNA, 25 bp, Homo sapien
tgacaggcagatcagggacactcac

SEQ ID NO: 2156794 - DNA, 25 bp, Homo sapien
tgtacaggattgcagttaggccact

SEQ ID NO: 2156795 - DNA, 25 bp, Homo sapien
tctgggccggcagctacagaatcaa

SEQ ID NO: 2156796 - DNA, 25 bp, Homo sapien
agaaggagctcagttctgggccggc

SEQ ID NO: 2156797 - DNA, 25 bp, Homo sapien
gagctcagttctgggccggcagcta

SEQ ID NO: 2156798 - DNA, 25 bp, Homo sapien
gttctgggccggcagctacagaatc

SEQ ID NO: 2156799 - DNA, 25 bp, Homo sapien
taaggaccagtaagagagtgggtat

SEQ ID NO: 2156800 - DNA, 25 bp, Homo sapien
tacaaccgtcaagagggccaaaagc

SEQ ID NO: 2156801 - DNA, 25 bp, Homo sapien
tgaccatctgttaaggaccagtaag

SEQ ID NO: 2156802 - DNA, 25 bp, Homo sapien
gtgaaagaaggtggtacaaccgtca

SEQ ID NO: 2156803 - DNA, 25 bp, Homo sapien
tctcagcagcctaagacacagcaac

SEQ ID NO: 2156804 - DNA, 25 bp, Homo sapien
cagcaacagccacatcagggagaga

SEQ ID NO: 2156805 - DNA, 25 bp, Homo sapien
tccaggatcagctgggcactatggc

SEQ ID NO: 2156806 - DNA, 25 bp, Homo sapien
tggaaaagagagacccactgaagtg

SEQ ID NO: 2156807 - DNA, 25 bp, Homo sapien
ggaacaccttaatgttggagacctc

SEQ ID NO: 2156808 - DNA, 25 bp, Homo sapien
tggagacctccttaaattttgacaa

SEQ ID NO: 2156809 - DNA, 25 bp, Homo sapien
tgttgtcttcatccctaaaaatgtc

SEQ ID NO: 2156810 - DNA, 25 bp, Homo sapien
cattgtacttggtaactttgctaac

SEQ ID NO: 2156811 - DNA, 25 bp, Homo sapien
ggctgtgcctttagattgggttccc

SEQ ID NO: 2156812 - DNA, 25 bp, Homo sapien
taccctgggaggcaattatttgtaa

SEQ ID NO: 2156813 - DNA, 25 bp, Homo sapien
ttgggttccccataagctgactctg

SEQ ID NO: 2156814 - DNA, 25 bp, Homo sapien
cacaaacattgagggcaagagtgta

SEQ ID NO: 2156815 - DNA, 25 bp, Homo sapien
tatgaatggttccacaagtcaaaga

SEQ ID NO: 2156816 - DNA, 25 bp, Homo sapien
aaaacttgccaaactgatgacgatg

SEQ ID NO: 2156817 - DNA, 25 bp, Homo sapien
gacatcacagtttccctaatagacc

SEQ ID NO: 2156818 - DNA, 25 bp, Homo sapien
gctgtgacataatagttactgcctg

SEQ ID NO: 2156819 - DNA, 25 bp, Homo sapien
ctgggccgcactctagagcgcgctg

SEQ ID NO: 2156820 - DNA, 25 bp, Homo sapien
atccaccgcatctcaccaacagact

SEQ ID NO: 2156821 - DNA, 25 bp, Homo sapien
cagactgtggctcctagtgatgtgg

SEQ ID NO: 2156822 - DNA, 25 bp, Homo sapien
cctccagactgccagccaactacat

SEQ ID NO: 2156823 - DNA, 25 bp, Homo sapien
gctctgggaagagttcgctgtgcca

SEQ ID NO: 2156824 - DNA, 25 bp, Homo sapien
agtggccaccgctagggtctccaca

SEQ ID NO: 2156825 - DNA, 25 bp, Homo sapien
gcttccggcgacgccttagcgctga

SEQ ID NO: 2156826 - DNA, 25 bp, Homo sapien
gcgcgcggcacgatggacggtcggg

SEQ ID NO: 2156827 - DNA, 25 bp, Homo sapien
atcttcaagtgcctaaatggtgctg

SEQ ID NO: 2156828 - DNA, 25 bp, Homo sapien
ttcaagtgcctaaatggtgctgacc

SEQ ID NO: 2156829 - DNA, 25 bp, Homo sapien
tcttcaagtgcctaaatggtgctga

SEQ ID NO: 2156830 - DNA, 25 bp, Homo sapien
ccatcttcaagtgcctaaatggtgc

SEQ ID NO: 2156831 - DNA, 25 bp, Homo sapien
gagacagtcttgctgcaggctgtac

SEQ ID NO: 2156832 - DNA, 25 bp, Homo sapien
cctggaaccatgctgaaacttgggc

SEQ ID NO: 2156833 - DNA, 25 bp, Homo sapien
cctggccgccagaatccatctgtaa

SEQ ID NO: 2156834 - DNA, 25 bp, Homo sapien
caggctgtaacttccaagagtttgc

SEQ ID NO: 2156835 - DNA, 25 bp, Homo sapien
caactggaggccttccgtgtctggt

SEQ ID NO: 2156836 - DNA, 25 bp, Homo sapien
tctggtgatcaaaagtgcctaagtc

SEQ ID NO: 2156837 - DNA, 25 bp, Homo sapien
taatacactaaaatcccaactggag

SEQ ID NO: 2156838 - DNA, 25 bp, Homo sapien
gctgtgctgagaaccgacttgaccc

SEQ ID NO: 2156839 - DNA, 25 bp, Homo sapien
tttggagcagtacagaagatcacag

SEQ ID NO: 2156840 - DNA, 25 bp, Homo sapien
gggcttttcagcagtgaagtggcac

SEQ ID NO: 2156841 - DNA, 25 bp, Homo sapien
ggctcctggagacacgacataacca

SEQ ID NO: 2156842 - DNA, 25 bp, Homo sapien
tgagacccatggcatgaccccaatt

SEQ ID NO: 2156843 - DNA, 25 bp, Homo sapien
gactatgacttcacttggtgctgaa

SEQ ID NO: 2156844 - DNA, 25 bp, Homo sapien
cttattcaggcttgaaccagaagga

SEQ ID NO: 2156845 - DNA, 25 bp, Homo sapien
tggtgctgaaccaatcaggccctgg

SEQ ID NO: 2156846 - DNA, 25 bp, Homo sapien
ggacaattgtgagtcaccatagtga

SEQ ID NO: 2156847 - DNA, 25 bp, Homo sapien
tcctgatgctccacgcagatgtgct

SEQ ID NO: 2156848 - DNA, 25 bp, Homo sapien
ccacgcagatgtgctgggacctact

SEQ ID NO: 2156849 - DNA, 25 bp, Homo sapien
gctgggtcttaagtattcatccacc

SEQ ID NO: 2156850 - DNA, 25 bp, Homo sapien
tgactgcttgactccacagatggct

SEQ ID NO: 2156851 - DNA, 25 bp, Homo sapien
tctactgagtaaaacgctcagcacc

SEQ ID NO: 2156852 - DNA, 25 bp, Homo sapien
cgctcagcaccgatttagaggccag

SEQ ID NO: 2156853 - DNA, 25 bp, Homo sapien
gtccaccctggtatggcttgcttca

SEQ ID NO: 2156854 - DNA, 25 bp, Homo sapien
ccctggtatggcttgcttcagtgtc

SEQ ID NO: 2156855 - DNA, 25 bp, Homo sapien
tgattgtgtggcgtgtcggcaaagg

SEQ ID NO: 2156856 - DNA, 25 bp, Homo sapien
gggttgattgtgtggcgtgtcggca

SEQ ID NO: 2156857 - DNA, 25 bp, Homo sapien
attgtgtggcgtgtcggcaaaggcc

SEQ ID NO: 2156858 - DNA, 25 bp, Homo sapien
tgtgtggcgtgtcggcaaaggccag

SEQ ID NO: 2156859 - DNA, 25 bp, Homo sapien
caggggaaggatttattgatccaca

SEQ ID NO: 2156860 - DNA, 25 bp, Homo sapien
tcaggggaaggatttattgatccac

SEQ ID NO: 2156861 - DNA, 25 bp, Homo sapien
aggggaaggatttattgatccacac

SEQ ID NO: 2156862 - DNA, 25 bp, Homo sapien
gtgatcaaagaccatgtccagccaa

SEQ ID NO: 2156863 - DNA, 25 bp, Homo sapien
accaggtgatcaaagaccatgtcca

SEQ ID NO: 2156864 - DNA, 25 bp, Homo sapien
ctcgggtaacacagagacgggtcag

SEQ ID NO: 2156865 - DNA, 25 bp, Homo sapien
cacagagacgggtcagaagtcaaga

SEQ ID NO: 2156866 - DNA, 25 bp, Homo sapien
taagcagggcccctcgtgtctccaa

SEQ ID NO: 2156867 - DNA, 25 bp, Homo sapien
cagactctacaacgttagtaaacac

SEQ ID NO: 2156868 - DNA, 25 bp, Homo sapien
acaccttctcggagggcagtaggta

SEQ ID NO: 2156869 - DNA, 25 bp, Homo sapien
tctcggagggcagtaggtaaagttc

SEQ ID NO: 2156870 - DNA, 25 bp, Homo sapien
aatttagggttgcagggcctctcca

SEQ ID NO: 2156871 - DNA, 25 bp, Homo sapien
tcaagggagacaaatcaagacctct

SEQ ID NO: 2156872 - DNA, 25 bp, Homo sapien
caagacctctaagtgggctcctgaa

SEQ ID NO: 2156873 - DNA, 25 bp, Homo sapien
tagaaatttagggttgcagggcctc

SEQ ID NO: 2156874 - DNA, 25 bp, Homo sapien
acccgggccagccctctacttcttg

SEQ ID NO: 2156875 - DNA, 25 bp, Homo sapien
cccgggccagccctctacttcttgt

SEQ ID NO: 2156876 - DNA, 25 bp, Homo sapien
cgggccagccctctacttcttgtcc

SEQ ID NO: 2156877 - DNA, 25 bp, Homo sapien
ccgggccagccctctacttcttgtc

SEQ ID NO: 2156878 - DNA, 25 bp, Homo sapien
ctttctcatttctagcccggtcata

SEQ ID NO: 2156879 - DNA, 25 bp, Homo sapien
catcccgagcagaaacagtcatggg

SEQ ID NO: 2156880 - DNA, 25 bp, Homo sapien
tagcccggtcatatgggctgaatac

SEQ ID NO: 2156881 - DNA, 25 bp, Homo sapien
aggccatcccgagcagaaacagtca

SEQ ID NO: 2156882 - DNA, 25 bp, Homo sapien
ctgcagggatggttccatagtgtgc

SEQ ID NO: 2156883 - DNA, 25 bp, Homo sapien
attacactttgtccgcttgcccctg

SEQ ID NO: 2156884 - DNA, 25 bp, Homo sapien
ccccaggcggctcagcatcaggtaa

SEQ ID NO: 2156885 - DNA, 25 bp, Homo sapien
taagggaggagagacattacacttt

SEQ ID NO: 2156886 - DNA, 25 bp, Homo sapien
tttcttcaatacaaccacagtgttc

SEQ ID NO: 2156887 - DNA, 25 bp, Homo sapien
tatggactatttcgaagaaataatg

SEQ ID NO: 2156888 - DNA, 25 bp, Homo sapien
aagaaataatggcaactcataagca

SEQ ID NO: 2156889 - DNA, 25 bp, Homo sapien
tcaacacagtccacctttgaagtat

SEQ ID NO: 2156890 - DNA, 25 bp, Homo sapien
gcacagtgcataacaagcgaataat

SEQ ID NO: 2156891 - DNA, 25 bp, Homo sapien
aataataagtcgcacctcacagcac

SEQ ID NO: 2156892 - DNA, 25 bp, Homo sapien
tgtgaatgcacagtgcataacaagc

SEQ ID NO: 2156893 - DNA, 25 bp, Homo sapien
taacaagcgaataataagtcgcacc

SEQ ID NO: 2156894 - DNA, 25 bp, Homo sapien
tccctcataggtccaaccgttatcg

SEQ ID NO: 2156895 - DNA, 25 bp, Homo sapien
cagccagttcacgtgtgggagaccc

SEQ ID NO: 2156896 - DNA, 25 bp, Homo sapien
aaccgttatcggcaccagccagttc

SEQ ID NO: 2156897 - DNA, 25 bp, Homo sapien
cacaagtgccctgaatgcgggaaag

SEQ ID NO: 2156898 - DNA, 25 bp, Homo sapien
tacttagacatgagcatggaatctg

SEQ ID NO: 2156899 - DNA, 25 bp, Homo sapien
ctctcctccgtagcccagaaaacgc

SEQ ID NO: 2156900 - DNA, 25 bp, Homo sapien
tagacatgagcatggaatctgtcat

SEQ ID NO: 2156901 - DNA, 25 bp, Homo sapien
gaacttgtacttagacatgagcatg

SEQ ID NO: 2156902 - DNA, 25 bp, Homo sapien
ccccatcaagtggatcttgtgcaaa

SEQ ID NO: 2156903 - DNA, 25 bp, Homo sapien
catcaagtggatcttgtgcaaatgg

SEQ ID NO: 2156904 - DNA, 25 bp, Homo sapien
agacaaccccatcaagtggatcttg

SEQ ID NO: 2156905 - DNA, 25 bp, Homo sapien
caaccccatcaagtggatcttgtgc

SEQ ID NO: 2156906 - DNA, 25 bp, Homo sapien
gatttcttagcaccaatctcttgct

SEQ ID NO: 2156907 - DNA, 25 bp, Homo sapien
tctttctaaggcgatttcttagcac

SEQ ID NO: 2156908 - DNA, 25 bp, Homo sapien
cttgctgcagcatccgttattagct

SEQ ID NO: 2156909 - DNA, 25 bp, Homo sapien
tagctctatttgtgccagcagggac

SEQ ID NO: 2156910 - DNA, 25 bp, Homo sapien
cttctctgccaacagagtttgaacc

SEQ ID NO: 2156911 - DNA, 25 bp, Homo sapien
ttcattgtaatagtcacctaggaca

SEQ ID NO: 2156912 - DNA, 25 bp, Homo sapien
attgtaatagtcacctaggacagcc

SEQ ID NO: 2156913 - DNA, 25 bp, Homo sapien
cattgtaatagtcacctaggacagc

SEQ ID NO: 2156914 - DNA, 25 bp, Homo sapien
ttgtaatagtcacctaggacagcct

SEQ ID NO: 2156915 - DNA, 25 bp, Homo sapien
tctttctaaggcgatttcttagcac

SEQ ID NO: 2156916 - DNA, 25 bp, Homo sapien
gatttcttagcaccaatctcttgct

SEQ ID NO: 2156917 - DNA, 25 bp, Homo sapien
cttgctgcagcatccgttattagct

SEQ ID NO: 2156918 - DNA, 25 bp, Homo sapien
tagctctatttgtgccagcagggac

SEQ ID NO: 2156919 - DNA, 25 bp, Homo sapien
cttctctgccaacagagtttgaacc

SEQ ID NO: 2156920 - DNA, 25 bp, Homo sapien
accctgaggacaggttgcaaagcca

SEQ ID NO: 2156921 - DNA, 25 bp, Homo sapien
gaaccacagttctgacgtttacagc

SEQ ID NO: 2156922 - DNA, 25 bp, Homo sapien
ggatctaacgtcttccgaaccacag

SEQ ID NO: 2156923 - DNA, 25 bp, Homo sapien
gagttgagctgggatctaacgtctt

SEQ ID NO: 2156924 - DNA, 25 bp, Homo sapien
aagggcttcatgagattctttccag

SEQ ID NO: 2156925 - DNA, 25 bp, Homo sapien
aacttttagaggcacgttgccagtc

SEQ ID NO: 2156926 - DNA, 25 bp, Homo sapien
gccagtcacaacatcactactgaag

SEQ ID NO: 2156927 - DNA, 25 bp, Homo sapien
tgaagtagatcgactcatcaatcat

SEQ ID NO: 2156928 - DNA, 25 bp, Homo sapien
cactactgaagtagatcgactcatc

SEQ ID NO: 2156929 - DNA, 25 bp, Homo sapien
ccaagtgaacgatgagactgctttc

SEQ ID NO: 2156930 - DNA, 25 bp, Homo sapien
gatcgagaatattgtcgtccttgcc

SEQ ID NO: 2156931 - DNA, 25 bp, Homo sapien
ggaaacctgctgtaatctcattaag

SEQ ID NO: 2156932 - DNA, 25 bp, Homo sapien
tttccccttctcatatttgcaaaga

SEQ ID NO: 2156933 - DNA, 25 bp, Homo sapien
gggtgatagaaatcgctctccaaat

SEQ ID NO: 2156934 - DNA, 25 bp, Homo sapien
ttcttccatgtacgctagtaatgca

SEQ ID NO: 2156935 - DNA, 25 bp, Homo sapien
catgaccacattgacgatatcatct

SEQ ID NO: 2156936 - DNA, 25 bp, Homo sapien
tctacttgaggtacgtatccatcag

SEQ ID NO: 2156937 - DNA, 25 bp, Homo sapien
gactagcaagctaatttagcatgct

SEQ ID NO: 2156938 - DNA, 25 bp, Homo sapien
tcctccagtgactagcaagctaatt

SEQ ID NO: 2156939 - DNA, 25 bp, Homo sapien
taatggccgtgttcattttaattaa

SEQ ID NO: 2156940 - DNA, 25 bp, Homo sapien
ttcaaatttaatggccgtgttcatt

SEQ ID NO: 2156941 - DNA, 25 bp, Homo sapien
taaatgctttggctccgacgttccc

SEQ ID NO: 2156942 - DNA, 25 bp, Homo sapien
tacaggttgtacaggcagcataacg

SEQ ID NO: 2156943 - DNA, 25 bp, Homo sapien
caacaaacaccgcaagttatgtggg

SEQ ID NO: 2156944 - DNA, 25 bp, Homo sapien
gaaagaggctatggaacaatacagg

SEQ ID NO: 2156945 - DNA, 25 bp, Homo sapien
agtgcttggtgatgctttaatgaca

SEQ ID NO: 2156946 - DNA, 25 bp, Homo sapien
gaaccacaggtaagtatcattgctg

SEQ ID NO: 2156947 - DNA, 25 bp, Homo sapien
tctgctcattgagtctgccaggcac

SEQ ID NO: 2156948 - DNA, 25 bp, Homo sapien
cattcagtcattgaacttaataaca

SEQ ID NO: 2156949 - DNA, 25 bp, Homo sapien
tgtgtcactctcctagtggatgacc

SEQ ID NO: 2156950 - DNA, 25 bp, Homo sapien
tttcactgaggtcttgtgcaccaag

SEQ ID NO: 2156951 - DNA, 25 bp, Homo sapien
caccaaggtcttgtgtctctctata

SEQ ID NO: 2156952 - DNA, 25 bp, Homo sapien
gtggatgacccataagacaccccgg

SEQ ID NO: 2156953 - DNA, 25 bp, Homo sapien
catgggaccatgctttgactcagag

SEQ ID NO: 2156954 - DNA, 25 bp, Homo sapien
taaaccctgtcaaaaccatgaagag

SEQ ID NO: 2156955 - DNA, 25 bp, Homo sapien
gagactcagaaaactatgggctaat

SEQ ID NO: 2156956 - DNA, 25 bp, Homo sapien
ccccactgctgtaggactgctgtaa

SEQ ID NO: 2156957 - DNA, 25 bp, Homo sapien
ttcaggaaacactccccagggagag

SEQ ID NO: 2156958 - DNA, 25 bp, Homo sapien
cttcattcaggaaacactccccagg

SEQ ID NO: 2156959 - DNA, 25 bp, Homo sapien
agtgcagacacccatccttctgttt

SEQ ID NO: 2156960 - DNA, 25 bp, Homo sapien
cattcaggaaacactccccagggag

SEQ ID NO: 2156961 - DNA, 25 bp, Homo sapien
aggtgggcaagtgttcactgaacgc

SEQ ID NO: 2156962 - DNA, 25 bp, Homo sapien
gcttctctcaagcaaaacattgtct

SEQ ID NO: 2156963 - DNA, 25 bp, Homo sapien
agcaaaacattgtctgcactgagaa

SEQ ID NO: 2156964 - DNA, 25 bp, Homo sapien
tctctcaagcaaaacattgtctgca

SEQ ID NO: 2156965 - DNA, 25 bp, Homo sapien
caagcaaaacattgtctgcactgag

SEQ ID NO: 2156966 - DNA, 25 bp, Homo sapien
gcttggtgcatcatatggtctgctc

SEQ ID NO: 2156967 - DNA, 25 bp, Homo sapien
tgaagcttttagagcagtgcctaca

SEQ ID NO: 2156968 - DNA, 25 bp, Homo sapien
gatctctgtctgtagcttgtcccgc

SEQ ID NO: 2156969 - DNA, 25 bp, Homo sapien
tctcccacgtatagattcttaagcg

SEQ ID NO: 2156970 - DNA, 25 bp, Homo sapien
tcaaaaattgtccagcatttgatcc

SEQ ID NO: 2156971 - DNA, 25 bp, Homo sapien
tcttcaaaaattgtccagcatttga

SEQ ID NO: 2156972 - DNA, 25 bp, Homo sapien
catttgatccaaccacacgtgttct

SEQ ID NO: 2156973 - DNA, 25 bp, Homo sapien
ctcttcaaaaattgtccagcatttg

SEQ ID NO: 2156974 - DNA, 25 bp, Homo sapien
taacagcttggcactccctctcttt

SEQ ID NO: 2156975 - DNA, 25 bp, Homo sapien
aacagtaacagcttggcactccctc

SEQ ID NO: 2156976 - DNA, 25 bp, Homo sapien
tgggccagagggtaaacagtaacag

SEQ ID NO: 2156977 - DNA, 25 bp, Homo sapien
cagggcctgattggttcagcaccaa

SEQ ID NO: 2156978 - DNA, 25 bp, Homo sapien
gtgaagcaggtatgaatcttactcc

SEQ ID NO: 2156979 - DNA, 25 bp, Homo sapien
ccaaatctctttatgtgactttagc

SEQ ID NO: 2156980 - DNA, 25 bp, Homo sapien
caaataggatttgcctcctttgaaa

SEQ ID NO: 2156981 - DNA, 25 bp, Homo sapien
actttagcttcaaataggatttgcc

SEQ ID NO: 2156982 - DNA, 25 bp, Homo sapien
agtaaaacagcacaaccgaggaagt

SEQ ID NO: 2156983 - DNA, 25 bp, Homo sapien
tcttgcgtttgaaggatttgtctga

SEQ ID NO: 2156984 - DNA, 25 bp, Homo sapien
ttgatgttcagtgcgggctccctgg

SEQ ID NO: 2156985 - DNA, 25 bp, Homo sapien
ccatcttgacaggtcgatgtcactt

SEQ ID NO: 2156986 - DNA, 25 bp, Homo sapien
cctgggactgcctttagggacttct

SEQ ID NO: 2156987 - DNA, 25 bp, Homo sapien
cacccagacttccagtgtgagtaga

SEQ ID NO: 2156988 - DNA, 25 bp, Homo sapien
gtttaaactcggcacagcctccaat

SEQ ID NO: 2156989 - DNA, 25 bp, Homo sapien
ctctctggtctccaacccacccaga

SEQ ID NO: 2156990 - DNA, 25 bp, Homo sapien
tttcctcgtttaaactcggcacagc

SEQ ID NO: 2156991 - DNA, 25 bp, Homo sapien
aaacaaaagtcaagttctctaggtg

SEQ ID NO: 2156992 - DNA, 25 bp, Homo sapien
caagttctctaggtgaacactgagt

SEQ ID NO: 2156993 - DNA, 25 bp, Homo sapien
ctggaaacaaaagtcaagttctcta

SEQ ID NO: 2156994 - DNA, 25 bp, Homo sapien
aaagtcaagttctctaggtgaacac

SEQ ID NO: 2156995 - DNA, 25 bp, Homo sapien
gatccccatgcctcatgactgggag

SEQ ID NO: 2156996 - DNA, 25 bp, Homo sapien
gtccacacaaaaaccccatctgaag

SEQ ID NO: 2156997 - DNA, 25 bp, Homo sapien
ccatgcctcatgactgggagacatc

SEQ ID NO: 2156998 - DNA, 25 bp, Homo sapien
gcagacctgaagcagaagggcctga

SEQ ID NO: 2156999 - DNA, 25 bp, Homo sapien
gccttgttctgtctgccacaggcca

SEQ ID NO: 2157000 - DNA, 25 bp, Homo sapien
ttctgtctgccacaggccaatcctg

SEQ ID NO: 2157001 - DNA, 25 bp, Homo sapien
ttattgccttgttctgtctgccaca

SEQ ID NO: 2157002 - DNA, 25 bp, Homo sapien
tctccactcccaagaaacctcttcc

SEQ ID NO: 2157003 - DNA, 25 bp, Homo sapien
cagctgataccaggagggaacatcc

SEQ ID NO: 2157004 - DNA, 25 bp, Homo sapien
cacagtgatgatgccagtcagagcc

SEQ ID NO: 2157005 - DNA, 25 bp, Homo sapien
gatcaactacaaccctatatgcctg

SEQ ID NO: 2157006 - DNA, 25 bp, Homo sapien
tgaacttttagctttggtgcacagc

SEQ ID NO: 2157007 - DNA, 25 bp, Homo sapien
gctccttttggccaattggtgccag

SEQ ID NO: 2157008 - DNA, 25 bp, Homo sapien
tgccaatataggacaggaaacccac

SEQ ID NO: 2157009 - DNA, 25 bp, Homo sapien
ttcgagaaactcaaataggccctat

SEQ ID NO: 2157010 - DNA, 25 bp, Homo sapien
agttctcctaccagcattgatacag

SEQ ID NO: 2157011 - DNA, 25 bp, Homo sapien
cagcacactgtccccatagtgggtg

SEQ ID NO: 2157012 - DNA, 25 bp, Homo sapien
ggaaatgctgttctgggtggtgact

SEQ ID NO: 2157013 - DNA, 25 bp, Homo sapien
gcacactgtccccatagtgggtgcc

SEQ ID NO: 2157014 - DNA, 25 bp, Homo sapien
atgctgttctgggtggtgactccat

SEQ ID NO: 2157015 - DNA, 25 bp, Homo sapien
ctcagcacgtggaatacaaacctcc

SEQ ID NO: 2157016 - DNA, 25 bp, Homo sapien
gggacactgaatagagcagttgccc

SEQ ID NO: 2157017 - DNA, 25 bp, Homo sapien
actgaatagagcagttgcccctgga

SEQ ID NO: 2157018 - DNA, 25 bp, Homo sapien
gacactgaatagagcagttgcccct

SEQ ID NO: 2157019 - DNA, 25 bp, Homo sapien
aatagagcagttgcccctggaaggc

SEQ ID NO: 2157020 - DNA, 25 bp, Homo sapien
ttaagctggtctctacaccatggcc

SEQ ID NO: 2157021 - DNA, 25 bp, Homo sapien
gtctctacaccatggccgatggtca

SEQ ID NO: 2157022 - DNA, 25 bp, Homo sapien
tcaggtccttggctatggaattgct

SEQ ID NO: 2157023 - DNA, 25 bp, Homo sapien
ccttggctatggaattgcttgtttt

SEQ ID NO: 2157024 - DNA, 25 bp, Homo sapien
tcttgtagctttcactgggtgattg

SEQ ID NO: 2157025 - DNA, 25 bp, Homo sapien
gttctcttgtagctttcactgggtg

SEQ ID NO: 2157026 - DNA, 25 bp, Homo sapien
tactgagttctcttgtagctttcac

SEQ ID NO: 2157027 - DNA, 25 bp, Homo sapien
tgagttctcttgtagctttcactgg

SEQ ID NO: 2157028 - DNA, 25 bp, Homo sapien
gcctccccagttgtctaccgagtaa

SEQ ID NO: 2157029 - DNA, 25 bp, Homo sapien
tccaagattctgtgtaggcatgtgc

SEQ ID NO: 2157030 - DNA, 25 bp, Homo sapien
acttcagagagtcctttgtccgtga

SEQ ID NO: 2157031 - DNA, 25 bp, Homo sapien
tgtccgtgactggtagactccacgt

SEQ ID NO: 2157032 - DNA, 25 bp, Homo sapien
gcagctgtgtgttatgatcatcgcc

SEQ ID NO: 2157033 - DNA, 25 bp, Homo sapien
gaccctgcactggaatcatgcagct

SEQ ID NO: 2157034 - DNA, 25 bp, Homo sapien
tgggcgatgatcagagaccctgcac

SEQ ID NO: 2157035 - DNA, 25 bp, Homo sapien
tgatcatcgcctagagcacaggccc

SEQ ID NO: 2157036 - DNA, 25 bp, Homo sapien
agtaggtccttgcagcagttgggac

SEQ ID NO: 2157037 - DNA, 25 bp, Homo sapien
agaggttaggggtgaagaggatttg

SEQ ID NO: 2157038 - DNA, 25 bp, Homo sapien
tgcttggggtcaaaacagaggttag

SEQ ID NO: 2157039 - DNA, 25 bp, Homo sapien
ggactagagggtttgtagagttgct

SEQ ID NO: 2157040 - DNA, 25 bp, Homo sapien
gaaagaacttcaaggacttctttgc

SEQ ID NO: 2157041 - DNA, 25 bp, Homo sapien
aaagaacttcaaggacttctttgca

SEQ ID NO: 2157042 - DNA, 25 bp, Homo sapien
ctgtgtgtccttgggaaagaacttc

SEQ ID NO: 2157043 - DNA, 25 bp, Homo sapien
tgtccttgggaaagaacttcaagga

SEQ ID NO: 2157044 - DNA, 25 bp, Homo sapien
ggcagtatagttcactctttattct

SEQ ID NO: 2157045 - DNA, 25 bp, Homo sapien
ggttctctctggataattgacatta

SEQ ID NO: 2157046 - DNA, 25 bp, Homo sapien
taggtatgtagagaactgagtagaa

SEQ ID NO: 2157047 - DNA, 25 bp, Homo sapien
cacgtgattccagttttataacagg

SEQ ID NO: 2157048 - DNA, 25 bp, Homo sapien
ccaggacatccacagcagggtgcag

SEQ ID NO: 2157049 - DNA, 25 bp, Homo sapien
gtcccaggacatccacagcagggtg

SEQ ID NO: 2157050 - DNA, 25 bp, Homo sapien
aggacatccacagcagggtgcagaa

SEQ ID NO: 2157051 - DNA, 25 bp, Homo sapien
ctgtcccaggacatccacagcaggg

SEQ ID NO: 2157052 - DNA, 25 bp, Homo sapien
tggtgttggaggagttcctgactat

SEQ ID NO: 2157053 - DNA, 25 bp, Homo sapien
ctggtgttggaggagttcctgacta

SEQ ID NO: 2157054 - DNA, 25 bp, Homo sapien
ggtgttggaggagttcctgactatc

SEQ ID NO: 2157055 - DNA, 25 bp, Homo sapien
cagcagtttcgccatgggtgtttcg

SEQ ID NO: 2157056 - DNA, 25 bp, Homo sapien
ccatgggtgtttcgccatgggagtt

SEQ ID NO: 2157057 - DNA, 25 bp, Homo sapien
catgggtgactttggcctgagatgc

SEQ ID NO: 2157058 - DNA, 25 bp, Homo sapien
gagtttcgccatgggtgactttggc

SEQ ID NO: 2157059 - DNA, 25 bp, Homo sapien
aagcctgactgtggcgtctggcctg

SEQ ID NO: 2157060 - DNA, 25 bp, Homo sapien
ctggaacttgaaaccggagcacgcc

SEQ ID NO: 2157061 - DNA, 25 bp, Homo sapien
ttggccggcgggcacaactggtttc

SEQ ID NO: 2157062 - DNA, 25 bp, Homo sapien
ggagcacgccggactcctgctgaag

SEQ ID NO: 2157063 - DNA, 25 bp, Homo sapien
tcccaagcccagtgaggcgaagcta

SEQ ID NO: 2157064 - DNA, 25 bp, Homo sapien
gcttttgtgcctcccggaggtcctg

SEQ ID NO: 2157065 - DNA, 25 bp, Homo sapien
tctgccgggtccaaagttgggctca

SEQ ID NO: 2157066 - DNA, 25 bp, Homo sapien
ggagacagctctgccgggtccaaag

SEQ ID NO: 2157067 - DNA, 25 bp, Homo sapien
tacaatggtgtcgttcgggaaacgc

SEQ ID NO: 2157068 - DNA, 25 bp, Homo sapien
ctaggactttctgcgtgtggaccgg

SEQ ID NO: 2157069 - DNA, 25 bp, Homo sapien
ccaatggccgcttgatacaatggtg

SEQ ID NO: 2157070 - DNA, 25 bp, Homo sapien
tgtggacgccaaacttccgtgctag

SEQ ID NO: 2157071 - DNA, 25 bp, Homo sapien
ggttctcccaagctcaccggcaact

SEQ ID NO: 2157072 - DNA, 25 bp, Homo sapien
acggttctcccaagctcaccggcaa

SEQ ID NO: 2157073 - DNA, 25 bp, Homo sapien
ccacggttctcccaagctcaccggc

SEQ ID NO: 2157074 - DNA, 25 bp, Homo sapien
gcgcccacggttctcccaagctcac

SEQ ID NO: 2157075 - DNA, 25 bp, Homo sapien
ttacagtttatctggagcctcactt

SEQ ID NO: 2157076 - DNA, 25 bp, Homo sapien
ttctctctgaaatcgttggggtggg

SEQ ID NO: 2157077 - DNA, 25 bp, Homo sapien
cagtttatctggagcctcacttctc

SEQ ID NO: 2157078 - DNA, 25 bp, Homo sapien
tctcagattccgacttgtttctctc

SEQ ID NO: 2157079 - DNA, 25 bp, Homo sapien
ctggattgcacaacccagggccaca

SEQ ID NO: 2157080 - DNA, 25 bp, Homo sapien
ttgcacaacccagggccacagccat

SEQ ID NO: 2157081 - DNA, 25 bp, Homo sapien
ggattgcacaacccagggccacagc

SEQ ID NO: 2157082 - DNA, 25 bp, Homo sapien
attgcacaacccagggccacagcca

SEQ ID NO: 2157083 - DNA, 25 bp, Homo sapien
tcagtatcatattcttgaaacacag

SEQ ID NO: 2157084 - DNA, 25 bp, Homo sapien
cggaaaacttcacagtcagtatcat

SEQ ID NO: 2157085 - DNA, 25 bp, Homo sapien
gtcagtatcatattcttgaaacaca

SEQ ID NO: 2157086 - DNA, 25 bp, Homo sapien
ctgacggaaaacttcacagtcagta

SEQ ID NO: 2157087 - DNA, 25 bp, Homo sapien
gatagttaggaattgctccaacact

SEQ ID NO: 2157088 - DNA, 25 bp, Homo sapien
attgctccaacactagcagctccag

SEQ ID NO: 2157089 - DNA, 25 bp, Homo sapien
aggtctctatctctgtgggcaggat

SEQ ID NO: 2157090 - DNA, 25 bp, Homo sapien
caggatttgttccttagagcgcatc

SEQ ID NO: 2157091 - DNA, 25 bp, Homo sapien
ctttctctattctctgggcagtgct

SEQ ID NO: 2157092 - DNA, 25 bp, Homo sapien
tctggtatctcaagttctctctgta

SEQ ID NO: 2157093 - DNA, 25 bp, Homo sapien
gtcttctatcagtgacacaactctt

SEQ ID NO: 2157094 - DNA, 25 bp, Homo sapien
tgctctggtatctcaagttctctct

SEQ ID NO: 2157095 - DNA, 25 bp, Homo sapien
ctttggaccaatcacaaagatccca

SEQ ID NO: 2157096 - DNA, 25 bp, Homo sapien
tttggaccaatcacaaagatcccac

SEQ ID NO: 2157097 - DNA, 25 bp, Homo sapien
cctttggaccaatcacaaagatccc

SEQ ID NO: 2157098 - DNA, 25 bp, Homo sapien
tcatgacattcggtcaggcccaagc

SEQ ID NO: 2157099 - DNA, 25 bp, Homo sapien
gcagaattgttctaggtccctacca

SEQ ID NO: 2157100 - DNA, 25 bp, Homo sapien
caagactggagtatccctgatgccc

SEQ ID NO: 2157101 - DNA, 25 bp, Homo sapien
cagtcacggcacttctgaaaagagg

SEQ ID NO: 2157102 - DNA, 25 bp, Homo sapien
tagtgactgtattcagcagcaaatg

SEQ ID NO: 2157103 - DNA, 25 bp, Homo sapien
ctagtagtgactgtattcagcagca

SEQ ID NO: 2157104 - DNA, 25 bp, Homo sapien
agtagtgactgtattcagcagcaaa

SEQ ID NO: 2157105 - DNA, 25 bp, Homo sapien
agtgactgtattcagcagcaaatgt

SEQ ID NO: 2157106 - DNA, 25 bp, Homo sapien
ggccatatttcaagggctcaagagc

SEQ ID NO: 2157107 - DNA, 25 bp, Homo sapien
tattggccatatttcaagggctcaa

SEQ ID NO: 2157108 - DNA, 25 bp, Homo sapien
tttgtattggccatatttcaagggc

SEQ ID NO: 2157109 - DNA, 25 bp, Homo sapien
tgtattggccatatttcaagggctc

SEQ ID NO: 2157110 - DNA, 25 bp, Homo sapien
tccagtgcaaacaatcaggatttca

SEQ ID NO: 2157111 - DNA, 25 bp, Homo sapien
ggccaatcttaatagtacgtgttac

SEQ ID NO: 2157112 - DNA, 25 bp, Homo sapien
cataccaagtcttctgcatgtggtg

SEQ ID NO: 2157113 - DNA, 25 bp, Homo sapien
tctcaagtctagaccaacagtgccc

SEQ ID NO: 2157114 - DNA, 25 bp, Homo sapien
ggtatgtgtgccgttcccactggtg

SEQ ID NO: 2157115 - DNA, 25 bp, Homo sapien
tgcaggtgactctaggtgcatggtt

SEQ ID NO: 2157116 - DNA, 25 bp, Homo sapien
tgtgggatccatgcctctgctactg

SEQ ID NO: 2157117 - DNA, 25 bp, Homo sapien
ctgggcaggtcccattacctggagt

SEQ ID NO: 2157118 - DNA, 25 bp, Homo sapien
gatcaaagtcttagatgtaagagct

SEQ ID NO: 2157119 - DNA, 25 bp, Homo sapien
ctggatgtctccacgggaaaaaatt

SEQ ID NO: 2157120 - DNA, 25 bp, Homo sapien
ataaatccatatacctgtcctgtgg

SEQ ID NO: 2157121 - DNA, 25 bp, Homo sapien
tattatttggacctctacctcccac

SEQ ID NO: 2157122 - DNA, 25 bp, Homo sapien
tgacagctggtgttgcttacatcct

SEQ ID NO: 2157123 - DNA, 25 bp, Homo sapien
tgaatccacatgacaaagcagcaca

SEQ ID NO: 2157124 - DNA, 25 bp, Homo sapien
gggttgaacctagcaaaagcagcat

SEQ ID NO: 2157125 - DNA, 25 bp, Homo sapien
caatctaaggacaaccaggtgaagt

SEQ ID NO: 2157126 - DNA, 25 bp, Homo sapien
tggaatcaagtaattgtttcatttc

SEQ ID NO: 2157127 - DNA, 25 bp, Homo sapien
ttggaatcaagtaattgtttcattt

SEQ ID NO: 2157128 - DNA, 25 bp, Homo sapien
ggaatcaagtaattgtttcatttct

SEQ ID NO: 2157129 - DNA, 25 bp, Homo sapien
gaatcaagtaattgtttcatttctt

SEQ ID NO: 2157130 - DNA, 25 bp, Homo sapien
tcccactagtatatcaaagaacaat

SEQ ID NO: 2157131 - DNA, 25 bp, Homo sapien
aaccagtggcaggaacatagaaatt

SEQ ID NO: 2157132 - DNA, 25 bp, Homo sapien
aatgaagagttatgttaaaccagtg

SEQ ID NO: 2157133 - DNA, 25 bp, Homo sapien
aactgcagatgatattgtgttccat

SEQ ID NO: 2157134 - DNA, 25 bp, Homo sapien
cctataagatgtgaccgccgagtga

SEQ ID NO: 2157135 - DNA, 25 bp, Homo sapien
tggtgcataataaggccggctctct

SEQ ID NO: 2157136 - DNA, 25 bp, Homo sapien
taaaggtctgaactacgaaggaatc

SEQ ID NO: 2157137 - DNA, 25 bp, Homo sapien
tctcccctgtatgaagtcgttggtg

SEQ ID NO: 2157138 - DNA, 25 bp, Homo sapien
aaataagtcctctaaagtgagtgac

SEQ ID NO: 2157139 - DNA, 25 bp, Homo sapien
taaataagtcctctaaagtgagtga

SEQ ID NO: 2157140 - DNA, 25 bp, Homo sapien
ttaaataagtcctctaaagtgagtg

SEQ ID NO: 2157141 - DNA, 25 bp, Homo sapien
gatacatcctgggtctagcaattgg

SEQ ID NO: 2157142 - DNA, 25 bp, Homo sapien
taacccagttcttaccaggcaaatg

SEQ ID NO: 2157143 - DNA, 25 bp, Homo sapien
taaggcagtgtgttccaagagacat

SEQ ID NO: 2157144 - DNA, 25 bp, Homo sapien
tttgagccccagacttatagcagca

SEQ ID NO: 2157145 - DNA, 25 bp, Homo sapien
gcacatacatttccgctttattcaa

SEQ ID NO: 2157146 - DNA, 25 bp, Homo sapien
cacatacatttccgctttattcaaa

SEQ ID NO: 2157147 - DNA, 25 bp, Homo sapien
tgccactgttcagggaagaagctct

SEQ ID NO: 2157148 - DNA, 25 bp, Homo sapien
gagagaaaagcgattccaacttggg

SEQ ID NO: 2157149 - DNA, 25 bp, Homo sapien
tatgattgcaactaaccctactagc

SEQ ID NO: 2157150 - DNA, 25 bp, Homo sapien
tcaattgccatgcttgttgccactg

SEQ ID NO: 2157151 - DNA, 25 bp, Homo sapien
atgcttgttgtctcacactgaagct

SEQ ID NO: 2157152 - DNA, 25 bp, Homo sapien
catgcttgttgtctcacactgaagc

SEQ ID NO: 2157153 - DNA, 25 bp, Homo sapien
tcatgcttgttgtctcacactgaag

SEQ ID NO: 2157154 - DNA, 25 bp, Homo sapien
ttgatgtctgggcaagggcttcact

SEQ ID NO: 2157155 - DNA, 25 bp, Homo sapien
tgatgcactgattgatgtctgggca

SEQ ID NO: 2157156 - DNA, 25 bp, Homo sapien
gcaagggcttcactaagggagattg

SEQ ID NO: 2157157 - DNA, 25 bp, Homo sapien
tctgatgatgcactgattgatgtct

SEQ ID NO: 2157158 - DNA, 25 bp, Homo sapien
tgtagaacctgtgatggaaaagtcc

SEQ ID NO: 2157159 - DNA, 25 bp, Homo sapien
cttttggcagattcatacagtcacc

SEQ ID NO: 2157160 - DNA, 25 bp, Homo sapien
gtccagtaccggtgagcctatgggc

SEQ ID NO: 2157161 - DNA, 25 bp, Homo sapien
gaaaagtccagtaccggtgagccta

SEQ ID NO: 2157162 - DNA, 25 bp, Homo sapien
ctttgcacaggctgcatgactgagt

SEQ ID NO: 2157163 - DNA, 25 bp, Homo sapien
caaagaggaagtatgtcccaaccac

SEQ ID NO: 2157164 - DNA, 25 bp, Homo sapien
cctggggtcaacaaccattttcaga

SEQ ID NO: 2157165 - DNA, 25 bp, Homo sapien
aggctgcatgactgagtaccctggg

SEQ ID NO: 2157166 - DNA, 25 bp, Homo sapien
tgttgcttttggttggacgtggctt

SEQ ID NO: 2157167 - DNA, 25 bp, Homo sapien
caaccaattacaaatggaagctgtg

SEQ ID NO: 2157168 - DNA, 25 bp, Homo sapien
gccctctggcgaggatggaaaatcc

SEQ ID NO: 2157169 - DNA, 25 bp, Homo sapien
caataaatccttcccctgatgcaac

SEQ ID NO: 2157170 - DNA, 25 bp, Homo sapien
aaagatgtagactaggaggccaggc

SEQ ID NO: 2157171 - DNA, 25 bp, Homo sapien
gaggccaggcccgtctcaatagttc

SEQ ID NO: 2157172 - DNA, 25 bp, Homo sapien
gccaggcccgtctcaatagttcaca

SEQ ID NO: 2157173 - DNA, 25 bp, Homo sapien
caggcccgtctcaatagttcacatt

SEQ ID NO: 2157174 - DNA, 25 bp, Homo sapien
gatgttcagtgcaagcttgttggga

SEQ ID NO: 2157175 - DNA, 25 bp, Homo sapien
tatttatccatgacgcagcggctcc

SEQ ID NO: 2157176 - DNA, 25 bp, Homo sapien
tccaccttgacaggttgatgtcgct

SEQ ID NO: 2157177 - DNA, 25 bp, Homo sapien
tatgacagcatccatatccaccttg

SEQ ID NO: 2157178 - DNA, 25 bp, Homo sapien
ccggcgttcagcacacggaggatcc

SEQ ID NO: 2157179 - DNA, 25 bp, Homo sapien
ccttagtatttattcatcattattg

SEQ ID NO: 2157180 - DNA, 25 bp, Homo sapien
ggcgttcagcacacggaggatcccg

SEQ ID NO: 2157181 - DNA, 25 bp, Homo sapien
gaccggcgttcagcacacggaggat

SEQ ID NO: 2157182 - DNA, 25 bp, Homo sapien
ctcccacggtctcccctgaaaactg

SEQ ID NO: 2157183 - DNA, 25 bp, Homo sapien
cgactgacccgctcgagcgcgagcc

SEQ ID NO: 2157184 - DNA, 25 bp, Homo sapien
ctagtgcacccagcgggtcgcccag

SEQ ID NO: 2157185 - DNA, 25 bp, Homo sapien
cggtgggacccgagcactagtgcac

SEQ ID NO: 2157186 - DNA, 25 bp, Homo sapien
tgttcccaaggccgagcggggctca

SEQ ID NO: 2157187 - DNA, 25 bp, Homo sapien
gctgcagacagagccgccgacgccg

SEQ ID NO: 2157188 - DNA, 25 bp, Homo sapien
ctgagcgcgacagccgcaccgccag

SEQ ID NO: 2157189 - DNA, 25 bp, Homo sapien
cagccgccgctgcagacagagccgc

SEQ ID NO: 2157190 - DNA, 25 bp, Homo sapien
ccaggccagacagggccgccgcagc

SEQ ID NO: 2157191 - DNA, 25 bp, Homo sapien
agaaggtgagcagcgtgcgcgtgag

SEQ ID NO: 2157192 - DNA, 25 bp, Homo sapien
aagaaggtgagcagcgtgcgcgtga

SEQ ID NO: 2157193 - DNA, 25 bp, Homo sapien
gcggacgttaagcatcaccgaggcc

SEQ ID NO: 2157194 - DNA, 25 bp, Homo sapien
ctgcaggcggacgttaagcatcacc

SEQ ID NO: 2157195 - DNA, 25 bp, Homo sapien
caccgaggccacgatgtagaagtag

SEQ ID NO: 2157196 - DNA, 25 bp, Homo sapien
caggcggacgttaagcatcaccgag

SEQ ID NO: 2157197 - DNA, 25 bp, Homo sapien
ggcggcgtaggtctagagtccaggg

SEQ ID NO: 2157198 - DNA, 25 bp, Homo sapien
atatgaggcaacaggtcggccgagc

SEQ ID NO: 2157199 - DNA, 25 bp, Homo sapien
gagcccgatggcaggggcccattca

SEQ ID NO: 2157200 - DNA, 25 bp, Homo sapien
tttggccaatatgaggcaacaggtc

SEQ ID NO: 2157201 - DNA, 25 bp, Homo sapien
tttctgctccgggcctggaaagtca

SEQ ID NO: 2157202 - DNA, 25 bp, Homo sapien
tggtttgccccggtgccttccatac

SEQ ID NO: 2157203 - DNA, 25 bp, Homo sapien
gccaacacgccctgacatctgaagg

SEQ ID NO: 2157204 - DNA, 25 bp, Homo sapien
cttctggctggtttgccccggtgcc

SEQ ID NO: 2157205 - DNA, 25 bp, Homo sapien
atacttccccctgaccgccaacacg

SEQ ID NO: 2157206 - DNA, 25 bp, Homo sapien
cccaagccaggactcgatcactggg

SEQ ID NO: 2157207 - DNA, 25 bp, Homo sapien
gggggaaatacacctctctcacagt

SEQ ID NO: 2157208 - DNA, 25 bp, Homo sapien
taggagggggaaatacacctctctc

SEQ ID NO: 2157209 - DNA, 25 bp, Homo sapien
cttctcctcttgttcaggcccttca

SEQ ID NO: 2157210 - DNA, 25 bp, Homo sapien
catgccaggtcttgaagaagactgg

SEQ ID NO: 2157211 - DNA, 25 bp, Homo sapien
gcatgtcaagggcaaatccacccct

SEQ ID NO: 2157212 - DNA, 25 bp, Homo sapien
cctcctcctatctgcatgtcaaggg

SEQ ID NO: 2157213 - DNA, 25 bp, Homo sapien
atgccaggtcttgaagaagactggg

SEQ ID NO: 2157214 - DNA, 25 bp, Homo sapien
gctgtccgtcctcctgatcttccct

SEQ ID NO: 2157215 - DNA, 25 bp, Homo sapien
aggagccacaacaccaagatcaccc

SEQ ID NO: 2157216 - DNA, 25 bp, Homo sapien
cttccctgtgactttccgtactgct

SEQ ID NO: 2157217 - DNA, 25 bp, Homo sapien
gaaagcgacattcctagattcccta

SEQ ID NO: 2157218 - DNA, 25 bp, Homo sapien
gcattgtacaccagttagcagcaca

SEQ ID NO: 2157219 - DNA, 25 bp, Homo sapien
caatccaagccgtgaggatgagatt

SEQ ID NO: 2157220 - DNA, 25 bp, Homo sapien
cagtgcaagagatgcggaaatgggg

SEQ ID NO: 2157221 - DNA, 25 bp, Homo sapien
tgagcattgtacaccagttagcagc

SEQ ID NO: 2157222 - DNA, 25 bp, Homo sapien
ggtacatagtaggtggctgggccac

SEQ ID NO: 2157223 - DNA, 25 bp, Homo sapien
caggaactgagaacgtggcgcccgg

SEQ ID NO: 2157224 - DNA, 25 bp, Homo sapien
aggaactgagaacgtggcgcccggg

SEQ ID NO: 2157225 - DNA, 25 bp, Homo sapien
ccaggaactgagaacgtggcgcccg

SEQ ID NO: 2157226 - DNA, 25 bp, Homo sapien
caggcggacagcttcattcaggacc

SEQ ID NO: 2157227 - DNA, 25 bp, Homo sapien
ggcggacagcttcattcaggacctg

SEQ ID NO: 2157228 - DNA, 25 bp, Homo sapien
aggcaggcggacagcttcattcagg

SEQ ID NO: 2157229 - DNA, 25 bp, Homo sapien
ggcaggcggacagcttcattcagga

SEQ ID NO: 2157230 - DNA, 25 bp, Homo sapien
ggacaagggggcatgtcatcaggcc

SEQ ID NO: 2157231 - DNA, 25 bp, Homo sapien
gacaagggggcatgtcatcaggccc

SEQ ID NO: 2157232 - DNA, 25 bp, Homo sapien
agaggctgcccccaaagatctgttg

SEQ ID NO: 2157233 - DNA, 25 bp, Homo sapien
cccagaggtggtccagggtggatag

SEQ ID NO: 2157234 - DNA, 25 bp, Homo sapien
gcaggctgacagacccccagaggtg

SEQ ID NO: 2157235 - DNA, 25 bp, Homo sapien
tcactcttgtcccatagaggctgcc

SEQ ID NO: 2157236 - DNA, 25 bp, Homo sapien
gcagagacccctgcggctgacgcaa

SEQ ID NO: 2157237 - DNA, 25 bp, Homo sapien
gacgcaactttatcccagtagggaa

SEQ ID NO: 2157238 - DNA, 25 bp, Homo sapien
tgcggctgacgcaactttatcccag

SEQ ID NO: 2157239 - DNA, 25 bp, Homo sapien
ctttatcccagtagggaaacagctt

SEQ ID NO: 2157240 - DNA, 25 bp, Homo sapien
taggccaatacggccacaccagaag

SEQ ID NO: 2157241 - DNA, 25 bp, Homo sapien
ctaggccaatacggccacaccagaa

SEQ ID NO: 2157242 - DNA, 25 bp, Homo sapien
taagacacttttgatcgccagactc

SEQ ID NO: 2157243 - DNA, 25 bp, Homo sapien
caccagtgcgtttggacgggtcctc

SEQ ID NO: 2157244 - DNA, 25 bp, Homo sapien
tggtccaggtcaagtcggttctcag

SEQ ID NO: 2157245 - DNA, 25 bp, Homo sapien
gagaggagtctcagtgctacacaaa

SEQ ID NO: 2157246 - DNA, 25 bp, Homo sapien
taagccatgcataccctttggtgca

SEQ ID NO: 2157247 - DNA, 25 bp, Homo sapien
ggaattgatgactatgccacagcat

SEQ ID NO: 2157248 - DNA, 25 bp, Homo sapien
gacttggtatcccaactctggagag

SEQ ID NO: 2157249 - DNA, 25 bp, Homo sapien
tgtatttgctctagtgcccctgaaa

SEQ ID NO: 2157250 - DNA, 25 bp, Homo sapien
tcctttgtgtagtaactagcttcat

SEQ ID NO: 2157251 - DNA, 25 bp, Homo sapien
cctgcttcggtgttcctttgtgtag

SEQ ID NO: 2157252 - DNA, 25 bp, Homo sapien
tttctgcttgtgaatacagtcatgc

SEQ ID NO: 2157253 - DNA, 25 bp, Homo sapien
cagtcatgcagactttatgttttcc

SEQ ID NO: 2157254 - DNA, 25 bp, Homo sapien
atgcgggcaggtaggatgatggtct

SEQ ID NO: 2157255 - DNA, 25 bp, Homo sapien
gcgggcaggtaggatgatggtctga

SEQ ID NO: 2157256 - DNA, 25 bp, Homo sapien
ctgatgcgggcaggtaggatgatgg

SEQ ID NO: 2157257 - DNA, 25 bp, Homo sapien
gatgcgggcaggtaggatgatggtc

SEQ ID NO: 2157258 - DNA, 25 bp, Homo sapien
gagggactgggctttcaggccggga

SEQ ID NO: 2157259 - DNA, 25 bp, Homo sapien
cgcagagggactgggctttcaggcc

SEQ ID NO: 2157260 - DNA, 25 bp, Homo sapien
cccgcagagggactgggctttcagg

SEQ ID NO: 2157261 - DNA, 25 bp, Homo sapien
gtggcccgcagagggactgggcttt

SEQ ID NO: 2157262 - DNA, 25 bp, Homo sapien
taatggtgagctcatcacgcttggc

SEQ ID NO: 2157263 - DNA, 25 bp, Homo sapien
cccattgtgcttaatggtgagctca

SEQ ID NO: 2157264 - DNA, 25 bp, Homo sapien
tcacgcttggcgtggctctgggcca

SEQ ID NO: 2157265 - DNA, 25 bp, Homo sapien
tgggccagtaagtcctccgcgcgcg

SEQ ID NO: 2157266 - DNA, 25 bp, Homo sapien
agctcctcagactccagacgcacac

SEQ ID NO: 2157267 - DNA, 25 bp, Homo sapien
tccagctcctcagactccagacgca

SEQ ID NO: 2157268 - DNA, 25 bp, Homo sapien
cagcccccgggctcctgcatctcca

SEQ ID NO: 2157269 - DNA, 25 bp, Homo sapien
agcccccgggctcctgcatctccag

SEQ ID NO: 2157270 - DNA, 25 bp, Homo sapien
tccagccgaatgagggcgctctcca

SEQ ID NO: 2157271 - DNA, 25 bp, Homo sapien
gctgctgcgcaagctctctggatct

SEQ ID NO: 2157272 - DNA, 25 bp, Homo sapien
ggcctgccactgttggccctcctgg

SEQ ID NO: 2157273 - DNA, 25 bp, Homo sapien
tgttggccctcctggtaggctcctc

SEQ ID NO: 2157274 - DNA, 25 bp, Homo sapien
agtctggctggccgatcctgcgtgg

SEQ ID NO: 2157275 - DNA, 25 bp, Homo sapien
gtctggctggccgatcctgcgtggt

SEQ ID NO: 2157276 - DNA, 25 bp, Homo sapien
tctggctggccgatcctgcgtggtc

SEQ ID NO: 2157277 - DNA, 25 bp, Homo sapien
ctggacagcgtatgatgtccaggcc

SEQ ID NO: 2157278 - DNA, 25 bp, Homo sapien
tctccagggccgcttcggccccgct

SEQ ID NO: 2157279 - DNA, 25 bp, Homo sapien
tgaggtcggccttgtccaggtcgct

SEQ ID NO: 2157280 - DNA, 25 bp, Homo sapien
cttcggccccgctctctgccagccg

SEQ ID NO: 2157281 - DNA, 25 bp, Homo sapien
tgctgctgggccatgtccttctcat

SEQ ID NO: 2157282 - DNA, 25 bp, Homo sapien
tacagattctgcttctgaagacgct

SEQ ID NO: 2157283 - DNA, 25 bp, Homo sapien
tgaagacgctccactgccagggcca

SEQ ID NO: 2157284 - DNA, 25 bp, Homo sapien
gaagacgctccactgccagggccag

SEQ ID NO: 2157285 - DNA, 25 bp, Homo sapien
agattctgcttctgaagacgctcca

SEQ ID NO: 2157286 - DNA, 25 bp, Homo sapien
cagctggacgccgtctcagtgtcca

SEQ ID NO: 2157287 - DNA, 25 bp, Homo sapien
ctcagtgtccaacaggacggcctgt

SEQ ID NO: 2157288 - DNA, 25 bp, Homo sapien
cgtccgcagtgtgctcggagccgct

SEQ ID NO: 2157289 - DNA, 25 bp, Homo sapien
gacgccgtctcagtgtccaacagga

SEQ ID NO: 2157290 - DNA, 25 bp, Homo sapien
ccggcttcggtggggcgaacggctg

SEQ ID NO: 2157291 - DNA, 25 bp, Homo sapien
ctagccagggaccggcttcggtggg

SEQ ID NO: 2157292 - DNA, 25 bp, Homo sapien
cagagtgaatcagggcgagcctgga

SEQ ID NO: 2157293 - DNA, 25 bp, Homo sapien
agggcagagtgaatcagggcgagcc

SEQ ID NO: 2157294 - DNA, 25 bp, Homo sapien
gtcgcttgtgcagggcagagtgaat

SEQ ID NO: 2157295 - DNA, 25 bp, Homo sapien
ctgtcgcttgtgcagggcagagtga

SEQ ID NO: 2157296 - DNA, 25 bp, Homo sapien
cttgggcctgcacggcgccatcggt

SEQ ID NO: 2157297 - DNA, 25 bp, Homo sapien
cgccatcggtcttgtcccactggtg

SEQ ID NO: 2157298 - DNA, 25 bp, Homo sapien
gctcaacctcactgtcgctaagctg

SEQ ID NO: 2157299 - DNA, 25 bp, Homo sapien
agggcccgccgctcaacctcactgt

SEQ ID NO: 2157300 - DNA, 25 bp, Homo sapien
gctcaagctcctggcgcacccgtgt

SEQ ID NO: 2157301 - DNA, 25 bp, Homo sapien
tggcgcacccgtgtaccatcctgca

SEQ ID NO: 2157302 - DNA, 25 bp, Homo sapien
ggagctcattggcgttccgcagcct

SEQ ID NO: 2157303 - DNA, 25 bp, Homo sapien
gctcattggcgttccgcagcctctg

SEQ ID NO: 2157304 - DNA, 25 bp, Homo sapien
acggagagctcgagtttcacctggc

SEQ ID NO: 2157305 - DNA, 25 bp, Homo sapien
ggagagctcgagtttcacctggcca

SEQ ID NO: 2157306 - DNA, 25 bp, Homo sapien
gagagctcgagtttcacctggccag

SEQ ID NO: 2157307 - DNA, 25 bp, Homo sapien
cacggagagctcgagtttcacctgg

SEQ ID NO: 2157308 - DNA, 25 bp, Homo sapien
tggcttcctgctccgcctgccgcag

SEQ ID NO: 2157309 - DNA, 25 bp, Homo sapien
agccgctcctgctcttcccgcgcca

SEQ ID NO: 2157310 - DNA, 25 bp, Homo sapien
gctcttcccgcgccacggtggcttc

SEQ ID NO: 2157311 - DNA, 25 bp, Homo sapien
ccgcgccacggtggcttcctgctcc

SEQ ID NO: 2157312 - DNA, 25 bp, Homo sapien
cgctcatggcgcagcgtggggagct

SEQ ID NO: 2157313 - DNA, 25 bp, Homo sapien
tgcagctggctgcgctcatggcgca

SEQ ID NO: 2157314 - DNA, 25 bp, Homo sapien
cagctggctgcgctcatggcgcagc

SEQ ID NO: 2157315 - DNA, 25 bp, Homo sapien
ggctgcgctcatggcgcagcgtggg

SEQ ID NO: 2157316 - DNA, 25 bp, Homo sapien
cctgccttcaggctccgcggccgcc

SEQ ID NO: 2157317 - DNA, 25 bp, Homo sapien
ggccagtgcaccccttggctagcgc

SEQ ID NO: 2157318 - DNA, 25 bp, Homo sapien
ccagtgcaccccttggctagcgcct

SEQ ID NO: 2157319 - DNA, 25 bp, Homo sapien
gtcctgccttcaggctccgcggccg

SEQ ID NO: 2157320 - DNA, 25 bp, Homo sapien
agcgcaggcatgtggcctcctctga

SEQ ID NO: 2157321 - DNA, 25 bp, Homo sapien
tccaagcgcaggcatgtggcctcct

SEQ ID NO: 2157322 - DNA, 25 bp, Homo sapien
caagcgcaggcatgtggcctcctct

SEQ ID NO: 2157323 - DNA, 25 bp, Homo sapien
ctccaagcgcaggcatgtggcctcc

SEQ ID NO: 2157324 - DNA, 25 bp, Homo sapien
gctgatcccagcgggcctcgagctg

SEQ ID NO: 2157325 - DNA, 25 bp, Homo sapien
gaaccaggtgcccttgcacctcaaa

SEQ ID NO: 2157326 - DNA, 25 bp, Homo sapien
tccagctgatcccagcgggcctcga

SEQ ID NO: 2157327 - DNA, 25 bp, Homo sapien
cgggcctcgagctgaaccaggtgcc

SEQ ID NO: 2157328 - DNA, 25 bp, Homo sapien
tgctccctcagagaggcctgggcct

SEQ ID NO: 2157329 - DNA, 25 bp, Homo sapien
cagtcctcctcatgggctgcccgct

SEQ ID NO: 2157330 - DNA, 25 bp, Homo sapien
gctgcccgctgctccctcagagagg

SEQ ID NO: 2157331 - DNA, 25 bp, Homo sapien
tgccagtcctcctcatgggctgccc

SEQ ID NO: 2157332 - DNA, 25 bp, Homo sapien
tcttccttctcgatctccagtcggg

SEQ ID NO: 2157333 - DNA, 25 bp, Homo sapien
tctctgacagagtcttttcagaccc

SEQ ID NO: 2157334 - DNA, 25 bp, Homo sapien
ttctcgatctccagtcgggccagca

SEQ ID NO: 2157335 - DNA, 25 bp, Homo sapien
acagagtcttttcagaccccttcag

SEQ ID NO: 2157336 - DNA, 25 bp, Homo sapien
gcgttcacggtgctccggtcctgct

SEQ ID NO: 2157337 - DNA, 25 bp, Homo sapien
agcgttcacggtgctccggtcctgc

SEQ ID NO: 2157338 - DNA, 25 bp, Homo sapien
ctccagctgggcccataggtccctc

SEQ ID NO: 2157339 - DNA, 25 bp, Homo sapien
ccagctgggcccataggtccctcag

SEQ ID NO: 2157340 - DNA, 25 bp, Homo sapien
ttcctgggcgtgggccacatcagcc

SEQ ID NO: 2157341 - DNA, 25 bp, Homo sapien
tcctccagctgggcccataggtccc

SEQ ID NO: 2157342 - DNA, 25 bp, Homo sapien
ggtctcgggcctgctcttgcagcct

SEQ ID NO: 2157343 - DNA, 25 bp, Homo sapien
ctggctctcacgcagcttgcgctgg

SEQ ID NO: 2157344 - DNA, 25 bp, Homo sapien
tggctctcacgcagcttgcgctggg

SEQ ID NO: 2157345 - DNA, 25 bp, Homo sapien
ggctctcacgcagcttgcgctgggc

SEQ ID NO: 2157346 - DNA, 25 bp, Homo sapien
cattggtaaacttcaggctgatgcg

SEQ ID NO: 2157347 - DNA, 25 bp, Homo sapien
caactcgcggcccactctggtattc

SEQ ID NO: 2157348 - DNA, 25 bp, Homo sapien
tcattggtaaacttcaggctgatgc

SEQ ID NO: 2157349 - DNA, 25 bp, Homo sapien
tcctcattggtaaacttcaggctga

SEQ ID NO: 2157350 - DNA, 25 bp, Homo sapien
ctgccggaggcgcaggatctcccgc

SEQ ID NO: 2157351 - DNA, 25 bp, Homo sapien
aggcgcaggatctcccgccggctct

SEQ ID NO: 2157352 - DNA, 25 bp, Homo sapien
gccggaggcgcaggatctcccgccg

SEQ ID NO: 2157353 - DNA, 25 bp, Homo sapien
ggaggcgcaggatctcccgccggct

SEQ ID NO: 2157354 - DNA, 25 bp, Homo sapien
tggagctcctgccgcgtcgcctcca

SEQ ID NO: 2157355 - DNA, 25 bp, Homo sapien
agctgctgcttttcggtgccgcgca

SEQ ID NO: 2157356 - DNA, 25 bp, Homo sapien
ttcggtgccgcgcacctcctccagg

SEQ ID NO: 2157357 - DNA, 25 bp, Homo sapien
gctcctgccgcgtcgcctccaggct

SEQ ID NO: 2157358 - DNA, 25 bp, Homo sapien
agggcgaggccccggcacagaaccg

SEQ ID NO: 2157359 - DNA, 25 bp, Homo sapien
gcgaggccccggcacagaaccgagc

SEQ ID NO: 2157360 - DNA, 25 bp, Homo sapien
cggcacagaaccgagcgcaggccgc

SEQ ID NO: 2157361 - DNA, 25 bp, Homo sapien
ggcgaggccccggcacagaaccgag

SEQ ID NO: 2157362 - DNA, 25 bp, Homo sapien
cctggccttcgaggttgtggtgtcc

SEQ ID NO: 2157363 - DNA, 25 bp, Homo sapien
ctctcagggcgctccgccgctcctg

SEQ ID NO: 2157364 - DNA, 25 bp, Homo sapien
ctctgggtccaggtctagaggagcc

SEQ ID NO: 2157365 - DNA, 25 bp, Homo sapien
cttcgaggttgtggtgtccctctca

SEQ ID NO: 2157366 - DNA, 25 bp, Homo sapien
cctcctggacccggctcagccgtcc

SEQ ID NO: 2157367 - DNA, 25 bp, Homo sapien
ggacccggctcagccgtccatccac

SEQ ID NO: 2157368 - DNA, 25 bp, Homo sapien
ctggacccggctcagccgtccatcc

SEQ ID NO: 2157369 - DNA, 25 bp, Homo sapien
tcctggacccggctcagccgtccat

SEQ ID NO: 2157370 - DNA, 25 bp, Homo sapien
ctccagtgcggccacctagtccact

SEQ ID NO: 2157371 - DNA, 25 bp, Homo sapien
cttctctccagtgcggccacctagt

SEQ ID NO: 2157372 - DNA, 25 bp, Homo sapien
agtgcggccacctagtccactgtgg

SEQ ID NO: 2157373 - DNA, 25 bp, Homo sapien
ccagtgcggccacctagtccactgt

SEQ ID NO: 2157374 - DNA, 25 bp, Homo sapien
cttcctcttgttggccttcatcttg

SEQ ID NO: 2157375 - DNA, 25 bp, Homo sapien
tgaggccctcggaggcgtccagcat

SEQ ID NO: 2157376 - DNA, 25 bp, Homo sapien
atctccttcaggcaccacttgtcgc

SEQ ID NO: 2157377 - DNA, 25 bp, Homo sapien
tcttgctgatcttctcccgactggc

SEQ ID NO: 2157378 - DNA, 25 bp, Homo sapien
gagggccgctgcagttccagcttga

SEQ ID NO: 2157379 - DNA, 25 bp, Homo sapien
agcgagggccgctgcagttccagct

SEQ ID NO: 2157380 - DNA, 25 bp, Homo sapien
ctcaagcgagggccgctgcagttcc

SEQ ID NO: 2157381 - DNA, 25 bp, Homo sapien
agggccgctgcagttccagcttgac

SEQ ID NO: 2157382 - DNA, 25 bp, Homo sapien
gggcttgggcctcgtggccgctcag

SEQ ID NO: 2157383 - DNA, 25 bp, Homo sapien
tcgtggccgctcaggcccaggtggc

SEQ ID NO: 2157384 - DNA, 25 bp, Homo sapien
tgggcttgggcctcgtggccgctca

SEQ ID NO: 2157385 - DNA, 25 bp, Homo sapien
gcctcgtggccgctcaggcccaggt

SEQ ID NO: 2157386 - DNA, 25 bp, Homo sapien
aggattcctgccttcacctcgctgt

SEQ ID NO: 2157387 - DNA, 25 bp, Homo sapien
cactccactgtcagctgcaggattc

SEQ ID NO: 2157388 - DNA, 25 bp, Homo sapien
ggccagggccccattcagccactcc

SEQ ID NO: 2157389 - DNA, 25 bp, Homo sapien
agggccccattcagccactccactg

SEQ ID NO: 2157390 - DNA, 25 bp, Homo sapien
cttgacgtgcaggagcccctccctt

SEQ ID NO: 2157391 - DNA, 25 bp, Homo sapien
cagatgcaggttcttgtcctgggtg

SEQ ID NO: 2157392 - DNA, 25 bp, Homo sapien
ctgcagatgcaggttcttgtcctgg

SEQ ID NO: 2157393 - DNA, 25 bp, Homo sapien
gatgcaggttcttgtcctgggtgct

SEQ ID NO: 2157394 - DNA, 25 bp, Homo sapien
tgcagatgcaggttcttgtcctggg

SEQ ID NO: 2157395 - DNA, 25 bp, Homo sapien
gtcatgttcacaggcggtcagagcc

SEQ ID NO: 2157396 - DNA, 25 bp, Homo sapien
gctgttgtagctggccctcggcctc

SEQ ID NO: 2157397 - DNA, 25 bp, Homo sapien
agctgttgtagctggccctcggcct

SEQ ID NO: 2157398 - DNA, 25 bp, Homo sapien
tatgactgcgaagcttctctcgctc

SEQ ID NO: 2157399 - DNA, 25 bp, Homo sapien
ttcaggaccgtgtgcaggactgcag

SEQ ID NO: 2157400 - DNA, 25 bp, Homo sapien
tgtccttatgactgcgaagcttctc

SEQ ID NO: 2157401 - DNA, 25 bp, Homo sapien
tgggctcagcggcactgtgtcctta

SEQ ID NO: 2157402 - DNA, 25 bp, Homo sapien
cccatgcctccagggtacgttcagc

SEQ ID NO: 2157403 - DNA, 25 bp, Homo sapien
gcctccagggtacgttcagcctgtg

SEQ ID NO: 2157404 - DNA, 25 bp, Homo sapien
tgggcactgcacaggcgctccacct

SEQ ID NO: 2157405 - DNA, 25 bp, Homo sapien
catgcctccagggtacgttcagcct

SEQ ID NO: 2157406 - DNA, 25 bp, Homo sapien
aaggctacgaggtcatgggacacag

SEQ ID NO: 2157407 - DNA, 25 bp, Homo sapien
aagaaaggctacgaggtcatgggac

SEQ ID NO: 2157408 - DNA, 25 bp, Homo sapien
ctcaggctttgataatggaaagaga

SEQ ID NO: 2157409 - DNA, 25 bp, Homo sapien
agagaagaaaggctacgaggtcatg

SEQ ID NO: 2157410 - DNA, 25 bp, Homo sapien
aacagcacaaagcattccaaggcct

SEQ ID NO: 2157411 - DNA, 25 bp, Homo sapien
cagcacaaagcattccaaggccttc

SEQ ID NO: 2157412 - DNA, 25 bp, Homo sapien
cacaaagcattccaaggccttctct

SEQ ID NO: 2157413 - DNA, 25 bp, Homo sapien
aaacagcacaaagcattccaaggcc

SEQ ID NO: 2157414 - DNA, 25 bp, Homo sapien
ctgtgtcaagggcacactctcccat

SEQ ID NO: 2157415 - DNA, 25 bp, Homo sapien
caaagactgtgtcaagggcacactc

SEQ ID NO: 2157416 - DNA, 25 bp, Homo sapien
tgctgctgtaccaaagactgtgtca

SEQ ID NO: 2157417 - DNA, 25 bp, Homo sapien
taccaaagactgtgtcaagggcaca

SEQ ID NO: 2157418 - DNA, 25 bp, Homo sapien
tttttctaccgtactcataatgatg

SEQ ID NO: 2157419 - DNA, 25 bp, Homo sapien
tgatttttctaccgtactcataatg

SEQ ID NO: 2157420 - DNA, 25 bp, Homo sapien
gatttttctaccgtactcataatga

SEQ ID NO: 2157421 - DNA, 25 bp, Homo sapien
ttttctaccgtactcataatgatgt

SEQ ID NO: 2157422 - DNA, 25 bp, Homo sapien
ctgtatcactgagcataggctcttg

SEQ ID NO: 2157423 - DNA, 25 bp, Homo sapien
gctcagtggatggaacggtctcctg

SEQ ID NO: 2157424 - DNA, 25 bp, Homo sapien
gatggaacggtctcctgggctctag

SEQ ID NO: 2157425 - DNA, 25 bp, Homo sapien
tagaacattctgtatcactgagcat

SEQ ID NO: 2157426 - DNA, 25 bp, Homo sapien
ttgaaacagcagaagcagttttaac

SEQ ID NO: 2157427 - DNA, 25 bp, Homo sapien
ccttgaaacagcagaagcagtttta

SEQ ID NO: 2157428 - DNA, 25 bp, Homo sapien
accttgaaacagcagaagcagtttt

SEQ ID NO: 2157429 - DNA, 25 bp, Homo sapien
aaccttgaaacagcagaagcagttt

SEQ ID NO: 2157430 - DNA, 25 bp, Homo sapien
catcttcgataacatgaccttctat

SEQ ID NO: 2157431 - DNA, 25 bp, Homo sapien
agtgttattcatgggaactgggcca

SEQ ID NO: 2157432 - DNA, 25 bp, Homo sapien
aaaagtctccagtgttattcatggg

SEQ ID NO: 2157433 - DNA, 25 bp, Homo sapien
tctacaaggccatcttcgataacat

SEQ ID NO: 2157434 - DNA, 25 bp, Homo sapien
tgctgccggactgccatgaaatccc

SEQ ID NO: 2157435 - DNA, 25 bp, Homo sapien
taggtggccagtggcattctgttcc

SEQ ID NO: 2157436 - DNA, 25 bp, Homo sapien
catgtgtgggatgtggctttcgagg

SEQ ID NO: 2157437 - DNA, 25 bp, Homo sapien
gatgtggctttcgaggagacccagg

SEQ ID NO: 2157438 - DNA, 25 bp, Homo sapien
gtggtgcccactcagcccgaactgt

SEQ ID NO: 2157439 - DNA, 25 bp, Homo sapien
ctcgggcacacggagtttgtgagcc

SEQ ID NO: 2157440 - DNA, 25 bp, Homo sapien
cagtatcgagtccttctgcctcggg

SEQ ID NO: 2157441 - DNA, 25 bp, Homo sapien
cacggagtttgtgagccgcatctct

SEQ ID NO: 2157442 - DNA, 25 bp, Homo sapien
tgactgtgagtcctgataactgctt

SEQ ID NO: 2157443 - DNA, 25 bp, Homo sapien
aggtgactgtgagtcctgataactg

SEQ ID NO: 2157444 - DNA, 25 bp, Homo sapien
tgtgagtcctgataactgcttcatc

SEQ ID NO: 2157445 - DNA, 25 bp, Homo sapien
actgtgagtcctgataactgcttca

SEQ ID NO: 2157446 - DNA, 25 bp, Homo sapien
ttggtggccgacaaatctggagatg

SEQ ID NO: 2157447 - DNA, 25 bp, Homo sapien
tcttggtggccgacaaatctggaga

SEQ ID NO: 2157448 - DNA, 25 bp, Homo sapien
gagccacacagatgcggcagacttg

SEQ ID NO: 2157449 - DNA, 25 bp, Homo sapien
gacttgacctggcacacctgtcaat

SEQ ID NO: 2157450 - DNA, 25 bp, Homo sapien
tggcaaggaggtgtagggccctgac

SEQ ID NO: 2157451 - DNA, 25 bp, Homo sapien
gaccatggcaaggaggtgtagggcc

SEQ ID NO: 2157452 - DNA, 25 bp, Homo sapien
tcaggaccatggcaaggaggtgtag

SEQ ID NO: 2157453 - DNA, 25 bp, Homo sapien
catggcaaggaggtgtagggccctg

SEQ ID NO: 2157454 - DNA, 25 bp, Homo sapien
aggtgtagcaaacactaacatcaga

SEQ ID NO: 2157455 - DNA, 25 bp, Homo sapien
tagcaaacactaacatcagagggat

SEQ ID NO: 2157456 - DNA, 25 bp, Homo sapien
cactaacatcagagggataaaggag

SEQ ID NO: 2157457 - DNA, 25 bp, Homo sapien
taacatcagagggataaaggagttt

SEQ ID NO: 2157458 - DNA, 25 bp, Homo sapien
gcgctcactagagcgctcgccccag

SEQ ID NO: 2157459 - DNA, 25 bp, Homo sapien
taagcatccgtccgcgctcactaga

SEQ ID NO: 2157460 - DNA, 25 bp, Homo sapien
tgagcgccgtctctgttcactgaca

SEQ ID NO: 2157461 - DNA, 25 bp, Homo sapien
gcgctcgccccagactgagcgccgt

SEQ ID NO: 2157462 - DNA, 25 bp, Homo sapien
ccctccaagggaacttgaaagtgtg

SEQ ID NO: 2157463 - DNA, 25 bp, Homo sapien
tcactgccgcgtacggccacctgaa

SEQ ID NO: 2157464 - DNA, 25 bp, Homo sapien
gacgggacggatgggaccgctcctg

SEQ ID NO: 2157465 - DNA, 25 bp, Homo sapien
gaaccctcaactctcgcagagccgg

SEQ ID NO: 2157466 - DNA, 25 bp, Homo sapien
gcggacgtgtctatgaggaacagca

SEQ ID NO: 2157467 - DNA, 25 bp, Homo sapien
aagaataactccacagcgcctttgg

SEQ ID NO: 2157468 - DNA, 25 bp, Homo sapien
gcaatgtccaaataagaggtgccca

SEQ ID NO: 2157469 - DNA, 25 bp, Homo sapien
gcgcctttggcaatgtccaaataag

SEQ ID NO: 2157470 - DNA, 25 bp, Homo sapien
taggtgaccagcatgtacctgtctc

SEQ ID NO: 2157471 - DNA, 25 bp, Homo sapien
tcgtaggtgaccagcatgtacctgt

SEQ ID NO: 2157472 - DNA, 25 bp, Homo sapien
gaccagcatgtacctgtctccacgg

SEQ ID NO: 2157473 - DNA, 25 bp, Homo sapien
agcatgtacctgtctccacggctgg

SEQ ID NO: 2157474 - DNA, 25 bp, Homo sapien
tccggagcagaaacgcaaagacttt

SEQ ID NO: 2157475 - DNA, 25 bp, Homo sapien
gctgaacctggccaattccggagca

SEQ ID NO: 2157476 - DNA, 25 bp, Homo sapien
cctccgtgtcgttgcttcgctggaa

SEQ ID NO: 2157477 - DNA, 25 bp, Homo sapien
actggcgtcgcggacagatttccga

SEQ ID NO: 2157478 - DNA, 25 bp, Homo sapien
aaagctctgcccctgtgggttcgca

SEQ ID NO: 2157479 - DNA, 25 bp, Homo sapien
aagctctgcccctgtgggttcgcac

SEQ ID NO: 2157480 - DNA, 25 bp, Homo sapien
ctaaaaagctctgcccctgtgggtt

SEQ ID NO: 2157481 - DNA, 25 bp, Homo sapien
aaaaagctctgcccctgtgggttcg

SEQ ID NO: 2157482 - DNA, 25 bp, Homo sapien
atgatgtaaataggtagagcggatc

SEQ ID NO: 2157483 - DNA, 25 bp, Homo sapien
tgatgtaaataggtagagcggatcc

SEQ ID NO: 2157484 - DNA, 25 bp, Homo sapien
tatgatgtaaataggtagagcggat

SEQ ID NO: 2157485 - DNA, 25 bp, Homo sapien
ttatgatgtaaataggtagagcgga

SEQ ID NO: 2157486 - DNA, 25 bp, Homo sapien
cacactacaaatggtcggttcttat

SEQ ID NO: 2157487 - DNA, 25 bp, Homo sapien
ctacttcgaattaaggagcatgtct

SEQ ID NO: 2157488 - DNA, 25 bp, Homo sapien
cgaagagtgtagacattcagaccta

SEQ ID NO: 2157489 - DNA, 25 bp, Homo sapien
tatctgtattagcagtcgaagagtg

SEQ ID NO: 2157490 - DNA, 25 bp, Homo sapien
catattttaacgaaactgggcaaag

SEQ ID NO: 2157491 - DNA, 25 bp, Homo sapien
aaatgattcacagtttgattccact

SEQ ID NO: 2157492 - DNA, 25 bp, Homo sapien
gaaatgattcacagtttgattccac

SEQ ID NO: 2157493 - DNA, 25 bp, Homo sapien
acatgaaaaataagaagccctgctt

SEQ ID NO: 2157494 - DNA, 25 bp, Homo sapien
cagtgagatggaatgacatgaaaaa

SEQ ID NO: 2157495 - DNA, 25 bp, Homo sapien
agtgagatggaatgacatgaaaaat

SEQ ID NO: 2157496 - DNA, 25 bp, Homo sapien
atgacatgaaaaataagaagccctg

SEQ ID NO: 2157497 - DNA, 25 bp, Homo sapien
gcctgttgctgaagctcttttgaat

SEQ ID NO: 2157498 - DNA, 25 bp, Homo sapien
tatgttctctgacatgtggtgctaa

SEQ ID NO: 2157499 - DNA, 25 bp, Homo sapien
gaaactggcatgctctctgcaggcc

SEQ ID NO: 2157500 - DNA, 25 bp, Homo sapien
tctcatctgactggttggtttgcaa

SEQ ID NO: 2157501 - DNA, 25 bp, Homo sapien
tcagaagggcaaagcctaaaagcaa

SEQ ID NO: 2157502 - DNA, 25 bp, Homo sapien
gagaatttgcacttttctcctcaga

SEQ ID NO: 2157503 - DNA, 25 bp, Homo sapien
tcctcagaagggcaaagcctaaaag

SEQ ID NO: 2157504 - DNA, 25 bp, Homo sapien
tcaccacaggaaggagagaatttgc

SEQ ID NO: 2157505 - DNA, 25 bp, Homo sapien
cagtaaaagatgattacaagaggcc

SEQ ID NO: 2157506 - DNA, 25 bp, Homo sapien
cagacttggtgatagagcatgaggc

SEQ ID NO: 2157507 - DNA, 25 bp, Homo sapien
ggaatcaagacctgaattaggatgg

SEQ ID NO: 2157508 - DNA, 25 bp, Homo sapien
gagcatgaggccaaaggatagacag

SEQ ID NO: 2157509 - DNA, 25 bp, Homo sapien
ttgcatgattttccttccaaccagc

SEQ ID NO: 2157510 - DNA, 25 bp, Homo sapien
tgttgcatgattttccttccaacca

SEQ ID NO: 2157511 - DNA, 25 bp, Homo sapien
gaatgttgcatgattttccttccaa

SEQ ID NO: 2157512 - DNA, 25 bp, Homo sapien
aatgttgcatgattttccttccaac

SEQ ID NO: 2157513 - DNA, 25 bp, Homo sapien
ggatcttagagcctgaccgagagta

SEQ ID NO: 2157514 - DNA, 25 bp, Homo sapien
ccagatattaatctattgagattta

SEQ ID NO: 2157515 - DNA, 25 bp, Homo sapien
gaccgagagtagtcagtccagaagc

SEQ ID NO: 2157516 - DNA, 25 bp, Homo sapien
ttgagatttaacaaatcaaatgagg

SEQ ID NO: 2157517 - DNA, 25 bp, Homo sapien
tctgtgatggtaattaaaatagatg

SEQ ID NO: 2157518 - DNA, 25 bp, Homo sapien
ccatctgtgatggtaattaaaatag

SEQ ID NO: 2157519 - DNA, 25 bp, Homo sapien
tgatggtaattaaaatagatggttc

SEQ ID NO: 2157520 - DNA, 25 bp, Homo sapien
tgtgatggtaattaaaatagatggt

SEQ ID NO: 2157521 - DNA, 25 bp, Homo sapien
ctttggttagttcacttccaggcag

SEQ ID NO: 2157522 - DNA, 25 bp, Homo sapien
atggcagattcatcagttggtacgc

SEQ ID NO: 2157523 - DNA, 25 bp, Homo sapien
cagttggtacgctccctagttgctc

SEQ ID NO: 2157524 - DNA, 25 bp, Homo sapien
actccaggcaaacgcaacaccaggg

SEQ ID NO: 2157525 - DNA, 25 bp, Homo sapien
tctccaataggaagtggatctggtc

SEQ ID NO: 2157526 - DNA, 25 bp, Homo sapien
tgtgttctcacacagtaggagcgac

SEQ ID NO: 2157527 - DNA, 25 bp, Homo sapien
gagattctaaacattgattcaacat

SEQ ID NO: 2157528 - DNA, 25 bp, Homo sapien
caccactctgaactttttgaactag

SEQ ID NO: 2157529 - DNA, 25 bp, Homo sapien
ggctgagcagcaaatgaattgcttg

SEQ ID NO: 2157530 - DNA, 25 bp, Homo sapien
gctgagcagcaaatgaattgcttgg

SEQ ID NO: 2157531 - DNA, 25 bp, Homo sapien
ctgagcagcaaatgaattgcttggc

SEQ ID NO: 2157532 - DNA, 25 bp, Homo sapien
gagttaggtcgtacataaatgagtt

SEQ ID NO: 2157533 - DNA, 25 bp, Homo sapien
gttaggtcgtacataaatgagttta

SEQ ID NO: 2157534 - DNA, 25 bp, Homo sapien
tttagagttaggtcgtacataaatg

SEQ ID NO: 2157535 - DNA, 25 bp, Homo sapien
tagagttaggtcgtacataaatgag

SEQ ID NO: 2157536 - DNA, 25 bp, Homo sapien
gggctcttcagtcttacattcaggt

SEQ ID NO: 2157537 - DNA, 25 bp, Homo sapien
ccaaaagggctcttcagtcttacat

SEQ ID NO: 2157538 - DNA, 25 bp, Homo sapien
agcaggggccaaaagggctcttcag

SEQ ID NO: 2157539 - DNA, 25 bp, Homo sapien
tacattcaggtctttcatggccact

SEQ ID NO: 2157540 - DNA, 25 bp, Homo sapien
cacaacaggatgagatgttcgtgga

SEQ ID NO: 2157541 - DNA, 25 bp, Homo sapien
tcacaacaggatgagatgttcgtgg

SEQ ID NO: 2157542 - DNA, 25 bp, Homo sapien
caacaggatgagatgttcgtggagg

SEQ ID NO: 2157543 - DNA, 25 bp, Homo sapien
ctcacaacaggatgagatgttcgtg

SEQ ID NO: 2157544 - DNA, 25 bp, Homo sapien
tatactgagttaagggcgaaggttc

SEQ ID NO: 2157545 - DNA, 25 bp, Homo sapien
aaggaagtttgtctattaccattgg

SEQ ID NO: 2157546 - DNA, 25 bp, Homo sapien
gggagactttcgttccaagatatac

SEQ ID NO: 2157547 - DNA, 25 bp, Homo sapien
gcgaaggttcaagttcatatttgtc

SEQ ID NO: 2157548 - DNA, 25 bp, Homo sapien
aataaccaaatggatatccaagttc

SEQ ID NO: 2157549 - DNA, 25 bp, Homo sapien
ggatatccaagttcattgtactttc

SEQ ID NO: 2157550 - DNA, 25 bp, Homo sapien
ggcatcacaaagaggtttacacaag

SEQ ID NO: 2157551 - DNA, 25 bp, Homo sapien
ttacacaagttaaagttgtactggc

SEQ ID NO: 2157552 - DNA, 25 bp, Homo sapien
agaactcagtaatatatatgaaaag

SEQ ID NO: 2157553 - DNA, 25 bp, Homo sapien
tactcaagaaaatatcagcacatag

SEQ ID NO: 2157554 - DNA, 25 bp, Homo sapien
tcagcacatagaactcagtaatata

SEQ ID NO: 2157555 - DNA, 25 bp, Homo sapien
aatatcagcacatagaactcagtaa

SEQ ID NO: 2157556 - DNA, 25 bp, Homo sapien
gtagataggctcaacaacagaatgc

SEQ ID NO: 2157557 - DNA, 25 bp, Homo sapien
tgaacggagcctaaggaacctaaga

SEQ ID NO: 2157558 - DNA, 25 bp, Homo sapien
aaagacaattaagggatgccaacac

SEQ ID NO: 2157559 - DNA, 25 bp, Homo sapien
caagttcaagtaagtgtcgtgcctc

SEQ ID NO: 2157560 - DNA, 25 bp, Homo sapien
catgccttcatctgacctccattac

SEQ ID NO: 2157561 - DNA, 25 bp, Homo sapien
cctaaagtcattgggtgatagtaaa

SEQ ID NO: 2157562 - DNA, 25 bp, Homo sapien
taaagtcattgggtgatagtaaaag

SEQ ID NO: 2157563 - DNA, 25 bp, Homo sapien
aagtcattgggtgatagtaaaagca

SEQ ID NO: 2157564 - DNA, 25 bp, Homo sapien
tgacctaaagtcattgggtgatagt

SEQ ID NO: 2157565 - DNA, 25 bp, Homo sapien
tttggcttaagcttgtgaactttaa

SEQ ID NO: 2157566 - DNA, 25 bp, Homo sapien
tggcttaagcttgtgaactttaaac

SEQ ID NO: 2157567 - DNA, 25 bp, Homo sapien
ttggcttaagcttgtgaactttaaa

SEQ ID NO: 2157568 - DNA, 25 bp, Homo sapien
tagctgtcaaaagcctgtcgccact

SEQ ID NO: 2157569 - DNA, 25 bp, Homo sapien
taggtagtatggaggcagagttttt

SEQ ID NO: 2157570 - DNA, 25 bp, Homo sapien
tagtatggaggcagagtttttaagt

SEQ ID NO: 2157571 - DNA, 25 bp, Homo sapien
tttttaagtagctgtcaaaagcctg

SEQ ID NO: 2157572 - DNA, 25 bp, Homo sapien
caacttcatgctgtgtctaggacac

SEQ ID NO: 2157573 - DNA, 25 bp, Homo sapien
tcttagaagtcaaggtgctgcacat

SEQ ID NO: 2157574 - DNA, 25 bp, Homo sapien
catttaagaggcaataggcaactgt

SEQ ID NO: 2157575 - DNA, 25 bp, Homo sapien
gatttgagaagacagtgacgacaca

SEQ ID NO: 2157576 - DNA, 25 bp, Homo sapien
tttaaggtaagagataacactgtaa

SEQ ID NO: 2157577 - DNA, 25 bp, Homo sapien
ttaaggtaagagataacactgtaac

SEQ ID NO: 2157578 - DNA, 25 bp, Homo sapien
tatcaaccagcttgcgggtaggaca

SEQ ID NO: 2157579 - DNA, 25 bp, Homo sapien
tgaaatggctcaagaaacactggtg

SEQ ID NO: 2157580 - DNA, 25 bp, Homo sapien
tagcaaggtgtgtcggcatcccaat

SEQ ID NO: 2157581 - DNA, 25 bp, Homo sapien
tgcacttataagcacactggactgg

SEQ ID NO: 2157582 - DNA, 25 bp, Homo sapien
tattgtgagtcaaggacatgccacc

SEQ ID NO: 2157583 - DNA, 25 bp, Homo sapien
tggtgttcaattctgtcagtctaag

SEQ ID NO: 2157584 - DNA, 25 bp, Homo sapien
tccccactgatgctagtattcgttc

SEQ ID NO: 2157585 - DNA, 25 bp, Homo sapien
tggaagccagcaaattctttggtgt

SEQ ID NO: 2157586 - DNA, 25 bp, Homo sapien
gcaggaccactgctcgtactctaga

SEQ ID NO: 2157587 - DNA, 25 bp, Homo sapien
gccttgcaggaccactgctcgtact

SEQ ID NO: 2157588 - DNA, 25 bp, Homo sapien
gaccactgctcgtactctagatgta

SEQ ID NO: 2157589 - DNA, 25 bp, Homo sapien
ctgtggccgccttgcaggaccactg

SEQ ID NO: 2157590 - DNA, 25 bp, Homo sapien
ccaacaataaacttgtgcgttttca

SEQ ID NO: 2157591 - DNA, 25 bp, Homo sapien
cctctacggggaatatcataagcat

SEQ ID NO: 2157592 - DNA, 25 bp, Homo sapien
agctggtctaaaagacctctacggg

SEQ ID NO: 2157593 - DNA, 25 bp, Homo sapien
cagattggatctcattctggtcagc

SEQ ID NO: 2157594 - DNA, 25 bp, Homo sapien
cacaggaaaagaaattgatgcttat

SEQ ID NO: 2157595 - DNA, 25 bp, Homo sapien
attgatgcttatagctgaagcgtat

SEQ ID NO: 2157596 - DNA, 25 bp, Homo sapien
atgcttatagctgaagcgtatggtc

SEQ ID NO: 2157597 - DNA, 25 bp, Homo sapien
atcacaggaaaagaaattgatgctt

SEQ ID NO: 2157598 - DNA, 25 bp, Homo sapien
ggttggtctggatcaatctctcgca

SEQ ID NO: 2157599 - DNA, 25 bp, Homo sapien
aagccaatgtcttcagatattcctg

SEQ ID NO: 2157600 - DNA, 25 bp, Homo sapien
tttaaacggattgccaaaagtatgc

SEQ ID NO: 2157601 - DNA, 25 bp, Homo sapien
gatagttacccatttgtgcaactgg

SEQ ID NO: 2157602 - DNA, 25 bp, Homo sapien
tacatgtacgtgttgaaaggcaggc

SEQ ID NO: 2157603 - DNA, 25 bp, Homo sapien
gaagtacgaactattttgcatcaac

SEQ ID NO: 2157604 - DNA, 25 bp, Homo sapien
tcaaccaaaaggagagaagtacgaa

SEQ ID NO: 2157605 - DNA, 25 bp, Homo sapien
gcaggtggaaaatgcacctccccat

SEQ ID NO: 2157606 - DNA, 25 bp, Homo sapien
gatgacataggactgttgggttccc

SEQ ID NO: 2157607 - DNA, 25 bp, Homo sapien
tcttagatgacataggactgttggg

SEQ ID NO: 2157608 - DNA, 25 bp, Homo sapien
acataggactgttgggttcccctgg

SEQ ID NO: 2157609 - DNA, 25 bp, Homo sapien
tccgccttctcttagatgacatagg

SEQ ID NO: 2157610 - DNA, 25 bp, Homo sapien
ctgtatgtacaagggtgggttttat

SEQ ID NO: 2157611 - DNA, 25 bp, Homo sapien
tggataagatgggaaccacgaggct

SEQ ID NO: 2157612 - DNA, 25 bp, Homo sapien
catggttagttacagtaggtggtgt

SEQ ID NO: 2157613 - DNA, 25 bp, Homo sapien
ctttccgcccacatggttagttaca

SEQ ID NO: 2157614 - DNA, 25 bp, Homo sapien
tctacaggcctttgggagacagcag

SEQ ID NO: 2157615 - DNA, 25 bp, Homo sapien
gaaccgctgggtaaatagtgctgaa

SEQ ID NO: 2157616 - DNA, 25 bp, Homo sapien
caggttttcaggagcgacatggcat

SEQ ID NO: 2157617 - DNA, 25 bp, Homo sapien
gataccagactgcaccggattagag

SEQ ID NO: 2157618 - DNA, 25 bp, Homo sapien
tctttttggtcatctacggagagac

SEQ ID NO: 2157619 - DNA, 25 bp, Homo sapien
catggccatcgtgaatgatagtagc

SEQ ID NO: 2157620 - DNA, 25 bp, Homo sapien
tgtgaagtcgtcagacagagaatcc

SEQ ID NO: 2157621 - DNA, 25 bp, Homo sapien
tactaccaggtttttgaatcagccc

SEQ ID NO: 2157622 - DNA, 25 bp, Homo sapien
ccagaggtccttgcacttcttcaag

SEQ ID NO: 2157623 - DNA, 25 bp, Homo sapien
catctccagaggtccttgcacttct

SEQ ID NO: 2157624 - DNA, 25 bp, Homo sapien
tttcttcatctccagaggtccttgc

SEQ ID NO: 2157625 - DNA, 25 bp, Homo sapien
gcggcttccttgatggtaaattcaa

SEQ ID NO: 2157626 - DNA, 25 bp, Homo sapien
ttttcctgcactgggccctactgct

SEQ ID NO: 2157627 - DNA, 25 bp, Homo sapien
tttttcctgcactgggccctactgc

SEQ ID NO: 2157628 - DNA, 25 bp, Homo sapien
gtactgaattaggactcgtctttta

SEQ ID NO: 2157629 - DNA, 25 bp, Homo sapien
tactgaattaggactcgtcttttaa

SEQ ID NO: 2157630 - DNA, 25 bp, Homo sapien
tgtgactaatgttgttgtgaaggtg

SEQ ID NO: 2157631 - DNA, 25 bp, Homo sapien
gatgtgactaatgttgttgtgaagg

SEQ ID NO: 2157632 - DNA, 25 bp, Homo sapien
tgatgtgactaatgttgttgtgaag

SEQ ID NO: 2157633 - DNA, 25 bp, Homo sapien
ttgatgtgactaatgttgttgtgaa

SEQ ID NO: 2157634 - DNA, 25 bp, Homo sapien
tggtgtttaccgaatttagcctgtg

SEQ ID NO: 2157635 - DNA, 25 bp, Homo sapien
cttgactcaaacattccaggaggct

SEQ ID NO: 2157636 - DNA, 25 bp, Homo sapien
tggcaaagttcaagtgagtgacctc

SEQ ID NO: 2157637 - DNA, 25 bp, Homo sapien
gagtgacctctcattacccgtggta

SEQ ID NO: 2157638 - DNA, 25 bp, Homo sapien
agaaataagttacccaaatagcagc

SEQ ID NO: 2157639 - DNA, 25 bp, Homo sapien
gacacagtaagagcaccaagttgtg

SEQ ID NO: 2157640 - DNA, 25 bp, Homo sapien
gcagcttcttacttctttgattcaa

SEQ ID NO: 2157641 - DNA, 25 bp, Homo sapien
gattcaaactatcctgaatattgca

SEQ ID NO: 2157642 - DNA, 25 bp, Homo sapien
gaatgtataagtccatctgaagact

SEQ ID NO: 2157643 - DNA, 25 bp, Homo sapien
gactttctatcatcacatgcaagaa

SEQ ID NO: 2157644 - DNA, 25 bp, Homo sapien
tccaaagcacagaatgtataagtcc

SEQ ID NO: 2157645 - DNA, 25 bp, Homo sapien
cataacaatactgctccatataaac

SEQ ID NO: 2157646 - DNA, 25 bp, Homo sapien
aaatgatttattttatatatgcaaa

SEQ ID NO: 2157647 - DNA, 25 bp, Homo sapien
tataaccttggcaaggagtactttc

SEQ ID NO: 2157648 - DNA, 25 bp, Homo sapien
ggtgaacgtgaatctccagaggctt

SEQ ID NO: 2157649 - DNA, 25 bp, Homo sapien
catgagtggccaggtattgtataac

SEQ ID NO: 2157650 - DNA, 25 bp, Homo sapien
tgccaggggcttatctgcactacca

SEQ ID NO: 2157651 - DNA, 25 bp, Homo sapien
aactggcacataaatcagtgctaca

SEQ ID NO: 2157652 - DNA, 25 bp, Homo sapien
ttgtaaacacgtagccaactgtatg

SEQ ID NO: 2157653 - DNA, 25 bp, Homo sapien
cacgtagccaactgtatgaagttct

SEQ ID NO: 2157654 - DNA, 25 bp, Homo sapien
atcatttgtaaacacgtagccaact

SEQ ID NO: 2157655 - DNA, 25 bp, Homo sapien
caactgcagatgcaatctcttttgt

SEQ ID NO: 2157656 - DNA, 25 bp, Homo sapien
gtccttaggccaatggtctgttcca

SEQ ID NO: 2157657 - DNA, 25 bp, Homo sapien
gtgtccttaggccaatggtctgttc

SEQ ID NO: 2157658 - DNA, 25 bp, Homo sapien
ctgttccacaactgcagatgcaatc

SEQ ID NO: 2157659 - DNA, 25 bp, Homo sapien
tctaaccgcagggacatactcttcc

SEQ ID NO: 2157660 - DNA, 25 bp, Homo sapien
ttgtctaaccgcagggacatactct

SEQ ID NO: 2157661 - DNA, 25 bp, Homo sapien
cctgtttgtctaaccgcagggacat

SEQ ID NO: 2157662 - DNA, 25 bp, Homo sapien
taaccgcagggacatactcttccct

SEQ ID NO: 2157663 - DNA, 25 bp, Homo sapien
gatgacattaccaggtgctggctgg

SEQ ID NO: 2157664 - DNA, 25 bp, Homo sapien
ttgtgatgacattaccaggtgctgg

SEQ ID NO: 2157665 - DNA, 25 bp, Homo sapien
cagttgtgatgacattaccaggtgc

SEQ ID NO: 2157666 - DNA, 25 bp, Homo sapien
tggaacagttgtgatgacattacca

SEQ ID NO: 2157667 - DNA, 25 bp, Homo sapien
catattaccagcagtcgagcagtcg

SEQ ID NO: 2157668 - DNA, 25 bp, Homo sapien
cgagcagtcgacaaggtgttatcag

SEQ ID NO: 2157669 - DNA, 25 bp, Homo sapien
cgtgctcgtggatgaaactccagct

SEQ ID NO: 2157670 - DNA, 25 bp, Homo sapien
acagatctctcgtgctcgtggatga

SEQ ID NO: 2157671 - DNA, 25 bp, Homo sapien
cgttatccatttgcagttggccatt

SEQ ID NO: 2157672 - DNA, 25 bp, Homo sapien
taaatcagccctgacagaacatttg

SEQ ID NO: 2157673 - DNA, 25 bp, Homo sapien
gacaagacgttatccatttgcagtt

SEQ ID NO: 2157674 - DNA, 25 bp, Homo sapien
ccctggtactcatcgctggtataca

SEQ ID NO: 2157675 - DNA, 25 bp, Homo sapien
tggagctgcagccatataaccaagc

SEQ ID NO: 2157676 - DNA, 25 bp, Homo sapien
gatggagctgcagccatataaccaa

SEQ ID NO: 2157677 - DNA, 25 bp, Homo sapien
tggatggagctgcagccatataacc

SEQ ID NO: 2157678 - DNA, 25 bp, Homo sapien
ggatggagctgcagccatataacca

SEQ ID NO: 2157679 - DNA, 25 bp, Homo sapien
cagggactgtgaaggtgactgtagc

SEQ ID NO: 2157680 - DNA, 25 bp, Homo sapien
gagcagttgacaaggggttctcaga

SEQ ID NO: 2157681 - DNA, 25 bp, Homo sapien
tattaataaaccctgttggagcagt

SEQ ID NO: 2157682 - DNA, 25 bp, Homo sapien
ggatggaataacagctcctgccata

SEQ ID NO: 2157683 - DNA, 25 bp, Homo sapien
gttgacaacatgttattaggttggg

SEQ ID NO: 2157684 - DNA, 25 bp, Homo sapien
aataaataaccactggttgaacagt

SEQ ID NO: 2157685 - DNA, 25 bp, Homo sapien
tggttgaacagttgacaacatgtta

SEQ ID NO: 2157686 - DNA, 25 bp, Homo sapien
cagctgctgccaaataaataaccac

SEQ ID NO: 2157687 - DNA, 25 bp, Homo sapien
tgatccctggtactcatgcccagaa

SEQ ID NO: 2157688 - DNA, 25 bp, Homo sapien
tccctggtactcatgcccagaatac

SEQ ID NO: 2157689 - DNA, 25 bp, Homo sapien
gatccctggtactcatgcccagaat

SEQ ID NO: 2157690 - DNA, 25 bp, Homo sapien
actgatccctggtactcatgcccag

SEQ ID NO: 2157691 - DNA, 25 bp, Homo sapien
taagtaagccctggtagaacagttg

SEQ ID NO: 2157692 - DNA, 25 bp, Homo sapien
caagccgttattaggtagtggttgg

SEQ ID NO: 2157693 - DNA, 25 bp, Homo sapien
cagctgctgccaaataagtaagccc

SEQ ID NO: 2157694 - DNA, 25 bp, Homo sapien
ccctggtagaacagttgacaagccg

SEQ ID NO: 2157695 - DNA, 25 bp, Homo sapien
catcctcgctccatggacattgtga

SEQ ID NO: 2157696 - DNA, 25 bp, Homo sapien
agacattatcctgttgcggttggcc

SEQ ID NO: 2157697 - DNA, 25 bp, Homo sapien
tcctcgctccatggacattgtgatt

SEQ ID NO: 2157698 - DNA, 25 bp, Homo sapien
tgacaagacattatcctgttgcggt

SEQ ID NO: 2157699 - DNA, 25 bp, Homo sapien
gatccctggtactaactgaaggagt

SEQ ID NO: 2157700 - DNA, 25 bp, Homo sapien
tccctggtactaactgaaggagtac

SEQ ID NO: 2157701 - DNA, 25 bp, Homo sapien
agatccctggtactaactgaaggag

SEQ ID NO: 2157702 - DNA, 25 bp, Homo sapien
cagatccctggtactaactgaagga

SEQ ID NO: 2157703 - DNA, 25 bp, Homo sapien
cagttgatacgacgttatcagtttg

SEQ ID NO: 2157704 - DNA, 25 bp, Homo sapien
ggcattggccattttccgtcgtctc

SEQ ID NO: 2157705 - DNA, 25 bp, Homo sapien
cattggccattttccgtcgtctctt

SEQ ID NO: 2157706 - DNA, 25 bp, Homo sapien
gcattggccattttccgtcgtctct

SEQ ID NO: 2157707 - DNA, 25 bp, Homo sapien
aataccagctcctgcgaaattcata

SEQ ID NO: 2157708 - DNA, 25 bp, Homo sapien
tcctgcgaaattcataagccctgct

SEQ ID NO: 2157709 - DNA, 25 bp, Homo sapien
cctgctgtaacagttgacaagaatt

SEQ ID NO: 2157710 - DNA, 25 bp, Homo sapien
ttcataagccctgctgtaacagttg

SEQ ID NO: 2157711 - DNA, 25 bp, Homo sapien
gctgttgccaaataagtaagtcctg

SEQ ID NO: 2157712 - DNA, 25 bp, Homo sapien
tcttcacggacattttgagtgacgg

SEQ ID NO: 2157713 - DNA, 25 bp, Homo sapien
tgatccccggtactcatggctagaa

SEQ ID NO: 2157714 - DNA, 25 bp, Homo sapien
tcctggtagaagagttgacaagacg

SEQ ID NO: 2157715 - DNA, 25 bp, Homo sapien
tattaccaatccacggtggaacagt

SEQ ID NO: 2157716 - DNA, 25 bp, Homo sapien
gccatattaccaatccacggtggaa

SEQ ID NO: 2157717 - DNA, 25 bp, Homo sapien
cagctgcagccatattaccaatcca

SEQ ID NO: 2157718 - DNA, 25 bp, Homo sapien
tccacggtggaacagttgacaagat

SEQ ID NO: 2157719 - DNA, 25 bp, Homo sapien
agatgttatccggttgcggttggct

SEQ ID NO: 2157720 - DNA, 25 bp, Homo sapien
tcttcatggacattgagactggccg

SEQ ID NO: 2157721 - DNA, 25 bp, Homo sapien
tggacattgagactggccgtagcat

SEQ ID NO: 2157722 - DNA, 25 bp, Homo sapien
tgttatccggttgcggttggctatt

SEQ ID NO: 2157723 - DNA, 25 bp, Homo sapien
agatctctggtactcatggctggaa

SEQ ID NO: 2157724 - DNA, 25 bp, Homo sapien
gatctctggtactcatggctggaat

SEQ ID NO: 2157725 - DNA, 25 bp, Homo sapien
tctctggtactcatggctggaatac

SEQ ID NO: 2157726 - DNA, 25 bp, Homo sapien
acagatctctggtactcatggctgg

SEQ ID NO: 2157727 - DNA, 25 bp, Homo sapien
gacattattaagttgtggttggtca

SEQ ID NO: 2157728 - DNA, 25 bp, Homo sapien
attattaagttgtggttggtcattt

SEQ ID NO: 2157729 - DNA, 25 bp, Homo sapien
cattattaagttgtggttggtcatt

SEQ ID NO: 2157730 - DNA, 25 bp, Homo sapien
agacattattaagttgtggttggtc

SEQ ID NO: 2157731 - DNA, 25 bp, Homo sapien
taggactcatggtcggaaaaccagc

SEQ ID NO: 2157732 - DNA, 25 bp, Homo sapien
cctaggactcatggtcggaaaacca

SEQ ID NO: 2157733 - DNA, 25 bp, Homo sapien
tataataaccaggtaagaccgtaca

SEQ ID NO: 2157734 - DNA, 25 bp, Homo sapien
gactcatggtcggaaaaccagctac

SEQ ID NO: 2157735 - DNA, 25 bp, Homo sapien
tccttggtgctcatagctggaatac

SEQ ID NO: 2157736 - DNA, 25 bp, Homo sapien
cttggtgctcatagctggaatacca

SEQ ID NO: 2157737 - DNA, 25 bp, Homo sapien
tcatagacactgattgacggtagca

SEQ ID NO: 2157738 - DNA, 25 bp, Homo sapien
ctcacttcatagacactgattgacg

SEQ ID NO: 2157739 - DNA, 25 bp, Homo sapien
cccttgataacactatgcatgcata

SEQ ID NO: 2157740 - DNA, 25 bp, Homo sapien
tatgcatgcatatgaaaaccaagta

SEQ ID NO: 2157741 - DNA, 25 bp, Homo sapien
aagtaggacaatccaacttataagc

SEQ ID NO: 2157742 - DNA, 25 bp, Homo sapien
cttcttcccttgataacactatgca

SEQ ID NO: 2157743 - DNA, 25 bp, Homo sapien
ccacggacatggtgagtgactgtag

SEQ ID NO: 2157744 - DNA, 25 bp, Homo sapien
tccacggacatggtgagtgactgta

SEQ ID NO: 2157745 - DNA, 25 bp, Homo sapien
ctctccacggacatggtgagtgact

SEQ ID NO: 2157746 - DNA, 25 bp, Homo sapien
tctccacggacatggtgagtgactg

SEQ ID NO: 2157747 - DNA, 25 bp, Homo sapien
tgggcattgtgagtgacagtaacat

SEQ ID NO: 2157748 - DNA, 25 bp, Homo sapien
gcttctggtgtattaataagcccca

SEQ ID NO: 2157749 - DNA, 25 bp, Homo sapien
gccccagtggaacagctgacaagat

SEQ ID NO: 2157750 - DNA, 25 bp, Homo sapien
gatgttatcagctgcttgttggcca

SEQ ID NO: 2157751 - DNA, 25 bp, Homo sapien
cagatcattggtactcatggctgga

SEQ ID NO: 2157752 - DNA, 25 bp, Homo sapien
gatcattggtactcatggctggaat

SEQ ID NO: 2157753 - DNA, 25 bp, Homo sapien
tcattggtactcatggctggaatac

SEQ ID NO: 2157754 - DNA, 25 bp, Homo sapien
acagatcattggtactcatggctgg

SEQ ID NO: 2157755 - DNA, 25 bp, Homo sapien
caccatgcacgcatatggaaaccaa

SEQ ID NO: 2157756 - DNA, 25 bp, Homo sapien
tgacaccatgcacgcatatggaaac

SEQ ID NO: 2157757 - DNA, 25 bp, Homo sapien
tcatgacaccatgcacgcatatgga

SEQ ID NO: 2157758 - DNA, 25 bp, Homo sapien
aagtaggacaatccaacttataagt

SEQ ID NO: 2157759 - DNA, 25 bp, Homo sapien
cttctcttcatggacattgtgagtg

SEQ ID NO: 2157760 - DNA, 25 bp, Homo sapien
ctggaatccaaatgaaaaagttgag

SEQ ID NO: 2157761 - DNA, 25 bp, Homo sapien
agcagcttatatctgctgagactag

SEQ ID NO: 2157762 - DNA, 25 bp, Homo sapien
gcagcttatatctgctgagactagt

SEQ ID NO: 2157763 - DNA, 25 bp, Homo sapien
atgcgttgggtggcatatgatctcc

SEQ ID NO: 2157764 - DNA, 25 bp, Homo sapien
ccaatgcgttgggtggcatatgatc

SEQ ID NO: 2157765 - DNA, 25 bp, Homo sapien
acagcagagttcctttttgcaccca

SEQ ID NO: 2157766 - DNA, 25 bp, Homo sapien
accttgctgcttccctgatggtaaa

SEQ ID NO: 2157767 - DNA, 25 bp, Homo sapien
tcttgactttcatagatccttgtag

SEQ ID NO: 2157768 - DNA, 25 bp, Homo sapien
agagttcctttttgcacccaccttg

SEQ ID NO: 2157769 - DNA, 25 bp, Homo sapien
tctcttcgcttcaaaattataggga

SEQ ID NO: 2157770 - DNA, 25 bp, Homo sapien
aacctgttccatcctgcggcgtgta

SEQ ID NO: 2157771 - DNA, 25 bp, Homo sapien
gtaggaacctatatctttaagcacc

SEQ ID NO: 2157772 - DNA, 25 bp, Homo sapien
cctgcggcgtgtatccttgtttctc

SEQ ID NO: 2157773 - DNA, 25 bp, Homo sapien
gaggcgtctcaccagaagcaccgat

SEQ ID NO: 2157774 - DNA, 25 bp, Homo sapien
tttctagaaacctgccctctgggag

SEQ ID NO: 2157775 - DNA, 25 bp, Homo sapien
agttgtggcgcctccccactggtgg

SEQ ID NO: 2157776 - DNA, 25 bp, Homo sapien
cccctagggcacctgggagtgatgt

SEQ ID NO: 2157777 - DNA, 25 bp, Homo sapien
aagggcaaatgtgcctcacggacga

SEQ ID NO: 2157778 - DNA, 25 bp, Homo sapien
ccacagggcggcgatcatgcgtctg

SEQ ID NO: 2157779 - DNA, 25 bp, Homo sapien
agagtgagcgacatccaagggcaaa

SEQ ID NO: 2157780 - DNA, 25 bp, Homo sapien
caaagcatccggtaagcgtccacat

SEQ ID NO: 2157781 - DNA, 25 bp, Homo sapien
ccgcagcaccgggagagagcaccca

SEQ ID NO: 2157782 - DNA, 25 bp, Homo sapien
agaatccaaggaacagcaccccatt

SEQ ID NO: 2157783 - DNA, 25 bp, Homo sapien
taggcttagagaatccaaggaacag

SEQ ID NO: 2157784 - DNA, 25 bp, Homo sapien
tagagaatccaaggaacagcacccc

SEQ ID NO: 2157785 - DNA, 25 bp, Homo sapien
ggtagagacagagttcccaaggtca

SEQ ID NO: 2157786 - DNA, 25 bp, Homo sapien
tggcctccctcatggctgacacaga

SEQ ID NO: 2157787 - DNA, 25 bp, Homo sapien
agagttcccaaggtcacgtggcctc

SEQ ID NO: 2157788 - DNA, 25 bp, Homo sapien
agacagagttcccaaggtcacgtgg

SEQ ID NO: 2157789 - DNA, 25 bp, Homo sapien
tcagatagagtcccggtgaagagtt

SEQ ID NO: 2157790 - DNA, 25 bp, Homo sapien
cagatagagtcccggtgaagagttc

SEQ ID NO: 2157791 - DNA, 25 bp, Homo sapien
atagagtcccggtgaagagttcctt

SEQ ID NO: 2157792 - DNA, 25 bp, Homo sapien
gatagagtcccggtgaagagttcct

SEQ ID NO: 2157793 - DNA, 25 bp, Homo sapien
tttctgatacgaaggactgtcacat

SEQ ID NO: 2157794 - DNA, 25 bp, Homo sapien
ggactgtcacattccctgggacgtt

SEQ ID NO: 2157795 - DNA, 25 bp, Homo sapien
tctgccttttctgatacgaaggact

SEQ ID NO: 2157796 - DNA, 25 bp, Homo sapien
aggactgtcacattccctgggacgt

SEQ ID NO: 2157797 - DNA, 25 bp, Homo sapien
gagttccaggttgcggtgaggccaa

SEQ ID NO: 2157798 - DNA, 25 bp, Homo sapien
gagccttctgtggaggtacccttgg

SEQ ID NO: 2157799 - DNA, 25 bp, Homo sapien
tgaggccaaggatatgggctggagt

SEQ ID NO: 2157800 - DNA, 25 bp, Homo sapien
tgggctagtggtaaggaagcagtcc

SEQ ID NO: 2157801 - DNA, 25 bp, Homo sapien
tgcacaatgagcaaatgaaacatac

SEQ ID NO: 2157802 - DNA, 25 bp, Homo sapien
gtgcacaatgagcaaatgaaacata

SEQ ID NO: 2157803 - DNA, 25 bp, Homo sapien
gagctgtgagatatgtgtgtttcat

SEQ ID NO: 2157804 - DNA, 25 bp, Homo sapien
tgagctgtgagatatgtgtgtttca

SEQ ID NO: 2157805 - DNA, 25 bp, Homo sapien
ctctgggtacatctatgtgctcctc

SEQ ID NO: 2157806 - DNA, 25 bp, Homo sapien
ccctccacatagacctcatgaatga

SEQ ID NO: 2157807 - DNA, 25 bp, Homo sapien
tccacatagacctcatgaatgacag

SEQ ID NO: 2157808 - DNA, 25 bp, Homo sapien
catcagttggtgtttgaccactttc

SEQ ID NO: 2157809 - DNA, 25 bp, Homo sapien
aaaagccatcagttggtgtttgacc

SEQ ID NO: 2157810 - DNA, 25 bp, Homo sapien
gctgaaaccagtgaagtcatcaatc

SEQ ID NO: 2157811 - DNA, 25 bp, Homo sapien
tctctgcattctaggtcatctccag

SEQ ID NO: 2157812 - DNA, 25 bp, Homo sapien
tgctggtaacgtttcctcccacagg

SEQ ID NO: 2157813 - DNA, 25 bp, Homo sapien
caacgcatcggagttccttcactaa

SEQ ID NO: 2157814 - DNA, 25 bp, Homo sapien
tccttgatgatggattcaaaaaatc

SEQ ID NO: 2157815 - DNA, 25 bp, Homo sapien
ttcctgactgcagtaggtccttgca

SEQ ID NO: 2157816 - DNA, 25 bp, Homo sapien
ttccttgatgatggattcaaaaaat

SEQ ID NO: 2157817 - DNA, 25 bp, Homo sapien
ccttgatgatggattcaaaaaatcg

SEQ ID NO: 2157818 - DNA, 25 bp, Homo sapien
ggtgcttaacaaagtctcgtctcat

SEQ ID NO: 2157819 - DNA, 25 bp, Homo sapien
ttaaggtgcttaacaaagtctcgtc

SEQ ID NO: 2157820 - DNA, 25 bp, Homo sapien
tcttcttaaggtgcttaacaaagtc

SEQ ID NO: 2157821 - DNA, 25 bp, Homo sapien
gcttaacaaagtctcgtctcataca

SEQ ID NO: 2157822 - DNA, 25 bp, Homo sapien
tcattaacgagattatgcatttggg

SEQ ID NO: 2157823 - DNA, 25 bp, Homo sapien
gcaatatcctgctccattgtagaaa

SEQ ID NO: 2157824 - DNA, 25 bp, Homo sapien
ggaaggccagttgattcggtaacat

SEQ ID NO: 2157825 - DNA, 25 bp, Homo sapien
gattcggtaacatatgccaggagac

SEQ ID NO: 2157826 - DNA, 25 bp, Homo sapien
gaaacaacagccttacagggactgc

SEQ ID NO: 2157827 - DNA, 25 bp, Homo sapien
tcaacattgagatcgggttcccacc

SEQ ID NO: 2157828 - DNA, 25 bp, Homo sapien
ccaggcaggatatctaatggttcag

SEQ ID NO: 2157829 - DNA, 25 bp, Homo sapien
gaaggtttgagtcatcctgccaggc

SEQ ID NO: 2157830 - DNA, 25 bp, Homo sapien
actgggtcctgttgtggggtgtggg

SEQ ID NO: 2157831 - DNA, 25 bp, Homo sapien
gaggggggagggatagcattaggag

SEQ ID NO: 2157832 - DNA, 25 bp, Homo sapien
cacactgggtcctgttgtggggtgt

SEQ ID NO: 2157833 - DNA, 25 bp, Homo sapien
atgggtgcagcacacaaaaatggca

SEQ ID NO: 2157834 - DNA, 25 bp, Homo sapien
agaagcaccgatcccgtttggccca

SEQ ID NO: 2157835 - DNA, 25 bp, Homo sapien
aagtagccagccacagcgtgcctgc

SEQ ID NO: 2157836 - DNA, 25 bp, Homo sapien
agcaccgatcccgtttggcccaagg

SEQ ID NO: 2157837 - DNA, 25 bp, Homo sapien
cagaagcaccgatcccgtttggccc

SEQ ID NO: 2157838 - DNA, 25 bp, Homo sapien
tttctagaaacctgccctctgggag

SEQ ID NO: 2157839 - DNA, 25 bp, Homo sapien
gagacggcggcacctcacaaaatgg

SEQ ID NO: 2157840 - DNA, 25 bp, Homo sapien
agttgtggcgcctccccactggtgg

SEQ ID NO: 2157841 - DNA, 25 bp, Homo sapien
cccctagggcacctgggagtgatgt

SEQ ID NO: 2157842 - DNA, 25 bp, Homo sapien
gagaatccaaggaacattaccccat

SEQ ID NO: 2157843 - DNA, 25 bp, Homo sapien
tagagaatccaaggaacattacccc

SEQ ID NO: 2157844 - DNA, 25 bp, Homo sapien
gaatccaaggaacattaccccattc

SEQ ID NO: 2157845 - DNA, 25 bp, Homo sapien
ggcttagagaatccaaggaacatta

SEQ ID NO: 2157846 - DNA, 25 bp, Homo sapien
tctgccttttctgatacgaaggact

SEQ ID NO: 2157847 - DNA, 25 bp, Homo sapien
ggactgtcacattccctgggacgtt

SEQ ID NO: 2157848 - DNA, 25 bp, Homo sapien
tttctgatacgaaggactgtcacat

SEQ ID NO: 2157849 - DNA, 25 bp, Homo sapien
aggactgtcacattccctgggacgt

SEQ ID NO: 2157850 - DNA, 25 bp, Homo sapien
gagttccaggttgcggtgaggccaa

SEQ ID NO: 2157851 - DNA, 25 bp, Homo sapien
tgggctagtggtaaggaagcagtcc

SEQ ID NO: 2157852 - DNA, 25 bp, Homo sapien
gagccttctgtggaggtacccttgg

SEQ ID NO: 2157853 - DNA, 25 bp, Homo sapien
tgaggccaaggatatgggctggagt

SEQ ID NO: 2157854 - DNA, 25 bp, Homo sapien
tgcacaatgagcaaatgaaacatac

SEQ ID NO: 2157855 - DNA, 25 bp, Homo sapien
gtgcacaatgagcaaatgaaacata

SEQ ID NO: 2157856 - DNA, 25 bp, Homo sapien
ctctgggtacatctatgtgctcctc

SEQ ID NO: 2157857 - DNA, 25 bp, Homo sapien
gagctgtgagatatgtgtgtttcat

SEQ ID NO: 2157858 - DNA, 25 bp, Homo sapien
tgagctgtgagatatgtgtgtttca

SEQ ID NO: 2157859 - DNA, 25 bp, Homo sapien
ccctccacatagacctcatgaatga

SEQ ID NO: 2157860 - DNA, 25 bp, Homo sapien
catcagttggtgtttgaccactttc

SEQ ID NO: 2157861 - DNA, 25 bp, Homo sapien
tccacatagacctcatgaatgacag

SEQ ID NO: 2157862 - DNA, 25 bp, Homo sapien
aaaagccatcagttggtgtttgacc

SEQ ID NO: 2157863 - DNA, 25 bp, Homo sapien
gctgaaaccagtgaagtcatcaatc

SEQ ID NO: 2157864 - DNA, 25 bp, Homo sapien
tctctgcattctaggtcatctccag

SEQ ID NO: 2157865 - DNA, 25 bp, Homo sapien
tgctggtaacgtttcctcccacagg

SEQ ID NO: 2157866 - DNA, 25 bp, Homo sapien
caacgcatcggagttccttcactaa

SEQ ID NO: 2157867 - DNA, 25 bp, Homo sapien
gatgatggattcaaaaaatcgtttc

SEQ ID NO: 2157868 - DNA, 25 bp, Homo sapien
gatggattcaaaaaatcgtttcctg

SEQ ID NO: 2157869 - DNA, 25 bp, Homo sapien
cttgatgatggattcaaaaaatcgt

SEQ ID NO: 2157870 - DNA, 25 bp, Homo sapien
tgatggattcaaaaaatcgtttcct

SEQ ID NO: 2157871 - DNA, 25 bp, Homo sapien
tcttcttaaggtgcttaacaaagtc

SEQ ID NO: 2157872 - DNA, 25 bp, Homo sapien
ttaaggtgcttaacaaagtctcgtc

SEQ ID NO: 2157873 - DNA, 25 bp, Homo sapien
gcttaacaaagtctcgtctcataca

SEQ ID NO: 2157874 - DNA, 25 bp, Homo sapien
ggtgcttaacaaagtctcgtctcat

SEQ ID NO: 2157875 - DNA, 25 bp, Homo sapien
tctagagagcttcttagtcctcccg

SEQ ID NO: 2157876 - DNA, 25 bp, Homo sapien
gtctagagagcttcttagtcctccc

SEQ ID NO: 2157877 - DNA, 25 bp, Homo sapien
gagagcttcttagtcctcccgtgtt

SEQ ID NO: 2157878 - DNA, 25 bp, Homo sapien
tagagagcttcttagtcctcccgtg

SEQ ID NO: 2157879 - DNA, 25 bp, Homo sapien
tgtatcagaccaatcctatctagga

SEQ ID NO: 2157880 - DNA, 25 bp, Homo sapien
gaaacaacagccttacagggactgc

SEQ ID NO: 2157881 - DNA, 25 bp, Homo sapien
tcaacattgagatcgggttcccacc

SEQ ID NO: 2157882 - DNA, 25 bp, Homo sapien
ttcaagtcgtatctggaaacaacag

SEQ ID NO: 2157883 - DNA, 25 bp, Homo sapien
actgggtcctgttgtggggtgtggg

SEQ ID NO: 2157884 - DNA, 25 bp, Homo sapien
gaggggggagggatagcattaggag

SEQ ID NO: 2157885 - DNA, 25 bp, Homo sapien
tgcagcacacaaaaatggcacatgt

SEQ ID NO: 2157886 - DNA, 25 bp, Homo sapien
cacactgggtcctgttgtggggtgt

SEQ ID NO: 2157887 - DNA, 25 bp, Homo sapien
cagaagcaccgatcccgtttggccc

SEQ ID NO: 2157888 - DNA, 25 bp, Homo sapien
agaagcaccgatcccgtttggccca

SEQ ID NO: 2157889 - DNA, 25 bp, Homo sapien
aagtagccagccacagcgtgcctgc

SEQ ID NO: 2157890 - DNA, 25 bp, Homo sapien
agcaccgatcccgtttggcccaagg

SEQ ID NO: 2157891 - DNA, 25 bp, Homo sapien
cccctagggcacctgggagtgatgt

SEQ ID NO: 2157892 - DNA, 25 bp, Homo sapien
tttctagaaacctgccctctgggag

SEQ ID NO: 2157893 - DNA, 25 bp, Homo sapien
gagacggcggcacctcacaaaatgg

SEQ ID NO: 2157894 - DNA, 25 bp, Homo sapien
agttgtggcgcctccccactggtgg

SEQ ID NO: 2157895 - DNA, 25 bp, Homo sapien
ttgtaactgagagcgagcaacatcc

SEQ ID NO: 2157896 - DNA, 25 bp, Homo sapien
catgagcacagatagtgtccccagg

SEQ ID NO: 2157897 - DNA, 25 bp, Homo sapien
gaaagcatccagtaagcgtccacaa

SEQ ID NO: 2157898 - DNA, 25 bp, Homo sapien
gcaacatccgaggacaaatgcgcct

SEQ ID NO: 2157899 - DNA, 25 bp, Homo sapien
gagaatccaaggaacattaccccat

SEQ ID NO: 2157900 - DNA, 25 bp, Homo sapien
tagagaatccaaggaacattacccc

SEQ ID NO: 2157901 - DNA, 25 bp, Homo sapien
gaatccaaggaacattaccccattc

SEQ ID NO: 2157902 - DNA, 25 bp, Homo sapien
ggcttagagaatccaaggaacatta

SEQ ID NO: 2157903 - DNA, 25 bp, Homo sapien
tctgccttttctgatacgaaggact

SEQ ID NO: 2157904 - DNA, 25 bp, Homo sapien
ggactgtcacattccctgggacgtt

SEQ ID NO: 2157905 - DNA, 25 bp, Homo sapien
tttctgatacgaaggactgtcacat

SEQ ID NO: 2157906 - DNA, 25 bp, Homo sapien
aggactgtcacattccctgggacgt

SEQ ID NO: 2157907 - DNA, 25 bp, Homo sapien
gagttccaggttgcggtgaggccaa

SEQ ID NO: 2157908 - DNA, 25 bp, Homo sapien
tgggctagtggtaaggaagcagtcc

SEQ ID NO: 2157909 - DNA, 25 bp, Homo sapien
gagccttctgtggaggtacccttgg

SEQ ID NO: 2157910 - DNA, 25 bp, Homo sapien
tgaggccaaggatatgggctggagt

SEQ ID NO: 2157911 - DNA, 25 bp, Homo sapien
tgcacaatgagcaaatgaaacatac

SEQ ID NO: 2157912 - DNA, 25 bp, Homo sapien
gtgcacaatgagcaaatgaaacata

SEQ ID NO: 2157913 - DNA, 25 bp, Homo sapien
gagctgtgagatatgtgtgtttcat

SEQ ID NO: 2157914 - DNA, 25 bp, Homo sapien
tgagctgtgagatatgtgtgtttca

SEQ ID NO: 2157915 - DNA, 25 bp, Homo sapien
ctctgggtacatctatgtgctcctc

SEQ ID NO: 2157916 - DNA, 25 bp, Homo sapien
catcagttggtgtttgaccactttc

SEQ ID NO: 2157917 - DNA, 25 bp, Homo sapien
tccacatagacctcatgaatgacag

SEQ ID NO: 2157918 - DNA, 25 bp, Homo sapien
ccctccacatagacctcatgaatga

SEQ ID NO: 2157919 - DNA, 25 bp, Homo sapien
aaaagccatcagttggtgtttgacc

SEQ ID NO: 2157920 - DNA, 25 bp, Homo sapien
gctgaaaccagtgaagtcatcaatc

SEQ ID NO: 2157921 - DNA, 25 bp, Homo sapien
tctctgcattctaggtcatctccag

SEQ ID NO: 2157922 - DNA, 25 bp, Homo sapien
tgctggtaacgtttcctcccacagg

SEQ ID NO: 2157923 - DNA, 25 bp, Homo sapien
caacgcatcggagttccttcactaa

SEQ ID NO: 2157924 - DNA, 25 bp, Homo sapien
ttcctgactgcagtaggtccttgca

SEQ ID NO: 2157925 - DNA, 25 bp, Homo sapien
ttccttgatgatggattcaaaaaat

SEQ ID NO: 2157926 - DNA, 25 bp, Homo sapien
ccttgatgatggattcaaaaaatcg

SEQ ID NO: 2157927 - DNA, 25 bp, Homo sapien
tccttgatgatggattcaaaaaatc

SEQ ID NO: 2157928 - DNA, 25 bp, Homo sapien
ttaaggtgcttaacaaagtctcgtc

SEQ ID NO: 2157929 - DNA, 25 bp, Homo sapien
tcttcttaaggtgcttaacaaagtc

SEQ ID NO: 2157930 - DNA, 25 bp, Homo sapien
gcttaacaaagtctcgtctcataca

SEQ ID NO: 2157931 - DNA, 25 bp, Homo sapien
ggtgcttaacaaagtctcgtctcat

SEQ ID NO: 2157932 - DNA, 25 bp, Homo sapien
taataatatctaccagcacaggtgg

SEQ ID NO: 2157933 - DNA, 25 bp, Homo sapien
tcattaacgagattatgcatttggg

SEQ ID NO: 2157934 - DNA, 25 bp, Homo sapien
gcaatatcctgctccattgtagaaa

SEQ ID NO: 2157935 - DNA, 25 bp, Homo sapien
gattcggtaacatatgccaggagac

SEQ ID NO: 2157936 - DNA, 25 bp, Homo sapien
tgaggctgtccggttctaccaatgt

SEQ ID NO: 2157937 - DNA, 25 bp, Homo sapien
catttgttggtaccccaatgagttt

SEQ ID NO: 2157938 - DNA, 25 bp, Homo sapien
tccccgtaataaccccagacattgc

SEQ ID NO: 2157939 - DNA, 25 bp, Homo sapien
ctctcctttcagcatttgttggtac

SEQ ID NO: 2157940 - DNA, 25 bp, Homo sapien
cccaggacccaagatgagggcagct

SEQ ID NO: 2157941 - DNA, 25 bp, Homo sapien
actgggaggaccgaggtgacactga

SEQ ID NO: 2157942 - DNA, 25 bp, Homo sapien
agctcctagtctgatgagctgcagc

SEQ ID NO: 2157943 - DNA, 25 bp, Homo sapien
cagctgagagcctatgggcaggcac

SEQ ID NO: 2157944 - DNA, 25 bp, Homo sapien
tgagaacgagcgacatccaaggaca

SEQ ID NO: 2157945 - DNA, 25 bp, Homo sapien
cccatcagggataaacagatccaaa

SEQ ID NO: 2157946 - DNA, 25 bp, Homo sapien
agagtaaccccacagggcgacgatc

SEQ ID NO: 2157947 - DNA, 25 bp, Homo sapien
cgaacacatcctagttgagaacgag

SEQ ID NO: 2157948 - DNA, 25 bp, Homo sapien
gccctgcactgccggggctccgcat

SEQ ID NO: 2157949 - DNA, 25 bp, Homo sapien
gtggccttggactgtagcagttgga

SEQ ID NO: 2157950 - DNA, 25 bp, Homo sapien
cagtggtggccttggactgtagcag

SEQ ID NO: 2157951 - DNA, 25 bp, Homo sapien
tggtggccttggactgtagcagttg

SEQ ID NO: 2157952 - DNA, 25 bp, Homo sapien
tggttctgtaactgtgattctttac

SEQ ID NO: 2157953 - DNA, 25 bp, Homo sapien
tctgtaactgtgattctttactgca

SEQ ID NO: 2157954 - DNA, 25 bp, Homo sapien
ctgtaactgtgattctttactgcag

SEQ ID NO: 2157955 - DNA, 25 bp, Homo sapien
gttctgtaactgtgattctttactg

SEQ ID NO: 2157956 - DNA, 25 bp, Homo sapien
tgtaggtgctctctcccggtgccgc

SEQ ID NO: 2157957 - DNA, 25 bp, Homo sapien
tattatctgtaggtgctctctcccg

SEQ ID NO: 2157958 - DNA, 25 bp, Homo sapien
aaaattattatctgtaggtgctctc

SEQ ID NO: 2157959 - DNA, 25 bp, Homo sapien
aatggggtaatgttccttggattct

SEQ ID NO: 2157960 - DNA, 25 bp, Homo sapien
ccttggttgcctgtgtcggcctcgg

SEQ ID NO: 2157961 - DNA, 25 bp, Homo sapien
cggtgtttctttcccgctcagtcgc

SEQ ID NO: 2157962 - DNA, 25 bp, Homo sapien
gggctttatctcaacctctggtgga

SEQ ID NO: 2157963 - DNA, 25 bp, Homo sapien
ggacacatgatcgtagccctgtggg

SEQ ID NO: 2157964 - DNA, 25 bp, Homo sapien
ctgtgcagttggtactgaaggtcgc

SEQ ID NO: 2157965 - DNA, 25 bp, Homo sapien
ttgctgtgcagttggtactgaaggt

SEQ ID NO: 2157966 - DNA, 25 bp, Homo sapien
catacgttgctgtgcagttggtact

SEQ ID NO: 2157967 - DNA, 25 bp, Homo sapien
ctacgcatacgttgctgtgcagttg

SEQ ID NO: 2157968 - DNA, 25 bp, Homo sapien
taaagcagaaacctgttcctcgacc

SEQ ID NO: 2157969 - DNA, 25 bp, Homo sapien
tctggaaacatgcagggctcgttat

SEQ ID NO: 2157970 - DNA, 25 bp, Homo sapien
ctatacttggacacctttacaggtt

SEQ ID NO: 2157971 - DNA, 25 bp, Homo sapien
tattaattgtatgtcctctttgtac

SEQ ID NO: 2157972 - DNA, 25 bp, Homo sapien
tgtaggtgctctctcccggtgccgc

SEQ ID NO: 2157973 - DNA, 25 bp, Homo sapien
tattatctgtaggtgctctctcccg

SEQ ID NO: 2157974 - DNA, 25 bp, Homo sapien
aaaattattatctgtaggtgctctc

SEQ ID NO: 2157975 - DNA, 25 bp, Homo sapien
aatggggtaatgttccttggattct

SEQ ID NO: 2157976 - DNA, 25 bp, Homo sapien
agaaggttctgcattcctccgcata

SEQ ID NO: 2157977 - DNA, 25 bp, Homo sapien
aaggttctgcattcctccgcatacg

SEQ ID NO: 2157978 - DNA, 25 bp, Homo sapien
tgcattcctccgcatacgttgctgt

SEQ ID NO: 2157979 - DNA, 25 bp, Homo sapien
ttctgcattcctccgcatacgttgc

SEQ ID NO: 2157980 - DNA, 25 bp, Homo sapien
tctggaaacatgcagggctcgttat

SEQ ID NO: 2157981 - DNA, 25 bp, Homo sapien
taaagcagaaacctgttcctcgacc

SEQ ID NO: 2157982 - DNA, 25 bp, Homo sapien
ctatacttggacacctttacaggtt

SEQ ID NO: 2157983 - DNA, 25 bp, Homo sapien
tattaattgtatgtcctctttgtac

SEQ ID NO: 2157984 - DNA, 25 bp, Homo sapien
aaaattattatctgtaggtgctctc

SEQ ID NO: 2157985 - DNA, 25 bp, Homo sapien
tgtaggtgctctctcccggtgccgc

SEQ ID NO: 2157986 - DNA, 25 bp, Homo sapien
tattatctgtaggtgctctctcccg

SEQ ID NO: 2157987 - DNA, 25 bp, Homo sapien
aatggggtaatgttccttggattct

SEQ ID NO: 2157988 - DNA, 25 bp, Homo sapien
tgcctctgcccgctgtgcagttgat

SEQ ID NO: 2157989 - DNA, 25 bp, Homo sapien
tcacccttttatcccgctgtgtgag

SEQ ID NO: 2157990 - DNA, 25 bp, Homo sapien
gctgtgcagttgatagtgaaggcca

SEQ ID NO: 2157991 - DNA, 25 bp, Homo sapien
cacctgtagagagcaccagagtcag

SEQ ID NO: 2157992 - DNA, 25 bp, Homo sapien
cacatagtccaaagtataaagctct

SEQ ID NO: 2157993 - DNA, 25 bp, Homo sapien
tttataaccacatagtccaaagtat

SEQ ID NO: 2157994 - DNA, 25 bp, Homo sapien
cctagagttagctgactcgtttgaa

SEQ ID NO: 2157995 - DNA, 25 bp, Homo sapien
aaagctcttcacctagagttagctg

SEQ ID NO: 2157996 - DNA, 25 bp, Homo sapien
gaaatatatgatcctcttgagagta

SEQ ID NO: 2157997 - DNA, 25 bp, Homo sapien
aaatatatgatcctcttgagagtac

SEQ ID NO: 2157998 - DNA, 25 bp, Homo sapien
atatatgatcctcttgagagtacat

SEQ ID NO: 2157999 - DNA, 25 bp, Homo sapien
ctgaaatatatgatcctcttgagag

SEQ ID NO: 2158000 - DNA, 25 bp, Homo sapien
tggcacataaattggcgctatacag

SEQ ID NO: 2158001 - DNA, 25 bp, Homo sapien
aactggcacataaattggcgctata

SEQ ID NO: 2158002 - DNA, 25 bp, Homo sapien
actggcacataaattggcgctatac

SEQ ID NO: 2158003 - DNA, 25 bp, Homo sapien
ctggcacataaattggcgctataca

SEQ ID NO: 2158004 - DNA, 25 bp, Homo sapien
ttgtaaacacataggcagcagcatg

SEQ ID NO: 2158005 - DNA, 25 bp, Homo sapien
tttgtaaacacataggcagcagcat

SEQ ID NO: 2158006 - DNA, 25 bp, Homo sapien
tgtaaacacataggcagcagcatga

SEQ ID NO: 2158007 - DNA, 25 bp, Homo sapien
ttgtctaaccacgaggacatactct

SEQ ID NO: 2158008 - DNA, 25 bp, Homo sapien
tttgtctaaccacgaggacatactc

SEQ ID NO: 2158009 - DNA, 25 bp, Homo sapien
cctgtttgtctaaccacgaggacat

SEQ ID NO: 2158010 - DNA, 25 bp, Homo sapien
ctgtttgtctaaccacgaggacata

SEQ ID NO: 2158011 - DNA, 25 bp, Homo sapien
ttctcttcatggacattgtgagtga

SEQ ID NO: 2158012 - DNA, 25 bp, Homo sapien
cttctcttcatggacattgtgagtg

SEQ ID NO: 2158013 - DNA, 25 bp, Homo sapien
tgtgtgcagattggccattttttac

SEQ ID NO: 2158014 - DNA, 25 bp, Homo sapien
gttgcaatgacattattgtgtgcag

SEQ ID NO: 2158015 - DNA, 25 bp, Homo sapien
gctgccatactaataagcactgatg

SEQ ID NO: 2158016 - DNA, 25 bp, Homo sapien
cactgatggaacagttgcaatgaca

SEQ ID NO: 2158017 - DNA, 25 bp, Homo sapien
gccgttatttatcctctcttcacaa

SEQ ID NO: 2158018 - DNA, 25 bp, Homo sapien
tcacaaatgctgtgagtgactgcag

SEQ ID NO: 2158019 - DNA, 25 bp, Homo sapien
tactggttggccgttatttatcctc

SEQ ID NO: 2158020 - DNA, 25 bp, Homo sapien
caagacattatcagctactggttgg

SEQ ID NO: 2158021 - DNA, 25 bp, Homo sapien
tcatggatgaaattcctgctgctgc

SEQ ID NO: 2158022 - DNA, 25 bp, Homo sapien
gatgaaattcctgctgctgccatat

SEQ ID NO: 2158023 - DNA, 25 bp, Homo sapien
ggatgaaattcctgctgctgccata

SEQ ID NO: 2158024 - DNA, 25 bp, Homo sapien
gaaattcctgctgctgccatattac

SEQ ID NO: 2158025 - DNA, 25 bp, Homo sapien
cagttcgagattggccattttccat

SEQ ID NO: 2158026 - DNA, 25 bp, Homo sapien
gactttgtcagttcgagattggcca

SEQ ID NO: 2158027 - DNA, 25 bp, Homo sapien
gcagttgacaagactttgtcagttc

SEQ ID NO: 2158028 - DNA, 25 bp, Homo sapien
gacaagactttgtcagttcgagatt

SEQ ID NO: 2158029 - DNA, 25 bp, Homo sapien
gatccctggtactcatggatggaat

SEQ ID NO: 2158030 - DNA, 25 bp, Homo sapien
cagatccctggtactcatggatgga

SEQ ID NO: 2158031 - DNA, 25 bp, Homo sapien
tccctggtactcatggatggaatac

SEQ ID NO: 2158032 - DNA, 25 bp, Homo sapien
gcagatccctggtactcatggatgg

SEQ ID NO: 2158033 - DNA, 25 bp, Homo sapien
tgaaattcataagccccgctgtaat

SEQ ID NO: 2158034 - DNA, 25 bp, Homo sapien
cccgctgtaatagtagacaagaatt

SEQ ID NO: 2158035 - DNA, 25 bp, Homo sapien
tcataagccccgctgtaatagtaga

SEQ ID NO: 2158036 - DNA, 25 bp, Homo sapien
cacagataatgtgagtaacagttga

SEQ ID NO: 2158037 - DNA, 25 bp, Homo sapien
aagcaagtaggtcagtacaactagt

SEQ ID NO: 2158038 - DNA, 25 bp, Homo sapien
aaagcaagtaggtcagtacaactag

SEQ ID NO: 2158039 - DNA, 25 bp, Homo sapien
gaaaagcaagtaggtcagtacaact

SEQ ID NO: 2158040 - DNA, 25 bp, Homo sapien
aaaagcaagtaggtcagtacaacta

SEQ ID NO: 2158041 - DNA, 25 bp, Homo sapien
cttcttccctgcatgacactgcatg

SEQ ID NO: 2158042 - DNA, 25 bp, Homo sapien
tcttccctgcatgacactgcatgcg

SEQ ID NO: 2158043 - DNA, 25 bp, Homo sapien
ttccctgcatgacactgcatgcgta

SEQ ID NO: 2158044 - DNA, 25 bp, Homo sapien
tccctgcatgacactgcatgcgtac

SEQ ID NO: 2158045 - DNA, 25 bp, Homo sapien
tggctggaataggagttgctgccat

SEQ ID NO: 2158046 - DNA, 25 bp, Homo sapien
tattaataagccctgtgggaccagt

SEQ ID NO: 2158047 - DNA, 25 bp, Homo sapien
cctgtgggaccagttgacaagacgt

SEQ ID NO: 2158048 - DNA, 25 bp, Homo sapien
gctggaataggagttgctgccatat

SEQ ID NO: 2158049 - DNA, 25 bp, Homo sapien
tactcatgggtgaaataccagtgtc

SEQ ID NO: 2158050 - DNA, 25 bp, Homo sapien
tgtctgtcatattaatacgccgtgg

SEQ ID NO: 2158051 - DNA, 25 bp, Homo sapien
cgccgtggtcgaagagtcaacaaca

SEQ ID NO: 2158052 - DNA, 25 bp, Homo sapien
gggtgaaataccagtgtctgtcata

SEQ ID NO: 2158053 - DNA, 25 bp, Homo sapien
cttctcctcagggacattgtaagtg

SEQ ID NO: 2158054 - DNA, 25 bp, Homo sapien
cattaataagccctgttgaagcagt

SEQ ID NO: 2158055 - DNA, 25 bp, Homo sapien
tcctcagggacattgtaagtgatgg

SEQ ID NO: 2158056 - DNA, 25 bp, Homo sapien
tctcctcagggacattgtaagtgat

SEQ ID NO: 2158057 - DNA, 25 bp, Homo sapien
caggccattggtgctgatggctgga

SEQ ID NO: 2158058 - DNA, 25 bp, Homo sapien
acaggccattggtgctgatggctgg

SEQ ID NO: 2158059 - DNA, 25 bp, Homo sapien
ggccattggtgctgatggctggagt

SEQ ID NO: 2158060 - DNA, 25 bp, Homo sapien
ccattggtgctgatggctggagtac

SEQ ID NO: 2158061 - DNA, 25 bp, Homo sapien
caatacgttattaggttgcggttgg

SEQ ID NO: 2158062 - DNA, 25 bp, Homo sapien
tcatgcccggaataccagttgctgt

SEQ ID NO: 2158063 - DNA, 25 bp, Homo sapien
ttgacaatacgttattaggttgcgg

SEQ ID NO: 2158064 - DNA, 25 bp, Homo sapien
tattcatgcccggaataccagttgc

SEQ ID NO: 2158065 - DNA, 25 bp, Homo sapien
gctgttgccaaataagcaagccctg

SEQ ID NO: 2158066 - DNA, 25 bp, Homo sapien
ccctggtagaacagttgacaaggcg

SEQ ID NO: 2158067 - DNA, 25 bp, Homo sapien
tgacaaggcgttactaggtagtggt

SEQ ID NO: 2158068 - DNA, 25 bp, Homo sapien
catggctggcatatcagctgttgcc

SEQ ID NO: 2158069 - DNA, 25 bp, Homo sapien
agctcctgccaagttaataagctct

SEQ ID NO: 2158070 - DNA, 25 bp, Homo sapien
aataagctctggtgtaacagctgac

SEQ ID NO: 2158071 - DNA, 25 bp, Homo sapien
tatcaggggttggttggctgttatc

SEQ ID NO: 2158072 - DNA, 25 bp, Homo sapien
ctttcttctcttcacgcagattgtg

SEQ ID NO: 2158073 - DNA, 25 bp, Homo sapien
caagacgttatcctgttttcgttgg

SEQ ID NO: 2158074 - DNA, 25 bp, Homo sapien
aactcattgctggaatactagctcc

SEQ ID NO: 2158075 - DNA, 25 bp, Homo sapien
cagatccctggaactcattgctgga

SEQ ID NO: 2158076 - DNA, 25 bp, Homo sapien
ccctggaactcattgctggaatact

SEQ ID NO: 2158077 - DNA, 25 bp, Homo sapien
cacgaacactgtgagtaatggtagc

SEQ ID NO: 2158078 - DNA, 25 bp, Homo sapien
caagctgtggtgcatcatttgatat

SEQ ID NO: 2158079 - DNA, 25 bp, Homo sapien
ccaagctgtggtgcatcatttgata

SEQ ID NO: 2158080 - DNA, 25 bp, Homo sapien
ttcacgaacactgtgagtaatggta

SEQ ID NO: 2158081 - DNA, 25 bp, Homo sapien
acagatccttggtactcatggatgg

SEQ ID NO: 2158082 - DNA, 25 bp, Homo sapien
tccttggtactcatggatggaatac

SEQ ID NO: 2158083 - DNA, 25 bp, Homo sapien
gatccttggtactcatggatggaat

SEQ ID NO: 2158084 - DNA, 25 bp, Homo sapien
ttggtactcatggatggaataccac

SEQ ID NO: 2158085 - DNA, 25 bp, Homo sapien
cagttgacaagtcataactaggttg

SEQ ID NO: 2158086 - DNA, 25 bp, Homo sapien
agaacagttgacaagtcataactag

SEQ ID NO: 2158087 - DNA, 25 bp, Homo sapien
cataactaggttgtggttggttatt

SEQ ID NO: 2158088 - DNA, 25 bp, Homo sapien
caagtcataactaggttgtggttgg

SEQ ID NO: 2158089 - DNA, 25 bp, Homo sapien
gctggtggaacagtcgagaagacat

SEQ ID NO: 2158090 - DNA, 25 bp, Homo sapien
tcgagaagacattatcggatgctgc

SEQ ID NO: 2158091 - DNA, 25 bp, Homo sapien
agacattatcggatgctgcttggcc

SEQ ID NO: 2158092 - DNA, 25 bp, Homo sapien
tggaacagtcgagaagacattatcg

SEQ ID NO: 2158093 - DNA, 25 bp, Homo sapien
ttatcttctcttcacggatgttgtg

SEQ ID NO: 2158094 - DNA, 25 bp, Homo sapien
tcacggatgttgtgagtgactgcag

SEQ ID NO: 2158095 - DNA, 25 bp, Homo sapien
tatttatcttctcttcacggatgtt

SEQ ID NO: 2158096 - DNA, 25 bp, Homo sapien
caggtgctggttggctgttatttat

SEQ ID NO: 2158097 - DNA, 25 bp, Homo sapien
aagccatggaggagcagttgacaag

SEQ ID NO: 2158098 - DNA, 25 bp, Homo sapien
ccagctgctgccatatgacgaagcc

SEQ ID NO: 2158099 - DNA, 25 bp, Homo sapien
gccatatgacgaagccatggaggag

SEQ ID NO: 2158100 - DNA, 25 bp, Homo sapien
tggtaatcgtggatgaaattccagc

SEQ ID NO: 2158101 - DNA, 25 bp, Homo sapien
ccaggtggaaccgttgacaaggagt

SEQ ID NO: 2158102 - DNA, 25 bp, Homo sapien
caggtggaaccgttgacaaggagtt

SEQ ID NO: 2158103 - DNA, 25 bp, Homo sapien
agatccctggtacttctgcatgaaa

SEQ ID NO: 2158104 - DNA, 25 bp, Homo sapien
tccctggtacttctgcatgaaatac

SEQ ID NO: 2158105 - DNA, 25 bp, Homo sapien
cagatccctggtacttctgcatgaa

SEQ ID NO: 2158106 - DNA, 25 bp, Homo sapien
gatccctggtacttctgcatgaaat

SEQ ID NO: 2158107 - DNA, 25 bp, Homo sapien
cacagtttccaccaaagacattact

SEQ ID NO: 2158108 - DNA, 25 bp, Homo sapien
tcaggaggggtttgatcattttcca

SEQ ID NO: 2158109 - DNA, 25 bp, Homo sapien
catggcaggagatatttgtggtgta

SEQ ID NO: 2158110 - DNA, 25 bp, Homo sapien
ttgtggtgtatttggcacagtttcc

SEQ ID NO: 2158111 - DNA, 25 bp, Homo sapien
caagcaaaatgaaaattctttcata

SEQ ID NO: 2158112 - DNA, 25 bp, Homo sapien
ttcaagcaaaatgaaaattctttca

SEQ ID NO: 2158113 - DNA, 25 bp, Homo sapien
cttcaagcaaaatgaaaattctttc

SEQ ID NO: 2158114 - DNA, 25 bp, Homo sapien
agcaaaatgaaaattctttcataat

SEQ ID NO: 2158115 - DNA, 25 bp, Homo sapien
ttgactttcatagatccttgtacct

SEQ ID NO: 2158116 - DNA, 25 bp, Homo sapien
ttgtctcttgactttcatagatcct

SEQ ID NO: 2158117 - DNA, 25 bp, Homo sapien
ctcttgactttcatagatccttgta

SEQ ID NO: 2158118 - DNA, 25 bp, Homo sapien
ttccttgatggtaaattcaacaaat

SEQ ID NO: 2158119 - DNA, 25 bp, Homo sapien
gaggatacctacaggatctatgaga

SEQ ID NO: 2158120 - DNA, 25 bp, Homo sapien
gataaatttggaagcctccatggta

SEQ ID NO: 2158121 - DNA, 25 bp, Homo sapien
gaatttaccatctacatgcaaacag

SEQ ID NO: 2158122 - DNA, 25 bp, Homo sapien
aaagaggtattccattcaccagagg

SEQ ID NO: 2158123 - DNA, 25 bp, Homo sapien
gatggcagtgggaatctatttcttt

SEQ ID NO: 2158124 - DNA, 25 bp, Homo sapien
aatctatttctttaagcgccttctc

SEQ ID NO: 2158125 - DNA, 25 bp, Homo sapien
tctatttctttaagcgccttctcga

SEQ ID NO: 2158126 - DNA, 25 bp, Homo sapien
tgagatggcagtgggaatctatttc

SEQ ID NO: 2158127 - DNA, 25 bp, Homo sapien
atcctacagcatatgtccttgtttc

SEQ ID NO: 2158128 - DNA, 25 bp, Homo sapien
tcatttcaggattatagggagcttc

SEQ ID NO: 2158129 - DNA, 25 bp, Homo sapien
catcctacagcatatgtccttgttt

SEQ ID NO: 2158130 - DNA, 25 bp, Homo sapien
ccatcctacagcatatgtccttgtt

SEQ ID NO: 2158131 - DNA, 25 bp, Homo sapien
gaagaaaaggagatacaaagaggag

SEQ ID NO: 2158132 - DNA, 25 bp, Homo sapien
ggaagaaaaggagatacaaagagga

SEQ ID NO: 2158133 - DNA, 25 bp, Homo sapien
aaaggagatacaaagaggaggtttg

SEQ ID NO: 2158134 - DNA, 25 bp, Homo sapien
gatacaaagaggaggtttgggcctc

SEQ ID NO: 2158135 - DNA, 25 bp, Homo sapien
gagagcctagagtccaagaaggagg

SEQ ID NO: 2158136 - DNA, 25 bp, Homo sapien
aaggccagagcttgctagcaggtcc

SEQ ID NO: 2158137 - DNA, 25 bp, Homo sapien
tagcaggtcctagagcctcaatatt

SEQ ID NO: 2158138 - DNA, 25 bp, Homo sapien
agaaggaggcttactagaagagtcc

SEQ ID NO: 2158139 - DNA, 25 bp, Homo sapien
tgctccatggcggacatctctgtac

SEQ ID NO: 2158140 - DNA, 25 bp, Homo sapien
ttaaatcgggctgccttcctgcctc

SEQ ID NO: 2158141 - DNA, 25 bp, Homo sapien
caaagtgcatgtttccctgtccaca

SEQ ID NO: 2158142 - DNA, 25 bp, Homo sapien
tgcagagcatcttaaatcgggctgc

SEQ ID NO: 2158143 - DNA, 25 bp, Homo sapien
atctttctgtccttcacggtgcttc

SEQ ID NO: 2158144 - DNA, 25 bp, Homo sapien
tttctatttccatgctgattgtttc

SEQ ID NO: 2158145 - DNA, 25 bp, Homo sapien
tcttcatctttctgtccttcacggt

SEQ ID NO: 2158146 - DNA, 25 bp, Homo sapien
catgcagatgaatttctatttccat

SEQ ID NO: 2158147 - DNA, 25 bp, Homo sapien
tagttactgccaaattgtcctctag

SEQ ID NO: 2158148 - DNA, 25 bp, Homo sapien
tcaaacactgataggctctttaggt

SEQ ID NO: 2158149 - DNA, 25 bp, Homo sapien
tacagtgtacctagcaatacaattg

SEQ ID NO: 2158150 - DNA, 25 bp, Homo sapien
ttaccaaacccatgccaatactggg

SEQ ID NO: 2158151 - DNA, 25 bp, Homo sapien
cagccaaatactgtgcagccgcaga

SEQ ID NO: 2158152 - DNA, 25 bp, Homo sapien
gaacgactcacttaataaccaggga

SEQ ID NO: 2158153 - DNA, 25 bp, Homo sapien
gatttggatgcgttgtaacactgct

SEQ ID NO: 2158154 - DNA, 25 bp, Homo sapien
tctcagtggcttgacagcatcttcc

SEQ ID NO: 2158155 - DNA, 25 bp, Homo sapien
tttggtttgttacgccagcccagtc

SEQ ID NO: 2158156 - DNA, 25 bp, Homo sapien
tggtaacacatagccccaaagcatg

SEQ ID NO: 2158157 - DNA, 25 bp, Homo sapien
gcccagtctgtctgcggaacactga

SEQ ID NO: 2158158 - DNA, 25 bp, Homo sapien
gaacactgactctgctctctaatga

SEQ ID NO: 2158159 - DNA, 25 bp, Homo sapien
gcttcagaagtacttgccagttttt

SEQ ID NO: 2158160 - DNA, 25 bp, Homo sapien
gacttccctgatgagaccaaaatgg

SEQ ID NO: 2158161 - DNA, 25 bp, Homo sapien
gtgtcccctaaaaagtggctctgct

SEQ ID NO: 2158162 - DNA, 25 bp, Homo sapien
taccttctaccatcagctgtcttgt

SEQ ID NO: 2158163 - DNA, 25 bp, Homo sapien
tagagaggcctccatagcgcaggtt

SEQ ID NO: 2158164 - DNA, 25 bp, Homo sapien
caggttcgtgggttctcgcggacct

SEQ ID NO: 2158165 - DNA, 25 bp, Homo sapien
cccgctttcgcctcttcgtttatga

SEQ ID NO: 2158166 - DNA, 25 bp, Homo sapien
tttatgactccgttgggctccggcc

SEQ ID NO: 2158167 - DNA, 25 bp, Homo sapien
cattttacccggatcagagatagag

SEQ ID NO: 2158168 - DNA, 25 bp, Homo sapien
tttgcgcgaatctttctccaggacc

SEQ ID NO: 2158169 - DNA, 25 bp, Homo sapien
gaccttaaaatggtttactgagcac

SEQ ID NO: 2158170 - DNA, 25 bp, Homo sapien
gacaaggcaagaaggctgcgttatt

SEQ ID NO: 2158171 - DNA, 25 bp, Homo sapien
aggagcaaccaaaggggccgcatga

SEQ ID NO: 2158172 - DNA, 25 bp, Homo sapien
tgcgggctcggggactgctgccgac

SEQ ID NO: 2158173 - DNA, 25 bp, Homo sapien
gactgctgccgacgccacggcggag

SEQ ID NO: 2158174 - DNA, 25 bp, Homo sapien
acggcggaggggtgcccgccgccag

SEQ ID NO: 2158175 - DNA, 25 bp, Homo sapien
taaatcatagccaggccggtttcgt

SEQ ID NO: 2158176 - DNA, 25 bp, Homo sapien
cggtggctctcctcggcttgcttct

SEQ ID NO: 2158177 - DNA, 25 bp, Homo sapien
acgatctcctcgtccatggctctag

SEQ ID NO: 2158178 - DNA, 25 bp, Homo sapien
atagccaggccggtttcgtgcagga

SEQ ID NO: 2158179 - DNA, 25 bp, Homo sapien
gagccgaacgtaggccgagcagggc

SEQ ID NO: 2158180 - DNA, 25 bp, Homo sapien
aggggagccgaacgtaggccgagca

SEQ ID NO: 2158181 - DNA, 25 bp, Homo sapien
ggaggcgaagcagccggcgggcaga

SEQ ID NO: 2158182 - DNA, 25 bp, Homo sapien
gcagaggaggcgaagcagccggcgg

SEQ ID NO: 2158183 - DNA, 25 bp, Homo sapien
aaatggatcgcaatggtgtctcccc

SEQ ID NO: 2158184 - DNA, 25 bp, Homo sapien
taaaggtcgactctggctccaaaag

SEQ ID NO: 2158185 - DNA, 25 bp, Homo sapien
tttgcaacctcgaaaggacagggcg

SEQ ID NO: 2158186 - DNA, 25 bp, Homo sapien
ccaaaagaacgccagattctgggca

SEQ ID NO: 2158187 - DNA, 25 bp, Homo sapien
aagaacaacataagctcttcttgcc

SEQ ID NO: 2158188 - DNA, 25 bp, Homo sapien
cttcttgccgacagagaccacttct

SEQ ID NO: 2158189 - DNA, 25 bp, Homo sapien
aaagaacaacataagctcttcttgc

SEQ ID NO: 2158190 - DNA, 25 bp, Homo sapien
gctcttcttgccgacagagaccact

SEQ ID NO: 2158191 - DNA, 25 bp, Homo sapien
gctcagggtcacattatttacatca

SEQ ID NO: 2158192 - DNA, 25 bp, Homo sapien
gaatgccataccgaagcacaaggcc

SEQ ID NO: 2158193 - DNA, 25 bp, Homo sapien
tacatcactcggaacatgaatgcca

SEQ ID NO: 2158194 - DNA, 25 bp, Homo sapien
aggtagttggacttgactgcacttc

SEQ ID NO: 2158195 - DNA, 25 bp, Homo sapien
tctcctttcagcatatactcataaa

SEQ ID NO: 2158196 - DNA, 25 bp, Homo sapien
tttcattatcttgaacattattgag

SEQ ID NO: 2158197 - DNA, 25 bp, Homo sapien
gttcatgtgaactaatctctccttt

SEQ ID NO: 2158198 - DNA, 25 bp, Homo sapien
ttgagttcatgtgaactaatctctc

SEQ ID NO: 2158199 - DNA, 25 bp, Homo sapien
tttcaggctataacctgcataaaat

SEQ ID NO: 2158200 - DNA, 25 bp, Homo sapien
tgcataaaatatgataggaggaagt

SEQ ID NO: 2158201 - DNA, 25 bp, Homo sapien
ccttttcaggctataacctgcataa

SEQ ID NO: 2158202 - DNA, 25 bp, Homo sapien
gcataaaatatgataggaggaagta

SEQ ID NO: 2158203 - DNA, 25 bp, Homo sapien
tgttccaagaaaagcgtatgctagg

SEQ ID NO: 2158204 - DNA, 25 bp, Homo sapien
taggatagacccaagatttcgaaaa

SEQ ID NO: 2158205 - DNA, 25 bp, Homo sapien
gaaaagcgtatgctaggatagaccc

SEQ ID NO: 2158206 - DNA, 25 bp, Homo sapien
gcgtatgctaggatagacccaagat

SEQ ID NO: 2158207 - DNA, 25 bp, Homo sapien
gttgctgatacaatggcaccaaaca

SEQ ID NO: 2158208 - DNA, 25 bp, Homo sapien
gatcagttgctgatacaatggcacc

SEQ ID NO: 2158209 - DNA, 25 bp, Homo sapien
gcaagttgtcccgttaccttcatca

SEQ ID NO: 2158210 - DNA, 25 bp, Homo sapien
tcatcagcgttacacagccatacat

SEQ ID NO: 2158211 - DNA, 25 bp, Homo sapien
ttctaagagcaagctaacaatggta

SEQ ID NO: 2158212 - DNA, 25 bp, Homo sapien
caaaagatatttgcttgggctattc

SEQ ID NO: 2158213 - DNA, 25 bp, Homo sapien
ttctactacaaagcattgcagctgg

SEQ ID NO: 2158214 - DNA, 25 bp, Homo sapien
agaaggagagtagagcaatagtgca

SEQ ID NO: 2158215 - DNA, 25 bp, Homo sapien
gacagagttttaccgtgttagtcag

SEQ ID NO: 2158216 - DNA, 25 bp, Homo sapien
agagacagagttttaccgtgttagt

SEQ ID NO: 2158217 - DNA, 25 bp, Homo sapien
agacagagttttaccgtgttagtca

SEQ ID NO: 2158218 - DNA, 25 bp, Homo sapien
gagacagagttttaccgtgttagtc

SEQ ID NO: 2158219 - DNA, 25 bp, Homo sapien
acagcatcattgaggacactttcac

SEQ ID NO: 2158220 - DNA, 25 bp, Homo sapien
tcgtggaatatagcaagaacagtca

SEQ ID NO: 2158221 - DNA, 25 bp, Homo sapien
ggcaacagcatcattgaggacactt

SEQ ID NO: 2158222 - DNA, 25 bp, Homo sapien
gcatagagttcaacatcaacttgaa

SEQ ID NO: 2158223 - DNA, 25 bp, Homo sapien
acatatatataaagggtcccactac

SEQ ID NO: 2158224 - DNA, 25 bp, Homo sapien
cccactaccataaatgagatctgat

SEQ ID NO: 2158225 - DNA, 25 bp, Homo sapien
taaagggtcccactaccataaatga

SEQ ID NO: 2158226 - DNA, 25 bp, Homo sapien
gagatctgatttcattataacatga

SEQ ID NO: 2158227 - DNA, 25 bp, Homo sapien
ttggcaacggtgcttaccgttacta

SEQ ID NO: 2158228 - DNA, 25 bp, Homo sapien
tagaaatgcctgagaaaattgctgt

SEQ ID NO: 2158229 - DNA, 25 bp, Homo sapien
tgcttaccgttactaaatcagttct

SEQ ID NO: 2158230 - DNA, 25 bp, Homo sapien
aatagaaatgcctgagaaaattgct

SEQ ID NO: 2158231 - DNA, 25 bp, Homo sapien
tgaacatcgctgtgacatcaaaggt

SEQ ID NO: 2158232 - DNA, 25 bp, Homo sapien
gcacccattgcaaaagatccactga

SEQ ID NO: 2158233 - DNA, 25 bp, Homo sapien
caaggaagatcccaatagacttgaa

SEQ ID NO: 2158234 - DNA, 25 bp, Homo sapien
catcaaaggtgtgactgttgtctcc

SEQ ID NO: 2158235 - DNA, 25 bp, Homo sapien
cattcggcgtcgctgttgtacattt

SEQ ID NO: 2158236 - DNA, 25 bp, Homo sapien
ggcgtcgctgttgtacatttcctat

SEQ ID NO: 2158237 - DNA, 25 bp, Homo sapien
acattttgttcattcggcgtcgctg

SEQ ID NO: 2158238 - DNA, 25 bp, Homo sapien
tgttcattcggcgtcgctgttgtac

SEQ ID NO: 2158239 - DNA, 25 bp, Homo sapien
ctccaacaactggaactcccgtaat

SEQ ID NO: 2158240 - DNA, 25 bp, Homo sapien
caactggaactcccgtaatttggtg

SEQ ID NO: 2158241 - DNA, 25 bp, Homo sapien
caacaactggaactcccgtaatttg

SEQ ID NO: 2158242 - DNA, 25 bp, Homo sapien
tgtttagttctatgctgagactccg

SEQ ID NO: 2158243 - DNA, 25 bp, Homo sapien
tgctgagactccgtggacaaattat

SEQ ID NO: 2158244 - DNA, 25 bp, Homo sapien
gccacaaaacaatactgcaactaca

SEQ ID NO: 2158245 - DNA, 25 bp, Homo sapien
gactccgtggacaaattattatacg

SEQ ID NO: 2158246 - DNA, 25 bp, Homo sapien
taaacatgagaggatttgcaggcca

SEQ ID NO: 2158247 - DNA, 25 bp, Homo sapien
cagagtcccagctttactttgcaac

SEQ ID NO: 2158248 - DNA, 25 bp, Homo sapien
caaactttcccatgaatggccagag

SEQ ID NO: 2158249 - DNA, 25 bp, Homo sapien
catgcttagctcactggcaagggcc

SEQ ID NO: 2158250 - DNA, 25 bp, Homo sapien
ctagcatagagtgcttcgtgagaac

SEQ ID NO: 2158251 - DNA, 25 bp, Homo sapien
gtgggtcttcctctcgtatagggag

SEQ ID NO: 2158252 - DNA, 25 bp, Homo sapien
tgagaactctcgtactcccagcttg

SEQ ID NO: 2158253 - DNA, 25 bp, Homo sapien
agggagtaagcgtcctacagatagg

SEQ ID NO: 2158254 - DNA, 25 bp, Homo sapien
tggaaggtgaacagtgtcagcccca

SEQ ID NO: 2158255 - DNA, 25 bp, Homo sapien
tacaaatgttgggttaaagacatgg

SEQ ID NO: 2158256 - DNA, 25 bp, Homo sapien
caaatgttgggttaaagacatggtt

SEQ ID NO: 2158257 - DNA, 25 bp, Homo sapien
ctggaaggtgaacagtgtcagcccc

SEQ ID NO: 2158258 - DNA, 25 bp, Homo sapien
ggacaaggggtaaatattggcagct

SEQ ID NO: 2158259 - DNA, 25 bp, Homo sapien
gaaaatttgatccaatcttacttct

SEQ ID NO: 2158260 - DNA, 25 bp, Homo sapien
tgttgaaaatttgatccaatcttac

SEQ ID NO: 2158261 - DNA, 25 bp, Homo sapien
aggggtaaatattggcagctcttcc

SEQ ID NO: 2158262 - DNA, 25 bp, Homo sapien
cagtatctcgaatggccaaggcaaa

SEQ ID NO: 2158263 - DNA, 25 bp, Homo sapien
caatcagaagcgtggtgctgaacat

SEQ ID NO: 2158264 - DNA, 25 bp, Homo sapien
gctgaacatcatttgccgtgcataa

SEQ ID NO: 2158265 - DNA, 25 bp, Homo sapien
agcatgacagcattgcagtggtgcc

SEQ ID NO: 2158266 - DNA, 25 bp, Homo sapien
ttcttggtctgaatcaacaccaacc

SEQ ID NO: 2158267 - DNA, 25 bp, Homo sapien
agtgttcttggtctgaatcaacacc

SEQ ID NO: 2158268 - DNA, 25 bp, Homo sapien
caagtgttcttggtctgaatcaaca

SEQ ID NO: 2158269 - DNA, 25 bp, Homo sapien
tgttcttggtctgaatcaacaccaa

SEQ ID NO: 2158270 - DNA, 25 bp, Homo sapien
tcaacgtgtcacgtgtcatgtatca

SEQ ID NO: 2158271 - DNA, 25 bp, Homo sapien
gtcacgtgtcatgtatcaacttata

SEQ ID NO: 2158272 - DNA, 25 bp, Homo sapien
catgtatcaacttatatataacaca

SEQ ID NO: 2158273 - DNA, 25 bp, Homo sapien
tgcttcaacgtgtcacgtgtcatgt

SEQ ID NO: 2158274 - DNA, 25 bp, Homo sapien
tctgctttggtagttctcctttcat

SEQ ID NO: 2158275 - DNA, 25 bp, Homo sapien
ctgctttggtagttctcctttcatt

SEQ ID NO: 2158276 - DNA, 25 bp, Homo sapien
ctggtgaggcacctggcgatgggtc

SEQ ID NO: 2158277 - DNA, 25 bp, Homo sapien
ggcacctggcgatgggtccacagca

SEQ ID NO: 2158278 - DNA, 25 bp, Homo sapien
agcggaggcccgctgtgggtcagca

SEQ ID NO: 2158279 - DNA, 25 bp, Homo sapien
gcagggagtgttgttgtcagcggag

SEQ ID NO: 2158280 - DNA, 25 bp, Homo sapien
gggttcagaatcatccattggaaga

SEQ ID NO: 2158281 - DNA, 25 bp, Homo sapien
tgcaagctcccgatccaaggcatct

SEQ ID NO: 2158282 - DNA, 25 bp, Homo sapien
tggatgtggccggttcagtgttcac

SEQ ID NO: 2158283 - DNA, 25 bp, Homo sapien
caggcgtgttcctcgaatgaccagt

SEQ ID NO: 2158284 - DNA, 25 bp, Homo sapien
gctaagccggctagatgtgactcct

SEQ ID NO: 2158285 - DNA, 25 bp, Homo sapien
gatccagtctacagagtgcaaccag

SEQ ID NO: 2158286 - DNA, 25 bp, Homo sapien
tcaaagctgccacgaaagggtacaa

SEQ ID NO: 2158287 - DNA, 25 bp, Homo sapien
tacacctgtactttggctaagccgg

SEQ ID NO: 2158288 - DNA, 25 bp, Homo sapien
actgtgactcaaatactgtgagtgg

SEQ ID NO: 2158289 - DNA, 25 bp, Homo sapien
ttccactaggtatataggtagaaaa

SEQ ID NO: 2158290 - DNA, 25 bp, Homo sapien
gaagtcagcactctttacgtctcac

SEQ ID NO: 2158291 - DNA, 25 bp, Homo sapien
ttacgtctcactaaaataaactgtg

SEQ ID NO: 2158292 - DNA, 25 bp, Homo sapien
tgctttgggccttgagacttcagtc

SEQ ID NO: 2158293 - DNA, 25 bp, Homo sapien
tgctttgagccgatggtggcaccag

SEQ ID NO: 2158294 - DNA, 25 bp, Homo sapien
tgtcaaccacatcagagcagtttca

SEQ ID NO: 2158295 - DNA, 25 bp, Homo sapien
gcacaaagggaagtcgaggtcctca

SEQ ID NO: 2158296 - DNA, 25 bp, Homo sapien
ggcaggcctgctgcctagagagtac

SEQ ID NO: 2158297 - DNA, 25 bp, Homo sapien
cgggttgggctctgacggcaggcct

SEQ ID NO: 2158298 - DNA, 25 bp, Homo sapien
caggcctgctgcctagagagtacat

SEQ ID NO: 2158299 - DNA, 25 bp, Homo sapien
ggttgggctctgacggcaggcctgc

SEQ ID NO: 2158300 - DNA, 25 bp, Homo sapien
tcagtgaagcaactgtgagctcata

SEQ ID NO: 2158301 - DNA, 25 bp, Homo sapien
catcgagtttagtgggaagtatata

SEQ ID NO: 2158302 - DNA, 25 bp, Homo sapien
aaacagatctgagcaagtccccgct

SEQ ID NO: 2158303 - DNA, 25 bp, Homo sapien
gagtcctgcatctcagactctggca

SEQ ID NO: 2158304 - DNA, 25 bp, Homo sapien
gctcccctccaccccgattcctcat

SEQ ID NO: 2158305 - DNA, 25 bp, Homo sapien
tgactttgtccttggaacccagttg

SEQ ID NO: 2158306 - DNA, 25 bp, Homo sapien
cttgcaataagttttgactttgtcc

SEQ ID NO: 2158307 - DNA, 25 bp, Homo sapien
atgtcttgcaataagttttgacttt

SEQ ID NO: 2158308 - DNA, 25 bp, Homo sapien
ccttggtgaccaggaacccaataca

SEQ ID NO: 2158309 - DNA, 25 bp, Homo sapien
gaacccaatacagccaactcgttta

SEQ ID NO: 2158310 - DNA, 25 bp, Homo sapien
tacagccaactcgtttactctggcc

SEQ ID NO: 2158311 - DNA, 25 bp, Homo sapien
gaccaggaacccaatacagccaact

SEQ ID NO: 2158312 - DNA, 25 bp, Homo sapien
caacataatcaatgccggaatcacc

SEQ ID NO: 2158313 - DNA, 25 bp, Homo sapien
gaatgagaagggaacatgtagacca

SEQ ID NO: 2158314 - DNA, 25 bp, Homo sapien
caatgccggaatcaccccatttgat

SEQ ID NO: 2158315 - DNA, 25 bp, Homo sapien
ggactccacaacataatcaatgccg

SEQ ID NO: 2158316 - DNA, 25 bp, Homo sapien
tgatgacccttttggctccccccac

SEQ ID NO: 2158317 - DNA, 25 bp, Homo sapien
agatgatgacccttttggctccccc

SEQ ID NO: 2158318 - DNA, 25 bp, Homo sapien
ttggggccatcagcagagggggcag

SEQ ID NO: 2158319 - DNA, 25 bp, Homo sapien
agggggcagagatgatgaccctttt

SEQ ID NO: 2158320 - DNA, 25 bp, Homo sapien
agatgcctgcctcaccactttcttg

SEQ ID NO: 2158321 - DNA, 25 bp, Homo sapien
cagaaggcaggtcaggtgatgatct

SEQ ID NO: 2158322 - DNA, 25 bp, Homo sapien
tgggtacttctcatggtttatgtcc

SEQ ID NO: 2158323 - DNA, 25 bp, Homo sapien
ttggccggggggctaatcatcttgt

SEQ ID NO: 2158324 - DNA, 25 bp, Homo sapien
gacgccaaccccagcatcgaaaatt

SEQ ID NO: 2158325 - DNA, 25 bp, Homo sapien
tgaatattgagtgttgctgttaaag

SEQ ID NO: 2158326 - DNA, 25 bp, Homo sapien
gtcaaaagatacaacctggtgctca

SEQ ID NO: 2158327 - DNA, 25 bp, Homo sapien
gacaaagtggtcgttcaaggtgacg

SEQ ID NO: 2158328 - DNA, 25 bp, Homo sapien
tagtgacatccaatgacaacttctt

SEQ ID NO: 2158329 - DNA, 25 bp, Homo sapien
gatggacgccgttgacactagtgac

SEQ ID NO: 2158330 - DNA, 25 bp, Homo sapien
tatatcttgtatactcaggaggatg

SEQ ID NO: 2158331 - DNA, 25 bp, Homo sapien
tcagaggagacctgtttatatcttg

SEQ ID NO: 2158332 - DNA, 25 bp, Homo sapien
gacaagcaggagattctggtccaat

SEQ ID NO: 2158333 - DNA, 25 bp, Homo sapien
agacaagcaggagattctggtccaa

SEQ ID NO: 2158334 - DNA, 25 bp, Homo sapien
acaagcaggagattctggtccaatc

SEQ ID NO: 2158335 - DNA, 25 bp, Homo sapien
tgccgataggtaatcgtgacatacc

SEQ ID NO: 2158336 - DNA, 25 bp, Homo sapien
cagttctcccgtggcatttggtcat

SEQ ID NO: 2158337 - DNA, 25 bp, Homo sapien
tctttgaagccgttcctgaccaact

SEQ ID NO: 2158338 - DNA, 25 bp, Homo sapien
tggtcatttggttcatgccgatagg

SEQ ID NO: 2158339 - DNA, 25 bp, Homo sapien
cttgcagcggcgccgaaaggcccac

SEQ ID NO: 2158340 - DNA, 25 bp, Homo sapien
cccggtggcttgcagcggcgccgaa

SEQ ID NO: 2158341 - DNA, 25 bp, Homo sapien
cacgccgtttcggcctccgacttcg

SEQ ID NO: 2158342 - DNA, 25 bp, Homo sapien
ctgcgcactccctgaaaagcggccc

SEQ ID NO: 2158343 - DNA, 25 bp, Homo sapien
gcggctgcggactgagccccctccg

SEQ ID NO: 2158344 - DNA, 25 bp, Homo sapien
gcggtggatgtagggcgcgggaggg

SEQ ID NO: 2158345 - DNA, 25 bp, Homo sapien
gggatgctcgcccgcgcagctgtct

SEQ ID NO: 2158346 - DNA, 25 bp, Homo sapien
cccctccgccgggcggtggatgtag

SEQ ID NO: 2158347 - DNA, 25 bp, Homo sapien
gggacctcgcactcgcagtccctcg

SEQ ID NO: 2158348 - DNA, 25 bp, Homo sapien
cctcgtcccgcaccccgcagcccgg

SEQ ID NO: 2158349 - DNA, 25 bp, Homo sapien
caggggggacctcgcactcgcagtc

SEQ ID NO: 2158350 - DNA, 25 bp, Homo sapien
cgcactcgcagtccctcgtcccgca

SEQ ID NO: 2158351 - DNA, 25 bp, Homo sapien
tgaaagtggctctcacacaaaagca

SEQ ID NO: 2158352 - DNA, 25 bp, Homo sapien
gagacgacgcatgccgaagtaatag

SEQ ID NO: 2158353 - DNA, 25 bp, Homo sapien
tctagaaggtgacaaacgaagggac

SEQ ID NO: 2158354 - DNA, 25 bp, Homo sapien
tcaaagacggtcataacacagccca

SEQ ID NO: 2158355 - DNA, 25 bp, Homo sapien
tacaggaggaatgcagcagggcaca

SEQ ID NO: 2158356 - DNA, 25 bp, Homo sapien
gaggaatgcagcagggcacagctct

SEQ ID NO: 2158357 - DNA, 25 bp, Homo sapien
aggaggaatgcagcagggcacagct

SEQ ID NO: 2158358 - DNA, 25 bp, Homo sapien
ctacaggaggaatgcagcagggcac

SEQ ID NO: 2158359 - DNA, 25 bp, Homo sapien
tacaggaggaatgcagcagggcaca

SEQ ID NO: 2158360 - DNA, 25 bp, Homo sapien
cagggcacagctcttcacagcaggg

SEQ ID NO: 2158361 - DNA, 25 bp, Homo sapien
cagcagggcacagctcttcacagca

SEQ ID NO: 2158362 - DNA, 25 bp, Homo sapien
ctacaggaggaatgcagcagggcac

SEQ ID NO: 2158363 - DNA, 25 bp, Homo sapien
tcatcccaggacgagggttctgcag

SEQ ID NO: 2158364 - DNA, 25 bp, Homo sapien
gaggtgccctgtgaccgctgaagtt

SEQ ID NO: 2158365 - DNA, 25 bp, Homo sapien
gccagaatgtagagcacaagtcact

SEQ ID NO: 2158366 - DNA, 25 bp, Homo sapien
taacatttggcaatcacccgggtaa

SEQ ID NO: 2158367 - DNA, 25 bp, Homo sapien
gagttaaaggaaaactgccaagatg

SEQ ID NO: 2158368 - DNA, 25 bp, Homo sapien
aaagtcaacttcctatgaaatggct

SEQ ID NO: 2158369 - DNA, 25 bp, Homo sapien
tagagttaaaggaaaactgccaaga

SEQ ID NO: 2158370 - DNA, 25 bp, Homo sapien
gaaatggctcatggtaacacattct

SEQ ID NO: 2158371 - DNA, 25 bp, Homo sapien
atggttgaaaacaacttccaaggtg

SEQ ID NO: 2158372 - DNA, 25 bp, Homo sapien
tggttgaaaacaacttccaaggtgc

SEQ ID NO: 2158373 - DNA, 25 bp, Homo sapien
ctggatatggttgaaaacaacttcc

SEQ ID NO: 2158374 - DNA, 25 bp, Homo sapien
gatatggttgaaaacaacttccaag

SEQ ID NO: 2158375 - DNA, 25 bp, Homo sapien
gatgtgtggcagataggatgtattc

SEQ ID NO: 2158376 - DNA, 25 bp, Homo sapien
gcagataggatgtattcggcaaagg

SEQ ID NO: 2158377 - DNA, 25 bp, Homo sapien
tggcagataggatgtattcggcaaa

SEQ ID NO: 2158378 - DNA, 25 bp, Homo sapien
tgtggcagataggatgtattcggca

SEQ ID NO: 2158379 - DNA, 25 bp, Homo sapien
agcagattctattcaactgacacac

SEQ ID NO: 2158380 - DNA, 25 bp, Homo sapien
tctttgcctattaataggagcgttc

SEQ ID NO: 2158381 - DNA, 25 bp, Homo sapien
tttgcctattaataggagcgttcat

SEQ ID NO: 2158382 - DNA, 25 bp, Homo sapien
gttggcttctcaaatctttgcctat

SEQ ID NO: 2158383 - DNA, 25 bp, Homo sapien
ttggcttctcaaatctttgcctatt

SEQ ID NO: 2158384 - DNA, 25 bp, Homo sapien
caaagttgagtaccacagcctccaa

SEQ ID NO: 2158385 - DNA, 25 bp, Homo sapien
cagaccaggttgagcagtttgggcc

SEQ ID NO: 2158386 - DNA, 25 bp, Homo sapien
gcagctacacacaagcaggtattgg

SEQ ID NO: 2158387 - DNA, 25 bp, Homo sapien
gaagttaactggtgaaatctgctac

SEQ ID NO: 2158388 - DNA, 25 bp, Homo sapien
cccagcctctttgttcttatacatt

SEQ ID NO: 2158389 - DNA, 25 bp, Homo sapien
gcctctttgttcttatacattaaat

SEQ ID NO: 2158390 - DNA, 25 bp, Homo sapien
ttatacattaaattttcatggaccg

SEQ ID NO: 2158391 - DNA, 25 bp, Homo sapien
tacattaaattttcatggaccgtct

SEQ ID NO: 2158392 - DNA, 25 bp, Homo sapien
tcctactgttatggtggtaacttag

SEQ ID NO: 2158393 - DNA, 25 bp, Homo sapien
ccctttgtaacacagccaggatagg

SEQ ID NO: 2158394 - DNA, 25 bp, Homo sapien
tccctccagagttgtaactttctaa

SEQ ID NO: 2158395 - DNA, 25 bp, Homo sapien
tgtagtaatcagtaatttgtcaaga

SEQ ID NO: 2158396 - DNA, 25 bp, Homo sapien
gttcgtcaacctgtgcatggtaagg

SEQ ID NO: 2158397 - DNA, 25 bp, Homo sapien
tataggctcctccacaagttggaga

SEQ ID NO: 2158398 - DNA, 25 bp, Homo sapien
ggtaaggacagagtataggctcctc

SEQ ID NO: 2158399 - DNA, 25 bp, Homo sapien
tgtcttccctgttcgtcaacctgtg

SEQ ID NO: 2158400 - DNA, 25 bp, Homo sapien
agctgcagaaccagagtgatcctgt

SEQ ID NO: 2158401 - DNA, 25 bp, Homo sapien
gagtgatcctgttggtgtgtggtct

SEQ ID NO: 2158402 - DNA, 25 bp, Homo sapien
ggtgtgtggtctgccattagattac

SEQ ID NO: 2158403 - DNA, 25 bp, Homo sapien
tcagctgcagaaccagagtgatcct

SEQ ID NO: 2158404 - DNA, 25 bp, Homo sapien
ccatggctcagagaccaagttcagg

SEQ ID NO: 2158405 - DNA, 25 bp, Homo sapien
gaagccatggctcagagaccaagtt

SEQ ID NO: 2158406 - DNA, 25 bp, Homo sapien
atgggaagccatggctcagagacca

SEQ ID NO: 2158407 - DNA, 25 bp, Homo sapien
agcacctagaccagtcttccctcaa

SEQ ID NO: 2158408 - DNA, 25 bp, Homo sapien
aaatgtcctctcagtatatggatag

SEQ ID NO: 2158409 - DNA, 25 bp, Homo sapien
tggatttggatccaattatcctagc

SEQ ID NO: 2158410 - DNA, 25 bp, Homo sapien
gtatatggatagtcactaaaaatgg

SEQ ID NO: 2158411 - DNA, 25 bp, Homo sapien
aagtcttcaatgtcaagagtataca

SEQ ID NO: 2158412 - DNA, 25 bp, Homo sapien
tagacatgctaatgcacctggaggt

SEQ ID NO: 2158413 - DNA, 25 bp, Homo sapien
tcaacagatggagcaaagccttagc

SEQ ID NO: 2158414 - DNA, 25 bp, Homo sapien
tctgacccggcagcaaaagagcatg

SEQ ID NO: 2158415 - DNA, 25 bp, Homo sapien
gacggagctcatgagtcacggctga

SEQ ID NO: 2158416 - DNA, 25 bp, Homo sapien
gatgccagagtaggtattagacatg

SEQ ID NO: 2158417 - DNA, 25 bp, Homo sapien
tcggtgtagccctcatctgtacata

SEQ ID NO: 2158418 - DNA, 25 bp, Homo sapien
catagtagggatgccagagtaggta

SEQ ID NO: 2158419 - DNA, 25 bp, Homo sapien
gccctcgggcagctctttgactaat

SEQ ID NO: 2158420 - DNA, 25 bp, Homo sapien
tgtcagccatcattgaaggaaacaa

SEQ ID NO: 2158421 - DNA, 25 bp, Homo sapien
gaaggaaacaattgctacacatcat

SEQ ID NO: 2158422 - DNA, 25 bp, Homo sapien
aattgctacacatcatcaccatgct

SEQ ID NO: 2158423 - DNA, 25 bp, Homo sapien
gggagtgtcagccatcattgaagga

SEQ ID NO: 2158424 - DNA, 25 bp, Homo sapien
cccagccagcattttacctcttctt

SEQ ID NO: 2158425 - DNA, 25 bp, Homo sapien
ccagccagcattttacctcttcttt

SEQ ID NO: 2158426 - DNA, 25 bp, Homo sapien
taaatctccagtaacggcaagtggc

SEQ ID NO: 2158427 - DNA, 25 bp, Homo sapien
gacttgctttcttgttaagggctga

SEQ ID NO: 2158428 - DNA, 25 bp, Homo sapien
tattgtgccctcaacaaagacttgc

SEQ ID NO: 2158429 - DNA, 25 bp, Homo sapien
tatataaagttccacctaaggtgag

SEQ ID NO: 2158430 - DNA, 25 bp, Homo sapien
tatttggatcttgttgccatgagca

SEQ ID NO: 2158431 - DNA, 25 bp, Homo sapien
gcaaaggctgttgaactctcactca

SEQ ID NO: 2158432 - DNA, 25 bp, Homo sapien
agtctcactttgggttccattccca

SEQ ID NO: 2158433 - DNA, 25 bp, Homo sapien
agagagtgagctaaggaaaccacac

SEQ ID NO: 2158434 - DNA, 25 bp, Homo sapien
ggtgcccaccttgtagctggaggga

SEQ ID NO: 2158435 - DNA, 25 bp, Homo sapien
gtgcccaccttgtagctggagggac

SEQ ID NO: 2158436 - DNA, 25 bp, Homo sapien
gggatccctgcagtagtggcagtca

SEQ ID NO: 2158437 - DNA, 25 bp, Homo sapien
agtagtggcagtcaaacttctccgc

SEQ ID NO: 2158438 - DNA, 25 bp, Homo sapien
gtggtggccatccttttgcacatac

SEQ ID NO: 2158439 - DNA, 25 bp, Homo sapien
gcaagggatccctgcagtagtggca

SEQ ID NO: 2158440 - DNA, 25 bp, Homo sapien
cttggagtccgcaccgatgggcttg

SEQ ID NO: 2158441 - DNA, 25 bp, Homo sapien
agtccgcaccgatgggcttgcggca

SEQ ID NO: 2158442 - DNA, 25 bp, Homo sapien
ttggagtccgcaccgatgggcttgc

SEQ ID NO: 2158443 - DNA, 25 bp, Homo sapien
gcaccgatgggcttgcggcattcca

SEQ ID NO: 2158444 - DNA, 25 bp, Homo sapien
tcccgagtggtgcacttgttgcaca

SEQ ID NO: 2158445 - DNA, 25 bp, Homo sapien
cagaagcggttcttatagtgcacct

SEQ ID NO: 2158446 - DNA, 25 bp, Homo sapien
caggtgtcatgccagaagcggttct

SEQ ID NO: 2158447 - DNA, 25 bp, Homo sapien
gggagtcctcccgagtggtgcactt

SEQ ID NO: 2158448 - DNA, 25 bp, Homo sapien
gacattaaatcagggactgcctggc

SEQ ID NO: 2158449 - DNA, 25 bp, Homo sapien
cgttagccccaccatgataagcaag

SEQ ID NO: 2158450 - DNA, 25 bp, Homo sapien
tactacgcccaaatgagaaagcgct

SEQ ID NO: 2158451 - DNA, 25 bp, Homo sapien
tctacttgtgcttgtgccaacccag

SEQ ID NO: 2158452 - DNA, 25 bp, Homo sapien
gggaagcaattggatagccccactg

SEQ ID NO: 2158453 - DNA, 25 bp, Homo sapien
agagggaagcaattggatagcccca

SEQ ID NO: 2158454 - DNA, 25 bp, Homo sapien
gaagcaattggatagccccactgac

SEQ ID NO: 2158455 - DNA, 25 bp, Homo sapien
agcaattggatagccccactgacag

SEQ ID NO: 2158456 - DNA, 25 bp, Homo sapien
agtctttgtgccagacggtcccctt

SEQ ID NO: 2158457 - DNA, 25 bp, Homo sapien
tgttgcacttcacgcaatgcttggc

SEQ ID NO: 2158458 - DNA, 25 bp, Homo sapien
tgcacttcacgcaatgcttggcaaa

SEQ ID NO: 2158459 - DNA, 25 bp, Homo sapien
ttgcacttcacgcaatgcttggcaa

SEQ ID NO: 2158460 - DNA, 25 bp, Homo sapien
cttgttgcacttcacgcaatgcttg

SEQ ID NO: 2158461 - DNA, 25 bp, Homo sapien
tgatcctggtaagtgattcctccag

SEQ ID NO: 2158462 - DNA, 25 bp, Homo sapien
taagtgattcctccagatgtgatgg

SEQ ID NO: 2158463 - DNA, 25 bp, Homo sapien
gcggtgaaacgctgcccagccagct

SEQ ID NO: 2158464 - DNA, 25 bp, Homo sapien
tcctccacagcggtgaaacgctgcc

SEQ ID NO: 2158465 - DNA, 25 bp, Homo sapien
ggcctttgtggatgaaaccgacgac

SEQ ID NO: 2158466 - DNA, 25 bp, Homo sapien
ctggcagacttagcaaggactcttt

SEQ ID NO: 2158467 - DNA, 25 bp, Homo sapien
acatttcaaggctccccgggaagat

SEQ ID NO: 2158468 - DNA, 25 bp, Homo sapien
gttaccatgcgcaaaacctagcctg

SEQ ID NO: 2158469 - DNA, 25 bp, Homo sapien
tgagaggcaagcgtttcccgtggca

SEQ ID NO: 2158470 - DNA, 25 bp, Homo sapien
ggagctgctaagcttcgattttttc

SEQ ID NO: 2158471 - DNA, 25 bp, Homo sapien
agaaccaccacccacgagggacaag

SEQ ID NO: 2158472 - DNA, 25 bp, Homo sapien
gcttcctagctttagagactgggtg

SEQ ID NO: 2158473 - DNA, 25 bp, Homo sapien
ggctgttcgtggggtgtgcacttac

SEQ ID NO: 2158474 - DNA, 25 bp, Homo sapien
tctttgatttaggtcagggccatga

SEQ ID NO: 2158475 - DNA, 25 bp, Homo sapien
cagtttctttgatttaggtcagggc

SEQ ID NO: 2158476 - DNA, 25 bp, Homo sapien
cagggccatgacatcaaagtggcca

SEQ ID NO: 2158477 - DNA, 25 bp, Homo sapien
cgacctcccagcataaccagtttct

SEQ ID NO: 2158478 - DNA, 25 bp, Homo sapien
atgccgccgcaaccctgctgtggct

SEQ ID NO: 2158479 - DNA, 25 bp, Homo sapien
atgtaaagaccccacgttcccatgc

SEQ ID NO: 2158480 - DNA, 25 bp, Homo sapien
gggcttccctgatgtaaagacccca

SEQ ID NO: 2158481 - DNA, 25 bp, Homo sapien
tgctgtggctctcaaggacctgaga

SEQ ID NO: 2158482 - DNA, 25 bp, Homo sapien
gaaaagaaaacaagagaaacagctg

SEQ ID NO: 2158483 - DNA, 25 bp, Homo sapien
aaaagaaaacaagagaaacagctga

SEQ ID NO: 2158484 - DNA, 25 bp, Homo sapien
agaaaagaaaacaagagaaacagct

SEQ ID NO: 2158485 - DNA, 25 bp, Homo sapien
cgtgccaggattgtccttcataggc

SEQ ID NO: 2158486 - DNA, 25 bp, Homo sapien
gtgccaggattgtccttcataggcc

SEQ ID NO: 2158487 - DNA, 25 bp, Homo sapien
tcgtgccaggattgtccttcatagg

SEQ ID NO: 2158488 - DNA, 25 bp, Homo sapien
agtcgtgccaggattgtccttcata

SEQ ID NO: 2158489 - DNA, 25 bp, Homo sapien
tggcacagtcgggacaatacacttg

SEQ ID NO: 2158490 - DNA, 25 bp, Homo sapien
agctttttggcacagtcgggacaat

SEQ ID NO: 2158491 - DNA, 25 bp, Homo sapien
gcacagtcgggacaatacacttgct

SEQ ID NO: 2158492 - DNA, 25 bp, Homo sapien
ttttggcacagtcgggacaatacac

SEQ ID NO: 2158493 - DNA, 25 bp, Homo sapien
tcgttgtgacgatgttcctctgaaa

SEQ ID NO: 2158494 - DNA, 25 bp, Homo sapien
gcagacaactactacgttacaaggg

SEQ ID NO: 2158495 - DNA, 25 bp, Homo sapien
tgtgtctacacggtgggtcccagct

SEQ ID NO: 2158496 - DNA, 25 bp, Homo sapien
ctaggaatcacaacagaagggactt

SEQ ID NO: 2158497 - DNA, 25 bp, Homo sapien
ctcttgtgctgtgccgtaagggcca

SEQ ID NO: 2158498 - DNA, 25 bp, Homo sapien
caaaagacactggtgtgtggtgcta

SEQ ID NO: 2158499 - DNA, 25 bp, Homo sapien
cccaagaacacgagcctcagaggtg

SEQ ID NO: 2158500 - DNA, 25 bp, Homo sapien
tgggcaggttggatgacccaagaac

SEQ ID NO: 2158501 - DNA, 25 bp, Homo sapien
gatcagcgcattttctacgcctgtg

SEQ ID NO: 2158502 - DNA, 25 bp, Homo sapien
tcctggtatcctctacccggaggga

SEQ ID NO: 2158503 - DNA, 25 bp, Homo sapien
ccatccattgaaactgtctaccagg

SEQ ID NO: 2158504 - DNA, 25 bp, Homo sapien
caagtctggcgccaggtcctgttga

SEQ ID NO: 2158505 - DNA, 25 bp, Homo sapien
agagaaggagaagacagttgtgggt

SEQ ID NO: 2158506 - DNA, 25 bp, Homo sapien
ctttggaagagaaggagaagacagt

SEQ ID NO: 2158507 - DNA, 25 bp, Homo sapien
tttggaagagaaggagaagacagtt

SEQ ID NO: 2158508 - DNA, 25 bp, Homo sapien
ggaagagaaggagaagacagttgtg

SEQ ID NO: 2158509 - DNA, 25 bp, Homo sapien
gtcacacaacgaaaaccagaaaggc

SEQ ID NO: 2158510 - DNA, 25 bp, Homo sapien
tctagccattccagggcagtctttg

SEQ ID NO: 2158511 - DNA, 25 bp, Homo sapien
gagcagcagcgtatctgtgacaaga

SEQ ID NO: 2158512 - DNA, 25 bp, Homo sapien
agaaaggcggatgaaaccaacacca

SEQ ID NO: 2158513 - DNA, 25 bp, Homo sapien
gggctctgcttcgacgggcggggcg

SEQ ID NO: 2158514 - DNA, 25 bp, Homo sapien
gcggctggaagccggaccccgcgga

SEQ ID NO: 2158515 - DNA, 25 bp, Homo sapien
ggctctgcttcgacgggcggggcgg

SEQ ID NO: 2158516 - DNA, 25 bp, Homo sapien
ctgccaacggtctgagccccgcgga

SEQ ID NO: 2158517 - DNA, 25 bp, Homo sapien
gttgaaattgtcagccgacgccgcg

SEQ ID NO: 2158518 - DNA, 25 bp, Homo sapien
cgccggagtgccctgggatgggaca

SEQ ID NO: 2158519 - DNA, 25 bp, Homo sapien
aacggtcgaactgccgctgccaacg

SEQ ID NO: 2158520 - DNA, 25 bp, Homo sapien
tccggtcccgactccgatgatggcg

SEQ ID NO: 2158521 - DNA, 25 bp, Homo sapien
caatgtatgcggagagccaccaccg

SEQ ID NO: 2158522 - DNA, 25 bp, Homo sapien
cgcgccgacgcctgcgcaatgtatg

SEQ ID NO: 2158523 - DNA, 25 bp, Homo sapien
tcccgactccgatgatggcggacgg

SEQ ID NO: 2158524 - DNA, 25 bp, Homo sapien
ccttgtgggccttgaagtgtttgct

SEQ ID NO: 2158525 - DNA, 25 bp, Homo sapien
tttgctgagtccttcacctgacctg

SEQ ID NO: 2158526 - DNA, 25 bp, Homo sapien
gctttgactcttggctacccatgcg

SEQ ID NO: 2158527 - DNA, 25 bp, Homo sapien
tgacctgcatgcaaagatgatggga

SEQ ID NO: 2158528 - DNA, 25 bp, Homo sapien
aggagacttcggttccagccacagg

SEQ ID NO: 2158529 - DNA, 25 bp, Homo sapien
cattagatagggtgtcaggagactt

SEQ ID NO: 2158530 - DNA, 25 bp, Homo sapien
tgagcctcggaggaaagtaaaagga

SEQ ID NO: 2158531 - DNA, 25 bp, Homo sapien
tcacgtgtgcgtagaggaaagaaca

SEQ ID NO: 2158532 - DNA, 25 bp, Homo sapien
tcttctgaaacaggccttctccccc

SEQ ID NO: 2158533 - DNA, 25 bp, Homo sapien
ctgaaacaggccttctcccccacaa

SEQ ID NO: 2158534 - DNA, 25 bp, Homo sapien
tctgaaacaggccttctcccccaca

SEQ ID NO: 2158535 - DNA, 25 bp, Homo sapien
tcttcttctgaaacaggccttctcc

SEQ ID NO: 2158536 - DNA, 25 bp, Homo sapien
gcctagtattgatatgcagaaactg

SEQ ID NO: 2158537 - DNA, 25 bp, Homo sapien
atctccaatgtttgatttggcgaag

SEQ ID NO: 2158538 - DNA, 25 bp, Homo sapien
ggcgaaggacttttcatgttcccac

SEQ ID NO: 2158539 - DNA, 25 bp, Homo sapien
aaactgtttgtcctgttgtgtatca

SEQ ID NO: 2158540 - DNA, 25 bp, Homo sapien
ctgagtattctaggacagtctctga

SEQ ID NO: 2158541 - DNA, 25 bp, Homo sapien
tattctaggacagtctctgagtacc

SEQ ID NO: 2158542 - DNA, 25 bp, Homo sapien
gacagtctctgagtaccacacctgg

SEQ ID NO: 2158543 - DNA, 25 bp, Homo sapien
tctaggacagtctctgagtaccaca

SEQ ID NO: 2158544 - DNA, 25 bp, Homo sapien
cctgctcagacttagggttctagga

SEQ ID NO: 2158545 - DNA, 25 bp, Homo sapien
ctcagacttagggttctaggattcc

SEQ ID NO: 2158546 - DNA, 25 bp, Homo sapien
gttccttcctgctcagacttagggt

SEQ ID NO: 2158547 - DNA, 25 bp, Homo sapien
ttcctgctcagacttagggttctag

SEQ ID NO: 2158548 - DNA, 25 bp, Homo sapien
tcaatactttttagcgacctgaccc

SEQ ID NO: 2158549 - DNA, 25 bp, Homo sapien
cttggttaagtggaagtgcagacac

SEQ ID NO: 2158550 - DNA, 25 bp, Homo sapien
atactttttagcgacctgaccctga

SEQ ID NO: 2158551 - DNA, 25 bp, Homo sapien
gatgccttggttaagtggaagtgca

SEQ ID NO: 2158552 - DNA, 25 bp, Homo sapien
agaaagataaaactcgacatgagaa

SEQ ID NO: 2158553 - DNA, 25 bp, Homo sapien
tgagaatcaatccataaagcttctg

SEQ ID NO: 2158554 - DNA, 25 bp, Homo sapien
atgagaatcaatccataaagcttct

SEQ ID NO: 2158555 - DNA, 25 bp, Homo sapien
catgagaatcaatccataaagcttc

SEQ ID NO: 2158556 - DNA, 25 bp, Homo sapien
caatcaccagccacagagttgtcca

SEQ ID NO: 2158557 - DNA, 25 bp, Homo sapien
tggaattcaacgttctggagcactg

SEQ ID NO: 2158558 - DNA, 25 bp, Homo sapien
gatatagaagcgtccaaccctgatc

SEQ ID NO: 2158559 - DNA, 25 bp, Homo sapien
gataaaccaggcctaccagatatag

SEQ ID NO: 2158560 - DNA, 25 bp, Homo sapien
gcttacatatgtgtcacctcttcca

SEQ ID NO: 2158561 - DNA, 25 bp, Homo sapien
ctgagttcaggaatggtatctatca

SEQ ID NO: 2158562 - DNA, 25 bp, Homo sapien
tggtatctatcaggcttacatatgt

SEQ ID NO: 2158563 - DNA, 25 bp, Homo sapien
ctatcaggcttacatatgtgtcacc

SEQ ID NO: 2158564 - DNA, 25 bp, Homo sapien
gaataccagatcaatgcatgctgtg

SEQ ID NO: 2158565 - DNA, 25 bp, Homo sapien
ccagatcaatgcatgctgtgaatcg

SEQ ID NO: 2158566 - DNA, 25 bp, Homo sapien
cagatcaatgcatgctgtgaatcgg

SEQ ID NO: 2158567 - DNA, 25 bp, Homo sapien
taccagatcaatgcatgctgtgaat

SEQ ID NO: 2158568 - DNA, 25 bp, Homo sapien
gaacagagtcccatgaggtgtcagg

SEQ ID NO: 2158569 - DNA, 25 bp, Homo sapien
gcccaggagggcgttattagtaata

SEQ ID NO: 2158570 - DNA, 25 bp, Homo sapien
ttagtaatataagagaaggccatcc

SEQ ID NO: 2158571 - DNA, 25 bp, Homo sapien
tgccattgaaatgaagccaggtggt

SEQ ID NO: 2158572 - DNA, 25 bp, Homo sapien
aaactcttcgttttccaggatgtgg

SEQ ID NO: 2158573 - DNA, 25 bp, Homo sapien
tcccagagttgaaagtagtacaagc

SEQ ID NO: 2158574 - DNA, 25 bp, Homo sapien
tcttgttgacaagccagacgtcttc

SEQ ID NO: 2158575 - DNA, 25 bp, Homo sapien
tacaagctgccaggaaagctacgca

SEQ ID NO: 2158576 - DNA, 25 bp, Homo sapien
tgttgattagatttgtgagagataa

SEQ ID NO: 2158577 - DNA, 25 bp, Homo sapien
agatttgtgagagataatggtgacc

SEQ ID NO: 2158578 - DNA, 25 bp, Homo sapien
ataatggtgaccagaaactgccaca

SEQ ID NO: 2158579 - DNA, 25 bp, Homo sapien
tgattagatttgtgagagataatgg

SEQ ID NO: 2158580 - DNA, 25 bp, Homo sapien
tatatgctggaagggcactcgtgct

SEQ ID NO: 2158581 - DNA, 25 bp, Homo sapien
taaaccaaggtacagttccggcagc

SEQ ID NO: 2158582 - DNA, 25 bp, Homo sapien
gaagcagtctgatccaaaggtggta

SEQ ID NO: 2158583 - DNA, 25 bp, Homo sapien
caaagatggagtaccccgggagtat

SEQ ID NO: 2158584 - DNA, 25 bp, Homo sapien
cgtcattatatagtccagctgtgga

SEQ ID NO: 2158585 - DNA, 25 bp, Homo sapien
tggacgttgccatagaggattctct

SEQ ID NO: 2158586 - DNA, 25 bp, Homo sapien
tctctaggaagcattgtaggtacat

SEQ ID NO: 2158587 - DNA, 25 bp, Homo sapien
ggagagaactgtaaaaccgtcatta

SEQ ID NO: 2158588 - DNA, 25 bp, Homo sapien
gagtcactatcccagccataatggt

SEQ ID NO: 2158589 - DNA, 25 bp, Homo sapien
gtagccccagcatatatcacaggtg

SEQ ID NO: 2158590 - DNA, 25 bp, Homo sapien
gaggacatctcagacataggcccag

SEQ ID NO: 2158591 - DNA, 25 bp, Homo sapien
gaggaaatagctccagtgctcttag

SEQ ID NO: 2158592 - DNA, 25 bp, Homo sapien
tgtgcttaacgtcagccaatgtgga

SEQ ID NO: 2158593 - DNA, 25 bp, Homo sapien
gataatgaagggttctcagaaagcc

SEQ ID NO: 2158594 - DNA, 25 bp, Homo sapien
cccaggaacaaggtgtagagtctct

SEQ ID NO: 2158595 - DNA, 25 bp, Homo sapien
gaagccagtagtgataccacccagt

SEQ ID NO: 2158596 - DNA, 25 bp, Homo sapien
ccagtgtgggcttaggaataattaa

SEQ ID NO: 2158597 - DNA, 25 bp, Homo sapien
ggcgaagtcgatgcttccgtagata

SEQ ID NO: 2158598 - DNA, 25 bp, Homo sapien
ccaggaacagtggatgtagtagtca

SEQ ID NO: 2158599 - DNA, 25 bp, Homo sapien
tatgtcaccccagtggatatgagtg

SEQ ID NO: 2158600 - DNA, 25 bp, Homo sapien
gctcatttcaacattgtagaaggaa

SEQ ID NO: 2158601 - DNA, 25 bp, Homo sapien
tttataacactggtaatagggatcc

SEQ ID NO: 2158602 - DNA, 25 bp, Homo sapien
acactggtaatagggatccttggct

SEQ ID NO: 2158603 - DNA, 25 bp, Homo sapien
gacagagaagctcatttcaacattg

SEQ ID NO: 2158604 - DNA, 25 bp, Homo sapien
gagtagcaagagaaaattcactgtt

SEQ ID NO: 2158605 - DNA, 25 bp, Homo sapien
ttaatttgggtttccagagtagcaa

SEQ ID NO: 2158606 - DNA, 25 bp, Homo sapien
cactgttctgaaatatagaattcaa

SEQ ID NO: 2158607 - DNA, 25 bp, Homo sapien
taatttgggtttccagagtagcaag

SEQ ID NO: 2158608 - DNA, 25 bp, Homo sapien
tccatttgtagacacggctttttga

SEQ ID NO: 2158609 - DNA, 25 bp, Homo sapien
catttgtagacacggctttttgaag

SEQ ID NO: 2158610 - DNA, 25 bp, Homo sapien
tttgtagacacggctttttgaagaa

SEQ ID NO: 2158611 - DNA, 25 bp, Homo sapien
ccatttgtagacacggctttttgaa

SEQ ID NO: 2158612 - DNA, 25 bp, Homo sapien
caattgatcttgtgtgaagtttcca

SEQ ID NO: 2158613 - DNA, 25 bp, Homo sapien
ccatgtgtgaagttgccatgtattt

SEQ ID NO: 2158614 - DNA, 25 bp, Homo sapien
cgtgttcacagtttactaataacgt

SEQ ID NO: 2158615 - DNA, 25 bp, Homo sapien
gttttttcactgcaacgtgttcaca

SEQ ID NO: 2158616 - DNA, 25 bp, Homo sapien
cagcagtctctggtaactcctccag

SEQ ID NO: 2158617 - DNA, 25 bp, Homo sapien
gcagtctctggtaactcctccagca

SEQ ID NO: 2158618 - DNA, 25 bp, Homo sapien
ctctggtaactcctccagcattctg

SEQ ID NO: 2158619 - DNA, 25 bp, Homo sapien
gtctctggtaactcctccagcattc

SEQ ID NO: 2158620 - DNA, 25 bp, Homo sapien
aggcacttaaaagtattacaaacat

SEQ ID NO: 2158621 - DNA, 25 bp, Homo sapien
tatgcacattttaaaggacaagagg

SEQ ID NO: 2158622 - DNA, 25 bp, Homo sapien
tacagagaaaatgtatgcacatttt

SEQ ID NO: 2158623 - DNA, 25 bp, Homo sapien
aaggacaagaggcacttaaaagtat

SEQ ID NO: 2158624 - DNA, 25 bp, Homo sapien
tctccgtagggttggttaatagcca

SEQ ID NO: 2158625 - DNA, 25 bp, Homo sapien
tgggctgtctccgtagggttggtta

SEQ ID NO: 2158626 - DNA, 25 bp, Homo sapien
taatagccacttataggtccctttg

SEQ ID NO: 2158627 - DNA, 25 bp, Homo sapien
taggtccctttgtatttagaggctg

SEQ ID NO: 2158628 - DNA, 25 bp, Homo sapien
ttcccactgagatttgcccgtgttg

SEQ ID NO: 2158629 - DNA, 25 bp, Homo sapien
cacaatcttgtcaggaagttcttga

SEQ ID NO: 2158630 - DNA, 25 bp, Homo sapien
gatttgcccgtgttgatgctgattg

SEQ ID NO: 2158631 - DNA, 25 bp, Homo sapien
tgaagcaatttgcattgtttaaact

SEQ ID NO: 2158632 - DNA, 25 bp, Homo sapien
catgcagatcagaggcggaattgtt

SEQ ID NO: 2158633 - DNA, 25 bp, Homo sapien
catacttatctcatcacattgtgaa

SEQ ID NO: 2158634 - DNA, 25 bp, Homo sapien
tgcttttccaaaacaacgttgatta

SEQ ID NO: 2158635 - DNA, 25 bp, Homo sapien
aacataacatgagttaggttcatac

SEQ ID NO: 2158636 - DNA, 25 bp, Homo sapien
gcccggccaccgtcagatttgctat

SEQ ID NO: 2158637 - DNA, 25 bp, Homo sapien
aaagccatgccatcaaacgtgtggt

SEQ ID NO: 2158638 - DNA, 25 bp, Homo sapien
gaccagtacgctcaattatcctcag

SEQ ID NO: 2158639 - DNA, 25 bp, Homo sapien
taggagtgaatgctgaaagccatgc

SEQ ID NO: 2158640 - DNA, 25 bp, Homo sapien
taagttgctaagaggaattctctcc

SEQ ID NO: 2158641 - DNA, 25 bp, Homo sapien
tctctccgtcagtgatttaggcaaa

SEQ ID NO: 2158642 - DNA, 25 bp, Homo sapien
tatatggaagccaaaatccctccca

SEQ ID NO: 2158643 - DNA, 25 bp, Homo sapien
caagatcgtttgtaagttgctaaga

SEQ ID NO: 2158644 - DNA, 25 bp, Homo sapien
gaatgaacatatcatctgaaatgct

SEQ ID NO: 2158645 - DNA, 25 bp, Homo sapien
tccaatatgctgcagagtgataacc

SEQ ID NO: 2158646 - DNA, 25 bp, Homo sapien
ccactgggtcagctaagttttgaat

SEQ ID NO: 2158647 - DNA, 25 bp, Homo sapien
tgctggcactcacaacataggtggt

SEQ ID NO: 2158648 - DNA, 25 bp, Homo sapien
caaaaggcacagtgaacttgaccat

SEQ ID NO: 2158649 - DNA, 25 bp, Homo sapien
cccaaaaggcacagtgaacttgacc

SEQ ID NO: 2158650 - DNA, 25 bp, Homo sapien
aaaatcccaaaaggcacagtgaact

SEQ ID NO: 2158651 - DNA, 25 bp, Homo sapien
aggcacagtgaacttgaccataatt

SEQ ID NO: 2158652 - DNA, 25 bp, Homo sapien
ttacagcctgacgaattccatccac

SEQ ID NO: 2158653 - DNA, 25 bp, Homo sapien
tacagcctgacgaattccatccacc

SEQ ID NO: 2158654 - DNA, 25 bp, Homo sapien
acagcctgacgaattccatccaccc

SEQ ID NO: 2158655 - DNA, 25 bp, Homo sapien
tttacagcctgacgaattccatcca

SEQ ID NO: 2158656 - DNA, 25 bp, Homo sapien
acactgacagattgtgtaatttaca

SEQ ID NO: 2158657 - DNA, 25 bp, Homo sapien
ttaagactccaaaatgggtgaggtg

SEQ ID NO: 2158658 - DNA, 25 bp, Homo sapien
aatgggtgaggtggtcacactgaca

SEQ ID NO: 2158659 - DNA, 25 bp, Homo sapien
tcacactgacagattgtgtaattta

SEQ ID NO: 2158660 - DNA, 25 bp, Homo sapien
ccggtgtatgttataagcgctaata

SEQ ID NO: 2158661 - DNA, 25 bp, Homo sapien
atggaggagattccacatccggtgt

SEQ ID NO: 2158662 - DNA, 25 bp, Homo sapien
ttcactgaatccactgtagacctgg

SEQ ID NO: 2158663 - DNA, 25 bp, Homo sapien
gcgctaatatctgttcattcactga

SEQ ID NO: 2158664 - DNA, 25 bp, Homo sapien
tatgttgaagactttgactagagcc

SEQ ID NO: 2158665 - DNA, 25 bp, Homo sapien
tccaggcccatccaagtaaaagaaa

SEQ ID NO: 2158666 - DNA, 25 bp, Homo sapien
aaatacatgtggactgcctccaggc

SEQ ID NO: 2158667 - DNA, 25 bp, Homo sapien
cacaggttgatcagaattttggcag

SEQ ID NO: 2158668 - DNA, 25 bp, Homo sapien
gagttgttgggctcagagttccata

SEQ ID NO: 2158669 - DNA, 25 bp, Homo sapien
ttttcacactgactgtgattgccac

SEQ ID NO: 2158670 - DNA, 25 bp, Homo sapien
gattgccaccatgatagccgggatt

SEQ ID NO: 2158671 - DNA, 25 bp, Homo sapien
gggctcagagttccatacagatctt

SEQ ID NO: 2158672 - DNA, 25 bp, Homo sapien
gaggcaaaaataagccaccactgag

SEQ ID NO: 2158673 - DNA, 25 bp, Homo sapien
tgaggccaagtaagaatgtcaggct

SEQ ID NO: 2158674 - DNA, 25 bp, Homo sapien
tgaggtcatgcaggatcatcttccg

SEQ ID NO: 2158675 - DNA, 25 bp, Homo sapien
caagaacagtgcagaacatggagag

SEQ ID NO: 2158676 - DNA, 25 bp, Homo sapien
tgtctcgctaactctcccaagggtt

SEQ ID NO: 2158677 - DNA, 25 bp, Homo sapien
ccatgtgtaaccaaacaactgcggg

SEQ ID NO: 2158678 - DNA, 25 bp, Homo sapien
caatctggaggctaaacggaatggc

SEQ ID NO: 2158679 - DNA, 25 bp, Homo sapien
cctgagactcggattccaggtggga

SEQ ID NO: 2158680 - DNA, 25 bp, Homo sapien
acagtgaaacacaaaaatgaagaat

SEQ ID NO: 2158681 - DNA, 25 bp, Homo sapien
cagtgaaacacaaaaatgaagaatc

SEQ ID NO: 2158682 - DNA, 25 bp, Homo sapien
cacacagtgaaacacaaaaatgaag

SEQ ID NO: 2158683 - DNA, 25 bp, Homo sapien
cacagtgaaacacaaaaatgaagaa

SEQ ID NO: 2158684 - DNA, 25 bp, Homo sapien
agagttatccaatcgcaaccaccca

SEQ ID NO: 2158685 - DNA, 25 bp, Homo sapien
gtgtatctgccactgctcccgcaca

SEQ ID NO: 2158686 - DNA, 25 bp, Homo sapien
cactgctcccgcacactctccttca

SEQ ID NO: 2158687 - DNA, 25 bp, Homo sapien
cagaagagttatccaatcgcaacca

SEQ ID NO: 2158688 - DNA, 25 bp, Homo sapien
tgcagttgacttgagagatggcgtc

SEQ ID NO: 2158689 - DNA, 25 bp, Homo sapien
gatggcgtcaacagtttgtgctcaa

SEQ ID NO: 2158690 - DNA, 25 bp, Homo sapien
tatccaacctttatctgacaccggc

SEQ ID NO: 2158691 - DNA, 25 bp, Homo sapien
gaaggtgtgccttgtgcagagccta

SEQ ID NO: 2158692 - DNA, 25 bp, Homo sapien
gaggaacagtaaggatctttgtcaa

SEQ ID NO: 2158693 - DNA, 25 bp, Homo sapien
ggagaggaacagtaaggatctttgt

SEQ ID NO: 2158694 - DNA, 25 bp, Homo sapien
tcaaggagaggaacagtaaggatct

SEQ ID NO: 2158695 - DNA, 25 bp, Homo sapien
aacagtaaggatctttgtcaaagtc

SEQ ID NO: 2158696 - DNA, 25 bp, Homo sapien
tcaaccagtagtgggctctgaagcc

SEQ ID NO: 2158697 - DNA, 25 bp, Homo sapien
ccagtagtgggctctgaagccacca

SEQ ID NO: 2158698 - DNA, 25 bp, Homo sapien
gaagccaccacatgcagggcactga

SEQ ID NO: 2158699 - DNA, 25 bp, Homo sapien
gtgggctctgaagccaccacatgca

SEQ ID NO: 2158700 - DNA, 25 bp, Homo sapien
tctaattgctgtgtaggagtaattc

SEQ ID NO: 2158701 - DNA, 25 bp, Homo sapien
ttgctgtgtaggagtaattctgtga

SEQ ID NO: 2158702 - DNA, 25 bp, Homo sapien
ccagaaagacaagctacagctaacg

SEQ ID NO: 2158703 - DNA, 25 bp, Homo sapien
tacagctaacgcttaaacattcatc

SEQ ID NO: 2158704 - DNA, 25 bp, Homo sapien
gctaccaacttctaaagaggaattg

SEQ ID NO: 2158705 - DNA, 25 bp, Homo sapien
gatgaagtaacctttgcccactgag

SEQ ID NO: 2158706 - DNA, 25 bp, Homo sapien
agagagagcgcgagaatgaatacag

SEQ ID NO: 2158707 - DNA, 25 bp, Homo sapien
tacaggaatatagccaggtgggtta

SEQ ID NO: 2158708 - DNA, 25 bp, Homo sapien
ctgtgcacaggatggagccagctct

SEQ ID NO: 2158709 - DNA, 25 bp, Homo sapien
aggatggagccagctctgcctaatg

SEQ ID NO: 2158710 - DNA, 25 bp, Homo sapien
atgctgccgctgatccagtgggcat

SEQ ID NO: 2158711 - DNA, 25 bp, Homo sapien
ggagccagctctgcctaatgctgcc

SEQ ID NO: 2158712 - DNA, 25 bp, Homo sapien
ggaggtggagttttattggcgtgtc

SEQ ID NO: 2158713 - DNA, 25 bp, Homo sapien
tctggcactgaagagtaggaggtgg

SEQ ID NO: 2158714 - DNA, 25 bp, Homo sapien
ctgaagagtaggaggtggagtttta

SEQ ID NO: 2158715 - DNA, 25 bp, Homo sapien
ccatctggcactgaagagtaggagg

SEQ ID NO: 2158716 - DNA, 25 bp, Homo sapien
gaagaaaatccaagacatccagata

SEQ ID NO: 2158717 - DNA, 25 bp, Homo sapien
gcagttgattgtcacgtccaatgcc

SEQ ID NO: 2158718 - DNA, 25 bp, Homo sapien
ttctcagttcaaatgcagttgattg

SEQ ID NO: 2158719 - DNA, 25 bp, Homo sapien
cgtctagtaacgagatggtattagg

SEQ ID NO: 2158720 - DNA, 25 bp, Homo sapien
tgtgtcatttgtgattgaaattaaa

SEQ ID NO: 2158721 - DNA, 25 bp, Homo sapien
aattaaagtctgattaggtgagtga

SEQ ID NO: 2158722 - DNA, 25 bp, Homo sapien
taatatagatggcacacaatgcttc

SEQ ID NO: 2158723 - DNA, 25 bp, Homo sapien
gagttgtccccgctccatcctttat

SEQ ID NO: 2158724 - DNA, 25 bp, Homo sapien
tttgtgttatcgttagaaaccacag

SEQ ID NO: 2158725 - DNA, 25 bp, Homo sapien
tctattcctggagagttgtccccgc

SEQ ID NO: 2158726 - DNA, 25 bp, Homo sapien
tccttctgcaaggtagtgagttgca

SEQ ID NO: 2158727 - DNA, 25 bp, Homo sapien
gtgagttgcatccactggcacacaa

SEQ ID NO: 2158728 - DNA, 25 bp, Homo sapien
gagcaccttacaaccaattcttccg

SEQ ID NO: 2158729 - DNA, 25 bp, Homo sapien
tgagccggatgaaagagagcacctt

SEQ ID NO: 2158730 - DNA, 25 bp, Homo sapien
tcatgagtgaacagttatcaacctt

SEQ ID NO: 2158731 - DNA, 25 bp, Homo sapien
aagacttcttttgtataagtgactg

SEQ ID NO: 2158732 - DNA, 25 bp, Homo sapien
catgagtgaacagttatcaaccttc

SEQ ID NO: 2158733 - DNA, 25 bp, Homo sapien
tcttttgtataagtgactgatgtta

SEQ ID NO: 2158734 - DNA, 25 bp, Homo sapien
tgtaaagggtcctagcaatcaagga

SEQ ID NO: 2158735 - DNA, 25 bp, Homo sapien
tcctcagtaggtatgttcagggtgc

SEQ ID NO: 2158736 - DNA, 25 bp, Homo sapien
tatcatagacacgatccagacgcag

SEQ ID NO: 2158737 - DNA, 25 bp, Homo sapien
gctcaagtggcttcacaactgcctt

SEQ ID NO: 2158738 - DNA, 25 bp, Homo sapien
tacaggaggtgatttggcaaccagc

SEQ ID NO: 2158739 - DNA, 25 bp, Homo sapien
tccgccttgcaacagaacaactgag

SEQ ID NO: 2158740 - DNA, 25 bp, Homo sapien
cagacatctgtatgctcccagtgcc

SEQ ID NO: 2158741 - DNA, 25 bp, Homo sapien
gaacgaggtcacactaatttcagac

SEQ ID NO: 2158742 - DNA, 25 bp, Homo sapien
ttagagtcggatacacacgctggga

SEQ ID NO: 2158743 - DNA, 25 bp, Homo sapien
tctgatcacaattgcacacccaggg

SEQ ID NO: 2158744 - DNA, 25 bp, Homo sapien
taagtgttgacccagtaaggcaagc

SEQ ID NO: 2158745 - DNA, 25 bp, Homo sapien
tgtgccccagatccttactcagtgc

SEQ ID NO: 2158746 - DNA, 25 bp, Homo sapien
ccgctaggtccagggcgctgcggga

SEQ ID NO: 2158747 - DNA, 25 bp, Homo sapien
gacgcagccgccattgtcggcgcgt

SEQ ID NO: 2158748 - DNA, 25 bp, Homo sapien
ggctccctcggcaacgtcaggaaat

SEQ ID NO: 2158749 - DNA, 25 bp, Homo sapien
gccgccgaccggatctgaggcgact

SEQ ID NO: 2158750 - DNA, 25 bp, Homo sapien
aagggaggtcaaccgcgctctgctc

SEQ ID NO: 2158751 - DNA, 25 bp, Homo sapien
agcagtccccgggaaatcgcggccg

SEQ ID NO: 2158752 - DNA, 25 bp, Homo sapien
cagagaaagggaggtcaaccgcgct

SEQ ID NO: 2158753 - DNA, 25 bp, Homo sapien
tgcgccccagcagtccccgggaaat

SEQ ID NO: 2158754 - DNA, 25 bp, Homo sapien
tcagaagaactaagaggccgaaatg

SEQ ID NO: 2158755 - DNA, 25 bp, Homo sapien
ctaagaggccgaaatgacgctggag

SEQ ID NO: 2158756 - DNA, 25 bp, Homo sapien
gggttcagaagaactaagaggccga

SEQ ID NO: 2158757 - DNA, 25 bp, Homo sapien
aactaagaggccgaaatgacgctgg

SEQ ID NO: 2158758 - DNA, 25 bp, Homo sapien
tccaggtcccactcgtagggagtgt

SEQ ID NO: 2158759 - DNA, 25 bp, Homo sapien
agagaatcgggttctccgccggcat

SEQ ID NO: 2158760 - DNA, 25 bp, Homo sapien
tcatcgttcccatccaagttggtgc

SEQ ID NO: 2158761 - DNA, 25 bp, Homo sapien
ccggcatcggtctgggtgtcaccat

SEQ ID NO: 2158762 - DNA, 25 bp, Homo sapien
ggcctgatatgtagcaatgaaatct

SEQ ID NO: 2158763 - DNA, 25 bp, Homo sapien
tctttctggcatcagtgggttccgg

SEQ ID NO: 2158764 - DNA, 25 bp, Homo sapien
ctagatgcgccatcgttagagaagc

SEQ ID NO: 2158765 - DNA, 25 bp, Homo sapien
tcttcaacatttgcggtagaactag

SEQ ID NO: 2158766 - DNA, 25 bp, Homo sapien
cagacacgtatacatttgtatttct

SEQ ID NO: 2158767 - DNA, 25 bp, Homo sapien
tgtatttctgtcttcttcaacatga

SEQ ID NO: 2158768 - DNA, 25 bp, Homo sapien
tttctgtcttcttcaacatgaaacc

SEQ ID NO: 2158769 - DNA, 25 bp, Homo sapien
agacacgtatacatttgtatttctg

SEQ ID NO: 2158770 - DNA, 25 bp, Homo sapien
tcaaataacagcaaagaccgtctcc

SEQ ID NO: 2158771 - DNA, 25 bp, Homo sapien
taacagcaaagaccgtctcctttaa

SEQ ID NO: 2158772 - DNA, 25 bp, Homo sapien
agcaaagaccgtctcctttaagatt

SEQ ID NO: 2158773 - DNA, 25 bp, Homo sapien
gccaaacttggacataagttgtata

SEQ ID NO: 2158774 - DNA, 25 bp, Homo sapien
catgtaatttgtagcctctaatttc

SEQ ID NO: 2158775 - DNA, 25 bp, Homo sapien
gaaactttgccacctcaacatgtaa

SEQ ID NO: 2158776 - DNA, 25 bp, Homo sapien
cacctcaacatgtaatttgtagcct

SEQ ID NO: 2158777 - DNA, 25 bp, Homo sapien
tcccttcagttgaaactttgccacc

SEQ ID NO: 2158778 - DNA, 25 bp, Homo sapien
tccacacagaagtaaacggttctgg

SEQ ID NO: 2158779 - DNA, 25 bp, Homo sapien
tagaaaaatttagctcctggtacca

SEQ ID NO: 2158780 - DNA, 25 bp, Homo sapien
tatagattgctaaaggtacctgatg

SEQ ID NO: 2158781 - DNA, 25 bp, Homo sapien
tgttcaacgttttccaaacagatgg

SEQ ID NO: 2158782 - DNA, 25 bp, Homo sapien
ataccttgaggctaaaaaatatatt

SEQ ID NO: 2158783 - DNA, 25 bp, Homo sapien
ctgttacaatcataaattttactga

SEQ ID NO: 2158784 - DNA, 25 bp, Homo sapien
acattccaatgagacccttgaaaaa

SEQ ID NO: 2158785 - DNA, 25 bp, Homo sapien
actactcaactctgttacaatcata

SEQ ID NO: 2158786 - DNA, 25 bp, Homo sapien
tcgctcatggcgcatccgggatggt

SEQ ID NO: 2158787 - DNA, 25 bp, Homo sapien
ggatggtccggctcgcctctcaggt

SEQ ID NO: 2158788 - DNA, 25 bp, Homo sapien
taggatgaaacatattcttgatgat

SEQ ID NO: 2158789 - DNA, 25 bp, Homo sapien
tcttgatgatgacaactcgctcatg

SEQ ID NO: 2158790 - DNA, 25 bp, Homo sapien
caaaatcaggccatacttgttggct

SEQ ID NO: 2158791 - DNA, 25 bp, Homo sapien
cactgaaaatccacaagcagttccc

SEQ ID NO: 2158792 - DNA, 25 bp, Homo sapien
caatggtttcccataccaagtagct

SEQ ID NO: 2158793 - DNA, 25 bp, Homo sapien
ggcgcagtatggttattaaacagtc

SEQ ID NO: 2158794 - DNA, 25 bp, Homo sapien
tccacggacattaaatattataact

SEQ ID NO: 2158795 - DNA, 25 bp, Homo sapien
caattgtgaagctggtactccccac

SEQ ID NO: 2158796 - DNA, 25 bp, Homo sapien
ttacaattgtgaagctggtactccc

SEQ ID NO: 2158797 - DNA, 25 bp, Homo sapien
ttttagtaccaaactgaagtttgca

SEQ ID NO: 2158798 - DNA, 25 bp, Homo sapien
gctcctattagagtgagtgctttca

SEQ ID NO: 2158799 - DNA, 25 bp, Homo sapien
taaatctgaggcttctaaaactaca

SEQ ID NO: 2158800 - DNA, 25 bp, Homo sapien
taaattgaagcgtgattccatggtg

SEQ ID NO: 2158801 - DNA, 25 bp, Homo sapien
aaataagctggcagggagttactga

SEQ ID NO: 2158802 - DNA, 25 bp, Homo sapien
gtccaaacttcgaacactctactcg

SEQ ID NO: 2158803 - DNA, 25 bp, Homo sapien
acttcgaacactctactcgaaggtc

SEQ ID NO: 2158804 - DNA, 25 bp, Homo sapien
aatttgtccaaacttcgaacactct

SEQ ID NO: 2158805 - DNA, 25 bp, Homo sapien
aaacttcgaacactctactcgaagg

SEQ ID NO: 2158806 - DNA, 25 bp, Homo sapien
ggatccatatgtccaagccatgaac

SEQ ID NO: 2158807 - DNA, 25 bp, Homo sapien
ccatatgtccaagccatgaacttac

SEQ ID NO: 2158808 - DNA, 25 bp, Homo sapien
aattattgctttaggatccatatgt

SEQ ID NO: 2158809 - DNA, 25 bp, Homo sapien
gctttaggatccatatgtccaagcc

SEQ ID NO: 2158810 - DNA, 25 bp, Homo sapien
catgcctgggcagtgatttgacggc

SEQ ID NO: 2158811 - DNA, 25 bp, Homo sapien
caaaccatcttccatcgagagtctg

SEQ ID NO: 2158812 - DNA, 25 bp, Homo sapien
gaatacaataatcagcttcctctgg

SEQ ID NO: 2158813 - DNA, 25 bp, Homo sapien
tctggatcccgaaaggacacagagg

SEQ ID NO: 2158814 - DNA, 25 bp, Homo sapien
tctgaacgcctaaggcctctgttgg

SEQ ID NO: 2158815 - DNA, 25 bp, Homo sapien
gaaggccctgccctttcggaagcag

SEQ ID NO: 2158816 - DNA, 25 bp, Homo sapien
aaatgccttgctctagaaggccctg

SEQ ID NO: 2158817 - DNA, 25 bp, Homo sapien
tcttcaaacgccattccagttgcag

SEQ ID NO: 2158818 - DNA, 25 bp, Homo sapien
cttcagatcctcttacgggattgcc

SEQ ID NO: 2158819 - DNA, 25 bp, Homo sapien
cctcttacgggattgccttcttcag

SEQ ID NO: 2158820 - DNA, 25 bp, Homo sapien
tacgggattgccttcttcagactct

SEQ ID NO: 2158821 - DNA, 25 bp, Homo sapien
ttttaggactatcctcttcagatcc

SEQ ID NO: 2158822 - DNA, 25 bp, Homo sapien
cgtccaaatctttctcgagaccatt

SEQ ID NO: 2158823 - DNA, 25 bp, Homo sapien
ttctctttcggagccatcttcagac

SEQ ID NO: 2158824 - DNA, 25 bp, Homo sapien
cttcaaattcggagttttcagagtc

SEQ ID NO: 2158825 - DNA, 25 bp, Homo sapien
tcatgaagctccttttcagaacctt

SEQ ID NO: 2158826 - DNA, 25 bp, Homo sapien
gaatcttcgtcaaactctctctcag

SEQ ID NO: 2158827 - DNA, 25 bp, Homo sapien
ccttttcatctgaatcttcgtcaaa

SEQ ID NO: 2158828 - DNA, 25 bp, Homo sapien
caagccccttttcatctgcatattc

SEQ ID NO: 2158829 - DNA, 25 bp, Homo sapien
tcatcagactcatcatcaaatactt

SEQ ID NO: 2158830 - DNA, 25 bp, Homo sapien
tctcatcagaatcgtcaaacaactt

SEQ ID NO: 2158831 - DNA, 25 bp, Homo sapien
tcatcatcgctactgagaataaagc

SEQ ID NO: 2158832 - DNA, 25 bp, Homo sapien
cgaacaacttttcgtcagcatcttc

SEQ ID NO: 2158833 - DNA, 25 bp, Homo sapien
accttcttccgcctttttatcagca

SEQ ID NO: 2158834 - DNA, 25 bp, Homo sapien
gctttaatctgatggcatcctacca

SEQ ID NO: 2158835 - DNA, 25 bp, Homo sapien
tactagtaattaccctgaagcacag

SEQ ID NO: 2158836 - DNA, 25 bp, Homo sapien
cacaggcaaatgtagatggaggact

SEQ ID NO: 2158837 - DNA, 25 bp, Homo sapien
taggtacaggtaacaatgaaacact

SEQ ID NO: 2158838 - DNA, 25 bp, Homo sapien
taaaatgcaatttaactcaagtcca

SEQ ID NO: 2158839 - DNA, 25 bp, Homo sapien
tcagaaaagccaaccttcagtataa

SEQ ID NO: 2158840 - DNA, 25 bp, Homo sapien
tacgtgctaataccagcgggaagca

SEQ ID NO: 2158841 - DNA, 25 bp, Homo sapien
aaacaagagttaatttgcaaggact

SEQ ID NO: 2158842 - DNA, 25 bp, Homo sapien
aggagctgaggatttgtacccccac

SEQ ID NO: 2158843 - DNA, 25 bp, Homo sapien
agcaggttagtgcttgcggaagcag

SEQ ID NO: 2158844 - DNA, 25 bp, Homo sapien
tagtgcttgcggaagcaggagctga

SEQ ID NO: 2158845 - DNA, 25 bp, Homo sapien
gagctgcctggctcacttcagagca

SEQ ID NO: 2158846 - DNA, 25 bp, Homo sapien
cctgaggacattagggccctgaagc

SEQ ID NO: 2158847 - DNA, 25 bp, Homo sapien
tctttgctaactccccttgaagcca

SEQ ID NO: 2158848 - DNA, 25 bp, Homo sapien
cagtggccactgctcaaggttcagg

SEQ ID NO: 2158849 - DNA, 25 bp, Homo sapien
ggttcaggcttgacacagcttgcaa

SEQ ID NO: 2158850 - DNA, 25 bp, Homo sapien
tgtgagtgaatgacacaggtgacag

SEQ ID NO: 2158851 - DNA, 25 bp, Homo sapien
tttgggcagccggatggcagtcttc

SEQ ID NO: 2158852 - DNA, 25 bp, Homo sapien
ttggaagtaggtgaaaaggacacac

SEQ ID NO: 2158853 - DNA, 25 bp, Homo sapien
tgttcatccactacgctgctgatgt

SEQ ID NO: 2158854 - DNA, 25 bp, Homo sapien
tccattccgtctttataggcttctg

SEQ ID NO: 2158855 - DNA, 25 bp, Homo sapien
ctttagtatctgctgctaccccatg

SEQ ID NO: 2158856 - DNA, 25 bp, Homo sapien
ttagtatctgctgctaccccatgcc

SEQ ID NO: 2158857 - DNA, 25 bp, Homo sapien
catttcctttagtatctgctgctac

SEQ ID NO: 2158858 - DNA, 25 bp, Homo sapien
tcctttagtatctgctgctacccca

SEQ ID NO: 2158859 - DNA, 25 bp, Homo sapien
gccctagagcaatgttgccaggcct

SEQ ID NO: 2158860 - DNA, 25 bp, Homo sapien
agccctagagcaatgttgccaggcc

SEQ ID NO: 2158861 - DNA, 25 bp, Homo sapien
tagtctttggatgaatatccagatt

SEQ ID NO: 2158862 - DNA, 25 bp, Homo sapien
ttagaggagattgtgctgttccagg

SEQ ID NO: 2158863 - DNA, 25 bp, Homo sapien
tggatgaatatccagattccttttc

SEQ ID NO: 2158864 - DNA, 25 bp, Homo sapien
ccctggggtacctagtctttggatg

SEQ ID NO: 2158865 - DNA, 25 bp, Homo sapien
cagggacggtgagaactgattcaca

SEQ ID NO: 2158866 - DNA, 25 bp, Homo sapien
ttgtccatggagacgagtaacgcca

SEQ ID NO: 2158867 - DNA, 25 bp, Homo sapien
caagttgcagttggcggcacggttt

SEQ ID NO: 2158868 - DNA, 25 bp, Homo sapien
tgattcacagccatgggaccaggca

SEQ ID NO: 2158869 - DNA, 25 bp, Homo sapien
cagctatctggccagggttgccatt

SEQ ID NO: 2158870 - DNA, 25 bp, Homo sapien
cctggcggcagattcctgaggacgg

SEQ ID NO: 2158871 - DNA, 25 bp, Homo sapien
ggacgggctaggcatctgtcttgct

SEQ ID NO: 2158872 - DNA, 25 bp, Homo sapien
gcttccagctatctggccagggttg

SEQ ID NO: 2158873 - DNA, 25 bp, Homo sapien
caacatgagtagagcatgaagacct

SEQ ID NO: 2158874 - DNA, 25 bp, Homo sapien
tctaggactaggttagagagtgccc

SEQ ID NO: 2158875 - DNA, 25 bp, Homo sapien
gagagtgcccagtagcattccaggg

SEQ ID NO: 2158876 - DNA, 25 bp, Homo sapien
tcctgattaagggtcactgacttcc

SEQ ID NO: 2158877 - DNA, 25 bp, Homo sapien
tggcagatccacgagatacatatag

SEQ ID NO: 2158878 - DNA, 25 bp, Homo sapien
tggtactggcagatccacgagatac

SEQ ID NO: 2158879 - DNA, 25 bp, Homo sapien
ggctggtactggcagatccacgaga

SEQ ID NO: 2158880 - DNA, 25 bp, Homo sapien
gatccacgagatacatatagtttct

SEQ ID NO: 2158881 - DNA, 25 bp, Homo sapien
atcaaaggctggcccagatacctac

SEQ ID NO: 2158882 - DNA, 25 bp, Homo sapien
catcaaaggctggcccagataccta

SEQ ID NO: 2158883 - DNA, 25 bp, Homo sapien
gttaagaaatgtgaccaggttcctg

SEQ ID NO: 2158884 - DNA, 25 bp, Homo sapien
gggtggccctatgtactaggctgaa

SEQ ID NO: 2158885 - DNA, 25 bp, Homo sapien
caacgcttagagtaatgtgccagcc

SEQ ID NO: 2158886 - DNA, 25 bp, Homo sapien
taataaagctggcaattgaccctga

SEQ ID NO: 2158887 - DNA, 25 bp, Homo sapien
catagatgcatgacagcccacatga

SEQ ID NO: 2158888 - DNA, 25 bp, Homo sapien
tctctgactacccttttggctctga

SEQ ID NO: 2158889 - DNA, 25 bp, Homo sapien
tgcttcatagatgcatgacagccca

SEQ ID NO: 2158890 - DNA, 25 bp, Homo sapien
gctctgatgactcttctgctccaca

SEQ ID NO: 2158891 - DNA, 25 bp, Homo sapien
acagcctcaacctattctcaatggg

SEQ ID NO: 2158892 - DNA, 25 bp, Homo sapien
tgatgaaaattgcacaacccaactg

SEQ ID NO: 2158893 - DNA, 25 bp, Homo sapien
tgaaagtatgtcattcatcaggacc

SEQ ID NO: 2158894 - DNA, 25 bp, Homo sapien
aacccaactgagagttcgcacttga

SEQ ID NO: 2158895 - DNA, 25 bp, Homo sapien
ccagatgaacacctgtgggatgtca

SEQ ID NO: 2158896 - DNA, 25 bp, Homo sapien
gaatttattcaacttgtgacgggca

SEQ ID NO: 2158897 - DNA, 25 bp, Homo sapien
ccagttaggcccctatggaaggctg

SEQ ID NO: 2158898 - DNA, 25 bp, Homo sapien
gataccagagtcctcaacctcagag

SEQ ID NO: 2158899 - DNA, 25 bp, Homo sapien
cccagtggtttggtggtgtaagtga

SEQ ID NO: 2158900 - DNA, 25 bp, Homo sapien
tgctgcaggtatcgatgtgggtggc

SEQ ID NO: 2158901 - DNA, 25 bp, Homo sapien
tgtgggtggccccagtggtttggtg

SEQ ID NO: 2158902 - DNA, 25 bp, Homo sapien
gtggtgtaagtgagtatttcccagg

SEQ ID NO: 2158903 - DNA, 25 bp, Homo sapien
cagggatgtcttgctgccgtgtctt

SEQ ID NO: 2158904 - DNA, 25 bp, Homo sapien
gaacaatatgcagggatgtcttgct

SEQ ID NO: 2158905 - DNA, 25 bp, Homo sapien
tctggaacaatatgcagggatgtct

SEQ ID NO: 2158906 - DNA, 25 bp, Homo sapien
tcttagaccaagtgttgtctttctc

SEQ ID NO: 2158907 - DNA, 25 bp, Homo sapien
gacacgaagctgtttaacagattgg

SEQ ID NO: 2158908 - DNA, 25 bp, Homo sapien
tgtttaacagattggggaggcaagt

SEQ ID NO: 2158909 - DNA, 25 bp, Homo sapien
gggaacattgacagcgggggcttct

SEQ ID NO: 2158910 - DNA, 25 bp, Homo sapien
tactgagctcatactagacacgaag

SEQ ID NO: 2158911 - DNA, 25 bp, Homo sapien
gtgccctttgtttacttgttatcat

SEQ ID NO: 2158912 - DNA, 25 bp, Homo sapien
tttctatgctctttcgctggtttgg

SEQ ID NO: 2158913 - DNA, 25 bp, Homo sapien
ctttcgctggtttgggaaggcattg

SEQ ID NO: 2158914 - DNA, 25 bp, Homo sapien
tatgctctttcgctggtttgggaag

SEQ ID NO: 2158915 - DNA, 25 bp, Homo sapien
ttctgtagccccattacttgtgcgg

SEQ ID NO: 2158916 - DNA, 25 bp, Homo sapien
ctctgtatagagagctggaagggtt

SEQ ID NO: 2158917 - DNA, 25 bp, Homo sapien
cgggtactcttggagacaaggagaa

SEQ ID NO: 2158918 - DNA, 25 bp, Homo sapien
aaatgagctatcagagtggactctg

SEQ ID NO: 2158919 - DNA, 25 bp, Homo sapien
tgggaagctgatgcctttctcagag

SEQ ID NO: 2158920 - DNA, 25 bp, Homo sapien
cacttggtgtagttggacaatccat

SEQ ID NO: 2158921 - DNA, 25 bp, Homo sapien
ttgacacttggtgtagttggacaat

SEQ ID NO: 2158922 - DNA, 25 bp, Homo sapien
ccggacattgggcaggcagttggct

SEQ ID NO: 2158923 - DNA, 25 bp, Homo sapien
gttactattctctgtatcactccag

SEQ ID NO: 2158924 - DNA, 25 bp, Homo sapien
atcactccagttttagtacatgggc

SEQ ID NO: 2158925 - DNA, 25 bp, Homo sapien
atggaacgcatcacaatttgtgtgt

SEQ ID NO: 2158926 - DNA, 25 bp, Homo sapien
tacatgggctgccaaagcaagcgca

SEQ ID NO: 2158927 - DNA, 25 bp, Homo sapien
ataatgagaataagctctgtaaggc

SEQ ID NO: 2158928 - DNA, 25 bp, Homo sapien
tcaggctccgttgcaaatagaggtg

SEQ ID NO: 2158929 - DNA, 25 bp, Homo sapien
tgcaaataaggataggtttcaggct

SEQ ID NO: 2158930 - DNA, 25 bp, Homo sapien
ggataggtttcaggctccgttgcaa

SEQ ID NO: 2158931 - DNA, 25 bp, Homo sapien
cttggagaagtgaatccagtttccc

SEQ ID NO: 2158932 - DNA, 25 bp, Homo sapien
ttggtccctcatagctattgaccct

SEQ ID NO: 2158933 - DNA, 25 bp, Homo sapien
tacaagctttcagtatcacttggag

SEQ ID NO: 2158934 - DNA, 25 bp, Homo sapien
cctcatagctattgacccttatctt

SEQ ID NO: 2158935 - DNA, 25 bp, Homo sapien
cagaaacgtttccaaactattcatc

SEQ ID NO: 2158936 - DNA, 25 bp, Homo sapien
cagtgataaactggtgcagaaacgt

SEQ ID NO: 2158937 - DNA, 25 bp, Homo sapien
aaaacccgatatgtagaatctgcac

SEQ ID NO: 2158938 - DNA, 25 bp, Homo sapien
aactattcatcatgtgcaccctaaa

SEQ ID NO: 2158939 - DNA, 25 bp, Homo sapien
cagctttgcccttgtctgacatccg

SEQ ID NO: 2158940 - DNA, 25 bp, Homo sapien
tgtctgacatccgttcagagagtta

SEQ ID NO: 2158941 - DNA, 25 bp, Homo sapien
aaaattcgttggcttttcagggcag

SEQ ID NO: 2158942 - DNA, 25 bp, Homo sapien
cattgagaagcatggcaaaaagtga

SEQ ID NO: 2158943 - DNA, 25 bp, Homo sapien
taggtgggtggagggtcaaggcaaa

SEQ ID NO: 2158944 - DNA, 25 bp, Homo sapien
tctattagtcagaggcatgtttgcc

SEQ ID NO: 2158945 - DNA, 25 bp, Homo sapien
gatgggaagtaactgtggaaacaca

SEQ ID NO: 2158946 - DNA, 25 bp, Homo sapien
tgtctgctggatgtaccaagtcatc

SEQ ID NO: 2158947 - DNA, 25 bp, Homo sapien
gagcacaatccacaatgacaccaaa

SEQ ID NO: 2158948 - DNA, 25 bp, Homo sapien
tgagcacaatccacaatgacaccaa

SEQ ID NO: 2158949 - DNA, 25 bp, Homo sapien
tgaaccagctcgaatgggtctctgt

SEQ ID NO: 2158950 - DNA, 25 bp, Homo sapien
acccacagcttgttgttgaaccagc

SEQ ID NO: 2158951 - DNA, 25 bp, Homo sapien
gcttgttgttgaaccagctcgaatg

SEQ ID NO: 2158952 - DNA, 25 bp, Homo sapien
gttgttgaaccagctcgaatgggtc

SEQ ID NO: 2158953 - DNA, 25 bp, Homo sapien
cttccttagagaatcaggactgtga

SEQ ID NO: 2158954 - DNA, 25 bp, Homo sapien
caagtgttttttcgtaccagatcct

SEQ ID NO: 2158955 - DNA, 25 bp, Homo sapien
accagatccttccttagagaatcag

SEQ ID NO: 2158956 - DNA, 25 bp, Homo sapien
cttctgaagcccaaatgagcaccat

SEQ ID NO: 2158957 - DNA, 25 bp, Homo sapien
tggaagagcttggaggccttcggtt

SEQ ID NO: 2158958 - DNA, 25 bp, Homo sapien
agtggaagagcttggaggccttcgg

SEQ ID NO: 2158959 - DNA, 25 bp, Homo sapien
gagcttggaggccttcggttggtag

SEQ ID NO: 2158960 - DNA, 25 bp, Homo sapien
gaagagcttggaggccttcggttgg

SEQ ID NO: 2158961 - DNA, 25 bp, Homo sapien
aatgggcttgccatacgggcctctt

SEQ ID NO: 2158962 - DNA, 25 bp, Homo sapien
gggcttgccatacgggcctcttgtt

SEQ ID NO: 2158963 - DNA, 25 bp, Homo sapien
tgggcttgccatacgggcctcttgt

SEQ ID NO: 2158964 - DNA, 25 bp, Homo sapien
gcaatgggcttgccatacgggcctc

SEQ ID NO: 2158965 - DNA, 25 bp, Homo sapien
gagatttccaaagctgtagatcttg

SEQ ID NO: 2158966 - DNA, 25 bp, Homo sapien
gacgagtgactagaaattggtttga

SEQ ID NO: 2158967 - DNA, 25 bp, Homo sapien
gaacaatctttagatgacgagtgac

SEQ ID NO: 2158968 - DNA, 25 bp, Homo sapien
tcactgttgccatacctgcgttctt

SEQ ID NO: 2158969 - DNA, 25 bp, Homo sapien
tgtgagggttatcgtgggcaaaggc

SEQ ID NO: 2158970 - DNA, 25 bp, Homo sapien
gagggttatcgtgggcaaaggccat

SEQ ID NO: 2158971 - DNA, 25 bp, Homo sapien
tattgctgttgtgagggttatcgtg

SEQ ID NO: 2158972 - DNA, 25 bp, Homo sapien
ttattgctgttgtgagggttatcgt

SEQ ID NO: 2158973 - DNA, 25 bp, Homo sapien
ctatgcagctccatcacagccagct

SEQ ID NO: 2158974 - DNA, 25 bp, Homo sapien
aggctctgggtgaaccgtcaagaca

SEQ ID NO: 2158975 - DNA, 25 bp, Homo sapien
agctccatcacagccagctgcatgc

SEQ ID NO: 2158976 - DNA, 25 bp, Homo sapien
gctcctgcttgctcaggctctgggt

SEQ ID NO: 2158977 - DNA, 25 bp, Homo sapien
ccagccccaggtaagagttagctaa

SEQ ID NO: 2158978 - DNA, 25 bp, Homo sapien
tatgtagtgtggttcaaggcaggac

SEQ ID NO: 2158979 - DNA, 25 bp, Homo sapien
tagtgccactcagcaaaaagatcca

SEQ ID NO: 2158980 - DNA, 25 bp, Homo sapien
tgactctcacatcatctacacggag

SEQ ID NO: 2158981 - DNA, 25 bp, Homo sapien
gacacacagtcaagcggaggaaccg

SEQ ID NO: 2158982 - DNA, 25 bp, Homo sapien
acacacagtcaagcggaggaaccgc

SEQ ID NO: 2158983 - DNA, 25 bp, Homo sapien
ggacacacagtcaagcggaggaacc

SEQ ID NO: 2158984 - DNA, 25 bp, Homo sapien
acacagtcaagcggaggaaccgcat

SEQ ID NO: 2158985 - DNA, 25 bp, Homo sapien
cattaaaactgaagctggcccgtcc

SEQ ID NO: 2158986 - DNA, 25 bp, Homo sapien
cttttccaggaatcaagctgcctct

SEQ ID NO: 2158987 - DNA, 25 bp, Homo sapien
gctgcctctcggaagactcaggtct

SEQ ID NO: 2158988 - DNA, 25 bp, Homo sapien
ttccagcccagtagtcttttccagg

SEQ ID NO: 2158989 - DNA, 25 bp, Homo sapien
cagcacctcaggttctccagtcagc

SEQ ID NO: 2158990 - DNA, 25 bp, Homo sapien
agcacctcaggttctccagtcagcc

SEQ ID NO: 2158991 - DNA, 25 bp, Homo sapien
acagcacctcaggttctccagtcag

SEQ ID NO: 2158992 - DNA, 25 bp, Homo sapien
gaactcatgggctcgttcttctctt

SEQ ID NO: 2158993 - DNA, 25 bp, Homo sapien
actcatgggctcgttcttctcttac

SEQ ID NO: 2158994 - DNA, 25 bp, Homo sapien
aactcatgggctcgttcttctctta

SEQ ID NO: 2158995 - DNA, 25 bp, Homo sapien
ggaactcatgggctcgttcttctct

SEQ ID NO: 2158996 - DNA, 25 bp, Homo sapien
gctctctgataggtctgggaatcca

SEQ ID NO: 2158997 - DNA, 25 bp, Homo sapien
gatagaatgcatgtctgcgaagcct

SEQ ID NO: 2158998 - DNA, 25 bp, Homo sapien
tccagagttgtatcctagaggcagg

SEQ ID NO: 2158999 - DNA, 25 bp, Homo sapien
taatcacctccagcatagatgagtg

SEQ ID NO: 2159000 - DNA, 25 bp, Homo sapien
gatgacgtgatctctggtacctcca

SEQ ID NO: 2159001 - DNA, 25 bp, Homo sapien
cactgagtgcctaatgtgagccagg

SEQ ID NO: 2159002 - DNA, 25 bp, Homo sapien
ggtacctccattcagaatactgcat

SEQ ID NO: 2159003 - DNA, 25 bp, Homo sapien
gattcttcatgtggatctgcagcag

SEQ ID NO: 2159004 - DNA, 25 bp, Homo sapien
caatcttactaatacgaagcgggaa

SEQ ID NO: 2159005 - DNA, 25 bp, Homo sapien
tcatagacttcttaacagacaatgg

SEQ ID NO: 2159006 - DNA, 25 bp, Homo sapien
gacaatggcagtattttcctatcac

SEQ ID NO: 2159007 - DNA, 25 bp, Homo sapien
tcatccaccagcaatagacttattt

SEQ ID NO: 2159008 - DNA, 25 bp, Homo sapien
ctgtgttaaagttgaaatggtatct

SEQ ID NO: 2159009 - DNA, 25 bp, Homo sapien
gtgttaaagttgaaatggtatcttc

SEQ ID NO: 2159010 - DNA, 25 bp, Homo sapien
gttaaagttgaaatggtatcttctg

SEQ ID NO: 2159011 - DNA, 25 bp, Homo sapien
taaagttgaaatggtatcttctggc

SEQ ID NO: 2159012 - DNA, 25 bp, Homo sapien
tccagtggccgcagatcggggagaa

SEQ ID NO: 2159013 - DNA, 25 bp, Homo sapien
agaagtttggttgtatgtttcgatc

SEQ ID NO: 2159014 - DNA, 25 bp, Homo sapien
taaaaattttcatgctgatgggcag

SEQ ID NO: 2159015 - DNA, 25 bp, Homo sapien
attttcatgctgatgggcagtccag

SEQ ID NO: 2159016 - DNA, 25 bp, Homo sapien
tacacagcaaaaagtgctgacccaa

SEQ ID NO: 2159017 - DNA, 25 bp, Homo sapien
caaccttctatgaagatacacagca

SEQ ID NO: 2159018 - DNA, 25 bp, Homo sapien
cagcaaaaagtgctgacccaatcat

SEQ ID NO: 2159019 - DNA, 25 bp, Homo sapien
cttgtccaaccttctatgaagatac

SEQ ID NO: 2159020 - DNA, 25 bp, Homo sapien
ttcagtaaggataaggatctttctc

SEQ ID NO: 2159021 - DNA, 25 bp, Homo sapien
tctcctgtgttgcatctctgtatcg

SEQ ID NO: 2159022 - DNA, 25 bp, Homo sapien
cttcacaaagccttcaaactggctt

SEQ ID NO: 2159023 - DNA, 25 bp, Homo sapien
tctctgtatcgttttcatgaataca

SEQ ID NO: 2159024 - DNA, 25 bp, Homo sapien
ccacggcagctgttgacggctattg

SEQ ID NO: 2159025 - DNA, 25 bp, Homo sapien
cagtgcgagagcatcaaggtttgga

SEQ ID NO: 2159026 - DNA, 25 bp, Homo sapien
gcaatgcaaaaaccaagcttggtgg

SEQ ID NO: 2159027 - DNA, 25 bp, Homo sapien
tgacggctattgcttccctgggaaa

SEQ ID NO: 2159028 - DNA, 25 bp, Homo sapien
gaactgtcctcaatgtggagtgctg

SEQ ID NO: 2159029 - DNA, 25 bp, Homo sapien
actgtcctcaatgtggagtgctgcc

SEQ ID NO: 2159030 - DNA, 25 bp, Homo sapien
aactgtcctcaatgtggagtgctgc

SEQ ID NO: 2159031 - DNA, 25 bp, Homo sapien
tgtcctcaatgtggagtgctgcctc

SEQ ID NO: 2159032 - DNA, 25 bp, Homo sapien
tctttcttcgtctcctctttgttta

SEQ ID NO: 2159033 - DNA, 25 bp, Homo sapien
gacatgtgccgcaatttgaggattc

SEQ ID NO: 2159034 - DNA, 25 bp, Homo sapien
gttgttttactgctggcctcactta

SEQ ID NO: 2159035 - DNA, 25 bp, Homo sapien
ggcctcacttatgacatgtgccgca

SEQ ID NO: 2159036 - DNA, 25 bp, Homo sapien
gccgcaatttgaggattctgatcac

SEQ ID NO: 2159037 - DNA, 25 bp, Homo sapien
gtagggcaagattttagcagcatgg

SEQ ID NO: 2159038 - DNA, 25 bp, Homo sapien
ctgtgggatgtagggcaagatttta

SEQ ID NO: 2159039 - DNA, 25 bp, Homo sapien
ctaattttagtacttgctgtgggat

SEQ ID NO: 2159040 - DNA, 25 bp, Homo sapien
taattttagtacttgctgtgggatg

SEQ ID NO: 2159041 - DNA, 25 bp, Homo sapien
gagtccttgtcttttaacggtcagc

SEQ ID NO: 2159042 - DNA, 25 bp, Homo sapien
caagtgaatggattgttgcccgcaa

SEQ ID NO: 2159043 - DNA, 25 bp, Homo sapien
ccaaaggacgtgaagccagtgccat

SEQ ID NO: 2159044 - DNA, 25 bp, Homo sapien
ttgacaaacaccgaagcacctggtt

SEQ ID NO: 2159045 - DNA, 25 bp, Homo sapien
cataactgaatgtgagctgaggctc

SEQ ID NO: 2159046 - DNA, 25 bp, Homo sapien
gaagagaactgactagcaacggcct

SEQ ID NO: 2159047 - DNA, 25 bp, Homo sapien
tattatgaagactcccagcgtcagc

SEQ ID NO: 2159048 - DNA, 25 bp, Homo sapien
tataagctcttatggagcagggccc

SEQ ID NO: 2159049 - DNA, 25 bp, Homo sapien
aattaaactgctgcccgtagaggcc

SEQ ID NO: 2159050 - DNA, 25 bp, Homo sapien
tactctggataacgaagcttgtgca

SEQ ID NO: 2159051 - DNA, 25 bp, Homo sapien
aatgaagccatgttaatctgagagc

SEQ ID NO: 2159052 - DNA, 25 bp, Homo sapien
tctgagagcagtgtcgccatagttg

SEQ ID NO: 2159053 - DNA, 25 bp, Homo sapien
cttcagggccagatcgagtacctcc

SEQ ID NO: 2159054 - DNA, 25 bp, Homo sapien
cactggataactcactgtcgcaaga

SEQ ID NO: 2159055 - DNA, 25 bp, Homo sapien
tgaattccatctgcccttcagggcc

SEQ ID NO: 2159056 - DNA, 25 bp, Homo sapien
gaacagttctgccttgagcattgcc

SEQ ID NO: 2159057 - DNA, 25 bp, Homo sapien
taagagtctacatgtagatggtcag

SEQ ID NO: 2159058 - DNA, 25 bp, Homo sapien
tgcctggcatagacaccaggtgttc

SEQ ID NO: 2159059 - DNA, 25 bp, Homo sapien
tactttatgccaagctagggtactt

SEQ ID NO: 2159060 - DNA, 25 bp, Homo sapien
tagggctaatgtacctgtgggtgac

SEQ ID NO: 2159061 - DNA, 25 bp, Homo sapien
tatgaaaagccctgcctgtgaagca

SEQ ID NO: 2159062 - DNA, 25 bp, Homo sapien
tgtgaagcaggcctgaacactaatt

SEQ ID NO: 2159063 - DNA, 25 bp, Homo sapien
gagaaatgtatgcagatcaggagac

SEQ ID NO: 2159064 - DNA, 25 bp, Homo sapien
gtatgttcttcatgaggaggtctcc

SEQ ID NO: 2159065 - DNA, 25 bp, Homo sapien
tattctcgtacaggggccatatgaa

SEQ ID NO: 2159066 - DNA, 25 bp, Homo sapien
cacaaatttttgtgttattctcgta

SEQ ID NO: 2159067 - DNA, 25 bp, Homo sapien
cgtacaggggccatatgaatattct

SEQ ID NO: 2159068 - DNA, 25 bp, Homo sapien
atttttgtgttattctcgtacaggg

SEQ ID NO: 2159069 - DNA, 25 bp, Homo sapien
gccctgttgtgccagcacatctccc

SEQ ID NO: 2159070 - DNA, 25 bp, Homo sapien
tgagccctgttgtgccagcacatct

SEQ ID NO: 2159071 - DNA, 25 bp, Homo sapien
ttgagccctgttgtgccagcacatc

SEQ ID NO: 2159072 - DNA, 25 bp, Homo sapien
gagccctgttgtgccagcacatctc

SEQ ID NO: 2159073 - DNA, 25 bp, Homo sapien
agggtttctggaacagcaggaaact

SEQ ID NO: 2159074 - DNA, 25 bp, Homo sapien
gaacagcaggaaacttcttctcttt

SEQ ID NO: 2159075 - DNA, 25 bp, Homo sapien
tggaacagcaggaaacttcttctct

SEQ ID NO: 2159076 - DNA, 25 bp, Homo sapien
ttctggaacagcaggaaacttcttc

SEQ ID NO: 2159077 - DNA, 25 bp, Homo sapien
tttcctacaaaagcttcctccttgc

SEQ ID NO: 2159078 - DNA, 25 bp, Homo sapien
aaacttctctctcgggctctgcgaa

SEQ ID NO: 2159079 - DNA, 25 bp, Homo sapien
gggcaaacttctctctcgggctctg

SEQ ID NO: 2159080 - DNA, 25 bp, Homo sapien
ttctctctcgggctctgcgaaattc

SEQ ID NO: 2159081 - DNA, 25 bp, Homo sapien
gctattttactctcagctctgtaca

SEQ ID NO: 2159082 - DNA, 25 bp, Homo sapien
tattttactctcagctctgtacatt

SEQ ID NO: 2159083 - DNA, 25 bp, Homo sapien
tagctattttactctcagctctgta

SEQ ID NO: 2159084 - DNA, 25 bp, Homo sapien
agctattttactctcagctctgtac

SEQ ID NO: 2159085 - DNA, 25 bp, Homo sapien
tttgggctcagagcattgctacctc

SEQ ID NO: 2159086 - DNA, 25 bp, Homo sapien
tgggctcagagcattgctacctctg

SEQ ID NO: 2159087 - DNA, 25 bp, Homo sapien
ggctcagagcattgctacctctgat

SEQ ID NO: 2159088 - DNA, 25 bp, Homo sapien
ctcagagcattgctacctctgatcc

SEQ ID NO: 2159089 - DNA, 25 bp, Homo sapien
ttgaatccttgttgagctttgcaaa

SEQ ID NO: 2159090 - DNA, 25 bp, Homo sapien
aattgaatccttgttgagctttgca

SEQ ID NO: 2159091 - DNA, 25 bp, Homo sapien
attgaatccttgttgagctttgcaa

SEQ ID NO: 2159092 - DNA, 25 bp, Homo sapien
tgaatccttgttgagctttgcaaag

SEQ ID NO: 2159093 - DNA, 25 bp, Homo sapien
ccacgcttgtagattagctcattta

SEQ ID NO: 2159094 - DNA, 25 bp, Homo sapien
ccataaccacgcttgtagattagct

SEQ ID NO: 2159095 - DNA, 25 bp, Homo sapien
taaccacgcttgtagattagctcat

SEQ ID NO: 2159096 - DNA, 25 bp, Homo sapien
cataaccacgcttgtagattagctc

SEQ ID NO: 2159097 - DNA, 25 bp, Homo sapien
tcatcccacctcttggagaggataa

SEQ ID NO: 2159098 - DNA, 25 bp, Homo sapien
ttcttcatcccacctcttggagagg

SEQ ID NO: 2159099 - DNA, 25 bp, Homo sapien
tcccacctcttggagaggataattt

SEQ ID NO: 2159100 - DNA, 25 bp, Homo sapien
tcttcatcccacctcttggagagga

SEQ ID NO: 2159101 - DNA, 25 bp, Homo sapien
tgaatctcctataaacctactggtg

SEQ ID NO: 2159102 - DNA, 25 bp, Homo sapien
gaaaaggcacctgatttggatacta

SEQ ID NO: 2159103 - DNA, 25 bp, Homo sapien
tactggtgagagacctgctgtgcaa

SEQ ID NO: 2159104 - DNA, 25 bp, Homo sapien
gagataggtcctttgactgaggaac

SEQ ID NO: 2159105 - DNA, 25 bp, Homo sapien
ggagctggaagatattatgttaagc

SEQ ID NO: 2159106 - DNA, 25 bp, Homo sapien
ggcttgagctgatggatacctcaat

SEQ ID NO: 2159107 - DNA, 25 bp, Homo sapien
catgttattactcatatttgagagc

SEQ ID NO: 2159108 - DNA, 25 bp, Homo sapien
tgttcactagcatgatagggcaact

SEQ ID NO: 2159109 - DNA, 25 bp, Homo sapien
tttcaggttttactgtttgattatg

SEQ ID NO: 2159110 - DNA, 25 bp, Homo sapien
tgcccactaaggtaaccagcggctg

SEQ ID NO: 2159111 - DNA, 25 bp, Homo sapien
tttattgcccactaaggtaaccagc

SEQ ID NO: 2159112 - DNA, 25 bp, Homo sapien
cactaaggtaaccagcggctgagtt

SEQ ID NO: 2159113 - DNA, 25 bp, Homo sapien
ggttgtagtttacaatatctgcctt

SEQ ID NO: 2159114 - DNA, 25 bp, Homo sapien
ctggttgtagtttacaatatctgcc

SEQ ID NO: 2159115 - DNA, 25 bp, Homo sapien
cctggttgtagtttacaatatctgc

SEQ ID NO: 2159116 - DNA, 25 bp, Homo sapien
tggttgtagtttacaatatctgcct

SEQ ID NO: 2159117 - DNA, 25 bp, Homo sapien
gaaggtgaagttcaaacacggcaca

SEQ ID NO: 2159118 - DNA, 25 bp, Homo sapien
cagttttcggattgtagcacaggaa

SEQ ID NO: 2159119 - DNA, 25 bp, Homo sapien
gactaggggcagttttcggattgta

SEQ ID NO: 2159120 - DNA, 25 bp, Homo sapien
gttcaaacacggcacattgttctca

SEQ ID NO: 2159121 - DNA, 25 bp, Homo sapien
ctgtgtgcctgcacatgtaatatgc

SEQ ID NO: 2159122 - DNA, 25 bp, Homo sapien
ggcttggcgcagatgttctttgtct

SEQ ID NO: 2159123 - DNA, 25 bp, Homo sapien
aaggtgtagttttcagggtggcctg

SEQ ID NO: 2159124 - DNA, 25 bp, Homo sapien
ggctccagtgctgcctaaatggaac

SEQ ID NO: 2159125 - DNA, 25 bp, Homo sapien
tttactgacctagcagatgtgtgga

SEQ ID NO: 2159126 - DNA, 25 bp, Homo sapien
catttgcaactagggataatacaac

SEQ ID NO: 2159127 - DNA, 25 bp, Homo sapien
tactactaatcacagaccacaaggg

SEQ ID NO: 2159128 - DNA, 25 bp, Homo sapien
ggttaacgcttctgtgaggaccttc

SEQ ID NO: 2159129 - DNA, 25 bp, Homo sapien
agctgtatctagtgaagtgtctgtc

SEQ ID NO: 2159130 - DNA, 25 bp, Homo sapien
tcctgtggatctgaggaaggcatca

SEQ ID NO: 2159131 - DNA, 25 bp, Homo sapien
taagtcactacagttgcataagcag

SEQ ID NO: 2159132 - DNA, 25 bp, Homo sapien
cataagcagtgctgtcagaattggt

SEQ ID NO: 2159133 - DNA, 25 bp, Homo sapien
cgtggcagtgcaccattggaacaga

SEQ ID NO: 2159134 - DNA, 25 bp, Homo sapien
cttgacatttagttggatgcctgac

SEQ ID NO: 2159135 - DNA, 25 bp, Homo sapien
tgacccaggtccagccatgaagttg

SEQ ID NO: 2159136 - DNA, 25 bp, Homo sapien
tagagctgttgtttaccaatggcga

SEQ ID NO: 2159137 - DNA, 25 bp, Homo sapien
gaatctatcagcattccacatcaga

SEQ ID NO: 2159138 - DNA, 25 bp, Homo sapien
aaaagtgaatctatcagcattccac

SEQ ID NO: 2159139 - DNA, 25 bp, Homo sapien
ctaaaaagtgaatctatcagcattc

SEQ ID NO: 2159140 - DNA, 25 bp, Homo sapien
tcagcattccacatcagatttaaag

SEQ ID NO: 2159141 - DNA, 25 bp, Homo sapien
tatgtaaggaaagtgctattcaccc

SEQ ID NO: 2159142 - DNA, 25 bp, Homo sapien
gaaatctcaatgttctcagtacgaa

SEQ ID NO: 2159143 - DNA, 25 bp, Homo sapien
tcccagcaaatgaggcaggcaattc

SEQ ID NO: 2159144 - DNA, 25 bp, Homo sapien
gggtgtcttccaactgaaatctcaa

SEQ ID NO: 2159145 - DNA, 25 bp, Homo sapien
gacagttactcaagcagccgaagtg

SEQ ID NO: 2159146 - DNA, 25 bp, Homo sapien
gatgattacagcagctcacgtgacg

SEQ ID NO: 2159147 - DNA, 25 bp, Homo sapien
gaccctgcaggtaactcacgtagtg

SEQ ID NO: 2159148 - DNA, 25 bp, Homo sapien
tctactcaagtggtcgtgatcgggt

SEQ ID NO: 2159149 - DNA, 25 bp, Homo sapien
tgaatgttcccagccaatgttggtg

SEQ ID NO: 2159150 - DNA, 25 bp, Homo sapien
aaagttagtcccctgaccagtgtcg

SEQ ID NO: 2159151 - DNA, 25 bp, Homo sapien
ttcgtattcattggcggccccggag

SEQ ID NO: 2159152 - DNA, 25 bp, Homo sapien
catgtggacttccatgcgggctgcg

SEQ ID NO: 2159153 - DNA, 25 bp, Homo sapien
catgaaatcggcacccgtggaggaa

SEQ ID NO: 2159154 - DNA, 25 bp, Homo sapien
taagcggaaatgacaagagcctcgg

SEQ ID NO: 2159155 - DNA, 25 bp, Homo sapien
cgagtactcatttcgggagccggct

SEQ ID NO: 2159156 - DNA, 25 bp, Homo sapien
gatagaacatggttcgcaacccggt

SEQ ID NO: 2159157 - DNA, 25 bp, Homo sapien
gatgtcgtcgttaaatgttccctaa

SEQ ID NO: 2159158 - DNA, 25 bp, Homo sapien
tacatagcactgaagatatacaaga

SEQ ID NO: 2159159 - DNA, 25 bp, Homo sapien
ggtaaagttattgctactcctgcca

SEQ ID NO: 2159160 - DNA, 25 bp, Homo sapien
tatgttgacaacctacaaatgttgg

SEQ ID NO: 2159161 - DNA, 25 bp, Homo sapien
attacaggcgcccaacactacgcct

SEQ ID NO: 2159162 - DNA, 25 bp, Homo sapien
tatttttagtagagatcggtttcgc

SEQ ID NO: 2159163 - DNA, 25 bp, Homo sapien
gattacaggcgcccaacactacgcc

SEQ ID NO: 2159164 - DNA, 25 bp, Homo sapien
ttacaggcgcccaacactacgcctg

SEQ ID NO: 2159165 - DNA, 25 bp, Homo sapien
tcatggaagacaaccgaagcgcctt

SEQ ID NO: 2159166 - DNA, 25 bp, Homo sapien
cagagtaaagcttcagaccttcacg

SEQ ID NO: 2159167 - DNA, 25 bp, Homo sapien
tcttctagacgttcggatgtgtccg

SEQ ID NO: 2159168 - DNA, 25 bp, Homo sapien
taatccctgaggtagactcaaaagt

SEQ ID NO: 2159169 - DNA, 25 bp, Homo sapien
aggttttcacaagcctatactactt

SEQ ID NO: 2159170 - DNA, 25 bp, Homo sapien
aaattggagaggattacgaggagac

SEQ ID NO: 2159171 - DNA, 25 bp, Homo sapien
tgtttcataataaggaggtgtgagg

SEQ ID NO: 2159172 - DNA, 25 bp, Homo sapien
tctcacatgaagttatacacagtat

SEQ ID NO: 2159173 - DNA, 25 bp, Homo sapien
tctacaaactggcactaaagcaggt

SEQ ID NO: 2159174 - DNA, 25 bp, Homo sapien
gagacatcgcaagggaaagggttta

SEQ ID NO: 2159175 - DNA, 25 bp, Homo sapien
cgctggagagacatcgcaagggaaa

SEQ ID NO: 2159176 - DNA, 25 bp, Homo sapien
actggcactaaagcaggtttgtcag

SEQ ID NO: 2159177 - DNA, 25 bp, Homo sapien
aataagcaagagcaagattactgtg

SEQ ID NO: 2159178 - DNA, 25 bp, Homo sapien
gaaaagctgagagtctcggtggagg

SEQ ID NO: 2159179 - DNA, 25 bp, Homo sapien
tggagggggtatgaccatcaaaata

SEQ ID NO: 2159180 - DNA, 25 bp, Homo sapien
gcaagagcaagattactgtgacttc

SEQ ID NO: 2159181 - DNA, 25 bp, Homo sapien
tagaagcccacttgacagttttgtt

SEQ ID NO: 2159182 - DNA, 25 bp, Homo sapien
gactccaaaatctaatcccacctag

SEQ ID NO: 2159183 - DNA, 25 bp, Homo sapien
aaaccactgaatattagcatgaggc

SEQ ID NO: 2159184 - DNA, 25 bp, Homo sapien
cacctagaagcccacttgacagttt

SEQ ID NO: 2159185 - DNA, 25 bp, Homo sapien
acaggtcattaaagctcctccattg

SEQ ID NO: 2159186 - DNA, 25 bp, Homo sapien
ggacccataacacaatggcacaggt

SEQ ID NO: 2159187 - DNA, 25 bp, Homo sapien
acacatatctggcaggggttcccag

SEQ ID NO: 2159188 - DNA, 25 bp, Homo sapien
tatacattatagcagacacatatct

SEQ ID NO: 2159189 - DNA, 25 bp, Homo sapien
aactgcagtcactaacgacgctgca

SEQ ID NO: 2159190 - DNA, 25 bp, Homo sapien
gaaactgcagtcactaacgacgctg

SEQ ID NO: 2159191 - DNA, 25 bp, Homo sapien
gcagtcactaacgacgctgcagtaa

SEQ ID NO: 2159192 - DNA, 25 bp, Homo sapien
ctgcagtcactaacgacgctgcagt

SEQ ID NO: 2159193 - DNA, 25 bp, Homo sapien
gaactagaagcctacaatgacaaga

SEQ ID NO: 2159194 - DNA, 25 bp, Homo sapien
aaatggatgccatcactcaaggaga

SEQ ID NO: 2159195 - DNA, 25 bp, Homo sapien
aacccacaggtgaggatataactag

SEQ ID NO: 2159196 - DNA, 25 bp, Homo sapien
cacatttgataggaggatgacagaa

SEQ ID NO: 2159197 - DNA, 25 bp, Homo sapien
caagcattgggtctcccattctcca

SEQ ID NO: 2159198 - DNA, 25 bp, Homo sapien
aaacaaatgacattcaccctcacca

SEQ ID NO: 2159199 - DNA, 25 bp, Homo sapien
catccaagcataggaaagggtcttc

SEQ ID NO: 2159200 - DNA, 25 bp, Homo sapien
caccaagagacgttcaccttcatta

SEQ ID NO: 2159201 - DNA, 25 bp, Homo sapien
tgtctgggaatagctcatcatcctc

SEQ ID NO: 2159202 - DNA, 25 bp, Homo sapien
ccagggagaacttcaggtagtaaca

SEQ ID NO: 2159203 - DNA, 25 bp, Homo sapien
aaaaatcatgtttccgtgtctccag

SEQ ID NO: 2159204 - DNA, 25 bp, Homo sapien
cctccaaggcgaaggtacaggccat

SEQ ID NO: 2159205 - DNA, 25 bp, Homo sapien
gatggactcaggattcttccaccga

SEQ ID NO: 2159206 - DNA, 25 bp, Homo sapien
aactataaaataggcggtgcaccct

SEQ ID NO: 2159207 - DNA, 25 bp, Homo sapien
caccctgggatagggagcgatctcc

SEQ ID NO: 2159208 - DNA, 25 bp, Homo sapien
cgatctccaagcgaggcggcaagat

SEQ ID NO: 2159209 - DNA, 25 bp, Homo sapien
tcctagcttttgagagattcgtttc

SEQ ID NO: 2159210 - DNA, 25 bp, Homo sapien
gagagattcgtttcagctgttatca

SEQ ID NO: 2159211 - DNA, 25 bp, Homo sapien
gtttagccacaatattcctctgcca

SEQ ID NO: 2159212 - DNA, 25 bp, Homo sapien
tgtttagccacaatattcctctgcc

SEQ ID NO: 2159213 - DNA, 25 bp, Homo sapien
aggagacggcagctgatgacccttc

SEQ ID NO: 2159214 - DNA, 25 bp, Homo sapien
cagagtagcaaaggagacggcagct

SEQ ID NO: 2159215 - DNA, 25 bp, Homo sapien
gatatctagcagagtagcaaaggag

SEQ ID NO: 2159216 - DNA, 25 bp, Homo sapien
accaaattgtaaggatatctagcag

SEQ ID NO: 2159217 - DNA, 25 bp, Homo sapien
tggaataggctaacttcaaatctgt

SEQ ID NO: 2159218 - DNA, 25 bp, Homo sapien
tatttcagtcatcgctcagtggcca

SEQ ID NO: 2159219 - DNA, 25 bp, Homo sapien
tctgtaaaccgaatagccccattcc

SEQ ID NO: 2159220 - DNA, 25 bp, Homo sapien
cctatacctttctccgatatgtgga

SEQ ID NO: 2159221 - DNA, 25 bp, Homo sapien
ttataatttccaagggagagactgg

SEQ ID NO: 2159222 - DNA, 25 bp, Homo sapien
catgcgaccagtggcaccatactaa

SEQ ID NO: 2159223 - DNA, 25 bp, Homo sapien
gacacacagctaaacaatcaatgag

SEQ ID NO: 2159224 - DNA, 25 bp, Homo sapien
cgttatctttgtcgttgttctaagt

SEQ ID NO: 2159225 - DNA, 25 bp, Homo sapien
taaagaagttctatggaggaatctg

SEQ ID NO: 2159226 - DNA, 25 bp, Homo sapien
ctgttcagaatgaaaaagagttgaa

SEQ ID NO: 2159227 - DNA, 25 bp, Homo sapien
gccaccaattatgatgccaagaagt

SEQ ID NO: 2159228 - DNA, 25 bp, Homo sapien
aatacagccgaaggggaaaatgcca

SEQ ID NO: 2159229 - DNA, 25 bp, Homo sapien
gattcaaataccacttttgccttag

SEQ ID NO: 2159230 - DNA, 25 bp, Homo sapien
tttgccttagaaagcctgttgacat

SEQ ID NO: 2159231 - DNA, 25 bp, Homo sapien
taccaacaacgacatcataaaacag

SEQ ID NO: 2159232 - DNA, 25 bp, Homo sapien
ttgaaggctgcaaatgccataaata

SEQ ID NO: 2159233 - DNA, 25 bp, Homo sapien
catataagttagttctcacttgaga

SEQ ID NO: 2159234 - DNA, 25 bp, Homo sapien
tagttctcacttgagactcatcaat

SEQ ID NO: 2159235 - DNA, 25 bp, Homo sapien
tcacttgagactcatcaatatcacc

SEQ ID NO: 2159236 - DNA, 25 bp, Homo sapien
tttctctggtcatataagttagttc

SEQ ID NO: 2159237 - DNA, 25 bp, Homo sapien
gtcccttacctatgcagtttcagag

SEQ ID NO: 2159238 - DNA, 25 bp, Homo sapien
tcttctctagtcagaaccagtgctg

SEQ ID NO: 2159239 - DNA, 25 bp, Homo sapien
agtttcagagtttggccgtatcttc

SEQ ID NO: 2159240 - DNA, 25 bp, Homo sapien
gacagtcatacacttctctaaacct

SEQ ID NO: 2159241 - DNA, 25 bp, Homo sapien
tctgagcaagtaatcacaagaatta

SEQ ID NO: 2159242 - DNA, 25 bp, Homo sapien
caaacatgtagtacagctaatgaga

SEQ ID NO: 2159243 - DNA, 25 bp, Homo sapien
aaacatgtagtacagctaatgagac

SEQ ID NO: 2159244 - DNA, 25 bp, Homo sapien
caaaactgtaacttctgagcaagta

SEQ ID NO: 2159245 - DNA, 25 bp, Homo sapien
ttccaataatgcaagtatagcaaat

SEQ ID NO: 2159246 - DNA, 25 bp, Homo sapien
atgcattagtttcttatggctttac

SEQ ID NO: 2159247 - DNA, 25 bp, Homo sapien
atgcaagtatagcaaatgcattagt

SEQ ID NO: 2159248 - DNA, 25 bp, Homo sapien
ttctaaacacagacttccaattcca

SEQ ID NO: 2159249 - DNA, 25 bp, Homo sapien
ccaaagtacaaaatagagctcgcaa

SEQ ID NO: 2159250 - DNA, 25 bp, Homo sapien
agaagtaatgaactgcatacgtaaa

SEQ ID NO: 2159251 - DNA, 25 bp, Homo sapien
gttaaaaatcgccaccaccaatgat

SEQ ID NO: 2159252 - DNA, 25 bp, Homo sapien
gagctcgcaatttctgtgatttgaa

SEQ ID NO: 2159253 - DNA, 25 bp, Homo sapien
tgatgtttattacattatggctatc

SEQ ID NO: 2159254 - DNA, 25 bp, Homo sapien
ccaagactcttaagagagtctgaaa

SEQ ID NO: 2159255 - DNA, 25 bp, Homo sapien
cattatggctatctccaagactctt

SEQ ID NO: 2159256 - DNA, 25 bp, Homo sapien
tatctccaagactcttaagagagtc

SEQ ID NO: 2159257 - DNA, 25 bp, Homo sapien
acttactggttggttaacaatcagc

SEQ ID NO: 2159258 - DNA, 25 bp, Homo sapien
tgactgtgaacaagtcaatctctct

SEQ ID NO: 2159259 - DNA, 25 bp, Homo sapien
tgttaccaagcccatagaagatgct

SEQ ID NO: 2159260 - DNA, 25 bp, Homo sapien
taaggtagagctagcaacaacttgg

SEQ ID NO: 2159261 - DNA, 25 bp, Homo sapien
gaaaaggaattccacttatgcaact

SEQ ID NO: 2159262 - DNA, 25 bp, Homo sapien
aaaggaattccacttatgcaactaa

SEQ ID NO: 2159263 - DNA, 25 bp, Homo sapien
tgaaaaggaattccacttatgcaac

SEQ ID NO: 2159264 - DNA, 25 bp, Homo sapien
gtgaaaaggaattccacttatgcaa

SEQ ID NO: 2159265 - DNA, 25 bp, Homo sapien
agaaatggccccatattcaaaaaat

SEQ ID NO: 2159266 - DNA, 25 bp, Homo sapien
agcccacgaattcaaatgcagcctg

SEQ ID NO: 2159267 - DNA, 25 bp, Homo sapien
aattacatgcaaaatggtgataata

SEQ ID NO: 2159268 - DNA, 25 bp, Homo sapien
gtcaggtgcactggcacgtgcctgt

SEQ ID NO: 2159269 - DNA, 25 bp, Homo sapien
ttaaagaaatgtgcctcccttgctc

SEQ ID NO: 2159270 - DNA, 25 bp, Homo sapien
catctgaaaaaccagtatggtactc

SEQ ID NO: 2159271 - DNA, 25 bp, Homo sapien
ttttagcaattaaccagaaacagga

SEQ ID NO: 2159272 - DNA, 25 bp, Homo sapien
tattcaagggcaagggagatgtgct

SEQ ID NO: 2159273 - DNA, 25 bp, Homo sapien
cgtgaactgacaggtttcgcgcttg

SEQ ID NO: 2159274 - DNA, 25 bp, Homo sapien
tggcagatccataatgtgaccatcc

SEQ ID NO: 2159275 - DNA, 25 bp, Homo sapien
catgccctcctaaagcagtagcaaa

SEQ ID NO: 2159276 - DNA, 25 bp, Homo sapien
tccatgccctcctaaagcagtagca

SEQ ID NO: 2159277 - DNA, 25 bp, Homo sapien
caggaatagtccatgcttgaagctc

SEQ ID NO: 2159278 - DNA, 25 bp, Homo sapien
gctgcactggcccttcaggaatagt

SEQ ID NO: 2159279 - DNA, 25 bp, Homo sapien
gaagctctgcgtgttcacctactcc

SEQ ID NO: 2159280 - DNA, 25 bp, Homo sapien
ccatgcttgaagctctgcgtgttca

SEQ ID NO: 2159281 - DNA, 25 bp, Homo sapien
tggtcaaaggaagtgctctatttgg

SEQ ID NO: 2159282 - DNA, 25 bp, Homo sapien
ggtcaaaggaagtgctctatttggc

SEQ ID NO: 2159283 - DNA, 25 bp, Homo sapien
gtaacagcataagcaggatgtcttc

SEQ ID NO: 2159284 - DNA, 25 bp, Homo sapien
ggctctacctcctgtactctttctg

SEQ ID NO: 2159285 - DNA, 25 bp, Homo sapien
agtctacatcggcatcgggtcctgt

SEQ ID NO: 2159286 - DNA, 25 bp, Homo sapien
tgtcttcctggagctagagggcatt

SEQ ID NO: 2159287 - DNA, 25 bp, Homo sapien
tgatcttctgtcactgataaccttt

SEQ ID NO: 2159288 - DNA, 25 bp, Homo sapien
ttgatcttctgtcactgataacctt

SEQ ID NO: 2159289 - DNA, 25 bp, Homo sapien
atttgatcttctgtcactgataacc

SEQ ID NO: 2159290 - DNA, 25 bp, Homo sapien
tttgatcttctgtcactgataacct

SEQ ID NO: 2159291 - DNA, 25 bp, Homo sapien
tttgaagagtttttttgtgtctcta

SEQ ID NO: 2159292 - DNA, 25 bp, Homo sapien
gatgccctgagcttgccggatgttc

SEQ ID NO: 2159293 - DNA, 25 bp, Homo sapien
tgccctgagcttgccggatgttctc

SEQ ID NO: 2159294 - DNA, 25 bp, Homo sapien
ctccatttatgatcaagtcatatgc

SEQ ID NO: 2159295 - DNA, 25 bp, Homo sapien
catttatgatcaagtcatatgcaga

SEQ ID NO: 2159296 - DNA, 25 bp, Homo sapien
ttcatcaaatcgtacatcatacaca

SEQ ID NO: 2159297 - DNA, 25 bp, Homo sapien
ccttcatcaaatcgtacatcataca

SEQ ID NO: 2159298 - DNA, 25 bp, Homo sapien
cctgcgtttctcagtcaaccacaag

SEQ ID NO: 2159299 - DNA, 25 bp, Homo sapien
ggccccttcatcaaatcgtacatca

SEQ ID NO: 2159300 - DNA, 25 bp, Homo sapien
tcaaagtcgagtgctatttccacca

SEQ ID NO: 2159301 - DNA, 25 bp, Homo sapien
tcctgcaacttcatccccaaagatg

SEQ ID NO: 2159302 - DNA, 25 bp, Homo sapien
caaagtcgagtgctatttccaccac

SEQ ID NO: 2159303 - DNA, 25 bp, Homo sapien
aaagatggagccacattccttggaa

SEQ ID NO: 2159304 - DNA, 25 bp, Homo sapien
gaacagagagactttggggttagca

SEQ ID NO: 2159305 - DNA, 25 bp, Homo sapien
aacagagagactttggggttagcat

SEQ ID NO: 2159306 - DNA, 25 bp, Homo sapien
ccaaggcaagtggccctcaactcca

SEQ ID NO: 2159307 - DNA, 25 bp, Homo sapien
agtggccctcaactccaggaacaga

SEQ ID NO: 2159308 - DNA, 25 bp, Homo sapien
ctgtagcaagcccatgttggataac

SEQ ID NO: 2159309 - DNA, 25 bp, Homo sapien
gcaagcccatgttggataaccacat

SEQ ID NO: 2159310 - DNA, 25 bp, Homo sapien
tgttggataaccacatcagaaaggg

SEQ ID NO: 2159311 - DNA, 25 bp, Homo sapien
gcccatgttggataaccacatcaga

SEQ ID NO: 2159312 - DNA, 25 bp, Homo sapien
acagagagtcgaaatccagcaagca

SEQ ID NO: 2159313 - DNA, 25 bp, Homo sapien
caagtgcagagctcgacaggaagac

SEQ ID NO: 2159314 - DNA, 25 bp, Homo sapien
tactttgaattaggcccgacaacca

SEQ ID NO: 2159315 - DNA, 25 bp, Homo sapien
caactctttgagcatgacttgcatg

SEQ ID NO: 2159316 - DNA, 25 bp, Homo sapien
gatacatttgtgatgcatgatatgc

SEQ ID NO: 2159317 - DNA, 25 bp, Homo sapien
catgatatgccatagaaaacaacca

SEQ ID NO: 2159318 - DNA, 25 bp, Homo sapien
tacatttgtgatgcatgatatgcca

SEQ ID NO: 2159319 - DNA, 25 bp, Homo sapien
tgtgatgcatgatatgccatagaaa

SEQ ID NO: 2159320 - DNA, 25 bp, Homo sapien
cccatctgctctggtcagtttcttt

SEQ ID NO: 2159321 - DNA, 25 bp, Homo sapien
tgtttctgacagctaaagctgccag

SEQ ID NO: 2159322 - DNA, 25 bp, Homo sapien
tgctctggtcagtttcttttcccca

SEQ ID NO: 2159323 - DNA, 25 bp, Homo sapien
ttccccagctggcatcagggtgtca

SEQ ID NO: 2159324 - DNA, 25 bp, Homo sapien
tctgtagggcttagcagacagcagc

SEQ ID NO: 2159325 - DNA, 25 bp, Homo sapien
agctgcagtgcggaccaccagtttc

SEQ ID NO: 2159326 - DNA, 25 bp, Homo sapien
gtcagaacagtcaagcaggagcgca

SEQ ID NO: 2159327 - DNA, 25 bp, Homo sapien
taaaaggccgatcagcagccattgt

SEQ ID NO: 2159328 - DNA, 25 bp, Homo sapien
ttgttttctcgcgggttaatcactg

SEQ ID NO: 2159329 - DNA, 25 bp, Homo sapien
ctccaacatcaacttagccttgtgt

SEQ ID NO: 2159330 - DNA, 25 bp, Homo sapien
caacatcaacttagccttgtgtagt

SEQ ID NO: 2159331 - DNA, 25 bp, Homo sapien
gttttctcgcgggttaatcactgac

SEQ ID NO: 2159332 - DNA, 25 bp, Homo sapien
cagcaactgggtgatgttaatcaca

SEQ ID NO: 2159333 - DNA, 25 bp, Homo sapien
ttaaataggaattgcccgataaatc

SEQ ID NO: 2159334 - DNA, 25 bp, Homo sapien
ggaattgcccgataaatcagcaact

SEQ ID NO: 2159335 - DNA, 25 bp, Homo sapien
tcacatttcggttgttactggaggg

SEQ ID NO: 2159336 - DNA, 25 bp, Homo sapien
acttgaaagtcaagaggcactggtg

SEQ ID NO: 2159337 - DNA, 25 bp, Homo sapien
aacaagaaatgggtagagagtcatt

SEQ ID NO: 2159338 - DNA, 25 bp, Homo sapien
tagaaggaggtatggagggtccaca

SEQ ID NO: 2159339 - DNA, 25 bp, Homo sapien
agagtcattggtggcagaaacagca

SEQ ID NO: 2159340 - DNA, 25 bp, Homo sapien
ttttatagcgccagccagagaagcc

SEQ ID NO: 2159341 - DNA, 25 bp, Homo sapien
ttcccgccctttcggatcagagttg

SEQ ID NO: 2159342 - DNA, 25 bp, Homo sapien
tcagagttgcaagcaccacttaggc

SEQ ID NO: 2159343 - DNA, 25 bp, Homo sapien
gaaagcctcatatctttttatagcg

SEQ ID NO: 2159344 - DNA, 25 bp, Homo sapien
ttctagcctcaagttttcaccacct

SEQ ID NO: 2159345 - DNA, 25 bp, Homo sapien
ggtttgcttgccctgacttgagtaa

SEQ ID NO: 2159346 - DNA, 25 bp, Homo sapien
ctgacttgagtaaggcttctagcct

SEQ ID NO: 2159347 - DNA, 25 bp, Homo sapien
cactcaaacgagtgaggtcaacata

SEQ ID NO: 2159348 - DNA, 25 bp, Homo sapien
tcagatcattctgtgcaacccatct

SEQ ID NO: 2159349 - DNA, 25 bp, Homo sapien
ttctgtgcaacccatcttgtgcctt

SEQ ID NO: 2159350 - DNA, 25 bp, Homo sapien
cagatcattctgtgcaacccatctt

SEQ ID NO: 2159351 - DNA, 25 bp, Homo sapien
tctgtgcaacccatcttgtgccttt

SEQ ID NO: 2159352 - DNA, 25 bp, Homo sapien
tactgctttcactcttggtacactt

SEQ ID NO: 2159353 - DNA, 25 bp, Homo sapien
tacactttaccactcctcccaccac

SEQ ID NO: 2159354 - DNA, 25 bp, Homo sapien
ctactgctttcactcttggtacact

SEQ ID NO: 2159355 - DNA, 25 bp, Homo sapien
tctcctactgctttcactcttggta

SEQ ID NO: 2159356 - DNA, 25 bp, Homo sapien
ctccaatgactgctggcagaagggt

SEQ ID NO: 2159357 - DNA, 25 bp, Homo sapien
gcagaagggtgcacagcctgttcac

SEQ ID NO: 2159358 - DNA, 25 bp, Homo sapien
tcctggacccattgcactccaatga

SEQ ID NO: 2159359 - DNA, 25 bp, Homo sapien
tgcactccaatgactgctggcagaa

SEQ ID NO: 2159360 - DNA, 25 bp, Homo sapien
agacttggagtgaccctctaggcca

SEQ ID NO: 2159361 - DNA, 25 bp, Homo sapien
taggtagacttggagtgaccctcta

SEQ ID NO: 2159362 - DNA, 25 bp, Homo sapien
ctgggagctggcacctgaactgaca

SEQ ID NO: 2159363 - DNA, 25 bp, Homo sapien
tctcacatgcaagcttcactgagga

SEQ ID NO: 2159364 - DNA, 25 bp, Homo sapien
cattgacaatactccacagcctgca

SEQ ID NO: 2159365 - DNA, 25 bp, Homo sapien
gaagcgtttctagaatcctggccag

SEQ ID NO: 2159366 - DNA, 25 bp, Homo sapien
gcagcgttgtcccattggaagttaa

SEQ ID NO: 2159367 - DNA, 25 bp, Homo sapien
caataggagagtggaacttggatac

SEQ ID NO: 2159368 - DNA, 25 bp, Homo sapien
tgccactgaggaagtcagaaaccat

SEQ ID NO: 2159369 - DNA, 25 bp, Homo sapien
tttcttcatccctgctttgccactg

SEQ ID NO: 2159370 - DNA, 25 bp, Homo sapien
tattttcttcatccctgctttgcca

SEQ ID NO: 2159371 - DNA, 25 bp, Homo sapien
gctttgccactgaggaagtcagaaa

SEQ ID NO: 2159372 - DNA, 25 bp, Homo sapien
tgttccagctagcagaacatactgc

SEQ ID NO: 2159373 - DNA, 25 bp, Homo sapien
agaaatggatgttccagctagcaga

SEQ ID NO: 2159374 - DNA, 25 bp, Homo sapien
ggtgggattccagcactcagaaatg

SEQ ID NO: 2159375 - DNA, 25 bp, Homo sapien
ccccagtggactatgaaggtgtgat

SEQ ID NO: 2159376 - DNA, 25 bp, Homo sapien
gctgacttgctgagatccaaaaaag

SEQ ID NO: 2159377 - DNA, 25 bp, Homo sapien
cctttcgcgcttggcagtgcctgtt

SEQ ID NO: 2159378 - DNA, 25 bp, Homo sapien
tctcctccggttgcaagggcattgt

SEQ ID NO: 2159379 - DNA, 25 bp, Homo sapien
tggcaacatccggtctcctgctgat

SEQ ID NO: 2159380 - DNA, 25 bp, Homo sapien
gaattaccttctcttctagctcgga

SEQ ID NO: 2159381 - DNA, 25 bp, Homo sapien
tgtccttgaagccattgagcagccc

SEQ ID NO: 2159382 - DNA, 25 bp, Homo sapien
tcttgaaggccacagtagaccgaac

SEQ ID NO: 2159383 - DNA, 25 bp, Homo sapien
caggctgaggcaaatttaatcgaat

SEQ ID NO: 2159384 - DNA, 25 bp, Homo sapien
ccactgagtgttctcttggtgtctc

SEQ ID NO: 2159385 - DNA, 25 bp, Homo sapien
ccctgctcctttcgctcaatttcag

SEQ ID NO: 2159386 - DNA, 25 bp, Homo sapien
tccatcctgatgtaccctgctcctt

SEQ ID NO: 2159387 - DNA, 25 bp, Homo sapien
caactccactgagtgttctcttggt

SEQ ID NO: 2159388 - DNA, 25 bp, Homo sapien
atgatgatctatctgagttctttac

SEQ ID NO: 2159389 - DNA, 25 bp, Homo sapien
tttggctgtgtttgactatttgcaa

SEQ ID NO: 2159390 - DNA, 25 bp, Homo sapien
ttgcaatgatgatctatctgagttc

SEQ ID NO: 2159391 - DNA, 25 bp, Homo sapien
ttggctgtgtttgactatttgcaat

SEQ ID NO: 2159392 - DNA, 25 bp, Homo sapien
ccgaacaacgaatacggcgggccat

SEQ ID NO: 2159393 - DNA, 25 bp, Homo sapien
tgctagggcgagatggcctagccct

SEQ ID NO: 2159394 - DNA, 25 bp, Homo sapien
cagcgccggacacgttctgatagag

SEQ ID NO: 2159395 - DNA, 25 bp, Homo sapien
cgaaaaacataggaaaagcccgcat

SEQ ID NO: 2159396 - DNA, 25 bp, Homo sapien
aactggaaaactcttgctcaaattc

SEQ ID NO: 2159397 - DNA, 25 bp, Homo sapien
aaactcttgctcaaattccttaaca

SEQ ID NO: 2159398 - DNA, 25 bp, Homo sapien
tcttgctcaaattccttaacaattg

SEQ ID NO: 2159399 - DNA, 25 bp, Homo sapien
tcaaattccttaacaattgccttta

SEQ ID NO: 2159400 - DNA, 25 bp, Homo sapien
taatgcagacactgagacatttggg

SEQ ID NO: 2159401 - DNA, 25 bp, Homo sapien
gtgtcacgattacccagcaccagag

SEQ ID NO: 2159402 - DNA, 25 bp, Homo sapien
ttgtctaagccccaaatcaatggct

SEQ ID NO: 2159403 - DNA, 25 bp, Homo sapien
tctcactagaagtcagtgggggctc

SEQ ID NO: 2159404 - DNA, 25 bp, Homo sapien
caagtctcggaagaattgtctctat

SEQ ID NO: 2159405 - DNA, 25 bp, Homo sapien
catcacaagtctcggaagaattgtc

SEQ ID NO: 2159406 - DNA, 25 bp, Homo sapien
ttgccatcacaagtctcggaagaat

SEQ ID NO: 2159407 - DNA, 25 bp, Homo sapien
gccatcacaagtctcggaagaattg

SEQ ID NO: 2159408 - DNA, 25 bp, Homo sapien
aaatgggtaagctccattgtagccc

SEQ ID NO: 2159409 - DNA, 25 bp, Homo sapien
gtaagctccattgtagccctttgca

SEQ ID NO: 2159410 - DNA, 25 bp, Homo sapien
cagaggtatcactggtatcgagtgt

SEQ ID NO: 2159411 - DNA, 25 bp, Homo sapien
tgggtaagctccattgtagcccttt

SEQ ID NO: 2159412 - DNA, 25 bp, Homo sapien
tcaagcttggaaggcacatgctgaa

SEQ ID NO: 2159413 - DNA, 25 bp, Homo sapien
tggaaggcacatgctgaagtgcacc

SEQ ID NO: 2159414 - DNA, 25 bp, Homo sapien
gaaggcacatgctgaagtgcaccca

SEQ ID NO: 2159415 - DNA, 25 bp, Homo sapien
cttggaaggcacatgctgaagtgca

SEQ ID NO: 2159416 - DNA, 25 bp, Homo sapien
gaggaattacatcccgagtaattga

SEQ ID NO: 2159417 - DNA, 25 bp, Homo sapien
tgaggaattacatcccgagtaattg

SEQ ID NO: 2159418 - DNA, 25 bp, Homo sapien
ctgaggaattacatcccgagtaatt

SEQ ID NO: 2159419 - DNA, 25 bp, Homo sapien
aagggtcagaatggatgagctgact

SEQ ID NO: 2159420 - DNA, 25 bp, Homo sapien
gaggtcaccatctgaagcacagcag

SEQ ID NO: 2159421 - DNA, 25 bp, Homo sapien
cagaatggatgagctgactggcagc

SEQ ID NO: 2159422 - DNA, 25 bp, Homo sapien
tgcacagcttttccggaacacttgg

SEQ ID NO: 2159423 - DNA, 25 bp, Homo sapien
tcaatagtttgtatcacatcctcaa

SEQ ID NO: 2159424 - DNA, 25 bp, Homo sapien
tctgtgagttgtgtgcttgcgtgta

SEQ ID NO: 2159425 - DNA, 25 bp, Homo sapien
gtgtgcttgcgtgtatgtttccagg

SEQ ID NO: 2159426 - DNA, 25 bp, Homo sapien
ttccaggaagatcaatagtttgtat

SEQ ID NO: 2159427 - DNA, 25 bp, Homo sapien
tccaagcctgcttcctttcgccttg

SEQ ID NO: 2159428 - DNA, 25 bp, Homo sapien
tcctttcgccttggcacacttttct

SEQ ID NO: 2159429 - DNA, 25 bp, Homo sapien
ggcacacttttctctaagtaactgg

SEQ ID NO: 2159430 - DNA, 25 bp, Homo sapien
cttttctctaagtaactggtgatga

SEQ ID NO: 2159431 - DNA, 25 bp, Homo sapien
acagtcttgatagggtctgcattgg

SEQ ID NO: 2159432 - DNA, 25 bp, Homo sapien
gacagagccccatataaaaggtgag

SEQ ID NO: 2159433 - DNA, 25 bp, Homo sapien
attggatggaatgaggacagagccc

SEQ ID NO: 2159434 - DNA, 25 bp, Homo sapien
aaggtgaggacaatctgagcttttc

SEQ ID NO: 2159435 - DNA, 25 bp, Homo sapien
ttgccaacccaaatagaagactgat

SEQ ID NO: 2159436 - DNA, 25 bp, Homo sapien
tgatttttcccataagtaatgcttt

SEQ ID NO: 2159437 - DNA, 25 bp, Homo sapien
gctgatttttgccaacccaaataga

SEQ ID NO: 2159438 - DNA, 25 bp, Homo sapien
aatgcttttagttgaggatcctcgg

SEQ ID NO: 2159439 - DNA, 25 bp, Homo sapien
acttcctttccatttcctggccact

SEQ ID NO: 2159440 - DNA, 25 bp, Homo sapien
tcattctcttcctattttcctttct

SEQ ID NO: 2159441 - DNA, 25 bp, Homo sapien
tttccatttcctggccactcagcac

SEQ ID NO: 2159442 - DNA, 25 bp, Homo sapien
tcctttccatttcctggccactcag

SEQ ID NO: 2159443 - DNA, 25 bp, Homo sapien
actgtagggcctgcctaacagggcc

SEQ ID NO: 2159444 - DNA, 25 bp, Homo sapien
tgaggttggcaacccagtgatttcc

SEQ ID NO: 2159445 - DNA, 25 bp, Homo sapien
gcatggcaacgagcttgtttctcca

SEQ ID NO: 2159446 - DNA, 25 bp, Homo sapien
gagcctccatcagggaagatcgata

SEQ ID NO: 2159447 - DNA, 25 bp, Homo sapien
ccgagggaccgaggctgttcagaaa

SEQ ID NO: 2159448 - DNA, 25 bp, Homo sapien
aatgccttatgttccagagctcccg

SEQ ID NO: 2159449 - DNA, 25 bp, Homo sapien
ggcgcttgggtccacatctagcttg

SEQ ID NO: 2159450 - DNA, 25 bp, Homo sapien
tgattattggtatttcgagggcgct

SEQ ID NO: 2159451 - DNA, 25 bp, Homo sapien
gaattattccaggacgctgaatttg

SEQ ID NO: 2159452 - DNA, 25 bp, Homo sapien
gcggatttccgttctgccaaggctt

SEQ ID NO: 2159453 - DNA, 25 bp, Homo sapien
tcaataaatgaatctttgaatccag

SEQ ID NO: 2159454 - DNA, 25 bp, Homo sapien
gacgctgaatttggtgcccctgtct

SEQ ID NO: 2159455 - DNA, 25 bp, Homo sapien
cccatcctgagagtgcggttctgag

SEQ ID NO: 2159456 - DNA, 25 bp, Homo sapien
taattaattgcctccagcacgtgct

SEQ ID NO: 2159457 - DNA, 25 bp, Homo sapien
tgaggcgattcagccaggccaaaat

SEQ ID NO: 2159458 - DNA, 25 bp, Homo sapien
aattagatcatcaaccgagaagtgg

SEQ ID NO: 2159459 - DNA, 25 bp, Homo sapien
gaagggctcagaaggggggcagccg

SEQ ID NO: 2159460 - DNA, 25 bp, Homo sapien
aagggctcagaaggggggcagccga

SEQ ID NO: 2159461 - DNA, 25 bp, Homo sapien
gcagccgagggagctcatcatgccc

SEQ ID NO: 2159462 - DNA, 25 bp, Homo sapien
aatcgagggccttgcgcgattgcaa

SEQ ID NO: 2159463 - DNA, 25 bp, Homo sapien
gccaggtaccccgagaatcgagggc

SEQ ID NO: 2159464 - DNA, 25 bp, Homo sapien
gccagcgctgatgcgagagtttccg

SEQ ID NO: 2159465 - DNA, 25 bp, Homo sapien
ctggccgggccagcgctgatgcgag

SEQ ID NO: 2159466 - DNA, 25 bp, Homo sapien
ccaaccgcccttggctaagtagttg

SEQ ID NO: 2159467 - DNA, 25 bp, Homo sapien
cgcggacagcggttctcgagactag

SEQ ID NO: 2159468 - DNA, 25 bp, Homo sapien
cgcccttggctaagtagttggtttg

SEQ ID NO: 2159469 - DNA, 25 bp, Homo sapien
ctcactgagctggtcccgcggacag

SEQ ID NO: 2159470 - DNA, 25 bp, Homo sapien
tgtgaaagtcctctcgccttctgtc

SEQ ID NO: 2159471 - DNA, 25 bp, Homo sapien
tgtctgttgcaaggtctttctgaca

SEQ ID NO: 2159472 - DNA, 25 bp, Homo sapien
ctttctgacataatgaccaggttca

SEQ ID NO: 2159473 - DNA, 25 bp, Homo sapien
tcagacaaggctataaattcactca

SEQ ID NO: 2159474 - DNA, 25 bp, Homo sapien
ttctgatggcctcgaggccgggacc

SEQ ID NO: 2159475 - DNA, 25 bp, Homo sapien
cacctccaatcactgcgagttctga

SEQ ID NO: 2159476 - DNA, 25 bp, Homo sapien
ccaggccgggatagttcgccgtttg

SEQ ID NO: 2159477 - DNA, 25 bp, Homo sapien
agcgcagcagtttcgcgctcccggt

SEQ ID NO: 2159478 - DNA, 25 bp, Homo sapien
tcggtcccactgctgcgccgatgga

SEQ ID NO: 2159479 - DNA, 25 bp, Homo sapien
ggagacgcggcgctcaacgtccagt

SEQ ID NO: 2159480 - DNA, 25 bp, Homo sapien
ttggccgccgcgaggctgattggca

SEQ ID NO: 2159481 - DNA, 25 bp, Homo sapien
cgcgggctctttgccccgcgaggat

SEQ ID NO: 2159482 - DNA, 25 bp, Homo sapien
tcctcgcacataaaccgagcgggag

SEQ ID NO: 2159483 - DNA, 25 bp, Homo sapien
ctcgcacataaaccgagcgggaggc

SEQ ID NO: 2159484 - DNA, 25 bp, Homo sapien
ggcgcgcgccaatggggagccagct

SEQ ID NO: 2159485 - DNA, 25 bp, Homo sapien
cacataaaccgagcgggaggccgcg

SEQ ID NO: 2159486 - DNA, 25 bp, Homo sapien
ggtttaacaaactaacaggcgcgca

SEQ ID NO: 2159487 - DNA, 25 bp, Homo sapien
gactcggactagatctggtttaaca

SEQ ID NO: 2159488 - DNA, 25 bp, Homo sapien
agtaggcaggctcgttactcgccgc

SEQ ID NO: 2159489 - DNA, 25 bp, Homo sapien
tttccgtcactgcaagagtctcctg

SEQ ID NO: 2159490 - DNA, 25 bp, Homo sapien
tgcggggagacccccaaggcgctac

SEQ ID NO: 2159491 - DNA, 25 bp, Homo sapien
ctgcggggagacccccaaggcgcta

SEQ ID NO: 2159492 - DNA, 25 bp, Homo sapien
ctccgaagtgccgtagtcggaaagg

SEQ ID NO: 2159493 - DNA, 25 bp, Homo sapien
ggtgggacgttctgggcacaggcga

SEQ ID NO: 2159494 - DNA, 25 bp, Homo sapien
taccggcgaaggaggagatctccga

SEQ ID NO: 2159495 - DNA, 25 bp, Homo sapien
atccggccgaagtgagagagggtac

SEQ ID NO: 2159496 - DNA, 25 bp, Homo sapien
agcccagggaactgcgggcctccgt

SEQ ID NO: 2159497 - DNA, 25 bp, Homo sapien
gaactgcgggcctccgtccaggagc

SEQ ID NO: 2159498 - DNA, 25 bp, Homo sapien
cagggaactgcgggcctccgtccag

SEQ ID NO: 2159499 - DNA, 25 bp, Homo sapien
ccagcccagggaactgcgggcctcc

SEQ ID NO: 2159500 - DNA, 25 bp, Homo sapien
gggcatctcgtggtggcgcggcgcg

SEQ ID NO: 2159501 - DNA, 25 bp, Homo sapien
ggcatctcgtggtggcgcggcgcgc

SEQ ID NO: 2159502 - DNA, 25 bp, Homo sapien
gcatctcgtggtggcgcggcgcgcc

SEQ ID NO: 2159503 - DNA, 25 bp, Homo sapien
ggttgagtccccgaagggattcagc

SEQ ID NO: 2159504 - DNA, 25 bp, Homo sapien
tgagtccccgaagggattcagcccc

SEQ ID NO: 2159505 - DNA, 25 bp, Homo sapien
gcggcggcgtgggttgagtccccga

SEQ ID NO: 2159506 - DNA, 25 bp, Homo sapien
gtccccgaagggattcagccccatg

SEQ ID NO: 2159507 - DNA, 25 bp, Homo sapien
cgagctctggcctgaagatagatcg

SEQ ID NO: 2159508 - DNA, 25 bp, Homo sapien
aaccctgcggcgtgaaagccgagct

SEQ ID NO: 2159509 - DNA, 25 bp, Homo sapien
ggcgttggcgtagcccgaaccctgc

SEQ ID NO: 2159510 - DNA, 25 bp, Homo sapien
tgaagatagatcgtgcgccgcggca

SEQ ID NO: 2159511 - DNA, 25 bp, Homo sapien
agaggcagcgccaccgtagctgggc

SEQ ID NO: 2159512 - DNA, 25 bp, Homo sapien
cggaacagaaactcgcgcgttgagt

SEQ ID NO: 2159513 - DNA, 25 bp, Homo sapien
aaactcgcgcgttgagttgaaggcg

SEQ ID NO: 2159514 - DNA, 25 bp, Homo sapien
ctggcggaacagaaactcgcgcgtt

SEQ ID NO: 2159515 - DNA, 25 bp, Homo sapien
gagcatgcaggctgctcgccgagcc

SEQ ID NO: 2159516 - DNA, 25 bp, Homo sapien
tgtgggcgacgggtgcccagcgccc

SEQ ID NO: 2159517 - DNA, 25 bp, Homo sapien
ccgagccggcgaagagcccgtgctg

SEQ ID NO: 2159518 - DNA, 25 bp, Homo sapien
gcagcccgggaaacagcaagtagct

SEQ ID NO: 2159519 - DNA, 25 bp, Homo sapien
aaggtccggtcgcagctcttcttgg

SEQ ID NO: 2159520 - DNA, 25 bp, Homo sapien
ccagtttgtacttcgccttgaaaga

SEQ ID NO: 2159521 - DNA, 25 bp, Homo sapien
tgcacgacagctcctgcttgatagg

SEQ ID NO: 2159522 - DNA, 25 bp, Homo sapien
gataggctgccgcatataacggaag

SEQ ID NO: 2159523 - DNA, 25 bp, Homo sapien
cttcccggaaagggagcgcggactg

SEQ ID NO: 2159524 - DNA, 25 bp, Homo sapien
ggtcagcgccggagtttctcagagg

SEQ ID NO: 2159525 - DNA, 25 bp, Homo sapien
aaagggagcgcggactgggggctgc

SEQ ID NO: 2159526 - DNA, 25 bp, Homo sapien
gtcagcgccggagtttctcagaggc

SEQ ID NO: 2159527 - DNA, 25 bp, Homo sapien
cttgtccgaggtatgcacatgcatg

SEQ ID NO: 2159528 - DNA, 25 bp, Homo sapien
ggacttgtcgcacactttgcagata

SEQ ID NO: 2159529 - DNA, 25 bp, Homo sapien
actttgcagatatagggcttgtccg

SEQ ID NO: 2159530 - DNA, 25 bp, Homo sapien
tgttggcaaagcgtctgtcacagcc

SEQ ID NO: 2159531 - DNA, 25 bp, Homo sapien
ggagcaaatcggatttaacgtggaa

SEQ ID NO: 2159532 - DNA, 25 bp, Homo sapien
ctgctggagcaaatcggatttaacg

SEQ ID NO: 2159533 - DNA, 25 bp, Homo sapien
cgcggcccggcgtcgggccgagtgt

SEQ ID NO: 2159534 - DNA, 25 bp, Homo sapien
tcggatttaacgtggaagacagagg

SEQ ID NO: 2159535 - DNA, 25 bp, Homo sapien
tgggaatcagattgcactcctcggc

SEQ ID NO: 2159536 - DNA, 25 bp, Homo sapien
gttttatccgaagccaaagagcgaa

SEQ ID NO: 2159537 - DNA, 25 bp, Homo sapien
tagaaaacccggagatgttcgccaa

SEQ ID NO: 2159538 - DNA, 25 bp, Homo sapien
ttcgagcactgtaacaacaagaccg

SEQ ID NO: 2159539 - DNA, 25 bp, Homo sapien
tgtggctggtgctagtttgaactgc

SEQ ID NO: 2159540 - DNA, 25 bp, Homo sapien
ctgtttgcagaagctatagcgggtg

SEQ ID NO: 2159541 - DNA, 25 bp, Homo sapien
gattcatagcctgaactggcagcag

SEQ ID NO: 2159542 - DNA, 25 bp, Homo sapien
gtggagtggaagattcatagcctga

SEQ ID NO: 2159543 - DNA, 25 bp, Homo sapien
gtttaaacaatcaccactaaggcga

SEQ ID NO: 2159544 - DNA, 25 bp, Homo sapien
cataaatattgttcagttcccggca

SEQ ID NO: 2159545 - DNA, 25 bp, Homo sapien
gacataacaggactttggcacggtt

SEQ ID NO: 2159546 - DNA, 25 bp, Homo sapien
gaacaacagtttcgaccctattaga

SEQ ID NO: 2159547 - DNA, 25 bp, Homo sapien
aaaagggatctgagtgagttataaa

SEQ ID NO: 2159548 - DNA, 25 bp, Homo sapien
aagggatctgagtgagttataaata

SEQ ID NO: 2159549 - DNA, 25 bp, Homo sapien
aaaaagggatctgagtgagttataa

SEQ ID NO: 2159550 - DNA, 25 bp, Homo sapien
gggatctgagtgagttataaatacc

SEQ ID NO: 2159551 - DNA, 25 bp, Homo sapien
taaagaaaggagagtcttcccagat

SEQ ID NO: 2159552 - DNA, 25 bp, Homo sapien
ataaagaaaggagagtcttcccaga

SEQ ID NO: 2159553 - DNA, 25 bp, Homo sapien
ctgagatagagataaagaaaggaga

SEQ ID NO: 2159554 - DNA, 25 bp, Homo sapien
ttgcatgccgaaaatccaggacaaa

SEQ ID NO: 2159555 - DNA, 25 bp, Homo sapien
atttgatttgcatgccgaaaatcca

SEQ ID NO: 2159556 - DNA, 25 bp, Homo sapien
cacatttaaactcgcagttaaacaa

SEQ ID NO: 2159557 - DNA, 25 bp, Homo sapien
acacatttaaactcgcagttaaaca

SEQ ID NO: 2159558 - DNA, 25 bp, Homo sapien
taagtaagcaatgctcaactggcct

SEQ ID NO: 2159559 - DNA, 25 bp, Homo sapien
gacagacatgcatcctgccgcaatt

SEQ ID NO: 2159560 - DNA, 25 bp, Homo sapien
tatatacagcaaacaaatcagcctt

SEQ ID NO: 2159561 - DNA, 25 bp, Homo sapien
agattgagatgtcatggccactaac

SEQ ID NO: 2159562 - DNA, 25 bp, Homo sapien
taaaagaactgtttgtccaaatgag

SEQ ID NO: 2159563 - DNA, 25 bp, Homo sapien
ttccatataaccactgtaaaagaac

SEQ ID NO: 2159564 - DNA, 25 bp, Homo sapien
ctgtttgtccaaatgagttgcttca

SEQ ID NO: 2159565 - DNA, 25 bp, Homo sapien
gaactgtttgtccaaatgagttgct

SEQ ID NO: 2159566 - DNA, 25 bp, Homo sapien
tagactgcttcaaccgcattcacag

SEQ ID NO: 2159567 - DNA, 25 bp, Homo sapien
gattgggctctcaataacaaacagc

SEQ ID NO: 2159568 - DNA, 25 bp, Homo sapien
taataccaaattgactgccaccaaa

SEQ ID NO: 2159569 - DNA, 25 bp, Homo sapien
gagcattgccccttaaaggaggtac

SEQ ID NO: 2159570 - DNA, 25 bp, Homo sapien
ttgggagtgatagactgaccaggtt

SEQ ID NO: 2159571 - DNA, 25 bp, Homo sapien
tgatagactgaccaggttacctgct

SEQ ID NO: 2159572 - DNA, 25 bp, Homo sapien
tagtcatcccaatctctgttcatgg

SEQ ID NO: 2159573 - DNA, 25 bp, Homo sapien
caaggtcaagatcggaatgtctggg

SEQ ID NO: 2159574 - DNA, 25 bp, Homo sapien
taccatgctacacccaaattagagg

SEQ ID NO: 2159575 - DNA, 25 bp, Homo sapien
taaggagttttctttaccacagatg

SEQ ID NO: 2159576 - DNA, 25 bp, Homo sapien
tgaatcctgtatccaacccatggct

SEQ ID NO: 2159577 - DNA, 25 bp, Homo sapien
tacatttaattgaaagggaggcagg

SEQ ID NO: 2159578 - DNA, 25 bp, Homo sapien
atgttaagaggcccttcgactttgc

SEQ ID NO: 2159579 - DNA, 25 bp, Homo sapien
tgttaagaggcccttcgactttgct

SEQ ID NO: 2159580 - DNA, 25 bp, Homo sapien
ttaagaggcccttcgactttgctcc

SEQ ID NO: 2159581 - DNA, 25 bp, Homo sapien
taagaggcccttcgactttgctcct

SEQ ID NO: 2159582 - DNA, 25 bp, Homo sapien
gtccggattaggcagaggctgattc

SEQ ID NO: 2159583 - DNA, 25 bp, Homo sapien
cattgtttgggctcgtattgacccc

SEQ ID NO: 2159584 - DNA, 25 bp, Homo sapien
tattgaccccaggtccggattaggc

SEQ ID NO: 2159585 - DNA, 25 bp, Homo sapien
ccccgccggcctaatgaggctggga

SEQ ID NO: 2159586 - DNA, 25 bp, Homo sapien
ccgactcgacggctgcgaagtgtgc

SEQ ID NO: 2159587 - DNA, 25 bp, Homo sapien
cgcggcactgcaaagcggctttcaa

SEQ ID NO: 2159588 - DNA, 25 bp, Homo sapien
aagcggctttcaactctatccccaa

SEQ ID NO: 2159589 - DNA, 25 bp, Homo sapien
tgcaaaatccgactcgacggctgcg

SEQ ID NO: 2159590 - DNA, 25 bp, Homo sapien
ggaagagttcgtgccgcttattttc

SEQ ID NO: 2159591 - DNA, 25 bp, Homo sapien
caagagggctgacttttccgtttgg

SEQ ID NO: 2159592 - DNA, 25 bp, Homo sapien
cacaccttcaggagcccaaatgcgt

SEQ ID NO: 2159593 - DNA, 25 bp, Homo sapien
aatgcgtgacactggacaaccccaa

SEQ ID NO: 2159594 - DNA, 25 bp, Homo sapien
tccgtttggccgttggtctccacga

SEQ ID NO: 2159595 - DNA, 25 bp, Homo sapien
gcagataggtcaaaacaggccacat

SEQ ID NO: 2159596 - DNA, 25 bp, Homo sapien
aacaaaaagtgaactgcagataggt

SEQ ID NO: 2159597 - DNA, 25 bp, Homo sapien
taggtcaaaacaggccacatttcct

SEQ ID NO: 2159598 - DNA, 25 bp, Homo sapien
caaaaagtgaactgcagataggtca

SEQ ID NO: 2159599 - DNA, 25 bp, Homo sapien
gatcacttcaaggtaacagacatcc

SEQ ID NO: 2159600 - DNA, 25 bp, Homo sapien
tcatttcttgcacagtaggttcggc

SEQ ID NO: 2159601 - DNA, 25 bp, Homo sapien
ggttcggcattaaccctgcatttag

SEQ ID NO: 2159602 - DNA, 25 bp, Homo sapien
agactgtcccggataccaagcagga

SEQ ID NO: 2159603 - DNA, 25 bp, Homo sapien
tgaggatccccacttggaaggccct

SEQ ID NO: 2159604 - DNA, 25 bp, Homo sapien
tggtcatgaggatccccacttggaa

SEQ ID NO: 2159605 - DNA, 25 bp, Homo sapien
gtcagacacccctccgacagcctag

SEQ ID NO: 2159606 - DNA, 25 bp, Homo sapien
agcctagcccagtctgcagttccag

SEQ ID NO: 2159607 - DNA, 25 bp, Homo sapien
aatccccagtagttttgtcacagaa

SEQ ID NO: 2159608 - DNA, 25 bp, Homo sapien
ttaatccccagtagttttgtcacag

SEQ ID NO: 2159609 - DNA, 25 bp, Homo sapien
agtagttttgtcacagaaagtcttc

SEQ ID NO: 2159610 - DNA, 25 bp, Homo sapien
cccagtagttttgtcacagaaagtc

SEQ ID NO: 2159611 - DNA, 25 bp, Homo sapien
tgtgatcccatcattgatcagcatg

SEQ ID NO: 2159612 - DNA, 25 bp, Homo sapien
agactccccattggcatgccacact

SEQ ID NO: 2159613 - DNA, 25 bp, Homo sapien
agacagtggcattcacagttgtgat

SEQ ID NO: 2159614 - DNA, 25 bp, Homo sapien
ggcattcacagttgtgatcccatca

SEQ ID NO: 2159615 - DNA, 25 bp, Homo sapien
catccatggatggtttgtgaaccat

SEQ ID NO: 2159616 - DNA, 25 bp, Homo sapien
ggcagacaggaatcgggtaaccact

SEQ ID NO: 2159617 - DNA, 25 bp, Homo sapien
cactgtgaagtggttatttccaatc

SEQ ID NO: 2159618 - DNA, 25 bp, Homo sapien
aatgccatttggcagttggcagaca

SEQ ID NO: 2159619 - DNA, 25 bp, Homo sapien
agtgacatttgtttagttcctttat

SEQ ID NO: 2159620 - DNA, 25 bp, Homo sapien
gacatttgtttagttcctttatgtg

SEQ ID NO: 2159621 - DNA, 25 bp, Homo sapien
cagtgacatttgtttagttccttta

SEQ ID NO: 2159622 - DNA, 25 bp, Homo sapien
gtgacatttgtttagttcctttatg

SEQ ID NO: 2159623 - DNA, 25 bp, Homo sapien
caaatcatcttgacggcttgccgca

SEQ ID NO: 2159624 - DNA, 25 bp, Homo sapien
cggcttgccgcagcgttttcaaaaa

SEQ ID NO: 2159625 - DNA, 25 bp, Homo sapien
tgaatctgccaaatcatcttgacgg

SEQ ID NO: 2159626 - DNA, 25 bp, Homo sapien
aaaggtacctctcccttgatacttg

SEQ ID NO: 2159627 - DNA, 25 bp, Homo sapien
taacttctacagttctaaaactgaa

SEQ ID NO: 2159628 - DNA, 25 bp, Homo sapien
tcagaaatattagatactccaaaag

SEQ ID NO: 2159629 - DNA, 25 bp, Homo sapien
ttgaaggctagatgatgtggaaata

SEQ ID NO: 2159630 - DNA, 25 bp, Homo sapien
cattagttgctaaggctgcctctgt

SEQ ID NO: 2159631 - DNA, 25 bp, Homo sapien
tctgacctgagttatactgccagag

SEQ ID NO: 2159632 - DNA, 25 bp, Homo sapien
ctgacctgagttatactgccagaga

SEQ ID NO: 2159633 - DNA, 25 bp, Homo sapien
ctgaaataaatctgtgatggtttat

SEQ ID NO: 2159634 - DNA, 25 bp, Homo sapien
ataaatctgtgatggtttatcttcc

SEQ ID NO: 2159635 - DNA, 25 bp, Homo sapien
gaaataaatctgtgatggtttatct

SEQ ID NO: 2159636 - DNA, 25 bp, Homo sapien
aaatctgtgatggtttatcttccac

SEQ ID NO: 2159637 - DNA, 25 bp, Homo sapien
caattttaaccattgacaacaaatt

SEQ ID NO: 2159638 - DNA, 25 bp, Homo sapien
acaattttaaccattgacaacaaat

SEQ ID NO: 2159639 - DNA, 25 bp, Homo sapien
tttaaccattgacaacaaatttgca

SEQ ID NO: 2159640 - DNA, 25 bp, Homo sapien
attttaaccattgacaacaaatttg

SEQ ID NO: 2159641 - DNA, 25 bp, Homo sapien
tgactatctcagactgacccactgc

SEQ ID NO: 2159642 - DNA, 25 bp, Homo sapien
cactgtagaagaatgactatctcag

SEQ ID NO: 2159643 - DNA, 25 bp, Homo sapien
tatctcagactgacccactgcatgc

SEQ ID NO: 2159644 - DNA, 25 bp, Homo sapien
taaagatatcctttggcaaacactt

SEQ ID NO: 2159645 - DNA, 25 bp, Homo sapien
gccagagatcccgataaagttgcac

SEQ ID NO: 2159646 - DNA, 25 bp, Homo sapien
gaagaaggaatgtcccaagttgccc

SEQ ID NO: 2159647 - DNA, 25 bp, Homo sapien
ctgaagaaggaatgtcccaagttgc

SEQ ID NO: 2159648 - DNA, 25 bp, Homo sapien
tgaagaaggaatgtcccaagttgcc

SEQ ID NO: 2159649 - DNA, 25 bp, Homo sapien
agaaggaatgtcccaagttgcccac

SEQ ID NO: 2159650 - DNA, 25 bp, Homo sapien
ctaggtcttgcagtgactggtaggt

SEQ ID NO: 2159651 - DNA, 25 bp, Homo sapien
tctggataagaatcccaaacaagta

SEQ ID NO: 2159652 - DNA, 25 bp, Homo sapien
caagaagattcatgatggtatgccc

SEQ ID NO: 2159653 - DNA, 25 bp, Homo sapien
tgaactactggcaaggtatactggt

SEQ ID NO: 2159654 - DNA, 25 bp, Homo sapien
ccacgggtgatggtgaagtccttca

SEQ ID NO: 2159655 - DNA, 25 bp, Homo sapien
cttcccacgggtgatggtgaagtcc

SEQ ID NO: 2159656 - DNA, 25 bp, Homo sapien
cacgggtgatggtgaagtccttcat

SEQ ID NO: 2159657 - DNA, 25 bp, Homo sapien
tcccacgggtgatggtgaagtcctt

SEQ ID NO: 2159658 - DNA, 25 bp, Homo sapien
cttgctaacgttcttgtcatcatcc

SEQ ID NO: 2159659 - DNA, 25 bp, Homo sapien
cccttgctaacgttcttgtcatcat

SEQ ID NO: 2159660 - DNA, 25 bp, Homo sapien
ccttgctaacgttcttgtcatcatc

SEQ ID NO: 2159661 - DNA, 25 bp, Homo sapien
aattgtgctggtcaggattttctgg

SEQ ID NO: 2159662 - DNA, 25 bp, Homo sapien
caattgtgctggtcaggattttctg

SEQ ID NO: 2159663 - DNA, 25 bp, Homo sapien
gccgacctgatctgaatcaagtgtc

SEQ ID NO: 2159664 - DNA, 25 bp, Homo sapien
gatagccgacctgatctgaatcaag

SEQ ID NO: 2159665 - DNA, 25 bp, Homo sapien
gacctgatctgaatcaagtgtcaca

SEQ ID NO: 2159666 - DNA, 25 bp, Homo sapien
gcttgatagccgacctgatctgaat

SEQ ID NO: 2159667 - DNA, 25 bp, Homo sapien
agctgacaggcccctccatggatca

SEQ ID NO: 2159668 - DNA, 25 bp, Homo sapien
tgagctgacaggcccctccatggat

SEQ ID NO: 2159669 - DNA, 25 bp, Homo sapien
gctgacaggcccctccatggatcac

SEQ ID NO: 2159670 - DNA, 25 bp, Homo sapien
gagctgacaggcccctccatggatc

SEQ ID NO: 2159671 - DNA, 25 bp, Homo sapien
taactttctaaatttgggcctgcag

SEQ ID NO: 2159672 - DNA, 25 bp, Homo sapien
caagagcagcaatatcacagtcata

SEQ ID NO: 2159673 - DNA, 25 bp, Homo sapien
gcagtaatgacagactttgaatgaa

SEQ ID NO: 2159674 - DNA, 25 bp, Homo sapien
tgcaaaactgctctgtgagatatct

SEQ ID NO: 2159675 - DNA, 25 bp, Homo sapien
actctggggactgataggctttttc

SEQ ID NO: 2159676 - DNA, 25 bp, Homo sapien
tagtactctggggactgataggctt

SEQ ID NO: 2159677 - DNA, 25 bp, Homo sapien
ttacattagtactctggggactgat

SEQ ID NO: 2159678 - DNA, 25 bp, Homo sapien
cattagtactctggggactgatagg

SEQ ID NO: 2159679 - DNA, 25 bp, Homo sapien
ttagccagatcccatatgttcatga

SEQ ID NO: 2159680 - DNA, 25 bp, Homo sapien
gccagatcccatatgttcatgagca

SEQ ID NO: 2159681 - DNA, 25 bp, Homo sapien
gatcccatatgttcatgagcagtca

SEQ ID NO: 2159682 - DNA, 25 bp, Homo sapien
tcatgagcagtcacttggaccaaac

SEQ ID NO: 2159683 - DNA, 25 bp, Homo sapien
atctgttaacaagccagaagtgtgg

SEQ ID NO: 2159684 - DNA, 25 bp, Homo sapien
aacacatgaaacaatctgttaacaa

SEQ ID NO: 2159685 - DNA, 25 bp, Homo sapien
tagacaaggctgattgatgcccagt

SEQ ID NO: 2159686 - DNA, 25 bp, Homo sapien
gggtagacaaggctgattgatgccc

SEQ ID NO: 2159687 - DNA, 25 bp, Homo sapien
ttatcaccgatgtcctgggacaaat

SEQ ID NO: 2159688 - DNA, 25 bp, Homo sapien
tcaccgatgtcctgggacaaatcct

SEQ ID NO: 2159689 - DNA, 25 bp, Homo sapien
tttatcaccgatgtcctgggacaaa

SEQ ID NO: 2159690 - DNA, 25 bp, Homo sapien
tatcaccgatgtcctgggacaaatc

SEQ ID NO: 2159691 - DNA, 25 bp, Homo sapien
gctctttactgtcagggtgatgtac

SEQ ID NO: 2159692 - DNA, 25 bp, Homo sapien
cagggtgatgtactggaagtcttta

SEQ ID NO: 2159693 - DNA, 25 bp, Homo sapien
tttactgtcagggtgatgtactgga

SEQ ID NO: 2159694 - DNA, 25 bp, Homo sapien
tgtcagggtgatgtactggaagtct

SEQ ID NO: 2159695 - DNA, 25 bp, Homo sapien
taaccactagtgacaataaagcgcc

SEQ ID NO: 2159696 - DNA, 25 bp, Homo sapien
gatccaatagcgaggtgtaaccact

SEQ ID NO: 2159697 - DNA, 25 bp, Homo sapien
aataaagcgccatctggcaaagtga

SEQ ID NO: 2159698 - DNA, 25 bp, Homo sapien
gctcttcacaccatttggtcttgaa

SEQ ID NO: 2159699 - DNA, 25 bp, Homo sapien
aaatggggttaagatccagatttgc

SEQ ID NO: 2159700 - DNA, 25 bp, Homo sapien
gataggtcggttcattttgctggcc

SEQ ID NO: 2159701 - DNA, 25 bp, Homo sapien
cctgaggtgtgattaaccaatgaaa

SEQ ID NO: 2159702 - DNA, 25 bp, Homo sapien
tatggataaaagattgcctgaggtg

SEQ ID NO: 2159703 - DNA, 25 bp, Homo sapien
cgttacctgctactgttccagccat

SEQ ID NO: 2159704 - DNA, 25 bp, Homo sapien
ccgttacctgctactgttccagcca

SEQ ID NO: 2159705 - DNA, 25 bp, Homo sapien
gtgtaatgaagatacagagtcacag

SEQ ID NO: 2159706 - DNA, 25 bp, Homo sapien
tagggaccagcacactagccataat

SEQ ID NO: 2159707 - DNA, 25 bp, Homo sapien
gccaccaatactagggaccagcaca

SEQ ID NO: 2159708 - DNA, 25 bp, Homo sapien
cactagccataatcatgtgtaatga

SEQ ID NO: 2159709 - DNA, 25 bp, Homo sapien
gcttgtcatactgccaaggctcctg

SEQ ID NO: 2159710 - DNA, 25 bp, Homo sapien
taattgcttgtcatactgccaaggc

SEQ ID NO: 2159711 - DNA, 25 bp, Homo sapien
tggtgtcttaattgcttgtcatact

SEQ ID NO: 2159712 - DNA, 25 bp, Homo sapien
tgtcatactgccaaggctcctgtgt

SEQ ID NO: 2159713 - DNA, 25 bp, Homo sapien
ctcaaatactttcagaggcttacaa

SEQ ID NO: 2159714 - DNA, 25 bp, Homo sapien
tcaaatactttcagaggcttacaat

SEQ ID NO: 2159715 - DNA, 25 bp, Homo sapien
tgtatcactcttctcaaatactttc

SEQ ID NO: 2159716 - DNA, 25 bp, Homo sapien
aatactttcagaggcttacaattgc

SEQ ID NO: 2159717 - DNA, 25 bp, Homo sapien
cccagttctaaagtgttacaggctc

SEQ ID NO: 2159718 - DNA, 25 bp, Homo sapien
gaatccagtccattcccatgatacc

SEQ ID NO: 2159719 - DNA, 25 bp, Homo sapien
tccacaaagtgaatccagtccattc

SEQ ID NO: 2159720 - DNA, 25 bp, Homo sapien
acccagttctaaagtgttacaggct

SEQ ID NO: 2159721 - DNA, 25 bp, Homo sapien
agttaggctctttgcaacttgctgg

SEQ ID NO: 2159722 - DNA, 25 bp, Homo sapien
tagttaggctctttgcaacttgctg

SEQ ID NO: 2159723 - DNA, 25 bp, Homo sapien
atagttaggctctttgcaacttgct

SEQ ID NO: 2159724 - DNA, 25 bp, Homo sapien
catagttaggctctttgcaacttgc

SEQ ID NO: 2159725 - DNA, 25 bp, Homo sapien
atgttgatcctaggtcagagaagcc

SEQ ID NO: 2159726 - DNA, 25 bp, Homo sapien
gagccatactgtaaaaagatgtgca

SEQ ID NO: 2159727 - DNA, 25 bp, Homo sapien
tcatctattctggtcagagccatac

SEQ ID NO: 2159728 - DNA, 25 bp, Homo sapien
ttgatcctaggtcagagaagccatg

SEQ ID NO: 2159729 - DNA, 25 bp, Homo sapien
taggcccactgtgtttatgtatccc

SEQ ID NO: 2159730 - DNA, 25 bp, Homo sapien
gagggaaccttacagctaaaccagc

SEQ ID NO: 2159731 - DNA, 25 bp, Homo sapien
accagttgggcagtaagcacacaaa

SEQ ID NO: 2159732 - DNA, 25 bp, Homo sapien
tcaggaagaatcaccaccacggttc

SEQ ID NO: 2159733 - DNA, 25 bp, Homo sapien
tccagcagggtaagcatcctgaagg

SEQ ID NO: 2159734 - DNA, 25 bp, Homo sapien
gactaccaaagagatcagggagcat

SEQ ID NO: 2159735 - DNA, 25 bp, Homo sapien
cacagctgctatcaagagactacca

SEQ ID NO: 2159736 - DNA, 25 bp, Homo sapien
ctgaaggagacgtgggaactgtcca

SEQ ID NO: 2159737 - DNA, 25 bp, Homo sapien
tgccgtgcctgcaagaatccaacag

SEQ ID NO: 2159738 - DNA, 25 bp, Homo sapien
cgtgcctgcaagaatccaacagcta

SEQ ID NO: 2159739 - DNA, 25 bp, Homo sapien
cagcaaaggctgccgtgcctgcaag

SEQ ID NO: 2159740 - DNA, 25 bp, Homo sapien
ggctgccgtgcctgcaagaatccaa

SEQ ID NO: 2159741 - DNA, 25 bp, Homo sapien
gattattcgaatttgcgtgcaagct

SEQ ID NO: 2159742 - DNA, 25 bp, Homo sapien
aatttgcgtgcaagctcttcatctg

SEQ ID NO: 2159743 - DNA, 25 bp, Homo sapien
cccatggtgattattcgaatttgcg

SEQ ID NO: 2159744 - DNA, 25 bp, Homo sapien
tctaacccatggtgattattcgaat

SEQ ID NO: 2159745 - DNA, 25 bp, Homo sapien
gaactatcgacaattacctgagaaa

SEQ ID NO: 2159746 - DNA, 25 bp, Homo sapien
agtcataagttctggccatctgcaa

SEQ ID NO: 2159747 - DNA, 25 bp, Homo sapien
cacgtttgttatattaattgagtca

SEQ ID NO: 2159748 - DNA, 25 bp, Homo sapien
gcagctcttaaaagttgttgaacaa

SEQ ID NO: 2159749 - DNA, 25 bp, Homo sapien
catcttccacaagatggcaggcagt

SEQ ID NO: 2159750 - DNA, 25 bp, Homo sapien
ccacaagatggcaggcagttttcat

SEQ ID NO: 2159751 - DNA, 25 bp, Homo sapien
tcttccacaagatggcaggcagttt

SEQ ID NO: 2159752 - DNA, 25 bp, Homo sapien
ttccacaagatggcaggcagttttc

SEQ ID NO: 2159753 - DNA, 25 bp, Homo sapien
ttttcctgggattgagggagttaca

SEQ ID NO: 2159754 - DNA, 25 bp, Homo sapien
tctcaattgtgattggagttaggaa

SEQ ID NO: 2159755 - DNA, 25 bp, Homo sapien
gtaatcaactgagctgatggctgcc

SEQ ID NO: 2159756 - DNA, 25 bp, Homo sapien
gtctcctccaagcaacactttactg

SEQ ID NO: 2159757 - DNA, 25 bp, Homo sapien
cacaggcaggagtatattctacaag

SEQ ID NO: 2159758 - DNA, 25 bp, Homo sapien
ttctacaagcaaagccatcccacag

SEQ ID NO: 2159759 - DNA, 25 bp, Homo sapien
cagaactggagcacaattgatttcc

SEQ ID NO: 2159760 - DNA, 25 bp, Homo sapien
tgtatgctcccagactcggtggcag

SEQ ID NO: 2159761 - DNA, 25 bp, Homo sapien
ggtatacaatcatatggcaggtgta

SEQ ID NO: 2159762 - DNA, 25 bp, Homo sapien
agcttgtgcaggattttgtgagact

SEQ ID NO: 2159763 - DNA, 25 bp, Homo sapien
gcgtgaaagacccaactccataatt

SEQ ID NO: 2159764 - DNA, 25 bp, Homo sapien
aacagtgcgtgaaagacccaactcc

SEQ ID NO: 2159765 - DNA, 25 bp, Homo sapien
gacttggacatgaagtggtcagaac

SEQ ID NO: 2159766 - DNA, 25 bp, Homo sapien
ggtgccagtgtcttaacaatcatac

SEQ ID NO: 2159767 - DNA, 25 bp, Homo sapien
cgtgggcaattaagtacaagggcca

SEQ ID NO: 2159768 - DNA, 25 bp, Homo sapien
tagggtcactaatcaaccaggtggc

SEQ ID NO: 2159769 - DNA, 25 bp, Homo sapien
actcccagttcaataaagggaatgc

SEQ ID NO: 2159770 - DNA, 25 bp, Homo sapien
ctggggcattagcaggattgatttg

SEQ ID NO: 2159771 - DNA, 25 bp, Homo sapien
tcccagttcaataaagggaatgcac

SEQ ID NO: 2159772 - DNA, 25 bp, Homo sapien
ccagttcaataaagggaatgcacag

SEQ ID NO: 2159773 - DNA, 25 bp, Homo sapien
ttggaaattgctgctaatataatct

SEQ ID NO: 2159774 - DNA, 25 bp, Homo sapien
gctgctaatataatctttctctgag

SEQ ID NO: 2159775 - DNA, 25 bp, Homo sapien
ttgctgctaatataatctttctctg

SEQ ID NO: 2159776 - DNA, 25 bp, Homo sapien
gaaattgctgctaatataatctttc

SEQ ID NO: 2159777 - DNA, 25 bp, Homo sapien
gctttatttgcactaggacatggcc

SEQ ID NO: 2159778 - DNA, 25 bp, Homo sapien
gaggcccttacagctgacaacacaa

SEQ ID NO: 2159779 - DNA, 25 bp, Homo sapien
tgacacttacaggagaacaaactgc

SEQ ID NO: 2159780 - DNA, 25 bp, Homo sapien
ggacatggcctgcatattcaaatga

SEQ ID NO: 2159781 - DNA, 25 bp, Homo sapien
acccagagaatacgcagtcaagaag

SEQ ID NO: 2159782 - DNA, 25 bp, Homo sapien
ctacacacaattaaacttccatctt

SEQ ID NO: 2159783 - DNA, 25 bp, Homo sapien
gagaatacgcagtcaagaagggttt

SEQ ID NO: 2159784 - DNA, 25 bp, Homo sapien
tgagacccagagaatacgcagtcaa

SEQ ID NO: 2159785 - DNA, 25 bp, Homo sapien
gaattgcctgacaaaacgatgttat

SEQ ID NO: 2159786 - DNA, 25 bp, Homo sapien
tctgtggtgggctcgaaaagactga

SEQ ID NO: 2159787 - DNA, 25 bp, Homo sapien
gactgatgtgttgactcttccactt

SEQ ID NO: 2159788 - DNA, 25 bp, Homo sapien
tagtcactgcggaaataagcctcat

SEQ ID NO: 2159789 - DNA, 25 bp, Homo sapien
cagttcaggtgtattctgctgctct

SEQ ID NO: 2159790 - DNA, 25 bp, Homo sapien
tggtcattgcctgtgattcctgctg

SEQ ID NO: 2159791 - DNA, 25 bp, Homo sapien
tggttgtcgtcttggtggtcattgc

SEQ ID NO: 2159792 - DNA, 25 bp, Homo sapien
ggctctgaagatggttgtcgtcttg

SEQ ID NO: 2159793 - DNA, 25 bp, Homo sapien
ttgagtttctgcttccttgtgactt

SEQ ID NO: 2159794 - DNA, 25 bp, Homo sapien
gagtttctgcttccttgtgacttca

SEQ ID NO: 2159795 - DNA, 25 bp, Homo sapien
tgagtttctgcttccttgtgacttc

SEQ ID NO: 2159796 - DNA, 25 bp, Homo sapien
caaccaaactccagagctatggtac

SEQ ID NO: 2159797 - DNA, 25 bp, Homo sapien
ctttttcagggtcaatgcagtcatt

SEQ ID NO: 2159798 - DNA, 25 bp, Homo sapien
ctacatctataggagcggacacact

SEQ ID NO: 2159799 - DNA, 25 bp, Homo sapien
tgcagtcattatggacccaaccaaa

SEQ ID NO: 2159800 - DNA, 25 bp, Homo sapien
gcctggccaataggctacacccttc

SEQ ID NO: 2159801 - DNA, 25 bp, Homo sapien
tttccctagccttccatgcccagat

SEQ ID NO: 2159802 - DNA, 25 bp, Homo sapien
gccaataggctacacccttcctgga

SEQ ID NO: 2159803 - DNA, 25 bp, Homo sapien
tttttccctagccttccatgcccag

SEQ ID NO: 2159804 - DNA, 25 bp, Homo sapien
cttttcatcaagattcaaccaaaat

SEQ ID NO: 2159805 - DNA, 25 bp, Homo sapien
ccttttcatcaagattcaaccaaaa

SEQ ID NO: 2159806 - DNA, 25 bp, Homo sapien
ttttcatcaagattcaaccaaaata

SEQ ID NO: 2159807 - DNA, 25 bp, Homo sapien
accttttcatcaagattcaaccaaa

SEQ ID NO: 2159808 - DNA, 25 bp, Homo sapien
ggcagccagtgcgttggcagctgct

SEQ ID NO: 2159809 - DNA, 25 bp, Homo sapien
cagccagtgcgttggcagctgctgg

SEQ ID NO: 2159810 - DNA, 25 bp, Homo sapien
acatcccatgatgttcaggaatatt

SEQ ID NO: 2159811 - DNA, 25 bp, Homo sapien
ttaatacatcccatgatgttcagga

SEQ ID NO: 2159812 - DNA, 25 bp, Homo sapien
gtagattgcttaaaaaccacatctg

SEQ ID NO: 2159813 - DNA, 25 bp, Homo sapien
tgcttaaaaaccacatctgtcctat

SEQ ID NO: 2159814 - DNA, 25 bp, Homo sapien
ctccagtcttgtagattgcttaaaa

SEQ ID NO: 2159815 - DNA, 25 bp, Homo sapien
taaaaaccacatctgtcctatacat

SEQ ID NO: 2159816 - DNA, 25 bp, Homo sapien
gctccaaccccagtggcatgactat

SEQ ID NO: 2159817 - DNA, 25 bp, Homo sapien
catgactatggccaagacgatacgt

SEQ ID NO: 2159818 - DNA, 25 bp, Homo sapien
tatggccaagacgatacgtgctgga

SEQ ID NO: 2159819 - DNA, 25 bp, Homo sapien
cgatacgtgctggaaagctcagcca

SEQ ID NO: 2159820 - DNA, 25 bp, Homo sapien
gattttgtacttgcaatttaccagg

SEQ ID NO: 2159821 - DNA, 25 bp, Homo sapien
tgtagtgaatgctatatcgtgggaa

SEQ ID NO: 2159822 - DNA, 25 bp, Homo sapien
tcaatagaagaatgtgtgattttgt

SEQ ID NO: 2159823 - DNA, 25 bp, Homo sapien
ccaggattgtagtgaatgctatatc

SEQ ID NO: 2159824 - DNA, 25 bp, Homo sapien
cttttgctggaattctaacagccct

SEQ ID NO: 2159825 - DNA, 25 bp, Homo sapien
tgctctcttttgctggaattctaac

SEQ ID NO: 2159826 - DNA, 25 bp, Homo sapien
gctctcttttgctggaattctaaca

SEQ ID NO: 2159827 - DNA, 25 bp, Homo sapien
ttgctggaattctaacagccctttc

SEQ ID NO: 2159828 - DNA, 25 bp, Homo sapien
tcccagaacatggattccctctcaa

SEQ ID NO: 2159829 - DNA, 25 bp, Homo sapien
cagaacatggattccctctcaattc

SEQ ID NO: 2159830 - DNA, 25 bp, Homo sapien
acatggattccctctcaattcagca

SEQ ID NO: 2159831 - DNA, 25 bp, Homo sapien
gattccctctcaattcagcaccttt

SEQ ID NO: 2159832 - DNA, 25 bp, Homo sapien
tgcttgaatcataagtactgacttt

SEQ ID NO: 2159833 - DNA, 25 bp, Homo sapien
ttcagggatcccctcaatgcttgaa

SEQ ID NO: 2159834 - DNA, 25 bp, Homo sapien
gatcccctcaatgcttgaatcataa

SEQ ID NO: 2159835 - DNA, 25 bp, Homo sapien
cagggatcccctcaatgcttgaatc

SEQ ID NO: 2159836 - DNA, 25 bp, Homo sapien
cacacagatactggagtcagagtac

SEQ ID NO: 2159837 - DNA, 25 bp, Homo sapien
tcacacagatactggagtcagagta

SEQ ID NO: 2159838 - DNA, 25 bp, Homo sapien
gaagcaaaggcacaaaacctcttgg

SEQ ID NO: 2159839 - DNA, 25 bp, Homo sapien
agatgtacagagatcctggaggctc

SEQ ID NO: 2159840 - DNA, 25 bp, Homo sapien
ctggcccaactgtatcgagagatgt

SEQ ID NO: 2159841 - DNA, 25 bp, Homo sapien
gtttgctcttgctgtcagtagaagc

SEQ ID NO: 2159842 - DNA, 25 bp, Homo sapien
tttgtagcgtggagttaggcagctt

SEQ ID NO: 2159843 - DNA, 25 bp, Homo sapien
ttcacactgactgagatttgtagcg

SEQ ID NO: 2159844 - DNA, 25 bp, Homo sapien
tcttcctacaccgaaatcgaatgtt

SEQ ID NO: 2159845 - DNA, 25 bp, Homo sapien
tatttcaacatgtagggtgttccca

SEQ ID NO: 2159846 - DNA, 25 bp, Homo sapien
caaagatttgggatagcttagggca

SEQ ID NO: 2159847 - DNA, 25 bp, Homo sapien
gcttagggcaacattgaccttggca

SEQ ID NO: 2159848 - DNA, 25 bp, Homo sapien
tccgcaggtttccttgtaagggaca

SEQ ID NO: 2159849 - DNA, 25 bp, Homo sapien
cacataatctgtgaagtctccgcag

SEQ ID NO: 2159850 - DNA, 25 bp, Homo sapien
gagtctgagaaaaggagttgtcttg

SEQ ID NO: 2159851 - DNA, 25 bp, Homo sapien
aaaggagttgtcttgtggttcctgg

SEQ ID NO: 2159852 - DNA, 25 bp, Homo sapien
cttgggatactcacagaagacttct

SEQ ID NO: 2159853 - DNA, 25 bp, Homo sapien
ggtaagaaaatctcttgggatactc

SEQ ID NO: 2159854 - DNA, 25 bp, Homo sapien
ccactacctttcaggattgttttca

SEQ ID NO: 2159855 - DNA, 25 bp, Homo sapien
gtatattgtcccactacctttcagg

SEQ ID NO: 2159856 - DNA, 25 bp, Homo sapien
ctacctttcaggattgttttcatcc

SEQ ID NO: 2159857 - DNA, 25 bp, Homo sapien
attgtcccactacctttcaggattg

SEQ ID NO: 2159858 - DNA, 25 bp, Homo sapien
gatcccctgcggtgttcagtttgct

SEQ ID NO: 2159859 - DNA, 25 bp, Homo sapien
tctcctgatcccctgcggtgttcag

SEQ ID NO: 2159860 - DNA, 25 bp, Homo sapien
attttctcctgatcccctgcggtgt

SEQ ID NO: 2159861 - DNA, 25 bp, Homo sapien
gtttgagtgtctcagttgaacattt

SEQ ID NO: 2159862 - DNA, 25 bp, Homo sapien
aggtttatgtagatgcaactaggaa

SEQ ID NO: 2159863 - DNA, 25 bp, Homo sapien
taggaaattcagtaaagtcaatgac

SEQ ID NO: 2159864 - DNA, 25 bp, Homo sapien
ctttaggtttatgtagatgcaacta

SEQ ID NO: 2159865 - DNA, 25 bp, Homo sapien
ctaaatcctctggattgacttccaa

SEQ ID NO: 2159866 - DNA, 25 bp, Homo sapien
gaacattcttggacctgagtacttg

SEQ ID NO: 2159867 - DNA, 25 bp, Homo sapien
ctgaacattcttggacctgagtact

SEQ ID NO: 2159868 - DNA, 25 bp, Homo sapien
gtacctgaacattcttggacctgag

SEQ ID NO: 2159869 - DNA, 25 bp, Homo sapien
acattcttggacctgagtacttgct

SEQ ID NO: 2159870 - DNA, 25 bp, Homo sapien
caagatcatctttgtttggtgtata

SEQ ID NO: 2159871 - DNA, 25 bp, Homo sapien
tccccaagatcatctttgtttggtg

SEQ ID NO: 2159872 - DNA, 25 bp, Homo sapien
ccaagatcatctttgtttggtgtat

SEQ ID NO: 2159873 - DNA, 25 bp, Homo sapien
cccaagatcatctttgtttggtgta

SEQ ID NO: 2159874 - DNA, 25 bp, Homo sapien
caacaggaaagtattcaggtgcagc

SEQ ID NO: 2159875 - DNA, 25 bp, Homo sapien
tgaccaacaggaaagtattcaggtg

SEQ ID NO: 2159876 - DNA, 25 bp, Homo sapien
gaaagtattcaggtgcagcaatgca

SEQ ID NO: 2159877 - DNA, 25 bp, Homo sapien
ttcaggtgcagcaatgcactcaggc

SEQ ID NO: 2159878 - DNA, 25 bp, Homo sapien
agtcctggctgcactgtagggtcca

SEQ ID NO: 2159879 - DNA, 25 bp, Homo sapien
tggctgcactgtagggtccaatgtg

SEQ ID NO: 2159880 - DNA, 25 bp, Homo sapien
ctgcactgtagggtccaatgtgctc

SEQ ID NO: 2159881 - DNA, 25 bp, Homo sapien
cttctcttccacttgagtcctggct

SEQ ID NO: 2159882 - DNA, 25 bp, Homo sapien
ggcatgcattgttcccaccccagca

SEQ ID NO: 2159883 - DNA, 25 bp, Homo sapien
gaggaggcatgcattgttcccaccc

SEQ ID NO: 2159884 - DNA, 25 bp, Homo sapien
aggaggcatgcattgttcccacccc

SEQ ID NO: 2159885 - DNA, 25 bp, Homo sapien
gaggcatgcattgttcccaccccag

SEQ ID NO: 2159886 - DNA, 25 bp, Homo sapien
caaatacatcaattttgtgggcgat

SEQ ID NO: 2159887 - DNA, 25 bp, Homo sapien
ttttgtgggcgataacagcaaaatg

SEQ ID NO: 2159888 - DNA, 25 bp, Homo sapien
catcaattttgtgggcgataacagc

SEQ ID NO: 2159889 - DNA, 25 bp, Homo sapien
tacatcaattttgtgggcgataaca

SEQ ID NO: 2159890 - DNA, 25 bp, Homo sapien
tcttttggctgtacggctttctgca

SEQ ID NO: 2159891 - DNA, 25 bp, Homo sapien
agaaacacccgctcagaatgtccct

SEQ ID NO: 2159892 - DNA, 25 bp, Homo sapien
tattataggtgctgttcagaaacac

SEQ ID NO: 2159893 - DNA, 25 bp, Homo sapien
tctgcatagctagagctcccagggt

SEQ ID NO: 2159894 - DNA, 25 bp, Homo sapien
tttcagggtggaaatcaggttgagg

SEQ ID NO: 2159895 - DNA, 25 bp, Homo sapien
gagcctgacagggtctgggactctt

SEQ ID NO: 2159896 - DNA, 25 bp, Homo sapien
ctggaggagacccttccagtgtggt

SEQ ID NO: 2159897 - DNA, 25 bp, Homo sapien
agcctgacagggtctgggactcttc

SEQ ID NO: 2159898 - DNA, 25 bp, Homo sapien
tggtgagcggttcccttacttcttc

SEQ ID NO: 2159899 - DNA, 25 bp, Homo sapien
ggagatcccttcagccctccgtaag

SEQ ID NO: 2159900 - DNA, 25 bp, Homo sapien
tgtctgcagcatcgcagggctgact

SEQ ID NO: 2159901 - DNA, 25 bp, Homo sapien
caggaatgagtttctacgggctccg

SEQ ID NO: 2159902 - DNA, 25 bp, Homo sapien
gggccctcaccttaatacctggaga

SEQ ID NO: 2159903 - DNA, 25 bp, Homo sapien
gacttgtttcgggggcagcctacag

SEQ ID NO: 2159904 - DNA, 25 bp, Homo sapien
ggggcagcctacaggagcatggtca

SEQ ID NO: 2159905 - DNA, 25 bp, Homo sapien
ggcagcctacaggagcatggtcagg

SEQ ID NO: 2159906 - DNA, 25 bp, Homo sapien
cttgacttgtttcgggggcagccta

SEQ ID NO: 2159907 - DNA, 25 bp, Homo sapien
ctgcacacctacaaggccctgtgcc

SEQ ID NO: 2159908 - DNA, 25 bp, Homo sapien
caagctcacagtgccgactcttttg

SEQ ID NO: 2159909 - DNA, 25 bp, Homo sapien
gccgactcttttggctgtgaggcat

SEQ ID NO: 2159910 - DNA, 25 bp, Homo sapien
ttgctcaagctcacagtgccgactc

SEQ ID NO: 2159911 - DNA, 25 bp, Homo sapien
ctggatcagagtagagggagaggag

SEQ ID NO: 2159912 - DNA, 25 bp, Homo sapien
gagaggaggaggctgtggtattcac

SEQ ID NO: 2159913 - DNA, 25 bp, Homo sapien
tggatcagagtagagggagaggagg

SEQ ID NO: 2159914 - DNA, 25 bp, Homo sapien
agggagaggaggaggctgtggtatt

SEQ ID NO: 2159915 - DNA, 25 bp, Homo sapien
gggggagcagactctctgagaactc

SEQ ID NO: 2159916 - DNA, 25 bp, Homo sapien
ctttgatggtagtgcagggggagca

SEQ ID NO: 2159917 - DNA, 25 bp, Homo sapien
gattccatggagtggctttgatggt

SEQ ID NO: 2159918 - DNA, 25 bp, Homo sapien
gagcagactctctgagaactctggg

SEQ ID NO: 2159919 - DNA, 25 bp, Homo sapien
gatccttgtgttctttgatgacacc

SEQ ID NO: 2159920 - DNA, 25 bp, Homo sapien
gcattcatgggcttgcataaagatc

SEQ ID NO: 2159921 - DNA, 25 bp, Homo sapien
cataaagatcggagggaagtgatcc

SEQ ID NO: 2159922 - DNA, 25 bp, Homo sapien
gttgtatacttgacactcaggaatt

SEQ ID NO: 2159923 - DNA, 25 bp, Homo sapien
tgggcattccctggtcatcgctcag

SEQ ID NO: 2159924 - DNA, 25 bp, Homo sapien
ggcctccattaagatcacaccgaag

SEQ ID NO: 2159925 - DNA, 25 bp, Homo sapien
gccccacgggaatttgtatcttgga

SEQ ID NO: 2159926 - DNA, 25 bp, Homo sapien
gatcactgttggatacctgacagca

SEQ ID NO: 2159927 - DNA, 25 bp, Homo sapien
tctgcattctgaagctaataagcct

SEQ ID NO: 2159928 - DNA, 25 bp, Homo sapien
tcacaaaataagacggaagcttccc

SEQ ID NO: 2159929 - DNA, 25 bp, Homo sapien
cacagagtgaagaatctgcctgaga

SEQ ID NO: 2159930 - DNA, 25 bp, Homo sapien
cactggccatgagagtagtaccacc

SEQ ID NO: 2159931 - DNA, 25 bp, Homo sapien
gctctgatgcctttagccacaggag

SEQ ID NO: 2159932 - DNA, 25 bp, Homo sapien
gcaggggctctgatgcctttagcca

SEQ ID NO: 2159933 - DNA, 25 bp, Homo sapien
aggggctctgatgcctttagccaca

SEQ ID NO: 2159934 - DNA, 25 bp, Homo sapien
gatgcctttagccacaggagctcct

SEQ ID NO: 2159935 - DNA, 25 bp, Homo sapien
caccaatgcccgttaaggacgtcaa

SEQ ID NO: 2159936 - DNA, 25 bp, Homo sapien
tgcaaagctagtggcgctggaggca

SEQ ID NO: 2159937 - DNA, 25 bp, Homo sapien
gggagctggctgttaaggacaccaa

SEQ ID NO: 2159938 - DNA, 25 bp, Homo sapien
gctggctgttaaggacaccaatgcc

SEQ ID NO: 2159939 - DNA, 25 bp, Homo sapien
tgtgaggggattgccagccataacc

SEQ ID NO: 2159940 - DNA, 25 bp, Homo sapien
ccagtgtgaggggattgccagccat

SEQ ID NO: 2159941 - DNA, 25 bp, Homo sapien
tccctggatgtggaccgcatcattg

SEQ ID NO: 2159942 - DNA, 25 bp, Homo sapien
gattgccagccataacccagctgag

SEQ ID NO: 2159943 - DNA, 25 bp, Homo sapien
gaaactctggtcttatggtcctcat

SEQ ID NO: 2159944 - DNA, 25 bp, Homo sapien
tatgatagataattgagacctggcc

SEQ ID NO: 2159945 - DNA, 25 bp, Homo sapien
tggtcctcattgcaatcagactgct

SEQ ID NO: 2159946 - DNA, 25 bp, Homo sapien
aattttgacaactgctgtccaccag

SEQ ID NO: 2159947 - DNA, 25 bp, Homo sapien
tgttctacagagaaatgtatgtctt

SEQ ID NO: 2159948 - DNA, 25 bp, Homo sapien
gttctacagagaaatgtatgtcttt

SEQ ID NO: 2159949 - DNA, 25 bp, Homo sapien
tgtttttcgcagatgtgccctttct

SEQ ID NO: 2159950 - DNA, 25 bp, Homo sapien
tgcatttgtaactgtggactcttgt

SEQ ID NO: 2159951 - DNA, 25 bp, Homo sapien
attcttccagcttaagaggcttgtt

SEQ ID NO: 2159952 - DNA, 25 bp, Homo sapien
cttgttcagttgaagaaaatgcgtc

SEQ ID NO: 2159953 - DNA, 25 bp, Homo sapien
gtaatttcatgagataagtcctcct

SEQ ID NO: 2159954 - DNA, 25 bp, Homo sapien
taatttcatgagataagtcctcctc

SEQ ID NO: 2159955 - DNA, 25 bp, Homo sapien
aatttcatgagataagtcctcctca

SEQ ID NO: 2159956 - DNA, 25 bp, Homo sapien
atttcatgagataagtcctcctcat

SEQ ID NO: 2159957 - DNA, 25 bp, Homo sapien
ttgtttaatatttgttgttgtatac

SEQ ID NO: 2159958 - DNA, 25 bp, Homo sapien
tgttccaaaagtggacatagcatgt

SEQ ID NO: 2159959 - DNA, 25 bp, Homo sapien
tcaaccccagtcagtaaagagaact

SEQ ID NO: 2159960 - DNA, 25 bp, Homo sapien
aattgagttgtattgtcaaccccag

SEQ ID NO: 2159961 - DNA, 25 bp, Homo sapien
tcatatctgttgcatggaagaaagt

SEQ ID NO: 2159962 - DNA, 25 bp, Homo sapien
cgaagactcggaggggccagggcga

SEQ ID NO: 2159963 - DNA, 25 bp, Homo sapien
ggccgcccgagctcccggcctctct

SEQ ID NO: 2159964 - DNA, 25 bp, Homo sapien
gcgctcactccctccgcccgcctcc

SEQ ID NO: 2159965 - DNA, 25 bp, Homo sapien
ctagtcgaagactcggaggggccag

SEQ ID NO: 2159966 - DNA, 25 bp, Homo sapien
tgatccctgtcggaaacctggcacg

SEQ ID NO: 2159967 - DNA, 25 bp, Homo sapien
ctggcacgggccaacttttcccgat

SEQ ID NO: 2159968 - DNA, 25 bp, Homo sapien
ttatcacgccaagaagttgcaagga

SEQ ID NO: 2159969 - DNA, 25 bp, Homo sapien
aacttttcccgattatcacgccaag

SEQ ID NO: 2159970 - DNA, 25 bp, Homo sapien
ctctgcgcgggtgggtgagggttct

SEQ ID NO: 2159971 - DNA, 25 bp, Homo sapien
tctgcgcgggtgggtgagggttctc

SEQ ID NO: 2159972 - DNA, 25 bp, Homo sapien
tgggtggcagcgtggtgtgcgggcg

SEQ ID NO: 2159973 - DNA, 25 bp, Homo sapien
cactgggtggcagcgtggtgtgcgg

SEQ ID NO: 2159974 - DNA, 25 bp, Homo sapien
gctggggctgaacccgtctggggac

SEQ ID NO: 2159975 - DNA, 25 bp, Homo sapien
gcagcgtggtgtgcgggcgcagctc

SEQ ID NO: 2159976 - DNA, 25 bp, Homo sapien
ggagaatgaatgaggtccgtagaca

SEQ ID NO: 2159977 - DNA, 25 bp, Homo sapien
ggtcacaggcctttgtgagttctct

SEQ ID NO: 2159978 - DNA, 25 bp, Homo sapien
tgagttctctttgtggaagagagag

SEQ ID NO: 2159979 - DNA, 25 bp, Homo sapien
ccgtagacagacagatcacagagag

SEQ ID NO: 2159980 - DNA, 25 bp, Homo sapien
actttggcatagtttcctgttggag

SEQ ID NO: 2159981 - DNA, 25 bp, Homo sapien
cattcgtctctgaaattttaagcac

SEQ ID NO: 2159982 - DNA, 25 bp, Homo sapien
acattcgtctctgaaattttaagca

SEQ ID NO: 2159983 - DNA, 25 bp, Homo sapien
gatggatgtgactttggcatagttt

SEQ ID NO: 2159984 - DNA, 25 bp, Homo sapien
caaaaggtggtacttggctacctca

SEQ ID NO: 2159985 - DNA, 25 bp, Homo sapien
tgctcagaatggactgaggctgctc

SEQ ID NO: 2159986 - DNA, 25 bp, Homo sapien
gagatcccagtgttactcgacgttg

SEQ ID NO: 2159987 - DNA, 25 bp, Homo sapien
tagtgtagaaggagaacaaactggc

SEQ ID NO: 2159988 - DNA, 25 bp, Homo sapien
tgtgcctcattgataggggtgctat

SEQ ID NO: 2159989 - DNA, 25 bp, Homo sapien
tctctccctttatataagagaaaat

SEQ ID NO: 2159990 - DNA, 25 bp, Homo sapien
cctggggggcctgaactagcagcag

SEQ ID NO: 2159991 - DNA, 25 bp, Homo sapien
gagatctacagatctccccagtgcc

SEQ ID NO: 2159992 - DNA, 25 bp, Homo sapien
gatctagatctgagctttagtgaca

SEQ ID NO: 2159993 - DNA, 25 bp, Homo sapien
tgtttgggatcaatctactcttata

SEQ ID NO: 2159994 - DNA, 25 bp, Homo sapien
tattaggccattagtattttgtttg

SEQ ID NO: 2159995 - DNA, 25 bp, Homo sapien
ggcaagtcactatgtgtaaaagaac

SEQ ID NO: 2159996 - DNA, 25 bp, Homo sapien
ggccacattctgaatctgatcatct

SEQ ID NO: 2159997 - DNA, 25 bp, Homo sapien
tctgatcatctgtgcttctaagcat

SEQ ID NO: 2159998 - DNA, 25 bp, Homo sapien
gccacattctgaatctgatcatctg

SEQ ID NO: 2159999 - DNA, 25 bp, Homo sapien
ctgaatctgatcatctgtgcttcta

SEQ ID NO: 2160000 - DNA, 25 bp, Homo sapien
tggtggcctgagcacttgctcagct

SEQ ID NO: 2160001 - DNA, 25 bp, Homo sapien
cttgctcagcttcccaaccagagaa

SEQ ID NO: 2160002 - DNA, 25 bp, Homo sapien
tcagcttcccaaccagagaacaatg

SEQ ID NO: 2160003 - DNA, 25 bp, Homo sapien
agcttcccaaccagagaacaatggg

SEQ ID NO: 2160004 - DNA, 25 bp, Homo sapien
aaagactgagtctcttgattagacc

SEQ ID NO: 2160005 - DNA, 25 bp, Homo sapien
gactgagtctcttgattagacctga

SEQ ID NO: 2160006 - DNA, 25 bp, Homo sapien
gggccattataagaagctatggcac

SEQ ID NO: 2160007 - DNA, 25 bp, Homo sapien
gctatggcacagctgaaagactgag

SEQ ID NO: 2160008 - DNA, 25 bp, Homo sapien
ccatgtcggctctcattttgtttat

SEQ ID NO: 2160009 - DNA, 25 bp, Homo sapien
catcaacagattgagctgctcccat

SEQ ID NO: 2160010 - DNA, 25 bp, Homo sapien
ttctgtgctgtctagacatcaacag

SEQ ID NO: 2160011 - DNA, 25 bp, Homo sapien
gacttgcaatttggctccatgtcgg

SEQ ID NO: 2160012 - DNA, 25 bp, Homo sapien
tttccataggattctgttgtcagcc

SEQ ID NO: 2160013 - DNA, 25 bp, Homo sapien
cagaacctggtttgttcctaactct

SEQ ID NO: 2160014 - DNA, 25 bp, Homo sapien
tcctaactctatcagggagcttaga

SEQ ID NO: 2160015 - DNA, 25 bp, Homo sapien
ctttctgatgagaattggtgggcac

SEQ ID NO: 2160016 - DNA, 25 bp, Homo sapien
tgggcagcatgagaggccggacaca

SEQ ID NO: 2160017 - DNA, 25 bp, Homo sapien
gaaatggtgctcaattttttctcta

SEQ ID NO: 2160018 - DNA, 25 bp, Homo sapien
cagcatgagaggccggacacaaggt

SEQ ID NO: 2160019 - DNA, 25 bp, Homo sapien
ttttctctatcgtcttcttggaact

SEQ ID NO: 2160020 - DNA, 25 bp, Homo sapien
gggtcacaggccatatgggtggact

SEQ ID NO: 2160021 - DNA, 25 bp, Homo sapien
tgtggggtcacaggccatatgggtg

SEQ ID NO: 2160022 - DNA, 25 bp, Homo sapien
attgtggggtcacaggccatatggg

SEQ ID NO: 2160023 - DNA, 25 bp, Homo sapien
gtcacaggccatatgggtggactaa

SEQ ID NO: 2160024 - DNA, 25 bp, Homo sapien
gcaagtgaccccactggaaggagca

SEQ ID NO: 2160025 - DNA, 25 bp, Homo sapien
tggaagggctgcaagtgaccccact

SEQ ID NO: 2160026 - DNA, 25 bp, Homo sapien
cattgtcaagtccacctttgctcct

SEQ ID NO: 2160027 - DNA, 25 bp, Homo sapien
tgcatcaggatggattcccaggcac

SEQ ID NO: 2160028 - DNA, 25 bp, Homo sapien
tcactgaaatctggaaagctcatca

SEQ ID NO: 2160029 - DNA, 25 bp, Homo sapien
ctgaaatctggaaagctcatcaact

SEQ ID NO: 2160030 - DNA, 25 bp, Homo sapien
gaaatctggaaagctcatcaacttc

SEQ ID NO: 2160031 - DNA, 25 bp, Homo sapien
cactgaaatctggaaagctcatcaa

SEQ ID NO: 2160032 - DNA, 25 bp, Homo sapien
tgtgacaccttgaagaaataagcat

SEQ ID NO: 2160033 - DNA, 25 bp, Homo sapien
cacccattaggttggcagatcttcc

SEQ ID NO: 2160034 - DNA, 25 bp, Homo sapien
aaaagaccacccattaggttggcag

SEQ ID NO: 2160035 - DNA, 25 bp, Homo sapien
taagaagttacaggtattttctcac

SEQ ID NO: 2160036 - DNA, 25 bp, Homo sapien
ctttgatgttctccgcgactaaata

SEQ ID NO: 2160037 - DNA, 25 bp, Homo sapien
gatgtcatgcataagcttggcctct

SEQ ID NO: 2160038 - DNA, 25 bp, Homo sapien
taagcttggcctctaatatagattc

SEQ ID NO: 2160039 - DNA, 25 bp, Homo sapien
tgcgggtaatgctcctttgggcttc

SEQ ID NO: 2160040 - DNA, 25 bp, Homo sapien
ctaatatagattctgcgggtaatgc

SEQ ID NO: 2160041 - DNA, 25 bp, Homo sapien
ttcacgctcctaatatgactaaagt

SEQ ID NO: 2160042 - DNA, 25 bp, Homo sapien
cactgactgagattcacgctcctaa

SEQ ID NO: 2160043 - DNA, 25 bp, Homo sapien
gggcagattttgctggctccactga

SEQ ID NO: 2160044 - DNA, 25 bp, Homo sapien
gtggtggatgggccacctggcacgc

SEQ ID NO: 2160045 - DNA, 25 bp, Homo sapien
ccagctgtttgtagcagtcttcagt

SEQ ID NO: 2160046 - DNA, 25 bp, Homo sapien
cacctttagcgtctgaattttctta

SEQ ID NO: 2160047 - DNA, 25 bp, Homo sapien
tctcattggctttgacttcctcgac

SEQ ID NO: 2160048 - DNA, 25 bp, Homo sapien
ttcctcgacggggttggtggcatta

SEQ ID NO: 2160049 - DNA, 25 bp, Homo sapien
ttcagattcttctggaggccctgct

SEQ ID NO: 2160050 - DNA, 25 bp, Homo sapien
actcttctgtgtcatctcctgtccc

SEQ ID NO: 2160051 - DNA, 25 bp, Homo sapien
atctcctgtccccttcagattcttc

SEQ ID NO: 2160052 - DNA, 25 bp, Homo sapien
tcatgaatttaaatactcttctgtg

SEQ ID NO: 2160053 - DNA, 25 bp, Homo sapien
cttctctagcttattggtggccttc

SEQ ID NO: 2160054 - DNA, 25 bp, Homo sapien
tgtaaattctgcttgagtctcaacc

SEQ ID NO: 2160055 - DNA, 25 bp, Homo sapien
ccttctccaattttgctgtagacct

SEQ ID NO: 2160056 - DNA, 25 bp, Homo sapien
gggactattcgtggtcttctctagc

SEQ ID NO: 2160057 - DNA, 25 bp, Homo sapien
tagagtagggtctggttcaaggtct

SEQ ID NO: 2160058 - DNA, 25 bp, Homo sapien
tctggttcaaggtctggtgagtctc

SEQ ID NO: 2160059 - DNA, 25 bp, Homo sapien
ggttcaaggtctggtgagtctccac

SEQ ID NO: 2160060 - DNA, 25 bp, Homo sapien
ttagagtagggtctggttcaaggtc

SEQ ID NO: 2160061 - DNA, 25 bp, Homo sapien
atttgtagtcagcctccatcccatt

SEQ ID NO: 2160062 - DNA, 25 bp, Homo sapien
tccccagcatctgacattggattaa

SEQ ID NO: 2160063 - DNA, 25 bp, Homo sapien
acattggattaagagcagcaacacc

SEQ ID NO: 2160064 - DNA, 25 bp, Homo sapien
tgacattggattaagagcagcaaca

SEQ ID NO: 2160065 - DNA, 25 bp, Homo sapien
gacattggattaagagcagcaacac

SEQ ID NO: 2160066 - DNA, 25 bp, Homo sapien
gttagaagattcatgaactaattca

SEQ ID NO: 2160067 - DNA, 25 bp, Homo sapien
ctgagaagatagcatttagaatcca

SEQ ID NO: 2160068 - DNA, 25 bp, Homo sapien
tctctgagaagatagcatttagaat

SEQ ID NO: 2160069 - DNA, 25 bp, Homo sapien
ttttctctgagaagatagcatttag

SEQ ID NO: 2160070 - DNA, 25 bp, Homo sapien
tctgagaagatagcatttagaatcc

SEQ ID NO: 2160071 - DNA, 25 bp, Homo sapien
cttgcaagcaattgttgaaacactt

SEQ ID NO: 2160072 - DNA, 25 bp, Homo sapien
taggattctccataagcgtgtggta

SEQ ID NO: 2160073 - DNA, 25 bp, Homo sapien
ggtaatctgccaccttgtgaccaac

SEQ ID NO: 2160074 - DNA, 25 bp, Homo sapien
tctgatgcagcttgcaagtatgggt

SEQ ID NO: 2160075 - DNA, 25 bp, Homo sapien
gttcccttacttgtttgccactctg

SEQ ID NO: 2160076 - DNA, 25 bp, Homo sapien
aagtcagaggaatgctgaggaacat

SEQ ID NO: 2160077 - DNA, 25 bp, Homo sapien
catgctgagggaaatgtttttcatc

SEQ ID NO: 2160078 - DNA, 25 bp, Homo sapien
aagaagtcagaggaatgctgaggaa

SEQ ID NO: 2160079 - DNA, 25 bp, Homo sapien
cagaggaatgctgaggaacatgctg

SEQ ID NO: 2160080 - DNA, 25 bp, Homo sapien
gttgcccttttgcatcattatggga

SEQ ID NO: 2160081 - DNA, 25 bp, Homo sapien
tatgggaatccttatgataattgtc

SEQ ID NO: 2160082 - DNA, 25 bp, Homo sapien
ttgcatcattatgggaatccttatg

SEQ ID NO: 2160083 - DNA, 25 bp, Homo sapien
tacttttgcattagtggtttttgta

SEQ ID NO: 2160084 - DNA, 25 bp, Homo sapien
tactgccccatttgggctggcaaag

SEQ ID NO: 2160085 - DNA, 25 bp, Homo sapien
gccccatttgggctggcaaagttgc

SEQ ID NO: 2160086 - DNA, 25 bp, Homo sapien
attttactgccccatttgggctggc

SEQ ID NO: 2160087 - DNA, 25 bp, Homo sapien
catttgggctggcaaagttgcttgc

SEQ ID NO: 2160088 - DNA, 25 bp, Homo sapien
ctgggaggttgatgtgcacaccagt

SEQ ID NO: 2160089 - DNA, 25 bp, Homo sapien
tggtctgcattgtatgggccaaact

SEQ ID NO: 2160090 - DNA, 25 bp, Homo sapien
gatgtgcacaccagtgcattcccct

SEQ ID NO: 2160091 - DNA, 25 bp, Homo sapien
tctgcattgtatgggccaaactctc

SEQ ID NO: 2160092 - DNA, 25 bp, Homo sapien
gggatctatcctccctggccacatg

SEQ ID NO: 2160093 - DNA, 25 bp, Homo sapien
ttcttcttagtggacctatttctgt

SEQ ID NO: 2160094 - DNA, 25 bp, Homo sapien
ttcagcagggggatctatcctccct

SEQ ID NO: 2160095 - DNA, 25 bp, Homo sapien
tagtggacctatttctgtcttcagc

SEQ ID NO: 2160096 - DNA, 25 bp, Homo sapien
tactgatctggaccatgaaacacag

SEQ ID NO: 2160097 - DNA, 25 bp, Homo sapien
gaagccagagccaaattggccagca

SEQ ID NO: 2160098 - DNA, 25 bp, Homo sapien
cacgttttgtagaggatttaggctt

SEQ ID NO: 2160099 - DNA, 25 bp, Homo sapien
tggccagcaaagcttcacgttttgt

SEQ ID NO: 2160100 - DNA, 25 bp, Homo sapien
catcatatctacttctgtgcctgac

SEQ ID NO: 2160101 - DNA, 25 bp, Homo sapien
gatgacaacactgtaatttgcttga

SEQ ID NO: 2160102 - DNA, 25 bp, Homo sapien
cagaaaacttctttgttgaagctga

SEQ ID NO: 2160103 - DNA, 25 bp, Homo sapien
cagtattccataggccagtggtggc

SEQ ID NO: 2160104 - DNA, 25 bp, Homo sapien
gcatggaaaagttgcagtgaaatga

SEQ ID NO: 2160105 - DNA, 25 bp, Homo sapien
ggtgcatggaaaagttgcagtgaaa

SEQ ID NO: 2160106 - DNA, 25 bp, Homo sapien
ttatttgtttggtgcatggaaaagt

SEQ ID NO: 2160107 - DNA, 25 bp, Homo sapien
gtttggtgcatggaaaagttgcagt

SEQ ID NO: 2160108 - DNA, 25 bp, Homo sapien
gtggccttagaacttgctcacataa

SEQ ID NO: 2160109 - DNA, 25 bp, Homo sapien
gaaccattccaagactgagatccat

SEQ ID NO: 2160110 - DNA, 25 bp, Homo sapien
cataattgttcatagcagttagtga

SEQ ID NO: 2160111 - DNA, 25 bp, Homo sapien
tcatagcagttagtgatcaacagaa

SEQ ID NO: 2160112 - DNA, 25 bp, Homo sapien
ccctgatgcttcactggtaggtttt

SEQ ID NO: 2160113 - DNA, 25 bp, Homo sapien
gatgcttcactggtaggtttttctt

SEQ ID NO: 2160114 - DNA, 25 bp, Homo sapien
taaagtcttccagatccaacacgat

SEQ ID NO: 2160115 - DNA, 25 bp, Homo sapien
gatggaaatagtgctggcccagcag

SEQ ID NO: 2160116 - DNA, 25 bp, Homo sapien
tatcgtggaccaagtagcctcagtt

SEQ ID NO: 2160117 - DNA, 25 bp, Homo sapien
ttttctgggtatgtgtatcgtggac

SEQ ID NO: 2160118 - DNA, 25 bp, Homo sapien
ggcaagcattctccccaagaaatgg

SEQ ID NO: 2160119 - DNA, 25 bp, Homo sapien
ggagagaattgtgccgatatggctg

SEQ ID NO: 2160120 - DNA, 25 bp, Homo sapien
ttctcttcccaacccacaatcttgt

SEQ ID NO: 2160121 - DNA, 25 bp, Homo sapien
tccagctgcagcctgaactttaact

SEQ ID NO: 2160122 - DNA, 25 bp, Homo sapien
gcctgaactttaactccctgttctc

SEQ ID NO: 2160123 - DNA, 25 bp, Homo sapien
tcttcccaacccacaatcttgttat

SEQ ID NO: 2160124 - DNA, 25 bp, Homo sapien
attggcacccttggggccattttga

SEQ ID NO: 2160125 - DNA, 25 bp, Homo sapien
ttttgatttcggatataagccttgt

SEQ ID NO: 2160126 - DNA, 25 bp, Homo sapien
ccatgagtgtgattggcacccttgg

SEQ ID NO: 2160127 - DNA, 25 bp, Homo sapien
tgattggcacccttggggccatttt

SEQ ID NO: 2160128 - DNA, 25 bp, Homo sapien
ggttgcttcacaatgacttggttaa

SEQ ID NO: 2160129 - DNA, 25 bp, Homo sapien
tgctttgtgctgagtcatacgcttg

SEQ ID NO: 2160130 - DNA, 25 bp, Homo sapien
aattagcactgtcagagagctccgt

SEQ ID NO: 2160131 - DNA, 25 bp, Homo sapien
tactttgccttgcatagaggaatcc

SEQ ID NO: 2160132 - DNA, 25 bp, Homo sapien
ccagatcaaagtctgaggaaccact

SEQ ID NO: 2160133 - DNA, 25 bp, Homo sapien
cagatcaaagtctgaggaaccactc

SEQ ID NO: 2160134 - DNA, 25 bp, Homo sapien
ggctgtggactccagatcaaagtct

SEQ ID NO: 2160135 - DNA, 25 bp, Homo sapien
cctctggggattgggagattcctgg

SEQ ID NO: 2160136 - DNA, 25 bp, Homo sapien
tttctgagagcaccgcgataacatc

SEQ ID NO: 2160137 - DNA, 25 bp, Homo sapien
tctttctgagagcaccgcgataaca

SEQ ID NO: 2160138 - DNA, 25 bp, Homo sapien
tttctttctgagagcaccgcgataa

SEQ ID NO: 2160139 - DNA, 25 bp, Homo sapien
cctgatggagcaggctgattgagca

SEQ ID NO: 2160140 - DNA, 25 bp, Homo sapien
ctgttggactgtatcacctgagcct

SEQ ID NO: 2160141 - DNA, 25 bp, Homo sapien
tgtgaactgtggtccaaatgggctg

SEQ ID NO: 2160142 - DNA, 25 bp, Homo sapien
ggctgggctgttggactgtatcacc

SEQ ID NO: 2160143 - DNA, 25 bp, Homo sapien
tgtccagtgtgatccttgattctga

SEQ ID NO: 2160144 - DNA, 25 bp, Homo sapien
gatcagatgtccagtgtgatccttg

SEQ ID NO: 2160145 - DNA, 25 bp, Homo sapien
gattctgaacaccaactggtgactg

SEQ ID NO: 2160146 - DNA, 25 bp, Homo sapien
tggctctgatcagatgtccagtgtg

SEQ ID NO: 2160147 - DNA, 25 bp, Homo sapien
tcatgctcgctaaagtggccacaca

SEQ ID NO: 2160148 - DNA, 25 bp, Homo sapien
tatcctcatgctcgctaaagtggcc

SEQ ID NO: 2160149 - DNA, 25 bp, Homo sapien
ttatacttctatcctcatgctcgct

SEQ ID NO: 2160150 - DNA, 25 bp, Homo sapien
aaagtggccacacagcaatagtatt

SEQ ID NO: 2160151 - DNA, 25 bp, Homo sapien
gcctttcttgtgcaacttcctctat

SEQ ID NO: 2160152 - DNA, 25 bp, Homo sapien
tcattcaaatacacaccttctgagc

SEQ ID NO: 2160153 - DNA, 25 bp, Homo sapien
accagtctgtgagggcatggattct

SEQ ID NO: 2160154 - DNA, 25 bp, Homo sapien
gcagaaatgcgttactgaaatgcag

SEQ ID NO: 2160155 - DNA, 25 bp, Homo sapien
gcacatgccgtttctctcttagttt

SEQ ID NO: 2160156 - DNA, 25 bp, Homo sapien
ttctggtagttaaatgcacatgccg

SEQ ID NO: 2160157 - DNA, 25 bp, Homo sapien
tcctttctggtagttaaatgcacat

SEQ ID NO: 2160158 - DNA, 25 bp, Homo sapien
gttaaatgcacatgccgtttctctc

SEQ ID NO: 2160159 - DNA, 25 bp, Homo sapien
cagacaattggttgaactgatatgc

SEQ ID NO: 2160160 - DNA, 25 bp, Homo sapien
ccagaggatactgaccttgggcctt

SEQ ID NO: 2160161 - DNA, 25 bp, Homo sapien
gaactgatatgctttacttgccttg

SEQ ID NO: 2160162 - DNA, 25 bp, Homo sapien
gccttgatgtcactacaccagacaa

SEQ ID NO: 2160163 - DNA, 25 bp, Homo sapien
taaaagttagtatccagtccatctg

SEQ ID NO: 2160164 - DNA, 25 bp, Homo sapien
cagagaaactggactgtcccggcat

SEQ ID NO: 2160165 - DNA, 25 bp, Homo sapien
cagttttataaaggagtgtgccaag

SEQ ID NO: 2160166 - DNA, 25 bp, Homo sapien
actcaaagactggatgcataatgcc

SEQ ID NO: 2160167 - DNA, 25 bp, Homo sapien
ctctttgtgtaatctagctgggaac

SEQ ID NO: 2160168 - DNA, 25 bp, Homo sapien
tctaattattttaccaggccaggaa

SEQ ID NO: 2160169 - DNA, 25 bp, Homo sapien
taggtataatacagaggcatagtgc

SEQ ID NO: 2160170 - DNA, 25 bp, Homo sapien
cagtgagctggaaagtgcatacatt

SEQ ID NO: 2160171 - DNA, 25 bp, Homo sapien
gcagaatgtgcaagccaacacacca

SEQ ID NO: 2160172 - DNA, 25 bp, Homo sapien
cctgatgcagaatgtgcaagccaac

SEQ ID NO: 2160173 - DNA, 25 bp, Homo sapien
gaatgtgcaagccaacacaccagtc

SEQ ID NO: 2160174 - DNA, 25 bp, Homo sapien
tgtgcaagccaacacaccagtcccc

SEQ ID NO: 2160175 - DNA, 25 bp, Homo sapien
tctgcctgtgcatcccacttcgata

SEQ ID NO: 2160176 - DNA, 25 bp, Homo sapien
gttgtttgaactggctggcttctgc

SEQ ID NO: 2160177 - DNA, 25 bp, Homo sapien
tgtgcatcccacttcgatacttttc

SEQ ID NO: 2160178 - DNA, 25 bp, Homo sapien
gatgtgatcacagtttaagggctgt

SEQ ID NO: 2160179 - DNA, 25 bp, Homo sapien
gttctagtaaatagtgctccacagg

SEQ ID NO: 2160180 - DNA, 25 bp, Homo sapien
tcacatggctgcgaaagctgaggtg

SEQ ID NO: 2160181 - DNA, 25 bp, Homo sapien
tgtctgaaagttgcatgcacaggca

SEQ ID NO: 2160182 - DNA, 25 bp, Homo sapien
ccttggttcttctcgcaatagcaga

SEQ ID NO: 2160183 - DNA, 25 bp, Homo sapien
tgtacggcccatttggccgtcagca

SEQ ID NO: 2160184 - DNA, 25 bp, Homo sapien
gtacggcccatttggccgtcagcat

SEQ ID NO: 2160185 - DNA, 25 bp, Homo sapien
tctgtacggcccatttggccgtcag

SEQ ID NO: 2160186 - DNA, 25 bp, Homo sapien
cgtctgtacggcccatttggccgtc

SEQ ID NO: 2160187 - DNA, 25 bp, Homo sapien
caggtgcctcttataatagtggcta

SEQ ID NO: 2160188 - DNA, 25 bp, Homo sapien
tataagcattattaccaggggccag

SEQ ID NO: 2160189 - DNA, 25 bp, Homo sapien
gttgccactcttcatcacacgttat

SEQ ID NO: 2160190 - DNA, 25 bp, Homo sapien
tataatagtggctagcatgttgcca

SEQ ID NO: 2160191 - DNA, 25 bp, Homo sapien
atgagttggtcgcatctcccagagc

SEQ ID NO: 2160192 - DNA, 25 bp, Homo sapien
gacatgtgttgacatctgagagcat

SEQ ID NO: 2160193 - DNA, 25 bp, Homo sapien
cagagcaaggacagataccacagga

SEQ ID NO: 2160194 - DNA, 25 bp, Homo sapien
tgctgagttggttgttaataaacac

SEQ ID NO: 2160195 - DNA, 25 bp, Homo sapien
gaggtgaagaccttgttctagatct

SEQ ID NO: 2160196 - DNA, 25 bp, Homo sapien
caagaggtgaagaccttgttctaga

SEQ ID NO: 2160197 - DNA, 25 bp, Homo sapien
cttcccagggctggatatagttgga

SEQ ID NO: 2160198 - DNA, 25 bp, Homo sapien
ttctcaagaggtgaagaccttgttc

SEQ ID NO: 2160199 - DNA, 25 bp, Homo sapien
cccatttgagcatagtccaggattc

SEQ ID NO: 2160200 - DNA, 25 bp, Homo sapien
taatgagaactagagtccaggacca

SEQ ID NO: 2160201 - DNA, 25 bp, Homo sapien
ctggtcctgagcgtgatcctggtac

SEQ ID NO: 2160202 - DNA, 25 bp, Homo sapien
tgagtttcttaagcttctgggcaaa

SEQ ID NO: 2160203 - DNA, 25 bp, Homo sapien
tcttctcttgtcgatctgatcccat

SEQ ID NO: 2160204 - DNA, 25 bp, Homo sapien
tgtcgatctgatcccatgtgttttc

SEQ ID NO: 2160205 - DNA, 25 bp, Homo sapien
tctcttgtcgatctgatcccatgtg

SEQ ID NO: 2160206 - DNA, 25 bp, Homo sapien
tgctcttctcttgtcgatctgatcc

SEQ ID NO: 2160207 - DNA, 25 bp, Homo sapien
ccccccacatatttgttgattcaca

SEQ ID NO: 2160208 - DNA, 25 bp, Homo sapien
gatcgggctctagaaccagagtccc

SEQ ID NO: 2160209 - DNA, 25 bp, Homo sapien
agccacagtgcttgatcgggctcta

SEQ ID NO: 2160210 - DNA, 25 bp, Homo sapien
tgcttgatcgggctctagaaccaga

SEQ ID NO: 2160211 - DNA, 25 bp, Homo sapien
ttaggctctaaagcgtcttcagtgc

SEQ ID NO: 2160212 - DNA, 25 bp, Homo sapien
gcctatagagagacagagctggatt

SEQ ID NO: 2160213 - DNA, 25 bp, Homo sapien
ctggaagggcctatagagagacaga

SEQ ID NO: 2160214 - DNA, 25 bp, Homo sapien
gagacagagctggattaggctctaa

SEQ ID NO: 2160215 - DNA, 25 bp, Homo sapien
agactgctggagctagtctcctgtg

SEQ ID NO: 2160216 - DNA, 25 bp, Homo sapien
tgtggccagtaagaacttttgcaca

SEQ ID NO: 2160217 - DNA, 25 bp, Homo sapien
tgttgtggccagtaagaacttttgc

SEQ ID NO: 2160218 - DNA, 25 bp, Homo sapien
cagggcaaacatgcctctgaagact

SEQ ID NO: 2160219 - DNA, 25 bp, Homo sapien
aaaatttgacagattgatgatgcat

SEQ ID NO: 2160220 - DNA, 25 bp, Homo sapien
gaaaatttgacagattgatgatgca

SEQ ID NO: 2160221 - DNA, 25 bp, Homo sapien
tagaaaatttgacagattgatgatg

SEQ ID NO: 2160222 - DNA, 25 bp, Homo sapien
tgtagaaaatttgacagattgatga

SEQ ID NO: 2160223 - DNA, 25 bp, Homo sapien
ctttagggtatgtaagttccagaag

SEQ ID NO: 2160224 - DNA, 25 bp, Homo sapien
ttagtgcccagtatgatgccagtca

SEQ ID NO: 2160225 - DNA, 25 bp, Homo sapien
catcatttagcttagtgcccagtat

SEQ ID NO: 2160226 - DNA, 25 bp, Homo sapien
tatgtaagttccagaagatcatcat

SEQ ID NO: 2160227 - DNA, 25 bp, Homo sapien
tgaagtagtcatcaaaaccaaggtg

SEQ ID NO: 2160228 - DNA, 25 bp, Homo sapien
tctgaatgaagtagtcatcaaaacc

SEQ ID NO: 2160229 - DNA, 25 bp, Homo sapien
tagtcatcaaaaccaaggtgagctt

SEQ ID NO: 2160230 - DNA, 25 bp, Homo sapien
ctgcagtggggagctaaacatctga

SEQ ID NO: 2160231 - DNA, 25 bp, Homo sapien
cttcagtgggggcccattggtggac

SEQ ID NO: 2160232 - DNA, 25 bp, Homo sapien
gcttcagtgggggcccattggtgga

SEQ ID NO: 2160233 - DNA, 25 bp, Homo sapien
tcagtgggggcccattggtggacat

SEQ ID NO: 2160234 - DNA, 25 bp, Homo sapien
cagcttcagtgggggcccattggtg

SEQ ID NO: 2160235 - DNA, 25 bp, Homo sapien
ccttctcactggacaccacaagcat

SEQ ID NO: 2160236 - DNA, 25 bp, Homo sapien
ccttgagatccttctcactggacac

SEQ ID NO: 2160237 - DNA, 25 bp, Homo sapien
gagatccttctcactggacaccaca

SEQ ID NO: 2160238 - DNA, 25 bp, Homo sapien
tgagatccttctcactggacaccac

SEQ ID NO: 2160239 - DNA, 25 bp, Homo sapien
tcgcagtctagaccgcgggcacgtt

SEQ ID NO: 2160240 - DNA, 25 bp, Homo sapien
atgacaaagcgccttcctggcggcg

SEQ ID NO: 2160241 - DNA, 25 bp, Homo sapien
agatactgcgcgctccggtgcagcc

SEQ ID NO: 2160242 - DNA, 25 bp, Homo sapien
gtttgcttgtcctcgatacccacgg

SEQ ID NO: 2160243 - DNA, 25 bp, Homo sapien
gagtgcacttcttgaatatgcccat

SEQ ID NO: 2160244 - DNA, 25 bp, Homo sapien
catttgttactgttctggagttgag

SEQ ID NO: 2160245 - DNA, 25 bp, Homo sapien
cagtgatgggtctattgcatggcta

SEQ ID NO: 2160246 - DNA, 25 bp, Homo sapien
cttgctccaaataatgtaggtagca

SEQ ID NO: 2160247 - DNA, 25 bp, Homo sapien
ttgttgcccccggtctggctcaagg

SEQ ID NO: 2160248 - DNA, 25 bp, Homo sapien
caaagtcttcagctcaaggccttta

SEQ ID NO: 2160249 - DNA, 25 bp, Homo sapien
tgactgaaggttccggaagtttgtg

SEQ ID NO: 2160250 - DNA, 25 bp, Homo sapien
ttgtcatacgggtcattgttgcccc

SEQ ID NO: 2160251 - DNA, 25 bp, Homo sapien
aattgtcgaccctcgagtgcctcca

SEQ ID NO: 2160252 - DNA, 25 bp, Homo sapien
ttcctcgcggaattgtcgaccctcg

SEQ ID NO: 2160253 - DNA, 25 bp, Homo sapien
ttcccctctggacgcacggtggtgg

SEQ ID NO: 2160254 - DNA, 25 bp, Homo sapien
cgggcagacgaagctgctgcagcct

SEQ ID NO: 2160255 - DNA, 25 bp, Homo sapien
caagggctgaacctatccatacaag

SEQ ID NO: 2160256 - DNA, 25 bp, Homo sapien
catacaaggtcccagataaggaact

SEQ ID NO: 2160257 - DNA, 25 bp, Homo sapien
catgctgcccaagggctgaacctat

SEQ ID NO: 2160258 - DNA, 25 bp, Homo sapien
gaacctatccatacaaggtcccaga

SEQ ID NO: 2160259 - DNA, 25 bp, Homo sapien
aattttattgctgatccaagcttct

SEQ ID NO: 2160260 - DNA, 25 bp, Homo sapien
ctagtaacaaacgtctgctgcttcc

SEQ ID NO: 2160261 - DNA, 25 bp, Homo sapien
atattcccagatggcaatttctgtg

SEQ ID NO: 2160262 - DNA, 25 bp, Homo sapien
tattgctgatccaagcttctagtaa

SEQ ID NO: 2160263 - DNA, 25 bp, Homo sapien
tgtggctgagaaacttctaagggcc

SEQ ID NO: 2160264 - DNA, 25 bp, Homo sapien
ttctgttcgaattggggattggaat

SEQ ID NO: 2160265 - DNA, 25 bp, Homo sapien
gccatttttctgttcgaattgggga

SEQ ID NO: 2160266 - DNA, 25 bp, Homo sapien
catttttctgttcgaattggggatt

SEQ ID NO: 2160267 - DNA, 25 bp, Homo sapien
tagttggggcggtggagatatttta

SEQ ID NO: 2160268 - DNA, 25 bp, Homo sapien
cttgagaagccgttggtaccacatg

SEQ ID NO: 2160269 - DNA, 25 bp, Homo sapien
gttctgttgcgccttcatgttctac

SEQ ID NO: 2160270 - DNA, 25 bp, Homo sapien
tctcagttccttgtgcagtcctctg

SEQ ID NO: 2160271 - DNA, 25 bp, Homo sapien
tgtgtgtggttctgtcctgaccctc

SEQ ID NO: 2160272 - DNA, 25 bp, Homo sapien
cagaggtatcccttgatcaggagac

SEQ ID NO: 2160273 - DNA, 25 bp, Homo sapien
agatatctacttctaccccacaaca

SEQ ID NO: 2160274 - DNA, 25 bp, Homo sapien
cagtaaagatatctacttctacccc

SEQ ID NO: 2160275 - DNA, 25 bp, Homo sapien
tgaggacagaggtatcccttgatca

SEQ ID NO: 2160276 - DNA, 25 bp, Homo sapien
accttcccctggtcagcactgctca

SEQ ID NO: 2160277 - DNA, 25 bp, Homo sapien
gagctttcatcacagagtgacattc

SEQ ID NO: 2160278 - DNA, 25 bp, Homo sapien
tcttgcacaggagccttcaagaaag

SEQ ID NO: 2160279 - DNA, 25 bp, Homo sapien
caggagccttcaagaaagccagagg

SEQ ID NO: 2160280 - DNA, 25 bp, Homo sapien
cacaaccagggatctatggtataag

SEQ ID NO: 2160281 - DNA, 25 bp, Homo sapien
cttccatgcacaaccagggatctat

SEQ ID NO: 2160282 - DNA, 25 bp, Homo sapien
taagagcaaaacctctttgtggcag

SEQ ID NO: 2160283 - DNA, 25 bp, Homo sapien
catgcacaaccagggatctatggta

SEQ ID NO: 2160284 - DNA, 25 bp, Homo sapien
ctgtagtccatctcaggtgtaagtg

SEQ ID NO: 2160285 - DNA, 25 bp, Homo sapien
tagtccatctcaggtgtaagtgatc

SEQ ID NO: 2160286 - DNA, 25 bp, Homo sapien
agtccatctcaggtgtaagtgatcc

SEQ ID NO: 2160287 - DNA, 25 bp, Homo sapien
tgtagtccatctcaggtgtaagtga

SEQ ID NO: 2160288 - DNA, 25 bp, Homo sapien
aatgcctcaggtacaattgacactc

SEQ ID NO: 2160289 - DNA, 25 bp, Homo sapien
caggtacaattgacactcttggttg

SEQ ID NO: 2160290 - DNA, 25 bp, Homo sapien
ctgtctcagtttggcctggaaatcc

SEQ ID NO: 2160291 - DNA, 25 bp, Homo sapien
gttctgtatttgacttgaacttcca

SEQ ID NO: 2160292 - DNA, 25 bp, Homo sapien
atcttggtgtctcagttatgaatac

SEQ ID NO: 2160293 - DNA, 25 bp, Homo sapien
ttagaatccttctaatgcttggtta

SEQ ID NO: 2160294 - DNA, 25 bp, Homo sapien
gcagtaggtggcgaatattttctat

SEQ ID NO: 2160295 - DNA, 25 bp, Homo sapien
gaatccttctaatgcttggttataa

SEQ ID NO: 2160296 - DNA, 25 bp, Homo sapien
atattgacagcagtaggtggcgaat

SEQ ID NO: 2160297 - DNA, 25 bp, Homo sapien
tggaccccatgaagtagcaggagga

SEQ ID NO: 2160298 - DNA, 25 bp, Homo sapien
gaccccatgaagtagcaggaggagt

SEQ ID NO: 2160299 - DNA, 25 bp, Homo sapien
catggaccccatgaagtagcaggag

SEQ ID NO: 2160300 - DNA, 25 bp, Homo sapien
atggaccccatgaagtagcaggagg

SEQ ID NO: 2160301 - DNA, 25 bp, Homo sapien
cccagggctatgagttgtaggagtc

SEQ ID NO: 2160302 - DNA, 25 bp, Homo sapien
tagccagatttcattagtccatggt

SEQ ID NO: 2160303 - DNA, 25 bp, Homo sapien
tagtccatggtcctagtctataaat

SEQ ID NO: 2160304 - DNA, 25 bp, Homo sapien
ttcagtagggcacaagtggccccag

SEQ ID NO: 2160305 - DNA, 25 bp, Homo sapien
tggccctggtgcatggatcacagtt

SEQ ID NO: 2160306 - DNA, 25 bp, Homo sapien
aattggccctggtgcatggatcaca

SEQ ID NO: 2160307 - DNA, 25 bp, Homo sapien
ttggccctggtgcatggatcacagt

SEQ ID NO: 2160308 - DNA, 25 bp, Homo sapien
caaattggccctggtgcatggatca

SEQ ID NO: 2160309 - DNA, 25 bp, Homo sapien
gcagctatggcccctgtagcaggca

SEQ ID NO: 2160310 - DNA, 25 bp, Homo sapien
tatggaggctggcagctatggcccc

SEQ ID NO: 2160311 - DNA, 25 bp, Homo sapien
agctgcatctggttccatgacatct

SEQ ID NO: 2160312 - DNA, 25 bp, Homo sapien
tacagtgccagaagatcctttgtgg

SEQ ID NO: 2160313 - DNA, 25 bp, Homo sapien
ctcctcactagaatacagtgccaga

SEQ ID NO: 2160314 - DNA, 25 bp, Homo sapien
gccagaagatcctttgtggtcctca

SEQ ID NO: 2160315 - DNA, 25 bp, Homo sapien
ctagaatacagtgccagaagatcct

SEQ ID NO: 2160316 - DNA, 25 bp, Homo sapien
aagccaagccgattcccactgtcat

SEQ ID NO: 2160317 - DNA, 25 bp, Homo sapien
aagccgattcccactgtcatcattg

SEQ ID NO: 2160318 - DNA, 25 bp, Homo sapien
aaaagccaagccgattcccactgtc

SEQ ID NO: 2160319 - DNA, 25 bp, Homo sapien
gccaagccgattcccactgtcatca

SEQ ID NO: 2160320 - DNA, 25 bp, Homo sapien
tgtctcaaacacgttcagtgactcc

SEQ ID NO: 2160321 - DNA, 25 bp, Homo sapien
tcaaacacgttcagtgactcccttt

SEQ ID NO: 2160322 - DNA, 25 bp, Homo sapien
aacacgttcagtgactccctttcta

SEQ ID NO: 2160323 - DNA, 25 bp, Homo sapien
ctctttgtctcaaacacgttcagtg

SEQ ID NO: 2160324 - DNA, 25 bp, Homo sapien
gccgtcgccgtcgccatcgccaggg

SEQ ID NO: 2160325 - DNA, 25 bp, Homo sapien
tcgccgtcgccatcgccagggctgg

SEQ ID NO: 2160326 - DNA, 25 bp, Homo sapien
cgtcgccgtcgccatcgccagggct

SEQ ID NO: 2160327 - DNA, 25 bp, Homo sapien
gccagggctgggccgcgtgctccat

SEQ ID NO: 2160328 - DNA, 25 bp, Homo sapien
gctgggtggcgcgtggcggctgtac

SEQ ID NO: 2160329 - DNA, 25 bp, Homo sapien
gcctgcggctgggtggcgcgtggcg

SEQ ID NO: 2160330 - DNA, 25 bp, Homo sapien
ctgcggctgggtggcgcgtggcggc

SEQ ID NO: 2160331 - DNA, 25 bp, Homo sapien
tgggtggcgcgtggcggctgtacac

SEQ ID NO: 2160332 - DNA, 25 bp, Homo sapien
ggtagagcggcagggccagtgaggg

SEQ ID NO: 2160333 - DNA, 25 bp, Homo sapien
ggcagcttctgcaccacccgggtgg

SEQ ID NO: 2160334 - DNA, 25 bp, Homo sapien
ggccagtgagggcagcttctgcacc

SEQ ID NO: 2160335 - DNA, 25 bp, Homo sapien
tggtgtactggtagagcggcagggc

SEQ ID NO: 2160336 - DNA, 25 bp, Homo sapien
tagtggacgaggaacatggccagga

SEQ ID NO: 2160337 - DNA, 25 bp, Homo sapien
tggacgaggaacatggccaggagga

SEQ ID NO: 2160338 - DNA, 25 bp, Homo sapien
gtagtggacgaggaacatggccagg

SEQ ID NO: 2160339 - DNA, 25 bp, Homo sapien
agtggacgaggaacatggccaggag

SEQ ID NO: 2160340 - DNA, 25 bp, Homo sapien
tcagcatacactgcacaatggctca

SEQ ID NO: 2160341 - DNA, 25 bp, Homo sapien
cctcctcgcatcagaaatgggtaaa

SEQ ID NO: 2160342 - DNA, 25 bp, Homo sapien
tgcacaatggctcaagtatctgctt

SEQ ID NO: 2160343 - DNA, 25 bp, Homo sapien
caggtacagaacataatcgccattg

SEQ ID NO: 2160344 - DNA, 25 bp, Homo sapien
ttctgagattccttaggatatgatc

SEQ ID NO: 2160345 - DNA, 25 bp, Homo sapien
gattccttaggatatgatctgaatg

SEQ ID NO: 2160346 - DNA, 25 bp, Homo sapien
ttggtattttgtatccagtatctcc

SEQ ID NO: 2160347 - DNA, 25 bp, Homo sapien
cttggtattttgtatccagtatctc

SEQ ID NO: 2160348 - DNA, 25 bp, Homo sapien
aaatgtgaagaaagcaaaagtcgcg

SEQ ID NO: 2160349 - DNA, 25 bp, Homo sapien
gaaagcaaaagtcgcgccttggaca

SEQ ID NO: 2160350 - DNA, 25 bp, Homo sapien
gtgaagaaagcaaaagtcgcgcctt

SEQ ID NO: 2160351 - DNA, 25 bp, Homo sapien
gaagaaagcaaaagtcgcgccttgg

SEQ ID NO: 2160352 - DNA, 25 bp, Homo sapien
actttggatactcttcaaatttccg

SEQ ID NO: 2160353 - DNA, 25 bp, Homo sapien
gatactcttcaaatttccggaggta

SEQ ID NO: 2160354 - DNA, 25 bp, Homo sapien
ttggatactcttcaaatttccggag

SEQ ID NO: 2160355 - DNA, 25 bp, Homo sapien
tctgaactttggatactcttcaaat

SEQ ID NO: 2160356 - DNA, 25 bp, Homo sapien
ccgttgaccttgaagggatcaccgt

SEQ ID NO: 2160357 - DNA, 25 bp, Homo sapien
tgccgttgaccttgaagggatcacc

SEQ ID NO: 2160358 - DNA, 25 bp, Homo sapien
gccgttgaccttgaagggatcaccg

SEQ ID NO: 2160359 - DNA, 25 bp, Homo sapien
cgttgaccttgaagggatcaccgta

SEQ ID NO: 2160360 - DNA, 25 bp, Homo sapien
cccgccttagaagggccacaaggag

SEQ ID NO: 2160361 - DNA, 25 bp, Homo sapien
gatgcctttgccccgccttagaagg

SEQ ID NO: 2160362 - DNA, 25 bp, Homo sapien
agtggtcttgctatcgttacagaag

SEQ ID NO: 2160363 - DNA, 25 bp, Homo sapien
tgctatcgttacagaaggtgatcat

SEQ ID NO: 2160364 - DNA, 25 bp, Homo sapien
tggcaatatctctactcttgtaata

SEQ ID NO: 2160365 - DNA, 25 bp, Homo sapien
ttgtaatatcgacttggagacctgg

SEQ ID NO: 2160366 - DNA, 25 bp, Homo sapien
tattaggtgcccataatgtcagctc

SEQ ID NO: 2160367 - DNA, 25 bp, Homo sapien
tcgacttggagacctggatatttca

SEQ ID NO: 2160368 - DNA, 25 bp, Homo sapien
ggctttcaggagtcaattgcaactc

SEQ ID NO: 2160369 - DNA, 25 bp, Homo sapien
tacaagagttcagacagttctagca

SEQ ID NO: 2160370 - DNA, 25 bp, Homo sapien
cccaaaccgattagtcaacaggact

SEQ ID NO: 2160371 - DNA, 25 bp, Homo sapien
tagtcaacaggactgaatcagcagg

SEQ ID NO: 2160372 - DNA, 25 bp, Homo sapien
taggagggatcatagaggaaatagc

SEQ ID NO: 2160373 - DNA, 25 bp, Homo sapien
gccctatgaactatgttgttgtaga

SEQ ID NO: 2160374 - DNA, 25 bp, Homo sapien
aatgtaatgtgatgtcttgtcttgg

SEQ ID NO: 2160375 - DNA, 25 bp, Homo sapien
tgtcttggtacccacgaatacccat

SEQ ID NO: 2160376 - DNA, 25 bp, Homo sapien
tgtgctttgcctcgaagccaatggc

SEQ ID NO: 2160377 - DNA, 25 bp, Homo sapien
gagctgcttatctaaatcccgtaac

SEQ ID NO: 2160378 - DNA, 25 bp, Homo sapien
gcttatctaaatcccgtaactctgg

SEQ ID NO: 2160379 - DNA, 25 bp, Homo sapien
aagctggactgtgctttgcctcgaa

SEQ ID NO: 2160380 - DNA, 25 bp, Homo sapien
ctttgctagcagattgtgaaagtgg

SEQ ID NO: 2160381 - DNA, 25 bp, Homo sapien
cctttgctagcagattgtgaaagtg

SEQ ID NO: 2160382 - DNA, 25 bp, Homo sapien
aacctttgctagcagattgtgaaag

SEQ ID NO: 2160383 - DNA, 25 bp, Homo sapien
tttgctagcagattgtgaaagtggt

SEQ ID NO: 2160384 - DNA, 25 bp, Homo sapien
gatatcctaaaaggcagatggtgat

SEQ ID NO: 2160385 - DNA, 25 bp, Homo sapien
gagtagatatcctaaaaggcagatg

SEQ ID NO: 2160386 - DNA, 25 bp, Homo sapien
ggtgatgaggcctggtgattctgcc

SEQ ID NO: 2160387 - DNA, 25 bp, Homo sapien
acattcagcactgagtagatatcct

SEQ ID NO: 2160388 - DNA, 25 bp, Homo sapien
cctgcgtgctggctgttagactctt

SEQ ID NO: 2160389 - DNA, 25 bp, Homo sapien
aattatacctctttggccgattcag

SEQ ID NO: 2160390 - DNA, 25 bp, Homo sapien
ttgttggcgttttcatgatcaagaa

SEQ ID NO: 2160391 - DNA, 25 bp, Homo sapien
tctctcaaggttcccttgaacaaac

SEQ ID NO: 2160392 - DNA, 25 bp, Homo sapien
cgtgcttcttcaaaactacactttt

SEQ ID NO: 2160393 - DNA, 25 bp, Homo sapien
caacatactgcttccaaaattcagt

SEQ ID NO: 2160394 - DNA, 25 bp, Homo sapien
aattgaattggcacgtaaactgctt

SEQ ID NO: 2160395 - DNA, 25 bp, Homo sapien
gaaattgaattggcacgtaaactgc

SEQ ID NO: 2160396 - DNA, 25 bp, Homo sapien
ttgaattggcacgtaaactgcttag

SEQ ID NO: 2160397 - DNA, 25 bp, Homo sapien
gaattggcacgtaaactgcttagaa

SEQ ID NO: 2160398 - DNA, 25 bp, Homo sapien
ctgccgccatttaaacatggattgg

SEQ ID NO: 2160399 - DNA, 25 bp, Homo sapien
tttaaacatggattggactcacact

SEQ ID NO: 2160400 - DNA, 25 bp, Homo sapien
tgtcatccttgcaactgccgccatt

SEQ ID NO: 2160401 - DNA, 25 bp, Homo sapien
cattcataggaattaatgtcatcct

SEQ ID NO: 2160402 - DNA, 25 bp, Homo sapien
gatatccctcagtacaggagcaaac

SEQ ID NO: 2160403 - DNA, 25 bp, Homo sapien
ggagcaaaccaccttgttatcagca

SEQ ID NO: 2160404 - DNA, 25 bp, Homo sapien
gctggttcacaggacttctggtttt

SEQ ID NO: 2160405 - DNA, 25 bp, Homo sapien
gttttctgcaagtcgatatccctca

SEQ ID NO: 2160406 - DNA, 25 bp, Homo sapien
tcaggaaaaacagtctcagcacggg

SEQ ID NO: 2160407 - DNA, 25 bp, Homo sapien
ccaacaacccgagtgaagtcattaa

SEQ ID NO: 2160408 - DNA, 25 bp, Homo sapien
tccaaaatggtttcagcttcagtag

SEQ ID NO: 2160409 - DNA, 25 bp, Homo sapien
tcagcacgggtgagcttagaagttt

SEQ ID NO: 2160410 - DNA, 25 bp, Homo sapien
cctgtgtcttgccagctgagctcca

SEQ ID NO: 2160411 - DNA, 25 bp, Homo sapien
gtcttgccagctgagctccagtttt

SEQ ID NO: 2160412 - DNA, 25 bp, Homo sapien
cagctgagctccagttttgacacac

SEQ ID NO: 2160413 - DNA, 25 bp, Homo sapien
tggcctgtgtcttgccagctgagct

SEQ ID NO: 2160414 - DNA, 25 bp, Homo sapien
acaaggcgcggctgcgttggccctt

SEQ ID NO: 2160415 - DNA, 25 bp, Homo sapien
gggctcctgggaagctaccatcgcg

SEQ ID NO: 2160416 - DNA, 25 bp, Homo sapien
cggcagcgccgttccggaaccatag

SEQ ID NO: 2160417 - DNA, 25 bp, Homo sapien
tgcgcgactttagaagctggcccgg

SEQ ID NO: 2160418 - DNA, 25 bp, Homo sapien
taagactcttactgcataatacatt

SEQ ID NO: 2160419 - DNA, 25 bp, Homo sapien
agactcttactgcataatacatttg

SEQ ID NO: 2160420 - DNA, 25 bp, Homo sapien
gactcttactgcataatacatttga

SEQ ID NO: 2160421 - DNA, 25 bp, Homo sapien
attaagactcttactgcataataca

SEQ ID NO: 2160422 - DNA, 25 bp, Homo sapien
taacaccagtttcaacacagtgggc

SEQ ID NO: 2160423 - DNA, 25 bp, Homo sapien
gggcagcagttacaatccatttttc

SEQ ID NO: 2160424 - DNA, 25 bp, Homo sapien
ccatttttcattaacgatagagcct

SEQ ID NO: 2160425 - DNA, 25 bp, Homo sapien
tccacagaatgcatcaactttacca

SEQ ID NO: 2160426 - DNA, 25 bp, Homo sapien
tggctcggtcaacaagtggaactct

SEQ ID NO: 2160427 - DNA, 25 bp, Homo sapien
taacgtagctgtttagcactaaggg

SEQ ID NO: 2160428 - DNA, 25 bp, Homo sapien
gcactaagggttcgtccagttccag

SEQ ID NO: 2160429 - DNA, 25 bp, Homo sapien
gatgttcgtgtattccttgtcagca

SEQ ID NO: 2160430 - DNA, 25 bp, Homo sapien
ttttttccttaatccagttgacata

SEQ ID NO: 2160431 - DNA, 25 bp, Homo sapien
tgagctttgttttttccttaatcca

SEQ ID NO: 2160432 - DNA, 25 bp, Homo sapien
tgttttttccttaatccagttgaca

SEQ ID NO: 2160433 - DNA, 25 bp, Homo sapien
tttttccttaatccagttgacatac

SEQ ID NO: 2160434 - DNA, 25 bp, Homo sapien
tcaattccaatgaattaaccttgga

SEQ ID NO: 2160435 - DNA, 25 bp, Homo sapien
gattagttagtgagaggccctgtta

SEQ ID NO: 2160436 - DNA, 25 bp, Homo sapien
aagatgggaaagtgattagttagtg

SEQ ID NO: 2160437 - DNA, 25 bp, Homo sapien
gaaaaagcaatgatcatagaatgta

SEQ ID NO: 2160438 - DNA, 25 bp, Homo sapien
ggctgggcccttagaaatgactgta

SEQ ID NO: 2160439 - DNA, 25 bp, Homo sapien
tctccactacggaagcaagtctggg

SEQ ID NO: 2160440 - DNA, 25 bp, Homo sapien
gaagtataacagaatgatgctcccc

SEQ ID NO: 2160441 - DNA, 25 bp, Homo sapien
tagctgtagattgcaaacgaacggt

SEQ ID NO: 2160442 - DNA, 25 bp, Homo sapien
gagtgattttgtcagtagtcccatg

SEQ ID NO: 2160443 - DNA, 25 bp, Homo sapien
ttatacttatatgcgaagacaaaaa

SEQ ID NO: 2160444 - DNA, 25 bp, Homo sapien
gaactagcaagagtgaggcctggct

SEQ ID NO: 2160445 - DNA, 25 bp, Homo sapien
tgtcagtagtcccatgcatcatcaa

SEQ ID NO: 2160446 - DNA, 25 bp, Homo sapien
tgacagggagttttgcacagagttg

SEQ ID NO: 2160447 - DNA, 25 bp, Homo sapien
tatcagggagatttactatggtggt

SEQ ID NO: 2160448 - DNA, 25 bp, Homo sapien
cacgtaatgtgtaaatcatgggaac

SEQ ID NO: 2160449 - DNA, 25 bp, Homo sapien
tgaggtcagcacttaagcctctgtg

SEQ ID NO: 2160450 - DNA, 25 bp, Homo sapien
taaccatagtttcctaggctaatct

SEQ ID NO: 2160451 - DNA, 25 bp, Homo sapien
gaagaaagtgaatgcaggaggcctt

SEQ ID NO: 2160452 - DNA, 25 bp, Homo sapien
ggtagatacagcttatggagaagac

SEQ ID NO: 2160453 - DNA, 25 bp, Homo sapien
tgaaaacacctccttatagcctagg

SEQ ID NO: 2160454 - DNA, 25 bp, Homo sapien
gatacaacgctaggtacatagaaag

SEQ ID NO: 2160455 - DNA, 25 bp, Homo sapien
tatgggaggcatattgagagaaacg

SEQ ID NO: 2160456 - DNA, 25 bp, Homo sapien
tgcaccttaggaaatagatacaacg

SEQ ID NO: 2160457 - DNA, 25 bp, Homo sapien
gagagaaacgaaatccctgtggcca

SEQ ID NO: 2160458 - DNA, 25 bp, Homo sapien
aagccactggatacccgacttggac

SEQ ID NO: 2160459 - DNA, 25 bp, Homo sapien
cgacttggaccgctcaagcccttta

SEQ ID NO: 2160460 - DNA, 25 bp, Homo sapien
tgaagcccagtgtaaacagtaaaag

SEQ ID NO: 2160461 - DNA, 25 bp, Homo sapien
gattctgactgctacaccattcatg

SEQ ID NO: 2160462 - DNA, 25 bp, Homo sapien
tacaacacaaagtatctgttaccat

SEQ ID NO: 2160463 - DNA, 25 bp, Homo sapien
ataaaccttggtggattacaatgtg

SEQ ID NO: 2160464 - DNA, 25 bp, Homo sapien
gaactgacatactggcacagcagaa

SEQ ID NO: 2160465 - DNA, 25 bp, Homo sapien
taggagaaatatttgcacttaagaa

SEQ ID NO: 2160466 - DNA, 25 bp, Homo sapien
tcaagttgcatattaggtgcatgtt

SEQ ID NO: 2160467 - DNA, 25 bp, Homo sapien
catgaattgtgagttggactttcaa

SEQ ID NO: 2160468 - DNA, 25 bp, Homo sapien
tgctttttgaatcatgaattgtgag

SEQ ID NO: 2160469 - DNA, 25 bp, Homo sapien
ttcttttgaagcaaatggccagttg

SEQ ID NO: 2160470 - DNA, 25 bp, Homo sapien
acttgctcctggatgaccactgggt

SEQ ID NO: 2160471 - DNA, 25 bp, Homo sapien
ctgaacaacttgctcctggatgacc

SEQ ID NO: 2160472 - DNA, 25 bp, Homo sapien
aacaacttgctcctggatgaccact

SEQ ID NO: 2160473 - DNA, 25 bp, Homo sapien
ttgctcctggatgaccactgggtaa

SEQ ID NO: 2160474 - DNA, 25 bp, Homo sapien
ctacaaaggcaaaagctcttgtttg

SEQ ID NO: 2160475 - DNA, 25 bp, Homo sapien
tacaaaggcaaaagctcttgtttgt

SEQ ID NO: 2160476 - DNA, 25 bp, Homo sapien
gctttgcacccagaaaagcgcatct

SEQ ID NO: 2160477 - DNA, 25 bp, Homo sapien
atcttggtccatgagcttgttgctt

SEQ ID NO: 2160478 - DNA, 25 bp, Homo sapien
gggctttgcacccagaaaagcgcat

SEQ ID NO: 2160479 - DNA, 25 bp, Homo sapien
tttgcacccagaaaagcgcatcttt

SEQ ID NO: 2160480 - DNA, 25 bp, Homo sapien
acagtgagatatctgtggccccaaa

SEQ ID NO: 2160481 - DNA, 25 bp, Homo sapien
aagtcatctcttttgcacgttctcg

SEQ ID NO: 2160482 - DNA, 25 bp, Homo sapien
ttctcgtaagagctcatggacacag

SEQ ID NO: 2160483 - DNA, 25 bp, Homo sapien
tccatatggcatctgaaggtctctt

SEQ ID NO: 2160484 - DNA, 25 bp, Homo sapien
cacagcctaacaacccaggctgtct

SEQ ID NO: 2160485 - DNA, 25 bp, Homo sapien
gagactccacgggacactgctaatc

SEQ ID NO: 2160486 - DNA, 25 bp, Homo sapien
tttgcctttgcctccatgctccaca

SEQ ID NO: 2160487 - DNA, 25 bp, Homo sapien
cttccccttttgtggagactccacg

SEQ ID NO: 2160488 - DNA, 25 bp, Homo sapien
tgctttgagggaagttacgcttatt

SEQ ID NO: 2160489 - DNA, 25 bp, Homo sapien
ttgctttgagggaagttacgcttat

SEQ ID NO: 2160490 - DNA, 25 bp, Homo sapien
cattaagtggaaaatatgcgaaaac

SEQ ID NO: 2160491 - DNA, 25 bp, Homo sapien
cctgaattaaagtatcagctttgcc

SEQ ID NO: 2160492 - DNA, 25 bp, Homo sapien
tttcattaagtggaaaatatgcgaa

SEQ ID NO: 2160493 - DNA, 25 bp, Homo sapien
aaatatgcgaaaacctgaattaaag

SEQ ID NO: 2160494 - DNA, 25 bp, Homo sapien
tcagcttgcaaaatgggactgcaat

SEQ ID NO: 2160495 - DNA, 25 bp, Homo sapien
ccatcttttatgactgcaacttgcc

SEQ ID NO: 2160496 - DNA, 25 bp, Homo sapien
tgcagattttatgcgtgttgacaaa

SEQ ID NO: 2160497 - DNA, 25 bp, Homo sapien
acatctacgttgttgctttctaaaa

SEQ ID NO: 2160498 - DNA, 25 bp, Homo sapien
gtatctttgcctcactattacagag

SEQ ID NO: 2160499 - DNA, 25 bp, Homo sapien
gaagggcatctgactcattatccgc

SEQ ID NO: 2160500 - DNA, 25 bp, Homo sapien
cattatccgccagaccttcagtcag

SEQ ID NO: 2160501 - DNA, 25 bp, Homo sapien
cagtcagacctcttcttttacgaac

SEQ ID NO: 2160502 - DNA, 25 bp, Homo sapien
tccttacaggttcatcacttaattt

SEQ ID NO: 2160503 - DNA, 25 bp, Homo sapien
cctccttacaggttcatcacttaat

SEQ ID NO: 2160504 - DNA, 25 bp, Homo sapien
taaacccctccttacaggttcatca

SEQ ID NO: 2160505 - DNA, 25 bp, Homo sapien
cccctccttacaggttcatcactta

SEQ ID NO: 2160506 - DNA, 25 bp, Homo sapien
ttcataggtatcattgtgtactagt

SEQ ID NO: 2160507 - DNA, 25 bp, Homo sapien
gcctcctagatattaccattacttc

SEQ ID NO: 2160508 - DNA, 25 bp, Homo sapien
cctacttcttttcagcttatctgcc

SEQ ID NO: 2160509 - DNA, 25 bp, Homo sapien
atatctgcagccctacacctactag

SEQ ID NO: 2160510 - DNA, 25 bp, Homo sapien
tagctacttagcctgatcacacctc

SEQ ID NO: 2160511 - DNA, 25 bp, Homo sapien
tatgtaggtaaactcatgccacagg

SEQ ID NO: 2160512 - DNA, 25 bp, Homo sapien
cactctccaccctgaagtagactcc

SEQ ID NO: 2160513 - DNA, 25 bp, Homo sapien
atgtaggtaaactcatgccacagga

SEQ ID NO: 2160514 - DNA, 25 bp, Homo sapien
gaggctgttgccaggtaagtttgct

SEQ ID NO: 2160515 - DNA, 25 bp, Homo sapien
tatctacagtaatagtcttgaggct

SEQ ID NO: 2160516 - DNA, 25 bp, Homo sapien
tgttgggcgaatcaatatctacagt

SEQ ID NO: 2160517 - DNA, 25 bp, Homo sapien
gatttcacctggatgtagaaaacac

SEQ ID NO: 2160518 - DNA, 25 bp, Homo sapien
attgcaaataggctctttcttgtcc

SEQ ID NO: 2160519 - DNA, 25 bp, Homo sapien
cctttcttagaatgatcatgatgca

SEQ ID NO: 2160520 - DNA, 25 bp, Homo sapien
tcatgatgcactaaagattgcaaat

SEQ ID NO: 2160521 - DNA, 25 bp, Homo sapien
tcatgcaattagtaggttctatcct

SEQ ID NO: 2160522 - DNA, 25 bp, Homo sapien
ccagaataaatcattgtgggcccag

SEQ ID NO: 2160523 - DNA, 25 bp, Homo sapien
gaaaaatgaatcaaatcagccttgt

SEQ ID NO: 2160524 - DNA, 25 bp, Homo sapien
gttaccctgtaaggctgatctatca

SEQ ID NO: 2160525 - DNA, 25 bp, Homo sapien
ttgttcactatcaacccagaataaa

SEQ ID NO: 2160526 - DNA, 25 bp, Homo sapien
ggagagacagcttaatcacttcaga

SEQ ID NO: 2160527 - DNA, 25 bp, Homo sapien
gaagccattgggtaatgcctaatta

SEQ ID NO: 2160528 - DNA, 25 bp, Homo sapien
cttgttataatggagtgggcttgga

SEQ ID NO: 2160529 - DNA, 25 bp, Homo sapien
gcaatttgaccaccgaatacattgt

SEQ ID NO: 2160530 - DNA, 25 bp, Homo sapien
ccaaaattagcaccttgaaggagtt

SEQ ID NO: 2160531 - DNA, 25 bp, Homo sapien
gaaagaaccaatgtaccctctagtg

SEQ ID NO: 2160532 - DNA, 25 bp, Homo sapien
ccctagggtaataggcacatttgag

SEQ ID NO: 2160533 - DNA, 25 bp, Homo sapien
taagtgggcatcttaaaagcctgaa

SEQ ID NO: 2160534 - DNA, 25 bp, Homo sapien
tccccctagcacctggtaactacca

SEQ ID NO: 2160535 - DNA, 25 bp, Homo sapien
gaacaatctattggaatttagtaca

SEQ ID NO: 2160536 - DNA, 25 bp, Homo sapien
aagtgaacaatctattggaatttag

SEQ ID NO: 2160537 - DNA, 25 bp, Homo sapien
aaccattgtaaagtgaacaatctat

SEQ ID NO: 2160538 - DNA, 25 bp, Homo sapien
ggcctttcctgcattgcaggtattg

SEQ ID NO: 2160539 - DNA, 25 bp, Homo sapien
cattgcaggtattgcagggccacgt

SEQ ID NO: 2160540 - DNA, 25 bp, Homo sapien
tattgcagggccacgtggtatgaca

SEQ ID NO: 2160541 - DNA, 25 bp, Homo sapien
ccacgtggtatgacacagttgggtg

SEQ ID NO: 2160542 - DNA, 25 bp, Homo sapien
agatatccgtgcttttcttcaaggg

SEQ ID NO: 2160543 - DNA, 25 bp, Homo sapien
cattggtaagttgcagtcactatgc

SEQ ID NO: 2160544 - DNA, 25 bp, Homo sapien
tacaggatatatgagacccagaaac

SEQ ID NO: 2160545 - DNA, 25 bp, Homo sapien
gaagtaacacatttcgaacctcaaa

SEQ ID NO: 2160546 - DNA, 25 bp, Homo sapien
ccatcctaagggaagtgctaactcc

SEQ ID NO: 2160547 - DNA, 25 bp, Homo sapien
agggaagtgctaactcccttgctta

SEQ ID NO: 2160548 - DNA, 25 bp, Homo sapien
aggtagcaattccttaaccatatgt

SEQ ID NO: 2160549 - DNA, 25 bp, Homo sapien
ggtagcaattccttaaccatatgtg

SEQ ID NO: 2160550 - DNA, 25 bp, Homo sapien
tctaggccttgcttctgggtccacc

SEQ ID NO: 2160551 - DNA, 25 bp, Homo sapien
ctgcctggacctttggttgttgctg

SEQ ID NO: 2160552 - DNA, 25 bp, Homo sapien
cctggacctttggttgttgctgcac

SEQ ID NO: 2160553 - DNA, 25 bp, Homo sapien
ccttctaggccttgcttctgggtcc

SEQ ID NO: 2160554 - DNA, 25 bp, Homo sapien
gaaaagtgtgtccttaagtgagacc

SEQ ID NO: 2160555 - DNA, 25 bp, Homo sapien
gatactagggataaagcaacctcct

SEQ ID NO: 2160556 - DNA, 25 bp, Homo sapien
tcaaatgctagtcaaggtaacagat

SEQ ID NO: 2160557 - DNA, 25 bp, Homo sapien
gagtatgtcatgcagcagatgagcc

SEQ ID NO: 2160558 - DNA, 25 bp, Homo sapien
ctgggctcaagctacatatgcttta

SEQ ID NO: 2160559 - DNA, 25 bp, Homo sapien
gctttaagtaactcatgtccacctg

SEQ ID NO: 2160560 - DNA, 25 bp, Homo sapien
tatgctttaagtaactcatgtccac

SEQ ID NO: 2160561 - DNA, 25 bp, Homo sapien
ggctcaagctacatatgctttaagt

SEQ ID NO: 2160562 - DNA, 25 bp, Homo sapien
cagctgaattctgtagtatcctaga

SEQ ID NO: 2160563 - DNA, 25 bp, Homo sapien
tttcttcagaaaagtaaccagctga

SEQ ID NO: 2160564 - DNA, 25 bp, Homo sapien
gctgaattctgtagtatcctagagt

SEQ ID NO: 2160565 - DNA, 25 bp, Homo sapien
tcttcagaaaagtaaccagctgaat

SEQ ID NO: 2160566 - DNA, 25 bp, Homo sapien
gtttctaaggacgtgcaggctacag

SEQ ID NO: 2160567 - DNA, 25 bp, Homo sapien
ttctttcccatagatctagcaatag

SEQ ID NO: 2160568 - DNA, 25 bp, Homo sapien
tttcccatagatctagcaatagtcc

SEQ ID NO: 2160569 - DNA, 25 bp, Homo sapien
gtgtttctaaggacgtgcaggctac

SEQ ID NO: 2160570 - DNA, 25 bp, Homo sapien
tgccagtttagcgtcaacacttgct

SEQ ID NO: 2160571 - DNA, 25 bp, Homo sapien
ctggagcatcgccaagttcgtggat

SEQ ID NO: 2160572 - DNA, 25 bp, Homo sapien
agccaggaagtattgatgtttctgc

SEQ ID NO: 2160573 - DNA, 25 bp, Homo sapien
gcagcctgccggtggtaaattgatg

SEQ ID NO: 2160574 - DNA, 25 bp, Homo sapien
gactgtggtaagtatcaggaatttg

SEQ ID NO: 2160575 - DNA, 25 bp, Homo sapien
cacttttgctaatactgaaatgagc

SEQ ID NO: 2160576 - DNA, 25 bp, Homo sapien
cagtgcggtaagctggaaggttctt

SEQ ID NO: 2160577 - DNA, 25 bp, Homo sapien
tgagctttgaccttattgttgcagc

SEQ ID NO: 2160578 - DNA, 25 bp, Homo sapien
aaatccgtaggtgatggcttgtact

SEQ ID NO: 2160579 - DNA, 25 bp, Homo sapien
agcagtagaggttgtacatatcaat

SEQ ID NO: 2160580 - DNA, 25 bp, Homo sapien
tcatcttgaaatccgtaggtgatgg

SEQ ID NO: 2160581 - DNA, 25 bp, Homo sapien
ggttgtacatatcaatcatcttgaa

SEQ ID NO: 2160582 - DNA, 25 bp, Homo sapien
gaagaaagggttcatctgcaaattt

SEQ ID NO: 2160583 - DNA, 25 bp, Homo sapien
aagggttcatctgcaaattttgatt

SEQ ID NO: 2160584 - DNA, 25 bp, Homo sapien
gaaagggttcatctgcaaattttga

SEQ ID NO: 2160585 - DNA, 25 bp, Homo sapien
gccaatgatgtggaagaaagggttc

SEQ ID NO: 2160586 - DNA, 25 bp, Homo sapien
gaaaatcgctttctggctactgact

SEQ ID NO: 2160587 - DNA, 25 bp, Homo sapien
tccagaccttgaacccatgggagaa

SEQ ID NO: 2160588 - DNA, 25 bp, Homo sapien
gaaggcggactgtgactggactcct

SEQ ID NO: 2160589 - DNA, 25 bp, Homo sapien
cattaagaatggagcgaaacaggac

SEQ ID NO: 2160590 - DNA, 25 bp, Homo sapien
tgtggacggcgccttcccagacagc

SEQ ID NO: 2160591 - DNA, 25 bp, Homo sapien
cggcccacgccgcagtgtgttttgt

SEQ ID NO: 2160592 - DNA, 25 bp, Homo sapien
tcagtgggtgctgcgcgagctgccg

SEQ ID NO: 2160593 - DNA, 25 bp, Homo sapien
gcgcggcgggctcgccttctcagtg

SEQ ID NO: 2160594 - DNA, 25 bp, Homo sapien
tattaatgttttcaataaaccagct

SEQ ID NO: 2160595 - DNA, 25 bp, Homo sapien
aggatcattggtgatacccccttta

SEQ ID NO: 2160596 - DNA, 25 bp, Homo sapien
tctgtaggatcattggtgatacccc

SEQ ID NO: 2160597 - DNA, 25 bp, Homo sapien
tttctgtaggatcattggtgatacc

SEQ ID NO: 2160598 - DNA, 25 bp, Homo sapien
cacctttataggacatgttctttca

SEQ ID NO: 2160599 - DNA, 25 bp, Homo sapien
aaacactgtcacctttataggacat

SEQ ID NO: 2160600 - DNA, 25 bp, Homo sapien
cactgtcacctttataggacatgtt

SEQ ID NO: 2160601 - DNA, 25 bp, Homo sapien
gtcacctttataggacatgttcttt

SEQ ID NO: 2160602 - DNA, 25 bp, Homo sapien
tgcaggcagtttacataggtatata

SEQ ID NO: 2160603 - DNA, 25 bp, Homo sapien
tcaggagcctgtatacaggcgcatg

SEQ ID NO: 2160604 - DNA, 25 bp, Homo sapien
cttctcaggagcctgtatacaggcg

SEQ ID NO: 2160605 - DNA, 25 bp, Homo sapien
tctcaggagcctgtatacaggcgca

SEQ ID NO: 2160606 - DNA, 25 bp, Homo sapien
aggcttctcaggagcctgtatacag

SEQ ID NO: 2160607 - DNA, 25 bp, Homo sapien
ttaagaaactcactcaaaactgctc

SEQ ID NO: 2160608 - DNA, 25 bp, Homo sapien
taaagcacttttcagcaaatgtaaa

SEQ ID NO: 2160609 - DNA, 25 bp, Homo sapien
ttggaagtaaagcacttttcagcaa

SEQ ID NO: 2160610 - DNA, 25 bp, Homo sapien
aaactcactcaaaactgctcaacta

SEQ ID NO: 2160611 - DNA, 25 bp, Homo sapien
ctacccgaaggtccatttcaaaatg

SEQ ID NO: 2160612 - DNA, 25 bp, Homo sapien
tacccgaaggtccatttcaaaatga

SEQ ID NO: 2160613 - DNA, 25 bp, Homo sapien
ttgttggtcttttgttgagaagagt

SEQ ID NO: 2160614 - DNA, 25 bp, Homo sapien
gctttttcgtgcttagaattggttg

SEQ ID NO: 2160615 - DNA, 25 bp, Homo sapien
ggtcttttgttgagaagagttcttc

SEQ ID NO: 2160616 - DNA, 25 bp, Homo sapien
gtaggctttttcgtgcttagaattg

SEQ ID NO: 2160617 - DNA, 25 bp, Homo sapien
tgttggtctcattgttatcctaggc

SEQ ID NO: 2160618 - DNA, 25 bp, Homo sapien
gttgtgtcttattctgcttgtggtg

SEQ ID NO: 2160619 - DNA, 25 bp, Homo sapien
gatggtttgcttttgccagcggctt

SEQ ID NO: 2160620 - DNA, 25 bp, Homo sapien
caggaaggaggtgattgagtttttt

SEQ ID NO: 2160621 - DNA, 25 bp, Homo sapien
caggaacgctaagtaccgtggaagc

SEQ ID NO: 2160622 - DNA, 25 bp, Homo sapien
tttattggcaggaacgctaagtacc

SEQ ID NO: 2160623 - DNA, 25 bp, Homo sapien
cgctaagtaccgtggaagcggtaag

SEQ ID NO: 2160624 - DNA, 25 bp, Homo sapien
ttcttttattggcaggaacgctaag

SEQ ID NO: 2160625 - DNA, 25 bp, Homo sapien
cagcgacagccgacggccggagttg

SEQ ID NO: 2160626 - DNA, 25 bp, Homo sapien
ggcagcgacagccgacggccggagt

SEQ ID NO: 2160627 - DNA, 25 bp, Homo sapien
gcgacagccgacggccggagttggg

SEQ ID NO: 2160628 - DNA, 25 bp, Homo sapien
agcgacagccgacggccggagttgg

SEQ ID NO: 2160629 - DNA, 25 bp, Homo sapien
cctttggatcatggccctcctccct

SEQ ID NO: 2160630 - DNA, 25 bp, Homo sapien
ggttcctttggatcatggccctcct

SEQ ID NO: 2160631 - DNA, 25 bp, Homo sapien
ctggttcctttggatcatggccctc

SEQ ID NO: 2160632 - DNA, 25 bp, Homo sapien
ttcctttggatcatggccctcctcc

SEQ ID NO: 2160633 - DNA, 25 bp, Homo sapien
gctgcatctacctctgtaacacaag

SEQ ID NO: 2160634 - DNA, 25 bp, Homo sapien
catctacctctgtaacacaagaata

SEQ ID NO: 2160635 - DNA, 25 bp, Homo sapien
cattgctgcatctacctctgtaaca

SEQ ID NO: 2160636 - DNA, 25 bp, Homo sapien
cacattgctgcatctacctctgtaa

SEQ ID NO: 2160637 - DNA, 25 bp, Homo sapien
tagaaacggcctttttgcttcacaa

SEQ ID NO: 2160638 - DNA, 25 bp, Homo sapien
ttagaaacggcctttttgcttcaca

SEQ ID NO: 2160639 - DNA, 25 bp, Homo sapien
agaaacggcctttttgcttcacaat

SEQ ID NO: 2160640 - DNA, 25 bp, Homo sapien
gcttcctccgcaacccataaaattg

SEQ ID NO: 2160641 - DNA, 25 bp, Homo sapien
aagcttcctccgcaacccataaaat

SEQ ID NO: 2160642 - DNA, 25 bp, Homo sapien
ccaaagcttcctccgcaacccataa

SEQ ID NO: 2160643 - DNA, 25 bp, Homo sapien
tctccaaagcttcctccgcaaccca

SEQ ID NO: 2160644 - DNA, 25 bp, Homo sapien
accatcacctccaaatctattatat

SEQ ID NO: 2160645 - DNA, 25 bp, Homo sapien
actactacaaccaggaccactgcca

SEQ ID NO: 2160646 - DNA, 25 bp, Homo sapien
acctccaaatctattatatccacca

SEQ ID NO: 2160647 - DNA, 25 bp, Homo sapien
ctacaaccaggaccactgccatagt

SEQ ID NO: 2160648 - DNA, 25 bp, Homo sapien
atcctccaccacctccaccataccc

SEQ ID NO: 2160649 - DNA, 25 bp, Homo sapien
tcctccaccacctccaccataccca

SEQ ID NO: 2160650 - DNA, 25 bp, Homo sapien
cctccaccacctccaccatacccac

SEQ ID NO: 2160651 - DNA, 25 bp, Homo sapien
aaatcactatagttcccaccaccac

SEQ ID NO: 2160652 - DNA, 25 bp, Homo sapien
ttgctgttgtccactataatttcca

SEQ ID NO: 2160653 - DNA, 25 bp, Homo sapien
tcatgggtccataatttgattgctg

SEQ ID NO: 2160654 - DNA, 25 bp, Homo sapien
taatttccaaaatcactatagttcc

SEQ ID NO: 2160655 - DNA, 25 bp, Homo sapien
actgcccgagtgtcttccaccaaaa

SEQ ID NO: 2160656 - DNA, 25 bp, Homo sapien
gactgtctcaaagtaacctgcagct

SEQ ID NO: 2160657 - DNA, 25 bp, Homo sapien
gcagctttcctgacaactcctcgct

SEQ ID NO: 2160658 - DNA, 25 bp, Homo sapien
tgcatttgggacgactgtctcaaag

SEQ ID NO: 2160659 - DNA, 25 bp, Homo sapien
ccacaatttacagggcaatatacct

SEQ ID NO: 2160660 - DNA, 25 bp, Homo sapien
gcaatatacctgatgtaatgaaaag

SEQ ID NO: 2160661 - DNA, 25 bp, Homo sapien
taccacaatttacagggcaatatac

SEQ ID NO: 2160662 - DNA, 25 bp, Homo sapien
cagggcaatatacctgatgtaatga

SEQ ID NO: 2160663 - DNA, 25 bp, Homo sapien
tcactaacaggagatatacttggga

SEQ ID NO: 2160664 - DNA, 25 bp, Homo sapien
cactaacaggagatatacttgggac

SEQ ID NO: 2160665 - DNA, 25 bp, Homo sapien
catcatgatcactaacaggagatat

SEQ ID NO: 2160666 - DNA, 25 bp, Homo sapien
tgatcactaacaggagatatacttg

SEQ ID NO: 2160667 - DNA, 25 bp, Homo sapien
taatctctcaagtaacccagttccc

SEQ ID NO: 2160668 - DNA, 25 bp, Homo sapien
agcccagtgaacgggaccctcaact

SEQ ID NO: 2160669 - DNA, 25 bp, Homo sapien
tgccccgactccttttgtggctcca

SEQ ID NO: 2160670 - DNA, 25 bp, Homo sapien
cagtgaacgggaccctcaacttgtt

SEQ ID NO: 2160671 - DNA, 25 bp, Homo sapien
tagaactgcatcatcgtacaccagg

SEQ ID NO: 2160672 - DNA, 25 bp, Homo sapien
caggatgtcgctggaattagagtaa

SEQ ID NO: 2160673 - DNA, 25 bp, Homo sapien
tcaatctcgtggaccagaccaccaa

SEQ ID NO: 2160674 - DNA, 25 bp, Homo sapien
cacaatcagatgagaacaagtagag

SEQ ID NO: 2160675 - DNA, 25 bp, Homo sapien
tgtcttacatctgaccctgacaaag

SEQ ID NO: 2160676 - DNA, 25 bp, Homo sapien
gactgtcttacatctgaccctgaca

SEQ ID NO: 2160677 - DNA, 25 bp, Homo sapien
tgactgtcttacatctgaccctgac

SEQ ID NO: 2160678 - DNA, 25 bp, Homo sapien
actgtcttacatctgaccctgacaa

SEQ ID NO: 2160679 - DNA, 25 bp, Homo sapien
agatctaggaataagaatgattcac

SEQ ID NO: 2160680 - DNA, 25 bp, Homo sapien
cagatctaggaataagaatgattca

SEQ ID NO: 2160681 - DNA, 25 bp, Homo sapien
ggacctgtctcagtgggacttgcac

SEQ ID NO: 2160682 - DNA, 25 bp, Homo sapien
tcataagtaggccagctctctgctg

SEQ ID NO: 2160683 - DNA, 25 bp, Homo sapien
tatttgcaaacccagtcctagcctg

SEQ ID NO: 2160684 - DNA, 25 bp, Homo sapien
gctgggttcgcctggctcataagta

SEQ ID NO: 2160685 - DNA, 25 bp, Homo sapien
gcatgtgtatcgatggccaaagacc

SEQ ID NO: 2160686 - DNA, 25 bp, Homo sapien
cttccatgacatttaatcttacatc

SEQ ID NO: 2160687 - DNA, 25 bp, Homo sapien
gatgcatgtgtatcgatggccaaag

SEQ ID NO: 2160688 - DNA, 25 bp, Homo sapien
ttgatgcatgtgtatcgatggccaa

SEQ ID NO: 2160689 - DNA, 25 bp, Homo sapien
caggttcctgtgcaatggatattca

SEQ ID NO: 2160690 - DNA, 25 bp, Homo sapien
aggttcctgtgcaatggatattcac

SEQ ID NO: 2160691 - DNA, 25 bp, Homo sapien
tcaggttcctgtgcaatggatattc

SEQ ID NO: 2160692 - DNA, 25 bp, Homo sapien
tggcagaagtcggaagcagtggagg

SEQ ID NO: 2160693 - DNA, 25 bp, Homo sapien
cagaagtcggaagcagtggagggag

SEQ ID NO: 2160694 - DNA, 25 bp, Homo sapien
ctggcagaagtcggaagcagtggag

SEQ ID NO: 2160695 - DNA, 25 bp, Homo sapien
gcagaagtcggaagcagtggaggga

SEQ ID NO: 2160696 - DNA, 25 bp, Homo sapien
tcgtcatagggcactacaacccaga

SEQ ID NO: 2160697 - DNA, 25 bp, Homo sapien
agcggctattcacacacataccatc

SEQ ID NO: 2160698 - DNA, 25 bp, Homo sapien
tgaacctagtgcaggcaccctatcg

SEQ ID NO: 2160699 - DNA, 25 bp, Homo sapien
ggagttcagcggctattcacacaca

SEQ ID NO: 2160700 - DNA, 25 bp, Homo sapien
aaaatctggcacaactgtaagtcat

SEQ ID NO: 2160701 - DNA, 25 bp, Homo sapien
aaaaatctggcacaactgtaagtca

SEQ ID NO: 2160702 - DNA, 25 bp, Homo sapien
aaacaggaactgcacacaatggagc

SEQ ID NO: 2160703 - DNA, 25 bp, Homo sapien
cctgagaaacaggaactgcacacaa

SEQ ID NO: 2160704 - DNA, 25 bp, Homo sapien
tgagaaacaggaactgcacacaatg

SEQ ID NO: 2160705 - DNA, 25 bp, Homo sapien
ccacagctccgcccctgagaaacag

SEQ ID NO: 2160706 - DNA, 25 bp, Homo sapien
agcccattgtgctggccgcaggtgc

SEQ ID NO: 2160707 - DNA, 25 bp, Homo sapien
ggccgcaggtgcctattatggcacc

SEQ ID NO: 2160708 - DNA, 25 bp, Homo sapien
cgcaggtgcctattatggcacccat

SEQ ID NO: 2160709 - DNA, 25 bp, Homo sapien
ctggccgcaggtgcctattatggca

SEQ ID NO: 2160710 - DNA, 25 bp, Homo sapien
ctgctccgagctccccgcctccttc

SEQ ID NO: 2160711 - DNA, 25 bp, Homo sapien
ttcaggccgcgcacctccaccaccg

SEQ ID NO: 2160712 - DNA, 25 bp, Homo sapien
cctcctcttcaggccgcgcacctcc

SEQ ID NO: 2160713 - DNA, 25 bp, Homo sapien
tcctcttcaggccgcgcacctccac

SEQ ID NO: 2160714 - DNA, 25 bp, Homo sapien
ctcttcaggccgcgcacctccacca

SEQ ID NO: 2160715 - DNA, 25 bp, Homo sapien
tggaaaaccagtgctccgcgacctc

SEQ ID NO: 2160716 - DNA, 25 bp, Homo sapien
cttggaaaaccagtgctccgcgacc

SEQ ID NO: 2160717 - DNA, 25 bp, Homo sapien
tgctccgcgacctcggcctcgccct

SEQ ID NO: 2160718 - DNA, 25 bp, Homo sapien
gaaaaccagtgctccgcgacctcgg

SEQ ID NO: 2160719 - DNA, 25 bp, Homo sapien
ggggtcccacatggaaagtccttgc

SEQ ID NO: 2160720 - DNA, 25 bp, Homo sapien
gctgttggcacccagaatccttgta

SEQ ID NO: 2160721 - DNA, 25 bp, Homo sapien
cagaatccttgtaaagctgagcaac

SEQ ID NO: 2160722 - DNA, 25 bp, Homo sapien
tgagcaacggcggtggccgagatct

SEQ ID NO: 2160723 - DNA, 25 bp, Homo sapien
caagtcttcgcgacgaatggtgctc

SEQ ID NO: 2160724 - DNA, 25 bp, Homo sapien
caagaagctagtttttcggcgccca

SEQ ID NO: 2160725 - DNA, 25 bp, Homo sapien
tgggcatccccgctctctttgtaga

SEQ ID NO: 2160726 - DNA, 25 bp, Homo sapien
catcactgcattgggccgaggtgcg

SEQ ID NO: 2160727 - DNA, 25 bp, Homo sapien
tcactctcaagcaatatggcggcag

SEQ ID NO: 2160728 - DNA, 25 bp, Homo sapien
taacctttagacaagcatgtcgacg

SEQ ID NO: 2160729 - DNA, 25 bp, Homo sapien
atggcggcaggcaaccaatgaggca

SEQ ID NO: 2160730 - DNA, 25 bp, Homo sapien
catgtcgacggttgagttcactctc

SEQ ID NO: 2160731 - DNA, 25 bp, Homo sapien
gaatgctgcattccaaaccactctg

SEQ ID NO: 2160732 - DNA, 25 bp, Homo sapien
tattacaatgttgtcaaggcccttc

SEQ ID NO: 2160733 - DNA, 25 bp, Homo sapien
tgttccctgtgacagctttcagcca

SEQ ID NO: 2160734 - DNA, 25 bp, Homo sapien
tgagtagtttttgaggacacaagcc

SEQ ID NO: 2160735 - DNA, 25 bp, Homo sapien
ttttcctagttttctttatcatctc

SEQ ID NO: 2160736 - DNA, 25 bp, Homo sapien
gactggcatgccttccaagagttca

SEQ ID NO: 2160737 - DNA, 25 bp, Homo sapien
tatgcaagtgctgtacagttcaagg

SEQ ID NO: 2160738 - DNA, 25 bp, Homo sapien
catttgccgtttgaattctttgcag

SEQ ID NO: 2160739 - DNA, 25 bp, Homo sapien
caaattgagtgtcttggtcataaca

SEQ ID NO: 2160740 - DNA, 25 bp, Homo sapien
aaatcccttttgttagtgatgcata

SEQ ID NO: 2160741 - DNA, 25 bp, Homo sapien
caacaattacaagtattatagagga

SEQ ID NO: 2160742 - DNA, 25 bp, Homo sapien
tgtcgttgcttaggaaaacagcctg

SEQ ID NO: 2160743 - DNA, 25 bp, Homo sapien
aatgtaaaatggtgtcgttgcttag

SEQ ID NO: 2160744 - DNA, 25 bp, Homo sapien
gccactcagacttcgaatctctcca

SEQ ID NO: 2160745 - DNA, 25 bp, Homo sapien
tcaagaccgtttctgagagcaggca

SEQ ID NO: 2160746 - DNA, 25 bp, Homo sapien
gcagccactcagacttcgaatctct

SEQ ID NO: 2160747 - DNA, 25 bp, Homo sapien
tccaccatcaagaccgtttctgaga

SEQ ID NO: 2160748 - DNA, 25 bp, Homo sapien
gatcattccaatttactcgcctgtt

SEQ ID NO: 2160749 - DNA, 25 bp, Homo sapien
cttctccaatacagccagcagaggg

SEQ ID NO: 2160750 - DNA, 25 bp, Homo sapien
gaagagagtgcacattgaacagaca

SEQ ID NO: 2160751 - DNA, 25 bp, Homo sapien
tgtaatcgtaggtgtctctatgccc

SEQ ID NO: 2160752 - DNA, 25 bp, Homo sapien
ccctgcaatcttgctgtgacttggg

SEQ ID NO: 2160753 - DNA, 25 bp, Homo sapien
cttgggctgaatattatgtgaagca

SEQ ID NO: 2160754 - DNA, 25 bp, Homo sapien
ggaacaagacgctgtgctccttgga

SEQ ID NO: 2160755 - DNA, 25 bp, Homo sapien
gagagggccttaggtaagtagctac

SEQ ID NO: 2160756 - DNA, 25 bp, Homo sapien
acacaaagggattgaagagtaggga

SEQ ID NO: 2160757 - DNA, 25 bp, Homo sapien
ggcctgttaactcaatgatgtttct

SEQ ID NO: 2160758 - DNA, 25 bp, Homo sapien
cctgctacctttttgtagcaaggaa

SEQ ID NO: 2160759 - DNA, 25 bp, Homo sapien
aggaaaggcctccttatgtaacaca

SEQ ID NO: 2160760 - DNA, 25 bp, Homo sapien
ctcattagctttgggctctgaccga

SEQ ID NO: 2160761 - DNA, 25 bp, Homo sapien
taaaccagcccagatggctttagga

SEQ ID NO: 2160762 - DNA, 25 bp, Homo sapien
tgggctctgaccgagctaaaccagc

SEQ ID NO: 2160763 - DNA, 25 bp, Homo sapien
cttggcctcattagctttgggctct

SEQ ID NO: 2160764 - DNA, 25 bp, Homo sapien
tgtagctagtggcatttccttgttc

SEQ ID NO: 2160765 - DNA, 25 bp, Homo sapien
ggttgagcaagattatccatcaaga

SEQ ID NO: 2160766 - DNA, 25 bp, Homo sapien
catctggttgagcaagattatccat

SEQ ID NO: 2160767 - DNA, 25 bp, Homo sapien
tctggttgagcaagattatccatca

SEQ ID NO: 2160768 - DNA, 25 bp, Homo sapien
ccatctggttgagcaagattatcca

SEQ ID NO: 2160769 - DNA, 25 bp, Homo sapien
aaatgttgattattgatccttgctt

SEQ ID NO: 2160770 - DNA, 25 bp, Homo sapien
tactaacgtctggaacacgacatga

SEQ ID NO: 2160771 - DNA, 25 bp, Homo sapien
catgattcatttgtcaattggaggc

SEQ ID NO: 2160772 - DNA, 25 bp, Homo sapien
taaacagatcagagccttatgcttc

SEQ ID NO: 2160773 - DNA, 25 bp, Homo sapien
tggtctgatctaaacagatcagagc

SEQ ID NO: 2160774 - DNA, 25 bp, Homo sapien
ttccactgtagggcctgggttcctg

SEQ ID NO: 2160775 - DNA, 25 bp, Homo sapien
ccacagaggtatcagcgctttgtga

SEQ ID NO: 2160776 - DNA, 25 bp, Homo sapien
actaccattggataggggtgcccca

SEQ ID NO: 2160777 - DNA, 25 bp, Homo sapien
gcgctttgtgatgtccaagccaccc

SEQ ID NO: 2160778 - DNA, 25 bp, Homo sapien
ccaagccaccccaggactaccattg

SEQ ID NO: 2160779 - DNA, 25 bp, Homo sapien
gtaagttaaattgtaatggagtgtc

SEQ ID NO: 2160780 - DNA, 25 bp, Homo sapien
ctgagctgatagggccttttcagtc

SEQ ID NO: 2160781 - DNA, 25 bp, Homo sapien
aagttaaattgtaatggagtgtcat

SEQ ID NO: 2160782 - DNA, 25 bp, Homo sapien
aggtaagttaaattgtaatggagtg

SEQ ID NO: 2160783 - DNA, 25 bp, Homo sapien
aaggagccagaccattatgagccat

SEQ ID NO: 2160784 - DNA, 25 bp, Homo sapien
cctgagatcaggtcctctgtccaat

SEQ ID NO: 2160785 - DNA, 25 bp, Homo sapien
tctgtccaattcccaagaaaagaaa

SEQ ID NO: 2160786 - DNA, 25 bp, Homo sapien
gaaaggagccagaccattatgagcc

SEQ ID NO: 2160787 - DNA, 25 bp, Homo sapien
tgccttctgtggacgcatcactctg

SEQ ID NO: 2160788 - DNA, 25 bp, Homo sapien
tctgtggacgcatcactctgagtga

SEQ ID NO: 2160789 - DNA, 25 bp, Homo sapien
ttctgtggacgcatcactctgagtg

SEQ ID NO: 2160790 - DNA, 25 bp, Homo sapien
ttttgccttctgtggacgcatcact

SEQ ID NO: 2160791 - DNA, 25 bp, Homo sapien
ttaaagagacaactccatttaccca

SEQ ID NO: 2160792 - DNA, 25 bp, Homo sapien
aaagagacaactccatttacccatc

SEQ ID NO: 2160793 - DNA, 25 bp, Homo sapien
aagagacaactccatttacccatct

SEQ ID NO: 2160794 - DNA, 25 bp, Homo sapien
taaagagacaactccatttacccat

SEQ ID NO: 2160795 - DNA, 25 bp, Homo sapien
gaataatgtatgtgggagaaagcaa

SEQ ID NO: 2160796 - DNA, 25 bp, Homo sapien
gactggtggcttattaataggctct

SEQ ID NO: 2160797 - DNA, 25 bp, Homo sapien
agcatgagttcaatgcaaatggaaa

SEQ ID NO: 2160798 - DNA, 25 bp, Homo sapien
gaaaagactggtggcttattaatag

SEQ ID NO: 2160799 - DNA, 25 bp, Homo sapien
agagtagcaggcacaaatatggcct

SEQ ID NO: 2160800 - DNA, 25 bp, Homo sapien
agaattggtcagtgcagagtagcag

SEQ ID NO: 2160801 - DNA, 25 bp, Homo sapien
ctttcaaaatcagaattggtcagtg

SEQ ID NO: 2160802 - DNA, 25 bp, Homo sapien
catggagagctaatggcttttttaa

SEQ ID NO: 2160803 - DNA, 25 bp, Homo sapien
tagttgataggcatatccaccaaca

SEQ ID NO: 2160804 - DNA, 25 bp, Homo sapien
aatgcgctgtccaaatgcctggaca

SEQ ID NO: 2160805 - DNA, 25 bp, Homo sapien
agggaaaatgcgctgtccaaatgcc

SEQ ID NO: 2160806 - DNA, 25 bp, Homo sapien
caccaacatcagtaagggaaaatgc

SEQ ID NO: 2160807 - DNA, 25 bp, Homo sapien
gcacagaaaacacgtacagacaaga

SEQ ID NO: 2160808 - DNA, 25 bp, Homo sapien
caatcctgaagactactatgtgcca

SEQ ID NO: 2160809 - DNA, 25 bp, Homo sapien
ggtccagctctcagattagcacaga

SEQ ID NO: 2160810 - DNA, 25 bp, Homo sapien
gagatctctgtgcataagtgaccca

SEQ ID NO: 2160811 - DNA, 25 bp, Homo sapien
gttttccagcattcttaatcagcat

SEQ ID NO: 2160812 - DNA, 25 bp, Homo sapien
ccttactattagttttccagcattc

SEQ ID NO: 2160813 - DNA, 25 bp, Homo sapien
cttccttactattagttttccagca

SEQ ID NO: 2160814 - DNA, 25 bp, Homo sapien
cacattcagaccaatttttctagtt

SEQ ID NO: 2160815 - DNA, 25 bp, Homo sapien
ctctctcccctctaaaaccagccat

SEQ ID NO: 2160816 - DNA, 25 bp, Homo sapien
gaacagggatgtccctgttccttct

SEQ ID NO: 2160817 - DNA, 25 bp, Homo sapien
cttctgctgtgtctgtggggagtgg

SEQ ID NO: 2160818 - DNA, 25 bp, Homo sapien
ttcttctgctgtgtctgtggggagt

SEQ ID NO: 2160819 - DNA, 25 bp, Homo sapien
taatgccaattccagtgcgctgagc

SEQ ID NO: 2160820 - DNA, 25 bp, Homo sapien
gggcaaccttgttcaccgaggtgct

SEQ ID NO: 2160821 - DNA, 25 bp, Homo sapien
tgcgctgagcggcactttgactggc

SEQ ID NO: 2160822 - DNA, 25 bp, Homo sapien
cactaacgctttcatgtaatgccaa

SEQ ID NO: 2160823 - DNA, 25 bp, Homo sapien
gcagatggtaggtcttctctttcca

SEQ ID NO: 2160824 - DNA, 25 bp, Homo sapien
gctgcagatggtaggtcttctcttt

SEQ ID NO: 2160825 - DNA, 25 bp, Homo sapien
caacagcaaggggaatctgtacttt

SEQ ID NO: 2160826 - DNA, 25 bp, Homo sapien
gatccatgctaaccaccactaaggg

SEQ ID NO: 2160827 - DNA, 25 bp, Homo sapien
gcagggagtccatgactaccacaag

SEQ ID NO: 2160828 - DNA, 25 bp, Homo sapien
accacaagggctgctaagttcctca

SEQ ID NO: 2160829 - DNA, 25 bp, Homo sapien
agccgatgggatccatgctaaccac

SEQ ID NO: 2160830 - DNA, 25 bp, Homo sapien
ccatacaatgtcaatttcccctgca

SEQ ID NO: 2160831 - DNA, 25 bp, Homo sapien
ttcccctgcataagtggctttaatg

SEQ ID NO: 2160832 - DNA, 25 bp, Homo sapien
gctttaatgttttatctagctgatc

SEQ ID NO: 2160833 - DNA, 25 bp, Homo sapien
tgtggtttccatagatccctcaacc

SEQ ID NO: 2160834 - DNA, 25 bp, Homo sapien
gatgggtgtagtcaaagctacagcc

SEQ ID NO: 2160835 - DNA, 25 bp, Homo sapien
ggcattagtaaaccagcccaggaag

SEQ ID NO: 2160836 - DNA, 25 bp, Homo sapien
tcaaataacctgctggtagtacact

SEQ ID NO: 2160837 - DNA, 25 bp, Homo sapien
tacagccttgggacttagagccagg

SEQ ID NO: 2160838 - DNA, 25 bp, Homo sapien
gagggttgctggtctcgtcactgct

SEQ ID NO: 2160839 - DNA, 25 bp, Homo sapien
agggttgctggtctcgtcactgctc

SEQ ID NO: 2160840 - DNA, 25 bp, Homo sapien
tagaaagcagtagaatctgagcagg

SEQ ID NO: 2160841 - DNA, 25 bp, Homo sapien
aatagtcacattagagtcaccaggt

SEQ ID NO: 2160842 - DNA, 25 bp, Homo sapien
tgcccttactagcaaactacatgaa

SEQ ID NO: 2160843 - DNA, 25 bp, Homo sapien
tcaaatcacctaaccatcacagacg

SEQ ID NO: 2160844 - DNA, 25 bp, Homo sapien
ctgctggacacagggacggcattga

SEQ ID NO: 2160845 - DNA, 25 bp, Homo sapien
cagcacttgaaaacgccgcgaggct

SEQ ID NO: 2160846 - DNA, 25 bp, Homo sapien
tggcaaacacaaaacgcccggccca

SEQ ID NO: 2160847 - DNA, 25 bp, Homo sapien
ccagcggcgggtccttttcaagctt

SEQ ID NO: 2160848 - DNA, 25 bp, Homo sapien
tgccttcatgctttgtttggcaaac

SEQ ID NO: 2160849 - DNA, 25 bp, Homo sapien
tgttgctctcctgccaccactgccc

SEQ ID NO: 2160850 - DNA, 25 bp, Homo sapien
gccaccactgcccagttgactcatc

SEQ ID NO: 2160851 - DNA, 25 bp, Homo sapien
tcctgccaccactgcccagttgact

SEQ ID NO: 2160852 - DNA, 25 bp, Homo sapien
cactgcccagttgactcatcttgga

SEQ ID NO: 2160853 - DNA, 25 bp, Homo sapien
caagctgtgcaaaacgctaggactc

SEQ ID NO: 2160854 - DNA, 25 bp, Homo sapien
agctgtgcaaaacgctaggactctt

SEQ ID NO: 2160855 - DNA, 25 bp, Homo sapien
tgtgcaaaacgctaggactcttcat

SEQ ID NO: 2160856 - DNA, 25 bp, Homo sapien
ctgtgcaaaacgctaggactcttca

SEQ ID NO: 2160857 - DNA, 25 bp, Homo sapien
ttgactggactctaccagaggcaga

SEQ ID NO: 2160858 - DNA, 25 bp, Homo sapien
cttaattgattgactggactctacc

SEQ ID NO: 2160859 - DNA, 25 bp, Homo sapien
taattgattgactggactctaccag

SEQ ID NO: 2160860 - DNA, 25 bp, Homo sapien
ttgattgactggactctaccagagg

SEQ ID NO: 2160861 - DNA, 25 bp, Homo sapien
cttcccttgtggactcagtctagga

SEQ ID NO: 2160862 - DNA, 25 bp, Homo sapien
cttgtggactcagtctaggattcat

SEQ ID NO: 2160863 - DNA, 25 bp, Homo sapien
agtcatttttcaggtacttcccttg

SEQ ID NO: 2160864 - DNA, 25 bp, Homo sapien
cccttgtggactcagtctaggattc

SEQ ID NO: 2160865 - DNA, 25 bp, Homo sapien
aaaggcatgtgcgaggaagttgcca

SEQ ID NO: 2160866 - DNA, 25 bp, Homo sapien
aactacttccacatgagcaaaggca

SEQ ID NO: 2160867 - DNA, 25 bp, Homo sapien
acaagaagctccacaacaagatggc

SEQ ID NO: 2160868 - DNA, 25 bp, Homo sapien
ggaagttgccattattcccaacaag

SEQ ID NO: 2160869 - DNA, 25 bp, Homo sapien
acacagcacacctcgacccagatgg

SEQ ID NO: 2160870 - DNA, 25 bp, Homo sapien
cagatgggcccttcccatttctact

SEQ ID NO: 2160871 - DNA, 25 bp, Homo sapien
ttacattggtatcgcccacacagca

SEQ ID NO: 2160872 - DNA, 25 bp, Homo sapien
ctttgtgagaagattgtcactgtta

SEQ ID NO: 2160873 - DNA, 25 bp, Homo sapien
gagacacttgatgccacttcgtcgt

SEQ ID NO: 2160874 - DNA, 25 bp, Homo sapien
tgatgagacacttgatgccacttcg

SEQ ID NO: 2160875 - DNA, 25 bp, Homo sapien
gccacttcgtcgttttcttgaataa

SEQ ID NO: 2160876 - DNA, 25 bp, Homo sapien
gtgcctggcatatatgatgagacac

SEQ ID NO: 2160877 - DNA, 25 bp, Homo sapien
tatgattgtcctaaacctctgccct

SEQ ID NO: 2160878 - DNA, 25 bp, Homo sapien
tactcccaaatgtccagtccatatg

SEQ ID NO: 2160879 - DNA, 25 bp, Homo sapien
gatgtctgcctagatatctgtttcc

SEQ ID NO: 2160880 - DNA, 25 bp, Homo sapien
taattaaacagcgtcgatgtctgcc

SEQ ID NO: 2160881 - DNA, 25 bp, Homo sapien
ctggggccgctgaggaaccagaagg

SEQ ID NO: 2160882 - DNA, 25 bp, Homo sapien
agaaggcgcttaaatgcaggggccc

SEQ ID NO: 2160883 - DNA, 25 bp, Homo sapien
cagaaggcgcttaaatgcaggggcc

SEQ ID NO: 2160884 - DNA, 25 bp, Homo sapien
tgctagcaattgtggactcaaattt

SEQ ID NO: 2160885 - DNA, 25 bp, Homo sapien
tccaattgctagcaattgtggactc

SEQ ID NO: 2160886 - DNA, 25 bp, Homo sapien
aattgctagcaattgtggactcaaa

SEQ ID NO: 2160887 - DNA, 25 bp, Homo sapien
tgggtttccaattgctagcaattgt

SEQ ID NO: 2160888 - DNA, 25 bp, Homo sapien
tggttggtgcttcaatccttgctgc

SEQ ID NO: 2160889 - DNA, 25 bp, Homo sapien
gattggagcaaacctgcaagctgcc

SEQ ID NO: 2160890 - DNA, 25 bp, Homo sapien
tgtgattggagcaaacctgcaagct

SEQ ID NO: 2160891 - DNA, 25 bp, Homo sapien
ccctcccggctggttggtgcttcaa

SEQ ID NO: 2160892 - DNA, 25 bp, Homo sapien
cgttgatttacagacccatacgctt

SEQ ID NO: 2160893 - DNA, 25 bp, Homo sapien
tttacagacccatacgctttgccct

SEQ ID NO: 2160894 - DNA, 25 bp, Homo sapien
gccggcgttgatttacagacccata

SEQ ID NO: 2160895 - DNA, 25 bp, Homo sapien
gggccggcgttgatttacagaccca

SEQ ID NO: 2160896 - DNA, 25 bp, Homo sapien
cagagtctcgagcccgctttctact

SEQ ID NO: 2160897 - DNA, 25 bp, Homo sapien
cacacggccccagtgtatctgtttg

SEQ ID NO: 2160898 - DNA, 25 bp, Homo sapien
cagagaaggctccttttcatccaga

SEQ ID NO: 2160899 - DNA, 25 bp, Homo sapien
gggcctttagtttcgcgcccagcca

SEQ ID NO: 2160900 - DNA, 25 bp, Homo sapien
ccatgggctcggtagtgaagtctga

SEQ ID NO: 2160901 - DNA, 25 bp, Homo sapien
gcctgggactgttgccttgtaccga

SEQ ID NO: 2160902 - DNA, 25 bp, Homo sapien
tcaggagcagcgaaaatgggacttc

SEQ ID NO: 2160903 - DNA, 25 bp, Homo sapien
ctgcagtcaacggaacggtgccgct

SEQ ID NO: 2160904 - DNA, 25 bp, Homo sapien
gaagcgaccattcatcgacgaggcc

SEQ ID NO: 2160905 - DNA, 25 bp, Homo sapien
caggcaagagtagtgcgaacgcagc

SEQ ID NO: 2160906 - DNA, 25 bp, Homo sapien
tgaactcaagaaccccgtagggaca

SEQ ID NO: 2160907 - DNA, 25 bp, Homo sapien
gaccgtgtgaaacggcccatgaacg

SEQ ID NO: 2160908 - DNA, 25 bp, Homo sapien
tgaatgcgacctgttcgagagaact

SEQ ID NO: 2160909 - DNA, 25 bp, Homo sapien
aatgcgacctgttcgagagaactca

SEQ ID NO: 2160910 - DNA, 25 bp, Homo sapien
tgtgaatgcgacctgttcgagagaa

SEQ ID NO: 2160911 - DNA, 25 bp, Homo sapien
ctgtgaatgcgacctgttcgagaga

SEQ ID NO: 2160912 - DNA, 25 bp, Homo sapien
aatcacgggtcctccgggttgcgag

SEQ ID NO: 2160913 - DNA, 25 bp, Homo sapien
cgagcaggtatataaggggcccagc

SEQ ID NO: 2160914 - DNA, 25 bp, Homo sapien
cccggggaatccgagcaggtatata

SEQ ID NO: 2160915 - DNA, 25 bp, Homo sapien
cagggcgcatcactgcgaacctgtc

SEQ ID NO: 2160916 - DNA, 25 bp, Homo sapien
caggagcacttccaatgagcctgga

SEQ ID NO: 2160917 - DNA, 25 bp, Homo sapien
tggagtccctaagccggcctgggta

SEQ ID NO: 2160918 - DNA, 25 bp, Homo sapien
gtggtgccctgcgttcctagcgctg

SEQ ID NO: 2160919 - DNA, 25 bp, Homo sapien
gaaaacctccgtgcagacaacggga

SEQ ID NO: 2160920 - DNA, 25 bp, Homo sapien
agtttcaaacgctgtgccactcgct

SEQ ID NO: 2160921 - DNA, 25 bp, Homo sapien
gcaagtgaatgtcccgctccgaatc

SEQ ID NO: 2160922 - DNA, 25 bp, Homo sapien
ccgcgccgctagtctttggcagata

SEQ ID NO: 2160923 - DNA, 25 bp, Homo sapien
ggcagataacccaacaagcaagtga

SEQ ID NO: 2160924 - DNA, 25 bp, Homo sapien
taagacgctagaaacctgggattcc

SEQ ID NO: 2160925 - DNA, 25 bp, Homo sapien
ccgggatcgcctggtcttgcattaa

SEQ ID NO: 2160926 - DNA, 25 bp, Homo sapien
caaacttccgagagatgatgccgac

SEQ ID NO: 2160927 - DNA, 25 bp, Homo sapien
agcccttggctgcagaatactcaga

SEQ ID NO: 2160928 - DNA, 25 bp, Homo sapien
atccggagctctgtgaaccgcccaa

SEQ ID NO: 2160929 - DNA, 25 bp, Homo sapien
cagatccggagctctgtgaaccgcc

SEQ ID NO: 2160930 - DNA, 25 bp, Homo sapien
ccagcgccagatccggagctctgtg

SEQ ID NO: 2160931 - DNA, 25 bp, Homo sapien
gagctctgtgaaccgcccaagggca

SEQ ID NO: 2160932 - DNA, 25 bp, Homo sapien
agaggctacgctgggtgaagtttcc

SEQ ID NO: 2160933 - DNA, 25 bp, Homo sapien
agggcgaagcggcaagaggctacgc

SEQ ID NO: 2160934 - DNA, 25 bp, Homo sapien
cgaagccaacaaacggcgctattgt

SEQ ID NO: 2160935 - DNA, 25 bp, Homo sapien
tattgtcgcgccctgggttctggga

SEQ ID NO: 2160936 - DNA, 25 bp, Homo sapien
gctctttccaccagtagctctaagg

SEQ ID NO: 2160937 - DNA, 25 bp, Homo sapien
acaattgctgagtgttctttgcaga

SEQ ID NO: 2160938 - DNA, 25 bp, Homo sapien
ttgggacacctgatgtcggccaagc

SEQ ID NO: 2160939 - DNA, 25 bp, Homo sapien
cgcgagtcgtgggacagctcctttc

SEQ ID NO: 2160940 - DNA, 25 bp, Homo sapien
aaggtcccctatgagcagttactga

SEQ ID NO: 2160941 - DNA, 25 bp, Homo sapien
gaaaaaggtcccctatgagcagtta

SEQ ID NO: 2160942 - DNA, 25 bp, Homo sapien
cttgaaaaaggtcccctatgagcag

SEQ ID NO: 2160943 - DNA, 25 bp, Homo sapien
aaaaggtcccctatgagcagttact

SEQ ID NO: 2160944 - DNA, 25 bp, Homo sapien
aaaatggcaactttcgggtggtgag

SEQ ID NO: 2160945 - DNA, 25 bp, Homo sapien
gcaaagaggctgacagcgatggctc

SEQ ID NO: 2160946 - DNA, 25 bp, Homo sapien
tgaggtcagcgagtaaaagcagaag

SEQ ID NO: 2160947 - DNA, 25 bp, Homo sapien
aaatgggacccagtgcatgggcaga

SEQ ID NO: 2160948 - DNA, 25 bp, Homo sapien
tctgtacaggtgagcgctgtgcctc

SEQ ID NO: 2160949 - DNA, 25 bp, Homo sapien
gcaggcctggacgtagggggccgag

SEQ ID NO: 2160950 - DNA, 25 bp, Homo sapien
gagttccccgagttgctccgcaggg

SEQ ID NO: 2160951 - DNA, 25 bp, Homo sapien
gccgagttccccgagttgctccgca

SEQ ID NO: 2160952 - DNA, 25 bp, Homo sapien
gcctctccgctagctggactctgcg

SEQ ID NO: 2160953 - DNA, 25 bp, Homo sapien
actcagacggcaacgccgggacgct

SEQ ID NO: 2160954 - DNA, 25 bp, Homo sapien
caagcggcacgttagctgttcctgg

SEQ ID NO: 2160955 - DNA, 25 bp, Homo sapien
gagcctcccttttaggccactcaga

SEQ ID NO: 2160956 - DNA, 25 bp, Homo sapien
gggaaacgggtctgcctgaggatag

SEQ ID NO: 2160957 - DNA, 25 bp, Homo sapien
ttttgtcgcgccgtctggccgccag

SEQ ID NO: 2160958 - DNA, 25 bp, Homo sapien
cagatctcattttgtcgcgccgtct

SEQ ID NO: 2160959 - DNA, 25 bp, Homo sapien
cgggtctgcctgaggataggcatcc

SEQ ID NO: 2160960 - DNA, 25 bp, Homo sapien
tgacagcggcctagacgccaaaaag

SEQ ID NO: 2160961 - DNA, 25 bp, Homo sapien
gatgcttttcggagaaatggaattg

SEQ ID NO: 2160962 - DNA, 25 bp, Homo sapien
gaattgggatgacagcggcctagac

SEQ ID NO: 2160963 - DNA, 25 bp, Homo sapien
tagcaaagccccgacgtcctaactc

SEQ ID NO: 2160964 - DNA, 25 bp, Homo sapien
gagccttggccgtctaattttcttc

SEQ ID NO: 2160965 - DNA, 25 bp, Homo sapien
tatagaaataggtgttgtgaagagc

SEQ ID NO: 2160966 - DNA, 25 bp, Homo sapien
ccacgtcgttgaaaaggtagtaatg

SEQ ID NO: 2160967 - DNA, 25 bp, Homo sapien
tcgttgaaaaggtagtaatgactat

SEQ ID NO: 2160968 - DNA, 25 bp, Homo sapien
tgtagtaagtttcaataagtggtca

SEQ ID NO: 2160969 - DNA, 25 bp, Homo sapien
taagtggtcactatcatcataattt

SEQ ID NO: 2160970 - DNA, 25 bp, Homo sapien
ttcctggaacctttagcaaacacat

SEQ ID NO: 2160971 - DNA, 25 bp, Homo sapien
cataatttcctggaacctttagcaa

SEQ ID NO: 2160972 - DNA, 25 bp, Homo sapien
aaactgccacactatctggtaaatg

SEQ ID NO: 2160973 - DNA, 25 bp, Homo sapien
aactgccacactatctggtaaatgg

SEQ ID NO: 2160974 - DNA, 25 bp, Homo sapien
gaaactgccacactatctggtaaat

SEQ ID NO: 2160975 - DNA, 25 bp, Homo sapien
ctgccacactatctggtaaatggca

SEQ ID NO: 2160976 - DNA, 25 bp, Homo sapien
gaaactgtgagaccccccaaacagc

SEQ ID NO: 2160977 - DNA, 25 bp, Homo sapien
tgaaactgtgagaccccccaaacag

SEQ ID NO: 2160978 - DNA, 25 bp, Homo sapien
aaactgtgagaccccccaaacagca

SEQ ID NO: 2160979 - DNA, 25 bp, Homo sapien
caataagagacaagcagggctgttc

SEQ ID NO: 2160980 - DNA, 25 bp, Homo sapien
tctacaaaaatcccaacaataagag

SEQ ID NO: 2160981 - DNA, 25 bp, Homo sapien
tgttgaagacttggtggaaaggcct

SEQ ID NO: 2160982 - DNA, 25 bp, Homo sapien
ggattctcccaagggtctgcaggct

SEQ ID NO: 2160983 - DNA, 25 bp, Homo sapien
agttagtcctttgagtttgagccca

SEQ ID NO: 2160984 - DNA, 25 bp, Homo sapien
gactctattgcttcacttggacacc

SEQ ID NO: 2160985 - DNA, 25 bp, Homo sapien
agtcatcctggtgggcaatctgcct

SEQ ID NO: 2160986 - DNA, 25 bp, Homo sapien
aatgttcagtgcaagacagtcatcc

SEQ ID NO: 2160987 - DNA, 25 bp, Homo sapien
gaagaaacaattcttccctaaggca

SEQ ID NO: 2160988 - DNA, 25 bp, Homo sapien
agaaacaattcttccctaaggcact

SEQ ID NO: 2160989 - DNA, 25 bp, Homo sapien
gcaacaaagggacagattgctgctt

SEQ ID NO: 2160990 - DNA, 25 bp, Homo sapien
ggcaacaaagggacagattgctgct

SEQ ID NO: 2160991 - DNA, 25 bp, Homo sapien
gggtctctgcatacatgcgactcat

SEQ ID NO: 2160992 - DNA, 25 bp, Homo sapien
tatccagtgcggtccctttgttcca

SEQ ID NO: 2160993 - DNA, 25 bp, Homo sapien
tgctctacaatcaaatctgctgcct

SEQ ID NO: 2160994 - DNA, 25 bp, Homo sapien
gtgtgaaagccattaaagtgctcta

SEQ ID NO: 2160995 - DNA, 25 bp, Homo sapien
gctctaagtttaggatcagtgctgc

SEQ ID NO: 2160996 - DNA, 25 bp, Homo sapien
taagtttaggatcagtgctgcagcc

SEQ ID NO: 2160997 - DNA, 25 bp, Homo sapien
cccagctctaagtttaggatcagtg

SEQ ID NO: 2160998 - DNA, 25 bp, Homo sapien
tctaagtttaggatcagtgctgcag

SEQ ID NO: 2160999 - DNA, 25 bp, Homo sapien
aaaatgccaattagtccttttgcca

SEQ ID NO: 2161000 - DNA, 25 bp, Homo sapien
tgccagaacactgcaattgagcatt

SEQ ID NO: 2161001 - DNA, 25 bp, Homo sapien
tcttttgtgcaacctttcagacaga

SEQ ID NO: 2161002 - DNA, 25 bp, Homo sapien
tactcgctgattcttgctattaggc

SEQ ID NO: 2161003 - DNA, 25 bp, Homo sapien
caatcttaggccaatttgctgtctc

SEQ ID NO: 2161004 - DNA, 25 bp, Homo sapien
tcaatcttaggccaatttgctgtct

SEQ ID NO: 2161005 - DNA, 25 bp, Homo sapien
aatcttaggccaatttgctgtctcc

SEQ ID NO: 2161006 - DNA, 25 bp, Homo sapien
ctcaatcttaggccaatttgctgtc

SEQ ID NO: 2161007 - DNA, 25 bp, Homo sapien
ttatcctgatctgttgatgtgccca

SEQ ID NO: 2161008 - DNA, 25 bp, Homo sapien
tttatcctgatctgttgatgtgccc

SEQ ID NO: 2161009 - DNA, 25 bp, Homo sapien
tatcctgatctgttgatgtgcccat

SEQ ID NO: 2161010 - DNA, 25 bp, Homo sapien
cagagccagaactgtgcaatcattc

SEQ ID NO: 2161011 - DNA, 25 bp, Homo sapien
ctgtggttgatgatttgcttattat

SEQ ID NO: 2161012 - DNA, 25 bp, Homo sapien
cattgagatgtctgctttatggcat

SEQ ID NO: 2161013 - DNA, 25 bp, Homo sapien
gcatttcagagccagaactgtgcaa

SEQ ID NO: 2161014 - DNA, 25 bp, Homo sapien
ctgtctgtcgcactgaaggagtggg

SEQ ID NO: 2161015 - DNA, 25 bp, Homo sapien
ggaaatgagatgtactctgaaaaaa

SEQ ID NO: 2161016 - DNA, 25 bp, Homo sapien
tgtcgcactgaaggagtgggggcaa

SEQ ID NO: 2161017 - DNA, 25 bp, Homo sapien
gggcaaacagcagcgcaacagccac

SEQ ID NO: 2161018 - DNA, 25 bp, Homo sapien
caggaattccatgtctacgaatttt

SEQ ID NO: 2161019 - DNA, 25 bp, Homo sapien
gatccaggaattccatgtctacgaa

SEQ ID NO: 2161020 - DNA, 25 bp, Homo sapien
ggaattccatgtctacgaatttttc

SEQ ID NO: 2161021 - DNA, 25 bp, Homo sapien
atttgatccaggaattccatgtcta

SEQ ID NO: 2161022 - DNA, 25 bp, Homo sapien
taggatttttgaaacgcacaagcac

SEQ ID NO: 2161023 - DNA, 25 bp, Homo sapien
gatgctgaaacaatcggtgacctat

SEQ ID NO: 2161024 - DNA, 25 bp, Homo sapien
catggtgctctagtatgctgtcaga

SEQ ID NO: 2161025 - DNA, 25 bp, Homo sapien
cgacctgtggaaagctacaccctat

SEQ ID NO: 2161026 - DNA, 25 bp, Homo sapien
catgcaactagcaagcagccgaggt

SEQ ID NO: 2161027 - DNA, 25 bp, Homo sapien
cattttacatctgaggaaacgaaga

SEQ ID NO: 2161028 - DNA, 25 bp, Homo sapien
agtaacccgtcccacagtcatgcaa

SEQ ID NO: 2161029 - DNA, 25 bp, Homo sapien
tcatactattatgattcccctcggg

SEQ ID NO: 2161030 - DNA, 25 bp, Homo sapien
cagtgtgtgcattaaagggtgagtt

SEQ ID NO: 2161031 - DNA, 25 bp, Homo sapien
tgtatactgcggacacaagtctgct

SEQ ID NO: 2161032 - DNA, 25 bp, Homo sapien
tttgtgttatctggtcagtgtgtgc

SEQ ID NO: 2161033 - DNA, 25 bp, Homo sapien
acaagtctgcttccaggcaagtccc

SEQ ID NO: 2161034 - DNA, 25 bp, Homo sapien
ctgtggtgcttgtcggtgtgccttt

SEQ ID NO: 2161035 - DNA, 25 bp, Homo sapien
gggaacatctttttgctgtggtgct

SEQ ID NO: 2161036 - DNA, 25 bp, Homo sapien
tgtcggtgtgcctttggatatgtct

SEQ ID NO: 2161037 - DNA, 25 bp, Homo sapien
tgtgtactggaaggcaagtgtgtgt

SEQ ID NO: 2161038 - DNA, 25 bp, Homo sapien
cctgtgctctaggacgagtctatgg

SEQ ID NO: 2161039 - DNA, 25 bp, Homo sapien
tcatgatgcgggtcttcaagctgtc

SEQ ID NO: 2161040 - DNA, 25 bp, Homo sapien
tgtttcattggcaagagtccctgtg

SEQ ID NO: 2161041 - DNA, 25 bp, Homo sapien
tcatgagtctattctcgggaaagtc

SEQ ID NO: 2161042 - DNA, 25 bp, Homo sapien
tgatgccaagctgtacattgtcagg

SEQ ID NO: 2161043 - DNA, 25 bp, Homo sapien
gggtatcctggatcacatctgtgac

SEQ ID NO: 2161044 - DNA, 25 bp, Homo sapien
catctgtgactgtgcccaaaagggt

SEQ ID NO: 2161045 - DNA, 25 bp, Homo sapien
gaaagattaggtgtctctacagcct

SEQ ID NO: 2161046 - DNA, 25 bp, Homo sapien
taagtatagagtcagtctatgttat

SEQ ID NO: 2161047 - DNA, 25 bp, Homo sapien
ggtttgtgtattatggagcacgcca

SEQ ID NO: 2161048 - DNA, 25 bp, Homo sapien
tgtgtcttaatgttattgaggcaag

SEQ ID NO: 2161049 - DNA, 25 bp, Homo sapien
tatggagcacgccatgtggtgtaag

SEQ ID NO: 2161050 - DNA, 25 bp, Homo sapien
gaatgtgtgtgtatggaatatgtgt

SEQ ID NO: 2161051 - DNA, 25 bp, Homo sapien
ggaatgtgtgtgtatggaatatgtg

SEQ ID NO: 2161052 - DNA, 25 bp, Homo sapien
atggaatgtgtctgtgtatggaatg

SEQ ID NO: 2161053 - DNA, 25 bp, Homo sapien
tgtatggaatgtgtctgtgtatgga

SEQ ID NO: 2161054 - DNA, 25 bp, Homo sapien
aatgtgtctgtgtatggaatgtgtg

SEQ ID NO: 2161055 - DNA, 25 bp, Homo sapien
gtctgtgtgtgtatggaatgtgtct

SEQ ID NO: 2161056 - DNA, 25 bp, Homo sapien
aatgtgtctgtgtatggaatgtgtg

SEQ ID NO: 2161057 - DNA, 25 bp, Homo sapien
ggaatgtgtctgtgtatggaatgtg

SEQ ID NO: 2161058 - DNA, 25 bp, Homo sapien
atggaatgtgtctgtgtatggaatg

SEQ ID NO: 2161059 - DNA, 25 bp, Homo sapien
gtatggaatgtgtctgtgtatggaa

SEQ ID NO: 2161060 - DNA, 25 bp, Homo sapien
agtatggaatgtgtctgaatgtgtg

SEQ ID NO: 2161061 - DNA, 25 bp, Homo sapien
tgaatgtgtgtgtgtatggaatgtg

SEQ ID NO: 2161062 - DNA, 25 bp, Homo sapien
gagtatggaatgtgtctgaatgtgt

SEQ ID NO: 2161063 - DNA, 25 bp, Homo sapien
atgtgtgtgtgtatggaatgtgtgt

SEQ ID NO: 2161064 - DNA, 25 bp, Homo sapien
tgtaggaagagctcgtgatgttatg

SEQ ID NO: 2161065 - DNA, 25 bp, Homo sapien
tcgtgatgttatggaattctgtgca

SEQ ID NO: 2161066 - DNA, 25 bp, Homo sapien
tgtctacgttgtgaaagagttgtct

SEQ ID NO: 2161067 - DNA, 25 bp, Homo sapien
gtgcattgcttaggcaatgtctacg

SEQ ID NO: 2161068 - DNA, 25 bp, Homo sapien
gaagaagccgtatatcttgggtgga

SEQ ID NO: 2161069 - DNA, 25 bp, Homo sapien
ggtgtggaagaagccgtatatcttg

SEQ ID NO: 2161070 - DNA, 25 bp, Homo sapien
cgtatatcttgggtggagtgtctgc

SEQ ID NO: 2161071 - DNA, 25 bp, Homo sapien
tgtattgtgaggtgtatccaggagg

SEQ ID NO: 2161072 - DNA, 25 bp, Homo sapien
gaacttgcggtccaattctgtgcat

SEQ ID NO: 2161073 - DNA, 25 bp, Homo sapien
tctcgatgtgatatgaggtgtgtct

SEQ ID NO: 2161074 - DNA, 25 bp, Homo sapien
ttcgggcaatactatatgatacagg

SEQ ID NO: 2161075 - DNA, 25 bp, Homo sapien
tcttggtgttgtaaagagaatgtgg

SEQ ID NO: 2161076 - DNA, 25 bp, Homo sapien
tcaaattcctttttaccataggcta

SEQ ID NO: 2161077 - DNA, 25 bp, Homo sapien
ctctcaaattcctttttaccatagg

SEQ ID NO: 2161078 - DNA, 25 bp, Homo sapien
aattcctttttaccataggctatct

SEQ ID NO: 2161079 - DNA, 25 bp, Homo sapien
tctcaaattcctttttaccataggc

SEQ ID NO: 2161080 - DNA, 25 bp, Homo sapien
ctctgtgtgagcatgtaggccctct

SEQ ID NO: 2161081 - DNA, 25 bp, Homo sapien
ctctcatattctgtggagcaaacaa

SEQ ID NO: 2161082 - DNA, 25 bp, Homo sapien
gaatgttctagagtgagcataccta

SEQ ID NO: 2161083 - DNA, 25 bp, Homo sapien
gactgagtttgtcccttatgaagtg

SEQ ID NO: 2161084 - DNA, 25 bp, Homo sapien
tggtcactaggtggcaaacgtgcac

SEQ ID NO: 2161085 - DNA, 25 bp, Homo sapien
gggcacgaagccctcttcccattct

SEQ ID NO: 2161086 - DNA, 25 bp, Homo sapien
ggtggcaaacgtgcacagggcacga

SEQ ID NO: 2161087 - DNA, 25 bp, Homo sapien
cattcttgcactctgctctcaatct

SEQ ID NO: 2161088 - DNA, 25 bp, Homo sapien
agacagggaggagcacactgcccat

SEQ ID NO: 2161089 - DNA, 25 bp, Homo sapien
ctgggactgatgagagctgagagac

SEQ ID NO: 2161090 - DNA, 25 bp, Homo sapien
agagacagggaggagcacactgccc

SEQ ID NO: 2161091 - DNA, 25 bp, Homo sapien
ctgagagacagggaggagcacactg

SEQ ID NO: 2161092 - DNA, 25 bp, Homo sapien
cagaagctgataagcttgcggctat

SEQ ID NO: 2161093 - DNA, 25 bp, Homo sapien
taagccctgattccaagtgtcgaag

SEQ ID NO: 2161094 - DNA, 25 bp, Homo sapien
tccaagtgtcgaagtttgtcaaaac

SEQ ID NO: 2161095 - DNA, 25 bp, Homo sapien
gcggctatcatccttaagccctgat

SEQ ID NO: 2161096 - DNA, 25 bp, Homo sapien
attcccaggtctacacagtcagtag

SEQ ID NO: 2161097 - DNA, 25 bp, Homo sapien
ctgatattcccaggtctacacagtc

SEQ ID NO: 2161098 - DNA, 25 bp, Homo sapien
tctgatattcccaggtctacacagt

SEQ ID NO: 2161099 - DNA, 25 bp, Homo sapien
caggtctacacagtcagtagcaaca

SEQ ID NO: 2161100 - DNA, 25 bp, Homo sapien
tcgctgacaggtgtggcctctcttg

SEQ ID NO: 2161101 - DNA, 25 bp, Homo sapien
acaggtgtggcctctcttggttggt

SEQ ID NO: 2161102 - DNA, 25 bp, Homo sapien
tgacaggtgtggcctctcttggttg

SEQ ID NO: 2161103 - DNA, 25 bp, Homo sapien
cttcgctgacaggtgtggcctctct

SEQ ID NO: 2161104 - DNA, 25 bp, Homo sapien
tagttgggcacagccatcctagccc

SEQ ID NO: 2161105 - DNA, 25 bp, Homo sapien
acagccagaggaattttgctttcca

SEQ ID NO: 2161106 - DNA, 25 bp, Homo sapien
aactcttagtgaagatagttgggca

SEQ ID NO: 2161107 - DNA, 25 bp, Homo sapien
tagtgaagatagttgggcacagcca

SEQ ID NO: 2161108 - DNA, 25 bp, Homo sapien
gacacaaaaaataatctaaatccat

SEQ ID NO: 2161109 - DNA, 25 bp, Homo sapien
tgacacaaaaaataatctaaatcca

SEQ ID NO: 2161110 - DNA, 25 bp, Homo sapien
ctgacacaaaaaataatctaaatcc

SEQ ID NO: 2161111 - DNA, 25 bp, Homo sapien
gcctccttactctggttgcatctac

SEQ ID NO: 2161112 - DNA, 25 bp, Homo sapien
ggactggctgtacatccagcctcct

SEQ ID NO: 2161113 - DNA, 25 bp, Homo sapien
ttctcactccgtcccgatacacttg

SEQ ID NO: 2161114 - DNA, 25 bp, Homo sapien
tgtacatccagcctccttactctgg

SEQ ID NO: 2161115 - DNA, 25 bp, Homo sapien
tttgccttgccacggtagaaattag

SEQ ID NO: 2161116 - DNA, 25 bp, Homo sapien
gagcaaatatcaacgtcttccaaga

SEQ ID NO: 2161117 - DNA, 25 bp, Homo sapien
tcttccaagagaatagaacaaaggg

SEQ ID NO: 2161118 - DNA, 25 bp, Homo sapien
tcactgtcagtagcaccattagagg

SEQ ID NO: 2161119 - DNA, 25 bp, Homo sapien
ctaaatgcagctgtacttgagtgtg

SEQ ID NO: 2161120 - DNA, 25 bp, Homo sapien
tttgggacacaatgagaatagacca

SEQ ID NO: 2161121 - DNA, 25 bp, Homo sapien
gaccaaatcatggaccagctgctaa

SEQ ID NO: 2161122 - DNA, 25 bp, Homo sapien
ggacacaatgagaatagaccaaatc

SEQ ID NO: 2161123 - DNA, 25 bp, Homo sapien
aacaggatggtgacttgaacttgca

SEQ ID NO: 2161124 - DNA, 25 bp, Homo sapien
caaagctctcaaaggcgcggactta

SEQ ID NO: 2161125 - DNA, 25 bp, Homo sapien
tgccctaggaagtgttgctttcacc

SEQ ID NO: 2161126 - DNA, 25 bp, Homo sapien
aagcgatcgtggaactcaggagtca

SEQ ID NO: 2161127 - DNA, 25 bp, Homo sapien
tctggtccttttctcatgctttgca

SEQ ID NO: 2161128 - DNA, 25 bp, Homo sapien
tattcaggatactctccggcagctc

SEQ ID NO: 2161129 - DNA, 25 bp, Homo sapien
tcatggtttcccttcatgtacacag

SEQ ID NO: 2161130 - DNA, 25 bp, Homo sapien
ggcaaattgccattgtcctcaatcg

SEQ ID NO: 2161131 - DNA, 25 bp, Homo sapien
ttctggatgttaacctatgctggct

SEQ ID NO: 2161132 - DNA, 25 bp, Homo sapien
gaaggtgagagtctaacaattcagt

SEQ ID NO: 2161133 - DNA, 25 bp, Homo sapien
tacttgaacattcttagagttctgg

SEQ ID NO: 2161134 - DNA, 25 bp, Homo sapien
acttaactcaatgtcttcaaggcct

SEQ ID NO: 2161135 - DNA, 25 bp, Homo sapien
tcaatgaaaatgcttggtcgtaaca

SEQ ID NO: 2161136 - DNA, 25 bp, Homo sapien
aagagatgtaagctcagtcttctgc

SEQ ID NO: 2161137 - DNA, 25 bp, Homo sapien
aaggtttaactatctgtgtgcggcg

SEQ ID NO: 2161138 - DNA, 25 bp, Homo sapien
cacaaatcaccatatcatcagagcc

SEQ ID NO: 2161139 - DNA, 25 bp, Homo sapien
cactgaggaggccagatatgagaac

SEQ ID NO: 2161140 - DNA, 25 bp, Homo sapien
gcttttcaggatcagccaatagcta

SEQ ID NO: 2161141 - DNA, 25 bp, Homo sapien
gattagctaccaaaggaaatctgga

SEQ ID NO: 2161142 - DNA, 25 bp, Homo sapien
tcagagaacaggaggtaataatatc

SEQ ID NO: 2161143 - DNA, 25 bp, Homo sapien
cgaacgtgttatgcatgatgggcga

SEQ ID NO: 2161144 - DNA, 25 bp, Homo sapien
caatagatggcaacgaggaatctgc

SEQ ID NO: 2161145 - DNA, 25 bp, Homo sapien
tggagggctcactttcaatagatgg

SEQ ID NO: 2161146 - DNA, 25 bp, Homo sapien
ggttgcctaggaatggtttagcgcc

SEQ ID NO: 2161147 - DNA, 25 bp, Homo sapien
ctttagagcggcagtttgaaaacca

SEQ ID NO: 2161148 - DNA, 25 bp, Homo sapien
caactgtggtttagatcaagagcgt

SEQ ID NO: 2161149 - DNA, 25 bp, Homo sapien
cataattttccctagctttagagcg

SEQ ID NO: 2161150 - DNA, 25 bp, Homo sapien
tctcctggaactgtggcgaatccta

SEQ ID NO: 2161151 - DNA, 25 bp, Homo sapien
caaatgacctatgaaaacttaaagc

SEQ ID NO: 2161152 - DNA, 25 bp, Homo sapien
taaagcattcaccatacagggttct

SEQ ID NO: 2161153 - DNA, 25 bp, Homo sapien
gaaccactgattatactgaggaaaa

SEQ ID NO: 2161154 - DNA, 25 bp, Homo sapien
cctgtagatgtgactaagaagaagc

SEQ ID NO: 2161155 - DNA, 25 bp, Homo sapien
gcactttgtaatactgagctcaaga

SEQ ID NO: 2161156 - DNA, 25 bp, Homo sapien
tgttcaactcaaccacagtaaaatg

SEQ ID NO: 2161157 - DNA, 25 bp, Homo sapien
gccatttgacaacaggttctctcca

SEQ ID NO: 2161158 - DNA, 25 bp, Homo sapien
gagctcaagaatttacccaagccat

SEQ ID NO: 2161159 - DNA, 25 bp, Homo sapien
gcaaagatctcactttaagtcccat

SEQ ID NO: 2161160 - DNA, 25 bp, Homo sapien
ggcaaagatctcactttaagtccca

SEQ ID NO: 2161161 - DNA, 25 bp, Homo sapien
cagcagacacagcatcagttatgat

SEQ ID NO: 2161162 - DNA, 25 bp, Homo sapien
gatgtgaggctaatacagttatgca

SEQ ID NO: 2161163 - DNA, 25 bp, Homo sapien
gcaaagactactagatacgtacagt

SEQ ID NO: 2161164 - DNA, 25 bp, Homo sapien
tgcagatcagggagtaacttacaga

SEQ ID NO: 2161165 - DNA, 25 bp, Homo sapien
gccctgctctaacgccaaatcaagg

SEQ ID NO: 2161166 - DNA, 25 bp, Homo sapien
cattccaggctagcattcacatatg

SEQ ID NO: 2161167 - DNA, 25 bp, Homo sapien
taagcagtatctaggtcgagagaac

SEQ ID NO: 2161168 - DNA, 25 bp, Homo sapien
gaactgcttggctttagatcaggga

SEQ ID NO: 2161169 - DNA, 25 bp, Homo sapien
gaattggcgataaaaatacactgta

SEQ ID NO: 2161170 - DNA, 25 bp, Homo sapien
cattggaggaattggcgataaaaat

SEQ ID NO: 2161171 - DNA, 25 bp, Homo sapien
tgaaagttcttgcaggtatttaaag

SEQ ID NO: 2161172 - DNA, 25 bp, Homo sapien
tatttaaagacttgggcattggagg

SEQ ID NO: 2161173 - DNA, 25 bp, Homo sapien
gaaacattgtaagcacaggatattg

SEQ ID NO: 2161174 - DNA, 25 bp, Homo sapien
gagacattgcaagccttggattttg

SEQ ID NO: 2161175 - DNA, 25 bp, Homo sapien
tattggagacattgcaagccttgga

SEQ ID NO: 2161176 - DNA, 25 bp, Homo sapien
acaggatattggagacattgcaagc

SEQ ID NO: 2161177 - DNA, 25 bp, Homo sapien
acttgaagtcgctggaagacccgga

SEQ ID NO: 2161178 - DNA, 25 bp, Homo sapien
tctggaagctcaggattatctggaa

SEQ ID NO: 2161179 - DNA, 25 bp, Homo sapien
ggaagaccagtaattgctggaagac

SEQ ID NO: 2161180 - DNA, 25 bp, Homo sapien
tgttggaagaccttgacacaggtgc

SEQ ID NO: 2161181 - DNA, 25 bp, Homo sapien
tgattgactggaagatctagatttt

SEQ ID NO: 2161182 - DNA, 25 bp, Homo sapien
ggattagctggaagatctgtatttg

SEQ ID NO: 2161183 - DNA, 25 bp, Homo sapien
attgactggaagatctagatttttc

SEQ ID NO: 2161184 - DNA, 25 bp, Homo sapien
gaagacatggattagctggaagatc

SEQ ID NO: 2161185 - DNA, 25 bp, Homo sapien
tggaagacactgattgactggaaga

SEQ ID NO: 2161186 - DNA, 25 bp, Homo sapien
ttctttctggaagacactgattgac

SEQ ID NO: 2161187 - DNA, 25 bp, Homo sapien
ctttctggaagacactgattgactg

SEQ ID NO: 2161188 - DNA, 25 bp, Homo sapien
ttctggaagacactgattgactgga

SEQ ID NO: 2161189 - DNA, 25 bp, Homo sapien
tggaagacgtagatttttctggaag

SEQ ID NO: 2161190 - DNA, 25 bp, Homo sapien
tttttccggaagatgtggattgact

SEQ ID NO: 2161191 - DNA, 25 bp, Homo sapien
tggattgactggaagacctggattt

SEQ ID NO: 2161192 - DNA, 25 bp, Homo sapien
acctggatttggtggaagacgtaga

SEQ ID NO: 2161193 - DNA, 25 bp, Homo sapien
gaagacatggatagtctggaagacc

SEQ ID NO: 2161194 - DNA, 25 bp, Homo sapien
gacacaagtaggctggaagacatta

SEQ ID NO: 2161195 - DNA, 25 bp, Homo sapien
ctttgttggaagacgtggacttgct

SEQ ID NO: 2161196 - DNA, 25 bp, Homo sapien
caggaagacccaaattatccggaag

SEQ ID NO: 2161197 - DNA, 25 bp, Homo sapien
gacgtacctttgttggaagacatac

SEQ ID NO: 2161198 - DNA, 25 bp, Homo sapien
ctggaagacgtacctttgttggaag

SEQ ID NO: 2161199 - DNA, 25 bp, Homo sapien
tgttggaagacgtacctttgttgga

SEQ ID NO: 2161200 - DNA, 25 bp, Homo sapien
gacatacctttgttggaagacgtac

SEQ ID NO: 2161201 - DNA, 25 bp, Homo sapien
gagatataggaagacatggatttgt

SEQ ID NO: 2161202 - DNA, 25 bp, Homo sapien
gatataggaagacatggatttgttg

SEQ ID NO: 2161203 - DNA, 25 bp, Homo sapien
gatttgttggaagacgtagcttagt

SEQ ID NO: 2161204 - DNA, 25 bp, Homo sapien
ctggagatataggaagacatggatt

SEQ ID NO: 2161205 - DNA, 25 bp, Homo sapien
gaatgtcagaagatcagcacactgg

SEQ ID NO: 2161206 - DNA, 25 bp, Homo sapien
gaatacctggatattgcagacactg

SEQ ID NO: 2161207 - DNA, 25 bp, Homo sapien
cgttggaagacatggatattgagcc

SEQ ID NO: 2161208 - DNA, 25 bp, Homo sapien
ccagttgatggaagactgggtagtt

SEQ ID NO: 2161209 - DNA, 25 bp, Homo sapien
caactgttagacacatgattgcttg

SEQ ID NO: 2161210 - DNA, 25 bp, Homo sapien
cacatggtcttgtttggctcagcaa

SEQ ID NO: 2161211 - DNA, 25 bp, Homo sapien
gaaggaacttaatgctcaccaatag

SEQ ID NO: 2161212 - DNA, 25 bp, Homo sapien
ggaacaccacgtagaatgacacagt

SEQ ID NO: 2161213 - DNA, 25 bp, Homo sapien
taggccccaagcatgtactaggaca

SEQ ID NO: 2161214 - DNA, 25 bp, Homo sapien
gagacagatccctcgttactagatg

SEQ ID NO: 2161215 - DNA, 25 bp, Homo sapien
taaggcagacattgcgagatcgagt

SEQ ID NO: 2161216 - DNA, 25 bp, Homo sapien
tcttgtctatttaccccagggtgcc

SEQ ID NO: 2161217 - DNA, 25 bp, Homo sapien
cctggcagtactttctcttggtctc

SEQ ID NO: 2161218 - DNA, 25 bp, Homo sapien
ttggtctccaccatcacaatgacag

SEQ ID NO: 2161219 - DNA, 25 bp, Homo sapien
tcttggtctccaccatcacaatgac

SEQ ID NO: 2161220 - DNA, 25 bp, Homo sapien
cccctgacctggcagtactttctct

SEQ ID NO: 2161221 - DNA, 25 bp, Homo sapien
gtgacaaggttaggcatgcacagga

SEQ ID NO: 2161222 - DNA, 25 bp, Homo sapien
tagagtctctcctaagacagggtgg

SEQ ID NO: 2161223 - DNA, 25 bp, Homo sapien
ttgactgaccttgggctagaggccc

SEQ ID NO: 2161224 - DNA, 25 bp, Homo sapien
taacctgccgtgtactatttgctga

SEQ ID NO: 2161225 - DNA, 25 bp, Homo sapien
tctggaggattcctgaatgaaagtg

SEQ ID NO: 2161226 - DNA, 25 bp, Homo sapien
gctatggcattttcgcattttctat

SEQ ID NO: 2161227 - DNA, 25 bp, Homo sapien
aaagtggaacacaatagctatggca

SEQ ID NO: 2161228 - DNA, 25 bp, Homo sapien
ttagcaagatcgagtccaaccctgg

SEQ ID NO: 2161229 - DNA, 25 bp, Homo sapien
tatcctggccgtggcagcgtaacag

SEQ ID NO: 2161230 - DNA, 25 bp, Homo sapien
tgttagcattttagtgtgagaataa

SEQ ID NO: 2161231 - DNA, 25 bp, Homo sapien
aggatttagaaaggccagataaggc

SEQ ID NO: 2161232 - DNA, 25 bp, Homo sapien
tagtcacggattagatatggacatg

SEQ ID NO: 2161233 - DNA, 25 bp, Homo sapien
ggcgataattgtaagtcagcagttt

SEQ ID NO: 2161234 - DNA, 25 bp, Homo sapien
gcagttgttttgtgatgtgtcacac

SEQ ID NO: 2161235 - DNA, 25 bp, Homo sapien
tcttttggagctgtccatatttggg

SEQ ID NO: 2161236 - DNA, 25 bp, Homo sapien
ggctttaacattaccattggctgca

SEQ ID NO: 2161237 - DNA, 25 bp, Homo sapien
atagaaaatggtctgcgaggacaca

SEQ ID NO: 2161238 - DNA, 25 bp, Homo sapien
tagaaaatggtctgcgaggacacat

SEQ ID NO: 2161239 - DNA, 25 bp, Homo sapien
atcagacaggtattagtgattatct

SEQ ID NO: 2161240 - DNA, 25 bp, Homo sapien
caccatgcagatgacgggtcatgaa

SEQ ID NO: 2161241 - DNA, 25 bp, Homo sapien
tgacgggtcatgaaccagcactcct

SEQ ID NO: 2161242 - DNA, 25 bp, Homo sapien
tgggctagcagagatcatggctcac

SEQ ID NO: 2161243 - DNA, 25 bp, Homo sapien
cttcccagtgggctagcagagatca

SEQ ID NO: 2161244 - DNA, 25 bp, Homo sapien
tgtacaccgatgacagctcaaaagg

SEQ ID NO: 2161245 - DNA, 25 bp, Homo sapien
tcactgttgccgaacaatgtacacc

SEQ ID NO: 2161246 - DNA, 25 bp, Homo sapien
ttatgcagttaacaaaaggtttatg

SEQ ID NO: 2161247 - DNA, 25 bp, Homo sapien
gggtgattatgcagttaacaaaagg

SEQ ID NO: 2161248 - DNA, 25 bp, Homo sapien
actccatgcggctcatcctttgcag

SEQ ID NO: 2161249 - DNA, 25 bp, Homo sapien
cagataccacttccactccatgcgg

SEQ ID NO: 2161250 - DNA, 25 bp, Homo sapien
tcctttgcaggaactctctcaattc

SEQ ID NO: 2161251 - DNA, 25 bp, Homo sapien
ggctcatcctttgcaggaactctct

SEQ ID NO: 2161252 - DNA, 25 bp, Homo sapien
aacagcagcataagccgagttccca

SEQ ID NO: 2161253 - DNA, 25 bp, Homo sapien
agccgagttcccaacaacattatca

SEQ ID NO: 2161254 - DNA, 25 bp, Homo sapien
gcataagccgagttcccaacaacat

SEQ ID NO: 2161255 - DNA, 25 bp, Homo sapien
acaacattatcaccgtgctcaaaag

SEQ ID NO: 2161256 - DNA, 25 bp, Homo sapien
ttatttatccccattacagaaatct

SEQ ID NO: 2161257 - DNA, 25 bp, Homo sapien
gcaagatctggcctgattaacaatc

SEQ ID NO: 2161258 - DNA, 25 bp, Homo sapien
caggtggatttatcccaatttttat

SEQ ID NO: 2161259 - DNA, 25 bp, Homo sapien
gtctttcccgtcacaggtggattta

SEQ ID NO: 2161260 - DNA, 25 bp, Homo sapien
tcttgaagtataaaacctgatctac

SEQ ID NO: 2161261 - DNA, 25 bp, Homo sapien
taaaacctgatctacgcatataggc

SEQ ID NO: 2161262 - DNA, 25 bp, Homo sapien
tctacgcatataggcttcacagtag

SEQ ID NO: 2161263 - DNA, 25 bp, Homo sapien
gaagtataaaacctgatctacgcat

SEQ ID NO: 2161264 - DNA, 25 bp, Homo sapien
tcatcgtttcctccacgtctcgcct

SEQ ID NO: 2161265 - DNA, 25 bp, Homo sapien
tctctgggaatggggtcatcgtttc

SEQ ID NO: 2161266 - DNA, 25 bp, Homo sapien
tcgtttcctccacgtctcgcctcat

SEQ ID NO: 2161267 - DNA, 25 bp, Homo sapien
gaatggggtcatcgtttcctccacg

SEQ ID NO: 2161268 - DNA, 25 bp, Homo sapien
ttccaatgcctgatggagacggtgg

SEQ ID NO: 2161269 - DNA, 25 bp, Homo sapien
tggagacggtgggaagtcttcataa

SEQ ID NO: 2161270 - DNA, 25 bp, Homo sapien
gacaccaatggtctttccctgcagt

SEQ ID NO: 2161271 - DNA, 25 bp, Homo sapien
gggaagtcttcataagtgacaccaa

SEQ ID NO: 2161272 - DNA, 25 bp, Homo sapien
caagcactggccgaaactggaaaat

SEQ ID NO: 2161273 - DNA, 25 bp, Homo sapien
ctgttgagctatggccactggtctg

SEQ ID NO: 2161274 - DNA, 25 bp, Homo sapien
agcactggccgaaactggaaaatga

SEQ ID NO: 2161275 - DNA, 25 bp, Homo sapien
aaaattgcaagcttgctgttgagct

SEQ ID NO: 2161276 - DNA, 25 bp, Homo sapien
aggctgaagactgctgtctattacc

SEQ ID NO: 2161277 - DNA, 25 bp, Homo sapien
ttaggttattagcagatttggtatc

SEQ ID NO: 2161278 - DNA, 25 bp, Homo sapien
taaggctgacccaaatacgtaaatg

SEQ ID NO: 2161279 - DNA, 25 bp, Homo sapien
tttggtatcagttgaagactgtggg

SEQ ID NO: 2161280 - DNA, 25 bp, Homo sapien
tgcaggacagagcagtaaggctgac

SEQ ID NO: 2161281 - DNA, 25 bp, Homo sapien
gaccatttacttttgggctactgcc

SEQ ID NO: 2161282 - DNA, 25 bp, Homo sapien
ccccacgctagtgtggctacattta

SEQ ID NO: 2161283 - DNA, 25 bp, Homo sapien
tagtattttcgatgtctcacctcaa

SEQ ID NO: 2161284 - DNA, 25 bp, Homo sapien
tacagttccttcacatgcacctcga

SEQ ID NO: 2161285 - DNA, 25 bp, Homo sapien
cacagccattcctattaagtgattc

SEQ ID NO: 2161286 - DNA, 25 bp, Homo sapien
ttaatgttcacggttcacatggaag

SEQ ID NO: 2161287 - DNA, 25 bp, Homo sapien
cagccattcctattaagtgattcat

SEQ ID NO: 2161288 - DNA, 25 bp, Homo sapien
gttcacggttcacatggaagtcaga

SEQ ID NO: 2161289 - DNA, 25 bp, Homo sapien
agatgcatcccaaaccgatctgccg

SEQ ID NO: 2161290 - DNA, 25 bp, Homo sapien
tgtagagcaaaccaaatgctgttgt

SEQ ID NO: 2161291 - DNA, 25 bp, Homo sapien
cactccctgggcttgcgggcgaggg

SEQ ID NO: 2161292 - DNA, 25 bp, Homo sapien
gggtgtagagcaaaccaaatgctgt

SEQ ID NO: 2161293 - DNA, 25 bp, Homo sapien
ggttcttcgatgtctacagtaggtt

SEQ ID NO: 2161294 - DNA, 25 bp, Homo sapien
tattggttcttcgatgtctacagta

SEQ ID NO: 2161295 - DNA, 25 bp, Homo sapien
atatattggttcttcgatgtctaca

SEQ ID NO: 2161296 - DNA, 25 bp, Homo sapien
ttggttcttcgatgtctacagtagg

SEQ ID NO: 2161297 - DNA, 25 bp, Homo sapien
tgcggacactggattgttggcccat

SEQ ID NO: 2161298 - DNA, 25 bp, Homo sapien
tggcctcattggcctcgttggcctc

SEQ ID NO: 2161299 - DNA, 25 bp, Homo sapien
cagcctgcggacactggattgttgg

SEQ ID NO: 2161300 - DNA, 25 bp, Homo sapien
cttcagcctgcggacactggattgt

SEQ ID NO: 2161301 - DNA, 25 bp, Homo sapien
gtatggtcgaggactcagatgtttt

SEQ ID NO: 2161302 - DNA, 25 bp, Homo sapien
tagcgaaccactagtatggtcgagg

SEQ ID NO: 2161303 - DNA, 25 bp, Homo sapien
tcctcctgtagcgaaccactagtat

SEQ ID NO: 2161304 - DNA, 25 bp, Homo sapien
ccactagtatggtcgaggactcaga

SEQ ID NO: 2161305 - DNA, 25 bp, Homo sapien
tttcattgccgaagtttgagggatg

SEQ ID NO: 2161306 - DNA, 25 bp, Homo sapien
attttcattgccgaagtttgaggga

SEQ ID NO: 2161307 - DNA, 25 bp, Homo sapien
ttattttcattgccgaagtttgagg

SEQ ID NO: 2161308 - DNA, 25 bp, Homo sapien
tcattgccgaagtttgagggatgta

SEQ ID NO: 2161309 - DNA, 25 bp, Homo sapien
tttgtggggttggcgcttgccacac

SEQ ID NO: 2161310 - DNA, 25 bp, Homo sapien
cacacttcttacagaaagtccggcg

SEQ ID NO: 2161311 - DNA, 25 bp, Homo sapien
cacttcttacagaaagtccggcggg

SEQ ID NO: 2161312 - DNA, 25 bp, Homo sapien
gtggggttggcgcttgccacacttc

SEQ ID NO: 2161313 - DNA, 25 bp, Homo sapien
tgctccctgtcataatatcgctttc

SEQ ID NO: 2161314 - DNA, 25 bp, Homo sapien
ctgctccctgtcataatatcgcttt

SEQ ID NO: 2161315 - DNA, 25 bp, Homo sapien
gctccctgtcataatatcgctttcc

SEQ ID NO: 2161316 - DNA, 25 bp, Homo sapien
ccagtgttcgcttagatctgcagtt

SEQ ID NO: 2161317 - DNA, 25 bp, Homo sapien
agccagtgttcgcttagatctgcag

SEQ ID NO: 2161318 - DNA, 25 bp, Homo sapien
atagccagtgttcgcttagatctgc

SEQ ID NO: 2161319 - DNA, 25 bp, Homo sapien
taatagccagtgttcgcttagatct

SEQ ID NO: 2161320 - DNA, 25 bp, Homo sapien
cagagttggctatgccttttcagac

SEQ ID NO: 2161321 - DNA, 25 bp, Homo sapien
cagacattgatttggacagctcacc

SEQ ID NO: 2161322 - DNA, 25 bp, Homo sapien
caatactacctggaaaaagcattgg

SEQ ID NO: 2161323 - DNA, 25 bp, Homo sapien
taccacctttcgagatcaggaccaa

SEQ ID NO: 2161324 - DNA, 25 bp, Homo sapien
actcttcctgtattagggcctggat

SEQ ID NO: 2161325 - DNA, 25 bp, Homo sapien
ggcctggatatgaaaggtgaagctg

SEQ ID NO: 2161326 - DNA, 25 bp, Homo sapien
aggagtcgaaccctgagtactcttc

SEQ ID NO: 2161327 - DNA, 25 bp, Homo sapien
aagtgtgctcccaggagtcgaaccc

SEQ ID NO: 2161328 - DNA, 25 bp, Homo sapien
tctctggctctaaaatgcccattcc

SEQ ID NO: 2161329 - DNA, 25 bp, Homo sapien
tgggtctctggctctaaaatgccca

SEQ ID NO: 2161330 - DNA, 25 bp, Homo sapien
ggtctctggctctaaaatgcccatt

SEQ ID NO: 2161331 - DNA, 25 bp, Homo sapien
tgtctggtccttgtgtatgagtcat

SEQ ID NO: 2161332 - DNA, 25 bp, Homo sapien
ctcagagggaacaatagtggttgcc

SEQ ID NO: 2161333 - DNA, 25 bp, Homo sapien
gttgcctcgtctggtttcctccctg

SEQ ID NO: 2161334 - DNA, 25 bp, Homo sapien
gttctgggcaggacatttcctgtct

SEQ ID NO: 2161335 - DNA, 25 bp, Homo sapien
ctcagttctgggcaggacatttcct

SEQ ID NO: 2161336 - DNA, 25 bp, Homo sapien
gtcacatagctttatcactgaaagg

SEQ ID NO: 2161337 - DNA, 25 bp, Homo sapien
ctgttgtccatgtatctaaaatgtc

SEQ ID NO: 2161338 - DNA, 25 bp, Homo sapien
cctttctaagtatggatcgcttcca

SEQ ID NO: 2161339 - DNA, 25 bp, Homo sapien
tccaattccgtctttctgttgtcca

SEQ ID NO: 2161340 - DNA, 25 bp, Homo sapien
tgatcagagtgttgatggcccagct

SEQ ID NO: 2161341 - DNA, 25 bp, Homo sapien
cagctgaattcgatcaagggtgatc

SEQ ID NO: 2161342 - DNA, 25 bp, Homo sapien
tcagaaggtcttttcatacagaact

SEQ ID NO: 2161343 - DNA, 25 bp, Homo sapien
tggcccagctccaagtgcatcgagc

SEQ ID NO: 2161344 - DNA, 25 bp, Homo sapien
aaggaagaactatccgagtggatca

SEQ ID NO: 2161345 - DNA, 25 bp, Homo sapien
aatccaaaggattctgtttcctctg

SEQ ID NO: 2161346 - DNA, 25 bp, Homo sapien
cacaatatgggagattgttaacatc

SEQ ID NO: 2161347 - DNA, 25 bp, Homo sapien
tgttaacatcaatctcatgcgggac

SEQ ID NO: 2161348 - DNA, 25 bp, Homo sapien
tgaaccctttaagatgaagccgatc

SEQ ID NO: 2161349 - DNA, 25 bp, Homo sapien
acgctgagtgcgagcccgcagagat

SEQ ID NO: 2161350 - DNA, 25 bp, Homo sapien
taaaagtgattgttctgatacctga

SEQ ID NO: 2161351 - DNA, 25 bp, Homo sapien
tactctatttcatacaggttataaa

SEQ ID NO: 2161352 - DNA, 25 bp, Homo sapien
ccaaggcgaaggacaggtaatttgc

SEQ ID NO: 2161353 - DNA, 25 bp, Homo sapien
tgctcttgccaaggcgaaggacagg

SEQ ID NO: 2161354 - DNA, 25 bp, Homo sapien
tttgctgtgactaattgaaaaacat

SEQ ID NO: 2161355 - DNA, 25 bp, Homo sapien
caggtaatttgctgtgactaattga

SEQ ID NO: 2161356 - DNA, 25 bp, Homo sapien
aggctatttagctctacgttttgga

SEQ ID NO: 2161357 - DNA, 25 bp, Homo sapien
taggaactggtatgacagatggaat

SEQ ID NO: 2161358 - DNA, 25 bp, Homo sapien
cagatggaatagctctagagatcta

SEQ ID NO: 2161359 - DNA, 25 bp, Homo sapien
ttttatagagtaacaaggcgattgt

SEQ ID NO: 2161360 - DNA, 25 bp, Homo sapien
cactggctattcaggagcatgtcat

SEQ ID NO: 2161361 - DNA, 25 bp, Homo sapien
gcatcccacaggtttaggcatgttg

SEQ ID NO: 2161362 - DNA, 25 bp, Homo sapien
ttgttggaaacaatacttcgtatga

SEQ ID NO: 2161363 - DNA, 25 bp, Homo sapien
gtgtaatattagaccatttgggaac

SEQ ID NO: 2161364 - DNA, 25 bp, Homo sapien
tgtagatctcaggtggaaaacttcc

SEQ ID NO: 2161365 - DNA, 25 bp, Homo sapien
tttgcataccaagaataaatcctat

SEQ ID NO: 2161366 - DNA, 25 bp, Homo sapien
atcatatgattgtctctcagtctgt

SEQ ID NO: 2161367 - DNA, 25 bp, Homo sapien
tcagtctgttaatgtaatgcatcac

SEQ ID NO: 2161368 - DNA, 25 bp, Homo sapien
ggactcttttccgattctatatgaa

SEQ ID NO: 2161369 - DNA, 25 bp, Homo sapien
gatttggctcttgacttgactactt

SEQ ID NO: 2161370 - DNA, 25 bp, Homo sapien
ctgatttggctcttgacttgactac

SEQ ID NO: 2161371 - DNA, 25 bp, Homo sapien
tttttatccataaacacggaatgat

SEQ ID NO: 2161372 - DNA, 25 bp, Homo sapien
tcttttttttgccgtatctttgcca

SEQ ID NO: 2161373 - DNA, 25 bp, Homo sapien
atttgattgtgatggataggtcttt

SEQ ID NO: 2161374 - DNA, 25 bp, Homo sapien
cttttttttgccgtatctttgccag

SEQ ID NO: 2161375 - DNA, 25 bp, Homo sapien
ccctgggatgaagcctatttgattg

SEQ ID NO: 2161376 - DNA, 25 bp, Homo sapien
tgcagccagcatctggacagtttct

SEQ ID NO: 2161377 - DNA, 25 bp, Homo sapien
ttatgcagccagcatctggacagtt

SEQ ID NO: 2161378 - DNA, 25 bp, Homo sapien
tatgcagccagcatctggacagttt

SEQ ID NO: 2161379 - DNA, 25 bp, Homo sapien
atgcagccagcatctggacagtttc

SEQ ID NO: 2161380 - DNA, 25 bp, Homo sapien
cagtatcatatttagcagcagacat

SEQ ID NO: 2161381 - DNA, 25 bp, Homo sapien
ctttttttcagtatcatatttagca

SEQ ID NO: 2161382 - DNA, 25 bp, Homo sapien
tttttcagtatcatatttagcagca

SEQ ID NO: 2161383 - DNA, 25 bp, Homo sapien
tcagtatcatatttagcagcagaca

SEQ ID NO: 2161384 - DNA, 25 bp, Homo sapien
tcaaatccaggacattttgtctcca

SEQ ID NO: 2161385 - DNA, 25 bp, Homo sapien
tattgatgtctatagttgatgtaac

SEQ ID NO: 2161386 - DNA, 25 bp, Homo sapien
tctatagttgatgtaacctgaatca

SEQ ID NO: 2161387 - DNA, 25 bp, Homo sapien
ccagtccatgctgttgattacagtc

SEQ ID NO: 2161388 - DNA, 25 bp, Homo sapien
gggctgctgttatataaagcgagca

SEQ ID NO: 2161389 - DNA, 25 bp, Homo sapien
tcaagcctttggagggcttcctagt

SEQ ID NO: 2161390 - DNA, 25 bp, Homo sapien
cctagtggagcataagaatctggga

SEQ ID NO: 2161391 - DNA, 25 bp, Homo sapien
tatataaagcgagcaggtggactgt

SEQ ID NO: 2161392 - DNA, 25 bp, Homo sapien
aaatctctgctgaacaacttttgct

SEQ ID NO: 2161393 - DNA, 25 bp, Homo sapien
gctgaacaacttttgctccgataaa

SEQ ID NO: 2161394 - DNA, 25 bp, Homo sapien
gatttcaaatctctgctgaacaact

SEQ ID NO: 2161395 - DNA, 25 bp, Homo sapien
ttgctccgataaagttgattgcata

SEQ ID NO: 2161396 - DNA, 25 bp, Homo sapien
ctattcacaaagaccagtaggccct

SEQ ID NO: 2161397 - DNA, 25 bp, Homo sapien
taaggtgctaaagctattcacaaag

SEQ ID NO: 2161398 - DNA, 25 bp, Homo sapien
taatctatggagtggcctaaggtgc

SEQ ID NO: 2161399 - DNA, 25 bp, Homo sapien
aatatgcataatctatggagtggcc

SEQ ID NO: 2161400 - DNA, 25 bp, Homo sapien
ctgatgcctaaatgtgaagtatgga

SEQ ID NO: 2161401 - DNA, 25 bp, Homo sapien
tacttcgttgtgcaagctgggaagc

SEQ ID NO: 2161402 - DNA, 25 bp, Homo sapien
taatgataccaggaaaacgggtatg

SEQ ID NO: 2161403 - DNA, 25 bp, Homo sapien
gcttttataaatagagtgatcaacc

SEQ ID NO: 2161404 - DNA, 25 bp, Homo sapien
accaatgttgggtagcaaagggaca

SEQ ID NO: 2161405 - DNA, 25 bp, Homo sapien
ttatataagagccttctttttgttg

SEQ ID NO: 2161406 - DNA, 25 bp, Homo sapien
tatataagagccttctttttgttgt

SEQ ID NO: 2161407 - DNA, 25 bp, Homo sapien
tgccgatcagcatacatttcctcct

SEQ ID NO: 2161408 - DNA, 25 bp, Homo sapien
tggagccttgtaatcaggccagtgg

SEQ ID NO: 2161409 - DNA, 25 bp, Homo sapien
ttgcaaaagccctcttggagccttg

SEQ ID NO: 2161410 - DNA, 25 bp, Homo sapien
ctgtatgccgatcagcatacatttc

SEQ ID NO: 2161411 - DNA, 25 bp, Homo sapien
ttgcctttgagttggataaatggct

SEQ ID NO: 2161412 - DNA, 25 bp, Homo sapien
ttggataaatggctgaaagctgatt

SEQ ID NO: 2161413 - DNA, 25 bp, Homo sapien
gataaatggctgaaagctgattctt

SEQ ID NO: 2161414 - DNA, 25 bp, Homo sapien
tgcctttgagttggataaatggctg

SEQ ID NO: 2161415 - DNA, 25 bp, Homo sapien
gccagcctgtgctagaaatgttcag

SEQ ID NO: 2161416 - DNA, 25 bp, Homo sapien
cttctgagtgtactgcctgaggcta

SEQ ID NO: 2161417 - DNA, 25 bp, Homo sapien
gggtcaatatcaggacctgcaggca

SEQ ID NO: 2161418 - DNA, 25 bp, Homo sapien
tctgagcagcatgcttgagggtcaa

SEQ ID NO: 2161419 - DNA, 25 bp, Homo sapien
aacgctggtcgctggtttccacgct

SEQ ID NO: 2161420 - DNA, 25 bp, Homo sapien
ctggtttccacgcttctcttccata

SEQ ID NO: 2161421 - DNA, 25 bp, Homo sapien
ggttggtcctaatctacctgaacgc

SEQ ID NO: 2161422 - DNA, 25 bp, Homo sapien
tgaggcgcccaaaggggctcgccat

SEQ ID NO: 2161423 - DNA, 25 bp, Homo sapien
tcaccaccgccgaaagccgtccgtc

SEQ ID NO: 2161424 - DNA, 25 bp, Homo sapien
tcagcattcctcacatctggtctga

SEQ ID NO: 2161425 - DNA, 25 bp, Homo sapien
attcctcacatctggtctgatcttt

SEQ ID NO: 2161426 - DNA, 25 bp, Homo sapien
cagcattcctcacatctggtctgat

SEQ ID NO: 2161427 - DNA, 25 bp, Homo sapien
gcattcctcacatctggtctgatct

SEQ ID NO: 2161428 - DNA, 25 bp, Homo sapien
ggctcggcccccgatttgatttcta

SEQ ID NO: 2161429 - DNA, 25 bp, Homo sapien
gctcggcccccgatttgatttctaa

SEQ ID NO: 2161430 - DNA, 25 bp, Homo sapien
taagatatgtaaatctggctagaaa

SEQ ID NO: 2161431 - DNA, 25 bp, Homo sapien
aactaaagtaagatatgtaaatctg

SEQ ID NO: 2161432 - DNA, 25 bp, Homo sapien
tttccagtcctctccatcgttacgg

SEQ ID NO: 2161433 - DNA, 25 bp, Homo sapien
tgcataggcgaataaacataatggg

SEQ ID NO: 2161434 - DNA, 25 bp, Homo sapien
gggaacatgcataggcgaataaaca

SEQ ID NO: 2161435 - DNA, 25 bp, Homo sapien
aacagatgagagaacgtggctttgg

SEQ ID NO: 2161436 - DNA, 25 bp, Homo sapien
aatgacagccgactttcgagcgcag

SEQ ID NO: 2161437 - DNA, 25 bp, Homo sapien
caactagaacttgtcgggtaggcat

SEQ ID NO: 2161438 - DNA, 25 bp, Homo sapien
gacccgtaaggatgatgccaccatt

SEQ ID NO: 2161439 - DNA, 25 bp, Homo sapien
caggcctgtcaacttgggaatatcg

SEQ ID NO: 2161440 - DNA, 25 bp, Homo sapien
cactccctgggcttgcgggcgaggg

SEQ ID NO: 2161441 - DNA, 25 bp, Homo sapien
agatgcatcccaaaccgatctgccg

SEQ ID NO: 2161442 - DNA, 25 bp, Homo sapien
ggtgtagagcaaaccaaatgctgct

SEQ ID NO: 2161443 - DNA, 25 bp, Homo sapien
gctgttgtttcagcatcccctgaag

SEQ ID NO: 2161444 - DNA, 25 bp, Homo sapien
gtaggttttgaatcttctcagtggc

SEQ ID NO: 2161445 - DNA, 25 bp, Homo sapien
gttcttcaatgtcagtggcaggctt

SEQ ID NO: 2161446 - DNA, 25 bp, Homo sapien
aatgtcagtggcaggcttttgtagg

SEQ ID NO: 2161447 - DNA, 25 bp, Homo sapien
cttttgtaggttttgaatcttctca

SEQ ID NO: 2161448 - DNA, 25 bp, Homo sapien
tcaccccgccggcactggattgttt

SEQ ID NO: 2161449 - DNA, 25 bp, Homo sapien
accccgccggcactggattgtttgt

SEQ ID NO: 2161450 - DNA, 25 bp, Homo sapien
cgccggcactggattgtttgtccat

SEQ ID NO: 2161451 - DNA, 25 bp, Homo sapien
ccccgccggcactggattgtttgtc

SEQ ID NO: 2161452 - DNA, 25 bp, Homo sapien
gtatggtcgaggactcagatgtttt

SEQ ID NO: 2161453 - DNA, 25 bp, Homo sapien
tcctcctgtagcgaaccactagtat

SEQ ID NO: 2161454 - DNA, 25 bp, Homo sapien
tagcgaaccactagtatggtcgagg

SEQ ID NO: 2161455 - DNA, 25 bp, Homo sapien
ccactagtatggtcgaggactcaga

SEQ ID NO: 2161456 - DNA, 25 bp, Homo sapien
caaggttgagagatgtagcttcttg

SEQ ID NO: 2161457 - DNA, 25 bp, Homo sapien
tgcccaaggttgagagatgtagctt

SEQ ID NO: 2161458 - DNA, 25 bp, Homo sapien
cccaaggttgagagatgtagcttct

SEQ ID NO: 2161459 - DNA, 25 bp, Homo sapien
gcccaaggttgagagatgtagcttc

SEQ ID NO: 2161460 - DNA, 25 bp, Homo sapien
tagccttcaaatctcctctataagg

SEQ ID NO: 2161461 - DNA, 25 bp, Homo sapien
tctcctctataagggttggtcagat

SEQ ID NO: 2161462 - DNA, 25 bp, Homo sapien
ctttcttgatggtatactttcttct

SEQ ID NO: 2161463 - DNA, 25 bp, Homo sapien
tcttcaaaccatatagccttcaaat

SEQ ID NO: 2161464 - DNA, 25 bp, Homo sapien
acatccagggcccagatatagacac

SEQ ID NO: 2161465 - DNA, 25 bp, Homo sapien
gatatagacaccaacacttactggg

SEQ ID NO: 2161466 - DNA, 25 bp, Homo sapien
acccaacatgcctgtacatccaggg

SEQ ID NO: 2161467 - DNA, 25 bp, Homo sapien
ttattcttgaacaacccaacatgcc

SEQ ID NO: 2161468 - DNA, 25 bp, Homo sapien
agcaacagtagcctactccaggcct

SEQ ID NO: 2161469 - DNA, 25 bp, Homo sapien
aacagtagcctactccaggcctcat

SEQ ID NO: 2161470 - DNA, 25 bp, Homo sapien
agagcaacagtagcctactccaggc

SEQ ID NO: 2161471 - DNA, 25 bp, Homo sapien
ctagagcaacagtagcctactccag

SEQ ID NO: 2161472 - DNA, 25 bp, Homo sapien
tagatgaacagtagcctacagcctc

SEQ ID NO: 2161473 - DNA, 25 bp, Homo sapien
agatgaacagtagcctacagcctct

SEQ ID NO: 2161474 - DNA, 25 bp, Homo sapien
gatgaacagtagcctacagcctctc

SEQ ID NO: 2161475 - DNA, 25 bp, Homo sapien
ctagatgaacagtagcctacagcct

SEQ ID NO: 2161476 - DNA, 25 bp, Homo sapien
ccttgttaatctccgccatcttaga

SEQ ID NO: 2161477 - DNA, 25 bp, Homo sapien
tcggtaacctttgggataatgtagc

SEQ ID NO: 2161478 - DNA, 25 bp, Homo sapien
tagagcaaaagtaggctatagcctc

SEQ ID NO: 2161479 - DNA, 25 bp, Homo sapien
tcttcaggaacatcttctattgtag

SEQ ID NO: 2161480 - DNA, 25 bp, Homo sapien
cccgctttacgtctttctgaattct

SEQ ID NO: 2161481 - DNA, 25 bp, Homo sapien
ttcatcctcatttggctgattttca

SEQ ID NO: 2161482 - DNA, 25 bp, Homo sapien
ccgctttacgtctttctgaattctg

SEQ ID NO: 2161483 - DNA, 25 bp, Homo sapien
cttcatcctcatttggctgattttc

SEQ ID NO: 2161484 - DNA, 25 bp, Homo sapien
tcttggtgcaatatgtagtttctct

SEQ ID NO: 2161485 - DNA, 25 bp, Homo sapien
gaattttaatcaccaacatccaaga

SEQ ID NO: 2161486 - DNA, 25 bp, Homo sapien
gtcttggtcttctgatgagctctca

SEQ ID NO: 2161487 - DNA, 25 bp, Homo sapien
tctagaggttaacctagagatgaga

SEQ ID NO: 2161488 - DNA, 25 bp, Homo sapien
catgaaatgggctaaacttgtggct

SEQ ID NO: 2161489 - DNA, 25 bp, Homo sapien
ccaagatctgggctaagggatcgct

SEQ ID NO: 2161490 - DNA, 25 bp, Homo sapien
ggatgaacatccctttgacactggt

SEQ ID NO: 2161491 - DNA, 25 bp, Homo sapien
tgtctatcctccaaagtggccatgt

SEQ ID NO: 2161492 - DNA, 25 bp, Homo sapien
agagtcactactcgttctccaggcg

SEQ ID NO: 2161493 - DNA, 25 bp, Homo sapien
cgtgcccgtgtaatgtagacatccg

SEQ ID NO: 2161494 - DNA, 25 bp, Homo sapien
tctccaggcgtagatgaaataatcg

SEQ ID NO: 2161495 - DNA, 25 bp, Homo sapien
gacatccgaaactcatgcacttggc

SEQ ID NO: 2161496 - DNA, 25 bp, Homo sapien
tatttggaggattgctcagtaaaac

SEQ ID NO: 2161497 - DNA, 25 bp, Homo sapien
cagtagtggagtggttaaatttgta

SEQ ID NO: 2161498 - DNA, 25 bp, Homo sapien
tctcataatagttagaagtctttgt

SEQ ID NO: 2161499 - DNA, 25 bp, Homo sapien
taatgttgggttccataaattcagt

SEQ ID NO: 2161500 - DNA, 25 bp, Homo sapien
gatacgtgaatctctaagccacggt

SEQ ID NO: 2161501 - DNA, 25 bp, Homo sapien
caaattaatgacaacgatcctttcc

SEQ ID NO: 2161502 - DNA, 25 bp, Homo sapien
aactttcctgtggttgatacgtgaa

SEQ ID NO: 2161503 - DNA, 25 bp, Homo sapien
cctttccattgtcttaggaggattt

SEQ ID NO: 2161504 - DNA, 25 bp, Homo sapien
gaccctggccctaacattctttcaa

SEQ ID NO: 2161505 - DNA, 25 bp, Homo sapien
cctttattctcatggatcctagacc

SEQ ID NO: 2161506 - DNA, 25 bp, Homo sapien
tcctttattctcatggatcctagac

SEQ ID NO: 2161507 - DNA, 25 bp, Homo sapien
ctttattctcatggatcctagaccc

SEQ ID NO: 2161508 - DNA, 25 bp, Homo sapien
ctctcaattaatatctgctcactca

SEQ ID NO: 2161509 - DNA, 25 bp, Homo sapien
atgtctctcaattaatatctgctca

SEQ ID NO: 2161510 - DNA, 25 bp, Homo sapien
gtctctcaattaatatctgctcact

SEQ ID NO: 2161511 - DNA, 25 bp, Homo sapien
tgtctctcaattaatatctgctcac

SEQ ID NO: 2161512 - DNA, 25 bp, Homo sapien
tatggatacagcatgcccagagcac

SEQ ID NO: 2161513 - DNA, 25 bp, Homo sapien
cctgagctttcttgagtggttggcc

SEQ ID NO: 2161514 - DNA, 25 bp, Homo sapien
cagcaatggctgtagctcctatgag

SEQ ID NO: 2161515 - DNA, 25 bp, Homo sapien
tgagaagaggctaagccaaggcctg

SEQ ID NO: 2161516 - DNA, 25 bp, Homo sapien
tgctgatttaggagcccatactgca

SEQ ID NO: 2161517 - DNA, 25 bp, Homo sapien
ctgtgatgaaaacctttggtgatac

SEQ ID NO: 2161518 - DNA, 25 bp, Homo sapien
tcagattcatctttagcacaaagag

SEQ ID NO: 2161519 - DNA, 25 bp, Homo sapien
tgtcaatgtgcccaaagcttcctcc

SEQ ID NO: 2161520 - DNA, 25 bp, Homo sapien
actcatcttatttatactgctaagg

SEQ ID NO: 2161521 - DNA, 25 bp, Homo sapien
tgagtaattctcatgaactcgagga

SEQ ID NO: 2161522 - DNA, 25 bp, Homo sapien
cgaggaactttgctactcatcttat

SEQ ID NO: 2161523 - DNA, 25 bp, Homo sapien
tatttatactgctaaggatgccatc

SEQ ID NO: 2161524 - DNA, 25 bp, Homo sapien
tgcacagccatattggaacctgagg

SEQ ID NO: 2161525 - DNA, 25 bp, Homo sapien
tacttagtatcgacctgcctggcaa

SEQ ID NO: 2161526 - DNA, 25 bp, Homo sapien
gctttattgtggcattgtggtataa

SEQ ID NO: 2161527 - DNA, 25 bp, Homo sapien
aggtaaatgcctcccttgtacttag

SEQ ID NO: 2161528 - DNA, 25 bp, Homo sapien
ccatattacatgtgatttggaagac

SEQ ID NO: 2161529 - DNA, 25 bp, Homo sapien
ttacatgtgatttggaagacaccat

SEQ ID NO: 2161530 - DNA, 25 bp, Homo sapien
ttgccatattacatgtgatttggaa

SEQ ID NO: 2161531 - DNA, 25 bp, Homo sapien
cattttgccatattacatgtgattt

SEQ ID NO: 2161532 - DNA, 25 bp, Homo sapien
aatagtatcgcctgtcttttctcac

SEQ ID NO: 2161533 - DNA, 25 bp, Homo sapien
aaaaaacaatcctccaagaacatga

SEQ ID NO: 2161534 - DNA, 25 bp, Homo sapien
tacacagacaaaatagtatcgcctg

SEQ ID NO: 2161535 - DNA, 25 bp, Homo sapien
gaactggtatggaccaaatatctag

SEQ ID NO: 2161536 - DNA, 25 bp, Homo sapien
gactatttaggagaagacgtaactg

SEQ ID NO: 2161537 - DNA, 25 bp, Homo sapien
ctagaattgcgctctctgactattt

SEQ ID NO: 2161538 - DNA, 25 bp, Homo sapien
ctctgactatttaggagaagacgta

SEQ ID NO: 2161539 - DNA, 25 bp, Homo sapien
gacgtaactgtccatccaaagctgc

SEQ ID NO: 2161540 - DNA, 25 bp, Homo sapien
ctgccaaagccctttaagtatacta

SEQ ID NO: 2161541 - DNA, 25 bp, Homo sapien
tgccaaagccctttaagtatactac

SEQ ID NO: 2161542 - DNA, 25 bp, Homo sapien
tctcccttttggtcatggagtaagg

SEQ ID NO: 2161543 - DNA, 25 bp, Homo sapien
ttttagggtaccatagtggaagcag

SEQ ID NO: 2161544 - DNA, 25 bp, Homo sapien
tttttagggtaccatagtggaagca

SEQ ID NO: 2161545 - DNA, 25 bp, Homo sapien
tcatggagtaaggaacaaagatgta

SEQ ID NO: 2161546 - DNA, 25 bp, Homo sapien
atctctctttagtcatgaacacttc

SEQ ID NO: 2161547 - DNA, 25 bp, Homo sapien
ctgacatctctctttagtcatgaac

SEQ ID NO: 2161548 - DNA, 25 bp, Homo sapien
ttagtcatgaacacttctgacatat

SEQ ID NO: 2161549 - DNA, 25 bp, Homo sapien
tttgctttctgacatctctctttag

SEQ ID NO: 2161550 - DNA, 25 bp, Homo sapien
tcaaaagctggattcatcgagtcca

SEQ ID NO: 2161551 - DNA, 25 bp, Homo sapien
tctcaaaagctggattcatcgagtc

SEQ ID NO: 2161552 - DNA, 25 bp, Homo sapien
caaaagctggattcatcgagtccat

SEQ ID NO: 2161553 - DNA, 25 bp, Homo sapien
gttctcaaaagctggattcatcgag

SEQ ID NO: 2161554 - DNA, 25 bp, Homo sapien
tccacaggtgtgctaacatctgctg

SEQ ID NO: 2161555 - DNA, 25 bp, Homo sapien
tttccacaggtgtgctaacatctgc

SEQ ID NO: 2161556 - DNA, 25 bp, Homo sapien
ggtgtgctaacatctgctgatctct

SEQ ID NO: 2161557 - DNA, 25 bp, Homo sapien
cacaggtgtgctaacatctgctgat

SEQ ID NO: 2161558 - DNA, 25 bp, Homo sapien
caggagagagtaaggcagatttaga

SEQ ID NO: 2161559 - DNA, 25 bp, Homo sapien
gattggttgatatgttccaaggatg

SEQ ID NO: 2161560 - DNA, 25 bp, Homo sapien
catctgaaagcactcttcatcataa

SEQ ID NO: 2161561 - DNA, 25 bp, Homo sapien
gaaagcactcttcatcataatgatg

SEQ ID NO: 2161562 - DNA, 25 bp, Homo sapien
ggtggcatccaacacccagtggcag

SEQ ID NO: 2161563 - DNA, 25 bp, Homo sapien
cacatgtgtttttcacccactggcc

SEQ ID NO: 2161564 - DNA, 25 bp, Homo sapien
gggataaggcatatgtggcacatgt

SEQ ID NO: 2161565 - DNA, 25 bp, Homo sapien
ctagactgccatcactgaaggtggc

SEQ ID NO: 2161566 - DNA, 25 bp, Homo sapien
atgcaactccctcacaaggatgtgc

SEQ ID NO: 2161567 - DNA, 25 bp, Homo sapien
gcaatgcaactccctcacaaggatg

SEQ ID NO: 2161568 - DNA, 25 bp, Homo sapien
aatgcaactccctcacaaggatgtg

SEQ ID NO: 2161569 - DNA, 25 bp, Homo sapien
aaggatgtgctccattgtctagcat

SEQ ID NO: 2161570 - DNA, 25 bp, Homo sapien
ttcagggatgctggacagatccact

SEQ ID NO: 2161571 - DNA, 25 bp, Homo sapien
tgctggacagatccactgaagttct

SEQ ID NO: 2161572 - DNA, 25 bp, Homo sapien
catccgaaacgttcagggatgctgg

SEQ ID NO: 2161573 - DNA, 25 bp, Homo sapien
tcatccgaaacgttcagggatgctg

SEQ ID NO: 2161574 - DNA, 25 bp, Homo sapien
cagaaaaagcctcacctccctcaga

SEQ ID NO: 2161575 - DNA, 25 bp, Homo sapien
gatctgaagttccacccctcagaaa

SEQ ID NO: 2161576 - DNA, 25 bp, Homo sapien
tgcccaagatgaaaggcagaatagt

SEQ ID NO: 2161577 - DNA, 25 bp, Homo sapien
gcagaatagtccttatctgtggcct

SEQ ID NO: 2161578 - DNA, 25 bp, Homo sapien
ctccggctgactcccaaaatgcaag

SEQ ID NO: 2161579 - DNA, 25 bp, Homo sapien
aacctttttccagggctgacggcag

SEQ ID NO: 2161580 - DNA, 25 bp, Homo sapien
tcttctcgttgagtggccagtcctg

SEQ ID NO: 2161581 - DNA, 25 bp, Homo sapien
cagagttctcttctcgttgagtggc

SEQ ID NO: 2161582 - DNA, 25 bp, Homo sapien
gacatagaaatggtcggggtccact

SEQ ID NO: 2161583 - DNA, 25 bp, Homo sapien
atggtcggggtccacttctgtcagg

SEQ ID NO: 2161584 - DNA, 25 bp, Homo sapien
tagcccgtgtatgtgttgatgacat

SEQ ID NO: 2161585 - DNA, 25 bp, Homo sapien
atcataggaaagtagcccgtgtatg

SEQ ID NO: 2161586 - DNA, 25 bp, Homo sapien
tcccgatagacgaaatgctccctct

SEQ ID NO: 2161587 - DNA, 25 bp, Homo sapien
cccgatagacgaaatgctccctctg

SEQ ID NO: 2161588 - DNA, 25 bp, Homo sapien
ccgatagacgaaatgctccctctga

SEQ ID NO: 2161589 - DNA, 25 bp, Homo sapien
ttctggagatgacacggaaccttgc

SEQ ID NO: 2161590 - DNA, 25 bp, Homo sapien
ggagatgacacggaaccttgcactg

SEQ ID NO: 2161591 - DNA, 25 bp, Homo sapien
agatgacacggaaccttgcactggc

SEQ ID NO: 2161592 - DNA, 25 bp, Homo sapien
tgacacggaaccttgcactggccat

SEQ ID NO: 2161593 - DNA, 25 bp, Homo sapien
tgtcccgacagcaacagttgttctg

SEQ ID NO: 2161594 - DNA, 25 bp, Homo sapien
ccgacagcaacagttgttctgtcat

SEQ ID NO: 2161595 - DNA, 25 bp, Homo sapien
tcccgacagcaacagttgttctgtc

SEQ ID NO: 2161596 - DNA, 25 bp, Homo sapien
ctgtcccgacagcaacagttgttct

SEQ ID NO: 2161597 - DNA, 25 bp, Homo sapien
tagctatccttccacagagttccct

SEQ ID NO: 2161598 - DNA, 25 bp, Homo sapien
tgttgggagatagctatccttccac

SEQ ID NO: 2161599 - DNA, 25 bp, Homo sapien
acctctccatctgttttgtccaggg

SEQ ID NO: 2161600 - DNA, 25 bp, Homo sapien
cctccgtgttgggagatagctatcc

SEQ ID NO: 2161601 - DNA, 25 bp, Homo sapien
gccaggtctaagacgcttccctctg

SEQ ID NO: 2161602 - DNA, 25 bp, Homo sapien
aagcacatccgcgaaccctgccaag

SEQ ID NO: 2161603 - DNA, 25 bp, Homo sapien
cgaaccctgccaaggctgaccaggg

SEQ ID NO: 2161604 - DNA, 25 bp, Homo sapien
gtccagactcctcgcaaaatgcttc

SEQ ID NO: 2161605 - DNA, 25 bp, Homo sapien
tccttggtgcgaagtccctcagttc

SEQ ID NO: 2161606 - DNA, 25 bp, Homo sapien
cagggcagaccggggcttcttctgt

SEQ ID NO: 2161607 - DNA, 25 bp, Homo sapien
tgtccttggtgcgaagtccctcagt

SEQ ID NO: 2161608 - DNA, 25 bp, Homo sapien
ttctgtccttggtgcgaagtccctc

SEQ ID NO: 2161609 - DNA, 25 bp, Homo sapien
ttgtggggacgcctcggtcagccct

SEQ ID NO: 2161610 - DNA, 25 bp, Homo sapien
ctgttgtggggacgcctcggtcagc

SEQ ID NO: 2161611 - DNA, 25 bp, Homo sapien
tgtggggacgcctcggtcagccctc

SEQ ID NO: 2161612 - DNA, 25 bp, Homo sapien
ttctgttgtggggacgcctcggtca

SEQ ID NO: 2161613 - DNA, 25 bp, Homo sapien
tgagagcagcgggaggtagcgaggt

SEQ ID NO: 2161614 - DNA, 25 bp, Homo sapien
agagcagcgggaggtagcgaggtgg

SEQ ID NO: 2161615 - DNA, 25 bp, Homo sapien
cagcgggaggtagcgaggtggcagc

SEQ ID NO: 2161616 - DNA, 25 bp, Homo sapien
agcagcgggaggtagcgaggtggca

SEQ ID NO: 2161617 - DNA, 25 bp, Homo sapien
aaaactcagggcaaactccacatcc

SEQ ID NO: 2161618 - DNA, 25 bp, Homo sapien
ttctcagacagggccatgtccctac

SEQ ID NO: 2161619 - DNA, 25 bp, Homo sapien
tttctcagacagggccatgtcccta

SEQ ID NO: 2161620 - DNA, 25 bp, Homo sapien
ctttaggaagtgtgcctcagaccca

SEQ ID NO: 2161621 - DNA, 25 bp, Homo sapien
cttgactcctgatattgcctgggcc

SEQ ID NO: 2161622 - DNA, 25 bp, Homo sapien
actttaggaagtgtgcctcagaccc

SEQ ID NO: 2161623 - DNA, 25 bp, Homo sapien
ttgactcctgatattgcctgggcct

SEQ ID NO: 2161624 - DNA, 25 bp, Homo sapien
cctaagaggtttgctccctcagaac

SEQ ID NO: 2161625 - DNA, 25 bp, Homo sapien
cctgtcttcctaagaggtttgctcc

SEQ ID NO: 2161626 - DNA, 25 bp, Homo sapien
tcttcctaagaggtttgctccctca

SEQ ID NO: 2161627 - DNA, 25 bp, Homo sapien
tcgcctgtcttcctaagaggtttgc

SEQ ID NO: 2161628 - DNA, 25 bp, Homo sapien
gatggggatgatgggatcccacagg

SEQ ID NO: 2161629 - DNA, 25 bp, Homo sapien
atggggatgatgggatcccacaggc

SEQ ID NO: 2161630 - DNA, 25 bp, Homo sapien
caggtaaacgtgtgagcagggatgg

SEQ ID NO: 2161631 - DNA, 25 bp, Homo sapien
cagcaggtaaacgtgtgagcaggga

SEQ ID NO: 2161632 - DNA, 25 bp, Homo sapien
tcctcaaagctgaggcgtggaaggt

SEQ ID NO: 2161633 - DNA, 25 bp, Homo sapien
cacactcgggttctggaagtcttcc

SEQ ID NO: 2161634 - DNA, 25 bp, Homo sapien
ggaacacccagaatgagagtagagg

SEQ ID NO: 2161635 - DNA, 25 bp, Homo sapien
tgtgcatctaccaagtcctctgtca

SEQ ID NO: 2161636 - DNA, 25 bp, Homo sapien
gaggactctgcggaggaccctgggg

SEQ ID NO: 2161637 - DNA, 25 bp, Homo sapien
ggaggactctgcggaggaccctggg

SEQ ID NO: 2161638 - DNA, 25 bp, Homo sapien
aggactctgcggaggaccctgggga

SEQ ID NO: 2161639 - DNA, 25 bp, Homo sapien
gggaggactctgcggaggaccctgg

SEQ ID NO: 2161640 - DNA, 25 bp, Homo sapien
catccaatcgggtccacaaaagagg

SEQ ID NO: 2161641 - DNA, 25 bp, Homo sapien
aagtagctgtatcctcctcttcact

SEQ ID NO: 2161642 - DNA, 25 bp, Homo sapien
tcctcatccaatcgggtccacaaaa

SEQ ID NO: 2161643 - DNA, 25 bp, Homo sapien
tcactttctggcaaggcatgccaag

SEQ ID NO: 2161644 - DNA, 25 bp, Homo sapien
tgggcatgccctggtcatcaatcag

SEQ ID NO: 2161645 - DNA, 25 bp, Homo sapien
gaatcaggagacagttcttgggcat

SEQ ID NO: 2161646 - DNA, 25 bp, Homo sapien
tcaggcttccctcataggtgaggtc

SEQ ID NO: 2161647 - DNA, 25 bp, Homo sapien
tgggctttcccgaagatcatgggaa

SEQ ID NO: 2161648 - DNA, 25 bp, Homo sapien
gctttctgggatccccatatataaa

SEQ ID NO: 2161649 - DNA, 25 bp, Homo sapien
tatagtgagcagctttctgggatcc

SEQ ID NO: 2161650 - DNA, 25 bp, Homo sapien
cacccaatgtatagtgagcagcttt

SEQ ID NO: 2161651 - DNA, 25 bp, Homo sapien
gagcagctttctgggatccccatat

SEQ ID NO: 2161652 - DNA, 25 bp, Homo sapien
aactctaagacttctcttgctggcc

SEQ ID NO: 2161653 - DNA, 25 bp, Homo sapien
gatgatactggatagcttggataaa

SEQ ID NO: 2161654 - DNA, 25 bp, Homo sapien
aaactctaagacttctcttgctggc

SEQ ID NO: 2161655 - DNA, 25 bp, Homo sapien
ggatagcttggataaaaactctaag

SEQ ID NO: 2161656 - DNA, 25 bp, Homo sapien
tcactcaggacagaagttggtggac

SEQ ID NO: 2161657 - DNA, 25 bp, Homo sapien
tcaaagcatccatgtaccaggatgg

SEQ ID NO: 2161658 - DNA, 25 bp, Homo sapien
tatctttcaaagcatccatgtacca

SEQ ID NO: 2161659 - DNA, 25 bp, Homo sapien
ggtgtcaattatggcctgggctctg

SEQ ID NO: 2161660 - DNA, 25 bp, Homo sapien
caggacaggcagcactaccagtcat

SEQ ID NO: 2161661 - DNA, 25 bp, Homo sapien
acaggacaggcagcactaccagtca

SEQ ID NO: 2161662 - DNA, 25 bp, Homo sapien
ggacaggacaggcagcactaccagt

SEQ ID NO: 2161663 - DNA, 25 bp, Homo sapien
cagggacaggacaggcagcactacc

SEQ ID NO: 2161664 - DNA, 25 bp, Homo sapien
gataggtctataagtctcctccctc

SEQ ID NO: 2161665 - DNA, 25 bp, Homo sapien
acgatcctcgtcacaaaatgcctca

SEQ ID NO: 2161666 - DNA, 25 bp, Homo sapien
tccgctgacctgagacgatcctcgt

SEQ ID NO: 2161667 - DNA, 25 bp, Homo sapien
cttgaagactggataggtctataag

SEQ ID NO: 2161668 - DNA, 25 bp, Homo sapien
ggtccctgtggcctcacgtctgttc

SEQ ID NO: 2161669 - DNA, 25 bp, Homo sapien
tctgacgcacatgtgacccctcagt

SEQ ID NO: 2161670 - DNA, 25 bp, Homo sapien
atgctgacttgccatgggaccccca

SEQ ID NO: 2161671 - DNA, 25 bp, Homo sapien
ctcacccagcagtgagagggtggcc

SEQ ID NO: 2161672 - DNA, 25 bp, Homo sapien
tggtgcttttaggatgtatgtgtcc

SEQ ID NO: 2161673 - DNA, 25 bp, Homo sapien
ggatgtatgtgtccctcacacccag

SEQ ID NO: 2161674 - DNA, 25 bp, Homo sapien
tatgtgtccctcacacccaggtctt

SEQ ID NO: 2161675 - DNA, 25 bp, Homo sapien
gcttttaggatgtatgtgtccctca

SEQ ID NO: 2161676 - DNA, 25 bp, Homo sapien
ctgtagaaggacgcgagaaagcacc

SEQ ID NO: 2161677 - DNA, 25 bp, Homo sapien
agcacctcggggcacagctggcagg

SEQ ID NO: 2161678 - DNA, 25 bp, Homo sapien
agaaggacgcgagaaagcacctcgg

SEQ ID NO: 2161679 - DNA, 25 bp, Homo sapien
gtagaaggacgcgagaaagcacctc

SEQ ID NO: 2161680 - DNA, 25 bp, Homo sapien
cttcttctcttaaggtggtgctcta

SEQ ID NO: 2161681 - DNA, 25 bp, Homo sapien
ttcttctcttaaggtggtgctctag

SEQ ID NO: 2161682 - DNA, 25 bp, Homo sapien
gcctcacaggtcgcctgtcttccta

SEQ ID NO: 2161683 - DNA, 25 bp, Homo sapien
ctggagaagactcggcatcccagca

SEQ ID NO: 2161684 - DNA, 25 bp, Homo sapien
cccagcagtaggcatatccttgtcc

SEQ ID NO: 2161685 - DNA, 25 bp, Homo sapien
catcccagcagtaggcatatccttg

SEQ ID NO: 2161686 - DNA, 25 bp, Homo sapien
ccagcagtaggcatatccttgtccc

SEQ ID NO: 2161687 - DNA, 25 bp, Homo sapien
ggacaactctgaggactctcagagg

SEQ ID NO: 2161688 - DNA, 25 bp, Homo sapien
caggacaactctgaggactctcaga

SEQ ID NO: 2161689 - DNA, 25 bp, Homo sapien
gacaactctgaggactctcagagga

SEQ ID NO: 2161690 - DNA, 25 bp, Homo sapien
aggacaactctgaggactctcagag

SEQ ID NO: 2161691 - DNA, 25 bp, Homo sapien
aggatacagggtgtcgtcgctctca

SEQ ID NO: 2161692 - DNA, 25 bp, Homo sapien
gattgggagtgcatcccctcaggag

SEQ ID NO: 2161693 - DNA, 25 bp, Homo sapien
caggaagacttggaacaatctggag

SEQ ID NO: 2161694 - DNA, 25 bp, Homo sapien
gagcactctcaggagaactctgtaa

SEQ ID NO: 2161695 - DNA, 25 bp, Homo sapien
tatattcatctactgggctgctgga

SEQ ID NO: 2161696 - DNA, 25 bp, Homo sapien
ctagcaaggtgtctgaggaacttgt

SEQ ID NO: 2161697 - DNA, 25 bp, Homo sapien
gactcttcactgaatgggctcaatg

SEQ ID NO: 2161698 - DNA, 25 bp, Homo sapien
tgaggactctcatgggaactttgga

SEQ ID NO: 2161699 - DNA, 25 bp, Homo sapien
tagcccgtgtacctgctgatgacat

SEQ ID NO: 2161700 - DNA, 25 bp, Homo sapien
tctgtggcagtcgaatcatctgtgg

SEQ ID NO: 2161701 - DNA, 25 bp, Homo sapien
aaagacataggagtcatcagggtcc

SEQ ID NO: 2161702 - DNA, 25 bp, Homo sapien
caagggctcgctctctatcaaggac

SEQ ID NO: 2161703 - DNA, 25 bp, Homo sapien
ggggacatgacactggagcttgcac

SEQ ID NO: 2161704 - DNA, 25 bp, Homo sapien
ctgggggacatgacactggagcttg

SEQ ID NO: 2161705 - DNA, 25 bp, Homo sapien
gagaagctgggggacatgacactgg

SEQ ID NO: 2161706 - DNA, 25 bp, Homo sapien
aagctgggggacatgacactggagc

SEQ ID NO: 2161707 - DNA, 25 bp, Homo sapien
tcttacgtaagccaagcaaaccagg

SEQ ID NO: 2161708 - DNA, 25 bp, Homo sapien
ttcaagaacaacagactaaaggacc

SEQ ID NO: 2161709 - DNA, 25 bp, Homo sapien
ctaaaggacctgaggaaatgcaaac

SEQ ID NO: 2161710 - DNA, 25 bp, Homo sapien
tgcgactcatgtgcataaactagga

SEQ ID NO: 2161711 - DNA, 25 bp, Homo sapien
catgattgtagaattgtggggcacc

SEQ ID NO: 2161712 - DNA, 25 bp, Homo sapien
ggggacggcattcccagatttcaag

SEQ ID NO: 2161713 - DNA, 25 bp, Homo sapien
tcaaggaataagaaacgtttgtgca

SEQ ID NO: 2161714 - DNA, 25 bp, Homo sapien
gccactgacagtgaaggtgtatcat

SEQ ID NO: 2161715 - DNA, 25 bp, Homo sapien
gaacagatgttgttgagggcctcct

SEQ ID NO: 2161716 - DNA, 25 bp, Homo sapien
tagaacagatgttgttgagggcctc

SEQ ID NO: 2161717 - DNA, 25 bp, Homo sapien
aacagatgttgttgagggcctcctc

SEQ ID NO: 2161718 - DNA, 25 bp, Homo sapien
cagatgttgttgagggcctcctcaa

SEQ ID NO: 2161719 - DNA, 25 bp, Homo sapien
gcctcagcagatctaattccattca

SEQ ID NO: 2161720 - DNA, 25 bp, Homo sapien
atttgaatgcaatttccaaatcact

SEQ ID NO: 2161721 - DNA, 25 bp, Homo sapien
tgctattggcagcttcccacagagc

SEQ ID NO: 2161722 - DNA, 25 bp, Homo sapien
cccacagagcctcagcagatctaat

SEQ ID NO: 2161723 - DNA, 25 bp, Homo sapien
caagcatgtaagttattttgtgcct

SEQ ID NO: 2161724 - DNA, 25 bp, Homo sapien
tcaagcatgtaagttattttgtgcc

SEQ ID NO: 2161725 - DNA, 25 bp, Homo sapien
tggataactggcaaaaccaagattg

SEQ ID NO: 2161726 - DNA, 25 bp, Homo sapien
tcagatgttggataactggcaaaac

SEQ ID NO: 2161727 - DNA, 25 bp, Homo sapien
ataactggcaaaaccaagattgaaa

SEQ ID NO: 2161728 - DNA, 25 bp, Homo sapien
ctcagatgttggataactggcaaaa

SEQ ID NO: 2161729 - DNA, 25 bp, Homo sapien
ggtgatgctaaatattagtactgag

SEQ ID NO: 2161730 - DNA, 25 bp, Homo sapien
gatgctaaatattagtactgagtaa

SEQ ID NO: 2161731 - DNA, 25 bp, Homo sapien
aagaaggtgatgctaaatattagta

SEQ ID NO: 2161732 - DNA, 25 bp, Homo sapien
gaaggtgatgctaaatattagtact

SEQ ID NO: 2161733 - DNA, 25 bp, Homo sapien
taagccaagtgttgctactgttagg

SEQ ID NO: 2161734 - DNA, 25 bp, Homo sapien
ttctttatgtcttgtagatcagcat

SEQ ID NO: 2161735 - DNA, 25 bp, Homo sapien
tttttaagccaagtgttgctactgt

SEQ ID NO: 2161736 - DNA, 25 bp, Homo sapien
catgtgtaatgtgcatttgatactt

SEQ ID NO: 2161737 - DNA, 25 bp, Homo sapien
cttcccgtgcataaggttgaccaga

SEQ ID NO: 2161738 - DNA, 25 bp, Homo sapien
ttgaccagatggctctccccttgcc

SEQ ID NO: 2161739 - DNA, 25 bp, Homo sapien
ggttgaccagatggctctccccttg

SEQ ID NO: 2161740 - DNA, 25 bp, Homo sapien
gaccagatggctctccccttgccat

SEQ ID NO: 2161741 - DNA, 25 bp, Homo sapien
tctttcccatgccaaaggttgacaa

SEQ ID NO: 2161742 - DNA, 25 bp, Homo sapien
ttcccatgccaaaggttgacaagtt

SEQ ID NO: 2161743 - DNA, 25 bp, Homo sapien
catgtctgagatctaccagatgtct

SEQ ID NO: 2161744 - DNA, 25 bp, Homo sapien
ggctctctgcatgccatgtctgaga

SEQ ID NO: 2161745 - DNA, 25 bp, Homo sapien
cagaattctcctcaatactgtgcac

SEQ ID NO: 2161746 - DNA, 25 bp, Homo sapien
taaaggaacgcatgataggaataac

SEQ ID NO: 2161747 - DNA, 25 bp, Homo sapien
tactgtgcacttggcaactactatc

SEQ ID NO: 2161748 - DNA, 25 bp, Homo sapien
tagaaactagcccaactgatgacaa

SEQ ID NO: 2161749 - DNA, 25 bp, Homo sapien
agagaatctgcggccaaatgatttt

SEQ ID NO: 2161750 - DNA, 25 bp, Homo sapien
gaagagaatctgcggccaaatgatt

SEQ ID NO: 2161751 - DNA, 25 bp, Homo sapien
agaagagaatctgcggccaaatgat

SEQ ID NO: 2161752 - DNA, 25 bp, Homo sapien
cagaagagaatctgcggccaaatga

SEQ ID NO: 2161753 - DNA, 25 bp, Homo sapien
acagctagatccctgtcgacaggca

SEQ ID NO: 2161754 - DNA, 25 bp, Homo sapien
gaactccagaatgcagcgcttcgct

SEQ ID NO: 2161755 - DNA, 25 bp, Homo sapien
tcagactctagctcatttgacccac

SEQ ID NO: 2161756 - DNA, 25 bp, Homo sapien
aaagaacacagactcgggaactcca

SEQ ID NO: 2161757 - DNA, 25 bp, Homo sapien
tctttcagtttgcaactgaagagaa

SEQ ID NO: 2161758 - DNA, 25 bp, Homo sapien
gtctttcagtttgcaactgaagaga

SEQ ID NO: 2161759 - DNA, 25 bp, Homo sapien
tgtctttcagtttgcaactgaagag

SEQ ID NO: 2161760 - DNA, 25 bp, Homo sapien
ctttcagtttgcaactgaagagaat

SEQ ID NO: 2161761 - DNA, 25 bp, Homo sapien
tgtcagtggcagcatgttcagtgaa

SEQ ID NO: 2161762 - DNA, 25 bp, Homo sapien
ctgtcagtggcagcatgttcagtga

SEQ ID NO: 2161763 - DNA, 25 bp, Homo sapien
gtcagtggcagcatgttcagtgaag

SEQ ID NO: 2161764 - DNA, 25 bp, Homo sapien
ctattgtcactcctggggtctcagg

SEQ ID NO: 2161765 - DNA, 25 bp, Homo sapien
agctgtgccctgaggtgtgttccca

SEQ ID NO: 2161766 - DNA, 25 bp, Homo sapien
gccagctgtgccctgaggtgtgttc

SEQ ID NO: 2161767 - DNA, 25 bp, Homo sapien
ggtgtgttcccacatcctcctacag

SEQ ID NO: 2161768 - DNA, 25 bp, Homo sapien
gcactgttcactacagtacatatac

SEQ ID NO: 2161769 - DNA, 25 bp, Homo sapien
gaggtacagtcatttgcagcacatg

SEQ ID NO: 2161770 - DNA, 25 bp, Homo sapien
cacaagggagtaatatttggccata

SEQ ID NO: 2161771 - DNA, 25 bp, Homo sapien
agcacatgaacaaaactataggtca

SEQ ID NO: 2161772 - DNA, 25 bp, Homo sapien
tagacccttattcttcattctacgt

SEQ ID NO: 2161773 - DNA, 25 bp, Homo sapien
tcctttagacccttattcttcattc

SEQ ID NO: 2161774 - DNA, 25 bp, Homo sapien
gcacatcaaagttaactgttcttgc

SEQ ID NO: 2161775 - DNA, 25 bp, Homo sapien
taccagattgcaccaatacctgcac

SEQ ID NO: 2161776 - DNA, 25 bp, Homo sapien
tgacaaagcctgactttaagatctc

SEQ ID NO: 2161777 - DNA, 25 bp, Homo sapien
gactttaagatctctgtaattgaca

SEQ ID NO: 2161778 - DNA, 25 bp, Homo sapien
tgacaacttcaagatactgctccag

SEQ ID NO: 2161779 - DNA, 25 bp, Homo sapien
tatcttcatatataacgctgttttc

SEQ ID NO: 2161780 - DNA, 25 bp, Homo sapien
atagatgtgaaccctgaggcttaaa

SEQ ID NO: 2161781 - DNA, 25 bp, Homo sapien
gaggcttaaacggactgaaaagcta

SEQ ID NO: 2161782 - DNA, 25 bp, Homo sapien
atatcttttccgtgcattcttttac

SEQ ID NO: 2161783 - DNA, 25 bp, Homo sapien
gcaccatgccacttacaaatatctt

SEQ ID NO: 2161784 - DNA, 25 bp, Homo sapien
ctctacagtacccagtattaccagg

SEQ ID NO: 2161785 - DNA, 25 bp, Homo sapien
actctacagtacccagtattaccag

SEQ ID NO: 2161786 - DNA, 25 bp, Homo sapien
catcctctaatactccattgctcaa

SEQ ID NO: 2161787 - DNA, 25 bp, Homo sapien
ggacatcctctaatactccattgct

SEQ ID NO: 2161788 - DNA, 25 bp, Homo sapien
ctggacatcctctaatactccattg

SEQ ID NO: 2161789 - DNA, 25 bp, Homo sapien
cctctaatactccattgctcaattt

SEQ ID NO: 2161790 - DNA, 25 bp, Homo sapien
tttctgatcgagcctcagttatctg

SEQ ID NO: 2161791 - DNA, 25 bp, Homo sapien
tctgatcgagcctcagttatctgcc

SEQ ID NO: 2161792 - DNA, 25 bp, Homo sapien
cccttgttttctgatcgagcctcag

SEQ ID NO: 2161793 - DNA, 25 bp, Homo sapien
tcccttgttttctgatcgagcctca

SEQ ID NO: 2161794 - DNA, 25 bp, Homo sapien
tttattgccacttcagaacatctgg

SEQ ID NO: 2161795 - DNA, 25 bp, Homo sapien
tcagaacatctggtccaattaaagg

SEQ ID NO: 2161796 - DNA, 25 bp, Homo sapien
caattaaaggataactgtgttgcct

SEQ ID NO: 2161797 - DNA, 25 bp, Homo sapien
taaatcactctgtttagttggaact

SEQ ID NO: 2161798 - DNA, 25 bp, Homo sapien
taccgattgccatgcagtagaggca

SEQ ID NO: 2161799 - DNA, 25 bp, Homo sapien
cagctcagtgaattggactagttcc

SEQ ID NO: 2161800 - DNA, 25 bp, Homo sapien
gatgctgccatgcttgagaaccagg

SEQ ID NO: 2161801 - DNA, 25 bp, Homo sapien
catgtgagtaggaaaggttggcact

SEQ ID NO: 2161802 - DNA, 25 bp, Homo sapien
tatttatgtcaatggcaactatatt

SEQ ID NO: 2161803 - DNA, 25 bp, Homo sapien
tgtaacatctccaatactttctaca

SEQ ID NO: 2161804 - DNA, 25 bp, Homo sapien
gtaacatctccaatactttctacaa

SEQ ID NO: 2161805 - DNA, 25 bp, Homo sapien
tatgtcaatggcaactatatttaac

SEQ ID NO: 2161806 - DNA, 25 bp, Homo sapien
gagacgcttctggttctgcgcacat

SEQ ID NO: 2161807 - DNA, 25 bp, Homo sapien
ccagaatcagagacgcttctggttc

SEQ ID NO: 2161808 - DNA, 25 bp, Homo sapien
tcagagacgcttctggttctgcgca

SEQ ID NO: 2161809 - DNA, 25 bp, Homo sapien
tctggttctgcgcacatctgctttc

SEQ ID NO: 2161810 - DNA, 25 bp, Homo sapien
gaggtagatatgattccacgataca

SEQ ID NO: 2161811 - DNA, 25 bp, Homo sapien
taggtcatcatattttcccctgaac

SEQ ID NO: 2161812 - DNA, 25 bp, Homo sapien
cagcaatgccattctaactgccttc

SEQ ID NO: 2161813 - DNA, 25 bp, Homo sapien
taactgccttctcaattttcacact

SEQ ID NO: 2161814 - DNA, 25 bp, Homo sapien
tgaggcataagcatttgaaccttac

SEQ ID NO: 2161815 - DNA, 25 bp, Homo sapien
aaaccacaatgaatagtttgaggca

SEQ ID NO: 2161816 - DNA, 25 bp, Homo sapien
ctgaaactgccttcgtatcctttgc

SEQ ID NO: 2161817 - DNA, 25 bp, Homo sapien
tatcctttgccttctattacttccc

SEQ ID NO: 2161818 - DNA, 25 bp, Homo sapien
cctatagatttcaattttgccagaa

SEQ ID NO: 2161819 - DNA, 25 bp, Homo sapien
cgagaaacttcatttaacatacttt

SEQ ID NO: 2161820 - DNA, 25 bp, Homo sapien
tcaattttgccagaattcgagaaac

SEQ ID NO: 2161821 - DNA, 25 bp, Homo sapien
gtgattcaccgcctatagatttcaa

SEQ ID NO: 2161822 - DNA, 25 bp, Homo sapien
ttaattctcagagtcaactggtggc

SEQ ID NO: 2161823 - DNA, 25 bp, Homo sapien
aattctcagagtcaactggtggctc

SEQ ID NO: 2161824 - DNA, 25 bp, Homo sapien
gagtcaactggtggctctgacacac

SEQ ID NO: 2161825 - DNA, 25 bp, Homo sapien
tctcagagtcaactggtggctctga

SEQ ID NO: 2161826 - DNA, 25 bp, Homo sapien
ttacaattccgggaatccatagagg

SEQ ID NO: 2161827 - DNA, 25 bp, Homo sapien
tagcgtagacggacacttaacatat

SEQ ID NO: 2161828 - DNA, 25 bp, Homo sapien
tagagggcttcatagcgtagacgga

SEQ ID NO: 2161829 - DNA, 25 bp, Homo sapien
caattccgggaatccatagagggct

SEQ ID NO: 2161830 - DNA, 25 bp, Homo sapien
cccagcgtagcaagggagcatcaca

SEQ ID NO: 2161831 - DNA, 25 bp, Homo sapien
tgatctcatagctgactgggagccg

SEQ ID NO: 2161832 - DNA, 25 bp, Homo sapien
aagaggctggcaacacaatacactg

SEQ ID NO: 2161833 - DNA, 25 bp, Homo sapien
catatggctcgcctgggaaaagatc

SEQ ID NO: 2161834 - DNA, 25 bp, Homo sapien
taggacatctacaactttcaaggta

SEQ ID NO: 2161835 - DNA, 25 bp, Homo sapien
acttcacgcatgtttgtgcaagctg

SEQ ID NO: 2161836 - DNA, 25 bp, Homo sapien
ctggtgttgatgctaggacatctac

SEQ ID NO: 2161837 - DNA, 25 bp, Homo sapien
agcacacagctgtcaataagaactt

SEQ ID NO: 2161838 - DNA, 25 bp, Homo sapien
gcagttttccccatattaacacctg

SEQ ID NO: 2161839 - DNA, 25 bp, Homo sapien
ctgctgtcacctgcagagcgttcat

SEQ ID NO: 2161840 - DNA, 25 bp, Homo sapien
agcagttttccccatattaacacct

SEQ ID NO: 2161841 - DNA, 25 bp, Homo sapien
tgtttcagggagtaccccaagccca

SEQ ID NO: 2161842 - DNA, 25 bp, Homo sapien
ggatgtaggtattgcaatctaagca

SEQ ID NO: 2161843 - DNA, 25 bp, Homo sapien
caatatgggcttgctagtacccttc

SEQ ID NO: 2161844 - DNA, 25 bp, Homo sapien
tcttgggcaagatcggaaaacattc

SEQ ID NO: 2161845 - DNA, 25 bp, Homo sapien
ctatctaacaccaacatgtacacca

SEQ ID NO: 2161846 - DNA, 25 bp, Homo sapien
tacatgcagaatactatctaacacc

SEQ ID NO: 2161847 - DNA, 25 bp, Homo sapien
cacatgtgctggaagttgttctgag

SEQ ID NO: 2161848 - DNA, 25 bp, Homo sapien
tctgagtgtttacatgcagaatact

SEQ ID NO: 2161849 - DNA, 25 bp, Homo sapien
tgcctccgctcctcatttctccatg

SEQ ID NO: 2161850 - DNA, 25 bp, Homo sapien
aactgatctgcctccgctcctcatt

SEQ ID NO: 2161851 - DNA, 25 bp, Homo sapien
tctgacaactccctgggtttgtggg

SEQ ID NO: 2161852 - DNA, 25 bp, Homo sapien
ctctgacaactccctgggtttgtgg

SEQ ID NO: 2161853 - DNA, 25 bp, Homo sapien
cagctgtattgaagctttccagtgg

SEQ ID NO: 2161854 - DNA, 25 bp, Homo sapien
tttccacagctgtattgaagctttc

SEQ ID NO: 2161855 - DNA, 25 bp, Homo sapien
gtcccagagcttttgcccaccctgt

SEQ ID NO: 2161856 - DNA, 25 bp, Homo sapien
tttgcccaccctgtatatataccct

SEQ ID NO: 2161857 - DNA, 25 bp, Homo sapien
ttttattctcgttggtgctggaagt

SEQ ID NO: 2161858 - DNA, 25 bp, Homo sapien
cattttattctcgttggtgctggaa

SEQ ID NO: 2161859 - DNA, 25 bp, Homo sapien
ttcattttattctcgttggtgctgg

SEQ ID NO: 2161860 - DNA, 25 bp, Homo sapien
tcattttattctcgttggtgctgga

SEQ ID NO: 2161861 - DNA, 25 bp, Homo sapien
cctgcagtaaaacactaatgttgga

SEQ ID NO: 2161862 - DNA, 25 bp, Homo sapien
ggagatcctgcagatatgtctaggt

SEQ ID NO: 2161863 - DNA, 25 bp, Homo sapien
tctctttgattggatcagtggagct

SEQ ID NO: 2161864 - DNA, 25 bp, Homo sapien
gatcagtggagctctctgtaggctg

SEQ ID NO: 2161865 - DNA, 25 bp, Homo sapien
tatgtgctcttctaaacatgcacgt

SEQ ID NO: 2161866 - DNA, 25 bp, Homo sapien
cttctaaacatgcacgtgctccaag

SEQ ID NO: 2161867 - DNA, 25 bp, Homo sapien
caatacagatcttcttatgtgctct

SEQ ID NO: 2161868 - DNA, 25 bp, Homo sapien
acagatcttcttatgtgctcttcta

SEQ ID NO: 2161869 - DNA, 25 bp, Homo sapien
gcattgggtgagttacaaaacacac

SEQ ID NO: 2161870 - DNA, 25 bp, Homo sapien
agcattgggtgagttacaaaacaca

SEQ ID NO: 2161871 - DNA, 25 bp, Homo sapien
ttagcatgaagcatattagaaacat

SEQ ID NO: 2161872 - DNA, 25 bp, Homo sapien
taaagatggcttagtgttcatagcc

SEQ ID NO: 2161873 - DNA, 25 bp, Homo sapien
tcttagcatgaagcatattagaaac

SEQ ID NO: 2161874 - DNA, 25 bp, Homo sapien
tggtaaagatggcttagtgttcata

SEQ ID NO: 2161875 - DNA, 25 bp, Homo sapien
ttctctaggactgctggctcaaagt

SEQ ID NO: 2161876 - DNA, 25 bp, Homo sapien
tagagcttctctaggactgctggct

SEQ ID NO: 2161877 - DNA, 25 bp, Homo sapien
ctgtgccctcttcattgtgactgta

SEQ ID NO: 2161878 - DNA, 25 bp, Homo sapien
ttgtgactgtagagcttctctagga

SEQ ID NO: 2161879 - DNA, 25 bp, Homo sapien
ttcagaagcttcacataagtagccc

SEQ ID NO: 2161880 - DNA, 25 bp, Homo sapien
taagtagcccataattgatcatggg

SEQ ID NO: 2161881 - DNA, 25 bp, Homo sapien
tcagcagagccagttgtaaacgtct

SEQ ID NO: 2161882 - DNA, 25 bp, Homo sapien
tgtaaacgtctcttccgagctgcac

SEQ ID NO: 2161883 - DNA, 25 bp, Homo sapien
ttgttacaatgggagtgagtagccc

SEQ ID NO: 2161884 - DNA, 25 bp, Homo sapien
caaggtgccgtgtactctaagaagc

SEQ ID NO: 2161885 - DNA, 25 bp, Homo sapien
ttggaagctggcaatcacaaggtgc

SEQ ID NO: 2161886 - DNA, 25 bp, Homo sapien
taaatacacgaaggcggaggatcat

SEQ ID NO: 2161887 - DNA, 25 bp, Homo sapien
tgttctactacagatggaccttgag

SEQ ID NO: 2161888 - DNA, 25 bp, Homo sapien
cctttctgaatgagtctgtggcttc

SEQ ID NO: 2161889 - DNA, 25 bp, Homo sapien
tacacccttgacctaagagctatcc

SEQ ID NO: 2161890 - DNA, 25 bp, Homo sapien
gacacacatcaagcagcgagggagg

SEQ ID NO: 2161891 - DNA, 25 bp, Homo sapien
tcttccacacttctggtccgccctt

SEQ ID NO: 2161892 - DNA, 25 bp, Homo sapien
ggcttctgccaattcatgtttcctg

SEQ ID NO: 2161893 - DNA, 25 bp, Homo sapien
atctatgatgcccaactttctttcc

SEQ ID NO: 2161894 - DNA, 25 bp, Homo sapien
aaactttctcagactaccatctatg

SEQ ID NO: 2161895 - DNA, 25 bp, Homo sapien
tgtgttcagcaataactgctgacat

SEQ ID NO: 2161896 - DNA, 25 bp, Homo sapien
ctgaaacactgctggcgcaaaaaaa

SEQ ID NO: 2161897 - DNA, 25 bp, Homo sapien
aggtggagagggtcatgatcagagg

SEQ ID NO: 2161898 - DNA, 25 bp, Homo sapien
ggtggagagggtcatgatcagaggt

SEQ ID NO: 2161899 - DNA, 25 bp, Homo sapien
gatgtccatgttaaacacagtaact

SEQ ID NO: 2161900 - DNA, 25 bp, Homo sapien
tccatgttaaacacagtaacttgca

SEQ ID NO: 2161901 - DNA, 25 bp, Homo sapien
tccaagactacttttgatgtccatg

SEQ ID NO: 2161902 - DNA, 25 bp, Homo sapien
cagggattccatgtattgattattc

SEQ ID NO: 2161903 - DNA, 25 bp, Homo sapien
ctgcatgctgttttccttcactatt

SEQ ID NO: 2161904 - DNA, 25 bp, Homo sapien
tgttttccttcactatttttgtcag

SEQ ID NO: 2161905 - DNA, 25 bp, Homo sapien
cttcctgcatgctgttttccttcac

SEQ ID NO: 2161906 - DNA, 25 bp, Homo sapien
cactatttttgtcagttttttcttg

SEQ ID NO: 2161907 - DNA, 25 bp, Homo sapien
ttcaataaatactaccttcatatag

SEQ ID NO: 2161908 - DNA, 25 bp, Homo sapien
tcatatagttattacctgcatctgc

SEQ ID NO: 2161909 - DNA, 25 bp, Homo sapien
tagttattacctgcatctgctataa

SEQ ID NO: 2161910 - DNA, 25 bp, Homo sapien
tgcatctgctataacctcacacaac

SEQ ID NO: 2161911 - DNA, 25 bp, Homo sapien
taggcagcccaacactgagtacatt

SEQ ID NO: 2161912 - DNA, 25 bp, Homo sapien
caaaactttgaagatgtgtcactgg

SEQ ID NO: 2161913 - DNA, 25 bp, Homo sapien
cattgctccttctatgtctgttgcc

SEQ ID NO: 2161914 - DNA, 25 bp, Homo sapien
tgaccttagtgaccgtcagcatgac

SEQ ID NO: 2161915 - DNA, 25 bp, Homo sapien
gctctgagaatcttcgcagatctcc

SEQ ID NO: 2161916 - DNA, 25 bp, Homo sapien
tgagaatcttcgcagatctccccat

SEQ ID NO: 2161917 - DNA, 25 bp, Homo sapien
gaatcttcgcagatctccccatcaa

SEQ ID NO: 2161918 - DNA, 25 bp, Homo sapien
tctgagaatcttcgcagatctcccc

SEQ ID NO: 2161919 - DNA, 25 bp, Homo sapien
caaatcttatccattagcttggata

SEQ ID NO: 2161920 - DNA, 25 bp, Homo sapien
tcaaacttgtgtaggtactaccgcc

SEQ ID NO: 2161921 - DNA, 25 bp, Homo sapien
tactaccgcccacttgggtcagtgg

SEQ ID NO: 2161922 - DNA, 25 bp, Homo sapien
ttgagaccacggcatttgattcctt

SEQ ID NO: 2161923 - DNA, 25 bp, Homo sapien
cagtggaaagttgcatgttttgaga

SEQ ID NO: 2161924 - DNA, 25 bp, Homo sapien
ctacttcagcaaagcgcaaattaga

SEQ ID NO: 2161925 - DNA, 25 bp, Homo sapien
ggcctggtcatctcgtactgttgat

SEQ ID NO: 2161926 - DNA, 25 bp, Homo sapien
tagaagcatattgtgtctgatggcc

SEQ ID NO: 2161927 - DNA, 25 bp, Homo sapien
tcagcaaagcgcaaattagaagcat

SEQ ID NO: 2161928 - DNA, 25 bp, Homo sapien
ccttgtgtcaagagggtaaccatac

SEQ ID NO: 2161929 - DNA, 25 bp, Homo sapien
tgtgtcaagagggtaaccatacatc

SEQ ID NO: 2161930 - DNA, 25 bp, Homo sapien
tcttcctattaaggcctatgggatg

SEQ ID NO: 2161931 - DNA, 25 bp, Homo sapien
gagggtaaccatacatcttcctatt

SEQ ID NO: 2161932 - DNA, 25 bp, Homo sapien
tttactggccttacatagaaggacc

SEQ ID NO: 2161933 - DNA, 25 bp, Homo sapien
ctggccttacatagaaggaccttaa

SEQ ID NO: 2161934 - DNA, 25 bp, Homo sapien
aggtcctgctcccttaaaagtagct

SEQ ID NO: 2161935 - DNA, 25 bp, Homo sapien
tcctgctcccttaaaagtagctgta

SEQ ID NO: 2161936 - DNA, 25 bp, Homo sapien
tacttgttgatcatgcattcttctc

SEQ ID NO: 2161937 - DNA, 25 bp, Homo sapien
cgtgcaccattgctacaacttgagc

SEQ ID NO: 2161938 - DNA, 25 bp, Homo sapien
tggccttcccagttgtacttgttga

SEQ ID NO: 2161939 - DNA, 25 bp, Homo sapien
gttcttaagaaaagtccgtgcacca

SEQ ID NO: 2161940 - DNA, 25 bp, Homo sapien
gataacttagaatattggttaccca

SEQ ID NO: 2161941 - DNA, 25 bp, Homo sapien
caagtgtggagataacttagaatat

SEQ ID NO: 2161942 - DNA, 25 bp, Homo sapien
tgtggagataacttagaatattggt

SEQ ID NO: 2161943 - DNA, 25 bp, Homo sapien
tttcaagtgtggagataacttagaa

SEQ ID NO: 2161944 - DNA, 25 bp, Homo sapien
cattgttaaagcatcgttctccaga

SEQ ID NO: 2161945 - DNA, 25 bp, Homo sapien
gagtcatcactcaaggtaaaggtgg

SEQ ID NO: 2161946 - DNA, 25 bp, Homo sapien
tctccagataattggcttttaggcc

SEQ ID NO: 2161947 - DNA, 25 bp, Homo sapien
agaactaacattaacctatacaagg

SEQ ID NO: 2161948 - DNA, 25 bp, Homo sapien
cttgtgcctattgggctcagtttga

SEQ ID NO: 2161949 - DNA, 25 bp, Homo sapien
tttgataggaaatgagcatctgatc

SEQ ID NO: 2161950 - DNA, 25 bp, Homo sapien
ggaaatgagcatctgatcagtcaag

SEQ ID NO: 2161951 - DNA, 25 bp, Homo sapien
aatcttgtgcctattgggctcagtt

SEQ ID NO: 2161952 - DNA, 25 bp, Homo sapien
tcattctacaccttgggaatacagc

SEQ ID NO: 2161953 - DNA, 25 bp, Homo sapien
tatgtgtcagtcttcattctacacc

SEQ ID NO: 2161954 - DNA, 25 bp, Homo sapien
cattctacaccttgggaatacagca

SEQ ID NO: 2161955 - DNA, 25 bp, Homo sapien
cagtcttcattctacaccttgggaa

SEQ ID NO: 2161956 - DNA, 25 bp, Homo sapien
tggtggaaggtgaagagaaagcagg

SEQ ID NO: 2161957 - DNA, 25 bp, Homo sapien
cacaggctgtacaggggacatggct

SEQ ID NO: 2161958 - DNA, 25 bp, Homo sapien
ggctgtacaggggacatggctgggg

SEQ ID NO: 2161959 - DNA, 25 bp, Homo sapien
aaggtgaagagaaagcaggcatggt

SEQ ID NO: 2161960 - DNA, 25 bp, Homo sapien
aggctttgaactaaacctgttatgt

SEQ ID NO: 2161961 - DNA, 25 bp, Homo sapien
atagtaggctttgaactaaacctgt

SEQ ID NO: 2161962 - DNA, 25 bp, Homo sapien
taggctttgaactaaacctgttatg

SEQ ID NO: 2161963 - DNA, 25 bp, Homo sapien
tatagtaggctttgaactaaacctg

SEQ ID NO: 2161964 - DNA, 25 bp, Homo sapien
ctgtacactgggtttgactggctgg

SEQ ID NO: 2161965 - DNA, 25 bp, Homo sapien
catgcgacaatcttgttgctttccc

SEQ ID NO: 2161966 - DNA, 25 bp, Homo sapien
tctgggaatgaatccaccaagggct

SEQ ID NO: 2161967 - DNA, 25 bp, Homo sapien
ggctctcagctcatgcgacaatctt

SEQ ID NO: 2161968 - DNA, 25 bp, Homo sapien
tattcaaggggtaatgtggactcat

SEQ ID NO: 2161969 - DNA, 25 bp, Homo sapien
tttgacctattaagctgcattaact

SEQ ID NO: 2161970 - DNA, 25 bp, Homo sapien
ccttgctttgacctattaagctgca

SEQ ID NO: 2161971 - DNA, 25 bp, Homo sapien
ggtaatgtggactcattcaggcatt

SEQ ID NO: 2161972 - DNA, 25 bp, Homo sapien
tgctttgagttgagctacattttgg

SEQ ID NO: 2161973 - DNA, 25 bp, Homo sapien
aaagaggtcaggtcatatgaaatct

SEQ ID NO: 2161974 - DNA, 25 bp, Homo sapien
ccggatgctttgagttgagctacat

SEQ ID NO: 2161975 - DNA, 25 bp, Homo sapien
agaggtcaggtcatatgaaatcttc

SEQ ID NO: 2161976 - DNA, 25 bp, Homo sapien
tcatctcgtttcaggatttttagct

SEQ ID NO: 2161977 - DNA, 25 bp, Homo sapien
atgctagttgattcattatgcaaaa

SEQ ID NO: 2161978 - DNA, 25 bp, Homo sapien
tttgactgtccgtgagtagctcatc

SEQ ID NO: 2161979 - DNA, 25 bp, Homo sapien
tgcaaaaggtacaagggattagctt

SEQ ID NO: 2161980 - DNA, 25 bp, Homo sapien
ctctgattatgcagttttaagtttt

SEQ ID NO: 2161981 - DNA, 25 bp, Homo sapien
tgaacctctgattatgcagttttaa

SEQ ID NO: 2161982 - DNA, 25 bp, Homo sapien
taaaaagaggaattgaacctctgat

SEQ ID NO: 2161983 - DNA, 25 bp, Homo sapien
aacctctgattatgcagttttaagt

SEQ ID NO: 2161984 - DNA, 25 bp, Homo sapien
tgcaaagggttggagtaggccaaat

SEQ ID NO: 2161985 - DNA, 25 bp, Homo sapien
tatgatgagcacaagggttggagca

SEQ ID NO: 2161986 - DNA, 25 bp, Homo sapien
caaatgggcctacaatgttgggatc

SEQ ID NO: 2161987 - DNA, 25 bp, Homo sapien
gatctttacgaagttgtatgtaacc

SEQ ID NO: 2161988 - DNA, 25 bp, Homo sapien
ataagagggcttaaacctttatgat

SEQ ID NO: 2161989 - DNA, 25 bp, Homo sapien
caggagacatataaaccaacgtttt

SEQ ID NO: 2161990 - DNA, 25 bp, Homo sapien
ggagacatataaaccaacgttttca

SEQ ID NO: 2161991 - DNA, 25 bp, Homo sapien
acaggagacatataaaccaacgttt

SEQ ID NO: 2161992 - DNA, 25 bp, Homo sapien
tacaggagacatataaaccaacgtt

SEQ ID NO: 2161993 - DNA, 25 bp, Homo sapien
ctgtaggaatttcaagacagtggtt

SEQ ID NO: 2161994 - DNA, 25 bp, Homo sapien
gtaggaatttcaagacagtggttgt

SEQ ID NO: 2161995 - DNA, 25 bp, Homo sapien
tgtaggaatttcaagacagtggttg

SEQ ID NO: 2161996 - DNA, 25 bp, Homo sapien
tgcagccacaacgtgtggagagttt

SEQ ID NO: 2161997 - DNA, 25 bp, Homo sapien
aagggaatcgaaaccatgcgtcagc

SEQ ID NO: 2161998 - DNA, 25 bp, Homo sapien
tcgaaaccatgcgtcagcgtgcagc

SEQ ID NO: 2161999 - DNA, 25 bp, Homo sapien
aaccagtggtctgtagaagggaatc

SEQ ID NO: 2162000 - DNA, 25 bp, Homo sapien
cagtggaatatcattgtggtgttcc

SEQ ID NO: 2162001 - DNA, 25 bp, Homo sapien
gtggaatatcattgtggtgttcctt

SEQ ID NO: 2162002 - DNA, 25 bp, Homo sapien
agtggaatatcattgtggtgttcct

SEQ ID NO: 2162003 - DNA, 25 bp, Homo sapien
ggaatatcattgtggtgttcctttg

SEQ ID NO: 2162004 - DNA, 25 bp, Homo sapien
ccacgaattgaagcccagtgttgga

SEQ ID NO: 2162005 - DNA, 25 bp, Homo sapien
aatgggggtgatcctggttgcagct

SEQ ID NO: 2162006 - DNA, 25 bp, Homo sapien
ttgaagcccagtgttggatgtgatg

SEQ ID NO: 2162007 - DNA, 25 bp, Homo sapien
gaattgaagcccagtgttggatgtg

SEQ ID NO: 2162008 - DNA, 25 bp, Homo sapien
aggcactggtactggacttggcaga

SEQ ID NO: 2162009 - DNA, 25 bp, Homo sapien
gcactggtactggacttggcagagg

SEQ ID NO: 2162010 - DNA, 25 bp, Homo sapien
ggaggcactggtactggacttggca

SEQ ID NO: 2162011 - DNA, 25 bp, Homo sapien
cactggtactggacttggcagagga

SEQ ID NO: 2162012 - DNA, 25 bp, Homo sapien
gcatcattttctctcccattactca

SEQ ID NO: 2162013 - DNA, 25 bp, Homo sapien
ctcctgagcatcattttctctccca

SEQ ID NO: 2162014 - DNA, 25 bp, Homo sapien
ctctcctgagcatcattttctctcc

SEQ ID NO: 2162015 - DNA, 25 bp, Homo sapien
cgcctctcctgagcatcattttctc

SEQ ID NO: 2162016 - DNA, 25 bp, Homo sapien
tgacacttcatgttcctggttctcc

SEQ ID NO: 2162017 - DNA, 25 bp, Homo sapien
gacacttcatgttcctggttctcca

SEQ ID NO: 2162018 - DNA, 25 bp, Homo sapien
ctgacacttcatgttcctggttctc

SEQ ID NO: 2162019 - DNA, 25 bp, Homo sapien
tgtgaattgagtaatggatgaagtc

SEQ ID NO: 2162020 - DNA, 25 bp, Homo sapien
tgaattgagtaatggatgaagtcag

SEQ ID NO: 2162021 - DNA, 25 bp, Homo sapien
tgaagtcaggaatgagtctattgca

SEQ ID NO: 2162022 - DNA, 25 bp, Homo sapien
ggaatgagtctattgcatgcgtgca

SEQ ID NO: 2162023 - DNA, 25 bp, Homo sapien
ctccactactggtaaacgactagct

SEQ ID NO: 2162024 - DNA, 25 bp, Homo sapien
ttctccactactggtaaacgactag

SEQ ID NO: 2162025 - DNA, 25 bp, Homo sapien
gttctccactactggtaaacgacta

SEQ ID NO: 2162026 - DNA, 25 bp, Homo sapien
tctccactactggtaaacgactagc

SEQ ID NO: 2162027 - DNA, 25 bp, Homo sapien
ggcctgattatttccgagtcagcat

SEQ ID NO: 2162028 - DNA, 25 bp, Homo sapien
cagcatttgaggctatcaggtctgt

SEQ ID NO: 2162029 - DNA, 25 bp, Homo sapien
gcttctaacagcctgataattttga

SEQ ID NO: 2162030 - DNA, 25 bp, Homo sapien
ttttgggatggcctgattatttccg

SEQ ID NO: 2162031 - DNA, 25 bp, Homo sapien
gcttcacccttatcaaacgctcctc

SEQ ID NO: 2162032 - DNA, 25 bp, Homo sapien
gctcctctataaaacaccccaagaa

SEQ ID NO: 2162033 - DNA, 25 bp, Homo sapien
cctctataaaacaccccaagaatca

SEQ ID NO: 2162034 - DNA, 25 bp, Homo sapien
tatcaaacgctcctctataaaacac

SEQ ID NO: 2162035 - DNA, 25 bp, Homo sapien
tcaatccttgactggcgagtttaaa

SEQ ID NO: 2162036 - DNA, 25 bp, Homo sapien
gatatgcttaaccaaccatgatgga

SEQ ID NO: 2162037 - DNA, 25 bp, Homo sapien
gagagccgttgggactcatccagtg

SEQ ID NO: 2162038 - DNA, 25 bp, Homo sapien
aactggactcggcagcttcacgtgg

SEQ ID NO: 2162039 - DNA, 25 bp, Homo sapien
gagaaggctcttggtacccagctgg

SEQ ID NO: 2162040 - DNA, 25 bp, Homo sapien
caagggtctttcagggcaccgagag

SEQ ID NO: 2162041 - DNA, 25 bp, Homo sapien
taggtttgttcagtcctggctggtc

SEQ ID NO: 2162042 - DNA, 25 bp, Homo sapien
caccggagtgtgaggctttattcgc

SEQ ID NO: 2162043 - DNA, 25 bp, Homo sapien
tcggagattgctagcgctcggcaag

SEQ ID NO: 2162044 - DNA, 25 bp, Homo sapien
caagttgtacaggtctcgggtggct

SEQ ID NO: 2162045 - DNA, 25 bp, Homo sapien
tcgcagccactttccgcagacgtgg

SEQ ID NO: 2162046 - DNA, 25 bp, Homo sapien
tttatttttgcaccccactcgcagc

SEQ ID NO: 2162047 - DNA, 25 bp, Homo sapien
gcaccagacgctgggctctagaggt

SEQ ID NO: 2162048 - DNA, 25 bp, Homo sapien
aacagcagcgcaggtcacggcgccg

SEQ ID NO: 2162049 - DNA, 25 bp, Homo sapien
tttcagcgggggctgcacaagctgc

SEQ ID NO: 2162050 - DNA, 25 bp, Homo sapien
ccgctcagctcagtagcgcgtgtgc

SEQ ID NO: 2162051 - DNA, 25 bp, Homo sapien
accaacccacgagcagtggaaatag

SEQ ID NO: 2162052 - DNA, 25 bp, Homo sapien
aaatgcgatcaagaggtttagaaag

SEQ ID NO: 2162053 - DNA, 25 bp, Homo sapien
gtggcttatgcaaccaacccacgag

SEQ ID NO: 2162054 - DNA, 25 bp, Homo sapien
aattttttgtggcttatgcaaccaa

SEQ ID NO: 2162055 - DNA, 25 bp, Homo sapien
tgaagtctgtgctacatctgccggc

SEQ ID NO: 2162056 - DNA, 25 bp, Homo sapien
ctgccggcagcaagatgcaaaggct

SEQ ID NO: 2162057 - DNA, 25 bp, Homo sapien
gtgaagtctgtgctacatctgccgg

SEQ ID NO: 2162058 - DNA, 25 bp, Homo sapien
ggctgactaagccttattattctgt

SEQ ID NO: 2162059 - DNA, 25 bp, Homo sapien
ttgaagacagatcacaccagcttct

SEQ ID NO: 2162060 - DNA, 25 bp, Homo sapien
gacagccaatgttgtattgaagaca

SEQ ID NO: 2162061 - DNA, 25 bp, Homo sapien
gccaattgtattcgtatcttcctga

SEQ ID NO: 2162062 - DNA, 25 bp, Homo sapien
tcttcctgattctttacagagtgac

SEQ ID NO: 2162063 - DNA, 25 bp, Homo sapien
cactgtattctgagtatcctggttc

SEQ ID NO: 2162064 - DNA, 25 bp, Homo sapien
gagtcactgtattctgagtatcctg

SEQ ID NO: 2162065 - DNA, 25 bp, Homo sapien
ttgtttgagtcactgtattctgagt

SEQ ID NO: 2162066 - DNA, 25 bp, Homo sapien
tctgagtatcctggttcagtatggt

SEQ ID NO: 2162067 - DNA, 25 bp, Homo sapien
tttgaacgcaaacttaaatgtattc

SEQ ID NO: 2162068 - DNA, 25 bp, Homo sapien
ctatgaagtagcttcttgtattgag

SEQ ID NO: 2162069 - DNA, 25 bp, Homo sapien
cttctatgaagtagcttcttgtatt

SEQ ID NO: 2162070 - DNA, 25 bp, Homo sapien
agtgaagagtttgaacgcaaactta

SEQ ID NO: 2162071 - DNA, 25 bp, Homo sapien
gaatctagtctttcttcacattgca

SEQ ID NO: 2162072 - DNA, 25 bp, Homo sapien
aatctagtctttcttcacattgcat

SEQ ID NO: 2162073 - DNA, 25 bp, Homo sapien
ctctgaatctagtctttcttcacat

SEQ ID NO: 2162074 - DNA, 25 bp, Homo sapien
ctgaatctagtctttcttcacattg

SEQ ID NO: 2162075 - DNA, 25 bp, Homo sapien
tgagaacaaatctttcgggtcttag

SEQ ID NO: 2162076 - DNA, 25 bp, Homo sapien
aaccaaataattatgtggcggcagc

SEQ ID NO: 2162077 - DNA, 25 bp, Homo sapien
ctagatgtctgctaatgtagatact

SEQ ID NO: 2162078 - DNA, 25 bp, Homo sapien
ttagtaaaatccaccaagtctgaga

SEQ ID NO: 2162079 - DNA, 25 bp, Homo sapien
gaagtactctgtgctcatgtgcctt

SEQ ID NO: 2162080 - DNA, 25 bp, Homo sapien
ttctattcctagaagtactctgtgc

SEQ ID NO: 2162081 - DNA, 25 bp, Homo sapien
tcctagaagtactctgtgctcatgt

SEQ ID NO: 2162082 - DNA, 25 bp, Homo sapien
tattcctagaagtactctgtgctca

SEQ ID NO: 2162083 - DNA, 25 bp, Homo sapien
aatggcagtgagaaagaaggttagg

SEQ ID NO: 2162084 - DNA, 25 bp, Homo sapien
tgaatggcagtgagaaagaaggtta

SEQ ID NO: 2162085 - DNA, 25 bp, Homo sapien
ctgaatggcagtgagaaagaaggtt

SEQ ID NO: 2162086 - DNA, 25 bp, Homo sapien
agaaaaagtcatagtagcaaatcct

SEQ ID NO: 2162087 - DNA, 25 bp, Homo sapien
ttggttgttgttatattcagttccc

SEQ ID NO: 2162088 - DNA, 25 bp, Homo sapien
caaagattataataactttccaact

SEQ ID NO: 2162089 - DNA, 25 bp, Homo sapien
tttccttggttgttgttatattcag

SEQ ID NO: 2162090 - DNA, 25 bp, Homo sapien
taactttccaactatcaacaatttc

SEQ ID NO: 2162091 - DNA, 25 bp, Homo sapien
agatctgcagctttgctaactggag

SEQ ID NO: 2162092 - DNA, 25 bp, Homo sapien
gcaaagggtgggaaactcataccca

SEQ ID NO: 2162093 - DNA, 25 bp, Homo sapien
tcatacccattggtaaacagggaag

SEQ ID NO: 2162094 - DNA, 25 bp, Homo sapien
taatctgggctgacttgattgacag

SEQ ID NO: 2162095 - DNA, 25 bp, Homo sapien
tcttcaaaggtgtttttgtggtcat

SEQ ID NO: 2162096 - DNA, 25 bp, Homo sapien
atagtcttcaaaggtgtttttgtgg

SEQ ID NO: 2162097 - DNA, 25 bp, Homo sapien
cttcctacagtagtcgatatatgaa

SEQ ID NO: 2162098 - DNA, 25 bp, Homo sapien
cagtagtcgatatatgaaaagttta

SEQ ID NO: 2162099 - DNA, 25 bp, Homo sapien
tatagggctctcagttggcctaatt

SEQ ID NO: 2162100 - DNA, 25 bp, Homo sapien
cacttagatgccattatagggctct

SEQ ID NO: 2162101 - DNA, 25 bp, Homo sapien
tcactgaaacacttagatgccatta

SEQ ID NO: 2162102 - DNA, 25 bp, Homo sapien
gatgccattatagggctctcagttg

SEQ ID NO: 2162103 - DNA, 25 bp, Homo sapien
tgtcaagcagaacctggaatactag

SEQ ID NO: 2162104 - DNA, 25 bp, Homo sapien
ccctggaactttaatgtcaagcaga

SEQ ID NO: 2162105 - DNA, 25 bp, Homo sapien
gctgccataatgtcccctggaactt

SEQ ID NO: 2162106 - DNA, 25 bp, Homo sapien
gaacctggaatactaggttgtccat

SEQ ID NO: 2162107 - DNA, 25 bp, Homo sapien
gaattttgtcgccctgaacttcctc

SEQ ID NO: 2162108 - DNA, 25 bp, Homo sapien
cacatgaaaataacgggcgttgctt

SEQ ID NO: 2162109 - DNA, 25 bp, Homo sapien
aaaataacgggcgttgctttcatct

SEQ ID NO: 2162110 - DNA, 25 bp, Homo sapien
aataacgggcgttgctttcatctgg

SEQ ID NO: 2162111 - DNA, 25 bp, Homo sapien
acgggcgttgctttcatctggttct

SEQ ID NO: 2162112 - DNA, 25 bp, Homo sapien
ctgcaagtaatagttcacgtttaaa

SEQ ID NO: 2162113 - DNA, 25 bp, Homo sapien
cttctgcaagtaatagttcacgttt

SEQ ID NO: 2162114 - DNA, 25 bp, Homo sapien
tctgcaagtaatagttcacgtttaa

SEQ ID NO: 2162115 - DNA, 25 bp, Homo sapien
ttctgcaagtaatagttcacgttta

SEQ ID NO: 2162116 - DNA, 25 bp, Homo sapien
gatgcacacttaatgattggatcaa

SEQ ID NO: 2162117 - DNA, 25 bp, Homo sapien
catgctctagctgtttcaatggctt

SEQ ID NO: 2162118 - DNA, 25 bp, Homo sapien
taaacgtttcacaacaatccggatg

SEQ ID NO: 2162119 - DNA, 25 bp, Homo sapien
ggatgatacgtctagcctctgctca

SEQ ID NO: 2162120 - DNA, 25 bp, Homo sapien
ttattattcttgcgttctatcttca

SEQ ID NO: 2162121 - DNA, 25 bp, Homo sapien
agattattattcttgcgttctatct

SEQ ID NO: 2162122 - DNA, 25 bp, Homo sapien
tattattcttgcgttctatcttcat

SEQ ID NO: 2162123 - DNA, 25 bp, Homo sapien
gattattattcttgcgttctatctt

SEQ ID NO: 2162124 - DNA, 25 bp, Homo sapien
ccacatctgcataaatgccaacaat

SEQ ID NO: 2162125 - DNA, 25 bp, Homo sapien
ttcccacatctgcataaatgccaac

SEQ ID NO: 2162126 - DNA, 25 bp, Homo sapien
cccacatctgcataaatgccaacaa

SEQ ID NO: 2162127 - DNA, 25 bp, Homo sapien
tcccacatctgcataaatgccaaca

SEQ ID NO: 2162128 - DNA, 25 bp, Homo sapien
tgtaaggaatgcaagaaaggatgag

SEQ ID NO: 2162129 - DNA, 25 bp, Homo sapien
gagcttgtttcagtaaccattgttg

SEQ ID NO: 2162130 - DNA, 25 bp, Homo sapien
gatggccatattgtattgcatccaa

SEQ ID NO: 2162131 - DNA, 25 bp, Homo sapien
cagtgatgagagtgtgcaggatcca

SEQ ID NO: 2162132 - DNA, 25 bp, Homo sapien
gttgaccatcacttcattgtgagtc

SEQ ID NO: 2162133 - DNA, 25 bp, Homo sapien
ggttgaccatcacttcattgtgagt

SEQ ID NO: 2162134 - DNA, 25 bp, Homo sapien
tggttgaccatcacttcattgtgag

SEQ ID NO: 2162135 - DNA, 25 bp, Homo sapien
tagttgccaaaggatgtaagcttct

SEQ ID NO: 2162136 - DNA, 25 bp, Homo sapien
ttgccaaaggatgtaagcttcttct

SEQ ID NO: 2162137 - DNA, 25 bp, Homo sapien
ttagttgccaaaggatgtaagcttc

SEQ ID NO: 2162138 - DNA, 25 bp, Homo sapien
ccaaaggatgtaagcttcttctttc

SEQ ID NO: 2162139 - DNA, 25 bp, Homo sapien
cggttgctttcttcctgttcagcat

SEQ ID NO: 2162140 - DNA, 25 bp, Homo sapien
tacggttgctttcttcctgttcagc

SEQ ID NO: 2162141 - DNA, 25 bp, Homo sapien
attacggttgctttcttcctgttca

SEQ ID NO: 2162142 - DNA, 25 bp, Homo sapien
acggttgctttcttcctgttcagca

SEQ ID NO: 2162143 - DNA, 25 bp, Homo sapien
ttactacccgattttatgaagccca

SEQ ID NO: 2162144 - DNA, 25 bp, Homo sapien
tactacccgattttatgaagcccat

SEQ ID NO: 2162145 - DNA, 25 bp, Homo sapien
gatcaatgtacttgggcctgttaga

SEQ ID NO: 2162146 - DNA, 25 bp, Homo sapien
tacttgggcctgttagagtcctcca

SEQ ID NO: 2162147 - DNA, 25 bp, Homo sapien
tgagatcaatgtacttgggcctgtt

SEQ ID NO: 2162148 - DNA, 25 bp, Homo sapien
atgtacttgggcctgttagagtcct

SEQ ID NO: 2162149 - DNA, 25 bp, Homo sapien
ctgtgttggtacttccacctgcaca

SEQ ID NO: 2162150 - DNA, 25 bp, Homo sapien
tctgtgttggtacttccacctgcac

SEQ ID NO: 2162151 - DNA, 25 bp, Homo sapien
cttttgtagaaccaagtgttattgc

SEQ ID NO: 2162152 - DNA, 25 bp, Homo sapien
cattatttctgtttttggacttcgg

SEQ ID NO: 2162153 - DNA, 25 bp, Homo sapien
tctgtttttggacttcggaagacac

SEQ ID NO: 2162154 - DNA, 25 bp, Homo sapien
tagaaccaagtgttattgctttcat

SEQ ID NO: 2162155 - DNA, 25 bp, Homo sapien
cagtttatcagggagtagtttccgg

SEQ ID NO: 2162156 - DNA, 25 bp, Homo sapien
accaacattggaggttgcttgagtc

SEQ ID NO: 2162157 - DNA, 25 bp, Homo sapien
gttgtgagttaaggattaaatctgc

SEQ ID NO: 2162158 - DNA, 25 bp, Homo sapien
gttcagttgtgagttaaggattaaa

SEQ ID NO: 2162159 - DNA, 25 bp, Homo sapien
tagtaggtgttagtgctctagtacc

SEQ ID NO: 2162160 - DNA, 25 bp, Homo sapien
ccttagctttcatactagtaggtgt

SEQ ID NO: 2162161 - DNA, 25 bp, Homo sapien
tcaaacggtcatgccccttagcttt

SEQ ID NO: 2162162 - DNA, 25 bp, Homo sapien
ttttcattgaccaaacatctgtttt

SEQ ID NO: 2162163 - DNA, 25 bp, Homo sapien
agagaatttgataactgttctttcc

SEQ ID NO: 2162164 - DNA, 25 bp, Homo sapien
agagctaacacaggggtcttggcat

SEQ ID NO: 2162165 - DNA, 25 bp, Homo sapien
tagagctaacacaggggtcttggca

SEQ ID NO: 2162166 - DNA, 25 bp, Homo sapien
atcagagaatttgataactgttctt

SEQ ID NO: 2162167 - DNA, 25 bp, Homo sapien
catcattgccaactgtagtgttctg

SEQ ID NO: 2162168 - DNA, 25 bp, Homo sapien
ttttacccatcccaatgacaccatg

SEQ ID NO: 2162169 - DNA, 25 bp, Homo sapien
tagttgccatattcgtcttgctatc

SEQ ID NO: 2162170 - DNA, 25 bp, Homo sapien
tgtcccagtgcataagtattgtggc

SEQ ID NO: 2162171 - DNA, 25 bp, Homo sapien
agctcattaggatgaactgcacttt

SEQ ID NO: 2162172 - DNA, 25 bp, Homo sapien
taagtaattatcaaagctgctagga

SEQ ID NO: 2162173 - DNA, 25 bp, Homo sapien
gctgctaggatagaacatgagttcc

SEQ ID NO: 2162174 - DNA, 25 bp, Homo sapien
aagcagatagtaaagtaagtaatta

SEQ ID NO: 2162175 - DNA, 25 bp, Homo sapien
acttcttgaacaaattgttccacca

SEQ ID NO: 2162176 - DNA, 25 bp, Homo sapien
ttcttgaacaaattgttccaccaag

SEQ ID NO: 2162177 - DNA, 25 bp, Homo sapien
tcttgaacaaattgttccaccaagt

SEQ ID NO: 2162178 - DNA, 25 bp, Homo sapien
cttgaacaaattgttccaccaagtt

SEQ ID NO: 2162179 - DNA, 25 bp, Homo sapien
tgcaacctaccaagaataaaccagg

SEQ ID NO: 2162180 - DNA, 25 bp, Homo sapien
gagacattgcaactcatactgcaga

SEQ ID NO: 2162181 - DNA, 25 bp, Homo sapien
tatctgggacccaattgaatccctg

SEQ ID NO: 2162182 - DNA, 25 bp, Homo sapien
gacttagtgggattcataccagaga

SEQ ID NO: 2162183 - DNA, 25 bp, Homo sapien
taacccacttttgcctctgaggcaa

SEQ ID NO: 2162184 - DNA, 25 bp, Homo sapien
tctgaggcaatctgagggttgagtt

SEQ ID NO: 2162185 - DNA, 25 bp, Homo sapien
ctggctttccaggtttttctcacta

SEQ ID NO: 2162186 - DNA, 25 bp, Homo sapien
tttagatagtttttcagtccctcta

SEQ ID NO: 2162187 - DNA, 25 bp, Homo sapien
tgtttgtcactttctggtaacaaaa

SEQ ID NO: 2162188 - DNA, 25 bp, Homo sapien
tcactgtttgtcactttctggtaac

SEQ ID NO: 2162189 - DNA, 25 bp, Homo sapien
actgtttgtcactttctggtaacaa

SEQ ID NO: 2162190 - DNA, 25 bp, Homo sapien
cactgtttgtcactttctggtaaca

SEQ ID NO: 2162191 - DNA, 25 bp, Homo sapien
tctggtgccaccgtccctgtatttt

SEQ ID NO: 2162192 - DNA, 25 bp, Homo sapien
cttaacttctgtctctggtgccacc

SEQ ID NO: 2162193 - DNA, 25 bp, Homo sapien
tgtctctggtgccaccgtccctgta

SEQ ID NO: 2162194 - DNA, 25 bp, Homo sapien
tggtgccaccgtccctgtattttta

SEQ ID NO: 2162195 - DNA, 25 bp, Homo sapien
tggaggaaggaaccctggattcttc

SEQ ID NO: 2162196 - DNA, 25 bp, Homo sapien
ggattcttctgacccgtatttgcag

SEQ ID NO: 2162197 - DNA, 25 bp, Homo sapien
gaaccctggattcttctgacccgta

SEQ ID NO: 2162198 - DNA, 25 bp, Homo sapien
aactgaaaggcaggagactggtttg

SEQ ID NO: 2162199 - DNA, 25 bp, Homo sapien
attctgctttggcactgagtacaaa

SEQ ID NO: 2162200 - DNA, 25 bp, Homo sapien
ccacaggaattggccataagaatgc

SEQ ID NO: 2162201 - DNA, 25 bp, Homo sapien
atccacaggaattggccataagaat

SEQ ID NO: 2162202 - DNA, 25 bp, Homo sapien
tctgctttggcactgagtacaaatc

SEQ ID NO: 2162203 - DNA, 25 bp, Homo sapien
cagctggtcccaacaatctgttgag

SEQ ID NO: 2162204 - DNA, 25 bp, Homo sapien
aatgacatcccttcgactcatgcag

SEQ ID NO: 2162205 - DNA, 25 bp, Homo sapien
gcttgactttgaaccagagcctgag

SEQ ID NO: 2162206 - DNA, 25 bp, Homo sapien
cagtgagcatggcaatagtaagagc

SEQ ID NO: 2162207 - DNA, 25 bp, Homo sapien
gcctctgggtgccatattaacttta

SEQ ID NO: 2162208 - DNA, 25 bp, Homo sapien
atgggcctctgggtgccatattaac

SEQ ID NO: 2162209 - DNA, 25 bp, Homo sapien
tgaataactcttgataaactgtgtg

SEQ ID NO: 2162210 - DNA, 25 bp, Homo sapien
gggtgccatattaactttactgaaa

SEQ ID NO: 2162211 - DNA, 25 bp, Homo sapien
ttatcctccagttaagtatttcagg

SEQ ID NO: 2162212 - DNA, 25 bp, Homo sapien
gctttatcctccagttaagtatttc

SEQ ID NO: 2162213 - DNA, 25 bp, Homo sapien
cctacattgtctgcgtgttcactag

SEQ ID NO: 2162214 - DNA, 25 bp, Homo sapien
gaaagctaggctttcaactacagca

SEQ ID NO: 2162215 - DNA, 25 bp, Homo sapien
tgttcactagattcaccaaaatcag

SEQ ID NO: 2162216 - DNA, 25 bp, Homo sapien
tctctgactagggataggctccaga

SEQ ID NO: 2162217 - DNA, 25 bp, Homo sapien
tatgcacagaaagacttaggcctaa

SEQ ID NO: 2162218 - DNA, 25 bp, Homo sapien
ggcagctaaattgctaacaactgac

SEQ ID NO: 2162219 - DNA, 25 bp, Homo sapien
ggaagtcttctaccctatgcacaga

SEQ ID NO: 2162220 - DNA, 25 bp, Homo sapien
agctcttgaaacttacctatggcag

SEQ ID NO: 2162221 - DNA, 25 bp, Homo sapien
gaaaacctggtagcaaagagaggga

SEQ ID NO: 2162222 - DNA, 25 bp, Homo sapien
tcaaccagtgctattattgggagag

SEQ ID NO: 2162223 - DNA, 25 bp, Homo sapien
tgtgagtaacctattggctactccc

SEQ ID NO: 2162224 - DNA, 25 bp, Homo sapien
tttctccttcgagcaacatagctag

SEQ ID NO: 2162225 - DNA, 25 bp, Homo sapien
aaatgaaattgtccagacaaggaag

SEQ ID NO: 2162226 - DNA, 25 bp, Homo sapien
ctgatttcagaagtggcttctacta

SEQ ID NO: 2162227 - DNA, 25 bp, Homo sapien
tcagaagtggcttctactaatttct

SEQ ID NO: 2162228 - DNA, 25 bp, Homo sapien
gaaattgtccagacaaggaagttca

SEQ ID NO: 2162229 - DNA, 25 bp, Homo sapien
ttaggaaacccaaagagatcttcag

SEQ ID NO: 2162230 - DNA, 25 bp, Homo sapien
gactgtttccaatctgctaccctaa

SEQ ID NO: 2162231 - DNA, 25 bp, Homo sapien
gatcttcagttggattggcgaatcc

SEQ ID NO: 2162232 - DNA, 25 bp, Homo sapien
gaaccctggataacatgtcttaagc

SEQ ID NO: 2162233 - DNA, 25 bp, Homo sapien
ttgctgttccatataagagtcttca

SEQ ID NO: 2162234 - DNA, 25 bp, Homo sapien
agaatgttgctgttccatataagag

SEQ ID NO: 2162235 - DNA, 25 bp, Homo sapien
aatgttgctgttccatataagagtc

SEQ ID NO: 2162236 - DNA, 25 bp, Homo sapien
gggacctcggagaatgcttagaatg

SEQ ID NO: 2162237 - DNA, 25 bp, Homo sapien
tgaggcattgttaggcaagtattcc

SEQ ID NO: 2162238 - DNA, 25 bp, Homo sapien
tggttgaaaccctataatagaggta

SEQ ID NO: 2162239 - DNA, 25 bp, Homo sapien
caagtattcctgcagggagtcatat

SEQ ID NO: 2162240 - DNA, 25 bp, Homo sapien
gaccctctcagccatcgtcctgagg

SEQ ID NO: 2162241 - DNA, 25 bp, Homo sapien
agaggcagctaggtgtttcccattg

SEQ ID NO: 2162242 - DNA, 25 bp, Homo sapien
tttgggcaggccatgctatggcagt

SEQ ID NO: 2162243 - DNA, 25 bp, Homo sapien
gggatccagccgcaagcacagggct

SEQ ID NO: 2162244 - DNA, 25 bp, Homo sapien
gtctcaactgattatcctcaatatc

SEQ ID NO: 2162245 - DNA, 25 bp, Homo sapien
ataatttctgtgtatgaagactcgg

SEQ ID NO: 2162246 - DNA, 25 bp, Homo sapien
tttctgtgtatgaagactcggtgac

SEQ ID NO: 2162247 - DNA, 25 bp, Homo sapien
aaaaattcactgagacgcagctggg

SEQ ID NO: 2162248 - DNA, 25 bp, Homo sapien
gggccatgagtgaagaataatttct

SEQ ID NO: 2162249 - DNA, 25 bp, Homo sapien
ctgattaaagctttccttgagtgga

SEQ ID NO: 2162250 - DNA, 25 bp, Homo sapien
attaaagctttccttgagtggagcc

SEQ ID NO: 2162251 - DNA, 25 bp, Homo sapien
gattaaagctttccttgagtggagc

SEQ ID NO: 2162252 - DNA, 25 bp, Homo sapien
ttaaagctttccttgagtggagcca

SEQ ID NO: 2162253 - DNA, 25 bp, Homo sapien
tgtgacagtaagatccaagcttcga

SEQ ID NO: 2162254 - DNA, 25 bp, Homo sapien
tgtagtacaagctccaacctgtttg

SEQ ID NO: 2162255 - DNA, 25 bp, Homo sapien
caagcttcgagttggaaacaagagc

SEQ ID NO: 2162256 - DNA, 25 bp, Homo sapien
gcaaatatttggaccgcactgcacc

SEQ ID NO: 2162257 - DNA, 25 bp, Homo sapien
tgaggacaaatggcccgagcaatgg

SEQ ID NO: 2162258 - DNA, 25 bp, Homo sapien
aggacaaatggcccgagcaatggga

SEQ ID NO: 2162259 - DNA, 25 bp, Homo sapien
gacaaatggcccgagcaatgggagg

SEQ ID NO: 2162260 - DNA, 25 bp, Homo sapien
acaaatggcccgagcaatgggagga

SEQ ID NO: 2162261 - DNA, 25 bp, Homo sapien
catcatccaacaggtccccctcaac

SEQ ID NO: 2162262 - DNA, 25 bp, Homo sapien
aacaggtccccctcaacagagtcat

SEQ ID NO: 2162263 - DNA, 25 bp, Homo sapien
caacaggtccccctcaacagagtca

SEQ ID NO: 2162264 - DNA, 25 bp, Homo sapien
catccaacaggtccccctcaacaga

SEQ ID NO: 2162265 - DNA, 25 bp, Homo sapien
ctcgccattggcgttgtctttgtcg

SEQ ID NO: 2162266 - DNA, 25 bp, Homo sapien
tgattaactctagctggtcatccct

SEQ ID NO: 2162267 - DNA, 25 bp, Homo sapien
ttgtcgtcttctccgtcatcttctc

SEQ ID NO: 2162268 - DNA, 25 bp, Homo sapien
taaaccccacaatatgcttcagagt

SEQ ID NO: 2162269 - DNA, 25 bp, Homo sapien
ctttcttggctgtggaagtgctcca

SEQ ID NO: 2162270 - DNA, 25 bp, Homo sapien
tcttggctgtggaagtgctccaaac

SEQ ID NO: 2162271 - DNA, 25 bp, Homo sapien
ctgtctttcttggctgtggaagtgc

SEQ ID NO: 2162272 - DNA, 25 bp, Homo sapien
cttggctgtggaagtgctccaaact

SEQ ID NO: 2162273 - DNA, 25 bp, Homo sapien
ttgatgtggcagtccttagaccggc

SEQ ID NO: 2162274 - DNA, 25 bp, Homo sapien
tagaccggctgatggctattccaca

SEQ ID NO: 2162275 - DNA, 25 bp, Homo sapien
cacatcggaccaaacaagaaaggac

SEQ ID NO: 2162276 - DNA, 25 bp, Homo sapien
cacgtccatgtggttgatgtggcag

SEQ ID NO: 2162277 - DNA, 25 bp, Homo sapien
gtcacatttgtcagaggagtaattt

SEQ ID NO: 2162278 - DNA, 25 bp, Homo sapien
ctgagcaacacagttgttgcttgcc

SEQ ID NO: 2162279 - DNA, 25 bp, Homo sapien
tgagcaacacagttgttgcttgcct

SEQ ID NO: 2162280 - DNA, 25 bp, Homo sapien
ggtcacatttgtcagaggagtaatt

SEQ ID NO: 2162281 - DNA, 25 bp, Homo sapien
tgagtctaaatttcccgggcgagtc

SEQ ID NO: 2162282 - DNA, 25 bp, Homo sapien
aagcctcttctaaagcttgcaagga

SEQ ID NO: 2162283 - DNA, 25 bp, Homo sapien
catgccaaatggtatctgagtctaa

SEQ ID NO: 2162284 - DNA, 25 bp, Homo sapien
cgggcgagtctcctctgttacagaa

SEQ ID NO: 2162285 - DNA, 25 bp, Homo sapien
tagctcttgggcctttgaataacca

SEQ ID NO: 2162286 - DNA, 25 bp, Homo sapien
tggaggggagtgaatagcctcccat

SEQ ID NO: 2162287 - DNA, 25 bp, Homo sapien
gaatagcctcccatatgaagcagca

SEQ ID NO: 2162288 - DNA, 25 bp, Homo sapien
cttggttagctcttgggcctttgaa

SEQ ID NO: 2162289 - DNA, 25 bp, Homo sapien
gaagtcaaagaaagtcgagtgaaag

SEQ ID NO: 2162290 - DNA, 25 bp, Homo sapien
caaagaaagtcgagtgaaaggtgga

SEQ ID NO: 2162291 - DNA, 25 bp, Homo sapien
ggattttcaagtgctctgtggcttg

SEQ ID NO: 2162292 - DNA, 25 bp, Homo sapien
gaaaggtggattttcaagtgctctg

SEQ ID NO: 2162293 - DNA, 25 bp, Homo sapien
gttgtcctctttgaccaagcaagca

SEQ ID NO: 2162294 - DNA, 25 bp, Homo sapien
ctttgaccaagcaagcagcttcagg

SEQ ID NO: 2162295 - DNA, 25 bp, Homo sapien
acctagccagccatatcaaccgaat

SEQ ID NO: 2162296 - DNA, 25 bp, Homo sapien
ttcaggagggatgtacatggagtgg

SEQ ID NO: 2162297 - DNA, 25 bp, Homo sapien
cgaaattagaattggcctagcttgt

SEQ ID NO: 2162298 - DNA, 25 bp, Homo sapien
gaaatgtgcgtgttgctttccaagt

SEQ ID NO: 2162299 - DNA, 25 bp, Homo sapien
ttccaagtcaccttttgtattgcag

SEQ ID NO: 2162300 - DNA, 25 bp, Homo sapien
tgacttgttcagttctttccacgtg

SEQ ID NO: 2162301 - DNA, 25 bp, Homo sapien
taattggtttacaaaggaggctaca

SEQ ID NO: 2162302 - DNA, 25 bp, Homo sapien
ccctggtgataattggattggaatc

SEQ ID NO: 2162303 - DNA, 25 bp, Homo sapien
acaccaagagacaaaaggtaggagg

SEQ ID NO: 2162304 - DNA, 25 bp, Homo sapien
cttagggacaagattagcatcatac

SEQ ID NO: 2162305 - DNA, 25 bp, Homo sapien
agtgtgaggatcaaaatgagctcat

SEQ ID NO: 2162306 - DNA, 25 bp, Homo sapien
ttctatattgtgcttcgtaagtgtg

SEQ ID NO: 2162307 - DNA, 25 bp, Homo sapien
gcattggatccacaagccaagacat

SEQ ID NO: 2162308 - DNA, 25 bp, Homo sapien
gagctcattatatagcattggatcc

SEQ ID NO: 2162309 - DNA, 25 bp, Homo sapien
cagtcgttgtcataggacattcact

SEQ ID NO: 2162310 - DNA, 25 bp, Homo sapien
cataccaaggtgtgcacagttgagc

SEQ ID NO: 2162311 - DNA, 25 bp, Homo sapien
gttgagctctttcctatactcctgg

SEQ ID NO: 2162312 - DNA, 25 bp, Homo sapien
agtcagtgagccatggcacagtcgt

SEQ ID NO: 2162313 - DNA, 25 bp, Homo sapien
agtggccccatatggcagcttcttg

SEQ ID NO: 2162314 - DNA, 25 bp, Homo sapien
tcagacagtggccccatatggcagc

SEQ ID NO: 2162315 - DNA, 25 bp, Homo sapien
gacagtggccccatatggcagcttc

SEQ ID NO: 2162316 - DNA, 25 bp, Homo sapien
agttcagacagtggccccatatggc

SEQ ID NO: 2162317 - DNA, 25 bp, Homo sapien
tctggagccgccataatcttcaaat

SEQ ID NO: 2162318 - DNA, 25 bp, Homo sapien
tttgctggtgtacatccggtagatg

SEQ ID NO: 2162319 - DNA, 25 bp, Homo sapien
tagatgtagcatggctctggagccg

SEQ ID NO: 2162320 - DNA, 25 bp, Homo sapien
tacaggtagtggtacagcaacagct

SEQ ID NO: 2162321 - DNA, 25 bp, Homo sapien
cagtggtgttgaggtaggaatccca

SEQ ID NO: 2162322 - DNA, 25 bp, Homo sapien
cactgcacagcagtggtgttgaggt

SEQ ID NO: 2162323 - DNA, 25 bp, Homo sapien
actgcacagcagtggtgttgaggta

SEQ ID NO: 2162324 - DNA, 25 bp, Homo sapien
ttgaggtaggaatcccagtcctctc

SEQ ID NO: 2162325 - DNA, 25 bp, Homo sapien
gaggagccaaggagatttcttcaca

SEQ ID NO: 2162326 - DNA, 25 bp, Homo sapien
tacttcgcttagaataatcatctgc

SEQ ID NO: 2162327 - DNA, 25 bp, Homo sapien
ttcgcttagaataatcatctgcagt

SEQ ID NO: 2162328 - DNA, 25 bp, Homo sapien
cttcgcttagaataatcatctgcag

SEQ ID NO: 2162329 - DNA, 25 bp, Homo sapien
ttacttcgcttagaataatcatctg

SEQ ID NO: 2162330 - DNA, 25 bp, Homo sapien
tcaaattactgttctttggacaatc

SEQ ID NO: 2162331 - DNA, 25 bp, Homo sapien
ccttgtaacatttatagatgtatga

SEQ ID NO: 2162332 - DNA, 25 bp, Homo sapien
tctttggacaatctttctctcaatg

SEQ ID NO: 2162333 - DNA, 25 bp, Homo sapien
tttctctcaatgtcccttttccttg

SEQ ID NO: 2162334 - DNA, 25 bp, Homo sapien
ctggatgtagaatagaaaattcagc

SEQ ID NO: 2162335 - DNA, 25 bp, Homo sapien
aaaattcagcaagatcagaacaggg

SEQ ID NO: 2162336 - DNA, 25 bp, Homo sapien
tcagaacaggggaaagctgaagttt

SEQ ID NO: 2162337 - DNA, 25 bp, Homo sapien
acaggggaaagctgaagtttgagca

SEQ ID NO: 2162338 - DNA, 25 bp, Homo sapien
atgtgtgaactgtcaacaaagtggg

SEQ ID NO: 2162339 - DNA, 25 bp, Homo sapien
tgtgaactgtcaacaaagtgggtga

SEQ ID NO: 2162340 - DNA, 25 bp, Homo sapien
tgtgtgaactgtcaacaaagtgggt

SEQ ID NO: 2162341 - DNA, 25 bp, Homo sapien
gaactgtcaacaaagtgggtgaaat

SEQ ID NO: 2162342 - DNA, 25 bp, Homo sapien
taaagcctctaggaggtcagctgcc

SEQ ID NO: 2162343 - DNA, 25 bp, Homo sapien
ccttcattcgaggatgtggtggtaa

SEQ ID NO: 2162344 - DNA, 25 bp, Homo sapien
gatttataaactgctagcttggcgt

SEQ ID NO: 2162345 - DNA, 25 bp, Homo sapien
ttttgaataagatcaccccttgtgg

SEQ ID NO: 2162346 - DNA, 25 bp, Homo sapien
aaagagaccacccagattagcccag

SEQ ID NO: 2162347 - DNA, 25 bp, Homo sapien
catggtgtgacactgggcggacttc

SEQ ID NO: 2162348 - DNA, 25 bp, Homo sapien
cccagattagcccagtcttgcgctt

SEQ ID NO: 2162349 - DNA, 25 bp, Homo sapien
tagcccagtcttgcgcttttgcctc

SEQ ID NO: 2162350 - DNA, 25 bp, Homo sapien
aggaatgtacttttggagattctcc

SEQ ID NO: 2162351 - DNA, 25 bp, Homo sapien
caggaatgtacttttggagattctc

SEQ ID NO: 2162352 - DNA, 25 bp, Homo sapien
ggaatgtacttttggagattctcca

SEQ ID NO: 2162353 - DNA, 25 bp, Homo sapien
tattgttgtcaatttcttgatcgtt

SEQ ID NO: 2162354 - DNA, 25 bp, Homo sapien
tactttcttattactcccaggccat

SEQ ID NO: 2162355 - DNA, 25 bp, Homo sapien
gttattgttgtcaatttcttgatcg

SEQ ID NO: 2162356 - DNA, 25 bp, Homo sapien
attgttgtcaatttcttgatcgttt

SEQ ID NO: 2162357 - DNA, 25 bp, Homo sapien
taagttccctttcaatagcgcccat

SEQ ID NO: 2162358 - DNA, 25 bp, Homo sapien
tccctaagttccctttcaatagcgc

SEQ ID NO: 2162359 - DNA, 25 bp, Homo sapien
caatagcgcccataacactgggcat

SEQ ID NO: 2162360 - DNA, 25 bp, Homo sapien
ttccctttcaatagcgcccataaca

SEQ ID NO: 2162361 - DNA, 25 bp, Homo sapien
cactgctgaccaatccctgggcttg

SEQ ID NO: 2162362 - DNA, 25 bp, Homo sapien
atgtagaggaaaccaaatgctgttg

SEQ ID NO: 2162363 - DNA, 25 bp, Homo sapien
ggaggggtgacagggatgtagagga

SEQ ID NO: 2162364 - DNA, 25 bp, Homo sapien
agatgcatcccaaaccgatctgccg

SEQ ID NO: 2162365 - DNA, 25 bp, Homo sapien
tcctcttctccccattgatgcttga

SEQ ID NO: 2162366 - DNA, 25 bp, Homo sapien
tccccattgatgcttgaagtgggct

SEQ ID NO: 2162367 - DNA, 25 bp, Homo sapien
tcatcattttcattgttggattcac

SEQ ID NO: 2162368 - DNA, 25 bp, Homo sapien
cattttcattgttggattcacaggg

SEQ ID NO: 2162369 - DNA, 25 bp, Homo sapien
gggctaagtccctgtttggtgtctc

SEQ ID NO: 2162370 - DNA, 25 bp, Homo sapien
ggctaagtccctgtttggtgtctcc

SEQ ID NO: 2162371 - DNA, 25 bp, Homo sapien
tcagctgagtctaggccttcgtcct

SEQ ID NO: 2162372 - DNA, 25 bp, Homo sapien
ttcagctgagtctaggccttcgtcc

SEQ ID NO: 2162373 - DNA, 25 bp, Homo sapien
cagctgagtctaggccttcgtcctc

SEQ ID NO: 2162374 - DNA, 25 bp, Homo sapien
cttcagctgagtctaggccttcgtc

SEQ ID NO: 2162375 - DNA, 25 bp, Homo sapien
caggtaattctacgtctttatcctc

SEQ ID NO: 2162376 - DNA, 25 bp, Homo sapien
ctagatgatcgctttttctctaggt

SEQ ID NO: 2162377 - DNA, 25 bp, Homo sapien
atccttcaggtaattctacgtcttt

SEQ ID NO: 2162378 - DNA, 25 bp, Homo sapien
aattctacgtctttatcctcctgtg

SEQ ID NO: 2162379 - DNA, 25 bp, Homo sapien
tctggtgttggttgatccatagctg

SEQ ID NO: 2162380 - DNA, 25 bp, Homo sapien
atgtcaagcagtagtatagcccggg

SEQ ID NO: 2162381 - DNA, 25 bp, Homo sapien
taggcaactccggtttgccagttac

SEQ ID NO: 2162382 - DNA, 25 bp, Homo sapien
tgatccatagctgtgttaggcaact

SEQ ID NO: 2162383 - DNA, 25 bp, Homo sapien
aatattccctatagaaatatggaag

SEQ ID NO: 2162384 - DNA, 25 bp, Homo sapien
cagaggctttgggtatatctaggtc

SEQ ID NO: 2162385 - DNA, 25 bp, Homo sapien
gactaaagtttctactgtggacagg

SEQ ID NO: 2162386 - DNA, 25 bp, Homo sapien
ctctgactaaagtttctactgtgga

SEQ ID NO: 2162387 - DNA, 25 bp, Homo sapien
gtccatatttggctgattttgattc

SEQ ID NO: 2162388 - DNA, 25 bp, Homo sapien
tggctgattttgattcaagttctta

SEQ ID NO: 2162389 - DNA, 25 bp, Homo sapien
ggctgaataatgttcgccctctttc

SEQ ID NO: 2162390 - DNA, 25 bp, Homo sapien
ataatgttcgccctctttctctggt

SEQ ID NO: 2162391 - DNA, 25 bp, Homo sapien
ctcgtgaggtgcatagaaagaaaac

SEQ ID NO: 2162392 - DNA, 25 bp, Homo sapien
ccagactcttctagtttttgtggac

SEQ ID NO: 2162393 - DNA, 25 bp, Homo sapien
cggtgtccgtccagtttctgccaaa

SEQ ID NO: 2162394 - DNA, 25 bp, Homo sapien
tgtggacttcgtggattcacagttt

SEQ ID NO: 2162395 - DNA, 25 bp, Homo sapien
tcctctggtctgcaacataagggga

SEQ ID NO: 2162396 - DNA, 25 bp, Homo sapien
tctgcaacataaggggaacttttga

SEQ ID NO: 2162397 - DNA, 25 bp, Homo sapien
gaacttttgaaggacactcttcagt

SEQ ID NO: 2162398 - DNA, 25 bp, Homo sapien
gggaacttttgaaggacactcttca

SEQ ID NO: 2162399 - DNA, 25 bp, Homo sapien
taagagttgtgtgatagacactgat

SEQ ID NO: 2162400 - DNA, 25 bp, Homo sapien
gaccgtgagactaacaagtccataa

SEQ ID NO: 2162401 - DNA, 25 bp, Homo sapien
tattgccttcaatccatgacaaggt

SEQ ID NO: 2162402 - DNA, 25 bp, Homo sapien
tccaccccattgattttgggcttga

SEQ ID NO: 2162403 - DNA, 25 bp, Homo sapien
ttattgatatagttcaaacactgct

SEQ ID NO: 2162404 - DNA, 25 bp, Homo sapien
atatagttcaaacactgctccagaa

SEQ ID NO: 2162405 - DNA, 25 bp, Homo sapien
tgatatagttcaaacactgctccag

SEQ ID NO: 2162406 - DNA, 25 bp, Homo sapien
tattgatatagttcaaacactgctc

SEQ ID NO: 2162407 - DNA, 25 bp, Homo sapien
gaaggaacaatagcattatcaggca

SEQ ID NO: 2162408 - DNA, 25 bp, Homo sapien
gaatgacgatatgggtaagaaggaa

SEQ ID NO: 2162409 - DNA, 25 bp, Homo sapien
ctttgaggaatacttcactagaggc

SEQ ID NO: 2162410 - DNA, 25 bp, Homo sapien
cactagaggcataagtgaatgacga

SEQ ID NO: 2162411 - DNA, 25 bp, Homo sapien
tctctatctccgcagtccagtttat

SEQ ID NO: 2162412 - DNA, 25 bp, Homo sapien
tatataaggatattgctgctctaag

SEQ ID NO: 2162413 - DNA, 25 bp, Homo sapien
tatgggcccctatccttcaggtacc

SEQ ID NO: 2162414 - DNA, 25 bp, Homo sapien
catttatgatgaaagcccaactctc

SEQ ID NO: 2162415 - DNA, 25 bp, Homo sapien
ctagaatggaccagagttgtagagc

SEQ ID NO: 2162416 - DNA, 25 bp, Homo sapien
gaatggaccagagttgtagagcagc

SEQ ID NO: 2162417 - DNA, 25 bp, Homo sapien
ggggagttgccaacagaagtcctag

SEQ ID NO: 2162418 - DNA, 25 bp, Homo sapien
gcaaggggagttgccaacagaagtc

SEQ ID NO: 2162419 - DNA, 25 bp, Homo sapien
tgaaatagtcgaattaataccttga

SEQ ID NO: 2162420 - DNA, 25 bp, Homo sapien
gataaaggacgcagagccatggaga

SEQ ID NO: 2162421 - DNA, 25 bp, Homo sapien
taataccttgaattcttaacctcca

SEQ ID NO: 2162422 - DNA, 25 bp, Homo sapien
cataagtctttaggataaaggacgc

SEQ ID NO: 2162423 - DNA, 25 bp, Homo sapien
cattgaactcactggattagatact

SEQ ID NO: 2162424 - DNA, 25 bp, Homo sapien
taaaactttgatggttcaaatctgc

SEQ ID NO: 2162425 - DNA, 25 bp, Homo sapien
gaattgtcctttaacaaccattgaa

SEQ ID NO: 2162426 - DNA, 25 bp, Homo sapien
ttagatactaaaccatgatgtgcga

SEQ ID NO: 2162427 - DNA, 25 bp, Homo sapien
ctgtccttactcagggaacttgcag

SEQ ID NO: 2162428 - DNA, 25 bp, Homo sapien
tatggggaatccaatcctcaacctc

SEQ ID NO: 2162429 - DNA, 25 bp, Homo sapien
tctggccacaggtatgtacacagcg

SEQ ID NO: 2162430 - DNA, 25 bp, Homo sapien
ccacaggtatgtacacagcggaggg

SEQ ID NO: 2162431 - DNA, 25 bp, Homo sapien
ctcttctggccacaggtatgtacac

SEQ ID NO: 2162432 - DNA, 25 bp, Homo sapien
aagacaggaggggagtgaggtcctg

SEQ ID NO: 2162433 - DNA, 25 bp, Homo sapien
taccaggaaggccagaagggaagac

SEQ ID NO: 2162434 - DNA, 25 bp, Homo sapien
ggaaggccagaagggaagacaggag

SEQ ID NO: 2162435 - DNA, 25 bp, Homo sapien
caggaggggagtgaggtcctgcttc

SEQ ID NO: 2162436 - DNA, 25 bp, Homo sapien
ccttgagcgctgtaagttcagatga

SEQ ID NO: 2162437 - DNA, 25 bp, Homo sapien
cagaatttagtgctgccttgagcgc

SEQ ID NO: 2162438 - DNA, 25 bp, Homo sapien
caggaacatctcatggtcacgtatt

SEQ ID NO: 2162439 - DNA, 25 bp, Homo sapien
gtcacgtatttgtacatggttatgg

SEQ ID NO: 2162440 - DNA, 25 bp, Homo sapien
tgaggctgaggaagatctagcaagt

SEQ ID NO: 2162441 - DNA, 25 bp, Homo sapien
tctataagcatctgcaaacgtgaag

SEQ ID NO: 2162442 - DNA, 25 bp, Homo sapien
tgaaagatagtagcggtcatctgga

SEQ ID NO: 2162443 - DNA, 25 bp, Homo sapien
gaggaagatctagcaagttggcagt

SEQ ID NO: 2162444 - DNA, 25 bp, Homo sapien
ggtaagcctgattcttgccttttct

SEQ ID NO: 2162445 - DNA, 25 bp, Homo sapien
tcagtcaggacgtcttattaattct

SEQ ID NO: 2162446 - DNA, 25 bp, Homo sapien
ccttttataatgtccacactggtaa

SEQ ID NO: 2162447 - DNA, 25 bp, Homo sapien
acactggtaagcctgattcttgcct

SEQ ID NO: 2162448 - DNA, 25 bp, Homo sapien
tattctcactggattgcataggagg

SEQ ID NO: 2162449 - DNA, 25 bp, Homo sapien
taattcccaaagtgatgtaaacaca

SEQ ID NO: 2162450 - DNA, 25 bp, Homo sapien
tactttgccataaagtactgtccat

SEQ ID NO: 2162451 - DNA, 25 bp, Homo sapien
tgtgtagggcctaccatgatgtgct

SEQ ID NO: 2162452 - DNA, 25 bp, Homo sapien
tttcttgatgtcactgttgcctgac

SEQ ID NO: 2162453 - DNA, 25 bp, Homo sapien
tgatgtcactgttgcctgacatgtc

SEQ ID NO: 2162454 - DNA, 25 bp, Homo sapien
cactgttgcctgacatgtcccttct

SEQ ID NO: 2162455 - DNA, 25 bp, Homo sapien
tgtcactgttgcctgacatgtccct

SEQ ID NO: 2162456 - DNA, 25 bp, Homo sapien
tggggactgcccctcgcgataaacc

SEQ ID NO: 2162457 - DNA, 25 bp, Homo sapien
cctggggactgcccctcgcgataaa

SEQ ID NO: 2162458 - DNA, 25 bp, Homo sapien
actgcccctcgcgataaaccgggct

SEQ ID NO: 2162459 - DNA, 25 bp, Homo sapien
ccctcgcgataaaccgggctcttct

SEQ ID NO: 2162460 - DNA, 25 bp, Homo sapien
ctccgcagggcccggtgccgctctc

SEQ ID NO: 2162461 - DNA, 25 bp, Homo sapien
cgcagggcccggtgccgctctccat

SEQ ID NO: 2162462 - DNA, 25 bp, Homo sapien
tgggcgctcttctccgcagggcccg

SEQ ID NO: 2162463 - DNA, 25 bp, Homo sapien
gtgggcgctcttctccgcagggccc

SEQ ID NO: 2162464 - DNA, 25 bp, Homo sapien
ggatgatcacagcacgtcatgtccc

SEQ ID NO: 2162465 - DNA, 25 bp, Homo sapien
aaagacctcgttggcgctgggattt

SEQ ID NO: 2162466 - DNA, 25 bp, Homo sapien
cctcgttggcgctgggattttggca

SEQ ID NO: 2162467 - DNA, 25 bp, Homo sapien
tcacagcacgtcatgtcccgactga

SEQ ID NO: 2162468 - DNA, 25 bp, Homo sapien
ggcaccttgatctggattcctttgg

SEQ ID NO: 2162469 - DNA, 25 bp, Homo sapien
caccttgatctggattcctttggcc

SEQ ID NO: 2162470 - DNA, 25 bp, Homo sapien
tgatctggattcctttggccccaag

SEQ ID NO: 2162471 - DNA, 25 bp, Homo sapien
ccttgatctggattcctttggcccc

SEQ ID NO: 2162472 - DNA, 25 bp, Homo sapien
cccacacggtcgctgtgcgaggctg

SEQ ID NO: 2162473 - DNA, 25 bp, Homo sapien
tcccacacggtcgctgtgcgaggct

SEQ ID NO: 2162474 - DNA, 25 bp, Homo sapien
ctcccacacggtcgctgtgcgaggc

SEQ ID NO: 2162475 - DNA, 25 bp, Homo sapien
cacacggtcgctgtgcgaggctggt

SEQ ID NO: 2162476 - DNA, 25 bp, Homo sapien
gccaggccttccagcacatgcaggc

SEQ ID NO: 2162477 - DNA, 25 bp, Homo sapien
ctctagggcaaatcgaatggaaagt

SEQ ID NO: 2162478 - DNA, 25 bp, Homo sapien
gaatggaaagtaggcctgaagctgc

SEQ ID NO: 2162479 - DNA, 25 bp, Homo sapien
aagctgccaggccttccagcacatg

SEQ ID NO: 2162480 - DNA, 25 bp, Homo sapien
agcccccgcagaggtatcgtttgca

SEQ ID NO: 2162481 - DNA, 25 bp, Homo sapien
ccgtcattgagctgcacattccagc

SEQ ID NO: 2162482 - DNA, 25 bp, Homo sapien
gtgggcccgtcattgagctgcacat

SEQ ID NO: 2162483 - DNA, 25 bp, Homo sapien
ccgcagaggtatcgtttgcaaccac

SEQ ID NO: 2162484 - DNA, 25 bp, Homo sapien
ggatgacgtcgaacctctctgacac

SEQ ID NO: 2162485 - DNA, 25 bp, Homo sapien
gatggatgacgtcgaacctctctga

SEQ ID NO: 2162486 - DNA, 25 bp, Homo sapien
tggatgacgtcgaacctctctgaca

SEQ ID NO: 2162487 - DNA, 25 bp, Homo sapien
cagatggatgacgtcgaacctctct

SEQ ID NO: 2162488 - DNA, 25 bp, Homo sapien
tccgtgcgggtcacgcacagcaact

SEQ ID NO: 2162489 - DNA, 25 bp, Homo sapien
agcaccgccgtgtccgtgcgggtca

SEQ ID NO: 2162490 - DNA, 25 bp, Homo sapien
gccgtgtccgtgcgggtcacgcaca

SEQ ID NO: 2162491 - DNA, 25 bp, Homo sapien
gtgcgggtcacgcacagcaactctc

SEQ ID NO: 2162492 - DNA, 25 bp, Homo sapien
ggcgctgatgctaagcagcggtacc

SEQ ID NO: 2162493 - DNA, 25 bp, Homo sapien
ttgagggccatggcaccgaatttgc

SEQ ID NO: 2162494 - DNA, 25 bp, Homo sapien
ggcctgcttgctggctgaggcctta

SEQ ID NO: 2162495 - DNA, 25 bp, Homo sapien
cctgcttgctggctgaggccttaac

SEQ ID NO: 2162496 - DNA, 25 bp, Homo sapien
agggcctgcttgctggctgaggcct

SEQ ID NO: 2162497 - DNA, 25 bp, Homo sapien
accagggcctgcttgctggctgagg

SEQ ID NO: 2162498 - DNA, 25 bp, Homo sapien
taggacacagcccacgaaatccagg

SEQ ID NO: 2162499 - DNA, 25 bp, Homo sapien
gcccacatggagcaaccaagctggt

SEQ ID NO: 2162500 - DNA, 25 bp, Homo sapien
tacagaggcacctgtgggagctcct

SEQ ID NO: 2162501 - DNA, 25 bp, Homo sapien
agcgaaacccggaagtgagcgtgga

SEQ ID NO: 2162502 - DNA, 25 bp, Homo sapien
gcatcttcccggatggtgaagttgg

SEQ ID NO: 2162503 - DNA, 25 bp, Homo sapien
ggcatcttcccggatggtgaagttg

SEQ ID NO: 2162504 - DNA, 25 bp, Homo sapien
tggcatcttcccggatggtgaagtt

SEQ ID NO: 2162505 - DNA, 25 bp, Homo sapien
tcctccatagcttcgccagcagcct

SEQ ID NO: 2162506 - DNA, 25 bp, Homo sapien
ctggacagtgaagcgcagcatcagc

SEQ ID NO: 2162507 - DNA, 25 bp, Homo sapien
acagtgaagcgcagcatcagcagag

SEQ ID NO: 2162508 - DNA, 25 bp, Homo sapien
ccagggggtctgtgattggaggtct

SEQ ID NO: 2162509 - DNA, 25 bp, Homo sapien
cccaggtccagggggtctgtgattg

SEQ ID NO: 2162510 - DNA, 25 bp, Homo sapien
ctattccgggcccagtggcagcccc

SEQ ID NO: 2162511 - DNA, 25 bp, Homo sapien
caggtccagggggtctgtgattgga

SEQ ID NO: 2162512 - DNA, 25 bp, Homo sapien
tgataaagtaatgcaccccagcctc

SEQ ID NO: 2162513 - DNA, 25 bp, Homo sapien
catactcatacaaaatatgtgctgg

SEQ ID NO: 2162514 - DNA, 25 bp, Homo sapien
cagcctcttcgtcagttgccacata

SEQ ID NO: 2162515 - DNA, 25 bp, Homo sapien
tatgtgctggtatgttaaagttcac

SEQ ID NO: 2162516 - DNA, 25 bp, Homo sapien
tgcagagaaggccaatggtgaccaa

SEQ ID NO: 2162517 - DNA, 25 bp, Homo sapien
cagagaaggccaatggtgaccaaca

SEQ ID NO: 2162518 - DNA, 25 bp, Homo sapien
agagaaggccaatggtgaccaacat

SEQ ID NO: 2162519 - DNA, 25 bp, Homo sapien
ctgcagagaaggccaatggtgacca

SEQ ID NO: 2162520 - DNA, 25 bp, Homo sapien
tcagtggcaggagatgcatgtgttc

SEQ ID NO: 2162521 - DNA, 25 bp, Homo sapien
ctcagtggcaggagatgcatgtgtt

SEQ ID NO: 2162522 - DNA, 25 bp, Homo sapien
cagtggcaggagatgcatgtgttct

SEQ ID NO: 2162523 - DNA, 25 bp, Homo sapien
taagatcatccggtggacatcaact

SEQ ID NO: 2162524 - DNA, 25 bp, Homo sapien
cacagttccaaactttgtactttgt

SEQ ID NO: 2162525 - DNA, 25 bp, Homo sapien
atttgtaagatcatccggtggacat

SEQ ID NO: 2162526 - DNA, 25 bp, Homo sapien
gatcatccggtggacatcaactatt

SEQ ID NO: 2162527 - DNA, 25 bp, Homo sapien
catggaccagggcacgtgcatactt

SEQ ID NO: 2162528 - DNA, 25 bp, Homo sapien
gaaaagatgaatggctccgggaaac

SEQ ID NO: 2162529 - DNA, 25 bp, Homo sapien
tgagtgcactcttctgacggagaca

SEQ ID NO: 2162530 - DNA, 25 bp, Homo sapien
tgttggttgtgagacagggctccct

SEQ ID NO: 2162531 - DNA, 25 bp, Homo sapien
gatttggattggtctcttgactgtt

SEQ ID NO: 2162532 - DNA, 25 bp, Homo sapien
acagcgttgacaaggacttcccagg

SEQ ID NO: 2162533 - DNA, 25 bp, Homo sapien
tgaaggcatatatagatcacagcgt

SEQ ID NO: 2162534 - DNA, 25 bp, Homo sapien
tcccagggctgaagacgttcagggc

SEQ ID NO: 2162535 - DNA, 25 bp, Homo sapien
gatcatgactgtcacaggcaactgg

SEQ ID NO: 2162536 - DNA, 25 bp, Homo sapien
taacttgggcactggatatggagat

SEQ ID NO: 2162537 - DNA, 25 bp, Homo sapien
gaacacagcaatggtcacagacaac

SEQ ID NO: 2162538 - DNA, 25 bp, Homo sapien
gaaggtcatggtgcagacttgttga

SEQ ID NO: 2162539 - DNA, 25 bp, Homo sapien
caactgccacagtggcagaccgtgt

SEQ ID NO: 2162540 - DNA, 25 bp, Homo sapien
gcagaccgtgtccaggcacatctca

SEQ ID NO: 2162541 - DNA, 25 bp, Homo sapien
caggactcttttcttcgaaatggcc

SEQ ID NO: 2162542 - DNA, 25 bp, Homo sapien
ggcccttttgagttgcatctggaac

SEQ ID NO: 2162543 - DNA, 25 bp, Homo sapien
gttactccggtttgtacactgcaga

SEQ ID NO: 2162544 - DNA, 25 bp, Homo sapien
ctgaaagaggcacttcaaattgtca

SEQ ID NO: 2162545 - DNA, 25 bp, Homo sapien
gaaagattaacacatgttactccgg

SEQ ID NO: 2162546 - DNA, 25 bp, Homo sapien
tgtcaaaacccggtgcttttgtgaa

SEQ ID NO: 2162547 - DNA, 25 bp, Homo sapien
catgagtagaagttccatgttccct

SEQ ID NO: 2162548 - DNA, 25 bp, Homo sapien
tggatggacattagtagctttagct

SEQ ID NO: 2162549 - DNA, 25 bp, Homo sapien
catgttccctgtttccgtgcagata

SEQ ID NO: 2162550 - DNA, 25 bp, Homo sapien
taagcttggcatgataggaagagag

SEQ ID NO: 2162551 - DNA, 25 bp, Homo sapien
gacattgtaggatcatttaattcca

SEQ ID NO: 2162552 - DNA, 25 bp, Homo sapien
cattgtaggatcatttaattccacc

SEQ ID NO: 2162553 - DNA, 25 bp, Homo sapien
acattgtaggatcatttaattccac

SEQ ID NO: 2162554 - DNA, 25 bp, Homo sapien
cactattaccgagaagaaaaatgac

SEQ ID NO: 2162555 - DNA, 25 bp, Homo sapien
ttcccgagtggactttaaatcttgc

SEQ ID NO: 2162556 - DNA, 25 bp, Homo sapien
cccgggtgtagttgtggtgttgaag

SEQ ID NO: 2162557 - DNA, 25 bp, Homo sapien
gggaatacaccttagttccggcagc

SEQ ID NO: 2162558 - DNA, 25 bp, Homo sapien
attcctgttgtgtcgagggctggaa

SEQ ID NO: 2162559 - DNA, 25 bp, Homo sapien
taactgcccagggctcccactactg

SEQ ID NO: 2162560 - DNA, 25 bp, Homo sapien
aactgcccagggctcccactactgc

SEQ ID NO: 2162561 - DNA, 25 bp, Homo sapien
ctaactgcccagggctcccactact

SEQ ID NO: 2162562 - DNA, 25 bp, Homo sapien
aaaagcatcattgggttgctgatga

SEQ ID NO: 2162563 - DNA, 25 bp, Homo sapien
tatacaaaaccaatgtccacaaaat

SEQ ID NO: 2162564 - DNA, 25 bp, Homo sapien
ttagttcacaaaaaaggctgttgct

SEQ ID NO: 2162565 - DNA, 25 bp, Homo sapien
ttgggagaaaaagcatcattgggtt

SEQ ID NO: 2162566 - DNA, 25 bp, Homo sapien
aatcgtttctgaatgaattgactct

SEQ ID NO: 2162567 - DNA, 25 bp, Homo sapien
atgaattgactctgttgtagctgtc

SEQ ID NO: 2162568 - DNA, 25 bp, Homo sapien
aatgaattgactctgttgtagctgt

SEQ ID NO: 2162569 - DNA, 25 bp, Homo sapien
tcaatcgtttctgaatgaattgact

SEQ ID NO: 2162570 - DNA, 25 bp, Homo sapien
caggtaaacacctgccggactgttc

SEQ ID NO: 2162571 - DNA, 25 bp, Homo sapien
aacacctgccggactgttccgcata

SEQ ID NO: 2162572 - DNA, 25 bp, Homo sapien
aaacacctgccggactgttccgcat

SEQ ID NO: 2162573 - DNA, 25 bp, Homo sapien
tggcaggtaaacacctgccggactg

SEQ ID NO: 2162574 - DNA, 25 bp, Homo sapien
gagtccatagctttttggatggacc

SEQ ID NO: 2162575 - DNA, 25 bp, Homo sapien
gctttttggatggaccataggacga

SEQ ID NO: 2162576 - DNA, 25 bp, Homo sapien
tggaccataggacgatttattcccc

SEQ ID NO: 2162577 - DNA, 25 bp, Homo sapien
aaatactgagtccatagctttttgg

SEQ ID NO: 2162578 - DNA, 25 bp, Homo sapien
cataatcacagctccggtgctttaa

SEQ ID NO: 2162579 - DNA, 25 bp, Homo sapien
gctttaaagcgtcaaggcaattcga

SEQ ID NO: 2162580 - DNA, 25 bp, Homo sapien
tatgtcaagagctattttcagacca

SEQ ID NO: 2162581 - DNA, 25 bp, Homo sapien
caaggcaattcgatatcaaaaggat

SEQ ID NO: 2162582 - DNA, 25 bp, Homo sapien
tagccaacgggcaacgcttcttgca

SEQ ID NO: 2162583 - DNA, 25 bp, Homo sapien
gatcttttcccggaggcgcccgcag

SEQ ID NO: 2162584 - DNA, 25 bp, Homo sapien
aggcagatccccaccgagcagctag

SEQ ID NO: 2162585 - DNA, 25 bp, Homo sapien
aaaggagccggcaccgcctcggact

SEQ ID NO: 2162586 - DNA, 25 bp, Homo sapien
gcatgcggacctacagccgcgacgg

SEQ ID NO: 2162587 - DNA, 25 bp, Homo sapien
ggtgcccggcatgcggacctacagc

SEQ ID NO: 2162588 - DNA, 25 bp, Homo sapien
cggccactcgggctgccctcgccat

SEQ ID NO: 2162589 - DNA, 25 bp, Homo sapien
agccgcgacggccactcgggctgcc

SEQ ID NO: 2162590 - DNA, 25 bp, Homo sapien
gcgcttccgggagaccaggtgtctc

SEQ ID NO: 2162591 - DNA, 25 bp, Homo sapien
ccgcaagccgggtcgaatcccattt

SEQ ID NO: 2162592 - DNA, 25 bp, Homo sapien
tcgaatcccatttccgaagggcgct

SEQ ID NO: 2162593 - DNA, 25 bp, Homo sapien
gatcgccggtaactgggcaccggcc

SEQ ID NO: 2162594 - DNA, 25 bp, Homo sapien
cccatcaggccacgagggggctaag

SEQ ID NO: 2162595 - DNA, 25 bp, Homo sapien
gctaagaggagtccggggaaccaga

SEQ ID NO: 2162596 - DNA, 25 bp, Homo sapien
agaggagtccggggaaccagagagg

SEQ ID NO: 2162597 - DNA, 25 bp, Homo sapien
cacgagggggctaagaggagtccgg

SEQ ID NO: 2162598 - DNA, 25 bp, Homo sapien
gggtgccggcgggcttacagcccac

SEQ ID NO: 2162599 - DNA, 25 bp, Homo sapien
gagcctggctcaggtctccaagcct

SEQ ID NO: 2162600 - DNA, 25 bp, Homo sapien
cgagtagagcctggctcaggtctcc

SEQ ID NO: 2162601 - DNA, 25 bp, Homo sapien
aggacacggtgggtgccggcgggct

SEQ ID NO: 2162602 - DNA, 25 bp, Homo sapien
cgacactcggaccctaaggaggtct

SEQ ID NO: 2162603 - DNA, 25 bp, Homo sapien
cacagctgctttccaaaacgtagtt

SEQ ID NO: 2162604 - DNA, 25 bp, Homo sapien
ctgcctgtccttgagagtccacagc

SEQ ID NO: 2162605 - DNA, 25 bp, Homo sapien
cactcggaccctaaggaggtcttcg

SEQ ID NO: 2162606 - DNA, 25 bp, Homo sapien
ctacagaatcaaggaaattcatggg

SEQ ID NO: 2162607 - DNA, 25 bp, Homo sapien
tatttttgcgaagaatttcagagac

SEQ ID NO: 2162608 - DNA, 25 bp, Homo sapien
ggttgggggctcatgagattcttga

SEQ ID NO: 2162609 - DNA, 25 bp, Homo sapien
ttcaagacattgatgacgctttcaa

SEQ ID NO: 2162610 - DNA, 25 bp, Homo sapien
cattgatgacgctttcaatattcct

SEQ ID NO: 2162611 - DNA, 25 bp, Homo sapien
ggggtaaataatgtctgctgttgcc

SEQ ID NO: 2162612 - DNA, 25 bp, Homo sapien
ccattgtggaatcaattcgcaaggg

SEQ ID NO: 2162613 - DNA, 25 bp, Homo sapien
tccattgtggaatcaattcgcaagg

SEQ ID NO: 2162614 - DNA, 25 bp, Homo sapien
ttcgcaaggggtaaataatgtctgc

SEQ ID NO: 2162615 - DNA, 25 bp, Homo sapien
gttgctagatgtgccactagcttct

SEQ ID NO: 2162616 - DNA, 25 bp, Homo sapien
tctgttgctagatgtgccactagct

SEQ ID NO: 2162617 - DNA, 25 bp, Homo sapien
tggctctgttgctagatgtgccact

SEQ ID NO: 2162618 - DNA, 25 bp, Homo sapien
gctctgttgctagatgtgccactag

SEQ ID NO: 2162619 - DNA, 25 bp, Homo sapien
catgcaccaatgtgtctgtgtagga

SEQ ID NO: 2162620 - DNA, 25 bp, Homo sapien
catatttgcctggactctgaaagtc

SEQ ID NO: 2162621 - DNA, 25 bp, Homo sapien
tgaggtttaaacgtgcacttcttgc

SEQ ID NO: 2162622 - DNA, 25 bp, Homo sapien
tctttgctacaggactggtgcccca

SEQ ID NO: 2162623 - DNA, 25 bp, Homo sapien
ggctttgcaaagctcaattcccggc

SEQ ID NO: 2162624 - DNA, 25 bp, Homo sapien
gcagcagtgcgtctagcagtttgaa

SEQ ID NO: 2162625 - DNA, 25 bp, Homo sapien
tcccggctgcgtcagttgattctga

SEQ ID NO: 2162626 - DNA, 25 bp, Homo sapien
aggtaaaataagacgctgcttccag

SEQ ID NO: 2162627 - DNA, 25 bp, Homo sapien
ctgcagtccaccaggagtttagcat

SEQ ID NO: 2162628 - DNA, 25 bp, Homo sapien
acatcaggagaagactgaatccctc

SEQ ID NO: 2162629 - DNA, 25 bp, Homo sapien
atcaggagaagactgaatccctctc

SEQ ID NO: 2162630 - DNA, 25 bp, Homo sapien
ctctgcagtccaccaggagtttagc

SEQ ID NO: 2162631 - DNA, 25 bp, Homo sapien
ccgagttgtcctactaaatcctgcc

SEQ ID NO: 2162632 - DNA, 25 bp, Homo sapien
gggtatctcgaagagatctcgggca

SEQ ID NO: 2162633 - DNA, 25 bp, Homo sapien
tctcgggcagctcgcccgtcttgag

SEQ ID NO: 2162634 - DNA, 25 bp, Homo sapien
gcagccagccgccaagtcattagta

SEQ ID NO: 2162635 - DNA, 25 bp, Homo sapien
cttcggtgtcaactcaggtacctac

SEQ ID NO: 2162636 - DNA, 25 bp, Homo sapien
ggtgtcaactcaggtacctacaggc

SEQ ID NO: 2162637 - DNA, 25 bp, Homo sapien
tgtcaactcaggtacctacaggcaa

SEQ ID NO: 2162638 - DNA, 25 bp, Homo sapien
tcaactcaggtacctacaggcaaac

SEQ ID NO: 2162639 - DNA, 25 bp, Homo sapien
ctgaggaaccaaacgccgctcagca

SEQ ID NO: 2162640 - DNA, 25 bp, Homo sapien
tgaggaaccaaacgccgctcagcat

SEQ ID NO: 2162641 - DNA, 25 bp, Homo sapien
ggttttggcacatctgacccacagg

SEQ ID NO: 2162642 - DNA, 25 bp, Homo sapien
tctatctggatgaaagccgggagct

SEQ ID NO: 2162643 - DNA, 25 bp, Homo sapien
tccaatatgttcaaggacgccagca

SEQ ID NO: 2162644 - DNA, 25 bp, Homo sapien
ttatagtggactaggcctgcgctgg

SEQ ID NO: 2162645 - DNA, 25 bp, Homo sapien
gctatactcggtaactgacgatgga

SEQ ID NO: 2162646 - DNA, 25 bp, Homo sapien
aattattaatcctgactgaggtggc

SEQ ID NO: 2162647 - DNA, 25 bp, Homo sapien
caacagttcggagcagcatcctctg

SEQ ID NO: 2162648 - DNA, 25 bp, Homo sapien
taatgtacttaaagtgcgaaggcac

SEQ ID NO: 2162649 - DNA, 25 bp, Homo sapien
aaacagtgtgcttctttcagacgcc

SEQ ID NO: 2162650 - DNA, 25 bp, Homo sapien
gatcaccatcccagttgcataagga

SEQ ID NO: 2162651 - DNA, 25 bp, Homo sapien
tagtacttgatttgatagcacccca

SEQ ID NO: 2162652 - DNA, 25 bp, Homo sapien
gacgccatcgcttgctttaataagg

SEQ ID NO: 2162653 - DNA, 25 bp, Homo sapien
gggatgctagtgagttaataaaact

SEQ ID NO: 2162654 - DNA, 25 bp, Homo sapien
tcaaagtatatgatgtatgatgatt

SEQ ID NO: 2162655 - DNA, 25 bp, Homo sapien
ggtcgaaagtgcttgagcagataaa

SEQ ID NO: 2162656 - DNA, 25 bp, Homo sapien
tgaaatagcaatatccagctgtgga

SEQ ID NO: 2162657 - DNA, 25 bp, Homo sapien
aaacacagttactatgcaggtgggc

SEQ ID NO: 2162658 - DNA, 25 bp, Homo sapien
aaactggtagcacaagcagccttgg

SEQ ID NO: 2162659 - DNA, 25 bp, Homo sapien
tctcaggacatagcctagagccagg

SEQ ID NO: 2162660 - DNA, 25 bp, Homo sapien
cacgaagctccttgctagggtgaga

SEQ ID NO: 2162661 - DNA, 25 bp, Homo sapien
tattaggcacagaagtctatttaca

SEQ ID NO: 2162662 - DNA, 25 bp, Homo sapien
gtcactattaggcacagaagtctat

SEQ ID NO: 2162663 - DNA, 25 bp, Homo sapien
acaatgtcactattaggcacagaag

SEQ ID NO: 2162664 - DNA, 25 bp, Homo sapien
ggcacagaagtctatttacacaaga

SEQ ID NO: 2162665 - DNA, 25 bp, Homo sapien
accacactctgagttatatataatc

SEQ ID NO: 2162666 - DNA, 25 bp, Homo sapien
attaactcactgatactcacaacca

SEQ ID NO: 2162667 - DNA, 25 bp, Homo sapien
tcacaaccacactctgagttatata

SEQ ID NO: 2162668 - DNA, 25 bp, Homo sapien
tatataatcattgtctctttgtttc

SEQ ID NO: 2162669 - DNA, 25 bp, Homo sapien
taaagttagcttgaagactgacctc

SEQ ID NO: 2162670 - DNA, 25 bp, Homo sapien
tgaaaattgtcgttgctgcctatca

SEQ ID NO: 2162671 - DNA, 25 bp, Homo sapien
aataaacgtggagaggattcctgca

SEQ ID NO: 2162672 - DNA, 25 bp, Homo sapien
tatcatgacctgttacagcactggc

SEQ ID NO: 2162673 - DNA, 25 bp, Homo sapien
taggaaagcgtttgaaatgggaagc

SEQ ID NO: 2162674 - DNA, 25 bp, Homo sapien
catgatttcttgtaggaaagcgttt

SEQ ID NO: 2162675 - DNA, 25 bp, Homo sapien
tcttgtaggaaagcgtttgaaatgg

SEQ ID NO: 2162676 - DNA, 25 bp, Homo sapien
gatttcttgtaggaaagcgtttgaa

SEQ ID NO: 2162677 - DNA, 25 bp, Homo sapien
gtgatgcagatgtaatcatattctt

SEQ ID NO: 2162678 - DNA, 25 bp, Homo sapien
atcatattctttgcaccagggtttt

SEQ ID NO: 2162679 - DNA, 25 bp, Homo sapien
ttttggtcacaatttaatggaatac

SEQ ID NO: 2162680 - DNA, 25 bp, Homo sapien
tcgatcctcgggaaaatctgtgatg

SEQ ID NO: 2162681 - DNA, 25 bp, Homo sapien
ccggcgatctcatcttttagacgtg

SEQ ID NO: 2162682 - DNA, 25 bp, Homo sapien
ttagacgtgggacatccagctgtac

SEQ ID NO: 2162683 - DNA, 25 bp, Homo sapien
tctggtcccttaggtggaaggcgta

SEQ ID NO: 2162684 - DNA, 25 bp, Homo sapien
cagctgtactatgggatctggtccc

SEQ ID NO: 2162685 - DNA, 25 bp, Homo sapien
tcagccaaattcatccagggttgcc

SEQ ID NO: 2162686 - DNA, 25 bp, Homo sapien
aatacctttagtgatgaccctcatt

SEQ ID NO: 2162687 - DNA, 25 bp, Homo sapien
ttttcaaatgtatgagtgtaaattg

SEQ ID NO: 2162688 - DNA, 25 bp, Homo sapien
ttgatattagtgagttgtgtcttct

SEQ ID NO: 2162689 - DNA, 25 bp, Homo sapien
attatcactgtaatacctttagtga

SEQ ID NO: 2162690 - DNA, 25 bp, Homo sapien
ggacctcaggcatcgtcgagatatt

SEQ ID NO: 2162691 - DNA, 25 bp, Homo sapien
caagagccttgaggtacctttcctg

SEQ ID NO: 2162692 - DNA, 25 bp, Homo sapien
tagtggcctttggacccatgatagg

SEQ ID NO: 2162693 - DNA, 25 bp, Homo sapien
gagaccttagttggccatgtggacc

SEQ ID NO: 2162694 - DNA, 25 bp, Homo sapien
ttcttgcgtggtaaacagcttatca

SEQ ID NO: 2162695 - DNA, 25 bp, Homo sapien
ccatgccaactggtgtattcagtgc

SEQ ID NO: 2162696 - DNA, 25 bp, Homo sapien
gtgtgagataaacatcctaaggcca

SEQ ID NO: 2162697 - DNA, 25 bp, Homo sapien
catagtagtctctgactccatgcca

SEQ ID NO: 2162698 - DNA, 25 bp, Homo sapien
tccagccatttgcttcatttaacat

SEQ ID NO: 2162699 - DNA, 25 bp, Homo sapien
tgtcagctcaatatgggttttccag

SEQ ID NO: 2162700 - DNA, 25 bp, Homo sapien
cacatcatgagttttatgaactgtc

SEQ ID NO: 2162701 - DNA, 25 bp, Homo sapien
gagttttatgaactgtcagctcaat

SEQ ID NO: 2162702 - DNA, 25 bp, Homo sapien
tatattctgctgattgatattcaat

SEQ ID NO: 2162703 - DNA, 25 bp, Homo sapien
tcaatgtgttcaccctttagatcac

SEQ ID NO: 2162704 - DNA, 25 bp, Homo sapien
cagtgtgttcaattgtatttccagg

SEQ ID NO: 2162705 - DNA, 25 bp, Homo sapien
tagatcacttcttgcaaatccatgc

SEQ ID NO: 2162706 - DNA, 25 bp, Homo sapien
tagcgcctggtgtggtaaatatcct

SEQ ID NO: 2162707 - DNA, 25 bp, Homo sapien
gatctccatctcgtagggcttggct

SEQ ID NO: 2162708 - DNA, 25 bp, Homo sapien
gactgtcagtgtgtgagcccggacc

SEQ ID NO: 2162709 - DNA, 25 bp, Homo sapien
cattaacacggttcggtggacctga

SEQ ID NO: 2162710 - DNA, 25 bp, Homo sapien
caacatgggattgcttcttcaggta

SEQ ID NO: 2162711 - DNA, 25 bp, Homo sapien
tctgagcactatcttctgagatgaa

SEQ ID NO: 2162712 - DNA, 25 bp, Homo sapien
cttcaggtagaaggtcaggcttgga

SEQ ID NO: 2162713 - DNA, 25 bp, Homo sapien
catgcccagtaggtgtctgagcact

SEQ ID NO: 2162714 - DNA, 25 bp, Homo sapien
agacggctgaccatggtaatggaag

SEQ ID NO: 2162715 - DNA, 25 bp, Homo sapien
gcatagacggctgaccatggtaatg

SEQ ID NO: 2162716 - DNA, 25 bp, Homo sapien
tggaagaggaaaacggcgagggcat

SEQ ID NO: 2162717 - DNA, 25 bp, Homo sapien
ggaaaacggcgagggcatccctcca

SEQ ID NO: 2162718 - DNA, 25 bp, Homo sapien
attgtatatccacccaaagtaaagg

SEQ ID NO: 2162719 - DNA, 25 bp, Homo sapien
tatttcattgtatatccacccaaag

SEQ ID NO: 2162720 - DNA, 25 bp, Homo sapien
agacaacgagttaagacaccttcct

SEQ ID NO: 2162721 - DNA, 25 bp, Homo sapien
ccttcctcacgaagtgtagcattga

SEQ ID NO: 2162722 - DNA, 25 bp, Homo sapien
cttggtagaagacaaagggaaggag

SEQ ID NO: 2162723 - DNA, 25 bp, Homo sapien
tggtagaagacaaagggaaggagga

SEQ ID NO: 2162724 - DNA, 25 bp, Homo sapien
ttctcagctgctttcacaatgcatt

SEQ ID NO: 2162725 - DNA, 25 bp, Homo sapien
cagctgctttcacaatgcattgatt

SEQ ID NO: 2162726 - DNA, 25 bp, Homo sapien
ctgctttcacaatgcattgattcca

SEQ ID NO: 2162727 - DNA, 25 bp, Homo sapien
gctttcacaatgcattgattccaca

SEQ ID NO: 2162728 - DNA, 25 bp, Homo sapien
gaataggcagtaagcggtcagggaa

SEQ ID NO: 2162729 - DNA, 25 bp, Homo sapien
cagctgatgagcagaaggtcgcaag

SEQ ID NO: 2162730 - DNA, 25 bp, Homo sapien
gaaggaagtaagcagaagagtccag

SEQ ID NO: 2162731 - DNA, 25 bp, Homo sapien
aaggctggcggcatgtggaatggca

SEQ ID NO: 2162732 - DNA, 25 bp, Homo sapien
gtttatgatcgccatggcccgtgga

SEQ ID NO: 2162733 - DNA, 25 bp, Homo sapien
agtattgtctttggccacttctgaa

SEQ ID NO: 2162734 - DNA, 25 bp, Homo sapien
gcaagctctctttaggtgctacaga

SEQ ID NO: 2162735 - DNA, 25 bp, Homo sapien
tctgaaatgcatgttgaagagcaag

SEQ ID NO: 2162736 - DNA, 25 bp, Homo sapien
caggtactgagatcctatagcccat

SEQ ID NO: 2162737 - DNA, 25 bp, Homo sapien
tgggacccaaatgccgagctggact

SEQ ID NO: 2162738 - DNA, 25 bp, Homo sapien
tccgcttcagtcaagtccccaggta

SEQ ID NO: 2162739 - DNA, 25 bp, Homo sapien
tggatgtaggagcaacatgtgcttc

SEQ ID NO: 2162740 - DNA, 25 bp, Homo sapien
tcaacttaagggtctctaccagtaa

SEQ ID NO: 2162741 - DNA, 25 bp, Homo sapien
gcatcttttcttatacactgacatt

SEQ ID NO: 2162742 - DNA, 25 bp, Homo sapien
aattcaacttaagggtctctaccag

SEQ ID NO: 2162743 - DNA, 25 bp, Homo sapien
tggatgaggcttcaacatgcatctt

SEQ ID NO: 2162744 - DNA, 25 bp, Homo sapien
gaaacatggtgagtggctctttccc

SEQ ID NO: 2162745 - DNA, 25 bp, Homo sapien
taattgagcgataccaggtgcttca

SEQ ID NO: 2162746 - DNA, 25 bp, Homo sapien
tagcataattgagcgataccaggtg

SEQ ID NO: 2162747 - DNA, 25 bp, Homo sapien
tctgtctagcataattgagcgatac

SEQ ID NO: 2162748 - DNA, 25 bp, Homo sapien
gagcgataccaggtgcttcatccag

SEQ ID NO: 2162749 - DNA, 25 bp, Homo sapien
ccatggtattggtctttcgtggtca

SEQ ID NO: 2162750 - DNA, 25 bp, Homo sapien
gagccctggttcaccatggtattgg

SEQ ID NO: 2162751 - DNA, 25 bp, Homo sapien
taaatccagactttctaggtaggcc

SEQ ID NO: 2162752 - DNA, 25 bp, Homo sapien
tagctaggagtcttgattccggtgg

SEQ ID NO: 2162753 - DNA, 25 bp, Homo sapien
ttctatctcagtggtggtcagacac

SEQ ID NO: 2162754 - DNA, 25 bp, Homo sapien
gatctaaaccagcagattcttcaca

SEQ ID NO: 2162755 - DNA, 25 bp, Homo sapien
aagaaggagctgcattggatctcag

SEQ ID NO: 2162756 - DNA, 25 bp, Homo sapien
cccctcataatgtctactgtgggaa

SEQ ID NO: 2162757 - DNA, 25 bp, Homo sapien
gctggagaaacggcccagatattgc

SEQ ID NO: 2162758 - DNA, 25 bp, Homo sapien
caggctggagaaacggcccagatat

SEQ ID NO: 2162759 - DNA, 25 bp, Homo sapien
agtctgaggaggataagaacagggc

SEQ ID NO: 2162760 - DNA, 25 bp, Homo sapien
gaccactgttctataatcaagctaa

SEQ ID NO: 2162761 - DNA, 25 bp, Homo sapien
cagtaagccccggttcccataattg

SEQ ID NO: 2162762 - DNA, 25 bp, Homo sapien
tgtcactgaactgctaccacaggga

SEQ ID NO: 2162763 - DNA, 25 bp, Homo sapien
taccacagggactgatgtgccactc

SEQ ID NO: 2162764 - DNA, 25 bp, Homo sapien
ttgttcatagtatcctcctttcttg

SEQ ID NO: 2162765 - DNA, 25 bp, Homo sapien
attgttcatagtatcctcctttctt

SEQ ID NO: 2162766 - DNA, 25 bp, Homo sapien
actgaattcgaaacatgacaaccat

SEQ ID NO: 2162767 - DNA, 25 bp, Homo sapien
cactgaattcgaaacatgacaacca

SEQ ID NO: 2162768 - DNA, 25 bp, Homo sapien
ccactgaattcgaaacatgacaacc

SEQ ID NO: 2162769 - DNA, 25 bp, Homo sapien
ggctagtgacctcatcaacaacgca

SEQ ID NO: 2162770 - DNA, 25 bp, Homo sapien
cccaaggctagtgacctcatcaaca

SEQ ID NO: 2162771 - DNA, 25 bp, Homo sapien
tcaacaacgcatttactgtgaccag

SEQ ID NO: 2162772 - DNA, 25 bp, Homo sapien
atttactgtgaccagtacttctctg

SEQ ID NO: 2162773 - DNA, 25 bp, Homo sapien
ttcatgctgggaagcgtcccctgga

SEQ ID NO: 2162774 - DNA, 25 bp, Homo sapien
tatatatgaatgactcttgctcgtt

SEQ ID NO: 2162775 - DNA, 25 bp, Homo sapien
cctggagttgcctgcaaacttctgc

SEQ ID NO: 2162776 - DNA, 25 bp, Homo sapien
taatctaacacaaagatttcccact

SEQ ID NO: 2162777 - DNA, 25 bp, Homo sapien
gctacagccactgaaatggtaacat

SEQ ID NO: 2162778 - DNA, 25 bp, Homo sapien
ggctacagccactgaaatggtaaca

SEQ ID NO: 2162779 - DNA, 25 bp, Homo sapien
cagccactgaaatggtaacatatac

SEQ ID NO: 2162780 - DNA, 25 bp, Homo sapien
tacagccactgaaatggtaacatat

SEQ ID NO: 2162781 - DNA, 25 bp, Homo sapien
tgagaacataccttgggcaaaaatg

SEQ ID NO: 2162782 - DNA, 25 bp, Homo sapien
cctgagaacataccttgggcaaaaa

SEQ ID NO: 2162783 - DNA, 25 bp, Homo sapien
tgcctgagaacataccttgggcaaa

SEQ ID NO: 2162784 - DNA, 25 bp, Homo sapien
agctgcctgagaacataccttgggc

SEQ ID NO: 2162785 - DNA, 25 bp, Homo sapien
gcaactcctggttgtccatggacag

SEQ ID NO: 2162786 - DNA, 25 bp, Homo sapien
acttgtcagcaactcctggttgtcc

SEQ ID NO: 2162787 - DNA, 25 bp, Homo sapien
tgtcagcaactcctggttgtccatg

SEQ ID NO: 2162788 - DNA, 25 bp, Homo sapien
cagcaactcctggttgtccatggac

SEQ ID NO: 2162789 - DNA, 25 bp, Homo sapien
ggttgatagccaaatgacactggca

SEQ ID NO: 2162790 - DNA, 25 bp, Homo sapien
tgagtcctgtagttcagcatgctgg

SEQ ID NO: 2162791 - DNA, 25 bp, Homo sapien
tgatgcatctgagtcctgtagttca

SEQ ID NO: 2162792 - DNA, 25 bp, Homo sapien
ttcagcatgctggttgatagccaaa

SEQ ID NO: 2162793 - DNA, 25 bp, Homo sapien
cacacagtctggttggtagctctgc

SEQ ID NO: 2162794 - DNA, 25 bp, Homo sapien
cacagtctggttggtagctctgcct

SEQ ID NO: 2162795 - DNA, 25 bp, Homo sapien
ctccacacagtctggttggtagctc

SEQ ID NO: 2162796 - DNA, 25 bp, Homo sapien
tctggttggtagctctgccttcctc

SEQ ID NO: 2162797 - DNA, 25 bp, Homo sapien
aagtgactccttccacttgaccatt

SEQ ID NO: 2162798 - DNA, 25 bp, Homo sapien
ttgaccattatacgcaggcattttc

SEQ ID NO: 2162799 - DNA, 25 bp, Homo sapien
taacttttgtacattgctgctgtca

SEQ ID NO: 2162800 - DNA, 25 bp, Homo sapien
cattttcttagacctgctgatctgt

SEQ ID NO: 2162801 - DNA, 25 bp, Homo sapien
gatggtacataagcgttatcagctc

SEQ ID NO: 2162802 - DNA, 25 bp, Homo sapien
cataagcgttatcagctccagtgtg

SEQ ID NO: 2162803 - DNA, 25 bp, Homo sapien
ggtacataagcgttatcagctccag

SEQ ID NO: 2162804 - DNA, 25 bp, Homo sapien
ctgaagggatggtacataagcgtta

SEQ ID NO: 2162805 - DNA, 25 bp, Homo sapien
tatccaggttagattcatcattttc

SEQ ID NO: 2162806 - DNA, 25 bp, Homo sapien
ccagaaatatccaggttagattcat

SEQ ID NO: 2162807 - DNA, 25 bp, Homo sapien
cagaaatatccaggttagattcatc

SEQ ID NO: 2162808 - DNA, 25 bp, Homo sapien
aatatccaggttagattcatcattt

SEQ ID NO: 2162809 - DNA, 25 bp, Homo sapien
tgaaggctgctgtgttgtcgtatgc

SEQ ID NO: 2162810 - DNA, 25 bp, Homo sapien
tgactccggtgatgaccctcctgtg

SEQ ID NO: 2162811 - DNA, 25 bp, Homo sapien
gggcatgacccaagtccgactgcag

SEQ ID NO: 2162812 - DNA, 25 bp, Homo sapien
taaaacttcgactgcaggctcccag

SEQ ID NO: 2162813 - DNA, 25 bp, Homo sapien
gctttgcaggttatagcccggatcc

SEQ ID NO: 2162814 - DNA, 25 bp, Homo sapien
caattcattgagtacgcatgggctc

SEQ ID NO: 2162815 - DNA, 25 bp, Homo sapien
aagtccctaggttgcacatagcggg

SEQ ID NO: 2162816 - DNA, 25 bp, Homo sapien
ttcagagttccaccaatcgttaggg

SEQ ID NO: 2162817 - DNA, 25 bp, Homo sapien
taagtaattctcctggaccaaggag

SEQ ID NO: 2162818 - DNA, 25 bp, Homo sapien
cagtgttgacttcaggcccggaata

SEQ ID NO: 2162819 - DNA, 25 bp, Homo sapien
cctgacataatgactactaggagtt

SEQ ID NO: 2162820 - DNA, 25 bp, Homo sapien
caggacacagagaattcccaatatg

SEQ ID NO: 2162821 - DNA, 25 bp, Homo sapien
tagggtctgcggactatatatttaa

SEQ ID NO: 2162822 - DNA, 25 bp, Homo sapien
gatctcttgtaagcctagtctactg

SEQ ID NO: 2162823 - DNA, 25 bp, Homo sapien
taggtgaagttttgatactatcgtg

SEQ ID NO: 2162824 - DNA, 25 bp, Homo sapien
tattacgtagttacttgatagggtc

SEQ ID NO: 2162825 - DNA, 25 bp, Homo sapien
tatgcaagactaatggaggctgttc

SEQ ID NO: 2162826 - DNA, 25 bp, Homo sapien
tcagttccaggaagtgaatcaccct

SEQ ID NO: 2162827 - DNA, 25 bp, Homo sapien
tatggccccatgagaacaccattgg

SEQ ID NO: 2162828 - DNA, 25 bp, Homo sapien
cattggcgacccttgacttttgagt

SEQ ID NO: 2162829 - DNA, 25 bp, Homo sapien
ggtgtccacctctcacaaacagtga

SEQ ID NO: 2162830 - DNA, 25 bp, Homo sapien
aaggtgtccacctctcacaaacagt

SEQ ID NO: 2162831 - DNA, 25 bp, Homo sapien
gccgtggttctgttgccgccgagct

SEQ ID NO: 2162832 - DNA, 25 bp, Homo sapien
caggagccccatcccagccgtggtt

SEQ ID NO: 2162833 - DNA, 25 bp, Homo sapien
agagaccccgagagagactgcactt

SEQ ID NO: 2162834 - DNA, 25 bp, Homo sapien
acgacgactttgtattgttgccggc

SEQ ID NO: 2162835 - DNA, 25 bp, Homo sapien
cagcttctgtttgaaaacggcgacc

SEQ ID NO: 2162836 - DNA, 25 bp, Homo sapien
ccttccagactggtccagacgtcgg

SEQ ID NO: 2162837 - DNA, 25 bp, Homo sapien
gggcttggtcttactatgaaaacaa

SEQ ID NO: 2162838 - DNA, 25 bp, Homo sapien
cagtggaaactagaagggcttggtc

SEQ ID NO: 2162839 - DNA, 25 bp, Homo sapien
taggcagtagactgtcaaacacagc

SEQ ID NO: 2162840 - DNA, 25 bp, Homo sapien
ctgccatgagtagggttattgtgac

SEQ ID NO: 2162841 - DNA, 25 bp, Homo sapien
aaagattccatacgatattgtttat

SEQ ID NO: 2162842 - DNA, 25 bp, Homo sapien
gaaagattccatacgatattgttta

SEQ ID NO: 2162843 - DNA, 25 bp, Homo sapien
ggaaagattccatacgatattgttt

SEQ ID NO: 2162844 - DNA, 25 bp, Homo sapien
ctttttatgtagattctatagttgt

SEQ ID NO: 2162845 - DNA, 25 bp, Homo sapien
ttatgtagattctatagttgtttgc

SEQ ID NO: 2162846 - DNA, 25 bp, Homo sapien
actttttatgtagattctatagttg

SEQ ID NO: 2162847 - DNA, 25 bp, Homo sapien
tttatgtagattctatagttgtttg

SEQ ID NO: 2162848 - DNA, 25 bp, Homo sapien
cagggtagttagctagctcttttcc

SEQ ID NO: 2162849 - DNA, 25 bp, Homo sapien
gggtagttagctagctcttttcctg

SEQ ID NO: 2162850 - DNA, 25 bp, Homo sapien
tagttagctagctcttttcctgtgg

SEQ ID NO: 2162851 - DNA, 25 bp, Homo sapien
gttagctagctcttttcctgtgggt

SEQ ID NO: 2162852 - DNA, 25 bp, Homo sapien
ctggtaccagtttgctgtaaaagcc

SEQ ID NO: 2162853 - DNA, 25 bp, Homo sapien
taccttgtagttactgcattcattg

SEQ ID NO: 2162854 - DNA, 25 bp, Homo sapien
gcctagagtaacaattaccttgtag

SEQ ID NO: 2162855 - DNA, 25 bp, Homo sapien
tactcgaagttcagcctcggagaag

SEQ ID NO: 2162856 - DNA, 25 bp, Homo sapien
ctggagagtgggcacggtcagtgga

SEQ ID NO: 2162857 - DNA, 25 bp, Homo sapien
ggagcagttgcatagattcccttga

SEQ ID NO: 2162858 - DNA, 25 bp, Homo sapien
ttcccttgactgtaagttggctttc

SEQ ID NO: 2162859 - DNA, 25 bp, Homo sapien
cccttgactgtaagttggctttctc

SEQ ID NO: 2162860 - DNA, 25 bp, Homo sapien
tacttgaggttgatggggtctgttc

SEQ ID NO: 2162861 - DNA, 25 bp, Homo sapien
ggcttctgtggctcactggtcacct

SEQ ID NO: 2162862 - DNA, 25 bp, Homo sapien
cttaacgccgcttctggaccttcgt

SEQ ID NO: 2162863 - DNA, 25 bp, Homo sapien
ccgcttctggaccttcgttgacggg

SEQ ID NO: 2162864 - DNA, 25 bp, Homo sapien
tctagagacatcacagaactgaggt

SEQ ID NO: 2162865 - DNA, 25 bp, Homo sapien
tagtttcaccggctttttggctcga

SEQ ID NO: 2162866 - DNA, 25 bp, Homo sapien
tttcagccggtgataacgaccacgc

SEQ ID NO: 2162867 - DNA, 25 bp, Homo sapien
tgacttttcagtggcggacctctag

SEQ ID NO: 2162868 - DNA, 25 bp, Homo sapien
ttcatggttttaacctgttggtgta

SEQ ID NO: 2162869 - DNA, 25 bp, Homo sapien
tcatggttttaacctgttggtgtag

SEQ ID NO: 2162870 - DNA, 25 bp, Homo sapien
catggttttaacctgttggtgtaga

SEQ ID NO: 2162871 - DNA, 25 bp, Homo sapien
attgctcaaaggtgaagtttggaat

SEQ ID NO: 2162872 - DNA, 25 bp, Homo sapien
aataatgtagttagctatttgtgtg

SEQ ID NO: 2162873 - DNA, 25 bp, Homo sapien
gtttggaataatgtagttagctatt

SEQ ID NO: 2162874 - DNA, 25 bp, Homo sapien
ttgctcaaaggtgaagtttggaata

SEQ ID NO: 2162875 - DNA, 25 bp, Homo sapien
agtctgtgccttctatcctcaaggt

SEQ ID NO: 2162876 - DNA, 25 bp, Homo sapien
ggttactatggtgctgaccatcttg

SEQ ID NO: 2162877 - DNA, 25 bp, Homo sapien
atcagttatctcaggatggttacta

SEQ ID NO: 2162878 - DNA, 25 bp, Homo sapien
tctgttctgcttcccgtagtctgtg

SEQ ID NO: 2162879 - DNA, 25 bp, Homo sapien
cctctcacattcctcgtgagaaaaa

SEQ ID NO: 2162880 - DNA, 25 bp, Homo sapien
tgagaaaaattggaggcagtagaga

SEQ ID NO: 2162881 - DNA, 25 bp, Homo sapien
tagagaggatgaaaaggcctccttt

SEQ ID NO: 2162882 - DNA, 25 bp, Homo sapien
cctcctttgcagtgcaggacaggga

SEQ ID NO: 2162883 - DNA, 25 bp, Homo sapien
agcattcaaccctctgataaatctg

SEQ ID NO: 2162884 - DNA, 25 bp, Homo sapien
ggacacagattcagatgcattatgt

SEQ ID NO: 2162885 - DNA, 25 bp, Homo sapien
tacaatgtccccatacttgaggtta

SEQ ID NO: 2162886 - DNA, 25 bp, Homo sapien
tacacaaaacggcagctggtccact

SEQ ID NO: 2162887 - DNA, 25 bp, Homo sapien
tcatcctggagttcaattgccttga

SEQ ID NO: 2162888 - DNA, 25 bp, Homo sapien
catgagagaggctttgatacaagca

SEQ ID NO: 2162889 - DNA, 25 bp, Homo sapien
tactcaccctattatgctatcgaat

SEQ ID NO: 2162890 - DNA, 25 bp, Homo sapien
tgccttgatgtttagattccaccaa

SEQ ID NO: 2162891 - DNA, 25 bp, Homo sapien
ctttggtcttcacaagagcaactct

SEQ ID NO: 2162892 - DNA, 25 bp, Homo sapien
tttggtcttcacaagagcaactctt

SEQ ID NO: 2162893 - DNA, 25 bp, Homo sapien
gctttggtcttcacaagagcaactc

SEQ ID NO: 2162894 - DNA, 25 bp, Homo sapien
tggtcttcacaagagcaactctttt

SEQ ID NO: 2162895 - DNA, 25 bp, Homo sapien
tcagtctgaaaagtcaaagagaaat

SEQ ID NO: 2162896 - DNA, 25 bp, Homo sapien
catcttggtggcttgcatgggtact

SEQ ID NO: 2162897 - DNA, 25 bp, Homo sapien
catcagggtggcaagtctattttca

SEQ ID NO: 2162898 - DNA, 25 bp, Homo sapien
taggtttgaattgacccctcgagca

SEQ ID NO: 2162899 - DNA, 25 bp, Homo sapien
tggtgttacccgaagcctaagacaa

SEQ ID NO: 2162900 - DNA, 25 bp, Homo sapien
ttttgatctctgctacttaactcca

SEQ ID NO: 2162901 - DNA, 25 bp, Homo sapien
taactccaatgttccagtcttatgt

SEQ ID NO: 2162902 - DNA, 25 bp, Homo sapien
tgatctctgctacttaactccaatg

SEQ ID NO: 2162903 - DNA, 25 bp, Homo sapien
tatgttgtgctttgtaattgaccat

SEQ ID NO: 2162904 - DNA, 25 bp, Homo sapien
aactggtccttattgcgtagtggca

SEQ ID NO: 2162905 - DNA, 25 bp, Homo sapien
aaacaattccacacaggagactgag

SEQ ID NO: 2162906 - DNA, 25 bp, Homo sapien
ctaatgagacagaaggcaagccagg

SEQ ID NO: 2162907 - DNA, 25 bp, Homo sapien
actttcaaaaacagagtgaccgtgt

SEQ ID NO: 2162908 - DNA, 25 bp, Homo sapien
ccagagcgaagaatccatgtaaaac

SEQ ID NO: 2162909 - DNA, 25 bp, Homo sapien
cagagcgaagaatccatgtaaaaca

SEQ ID NO: 2162910 - DNA, 25 bp, Homo sapien
agtcacatacaacacctccatctgc

SEQ ID NO: 2162911 - DNA, 25 bp, Homo sapien
ctaccagagcgaagaatccatgtaa

SEQ ID NO: 2162912 - DNA, 25 bp, Homo sapien
catcagtaagaacagggccttggtc

SEQ ID NO: 2162913 - DNA, 25 bp, Homo sapien
tcagtagtcgccacaaagagcaaga

SEQ ID NO: 2162914 - DNA, 25 bp, Homo sapien
gactgagcaacactgacgacgctga

SEQ ID NO: 2162915 - DNA, 25 bp, Homo sapien
gacgctgaagaaccacggctgatat

SEQ ID NO: 2162916 - DNA, 25 bp, Homo sapien
tggaaccggcccgtttgtcactcaa

SEQ ID NO: 2162917 - DNA, 25 bp, Homo sapien
ttgtcactcaaacctgtgctggtta

SEQ ID NO: 2162918 - DNA, 25 bp, Homo sapien
tgtgtccatggaaccggcccgtttg

SEQ ID NO: 2162919 - DNA, 25 bp, Homo sapien
gaagtcacctgtgtccatggaaccg

SEQ ID NO: 2162920 - DNA, 25 bp, Homo sapien
aagacatgtaaacacttatgaaaat

SEQ ID NO: 2162921 - DNA, 25 bp, Homo sapien
gacatgtaaacacttatgaaaatac

SEQ ID NO: 2162922 - DNA, 25 bp, Homo sapien
agacatgtaaacacttatgaaaata

SEQ ID NO: 2162923 - DNA, 25 bp, Homo sapien
tcccaggaagcaccttataccgctt

SEQ ID NO: 2162924 - DNA, 25 bp, Homo sapien
gaagcaccttataccgcttaaaagc

SEQ ID NO: 2162925 - DNA, 25 bp, Homo sapien
taactctcccaggaagcaccttata

SEQ ID NO: 2162926 - DNA, 25 bp, Homo sapien
ctatgcaataactctcccaggaagc

SEQ ID NO: 2162927 - DNA, 25 bp, Homo sapien
ttcacgtcctgtgttctcctcagtc

SEQ ID NO: 2162928 - DNA, 25 bp, Homo sapien
cttcacgtcctgtgttctcctcagt

SEQ ID NO: 2162929 - DNA, 25 bp, Homo sapien
ccttcacgtcctgtgttctcctcag

SEQ ID NO: 2162930 - DNA, 25 bp, Homo sapien
caggggcaaggctggcagtggtgta

SEQ ID NO: 2162931 - DNA, 25 bp, Homo sapien
gcaaggctggcagtggtgtaggctg

SEQ ID NO: 2162932 - DNA, 25 bp, Homo sapien
gggcaaggctggcagtggtgtaggc

SEQ ID NO: 2162933 - DNA, 25 bp, Homo sapien
caaggctggcagtggtgtaggctgg

SEQ ID NO: 2162934 - DNA, 25 bp, Homo sapien
cgtccagctgattttcggaggcatc

SEQ ID NO: 2162935 - DNA, 25 bp, Homo sapien
ggtcggaaaagaataacgcattgga

SEQ ID NO: 2162936 - DNA, 25 bp, Homo sapien
attttcggaggcatctggtgagagt

SEQ ID NO: 2162937 - DNA, 25 bp, Homo sapien
ataacgcattggatttttgccaccc

SEQ ID NO: 2162938 - DNA, 25 bp, Homo sapien
ccatggtgacggcagtcattcttga

SEQ ID NO: 2162939 - DNA, 25 bp, Homo sapien
atgtaaagctgatgagcagtaagac

SEQ ID NO: 2162940 - DNA, 25 bp, Homo sapien
ggaattgtgactgtgatgcagatgt

SEQ ID NO: 2162941 - DNA, 25 bp, Homo sapien
tgatgcagatgtaaagctgatgagc

SEQ ID NO: 2162942 - DNA, 25 bp, Homo sapien
ccaggcctgtaaggtgcaggaattg

SEQ ID NO: 2162943 - DNA, 25 bp, Homo sapien
ctacactcaatcttgaactaagggt

SEQ ID NO: 2162944 - DNA, 25 bp, Homo sapien
agggtacagagaagttgcccgaatg

SEQ ID NO: 2162945 - DNA, 25 bp, Homo sapien
caatcttgaactaagggtacagaga

SEQ ID NO: 2162946 - DNA, 25 bp, Homo sapien
gagaagttgcccgaatgattccaca

SEQ ID NO: 2162947 - DNA, 25 bp, Homo sapien
tccatttgtgctgcccaatcctcaa

SEQ ID NO: 2162948 - DNA, 25 bp, Homo sapien
gtgctgcccaatcctcaacttcagg

SEQ ID NO: 2162949 - DNA, 25 bp, Homo sapien
ttgttctccatttgtgctgcccaat

SEQ ID NO: 2162950 - DNA, 25 bp, Homo sapien
gttctccatttgtgctgcccaatcc

SEQ ID NO: 2162951 - DNA, 25 bp, Homo sapien
ctccagagcaggctattccctcctt

SEQ ID NO: 2162952 - DNA, 25 bp, Homo sapien
aaccccttgagaggggcatgaaggg

SEQ ID NO: 2162953 - DNA, 25 bp, Homo sapien
ccctccagagcaggctattccctcc

SEQ ID NO: 2162954 - DNA, 25 bp, Homo sapien
tccctccagagcaggctattccctc

SEQ ID NO: 2162955 - DNA, 25 bp, Homo sapien
attccgcccagagagctcttctgaa

SEQ ID NO: 2162956 - DNA, 25 bp, Homo sapien
gcacaatctcagcagcatttcccac

SEQ ID NO: 2162957 - DNA, 25 bp, Homo sapien
ctcttctgaaatgggtggcacaatc

SEQ ID NO: 2162958 - DNA, 25 bp, Homo sapien
gagctcttctgaaatgggtggcaca

SEQ ID NO: 2162959 - DNA, 25 bp, Homo sapien
cttctccagatccagataatcttct

SEQ ID NO: 2162960 - DNA, 25 bp, Homo sapien
atcttctgtgaagctgtgcagatac

SEQ ID NO: 2162961 - DNA, 25 bp, Homo sapien
tccagatccagataatcttctgtga

SEQ ID NO: 2162962 - DNA, 25 bp, Homo sapien
agatccagataatcttctgtgaagc

SEQ ID NO: 2162963 - DNA, 25 bp, Homo sapien
acagagtgagtaatgcaaacacaca

SEQ ID NO: 2162964 - DNA, 25 bp, Homo sapien
tctaaccacagagtgagtaatgcaa

SEQ ID NO: 2162965 - DNA, 25 bp, Homo sapien
ttctaaccacagagtgagtaatgca

SEQ ID NO: 2162966 - DNA, 25 bp, Homo sapien
ctgctattgctatttagcacaatgt

SEQ ID NO: 2162967 - DNA, 25 bp, Homo sapien
ctgctgcccagacacagaggactgc

SEQ ID NO: 2162968 - DNA, 25 bp, Homo sapien
gcacatcctgtacttgtatctttct

SEQ ID NO: 2162969 - DNA, 25 bp, Homo sapien
tgcacatcctgtacttgtatctttc

SEQ ID NO: 2162970 - DNA, 25 bp, Homo sapien
tgaagggagcagggaatttggtgtt

SEQ ID NO: 2162971 - DNA, 25 bp, Homo sapien
ctgaagggagcagggaatttggtgt

SEQ ID NO: 2162972 - DNA, 25 bp, Homo sapien
tggttctgagatggtgcttttttct

SEQ ID NO: 2162973 - DNA, 25 bp, Homo sapien
catgccttgatcactactgtttggt

SEQ ID NO: 2162974 - DNA, 25 bp, Homo sapien
gaaagggaagccgtgcatcccactt

SEQ ID NO: 2162975 - DNA, 25 bp, Homo sapien
gaagccgtgcatcccacttgaccag

SEQ ID NO: 2162976 - DNA, 25 bp, Homo sapien
gtgcatcccacttgaccagctcata

SEQ ID NO: 2162977 - DNA, 25 bp, Homo sapien
aagggaagccgtgcatcccacttga

SEQ ID NO: 2162978 - DNA, 25 bp, Homo sapien
tggggtccacaattttgtaatgcat

SEQ ID NO: 2162979 - DNA, 25 bp, Homo sapien
tttcccccgataatataccataggc

SEQ ID NO: 2162980 - DNA, 25 bp, Homo sapien
tcccccgataatataccataggcat

SEQ ID NO: 2162981 - DNA, 25 bp, Homo sapien
ttcccccgataatataccataggca

SEQ ID NO: 2162982 - DNA, 25 bp, Homo sapien
ccaaagaacggagaaagcaagtagc

SEQ ID NO: 2162983 - DNA, 25 bp, Homo sapien
ggtgagcccaacattatcacaaggg

SEQ ID NO: 2162984 - DNA, 25 bp, Homo sapien
caatgtttacagagtaacccctgaa

SEQ ID NO: 2162985 - DNA, 25 bp, Homo sapien
ggtggaggtaaagtccatgagccaa

SEQ ID NO: 2162986 - DNA, 25 bp, Homo sapien
ccaggttgttgtattctgtggtttt

SEQ ID NO: 2162987 - DNA, 25 bp, Homo sapien
caacctgttaccctctgactcttct

SEQ ID NO: 2162988 - DNA, 25 bp, Homo sapien
attaatttctatgggttcttcctgc

SEQ ID NO: 2162989 - DNA, 25 bp, Homo sapien
tctccacttctttgcatccaggttg

SEQ ID NO: 2162990 - DNA, 25 bp, Homo sapien
cctctgcttgttgtttcgttgcata

SEQ ID NO: 2162991 - DNA, 25 bp, Homo sapien
ggagggggctgtcatgatttaatta

SEQ ID NO: 2162992 - DNA, 25 bp, Homo sapien
gggctgtcatgatttaattattagt

SEQ ID NO: 2162993 - DNA, 25 bp, Homo sapien
tgttgtttcgttgcatacttgaagt

SEQ ID NO: 2162994 - DNA, 25 bp, Homo sapien
aacaagcctgtttatgccaaattcc

SEQ ID NO: 2162995 - DNA, 25 bp, Homo sapien
cagtgacagatttgacaggcgcagc

SEQ ID NO: 2162996 - DNA, 25 bp, Homo sapien
tgatgatcaaagtcggtttccggac

SEQ ID NO: 2162997 - DNA, 25 bp, Homo sapien
gagtgagcagtctcgaacagctgga

SEQ ID NO: 2162998 - DNA, 25 bp, Homo sapien
acaaagtggattgtgcaaaaatccc

SEQ ID NO: 2162999 - DNA, 25 bp, Homo sapien
aaaaatcccttctagtttcagctgc

SEQ ID NO: 2163000 - DNA, 25 bp, Homo sapien
aatcccttctagtttcagctgctgt

SEQ ID NO: 2163001 - DNA, 25 bp, Homo sapien
ccacaaagtggattgtgcaaaaatc

SEQ ID NO: 2163002 - DNA, 25 bp, Homo sapien
tcaatcacagcctcaccttggaaga

SEQ ID NO: 2163003 - DNA, 25 bp, Homo sapien
ggtgttggcagtgtgatcaatcaca

SEQ ID NO: 2163004 - DNA, 25 bp, Homo sapien
ctttccctgcttggtgacaggacac

SEQ ID NO: 2163005 - DNA, 25 bp, Homo sapien
cacagcctcaccttggaagagggtc

SEQ ID NO: 2163006 - DNA, 25 bp, Homo sapien
agcttgcttctcaacactagtggtt

SEQ ID NO: 2163007 - DNA, 25 bp, Homo sapien
ttgcttctcaacactagtggttgac

SEQ ID NO: 2163008 - DNA, 25 bp, Homo sapien
ttctcaacactagtggttgacacag

SEQ ID NO: 2163009 - DNA, 25 bp, Homo sapien
gcttctcaacactagtggttgacac

SEQ ID NO: 2163010 - DNA, 25 bp, Homo sapien
ttggataacattaaaggagccttca

SEQ ID NO: 2163011 - DNA, 25 bp, Homo sapien
agttggataacattaaaggagcctt

SEQ ID NO: 2163012 - DNA, 25 bp, Homo sapien
gataacattaaaggagccttcatct

SEQ ID NO: 2163013 - DNA, 25 bp, Homo sapien
gcaagttggataacattaaaggagc

SEQ ID NO: 2163014 - DNA, 25 bp, Homo sapien
ccagtagctatcaagttcagtaaaa

SEQ ID NO: 2163015 - DNA, 25 bp, Homo sapien
acagtaatgtttgtctgcactctca

SEQ ID NO: 2163016 - DNA, 25 bp, Homo sapien
ctaaattccagtagctatcaagttc

SEQ ID NO: 2163017 - DNA, 25 bp, Homo sapien
caaccacagtaatgtttgtctgcac

SEQ ID NO: 2163018 - DNA, 25 bp, Homo sapien
tctacgatgtcatactgagcccctc

SEQ ID NO: 2163019 - DNA, 25 bp, Homo sapien
gatgtcatactgagcccctccataa

SEQ ID NO: 2163020 - DNA, 25 bp, Homo sapien
ctgtctacgatgtcatactgagccc

SEQ ID NO: 2163021 - DNA, 25 bp, Homo sapien
ccctccataaccttcacacagcaac

SEQ ID NO: 2163022 - DNA, 25 bp, Homo sapien
gttgcttagcgccttggctgacatt

SEQ ID NO: 2163023 - DNA, 25 bp, Homo sapien
acagagtcaagttatctacttgttt

SEQ ID NO: 2163024 - DNA, 25 bp, Homo sapien
gagtcaagttatctacttgttttac

SEQ ID NO: 2163025 - DNA, 25 bp, Homo sapien
gcgccttggctgacattaatctcat

SEQ ID NO: 2163026 - DNA, 25 bp, Homo sapien
gcttggcatttgaccggcgcaaagg

SEQ ID NO: 2163027 - DNA, 25 bp, Homo sapien
cagtctcaatctgtaccatgttcag

SEQ ID NO: 2163028 - DNA, 25 bp, Homo sapien
atttgaccggcgcaaaggcagctgg

SEQ ID NO: 2163029 - DNA, 25 bp, Homo sapien
gagccacggttgctttctgagtgta

SEQ ID NO: 2163030 - DNA, 25 bp, Homo sapien
ggaagatcacaagattctggctgag

SEQ ID NO: 2163031 - DNA, 25 bp, Homo sapien
tgaggaagatcacaagattctggct

SEQ ID NO: 2163032 - DNA, 25 bp, Homo sapien
ctgaggaagatcacaagattctggc

SEQ ID NO: 2163033 - DNA, 25 bp, Homo sapien
gaggaagatcacaagattctggctg

SEQ ID NO: 2163034 - DNA, 25 bp, Homo sapien
catgtattacattaagcacttcccg

SEQ ID NO: 2163035 - DNA, 25 bp, Homo sapien
tccctggcccgctgagtaatgaatg

SEQ ID NO: 2163036 - DNA, 25 bp, Homo sapien
cttcagtgtgctcatgatctgattc

SEQ ID NO: 2163037 - DNA, 25 bp, Homo sapien
tgggaaaacaatccttgaagcgtac

SEQ ID NO: 2163038 - DNA, 25 bp, Homo sapien
tgtggcagtccaagtgaacagggaa

SEQ ID NO: 2163039 - DNA, 25 bp, Homo sapien
gcagtccaagtgaacagggaagtac

SEQ ID NO: 2163040 - DNA, 25 bp, Homo sapien
ttatgtggcagtccaagtgaacagg

SEQ ID NO: 2163041 - DNA, 25 bp, Homo sapien
tggcagtccaagtgaacagggaagt

SEQ ID NO: 2163042 - DNA, 25 bp, Homo sapien
catgcacgtctgacaagctgcttgc

SEQ ID NO: 2163043 - DNA, 25 bp, Homo sapien
aaccacatgcacgtctgacaagctg

SEQ ID NO: 2163044 - DNA, 25 bp, Homo sapien
cacatgcacgtctgacaagctgctt

SEQ ID NO: 2163045 - DNA, 25 bp, Homo sapien
tccaaaccacatgcacgtctgacaa

SEQ ID NO: 2163046 - DNA, 25 bp, Homo sapien
tatgttattgattccactcgctgac

SEQ ID NO: 2163047 - DNA, 25 bp, Homo sapien
gctcctatgggagccgtagctctga

SEQ ID NO: 2163048 - DNA, 25 bp, Homo sapien
tggcttcttttcaataacccgtggc

SEQ ID NO: 2163049 - DNA, 25 bp, Homo sapien
aacccgtggctgcttgctcctatgg

SEQ ID NO: 2163050 - DNA, 25 bp, Homo sapien
cctttgggagcctgaatttctacac

SEQ ID NO: 2163051 - DNA, 25 bp, Homo sapien
ctttgggagcctgaatttctacact

SEQ ID NO: 2163052 - DNA, 25 bp, Homo sapien
catggcaattggactattttactcc

SEQ ID NO: 2163053 - DNA, 25 bp, Homo sapien
ctgtccccaggtcctattgcaagac

SEQ ID NO: 2163054 - DNA, 25 bp, Homo sapien
gatctagtggatccagggccttcca

SEQ ID NO: 2163055 - DNA, 25 bp, Homo sapien
tgtattggcctaggtatctgggaag

SEQ ID NO: 2163056 - DNA, 25 bp, Homo sapien
aagttatccgtattaggcctatggg

SEQ ID NO: 2163057 - DNA, 25 bp, Homo sapien
gataagttatccgtattaggcctat

SEQ ID NO: 2163058 - DNA, 25 bp, Homo sapien
taagttatccgtattaggcctatgg

SEQ ID NO: 2163059 - DNA, 25 bp, Homo sapien
tgataagttatccgtattaggccta

SEQ ID NO: 2163060 - DNA, 25 bp, Homo sapien
catgagtccccaacatgacatacag

SEQ ID NO: 2163061 - DNA, 25 bp, Homo sapien
tgtgttttcaggcttgccctctaac

SEQ ID NO: 2163062 - DNA, 25 bp, Homo sapien
tctcttccataagattgaacatggg

SEQ ID NO: 2163063 - DNA, 25 bp, Homo sapien
cagatatgggctatatgtctcttcc

SEQ ID NO: 2163064 - DNA, 25 bp, Homo sapien
tgctgcagaattgggtagtgcctgc

SEQ ID NO: 2163065 - DNA, 25 bp, Homo sapien
cctcatacttgccttctagctggaa

SEQ ID NO: 2163066 - DNA, 25 bp, Homo sapien
ggtctctagataatactgcctctgc

SEQ ID NO: 2163067 - DNA, 25 bp, Homo sapien
tactgctgtgtgtagataggtctct

SEQ ID NO: 2163068 - DNA, 25 bp, Homo sapien
cacgaggtacatgggtggttagcat

SEQ ID NO: 2163069 - DNA, 25 bp, Homo sapien
aaactcagctgtgatcttaacgagc

SEQ ID NO: 2163070 - DNA, 25 bp, Homo sapien
cagttgactagttttccacgaggta

SEQ ID NO: 2163071 - DNA, 25 bp, Homo sapien
gcagttccattaatgtcttcctaaa

SEQ ID NO: 2163072 - DNA, 25 bp, Homo sapien
cctttgcctttgaggttggagatcc

SEQ ID NO: 2163073 - DNA, 25 bp, Homo sapien
ttgcctttgaggttggagatccacg

SEQ ID NO: 2163074 - DNA, 25 bp, Homo sapien
ttgaggttggagatccacgtctaat

SEQ ID NO: 2163075 - DNA, 25 bp, Homo sapien
cctttgaggttggagatccacgtct

SEQ ID NO: 2163076 - DNA, 25 bp, Homo sapien
tttcagccagatccaactctggcat

SEQ ID NO: 2163077 - DNA, 25 bp, Homo sapien
ttctccgcgtctctgttcctcccac

SEQ ID NO: 2163078 - DNA, 25 bp, Homo sapien
tgtctttcctgaacttctccgcgtc

SEQ ID NO: 2163079 - DNA, 25 bp, Homo sapien
tgttcctcccacatttcagccagat

SEQ ID NO: 2163080 - DNA, 25 bp, Homo sapien
cccaacagtgtgcttgttttggctt

SEQ ID NO: 2163081 - DNA, 25 bp, Homo sapien
aacagtgtgcttgttttggcttggg

SEQ ID NO: 2163082 - DNA, 25 bp, Homo sapien
tgtgcttgttttggcttggggcctc

SEQ ID NO: 2163083 - DNA, 25 bp, Homo sapien
ctcccaacagtgtgcttgttttggc

SEQ ID NO: 2163084 - DNA, 25 bp, Homo sapien
ggatgccctctttcccagtatctct

SEQ ID NO: 2163085 - DNA, 25 bp, Homo sapien
actcaggatgccctctttcccagta

SEQ ID NO: 2163086 - DNA, 25 bp, Homo sapien
tcaggatgccctctttcccagtatc

SEQ ID NO: 2163087 - DNA, 25 bp, Homo sapien
tctcttctctacttccgttttcaac

SEQ ID NO: 2163088 - DNA, 25 bp, Homo sapien
gaaggtatacaatgctccaaattca

SEQ ID NO: 2163089 - DNA, 25 bp, Homo sapien
tactgcattcccttcaccagaggca

SEQ ID NO: 2163090 - DNA, 25 bp, Homo sapien
atttggagaaggtatacaatgctcc

SEQ ID NO: 2163091 - DNA, 25 bp, Homo sapien
ggtatacaatgctccaaattcaaaa

SEQ ID NO: 2163092 - DNA, 25 bp, Homo sapien
ctaaaaaaggcacattttctcctga

SEQ ID NO: 2163093 - DNA, 25 bp, Homo sapien
aaggcacattttctcctgaaatgtt

SEQ ID NO: 2163094 - DNA, 25 bp, Homo sapien
cacattttctcctgaaatgtttgat

SEQ ID NO: 2163095 - DNA, 25 bp, Homo sapien
ggcacattttctcctgaaatgtttg

SEQ ID NO: 2163096 - DNA, 25 bp, Homo sapien
gttaaaaccgtccacatctctcttg

SEQ ID NO: 2163097 - DNA, 25 bp, Homo sapien
cattcactatgttctcgtacgctgt

SEQ ID NO: 2163098 - DNA, 25 bp, Homo sapien
atctctcttggatgttttaaaggct

SEQ ID NO: 2163099 - DNA, 25 bp, Homo sapien
ggctttgcaaccagtttgatgggaa

SEQ ID NO: 2163100 - DNA, 25 bp, Homo sapien
gtggttaaagtgtaaagatcagtga

SEQ ID NO: 2163101 - DNA, 25 bp, Homo sapien
ccacctccggtgttgtacttgacca

SEQ ID NO: 2163102 - DNA, 25 bp, Homo sapien
tatccacctccggtgttgtacttga

SEQ ID NO: 2163103 - DNA, 25 bp, Homo sapien
cacagtggttaaagtgtaaagatca

SEQ ID NO: 2163104 - DNA, 25 bp, Homo sapien
tgagctcctgaatttcagttgccat

SEQ ID NO: 2163105 - DNA, 25 bp, Homo sapien
gtttcattgagctcctgaatttcag

SEQ ID NO: 2163106 - DNA, 25 bp, Homo sapien
tcattgagctcctgaatttcagttg

SEQ ID NO: 2163107 - DNA, 25 bp, Homo sapien
cttgtttcattgagctcctgaattt

SEQ ID NO: 2163108 - DNA, 25 bp, Homo sapien
ctaggacttctgcattacacctttt

SEQ ID NO: 2163109 - DNA, 25 bp, Homo sapien
ggacttctgcattacaccttttact

SEQ ID NO: 2163110 - DNA, 25 bp, Homo sapien
tgttttatctctttcacttaattca

SEQ ID NO: 2163111 - DNA, 25 bp, Homo sapien
taggacttctgcattacacctttta

SEQ ID NO: 2163112 - DNA, 25 bp, Homo sapien
tttcactgttttgcttgtattctct

SEQ ID NO: 2163113 - DNA, 25 bp, Homo sapien
gttttgcttgtattctctcttgaaa

SEQ ID NO: 2163114 - DNA, 25 bp, Homo sapien
cactgttttgcttgtattctctctt

SEQ ID NO: 2163115 - DNA, 25 bp, Homo sapien
tgttttgcttgtattctctcttgaa

SEQ ID NO: 2163116 - DNA, 25 bp, Homo sapien
atctgtgaaagcacgtttaacatac

SEQ ID NO: 2163117 - DNA, 25 bp, Homo sapien
ctttaaatctgtgaaagcacgttta

SEQ ID NO: 2163118 - DNA, 25 bp, Homo sapien
ttctccagcgttctttaaatctgtg

SEQ ID NO: 2163119 - DNA, 25 bp, Homo sapien
taaatctgtgaaagcacgtttaaca

SEQ ID NO: 2163120 - DNA, 25 bp, Homo sapien
tcataggcacaagaatctaaggccc

SEQ ID NO: 2163121 - DNA, 25 bp, Homo sapien
aaagctttaggcagatcataggcac

SEQ ID NO: 2163122 - DNA, 25 bp, Homo sapien
taggcagatcataggcacaagaatc

SEQ ID NO: 2163123 - DNA, 25 bp, Homo sapien
aatctaaggcccacacactgatctt

SEQ ID NO: 2163124 - DNA, 25 bp, Homo sapien
gcctgcttgactcctttaagatcca

SEQ ID NO: 2163125 - DNA, 25 bp, Homo sapien
aagaattaggtctggcctgcttgac

SEQ ID NO: 2163126 - DNA, 25 bp, Homo sapien
tgtgcaatgaacaagtccatagaac

SEQ ID NO: 2163127 - DNA, 25 bp, Homo sapien
gtccatagaacctcatgagtgaaga

SEQ ID NO: 2163128 - DNA, 25 bp, Homo sapien
cacatatagtgtcccacattccaaa

SEQ ID NO: 2163129 - DNA, 25 bp, Homo sapien
aaacagcacatatagtgtcccacat

SEQ ID NO: 2163130 - DNA, 25 bp, Homo sapien
caagtcctggcttacgaacttcgca

SEQ ID NO: 2163131 - DNA, 25 bp, Homo sapien
tacgaacttcgcaaatgatgtgtgt

SEQ ID NO: 2163132 - DNA, 25 bp, Homo sapien
ctctttgggtttcggccacctctat

SEQ ID NO: 2163133 - DNA, 25 bp, Homo sapien
ttggttttggagtctgggaggcact

SEQ ID NO: 2163134 - DNA, 25 bp, Homo sapien
ggcactggtcagaatgttggtagca

SEQ ID NO: 2163135 - DNA, 25 bp, Homo sapien
ctgagcagacaatgaaagcgtagcc

SEQ ID NO: 2163136 - DNA, 25 bp, Homo sapien
tctgatgattagctgtctgcctctc

SEQ ID NO: 2163137 - DNA, 25 bp, Homo sapien
caaaggagccaaaagtgtggtagca

SEQ ID NO: 2163138 - DNA, 25 bp, Homo sapien
tcatacagttcctgtaccttcacta

SEQ ID NO: 2163139 - DNA, 25 bp, Homo sapien
cttcactaattccaaaggagccaaa

SEQ ID NO: 2163140 - DNA, 25 bp, Homo sapien
gacacatggcaacgataacatcttg

SEQ ID NO: 2163141 - DNA, 25 bp, Homo sapien
gactaacaacagctaccagacaggt

SEQ ID NO: 2163142 - DNA, 25 bp, Homo sapien
tagtagtttttgatgaccagggccc

SEQ ID NO: 2163143 - DNA, 25 bp, Homo sapien
tagttgcctcagatagtccagtcac

SEQ ID NO: 2163144 - DNA, 25 bp, Homo sapien
gccttcatggtcagtgccatcagct

SEQ ID NO: 2163145 - DNA, 25 bp, Homo sapien
tcagagcagagaaaatttgatggcc

SEQ ID NO: 2163146 - DNA, 25 bp, Homo sapien
gggagcgtaaactcagagcagagaa

SEQ ID NO: 2163147 - DNA, 25 bp, Homo sapien
gagaaaatttgatggccttcatggt

SEQ ID NO: 2163148 - DNA, 25 bp, Homo sapien
aaggaagcaaagcttctagcaggag

SEQ ID NO: 2163149 - DNA, 25 bp, Homo sapien
aaaaggaagcaaagcttctagcagg

SEQ ID NO: 2163150 - DNA, 25 bp, Homo sapien
gaagcaaagcttctagcaggaggtg

SEQ ID NO: 2163151 - DNA, 25 bp, Homo sapien
acaaaaggaagcaaagcttctagca

SEQ ID NO: 2163152 - DNA, 25 bp, Homo sapien
ttataaggacctacaggatggagct

SEQ ID NO: 2163153 - DNA, 25 bp, Homo sapien
tgccttgagcacaatgggacttggg

SEQ ID NO: 2163154 - DNA, 25 bp, Homo sapien
tcaccttcgtgattgacttgggccc

SEQ ID NO: 2163155 - DNA, 25 bp, Homo sapien
gaacaccgaggaaatcaagctatgg

SEQ ID NO: 2163156 - DNA, 25 bp, Homo sapien
catcagctgatttgacgctgcggtc

SEQ ID NO: 2163157 - DNA, 25 bp, Homo sapien
tatggccaaactgtgcaaagacacc

SEQ ID NO: 2163158 - DNA, 25 bp, Homo sapien
tagtgcattctgaagttcttctgaa

SEQ ID NO: 2163159 - DNA, 25 bp, Homo sapien
caaagacaccatcagctgatttgac

SEQ ID NO: 2163160 - DNA, 25 bp, Homo sapien
tattgtagaaggttcctggaatgta

SEQ ID NO: 2163161 - DNA, 25 bp, Homo sapien
ttatcttggtattgtagaaggttcc

SEQ ID NO: 2163162 - DNA, 25 bp, Homo sapien
cttggtattgtagaaggttcctgga

SEQ ID NO: 2163163 - DNA, 25 bp, Homo sapien
aggttcctggaatgtagatataacc

SEQ ID NO: 2163164 - DNA, 25 bp, Homo sapien
taatgttctctctaccattccattt

SEQ ID NO: 2163165 - DNA, 25 bp, Homo sapien
agggacatgctaatgttctctctac

SEQ ID NO: 2163166 - DNA, 25 bp, Homo sapien
gctaatgttctctctaccattccat

SEQ ID NO: 2163167 - DNA, 25 bp, Homo sapien
ctctctaccattccattttagtata

SEQ ID NO: 2163168 - DNA, 25 bp, Homo sapien
gtggctttagccaggaaggaatagc

SEQ ID NO: 2163169 - DNA, 25 bp, Homo sapien
tgtggctttagccaggaaggaatag

SEQ ID NO: 2163170 - DNA, 25 bp, Homo sapien
ttactctcaaactggacattccggc

SEQ ID NO: 2163171 - DNA, 25 bp, Homo sapien
gacattccggctttgcaaattgctg

SEQ ID NO: 2163172 - DNA, 25 bp, Homo sapien
aattgctgacgtccatgaagctctg

SEQ ID NO: 2163173 - DNA, 25 bp, Homo sapien
agcttcctggcctgcgttactctca

SEQ ID NO: 2163174 - DNA, 25 bp, Homo sapien
ccacccttggttgcatgaccacagg

SEQ ID NO: 2163175 - DNA, 25 bp, Homo sapien
acccttggttgcatgaccacagggt

SEQ ID NO: 2163176 - DNA, 25 bp, Homo sapien
cacccttggttgcatgaccacaggg

SEQ ID NO: 2163177 - DNA, 25 bp, Homo sapien
tccacccttggttgcatgaccacag

SEQ ID NO: 2163178 - DNA, 25 bp, Homo sapien
ttttgcttcgtttttctcagcacca

SEQ ID NO: 2163179 - DNA, 25 bp, Homo sapien
tgttcataactgtaaacctttggat

SEQ ID NO: 2163180 - DNA, 25 bp, Homo sapien
gcacgaattgagtattgttcataac

SEQ ID NO: 2163181 - DNA, 25 bp, Homo sapien
aacctttggattcacaactacacac

SEQ ID NO: 2163182 - DNA, 25 bp, Homo sapien
agctgagcgcctgactgaggccgaa

SEQ ID NO: 2163183 - DNA, 25 bp, Homo sapien
ggaagtgaaaccgaaacggagctga

SEQ ID NO: 2163184 - DNA, 25 bp, Homo sapien
tgagcgcctgactgaggccgaaccc

SEQ ID NO: 2163185 - DNA, 25 bp, Homo sapien
gaaaccgaaacggagctgagcgcct

SEQ ID NO: 2163186 - DNA, 25 bp, Homo sapien
ccctggcagcggcgcctccgtcacc

SEQ ID NO: 2163187 - DNA, 25 bp, Homo sapien
cccctggcagcggcgcctccgtcac

SEQ ID NO: 2163188 - DNA, 25 bp, Homo sapien
cttctcttcagccctgctagcgccg

SEQ ID NO: 2163189 - DNA, 25 bp, Homo sapien
tcttcagccctgctagcgccgggag

SEQ ID NO: 2163190 - DNA, 25 bp, Homo sapien
tctcttcagccctgctagcgccggg

SEQ ID NO: 2163191 - DNA, 25 bp, Homo sapien
ccgcccccgagaggtgggctgcggg

SEQ ID NO: 2163192 - DNA, 25 bp, Homo sapien
tgtagaaagcgccattggagccccg

SEQ ID NO: 2163193 - DNA, 25 bp, Homo sapien
cttgtagaaagcgccattggagccc

SEQ ID NO: 2163194 - DNA, 25 bp, Homo sapien
aaagcgccattggagccccgcactt

SEQ ID NO: 2163195 - DNA, 25 bp, Homo sapien
tagaaagcgccattggagccccgca

SEQ ID NO: 2163196 - DNA, 25 bp, Homo sapien
tgcctcccgccgacaccaagaagaa

SEQ ID NO: 2163197 - DNA, 25 bp, Homo sapien
cgcggtgctcgggaagagggccccg

SEQ ID NO: 2163198 - DNA, 25 bp, Homo sapien
gcctcccgccgacaccaagaagaaa

SEQ ID NO: 2163199 - DNA, 25 bp, Homo sapien
ctggtctctcatttcgataggcgct

SEQ ID NO: 2163200 - DNA, 25 bp, Homo sapien
gctcggcgccgaaagagaaccctct

SEQ ID NO: 2163201 - DNA, 25 bp, Homo sapien
gaaagagaaccctctcctcgctggt

SEQ ID NO: 2163202 - DNA, 25 bp, Homo sapien
tttcgataggcgctagggcctctcg

SEQ ID NO: 2163203 - DNA, 25 bp, Homo sapien
gatgatgtttaggaaagggggaata

SEQ ID NO: 2163204 - DNA, 25 bp, Homo sapien
ctgggagatgatgtttaggaaaggg

SEQ ID NO: 2163205 - DNA, 25 bp, Homo sapien
ggagatgatgtttaggaaaggggga

SEQ ID NO: 2163206 - DNA, 25 bp, Homo sapien
gagatgatgtttaggaaagggggaa

SEQ ID NO: 2163207 - DNA, 25 bp, Homo sapien
ggagctctccgaagtcccaatgcta

SEQ ID NO: 2163208 - DNA, 25 bp, Homo sapien
cccaatgctagaccggaaaagagaa

SEQ ID NO: 2163209 - DNA, 25 bp, Homo sapien
cagaacagtggagctctccgaagtc

SEQ ID NO: 2163210 - DNA, 25 bp, Homo sapien
aactacccacacgacaggcccggat

SEQ ID NO: 2163211 - DNA, 25 bp, Homo sapien
ttgtgatttggtgccgactaccgct

SEQ ID NO: 2163212 - DNA, 25 bp, Homo sapien
ctaaaaatcagttgccattgtgatt

SEQ ID NO: 2163213 - DNA, 25 bp, Homo sapien
aaaatcagttgccattgtgatttgg

SEQ ID NO: 2163214 - DNA, 25 bp, Homo sapien
tttggtgccgactaccgcttcttac

SEQ ID NO: 2163215 - DNA, 25 bp, Homo sapien
gacgctgaagcatgtgcattcctga

SEQ ID NO: 2163216 - DNA, 25 bp, Homo sapien
tgctgggccatgttagggtcttcct

SEQ ID NO: 2163217 - DNA, 25 bp, Homo sapien
gatctaaaatctcctccgaaatcca

SEQ ID NO: 2163218 - DNA, 25 bp, Homo sapien
gtagcagcgctgctaatggttttag

SEQ ID NO: 2163219 - DNA, 25 bp, Homo sapien
caagtattaacatttctcctcaggg

SEQ ID NO: 2163220 - DNA, 25 bp, Homo sapien
gtacttcaaggccataatgtgctac

SEQ ID NO: 2163221 - DNA, 25 bp, Homo sapien
gataagcaaactttagtggcatcca

SEQ ID NO: 2163222 - DNA, 25 bp, Homo sapien
aatgtgctacttgccctctgtgata

SEQ ID NO: 2163223 - DNA, 25 bp, Homo sapien
cacccacagatacactcataccttc

SEQ ID NO: 2163224 - DNA, 25 bp, Homo sapien
cccacagatacactcataccttcct

SEQ ID NO: 2163225 - DNA, 25 bp, Homo sapien
ccacagatacactcataccttcctt

SEQ ID NO: 2163226 - DNA, 25 bp, Homo sapien
cacagatacactcataccttccttc

SEQ ID NO: 2163227 - DNA, 25 bp, Homo sapien
gcaactgttattgaatcttcatgaa

SEQ ID NO: 2163228 - DNA, 25 bp, Homo sapien
tgttattgaatcttcatgaacatcc

SEQ ID NO: 2163229 - DNA, 25 bp, Homo sapien
tgaatcttcatgaacatcctttaca

SEQ ID NO: 2163230 - DNA, 25 bp, Homo sapien
tcaaatgcaactgttattgaatctt

SEQ ID NO: 2163231 - DNA, 25 bp, Homo sapien
ctttattataacctacaggaggtgg

SEQ ID NO: 2163232 - DNA, 25 bp, Homo sapien
tatctttattataacctacaggagg

SEQ ID NO: 2163233 - DNA, 25 bp, Homo sapien
ttataacctacaggaggtgggaatc

SEQ ID NO: 2163234 - DNA, 25 bp, Homo sapien
gaggtgggaatctgacatcatgaaa

SEQ ID NO: 2163235 - DNA, 25 bp, Homo sapien
taccccgaggtaggcagagatacat

SEQ ID NO: 2163236 - DNA, 25 bp, Homo sapien
tatcctcaaccaaattgtaaccctg

SEQ ID NO: 2163237 - DNA, 25 bp, Homo sapien
cagaaactacctgagattgctttga

SEQ ID NO: 2163238 - DNA, 25 bp, Homo sapien
tgtaaccctgtctatgtaccccgag

SEQ ID NO: 2163239 - DNA, 25 bp, Homo sapien
caccaacagcaaggctctttttcat

SEQ ID NO: 2163240 - DNA, 25 bp, Homo sapien
ccaccaacagcaaggctctttttca

SEQ ID NO: 2163241 - DNA, 25 bp, Homo sapien
ccctttatcatcctcactttagcta

SEQ ID NO: 2163242 - DNA, 25 bp, Homo sapien
tatcatcctcactttagctaaccac

SEQ ID NO: 2163243 - DNA, 25 bp, Homo sapien
tggcacatccagcttgatcttatgg

SEQ ID NO: 2163244 - DNA, 25 bp, Homo sapien
catgctgcatattctatcacataaa

SEQ ID NO: 2163245 - DNA, 25 bp, Homo sapien
ggtttgttgggattaacagatctta

SEQ ID NO: 2163246 - DNA, 25 bp, Homo sapien
gatcttagacgttcaattgtgacaa

SEQ ID NO: 2163247 - DNA, 25 bp, Homo sapien
aaatccttatgtgccgcctctttgg

SEQ ID NO: 2163248 - DNA, 25 bp, Homo sapien
tccttatgtgccgcctctttggcac

SEQ ID NO: 2163249 - DNA, 25 bp, Homo sapien
aattttctggatcataagttacaga

SEQ ID NO: 2163250 - DNA, 25 bp, Homo sapien
ataattttctggatcataagttaca

SEQ ID NO: 2163251 - DNA, 25 bp, Homo sapien
gactccgaaagtgcatgtcaatcag

SEQ ID NO: 2163252 - DNA, 25 bp, Homo sapien
agacaacttagtgcgcagactccga

SEQ ID NO: 2163253 - DNA, 25 bp, Homo sapien
cagcatatgtgctcgctttgaggtg

SEQ ID NO: 2163254 - DNA, 25 bp, Homo sapien
tcattatcagagacaacttagtgcg

SEQ ID NO: 2163255 - DNA, 25 bp, Homo sapien
tcttctcttacgataaactgttcat

SEQ ID NO: 2163256 - DNA, 25 bp, Homo sapien
tcatgaaatctcgaggcaagctgcc

SEQ ID NO: 2163257 - DNA, 25 bp, Homo sapien
catctagatcaatagcagtgacccc

SEQ ID NO: 2163258 - DNA, 25 bp, Homo sapien
gagtaccaatagctagacccatcag

SEQ ID NO: 2163259 - DNA, 25 bp, Homo sapien
acatcttcagcaaattcgagaaagc

SEQ ID NO: 2163260 - DNA, 25 bp, Homo sapien
tcagcaaattcgagaaagcttctag

SEQ ID NO: 2163261 - DNA, 25 bp, Homo sapien
gcaaattcgagaaagcttctagctt

SEQ ID NO: 2163262 - DNA, 25 bp, Homo sapien
tcttcagcaaattcgagaaagcttc

SEQ ID NO: 2163263 - DNA, 25 bp, Homo sapien
gaattactattgactttgcagaaag

SEQ ID NO: 2163264 - DNA, 25 bp, Homo sapien
tctgcagcatttaggagtattggtg

SEQ ID NO: 2163265 - DNA, 25 bp, Homo sapien
tatttgctgatactcacgatggtga

SEQ ID NO: 2163266 - DNA, 25 bp, Homo sapien
gctttcttgataaaactgcacctgg

SEQ ID NO: 2163267 - DNA, 25 bp, Homo sapien
gatttcaaaaccaaagtagagactc

SEQ ID NO: 2163268 - DNA, 25 bp, Homo sapien
cattgtttaaactcctttggtcagg

SEQ ID NO: 2163269 - DNA, 25 bp, Homo sapien
gcttaagcagctatacatacatcca

SEQ ID NO: 2163270 - DNA, 25 bp, Homo sapien
tacgctttaaacttgctggtactgt

SEQ ID NO: 2163271 - DNA, 25 bp, Homo sapien
tcagcctcaatcctcaccctcacaa

SEQ ID NO: 2163272 - DNA, 25 bp, Homo sapien
cattttcagcctcaatcctcaccct

SEQ ID NO: 2163273 - DNA, 25 bp, Homo sapien
ttttcagcctcaatcctcaccctca

SEQ ID NO: 2163274 - DNA, 25 bp, Homo sapien
tttcagcctcaatcctcaccctcac

SEQ ID NO: 2163275 - DNA, 25 bp, Homo sapien
aaggaagggaatttggtggcataat

SEQ ID NO: 2163276 - DNA, 25 bp, Homo sapien
tccaacccttgaattattggaagga

SEQ ID NO: 2163277 - DNA, 25 bp, Homo sapien
ttgtactgttaggttgagaaaaatg

SEQ ID NO: 2163278 - DNA, 25 bp, Homo sapien
tcttctggggcattaggtccaaccc

SEQ ID NO: 2163279 - DNA, 25 bp, Homo sapien
taacaaacgatacacagaagcctga

SEQ ID NO: 2163280 - DNA, 25 bp, Homo sapien
aagtagcctacaagtctaaccagag

SEQ ID NO: 2163281 - DNA, 25 bp, Homo sapien
gcctgaacgcaggactttcactgca

SEQ ID NO: 2163282 - DNA, 25 bp, Homo sapien
cagtataaggaatgcaagggatgtc

SEQ ID NO: 2163283 - DNA, 25 bp, Homo sapien
tgccaagccttgagttcaggtttct

SEQ ID NO: 2163284 - DNA, 25 bp, Homo sapien
gggattcccctgctacaactgatga

SEQ ID NO: 2163285 - DNA, 25 bp, Homo sapien
ggtttctgggattcccctgctacaa

SEQ ID NO: 2163286 - DNA, 25 bp, Homo sapien
gctacaactgatgaagccactaaca

SEQ ID NO: 2163287 - DNA, 25 bp, Homo sapien
taggaaaagccttacaagcggcatg

SEQ ID NO: 2163288 - DNA, 25 bp, Homo sapien
tcttcggcaagtacacaaggaaagc

SEQ ID NO: 2163289 - DNA, 25 bp, Homo sapien
tatgtctagaagcaaaataagcacg

SEQ ID NO: 2163290 - DNA, 25 bp, Homo sapien
taactccagggcaatggatccacat

SEQ ID NO: 2163291 - DNA, 25 bp, Homo sapien
ggcacctttgcttttaatccatgag

SEQ ID NO: 2163292 - DNA, 25 bp, Homo sapien
ttctggaataatgggctgcccggca

SEQ ID NO: 2163293 - DNA, 25 bp, Homo sapien
cttacaatgtggttgaggagatcaa

SEQ ID NO: 2163294 - DNA, 25 bp, Homo sapien
ccacttgccgttatagtcctctttg

SEQ ID NO: 2163295 - DNA, 25 bp, Homo sapien
catgtgatggaatgaatgctacacc

SEQ ID NO: 2163296 - DNA, 25 bp, Homo sapien
tggatagctgggacaacacgtgcat

SEQ ID NO: 2163297 - DNA, 25 bp, Homo sapien
ctaaactgctggagtaccccaaggg

SEQ ID NO: 2163298 - DNA, 25 bp, Homo sapien
tcttgtcacaagttatagggaaacc

SEQ ID NO: 2163299 - DNA, 25 bp, Homo sapien
gaatacgaatagatcaatagcaacc

SEQ ID NO: 2163300 - DNA, 25 bp, Homo sapien
ttatacaagctttaccatgagatgt

SEQ ID NO: 2163301 - DNA, 25 bp, Homo sapien
taacgactaattccctagcacagga

SEQ ID NO: 2163302 - DNA, 25 bp, Homo sapien
tatgaaaggctttatcctgatcaaa

SEQ ID NO: 2163303 - DNA, 25 bp, Homo sapien
aatagttcaggtgataatccaaaag

SEQ ID NO: 2163304 - DNA, 25 bp, Homo sapien
gcattagcgatgctgtcctttgttc

SEQ ID NO: 2163305 - DNA, 25 bp, Homo sapien
taatccaaaagaacagtggcattag

SEQ ID NO: 2163306 - DNA, 25 bp, Homo sapien
ccaaaagaacagtggcattagcgat

SEQ ID NO: 2163307 - DNA, 25 bp, Homo sapien
ttaacaggctatgtacaggattgcc

SEQ ID NO: 2163308 - DNA, 25 bp, Homo sapien
ttttaaggaggcataaccgcatcac

SEQ ID NO: 2163309 - DNA, 25 bp, Homo sapien
tgcacaggctagaatgagtcctaac

SEQ ID NO: 2163310 - DNA, 25 bp, Homo sapien
gagtcctaactgctgaaagatctac

SEQ ID NO: 2163311 - DNA, 25 bp, Homo sapien
cagtcacatagcttttttccttatc

SEQ ID NO: 2163312 - DNA, 25 bp, Homo sapien
tgtaatctctccaaacgcaactggt

SEQ ID NO: 2163313 - DNA, 25 bp, Homo sapien
tgtacgatttggtggtggtctagaa

SEQ ID NO: 2163314 - DNA, 25 bp, Homo sapien
tagaactagctccaatctgtcgcaa

SEQ ID NO: 2163315 - DNA, 25 bp, Homo sapien
gtatatccaggaccgcgtctgccgt

SEQ ID NO: 2163316 - DNA, 25 bp, Homo sapien
tgccgtgccccctatttctgtaagg

SEQ ID NO: 2163317 - DNA, 25 bp, Homo sapien
tgccccctatttctgtaaggtctac

SEQ ID NO: 2163318 - DNA, 25 bp, Homo sapien
ctgaagtatatccaggaccgcgtct

SEQ ID NO: 2163319 - DNA, 25 bp, Homo sapien
tacttcttgactgtgcctagggctg

SEQ ID NO: 2163320 - DNA, 25 bp, Homo sapien
tacacagtccatccagcaagtatga

SEQ ID NO: 2163321 - DNA, 25 bp, Homo sapien
gagcatgaacagaacttgcaccggc

SEQ ID NO: 2163322 - DNA, 25 bp, Homo sapien
gaggcagacccctgatttacacagt

SEQ ID NO: 2163323 - DNA, 25 bp, Homo sapien
cagagacgtttcaggggtaatccaa

SEQ ID NO: 2163324 - DNA, 25 bp, Homo sapien
aatgaagggctttgcaatatttgag

SEQ ID NO: 2163325 - DNA, 25 bp, Homo sapien
tcttcccaatttataagcccaccaa

SEQ ID NO: 2163326 - DNA, 25 bp, Homo sapien
taagcccaccaagagtattatcact

SEQ ID NO: 2163327 - DNA, 25 bp, Homo sapien
cagaagcatttgatgcttcagaatt

SEQ ID NO: 2163328 - DNA, 25 bp, Homo sapien
tgtttcagaagcatttgatgcttca

SEQ ID NO: 2163329 - DNA, 25 bp, Homo sapien
gaagcatttgatgcttcagaattag

SEQ ID NO: 2163330 - DNA, 25 bp, Homo sapien
ttcagaagcatttgatgcttcagaa

SEQ ID NO: 2163331 - DNA, 25 bp, Homo sapien
tcttcctctgttggagctaatgacc

SEQ ID NO: 2163332 - DNA, 25 bp, Homo sapien
ctcctctgcgcaggaagctctccct

SEQ ID NO: 2163333 - DNA, 25 bp, Homo sapien
gctaatgaccaatcactgagttcgt

SEQ ID NO: 2163334 - DNA, 25 bp, Homo sapien
cactgagttcgtctctgtggtcaga

SEQ ID NO: 2163335 - DNA, 25 bp, Homo sapien
tgaagcctcctccacgtcctcttcc

SEQ ID NO: 2163336 - DNA, 25 bp, Homo sapien
tccttgtcctcttcctccccctcca

SEQ ID NO: 2163337 - DNA, 25 bp, Homo sapien
cctcttcctccttgtcctcttcctc

SEQ ID NO: 2163338 - DNA, 25 bp, Homo sapien
ctttgaagcctcctccacgtcctct

SEQ ID NO: 2163339 - DNA, 25 bp, Homo sapien
caccctctatttaaaccaaccacag

SEQ ID NO: 2163340 - DNA, 25 bp, Homo sapien
cctctatttaaaccaaccacagaat

SEQ ID NO: 2163341 - DNA, 25 bp, Homo sapien
gattacgtggacgattatctgttcg

SEQ ID NO: 2163342 - DNA, 25 bp, Homo sapien
tctgttcgggagtgatcgtcgtttc

SEQ ID NO: 2163343 - DNA, 25 bp, Homo sapien
gcctctcttggattacgtggacgat

SEQ ID NO: 2163344 - DNA, 25 bp, Homo sapien
gacgattatctgttcgggagtgatc

SEQ ID NO: 2163345 - DNA, 25 bp, Homo sapien
taaactcataaatctcaaactacca

SEQ ID NO: 2163346 - DNA, 25 bp, Homo sapien
atctcaaactaccatattcaaacaa

SEQ ID NO: 2163347 - DNA, 25 bp, Homo sapien
ataaactcataaatctcaaactacc

SEQ ID NO: 2163348 - DNA, 25 bp, Homo sapien
ctcaaactaccatattcaaacaatt

SEQ ID NO: 2163349 - DNA, 25 bp, Homo sapien
tagcactggtgacagccaattgaga

SEQ ID NO: 2163350 - DNA, 25 bp, Homo sapien
actaggtcctggctgtaaataagca

SEQ ID NO: 2163351 - DNA, 25 bp, Homo sapien
taagcagatgactgaccaagcatgg

SEQ ID NO: 2163352 - DNA, 25 bp, Homo sapien
tgagaagagatcctcggactaggtc

SEQ ID NO: 2163353 - DNA, 25 bp, Homo sapien
catcaaacatatcagtttaagtgga

SEQ ID NO: 2163354 - DNA, 25 bp, Homo sapien
taaccaatgcagttagactgccaag

SEQ ID NO: 2163355 - DNA, 25 bp, Homo sapien
catacttaatagagaaaacatcacc

SEQ ID NO: 2163356 - DNA, 25 bp, Homo sapien
tagaaatataaatgtgcatcctttt

SEQ ID NO: 2163357 - DNA, 25 bp, Homo sapien
cttctttaactggaacacactggtc

SEQ ID NO: 2163358 - DNA, 25 bp, Homo sapien
ctggaacacactggtcatctcactg

SEQ ID NO: 2163359 - DNA, 25 bp, Homo sapien
tctcactgcatccaaagttagagaa

SEQ ID NO: 2163360 - DNA, 25 bp, Homo sapien
gagaaaaactcacaatcctatcatg

SEQ ID NO: 2163361 - DNA, 25 bp, Homo sapien
tttcattattgcagtcaactctgat

SEQ ID NO: 2163362 - DNA, 25 bp, Homo sapien
ctgtaatgttttagtgtggacactc

SEQ ID NO: 2163363 - DNA, 25 bp, Homo sapien
tgttttagtgtggacactcctttca

SEQ ID NO: 2163364 - DNA, 25 bp, Homo sapien
ttagtgtggacactcctttcattat

SEQ ID NO: 2163365 - DNA, 25 bp, Homo sapien
atctttacccgtgcgcagccgacta

SEQ ID NO: 2163366 - DNA, 25 bp, Homo sapien
cttctggttacgatctttacccgtg

SEQ ID NO: 2163367 - DNA, 25 bp, Homo sapien
gtgcgcagccgactaccttcactgg

SEQ ID NO: 2163368 - DNA, 25 bp, Homo sapien
gcagccgactaccttcactggaggt

SEQ ID NO: 2163369 - DNA, 25 bp, Homo sapien
taaaatctgccctgaagtgctaagt

SEQ ID NO: 2163370 - DNA, 25 bp, Homo sapien
cacccaatgcaggaaaatggtccaa

SEQ ID NO: 2163371 - DNA, 25 bp, Homo sapien
gacacaggacatgaaatgacatagc

SEQ ID NO: 2163372 - DNA, 25 bp, Homo sapien
gaatgtactggtgaatgatcaccca

SEQ ID NO: 2163373 - DNA, 25 bp, Homo sapien
gattcagtggtacccctactaggag

SEQ ID NO: 2163374 - DNA, 25 bp, Homo sapien
taacatcttagagtgaaggtccttc

SEQ ID NO: 2163375 - DNA, 25 bp, Homo sapien
tgtacagagaatattgcccaagagc

SEQ ID NO: 2163376 - DNA, 25 bp, Homo sapien
tacagatgatgtgtgcaaggtacca

SEQ ID NO: 2163377 - DNA, 25 bp, Homo sapien
taaaggctaacttcctatgacgtga

SEQ ID NO: 2163378 - DNA, 25 bp, Homo sapien
tgtaatatgaatgaactccaactcc

SEQ ID NO: 2163379 - DNA, 25 bp, Homo sapien
gacgtgaaatttccaatggtaacag

SEQ ID NO: 2163380 - DNA, 25 bp, Homo sapien
agttagcgccttgctgaatacagcc

SEQ ID NO: 2163381 - DNA, 25 bp, Homo sapien
ttttcataagtgcaactttttaata

SEQ ID NO: 2163382 - DNA, 25 bp, Homo sapien
ccaatccaatattgatgggcgccta

SEQ ID NO: 2163383 - DNA, 25 bp, Homo sapien
tccaatattgatgggcgcctagatt

SEQ ID NO: 2163384 - DNA, 25 bp, Homo sapien
aatattgatgggcgcctagattgat

SEQ ID NO: 2163385 - DNA, 25 bp, Homo sapien
aatccaatattgatgggcgcctaga

SEQ ID NO: 2163386 - DNA, 25 bp, Homo sapien
aattcttgaaacgtagcacactcca

SEQ ID NO: 2163387 - DNA, 25 bp, Homo sapien
agcaaggcttcctattccaataatt

SEQ ID NO: 2163388 - DNA, 25 bp, Homo sapien
tccaataattcttgaaacgtagcac

SEQ ID NO: 2163389 - DNA, 25 bp, Homo sapien
ttgaaacgtagcacactccacccat

SEQ ID NO: 2163390 - DNA, 25 bp, Homo sapien
cgtggcatgtgccaactctcgcgag

SEQ ID NO: 2163391 - DNA, 25 bp, Homo sapien
ctcgcgtggcatgtgccaactctcg

SEQ ID NO: 2163392 - DNA, 25 bp, Homo sapien
gtggcatgtgccaactctcgcgaga

SEQ ID NO: 2163393 - DNA, 25 bp, Homo sapien
cgcgtggcatgtgccaactctcgcg

SEQ ID NO: 2163394 - DNA, 25 bp, Homo sapien
ctcagaagccaatagggcagtggcc

SEQ ID NO: 2163395 - DNA, 25 bp, Homo sapien
acagcccaacggtccggcagtccgt

SEQ ID NO: 2163396 - DNA, 25 bp, Homo sapien
gtgccgcctcgctgagacgctgcct

SEQ ID NO: 2163397 - DNA, 25 bp, Homo sapien
ggctccgggtgccgcctcgctgaga

SEQ ID NO: 2163398 - DNA, 25 bp, Homo sapien
agcccaacggtccggcagtccgtgg

SEQ ID NO: 2163399 - DNA, 25 bp, Homo sapien
atggcggcctcgtatccaggatggc

SEQ ID NO: 2163400 - DNA, 25 bp, Homo sapien
tagtagcacacgaacagcaggatcc

SEQ ID NO: 2163401 - DNA, 25 bp, Homo sapien
tctaagtgagccacacgcatggcac

SEQ ID NO: 2163402 - DNA, 25 bp, Homo sapien
gggattcgactcagttgccgccaac

SEQ ID NO: 2163403 - DNA, 25 bp, Homo sapien
tggaccttggttgagaagacggaaa

SEQ ID NO: 2163404 - DNA, 25 bp, Homo sapien
ctctttgactgtgggtggaccttgg

SEQ ID NO: 2163405 - DNA, 25 bp, Homo sapien
tgtgacatagtgtatagaagtctct

SEQ ID NO: 2163406 - DNA, 25 bp, Homo sapien
ctttgcctccctctttgactgtggg

SEQ ID NO: 2163407 - DNA, 25 bp, Homo sapien
ttcactgttgggcaggatatgtcca

SEQ ID NO: 2163408 - DNA, 25 bp, Homo sapien
cagcaaagcttccaatgcggaatct

SEQ ID NO: 2163409 - DNA, 25 bp, Homo sapien
ccatttgcaagcacaaaatatgagg

SEQ ID NO: 2163410 - DNA, 25 bp, Homo sapien
ttcttccagagattggccatgagca

SEQ ID NO: 2163411 - DNA, 25 bp, Homo sapien
tgcagatatctttttcgaaccattt

SEQ ID NO: 2163412 - DNA, 25 bp, Homo sapien
atgcagatatctttttcgaaccatt

SEQ ID NO: 2163413 - DNA, 25 bp, Homo sapien
caaggctttgccacctgattttccc

SEQ ID NO: 2163414 - DNA, 25 bp, Homo sapien
tcttgcagctcattacaaggctttg

SEQ ID NO: 2163415 - DNA, 25 bp, Homo sapien
aaacatttgaagctcgtggtccccg

SEQ ID NO: 2163416 - DNA, 25 bp, Homo sapien
gtggtccccgatgatgaaaaacagc

SEQ ID NO: 2163417 - DNA, 25 bp, Homo sapien
ttgagggttccatagagcctggaaa

SEQ ID NO: 2163418 - DNA, 25 bp, Homo sapien
gccattgagggttccatagagcctg

SEQ ID NO: 2163419 - DNA, 25 bp, Homo sapien
cattgagggttccatagagcctgga

SEQ ID NO: 2163420 - DNA, 25 bp, Homo sapien
tcagccattgagggttccatagagc

SEQ ID NO: 2163421 - DNA, 25 bp, Homo sapien
aatgggcagacataccaggataagg

SEQ ID NO: 2163422 - DNA, 25 bp, Homo sapien
caggataaggctgatcgcaccaagc

SEQ ID NO: 2163423 - DNA, 25 bp, Homo sapien
gctgatcgcaccaagcccaaacatt

SEQ ID NO: 2163424 - DNA, 25 bp, Homo sapien
cctccagaaaagagagcggcaataa

SEQ ID NO: 2163425 - DNA, 25 bp, Homo sapien
taccagctttatacgaatttcaaac

SEQ ID NO: 2163426 - DNA, 25 bp, Homo sapien
cagctttatacgaatttcaaaccta

SEQ ID NO: 2163427 - DNA, 25 bp, Homo sapien
gaagtaccagctttatacgaatttc

SEQ ID NO: 2163428 - DNA, 25 bp, Homo sapien
tccaagaagtaccagctttatacga

SEQ ID NO: 2163429 - DNA, 25 bp, Homo sapien
agatggtgtctctcctataagaatc

SEQ ID NO: 2163430 - DNA, 25 bp, Homo sapien
agatgctacccttagttcccttttg

SEQ ID NO: 2163431 - DNA, 25 bp, Homo sapien
tgccttcgctctttagatgctaccc

SEQ ID NO: 2163432 - DNA, 25 bp, Homo sapien
gaatctcttggattagatatatcat

SEQ ID NO: 2163433 - DNA, 25 bp, Homo sapien
ttacaattttcaaagcaccttcact

SEQ ID NO: 2163434 - DNA, 25 bp, Homo sapien
gcaccttcacttactcctgttgtca

SEQ ID NO: 2163435 - DNA, 25 bp, Homo sapien
ttcaaagcaccttcacttactcctg

SEQ ID NO: 2163436 - DNA, 25 bp, Homo sapien
aagcaccttcacttactcctgttgt

SEQ ID NO: 2163437 - DNA, 25 bp, Homo sapien
cttggcttgctcatattgatcatca

SEQ ID NO: 2163438 - DNA, 25 bp, Homo sapien
taataaatccgatagaaattattcc

SEQ ID NO: 2163439 - DNA, 25 bp, Homo sapien
tattccacttggcttgctcatattg

SEQ ID NO: 2163440 - DNA, 25 bp, Homo sapien
tagaaattattccacttggcttgct

SEQ ID NO: 2163441 - DNA, 25 bp, Homo sapien
cctttgtaaatcatcggccggttcg

SEQ ID NO: 2163442 - DNA, 25 bp, Homo sapien
cttcaaacccgttacaactctgttg

SEQ ID NO: 2163443 - DNA, 25 bp, Homo sapien
tgtcctgcctttgtaaatcatcggc

SEQ ID NO: 2163444 - DNA, 25 bp, Homo sapien
aacccgttacaactctgttgtcctg

SEQ ID NO: 2163445 - DNA, 25 bp, Homo sapien
cctattcatcaaatcaaccttctca

SEQ ID NO: 2163446 - DNA, 25 bp, Homo sapien
taaatcacttttcctattcatcaaa

SEQ ID NO: 2163447 - DNA, 25 bp, Homo sapien
caaccttctcattctgaagattggt

SEQ ID NO: 2163448 - DNA, 25 bp, Homo sapien
tctcattctgaagattggtgaaatg

SEQ ID NO: 2163449 - DNA, 25 bp, Homo sapien
atggctgagacagtcccctctgctc

SEQ ID NO: 2163450 - DNA, 25 bp, Homo sapien
gctgagacagtcccctctgctctga

SEQ ID NO: 2163451 - DNA, 25 bp, Homo sapien
gcatggctgagacagtcccctctgc

SEQ ID NO: 2163452 - DNA, 25 bp, Homo sapien
ccatgaggtttgcatggctgagaca

SEQ ID NO: 2163453 - DNA, 25 bp, Homo sapien
cctgcaatagagcacatatggagat

SEQ ID NO: 2163454 - DNA, 25 bp, Homo sapien
ggtatggtgtctttatgaacctccg

SEQ ID NO: 2163455 - DNA, 25 bp, Homo sapien
tgaacctccgtttgacaggaactct

SEQ ID NO: 2163456 - DNA, 25 bp, Homo sapien
tgctttgttggctcaaatgacgcct

SEQ ID NO: 2163457 - DNA, 25 bp, Homo sapien
gtcctgatccaaaccaaaactcttg

SEQ ID NO: 2163458 - DNA, 25 bp, Homo sapien
cagaagactagaagcttcccgcaat

SEQ ID NO: 2163459 - DNA, 25 bp, Homo sapien
ttcccgcaattacaagcttggctca

SEQ ID NO: 2163460 - DNA, 25 bp, Homo sapien
ggaacaagaggcaagctgacactca

SEQ ID NO: 2163461 - DNA, 25 bp, Homo sapien
gaccttggggcagtccgagggcgcg

SEQ ID NO: 2163462 - DNA, 25 bp, Homo sapien
acagttgaagcaggaaacctcgacg

SEQ ID NO: 2163463 - DNA, 25 bp, Homo sapien
cgggttccgtccaagcacagttgaa

SEQ ID NO: 2163464 - DNA, 25 bp, Homo sapien
gcgcggtgaaaaggtgacggagggc

SEQ ID NO: 2163465 - DNA, 25 bp, Homo sapien
ctaaggagaggcggcggcggtggct

SEQ ID NO: 2163466 - DNA, 25 bp, Homo sapien
agaggcggcggcggtggctgcgcgg

SEQ ID NO: 2163467 - DNA, 25 bp, Homo sapien
ggagaggcggcggcggtggctgcgc

SEQ ID NO: 2163468 - DNA, 25 bp, Homo sapien
aggcggcggcggtggctgcgcggcc

SEQ ID NO: 2163469 - DNA, 25 bp, Homo sapien
gtggacgcggtcgtcaaggcggcga

SEQ ID NO: 2163470 - DNA, 25 bp, Homo sapien
ggtggacgcggtcgtcaaggcggcg

SEQ ID NO: 2163471 - DNA, 25 bp, Homo sapien
gcgaggtggacgcggtcgtcaaggc

SEQ ID NO: 2163472 - DNA, 25 bp, Homo sapien
gaggtggacgcggtcgtcaaggcgg

SEQ ID NO: 2163473 - DNA, 25 bp, Homo sapien
gtaaacgtaggaggcgtagagctcc

SEQ ID NO: 2163474 - DNA, 25 bp, Homo sapien
atggacaggtaaacgtaggaggcgt

SEQ ID NO: 2163475 - DNA, 25 bp, Homo sapien
ctggcggttgatggccgcctctgag

SEQ ID NO: 2163476 - DNA, 25 bp, Homo sapien
ttgatctggcggttgatggccgcct

SEQ ID NO: 2163477 - DNA, 25 bp, Homo sapien
tcattggttctgcagcttcatcagt

SEQ ID NO: 2163478 - DNA, 25 bp, Homo sapien
cttcatcagttcctcagcatgttcc

SEQ ID NO: 2163479 - DNA, 25 bp, Homo sapien
atcatcgtggtcaaagtagtaagac

SEQ ID NO: 2163480 - DNA, 25 bp, Homo sapien
ccacatcatcgtggtcaaagtagta

SEQ ID NO: 2163481 - DNA, 25 bp, Homo sapien
ctccatctcattcagcccgctccca

SEQ ID NO: 2163482 - DNA, 25 bp, Homo sapien
tccatctcattcagcccgctcccag

SEQ ID NO: 2163483 - DNA, 25 bp, Homo sapien
ttccctccccttcatacttgccaat

SEQ ID NO: 2163484 - DNA, 25 bp, Homo sapien
tacttgccaatttgagtcagggcct

SEQ ID NO: 2163485 - DNA, 25 bp, Homo sapien
atacttgccaatttgagtcagggcc

SEQ ID NO: 2163486 - DNA, 25 bp, Homo sapien
ttgccaatttgagtcagggccttca

SEQ ID NO: 2163487 - DNA, 25 bp, Homo sapien
tgtgacctgaaaatgaccaagagta

SEQ ID NO: 2163488 - DNA, 25 bp, Homo sapien
cacttttgtgacctgaaaatgacca

SEQ ID NO: 2163489 - DNA, 25 bp, Homo sapien
aatcacttttgtgacctgaaaatga

SEQ ID NO: 2163490 - DNA, 25 bp, Homo sapien
tttgtgacctgaaaatgaccaagag

SEQ ID NO: 2163491 - DNA, 25 bp, Homo sapien
ccatttctgtagcaggcagatcttt

SEQ ID NO: 2163492 - DNA, 25 bp, Homo sapien
gagagcacaccttctacttcaaaat

SEQ ID NO: 2163493 - DNA, 25 bp, Homo sapien
ctgccctaatatctggagtcagtac

SEQ ID NO: 2163494 - DNA, 25 bp, Homo sapien
gccaaacatattctgtcctgtagct

SEQ ID NO: 2163495 - DNA, 25 bp, Homo sapien
ttccacagtcctgctgcatgccaaa

SEQ ID NO: 2163496 - DNA, 25 bp, Homo sapien
gtcctgtagcttctgccctaatatc

SEQ ID NO: 2163497 - DNA, 25 bp, Homo sapien
ttgatgacgtatggcctgtggaccc

SEQ ID NO: 2163498 - DNA, 25 bp, Homo sapien
tcctaggatgctggttccggtcccg

SEQ ID NO: 2163499 - DNA, 25 bp, Homo sapien
cgcagtaacccaacacgaagcagat

SEQ ID NO: 2163500 - DNA, 25 bp, Homo sapien
agcaccagattgaggctcccagaga

SEQ ID NO: 2163501 - DNA, 25 bp, Homo sapien
cggctttgatgacctagtacaagat

SEQ ID NO: 2163502 - DNA, 25 bp, Homo sapien
ccaggaggagggatacgtttccacg

SEQ ID NO: 2163503 - DNA, 25 bp, Homo sapien
gaacccaaggttcgataatcctcag

SEQ ID NO: 2163504 - DNA, 25 bp, Homo sapien
gtttccacgataacttcggctttga

SEQ ID NO: 2163505 - DNA, 25 bp, Homo sapien
tatgatcctgggtgagccactacct

SEQ ID NO: 2163506 - DNA, 25 bp, Homo sapien
gggacactgagcaatgtctacagac

SEQ ID NO: 2163507 - DNA, 25 bp, Homo sapien
gcagtgggtctcaactggtggcaaa

SEQ ID NO: 2163508 - DNA, 25 bp, Homo sapien
aagaagctggaagatctgacacaca

SEQ ID NO: 2163509 - DNA, 25 bp, Homo sapien
tctccagttcttatccactctacct

SEQ ID NO: 2163510 - DNA, 25 bp, Homo sapien
cacagcacactatatccaatccatt

SEQ ID NO: 2163511 - DNA, 25 bp, Homo sapien
ttatccactctacctctagaacatc

SEQ ID NO: 2163512 - DNA, 25 bp, Homo sapien
agcacactatatccaatccattcct

SEQ ID NO: 2163513 - DNA, 25 bp, Homo sapien
gcttggcagcactctcatctacctg

SEQ ID NO: 2163514 - DNA, 25 bp, Homo sapien
ggcagcactctcatctacctgaata

SEQ ID NO: 2163515 - DNA, 25 bp, Homo sapien
tggcagcactctcatctacctgaat

SEQ ID NO: 2163516 - DNA, 25 bp, Homo sapien
ttggcagcactctcatctacctgaa

SEQ ID NO: 2163517 - DNA, 25 bp, Homo sapien
taattgagaggtattagtcttgatc

SEQ ID NO: 2163518 - DNA, 25 bp, Homo sapien
tagaagaggtaagaacccatattca

SEQ ID NO: 2163519 - DNA, 25 bp, Homo sapien
tattcaaaggtctcagaaacatcta

SEQ ID NO: 2163520 - DNA, 25 bp, Homo sapien
gaaacatctaattgagaggtattag

SEQ ID NO: 2163521 - DNA, 25 bp, Homo sapien
tctatggttggcttaacgaggttta

SEQ ID NO: 2163522 - DNA, 25 bp, Homo sapien
taataactgtaagataggctgaaac

SEQ ID NO: 2163523 - DNA, 25 bp, Homo sapien
gataggctgaaactgaacagcatct

SEQ ID NO: 2163524 - DNA, 25 bp, Homo sapien
ggaaataggctcattaatgcagctt

SEQ ID NO: 2163525 - DNA, 25 bp, Homo sapien
tctcccacctctcagtgtgctccat

SEQ ID NO: 2163526 - DNA, 25 bp, Homo sapien
gaacataaggaagaggctgaatttt

SEQ ID NO: 2163527 - DNA, 25 bp, Homo sapien
atggggaacataaggaagaggctga

SEQ ID NO: 2163528 - DNA, 25 bp, Homo sapien
tcacaaatgtgggcaagggtgagat

SEQ ID NO: 2163529 - DNA, 25 bp, Homo sapien
gcaagggtgagatggggaacataag

SEQ ID NO: 2163530 - DNA, 25 bp, Homo sapien
tatcccactgccgttcttcacatga

SEQ ID NO: 2163531 - DNA, 25 bp, Homo sapien
ccggcactgcgtgcatcctcttcac

SEQ ID NO: 2163532 - DNA, 25 bp, Homo sapien
taggctctctatcccactgccgttc

SEQ ID NO: 2163533 - DNA, 25 bp, Homo sapien
ttcttcacatgacaaagggaagacc

SEQ ID NO: 2163534 - DNA, 25 bp, Homo sapien
ttctgtgtagtaggttaaggtagca

SEQ ID NO: 2163535 - DNA, 25 bp, Homo sapien
gaatcaaattatagacataggagaa

SEQ ID NO: 2163536 - DNA, 25 bp, Homo sapien
ggaaggattctgtgtagtaggttaa

SEQ ID NO: 2163537 - DNA, 25 bp, Homo sapien
gaggaatcaaattatagacatagga

SEQ ID NO: 2163538 - DNA, 25 bp, Homo sapien
tcttgcatgtgaacgcaatactcaa

SEQ ID NO: 2163539 - DNA, 25 bp, Homo sapien
ttgtgtggtcatccaaagccctctt

SEQ ID NO: 2163540 - DNA, 25 bp, Homo sapien
aacgcaatactcaattgtgtggtca

SEQ ID NO: 2163541 - DNA, 25 bp, Homo sapien
cttgtcttgcatgtgaacgcaatac

SEQ ID NO: 2163542 - DNA, 25 bp, Homo sapien
gttctctctccatgtcgtgaggtaa

SEQ ID NO: 2163543 - DNA, 25 bp, Homo sapien
gattagccatttgttcctgaggttc

SEQ ID NO: 2163544 - DNA, 25 bp, Homo sapien
tgattagccatttgttcctgaggtt

SEQ ID NO: 2163545 - DNA, 25 bp, Homo sapien
tgtcgtgaggtaaaaatgacaactt

SEQ ID NO: 2163546 - DNA, 25 bp, Homo sapien
gatatgtctccaatgaatccatgaa

SEQ ID NO: 2163547 - DNA, 25 bp, Homo sapien
gactgatatgtctccaatgaatcca

SEQ ID NO: 2163548 - DNA, 25 bp, Homo sapien
ccatgactgatatgtctccaatgaa

SEQ ID NO: 2163549 - DNA, 25 bp, Homo sapien
ttcccatgactgatatgtctccaat

SEQ ID NO: 2163550 - DNA, 25 bp, Homo sapien
gataggaggaggcaccattgctttg

SEQ ID NO: 2163551 - DNA, 25 bp, Homo sapien
gtagataggaggaggcaccattgct

SEQ ID NO: 2163552 - DNA, 25 bp, Homo sapien
tcctgaagagctatcattacaaaaa

SEQ ID NO: 2163553 - DNA, 25 bp, Homo sapien
ggaggaggcaccattgctttgaaca

SEQ ID NO: 2163554 - DNA, 25 bp, Homo sapien
atgtcacggggctttgatatacata

SEQ ID NO: 2163555 - DNA, 25 bp, Homo sapien
catgtcacggggctttgatatacat

SEQ ID NO: 2163556 - DNA, 25 bp, Homo sapien
cacatgtcacggggctttgatatac

SEQ ID NO: 2163557 - DNA, 25 bp, Homo sapien
acacatgtcacggggctttgatata

SEQ ID NO: 2163558 - DNA, 25 bp, Homo sapien
agtttcacaggagtatgcaagtgcc

SEQ ID NO: 2163559 - DNA, 25 bp, Homo sapien
ttcttttgcacagcatgggagctgc

SEQ ID NO: 2163560 - DNA, 25 bp, Homo sapien
aattcttgcaattccatatcttgtc

SEQ ID NO: 2163561 - DNA, 25 bp, Homo sapien
tgttgccataggaatcgagtttcac

SEQ ID NO: 2163562 - DNA, 25 bp, Homo sapien
cttatccaacatgtgtcttccacct

SEQ ID NO: 2163563 - DNA, 25 bp, Homo sapien
atccaacatgtgtcttccacctgct

SEQ ID NO: 2163564 - DNA, 25 bp, Homo sapien
tatccaacatgtgtcttccacctgc

SEQ ID NO: 2163565 - DNA, 25 bp, Homo sapien
ttatccaacatgtgtcttccacctg

SEQ ID NO: 2163566 - DNA, 25 bp, Homo sapien
ttccagtatctgctgatgcagctat

SEQ ID NO: 2163567 - DNA, 25 bp, Homo sapien
gaaattccagtatctgctgatgcag

SEQ ID NO: 2163568 - DNA, 25 bp, Homo sapien
aaattccagtatctgctgatgcagc

SEQ ID NO: 2163569 - DNA, 25 bp, Homo sapien
aattccagtatctgctgatgcagct

SEQ ID NO: 2163570 - DNA, 25 bp, Homo sapien
cccttggtcctgagtagaatgaaga

SEQ ID NO: 2163571 - DNA, 25 bp, Homo sapien
caacatagcaatcacaataaccagg

SEQ ID NO: 2163572 - DNA, 25 bp, Homo sapien
ccagagcatcctggcctttgttggc

SEQ ID NO: 2163573 - DNA, 25 bp, Homo sapien
gaggtctagcttctttaactgttgg

SEQ ID NO: 2163574 - DNA, 25 bp, Homo sapien
gtgacttgacaatcatgtaggaatg

SEQ ID NO: 2163575 - DNA, 25 bp, Homo sapien
tcaagaaaatgacgccaaccttccc

SEQ ID NO: 2163576 - DNA, 25 bp, Homo sapien
catttctgtgacttgacaatcatgt

SEQ ID NO: 2163577 - DNA, 25 bp, Homo sapien
ggtctttcaagaaaatgacgccaac

SEQ ID NO: 2163578 - DNA, 25 bp, Homo sapien
acatgcttccacttcattgataaaa

SEQ ID NO: 2163579 - DNA, 25 bp, Homo sapien
attgataaaaatttactgcagtttg

SEQ ID NO: 2163580 - DNA, 25 bp, Homo sapien
tttactgcagtttggcacctgggtc

SEQ ID NO: 2163581 - DNA, 25 bp, Homo sapien
acacatgcttccacttcattgataa

SEQ ID NO: 2163582 - DNA, 25 bp, Homo sapien
gggtcaagtgtactggtcgtcagca

SEQ ID NO: 2163583 - DNA, 25 bp, Homo sapien
tcaagtgtactggtcgtcagcaggc

SEQ ID NO: 2163584 - DNA, 25 bp, Homo sapien
agtgtactggtcgtcagcaggctcc

SEQ ID NO: 2163585 - DNA, 25 bp, Homo sapien
tgtactggtcgtcagcaggctccat

SEQ ID NO: 2163586 - DNA, 25 bp, Homo sapien
taaatggctgaggagactttccacc

SEQ ID NO: 2163587 - DNA, 25 bp, Homo sapien
aaacctgcaacctccccaatgaatg

SEQ ID NO: 2163588 - DNA, 25 bp, Homo sapien
tgcttctctgccactaggtggttca

SEQ ID NO: 2163589 - DNA, 25 bp, Homo sapien
tgatcaggatgacccagagttggcc

SEQ ID NO: 2163590 - DNA, 25 bp, Homo sapien
actgtcatgcaggttcgggtagtgt

SEQ ID NO: 2163591 - DNA, 25 bp, Homo sapien
aatttgtagtctccaggtactaatc

SEQ ID NO: 2163592 - DNA, 25 bp, Homo sapien
ttgtacagtcgtactaaaggcactg

SEQ ID NO: 2163593 - DNA, 25 bp, Homo sapien
aaatcctccatttgtacagtcgtac

SEQ ID NO: 2163594 - DNA, 25 bp, Homo sapien
gaggcagcactatgaacagaagtgc

SEQ ID NO: 2163595 - DNA, 25 bp, Homo sapien
aagaggcagcactatgaacagaagt

SEQ ID NO: 2163596 - DNA, 25 bp, Homo sapien
gcaagaggcagcactatgaacagaa

SEQ ID NO: 2163597 - DNA, 25 bp, Homo sapien
caagaggcagcactatgaacagaag

SEQ ID NO: 2163598 - DNA, 25 bp, Homo sapien
agctaaaagtgtccgggccgcatcg

SEQ ID NO: 2163599 - DNA, 25 bp, Homo sapien
actgggcgggcaagcgcctggtcgc

SEQ ID NO: 2163600 - DNA, 25 bp, Homo sapien
tggtcgcccactcgggtccgctcgg

SEQ ID NO: 2163601 - DNA, 25 bp, Homo sapien
tctggtcctgtgctccggcgaggaa

SEQ ID NO: 2163602 - DNA, 25 bp, Homo sapien
agcgggtcggcgcggctctcggcac

SEQ ID NO: 2163603 - DNA, 25 bp, Homo sapien
tcggcgcggctctcggcacagctcg

SEQ ID NO: 2163604 - DNA, 25 bp, Homo sapien
gggtcggcgcggctctcggcacagc

SEQ ID NO: 2163605 - DNA, 25 bp, Homo sapien
cctgtccctgatcgcagcgggtcgg

SEQ ID NO: 2163606 - DNA, 25 bp, Homo sapien
tctctgaaaaagtcgaatagatcca

SEQ ID NO: 2163607 - DNA, 25 bp, Homo sapien
ctctgaaaaagtcgaatagatccat

SEQ ID NO: 2163608 - DNA, 25 bp, Homo sapien
agtctctgaaaaagtcgaatagatc

SEQ ID NO: 2163609 - DNA, 25 bp, Homo sapien
gtctctgaaaaagtcgaatagatcc

SEQ ID NO: 2163610 - DNA, 25 bp, Homo sapien
taaatgtgcattgacatcagagctg

SEQ ID NO: 2163611 - DNA, 25 bp, Homo sapien
cagaaggaaaggtgtgcgcgccgcg

SEQ ID NO: 2163612 - DNA, 25 bp, Homo sapien
tcttgaaagccaagcgccgaagtcg

SEQ ID NO: 2163613 - DNA, 25 bp, Homo sapien
tcgaaccaaggtcccctgagtggtg

SEQ ID NO: 2163614 - DNA, 25 bp, Homo sapien
cgtcctccattaaggcaatgaagct

SEQ ID NO: 2163615 - DNA, 25 bp, Homo sapien
tttccgtcctccattaaggcaatga

SEQ ID NO: 2163616 - DNA, 25 bp, Homo sapien
ctttccgtcctccattaaggcaatg

SEQ ID NO: 2163617 - DNA, 25 bp, Homo sapien
tccgtcctccattaaggcaatgaag

SEQ ID NO: 2163618 - DNA, 25 bp, Homo sapien
ctttcaaaacactgccataagtatc

SEQ ID NO: 2163619 - DNA, 25 bp, Homo sapien
taagaaggcttgcttatccattgcc

SEQ ID NO: 2163620 - DNA, 25 bp, Homo sapien
gaatacagtcaaacagcctgcaaga

SEQ ID NO: 2163621 - DNA, 25 bp, Homo sapien
tgcaagatattaaaggcctctgcct

SEQ ID NO: 2163622 - DNA, 25 bp, Homo sapien
tacattagcaacgacagttttggac

SEQ ID NO: 2163623 - DNA, 25 bp, Homo sapien
aggattttctggagcagcgacagtg

SEQ ID NO: 2163624 - DNA, 25 bp, Homo sapien
tctggagcagcgacagtgttgaaat

SEQ ID NO: 2163625 - DNA, 25 bp, Homo sapien
aactggatccaaggattttctggag

SEQ ID NO: 2163626 - DNA, 25 bp, Homo sapien
ctggatccaaggattttctggagca

SEQ ID NO: 2163627 - DNA, 25 bp, Homo sapien
gttaattggcagtcatgatagcccc

SEQ ID NO: 2163628 - DNA, 25 bp, Homo sapien
aaaagtgatcttgtgttcccctcag

SEQ ID NO: 2163629 - DNA, 25 bp, Homo sapien
tgtaaacccaacattgtgtatcgcc

SEQ ID NO: 2163630 - DNA, 25 bp, Homo sapien
gaaagggtccaagatccaatctaaa

SEQ ID NO: 2163631 - DNA, 25 bp, Homo sapien
ttcagcagatgccttactgttattt

SEQ ID NO: 2163632 - DNA, 25 bp, Homo sapien
cagatgccttactgttatttctaat

SEQ ID NO: 2163633 - DNA, 25 bp, Homo sapien
cagcagatgccttactgttatttct

SEQ ID NO: 2163634 - DNA, 25 bp, Homo sapien
gcagatgccttactgttatttctaa

SEQ ID NO: 2163635 - DNA, 25 bp, Homo sapien
ccatataatgaattcgagcaggcta

SEQ ID NO: 2163636 - DNA, 25 bp, Homo sapien
gcaaggtccccgcttagtgaccatt

SEQ ID NO: 2163637 - DNA, 25 bp, Homo sapien
gggatatgtaaacctgcttgtttcc

SEQ ID NO: 2163638 - DNA, 25 bp, Homo sapien
tgaccattcactccaagttcgaaag

SEQ ID NO: 2163639 - DNA, 25 bp, Homo sapien
tttgtgtcagtcactacatctctat

SEQ ID NO: 2163640 - DNA, 25 bp, Homo sapien
tgtgtcagtcactacatctctataa

SEQ ID NO: 2163641 - DNA, 25 bp, Homo sapien
gtcactacatctctataaacataat

SEQ ID NO: 2163642 - DNA, 25 bp, Homo sapien
gtcagtcactacatctctataaaca

SEQ ID NO: 2163643 - DNA, 25 bp, Homo sapien
agccagccaaatccttcttactttc

SEQ ID NO: 2163644 - DNA, 25 bp, Homo sapien
gcagccagccaaatccttcttactt

SEQ ID NO: 2163645 - DNA, 25 bp, Homo sapien
cagccagccaaatccttcttacttt

SEQ ID NO: 2163646 - DNA, 25 bp, Homo sapien
ccactgggtagagggtattgtccaa

SEQ ID NO: 2163647 - DNA, 25 bp, Homo sapien
tccaagggccataggtaggtaaagc

SEQ ID NO: 2163648 - DNA, 25 bp, Homo sapien
gaaagccccagtgtgcaaataagga

SEQ ID NO: 2163649 - DNA, 25 bp, Homo sapien
aagacagctgagtcaaactggccag

SEQ ID NO: 2163650 - DNA, 25 bp, Homo sapien
caactgtgagttccagaaatagcaa

SEQ ID NO: 2163651 - DNA, 25 bp, Homo sapien
taatcacaactgtgagttccagaaa

SEQ ID NO: 2163652 - DNA, 25 bp, Homo sapien
tcacaactgtgagttccagaaatag

SEQ ID NO: 2163653 - DNA, 25 bp, Homo sapien
ctaatcacaactgtgagttccagaa

SEQ ID NO: 2163654 - DNA, 25 bp, Homo sapien
catacgtattcgcagatgcccctcg

SEQ ID NO: 2163655 - DNA, 25 bp, Homo sapien
ctcaggacgataatcaggatggccc

SEQ ID NO: 2163656 - DNA, 25 bp, Homo sapien
caaagagttacttggctgcaaatgt

SEQ ID NO: 2163657 - DNA, 25 bp, Homo sapien
tgtatctaggtcagggaaactcagg

SEQ ID NO: 2163658 - DNA, 25 bp, Homo sapien
taaacttcaaccaggccattatccc

SEQ ID NO: 2163659 - DNA, 25 bp, Homo sapien
cccagcatctggaggagagtttaga

SEQ ID NO: 2163660 - DNA, 25 bp, Homo sapien
gcttatcaaaatcattcatcgcctg

SEQ ID NO: 2163661 - DNA, 25 bp, Homo sapien
taagtgctaattgtgtgcctaaaca

SEQ ID NO: 2163662 - DNA, 25 bp, Homo sapien
catgcccatgattccactgataaca

SEQ ID NO: 2163663 - DNA, 25 bp, Homo sapien
tcagagcttgcatttattttgacct

SEQ ID NO: 2163664 - DNA, 25 bp, Homo sapien
taatttcaattccatgtaatgtgtc

SEQ ID NO: 2163665 - DNA, 25 bp, Homo sapien
gataacaagcatcatactctttctt

SEQ ID NO: 2163666 - DNA, 25 bp, Homo sapien
cgctcctcctgatcactactggttt

SEQ ID NO: 2163667 - DNA, 25 bp, Homo sapien
tcgctcctcctgatcactactggtt

SEQ ID NO: 2163668 - DNA, 25 bp, Homo sapien
aaaagaacacctcgctcctcctgat

SEQ ID NO: 2163669 - DNA, 25 bp, Homo sapien
tgcttaaaagaacacctcgctcctc

SEQ ID NO: 2163670 - DNA, 25 bp, Homo sapien
cattgaatagcaaagaaacgaccgc

SEQ ID NO: 2163671 - DNA, 25 bp, Homo sapien
cattgtacatcttctatatgcagag

SEQ ID NO: 2163672 - DNA, 25 bp, Homo sapien
gatagattttgcaccctaactctac

SEQ ID NO: 2163673 - DNA, 25 bp, Homo sapien
cctagatagagaaatcctcttcctc

SEQ ID NO: 2163674 - DNA, 25 bp, Homo sapien
gccactgttgctactaattcttcca

SEQ ID NO: 2163675 - DNA, 25 bp, Homo sapien
tgtatttccatcatggcgcagctga

SEQ ID NO: 2163676 - DNA, 25 bp, Homo sapien
ggtaatataaacgttgccactgttg

SEQ ID NO: 2163677 - DNA, 25 bp, Homo sapien
gcgcagctgagattatcttctggta

SEQ ID NO: 2163678 - DNA, 25 bp, Homo sapien
cataatcagcctgatcatgggtgca

SEQ ID NO: 2163679 - DNA, 25 bp, Homo sapien
gctgctcgattgatggtgttagaca

SEQ ID NO: 2163680 - DNA, 25 bp, Homo sapien
taaaaaacaactggagtcatcaggc

SEQ ID NO: 2163681 - DNA, 25 bp, Homo sapien
tagacagggaataaagagagatgcc

SEQ ID NO: 2163682 - DNA, 25 bp, Homo sapien
gctttcattaaacctcgctaactga

SEQ ID NO: 2163683 - DNA, 25 bp, Homo sapien
tctttgctttcattaaacctcgcta

SEQ ID NO: 2163684 - DNA, 25 bp, Homo sapien
tcactatttggcctaattgggagag

SEQ ID NO: 2163685 - DNA, 25 bp, Homo sapien
cctaattgggagagctgaaatacta

SEQ ID NO: 2163686 - DNA, 25 bp, Homo sapien
cattggtcacatcttgttgctggct

SEQ ID NO: 2163687 - DNA, 25 bp, Homo sapien
tgtctcagagccagaactatctcct

SEQ ID NO: 2163688 - DNA, 25 bp, Homo sapien
tatctccttcacctaaatggcctcg

SEQ ID NO: 2163689 - DNA, 25 bp, Homo sapien
aatggcctcgtgttcccattggtca

SEQ ID NO: 2163690 - DNA, 25 bp, Homo sapien
gaaggatcctctatctttaggaaca

SEQ ID NO: 2163691 - DNA, 25 bp, Homo sapien
ttagaatggctgaaggatcctctat

SEQ ID NO: 2163692 - DNA, 25 bp, Homo sapien
tcccttctaagttagaatggctgaa

SEQ ID NO: 2163693 - DNA, 25 bp, Homo sapien
ggctgaaggatcctctatctttagg

SEQ ID NO: 2163694 - DNA, 25 bp, Homo sapien
gggtcatcagctcccttgagtctgt

SEQ ID NO: 2163695 - DNA, 25 bp, Homo sapien
tcatcagctcccttgagtctgtcat

SEQ ID NO: 2163696 - DNA, 25 bp, Homo sapien
tgtgggtcatcagctcccttgagtc

SEQ ID NO: 2163697 - DNA, 25 bp, Homo sapien
gctgtgggtcatcagctcccttgag

SEQ ID NO: 2163698 - DNA, 25 bp, Homo sapien
cattcgtatgctttgatagatgcat

SEQ ID NO: 2163699 - DNA, 25 bp, Homo sapien
tgctttgatagatgcattcatttgc

SEQ ID NO: 2163700 - DNA, 25 bp, Homo sapien
cgtatgctttgatagatgcattcat

SEQ ID NO: 2163701 - DNA, 25 bp, Homo sapien
gctttgatagatgcattcatttgct

SEQ ID NO: 2163702 - DNA, 25 bp, Homo sapien
tactgccacagaggattttacagcc

SEQ ID NO: 2163703 - DNA, 25 bp, Homo sapien
ctttagtactacttaaggtggtatg

SEQ ID NO: 2163704 - DNA, 25 bp, Homo sapien
gatagtgtttagtggcagatttttc

SEQ ID NO: 2163705 - DNA, 25 bp, Homo sapien
taaagaaaacattctcggcacacca

SEQ ID NO: 2163706 - DNA, 25 bp, Homo sapien
aagtttttagctctagacagctgcc

SEQ ID NO: 2163707 - DNA, 25 bp, Homo sapien
taatgtcaggactcatgaggaactc

SEQ ID NO: 2163708 - DNA, 25 bp, Homo sapien
gacatcaatagtccagaggtcctgg

SEQ ID NO: 2163709 - DNA, 25 bp, Homo sapien
taggagcatcttgggactacctcat

SEQ ID NO: 2163710 - DNA, 25 bp, Homo sapien
ttttggaatcgctatttcattgata

SEQ ID NO: 2163711 - DNA, 25 bp, Homo sapien
cattgatatccacgctagctgactg

SEQ ID NO: 2163712 - DNA, 25 bp, Homo sapien
tatttcattgatatccacgctagct

SEQ ID NO: 2163713 - DNA, 25 bp, Homo sapien
cacgctagctgactggaaaaggtca

SEQ ID NO: 2163714 - DNA, 25 bp, Homo sapien
ggaaaaagagctccatagcccacaa

SEQ ID NO: 2163715 - DNA, 25 bp, Homo sapien
aaaaagagctccatagcccacaaag

SEQ ID NO: 2163716 - DNA, 25 bp, Homo sapien
gaaaaagagctccatagcccacaaa

SEQ ID NO: 2163717 - DNA, 25 bp, Homo sapien
aaaagagctccatagcccacaaaga

SEQ ID NO: 2163718 - DNA, 25 bp, Homo sapien
ctgacagctaagaatgacaggccca

SEQ ID NO: 2163719 - DNA, 25 bp, Homo sapien
tgacagctaagaatgacaggcccat

SEQ ID NO: 2163720 - DNA, 25 bp, Homo sapien
cttcttgattcctccgctcccattc

SEQ ID NO: 2163721 - DNA, 25 bp, Homo sapien
agaaaagagatcgtcttcttgctgg

SEQ ID NO: 2163722 - DNA, 25 bp, Homo sapien
tgaagaaaagagatcgtcttcttgc

SEQ ID NO: 2163723 - DNA, 25 bp, Homo sapien
aaagagatcgtcttcttgctggact

SEQ ID NO: 2163724 - DNA, 25 bp, Homo sapien
tggcttgccagtacagtgctagggt

SEQ ID NO: 2163725 - DNA, 25 bp, Homo sapien
caggcgcttgcacggcgaattcaga

SEQ ID NO: 2163726 - DNA, 25 bp, Homo sapien
tatgactatcacgtgaccactcagg

SEQ ID NO: 2163727 - DNA, 25 bp, Homo sapien
actgaaaggccactgctaggagcta

SEQ ID NO: 2163728 - DNA, 25 bp, Homo sapien
tcaaacgcttgaggtgcagtagaca

SEQ ID NO: 2163729 - DNA, 25 bp, Homo sapien
caggaatccaatctaaaggcagtgg

SEQ ID NO: 2163730 - DNA, 25 bp, Homo sapien
gtagacagccgcttacatggtagtg

SEQ ID NO: 2163731 - DNA, 25 bp, Homo sapien
tagtcaccagtgacaggaatccaat

SEQ ID NO: 2163732 - DNA, 25 bp, Homo sapien
gaatagcactgagtgcaaagtcatt

SEQ ID NO: 2163733 - DNA, 25 bp, Homo sapien
ccattgtaaacatgttccctgtgta

SEQ ID NO: 2163734 - DNA, 25 bp, Homo sapien
tattttatcatagggactgagggag

SEQ ID NO: 2163735 - DNA, 25 bp, Homo sapien
caaaggatgcgatttctccatcaat

SEQ ID NO: 2163736 - DNA, 25 bp, Homo sapien
cctttatttcccatgtaacctgtga

SEQ ID NO: 2163737 - DNA, 25 bp, Homo sapien
ctgtgagactcaggttcacatgaca

SEQ ID NO: 2163738 - DNA, 25 bp, Homo sapien
gaggcctttggcacttccattcaaa

SEQ ID NO: 2163739 - DNA, 25 bp, Homo sapien
tagatgtcgggaacaagcttagccc

SEQ ID NO: 2163740 - DNA, 25 bp, Homo sapien
caatgtctctttaacaccatttgca

SEQ ID NO: 2163741 - DNA, 25 bp, Homo sapien
tcccagttatcaacaatgaacgcca

SEQ ID NO: 2163742 - DNA, 25 bp, Homo sapien
cccagttatcaacaatgaacgccat

SEQ ID NO: 2163743 - DNA, 25 bp, Homo sapien
ccatttgcaccacattgttcccagt

SEQ ID NO: 2163744 - DNA, 25 bp, Homo sapien
gcatttcttttcttttcctcctcac

SEQ ID NO: 2163745 - DNA, 25 bp, Homo sapien
ctggaaatggcatttcttttctttt

SEQ ID NO: 2163746 - DNA, 25 bp, Homo sapien
atggcatttcttttcttttcctcct

SEQ ID NO: 2163747 - DNA, 25 bp, Homo sapien
tggaaatggcatttcttttcttttc

SEQ ID NO: 2163748 - DNA, 25 bp, Homo sapien
ttcacttggtgaagggaaccacctg

SEQ ID NO: 2163749 - DNA, 25 bp, Homo sapien
taaatattcattcacttggtgaagg

SEQ ID NO: 2163750 - DNA, 25 bp, Homo sapien
tcagcctagtttggagatatctgga

SEQ ID NO: 2163751 - DNA, 25 bp, Homo sapien
cagcctagtttggagatatctggaa

SEQ ID NO: 2163752 - DNA, 25 bp, Homo sapien
ccagagagatgctccttaccaatgc

SEQ ID NO: 2163753 - DNA, 25 bp, Homo sapien
actgtagcacagcatcgagatgagc

SEQ ID NO: 2163754 - DNA, 25 bp, Homo sapien
tattgtgtgtggatcacaccagaga

SEQ ID NO: 2163755 - DNA, 25 bp, Homo sapien
agatgctccttaccaatgcccacag

SEQ ID NO: 2163756 - DNA, 25 bp, Homo sapien
gacatatagttagctgaaaacagca

SEQ ID NO: 2163757 - DNA, 25 bp, Homo sapien
ctggtcaaaggattgagttaaagcc

SEQ ID NO: 2163758 - DNA, 25 bp, Homo sapien
cctagaatttgggacagctggtcaa

SEQ ID NO: 2163759 - DNA, 25 bp, Homo sapien
catacctatgctgttgagcagtgaa

SEQ ID NO: 2163760 - DNA, 25 bp, Homo sapien
caaggtgattgtctactgaagttat

SEQ ID NO: 2163761 - DNA, 25 bp, Homo sapien
caagatgtttacaaggtgattgtct

SEQ ID NO: 2163762 - DNA, 25 bp, Homo sapien
tgtttacaaggtgattgtctactga

SEQ ID NO: 2163763 - DNA, 25 bp, Homo sapien
ctcaagatgtttacaaggtgattgt

SEQ ID NO: 2163764 - DNA, 25 bp, Homo sapien
gagcttcagttggtaccgaacgttc

SEQ ID NO: 2163765 - DNA, 25 bp, Homo sapien
cttcagttggtaccgaacgttcctg

SEQ ID NO: 2163766 - DNA, 25 bp, Homo sapien
tgagcttcagttggtaccgaacgtt

SEQ ID NO: 2163767 - DNA, 25 bp, Homo sapien
tctcttctgattcaccccatgaagc

SEQ ID NO: 2163768 - DNA, 25 bp, Homo sapien
gtttacatttctgttcttgtctctc

SEQ ID NO: 2163769 - DNA, 25 bp, Homo sapien
tcacacgtgcataattctgtcttgt

SEQ ID NO: 2163770 - DNA, 25 bp, Homo sapien
cttgtctctcttctgattcacccca

SEQ ID NO: 2163771 - DNA, 25 bp, Homo sapien
ccttttgactctgtatccagtggtt

SEQ ID NO: 2163772 - DNA, 25 bp, Homo sapien
tgactctgtatccagtggtttttaa

SEQ ID NO: 2163773 - DNA, 25 bp, Homo sapien
aatggcagaattttctcttgaacaa

SEQ ID NO: 2163774 - DNA, 25 bp, Homo sapien
tgaacaatgagccttttgactctgt

SEQ ID NO: 2163775 - DNA, 25 bp, Homo sapien
cctcactatgaaatgaagggtcctg

SEQ ID NO: 2163776 - DNA, 25 bp, Homo sapien
gaatcacctatgctctctgggctaa

SEQ ID NO: 2163777 - DNA, 25 bp, Homo sapien
tctgggctaaagtctcctcactatg

SEQ ID NO: 2163778 - DNA, 25 bp, Homo sapien
gctgagataaggcatgggcacatat

SEQ ID NO: 2163779 - DNA, 25 bp, Homo sapien
gccttcacagactccacaaattcca

SEQ ID NO: 2163780 - DNA, 25 bp, Homo sapien
ctaaggatgttgacctgctgtagga

SEQ ID NO: 2163781 - DNA, 25 bp, Homo sapien
ctgtaggaccccatcagaaacagac

SEQ ID NO: 2163782 - DNA, 25 bp, Homo sapien
actgatatattaggagattgggaaa

SEQ ID NO: 2163783 - DNA, 25 bp, Homo sapien
cacgtcttcgcagtaattctggagg

SEQ ID NO: 2163784 - DNA, 25 bp, Homo sapien
agttactcggacaggtgtgaaagac

SEQ ID NO: 2163785 - DNA, 25 bp, Homo sapien
tgctgcccgttgagttgccaagctg

SEQ ID NO: 2163786 - DNA, 25 bp, Homo sapien
tgctgcttaattcccgaggcacctt

SEQ ID NO: 2163787 - DNA, 25 bp, Homo sapien
caccgtagtcctcgctccatatggg

SEQ ID NO: 2163788 - DNA, 25 bp, Homo sapien
cagccgttgaggtccccaccgtagt

SEQ ID NO: 2163789 - DNA, 25 bp, Homo sapien
gacagaagctcccagccgttgaggt

SEQ ID NO: 2163790 - DNA, 25 bp, Homo sapien
accgacactgccatgtcagacagaa

SEQ ID NO: 2163791 - DNA, 25 bp, Homo sapien
ttcttcaacacagcttggatcactg

SEQ ID NO: 2163792 - DNA, 25 bp, Homo sapien
aggcaaaggtttagggtatggtgct

SEQ ID NO: 2163793 - DNA, 25 bp, Homo sapien
aggtttagggtatggtgcttgaaca

SEQ ID NO: 2163794 - DNA, 25 bp, Homo sapien
atggtgcttgaacagggaacgtttc

SEQ ID NO: 2163795 - DNA, 25 bp, Homo sapien
gtatggtgcttgaacagggaacgtt

SEQ ID NO: 2163796 - DNA, 25 bp, Homo sapien
agttctttcaaaggccgatgctgca

SEQ ID NO: 2163797 - DNA, 25 bp, Homo sapien
aaggccgatgctgcatggtctccac

SEQ ID NO: 2163798 - DNA, 25 bp, Homo sapien
caggctctaacatcagggtggattc

SEQ ID NO: 2163799 - DNA, 25 bp, Homo sapien
cacttttgcatcaaaagcactaggg

SEQ ID NO: 2163800 - DNA, 25 bp, Homo sapien
ccggtacagggtctggtggtactct

SEQ ID NO: 2163801 - DNA, 25 bp, Homo sapien
gaggctagactaggtcccggtacag

SEQ ID NO: 2163802 - DNA, 25 bp, Homo sapien
taccagttaccattcgaagtagaaa

SEQ ID NO: 2163803 - DNA, 25 bp, Homo sapien
ccagctcaggcaaaccaacttgata

SEQ ID NO: 2163804 - DNA, 25 bp, Homo sapien
catgctatatcctcacagcatgaga

SEQ ID NO: 2163805 - DNA, 25 bp, Homo sapien
atgacatgctatatcctcacagcat

SEQ ID NO: 2163806 - DNA, 25 bp, Homo sapien
gctatatcctcacagcatgagatgt

SEQ ID NO: 2163807 - DNA, 25 bp, Homo sapien
gacatgctatatcctcacagcatga

SEQ ID NO: 2163808 - DNA, 25 bp, Homo sapien
gcttggctgttccaaacgaaattcc

SEQ ID NO: 2163809 - DNA, 25 bp, Homo sapien
gggagcttggctgttccaaacgaaa

SEQ ID NO: 2163810 - DNA, 25 bp, Homo sapien
gccccctcaggcaggcttcggaagg

SEQ ID NO: 2163811 - DNA, 25 bp, Homo sapien
cccctcaggcaggcttcggaaggac

SEQ ID NO: 2163812 - DNA, 25 bp, Homo sapien
tgcatggaagtgagaggagtaggcc

SEQ ID NO: 2163813 - DNA, 25 bp, Homo sapien
ctgggatggaaaaggtgctctgctc

SEQ ID NO: 2163814 - DNA, 25 bp, Homo sapien
tgtcctgggatggaaaaggtgctct

SEQ ID NO: 2163815 - DNA, 25 bp, Homo sapien
tcagagtgtccagcagtatgcatgg

SEQ ID NO: 2163816 - DNA, 25 bp, Homo sapien
atcctggggtcagatgctgcgattc

SEQ ID NO: 2163817 - DNA, 25 bp, Homo sapien
ttgtaaggtgaatcctggggtcaga

SEQ ID NO: 2163818 - DNA, 25 bp, Homo sapien
tttgtaaggtgaatcctggggtcag

SEQ ID NO: 2163819 - DNA, 25 bp, Homo sapien
tgaatcctggggtcagatgctgcga

SEQ ID NO: 2163820 - DNA, 25 bp, Homo sapien
gaagctctggtggttgggtcattcc

SEQ ID NO: 2163821 - DNA, 25 bp, Homo sapien
aagctctggtggttgggtcattcca

SEQ ID NO: 2163822 - DNA, 25 bp, Homo sapien
agctctggtggttgggtcattccac

SEQ ID NO: 2163823 - DNA, 25 bp, Homo sapien
gctctggtggttgggtcattccact

SEQ ID NO: 2163824 - DNA, 25 bp, Homo sapien
tagtatatgcaagacctaactcagt

SEQ ID NO: 2163825 - DNA, 25 bp, Homo sapien
ttagatctaatacttcccctgattt

SEQ ID NO: 2163826 - DNA, 25 bp, Homo sapien
tattctagagtcctggtgacacaat

SEQ ID NO: 2163827 - DNA, 25 bp, Homo sapien
cccctgatttaaaccaaaatggcat

SEQ ID NO: 2163828 - DNA, 25 bp, Homo sapien
acttgtcaggactctgatgagttct

SEQ ID NO: 2163829 - DNA, 25 bp, Homo sapien
cttgtcaggactctgatgagttctg

SEQ ID NO: 2163830 - DNA, 25 bp, Homo sapien
gacttgtcaggactctgatgagttc

SEQ ID NO: 2163831 - DNA, 25 bp, Homo sapien
agaaaacagctctgcttcgaactac

SEQ ID NO: 2163832 - DNA, 25 bp, Homo sapien
cagctctgcttcgaactacagccat

SEQ ID NO: 2163833 - DNA, 25 bp, Homo sapien
ctgaatagcataaattgagctgaag

SEQ ID NO: 2163834 - DNA, 25 bp, Homo sapien
gaagttgatttaaatctcatgcaga

SEQ ID NO: 2163835 - DNA, 25 bp, Homo sapien
gaaagtctgtcatgcggctgctctg

SEQ ID NO: 2163836 - DNA, 25 bp, Homo sapien
cttgccaccgtgaatactgagtatc

SEQ ID NO: 2163837 - DNA, 25 bp, Homo sapien
tttttctgggatagatccccagcag

SEQ ID NO: 2163838 - DNA, 25 bp, Homo sapien
cagtatcttctcttagtatcgttac

SEQ ID NO: 2163839 - DNA, 25 bp, Homo sapien
tttcatgacatctacagtgcactgg

SEQ ID NO: 2163840 - DNA, 25 bp, Homo sapien
cttattttgacaaagatatgctttc

SEQ ID NO: 2163841 - DNA, 25 bp, Homo sapien
ttttgacaaagatatgctttcatga

SEQ ID NO: 2163842 - DNA, 25 bp, Homo sapien
ttgacaaagatatgctttcatgaca

SEQ ID NO: 2163843 - DNA, 25 bp, Homo sapien
tgatcagcattcagaactctttggc

SEQ ID NO: 2163844 - DNA, 25 bp, Homo sapien
gacactgtttccaattatgatcagc

SEQ ID NO: 2163845 - DNA, 25 bp, Homo sapien
acttgatagagaccttgttgctgtc

SEQ ID NO: 2163846 - DNA, 25 bp, Homo sapien
tcagaactctttggccaccttgaac

SEQ ID NO: 2163847 - DNA, 25 bp, Homo sapien
ccatgatgtggataagaaatctttc

SEQ ID NO: 2163848 - DNA, 25 bp, Homo sapien
tatatgaccgatctcttcctgtaaa

SEQ ID NO: 2163849 - DNA, 25 bp, Homo sapien
tttgatctgagagatgtaagcccat

SEQ ID NO: 2163850 - DNA, 25 bp, Homo sapien
cttctgatatatgaccgatctcttc

SEQ ID NO: 2163851 - DNA, 25 bp, Homo sapien
cttcacaggctcaaggtcatcttca

SEQ ID NO: 2163852 - DNA, 25 bp, Homo sapien
gtagagctcagtggcagtgcactga

SEQ ID NO: 2163853 - DNA, 25 bp, Homo sapien
actgagtggtcaaggtcttcacagg

SEQ ID NO: 2163854 - DNA, 25 bp, Homo sapien
ctggtagagctcagtggcagtgcac

SEQ ID NO: 2163855 - DNA, 25 bp, Homo sapien
aaagagaagcacaaggtctatatct

SEQ ID NO: 2163856 - DNA, 25 bp, Homo sapien
gactgattaggctgcttatattgaa

SEQ ID NO: 2163857 - DNA, 25 bp, Homo sapien
ttattgaactgcaagcatagcatca

SEQ ID NO: 2163858 - DNA, 25 bp, Homo sapien
acctttgagactgattaggctgctt

SEQ ID NO: 2163859 - DNA, 25 bp, Homo sapien
ggaatgactgaatactcagatcaat

SEQ ID NO: 2163860 - DNA, 25 bp, Homo sapien
cacagaagggcaaggaatgactgaa

SEQ ID NO: 2163861 - DNA, 25 bp, Homo sapien
gaatactcagatcaatttcctcctg

SEQ ID NO: 2163862 - DNA, 25 bp, Homo sapien
ttttattagccgacaccacagaagg

SEQ ID NO: 2163863 - DNA, 25 bp, Homo sapien
acttccaccatgatagaaagtcgag

SEQ ID NO: 2163864 - DNA, 25 bp, Homo sapien
tagaaagtcgagtgtccctttctaa

SEQ ID NO: 2163865 - DNA, 25 bp, Homo sapien
gatagaaagtcgagtgtccctttct

SEQ ID NO: 2163866 - DNA, 25 bp, Homo sapien
tggccatacttccaccatgatagaa

SEQ ID NO: 2163867 - DNA, 25 bp, Homo sapien
tcctaggttttgccttttcaacagc

SEQ ID NO: 2163868 - DNA, 25 bp, Homo sapien
ttcacaggattattcctaggttttg

SEQ ID NO: 2163869 - DNA, 25 bp, Homo sapien
caggattattcctaggttttgcctt

SEQ ID NO: 2163870 - DNA, 25 bp, Homo sapien
cacaggattattcctaggttttgcc

SEQ ID NO: 2163871 - DNA, 25 bp, Homo sapien
ttttcacatgcatcgagtccgttaa

SEQ ID NO: 2163872 - DNA, 25 bp, Homo sapien
tgcatcgagtccgttaaaattaaca

SEQ ID NO: 2163873 - DNA, 25 bp, Homo sapien
tgaatagagattaactcaaaatcca

SEQ ID NO: 2163874 - DNA, 25 bp, Homo sapien
cttattttttcacatgcatcgagtc

SEQ ID NO: 2163875 - DNA, 25 bp, Homo sapien
ggctgtggcttaaagactccctgct

SEQ ID NO: 2163876 - DNA, 25 bp, Homo sapien
tgcagcggctccatatgccagaaac

SEQ ID NO: 2163877 - DNA, 25 bp, Homo sapien
tggccccattgataggctggtgaac

SEQ ID NO: 2163878 - DNA, 25 bp, Homo sapien
aaagactccctgcttaggaccactg

SEQ ID NO: 2163879 - DNA, 25 bp, Homo sapien
cttcgaatatcaggcagagggttgg

SEQ ID NO: 2163880 - DNA, 25 bp, Homo sapien
aacagaatcaagtgttggtgttttg

SEQ ID NO: 2163881 - DNA, 25 bp, Homo sapien
gtgattgacttcgaatatcaggcag

SEQ ID NO: 2163882 - DNA, 25 bp, Homo sapien
gtgttggtgttttgctgagaacatc

SEQ ID NO: 2163883 - DNA, 25 bp, Homo sapien
actcccagaagccaataaactgttc

SEQ ID NO: 2163884 - DNA, 25 bp, Homo sapien
cccagaagccaataaactgttctga

SEQ ID NO: 2163885 - DNA, 25 bp, Homo sapien
tcccagaagccaataaactgttctg

SEQ ID NO: 2163886 - DNA, 25 bp, Homo sapien
cagaagccaataaactgttctgaat

SEQ ID NO: 2163887 - DNA, 25 bp, Homo sapien
gccagcattctgttatggaagtaac

SEQ ID NO: 2163888 - DNA, 25 bp, Homo sapien
ttagcatcccttgggacaagtgtac

SEQ ID NO: 2163889 - DNA, 25 bp, Homo sapien
ggaggcttgaactcccaaggccaga

SEQ ID NO: 2163890 - DNA, 25 bp, Homo sapien
tggaagtaactgtttggaacaccaa

SEQ ID NO: 2163891 - DNA, 25 bp, Homo sapien
tcttcaggaatacagtgaaaatccc

SEQ ID NO: 2163892 - DNA, 25 bp, Homo sapien
gagatgttggataccatctgtatct

SEQ ID NO: 2163893 - DNA, 25 bp, Homo sapien
gaatacagtgaaaatccctgatcat

SEQ ID NO: 2163894 - DNA, 25 bp, Homo sapien
tgaggagatgttggataccatctgt

SEQ ID NO: 2163895 - DNA, 25 bp, Homo sapien
agaaccccactcctttccaaatatg

SEQ ID NO: 2163896 - DNA, 25 bp, Homo sapien
gaaccccactcctttccaaatatga

SEQ ID NO: 2163897 - DNA, 25 bp, Homo sapien
tatcacagaaaacgcaaggtaaatt

SEQ ID NO: 2163898 - DNA, 25 bp, Homo sapien
tcccttatcattatcacagaaaacg

SEQ ID NO: 2163899 - DNA, 25 bp, Homo sapien
cattatcacagaaaacgcaaggtaa

SEQ ID NO: 2163900 - DNA, 25 bp, Homo sapien
atcattatcacagaaaacgcaaggt

SEQ ID NO: 2163901 - DNA, 25 bp, Homo sapien
actatctcctccaccatgcaaaaat

SEQ ID NO: 2163902 - DNA, 25 bp, Homo sapien
cactatctcctccaccatgcaaaaa

SEQ ID NO: 2163903 - DNA, 25 bp, Homo sapien
tcctttcgatgacaattttgcaaag

SEQ ID NO: 2163904 - DNA, 25 bp, Homo sapien
ctggctatcctttcgatgacaattt

SEQ ID NO: 2163905 - DNA, 25 bp, Homo sapien
tgttctggctatcctttcgatgaca

SEQ ID NO: 2163906 - DNA, 25 bp, Homo sapien
tatcatttatgttctggctatcctt

SEQ ID NO: 2163907 - DNA, 25 bp, Homo sapien
tggatgctggccatatgacacagtg

SEQ ID NO: 2163908 - DNA, 25 bp, Homo sapien
tttcaactgcctctatggatgctgg

SEQ ID NO: 2163909 - DNA, 25 bp, Homo sapien
tatttagagcaacaaccattgatgg

SEQ ID NO: 2163910 - DNA, 25 bp, Homo sapien
ccattgatgggtcgcagagtgtaca

SEQ ID NO: 2163911 - DNA, 25 bp, Homo sapien
gggcccaactgcttgtcaggagaac

SEQ ID NO: 2163912 - DNA, 25 bp, Homo sapien
gttacaaatcgtaggtggagcaggc

SEQ ID NO: 2163913 - DNA, 25 bp, Homo sapien
tgcttccatggaggaatctcctcca

SEQ ID NO: 2163914 - DNA, 25 bp, Homo sapien
gcttgtcaggagaacccaggcagat

SEQ ID NO: 2163915 - DNA, 25 bp, Homo sapien
agcacctttcctgtgcctctactct

SEQ ID NO: 2163916 - DNA, 25 bp, Homo sapien
ttcctgtgcctctactctccatctt

SEQ ID NO: 2163917 - DNA, 25 bp, Homo sapien
cctttcctgtgcctctactctccat

SEQ ID NO: 2163918 - DNA, 25 bp, Homo sapien
acctttcctgtgcctctactctcca

SEQ ID NO: 2163919 - DNA, 25 bp, Homo sapien
cgatcgtttgctctctgcgtcctat

SEQ ID NO: 2163920 - DNA, 25 bp, Homo sapien
tcctataacaagtcagcctcagctg

SEQ ID NO: 2163921 - DNA, 25 bp, Homo sapien
gctctctgcgtcctataacaagtca

SEQ ID NO: 2163922 - DNA, 25 bp, Homo sapien
tctgcgtcctataacaagtcagcct

SEQ ID NO: 2163923 - DNA, 25 bp, Homo sapien
gctactctgcctttattgataaata

SEQ ID NO: 2163924 - DNA, 25 bp, Homo sapien
attgataaataatactcctccatac

SEQ ID NO: 2163925 - DNA, 25 bp, Homo sapien
gtgacaccatttgctactctgcctt

SEQ ID NO: 2163926 - DNA, 25 bp, Homo sapien
ttggaaagtgacaccatttgctact

SEQ ID NO: 2163927 - DNA, 25 bp, Homo sapien
ctgaatccgactcagagctgctctc

SEQ ID NO: 2163928 - DNA, 25 bp, Homo sapien
gaggtgcctcattagattcgctgtc

SEQ ID NO: 2163929 - DNA, 25 bp, Homo sapien
tgctctccgattcgctggagctgcc

SEQ ID NO: 2163930 - DNA, 25 bp, Homo sapien
cctcattagattcgctgtcagtggt

SEQ ID NO: 2163931 - DNA, 25 bp, Homo sapien
catcagctgaggcttatggtaccag

SEQ ID NO: 2163932 - DNA, 25 bp, Homo sapien
acacttgagtagttgtgatagcaac

SEQ ID NO: 2163933 - DNA, 25 bp, Homo sapien
gccaatagagggtgacagaattaaa

SEQ ID NO: 2163934 - DNA, 25 bp, Homo sapien
ggtccttgattcctaactctgagtt

SEQ ID NO: 2163935 - DNA, 25 bp, Homo sapien
caggaggcaaaggtaatagtctctg

SEQ ID NO: 2163936 - DNA, 25 bp, Homo sapien
ggaggcaaaggtaatagtctctgat

SEQ ID NO: 2163937 - DNA, 25 bp, Homo sapien
aggaggcaaaggtaatagtctctga

SEQ ID NO: 2163938 - DNA, 25 bp, Homo sapien
gaggcaaaggtaatagtctctgatc

SEQ ID NO: 2163939 - DNA, 25 bp, Homo sapien
tctttgggttcagctgggacctgac

SEQ ID NO: 2163940 - DNA, 25 bp, Homo sapien
aatgaattcccgagactttggcaca

SEQ ID NO: 2163941 - DNA, 25 bp, Homo sapien
tcttcttctcgggagccaaagggat

SEQ ID NO: 2163942 - DNA, 25 bp, Homo sapien
ggacgggctttctccctaatgagac

SEQ ID NO: 2163943 - DNA, 25 bp, Homo sapien
cagtattacctccagaaataatgca

SEQ ID NO: 2163944 - DNA, 25 bp, Homo sapien
gtcaggctggcaccacagatttcct

SEQ ID NO: 2163945 - DNA, 25 bp, Homo sapien
gctgccactgctactcattaaggtg

SEQ ID NO: 2163946 - DNA, 25 bp, Homo sapien
cagaaataatgcacggaggcaggac

SEQ ID NO: 2163947 - DNA, 25 bp, Homo sapien
cagtctccttgtggtctggcttggc

SEQ ID NO: 2163948 - DNA, 25 bp, Homo sapien
caggaataggtgaaaatgttggctc

SEQ ID NO: 2163949 - DNA, 25 bp, Homo sapien
caggttctcatgatctcgcagaggg

SEQ ID NO: 2163950 - DNA, 25 bp, Homo sapien
tcaaggtcaatcttcacccagaggt

SEQ ID NO: 2163951 - DNA, 25 bp, Homo sapien
gagcttgaaatgcatggcaccattc

SEQ ID NO: 2163952 - DNA, 25 bp, Homo sapien
agcttgaaatgcatggcaccattca

SEQ ID NO: 2163953 - DNA, 25 bp, Homo sapien
aaaaatacacagagcttgaaatgca

SEQ ID NO: 2163954 - DNA, 25 bp, Homo sapien
aaggagggagcaagcagatagttgt

SEQ ID NO: 2163955 - DNA, 25 bp, Homo sapien
agcaagcagatagttgtggcctcct

SEQ ID NO: 2163956 - DNA, 25 bp, Homo sapien
gagggagcaagcagatagttgtggc

SEQ ID NO: 2163957 - DNA, 25 bp, Homo sapien
gggagcaagcagatagttgtggcct

SEQ ID NO: 2163958 - DNA, 25 bp, Homo sapien
cagttctcttaggtttggtagatgt

SEQ ID NO: 2163959 - DNA, 25 bp, Homo sapien
atttctgcggcgtggagggtcctct

SEQ ID NO: 2163960 - DNA, 25 bp, Homo sapien
aaagggaccattattgccactgaca

SEQ ID NO: 2163961 - DNA, 25 bp, Homo sapien
cgatatccctttgaaagtagcacag

SEQ ID NO: 2163962 - DNA, 25 bp, Homo sapien
aataataatatttcttccaagatgc

SEQ ID NO: 2163963 - DNA, 25 bp, Homo sapien
ataatatttcttccaagatgcttac

SEQ ID NO: 2163964 - DNA, 25 bp, Homo sapien
ataataatatttcttccaagatgct

SEQ ID NO: 2163965 - DNA, 25 bp, Homo sapien
taataatatttcttccaagatgctt

SEQ ID NO: 2163966 - DNA, 25 bp, Homo sapien
tgtaagccagcttcgtgtctccact

SEQ ID NO: 2163967 - DNA, 25 bp, Homo sapien
ttgtaagccagcttcgtgtctccac

SEQ ID NO: 2163968 - DNA, 25 bp, Homo sapien
aagccagcttcgtgtctccactgcc

SEQ ID NO: 2163969 - DNA, 25 bp, Homo sapien
taagccagcttcgtgtctccactgc

SEQ ID NO: 2163970 - DNA, 25 bp, Homo sapien
tagcagtattggtgacagtgatggt

SEQ ID NO: 2163971 - DNA, 25 bp, Homo sapien
tggtagtagttgtggtggtggccgt

SEQ ID NO: 2163972 - DNA, 25 bp, Homo sapien
gtggcaatagcagtattggtgacag

SEQ ID NO: 2163973 - DNA, 25 bp, Homo sapien
gaggccagtagtgatggtagaggtg

SEQ ID NO: 2163974 - DNA, 25 bp, Homo sapien
cccaggacgtcatctccaggtgact

SEQ ID NO: 2163975 - DNA, 25 bp, Homo sapien
cttgggtctccggacattagtgctg

SEQ ID NO: 2163976 - DNA, 25 bp, Homo sapien
gtctccggacattagtgctgctgct

SEQ ID NO: 2163977 - DNA, 25 bp, Homo sapien
gcagagccgcccaggacgtcatctc

SEQ ID NO: 2163978 - DNA, 25 bp, Homo sapien
tcactactccaaactgtccatgata

SEQ ID NO: 2163979 - DNA, 25 bp, Homo sapien
ttcactactccaaactgtccatgat

SEQ ID NO: 2163980 - DNA, 25 bp, Homo sapien
ccccattcactactccaaactgtcc

SEQ ID NO: 2163981 - DNA, 25 bp, Homo sapien
cattcactactccaaactgtccatg

SEQ ID NO: 2163982 - DNA, 25 bp, Homo sapien
gaaatctgaagtacataatggccca

SEQ ID NO: 2163983 - DNA, 25 bp, Homo sapien
ccttgaaaaaggcagactaatgctg

SEQ ID NO: 2163984 - DNA, 25 bp, Homo sapien
tgaatcatcaaaccttttctgctat

SEQ ID NO: 2163985 - DNA, 25 bp, Homo sapien
gtcattcatatcataaccaaccttg

SEQ ID NO: 2163986 - DNA, 25 bp, Homo sapien
gtgcttcagcttcttagcttcttgc

SEQ ID NO: 2163987 - DNA, 25 bp, Homo sapien
acaaagcaatgagaaaaaggaaact

SEQ ID NO: 2163988 - DNA, 25 bp, Homo sapien
gaacaaagcaatgagaaaaaggaaa

SEQ ID NO: 2163989 - DNA, 25 bp, Homo sapien
caaagcaatgagaaaaaggaaactt

SEQ ID NO: 2163990 - DNA, 25 bp, Homo sapien
atttccagggaagtttcataagtca

SEQ ID NO: 2163991 - DNA, 25 bp, Homo sapien
gggaagtttcataagtcattccaaa

SEQ ID NO: 2163992 - DNA, 25 bp, Homo sapien
gtttcataagtcattccaaaatcac

SEQ ID NO: 2163993 - DNA, 25 bp, Homo sapien
gacagtggtatatgccattgagctt

SEQ ID NO: 2163994 - DNA, 25 bp, Homo sapien
tgcttccagagggtcgcgttccatg

SEQ ID NO: 2163995 - DNA, 25 bp, Homo sapien
agtctcagagtacatggtgtatggg

SEQ ID NO: 2163996 - DNA, 25 bp, Homo sapien
ggtcgcgttccatggcattgccaca

SEQ ID NO: 2163997 - DNA, 25 bp, Homo sapien
gagggcggcatcagcataattcaca

SEQ ID NO: 2163998 - DNA, 25 bp, Homo sapien
gctttttgtccccatccgaagccaa

SEQ ID NO: 2163999 - DNA, 25 bp, Homo sapien
ctttttgtccccatccgaagccaag

SEQ ID NO: 2164000 - DNA, 25 bp, Homo sapien
ggagtacttcatagcatggtccttc

SEQ ID NO: 2164001 - DNA, 25 bp, Homo sapien
ccatcagtgatctggagtacttcat

SEQ ID NO: 2164002 - DNA, 25 bp, Homo sapien
gtacttcatagcatggtccttcttc

SEQ ID NO: 2164003 - DNA, 25 bp, Homo sapien
ctggagtacttcatagcatggtcct

SEQ ID NO: 2164004 - DNA, 25 bp, Homo sapien
gcatgtcgtgtcttattagtgattt

SEQ ID NO: 2164005 - DNA, 25 bp, Homo sapien
tgcatgtcgtgtcttattagtgatt

SEQ ID NO: 2164006 - DNA, 25 bp, Homo sapien
ctgcatgtcgtgtcttattagtgat

SEQ ID NO: 2164007 - DNA, 25 bp, Homo sapien
ttggcagcatttgacattcgataac

SEQ ID NO: 2164008 - DNA, 25 bp, Homo sapien
ggttaagcctttggcagcatttgac

SEQ ID NO: 2164009 - DNA, 25 bp, Homo sapien
gagagaggttaagcctttggcagca

SEQ ID NO: 2164010 - DNA, 25 bp, Homo sapien
aagggtaggacggccatggccagca

SEQ ID NO: 2164011 - DNA, 25 bp, Homo sapien
gagagggtatctgtgcgacttttga

SEQ ID NO: 2164012 - DNA, 25 bp, Homo sapien
catggagagggtatctgtgcgactt

SEQ ID NO: 2164013 - DNA, 25 bp, Homo sapien
tatctgtgcgacttttgaagcattt

SEQ ID NO: 2164014 - DNA, 25 bp, Homo sapien
gggtatctgtgcgacttttgaagca

SEQ ID NO: 2164015 - DNA, 25 bp, Homo sapien
gatggatggctacttattgcaaaag

SEQ ID NO: 2164016 - DNA, 25 bp, Homo sapien
cagtgtctggcgtatatgttctcaa

SEQ ID NO: 2164017 - DNA, 25 bp, Homo sapien
aggcctggcagagtgtctcacacaa

SEQ ID NO: 2164018 - DNA, 25 bp, Homo sapien
gagcaaagagtatactagaggagca

SEQ ID NO: 2164019 - DNA, 25 bp, Homo sapien
gctgctgactagatctgggaacaat

SEQ ID NO: 2164020 - DNA, 25 bp, Homo sapien
ctacagctataggacagagttggac

SEQ ID NO: 2164021 - DNA, 25 bp, Homo sapien
gctgtgcctacagctataggacaga

SEQ ID NO: 2164022 - DNA, 25 bp, Homo sapien
tgggaacaattacaactgcaatgct

SEQ ID NO: 2164023 - DNA, 25 bp, Homo sapien
tgtggaaaccacaatgtcagtttgc

SEQ ID NO: 2164024 - DNA, 25 bp, Homo sapien
ccaatattggtctatcatcaaagtg

SEQ ID NO: 2164025 - DNA, 25 bp, Homo sapien
gaaaacacttgatgtccaatattgg

SEQ ID NO: 2164026 - DNA, 25 bp, Homo sapien
tgccggaacggctatcagcagttag

SEQ ID NO: 2164027 - DNA, 25 bp, Homo sapien
tgggaaatggaaagagacaagcctt

SEQ ID NO: 2164028 - DNA, 25 bp, Homo sapien
ctcttgtcagtttgtcggccatatc

SEQ ID NO: 2164029 - DNA, 25 bp, Homo sapien
tgactgggccattgttacagttccc

SEQ ID NO: 2164030 - DNA, 25 bp, Homo sapien
ctggcagccatgtggtgaatgcgct

SEQ ID NO: 2164031 - DNA, 25 bp, Homo sapien
cattgctagtgatgttgacgtggct

SEQ ID NO: 2164032 - DNA, 25 bp, Homo sapien
caacaagtgggcatcgatgcgcagc

SEQ ID NO: 2164033 - DNA, 25 bp, Homo sapien
ggtcagaggccccatcagcgtgtcc

SEQ ID NO: 2164034 - DNA, 25 bp, Homo sapien
caagattggtcatgctgctgtgctg

SEQ ID NO: 2164035 - DNA, 25 bp, Homo sapien
aacacagtccttggcgaacgtagcg

SEQ ID NO: 2164036 - DNA, 25 bp, Homo sapien
tagtggtggccctacctgggtcaag

SEQ ID NO: 2164037 - DNA, 25 bp, Homo sapien
gatgccagctgatgcctaaaacttg

SEQ ID NO: 2164038 - DNA, 25 bp, Homo sapien
caaagagaacgttccccagtgagtg

SEQ ID NO: 2164039 - DNA, 25 bp, Homo sapien
aacttacaagtcaagccagtgggct

SEQ ID NO: 2164040 - DNA, 25 bp, Homo sapien
ccattagtctacactgcacagttaa

SEQ ID NO: 2164041 - DNA, 25 bp, Homo sapien
cagtgtcccctaacccaatgtgagc

SEQ ID NO: 2164042 - DNA, 25 bp, Homo sapien
aaagctccaatctcttagaagaatg

SEQ ID NO: 2164043 - DNA, 25 bp, Homo sapien
tgatcatggatctaaaaagcagttc

SEQ ID NO: 2164044 - DNA, 25 bp, Homo sapien
ttcaaccatggatacaggcccagag

SEQ ID NO: 2164045 - DNA, 25 bp, Homo sapien
acttacttgggagggagcataggcc

SEQ ID NO: 2164046 - DNA, 25 bp, Homo sapien
tctatgagagaaaccaacgcaccag

SEQ ID NO: 2164047 - DNA, 25 bp, Homo sapien
tatggcttgccacaatggtccagcg

SEQ ID NO: 2164048 - DNA, 25 bp, Homo sapien
gaagattggcccaatgcctttcctt

SEQ ID NO: 2164049 - DNA, 25 bp, Homo sapien
tcttcataggaaaaggtgtttctga

SEQ ID NO: 2164050 - DNA, 25 bp, Homo sapien
gtgtttctgaagattggcccaatgc

SEQ ID NO: 2164051 - DNA, 25 bp, Homo sapien
tggaaagactgagcggaaatcactt

SEQ ID NO: 2164052 - DNA, 25 bp, Homo sapien
attttaatggtcactgtagtgcaca

SEQ ID NO: 2164053 - DNA, 25 bp, Homo sapien
ttttaatggtcactgtagtgcacac

SEQ ID NO: 2164054 - DNA, 25 bp, Homo sapien
gttgatgttgacaaagaatagcatt

SEQ ID NO: 2164055 - DNA, 25 bp, Homo sapien
ttgatgttgacaaagaatagcattt

SEQ ID NO: 2164056 - DNA, 25 bp, Homo sapien
ggttgatgttgacaaagaatagcat

SEQ ID NO: 2164057 - DNA, 25 bp, Homo sapien
aggttgatgttgacaaagaatagca

SEQ ID NO: 2164058 - DNA, 25 bp, Homo sapien
tgtctcaatggtctacctcagcctg

SEQ ID NO: 2164059 - DNA, 25 bp, Homo sapien
caggtggttgttccacaactgggct

SEQ ID NO: 2164060 - DNA, 25 bp, Homo sapien
gactttggttgagaatgggcctccc

SEQ ID NO: 2164061 - DNA, 25 bp, Homo sapien
cttggctctttggtgtccgcaggtg

SEQ ID NO: 2164062 - DNA, 25 bp, Homo sapien
caggggcttcatgagaagcggtaca

SEQ ID NO: 2164063 - DNA, 25 bp, Homo sapien
acagaagggcatctgttttaaggaa

SEQ ID NO: 2164064 - DNA, 25 bp, Homo sapien
ggggtgggaacaggggcttcatgag

SEQ ID NO: 2164065 - DNA, 25 bp, Homo sapien
agaagggcatctgttttaaggaagt

SEQ ID NO: 2164066 - DNA, 25 bp, Homo sapien
tggcctttttcttggaacttcctca

SEQ ID NO: 2164067 - DNA, 25 bp, Homo sapien
tcatcaccatggggcgtacccagtg

SEQ ID NO: 2164068 - DNA, 25 bp, Homo sapien
tagatctgaggtctctggccttgcc

SEQ ID NO: 2164069 - DNA, 25 bp, Homo sapien
ccagatactgttggcctgctctctt

SEQ ID NO: 2164070 - DNA, 25 bp, Homo sapien
cagtggggtatagaatgtactctag

SEQ ID NO: 2164071 - DNA, 25 bp, Homo sapien
ggttaattgatgttcctggtctgcc

SEQ ID NO: 2164072 - DNA, 25 bp, Homo sapien
tccttcatcctagaattcagagcca

SEQ ID NO: 2164073 - DNA, 25 bp, Homo sapien
tcttcatgcatagactctaatgccg

SEQ ID NO: 2164074 - DNA, 25 bp, Homo sapien
tctaatgccgtgtaaaccacaggga

SEQ ID NO: 2164075 - DNA, 25 bp, Homo sapien
aagccagccgccattaagattattg

SEQ ID NO: 2164076 - DNA, 25 bp, Homo sapien
ctctggcagctggagcctggactac

SEQ ID NO: 2164077 - DNA, 25 bp, Homo sapien
gcagcaattccatagccctgtctag

SEQ ID NO: 2164078 - DNA, 25 bp, Homo sapien
tatagggcccatagcactagaaagc

SEQ ID NO: 2164079 - DNA, 25 bp, Homo sapien
tcagtgaggtttgtaggaacaggtc

SEQ ID NO: 2164080 - DNA, 25 bp, Homo sapien
aactcttcggcatccacagcctggt

SEQ ID NO: 2164081 - DNA, 25 bp, Homo sapien
ttaatgaagcaggtagaatgaactc

SEQ ID NO: 2164082 - DNA, 25 bp, Homo sapien
gaggtttgtaggaacaggtcttgta

SEQ ID NO: 2164083 - DNA, 25 bp, Homo sapien
gattgcacctatgcagccatcattg

SEQ ID NO: 2164084 - DNA, 25 bp, Homo sapien
cctttgtcctcacggtagacatcat

SEQ ID NO: 2164085 - DNA, 25 bp, Homo sapien
gtcgccctttgtcctcacggtagac

SEQ ID NO: 2164086 - DNA, 25 bp, Homo sapien
acctttccaaccaacgcaaagattg

SEQ ID NO: 2164087 - DNA, 25 bp, Homo sapien
tctctgatgggatatcacgtgattc

SEQ ID NO: 2164088 - DNA, 25 bp, Homo sapien
gatgggatatcacgtgattccaaaa

SEQ ID NO: 2164089 - DNA, 25 bp, Homo sapien
tgatgggatatcacgtgattccaaa

SEQ ID NO: 2164090 - DNA, 25 bp, Homo sapien
tctgatgggatatcacgtgattcca

SEQ ID NO: 2164091 - DNA, 25 bp, Homo sapien
taaggtcgcacctcaaggaagtaga

SEQ ID NO: 2164092 - DNA, 25 bp, Homo sapien
gagatatcacaaacggtaccacaga

SEQ ID NO: 2164093 - DNA, 25 bp, Homo sapien
tctgaacagacgtatgactggtagc

SEQ ID NO: 2164094 - DNA, 25 bp, Homo sapien
ggagatatacaaccatcctaggtta

SEQ ID NO: 2164095 - DNA, 25 bp, Homo sapien
tgtctagagcctgagcccagatgtt

SEQ ID NO: 2164096 - DNA, 25 bp, Homo sapien
cagatgttcccctccactgccaagg

SEQ ID NO: 2164097 - DNA, 25 bp, Homo sapien
aaggcccattcctctggctgcttca

SEQ ID NO: 2164098 - DNA, 25 bp, Homo sapien
actgccaaggcccattcctctggct

SEQ ID NO: 2164099 - DNA, 25 bp, Homo sapien
cagagttcacagagtcaaggtttgc

SEQ ID NO: 2164100 - DNA, 25 bp, Homo sapien
gacattgcgttagaatgcacataaa

SEQ ID NO: 2164101 - DNA, 25 bp, Homo sapien
tatttaagagtgtctgctttgatca

SEQ ID NO: 2164102 - DNA, 25 bp, Homo sapien
caaggtttgccagagattggatgga

SEQ ID NO: 2164103 - DNA, 25 bp, Homo sapien
tgagttccgagcacgtttctctgaa

SEQ ID NO: 2164104 - DNA, 25 bp, Homo sapien
gttccgagcacgtttctctgaaggg

SEQ ID NO: 2164105 - DNA, 25 bp, Homo sapien
ggcagggcttcttatgcaggaaggg

SEQ ID NO: 2164106 - DNA, 25 bp, Homo sapien
tgaggagactgagttccgagcacgt

SEQ ID NO: 2164107 - DNA, 25 bp, Homo sapien
ggaagcatcaggcctagcatcaggg

SEQ ID NO: 2164108 - DNA, 25 bp, Homo sapien
agcatcaggcctagcatcaggggca

SEQ ID NO: 2164109 - DNA, 25 bp, Homo sapien
tcaggcctagcatcaggggcactga

SEQ ID NO: 2164110 - DNA, 25 bp, Homo sapien
ggcctagcatcaggggcactgagca

SEQ ID NO: 2164111 - DNA, 25 bp, Homo sapien
ggatttgtggggcacgtgcctaagg

SEQ ID NO: 2164112 - DNA, 25 bp, Homo sapien
tggggcacgtgcctaaggagcaggc

SEQ ID NO: 2164113 - DNA, 25 bp, Homo sapien
ctgtgggccccttttccaacctgcg

SEQ ID NO: 2164114 - DNA, 25 bp, Homo sapien
tttgtggggcacgtgcctaaggagc

SEQ ID NO: 2164115 - DNA, 25 bp, Homo sapien
gccagagttgttcaccaggtatggg

SEQ ID NO: 2164116 - DNA, 25 bp, Homo sapien
tgttcaccaggtatgggggaagtaa

SEQ ID NO: 2164117 - DNA, 25 bp, Homo sapien
gggccagagttgttcaccaggtatg

SEQ ID NO: 2164118 - DNA, 25 bp, Homo sapien
ctgggccagagttgttcaccaggta

SEQ ID NO: 2164119 - DNA, 25 bp, Homo sapien
cccagcagttggagcttgtaggata

SEQ ID NO: 2164120 - DNA, 25 bp, Homo sapien
tggagcttgtaggatatctctggaa

SEQ ID NO: 2164121 - DNA, 25 bp, Homo sapien
ccacttggctatctttggtggagcc

SEQ ID NO: 2164122 - DNA, 25 bp, Homo sapien
cctggaggatacagctcttcttagc

SEQ ID NO: 2164123 - DNA, 25 bp, Homo sapien
tgtatttttccccagatgtttccca

SEQ ID NO: 2164124 - DNA, 25 bp, Homo sapien
gtttcccatttctttcagaaatgct

SEQ ID NO: 2164125 - DNA, 25 bp, Homo sapien
cgctttgttgtatttttccccagat

SEQ ID NO: 2164126 - DNA, 25 bp, Homo sapien
tttcccatttctttcagaaatgctt

SEQ ID NO: 2164127 - DNA, 25 bp, Homo sapien
tcacacaaatcatgggcccattatg

SEQ ID NO: 2164128 - DNA, 25 bp, Homo sapien
tggaacaagctctgatgacttgtgg

SEQ ID NO: 2164129 - DNA, 25 bp, Homo sapien
tgcatctgctacatttgtcacacaa

SEQ ID NO: 2164130 - DNA, 25 bp, Homo sapien
tctgatgacttgtggaaggaaagca

SEQ ID NO: 2164131 - DNA, 25 bp, Homo sapien
gagcattgtgagacatttcccaata

SEQ ID NO: 2164132 - DNA, 25 bp, Homo sapien
ctggagcattgtgagacatttccca

SEQ ID NO: 2164133 - DNA, 25 bp, Homo sapien
ttcccaatatttgccaaaaccgatc

SEQ ID NO: 2164134 - DNA, 25 bp, Homo sapien
aatatttgccaaaaccgatctgcat

SEQ ID NO: 2164135 - DNA, 25 bp, Homo sapien
aggaaaggcctcatgtcttcagctt

SEQ ID NO: 2164136 - DNA, 25 bp, Homo sapien
ggaaaggcctcatgtcttcagcttg

SEQ ID NO: 2164137 - DNA, 25 bp, Homo sapien
ctacaactctgcactgacaactgac

SEQ ID NO: 2164138 - DNA, 25 bp, Homo sapien
cccgcagctcttcagagtgagcaat

SEQ ID NO: 2164139 - DNA, 25 bp, Homo sapien
cagagtgagcaatgccagtttcttg

SEQ ID NO: 2164140 - DNA, 25 bp, Homo sapien
tgagcaatgccagtttcttgaatgc

SEQ ID NO: 2164141 - DNA, 25 bp, Homo sapien
tcttcagagtgagcaatgccagttt

SEQ ID NO: 2164142 - DNA, 25 bp, Homo sapien
atttaataccgccattcctttgaga

SEQ ID NO: 2164143 - DNA, 25 bp, Homo sapien
tgacagagccagttccacggcttcg

SEQ ID NO: 2164144 - DNA, 25 bp, Homo sapien
cacggcttcgcctttaatggagtga

SEQ ID NO: 2164145 - DNA, 25 bp, Homo sapien
taaattcctgtagcactttgcagca

SEQ ID NO: 2164146 - DNA, 25 bp, Homo sapien
tatcatcccatctgccaatgactct

SEQ ID NO: 2164147 - DNA, 25 bp, Homo sapien
tcttgtcgccttgatatctttccag

SEQ ID NO: 2164148 - DNA, 25 bp, Homo sapien
tggctgtgactgatacacaagtctt

SEQ ID NO: 2164149 - DNA, 25 bp, Homo sapien
gactgatacacaagtcttgtcgcct

SEQ ID NO: 2164150 - DNA, 25 bp, Homo sapien
ccctgccttgtatgatcatagcagg

SEQ ID NO: 2164151 - DNA, 25 bp, Homo sapien
tagcaggttcctatcagagaaagcc

SEQ ID NO: 2164152 - DNA, 25 bp, Homo sapien
tatgatcatagcaggttcctatcag

SEQ ID NO: 2164153 - DNA, 25 bp, Homo sapien
caggttcctatcagagaaagcctct

SEQ ID NO: 2164154 - DNA, 25 bp, Homo sapien
acaggcagaatgcttgcatgagagg

SEQ ID NO: 2164155 - DNA, 25 bp, Homo sapien
agcacaggcagaatgcttgcatgag

SEQ ID NO: 2164156 - DNA, 25 bp, Homo sapien
aatgcttgcatgagaggggcctctg

SEQ ID NO: 2164157 - DNA, 25 bp, Homo sapien
tctgctgaactacccttcctcctcc

SEQ ID NO: 2164158 - DNA, 25 bp, Homo sapien
gagccacgtgtctgctgctaagcac

SEQ ID NO: 2164159 - DNA, 25 bp, Homo sapien
gggtgttccactcctccatagggat

SEQ ID NO: 2164160 - DNA, 25 bp, Homo sapien
gaaggactgcccttagatgcattgg

SEQ ID NO: 2164161 - DNA, 25 bp, Homo sapien
tagagttacactggtgagccacgtg

SEQ ID NO: 2164162 - DNA, 25 bp, Homo sapien
cctgcaggcatgtgggcctaggtgc

SEQ ID NO: 2164163 - DNA, 25 bp, Homo sapien
tttttggtcaaaactgggcctgcag

SEQ ID NO: 2164164 - DNA, 25 bp, Homo sapien
ggcctagcaggacctcttctgtgag

SEQ ID NO: 2164165 - DNA, 25 bp, Homo sapien
gccacccttccaggattcaatcctt

SEQ ID NO: 2164166 - DNA, 25 bp, Homo sapien
gggttgagtgctatatctaagtgct

SEQ ID NO: 2164167 - DNA, 25 bp, Homo sapien
gctatatctaagtgcttcagtggct

SEQ ID NO: 2164168 - DNA, 25 bp, Homo sapien
tgtcagggggttgagtgctatatct

SEQ ID NO: 2164169 - DNA, 25 bp, Homo sapien
gagtgctatatctaagtgcttcagt

SEQ ID NO: 2164170 - DNA, 25 bp, Homo sapien
gaacaactgtagctttaattccgta

SEQ ID NO: 2164171 - DNA, 25 bp, Homo sapien
ccggtcacagtgcaatcagctaatt

SEQ ID NO: 2164172 - DNA, 25 bp, Homo sapien
tagaccgttgctagttccctgaatg

SEQ ID NO: 2164173 - DNA, 25 bp, Homo sapien
tccactccagctttgtagaccgttg

SEQ ID NO: 2164174 - DNA, 25 bp, Homo sapien
agtttggacaaagctattgtttagg

SEQ ID NO: 2164175 - DNA, 25 bp, Homo sapien
ggacaaagctattgtttaggtgttc

SEQ ID NO: 2164176 - DNA, 25 bp, Homo sapien
caaagctattgtttaggtgttcctt

SEQ ID NO: 2164177 - DNA, 25 bp, Homo sapien
agagtagtttggacaaagctattgt

SEQ ID NO: 2164178 - DNA, 25 bp, Homo sapien
catctggtgtgctactaacagtctc

SEQ ID NO: 2164179 - DNA, 25 bp, Homo sapien
taagaggccatctgttaatactttt

SEQ ID NO: 2164180 - DNA, 25 bp, Homo sapien
taacagtctccgagagtaagaggcc

SEQ ID NO: 2164181 - DNA, 25 bp, Homo sapien
tctcatttgggttgccatctggtgt

SEQ ID NO: 2164182 - DNA, 25 bp, Homo sapien
agttgaaggagttcctgtaaatttg

SEQ ID NO: 2164183 - DNA, 25 bp, Homo sapien
gttgaaggagttcctgtaaatttga

SEQ ID NO: 2164184 - DNA, 25 bp, Homo sapien
gaaggaccataaactcctgtcccat

SEQ ID NO: 2164185 - DNA, 25 bp, Homo sapien
gattgtcatgttacctgcagtaaac

SEQ ID NO: 2164186 - DNA, 25 bp, Homo sapien
tatggaaggaccataaactcctgtc

SEQ ID NO: 2164187 - DNA, 25 bp, Homo sapien
ctgtaaggggatgaaacatcatcta

SEQ ID NO: 2164188 - DNA, 25 bp, Homo sapien
tcctggcagaaggtatgcagatgtg

SEQ ID NO: 2164189 - DNA, 25 bp, Homo sapien
tgtagcttgacagccacttccagga

SEQ ID NO: 2164190 - DNA, 25 bp, Homo sapien
gtatgcagatgtgggatcaccccac

SEQ ID NO: 2164191 - DNA, 25 bp, Homo sapien
caggttatcaccttcagcggccagg

SEQ ID NO: 2164192 - DNA, 25 bp, Homo sapien
gactactgggccagcagtagacttc

SEQ ID NO: 2164193 - DNA, 25 bp, Homo sapien
gatgtaggccttgcccctggtgtga

SEQ ID NO: 2164194 - DNA, 25 bp, Homo sapien
gcaggtagacttcatagactactgg

SEQ ID NO: 2164195 - DNA, 25 bp, Homo sapien
ctgggtctgcaggtagacttcatag

SEQ ID NO: 2164196 - DNA, 25 bp, Homo sapien
gctttagggacaagctggagcctgg

SEQ ID NO: 2164197 - DNA, 25 bp, Homo sapien
agctctgatccggccacacagccca

SEQ ID NO: 2164198 - DNA, 25 bp, Homo sapien
ggctttagggacaagctggagcctg

SEQ ID NO: 2164199 - DNA, 25 bp, Homo sapien
gtgcaaaggagccacctcaaagcta

SEQ ID NO: 2164200 - DNA, 25 bp, Homo sapien
cccgatccagggagtagatttcagc

SEQ ID NO: 2164201 - DNA, 25 bp, Homo sapien
tgaaaccgccagaaaatcactttgt

SEQ ID NO: 2164202 - DNA, 25 bp, Homo sapien
aagaaggctggcgaccacccgtttg

SEQ ID NO: 2164203 - DNA, 25 bp, Homo sapien
accgacaagttggttccagatgagg

SEQ ID NO: 2164204 - DNA, 25 bp, Homo sapien
ggaacaaaagctcaaggtctagtag

SEQ ID NO: 2164205 - DNA, 25 bp, Homo sapien
ctctgagtaatgtgacggcccaggc

SEQ ID NO: 2164206 - DNA, 25 bp, Homo sapien
tgggagagaacaaaccgacaagttg

SEQ ID NO: 2164207 - DNA, 25 bp, Homo sapien
gatcatggttctctttgtacgatag

SEQ ID NO: 2164208 - DNA, 25 bp, Homo sapien
ccacttgtgtgaatttgcctttaaa

SEQ ID NO: 2164209 - DNA, 25 bp, Homo sapien
ccctccccaatctggacattgaata

SEQ ID NO: 2164210 - DNA, 25 bp, Homo sapien
ctttgcttgttagtgaccttgatca

SEQ ID NO: 2164211 - DNA, 25 bp, Homo sapien
cccttaggatagtctctcagtgcca

SEQ ID NO: 2164212 - DNA, 25 bp, Homo sapien
gtgcctactactgggtctagacaga

SEQ ID NO: 2164213 - DNA, 25 bp, Homo sapien
ctctagactctattgtgggatggaa

SEQ ID NO: 2164214 - DNA, 25 bp, Homo sapien
tcctttgataacaccgtcagtgcct

SEQ ID NO: 2164215 - DNA, 25 bp, Homo sapien
tgcatttgccccacaaagacttatc

SEQ ID NO: 2164216 - DNA, 25 bp, Homo sapien
ctgaatttgttggatgttggcaagt

SEQ ID NO: 2164217 - DNA, 25 bp, Homo sapien
ttggcaagtgcctcttatgagctgt

SEQ ID NO: 2164218 - DNA, 25 bp, Homo sapien
ttggagactcctagattttctgtgg

SEQ ID NO: 2164219 - DNA, 25 bp, Homo sapien
tatccatgggtggattgaatcactc

SEQ ID NO: 2164220 - DNA, 25 bp, Homo sapien
tgttctggcaacaacgacttctccg

SEQ ID NO: 2164221 - DNA, 25 bp, Homo sapien
tgctttggtcgatggtttccctcag

SEQ ID NO: 2164222 - DNA, 25 bp, Homo sapien
ggtaacacggtgatcttctaagcag

SEQ ID NO: 2164223 - DNA, 25 bp, Homo sapien
cagcctgagggctagttaatccaaa

SEQ ID NO: 2164224 - DNA, 25 bp, Homo sapien
tgattgcctatagccagtatccccg

SEQ ID NO: 2164225 - DNA, 25 bp, Homo sapien
cccataatattggaagcagcctgag

SEQ ID NO: 2164226 - DNA, 25 bp, Homo sapien
ggccttcagacatccctcagtggaa

SEQ ID NO: 2164227 - DNA, 25 bp, Homo sapien
attcttcaacattccaagagcaggg

SEQ ID NO: 2164228 - DNA, 25 bp, Homo sapien
agcaagctcttcacgcctggctcca

SEQ ID NO: 2164229 - DNA, 25 bp, Homo sapien
tatctccccctaaggctgtttccta

SEQ ID NO: 2164230 - DNA, 25 bp, Homo sapien
gatccagaacaatcctggcagagcc

SEQ ID NO: 2164231 - DNA, 25 bp, Homo sapien
gatgagtgtaatctggtacccagga

SEQ ID NO: 2164232 - DNA, 25 bp, Homo sapien
tcccgtgtggccagcattgctgttg

SEQ ID NO: 2164233 - DNA, 25 bp, Homo sapien
cagggtacctgtcagtaaacctagg

SEQ ID NO: 2164234 - DNA, 25 bp, Homo sapien
tccactctggaaattaagtcagaaa

SEQ ID NO: 2164235 - DNA, 25 bp, Homo sapien
cccttttaccttctatccattcata

SEQ ID NO: 2164236 - DNA, 25 bp, Homo sapien
ttcactccttcctaccgtcccttca

SEQ ID NO: 2164237 - DNA, 25 bp, Homo sapien
gtctgcgtcgccctcggatccgaaa

SEQ ID NO: 2164238 - DNA, 25 bp, Homo sapien
ggatccgaaacgcaggccaactcga

SEQ ID NO: 2164239 - DNA, 25 bp, Homo sapien
gatatggcctgtttggggacttaga

SEQ ID NO: 2164240 - DNA, 25 bp, Homo sapien
ggaaatgggcagatagtgaaaagcc

SEQ ID NO: 2164241 - DNA, 25 bp, Homo sapien
ggtttccagtcctgaaggtcctaca

SEQ ID NO: 2164242 - DNA, 25 bp, Homo sapien
aagaagcgccgtgagaccataggtt

SEQ ID NO: 2164243 - DNA, 25 bp, Homo sapien
ccacagtgggccagaaacaagacca

SEQ ID NO: 2164244 - DNA, 25 bp, Homo sapien
tgggccagaaacaagaccattggat

SEQ ID NO: 2164245 - DNA, 25 bp, Homo sapien
ggccagaaacaagaccattggattt

SEQ ID NO: 2164246 - DNA, 25 bp, Homo sapien
agtgggccagaaacaagaccattgg

SEQ ID NO: 2164247 - DNA, 25 bp, Homo sapien
gcctcagatgggcttgcttcacaca

SEQ ID NO: 2164248 - DNA, 25 bp, Homo sapien
agcatcgactacagcccatgccttg

SEQ ID NO: 2164249 - DNA, 25 bp, Homo sapien
cagatgggcttgcttcacacaggat

SEQ ID NO: 2164250 - DNA, 25 bp, Homo sapien
gaacgaccacagcatcgactacagc

SEQ ID NO: 2164251 - DNA, 25 bp, Homo sapien
ctttggcaggcagtggaatgatgac

SEQ ID NO: 2164252 - DNA, 25 bp, Homo sapien
gtttggggccttcactagttcatcc

SEQ ID NO: 2164253 - DNA, 25 bp, Homo sapien
cagttggtcaatgtttggggccttc

SEQ ID NO: 2164254 - DNA, 25 bp, Homo sapien
ctgtgggatgccagttggtcaatgt

SEQ ID NO: 2164255 - DNA, 25 bp, Homo sapien
tgggatgccagttggtcaatgtttg

SEQ ID NO: 2164256 - DNA, 25 bp, Homo sapien
cagactatgcttccctctaacaaga

SEQ ID NO: 2164257 - DNA, 25 bp, Homo sapien
aggcaagcgcccgttctgggagaaa

SEQ ID NO: 2164258 - DNA, 25 bp, Homo sapien
tgaaggtcaagctttcccatgagtg

SEQ ID NO: 2164259 - DNA, 25 bp, Homo sapien
tccactaccattttccagactatgc

SEQ ID NO: 2164260 - DNA, 25 bp, Homo sapien
aaagaaacgcggctcggggcgcaca

SEQ ID NO: 2164261 - DNA, 25 bp, Homo sapien
agtgaggaaagaaacgcggctcggg

SEQ ID NO: 2164262 - DNA, 25 bp, Homo sapien
agaaacgcggctcggggcgcacact

SEQ ID NO: 2164263 - DNA, 25 bp, Homo sapien
acgcggctcggggcgcacactgctt

SEQ ID NO: 2164264 - DNA, 25 bp, Homo sapien
tggtggagaagtttccagcgtgcac

SEQ ID NO: 2164265 - DNA, 25 bp, Homo sapien
ccctccagtaggagttgaagtcgta

SEQ ID NO: 2164266 - DNA, 25 bp, Homo sapien
tcgtacaggcgggtggtgtcaggtc

SEQ ID NO: 2164267 - DNA, 25 bp, Homo sapien
agtttccagcgtgcaccctccagta

SEQ ID NO: 2164268 - DNA, 25 bp, Homo sapien
cccaggatgggaatgctggattcag

SEQ ID NO: 2164269 - DNA, 25 bp, Homo sapien
gctggattcagacaccacaaaccaa

SEQ ID NO: 2164270 - DNA, 25 bp, Homo sapien
ccagactctggacgtggagcagtac

SEQ ID NO: 2164271 - DNA, 25 bp, Homo sapien
gaaggactcgcccagccagaagagg

SEQ ID NO: 2164272 - DNA, 25 bp, Homo sapien
gaaccctgaatgctgtagtgtcacc

SEQ ID NO: 2164273 - DNA, 25 bp, Homo sapien
catgctcattcttgacaggctggga

SEQ ID NO: 2164274 - DNA, 25 bp, Homo sapien
tggaaatgcctcactgctaagacat

SEQ ID NO: 2164275 - DNA, 25 bp, Homo sapien
tgccacaggtggatttgagaagatg

SEQ ID NO: 2164276 - DNA, 25 bp, Homo sapien
tctttgggattcgttcagcttctga

SEQ ID NO: 2164277 - DNA, 25 bp, Homo sapien
tggaacccttatgacacagatgtga

SEQ ID NO: 2164278 - DNA, 25 bp, Homo sapien
acaggtccctaaagctctgtccatc

SEQ ID NO: 2164279 - DNA, 25 bp, Homo sapien
agatcattgttcatagtcccacagg

SEQ ID NO: 2164280 - DNA, 25 bp, Homo sapien
gggacctcgagaccggcagcctcga

SEQ ID NO: 2164281 - DNA, 25 bp, Homo sapien
accggcagcctcgacgaagaaccgg

SEQ ID NO: 2164282 - DNA, 25 bp, Homo sapien
atgcgcgccagccaaccaggccaag

SEQ ID NO: 2164283 - DNA, 25 bp, Homo sapien
ctcgagaccggcagcctcgacgaag

SEQ ID NO: 2164284 - DNA, 25 bp, Homo sapien
tgggcgcgcaatcacgcatgtatgc

SEQ ID NO: 2164285 - DNA, 25 bp, Homo sapien
tcacgaagaacgtacgtgggcgcgc

SEQ ID NO: 2164286 - DNA, 25 bp, Homo sapien
tccgggaaaccagtggccagtgaca

SEQ ID NO: 2164287 - DNA, 25 bp, Homo sapien
gcattctcgaagacacgcactgacg

SEQ ID NO: 2164288 - DNA, 25 bp, Homo sapien
aaccatggaccctgcgagtcgtggg

SEQ ID NO: 2164289 - DNA, 25 bp, Homo sapien
gaatgaacagtcctctgcttccccg

SEQ ID NO: 2164290 - DNA, 25 bp, Homo sapien
ctcccaagcaaggagacgtgggccg

SEQ ID NO: 2164291 - DNA, 25 bp, Homo sapien
cggcttttcgccacaggaatgaaca

SEQ ID NO: 2164292 - DNA, 25 bp, Homo sapien
acacaggctcccgcagcatgggccc

SEQ ID NO: 2164293 - DNA, 25 bp, Homo sapien
cacacaggctcccgcagcatgggcc

SEQ ID NO: 2164294 - DNA, 25 bp, Homo sapien
tttctactcgcagacgcacgtcgcg

SEQ ID NO: 2164295 - DNA, 25 bp, Homo sapien
tacacgcgcttagaaggagcggagc

SEQ ID NO: 2164296 - DNA, 25 bp, Homo sapien
gccaagcatgctccattcgaaggga

SEQ ID NO: 2164297 - DNA, 25 bp, Homo sapien
tgtcctcagcttaattctgggtagg

SEQ ID NO: 2164298 - DNA, 25 bp, Homo sapien
tgctaatcacagcagtgggaccctc

SEQ ID NO: 2164299 - DNA, 25 bp, Homo sapien
tggttaatggccctaagaaggtcat

SEQ ID NO: 2164300 - DNA, 25 bp, Homo sapien
gggaggcctggtcttatcagtaaca

SEQ ID NO: 2164301 - DNA, 25 bp, Homo sapien
gcacctgtctgggtcaaggaccaca

SEQ ID NO: 2164302 - DNA, 25 bp, Homo sapien
gaggaggaaacactcttccacttag

SEQ ID NO: 2164303 - DNA, 25 bp, Homo sapien
ctgctttacggccagaggaggaaac

SEQ ID NO: 2164304 - DNA, 25 bp, Homo sapien
agaggaggaaacactcttccactta

SEQ ID NO: 2164305 - DNA, 25 bp, Homo sapien
gaggaaacactcttccacttagctt

SEQ ID NO: 2164306 - DNA, 25 bp, Homo sapien
tcggaatgatcttggtacagggaca

SEQ ID NO: 2164307 - DNA, 25 bp, Homo sapien
gagtggcatcaccagctacagcgtt

SEQ ID NO: 2164308 - DNA, 25 bp, Homo sapien
tcagactcagccttaggtggacagg

SEQ ID NO: 2164309 - DNA, 25 bp, Homo sapien
tggacaggcccgtacatactcagga

SEQ ID NO: 2164310 - DNA, 25 bp, Homo sapien
cgtggcacctaatagaacagtcaga

SEQ ID NO: 2164311 - DNA, 25 bp, Homo sapien
ccagcccagtacgtggcacctaata

SEQ ID NO: 2164312 - DNA, 25 bp, Homo sapien
cagtcagaaatagtggctgccctca

SEQ ID NO: 2164313 - DNA, 25 bp, Homo sapien
catggctgtgaggaagggagataag

SEQ ID NO: 2164314 - DNA, 25 bp, Homo sapien
gctctgtcctcaggatgcaccgtga

SEQ ID NO: 2164315 - DNA, 25 bp, Homo sapien
atcgttgatatccaatctcagctct

SEQ ID NO: 2164316 - DNA, 25 bp, Homo sapien
gctgctgagcccacatcgttgatat

SEQ ID NO: 2164317 - DNA, 25 bp, Homo sapien
atgcaccgtgacctcagatggccct

SEQ ID NO: 2164318 - DNA, 25 bp, Homo sapien
aggacagagggcccccttggcctag

SEQ ID NO: 2164319 - DNA, 25 bp, Homo sapien
ttggcctagccagagtggagagtcc

SEQ ID NO: 2164320 - DNA, 25 bp, Homo sapien
ggctggtgttagccctcttccagca

SEQ ID NO: 2164321 - DNA, 25 bp, Homo sapien
tggtgttagccctcttccagcacag

SEQ ID NO: 2164322 - DNA, 25 bp, Homo sapien
gaaggcacaggcaggataccatgtg

SEQ ID NO: 2164323 - DNA, 25 bp, Homo sapien
aaggcacaggcaggataccatgtgg

SEQ ID NO: 2164324 - DNA, 25 bp, Homo sapien
aggcacaggcaggataccatgtggt

SEQ ID NO: 2164325 - DNA, 25 bp, Homo sapien
tctcctgcttccgtctgtcactgat

SEQ ID NO: 2164326 - DNA, 25 bp, Homo sapien
gctgggattcggctgactcaggtcc

SEQ ID NO: 2164327 - DNA, 25 bp, Homo sapien
tgcttccgtctgtcactgatgtcca

SEQ ID NO: 2164328 - DNA, 25 bp, Homo sapien
aggtccatcccatggagtctttggg

SEQ ID NO: 2164329 - DNA, 25 bp, Homo sapien
ctctcaggtggcctaaatcgcactg

SEQ ID NO: 2164330 - DNA, 25 bp, Homo sapien
ctcaggtggcctaaatcgcactgac

SEQ ID NO: 2164331 - DNA, 25 bp, Homo sapien
tgtctctcaggtggcctaaatcgca

SEQ ID NO: 2164332 - DNA, 25 bp, Homo sapien
ccccgtgtctctcaggtggcctaaa

SEQ ID NO: 2164333 - DNA, 25 bp, Homo sapien
agcacagaagcgcatcacacgccag

SEQ ID NO: 2164334 - DNA, 25 bp, Homo sapien
tcacacgccagccctccaagctcat

SEQ ID NO: 2164335 - DNA, 25 bp, Homo sapien
ggaagcacagaagcgcatcacacgc

SEQ ID NO: 2164336 - DNA, 25 bp, Homo sapien
ctgcggaagcacagaagcgcatcac

SEQ ID NO: 2164337 - DNA, 25 bp, Homo sapien
cgcaagcgccccgggcctcccgtag

SEQ ID NO: 2164338 - DNA, 25 bp, Homo sapien
tcgcaagcgccccgggcctcccgta

SEQ ID NO: 2164339 - DNA, 25 bp, Homo sapien
gcaagcgccccgggcctcccgtagc

SEQ ID NO: 2164340 - DNA, 25 bp, Homo sapien
cttcgcaagcgccccgggcctcccg

SEQ ID NO: 2164341 - DNA, 25 bp, Homo sapien
agcaggggacgccagcgcgtctcca

SEQ ID NO: 2164342 - DNA, 25 bp, Homo sapien
ggtacagttccgctggctgctcagc

SEQ ID NO: 2164343 - DNA, 25 bp, Homo sapien
tggacggcgatggtacagttccgct

SEQ ID NO: 2164344 - DNA, 25 bp, Homo sapien
tgtgagcaatgtggacggcgatggt

SEQ ID NO: 2164345 - DNA, 25 bp, Homo sapien
aggcctgaatctgagcaggagtcat

SEQ ID NO: 2164346 - DNA, 25 bp, Homo sapien
ctgaatctgagcaggagtcatcccg

SEQ ID NO: 2164347 - DNA, 25 bp, Homo sapien
tctgagcaggagtcatcccgagtct

SEQ ID NO: 2164348 - DNA, 25 bp, Homo sapien
gagcaggagtcatcccgagtctctc

SEQ ID NO: 2164349 - DNA, 25 bp, Homo sapien
cctcatcgggagttaagtcttcggg

SEQ ID NO: 2164350 - DNA, 25 bp, Homo sapien
atacatccttgcctcctttcctagg

SEQ ID NO: 2164351 - DNA, 25 bp, Homo sapien
tcttcggggcattgcaaagtttccc

SEQ ID NO: 2164352 - DNA, 25 bp, Homo sapien
ctgcttcaggttggtcagtacagct

SEQ ID NO: 2164353 - DNA, 25 bp, Homo sapien
catgccccaaagggatcaggtgctc

SEQ ID NO: 2164354 - DNA, 25 bp, Homo sapien
cccaaagggatcaggtgctctggga

SEQ ID NO: 2164355 - DNA, 25 bp, Homo sapien
tgccccaaagggatcaggtgctctg

SEQ ID NO: 2164356 - DNA, 25 bp, Homo sapien
gccccaaagggatcaggtgctctgg

SEQ ID NO: 2164357 - DNA, 25 bp, Homo sapien
cctaatgtatacaggtctgcgtcat

SEQ ID NO: 2164358 - DNA, 25 bp, Homo sapien
tctgcgtcatgatggcaaattgaag

SEQ ID NO: 2164359 - DNA, 25 bp, Homo sapien
cattcctttcaggagcccacacttg

SEQ ID NO: 2164360 - DNA, 25 bp, Homo sapien
ggtgtcatgatttagctggtttctc

SEQ ID NO: 2164361 - DNA, 25 bp, Homo sapien
tacatgcacagtgcttagtgggtgg

SEQ ID NO: 2164362 - DNA, 25 bp, Homo sapien
tccttcatctgagcaaaggaacctg

SEQ ID NO: 2164363 - DNA, 25 bp, Homo sapien
gcaaaggaacctgtttacatgcaca

SEQ ID NO: 2164364 - DNA, 25 bp, Homo sapien
agtgggtgggactctccaaagcagt

SEQ ID NO: 2164365 - DNA, 25 bp, Homo sapien
tagcaggaccaaaattagcagcaat

SEQ ID NO: 2164366 - DNA, 25 bp, Homo sapien
caaagtacttgagacattgcctgtg

SEQ ID NO: 2164367 - DNA, 25 bp, Homo sapien
tgagacatttactggcagctttgcc

SEQ ID NO: 2164368 - DNA, 25 bp, Homo sapien
tgtacaatccagaaactagcaggac

SEQ ID NO: 2164369 - DNA, 25 bp, Homo sapien
gttgattaacggctagtcactacca

SEQ ID NO: 2164370 - DNA, 25 bp, Homo sapien
gtgccaggtcccagactttctgtat

SEQ ID NO: 2164371 - DNA, 25 bp, Homo sapien
gtattgtcgcctggatgctagttac

SEQ ID NO: 2164372 - DNA, 25 bp, Homo sapien
taccaggcaaacattcagtgccagg

SEQ ID NO: 2164373 - DNA, 25 bp, Homo sapien
gacctggtcccctgagattggcctg

SEQ ID NO: 2164374 - DNA, 25 bp, Homo sapien
gaatagacgcctgattccggcaata

SEQ ID NO: 2164375 - DNA, 25 bp, Homo sapien
tcgtgaagtcacaggccactaatgg

SEQ ID NO: 2164376 - DNA, 25 bp, Homo sapien
tcggctactacctggatggaaggca

SEQ ID NO: 2164377 - DNA, 25 bp, Homo sapien
ttgggcacgcctactctgactgaag

SEQ ID NO: 2164378 - DNA, 25 bp, Homo sapien
ccagcgaggttttggacaggcacga

SEQ ID NO: 2164379 - DNA, 25 bp, Homo sapien
caacgcgtggtcaacgtggaagaca

SEQ ID NO: 2164380 - DNA, 25 bp, Homo sapien
taagggccttgggtacaaaatgctc

SEQ ID NO: 2164381 - DNA, 25 bp, Homo sapien
gggtgctaccacacagatcaggcca

SEQ ID NO: 2164382 - DNA, 25 bp, Homo sapien
tgagcaaattagaggccagcaaatg

SEQ ID NO: 2164383 - DNA, 25 bp, Homo sapien
ggccaaacagcctggtagggaccac

SEQ ID NO: 2164384 - DNA, 25 bp, Homo sapien
ggagcacatgcaaccaatcattagg

SEQ ID NO: 2164385 - DNA, 25 bp, Homo sapien
gaagctgcagcgagtcagcactgag

SEQ ID NO: 2164386 - DNA, 25 bp, Homo sapien
tgtgctctgcttgggtcgcctgacc

SEQ ID NO: 2164387 - DNA, 25 bp, Homo sapien
tgattgctgcatagctacaaagaag

SEQ ID NO: 2164388 - DNA, 25 bp, Homo sapien
tcctcataccatagtcagctgtgct

SEQ ID NO: 2164389 - DNA, 25 bp, Homo sapien
ggcctggcggatcatgtgacaggca

SEQ ID NO: 2164390 - DNA, 25 bp, Homo sapien
gagggcctggcggatcatgtgacag

SEQ ID NO: 2164391 - DNA, 25 bp, Homo sapien
gacaggcaaggcctacacagcaagt

SEQ ID NO: 2164392 - DNA, 25 bp, Homo sapien
ggcaaggcctacacagcaagtcttg

SEQ ID NO: 2164393 - DNA, 25 bp, Homo sapien
gtgggatgaaccaactgcagggaca

SEQ ID NO: 2164394 - DNA, 25 bp, Homo sapien
gggacacatcctggagcctgggaga

SEQ ID NO: 2164395 - DNA, 25 bp, Homo sapien
caactgcagggacacatcctggagc

SEQ ID NO: 2164396 - DNA, 25 bp, Homo sapien
ttagaaagactcctctggggtggga

SEQ ID NO: 2164397 - DNA, 25 bp, Homo sapien
gagcctatgaatggacgtgcagtca

SEQ ID NO: 2164398 - DNA, 25 bp, Homo sapien
ggaccctgacaagctgagtgactgc

SEQ ID NO: 2164399 - DNA, 25 bp, Homo sapien
aaccagaggttgatgtagggagacc

SEQ ID NO: 2164400 - DNA, 25 bp, Homo sapien
tataaacggatgcatgaggagcacc

SEQ ID NO: 2164401 - DNA, 25 bp, Homo sapien
cacagactagcagagcacttagcac

SEQ ID NO: 2164402 - DNA, 25 bp, Homo sapien
ggcctagcttggctcattggagaaa

SEQ ID NO: 2164403 - DNA, 25 bp, Homo sapien
gctcagatcattggaacactcattg

SEQ ID NO: 2164404 - DNA, 25 bp, Homo sapien
gtctgagagtctgaccatgtgggcc

SEQ ID NO: 2164405 - DNA, 25 bp, Homo sapien
caaggcctgataggtaaagtcttct

SEQ ID NO: 2164406 - DNA, 25 bp, Homo sapien
ggcctgataggtaaagtcttctatc

SEQ ID NO: 2164407 - DNA, 25 bp, Homo sapien
cccccttaacagtcaaggaaagcag

SEQ ID NO: 2164408 - DNA, 25 bp, Homo sapien
gcagcaaggcctgataggtaaagtc

SEQ ID NO: 2164409 - DNA, 25 bp, Homo sapien
cagaaggcaaaagggtaatcagcat

SEQ ID NO: 2164410 - DNA, 25 bp, Homo sapien
agaaggcaaaagggtaatcagcata

SEQ ID NO: 2164411 - DNA, 25 bp, Homo sapien
tgaagggcacaaaatacccaagctg

SEQ ID NO: 2164412 - DNA, 25 bp, Homo sapien
tctgtaggagctcgacccttgtggc

SEQ ID NO: 2164413 - DNA, 25 bp, Homo sapien
tttccaggttcagagtacaagccgc

SEQ ID NO: 2164414 - DNA, 25 bp, Homo sapien
tcagccagatgcaggtagcagtgtc

SEQ ID NO: 2164415 - DNA, 25 bp, Homo sapien
aaatctgggttttatgctggtggac

SEQ ID NO: 2164416 - DNA, 25 bp, Homo sapien
tcctggttgagctatgttgaaaaca

SEQ ID NO: 2164417 - DNA, 25 bp, Homo sapien
ggtggacttctgagccaataggtct

SEQ ID NO: 2164418 - DNA, 25 bp, Homo sapien
gtttaccagggtatgaaagccagga

SEQ ID NO: 2164419 - DNA, 25 bp, Homo sapien
tggtttcccttgcagacagtttggc

SEQ ID NO: 2164420 - DNA, 25 bp, Homo sapien
caagagggtgtacctaagtcaggca

SEQ ID NO: 2164421 - DNA, 25 bp, Homo sapien
taaaacacagctctggacaggaagt

SEQ ID NO: 2164422 - DNA, 25 bp, Homo sapien
caggcagggcacataagctgtacaa

SEQ ID NO: 2164423 - DNA, 25 bp, Homo sapien
tggaatggacgactgctcagcagtt

SEQ ID NO: 2164424 - DNA, 25 bp, Homo sapien
agaaaggcctggaatggacgactgc

SEQ ID NO: 2164425 - DNA, 25 bp, Homo sapien
ttttggatagtggatgaacagagaa

SEQ ID NO: 2164426 - DNA, 25 bp, Homo sapien
tggacgactgctcagcagttccttt

SEQ ID NO: 2164427 - DNA, 25 bp, Homo sapien
gagttgctcgctgagtgctaattgt

SEQ ID NO: 2164428 - DNA, 25 bp, Homo sapien
aaaattacctggagttgctcgctga

SEQ ID NO: 2164429 - DNA, 25 bp, Homo sapien
cctggagttgctcgctgagtgctaa

SEQ ID NO: 2164430 - DNA, 25 bp, Homo sapien
tgctcgctgagtgctaattgtgctg

SEQ ID NO: 2164431 - DNA, 25 bp, Homo sapien
gaaggaggctgcctccgactcccca

SEQ ID NO: 2164432 - DNA, 25 bp, Homo sapien
aggaggctgcctccgactccccact

SEQ ID NO: 2164433 - DNA, 25 bp, Homo sapien
cctccgactccccactggactgcat

SEQ ID NO: 2164434 - DNA, 25 bp, Homo sapien
aggctgcctccgactccccactgga

SEQ ID NO: 2164435 - DNA, 25 bp, Homo sapien
cggggtgtagaagggtctctgcctg

SEQ ID NO: 2164436 - DNA, 25 bp, Homo sapien
ccggggtgtagaagggtctctgcct

SEQ ID NO: 2164437 - DNA, 25 bp, Homo sapien
cacccggggtgtagaagggtctctg

SEQ ID NO: 2164438 - DNA, 25 bp, Homo sapien
aacatgctcgaaggccaacagctgc

SEQ ID NO: 2164439 - DNA, 25 bp, Homo sapien
caaaacatgctcgaaggccaacagc

SEQ ID NO: 2164440 - DNA, 25 bp, Homo sapien
aaaacatgctcgaaggccaacagct

SEQ ID NO: 2164441 - DNA, 25 bp, Homo sapien
aaacatgctcgaaggccaacagctg

SEQ ID NO: 2164442 - DNA, 25 bp, Homo sapien
aaacccacgtgcgtttctctggaga

SEQ ID NO: 2164443 - DNA, 25 bp, Homo sapien
catcaccggttcgtggcagtctctg

SEQ ID NO: 2164444 - DNA, 25 bp, Homo sapien
acagacactgctttggatggacacc

SEQ ID NO: 2164445 - DNA, 25 bp, Homo sapien
aacaactgttgcagagatggaccgc

SEQ ID NO: 2164446 - DNA, 25 bp, Homo sapien
gttccaccgtgtgtcagaggctgca

SEQ ID NO: 2164447 - DNA, 25 bp, Homo sapien
tgcttgaagccggaacactagagaa

SEQ ID NO: 2164448 - DNA, 25 bp, Homo sapien
ggttaattcaagtctgctgcgagca

SEQ ID NO: 2164449 - DNA, 25 bp, Homo sapien
gaatagtggctagcttcaaacctga

SEQ ID NO: 2164450 - DNA, 25 bp, Homo sapien
ggagtgactccatgcttgtatacag

SEQ ID NO: 2164451 - DNA, 25 bp, Homo sapien
cacggatgagccctttctacgggag

SEQ ID NO: 2164452 - DNA, 25 bp, Homo sapien
caagcttgtgctgtaggcacatgcc

SEQ ID NO: 2164453 - DNA, 25 bp, Homo sapien
cagcagtttttcatagcctcacgga

SEQ ID NO: 2164454 - DNA, 25 bp, Homo sapien
tgtggctcttattactccccatttc

SEQ ID NO: 2164455 - DNA, 25 bp, Homo sapien
ggcccttcgtttggatggcatcata

SEQ ID NO: 2164456 - DNA, 25 bp, Homo sapien
attcctcatctatgcctgtctgctg

SEQ ID NO: 2164457 - DNA, 25 bp, Homo sapien
tggcatcatacagtggagttactgg

SEQ ID NO: 2164458 - DNA, 25 bp, Homo sapien
cactactagttcatgcagctccaga

SEQ ID NO: 2164459 - DNA, 25 bp, Homo sapien
caaagaggaaatgcggtttgtggac

SEQ ID NO: 2164460 - DNA, 25 bp, Homo sapien
tccagctgcagatgctgagccacag

SEQ ID NO: 2164461 - DNA, 25 bp, Homo sapien
gcatcactttgttagcttccagctg

SEQ ID NO: 2164462 - DNA, 25 bp, Homo sapien
tctcagcagattagatgactcaaca

SEQ ID NO: 2164463 - DNA, 25 bp, Homo sapien
gatgactcaacaatttccttcgagc

SEQ ID NO: 2164464 - DNA, 25 bp, Homo sapien
aatttccttcgagccaactccactg

SEQ ID NO: 2164465 - DNA, 25 bp, Homo sapien
ctggtctcttttattctcagcagat

SEQ ID NO: 2164466 - DNA, 25 bp, Homo sapien
gtgtccccacacctgaaatcctaag

SEQ ID NO: 2164467 - DNA, 25 bp, Homo sapien
tgcagatagaacagagcctccactt

SEQ ID NO: 2164468 - DNA, 25 bp, Homo sapien
ctaagaccctttcctgaccccacat

SEQ ID NO: 2164469 - DNA, 25 bp, Homo sapien
ggccccactcctgggacctcactgt

SEQ ID NO: 2164470 - DNA, 25 bp, Homo sapien
caagtactgtccctctgctcgggca

SEQ ID NO: 2164471 - DNA, 25 bp, Homo sapien
gcttctggccctagcatttccttca

SEQ ID NO: 2164472 - DNA, 25 bp, Homo sapien
aaatagtattttccgtggccactgg

SEQ ID NO: 2164473 - DNA, 25 bp, Homo sapien
tccccgcagaaggagtcatagggtc

SEQ ID NO: 2164474 - DNA, 25 bp, Homo sapien
tgccaccaatatgcctgcattctct

SEQ ID NO: 2164475 - DNA, 25 bp, Homo sapien
agctatttgatggcagttcactctt

SEQ ID NO: 2164476 - DNA, 25 bp, Homo sapien
ttcactctttatctcgcctctgatg

SEQ ID NO: 2164477 - DNA, 25 bp, Homo sapien
ttatctcgcctctgatgccaccaat

SEQ ID NO: 2164478 - DNA, 25 bp, Homo sapien
taggaataccaatgagcaaggtaag

SEQ ID NO: 2164479 - DNA, 25 bp, Homo sapien
ctaggaataccaatgagcaaggtaa

SEQ ID NO: 2164480 - DNA, 25 bp, Homo sapien
gtgtacactggacccctttcataga

SEQ ID NO: 2164481 - DNA, 25 bp, Homo sapien
gactgatggctgaccattgatacag

SEQ ID NO: 2164482 - DNA, 25 bp, Homo sapien
tcaggaagggtatagctggctgcct

SEQ ID NO: 2164483 - DNA, 25 bp, Homo sapien
ccccagtggaggctgacaatttttt

SEQ ID NO: 2164484 - DNA, 25 bp, Homo sapien
agctctcaatccagagttcagccca

SEQ ID NO: 2164485 - DNA, 25 bp, Homo sapien
gagttcagcccagtgggatcaggga

SEQ ID NO: 2164486 - DNA, 25 bp, Homo sapien
agttcagcccagtgggatcagggac

SEQ ID NO: 2164487 - DNA, 25 bp, Homo sapien
agagttcagcccagtgggatcaggg

SEQ ID NO: 2164488 - DNA, 25 bp, Homo sapien
cccatattaagttctggtgggtcac

SEQ ID NO: 2164489 - DNA, 25 bp, Homo sapien
catctccccatattaagttctggtg

SEQ ID NO: 2164490 - DNA, 25 bp, Homo sapien
tccccatattaagttctggtgggtc

SEQ ID NO: 2164491 - DNA, 25 bp, Homo sapien
tctccatctccccatattaagttct

SEQ ID NO: 2164492 - DNA, 25 bp, Homo sapien
tcttttctggaacgccatcaaagtg

SEQ ID NO: 2164493 - DNA, 25 bp, Homo sapien
tggaacgccatcaaagtgtttcttt

SEQ ID NO: 2164494 - DNA, 25 bp, Homo sapien
gagaggcttcttttctggaacgcca

SEQ ID NO: 2164495 - DNA, 25 bp, Homo sapien
ggcttcttttctggaacgccatcaa

SEQ ID NO: 2164496 - DNA, 25 bp, Homo sapien
tactcccttcctggagttttcctca

SEQ ID NO: 2164497 - DNA, 25 bp, Homo sapien
ccttcctggagttttcctcaagcag

SEQ ID NO: 2164498 - DNA, 25 bp, Homo sapien
ctcccttcctggagttttcctcaag

SEQ ID NO: 2164499 - DNA, 25 bp, Homo sapien
tcctggagttttcctcaagcagtgg

SEQ ID NO: 2164500 - DNA, 25 bp, Homo sapien
gcagcctcctagtgtccagtcctgg

SEQ ID NO: 2164501 - DNA, 25 bp, Homo sapien
tgaagccccttcacatcctgaatgg

SEQ ID NO: 2164502 - DNA, 25 bp, Homo sapien
tgcagcctcctagtgtccagtcctg

SEQ ID NO: 2164503 - DNA, 25 bp, Homo sapien
agccccttcacatcctgaatggctt

SEQ ID NO: 2164504 - DNA, 25 bp, Homo sapien
agtccgcagaatactcccagatcca

SEQ ID NO: 2164505 - DNA, 25 bp, Homo sapien
agactaaaggctgtagcagatggtg

SEQ ID NO: 2164506 - DNA, 25 bp, Homo sapien
gatccacgttaggacttggaaagca

SEQ ID NO: 2164507 - DNA, 25 bp, Homo sapien
ggcgttgagtatcgggacactccgc

SEQ ID NO: 2164508 - DNA, 25 bp, Homo sapien
ccatccgtggataggtcttgagggt

SEQ ID NO: 2164509 - DNA, 25 bp, Homo sapien
cgtggataggtcttgagggtttcca

SEQ ID NO: 2164510 - DNA, 25 bp, Homo sapien
gcccatccgtggataggtcttgagg

SEQ ID NO: 2164511 - DNA, 25 bp, Homo sapien
tgtgcccatccgtggataggtcttg

SEQ ID NO: 2164512 - DNA, 25 bp, Homo sapien
tcctacaggcatttcagggtccagc

SEQ ID NO: 2164513 - DNA, 25 bp, Homo sapien
cagctaggacgttccatgcacccca

SEQ ID NO: 2164514 - DNA, 25 bp, Homo sapien
tgcagcagctaggacgttccatgca

SEQ ID NO: 2164515 - DNA, 25 bp, Homo sapien
cctacaggcatttcagggtccagca

SEQ ID NO: 2164516 - DNA, 25 bp, Homo sapien
ggtgtaccggcaagtgcctggcagt

SEQ ID NO: 2164517 - DNA, 25 bp, Homo sapien
tggtgtaccggcaagtgcctggcag

SEQ ID NO: 2164518 - DNA, 25 bp, Homo sapien
ggcagtgatcctgcatgctatgagt

SEQ ID NO: 2164519 - DNA, 25 bp, Homo sapien
cagtgatcctgcatgctatgagttc

SEQ ID NO: 2164520 - DNA, 25 bp, Homo sapien
caggcattgtcatgagtaaatctga

SEQ ID NO: 2164521 - DNA, 25 bp, Homo sapien
cattgtcatgagtaaatctgaatac

SEQ ID NO: 2164522 - DNA, 25 bp, Homo sapien
ggcattgtcatgagtaaatctgaat

SEQ ID NO: 2164523 - DNA, 25 bp, Homo sapien
gggcaggcattgtcatgagtaaatc

SEQ ID NO: 2164524 - DNA, 25 bp, Homo sapien
tacaccaagacttccctttacacca

SEQ ID NO: 2164525 - DNA, 25 bp, Homo sapien
ttccctttacaccaatcttcaggga

SEQ ID NO: 2164526 - DNA, 25 bp, Homo sapien
ttacaccaatcttcagggaatctcc

SEQ ID NO: 2164527 - DNA, 25 bp, Homo sapien
gaatctccctgaagattccccaact

SEQ ID NO: 2164528 - DNA, 25 bp, Homo sapien
agtcgtcctctgagaacatagtgct

SEQ ID NO: 2164529 - DNA, 25 bp, Homo sapien
cgtcctctgagaacatagtgctcac

SEQ ID NO: 2164530 - DNA, 25 bp, Homo sapien
gggaccactgtagttgtggaccata

SEQ ID NO: 2164531 - DNA, 25 bp, Homo sapien
ctgttgactggaagtcgtcctctga

SEQ ID NO: 2164532 - DNA, 25 bp, Homo sapien
agaggcttggtatcatgagaatggc

SEQ ID NO: 2164533 - DNA, 25 bp, Homo sapien
gcaagtggatcctgatttccgcatc

SEQ ID NO: 2164534 - DNA, 25 bp, Homo sapien
tgatttccgcatcccgggctgaccg

SEQ ID NO: 2164535 - DNA, 25 bp, Homo sapien
cgggctgaccgagggaagaggcttg

SEQ ID NO: 2164536 - DNA, 25 bp, Homo sapien
ggtaccgcggacttgcacattaggg

SEQ ID NO: 2164537 - DNA, 25 bp, Homo sapien
ttgtccctgcagtcaacgcaaagga

SEQ ID NO: 2164538 - DNA, 25 bp, Homo sapien
acagcccggttctgaagggcggctt

SEQ ID NO: 2164539 - DNA, 25 bp, Homo sapien
cagagagaagtgacagcccggttct

SEQ ID NO: 2164540 - DNA, 25 bp, Homo sapien
aggactctgagaaattatggagagg

SEQ ID NO: 2164541 - DNA, 25 bp, Homo sapien
ctgagaaattatggagaggttccac

SEQ ID NO: 2164542 - DNA, 25 bp, Homo sapien
cagaggcagttccgtaaagggtggg

SEQ ID NO: 2164543 - DNA, 25 bp, Homo sapien
tctgagaaattatggagaggttcca

SEQ ID NO: 2164544 - DNA, 25 bp, Homo sapien
gagggccccaaataatccagcgcca

SEQ ID NO: 2164545 - DNA, 25 bp, Homo sapien
atagagggccccaaataatccagcg

SEQ ID NO: 2164546 - DNA, 25 bp, Homo sapien
aataatccagcgccaaccctggagc

SEQ ID NO: 2164547 - DNA, 25 bp, Homo sapien
ccagatagagggccccaaataatcc

SEQ ID NO: 2164548 - DNA, 25 bp, Homo sapien
cagagtcagagacttggtctgagga

SEQ ID NO: 2164549 - DNA, 25 bp, Homo sapien
ccattggcagaggacggagctccag

SEQ ID NO: 2164550 - DNA, 25 bp, Homo sapien
aggagaggagacaccattggcagag

SEQ ID NO: 2164551 - DNA, 25 bp, Homo sapien
gccacttcaggggactcagagtcag

SEQ ID NO: 2164552 - DNA, 25 bp, Homo sapien
ggaagaccttggcaatgttgtcccc

SEQ ID NO: 2164553 - DNA, 25 bp, Homo sapien
ggtcactaaaatcacaggtgctgaa

SEQ ID NO: 2164554 - DNA, 25 bp, Homo sapien
gggtcttctcccagaggtcactaaa

SEQ ID NO: 2164555 - DNA, 25 bp, Homo sapien
cagttggcaaatgctcagaggtgac

SEQ ID NO: 2164556 - DNA, 25 bp, Homo sapien
aataaggaccgttccatctcccagg

SEQ ID NO: 2164557 - DNA, 25 bp, Homo sapien
tctgtccagttaaggcggtccttcc

SEQ ID NO: 2164558 - DNA, 25 bp, Homo sapien
catctttagcaccttgctgtgtctg

SEQ ID NO: 2164559 - DNA, 25 bp, Homo sapien
gtgagccgaataaggaccgttccat

SEQ ID NO: 2164560 - DNA, 25 bp, Homo sapien
caatgtagtagaggaccaccaggca

SEQ ID NO: 2164561 - DNA, 25 bp, Homo sapien
tccatagagcgcaagaacaagacgg

SEQ ID NO: 2164562 - DNA, 25 bp, Homo sapien
ctcagggccatggttatgtgtgtcc

SEQ ID NO: 2164563 - DNA, 25 bp, Homo sapien
acgatggtcatccagctcagggcca

SEQ ID NO: 2164564 - DNA, 25 bp, Homo sapien
tcagcgtgatcaacgagagccaaag

SEQ ID NO: 2164565 - DNA, 25 bp, Homo sapien
atgtggttgccatcagcgtgatcaa

SEQ ID NO: 2164566 - DNA, 25 bp, Homo sapien
aggcgttgtggccatccagtttgtg

SEQ ID NO: 2164567 - DNA, 25 bp, Homo sapien
caaagatcgggatgcaggagaaggc

SEQ ID NO: 2164568 - DNA, 25 bp, Homo sapien
ggacttctgaaatgctgagtacata

SEQ ID NO: 2164569 - DNA, 25 bp, Homo sapien
caaggacttctgaaatgctgagtac

SEQ ID NO: 2164570 - DNA, 25 bp, Homo sapien
aaggacttctgaaatgctgagtaca

SEQ ID NO: 2164571 - DNA, 25 bp, Homo sapien
gacttctgaaatgctgagtacatac

SEQ ID NO: 2164572 - DNA, 25 bp, Homo sapien
gaaatctttgcggataccaaaccac

SEQ ID NO: 2164573 - DNA, 25 bp, Homo sapien
cctggccttctttcgaaacatgggt

SEQ ID NO: 2164574 - DNA, 25 bp, Homo sapien
tctgggtaatgaccaccctggcctt

SEQ ID NO: 2164575 - DNA, 25 bp, Homo sapien
gtttccatattctcgtagaaatggg

SEQ ID NO: 2164576 - DNA, 25 bp, Homo sapien
ctaatctggcatttcgatatttaat

SEQ ID NO: 2164577 - DNA, 25 bp, Homo sapien
gcatttcgatatttaatttgggagg

SEQ ID NO: 2164578 - DNA, 25 bp, Homo sapien
tatttaatttgggaggtgggagcac

SEQ ID NO: 2164579 - DNA, 25 bp, Homo sapien
taatttgggaggtgggagcacatac

SEQ ID NO: 2164580 - DNA, 25 bp, Homo sapien
gcagaggaaggcggagagagtgcgt

SEQ ID NO: 2164581 - DNA, 25 bp, Homo sapien
agtccacttaagctctgtccccgga

SEQ ID NO: 2164582 - DNA, 25 bp, Homo sapien
gcggggtgaacgagggggcagagga

SEQ ID NO: 2164583 - DNA, 25 bp, Homo sapien
gaggaaggcggagagagtgcgtccc

SEQ ID NO: 2164584 - DNA, 25 bp, Homo sapien
acccagctccagtactggttctggt

SEQ ID NO: 2164585 - DNA, 25 bp, Homo sapien
gacccagctccagtactggttctgg

SEQ ID NO: 2164586 - DNA, 25 bp, Homo sapien
gagacccagctccagtactggttct

SEQ ID NO: 2164587 - DNA, 25 bp, Homo sapien
ctggagacccagctccagtactggt

SEQ ID NO: 2164588 - DNA, 25 bp, Homo sapien
tgccacttccgcgtcccgtcgtggt

SEQ ID NO: 2164589 - DNA, 25 bp, Homo sapien
gctgataggcgctggatgcaaacaa

SEQ ID NO: 2164590 - DNA, 25 bp, Homo sapien
tcccgtcgtggtgagtggctgatag

SEQ ID NO: 2164591 - DNA, 25 bp, Homo sapien
tgagtggctgataggcgctggatgc

SEQ ID NO: 2164592 - DNA, 25 bp, Homo sapien
tgtatacaagcatggagtcactccc

SEQ ID NO: 2164593 - DNA, 25 bp, Homo sapien
cacgacctgggagtgctgaggacct

SEQ ID NO: 2164594 - DNA, 25 bp, Homo sapien
taaacacgtggtgcatcagagacat

SEQ ID NO: 2164595 - DNA, 25 bp, Homo sapien
tcagcaccgtatagacagatgttcc

SEQ ID NO: 2164596 - DNA, 25 bp, Homo sapien
gcaatgtcccatgaaggcgtggcac

SEQ ID NO: 2164597 - DNA, 25 bp, Homo sapien
tggcaatgtcccatgaaggcgtggc

SEQ ID NO: 2164598 - DNA, 25 bp, Homo sapien
ccatgaaggcgtggcaccccacggg

SEQ ID NO: 2164599 - DNA, 25 bp, Homo sapien
aatgtcccatgaaggcgtggcaccc

SEQ ID NO: 2164600 - DNA, 25 bp, Homo sapien
cagaaaagcatggaccatctcttgc

SEQ ID NO: 2164601 - DNA, 25 bp, Homo sapien
gaccatctcttgcttggtgttgccg

SEQ ID NO: 2164602 - DNA, 25 bp, Homo sapien
ccatctcttgcttggtgttgccgtt

SEQ ID NO: 2164603 - DNA, 25 bp, Homo sapien
agaacgtcagaaaagcatggaccat

SEQ ID NO: 2164604 - DNA, 25 bp, Homo sapien
ttgcagcctctgacacacggtggaa

SEQ ID NO: 2164605 - DNA, 25 bp, Homo sapien
gagactttcccacgcatagtcgtga

SEQ ID NO: 2164606 - DNA, 25 bp, Homo sapien
tgaattaaccccatgtaggccggcg

SEQ ID NO: 2164607 - DNA, 25 bp, Homo sapien
tagtgttccggcttcaagcagcgct

SEQ ID NO: 2164608 - DNA, 25 bp, Homo sapien
tgaggaaccggtttattgaacagct

SEQ ID NO: 2164609 - DNA, 25 bp, Homo sapien
cttaaggagagcaaaaatagtggct

SEQ ID NO: 2164610 - DNA, 25 bp, Homo sapien
gagcaggaaagtctaaaccatcccg

SEQ ID NO: 2164611 - DNA, 25 bp, Homo sapien
cattttttacacactgagcaggaaa

SEQ ID NO: 2164612 - DNA, 25 bp, Homo sapien
gagcctaaggcagaatccacctgtg

SEQ ID NO: 2164613 - DNA, 25 bp, Homo sapien
gcaccggcagttgggtcagagctac

SEQ ID NO: 2164614 - DNA, 25 bp, Homo sapien
gcaagtcggaaatctcatgagccta

SEQ ID NO: 2164615 - DNA, 25 bp, Homo sapien
gacgtataggaactagcgaggcacc

SEQ ID NO: 2164616 - DNA, 25 bp, Homo sapien
gagaggtgtccatccaaagcagtgt

SEQ ID NO: 2164617 - DNA, 25 bp, Homo sapien
catctctgcaacagttgttcctttg

SEQ ID NO: 2164618 - DNA, 25 bp, Homo sapien
agagactgccacgaaccggtgatgc

SEQ ID NO: 2164619 - DNA, 25 bp, Homo sapien
ggtgatgcctccacgcttgagacat

SEQ ID NO: 2164620 - DNA, 25 bp, Homo sapien
gcacatgactgacactcggaagcac

SEQ ID NO: 2164621 - DNA, 25 bp, Homo sapien
ggtccccttgtcctagagctcctga

SEQ ID NO: 2164622 - DNA, 25 bp, Homo sapien
tgccacaccgtagatgcagacctgg

SEQ ID NO: 2164623 - DNA, 25 bp, Homo sapien
gacactagtgcacaagagtgccgag

SEQ ID NO: 2164624 - DNA, 25 bp, Homo sapien
tcagggtgcggccttctgaacgaag

SEQ ID NO: 2164625 - DNA, 25 bp, Homo sapien
gaaaggcaccctttccaagccatga

SEQ ID NO: 2164626 - DNA, 25 bp, Homo sapien
gaaggtaggtctctgactgcaactg

SEQ ID NO: 2164627 - DNA, 25 bp, Homo sapien
ctgaacgaagcttcctcggccagag

SEQ ID NO: 2164628 - DNA, 25 bp, Homo sapien
cattgacgccgttttcggaagccat

SEQ ID NO: 2164629 - DNA, 25 bp, Homo sapien
tacaagtttagctggcggaagaagc

SEQ ID NO: 2164630 - DNA, 25 bp, Homo sapien
gcaaacactttgtgtgcgacgtccc

SEQ ID NO: 2164631 - DNA, 25 bp, Homo sapien
tggagaccagcctttttgcggagaa

SEQ ID NO: 2164632 - DNA, 25 bp, Homo sapien
taacgcctccagaggcttgtcgttc

SEQ ID NO: 2164633 - DNA, 25 bp, Homo sapien
cgacttaacgcctccagaggcttgt

SEQ ID NO: 2164634 - DNA, 25 bp, Homo sapien
ttaacgcctccagaggcttgtcgtt

SEQ ID NO: 2164635 - DNA, 25 bp, Homo sapien
acttaacgcctccagaggcttgtcg

SEQ ID NO: 2164636 - DNA, 25 bp, Homo sapien
tgcctgaggtcgcccacttcccagg

SEQ ID NO: 2164637 - DNA, 25 bp, Homo sapien
accctgcctgaggtcgcccacttcc

SEQ ID NO: 2164638 - DNA, 25 bp, Homo sapien
ggggacacaggcccacagcgatggc

SEQ ID NO: 2164639 - DNA, 25 bp, Homo sapien
cctgcctgaggtcgcccacttccca

SEQ ID NO: 2164640 - DNA, 25 bp, Homo sapien
tccacttgagcacctctccagacac

SEQ ID NO: 2164641 - DNA, 25 bp, Homo sapien
ccacttgagcacctctccagacacc

SEQ ID NO: 2164642 - DNA, 25 bp, Homo sapien
ttccacttgagcacctctccagaca

SEQ ID NO: 2164643 - DNA, 25 bp, Homo sapien
cttccacttgagcacctctccagac

SEQ ID NO: 2164644 - DNA, 25 bp, Homo sapien
gggactcgcgttcacatcgtcaagg

SEQ ID NO: 2164645 - DNA, 25 bp, Homo sapien
tcgtcaaggtttaccaagttgtggc

SEQ ID NO: 2164646 - DNA, 25 bp, Homo sapien
tacgcccctgtgcaagagaactcta

SEQ ID NO: 2164647 - DNA, 25 bp, Homo sapien
ctcaaaatggcagattagggtgtcc

SEQ ID NO: 2164648 - DNA, 25 bp, Homo sapien
agtaaggatggcagtagaactctaa

SEQ ID NO: 2164649 - DNA, 25 bp, Homo sapien
aagtaaggatggcagtagaactcta

SEQ ID NO: 2164650 - DNA, 25 bp, Homo sapien
aaagtaaggatggcagtagaactct

SEQ ID NO: 2164651 - DNA, 25 bp, Homo sapien
catggcaagggtactacgggacgct

SEQ ID NO: 2164652 - DNA, 25 bp, Homo sapien
ggaagtcctgtggtgtccatggcaa

SEQ ID NO: 2164653 - DNA, 25 bp, Homo sapien
cacaggcccgtaagaattcatctga

SEQ ID NO: 2164654 - DNA, 25 bp, Homo sapien
tagggtcaccggtacccagagatgg

SEQ ID NO: 2164655 - DNA, 25 bp, Homo sapien
gggcccatcgctagctggcatgtac

SEQ ID NO: 2164656 - DNA, 25 bp, Homo sapien
tagctggcatgtactgtgacgtgcg

SEQ ID NO: 2164657 - DNA, 25 bp, Homo sapien
ctatgtgctctggtctgcgtagtct

SEQ ID NO: 2164658 - DNA, 25 bp, Homo sapien
tggtctgcgtagtctgggtacgcct

SEQ ID NO: 2164659 - DNA, 25 bp, Homo sapien
gaccagcacatattctgcccaaatg

SEQ ID NO: 2164660 - DNA, 25 bp, Homo sapien
tttattgaccagcacatattctgcc

SEQ ID NO: 2164661 - DNA, 25 bp, Homo sapien
ttgaccagcacatattctgcccaaa

SEQ ID NO: 2164662 - DNA, 25 bp, Homo sapien
tattgaccagcacatattctgccca

SEQ ID NO: 2164663 - DNA, 25 bp, Homo sapien
tatgtaaagtgaagatcctgttata

SEQ ID NO: 2164664 - DNA, 25 bp, Homo sapien
tccacaactatcaagggcacttttt

SEQ ID NO: 2164665 - DNA, 25 bp, Homo sapien
gacaaagccagacgtgatctcatct

SEQ ID NO: 2164666 - DNA, 25 bp, Homo sapien
ctttttaacccaatgacaaagccag

SEQ ID NO: 2164667 - DNA, 25 bp, Homo sapien
gagatccacctgcagaccatggctg

SEQ ID NO: 2164668 - DNA, 25 bp, Homo sapien
catttgtaagtgagcaggccgagac

SEQ ID NO: 2164669 - DNA, 25 bp, Homo sapien
aaatcacaggcagggatacctctgg

SEQ ID NO: 2164670 - DNA, 25 bp, Homo sapien
tctaagatgaacaccccaagtgagc

SEQ ID NO: 2164671 - DNA, 25 bp, Homo sapien
ggcagcatctttgcatgattcaaac

SEQ ID NO: 2164672 - DNA, 25 bp, Homo sapien
gtgcccagctgagattcacaggaaa

SEQ ID NO: 2164673 - DNA, 25 bp, Homo sapien
tcacaggaaaaccacgatcggaggg

SEQ ID NO: 2164674 - DNA, 25 bp, Homo sapien
ttaagtggcagcatctttgcatgat

SEQ ID NO: 2164675 - DNA, 25 bp, Homo sapien
tgtggccttcacacatacttactat

SEQ ID NO: 2164676 - DNA, 25 bp, Homo sapien
gacattatatacatctatgcttata

SEQ ID NO: 2164677 - DNA, 25 bp, Homo sapien
taatatctactcatagtatgtggcc

SEQ ID NO: 2164678 - DNA, 25 bp, Homo sapien
tacatattcgtttgtatttctagac

SEQ ID NO: 2164679 - DNA, 25 bp, Homo sapien
tgtgagagaagatgcacaccatccc

SEQ ID NO: 2164680 - DNA, 25 bp, Homo sapien
ccagccagagctagactttgcaaac

SEQ ID NO: 2164681 - DNA, 25 bp, Homo sapien
gctgcacgcgttgcagagaatggct

SEQ ID NO: 2164682 - DNA, 25 bp, Homo sapien
cacctgtgattgtaggacctgtgag

SEQ ID NO: 2164683 - DNA, 25 bp, Homo sapien
agccgcccctcagaaggaggcctct

SEQ ID NO: 2164684 - DNA, 25 bp, Homo sapien
tgcgcacgtcagtgacgtcacatcc

SEQ ID NO: 2164685 - DNA, 25 bp, Homo sapien
cccagtgcgcacgtcagtgacgtca

SEQ ID NO: 2164686 - DNA, 25 bp, Homo sapien
gcacgtcagtgacgtcacatccggc

SEQ ID NO: 2164687 - DNA, 25 bp, Homo sapien
actcctcacagagcctcggccagct

SEQ ID NO: 2164688 - DNA, 25 bp, Homo sapien
cttgactcctcacagagcctcggcc

SEQ ID NO: 2164689 - DNA, 25 bp, Homo sapien
tgactcctcacagagcctcggccag

SEQ ID NO: 2164690 - DNA, 25 bp, Homo sapien
cctcacagagcctcggccagcttac

SEQ ID NO: 2164691 - DNA, 25 bp, Homo sapien
ccggattctgccacgggagacttgg

SEQ ID NO: 2164692 - DNA, 25 bp, Homo sapien
gttgacagcaggagccgaaccggat

SEQ ID NO: 2164693 - DNA, 25 bp, Homo sapien
gcaggagccgaaccggattctgcca

SEQ ID NO: 2164694 - DNA, 25 bp, Homo sapien
agccgaaccggattctgccacggga

SEQ ID NO: 2164695 - DNA, 25 bp, Homo sapien
ccagtgcgcaagtcagaggccttac

SEQ ID NO: 2164696 - DNA, 25 bp, Homo sapien
cccagtgcgcaagtcagaggcctta

SEQ ID NO: 2164697 - DNA, 25 bp, Homo sapien
ttgcctgaccgccatgcccggaact

SEQ ID NO: 2164698 - DNA, 25 bp, Homo sapien
agatatcacgatccgcttgcctgac

SEQ ID NO: 2164699 - DNA, 25 bp, Homo sapien
cttccctcggtcagcccaggatgca

SEQ ID NO: 2164700 - DNA, 25 bp, Homo sapien
gcggccacgctaacgataccaagcc

SEQ ID NO: 2164701 - DNA, 25 bp, Homo sapien
accagccacaatgcaccacatgcgg

SEQ ID NO: 2164702 - DNA, 25 bp, Homo sapien
cacatgcggccaccgtgcccgggat

SEQ ID NO: 2164703 - DNA, 25 bp, Homo sapien
ttgttccttccctggtctcctagag

SEQ ID NO: 2164704 - DNA, 25 bp, Homo sapien
tgcccgggatcgcccaggccaagat

SEQ ID NO: 2164705 - DNA, 25 bp, Homo sapien
tttcctaggtctgggatgagaggtc

SEQ ID NO: 2164706 - DNA, 25 bp, Homo sapien
cttccaagactgacggcaggggcag

SEQ ID NO: 2164707 - DNA, 25 bp, Homo sapien
tggggccttccaagactgacggcag

SEQ ID NO: 2164708 - DNA, 25 bp, Homo sapien
gatgagaggtctggtgaatccttcc

SEQ ID NO: 2164709 - DNA, 25 bp, Homo sapien
gggccacctcatggtcactcatgca

SEQ ID NO: 2164710 - DNA, 25 bp, Homo sapien
tctgggtgtcctctaggtattcata

SEQ ID NO: 2164711 - DNA, 25 bp, Homo sapien
ctgacagaatctggccccttccatt

SEQ ID NO: 2164712 - DNA, 25 bp, Homo sapien
ctcatgcatgagatacccaaggctg

SEQ ID NO: 2164713 - DNA, 25 bp, Homo sapien
gctctgcgacctgaggacactgtct

SEQ ID NO: 2164714 - DNA, 25 bp, Homo sapien
tcactgctgacactgcctgggtctc

SEQ ID NO: 2164715 - DNA, 25 bp, Homo sapien
gacactgtctcagaccaaggcctgc

SEQ ID NO: 2164716 - DNA, 25 bp, Homo sapien
ggtctcctctgctctgcgacctgag

SEQ ID NO: 2164717 - DNA, 25 bp, Homo sapien
ctcctggttagcctgtcccgagaac

SEQ ID NO: 2164718 - DNA, 25 bp, Homo sapien
tcctcctggttagcctgtcccgaga

SEQ ID NO: 2164719 - DNA, 25 bp, Homo sapien
cctcctggttagcctgtcccgagaa

SEQ ID NO: 2164720 - DNA, 25 bp, Homo sapien
gtcctcctggttagcctgtcccgag

SEQ ID NO: 2164721 - DNA, 25 bp, Homo sapien
gagctgggcgatggagacccacagg

SEQ ID NO: 2164722 - DNA, 25 bp, Homo sapien
agggcagcagtcaggagcgtgggca

SEQ ID NO: 2164723 - DNA, 25 bp, Homo sapien
gcagcagtcaggagcgtgggcagga

SEQ ID NO: 2164724 - DNA, 25 bp, Homo sapien
tggtcagggcagcagtcaggagcgt

SEQ ID NO: 2164725 - DNA, 25 bp, Homo sapien
cggccttgggcatgctatgaccatc

SEQ ID NO: 2164726 - DNA, 25 bp, Homo sapien
catgctatcgcacgagaggccaaga

SEQ ID NO: 2164727 - DNA, 25 bp, Homo sapien
cagtgcttcttggaacatgaactcc

SEQ ID NO: 2164728 - DNA, 25 bp, Homo sapien
tcttcataaagggatgggtagcaga

SEQ ID NO: 2164729 - DNA, 25 bp, Homo sapien
tgccactgagaacactgattgctct

SEQ ID NO: 2164730 - DNA, 25 bp, Homo sapien
tcacccaatagacaaggaacccaga

SEQ ID NO: 2164731 - DNA, 25 bp, Homo sapien
ccatgtgactcaaaagcaagaatct

SEQ ID NO: 2164732 - DNA, 25 bp, Homo sapien
gccaagcaaatccaggtatacatgt

SEQ ID NO: 2164733 - DNA, 25 bp, Homo sapien
acacgggaacgtgctgatgccagac

SEQ ID NO: 2164734 - DNA, 25 bp, Homo sapien
taggaatgctccatgttgcaggaag

SEQ ID NO: 2164735 - DNA, 25 bp, Homo sapien
agcaggtcaggtcgcagagtcagaa

SEQ ID NO: 2164736 - DNA, 25 bp, Homo sapien
gaagtgctgattatgtattcgtccc

SEQ ID NO: 2164737 - DNA, 25 bp, Homo sapien
gtgccactagtcacgctgaaagccg

SEQ ID NO: 2164738 - DNA, 25 bp, Homo sapien
ctgaacacctgtataggtgccacta

SEQ ID NO: 2164739 - DNA, 25 bp, Homo sapien
cactagtcacgctgaaagccggcat

SEQ ID NO: 2164740 - DNA, 25 bp, Homo sapien
cacctgtataggtgccactagtcac

SEQ ID NO: 2164741 - DNA, 25 bp, Homo sapien
tctgctaccctccatatgactgttc

SEQ ID NO: 2164742 - DNA, 25 bp, Homo sapien
gctaccctccatatgactgttctta

SEQ ID NO: 2164743 - DNA, 25 bp, Homo sapien
atcatctctgctaccctccatatga

SEQ ID NO: 2164744 - DNA, 25 bp, Homo sapien
atctctgctaccctccatatgactg

SEQ ID NO: 2164745 - DNA, 25 bp, Homo sapien
gcctcctgggacttctgacctcctg

SEQ ID NO: 2164746 - DNA, 25 bp, Homo sapien
agatcttctccttcggtgctcctct

SEQ ID NO: 2164747 - DNA, 25 bp, Homo sapien
tcctggccggcctgtccgctgagaa

SEQ ID NO: 2164748 - DNA, 25 bp, Homo sapien
ttctgacctcctggccggcctgtcc

SEQ ID NO: 2164749 - DNA, 25 bp, Homo sapien
ggtgccttcaatcagagtgaaggag

SEQ ID NO: 2164750 - DNA, 25 bp, Homo sapien
tgccttcaatcagagtgaaggagga

SEQ ID NO: 2164751 - DNA, 25 bp, Homo sapien
cagggtgccttcaatcagagtgaag

SEQ ID NO: 2164752 - DNA, 25 bp, Homo sapien
tccagggtgccttcaatcagagtga

SEQ ID NO: 2164753 - DNA, 25 bp, Homo sapien
caaagaaactgctccatcccatcat

SEQ ID NO: 2164754 - DNA, 25 bp, Homo sapien
gcccaaagaaactgctccatcccat

SEQ ID NO: 2164755 - DNA, 25 bp, Homo sapien
tgcccaaagaaactgctccatccca

SEQ ID NO: 2164756 - DNA, 25 bp, Homo sapien
ccaaagaaactgctccatcccatca

SEQ ID NO: 2164757 - DNA, 25 bp, Homo sapien
aactggtagcacgggggatcactgc

SEQ ID NO: 2164758 - DNA, 25 bp, Homo sapien
ggcggtattgcaggtagttttcctg

SEQ ID NO: 2164759 - DNA, 25 bp, Homo sapien
cctggctgcatactccaggactttc

SEQ ID NO: 2164760 - DNA, 25 bp, Homo sapien
gcacctggcggtattgcaggtagtt

SEQ ID NO: 2164761 - DNA, 25 bp, Homo sapien
gatgggtaggaaatgctctctttag

SEQ ID NO: 2164762 - DNA, 25 bp, Homo sapien
gggtaggaaatgctctctttagtac

SEQ ID NO: 2164763 - DNA, 25 bp, Homo sapien
ctctcccaaagcctcttcatgcagg

SEQ ID NO: 2164764 - DNA, 25 bp, Homo sapien
cccaaagcctcttcatgcagggatg

SEQ ID NO: 2164765 - DNA, 25 bp, Homo sapien
atggcatgcttggagagcaggcaaa

SEQ ID NO: 2164766 - DNA, 25 bp, Homo sapien
ccctcctggcaggtcaggcctgctt

SEQ ID NO: 2164767 - DNA, 25 bp, Homo sapien
tcagggccatggcatgcttggagag

SEQ ID NO: 2164768 - DNA, 25 bp, Homo sapien
tgcttggagagcaggcaaagcacag

SEQ ID NO: 2164769 - DNA, 25 bp, Homo sapien
ctatacaggttatagtctgcggtca

SEQ ID NO: 2164770 - DNA, 25 bp, Homo sapien
actccgtagatggtattgtataatc

SEQ ID NO: 2164771 - DNA, 25 bp, Homo sapien
tatagtctgcggtcagccaagaccc

SEQ ID NO: 2164772 - DNA, 25 bp, Homo sapien
tataatcgtaggcactatacaggtt

SEQ ID NO: 2164773 - DNA, 25 bp, Homo sapien
tctttacccaaattaagcactacag

SEQ ID NO: 2164774 - DNA, 25 bp, Homo sapien
tacagtcccaccatttcctctataa

SEQ ID NO: 2164775 - DNA, 25 bp, Homo sapien
caaattaagcactacagtcccacca

SEQ ID NO: 2164776 - DNA, 25 bp, Homo sapien
ctctataaccttcgtctgtgacacc

SEQ ID NO: 2164777 - DNA, 25 bp, Homo sapien
atctcaagccgacccctcagaacca

SEQ ID NO: 2164778 - DNA, 25 bp, Homo sapien
ccctgagcccgcttccctcagccga

SEQ ID NO: 2164779 - DNA, 25 bp, Homo sapien
tcctcacagaccctgagcccgcttc

SEQ ID NO: 2164780 - DNA, 25 bp, Homo sapien
agccgatctcaagccgacccctcag

SEQ ID NO: 2164781 - DNA, 25 bp, Homo sapien
tttgctgcatcagccccggatgcgg

SEQ ID NO: 2164782 - DNA, 25 bp, Homo sapien
cgtgctcatgaagcccctttgctgc

SEQ ID NO: 2164783 - DNA, 25 bp, Homo sapien
acgtcagaatcagcgagcccggccg

SEQ ID NO: 2164784 - DNA, 25 bp, Homo sapien
gctcctcttgagtccgtgctcatga

SEQ ID NO: 2164785 - DNA, 25 bp, Homo sapien
aaagaggccgggcagatttctgttg

SEQ ID NO: 2164786 - DNA, 25 bp, Homo sapien
cctcagctgatagtcctgctcatgc

SEQ ID NO: 2164787 - DNA, 25 bp, Homo sapien
ccaatgagtctggtataacacaggg

SEQ ID NO: 2164788 - DNA, 25 bp, Homo sapien
gacctgaatgcagtgccctcagacc

SEQ ID NO: 2164789 - DNA, 25 bp, Homo sapien
tactgcctgggcctcttatgctctg

SEQ ID NO: 2164790 - DNA, 25 bp, Homo sapien
tatgctctgtgattgaagatactgc

SEQ ID NO: 2164791 - DNA, 25 bp, Homo sapien
gtgcagcctcctggcaaaggccaag

SEQ ID NO: 2164792 - DNA, 25 bp, Homo sapien
gctccaggactgacaaaagggctgg

SEQ ID NO: 2164793 - DNA, 25 bp, Homo sapien
cctggctggcctgttctctgcgaac

SEQ ID NO: 2164794 - DNA, 25 bp, Homo sapien
tcctggctggcctgttctctgcgaa

SEQ ID NO: 2164795 - DNA, 25 bp, Homo sapien
atgactcaggtcagggcagcaggag

SEQ ID NO: 2164796 - DNA, 25 bp, Homo sapien
ccggagctgggcaattgagacccac

SEQ ID NO: 2164797 - DNA, 25 bp, Homo sapien
gcaggagagtgtgggccggagctgg

SEQ ID NO: 2164798 - DNA, 25 bp, Homo sapien
ggcagcaggagagtgtgggccggag

SEQ ID NO: 2164799 - DNA, 25 bp, Homo sapien
tcatcggattggctccacagagtgc

SEQ ID NO: 2164800 - DNA, 25 bp, Homo sapien
cattaagatcatgcccaggacgatt

SEQ ID NO: 2164801 - DNA, 25 bp, Homo sapien
ggtcttgggcgtactctgatcatca

SEQ ID NO: 2164802 - DNA, 25 bp, Homo sapien
tttgcggagcaggaaacgaactaac

SEQ ID NO: 2164803 - DNA, 25 bp, Homo sapien
tgagagatggtccacactgtgttcc

SEQ ID NO: 2164804 - DNA, 25 bp, Homo sapien
ccaaatcgcccaatagaacaggaac

SEQ ID NO: 2164805 - DNA, 25 bp, Homo sapien
cactactgagaactgtgactgctct

SEQ ID NO: 2164806 - DNA, 25 bp, Homo sapien
taatcctctgctcttgtagtgtctg

SEQ ID NO: 2164807 - DNA, 25 bp, Homo sapien
caatgctatgggacaaaataaaagt

SEQ ID NO: 2164808 - DNA, 25 bp, Homo sapien
taaaagtttgtccattgatgttgcc

SEQ ID NO: 2164809 - DNA, 25 bp, Homo sapien
aaaactagttcaggacatgatgagg

SEQ ID NO: 2164810 - DNA, 25 bp, Homo sapien
ggcaaatcctggccagaaggaaaga

SEQ ID NO: 2164811 - DNA, 25 bp, Homo sapien
actaccaaaattgacaatgcttaaa

SEQ ID NO: 2164812 - DNA, 25 bp, Homo sapien
tagctcaaagtggaaactaccaaaa

SEQ ID NO: 2164813 - DNA, 25 bp, Homo sapien
ttgacaatgcttaaattatagtaca

SEQ ID NO: 2164814 - DNA, 25 bp, Homo sapien
tacatgtcacaacttgaaggaacct

SEQ ID NO: 2164815 - DNA, 25 bp, Homo sapien
gcttgagaaagtgtagatccaacat

SEQ ID NO: 2164816 - DNA, 25 bp, Homo sapien
tgaggtagggatgggagttcaggac

SEQ ID NO: 2164817 - DNA, 25 bp, Homo sapien
ggactctgagaagataacatgtcat

SEQ ID NO: 2164818 - DNA, 25 bp, Homo sapien
tccaacatccaaacatagttgccat

SEQ ID NO: 2164819 - DNA, 25 bp, Homo sapien
ctaaaggttcatgtaatgaaagtta

SEQ ID NO: 2164820 - DNA, 25 bp, Homo sapien
ggctacttcttgacgtgcgcacggg

SEQ ID NO: 2164821 - DNA, 25 bp, Homo sapien
gcagggcctgtagtttagctcaaac

SEQ ID NO: 2164822 - DNA, 25 bp, Homo sapien
cgcacgggtgcagtagtctcatgga

SEQ ID NO: 2164823 - DNA, 25 bp, Homo sapien
tctcagaggctgaacattggtgccc

SEQ ID NO: 2164824 - DNA, 25 bp, Homo sapien
aatgtccagcattagaagattcatc

SEQ ID NO: 2164825 - DNA, 25 bp, Homo sapien
catacaggtgaaacaacagttgcac

SEQ ID NO: 2164826 - DNA, 25 bp, Homo sapien
tagtaatacccatgaaaagccttaa

SEQ ID NO: 2164827 - DNA, 25 bp, Homo sapien
acttggaaaggtgtagtcacacact

SEQ ID NO: 2164828 - DNA, 25 bp, Homo sapien
agagtataaacatgagctcttaggg

SEQ ID NO: 2164829 - DNA, 25 bp, Homo sapien
tggagtatactcgatcaagacctct

SEQ ID NO: 2164830 - DNA, 25 bp, Homo sapien
aatgacctttacctactcattggag

SEQ ID NO: 2164831 - DNA, 25 bp, Homo sapien
ccataaatgcctcatgcagtaagac

SEQ ID NO: 2164832 - DNA, 25 bp, Homo sapien
cccctcatcccaggattcaaagtcc

SEQ ID NO: 2164833 - DNA, 25 bp, Homo sapien
gacgccacagctggagtactctctc

SEQ ID NO: 2164834 - DNA, 25 bp, Homo sapien
caggacgccacagctggagtactct

SEQ ID NO: 2164835 - DNA, 25 bp, Homo sapien
ccccctcatcccaggattcaaagtc

SEQ ID NO: 2164836 - DNA, 25 bp, Homo sapien
aggagaagtattaaaagtatgctgt

SEQ ID NO: 2164837 - DNA, 25 bp, Homo sapien
caaggagaagtattaaaagtatgct

SEQ ID NO: 2164838 - DNA, 25 bp, Homo sapien
gccaaggagaagtattaaaagtatg

SEQ ID NO: 2164839 - DNA, 25 bp, Homo sapien
gagaagtattaaaagtatgctgtcc

SEQ ID NO: 2164840 - DNA, 25 bp, Homo sapien
ctcctcagccatgtactgatgacat

SEQ ID NO: 2164841 - DNA, 25 bp, Homo sapien
gccctgaagagtctctcatactgaa

SEQ ID NO: 2164842 - DNA, 25 bp, Homo sapien
tgaattcctcccactgacaatttgc

SEQ ID NO: 2164843 - DNA, 25 bp, Homo sapien
tgtactgatgacatatggcatctct

SEQ ID NO: 2164844 - DNA, 25 bp, Homo sapien
ccagctgacagaagcagtagcaatt

SEQ ID NO: 2164845 - DNA, 25 bp, Homo sapien
attcaagtccatttgccagaagggc

SEQ ID NO: 2164846 - DNA, 25 bp, Homo sapien
caaagaccttgaagtaaacatagcc

SEQ ID NO: 2164847 - DNA, 25 bp, Homo sapien
tgaagtaaacatagccaccagctga

SEQ ID NO: 2164848 - DNA, 25 bp, Homo sapien
caatcagtagcctattgtttgttgc

SEQ ID NO: 2164849 - DNA, 25 bp, Homo sapien
tcagacctaaattcaatcagtagcc

SEQ ID NO: 2164850 - DNA, 25 bp, Homo sapien
ctttaattgtatgaagttcagacct

SEQ ID NO: 2164851 - DNA, 25 bp, Homo sapien
ttgcttcctgggaagcaagtagcag

SEQ ID NO: 2164852 - DNA, 25 bp, Homo sapien
tctttcattgagaggcagaatctga

SEQ ID NO: 2164853 - DNA, 25 bp, Homo sapien
tctcagcagcttagtcctcaaacgg

SEQ ID NO: 2164854 - DNA, 25 bp, Homo sapien
tcctccaagagagcacaaggcagca

SEQ ID NO: 2164855 - DNA, 25 bp, Homo sapien
gaggctgagtcataaaaggttgtac

SEQ ID NO: 2164856 - DNA, 25 bp, Homo sapien
tagtcctgagcaaacctgatctaga

SEQ ID NO: 2164857 - DNA, 25 bp, Homo sapien
gacaggcgggccttacattccactg

SEQ ID NO: 2164858 - DNA, 25 bp, Homo sapien
tgtcgaaggaacagcacaagatgct

SEQ ID NO: 2164859 - DNA, 25 bp, Homo sapien
caccttgctgtgaattagtcctgag

SEQ ID NO: 2164860 - DNA, 25 bp, Homo sapien
tgtgccctaaatgaattcccaacct

SEQ ID NO: 2164861 - DNA, 25 bp, Homo sapien
tatgctttggtcacaattcaatttt

SEQ ID NO: 2164862 - DNA, 25 bp, Homo sapien
acagcatcctgaggaaaaagatgct

SEQ ID NO: 2164863 - DNA, 25 bp, Homo sapien
caacatggcattgctgggtttgtaa

SEQ ID NO: 2164864 - DNA, 25 bp, Homo sapien
caactttcagtagcatgttaatttc

SEQ ID NO: 2164865 - DNA, 25 bp, Homo sapien
aatacctacaatatgaacccctcca

SEQ ID NO: 2164866 - DNA, 25 bp, Homo sapien
tttccccgttgctatagctatggca

SEQ ID NO: 2164867 - DNA, 25 bp, Homo sapien
agcgtgatatatttagcaactttca

SEQ ID NO: 2164868 - DNA, 25 bp, Homo sapien
gggaactcagggaattaaactcata

SEQ ID NO: 2164869 - DNA, 25 bp, Homo sapien
aaattccagatgcaataccacccag

SEQ ID NO: 2164870 - DNA, 25 bp, Homo sapien
tctgatggcatagctagactggttt

SEQ ID NO: 2164871 - DNA, 25 bp, Homo sapien
tgtgagtcatgaaactgctgtgttc

SEQ ID NO: 2164872 - DNA, 25 bp, Homo sapien
gaattcaggctatggtgtgtcagat

SEQ ID NO: 2164873 - DNA, 25 bp, Homo sapien
gctggtaggtaactaatgcatgttc

SEQ ID NO: 2164874 - DNA, 25 bp, Homo sapien
atccattcctgtcaagctggtaggt

SEQ ID NO: 2164875 - DNA, 25 bp, Homo sapien
tccaggagcaaactggtgagaattc

SEQ ID NO: 2164876 - DNA, 25 bp, Homo sapien
cccactactaacaaactctaaggag

SEQ ID NO: 2164877 - DNA, 25 bp, Homo sapien
tctactctaccaaaaatggaatggc

SEQ ID NO: 2164878 - DNA, 25 bp, Homo sapien
tactacagactcagatgcagacttt

SEQ ID NO: 2164879 - DNA, 25 bp, Homo sapien
caaacacgttctcctgaaactcaag

SEQ ID NO: 2164880 - DNA, 25 bp, Homo sapien
ctggaagcttatttagaagagtggc

SEQ ID NO: 2164881 - DNA, 25 bp, Homo sapien
tgcgtttatgctttatccacagaag

SEQ ID NO: 2164882 - DNA, 25 bp, Homo sapien
cacacacacttcactgcgtttatgc

SEQ ID NO: 2164883 - DNA, 25 bp, Homo sapien
cagaagctcccgtttatcttagcag

SEQ ID NO: 2164884 - DNA, 25 bp, Homo sapien
tccaagctcaacttgtatctaagca

SEQ ID NO: 2164885 - DNA, 25 bp, Homo sapien
tggaattccaagctcaacttgtatc

SEQ ID NO: 2164886 - DNA, 25 bp, Homo sapien
tctggaattccaagctcaacttgta

SEQ ID NO: 2164887 - DNA, 25 bp, Homo sapien
gaattccaagctcaacttgtatcta

SEQ ID NO: 2164888 - DNA, 25 bp, Homo sapien
tatgtctccaatcagcagtgctcta

SEQ ID NO: 2164889 - DNA, 25 bp, Homo sapien
tttacttaatatgtctccaatcagc

SEQ ID NO: 2164890 - DNA, 25 bp, Homo sapien
ttggacacctgaatacatacaatga

SEQ ID NO: 2164891 - DNA, 25 bp, Homo sapien
tccacagtacattttacttaatatg

SEQ ID NO: 2164892 - DNA, 25 bp, Homo sapien
cagcattctagtgacaagataggcc

SEQ ID NO: 2164893 - DNA, 25 bp, Homo sapien
taatacagtccattccaaacaggcc

SEQ ID NO: 2164894 - DNA, 25 bp, Homo sapien
gataggccaaaccaaaatgggctac

SEQ ID NO: 2164895 - DNA, 25 bp, Homo sapien
aacaggccctttgcaattcattggg

SEQ ID NO: 2164896 - DNA, 25 bp, Homo sapien
gggcatttgcccaagtcattggctt

SEQ ID NO: 2164897 - DNA, 25 bp, Homo sapien
atttgcccaagtcattggcttccgt

SEQ ID NO: 2164898 - DNA, 25 bp, Homo sapien
ttgcccaagtcattggcttccgtgc

SEQ ID NO: 2164899 - DNA, 25 bp, Homo sapien
ttaggggcatttgcccaagtcattg

SEQ ID NO: 2164900 - DNA, 25 bp, Homo sapien
ggaaacctggtcatctgagttgatc

SEQ ID NO: 2164901 - DNA, 25 bp, Homo sapien
tctaggtaggggaaacctggtcatc

SEQ ID NO: 2164902 - DNA, 25 bp, Homo sapien
ttcactgcaataagtagcactctag

SEQ ID NO: 2164903 - DNA, 25 bp, Homo sapien
gcaataagtagcactctaggtaggg

SEQ ID NO: 2164904 - DNA, 25 bp, Homo sapien
ccacctgcaaattgggagggcttta

SEQ ID NO: 2164905 - DNA, 25 bp, Homo sapien
gctttattatactggctagaatttc

SEQ ID NO: 2164906 - DNA, 25 bp, Homo sapien
tgtttccctctcaatactcctttag

SEQ ID NO: 2164907 - DNA, 25 bp, Homo sapien
attgtgtcttgcaaccttactaaac

SEQ ID NO: 2164908 - DNA, 25 bp, Homo sapien
ggattggagggaagatttgataact

SEQ ID NO: 2164909 - DNA, 25 bp, Homo sapien
gaaataaatatcaacgtcacagagg

SEQ ID NO: 2164910 - DNA, 25 bp, Homo sapien
gcctggaatgcgatagcacaatatc

SEQ ID NO: 2164911 - DNA, 25 bp, Homo sapien
atttgaaggtagactcatagttagc

SEQ ID NO: 2164912 - DNA, 25 bp, Homo sapien
catggaggtatagtaatatcacatt

SEQ ID NO: 2164913 - DNA, 25 bp, Homo sapien
tccagagtggtcatactattaccca

SEQ ID NO: 2164914 - DNA, 25 bp, Homo sapien
tgaaaacagctctgctatgaacgaa

SEQ ID NO: 2164915 - DNA, 25 bp, Homo sapien
attcacctattaaccaaacacctgg

SEQ ID NO: 2164916 - DNA, 25 bp, Homo sapien
cataacgtgggagggctcatcacct

SEQ ID NO: 2164917 - DNA, 25 bp, Homo sapien
tgcataaatgcagcaccgacagtgt

SEQ ID NO: 2164918 - DNA, 25 bp, Homo sapien
gctgtgctgcagtcaagtataggct

SEQ ID NO: 2164919 - DNA, 25 bp, Homo sapien
tataggctgaggtacacatcctgca

SEQ ID NO: 2164920 - DNA, 25 bp, Homo sapien
gacacagtataaggggttcaagata

SEQ ID NO: 2164921 - DNA, 25 bp, Homo sapien
ggtgaagtgcgtttcttatgacaca

SEQ ID NO: 2164922 - DNA, 25 bp, Homo sapien
gaggtgaagtgcgtttcttatgaca

SEQ ID NO: 2164923 - DNA, 25 bp, Homo sapien
gaagtgcgtttcttatgacacagta

SEQ ID NO: 2164924 - DNA, 25 bp, Homo sapien
cagttgctgcacacacttcatccag

SEQ ID NO: 2164925 - DNA, 25 bp, Homo sapien
tataatgtagctcaccagttttccc

SEQ ID NO: 2164926 - DNA, 25 bp, Homo sapien
taccagtttctccactacattgcat

SEQ ID NO: 2164927 - DNA, 25 bp, Homo sapien
ccttgaagagcactgatcagttatt

SEQ ID NO: 2164928 - DNA, 25 bp, Homo sapien
ggttcctcagtttgggcaatccact

SEQ ID NO: 2164929 - DNA, 25 bp, Homo sapien
ttggttcctcagtttgggcaatcca

SEQ ID NO: 2164930 - DNA, 25 bp, Homo sapien
tcctcagtttgggcaatccacttgg

SEQ ID NO: 2164931 - DNA, 25 bp, Homo sapien
gttcctcagtttgggcaatccactt

SEQ ID NO: 2164932 - DNA, 25 bp, Homo sapien
ttctaaaccaaagaccaagtaagca

SEQ ID NO: 2164933 - DNA, 25 bp, Homo sapien
gatttcaggtgcacgagtccaatgt

SEQ ID NO: 2164934 - DNA, 25 bp, Homo sapien
tccaatgttaggacaaacagccact

SEQ ID NO: 2164935 - DNA, 25 bp, Homo sapien
ttagtggccatatccaataccaggg

SEQ ID NO: 2164936 - DNA, 25 bp, Homo sapien
tgaaattggttgagtgcagcacgga

SEQ ID NO: 2164937 - DNA, 25 bp, Homo sapien
tatggccatggtattcagcacatac

SEQ ID NO: 2164938 - DNA, 25 bp, Homo sapien
tactgctatgattcaggcaaagaca

SEQ ID NO: 2164939 - DNA, 25 bp, Homo sapien
gatcacgtgtgcaaaaggaggcaga

SEQ ID NO: 2164940 - DNA, 25 bp, Homo sapien
gatgccaggttttatcaggaccagg

SEQ ID NO: 2164941 - DNA, 25 bp, Homo sapien
gaccagggggatgtgagagatagat

SEQ ID NO: 2164942 - DNA, 25 bp, Homo sapien
gggggatgtgagagatagatgcctt

SEQ ID NO: 2164943 - DNA, 25 bp, Homo sapien
tggatgccaggttttatcaggacca

SEQ ID NO: 2164944 - DNA, 25 bp, Homo sapien
gttactgccaagggagtgaaaactg

SEQ ID NO: 2164945 - DNA, 25 bp, Homo sapien
gccaagggagtgaaaactgatcccc

SEQ ID NO: 2164946 - DNA, 25 bp, Homo sapien
ctgccaagggagtgaaaactgatcc

SEQ ID NO: 2164947 - DNA, 25 bp, Homo sapien
actgccaagggagtgaaaactgatc

SEQ ID NO: 2164948 - DNA, 25 bp, Homo sapien
ggcaatgtatcaccaagcaccagac

SEQ ID NO: 2164949 - DNA, 25 bp, Homo sapien
gcagtgcggcccacaattgagctca

SEQ ID NO: 2164950 - DNA, 25 bp, Homo sapien
tttagtgtggcctccatcagacaga

SEQ ID NO: 2164951 - DNA, 25 bp, Homo sapien
gaaaggacctgtctctgtagcccca

SEQ ID NO: 2164952 - DNA, 25 bp, Homo sapien
gccccaaggccacactgaaggctgt

SEQ ID NO: 2164953 - DNA, 25 bp, Homo sapien
aaggctgtcccacatctagcctgcc

SEQ ID NO: 2164954 - DNA, 25 bp, Homo sapien
actgaaggctgtcccacatctagcc

SEQ ID NO: 2164955 - DNA, 25 bp, Homo sapien
gctgtcccacatctagcctgccaca

SEQ ID NO: 2164956 - DNA, 25 bp, Homo sapien
taaaccctttcatgatgtattcccc

SEQ ID NO: 2164957 - DNA, 25 bp, Homo sapien
ctgacataaaccctttcatgatgta

SEQ ID NO: 2164958 - DNA, 25 bp, Homo sapien
ataaaccctttcatgatgtattccc

SEQ ID NO: 2164959 - DNA, 25 bp, Homo sapien
ctttcatgatgtattccccccccat

SEQ ID NO: 2164960 - DNA, 25 bp, Homo sapien
tggagataaccagagggtcactgct

SEQ ID NO: 2164961 - DNA, 25 bp, Homo sapien
gtggagataaccagagggtcactgc

SEQ ID NO: 2164962 - DNA, 25 bp, Homo sapien
tgccctgttgtagccagtccctcat

SEQ ID NO: 2164963 - DNA, 25 bp, Homo sapien
taacagccacggttacttcccagat

SEQ ID NO: 2164964 - DNA, 25 bp, Homo sapien
cacagctggttcaggcttagggtcc

SEQ ID NO: 2164965 - DNA, 25 bp, Homo sapien
ttcaggcttagggtccccagtgtcc

SEQ ID NO: 2164966 - DNA, 25 bp, Homo sapien
tggctaacagccacggttacttccc

SEQ ID NO: 2164967 - DNA, 25 bp, Homo sapien
actctgcttcatgcctaggagtcct

SEQ ID NO: 2164968 - DNA, 25 bp, Homo sapien
tttgtcactctgcttcatgcctagg

SEQ ID NO: 2164969 - DNA, 25 bp, Homo sapien
aaccttatagaggatcacggttctg

SEQ ID NO: 2164970 - DNA, 25 bp, Homo sapien
cttatagaggatcacggttctgcca

SEQ ID NO: 2164971 - DNA, 25 bp, Homo sapien
tatacttcaactgacaatgtagctt

SEQ ID NO: 2164972 - DNA, 25 bp, Homo sapien
agtttcctatatacttcaactgaca

SEQ ID NO: 2164973 - DNA, 25 bp, Homo sapien
tcctatatacttcaactgacaatgt

SEQ ID NO: 2164974 - DNA, 25 bp, Homo sapien
tgaaagtttcctatatacttcaact

SEQ ID NO: 2164975 - DNA, 25 bp, Homo sapien
caggatgtctgaatactatgaaaaa

SEQ ID NO: 2164976 - DNA, 25 bp, Homo sapien
aagcgaggcctctaaaccacgaaca

SEQ ID NO: 2164977 - DNA, 25 bp, Homo sapien
caaagtgatttccatgtttttcagt

SEQ ID NO: 2164978 - DNA, 25 bp, Homo sapien
aatcacttcatcagagataacagct

SEQ ID NO: 2164979 - DNA, 25 bp, Homo sapien
gagatgaatttctgatctaccaatg

SEQ ID NO: 2164980 - DNA, 25 bp, Homo sapien
atagtttttgtcttgtccaactaag

SEQ ID NO: 2164981 - DNA, 25 bp, Homo sapien
gatctaccaatgcagtaaaactctc

SEQ ID NO: 2164982 - DNA, 25 bp, Homo sapien
ccaatgcagtaaaactctctataaa

SEQ ID NO: 2164983 - DNA, 25 bp, Homo sapien
agaagctgctagtggacttcctagg

SEQ ID NO: 2164984 - DNA, 25 bp, Homo sapien
attttatgttccatacagagaggca

SEQ ID NO: 2164985 - DNA, 25 bp, Homo sapien
ttttatgttccatacagagaggcat

SEQ ID NO: 2164986 - DNA, 25 bp, Homo sapien
tggtcccttgtggtaactcttttga

SEQ ID NO: 2164987 - DNA, 25 bp, Homo sapien
ccactggtcccttgtggtaactctt

SEQ ID NO: 2164988 - DNA, 25 bp, Homo sapien
ctggtcccttgtggtaactcttttg

SEQ ID NO: 2164989 - DNA, 25 bp, Homo sapien
cactggtcccttgtggtaactcttt

SEQ ID NO: 2164990 - DNA, 25 bp, Homo sapien
ctttttggtatcacagagcatgaaa

SEQ ID NO: 2164991 - DNA, 25 bp, Homo sapien
agagctccagcacttcaattgaata

SEQ ID NO: 2164992 - DNA, 25 bp, Homo sapien
gcacttcaattgaatataatcctct

SEQ ID NO: 2164993 - DNA, 25 bp, Homo sapien
agaagagctccagcacttcaattga

SEQ ID NO: 2164994 - DNA, 25 bp, Homo sapien
gctccagcacttcaattgaatataa

SEQ ID NO: 2164995 - DNA, 25 bp, Homo sapien
gacatgtttctcttgacaccgagag

SEQ ID NO: 2164996 - DNA, 25 bp, Homo sapien
acatgtttctcttgacaccgagagg

SEQ ID NO: 2164997 - DNA, 25 bp, Homo sapien
catgtttctcttgacaccgagaggg

SEQ ID NO: 2164998 - DNA, 25 bp, Homo sapien
tgtttctcttgacaccgagagggtc

SEQ ID NO: 2164999 - DNA, 25 bp, Homo sapien
gcagcagaggatgggggcggtgctg

SEQ ID NO: 2165000 - DNA, 25 bp, Homo sapien
gcagaggatgggggcggtgctgcat

SEQ ID NO: 2165001 - DNA, 25 bp, Homo sapien
agcagcagaggatgggggcggtgct

SEQ ID NO: 2165002 - DNA, 25 bp, Homo sapien
acagcagcagaggatgggggcggtg

SEQ ID NO: 2165003 - DNA, 25 bp, Homo sapien
tagggacccattcctcagaagcaca

SEQ ID NO: 2165004 - DNA, 25 bp, Homo sapien
cagagactctaccttttggggagac

SEQ ID NO: 2165005 - DNA, 25 bp, Homo sapien
tggttccagacaaccgggactggca

SEQ ID NO: 2165006 - DNA, 25 bp, Homo sapien
ttggggagacaactgtagggaccca

SEQ ID NO: 2165007 - DNA, 25 bp, Homo sapien
cagattcagtctttggtgaccttca

SEQ ID NO: 2165008 - DNA, 25 bp, Homo sapien
gaaggcatggcattgctctcagatt

SEQ ID NO: 2165009 - DNA, 25 bp, Homo sapien
aggacctgaaggcatggcattgctc

SEQ ID NO: 2165010 - DNA, 25 bp, Homo sapien
tggcttctcccagtatggctgggga

SEQ ID NO: 2165011 - DNA, 25 bp, Homo sapien
gcaagccaggacagcacttatgctc

SEQ ID NO: 2165012 - DNA, 25 bp, Homo sapien
ttatgctctgatggcaaggtcccgc

SEQ ID NO: 2165013 - DNA, 25 bp, Homo sapien
gcagaagcccacatacacctgctgt

SEQ ID NO: 2165014 - DNA, 25 bp, Homo sapien
aaggtcccgctgcagaagcccacat

SEQ ID NO: 2165015 - DNA, 25 bp, Homo sapien
aaaattcagctattcccaaggccag

SEQ ID NO: 2165016 - DNA, 25 bp, Homo sapien
gcaaatggagttgtatgtggcctca

SEQ ID NO: 2165017 - DNA, 25 bp, Homo sapien
tggccaggctacaagggctcctgtt

SEQ ID NO: 2165018 - DNA, 25 bp, Homo sapien
tttgaatactctgtcctgggctgaa

SEQ ID NO: 2165019 - DNA, 25 bp, Homo sapien
aggcttggcctttgttactcttgat

SEQ ID NO: 2165020 - DNA, 25 bp, Homo sapien
gcaatgccagcttggctgatgggca

SEQ ID NO: 2165021 - DNA, 25 bp, Homo sapien
agcttggctgatgggcaagccctcc

SEQ ID NO: 2165022 - DNA, 25 bp, Homo sapien
gaggcttggcctttgttactcttga

SEQ ID NO: 2165023 - DNA, 25 bp, Homo sapien
tgtagggactgggccacccgagtaa

SEQ ID NO: 2165024 - DNA, 25 bp, Homo sapien
agcaaagaaagcagcacggtgtggg

SEQ ID NO: 2165025 - DNA, 25 bp, Homo sapien
tgggctcagctcattggctatgtgt

SEQ ID NO: 2165026 - DNA, 25 bp, Homo sapien
aactctagaacaattgatagtatat

SEQ ID NO: 2165027 - DNA, 25 bp, Homo sapien
tgatagtatatttcctgggctcagc

SEQ ID NO: 2165028 - DNA, 25 bp, Homo sapien
cagctcattggctatgtgtggagag

SEQ ID NO: 2165029 - DNA, 25 bp, Homo sapien
tccaactaaaccatgctcaagcctg

SEQ ID NO: 2165030 - DNA, 25 bp, Homo sapien
tgtaggttccttggagaagcaccct

SEQ ID NO: 2165031 - DNA, 25 bp, Homo sapien
ctgggccctggttcacggtcccttg

SEQ ID NO: 2165032 - DNA, 25 bp, Homo sapien
agcctgtgtaggttccttggagaag

SEQ ID NO: 2165033 - DNA, 25 bp, Homo sapien
ctgttaatgctgtgatgcacgtcac

SEQ ID NO: 2165034 - DNA, 25 bp, Homo sapien
acgtcactgtcaacgggtaccttca

SEQ ID NO: 2165035 - DNA, 25 bp, Homo sapien
tgtgatgcacgtcactgtcaacggg

SEQ ID NO: 2165036 - DNA, 25 bp, Homo sapien
taatgctgtgatgcacgtcactgtc

SEQ ID NO: 2165037 - DNA, 25 bp, Homo sapien
tggtctcttgggtgattcctgcatt

SEQ ID NO: 2165038 - DNA, 25 bp, Homo sapien
tgggtgattcctgcatttggtccat

SEQ ID NO: 2165039 - DNA, 25 bp, Homo sapien
gttcgctggtctcttgggtgattcc

SEQ ID NO: 2165040 - DNA, 25 bp, Homo sapien
cgctggtctcttgggtgattcctgc

SEQ ID NO: 2165041 - DNA, 25 bp, Homo sapien
ctgaccagcttatagcctctggatc

SEQ ID NO: 2165042 - DNA, 25 bp, Homo sapien
tcactgccaccggagttgtttggtg

SEQ ID NO: 2165043 - DNA, 25 bp, Homo sapien
gaccagcttatagcctctggatctc

SEQ ID NO: 2165044 - DNA, 25 bp, Homo sapien
tgccaccggagttgtttggtgccat

SEQ ID NO: 2165045 - DNA, 25 bp, Homo sapien
gatccataagcacaagttggtacag

SEQ ID NO: 2165046 - DNA, 25 bp, Homo sapien
ccataagcacaagttggtacagacc

SEQ ID NO: 2165047 - DNA, 25 bp, Homo sapien
ggatccataagcacaagttggtaca

SEQ ID NO: 2165048 - DNA, 25 bp, Homo sapien
ggcggggctgaagaaagcataagga

SEQ ID NO: 2165049 - DNA, 25 bp, Homo sapien
ttcatgttgactggaaagtctccat

SEQ ID NO: 2165050 - DNA, 25 bp, Homo sapien
ctgggtggctgccaaaccaatgaca

SEQ ID NO: 2165051 - DNA, 25 bp, Homo sapien
aaccaatgacagagttcacactctc

SEQ ID NO: 2165052 - DNA, 25 bp, Homo sapien
ggctgccaaaccaatgacagagttc

SEQ ID NO: 2165053 - DNA, 25 bp, Homo sapien
cgtctttatgaggcttgctcaatgg

SEQ ID NO: 2165054 - DNA, 25 bp, Homo sapien
ctttatgaggcttgctcaatggctg

SEQ ID NO: 2165055 - DNA, 25 bp, Homo sapien
gaggcttgctcaatggctgtctgtg

SEQ ID NO: 2165056 - DNA, 25 bp, Homo sapien
ttgctcaatggctgtctgtgagccc

SEQ ID NO: 2165057 - DNA, 25 bp, Homo sapien
gccctccagcatatcaactggcttt

SEQ ID NO: 2165058 - DNA, 25 bp, Homo sapien
tcaactggctttgcaagcacccggc

SEQ ID NO: 2165059 - DNA, 25 bp, Homo sapien
ctggctttgcaagcacccggcccag

SEQ ID NO: 2165060 - DNA, 25 bp, Homo sapien
cctccagcatatcaactggctttgc

SEQ ID NO: 2165061 - DNA, 25 bp, Homo sapien
ctcagaagaggagcaacagatgtcc

SEQ ID NO: 2165062 - DNA, 25 bp, Homo sapien
cagagaagatgagaagcaagctaca

SEQ ID NO: 2165063 - DNA, 25 bp, Homo sapien
tggcaactgcagaaatgaccgagac

SEQ ID NO: 2165064 - DNA, 25 bp, Homo sapien
gaattgctggtgacccttttgggac

SEQ ID NO: 2165065 - DNA, 25 bp, Homo sapien
ctgttttttgagcatggtctggcct

SEQ ID NO: 2165066 - DNA, 25 bp, Homo sapien
cagccctgtgctttttcaggctatg

SEQ ID NO: 2165067 - DNA, 25 bp, Homo sapien
gacatggggtctgctcactggcttg

SEQ ID NO: 2165068 - DNA, 25 bp, Homo sapien
ctatgctctggctaccgaggcaggg

SEQ ID NO: 2165069 - DNA, 25 bp, Homo sapien
gactgcttgaccctgcataaactca

SEQ ID NO: 2165070 - DNA, 25 bp, Homo sapien
tggtggctgctgtttgcgactgact

SEQ ID NO: 2165071 - DNA, 25 bp, Homo sapien
tttgcgactgactgcttgaccctgc

SEQ ID NO: 2165072 - DNA, 25 bp, Homo sapien
gatgcactgctgatctggtggctgc

SEQ ID NO: 2165073 - DNA, 25 bp, Homo sapien
gaaaggatgaggacttctctagcaa

SEQ ID NO: 2165074 - DNA, 25 bp, Homo sapien
gcattgccgatctttggtgctgggc

SEQ ID NO: 2165075 - DNA, 25 bp, Homo sapien
ggtgctgggccctttgcaaagaggg

SEQ ID NO: 2165076 - DNA, 25 bp, Homo sapien
tctctagcaattcccgaaatgattt

SEQ ID NO: 2165077 - DNA, 25 bp, Homo sapien
gcatgatacccccacagggaaacca

SEQ ID NO: 2165078 - DNA, 25 bp, Homo sapien
tcatctttgccttcgcatgataccc

SEQ ID NO: 2165079 - DNA, 25 bp, Homo sapien
catggatggccacgtcatctttgcc

SEQ ID NO: 2165080 - DNA, 25 bp, Homo sapien
agggagccatgtgcttccatctcac

SEQ ID NO: 2165081 - DNA, 25 bp, Homo sapien
cagcaagtgtggcaaagtgaatttc

SEQ ID NO: 2165082 - DNA, 25 bp, Homo sapien
gcagcaagtgtggcaaagtgaattt

SEQ ID NO: 2165083 - DNA, 25 bp, Homo sapien
caagtgtggcaaagtgaatttcttc

SEQ ID NO: 2165084 - DNA, 25 bp, Homo sapien
gcaagtgtggcaaagtgaatttctt

SEQ ID NO: 2165085 - DNA, 25 bp, Homo sapien
taaagctgacgtgttggcctccagc

SEQ ID NO: 2165086 - DNA, 25 bp, Homo sapien
aataaagctgacgtgttggcctcca

SEQ ID NO: 2165087 - DNA, 25 bp, Homo sapien
ataaagctgacgtgttggcctccag

SEQ ID NO: 2165088 - DNA, 25 bp, Homo sapien
aaagctgacgtgttggcctccagct

SEQ ID NO: 2165089 - DNA, 25 bp, Homo sapien
cggagtcaccctgcatcagctcttg

SEQ ID NO: 2165090 - DNA, 25 bp, Homo sapien
cggcttaaggctcgaggcgtgccag

SEQ ID NO: 2165091 - DNA, 25 bp, Homo sapien
cttaaggctcgaggcgtgccagggc

SEQ ID NO: 2165092 - DNA, 25 bp, Homo sapien
cccggagtcaccctgcatcagctct

SEQ ID NO: 2165093 - DNA, 25 bp, Homo sapien
ttctctttagagagtggccccacaa

SEQ ID NO: 2165094 - DNA, 25 bp, Homo sapien
ggccccacaagaggagcagctgaga

SEQ ID NO: 2165095 - DNA, 25 bp, Homo sapien
tgcaaatggcagagccctccagctt

SEQ ID NO: 2165096 - DNA, 25 bp, Homo sapien
agagagtggccccacaagaggagca

SEQ ID NO: 2165097 - DNA, 25 bp, Homo sapien
tgctggagacgtgatgcccagagct

SEQ ID NO: 2165098 - DNA, 25 bp, Homo sapien
cagaataaggcaaaatcgatgcctt

SEQ ID NO: 2165099 - DNA, 25 bp, Homo sapien
gaattacggtattgggcagttgcca

SEQ ID NO: 2165100 - DNA, 25 bp, Homo sapien
gaagagagtgtgtgccttacaagga

SEQ ID NO: 2165101 - DNA, 25 bp, Homo sapien
ttccaaaatgccataggtaatgcta

SEQ ID NO: 2165102 - DNA, 25 bp, Homo sapien
aatgccataggtaatgctaccaaag

SEQ ID NO: 2165103 - DNA, 25 bp, Homo sapien
atgccataggtaatgctaccaaagc

SEQ ID NO: 2165104 - DNA, 25 bp, Homo sapien
caaaatgccataggtaatgctacca

SEQ ID NO: 2165105 - DNA, 25 bp, Homo sapien
agggcagttgtgaaggaatccgcct

SEQ ID NO: 2165106 - DNA, 25 bp, Homo sapien
gggtacacagttcgtcagggcagtt

SEQ ID NO: 2165107 - DNA, 25 bp, Homo sapien
gcccaaccgcgaggcacatgcaggg

SEQ ID NO: 2165108 - DNA, 25 bp, Homo sapien
cttgtctgggtccagtcccgtctgc

SEQ ID NO: 2165109 - DNA, 25 bp, Homo sapien
ctccgcagttatcccaagacggaca

SEQ ID NO: 2165110 - DNA, 25 bp, Homo sapien
agacggacacctgcggcttctgcag

SEQ ID NO: 2165111 - DNA, 25 bp, Homo sapien
agtctcccgttccactggaccaggg

SEQ ID NO: 2165112 - DNA, 25 bp, Homo sapien
ccagtacgcttagctcagagtccag

SEQ ID NO: 2165113 - DNA, 25 bp, Homo sapien
aaagacaggagaccgtacgagacac

SEQ ID NO: 2165114 - DNA, 25 bp, Homo sapien
cgctcaggaccgagagaccaagaaa

SEQ ID NO: 2165115 - DNA, 25 bp, Homo sapien
cgaaggtagactttccgcgtctggg

SEQ ID NO: 2165116 - DNA, 25 bp, Homo sapien
caaaagccagcggtcatcagtgaca

SEQ ID NO: 2165117 - DNA, 25 bp, Homo sapien
gtcagctggcttgcctaggcggtgc

SEQ ID NO: 2165118 - DNA, 25 bp, Homo sapien
ttggctgctccgcactcagtggagg

SEQ ID NO: 2165119 - DNA, 25 bp, Homo sapien
ccccggcgtcagctggcttgcctag

SEQ ID NO: 2165120 - DNA, 25 bp, Homo sapien
cttggctgctccgcactcagtggag

SEQ ID NO: 2165121 - DNA, 25 bp, Homo sapien
atttctccagtcggctcgaaccagg

SEQ ID NO: 2165122 - DNA, 25 bp, Homo sapien
cagtcggctcgaaccagggcagctg

SEQ ID NO: 2165123 - DNA, 25 bp, Homo sapien
gcggaaggggcatcggtgcactcac

SEQ ID NO: 2165124 - DNA, 25 bp, Homo sapien
ttctccagtcggctcgaaccagggc

SEQ ID NO: 2165125 - DNA, 25 bp, Homo sapien
cgtgctgcagagctccggcggcggc

SEQ ID NO: 2165126 - DNA, 25 bp, Homo sapien
ggcgcgggcagcctggactcaggcg

SEQ ID NO: 2165127 - DNA, 25 bp, Homo sapien
gccggcgcgggcagcctggactcag

SEQ ID NO: 2165128 - DNA, 25 bp, Homo sapien
cgcgggcagcctggactcaggcggc

SEQ ID NO: 2165129 - DNA, 25 bp, Homo sapien
catgtgaaggcaccgtcgccggtga

SEQ ID NO: 2165130 - DNA, 25 bp, Homo sapien
gagtgcagggcagcggattcggcgc

SEQ ID NO: 2165131 - DNA, 25 bp, Homo sapien
ctcagaggcggcaaacagcgttggg

SEQ ID NO: 2165132 - DNA, 25 bp, Homo sapien
ctgaagcgcggactctgacgcaggg

SEQ ID NO: 2165133 - DNA, 25 bp, Homo sapien
aaacagctggtctgtccggcaggtt

SEQ ID NO: 2165134 - DNA, 25 bp, Homo sapien
gggaagaagctgattagctgctctg

SEQ ID NO: 2165135 - DNA, 25 bp, Homo sapien
tggtctgtccggcaggttcaaggcc

SEQ ID NO: 2165136 - DNA, 25 bp, Homo sapien
aagctgattagctgctctggctggc

SEQ ID NO: 2165137 - DNA, 25 bp, Homo sapien
gggcccagggtaagctgaacttcca

SEQ ID NO: 2165138 - DNA, 25 bp, Homo sapien
ctattttgccagagtggtgttagtg

SEQ ID NO: 2165139 - DNA, 25 bp, Homo sapien
gcaataaggctttgtcagtcagcgc

SEQ ID NO: 2165140 - DNA, 25 bp, Homo sapien
ttccactccacctatcagcaataag

SEQ ID NO: 2165141 - DNA, 25 bp, Homo sapien
tgggaaccatttccgaaatgcgcag

SEQ ID NO: 2165142 - DNA, 25 bp, Homo sapien
catttccgaaatgcgcagcaatttt

SEQ ID NO: 2165143 - DNA, 25 bp, Homo sapien
cgaaatgcgcagcaattttcccact

SEQ ID NO: 2165144 - DNA, 25 bp, Homo sapien
agtgtctgggaaccatttccgaaat

SEQ ID NO: 2165145 - DNA, 25 bp, Homo sapien
aggaagtgattgtgagagaactgcc

SEQ ID NO: 2165146 - DNA, 25 bp, Homo sapien
ccagggcaaacgacatgctagggtg

SEQ ID NO: 2165147 - DNA, 25 bp, Homo sapien
ataggagaatgatctttaatgtaca

SEQ ID NO: 2165148 - DNA, 25 bp, Homo sapien
agaactgcctggtcatcgatggcca

SEQ ID NO: 2165149 - DNA, 25 bp, Homo sapien
tttggaaatgcaatgatggaagctc

SEQ ID NO: 2165150 - DNA, 25 bp, Homo sapien
gaaatgcaatgatggaagctcagcc

SEQ ID NO: 2165151 - DNA, 25 bp, Homo sapien
attcataagcctggacattgatgag

SEQ ID NO: 2165152 - DNA, 25 bp, Homo sapien
atgagtttgctacggaggtgcagct

SEQ ID NO: 2165153 - DNA, 25 bp, Homo sapien
ccttcccttctgtgtaagtgtcata

SEQ ID NO: 2165154 - DNA, 25 bp, Homo sapien
atccttcccttctgtgtaagtgtca

SEQ ID NO: 2165155 - DNA, 25 bp, Homo sapien
cttctgtgtaagtgtcatatggtcg

SEQ ID NO: 2165156 - DNA, 25 bp, Homo sapien
tcccttctgtgtaagtgtcatatgg

SEQ ID NO: 2165157 - DNA, 25 bp, Homo sapien
aaccacctggaaaagctctagctga

SEQ ID NO: 2165158 - DNA, 25 bp, Homo sapien
ccagttcagcctttggtatgcacaa

SEQ ID NO: 2165159 - DNA, 25 bp, Homo sapien
tcctctgggataggaaccacagccc

SEQ ID NO: 2165160 - DNA, 25 bp, Homo sapien
caagctgggacatcaggtttagcag

SEQ ID NO: 2165161 - DNA, 25 bp, Homo sapien
accccattcaattgaataaggctgc

SEQ ID NO: 2165162 - DNA, 25 bp, Homo sapien
taagaccccattcaattgaataagg

SEQ ID NO: 2165163 - DNA, 25 bp, Homo sapien
cccttgttaagaccccattcaattg

SEQ ID NO: 2165164 - DNA, 25 bp, Homo sapien
tgttaagaccccattcaattgaata

SEQ ID NO: 2165165 - DNA, 25 bp, Homo sapien
gggtagtcagcatcattgtgctcca

SEQ ID NO: 2165166 - DNA, 25 bp, Homo sapien
tgggtagtcagcatcattgtgctcc

SEQ ID NO: 2165167 - DNA, 25 bp, Homo sapien
cattgtgctccatgcgccagttcat

SEQ ID NO: 2165168 - DNA, 25 bp, Homo sapien
gtagtcagcatcattgtgctccatg

SEQ ID NO: 2165169 - DNA, 25 bp, Homo sapien
gctagatctaccttgctgccacctg

SEQ ID NO: 2165170 - DNA, 25 bp, Homo sapien
tatctacgacctcttgcttatctgg

SEQ ID NO: 2165171 - DNA, 25 bp, Homo sapien
tgactctaggcatgacaggaagtaa

SEQ ID NO: 2165172 - DNA, 25 bp, Homo sapien
tgggacctttagctcccagaccatg

SEQ ID NO: 2165173 - DNA, 25 bp, Homo sapien
gcatgctcttgattacaagccgact

SEQ ID NO: 2165174 - DNA, 25 bp, Homo sapien
aatttattcttgactctccaaggcg

SEQ ID NO: 2165175 - DNA, 25 bp, Homo sapien
cgatttcccaccatggcgaaatggg

SEQ ID NO: 2165176 - DNA, 25 bp, Homo sapien
tcatccattgtttgacctgcaaatt

SEQ ID NO: 2165177 - DNA, 25 bp, Homo sapien
cctccatccacgagggcttctttcc

SEQ ID NO: 2165178 - DNA, 25 bp, Homo sapien
tcttcctccatccacgagggcttct

SEQ ID NO: 2165179 - DNA, 25 bp, Homo sapien
ttcttcctccatccacgagggcttc

SEQ ID NO: 2165180 - DNA, 25 bp, Homo sapien
ttcctccatccacgagggcttcttt

SEQ ID NO: 2165181 - DNA, 25 bp, Homo sapien
aggccatgcagctccatgttttgga

SEQ ID NO: 2165182 - DNA, 25 bp, Homo sapien
gatttcatggaatgagctttcaaca

SEQ ID NO: 2165183 - DNA, 25 bp, Homo sapien
catgcagctccatgttttggatttc

SEQ ID NO: 2165184 - DNA, 25 bp, Homo sapien
tcaacagtgagcctgaagtgccctg

SEQ ID NO: 2165185 - DNA, 25 bp, Homo sapien
tgctgttttggcagagtggcaagct

SEQ ID NO: 2165186 - DNA, 25 bp, Homo sapien
agctgcaagcctcttctgagctttc

SEQ ID NO: 2165187 - DNA, 25 bp, Homo sapien
gtttggggtgccgatagaggctgct

SEQ ID NO: 2165188 - DNA, 25 bp, Homo sapien
cagagtggcaagctgcaagcctctt

SEQ ID NO: 2165189 - DNA, 25 bp, Homo sapien
ggaagtggtcttcttcttgtctcct

SEQ ID NO: 2165190 - DNA, 25 bp, Homo sapien
gaagtggtcttcttcttgtctcctc

SEQ ID NO: 2165191 - DNA, 25 bp, Homo sapien
aaactggaagtggtcttcttcttgt

SEQ ID NO: 2165192 - DNA, 25 bp, Homo sapien
tggaaactggaagtggtcttcttct

SEQ ID NO: 2165193 - DNA, 25 bp, Homo sapien
ttgaagctcctggtctacagccggc

SEQ ID NO: 2165194 - DNA, 25 bp, Homo sapien
tctcatagtaaggaacagtgggccc

SEQ ID NO: 2165195 - DNA, 25 bp, Homo sapien
cagtactaggatgagcacctgggcc

SEQ ID NO: 2165196 - DNA, 25 bp, Homo sapien
gaattttggtgagctcctctagcag

SEQ ID NO: 2165197 - DNA, 25 bp, Homo sapien
ttcagctggtgggcgtgatgccact

SEQ ID NO: 2165198 - DNA, 25 bp, Homo sapien
gggcagagcgacagggagcatggcc

SEQ ID NO: 2165199 - DNA, 25 bp, Homo sapien
gccattgaagaactcggtgacacta

SEQ ID NO: 2165200 - DNA, 25 bp, Homo sapien
ttgctggctgccaacgccttcagct

SEQ ID NO: 2165201 - DNA, 25 bp, Homo sapien
gggcccttgctgctttgtagcagac

SEQ ID NO: 2165202 - DNA, 25 bp, Homo sapien
tgatggcactgggcggtaaggtgga

SEQ ID NO: 2165203 - DNA, 25 bp, Homo sapien
ggcactgggcggtaaggtggagaga

SEQ ID NO: 2165204 - DNA, 25 bp, Homo sapien
tggcactgggcggtaaggtggagag

SEQ ID NO: 2165205 - DNA, 25 bp, Homo sapien
ggtgatggcactgggcggtaaggtg

SEQ ID NO: 2165206 - DNA, 25 bp, Homo sapien
catgcaggacaccatgaggctctgg

SEQ ID NO: 2165207 - DNA, 25 bp, Homo sapien
caaggtattggacgacatgcaggac

SEQ ID NO: 2165208 - DNA, 25 bp, Homo sapien
ggtattggacgacatgcaggacacc

SEQ ID NO: 2165209 - DNA, 25 bp, Homo sapien
ctacccgacaaggtattggacgaca

SEQ ID NO: 2165210 - DNA, 25 bp, Homo sapien
tgaggcttcggatcagggaacactg

SEQ ID NO: 2165211 - DNA, 25 bp, Homo sapien
tggacgtcatgcttgacagtaaggc

SEQ ID NO: 2165212 - DNA, 25 bp, Homo sapien
aatggagctctgagggccgaactgc

SEQ ID NO: 2165213 - DNA, 25 bp, Homo sapien
catgaggttggcaagaatggagctc

SEQ ID NO: 2165214 - DNA, 25 bp, Homo sapien
gctgcttatgggcttaaagatcaca

SEQ ID NO: 2165215 - DNA, 25 bp, Homo sapien
gacccggctcagaaacaaaatggga

SEQ ID NO: 2165216 - DNA, 25 bp, Homo sapien
aaaagtaaatggctccgtggctcct

SEQ ID NO: 2165217 - DNA, 25 bp, Homo sapien
gcatgatcatgctcagggttttgga

SEQ ID NO: 2165218 - DNA, 25 bp, Homo sapien
aaggaatgaagaatggtcaggctgc

SEQ ID NO: 2165219 - DNA, 25 bp, Homo sapien
ctgcagaaggaatgaagaatggtca

SEQ ID NO: 2165220 - DNA, 25 bp, Homo sapien
cagaaggaatgaagaatggtcaggc

SEQ ID NO: 2165221 - DNA, 25 bp, Homo sapien
aggaatgaagaatggtcaggctgct

SEQ ID NO: 2165222 - DNA, 25 bp, Homo sapien
gccactgatcgctgaaaacgctggg

SEQ ID NO: 2165223 - DNA, 25 bp, Homo sapien
aacgctggggttgctgcatcatctg

SEQ ID NO: 2165224 - DNA, 25 bp, Homo sapien
tgaggccactgatcgctgaaaacgc

SEQ ID NO: 2165225 - DNA, 25 bp, Homo sapien
ggaatctgaggccactgatcgctga

SEQ ID NO: 2165226 - DNA, 25 bp, Homo sapien
cagctgcatttcatgattgaaaagc

SEQ ID NO: 2165227 - DNA, 25 bp, Homo sapien
tcagctgcatttcatgattgaaaag

SEQ ID NO: 2165228 - DNA, 25 bp, Homo sapien
acggtgacacgtctccaggctgagg

SEQ ID NO: 2165229 - DNA, 25 bp, Homo sapien
gaaagagttcccgtgttgatgctgg

SEQ ID NO: 2165230 - DNA, 25 bp, Homo sapien
gaggatcttgcctgctagtgaaaga

SEQ ID NO: 2165231 - DNA, 25 bp, Homo sapien
aatgttagacggtgacacgtctcca

SEQ ID NO: 2165232 - DNA, 25 bp, Homo sapien
tgagatccccagtctgcaaagcagg

SEQ ID NO: 2165233 - DNA, 25 bp, Homo sapien
taacgtggcttgtgtctgtcctgcc

SEQ ID NO: 2165234 - DNA, 25 bp, Homo sapien
ctctcaggagaatggtaacagcccc

SEQ ID NO: 2165235 - DNA, 25 bp, Homo sapien
tttattgtgctcctagccccaggga

SEQ ID NO: 2165236 - DNA, 25 bp, Homo sapien
ctggatggaagggtcacgtctttga

SEQ ID NO: 2165237 - DNA, 25 bp, Homo sapien
taccgtgagtttcatctgctctaga

SEQ ID NO: 2165238 - DNA, 25 bp, Homo sapien
tgttagggccacagctgaatggagc

SEQ ID NO: 2165239 - DNA, 25 bp, Homo sapien
tttgattccccttggcgctctgcac

SEQ ID NO: 2165240 - DNA, 25 bp, Homo sapien
tcttcatgggccaccccgacatggg

SEQ ID NO: 2165241 - DNA, 25 bp, Homo sapien
aattgcaaatgagtagtccaccttc

SEQ ID NO: 2165242 - DNA, 25 bp, Homo sapien
gggcctcccacatcgttcaaagctt

SEQ ID NO: 2165243 - DNA, 25 bp, Homo sapien
cccagttattcccactcagggatgg

SEQ ID NO: 2165244 - DNA, 25 bp, Homo sapien
gaatcactggatcatacggtatttc

SEQ ID NO: 2165245 - DNA, 25 bp, Homo sapien
ctatagtggagtgcattgtctgttc

SEQ ID NO: 2165246 - DNA, 25 bp, Homo sapien
catcccaatgggtgtcaacattttg

SEQ ID NO: 2165247 - DNA, 25 bp, Homo sapien
tgaaactgcaggcaacgccaccatg

SEQ ID NO: 2165248 - DNA, 25 bp, Homo sapien
cactgaaggcagagtagacagccag

SEQ ID NO: 2165249 - DNA, 25 bp, Homo sapien
ggctagtaggcgttggatccattca

SEQ ID NO: 2165250 - DNA, 25 bp, Homo sapien
catttaggcagcttcgtttggccca

SEQ ID NO: 2165251 - DNA, 25 bp, Homo sapien
gacacatcacctagggtttccggat

SEQ ID NO: 2165252 - DNA, 25 bp, Homo sapien
ttggtgcctcgctctccagactgca

SEQ ID NO: 2165253 - DNA, 25 bp, Homo sapien
agggctgtgccctgcaaatggcctg

SEQ ID NO: 2165254 - DNA, 25 bp, Homo sapien
tgcagccttggtgcctcgctctcca

SEQ ID NO: 2165255 - DNA, 25 bp, Homo sapien
ctccactttagcctccagggctgtg

SEQ ID NO: 2165256 - DNA, 25 bp, Homo sapien
caattttcagtccagggcaccttgt

SEQ ID NO: 2165257 - DNA, 25 bp, Homo sapien
tcaattttcagtccagggcaccttg

SEQ ID NO: 2165258 - DNA, 25 bp, Homo sapien
ggcaccttgttgtgactatcccaaa

SEQ ID NO: 2165259 - DNA, 25 bp, Homo sapien
cttgttgtgactatcccaaaggcag

SEQ ID NO: 2165260 - DNA, 25 bp, Homo sapien
agggagccatccaactaaccgtcat

SEQ ID NO: 2165261 - DNA, 25 bp, Homo sapien
tccctgatggcaccttgggcttcca

SEQ ID NO: 2165262 - DNA, 25 bp, Homo sapien
tatctccctgatggcaccttgggct

SEQ ID NO: 2165263 - DNA, 25 bp, Homo sapien
ctcagtatctccctgatggcacctt

SEQ ID NO: 2165264 - DNA, 25 bp, Homo sapien
cagtgaccaaggctgtgcctgttgt

SEQ ID NO: 2165265 - DNA, 25 bp, Homo sapien
ccaaggctgtgcctgttgtcagcaa

SEQ ID NO: 2165266 - DNA, 25 bp, Homo sapien
tgaccaaggctgtgcctgttgtcag

SEQ ID NO: 2165267 - DNA, 25 bp, Homo sapien
ttcacagtgaccaaggctgtgcctg

SEQ ID NO: 2165268 - DNA, 25 bp, Homo sapien
attcctgtggatatcccatagtgct

SEQ ID NO: 2165269 - DNA, 25 bp, Homo sapien
gcttggcatagagtgaatctgcagt

SEQ ID NO: 2165270 - DNA, 25 bp, Homo sapien
tggcatagagtgaatctgcagtata

SEQ ID NO: 2165271 - DNA, 25 bp, Homo sapien
gatatcccatagtgcttggcataga

SEQ ID NO: 2165272 - DNA, 25 bp, Homo sapien
ggctacagcagtggacagcacagct

SEQ ID NO: 2165273 - DNA, 25 bp, Homo sapien
ccaggaaggttagcagcagcattaa

SEQ ID NO: 2165274 - DNA, 25 bp, Homo sapien
catgttgtatgcactccaggaaggt

SEQ ID NO: 2165275 - DNA, 25 bp, Homo sapien
aattagcacgtatgcagtgcctggc

SEQ ID NO: 2165276 - DNA, 25 bp, Homo sapien
ttcatacttgatatccatgtcagca

SEQ ID NO: 2165277 - DNA, 25 bp, Homo sapien
tcagccaaaggcaattaaaataact

SEQ ID NO: 2165278 - DNA, 25 bp, Homo sapien
taacttcatacttgatatccatgtc

SEQ ID NO: 2165279 - DNA, 25 bp, Homo sapien
tacttgatatccatgtcagcaaaag

SEQ ID NO: 2165280 - DNA, 25 bp, Homo sapien
tctgaggtgctgtacgaggaggtga

SEQ ID NO: 2165281 - DNA, 25 bp, Homo sapien
ctaggcagtagtggagcgggcacct

SEQ ID NO: 2165282 - DNA, 25 bp, Homo sapien
gaggaggtgactcgggccagctcat

SEQ ID NO: 2165283 - DNA, 25 bp, Homo sapien
gcaggacgggggctgtcgcccgagg

SEQ ID NO: 2165284 - DNA, 25 bp, Homo sapien
tgggaggccctttcagcttaatgac

SEQ ID NO: 2165285 - DNA, 25 bp, Homo sapien
aagccgaatttccattaaaggccag

SEQ ID NO: 2165286 - DNA, 25 bp, Homo sapien
attaaaggccagaatcctgggaggc

SEQ ID NO: 2165287 - DNA, 25 bp, Homo sapien
atttccattaaaggccagaatcctg

SEQ ID NO: 2165288 - DNA, 25 bp, Homo sapien
aggtttgaactggtctgaagctgtc

SEQ ID NO: 2165289 - DNA, 25 bp, Homo sapien
gccctcaggtttgaactggtctgaa

SEQ ID NO: 2165290 - DNA, 25 bp, Homo sapien
ctgccctcaggtttgaactggtctg

SEQ ID NO: 2165291 - DNA, 25 bp, Homo sapien
cctcaggtttgaactggtctgaagc

SEQ ID NO: 2165292 - DNA, 25 bp, Homo sapien
ttaagcaggcaaaaggactccaacg

SEQ ID NO: 2165293 - DNA, 25 bp, Homo sapien
ccctatgagcccttggaggagagca

SEQ ID NO: 2165294 - DNA, 25 bp, Homo sapien
aaaggcagaggacaaacgattcggg

SEQ ID NO: 2165295 - DNA, 25 bp, Homo sapien
gattatctacccctccatgctaggg

SEQ ID NO: 2165296 - DNA, 25 bp, Homo sapien
ccggagtctaatggaaaagctggcc

SEQ ID NO: 2165297 - DNA, 25 bp, Homo sapien
tcaatgtgctccaaagataagcccc

SEQ ID NO: 2165298 - DNA, 25 bp, Homo sapien
ttttctagggctgcaactgtggcac

SEQ ID NO: 2165299 - DNA, 25 bp, Homo sapien
catcagggcagaagatctacagtcc

SEQ ID NO: 2165300 - DNA, 25 bp, Homo sapien
catccggatctgcctgagatggtca

SEQ ID NO: 2165301 - DNA, 25 bp, Homo sapien
cctgagatggtcagggttggcagcc

SEQ ID NO: 2165302 - DNA, 25 bp, Homo sapien
tccggatctgcctgagatggtcagg

SEQ ID NO: 2165303 - DNA, 25 bp, Homo sapien
tgcctgagatggtcagggttggcag

SEQ ID NO: 2165304 - DNA, 25 bp, Homo sapien
ggacttgcctctacaacacgggctg

SEQ ID NO: 2165305 - DNA, 25 bp, Homo sapien
gactacaccagaagcgattccacca

SEQ ID NO: 2165306 - DNA, 25 bp, Homo sapien
gacccagtgcttgggactgtgccca

SEQ ID NO: 2165307 - DNA, 25 bp, Homo sapien
tgtcatctagcaacaccccatgtgg

SEQ ID NO: 2165308 - DNA, 25 bp, Homo sapien
ccacacagtgaggggagcccggcca

SEQ ID NO: 2165309 - DNA, 25 bp, Homo sapien
cacacagtgaggggagcccggccat

SEQ ID NO: 2165310 - DNA, 25 bp, Homo sapien
cccacacagtgaggggagcccggcc

SEQ ID NO: 2165311 - DNA, 25 bp, Homo sapien
tagtggtggatacctagcctctgca

SEQ ID NO: 2165312 - DNA, 25 bp, Homo sapien
actcagtctgggatcggctcaagga

SEQ ID NO: 2165313 - DNA, 25 bp, Homo sapien
caaggccgcagtttcagcactcagt

SEQ ID NO: 2165314 - DNA, 25 bp, Homo sapien
taattagccttaggatcgctgcgtg

SEQ ID NO: 2165315 - DNA, 25 bp, Homo sapien
cataagacctgatctctgttcctct

SEQ ID NO: 2165316 - DNA, 25 bp, Homo sapien
gccataagacctgatctctgttcct

SEQ ID NO: 2165317 - DNA, 25 bp, Homo sapien
taagacctgatctctgttcctcttg

SEQ ID NO: 2165318 - DNA, 25 bp, Homo sapien
tgccataagacctgatctctgttcc

SEQ ID NO: 2165319 - DNA, 25 bp, Homo sapien
gactcatctgttgggagatatatgc

SEQ ID NO: 2165320 - DNA, 25 bp, Homo sapien
catctgttgggagatatatgcattc

SEQ ID NO: 2165321 - DNA, 25 bp, Homo sapien
ttgggagatatatgcattctgccgt

SEQ ID NO: 2165322 - DNA, 25 bp, Homo sapien
tgttgggagatatatgcattctgcc

SEQ ID NO: 2165323 - DNA, 25 bp, Homo sapien
gaacgcagtgggcattcttggcaca

SEQ ID NO: 2165324 - DNA, 25 bp, Homo sapien
tcttggcacactaggccgtctgagc

SEQ ID NO: 2165325 - DNA, 25 bp, Homo sapien
acttgtgttcccatcgcagcgggca

SEQ ID NO: 2165326 - DNA, 25 bp, Homo sapien
gagtgctgctgaacgctattatcca

SEQ ID NO: 2165327 - DNA, 25 bp, Homo sapien
gctcaggggactaaagctggccata

SEQ ID NO: 2165328 - DNA, 25 bp, Homo sapien
cacatagcttggtggctcgatgccc

SEQ ID NO: 2165329 - DNA, 25 bp, Homo sapien
gaactggctggcagcaacggcagaa

SEQ ID NO: 2165330 - DNA, 25 bp, Homo sapien
ctcgatgccctgtatggggctcagg

SEQ ID NO: 2165331 - DNA, 25 bp, Homo sapien
cgcaaaaagtcggcaggtggcagct

SEQ ID NO: 2165332 - DNA, 25 bp, Homo sapien
gcagtcaggtgacgaaatcagatca

SEQ ID NO: 2165333 - DNA, 25 bp, Homo sapien
gggaatatccgttctgtcgaacgga

SEQ ID NO: 2165334 - DNA, 25 bp, Homo sapien
gcagctcagggggaatatccgttct

SEQ ID NO: 2165335 - DNA, 25 bp, Homo sapien
gacaactgcgggtatggatcgacac

SEQ ID NO: 2165336 - DNA, 25 bp, Homo sapien
tcactggagcaaacaacacggtctg

SEQ ID NO: 2165337 - DNA, 25 bp, Homo sapien
tcattaggaaagagctagcggagac

SEQ ID NO: 2165338 - DNA, 25 bp, Homo sapien
taaagggaggaggatactctagctc

SEQ ID NO: 2165339 - DNA, 25 bp, Homo sapien
ccagatcttctaatgggaaagcctc

SEQ ID NO: 2165340 - DNA, 25 bp, Homo sapien
tcttctaatgggaaagcctccacct

SEQ ID NO: 2165341 - DNA, 25 bp, Homo sapien
gctcccagatcttctaatgggaaag

SEQ ID NO: 2165342 - DNA, 25 bp, Homo sapien
ttctaatgggaaagcctccacctgt

SEQ ID NO: 2165343 - DNA, 25 bp, Homo sapien
caaggccctgcatgcgctctctttt

SEQ ID NO: 2165344 - DNA, 25 bp, Homo sapien
aaagcccaccctcgcgttgtgctgg

SEQ ID NO: 2165345 - DNA, 25 bp, Homo sapien
tgctgacaagccataagctccaaag

SEQ ID NO: 2165346 - DNA, 25 bp, Homo sapien
tctgagaaccgcgtctgccctgttc

SEQ ID NO: 2165347 - DNA, 25 bp, Homo sapien
taaagcggagaagactcgcaccaga

SEQ ID NO: 2165348 - DNA, 25 bp, Homo sapien
ctggacggcggcgatttgcaagacc

SEQ ID NO: 2165349 - DNA, 25 bp, Homo sapien
tctgagtccgagtcgtaaagcggag

SEQ ID NO: 2165350 - DNA, 25 bp, Homo sapien
tcacttagaagggaagcgtgcagtg

SEQ ID NO: 2165351 - DNA, 25 bp, Homo sapien
ttttcattcattgccaggacctgcc

SEQ ID NO: 2165352 - DNA, 25 bp, Homo sapien
tttgcagagggtgagcttcagccac

SEQ ID NO: 2165353 - DNA, 25 bp, Homo sapien
tcaacccgaggttgctggactccag

SEQ ID NO: 2165354 - DNA, 25 bp, Homo sapien
gattatgatgcccacttcagagagg

SEQ ID NO: 2165355 - DNA, 25 bp, Homo sapien
tgccaggtgctagatggaagtttga

SEQ ID NO: 2165356 - DNA, 25 bp, Homo sapien
ctcacagagctcaatgttaagttgg

SEQ ID NO: 2165357 - DNA, 25 bp, Homo sapien
tccttgaggaggccccgctggtcag

SEQ ID NO: 2165358 - DNA, 25 bp, Homo sapien
cctgggcagacgagactgctattgc

SEQ ID NO: 2165359 - DNA, 25 bp, Homo sapien
ctccccgtgccggttggcgggactg

SEQ ID NO: 2165360 - DNA, 25 bp, Homo sapien
ggcgccaccgccgttgccaggctgc

SEQ ID NO: 2165361 - DNA, 25 bp, Homo sapien
ccgccgttgccaggctgctcggctg

SEQ ID NO: 2165362 - DNA, 25 bp, Homo sapien
cccgtgccggttggcgggactgcat

SEQ ID NO: 2165363 - DNA, 25 bp, Homo sapien
tcaccacgggtccccgcagtgcccg

SEQ ID NO: 2165364 - DNA, 25 bp, Homo sapien
gcagtgcccggctccgagccaggcc

SEQ ID NO: 2165365 - DNA, 25 bp, Homo sapien
cgcagtgcccggctccgagccaggc

SEQ ID NO: 2165366 - DNA, 25 bp, Homo sapien
cagtgcccggctccgagccaggcca

SEQ ID NO: 2165367 - DNA, 25 bp, Homo sapien
cagacaccggcatgaaatcaacaac

SEQ ID NO: 2165368 - DNA, 25 bp, Homo sapien
gaaacccttgtgcaaggtagcctga

SEQ ID NO: 2165369 - DNA, 25 bp, Homo sapien
tcatttcagataagaggttcacagt

SEQ ID NO: 2165370 - DNA, 25 bp, Homo sapien
aatgaggctgggatgagcttaccat

SEQ ID NO: 2165371 - DNA, 25 bp, Homo sapien
gatcaagttcccgtgcatctgccaa

SEQ ID NO: 2165372 - DNA, 25 bp, Homo sapien
gaacccagctgatctgctcaatgaa

SEQ ID NO: 2165373 - DNA, 25 bp, Homo sapien
ggtcacttcaaatcttagggctaca

SEQ ID NO: 2165374 - DNA, 25 bp, Homo sapien
agaaaacacttgactcctagcccag

SEQ ID NO: 2165375 - DNA, 25 bp, Homo sapien
cttggcacaaaatctagtgggattt

SEQ ID NO: 2165376 - DNA, 25 bp, Homo sapien
gaaaggtgacgaagtcacagaaaaa

SEQ ID NO: 2165377 - DNA, 25 bp, Homo sapien
taagaaatagtcaagaaaggtgacg

SEQ ID NO: 2165378 - DNA, 25 bp, Homo sapien
actggctactgtccttaagaaatag

SEQ ID NO: 2165379 - DNA, 25 bp, Homo sapien
attatatttagaagttgatgcagaa

SEQ ID NO: 2165380 - DNA, 25 bp, Homo sapien
aattatatttagaagttgatgcaga

SEQ ID NO: 2165381 - DNA, 25 bp, Homo sapien
cagtgattagtgtttctcctggaag

SEQ ID NO: 2165382 - DNA, 25 bp, Homo sapien
ggaacagcctcagtgagatctcgat

SEQ ID NO: 2165383 - DNA, 25 bp, Homo sapien
ctcgattgactccatctcgagacgt

SEQ ID NO: 2165384 - DNA, 25 bp, Homo sapien
ttctcctggaagtcgaggaacagcc

SEQ ID NO: 2165385 - DNA, 25 bp, Homo sapien
cccagatctgaattaatcaaaaggt

SEQ ID NO: 2165386 - DNA, 25 bp, Homo sapien
tccctggaacaatggtcatcacatc

SEQ ID NO: 2165387 - DNA, 25 bp, Homo sapien
tgaattaatcaaaaggttccctgga

SEQ ID NO: 2165388 - DNA, 25 bp, Homo sapien
ttaagctaaacaacccagatctgaa

SEQ ID NO: 2165389 - DNA, 25 bp, Homo sapien
tgaaaggacatatgtaaataacttc

SEQ ID NO: 2165390 - DNA, 25 bp, Homo sapien
ccttaatggggccattgaaaggaca

SEQ ID NO: 2165391 - DNA, 25 bp, Homo sapien
tcttaaataaagacgataatttgtg

SEQ ID NO: 2165392 - DNA, 25 bp, Homo sapien
aaagacgataatttgtgatgtaaac

SEQ ID NO: 2165393 - DNA, 25 bp, Homo sapien
cacagggtgagtcaaaaagccaaga

SEQ ID NO: 2165394 - DNA, 25 bp, Homo sapien
agttagtagtcagtgtcagacaggc

SEQ ID NO: 2165395 - DNA, 25 bp, Homo sapien
taaggtggaactggctacacagggt

SEQ ID NO: 2165396 - DNA, 25 bp, Homo sapien
gatagcccaaatactgaaacctttg

SEQ ID NO: 2165397 - DNA, 25 bp, Homo sapien
gtgtgaaatgaccacgagtgagaaa

SEQ ID NO: 2165398 - DNA, 25 bp, Homo sapien
tgtgaaatgaccacgagtgagaaat

SEQ ID NO: 2165399 - DNA, 25 bp, Homo sapien
caagggttaggatctgctccactgg

SEQ ID NO: 2165400 - DNA, 25 bp, Homo sapien
tctgctccactggaagccttaaaag

SEQ ID NO: 2165401 - DNA, 25 bp, Homo sapien
gctccactggaagccttaaaagccc

SEQ ID NO: 2165402 - DNA, 25 bp, Homo sapien
aagggttaggatctgctccactgga

SEQ ID NO: 2165403 - DNA, 25 bp, Homo sapien
gcagtcctgaacctagagccaaatt

SEQ ID NO: 2165404 - DNA, 25 bp, Homo sapien
taattaagtggactggccttccctc

SEQ ID NO: 2165405 - DNA, 25 bp, Homo sapien
gaatctttgggtaatacactgcctg

SEQ ID NO: 2165406 - DNA, 25 bp, Homo sapien
tgaggaaacccgagtactgctgcac

SEQ ID NO: 2165407 - DNA, 25 bp, Homo sapien
ctggcgtcgtgcctgatgccagtag

SEQ ID NO: 2165408 - DNA, 25 bp, Homo sapien
gacaaaattgtagagagggaaccca

SEQ ID NO: 2165409 - DNA, 25 bp, Homo sapien
tcttttgtggtgacagaacagttcc

SEQ ID NO: 2165410 - DNA, 25 bp, Homo sapien
aaacgggcagcacgagcgagttctt

SEQ ID NO: 2165411 - DNA, 25 bp, Homo sapien
gggatagcgcgactctaaacgggca

SEQ ID NO: 2165412 - DNA, 25 bp, Homo sapien
tataaatgcagctcatgggttatct

SEQ ID NO: 2165413 - DNA, 25 bp, Homo sapien
aggctgcgagcatccataccatgga

SEQ ID NO: 2165414 - DNA, 25 bp, Homo sapien
gctcatgggttatctagaaattcaa

SEQ ID NO: 2165415 - DNA, 25 bp, Homo sapien
gaaattcaaaaagtgtaaggctgcg

SEQ ID NO: 2165416 - DNA, 25 bp, Homo sapien
caattctcgagatcacacccagagg

SEQ ID NO: 2165417 - DNA, 25 bp, Homo sapien
tcctctacttgtcgcgcctcccatt

SEQ ID NO: 2165418 - DNA, 25 bp, Homo sapien
caagtaatatctagaccataggaat

SEQ ID NO: 2165419 - DNA, 25 bp, Homo sapien
cacccagaggaacatcaagtattag

SEQ ID NO: 2165420 - DNA, 25 bp, Homo sapien
tcaatacatggttactatcacagca

SEQ ID NO: 2165421 - DNA, 25 bp, Homo sapien
aacagaaatctgatgtggcccacaa

SEQ ID NO: 2165422 - DNA, 25 bp, Homo sapien
ggttcatagtcacacgagacgcttg

SEQ ID NO: 2165423 - DNA, 25 bp, Homo sapien
ggacacatcccgttaacagagggca

SEQ ID NO: 2165424 - DNA, 25 bp, Homo sapien
tataagccacattaaagtagcccat

SEQ ID NO: 2165425 - DNA, 25 bp, Homo sapien
gagttccatataagccacattaaag

SEQ ID NO: 2165426 - DNA, 25 bp, Homo sapien
cttcacagagttccatataagccac

SEQ ID NO: 2165427 - DNA, 25 bp, Homo sapien
catataagccacattaaagtagccc

SEQ ID NO: 2165428 - DNA, 25 bp, Homo sapien
ttcaaagcgaacctcaggtttctca

SEQ ID NO: 2165429 - DNA, 25 bp, Homo sapien
caaagcgaacctcaggtttctcatg

SEQ ID NO: 2165430 - DNA, 25 bp, Homo sapien
tcaaagcgaacctcaggtttctcat

SEQ ID NO: 2165431 - DNA, 25 bp, Homo sapien
tgagccaggggaaacgcgtatctcg

SEQ ID NO: 2165432 - DNA, 25 bp, Homo sapien
tgtgagccaggggaaacgcgtatct

SEQ ID NO: 2165433 - DNA, 25 bp, Homo sapien
agccaggggaaacgcgtatctcgtg

SEQ ID NO: 2165434 - DNA, 25 bp, Homo sapien
gggaaacgcgtatctcgtgaggatc

SEQ ID NO: 2165435 - DNA, 25 bp, Homo sapien
ttagaagattcaagcaaggcacggc

SEQ ID NO: 2165436 - DNA, 25 bp, Homo sapien
gaaagccttatttcagtcatgcagt

SEQ ID NO: 2165437 - DNA, 25 bp, Homo sapien
aacacatgcctcttctacttaaggg

SEQ ID NO: 2165438 - DNA, 25 bp, Homo sapien
tatgagatcagcacatttgttccca

SEQ ID NO: 2165439 - DNA, 25 bp, Homo sapien
gaacacactggctttcactttcagg

SEQ ID NO: 2165440 - DNA, 25 bp, Homo sapien
tgcagacagcaagaggaacacactg

SEQ ID NO: 2165441 - DNA, 25 bp, Homo sapien
tttcaggccacttccagaactggtt

SEQ ID NO: 2165442 - DNA, 25 bp, Homo sapien
ctttcactttcaggccacttccaga

SEQ ID NO: 2165443 - DNA, 25 bp, Homo sapien
tagaaaggcctgcatacatggttgg

SEQ ID NO: 2165444 - DNA, 25 bp, Homo sapien
tcccaggtgggcaacatctcatatg

SEQ ID NO: 2165445 - DNA, 25 bp, Homo sapien
gaagaattaacatggcaggcctgag

SEQ ID NO: 2165446 - DNA, 25 bp, Homo sapien
ctgttatcgaatcaccacacgtggg

SEQ ID NO: 2165447 - DNA, 25 bp, Homo sapien
cttcatttaaaaatgcaaataatgg

SEQ ID NO: 2165448 - DNA, 25 bp, Homo sapien
tgtccatccatccacgttaaacttt

SEQ ID NO: 2165449 - DNA, 25 bp, Homo sapien
catcatctgaggcacgatacggaac

SEQ ID NO: 2165450 - DNA, 25 bp, Homo sapien
tcgggacctaaaagttgcaactctc

SEQ ID NO: 2165451 - DNA, 25 bp, Homo sapien
gcaactctccggaggtcatcatctg

SEQ ID NO: 2165452 - DNA, 25 bp, Homo sapien
gatacggaaccaccaaaagagcagg

SEQ ID NO: 2165453 - DNA, 25 bp, Homo sapien
tgttggccactgcatttacgctggg

SEQ ID NO: 2165454 - DNA, 25 bp, Homo sapien
tacgctgggtcttgcatcataaatg

SEQ ID NO: 2165455 - DNA, 25 bp, Homo sapien
cataccgacaagaggctgactgcaa

SEQ ID NO: 2165456 - DNA, 25 bp, Homo sapien
tgactgcaacgcacaatgaccgtct

SEQ ID NO: 2165457 - DNA, 25 bp, Homo sapien
ctaagaagaaaagttcggcgttatg

SEQ ID NO: 2165458 - DNA, 25 bp, Homo sapien
taaagattcccgcataacatgaata

SEQ ID NO: 2165459 - DNA, 25 bp, Homo sapien
aagttcggcgttatgatatgcatca

SEQ ID NO: 2165460 - DNA, 25 bp, Homo sapien
tttttaaagattcccgcataacatg

SEQ ID NO: 2165461 - DNA, 25 bp, Homo sapien
tctaaccaatgagtagactccaaac

SEQ ID NO: 2165462 - DNA, 25 bp, Homo sapien
gattcttctacattaggataaacaa

SEQ ID NO: 2165463 - DNA, 25 bp, Homo sapien
ctaaccaatgagtagactccaaact

SEQ ID NO: 2165464 - DNA, 25 bp, Homo sapien
ccaatgagattcttctacattagga

SEQ ID NO: 2165465 - DNA, 25 bp, Homo sapien
ttttatatacacaaatattttcaca

SEQ ID NO: 2165466 - DNA, 25 bp, Homo sapien
tatacacaaatattttcacaaaata

SEQ ID NO: 2165467 - DNA, 25 bp, Homo sapien
acacaaatattttcacaaaatatac

SEQ ID NO: 2165468 - DNA, 25 bp, Homo sapien
tatatacacaaatattttcacaaaa

SEQ ID NO: 2165469 - DNA, 25 bp, Homo sapien
tatgtccattccactaaacaattac

SEQ ID NO: 2165470 - DNA, 25 bp, Homo sapien
aaatatgtccattccactaaacaat

SEQ ID NO: 2165471 - DNA, 25 bp, Homo sapien
ttaaaaatatgtccattccactaaa

SEQ ID NO: 2165472 - DNA, 25 bp, Homo sapien
aaaaatatgtccattccactaaaca

SEQ ID NO: 2165473 - DNA, 25 bp, Homo sapien
ttccaatatcctcctttgatgtcca

SEQ ID NO: 2165474 - DNA, 25 bp, Homo sapien
cttccaatatcctcctttgatgtcc

SEQ ID NO: 2165475 - DNA, 25 bp, Homo sapien
tccaatatcctcctttgatgtccat

SEQ ID NO: 2165476 - DNA, 25 bp, Homo sapien
actacagttgtgcacaactacaact

SEQ ID NO: 2165477 - DNA, 25 bp, Homo sapien
tacagttgtgcacaactacaactat

SEQ ID NO: 2165478 - DNA, 25 bp, Homo sapien
tgtttgtctgagttttttgtaagaa

SEQ ID NO: 2165479 - DNA, 25 bp, Homo sapien
acagttgtgcacaactacaactatt

SEQ ID NO: 2165480 - DNA, 25 bp, Homo sapien
aacccttcaatgctcctatagaagc

SEQ ID NO: 2165481 - DNA, 25 bp, Homo sapien
ggatgtcagctgagcagtcctgtcc

SEQ ID NO: 2165482 - DNA, 25 bp, Homo sapien
cttgaatggctcctgtcaaaacgag

SEQ ID NO: 2165483 - DNA, 25 bp, Homo sapien
tatagaagctatccaacatcagcat

SEQ ID NO: 2165484 - DNA, 25 bp, Homo sapien
tttatgtccaaaacttatccattct

SEQ ID NO: 2165485 - DNA, 25 bp, Homo sapien
atttatgtccaaaacttatccattc

SEQ ID NO: 2165486 - DNA, 25 bp, Homo sapien
aatttatgtccaaaacttatccatt

SEQ ID NO: 2165487 - DNA, 25 bp, Homo sapien
ttcagtcgcgaagaaaacaatccta

SEQ ID NO: 2165488 - DNA, 25 bp, Homo sapien
ctaaagtttcaagacttaaaatcat

SEQ ID NO: 2165489 - DNA, 25 bp, Homo sapien
ctagttctttcagtcgcgaagaaaa

SEQ ID NO: 2165490 - DNA, 25 bp, Homo sapien
ctttcagtcgcgaagaaaacaatcc

SEQ ID NO: 2165491 - DNA, 25 bp, Homo sapien
ctgaataaattgatgaagataattt

SEQ ID NO: 2165492 - DNA, 25 bp, Homo sapien
gaataaattgatgaagataatttgt

SEQ ID NO: 2165493 - DNA, 25 bp, Homo sapien
tgaataaattgatgaagataatttg

SEQ ID NO: 2165494 - DNA, 25 bp, Homo sapien
tcagcatcggtgtggtttttatcac

SEQ ID NO: 2165495 - DNA, 25 bp, Homo sapien
gaacggtcagcatcggtgtggtttt

SEQ ID NO: 2165496 - DNA, 25 bp, Homo sapien
gaaaaataggagaacggtcagcatc

SEQ ID NO: 2165497 - DNA, 25 bp, Homo sapien
aataggagaacggtcagcatcggtg

SEQ ID NO: 2165498 - DNA, 25 bp, Homo sapien
gttttgacatttgccacacacaatc

SEQ ID NO: 2165499 - DNA, 25 bp, Homo sapien
ctgttttgacatttgccacacacaa

SEQ ID NO: 2165500 - DNA, 25 bp, Homo sapien
tttgacatttgccacacacaatcaa

SEQ ID NO: 2165501 - DNA, 25 bp, Homo sapien
gacatttgccacacacaatcaataa

SEQ ID NO: 2165502 - DNA, 25 bp, Homo sapien
cggcaactatacagatgatccaaaa

SEQ ID NO: 2165503 - DNA, 25 bp, Homo sapien
aaagtaccaaatcggcaactataca

SEQ ID NO: 2165504 - DNA, 25 bp, Homo sapien
ctttctcgagcagattcacagttga

SEQ ID NO: 2165505 - DNA, 25 bp, Homo sapien
tgtctttctcgagcagattcacagt

SEQ ID NO: 2165506 - DNA, 25 bp, Homo sapien
tcagtgaccataaagaaacagtcct

SEQ ID NO: 2165507 - DNA, 25 bp, Homo sapien
gtgacgcatactggcaactggatat

SEQ ID NO: 2165508 - DNA, 25 bp, Homo sapien
gggttccatctaatgtagtaattca

SEQ ID NO: 2165509 - DNA, 25 bp, Homo sapien
tgtagtaattcacccagagttccaa

SEQ ID NO: 2165510 - DNA, 25 bp, Homo sapien
agttgacattgctatcttttaacag

SEQ ID NO: 2165511 - DNA, 25 bp, Homo sapien
gctatcttttaacagtgctacttca

SEQ ID NO: 2165512 - DNA, 25 bp, Homo sapien
aaggcaagcagttgacattgctatc

SEQ ID NO: 2165513 - DNA, 25 bp, Homo sapien
cattgctatcttttaacagtgctac

SEQ ID NO: 2165514 - DNA, 25 bp, Homo sapien
catgtaacgctgctccactggattc

SEQ ID NO: 2165515 - DNA, 25 bp, Homo sapien
tcaagccgctttatgtattcgtcgc

SEQ ID NO: 2165516 - DNA, 25 bp, Homo sapien
ttggcgagctgcagttcctcaagcc

SEQ ID NO: 2165517 - DNA, 25 bp, Homo sapien
ttcgtcgcgtaaggctaagagctcc

SEQ ID NO: 2165518 - DNA, 25 bp, Homo sapien
tatttcgagctctaatgcggtgcca

SEQ ID NO: 2165519 - DNA, 25 bp, Homo sapien
cagctatcgcctttatttcgagctc

SEQ ID NO: 2165520 - DNA, 25 bp, Homo sapien
gcctttatttcgagctctaatgcgg

SEQ ID NO: 2165521 - DNA, 25 bp, Homo sapien
agctctaatgcggtgccagggtccc

SEQ ID NO: 2165522 - DNA, 25 bp, Homo sapien
tggactgactagagcaacatttgcg

SEQ ID NO: 2165523 - DNA, 25 bp, Homo sapien
gcaaacggcctggtacttcaagtaa

SEQ ID NO: 2165524 - DNA, 25 bp, Homo sapien
tagctcatgcatccaagacggtagc

SEQ ID NO: 2165525 - DNA, 25 bp, Homo sapien
tagaaccagtttttatgcacgcgtg

SEQ ID NO: 2165526 - DNA, 25 bp, Homo sapien
gagtgacactttgttaatttatgaa

SEQ ID NO: 2165527 - DNA, 25 bp, Homo sapien
tattacagcaggtctttagtcatta

SEQ ID NO: 2165528 - DNA, 25 bp, Homo sapien
cacaaaatcttttaggctattagta

SEQ ID NO: 2165529 - DNA, 25 bp, Homo sapien
tactactgtatttgagatgtcttac

SEQ ID NO: 2165530 - DNA, 25 bp, Homo sapien
aagtacatgaagcagacccgggcaa

SEQ ID NO: 2165531 - DNA, 25 bp, Homo sapien
ggttgccggtgagataaaaagtaca

SEQ ID NO: 2165532 - DNA, 25 bp, Homo sapien
acttaaatgcccaatcttgctgaaa

SEQ ID NO: 2165533 - DNA, 25 bp, Homo sapien
aagaaatcagatggccaccatgcac

SEQ ID NO: 2165534 - DNA, 25 bp, Homo sapien
cggcggccgggaaggtttcgctgct

SEQ ID NO: 2165535 - DNA, 25 bp, Homo sapien
agccgccgtcgggacgggagcggcg

SEQ ID NO: 2165536 - DNA, 25 bp, Homo sapien
aggcggccgccgccattagctgtca

SEQ ID NO: 2165537 - DNA, 25 bp, Homo sapien
aggtttcgctgcttgcctcctgccg

SEQ ID NO: 2165538 - DNA, 25 bp, Homo sapien
ttcgggcccccgccgccctcgcagc

SEQ ID NO: 2165539 - DNA, 25 bp, Homo sapien
ccgccgccgccgccggcctgtccat

SEQ ID NO: 2165540 - DNA, 25 bp, Homo sapien
cccccgccgccctcgcagcccgccg

SEQ ID NO: 2165541 - DNA, 25 bp, Homo sapien
ccgccgccctcgcagcccgccgccg

SEQ ID NO: 2165542 - DNA, 25 bp, Homo sapien
gctgccgggagccggcggtggcgcc

SEQ ID NO: 2165543 - DNA, 25 bp, Homo sapien
gctgggctgccgggagccggcggtg

SEQ ID NO: 2165544 - DNA, 25 bp, Homo sapien
ggtctccacgctgggctgccgggag

SEQ ID NO: 2165545 - DNA, 25 bp, Homo sapien
ctgtccagggtctccacgctgggct

SEQ ID NO: 2165546 - DNA, 25 bp, Homo sapien
tgttccgggttacacgataggccat

SEQ ID NO: 2165547 - DNA, 25 bp, Homo sapien
tggatgttccgggttacacgatagg

SEQ ID NO: 2165548 - DNA, 25 bp, Homo sapien
gatgttccgggttacacgataggcc

SEQ ID NO: 2165549 - DNA, 25 bp, Homo sapien
agtgcatgctgcctgagtgcactct

SEQ ID NO: 2165550 - DNA, 25 bp, Homo sapien
actgaacctgaaatctgactagaaa

SEQ ID NO: 2165551 - DNA, 25 bp, Homo sapien
tgtttacaccattcaacatgtgatc

SEQ ID NO: 2165552 - DNA, 25 bp, Homo sapien
tagaaattgtagcagctataagctg

SEQ ID NO: 2165553 - DNA, 25 bp, Homo sapien
tgactagaaattgtagcagctataa

SEQ ID NO: 2165554 - DNA, 25 bp, Homo sapien
cagtgatgcagcaaatgcttctccc

SEQ ID NO: 2165555 - DNA, 25 bp, Homo sapien
taaggtgcaggcaatagggcaactg

SEQ ID NO: 2165556 - DNA, 25 bp, Homo sapien
cagccattcacgcatcagtgatgca

SEQ ID NO: 2165557 - DNA, 25 bp, Homo sapien
aactggaactgatgcgatccgcagc

SEQ ID NO: 2165558 - DNA, 25 bp, Homo sapien
taggagtccaggttccgtactcagc

SEQ ID NO: 2165559 - DNA, 25 bp, Homo sapien
cagaaacctccctggctgagagaaa

SEQ ID NO: 2165560 - DNA, 25 bp, Homo sapien
caagggtgagagttctagctcccag

SEQ ID NO: 2165561 - DNA, 25 bp, Homo sapien
tctgacactgctccaacagaagagg

SEQ ID NO: 2165562 - DNA, 25 bp, Homo sapien
cggactaagacaatacctaagtatt

SEQ ID NO: 2165563 - DNA, 25 bp, Homo sapien
actaatgtcaatggcactgtgtttt

SEQ ID NO: 2165564 - DNA, 25 bp, Homo sapien
tatcctgtgacctcactaaactcac

SEQ ID NO: 2165565 - DNA, 25 bp, Homo sapien
tccccacgtgttgctagtacataga

SEQ ID NO: 2165566 - DNA, 25 bp, Homo sapien
tagcaggtttgctctatcttgccat

SEQ ID NO: 2165567 - DNA, 25 bp, Homo sapien
tcatgttgcctgaaggtaaggcctt

SEQ ID NO: 2165568 - DNA, 25 bp, Homo sapien
gatatggtcatcagggtagggcttc

SEQ ID NO: 2165569 - DNA, 25 bp, Homo sapien
tataggaagacggatctgagctagc

SEQ ID NO: 2165570 - DNA, 25 bp, Homo sapien
tctcttggacaaatgcccaggagta

SEQ ID NO: 2165571 - DNA, 25 bp, Homo sapien
ttttcacgtgcttacctgccatgtg

SEQ ID NO: 2165572 - DNA, 25 bp, Homo sapien
gatatagcgatatctcactgtgact

SEQ ID NO: 2165573 - DNA, 25 bp, Homo sapien
tgtttggtcatatggcaggtgcaca

SEQ ID NO: 2165574 - DNA, 25 bp, Homo sapien
agttgatacctattgtgttttctct

SEQ ID NO: 2165575 - DNA, 25 bp, Homo sapien
aagttgatacctattgtgttttctc

SEQ ID NO: 2165576 - DNA, 25 bp, Homo sapien
ccaatgtggccactactgagaggag

SEQ ID NO: 2165577 - DNA, 25 bp, Homo sapien
caatgtggccactactgagaggagg

SEQ ID NO: 2165578 - DNA, 25 bp, Homo sapien
aatgtggccactactgagaggaggg

SEQ ID NO: 2165579 - DNA, 25 bp, Homo sapien
aatctttgtcttgctttatgaatgt

SEQ ID NO: 2165580 - DNA, 25 bp, Homo sapien
caatctttgtcttgctttatgaatg

SEQ ID NO: 2165581 - DNA, 25 bp, Homo sapien
atctttgtcttgctttatgaatgtt

SEQ ID NO: 2165582 - DNA, 25 bp, Homo sapien
ctttgcaaatcacaacattttcccc

SEQ ID NO: 2165583 - DNA, 25 bp, Homo sapien
catgactttgcaaatcacaacattt

SEQ ID NO: 2165584 - DNA, 25 bp, Homo sapien
tttcatgactttgcaaatcacaaca

SEQ ID NO: 2165585 - DNA, 25 bp, Homo sapien
gactttgcaaatcacaacattttcc

SEQ ID NO: 2165586 - DNA, 25 bp, Homo sapien
ggtgcatggacaagaaaaggcaaag

SEQ ID NO: 2165587 - DNA, 25 bp, Homo sapien
tcagtgagacatagtaaggcaaacc

SEQ ID NO: 2165588 - DNA, 25 bp, Homo sapien
tcaactgaatctggaggagcttagg

SEQ ID NO: 2165589 - DNA, 25 bp, Homo sapien
taattgataaatctgggacatgcct

SEQ ID NO: 2165590 - DNA, 25 bp, Homo sapien
caattgcttcagatttccccgtagg

SEQ ID NO: 2165591 - DNA, 25 bp, Homo sapien
gccagcttatttccatcccttagag

SEQ ID NO: 2165592 - DNA, 25 bp, Homo sapien
tctgtgccagcttatttccatccct

SEQ ID NO: 2165593 - DNA, 25 bp, Homo sapien
gtgccagcttatttccatcccttag

SEQ ID NO: 2165594 - DNA, 25 bp, Homo sapien
catctgtgccagcttatttccatcc

SEQ ID NO: 2165595 - DNA, 25 bp, Homo sapien
tacatcacttaaggatttgcagatg

SEQ ID NO: 2165596 - DNA, 25 bp, Homo sapien
agccaccagaggagcataaagcata

SEQ ID NO: 2165597 - DNA, 25 bp, Homo sapien
cagatgtccttaagatctaactcta

SEQ ID NO: 2165598 - DNA, 25 bp, Homo sapien
ttccaataattcgtattggagtggg

SEQ ID NO: 2165599 - DNA, 25 bp, Homo sapien
ctatactccttatgtactgagagcc

SEQ ID NO: 2165600 - DNA, 25 bp, Homo sapien
tgggattctgggtataattggaaga

SEQ ID NO: 2165601 - DNA, 25 bp, Homo sapien
taattggaagaagttcctgtccatg

SEQ ID NO: 2165602 - DNA, 25 bp, Homo sapien
ttccattgaacttttctatactcct

SEQ ID NO: 2165603 - DNA, 25 bp, Homo sapien
ctatcacaaagataccacatcttca

SEQ ID NO: 2165604 - DNA, 25 bp, Homo sapien
ttctatcacaaagataccacatctt

SEQ ID NO: 2165605 - DNA, 25 bp, Homo sapien
tctatcacaaagataccacatcttc

SEQ ID NO: 2165606 - DNA, 25 bp, Homo sapien
gaaaaccctgggctactgtttcatg

SEQ ID NO: 2165607 - DNA, 25 bp, Homo sapien
aaactaaagattgtctcctaatgca

SEQ ID NO: 2165608 - DNA, 25 bp, Homo sapien
tatagagagatgcatagtcttctaa

SEQ ID NO: 2165609 - DNA, 25 bp, Homo sapien
gtaaagggcctcataagaagttata

SEQ ID NO: 2165610 - DNA, 25 bp, Homo sapien
agtagcaactactgccatagacttg

SEQ ID NO: 2165611 - DNA, 25 bp, Homo sapien
agcaactactgccatagacttgtgc

SEQ ID NO: 2165612 - DNA, 25 bp, Homo sapien
gcaactactgccatagacttgtgct

SEQ ID NO: 2165613 - DNA, 25 bp, Homo sapien
ccaaagtagcaactactgccataga

SEQ ID NO: 2165614 - DNA, 25 bp, Homo sapien
cactgctcccataaatgggcagata

SEQ ID NO: 2165615 - DNA, 25 bp, Homo sapien
tttgaagtacagcttaaagtccgtc

SEQ ID NO: 2165616 - DNA, 25 bp, Homo sapien
ttaaagtccgtcactgtcagggttc

SEQ ID NO: 2165617 - DNA, 25 bp, Homo sapien
tacagcttaaagtccgtcactgtca

SEQ ID NO: 2165618 - DNA, 25 bp, Homo sapien
cactatctctataccacaggaattg

SEQ ID NO: 2165619 - DNA, 25 bp, Homo sapien
gctctgtgctccaatcttctccact

SEQ ID NO: 2165620 - DNA, 25 bp, Homo sapien
cttgcacactatctctataccacag

SEQ ID NO: 2165621 - DNA, 25 bp, Homo sapien
tctctataccacaggaattgtctcc

SEQ ID NO: 2165622 - DNA, 25 bp, Homo sapien
gtttataagcaagccgcaagttcct

SEQ ID NO: 2165623 - DNA, 25 bp, Homo sapien
cttcctgtttataagcaagccgcaa

SEQ ID NO: 2165624 - DNA, 25 bp, Homo sapien
cctgtttataagcaagccgcaagtt

SEQ ID NO: 2165625 - DNA, 25 bp, Homo sapien
taagcaagccgcaagttcctcatat

SEQ ID NO: 2165626 - DNA, 25 bp, Homo sapien
aatttttctttatagctgaatgcaa

SEQ ID NO: 2165627 - DNA, 25 bp, Homo sapien
ctgtctcttatattcagatactgga

SEQ ID NO: 2165628 - DNA, 25 bp, Homo sapien
tattcagatactggatcataaactt

SEQ ID NO: 2165629 - DNA, 25 bp, Homo sapien
ccagccattaattggaaatttttct

SEQ ID NO: 2165630 - DNA, 25 bp, Homo sapien
tctgccttttgctcgaaaagctgcc

SEQ ID NO: 2165631 - DNA, 25 bp, Homo sapien
tggcagggtaggtgtcacagaactc

SEQ ID NO: 2165632 - DNA, 25 bp, Homo sapien
gctcgaaaagctgccacttttgaaa

SEQ ID NO: 2165633 - DNA, 25 bp, Homo sapien
catcttttacactagttggcacaac

SEQ ID NO: 2165634 - DNA, 25 bp, Homo sapien
ggtaatcgttgcttgactttccgga

SEQ ID NO: 2165635 - DNA, 25 bp, Homo sapien
tggctggctgcaacgggtaatcgtt

SEQ ID NO: 2165636 - DNA, 25 bp, Homo sapien
tcattgggacccacaagtggctggc

SEQ ID NO: 2165637 - DNA, 25 bp, Homo sapien
tctttgcagcgcttatcattgggac

SEQ ID NO: 2165638 - DNA, 25 bp, Homo sapien
tggcctccaccaatatggcttttct

SEQ ID NO: 2165639 - DNA, 25 bp, Homo sapien
ctccaccaatatggcttttctcaca

SEQ ID NO: 2165640 - DNA, 25 bp, Homo sapien
cctgttggctagtctgaagatggcc

SEQ ID NO: 2165641 - DNA, 25 bp, Homo sapien
gcctccaccaatatggcttttctca

SEQ ID NO: 2165642 - DNA, 25 bp, Homo sapien
aaccacagattaacatcccttatga

SEQ ID NO: 2165643 - DNA, 25 bp, Homo sapien
gacatcacaagaagagaaaaccaca

SEQ ID NO: 2165644 - DNA, 25 bp, Homo sapien
gaaaaccacagattaacatccctta

SEQ ID NO: 2165645 - DNA, 25 bp, Homo sapien
cacagattaacatcccttatgaaaa

SEQ ID NO: 2165646 - DNA, 25 bp, Homo sapien
attccatgaggctagctgtatcctg

SEQ ID NO: 2165647 - DNA, 25 bp, Homo sapien
ttccatgaggctagctgtatcctga

SEQ ID NO: 2165648 - DNA, 25 bp, Homo sapien
ttaggactgcaacatatctctgagc

SEQ ID NO: 2165649 - DNA, 25 bp, Homo sapien
caggttccgatagtcccaggtgttc

SEQ ID NO: 2165650 - DNA, 25 bp, Homo sapien
gaacctggatatcactgccttgcgg

SEQ ID NO: 2165651 - DNA, 25 bp, Homo sapien
tgaattcaaggtatcggcagtgcca

SEQ ID NO: 2165652 - DNA, 25 bp, Homo sapien
tctagtgctatgagatacagaccac

SEQ ID NO: 2165653 - DNA, 25 bp, Homo sapien
ttatatattccagccaatgcgtccc

SEQ ID NO: 2165654 - DNA, 25 bp, Homo sapien
cgtagtgactctcgcatgacatgaa

SEQ ID NO: 2165655 - DNA, 25 bp, Homo sapien
tgtggatctccaagaacacaagttc

SEQ ID NO: 2165656 - DNA, 25 bp, Homo sapien
tcgatcgaagggtacacaatctctt

SEQ ID NO: 2165657 - DNA, 25 bp, Homo sapien
cattagcatagccagagatgtgagc

SEQ ID NO: 2165658 - DNA, 25 bp, Homo sapien
cagcaattcttactgccccagcaag

SEQ ID NO: 2165659 - DNA, 25 bp, Homo sapien
agtgcaaacctgtgtccaaagctta

SEQ ID NO: 2165660 - DNA, 25 bp, Homo sapien
aatggtcctgtagtaactgtccaac

SEQ ID NO: 2165661 - DNA, 25 bp, Homo sapien
tatgataccgcaaaacagtccagca

SEQ ID NO: 2165662 - DNA, 25 bp, Homo sapien
ttacatccatatgataccgcaaaac

SEQ ID NO: 2165663 - DNA, 25 bp, Homo sapien
catatgataccgcaaaacagtccag

SEQ ID NO: 2165664 - DNA, 25 bp, Homo sapien
catccatatgataccgcaaaacagt

SEQ ID NO: 2165665 - DNA, 25 bp, Homo sapien
catggaactcctatggcgtgtgcaa

SEQ ID NO: 2165666 - DNA, 25 bp, Homo sapien
tacccatcagcggaattgtcagatc

SEQ ID NO: 2165667 - DNA, 25 bp, Homo sapien
caccaagggctttgagtgcacactg

SEQ ID NO: 2165668 - DNA, 25 bp, Homo sapien
tagctagggccagatcaccaagggc

SEQ ID NO: 2165669 - DNA, 25 bp, Homo sapien
ggttgtcattaccatggcccactcg

SEQ ID NO: 2165670 - DNA, 25 bp, Homo sapien
cagcatccgcatggttgtcattacc

SEQ ID NO: 2165671 - DNA, 25 bp, Homo sapien
atggttgtcattaccatggcccact

SEQ ID NO: 2165672 - DNA, 25 bp, Homo sapien
ggagatcggtcagcatccgcatggt

SEQ ID NO: 2165673 - DNA, 25 bp, Homo sapien
ggtggagagccatcttctgagttct

SEQ ID NO: 2165674 - DNA, 25 bp, Homo sapien
tcaaggtggagagccatcttctgag

SEQ ID NO: 2165675 - DNA, 25 bp, Homo sapien
agccatcttctgagttctccaggtc

SEQ ID NO: 2165676 - DNA, 25 bp, Homo sapien
agagccatcttctgagttctccagg

SEQ ID NO: 2165677 - DNA, 25 bp, Homo sapien
ccaaaattgtaatcaagaatagctc

SEQ ID NO: 2165678 - DNA, 25 bp, Homo sapien
cattaaactcgaatgctgaaggaaa

SEQ ID NO: 2165679 - DNA, 25 bp, Homo sapien
aagacagctataaaggtgatccaaa

SEQ ID NO: 2165680 - DNA, 25 bp, Homo sapien
tctttgaatcgctgctgttcacagt

SEQ ID NO: 2165681 - DNA, 25 bp, Homo sapien
tcctgagagagccacgggctcgctg

SEQ ID NO: 2165682 - DNA, 25 bp, Homo sapien
ggctttttggctaatcagcagactc

SEQ ID NO: 2165683 - DNA, 25 bp, Homo sapien
tacatgaactcggagtcaggaggtc

SEQ ID NO: 2165684 - DNA, 25 bp, Homo sapien
tggtgcagcggagactacatgaact

SEQ ID NO: 2165685 - DNA, 25 bp, Homo sapien
tcaagtatgatctggccaacaccac

SEQ ID NO: 2165686 - DNA, 25 bp, Homo sapien
atgtaaaaaagtgttagcttgctac

SEQ ID NO: 2165687 - DNA, 25 bp, Homo sapien
ttgatgtaaaaaagtgttagcttgc

SEQ ID NO: 2165688 - DNA, 25 bp, Homo sapien
gatgtaaaaaagtgttagcttgcta

SEQ ID NO: 2165689 - DNA, 25 bp, Homo sapien
tgatgtaaaaaagtgttagcttgct

SEQ ID NO: 2165690 - DNA, 25 bp, Homo sapien
gtggattttactctaactgcagtgg

SEQ ID NO: 2165691 - DNA, 25 bp, Homo sapien
ttattaggaggttagcaagtcccca

SEQ ID NO: 2165692 - DNA, 25 bp, Homo sapien
tttagaatggactactgaaggtcag

SEQ ID NO: 2165693 - DNA, 25 bp, Homo sapien
tgaatgctcgctgtggttgctatgt

SEQ ID NO: 2165694 - DNA, 25 bp, Homo sapien
caattccaaatgactcagactagca

SEQ ID NO: 2165695 - DNA, 25 bp, Homo sapien
ggctattgatatacgaccataaaga

SEQ ID NO: 2165696 - DNA, 25 bp, Homo sapien
gactagcaacaggatataacacgtg

SEQ ID NO: 2165697 - DNA, 25 bp, Homo sapien
gaaaactcgtctagctggctattga

SEQ ID NO: 2165698 - DNA, 25 bp, Homo sapien
tggagcatggagctaaggccaccag

SEQ ID NO: 2165699 - DNA, 25 bp, Homo sapien
tagtgacgtatccttgaggttccag

SEQ ID NO: 2165700 - DNA, 25 bp, Homo sapien
caggccggggtactatagtgacgta

SEQ ID NO: 2165701 - DNA, 25 bp, Homo sapien
agctaaggccaccagtgagggagct

SEQ ID NO: 2165702 - DNA, 25 bp, Homo sapien
tttgggcaatcaacatagggccgcc

SEQ ID NO: 2165703 - DNA, 25 bp, Homo sapien
taagggcaccctaggatgcaggagc

SEQ ID NO: 2165704 - DNA, 25 bp, Homo sapien
caagtactaggctgaatgagcaccc

SEQ ID NO: 2165705 - DNA, 25 bp, Homo sapien
caaacaggccggtgcagtatcgagt

SEQ ID NO: 2165706 - DNA, 25 bp, Homo sapien
ccagagtgaggggtcaccgactggg

SEQ ID NO: 2165707 - DNA, 25 bp, Homo sapien
accagagtgaggggtcaccgactgg

SEQ ID NO: 2165708 - DNA, 25 bp, Homo sapien
gaccagagtgaggggtcaccgactg

SEQ ID NO: 2165709 - DNA, 25 bp, Homo sapien
atgaggatgagacggcgcgcgtggc

SEQ ID NO: 2165710 - DNA, 25 bp, Homo sapien
agggcgaggagccccgctcagatga

SEQ ID NO: 2165711 - DNA, 25 bp, Homo sapien
tgcagctccgccctgacggccagca

SEQ ID NO: 2165712 - DNA, 25 bp, Homo sapien
tgtggacggaggtggcggagtggga

SEQ ID NO: 2165713 - DNA, 25 bp, Homo sapien
ggaggaccccgtgcatgaagaaaac

SEQ ID NO: 2165714 - DNA, 25 bp, Homo sapien
tgaggtgaggacagaacacgttgcc

SEQ ID NO: 2165715 - DNA, 25 bp, Homo sapien
gacaggagggtaacggttgccaaca

SEQ ID NO: 2165716 - DNA, 25 bp, Homo sapien
cccaagaggcgagtaccagagtgag

SEQ ID NO: 2165717 - DNA, 25 bp, Homo sapien
agaggcctcggtttaccctcagcgg

SEQ ID NO: 2165718 - DNA, 25 bp, Homo sapien
ggcagtgctccttgaaggagccaga

SEQ ID NO: 2165719 - DNA, 25 bp, Homo sapien
gctgccagaggcctcggtttaccct

SEQ ID NO: 2165720 - DNA, 25 bp, Homo sapien
gcagtgctccttgaaggagccagag

SEQ ID NO: 2165721 - DNA, 25 bp, Homo sapien
aaaccaagggaagtgcgtgctatgc

SEQ ID NO: 2165722 - DNA, 25 bp, Homo sapien
tagttaattcctgcgagaaccgacg

SEQ ID NO: 2165723 - DNA, 25 bp, Homo sapien
ttccgtaagaatcaggaggttccca

SEQ ID NO: 2165724 - DNA, 25 bp, Homo sapien
tatgaacaggcagccacgcgagtaa

SEQ ID NO: 2165725 - DNA, 25 bp, Homo sapien
tgaaatacagtgcaacagatgagac

SEQ ID NO: 2165726 - DNA, 25 bp, Homo sapien
gtttgtcgaaggcatcatccagtcc

SEQ ID NO: 2165727 - DNA, 25 bp, Homo sapien
gaaccataacggcttcgcattctag

SEQ ID NO: 2165728 - DNA, 25 bp, Homo sapien
tgtttaacagtcctagtcagccagg

SEQ ID NO: 2165729 - DNA, 25 bp, Homo sapien
tattaactgtgcttgacgcacagta

SEQ ID NO: 2165730 - DNA, 25 bp, Homo sapien
ttactgaatgaattaaatcacataa

SEQ ID NO: 2165731 - DNA, 25 bp, Homo sapien
gtgcttgacgcacagtaaacattca

SEQ ID NO: 2165732 - DNA, 25 bp, Homo sapien
tacatcatcatatattaactgtgct

SEQ ID NO: 2165733 - DNA, 25 bp, Homo sapien
tacctttatggtgaggcctgtcgga

SEQ ID NO: 2165734 - DNA, 25 bp, Homo sapien
gaaaccctagagctgtgacgtagaa

SEQ ID NO: 2165735 - DNA, 25 bp, Homo sapien
gatggctaagtccttgaaaccctag

SEQ ID NO: 2165736 - DNA, 25 bp, Homo sapien
caagtatgtcgagaaccgatggccc

SEQ ID NO: 2165737 - DNA, 25 bp, Homo sapien
tcacgggacagaaccacatgctagg

SEQ ID NO: 2165738 - DNA, 25 bp, Homo sapien
ggcaggatcttacaaaactcacggg

SEQ ID NO: 2165739 - DNA, 25 bp, Homo sapien
tcataggctgtccactgagcgggat

SEQ ID NO: 2165740 - DNA, 25 bp, Homo sapien
catgctcaccgtggcaaacacagga

SEQ ID NO: 2165741 - DNA, 25 bp, Homo sapien
cttcagagaatcttctctaataaca

SEQ ID NO: 2165742 - DNA, 25 bp, Homo sapien
gaatcttctctaataacaaactaca

SEQ ID NO: 2165743 - DNA, 25 bp, Homo sapien
tttttgatgctctacaccttcagag

SEQ ID NO: 2165744 - DNA, 25 bp, Homo sapien
accttcagagaatcttctctaataa

SEQ ID NO: 2165745 - DNA, 25 bp, Homo sapien
tagcatgcaagtgaactacctacag

SEQ ID NO: 2165746 - DNA, 25 bp, Homo sapien
accacaaccaataggccaggaacca

SEQ ID NO: 2165747 - DNA, 25 bp, Homo sapien
tccggcaaaacctccaggtaatgtg

SEQ ID NO: 2165748 - DNA, 25 bp, Homo sapien
taatgtggctgccttaaggagggca

SEQ ID NO: 2165749 - DNA, 25 bp, Homo sapien
agatttgccaccattactattatgg

SEQ ID NO: 2165750 - DNA, 25 bp, Homo sapien
ctggtagttagatttgccaccatta

SEQ ID NO: 2165751 - DNA, 25 bp, Homo sapien
ccaccattactattatggcatgtga

SEQ ID NO: 2165752 - DNA, 25 bp, Homo sapien
ggtagttagatttgccaccattact

SEQ ID NO: 2165753 - DNA, 25 bp, Homo sapien
catttgtattcggtctaccatttgc

SEQ ID NO: 2165754 - DNA, 25 bp, Homo sapien
ggaaccatttgtattcggtctacca

SEQ ID NO: 2165755 - DNA, 25 bp, Homo sapien
aaagaccacatacctgccattcaac

SEQ ID NO: 2165756 - DNA, 25 bp, Homo sapien
ttgtattcggtctaccatttgctgt

SEQ ID NO: 2165757 - DNA, 25 bp, Homo sapien
gagtttgtcgcatagatttcccaca

SEQ ID NO: 2165758 - DNA, 25 bp, Homo sapien
tgagtttgtcgcatagatttcccac

SEQ ID NO: 2165759 - DNA, 25 bp, Homo sapien
agtgagtttgtcgcatagatttccc

SEQ ID NO: 2165760 - DNA, 25 bp, Homo sapien
gtttgtcgcatagatttcccacaag

SEQ ID NO: 2165761 - DNA, 25 bp, Homo sapien
ctgggctgaatggtcaagaattcca

SEQ ID NO: 2165762 - DNA, 25 bp, Homo sapien
gctgggctgaatggtcaagaattcc

SEQ ID NO: 2165763 - DNA, 25 bp, Homo sapien
tcatgctcgtcggtaaccagctgtt

SEQ ID NO: 2165764 - DNA, 25 bp, Homo sapien
tcggtgatattcctcaatggagagc

SEQ ID NO: 2165765 - DNA, 25 bp, Homo sapien
tcggtaaccagctgttggataaatg

SEQ ID NO: 2165766 - DNA, 25 bp, Homo sapien
tgtctggtaatgctcggtgatattc

SEQ ID NO: 2165767 - DNA, 25 bp, Homo sapien
gatttatctgttgccaggtacttca

SEQ ID NO: 2165768 - DNA, 25 bp, Homo sapien
tgaatcacggtgagtccttcatgtt

SEQ ID NO: 2165769 - DNA, 25 bp, Homo sapien
cctgaatcacggtgagtccttcatg

SEQ ID NO: 2165770 - DNA, 25 bp, Homo sapien
aatcacggtgagtccttcatgtttc

SEQ ID NO: 2165771 - DNA, 25 bp, Homo sapien
gagcagccaggacccgtgtgggggc

SEQ ID NO: 2165772 - DNA, 25 bp, Homo sapien
agcaggccttatcctgaatgagcag

SEQ ID NO: 2165773 - DNA, 25 bp, Homo sapien
caggccttatcctgaatgagcagcc

SEQ ID NO: 2165774 - DNA, 25 bp, Homo sapien
agcagccaggacccgtgtgggggca

SEQ ID NO: 2165775 - DNA, 25 bp, Homo sapien
gaagttgccttcagtggagatgatg

SEQ ID NO: 2165776 - DNA, 25 bp, Homo sapien
gatgatgctgattaggcccattttg

SEQ ID NO: 2165777 - DNA, 25 bp, Homo sapien
tcagtaggcattgaggaagggcctg

SEQ ID NO: 2165778 - DNA, 25 bp, Homo sapien
ggagatgatgctgattaggcccatt

SEQ ID NO: 2165779 - DNA, 25 bp, Homo sapien
cccggcctcgttttctcgagacgtg

SEQ ID NO: 2165780 - DNA, 25 bp, Homo sapien
gcagccagtcacgaaaacggtcctt

SEQ ID NO: 2165781 - DNA, 25 bp, Homo sapien
cttttcttcagtctccggccagggt

SEQ ID NO: 2165782 - DNA, 25 bp, Homo sapien
gacgtgtcactgcttgttgaccgca

SEQ ID NO: 2165783 - DNA, 25 bp, Homo sapien
ttcaatctgctagaacggaggtcag

SEQ ID NO: 2165784 - DNA, 25 bp, Homo sapien
acaactgttcaactccactgtggca

SEQ ID NO: 2165785 - DNA, 25 bp, Homo sapien
cactacttttagctggaaggctgaa

SEQ ID NO: 2165786 - DNA, 25 bp, Homo sapien
tagaggagcacactcttaaggtccc

SEQ ID NO: 2165787 - DNA, 25 bp, Homo sapien
tagtaatgtactacagaaacaattc

SEQ ID NO: 2165788 - DNA, 25 bp, Homo sapien
gacattctctagtaatgtactacag

SEQ ID NO: 2165789 - DNA, 25 bp, Homo sapien
tgcacattcagaggacattctctag

SEQ ID NO: 2165790 - DNA, 25 bp, Homo sapien
ttcagaggacattctctagtaatgt

SEQ ID NO: 2165791 - DNA, 25 bp, Homo sapien
acatgccaaggactgcctgacagca

SEQ ID NO: 2165792 - DNA, 25 bp, Homo sapien
ttctaccctagaggaagcatggtcc

SEQ ID NO: 2165793 - DNA, 25 bp, Homo sapien
tagaggaagcatggtcctggtgaca

SEQ ID NO: 2165794 - DNA, 25 bp, Homo sapien
tgatgcagctacaagggtggacatg

SEQ ID NO: 2165795 - DNA, 25 bp, Homo sapien
agttgtggaggctgaaacgtccaag

SEQ ID NO: 2165796 - DNA, 25 bp, Homo sapien
tggtcagggacttcttgccggcggg

SEQ ID NO: 2165797 - DNA, 25 bp, Homo sapien
caaaggacatcacatgtcgaggggg

SEQ ID NO: 2165798 - DNA, 25 bp, Homo sapien
tgcagagtactgaggtggcaaagga

SEQ ID NO: 2165799 - DNA, 25 bp, Homo sapien
cccattctgcttgatttggacttga

SEQ ID NO: 2165800 - DNA, 25 bp, Homo sapien
ccattctgcttgatttggacttgac

SEQ ID NO: 2165801 - DNA, 25 bp, Homo sapien
cttgatttggacttgacagaagtac

SEQ ID NO: 2165802 - DNA, 25 bp, Homo sapien
ctgcttgatttggacttgacagaag

SEQ ID NO: 2165803 - DNA, 25 bp, Homo sapien
aactgacaattatcacagcttcaaa

SEQ ID NO: 2165804 - DNA, 25 bp, Homo sapien
taaactgacaattatcacagcttca

SEQ ID NO: 2165805 - DNA, 25 bp, Homo sapien
ttaaactgacaattatcacagcttc

SEQ ID NO: 2165806 - DNA, 25 bp, Homo sapien
ctgacaattatcacagcttcaaatg

SEQ ID NO: 2165807 - DNA, 25 bp, Homo sapien
tatgtttatcaagacgcaacttgca

SEQ ID NO: 2165808 - DNA, 25 bp, Homo sapien
ttgctggctcacatagtaactatgt

SEQ ID NO: 2165809 - DNA, 25 bp, Homo sapien
acttgcagtagaatccagcgcatca

SEQ ID NO: 2165810 - DNA, 25 bp, Homo sapien
agcgcatcaactctgagtctctgag

SEQ ID NO: 2165811 - DNA, 25 bp, Homo sapien
tcactagagccgctaaatcaaatgc

SEQ ID NO: 2165812 - DNA, 25 bp, Homo sapien
gagccgctaaatcaaatgcgaattt

SEQ ID NO: 2165813 - DNA, 25 bp, Homo sapien
ttgatcactagagccgctaaatcaa

SEQ ID NO: 2165814 - DNA, 25 bp, Homo sapien
aatcaaatgcgaatttgatctgctc

SEQ ID NO: 2165815 - DNA, 25 bp, Homo sapien
tcctcatggctttgtgaacaccata

SEQ ID NO: 2165816 - DNA, 25 bp, Homo sapien
ggctttgtgaacaccatattcttca

SEQ ID NO: 2165817 - DNA, 25 bp, Homo sapien
gccaggtagtccagcaagggcagcc

SEQ ID NO: 2165818 - DNA, 25 bp, Homo sapien
ccagcttatcaggacagccaggtag

SEQ ID NO: 2165819 - DNA, 25 bp, Homo sapien
tgttttcagcaaaccatcagccagg

SEQ ID NO: 2165820 - DNA, 25 bp, Homo sapien
gcctctcctgttttcagcaaaccat

SEQ ID NO: 2165821 - DNA, 25 bp, Homo sapien
gtccagcctctcctgttttcagcaa

SEQ ID NO: 2165822 - DNA, 25 bp, Homo sapien
tcctgttttcagcaaaccatcagcc

SEQ ID NO: 2165823 - DNA, 25 bp, Homo sapien
taggagctcccagtaaaattggaac

SEQ ID NO: 2165824 - DNA, 25 bp, Homo sapien
agggcagcatcatttggtaataagt

SEQ ID NO: 2165825 - DNA, 25 bp, Homo sapien
tagcttgccggtgttcagggatgaa

SEQ ID NO: 2165826 - DNA, 25 bp, Homo sapien
tggtaataagtgcagcaacctgaaa

SEQ ID NO: 2165827 - DNA, 25 bp, Homo sapien
acattaccgaacagccctgccttgt

SEQ ID NO: 2165828 - DNA, 25 bp, Homo sapien
gccctgccttgtcccgccttgaagt

SEQ ID NO: 2165829 - DNA, 25 bp, Homo sapien
gccttgtcccgccttgaagtcttca

SEQ ID NO: 2165830 - DNA, 25 bp, Homo sapien
agccaccacattaccgaacagccct

SEQ ID NO: 2165831 - DNA, 25 bp, Homo sapien
gcacccaggtcagcgtgcaagggct

SEQ ID NO: 2165832 - DNA, 25 bp, Homo sapien
agggaatgaaggatactctaggcct

SEQ ID NO: 2165833 - DNA, 25 bp, Homo sapien
cagcacccaggtcagcgtgcaaggg

SEQ ID NO: 2165834 - DNA, 25 bp, Homo sapien
atgaaggatactctaggcctctgcc

SEQ ID NO: 2165835 - DNA, 25 bp, Homo sapien
tgctctcaagaaagctacctcttat

SEQ ID NO: 2165836 - DNA, 25 bp, Homo sapien
tacctcttatatggagctgaagcac

SEQ ID NO: 2165837 - DNA, 25 bp, Homo sapien
cgcttacgcgcaggaagtatttcca

SEQ ID NO: 2165838 - DNA, 25 bp, Homo sapien
aaatatttcgatctctgctctcaag

SEQ ID NO: 2165839 - DNA, 25 bp, Homo sapien
tgattccgcttctgcggatcgtgct

SEQ ID NO: 2165840 - DNA, 25 bp, Homo sapien
tctttccactaaatgccagaaggtc

SEQ ID NO: 2165841 - DNA, 25 bp, Homo sapien
tatttgcgcccgaaattgcggaacc

SEQ ID NO: 2165842 - DNA, 25 bp, Homo sapien
tgctcaactaggctctttccactaa

SEQ ID NO: 2165843 - DNA, 25 bp, Homo sapien
ccagcctcgcgctagctgcctccac

SEQ ID NO: 2165844 - DNA, 25 bp, Homo sapien
agcgctccccagcctcgcgctagct

SEQ ID NO: 2165845 - DNA, 25 bp, Homo sapien
ggcacgacgcgcggctcagcgctcc

SEQ ID NO: 2165846 - DNA, 25 bp, Homo sapien
cgacgcgcggctcagcgctccccag

SEQ ID NO: 2165847 - DNA, 25 bp, Homo sapien
cggcgcgggccggaaagttgtgcgg

SEQ ID NO: 2165848 - DNA, 25 bp, Homo sapien
cgggccggaaagttgtgcgggcgct

SEQ ID NO: 2165849 - DNA, 25 bp, Homo sapien
tgcttcttccttcccggccgcctag

SEQ ID NO: 2165850 - DNA, 25 bp, Homo sapien
ccggaaagttgtgcgggcgctgcgg

SEQ ID NO: 2165851 - DNA, 25 bp, Homo sapien
caaacatctggcctcgggggccctg

SEQ ID NO: 2165852 - DNA, 25 bp, Homo sapien
gccgcagccgcagctgcccaaacat

SEQ ID NO: 2165853 - DNA, 25 bp, Homo sapien
agctgcccaaacatctggcctcggg

SEQ ID NO: 2165854 - DNA, 25 bp, Homo sapien
ccgcagccgcccctctgctcgccca

SEQ ID NO: 2165855 - DNA, 25 bp, Homo sapien
ctcctgatgaaagaaagtgcccctg

SEQ ID NO: 2165856 - DNA, 25 bp, Homo sapien
agaaagtgcccctgaaatccgccgc

SEQ ID NO: 2165857 - DNA, 25 bp, Homo sapien
tcaaaagcctcctgatgaaagaaag

SEQ ID NO: 2165858 - DNA, 25 bp, Homo sapien
aagtgcccctgaaatccgccgctgt

SEQ ID NO: 2165859 - DNA, 25 bp, Homo sapien
aagaaatacaatgaggaaaagcaag

SEQ ID NO: 2165860 - DNA, 25 bp, Homo sapien
agagaaacaaagaaatacaatgagg

SEQ ID NO: 2165861 - DNA, 25 bp, Homo sapien
gaaacaaagaaatacaatgaggaaa

SEQ ID NO: 2165862 - DNA, 25 bp, Homo sapien
caaagaaatacaatgaggaaaagca

SEQ ID NO: 2165863 - DNA, 25 bp, Homo sapien
aaggcataagcggacatcttgccct

SEQ ID NO: 2165864 - DNA, 25 bp, Homo sapien
aattccgcaaaattgacagggacct

SEQ ID NO: 2165865 - DNA, 25 bp, Homo sapien
gcataagcggacatcttgccctttg

SEQ ID NO: 2165866 - DNA, 25 bp, Homo sapien
ataagcggacatcttgccctttggt

SEQ ID NO: 2165867 - DNA, 25 bp, Homo sapien
ttagatttctctttcccggacatcg

SEQ ID NO: 2165868 - DNA, 25 bp, Homo sapien
tagatttctctttcccggacatcgt

SEQ ID NO: 2165869 - DNA, 25 bp, Homo sapien
cgatcatagcgcactttatctgcct

SEQ ID NO: 2165870 - DNA, 25 bp, Homo sapien
ttcccgatcatagcgcactttatct

SEQ ID NO: 2165871 - DNA, 25 bp, Homo sapien
aaaatatgtggtgcgcggctcacgc

SEQ ID NO: 2165872 - DNA, 25 bp, Homo sapien
gacaacgctggcactgcatcgtaaa

SEQ ID NO: 2165873 - DNA, 25 bp, Homo sapien
cagaatggtttgcagaggtattgcc

SEQ ID NO: 2165874 - DNA, 25 bp, Homo sapien
tcgtaaagcccaagtacagaatggt

SEQ ID NO: 2165875 - DNA, 25 bp, Homo sapien
cacccagcttttttgccacgtctcc

SEQ ID NO: 2165876 - DNA, 25 bp, Homo sapien
ctttgccgccttagtgatgtaaggc

SEQ ID NO: 2165877 - DNA, 25 bp, Homo sapien
ttctccttcagctttgccgccttag

SEQ ID NO: 2165878 - DNA, 25 bp, Homo sapien
gcttttttgccacgtctccaataga

SEQ ID NO: 2165879 - DNA, 25 bp, Homo sapien
ttgaaatcaagtaagacagtgctgc

SEQ ID NO: 2165880 - DNA, 25 bp, Homo sapien
aaaaagcatgaacaccagcacccgt

SEQ ID NO: 2165881 - DNA, 25 bp, Homo sapien
gatgggcccttgagcgctatgctaa

SEQ ID NO: 2165882 - DNA, 25 bp, Homo sapien
acatgccctgcaacctactgatagc

SEQ ID NO: 2165883 - DNA, 25 bp, Homo sapien
atcaaactttcctttcgacttatag

SEQ ID NO: 2165884 - DNA, 25 bp, Homo sapien
tttcctttcgacttatagtcagcaa

SEQ ID NO: 2165885 - DNA, 25 bp, Homo sapien
catcaaactttcctttcgacttata

SEQ ID NO: 2165886 - DNA, 25 bp, Homo sapien
aactttcctttcgacttatagtcag

SEQ ID NO: 2165887 - DNA, 25 bp, Homo sapien
catcttcctcttccacctttttccg

SEQ ID NO: 2165888 - DNA, 25 bp, Homo sapien
tcatcttcctcttccacctttttcc

SEQ ID NO: 2165889 - DNA, 25 bp, Homo sapien
tcctcctcttcttcctcctcctctt

SEQ ID NO: 2165890 - DNA, 25 bp, Homo sapien
cctcctcctcttcttcatcttcctc

SEQ ID NO: 2165891 - DNA, 25 bp, Homo sapien
atgtgtcaattacggcgctccccta

SEQ ID NO: 2165892 - DNA, 25 bp, Homo sapien
tcaaataagagatgtgtcaattacg

SEQ ID NO: 2165893 - DNA, 25 bp, Homo sapien
cccctactctaagtattcacaagga

SEQ ID NO: 2165894 - DNA, 25 bp, Homo sapien
ctaatgagggcaacagacacttctc

SEQ ID NO: 2165895 - DNA, 25 bp, Homo sapien
aataacagaacgttgcgaatcgtgt

SEQ ID NO: 2165896 - DNA, 25 bp, Homo sapien
aaaaaatattctcatgccagctgac

SEQ ID NO: 2165897 - DNA, 25 bp, Homo sapien
ctcaacgccgagcaaggagcatcaa

SEQ ID NO: 2165898 - DNA, 25 bp, Homo sapien
caacctgaagctaaatggatgcccc

SEQ ID NO: 2165899 - DNA, 25 bp, Homo sapien
gctgtgaccgtgaccataactcgta

SEQ ID NO: 2165900 - DNA, 25 bp, Homo sapien
taccacatttatagggaggccagtc

SEQ ID NO: 2165901 - DNA, 25 bp, Homo sapien
gaaattctggaacaagtgcctctgg

SEQ ID NO: 2165902 - DNA, 25 bp, Homo sapien
tagttatgagatagacgcgcaccac

SEQ ID NO: 2165903 - DNA, 25 bp, Homo sapien
acagcgaaggacactagaggcgagc

SEQ ID NO: 2165904 - DNA, 25 bp, Homo sapien
tggtcttattggggtccaaccacac

SEQ ID NO: 2165905 - DNA, 25 bp, Homo sapien
ccagatctgctgatgggaattggca

SEQ ID NO: 2165906 - DNA, 25 bp, Homo sapien
ttatctatgcctatgtgcctgccct

SEQ ID NO: 2165907 - DNA, 25 bp, Homo sapien
ctgagcagcaggtgcagaatcctca

SEQ ID NO: 2165908 - DNA, 25 bp, Homo sapien
ttcatccacgtgaccttctctggca

SEQ ID NO: 2165909 - DNA, 25 bp, Homo sapien
ttctcttcatccacgtgaccttctc

SEQ ID NO: 2165910 - DNA, 25 bp, Homo sapien
gcagcaggtgcagaatcctcattct

SEQ ID NO: 2165911 - DNA, 25 bp, Homo sapien
cgatcaatcttcttagattcacagt

SEQ ID NO: 2165912 - DNA, 25 bp, Homo sapien
ctgtgatacatgtggcgatcaatct

SEQ ID NO: 2165913 - DNA, 25 bp, Homo sapien
tacatgtggcgatcaatcttcttag

SEQ ID NO: 2165914 - DNA, 25 bp, Homo sapien
ggcgatcaatcttcttagattcaca

SEQ ID NO: 2165915 - DNA, 25 bp, Homo sapien
tttttggcaagcagataaaggcttg

SEQ ID NO: 2165916 - DNA, 25 bp, Homo sapien
tggcaagcagataaaggcttgtttt

SEQ ID NO: 2165917 - DNA, 25 bp, Homo sapien
gaggcgctcttcactgcgcttccgt

SEQ ID NO: 2165918 - DNA, 25 bp, Homo sapien
actgcgcttccgtgcttccttggtc

SEQ ID NO: 2165919 - DNA, 25 bp, Homo sapien
agtgactgtggttaacctgtcacca

SEQ ID NO: 2165920 - DNA, 25 bp, Homo sapien
tgactgtggttaacctgtcaccagg

SEQ ID NO: 2165921 - DNA, 25 bp, Homo sapien
gactgtggttaacctgtcaccaggg

SEQ ID NO: 2165922 - DNA, 25 bp, Homo sapien
cagaagaccttgcactcctcaatca

SEQ ID NO: 2165923 - DNA, 25 bp, Homo sapien
gacatggctacagtgaccagcaagg

SEQ ID NO: 2165924 - DNA, 25 bp, Homo sapien
gaagtggtgctttctttgaccaatt

SEQ ID NO: 2165925 - DNA, 25 bp, Homo sapien
ggtgctttctttgaccaattcccat

SEQ ID NO: 2165926 - DNA, 25 bp, Homo sapien
cagaatcttataaatgaagtggtgc

SEQ ID NO: 2165927 - DNA, 25 bp, Homo sapien
atcttataaatgaagtggtgctttc

SEQ ID NO: 2165928 - DNA, 25 bp, Homo sapien
tttataagtgggtgcggaaagagct

SEQ ID NO: 2165929 - DNA, 25 bp, Homo sapien
ccgttgatgacaatgggagattttg

SEQ ID NO: 2165930 - DNA, 25 bp, Homo sapien
gagattttgttttataagtgggtgc

SEQ ID NO: 2165931 - DNA, 25 bp, Homo sapien
ttatccgttgatgacaatgggagat

SEQ ID NO: 2165932 - DNA, 25 bp, Homo sapien
tgagatgaagtgaacttggcaacgg

SEQ ID NO: 2165933 - DNA, 25 bp, Homo sapien
gcaattagccagggctcttcccaaa

SEQ ID NO: 2165934 - DNA, 25 bp, Homo sapien
atgaagtgaacttggcaacgggaag

SEQ ID NO: 2165935 - DNA, 25 bp, Homo sapien
atttccatgtctgagatgaagtgaa

SEQ ID NO: 2165936 - DNA, 25 bp, Homo sapien
cagcgtatattcaagggctttctgc

SEQ ID NO: 2165937 - DNA, 25 bp, Homo sapien
tatattcaagggctttctgctgcat

SEQ ID NO: 2165938 - DNA, 25 bp, Homo sapien
ctcccagcgtatattcaagggcttt

SEQ ID NO: 2165939 - DNA, 25 bp, Homo sapien
gcgtatattcaagggctttctgctg

SEQ ID NO: 2165940 - DNA, 25 bp, Homo sapien
aggccttgaaggtgacggagagtga

SEQ ID NO: 2165941 - DNA, 25 bp, Homo sapien
ctgagctactttcaagatggagtaa

SEQ ID NO: 2165942 - DNA, 25 bp, Homo sapien
agtccaggccttgaaggtgacggag

SEQ ID NO: 2165943 - DNA, 25 bp, Homo sapien
tccaggccttgaaggtgacggagag

SEQ ID NO: 2165944 - DNA, 25 bp, Homo sapien
gagatgaggtggctagagcccccgg

SEQ ID NO: 2165945 - DNA, 25 bp, Homo sapien
gcaggcattgctacactccagtgta

SEQ ID NO: 2165946 - DNA, 25 bp, Homo sapien
ctccagtgtactgcacttctgagat

SEQ ID NO: 2165947 - DNA, 25 bp, Homo sapien
gaattccccgcggatgtggcctgaa

SEQ ID NO: 2165948 - DNA, 25 bp, Homo sapien
gactagtcttcttgccacagtaggg

SEQ ID NO: 2165949 - DNA, 25 bp, Homo sapien
gagcgccatcgtctggacacagcag

SEQ ID NO: 2165950 - DNA, 25 bp, Homo sapien
aacttgttccagactagtcttcttg

SEQ ID NO: 2165951 - DNA, 25 bp, Homo sapien
gccgggagcgccatcgtctggacac

SEQ ID NO: 2165952 - DNA, 25 bp, Homo sapien
tctcttgggtccccgcttctcaagg

SEQ ID NO: 2165953 - DNA, 25 bp, Homo sapien
cttctcaaggaaactcaggacgaga

SEQ ID NO: 2165954 - DNA, 25 bp, Homo sapien
ggagcgggagctcgtctcctttcca

SEQ ID NO: 2165955 - DNA, 25 bp, Homo sapien
caggacgagaggctctgacgcctct

SEQ ID NO: 2165956 - DNA, 25 bp, Homo sapien
caggctcaggatcagcagccaggtc

SEQ ID NO: 2165957 - DNA, 25 bp, Homo sapien
tcgttaagatctcccagcaggctca

SEQ ID NO: 2165958 - DNA, 25 bp, Homo sapien
ggctcaggatcagcagccaggtcca

SEQ ID NO: 2165959 - DNA, 25 bp, Homo sapien
tggggatcgttaagatctcccagca

SEQ ID NO: 2165960 - DNA, 25 bp, Homo sapien
gccgattaggtctacaacgatggtg

SEQ ID NO: 2165961 - DNA, 25 bp, Homo sapien
ggtgataaccatcgcgcagaacata

SEQ ID NO: 2165962 - DNA, 25 bp, Homo sapien
gccaaaatgaccatggagttgccga

SEQ ID NO: 2165963 - DNA, 25 bp, Homo sapien
gggtagcttacagccaatacagcca

SEQ ID NO: 2165964 - DNA, 25 bp, Homo sapien
catatcggccacagagagactgacc

SEQ ID NO: 2165965 - DNA, 25 bp, Homo sapien
ggtattgcgcacactgaagatccgt

SEQ ID NO: 2165966 - DNA, 25 bp, Homo sapien
caaagggtatgggtagatggccacc

SEQ ID NO: 2165967 - DNA, 25 bp, Homo sapien
taacggttgatagcgattgccacga

SEQ ID NO: 2165968 - DNA, 25 bp, Homo sapien
tcacaaacatggttagaaaattgcg

SEQ ID NO: 2165969 - DNA, 25 bp, Homo sapien
gatcacaaacatggttagaaaattg

SEQ ID NO: 2165970 - DNA, 25 bp, Homo sapien
ggaggaagatcacaaacatggttag

SEQ ID NO: 2165971 - DNA, 25 bp, Homo sapien
caaacatggttagaaaattgcgaac

SEQ ID NO: 2165972 - DNA, 25 bp, Homo sapien
tgagcacgttgatagggcaccagca

SEQ ID NO: 2165973 - DNA, 25 bp, Homo sapien
aagtaggctgcaagataaagccagt

SEQ ID NO: 2165974 - DNA, 25 bp, Homo sapien
ccatctccttcggactgacagccac

SEQ ID NO: 2165975 - DNA, 25 bp, Homo sapien
gccaccaagacagtgagcacgttga

SEQ ID NO: 2165976 - DNA, 25 bp, Homo sapien
tggaacattccggacattcatcggg

SEQ ID NO: 2165977 - DNA, 25 bp, Homo sapien
ttgaggagcccgtagatcacagcgt

SEQ ID NO: 2165978 - DNA, 25 bp, Homo sapien
catgggcacggtcttgttcacgagc

SEQ ID NO: 2165979 - DNA, 25 bp, Homo sapien
cacgaatatcactgatgaggccaga

SEQ ID NO: 2165980 - DNA, 25 bp, Homo sapien
gccttgaaatggacagaggcaggct

SEQ ID NO: 2165981 - DNA, 25 bp, Homo sapien
caggcttgaaatgaacagagtcagg

SEQ ID NO: 2165982 - DNA, 25 bp, Homo sapien
cagccttggagtggctaaagacaga

SEQ ID NO: 2165983 - DNA, 25 bp, Homo sapien
cagagacaggcttgaggtgaccaga

SEQ ID NO: 2165984 - DNA, 25 bp, Homo sapien
tcattggtactggtagtgactacag

SEQ ID NO: 2165985 - DNA, 25 bp, Homo sapien
ggtcagcgatggtgtcagactccag

SEQ ID NO: 2165986 - DNA, 25 bp, Homo sapien
gactcagggaggtcactgtcgtcag

SEQ ID NO: 2165987 - DNA, 25 bp, Homo sapien
cacgacatcatggtaatcattggta

SEQ ID NO: 2165988 - DNA, 25 bp, Homo sapien
actgcctggccacctacgagagcat

SEQ ID NO: 2165989 - DNA, 25 bp, Homo sapien
ctgcctggccacctacgagagcatt

SEQ ID NO: 2165990 - DNA, 25 bp, Homo sapien
gacatctacgacttaacatcgtgta

SEQ ID NO: 2165991 - DNA, 25 bp, Homo sapien
gtgtatcactgaaccttagccaagt

SEQ ID NO: 2165992 - DNA, 25 bp, Homo sapien
taggattgattggtgtaggcatctc

SEQ ID NO: 2165993 - DNA, 25 bp, Homo sapien
tccccatccgggaggaatgctcatt

SEQ ID NO: 2165994 - DNA, 25 bp, Homo sapien
ggtctcgtgagtcagttacaatcaa

SEQ ID NO: 2165995 - DNA, 25 bp, Homo sapien
gccaggacgtgaattactgttaatc

SEQ ID NO: 2165996 - DNA, 25 bp, Homo sapien
cggattgtctccaactgagcggctg

SEQ ID NO: 2165997 - DNA, 25 bp, Homo sapien
ttaataagcaggatccccaccggat

SEQ ID NO: 2165998 - DNA, 25 bp, Homo sapien
gttgacttcttaaagccaactccag

SEQ ID NO: 2165999 - DNA, 25 bp, Homo sapien
ttgacttcttaaagccaactccagt

SEQ ID NO: 2166000 - DNA, 25 bp, Homo sapien
actccagtatcagaccccttccgca

SEQ ID NO: 2166001 - DNA, 25 bp, Homo sapien
gcagtgacctaagggtgtgttctga

SEQ ID NO: 2166002 - DNA, 25 bp, Homo sapien
tgaaggtcttaatgaggcagtgacc

SEQ ID NO: 2166003 - DNA, 25 bp, Homo sapien
tctgaaggatcggagaggtcatgac

SEQ ID NO: 2166004 - DNA, 25 bp, Homo sapien
gctacttgggcaatgggatcattag

SEQ ID NO: 2166005 - DNA, 25 bp, Homo sapien
tgagaacagctgtggcaatagacat

SEQ ID NO: 2166006 - DNA, 25 bp, Homo sapien
cccttccctcaatgatgatggtcct

SEQ ID NO: 2166007 - DNA, 25 bp, Homo sapien
ctgagaacagctgtggcaatagaca

SEQ ID NO: 2166008 - DNA, 25 bp, Homo sapien
aatgatgatggtcctgagaacagct

SEQ ID NO: 2166009 - DNA, 25 bp, Homo sapien
ttcaagttcatcaattcccaactct

SEQ ID NO: 2166010 - DNA, 25 bp, Homo sapien
caagttcatcaattcccaactcttt

SEQ ID NO: 2166011 - DNA, 25 bp, Homo sapien
cttcaagttcatcaattcccaactc

SEQ ID NO: 2166012 - DNA, 25 bp, Homo sapien
tcaagttcatcaattcccaactctt

SEQ ID NO: 2166013 - DNA, 25 bp, Homo sapien
tgaaaacgctgtgacaaagtgccac

SEQ ID NO: 2166014 - DNA, 25 bp, Homo sapien
acaaagtgccacaggagcgtgctgg

SEQ ID NO: 2166015 - DNA, 25 bp, Homo sapien
caagaggtccggcaagttgactggt

SEQ ID NO: 2166016 - DNA, 25 bp, Homo sapien
tccggcaagttgactggtgaaaacg

SEQ ID NO: 2166017 - DNA, 25 bp, Homo sapien
actctggcattgaacataaacttcc

SEQ ID NO: 2166018 - DNA, 25 bp, Homo sapien
tggcattgaacataaacttccgcac

SEQ ID NO: 2166019 - DNA, 25 bp, Homo sapien
gcattgaacataaacttccgcacca

SEQ ID NO: 2166020 - DNA, 25 bp, Homo sapien
tctggcattgaacataaacttccgc

SEQ ID NO: 2166021 - DNA, 25 bp, Homo sapien
cattgcatgatcttcaccaacagcc

SEQ ID NO: 2166022 - DNA, 25 bp, Homo sapien
ttgcatgatcttcaccaacagccat

SEQ ID NO: 2166023 - DNA, 25 bp, Homo sapien
attgcatgatcttcaccaacagcca

SEQ ID NO: 2166024 - DNA, 25 bp, Homo sapien
catggggtgatgctgttgctgctgc

SEQ ID NO: 2166025 - DNA, 25 bp, Homo sapien
tcatggggtgatgctgttgctgctg

SEQ ID NO: 2166026 - DNA, 25 bp, Homo sapien
cctgctcatctaatcccaggagcag

SEQ ID NO: 2166027 - DNA, 25 bp, Homo sapien
gagacggcaaaacggggagcagaga

SEQ ID NO: 2166028 - DNA, 25 bp, Homo sapien
cagagagagagcgtctgagacagag

SEQ ID NO: 2166029 - DNA, 25 bp, Homo sapien
gagagcgtctgagacagagatgcca

SEQ ID NO: 2166030 - DNA, 25 bp, Homo sapien
tctttgggcaccctggtcgtcgtgg

SEQ ID NO: 2166031 - DNA, 25 bp, Homo sapien
agggcacaggctgggatacgctccg

SEQ ID NO: 2166032 - DNA, 25 bp, Homo sapien
gcgctggaagcctctaggtggcact

SEQ ID NO: 2166033 - DNA, 25 bp, Homo sapien
caaagcccgcagagacaaaaactct

SEQ ID NO: 2166034 - DNA, 25 bp, Homo sapien
gaaacaccaactgatacttgccaag

SEQ ID NO: 2166035 - DNA, 25 bp, Homo sapien
gctgtgggattggatggaacaacca

SEQ ID NO: 2166036 - DNA, 25 bp, Homo sapien
gcctatacctgaacagcacggtgtt

SEQ ID NO: 2166037 - DNA, 25 bp, Homo sapien
ggaacaaccatattgaaacaccaac

SEQ ID NO: 2166038 - DNA, 25 bp, Homo sapien
aagagctcttgctgagaatgactgt

SEQ ID NO: 2166039 - DNA, 25 bp, Homo sapien
gctgagaatgactgttccagactcg

SEQ ID NO: 2166040 - DNA, 25 bp, Homo sapien
tgttccagactcgatgccagtgacc

SEQ ID NO: 2166041 - DNA, 25 bp, Homo sapien
gaatgactgttccagactcgatgcc

SEQ ID NO: 2166042 - DNA, 25 bp, Homo sapien
cactggtcctcgtctgcgtctcggt

SEQ ID NO: 2166043 - DNA, 25 bp, Homo sapien
ccctgaactcgcgtgaacactggtc

SEQ ID NO: 2166044 - DNA, 25 bp, Homo sapien
tcctcgtctgcgtctcggtcgctga

SEQ ID NO: 2166045 - DNA, 25 bp, Homo sapien
gaactcgcgtgaacactggtcctcg

SEQ ID NO: 2166046 - DNA, 25 bp, Homo sapien
agccactccacgttgagccgggact

SEQ ID NO: 2166047 - DNA, 25 bp, Homo sapien
actccacgttgagccgggacttgcc

SEQ ID NO: 2166048 - DNA, 25 bp, Homo sapien
tggctccgcggcgtgcgccctgcca

SEQ ID NO: 2166049 - DNA, 25 bp, Homo sapien
aggcctggcgagtagcccagccact

SEQ ID NO: 2166050 - DNA, 25 bp, Homo sapien
ctccgcgagggaacggccgaggcgg

SEQ ID NO: 2166051 - DNA, 25 bp, Homo sapien
gcggcggagctgggctcggcggccg

SEQ ID NO: 2166052 - DNA, 25 bp, Homo sapien
gggctcggcggccgcgctcagtaag

SEQ ID NO: 2166053 - DNA, 25 bp, Homo sapien
cacaggcgctcggcggcggagctgg

SEQ ID NO: 2166054 - DNA, 25 bp, Homo sapien
ggtgtagccgtgccggcacaggcgc

SEQ ID NO: 2166055 - DNA, 25 bp, Homo sapien
aggctgcagtgcgttcagcgccgcc

SEQ ID NO: 2166056 - DNA, 25 bp, Homo sapien
gcagtgcgttcagcgccgccttatc

SEQ ID NO: 2166057 - DNA, 25 bp, Homo sapien
gctgcagtgcgttcagcgccgcctt

SEQ ID NO: 2166058 - DNA, 25 bp, Homo sapien
agcgccgccttatccgggcgctcca

SEQ ID NO: 2166059 - DNA, 25 bp, Homo sapien
agctgtgaagaacaggagcgtcttc

SEQ ID NO: 2166060 - DNA, 25 bp, Homo sapien
caaatatgtaagatttagttgtgaa

SEQ ID NO: 2166061 - DNA, 25 bp, Homo sapien
gaaatataacccaataggaacagtg

SEQ ID NO: 2166062 - DNA, 25 bp, Homo sapien
ggagcgtcttcagtgtagatgctaa

SEQ ID NO: 2166063 - DNA, 25 bp, Homo sapien
acatggacggcgaccactgcaacaa

SEQ ID NO: 2166064 - DNA, 25 bp, Homo sapien
tgtttgccttcacgccactgtcgtg

SEQ ID NO: 2166065 - DNA, 25 bp, Homo sapien
caatagcagcgtaaaaatagctgtc

SEQ ID NO: 2166066 - DNA, 25 bp, Homo sapien
tccctattggacatcccaagggcgc

SEQ ID NO: 2166067 - DNA, 25 bp, Homo sapien
aatgctataaaaaggtgatgttcac

SEQ ID NO: 2166068 - DNA, 25 bp, Homo sapien
tcagatggccccctccagcatttat

SEQ ID NO: 2166069 - DNA, 25 bp, Homo sapien
ttcaactttattcaaatcagatggc

SEQ ID NO: 2166070 - DNA, 25 bp, Homo sapien
tgaatttaatgctataaaaaggtga

SEQ ID NO: 2166071 - DNA, 25 bp, Homo sapien
gcatcgacgtcaagagacatctcgt

SEQ ID NO: 2166072 - DNA, 25 bp, Homo sapien
tatacacggcttgaaatgcagcaca

SEQ ID NO: 2166073 - DNA, 25 bp, Homo sapien
ttggtctgcaaagcacaaagctggc

SEQ ID NO: 2166074 - DNA, 25 bp, Homo sapien
gaaaaaggactacattctccagggc

SEQ ID NO: 2166075 - DNA, 25 bp, Homo sapien
gataatccaggataaacagttcctc

SEQ ID NO: 2166076 - DNA, 25 bp, Homo sapien
tctgcatgggtatgtctcaaattcc

SEQ ID NO: 2166077 - DNA, 25 bp, Homo sapien
gagagccacactcctccgagaggct

SEQ ID NO: 2166078 - DNA, 25 bp, Homo sapien
tacataaggtaatatccacaggttc

SEQ ID NO: 2166079 - DNA, 25 bp, Homo sapien
ggtacgtgggcctggcttggaaggc

SEQ ID NO: 2166080 - DNA, 25 bp, Homo sapien
gaaggcccagcccaactgtagttct

SEQ ID NO: 2166081 - DNA, 25 bp, Homo sapien
tggccagctgactcaggcctgtcct

SEQ ID NO: 2166082 - DNA, 25 bp, Homo sapien
ttctggtttggccagctgactcagg

SEQ ID NO: 2166083 - DNA, 25 bp, Homo sapien
agtgccatgcttatccatctccagg

SEQ ID NO: 2166084 - DNA, 25 bp, Homo sapien
caagtggtattagcctgtcaatcta

SEQ ID NO: 2166085 - DNA, 25 bp, Homo sapien
tatgcccctaaagtacctcatccat

SEQ ID NO: 2166086 - DNA, 25 bp, Homo sapien
cctggtcaacaacagacacttggtg

SEQ ID NO: 2166087 - DNA, 25 bp, Homo sapien
gattatcaccttgctcagggcacaa

SEQ ID NO: 2166088 - DNA, 25 bp, Homo sapien
tcaccttgctcagggcacaacacta

SEQ ID NO: 2166089 - DNA, 25 bp, Homo sapien
tgtgaatcccagatgattatcacct

SEQ ID NO: 2166090 - DNA, 25 bp, Homo sapien
atgattatcaccttgctcagggcac

SEQ ID NO: 2166091 - DNA, 25 bp, Homo sapien
tccatgttggtattctctcgaggta

SEQ ID NO: 2166092 - DNA, 25 bp, Homo sapien
tcctccatgttggtattctctcgag

SEQ ID NO: 2166093 - DNA, 25 bp, Homo sapien
aactcctccatgttggtattctctc

SEQ ID NO: 2166094 - DNA, 25 bp, Homo sapien
catgttggtattctctcgaggtagg

SEQ ID NO: 2166095 - DNA, 25 bp, Homo sapien
gataaggcctgaacttgttaacttg

SEQ ID NO: 2166096 - DNA, 25 bp, Homo sapien
ttgcctttccaaactcaataccaag

SEQ ID NO: 2166097 - DNA, 25 bp, Homo sapien
tatccccctacaaccttcaggataa

SEQ ID NO: 2166098 - DNA, 25 bp, Homo sapien
tcttggcaagccttttacaatttgc

SEQ ID NO: 2166099 - DNA, 25 bp, Homo sapien
tctcttccccagagtgggcttcaca

SEQ ID NO: 2166100 - DNA, 25 bp, Homo sapien
catctcttccccagagtgggcttca

SEQ ID NO: 2166101 - DNA, 25 bp, Homo sapien
gtgggcttcacagaggccccagggg

SEQ ID NO: 2166102 - DNA, 25 bp, Homo sapien
ctcatctcttccccagagtgggctt

SEQ ID NO: 2166103 - DNA, 25 bp, Homo sapien
tccgatgagataaatgagaacaaga

SEQ ID NO: 2166104 - DNA, 25 bp, Homo sapien
gagcagctagccagaagaggtacca

SEQ ID NO: 2166105 - DNA, 25 bp, Homo sapien
gaacaagagctaagatatctccagg

SEQ ID NO: 2166106 - DNA, 25 bp, Homo sapien
tccccggcagtattttgctaaaagc

SEQ ID NO: 2166107 - DNA, 25 bp, Homo sapien
taattctcaatcacctctagccaag

SEQ ID NO: 2166108 - DNA, 25 bp, Homo sapien
tattaaccttttgctctgatctgcc

SEQ ID NO: 2166109 - DNA, 25 bp, Homo sapien
aaacattggcatcaaacttgtcacc

SEQ ID NO: 2166110 - DNA, 25 bp, Homo sapien
gctaacttgatatcgccatttggag

SEQ ID NO: 2166111 - DNA, 25 bp, Homo sapien
taaatactgatcagttgccttctgc

SEQ ID NO: 2166112 - DNA, 25 bp, Homo sapien
ctgtaatcaaatgaactctttgagt

SEQ ID NO: 2166113 - DNA, 25 bp, Homo sapien
aagtttcttgaattcaggcagacat

SEQ ID NO: 2166114 - DNA, 25 bp, Homo sapien
tctttaaacaatcaggatccacaag

SEQ ID NO: 2166115 - DNA, 25 bp, Homo sapien
ttgtttctcaactgtaactggagga

SEQ ID NO: 2166116 - DNA, 25 bp, Homo sapien
tgtttctcaactgtaactggaggaa

SEQ ID NO: 2166117 - DNA, 25 bp, Homo sapien
ctggaggaacagactccaatggcat

SEQ ID NO: 2166118 - DNA, 25 bp, Homo sapien
taactggaggaacagactccaatgg

SEQ ID NO: 2166119 - DNA, 25 bp, Homo sapien
tcaggttttcttgaagtggtagtct

SEQ ID NO: 2166120 - DNA, 25 bp, Homo sapien
caggttttcttgaagtggtagtctt

SEQ ID NO: 2166121 - DNA, 25 bp, Homo sapien
tatcatcttgtagtcttcttctcaa

SEQ ID NO: 2166122 - DNA, 25 bp, Homo sapien
atcatcttgtagtcttcttctcaaa

SEQ ID NO: 2166123 - DNA, 25 bp, Homo sapien
gttggaggcttgtgctttactggcc

SEQ ID NO: 2166124 - DNA, 25 bp, Homo sapien
ctgggttggaggcttgtgctttact

SEQ ID NO: 2166125 - DNA, 25 bp, Homo sapien
gggttggaggcttgtgctttactgg

SEQ ID NO: 2166126 - DNA, 25 bp, Homo sapien
tggaggcttgtgctttactggccat

SEQ ID NO: 2166127 - DNA, 25 bp, Homo sapien
gtgttgtgggtggttgtccctcgac

SEQ ID NO: 2166128 - DNA, 25 bp, Homo sapien
tgttgtgggtggttgtccctcgaca

SEQ ID NO: 2166129 - DNA, 25 bp, Homo sapien
gttgtgggtggttgtccctcgacaa

SEQ ID NO: 2166130 - DNA, 25 bp, Homo sapien
tggaactccctcaaagactctcttt

SEQ ID NO: 2166131 - DNA, 25 bp, Homo sapien
gaagcggcggtctttcgggagtggc

SEQ ID NO: 2166132 - DNA, 25 bp, Homo sapien
ggctggatagcgttggccctctccc

SEQ ID NO: 2166133 - DNA, 25 bp, Homo sapien
cctggaactccctcaaagactctct

SEQ ID NO: 2166134 - DNA, 25 bp, Homo sapien
ctgtccagggagacgctggagatgg

SEQ ID NO: 2166135 - DNA, 25 bp, Homo sapien
ccagggagacgctggagatggtgga

SEQ ID NO: 2166136 - DNA, 25 bp, Homo sapien
gggagacgctggagatggtggaagt

SEQ ID NO: 2166137 - DNA, 25 bp, Homo sapien
gagacgctggagatggtggaagtct

SEQ ID NO: 2166138 - DNA, 25 bp, Homo sapien
aaatgtaccatagacccttttggct

SEQ ID NO: 2166139 - DNA, 25 bp, Homo sapien
ccctgttgtgtgtaaaatgtaccat

SEQ ID NO: 2166140 - DNA, 25 bp, Homo sapien
tagatctagtcctttgaacttgccc

SEQ ID NO: 2166141 - DNA, 25 bp, Homo sapien
tggagacctctcagatagatctagt

SEQ ID NO: 2166142 - DNA, 25 bp, Homo sapien
tcttcagggaagtgcgtgggcccca

SEQ ID NO: 2166143 - DNA, 25 bp, Homo sapien
ccccagagtgcaaagcgcgtggtgg

SEQ ID NO: 2166144 - DNA, 25 bp, Homo sapien
gtgggccccagagtgcaaagcgcgt

SEQ ID NO: 2166145 - DNA, 25 bp, Homo sapien
ggccccagagtgcaaagcgcgtggt

SEQ ID NO: 2166146 - DNA, 25 bp, Homo sapien
tggggtaccttgaagctcctccctg

SEQ ID NO: 2166147 - DNA, 25 bp, Homo sapien
tcctccctgtggtctccggtgagag

SEQ ID NO: 2166148 - DNA, 25 bp, Homo sapien
tccctgtggtctccggtgagagccc

SEQ ID NO: 2166149 - DNA, 25 bp, Homo sapien
tctccggtgagagcccgggagcctg

SEQ ID NO: 2166150 - DNA, 25 bp, Homo sapien
gatagtctatccagatcatcttaga

SEQ ID NO: 2166151 - DNA, 25 bp, Homo sapien
caccagggaattcaataatcacata

SEQ ID NO: 2166152 - DNA, 25 bp, Homo sapien
taaaaaatagcccatctaacaacac

SEQ ID NO: 2166153 - DNA, 25 bp, Homo sapien
actgatgagtgttatgtatgggcac

SEQ ID NO: 2166154 - DNA, 25 bp, Homo sapien
tcattattcagtgacgtaggaagac

SEQ ID NO: 2166155 - DNA, 25 bp, Homo sapien
cattattcagtgacgtaggaagact

SEQ ID NO: 2166156 - DNA, 25 bp, Homo sapien
attattcagtgacgtaggaagactc

SEQ ID NO: 2166157 - DNA, 25 bp, Homo sapien
tcttctcttttcccctctcatcttc

SEQ ID NO: 2166158 - DNA, 25 bp, Homo sapien
cttctcttttcccctctcatcttca

SEQ ID NO: 2166159 - DNA, 25 bp, Homo sapien
ttctcttttcccctctcatcttcat

SEQ ID NO: 2166160 - DNA, 25 bp, Homo sapien
ctcttctcttttcccctctcatctt

SEQ ID NO: 2166161 - DNA, 25 bp, Homo sapien
cttggttgaagtaatcataggtagg

SEQ ID NO: 2166162 - DNA, 25 bp, Homo sapien
ctgtagcgtcacttggttgaagtaa

SEQ ID NO: 2166163 - DNA, 25 bp, Homo sapien
gcgtcacttggttgaagtaatcata

SEQ ID NO: 2166164 - DNA, 25 bp, Homo sapien
ttgaagtaatcataggtaggaaatg

SEQ ID NO: 2166165 - DNA, 25 bp, Homo sapien
tccatctgtgctcagtgtaatcata

SEQ ID NO: 2166166 - DNA, 25 bp, Homo sapien
gtgtaatcataaagccatctaataa

SEQ ID NO: 2166167 - DNA, 25 bp, Homo sapien
catctgtgctcagtgtaatcataaa

SEQ ID NO: 2166168 - DNA, 25 bp, Homo sapien
agtgtaatcataaagccatctaata

SEQ ID NO: 2166169 - DNA, 25 bp, Homo sapien
aatcttttggtagacttcatctttc

SEQ ID NO: 2166170 - DNA, 25 bp, Homo sapien
taataattttttgcccacaatctca

SEQ ID NO: 2166171 - DNA, 25 bp, Homo sapien
cttcatcaggcagaaggcttaataa

SEQ ID NO: 2166172 - DNA, 25 bp, Homo sapien
tgagtttagtaaaggaaatttgaga

SEQ ID NO: 2166173 - DNA, 25 bp, Homo sapien
cagaactatcaccatgttcgacatt

SEQ ID NO: 2166174 - DNA, 25 bp, Homo sapien
catgttcgacatttcctctttttaa

SEQ ID NO: 2166175 - DNA, 25 bp, Homo sapien
gttttcgtaagcagaactatcacca

SEQ ID NO: 2166176 - DNA, 25 bp, Homo sapien
cattcacaataaatttcacgttttc

SEQ ID NO: 2166177 - DNA, 25 bp, Homo sapien
caagccactaaagaccacaggaaac

SEQ ID NO: 2166178 - DNA, 25 bp, Homo sapien
cctcctgaggaacacatgcagcaaa

SEQ ID NO: 2166179 - DNA, 25 bp, Homo sapien
ttcccacaagataaagccgatcctc

SEQ ID NO: 2166180 - DNA, 25 bp, Homo sapien
gtcagcacagaggtggctggaaaac

SEQ ID NO: 2166181 - DNA, 25 bp, Homo sapien
cctcatctgaatcttgtgtaagtac

SEQ ID NO: 2166182 - DNA, 25 bp, Homo sapien
tctgaatcttgtgtaagtacagctt

SEQ ID NO: 2166183 - DNA, 25 bp, Homo sapien
gaatcttgtgtaagtacagcttcat

SEQ ID NO: 2166184 - DNA, 25 bp, Homo sapien
catctgaatcttgtgtaagtacagc

SEQ ID NO: 2166185 - DNA, 25 bp, Homo sapien
tcatattcaaagttgggccgcaccc

SEQ ID NO: 2166186 - DNA, 25 bp, Homo sapien
accaggtgtcagcatgtgagtatct

SEQ ID NO: 2166187 - DNA, 25 bp, Homo sapien
tgggtgtcggagcacagagtcatct

SEQ ID NO: 2166188 - DNA, 25 bp, Homo sapien
tgtatgtggcctccaagctggaagt

SEQ ID NO: 2166189 - DNA, 25 bp, Homo sapien
ctctccagcagagtaatttattact

SEQ ID NO: 2166190 - DNA, 25 bp, Homo sapien
cctctccagcagagtaatttattac

SEQ ID NO: 2166191 - DNA, 25 bp, Homo sapien
agcagcagcgggttcaacgtacacg

SEQ ID NO: 2166192 - DNA, 25 bp, Homo sapien
tcatgctagtgtgtcctctttgacc

SEQ ID NO: 2166193 - DNA, 25 bp, Homo sapien
cacggctttcatgctagtgtgtcct

SEQ ID NO: 2166194 - DNA, 25 bp, Homo sapien
gcgggttcaacgtacacggctttca

SEQ ID NO: 2166195 - DNA, 25 bp, Homo sapien
tgctcaacctctgcaatatcaattt

SEQ ID NO: 2166196 - DNA, 25 bp, Homo sapien
gtgaacgttttcttgtggtccatac

SEQ ID NO: 2166197 - DNA, 25 bp, Homo sapien
tgaacgttttcttgtggtccatact

SEQ ID NO: 2166198 - DNA, 25 bp, Homo sapien
gtggtccatactgctcaacctctgc

SEQ ID NO: 2166199 - DNA, 25 bp, Homo sapien
ctgtactggagcaataagttgaatc

SEQ ID NO: 2166200 - DNA, 25 bp, Homo sapien
ggaaaactgtactggagcaataagt

SEQ ID NO: 2166201 - DNA, 25 bp, Homo sapien
ctggagcaataagttgaatcagaat

SEQ ID NO: 2166202 - DNA, 25 bp, Homo sapien
tccaggaaaactgtactggagcaat

SEQ ID NO: 2166203 - DNA, 25 bp, Homo sapien
tgaggaagaaagcacaggggagttc

SEQ ID NO: 2166204 - DNA, 25 bp, Homo sapien
aggaagaaagcacaggggagttcat

SEQ ID NO: 2166205 - DNA, 25 bp, Homo sapien
ctgaggaagaaagcacaggggagtt

SEQ ID NO: 2166206 - DNA, 25 bp, Homo sapien
gaggaagaaagcacaggggagttca

SEQ ID NO: 2166207 - DNA, 25 bp, Homo sapien
cctcgaaagtcttgcaaggataagg

SEQ ID NO: 2166208 - DNA, 25 bp, Homo sapien
ggtcctgctggtccattgggccctc

SEQ ID NO: 2166209 - DNA, 25 bp, Homo sapien
gggtctgccctgtacaatggattca

SEQ ID NO: 2166210 - DNA, 25 bp, Homo sapien
tgatccaccgagaactccaggtcca

SEQ ID NO: 2166211 - DNA, 25 bp, Homo sapien
tgaaggtgatccatcatcaattcca

SEQ ID NO: 2166212 - DNA, 25 bp, Homo sapien
ccagttcctggctaatgatgtcata

SEQ ID NO: 2166213 - DNA, 25 bp, Homo sapien
caactggtgatgatggctgtaatgg

SEQ ID NO: 2166214 - DNA, 25 bp, Homo sapien
tttggatggcatcatgcagcaacca

SEQ ID NO: 2166215 - DNA, 25 bp, Homo sapien
gatcaggaatgacaacgtggcgtaa

SEQ ID NO: 2166216 - DNA, 25 bp, Homo sapien
cagaaacacttgacgtccttgggat

SEQ ID NO: 2166217 - DNA, 25 bp, Homo sapien
gaaggcaacacaaggctcctgaagc

SEQ ID NO: 2166218 - DNA, 25 bp, Homo sapien
ttgggcactgcctccgaagattgga

SEQ ID NO: 2166219 - DNA, 25 bp, Homo sapien
tgacattatgcttcagtggctgctc

SEQ ID NO: 2166220 - DNA, 25 bp, Homo sapien
tctcattccccacgatgacattatg

SEQ ID NO: 2166221 - DNA, 25 bp, Homo sapien
tacgtcacgtgggttttgcaggcat

SEQ ID NO: 2166222 - DNA, 25 bp, Homo sapien
aatctaacagggtgattgcagaggg

SEQ ID NO: 2166223 - DNA, 25 bp, Homo sapien
aagccagagggctgttgttcagctg

SEQ ID NO: 2166224 - DNA, 25 bp, Homo sapien
tcttcctgttgcccacagttttcat

SEQ ID NO: 2166225 - DNA, 25 bp, Homo sapien
ttcctgttgcccacagttttcatct

SEQ ID NO: 2166226 - DNA, 25 bp, Homo sapien
agccagagggctgttgttcagctgc

SEQ ID NO: 2166227 - DNA, 25 bp, Homo sapien
gtttgaggtatctatcaatggcagc

SEQ ID NO: 2166228 - DNA, 25 bp, Homo sapien
agaagaaattgcctcagagtttgag

SEQ ID NO: 2166229 - DNA, 25 bp, Homo sapien
gggcccttgatacgcctcaggataa

SEQ ID NO: 2166230 - DNA, 25 bp, Homo sapien
gtatctatcaatggcagctggttca

SEQ ID NO: 2166231 - DNA, 25 bp, Homo sapien
tcagacaactcttgccaaagccgga

SEQ ID NO: 2166232 - DNA, 25 bp, Homo sapien
caacaggaccgagtgaatcagacaa

SEQ ID NO: 2166233 - DNA, 25 bp, Homo sapien
caagtgttcacttggacaacaggac

SEQ ID NO: 2166234 - DNA, 25 bp, Homo sapien
tgctcatcgcaagaccaagtgttca

SEQ ID NO: 2166235 - DNA, 25 bp, Homo sapien
agatggtgttacaaagtatgggctg

SEQ ID NO: 2166236 - DNA, 25 bp, Homo sapien
gatggtgttacaaagtatgggctga

SEQ ID NO: 2166237 - DNA, 25 bp, Homo sapien
atggtgttacaaagtatgggctgag

SEQ ID NO: 2166238 - DNA, 25 bp, Homo sapien
tttagttcaaatacacaagctgctg

SEQ ID NO: 2166239 - DNA, 25 bp, Homo sapien
caaggtggaatgtttgctagagtct

SEQ ID NO: 2166240 - DNA, 25 bp, Homo sapien
gagaaatacttctttggaacatgag

SEQ ID NO: 2166241 - DNA, 25 bp, Homo sapien
tagttcaaatacacaagctgctgag

SEQ ID NO: 2166242 - DNA, 25 bp, Homo sapien
ggcatcaatctggtctgctccgcag

SEQ ID NO: 2166243 - DNA, 25 bp, Homo sapien
ttagcacggcttatttgagtcacgt

SEQ ID NO: 2166244 - DNA, 25 bp, Homo sapien
gagtcacgttgctctgcaggcatca

SEQ ID NO: 2166245 - DNA, 25 bp, Homo sapien
catctggtctggctggtatgcagca

SEQ ID NO: 2166246 - DNA, 25 bp, Homo sapien
tagcatactacggatcacaggctgc

SEQ ID NO: 2166247 - DNA, 25 bp, Homo sapien
ggcagacaagacatcagatccagct

SEQ ID NO: 2166248 - DNA, 25 bp, Homo sapien
tgatcatcagggtcaagacctcgga

SEQ ID NO: 2166249 - DNA, 25 bp, Homo sapien
tgggcttctccaacaagactatgga

SEQ ID NO: 2166250 - DNA, 25 bp, Homo sapien
caatgaaggagccagcatgcctgag

SEQ ID NO: 2166251 - DNA, 25 bp, Homo sapien
ggctgcccttggtgtcaatgaagga

SEQ ID NO: 2166252 - DNA, 25 bp, Homo sapien
tgcccttggtgtcaatgaaggagcc

SEQ ID NO: 2166253 - DNA, 25 bp, Homo sapien
tcagagttcagtgggcctgtggctg

SEQ ID NO: 2166254 - DNA, 25 bp, Homo sapien
ttggctatccgaacctctctctgca

SEQ ID NO: 2166255 - DNA, 25 bp, Homo sapien
tcttggtgcttgacttgtaaccaaa

SEQ ID NO: 2166256 - DNA, 25 bp, Homo sapien
tctgcaccatgcagacaactgtgaa

SEQ ID NO: 2166257 - DNA, 25 bp, Homo sapien
acaatgacctctggtttggctatcc

SEQ ID NO: 2166258 - DNA, 25 bp, Homo sapien
ttttgattctgcagggttgtgggtt

SEQ ID NO: 2166259 - DNA, 25 bp, Homo sapien
tactgcaatttgtctgtcctgtctg

SEQ ID NO: 2166260 - DNA, 25 bp, Homo sapien
gcctctctgtaattgacatgttttg

SEQ ID NO: 2166261 - DNA, 25 bp, Homo sapien
gaccaggtggttaattagcctttga

SEQ ID NO: 2166262 - DNA, 25 bp, Homo sapien
gcaagccttgaccagttgcctcttt

SEQ ID NO: 2166263 - DNA, 25 bp, Homo sapien
ctgccattcaggcccgccgggctcc

SEQ ID NO: 2166264 - DNA, 25 bp, Homo sapien
gagaggggggctagcctgcaaccta

SEQ ID NO: 2166265 - DNA, 25 bp, Homo sapien
tgccattcaggcccgccgggctcct

SEQ ID NO: 2166266 - DNA, 25 bp, Homo sapien
acgaaaagagaggggggctagcctg

SEQ ID NO: 2166267 - DNA, 25 bp, Homo sapien
gcggccgccctgtttgcgcacgcag

SEQ ID NO: 2166268 - DNA, 25 bp, Homo sapien
aaggcggccgccctgtttgcgcacg

SEQ ID NO: 2166269 - DNA, 25 bp, Homo sapien
aggcggccgccctgtttgcgcacgc

SEQ ID NO: 2166270 - DNA, 25 bp, Homo sapien
ggccgccctgtttgcgcacgcagcc

SEQ ID NO: 2166271 - DNA, 25 bp, Homo sapien
cccggagctgttcaatacgccccat

SEQ ID NO: 2166272 - DNA, 25 bp, Homo sapien
agcgccctgacccagcaacactctt

SEQ ID NO: 2166273 - DNA, 25 bp, Homo sapien
acaccagcgccctgacccagcaaca

SEQ ID NO: 2166274 - DNA, 25 bp, Homo sapien
agcaacactcttctcccggagctgt

SEQ ID NO: 2166275 - DNA, 25 bp, Homo sapien
tccccgcaggaacacagctgaatcc

SEQ ID NO: 2166276 - DNA, 25 bp, Homo sapien
cccgcaggaacacagctgaatcctg

SEQ ID NO: 2166277 - DNA, 25 bp, Homo sapien
aggaacacagctgaatcctgacagc

SEQ ID NO: 2166278 - DNA, 25 bp, Homo sapien
gcaggaacacagctgaatcctgaca

SEQ ID NO: 2166279 - DNA, 25 bp, Homo sapien
aagcttcagtcgagccaggaacacc

SEQ ID NO: 2166280 - DNA, 25 bp, Homo sapien
cattagcaattctgtagccaccttc

SEQ ID NO: 2166281 - DNA, 25 bp, Homo sapien
tccccaaaatgtagcgcctgcttct

SEQ ID NO: 2166282 - DNA, 25 bp, Homo sapien
gcatggcccactccattagcaattc

SEQ ID NO: 2166283 - DNA, 25 bp, Homo sapien
gatagatgaggagatacagcccaga

SEQ ID NO: 2166284 - DNA, 25 bp, Homo sapien
cttccaattggaaaggacctcagag

SEQ ID NO: 2166285 - DNA, 25 bp, Homo sapien
gagcatctataagaaccaagggttg

SEQ ID NO: 2166286 - DNA, 25 bp, Homo sapien
cgggctcagacaaggttaagcaaat

SEQ ID NO: 2166287 - DNA, 25 bp, Homo sapien
gatgctccctcagctgcagggtctc

SEQ ID NO: 2166288 - DNA, 25 bp, Homo sapien
gctccctcagctgcagggtctcact

SEQ ID NO: 2166289 - DNA, 25 bp, Homo sapien
ccctcagctgcagggtctcacttct

SEQ ID NO: 2166290 - DNA, 25 bp, Homo sapien
tgctccctcagctgcagggtctcac

SEQ ID NO: 2166291 - DNA, 25 bp, Homo sapien
tccatgcactctcgctcgatggtgc

SEQ ID NO: 2166292 - DNA, 25 bp, Homo sapien
tcaggaccgaatgggcatccttggc

SEQ ID NO: 2166293 - DNA, 25 bp, Homo sapien
gcactctcgctcgatggtgccctgg

SEQ ID NO: 2166294 - DNA, 25 bp, Homo sapien
caggaactcattggcacgagggaat

SEQ ID NO: 2166295 - DNA, 25 bp, Homo sapien
ctctttgttctcaaacacttccttg

SEQ ID NO: 2166296 - DNA, 25 bp, Homo sapien
ttctctttgttctcaaacacttcct

SEQ ID NO: 2166297 - DNA, 25 bp, Homo sapien
cgttttctctttgttctcaaacact

SEQ ID NO: 2166298 - DNA, 25 bp, Homo sapien
ctttgttctcaaacacttccttgac

SEQ ID NO: 2166299 - DNA, 25 bp, Homo sapien
tttatctgctccgtgatggccctag

SEQ ID NO: 2166300 - DNA, 25 bp, Homo sapien
cctagtggctatgccttaggctggg

SEQ ID NO: 2166301 - DNA, 25 bp, Homo sapien
tctgattggtctgcattaccagggc

SEQ ID NO: 2166302 - DNA, 25 bp, Homo sapien
taccagggcctgttcttgctattcc

SEQ ID NO: 2166303 - DNA, 25 bp, Homo sapien
tgaacaaggcgatgacaatcagcag

SEQ ID NO: 2166304 - DNA, 25 bp, Homo sapien
catacatggcatctgagctctgcga

SEQ ID NO: 2166305 - DNA, 25 bp, Homo sapien
gggtctcggacagagtagactgcat

SEQ ID NO: 2166306 - DNA, 25 bp, Homo sapien
tgcatttgggtaccctttccagaac

SEQ ID NO: 2166307 - DNA, 25 bp, Homo sapien
ttggctatgcacagtaccccggtac

SEQ ID NO: 2166308 - DNA, 25 bp, Homo sapien
gttggcggccactatctcctcgtac

SEQ ID NO: 2166309 - DNA, 25 bp, Homo sapien
gggcgcagtcacctcctcgtaggag

SEQ ID NO: 2166310 - DNA, 25 bp, Homo sapien
tgggtcactgtaagacacgctggcc

SEQ ID NO: 2166311 - DNA, 25 bp, Homo sapien
ttatttggcaacaaggaggctaagg

SEQ ID NO: 2166312 - DNA, 25 bp, Homo sapien
ctttggcataagagaagccagttcc

SEQ ID NO: 2166313 - DNA, 25 bp, Homo sapien
ttctggccacaatcaactcaatggg

SEQ ID NO: 2166314 - DNA, 25 bp, Homo sapien
gaaagaggcgttcatccaggacagg

SEQ ID NO: 2166315 - DNA, 25 bp, Homo sapien
tcaatagtcacacatctttccatac

SEQ ID NO: 2166316 - DNA, 25 bp, Homo sapien
caatagtcacacatctttccataca

SEQ ID NO: 2166317 - DNA, 25 bp, Homo sapien
aatagtcacacatctttccatacac

SEQ ID NO: 2166318 - DNA, 25 bp, Homo sapien
gtcaatagtcacacatctttccata

SEQ ID NO: 2166319 - DNA, 25 bp, Homo sapien
catattcgggctaccaaaaaggcaa

SEQ ID NO: 2166320 - DNA, 25 bp, Homo sapien
gagatcaccctgtacatacgagaag

SEQ ID NO: 2166321 - DNA, 25 bp, Homo sapien
catgggatgtcactgggttgtcaaa

SEQ ID NO: 2166322 - DNA, 25 bp, Homo sapien
tcattttgaaaaccggaggcgatgg

SEQ ID NO: 2166323 - DNA, 25 bp, Homo sapien
tcttgctagagagagactcgctgcc

SEQ ID NO: 2166324 - DNA, 25 bp, Homo sapien
gaagatctgtgttaatgctcgggct

SEQ ID NO: 2166325 - DNA, 25 bp, Homo sapien
tcgctgcccacagtctgaaaggaaa

SEQ ID NO: 2166326 - DNA, 25 bp, Homo sapien
tcagttgcacatatcagggtttcca

SEQ ID NO: 2166327 - DNA, 25 bp, Homo sapien
ctctggcaaaagagcctaaagttca

SEQ ID NO: 2166328 - DNA, 25 bp, Homo sapien
tctggcaaaagagcctaaagttcaa

SEQ ID NO: 2166329 - DNA, 25 bp, Homo sapien
tggcaaaagagcctaaagttcaaaa

SEQ ID NO: 2166330 - DNA, 25 bp, Homo sapien
ctggcaaaagagcctaaagttcaaa

SEQ ID NO: 2166331 - DNA, 25 bp, Homo sapien
tgggtgtctagagcttttatatttt

SEQ ID NO: 2166332 - DNA, 25 bp, Homo sapien
atattttgggtgtctagagctttta

SEQ ID NO: 2166333 - DNA, 25 bp, Homo sapien
gcacagcaggtgcctataagtggaa

SEQ ID NO: 2166334 - DNA, 25 bp, Homo sapien
tgtagcactgagcattcctgaacat

SEQ ID NO: 2166335 - DNA, 25 bp, Homo sapien
ctatggctaaggatgcacagggtgc

SEQ ID NO: 2166336 - DNA, 25 bp, Homo sapien
agggtgccaggaacagaggagtcac

SEQ ID NO: 2166337 - DNA, 25 bp, Homo sapien
tatggctaaggatgcacagggtgcc

SEQ ID NO: 2166338 - DNA, 25 bp, Homo sapien
atggctaaggatgcacagggtgcca

SEQ ID NO: 2166339 - DNA, 25 bp, Homo sapien
cagggacatttccatctccgccttg

SEQ ID NO: 2166340 - DNA, 25 bp, Homo sapien
tgattcagttcttctgccagggaca

SEQ ID NO: 2166341 - DNA, 25 bp, Homo sapien
tttccccttggcgtccatgattcag

SEQ ID NO: 2166342 - DNA, 25 bp, Homo sapien
ggacatttccatctccgccttggtg

SEQ ID NO: 2166343 - DNA, 25 bp, Homo sapien
cacccatagaagttgcaccagggtt

SEQ ID NO: 2166344 - DNA, 25 bp, Homo sapien
ggtcgggtggcagtcatattccaaa

SEQ ID NO: 2166345 - DNA, 25 bp, Homo sapien
ggaccgagatccaagctccatcatt

SEQ ID NO: 2166346 - DNA, 25 bp, Homo sapien
aggcaccccgggaccgagatccaag

SEQ ID NO: 2166347 - DNA, 25 bp, Homo sapien
ccaaactcgtttggctgaagcagag

SEQ ID NO: 2166348 - DNA, 25 bp, Homo sapien
cctgctgaagtagagcctgtcattt

SEQ ID NO: 2166349 - DNA, 25 bp, Homo sapien
tcttcattctggcagggttcagggt

SEQ ID NO: 2166350 - DNA, 25 bp, Homo sapien
ctgaggcgcacagagtactgggtta

SEQ ID NO: 2166351 - DNA, 25 bp, Homo sapien
aataaaaccgtcttcattctggcag

SEQ ID NO: 2166352 - DNA, 25 bp, Homo sapien
gccaaaacctgaaccaaatgaataa

SEQ ID NO: 2166353 - DNA, 25 bp, Homo sapien
ccaaaacctgaaccaaatgaataag

SEQ ID NO: 2166354 - DNA, 25 bp, Homo sapien
ccaagccaaaacctgaaccaaatga

SEQ ID NO: 2166355 - DNA, 25 bp, Homo sapien
aagccaaaacctgaaccaaatgaat

SEQ ID NO: 2166356 - DNA, 25 bp, Homo sapien
atggcggcatatcacaagaaaggag

SEQ ID NO: 2166357 - DNA, 25 bp, Homo sapien
acaatggcggcatatcacaagaaag

SEQ ID NO: 2166358 - DNA, 25 bp, Homo sapien
aggacttagacctgcaaggacaatg

SEQ ID NO: 2166359 - DNA, 25 bp, Homo sapien
agaggacttagacctgcaaggacaa

SEQ ID NO: 2166360 - DNA, 25 bp, Homo sapien
taatggaaacgtatgccttggaaat

SEQ ID NO: 2166361 - DNA, 25 bp, Homo sapien
ttggaaattgccagcgtactcctgg

SEQ ID NO: 2166362 - DNA, 25 bp, Homo sapien
ttgccagcgtactcctggagatggg

SEQ ID NO: 2166363 - DNA, 25 bp, Homo sapien
tcataatggaaacgtatgccttgga

SEQ ID NO: 2166364 - DNA, 25 bp, Homo sapien
aagacagatggtcaaagctgctggt

SEQ ID NO: 2166365 - DNA, 25 bp, Homo sapien
aaaaagacagatggtcaaagctgct

SEQ ID NO: 2166366 - DNA, 25 bp, Homo sapien
agatggtcaaagctgctggtggtcc

SEQ ID NO: 2166367 - DNA, 25 bp, Homo sapien
acagatggtcaaagctgctggtggt

SEQ ID NO: 2166368 - DNA, 25 bp, Homo sapien
actcttccaggctagtctgcgccac

SEQ ID NO: 2166369 - DNA, 25 bp, Homo sapien
aactcttccaggctagtctgcgcca

SEQ ID NO: 2166370 - DNA, 25 bp, Homo sapien
cttccaggctagtctgcgccactgc

SEQ ID NO: 2166371 - DNA, 25 bp, Homo sapien
tcttccaggctagtctgcgccactg

SEQ ID NO: 2166372 - DNA, 25 bp, Homo sapien
aggttggcaatgctggccgacacca

SEQ ID NO: 2166373 - DNA, 25 bp, Homo sapien
gcgcagacgccggttgactgcatac

SEQ ID NO: 2166374 - DNA, 25 bp, Homo sapien
gcagacgccggttgactgcatacag

SEQ ID NO: 2166375 - DNA, 25 bp, Homo sapien
cacggcgatgatcagggtctccctg

SEQ ID NO: 2166376 - DNA, 25 bp, Homo sapien
tcaaagggtggcatctcagcccacg

SEQ ID NO: 2166377 - DNA, 25 bp, Homo sapien
tattgagcgtgttgtctgtgcagag

SEQ ID NO: 2166378 - DNA, 25 bp, Homo sapien
tgaaaatgatcctgacgctcctgag

SEQ ID NO: 2166379 - DNA, 25 bp, Homo sapien
gcaaggttgccactaggtgttactg

SEQ ID NO: 2166380 - DNA, 25 bp, Homo sapien
acgtgcctcgtgtcccacagggctg

SEQ ID NO: 2166381 - DNA, 25 bp, Homo sapien
ctttcctaggtgtccttttctctgc

SEQ ID NO: 2166382 - DNA, 25 bp, Homo sapien
caggggccacgtgcctcgtgtccca

SEQ ID NO: 2166383 - DNA, 25 bp, Homo sapien
ccacgtgcctcgtgtcccacagggc

SEQ ID NO: 2166384 - DNA, 25 bp, Homo sapien
acagcatcctgcttcaccatgggga

SEQ ID NO: 2166385 - DNA, 25 bp, Homo sapien
cagcatcctgcttcaccatggggaa

SEQ ID NO: 2166386 - DNA, 25 bp, Homo sapien
ggccagtcagcatccgttggtcctt

SEQ ID NO: 2166387 - DNA, 25 bp, Homo sapien
catctggagctaacagagatctcct

SEQ ID NO: 2166388 - DNA, 25 bp, Homo sapien
tgcacaacctccagtcagagacaaa

SEQ ID NO: 2166389 - DNA, 25 bp, Homo sapien
catggctaaggcaaactcaagacgc

SEQ ID NO: 2166390 - DNA, 25 bp, Homo sapien
gaaggatacacaaaaggcagggctt

SEQ ID NO: 2166391 - DNA, 25 bp, Homo sapien
ggtccttgagaactacttgttgaat

SEQ ID NO: 2166392 - DNA, 25 bp, Homo sapien
acagcagcttcatgaactaggtcct

SEQ ID NO: 2166393 - DNA, 25 bp, Homo sapien
ggtagtgggcctttgagtctgagct

SEQ ID NO: 2166394 - DNA, 25 bp, Homo sapien
cctttgctgggtgctgagtttagaa

SEQ ID NO: 2166395 - DNA, 25 bp, Homo sapien
tggtggtcccagagtaagagataga

SEQ ID NO: 2166396 - DNA, 25 bp, Homo sapien
cagtctcgagctcagtggtggtccc

SEQ ID NO: 2166397 - DNA, 25 bp, Homo sapien
caggaacacgatttatcccaagtca

SEQ ID NO: 2166398 - DNA, 25 bp, Homo sapien
ctggtgctctctgcggaactatggc

SEQ ID NO: 2166399 - DNA, 25 bp, Homo sapien
gaactatggcaccaggatagtaacg

SEQ ID NO: 2166400 - DNA, 25 bp, Homo sapien
tctgcggaactatggcaccaggata

SEQ ID NO: 2166401 - DNA, 25 bp, Homo sapien
tggcaccaggatagtaacgagggca

SEQ ID NO: 2166402 - DNA, 25 bp, Homo sapien
cttggagctgctcggcagcttaagc

SEQ ID NO: 2166403 - DNA, 25 bp, Homo sapien
gcagtggctgccttggagctgctcg

SEQ ID NO: 2166404 - DNA, 25 bp, Homo sapien
gctgctcggcagcttaagcatgtgc

SEQ ID NO: 2166405 - DNA, 25 bp, Homo sapien
ggcagcttaagcatgtgccagacat

SEQ ID NO: 2166406 - DNA, 25 bp, Homo sapien
gccaagaagaaggtcacagaggacc

SEQ ID NO: 2166407 - DNA, 25 bp, Homo sapien
ctgccaggaagagggccaagaagaa

SEQ ID NO: 2166408 - DNA, 25 bp, Homo sapien
gaagagggccaagaagaaggtcaca

SEQ ID NO: 2166409 - DNA, 25 bp, Homo sapien
ggccaagaagaaggtcacagaggac

SEQ ID NO: 2166410 - DNA, 25 bp, Homo sapien
cctccatgtacaaccagagcactta

SEQ ID NO: 2166411 - DNA, 25 bp, Homo sapien
ctccatgtacaaccagagcacttat

SEQ ID NO: 2166412 - DNA, 25 bp, Homo sapien
cttgatggcaggaggtgcatgatgg

SEQ ID NO: 2166413 - DNA, 25 bp, Homo sapien
gaggtgcatgatggttgtgattatt

SEQ ID NO: 2166414 - DNA, 25 bp, Homo sapien
gcaggaggtgcatgatggttgtgat

SEQ ID NO: 2166415 - DNA, 25 bp, Homo sapien
catgatggttgtgattattggctgg

SEQ ID NO: 2166416 - DNA, 25 bp, Homo sapien
aggtgtcatcgtcagctgcagagtg

SEQ ID NO: 2166417 - DNA, 25 bp, Homo sapien
cctgctgtggggcatccacgtctgc

SEQ ID NO: 2166418 - DNA, 25 bp, Homo sapien
gtgtcatcgtcagctgcagagtgtg

SEQ ID NO: 2166419 - DNA, 25 bp, Homo sapien
tgtggggcatccacgtctgccagcc

SEQ ID NO: 2166420 - DNA, 25 bp, Homo sapien
acagtctggagttcaggcccacgaa

SEQ ID NO: 2166421 - DNA, 25 bp, Homo sapien
cctctcggaaattcttgttggccca

SEQ ID NO: 2166422 - DNA, 25 bp, Homo sapien
ggcccacgaaaacgctcgaggaatg

SEQ ID NO: 2166423 - DNA, 25 bp, Homo sapien
attctctgatgatccccaccaggcg

SEQ ID NO: 2166424 - DNA, 25 bp, Homo sapien
cagctgggtccaagacaaatagttc

SEQ ID NO: 2166425 - DNA, 25 bp, Homo sapien
tgacaaatagccagcagtagtacca

SEQ ID NO: 2166426 - DNA, 25 bp, Homo sapien
ccagttgtaaaggacgggcatggca

SEQ ID NO: 2166427 - DNA, 25 bp, Homo sapien
agtagtaccaatccccagctgggtc

SEQ ID NO: 2166428 - DNA, 25 bp, Homo sapien
ccagccacaccaggtagtagccttt

SEQ ID NO: 2166429 - DNA, 25 bp, Homo sapien
acaccaggtagtagcctttctgtag

SEQ ID NO: 2166430 - DNA, 25 bp, Homo sapien
tgtgcgcaatcggatgaagaggtcc

SEQ ID NO: 2166431 - DNA, 25 bp, Homo sapien
gaggtccgcaatgtagaccacatct

SEQ ID NO: 2166432 - DNA, 25 bp, Homo sapien
tagatgtattccctagccaggtagc

SEQ ID NO: 2166433 - DNA, 25 bp, Homo sapien
ttggcatcagggtactcagtcacag

SEQ ID NO: 2166434 - DNA, 25 bp, Homo sapien
ggtgtcgaccccaaagcctatggat

SEQ ID NO: 2166435 - DNA, 25 bp, Homo sapien
tccccaatggtagtgagagtcagtg

SEQ ID NO: 2166436 - DNA, 25 bp, Homo sapien
tgttcatcccatcagacaggtagtc

SEQ ID NO: 2166437 - DNA, 25 bp, Homo sapien
gttcatcccatcagacaggtagtca

SEQ ID NO: 2166438 - DNA, 25 bp, Homo sapien
ctgttcatcccatcagacaggtagt

SEQ ID NO: 2166439 - DNA, 25 bp, Homo sapien
ttcatcccatcagacaggtagtcat

SEQ ID NO: 2166440 - DNA, 25 bp, Homo sapien
gactcctgaaagcaatccctgatga

SEQ ID NO: 2166441 - DNA, 25 bp, Homo sapien
tatagtcggtgctcgaagtacatgc

SEQ ID NO: 2166442 - DNA, 25 bp, Homo sapien
caaacttgggctaaacttggaggcg

SEQ ID NO: 2166443 - DNA, 25 bp, Homo sapien
tccaggtggacaaatgccagttgcc

SEQ ID NO: 2166444 - DNA, 25 bp, Homo sapien
tgggcctcctggacttcccttgctt

SEQ ID NO: 2166445 - DNA, 25 bp, Homo sapien
cctggacttcccttgctttgaccat

SEQ ID NO: 2166446 - DNA, 25 bp, Homo sapien
cctgggcctcctggacttcccttgc

SEQ ID NO: 2166447 - DNA, 25 bp, Homo sapien
ctcctggacttcccttgctttgacc

SEQ ID NO: 2166448 - DNA, 25 bp, Homo sapien
gtaaagacctctgttagcaatagct

SEQ ID NO: 2166449 - DNA, 25 bp, Homo sapien
tgccgagaggccgactgaattatca

SEQ ID NO: 2166450 - DNA, 25 bp, Homo sapien
cagagttgaggttgcctccatgcac

SEQ ID NO: 2166451 - DNA, 25 bp, Homo sapien
tccatgcactggaactgccgagagg

SEQ ID NO: 2166452 - DNA, 25 bp, Homo sapien
tgactgtctgctatctcaagcaaag

SEQ ID NO: 2166453 - DNA, 25 bp, Homo sapien
tctaatagccatcttctgaagtcat

SEQ ID NO: 2166454 - DNA, 25 bp, Homo sapien
catgagctgcaacgttgaaggaatc

SEQ ID NO: 2166455 - DNA, 25 bp, Homo sapien
gacttggccgtatttcctttgacac

SEQ ID NO: 2166456 - DNA, 25 bp, Homo sapien
taggtcttcagtaactgtggtagga

SEQ ID NO: 2166457 - DNA, 25 bp, Homo sapien
tggtaggatcatgatctggagagta

SEQ ID NO: 2166458 - DNA, 25 bp, Homo sapien
catctcaggagggtgaagttagcag

SEQ ID NO: 2166459 - DNA, 25 bp, Homo sapien
ggaagtggaggccaagaaaaagcca

SEQ ID NO: 2166460 - DNA, 25 bp, Homo sapien
agcagaagggacatacccattcagc

SEQ ID NO: 2166461 - DNA, 25 bp, Homo sapien
ggaagatgaatacggcctccgcata

SEQ ID NO: 2166462 - DNA, 25 bp, Homo sapien
cagaagggacatacccattcagcag

SEQ ID NO: 2166463 - DNA, 25 bp, Homo sapien
gatgtttttggaagatgaatacggc

SEQ ID NO: 2166464 - DNA, 25 bp, Homo sapien
tttgcagctctaagcagtctactga

SEQ ID NO: 2166465 - DNA, 25 bp, Homo sapien
cttttgcagctctaagcagtctact

SEQ ID NO: 2166466 - DNA, 25 bp, Homo sapien
agcagtctactgacaaaacctggtc

SEQ ID NO: 2166467 - DNA, 25 bp, Homo sapien
tctactgacaaaacctggtcatcca

SEQ ID NO: 2166468 - DNA, 25 bp, Homo sapien
gcatcagctttctcataacaccatc

SEQ ID NO: 2166469 - DNA, 25 bp, Homo sapien
ggatcaaatgtgtagctcttgtgga

SEQ ID NO: 2166470 - DNA, 25 bp, Homo sapien
gagagaaatgtttgattccactagg

SEQ ID NO: 2166471 - DNA, 25 bp, Homo sapien
cacaggatcaaatgtgtagctcttg

SEQ ID NO: 2166472 - DNA, 25 bp, Homo sapien
gtgagagaaatgtttgattccacta

SEQ ID NO: 2166473 - DNA, 25 bp, Homo sapien
gtggttggatcaaaggtgacaaatt

SEQ ID NO: 2166474 - DNA, 25 bp, Homo sapien
acaggacatttgcacatctccattt

SEQ ID NO: 2166475 - DNA, 25 bp, Homo sapien
cattgctctgggtggttggatcaaa

SEQ ID NO: 2166476 - DNA, 25 bp, Homo sapien
ctgggtggttggatcaaaggtgaca

SEQ ID NO: 2166477 - DNA, 25 bp, Homo sapien
tccagctcctatacaggtcctcatg

SEQ ID NO: 2166478 - DNA, 25 bp, Homo sapien
gcctgctgagttatctgccccggtt

SEQ ID NO: 2166479 - DNA, 25 bp, Homo sapien
cacaggaccatccttggatatggaa

SEQ ID NO: 2166480 - DNA, 25 bp, Homo sapien
ggtccaaatccaacaatcttccagc

SEQ ID NO: 2166481 - DNA, 25 bp, Homo sapien
ttactgctgccttagctcaatcagc

SEQ ID NO: 2166482 - DNA, 25 bp, Homo sapien
acttccttggaaccccaatcctgct

SEQ ID NO: 2166483 - DNA, 25 bp, Homo sapien
tactgctgccttagctcaatcagca

SEQ ID NO: 2166484 - DNA, 25 bp, Homo sapien
gcaaaaacaacctagcacttccttg

SEQ ID NO: 2166485 - DNA, 25 bp, Homo sapien
caaattcacaggtataaggtgctga

SEQ ID NO: 2166486 - DNA, 25 bp, Homo sapien
ttggctgcattctggagctagagag

SEQ ID NO: 2166487 - DNA, 25 bp, Homo sapien
tttggctgcattctggagctagaga

SEQ ID NO: 2166488 - DNA, 25 bp, Homo sapien
catggggggtgtagcaaattcacag

SEQ ID NO: 2166489 - DNA, 25 bp, Homo sapien
tacattacctattggatggcccacg

SEQ ID NO: 2166490 - DNA, 25 bp, Homo sapien
gacgagtttaccaaggctgctgtga

SEQ ID NO: 2166491 - DNA, 25 bp, Homo sapien
tgtcccattgcaaccccagggtcat

SEQ ID NO: 2166492 - DNA, 25 bp, Homo sapien
tagtcaccctttgaaagatagcggg

SEQ ID NO: 2166493 - DNA, 25 bp, Homo sapien
ttaagggtggtgctctcatcttcct

SEQ ID NO: 2166494 - DNA, 25 bp, Homo sapien
tgttcttgggcaagcaaggtgctgc

SEQ ID NO: 2166495 - DNA, 25 bp, Homo sapien
gagcaccaggtcttcatttaactcc

SEQ ID NO: 2166496 - DNA, 25 bp, Homo sapien
ggtactgataggactgaggccaccc

SEQ ID NO: 2166497 - DNA, 25 bp, Homo sapien
ccagaggcttagcagcctggagcac

SEQ ID NO: 2166498 - DNA, 25 bp, Homo sapien
ttatccaatttctctgggcataatg

SEQ ID NO: 2166499 - DNA, 25 bp, Homo sapien
atttctctgggcataatgcagccat

SEQ ID NO: 2166500 - DNA, 25 bp, Homo sapien
aatttctctgggcataatgcagcca

SEQ ID NO: 2166501 - DNA, 25 bp, Homo sapien
gcctcctcacagagcctgcgcctgc

SEQ ID NO: 2166502 - DNA, 25 bp, Homo sapien
cttgcctcctcacagagcctgcgcc

SEQ ID NO: 2166503 - DNA, 25 bp, Homo sapien
tgcctcctcacagagcctgcgcctg

SEQ ID NO: 2166504 - DNA, 25 bp, Homo sapien
ttgcctcctcacagagcctgcgcct

SEQ ID NO: 2166505 - DNA, 25 bp, Homo sapien
cttgtctccttatagagcctgggcg

SEQ ID NO: 2166506 - DNA, 25 bp, Homo sapien
gtctccttatagagcctgggcgggc

SEQ ID NO: 2166507 - DNA, 25 bp, Homo sapien
ttccctccgccagtctcaagctgcg

SEQ ID NO: 2166508 - DNA, 25 bp, Homo sapien
ccgccagtctcaagctgcgagtcag

SEQ ID NO: 2166509 - DNA, 25 bp, Homo sapien
ggtcagacagagcagctcgcttctc

SEQ ID NO: 2166510 - DNA, 25 bp, Homo sapien
ccctccgccaatcccaagctgctgg

SEQ ID NO: 2166511 - DNA, 25 bp, Homo sapien
ttccctccgccaatcccaagctgct

SEQ ID NO: 2166512 - DNA, 25 bp, Homo sapien
caagctgctggtcagacagagcagc

SEQ ID NO: 2166513 - DNA, 25 bp, Homo sapien
acccccaatgcgcaagtcagtggca

SEQ ID NO: 2166514 - DNA, 25 bp, Homo sapien
ggtcagacagagcagctcgcttctc

SEQ ID NO: 2166515 - DNA, 25 bp, Homo sapien
ttccctccgccaatcccaagctgct

SEQ ID NO: 2166516 - DNA, 25 bp, Homo sapien
caagctgctggtcagacagagcagc

SEQ ID NO: 2166517 - DNA, 25 bp, Homo sapien
gcttccctccgccaatcccaagcgg

SEQ ID NO: 2166518 - DNA, 25 bp, Homo sapien
cccccaatgcgcaagtcagtggcat

SEQ ID NO: 2166519 - DNA, 25 bp, Homo sapien
ctccgccaatcccaagcggctggtc

SEQ ID NO: 2166520 - DNA, 25 bp, Homo sapien
ccaatgcgcaagtcagtggcatcac

SEQ ID NO: 2166521 - DNA, 25 bp, Homo sapien
gctgctggtcagacagcagctcgct

SEQ ID NO: 2166522 - DNA, 25 bp, Homo sapien
ccttccaccaatcccaagctgctgg

SEQ ID NO: 2166523 - DNA, 25 bp, Homo sapien
cctggcctgcttccttccaccaatc

SEQ ID NO: 2166524 - DNA, 25 bp, Homo sapien
aatcccaagctgctggtcagacagc

SEQ ID NO: 2166525 - DNA, 25 bp, Homo sapien
tgatcaccccaagctctgactgcag

SEQ ID NO: 2166526 - DNA, 25 bp, Homo sapien
ctgactgcagagtcccgtgcgactt

SEQ ID NO: 2166527 - DNA, 25 bp, Homo sapien
atcaccccaagctctgactgcagag

SEQ ID NO: 2166528 - DNA, 25 bp, Homo sapien
tcccgtgcgacttcagaggcagtgg

SEQ ID NO: 2166529 - DNA, 25 bp, Homo sapien
gtcccctgcggcttcagcggcagtg

SEQ ID NO: 2166530 - DNA, 25 bp, Homo sapien
cccctgcggcttcagcggcagtggg

SEQ ID NO: 2166531 - DNA, 25 bp, Homo sapien
tcccctgcggcttcagcggcagtgg

SEQ ID NO: 2166532 - DNA, 25 bp, Homo sapien
tctggggtgagggttctgatggcct

SEQ ID NO: 2166533 - DNA, 25 bp, Homo sapien
gggtgagggttctgatggcctcctg

SEQ ID NO: 2166534 - DNA, 25 bp, Homo sapien
gtgagggttctgatggcctcctgtg

SEQ ID NO: 2166535 - DNA, 25 bp, Homo sapien
cagggctgacccctttggttctggg

SEQ ID NO: 2166536 - DNA, 25 bp, Homo sapien
gtcctccggttggcctgtctgctca

SEQ ID NO: 2166537 - DNA, 25 bp, Homo sapien
tcctccggttggcctgtctgctcag

SEQ ID NO: 2166538 - DNA, 25 bp, Homo sapien
tgtcctccggttggcctgtctgctc

SEQ ID NO: 2166539 - DNA, 25 bp, Homo sapien
gagaaccaaatcttagaggctctaa

SEQ ID NO: 2166540 - DNA, 25 bp, Homo sapien
ctgagaaccaaatcttagaggctct

SEQ ID NO: 2166541 - DNA, 25 bp, Homo sapien
gaaccaaatcttagaggctctaaca

SEQ ID NO: 2166542 - DNA, 25 bp, Homo sapien
gctgagaaccaaatcttagaggctc

SEQ ID NO: 2166543 - DNA, 25 bp, Homo sapien
agcaggcaagagtgcaggcaaaagc

SEQ ID NO: 2166544 - DNA, 25 bp, Homo sapien
aggcaagagtgcaggcaaaagctgg

SEQ ID NO: 2166545 - DNA, 25 bp, Homo sapien
gcaaaagctgggcaatggggaccca

SEQ ID NO: 2166546 - DNA, 25 bp, Homo sapien
caaaagctgggcaatggggacccac

SEQ ID NO: 2166547 - DNA, 25 bp, Homo sapien
gaacaaggactctgcgtcaggcgag

SEQ ID NO: 2166548 - DNA, 25 bp, Homo sapien
cattgcaattgtgcccaggacgatt

SEQ ID NO: 2166549 - DNA, 25 bp, Homo sapien
gaaagatctgattattacccagcag

SEQ ID NO: 2166550 - DNA, 25 bp, Homo sapien
tcagaggcgctgtcgccctccattg

SEQ ID NO: 2166551 - DNA, 25 bp, Homo sapien
agcgcgcaggattactgccgggtac

SEQ ID NO: 2166552 - DNA, 25 bp, Homo sapien
cgcgcaggattactgccgggtacct

SEQ ID NO: 2166553 - DNA, 25 bp, Homo sapien
catagcgcgcaggattactgccggg

SEQ ID NO: 2166554 - DNA, 25 bp, Homo sapien
tagcgcgcaggattactgccgggta

SEQ ID NO: 2166555 - DNA, 25 bp, Homo sapien
tcacgcagggatgggtaggcaatgc

SEQ ID NO: 2166556 - DNA, 25 bp, Homo sapien
ttgcattgaccctgaccacatgctc

SEQ ID NO: 2166557 - DNA, 25 bp, Homo sapien
tctaacaaagctgcttcacgcaggg

SEQ ID NO: 2166558 - DNA, 25 bp, Homo sapien
caatgcgaactcttgcattgaccct

SEQ ID NO: 2166559 - DNA, 25 bp, Homo sapien
cgttaactacgattcataaacttgg

SEQ ID NO: 2166560 - DNA, 25 bp, Homo sapien
aatagactgaggcataaggcgggaa

SEQ ID NO: 2166561 - DNA, 25 bp, Homo sapien
cacagggctgttagatgcactggcc

SEQ ID NO: 2166562 - DNA, 25 bp, Homo sapien
cccactactaagaacactgactatt

SEQ ID NO: 2166563 - DNA, 25 bp, Homo sapien
ttatgaagggacaaacactagtggc

SEQ ID NO: 2166564 - DNA, 25 bp, Homo sapien
gttgtggaaagatcccatatccatt

SEQ ID NO: 2166565 - DNA, 25 bp, Homo sapien
ggtgcatgcgtacttcagaattata

SEQ ID NO: 2166566 - DNA, 25 bp, Homo sapien
tatagaaagtggtatcaaaagagag

SEQ ID NO: 2166567 - DNA, 25 bp, Homo sapien
tccatggaaactaccactgagaggg

SEQ ID NO: 2166568 - DNA, 25 bp, Homo sapien
gttggagtaagagtttccacatcta

SEQ ID NO: 2166569 - DNA, 25 bp, Homo sapien
atgagtcctcgcttcatccacactg

SEQ ID NO: 2166570 - DNA, 25 bp, Homo sapien
aggcttctgttggagtaagagtttc

SEQ ID NO: 2166571 - DNA, 25 bp, Homo sapien
ctatgggatgagtcctcgcttcatc

SEQ ID NO: 2166572 - DNA, 25 bp, Homo sapien
taaattgcagtcaagatcccacggc

SEQ ID NO: 2166573 - DNA, 25 bp, Homo sapien
ggtttcccactgacaacaggtcgct

SEQ ID NO: 2166574 - DNA, 25 bp, Homo sapien
aattggcatctcttgacgagcggag

SEQ ID NO: 2166575 - DNA, 25 bp, Homo sapien
cattctggccagtaggcaagtgcga

SEQ ID NO: 2166576 - DNA, 25 bp, Homo sapien
tgcctctgaagcgtatctcaagtat

SEQ ID NO: 2166577 - DNA, 25 bp, Homo sapien
tatctcaagtatgtctgctcctctc

SEQ ID NO: 2166578 - DNA, 25 bp, Homo sapien
tctgaagcgtatctcaagtatgtct

SEQ ID NO: 2166579 - DNA, 25 bp, Homo sapien
gcgtatctcaagtatgtctgctcct

SEQ ID NO: 2166580 - DNA, 25 bp, Homo sapien
gatgagtcatctgcttttaccacca

SEQ ID NO: 2166581 - DNA, 25 bp, Homo sapien
gactgtttggtgcaaagtcctgcag

SEQ ID NO: 2166582 - DNA, 25 bp, Homo sapien
aataaacgataatggcttggcagcc

SEQ ID NO: 2166583 - DNA, 25 bp, Homo sapien
tggcagcctttcgtatattaatagc

SEQ ID NO: 2166584 - DNA, 25 bp, Homo sapien
tgccacagcttctatcatgatcttg

SEQ ID NO: 2166585 - DNA, 25 bp, Homo sapien
agggacctcagcaattgccacagct

SEQ ID NO: 2166586 - DNA, 25 bp, Homo sapien
tcacgaaagctctaggactccatcc

SEQ ID NO: 2166587 - DNA, 25 bp, Homo sapien
atcttgctgcggctgacattgctat

SEQ ID NO: 2166588 - DNA, 25 bp, Homo sapien
gacattgcgagtcacctgcatgatc

SEQ ID NO: 2166589 - DNA, 25 bp, Homo sapien
acattgcgagtcacctgcatgatct

SEQ ID NO: 2166590 - DNA, 25 bp, Homo sapien
cagacattgcgagtcacctgcatga

SEQ ID NO: 2166591 - DNA, 25 bp, Homo sapien
agacattgcgagtcacctgcatgat

SEQ ID NO: 2166592 - DNA, 25 bp, Homo sapien
tgatgcctcagggaaaagctgctct

SEQ ID NO: 2166593 - DNA, 25 bp, Homo sapien
gacttgatgggccaggattcagcca

SEQ ID NO: 2166594 - DNA, 25 bp, Homo sapien
cgggtacaccacagggcaagctgat

SEQ ID NO: 2166595 - DNA, 25 bp, Homo sapien
tctttgctgcagacttgatgggcca

SEQ ID NO: 2166596 - DNA, 25 bp, Homo sapien
aataaatgaaagtggtgattaaggc

SEQ ID NO: 2166597 - DNA, 25 bp, Homo sapien
catctcatttcctggtagccagaaa

SEQ ID NO: 2166598 - DNA, 25 bp, Homo sapien
aatgaaagtggtgattaaggcttac

SEQ ID NO: 2166599 - DNA, 25 bp, Homo sapien
gaaagtggtgattaaggcttacagc

SEQ ID NO: 2166600 - DNA, 25 bp, Homo sapien
gcaggaggaatcctcagattccagc

SEQ ID NO: 2166601 - DNA, 25 bp, Homo sapien
cagggcaggaggaatcctcagattc

SEQ ID NO: 2166602 - DNA, 25 bp, Homo sapien
gcagggcaggaggaatcctcagatt

SEQ ID NO: 2166603 - DNA, 25 bp, Homo sapien
gggcaggaggaatcctcagattcca

SEQ ID NO: 2166604 - DNA, 25 bp, Homo sapien
tcattccatgggacggccagaagcc

SEQ ID NO: 2166605 - DNA, 25 bp, Homo sapien
cattccatgggacggccagaagcca

SEQ ID NO: 2166606 - DNA, 25 bp, Homo sapien
ccatgggacggccagaagccagggc

SEQ ID NO: 2166607 - DNA, 25 bp, Homo sapien
ttccatgggacggccagaagccagg

SEQ ID NO: 2166608 - DNA, 25 bp, Homo sapien
actgcagtcaccagaacagccagca

SEQ ID NO: 2166609 - DNA, 25 bp, Homo sapien
tgcagtcaccagaacagccagcaca

SEQ ID NO: 2166610 - DNA, 25 bp, Homo sapien
taactgcagtcaccagaacagccag

SEQ ID NO: 2166611 - DNA, 25 bp, Homo sapien
aactgcagtcaccagaacagccagc

SEQ ID NO: 2166612 - DNA, 25 bp, Homo sapien
tacgatcgaactcgtcactcaggta

SEQ ID NO: 2166613 - DNA, 25 bp, Homo sapien
gatcgaactcgtcactcaggtaatg

SEQ ID NO: 2166614 - DNA, 25 bp, Homo sapien
gtttggggtacgatcgaactcgtca

SEQ ID NO: 2166615 - DNA, 25 bp, Homo sapien
gggtacgatcgaactcgtcactcag

SEQ ID NO: 2166616 - DNA, 25 bp, Homo sapien
ccccagatgagttccaatgcagtag

SEQ ID NO: 2166617 - DNA, 25 bp, Homo sapien
ttatgaagccgtgaaaaaggactca

SEQ ID NO: 2166618 - DNA, 25 bp, Homo sapien
tatccctggttgttctgtgccgtac

SEQ ID NO: 2166619 - DNA, 25 bp, Homo sapien
tgtgccgtacttgttggtctcctcc

SEQ ID NO: 2166620 - DNA, 25 bp, Homo sapien
ctgaagtctcttcttctttgacttc

SEQ ID NO: 2166621 - DNA, 25 bp, Homo sapien
tgaagtctcttcttctttgacttcc

SEQ ID NO: 2166622 - DNA, 25 bp, Homo sapien
gaagtctcttcttctttgacttcca

SEQ ID NO: 2166623 - DNA, 25 bp, Homo sapien
gaatgactggagaggcgaaatgccc

SEQ ID NO: 2166624 - DNA, 25 bp, Homo sapien
caagtcctacgtcctggcgagaaaa

SEQ ID NO: 2166625 - DNA, 25 bp, Homo sapien
tagtatcctcctttggttgcgacag

SEQ ID NO: 2166626 - DNA, 25 bp, Homo sapien
gtgaagttaacactgatcccctggt

SEQ ID NO: 2166627 - DNA, 25 bp, Homo sapien
cattcccgttgaccccaatccctgt

SEQ ID NO: 2166628 - DNA, 25 bp, Homo sapien
ggctcttcattcccgttgaccccaa

SEQ ID NO: 2166629 - DNA, 25 bp, Homo sapien
tcattcccgttgaccccaatccctg

SEQ ID NO: 2166630 - DNA, 25 bp, Homo sapien
tcttcattcccgttgaccccaatcc

SEQ ID NO: 2166631 - DNA, 25 bp, Homo sapien
cactggtcctgttgggagcatcctc

SEQ ID NO: 2166632 - DNA, 25 bp, Homo sapien
gggagcatcctcatctccatgtcag

SEQ ID NO: 2166633 - DNA, 25 bp, Homo sapien
gcaggaagtatcatgcactggtcct

SEQ ID NO: 2166634 - DNA, 25 bp, Homo sapien
taagctgacatggacttgcgtggtc

SEQ ID NO: 2166635 - DNA, 25 bp, Homo sapien
gacttatagacttagtttgacaggg

SEQ ID NO: 2166636 - DNA, 25 bp, Homo sapien
gttggcaggtggttgttctttgaca

SEQ ID NO: 2166637 - DNA, 25 bp, Homo sapien
ttccttgcccctttggtgttggcag

SEQ ID NO: 2166638 - DNA, 25 bp, Homo sapien
cttgataggacttatagacttagtt

SEQ ID NO: 2166639 - DNA, 25 bp, Homo sapien
gagaaggagtctgcagtgaccctgt

SEQ ID NO: 2166640 - DNA, 25 bp, Homo sapien
cagtgaccctgtcgtggtattttcc

SEQ ID NO: 2166641 - DNA, 25 bp, Homo sapien
gagtctgcagtgaccctgtcgtggt

SEQ ID NO: 2166642 - DNA, 25 bp, Homo sapien
tctgcagtgaccctgtcgtggtatt

SEQ ID NO: 2166643 - DNA, 25 bp, Homo sapien
aatgccaatgatcagtggaaggtgg

SEQ ID NO: 2166644 - DNA, 25 bp, Homo sapien
aatgatcagtggaaggtggtagtgg

SEQ ID NO: 2166645 - DNA, 25 bp, Homo sapien
ccaatgatcagtggaaggtggtagt

SEQ ID NO: 2166646 - DNA, 25 bp, Homo sapien
tgccaatgatcagtggaaggtggta

SEQ ID NO: 2166647 - DNA, 25 bp, Homo sapien
agctctgaatccagatttcagcccg

SEQ ID NO: 2166648 - DNA, 25 bp, Homo sapien
gctctgaatccagatttcagcccgg

SEQ ID NO: 2166649 - DNA, 25 bp, Homo sapien
gagagctctgaatccagatttcagc

SEQ ID NO: 2166650 - DNA, 25 bp, Homo sapien
actgagagctctgaatccagatttc

SEQ ID NO: 2166651 - DNA, 25 bp, Homo sapien
accctcggctggcaaggggcattag

SEQ ID NO: 2166652 - DNA, 25 bp, Homo sapien
acaccctcggctggcaaggggcatt

SEQ ID NO: 2166653 - DNA, 25 bp, Homo sapien
agacaggacaccctcggctggcaag

SEQ ID NO: 2166654 - DNA, 25 bp, Homo sapien
ggacaccctcggctggcaaggggca

SEQ ID NO: 2166655 - DNA, 25 bp, Homo sapien
ggtggtggatgaacagagaggagtc

SEQ ID NO: 2166656 - DNA, 25 bp, Homo sapien
tcacatagttgacagagcaaatcct

SEQ ID NO: 2166657 - DNA, 25 bp, Homo sapien
tctgagcagttccttttgggtggtg

SEQ ID NO: 2166658 - DNA, 25 bp, Homo sapien
tgacagagcaaatcctgggatgtaa

SEQ ID NO: 2166659 - DNA, 25 bp, Homo sapien
tagggctcatactggtggatgagaa

SEQ ID NO: 2166660 - DNA, 25 bp, Homo sapien
tgggcatagggctcatactggtgga

SEQ ID NO: 2166661 - DNA, 25 bp, Homo sapien
acagcaatgatttgatgatcacaca

SEQ ID NO: 2166662 - DNA, 25 bp, Homo sapien
tctggccttggattgcagcttgctg

SEQ ID NO: 2166663 - DNA, 25 bp, Homo sapien
ggttgtctgaatattcgtatgatgt

SEQ ID NO: 2166664 - DNA, 25 bp, Homo sapien
tctgaatattcgtatgatgttcctt

SEQ ID NO: 2166665 - DNA, 25 bp, Homo sapien
tgaatattcgtatgatgttccttca

SEQ ID NO: 2166666 - DNA, 25 bp, Homo sapien
tgtctgaatattcgtatgatgttcc

SEQ ID NO: 2166667 - DNA, 25 bp, Homo sapien
tgttgtaatgagatagccatcattc

SEQ ID NO: 2166668 - DNA, 25 bp, Homo sapien
ggcataattgtgtctactgttgtaa

SEQ ID NO: 2166669 - DNA, 25 bp, Homo sapien
catggttttctgcataaggcataat

SEQ ID NO: 2166670 - DNA, 25 bp, Homo sapien
ctactgttgtaatgagatagccatc

SEQ ID NO: 2166671 - DNA, 25 bp, Homo sapien
gcacatataccctttactcctttgg

SEQ ID NO: 2166672 - DNA, 25 bp, Homo sapien
tgcacatataccctttactcctttg

SEQ ID NO: 2166673 - DNA, 25 bp, Homo sapien
ttttgcacatataccctttactcct

SEQ ID NO: 2166674 - DNA, 25 bp, Homo sapien
tttgcacatataccctttactcctt

SEQ ID NO: 2166675 - DNA, 25 bp, Homo sapien
tgttgcagaacctgagtgtgcatcg

SEQ ID NO: 2166676 - DNA, 25 bp, Homo sapien
cttctgttgcagaacctgagtgtgc

SEQ ID NO: 2166677 - DNA, 25 bp, Homo sapien
tgcagaacctgagtgtgcatcgtgg

SEQ ID NO: 2166678 - DNA, 25 bp, Homo sapien
cagaacctgagtgtgcatcgtggtc

SEQ ID NO: 2166679 - DNA, 25 bp, Homo sapien
gaatgtgcttatgccctttagctat

SEQ ID NO: 2166680 - DNA, 25 bp, Homo sapien
tcatcatgatttgtgaaaatgcacc

SEQ ID NO: 2166681 - DNA, 25 bp, Homo sapien
ctaattttccatggttgtatgaatg

SEQ ID NO: 2166682 - DNA, 25 bp, Homo sapien
aatgcaccatcgttgtctacattgt

SEQ ID NO: 2166683 - DNA, 25 bp, Homo sapien
tgtgcatcgtggtcaaatgctcaga

SEQ ID NO: 2166684 - DNA, 25 bp, Homo sapien
gtgtgcatcgtggtcaaatgctcag

SEQ ID NO: 2166685 - DNA, 25 bp, Homo sapien
atgcaccacggatgtttgagcatgt

SEQ ID NO: 2166686 - DNA, 25 bp, Homo sapien
tgtttaaagtttatctgaacattta

SEQ ID NO: 2166687 - DNA, 25 bp, Homo sapien
taaagtttatctgaacatttaccat

SEQ ID NO: 2166688 - DNA, 25 bp, Homo sapien
ttaaagtttatctgaacatttacca

SEQ ID NO: 2166689 - DNA, 25 bp, Homo sapien
cttgtttaaagtttatctgaacatt

SEQ ID NO: 2166690 - DNA, 25 bp, Homo sapien
tagtttagaaccaatgacatatggg

SEQ ID NO: 2166691 - DNA, 25 bp, Homo sapien
gaaccaatgacatatgggtcaacac

SEQ ID NO: 2166692 - DNA, 25 bp, Homo sapien
catagctagtttagaaccaatgaca

SEQ ID NO: 2166693 - DNA, 25 bp, Homo sapien
caaagagatcatagctagtttagaa

SEQ ID NO: 2166694 - DNA, 25 bp, Homo sapien
gcagccccagggactactattgaga

SEQ ID NO: 2166695 - DNA, 25 bp, Homo sapien
ttagcgtacagcttcatctgtctga

SEQ ID NO: 2166696 - DNA, 25 bp, Homo sapien
aggagggacgccaccgcatagcagc

SEQ ID NO: 2166697 - DNA, 25 bp, Homo sapien
ctattgagagtagctctttggatga

SEQ ID NO: 2166698 - DNA, 25 bp, Homo sapien
gggttgggcctgacttcctccacaa

SEQ ID NO: 2166699 - DNA, 25 bp, Homo sapien
cttgtttcccggcgagaagctccat

SEQ ID NO: 2166700 - DNA, 25 bp, Homo sapien
tttgccttgtttcccggcgagaagc

SEQ ID NO: 2166701 - DNA, 25 bp, Homo sapien
cacaaacttgggaggtttgccttgt

SEQ ID NO: 2166702 - DNA, 25 bp, Homo sapien
cttgcaaattgcttggggggcccca

SEQ ID NO: 2166703 - DNA, 25 bp, Homo sapien
gctgcagaaagccacggagtggccc

SEQ ID NO: 2166704 - DNA, 25 bp, Homo sapien
ctgctgcagaaagccacggagtggc

SEQ ID NO: 2166705 - DNA, 25 bp, Homo sapien
agctgctgcagaaagccacggagtg

SEQ ID NO: 2166706 - DNA, 25 bp, Homo sapien
tgcgatgtggtatatgcgtgatttg

SEQ ID NO: 2166707 - DNA, 25 bp, Homo sapien
tgtgatgctatcctgggttccccag

SEQ ID NO: 2166708 - DNA, 25 bp, Homo sapien
gatagcatctctcccccgtactgag

SEQ ID NO: 2166709 - DNA, 25 bp, Homo sapien
gagagtctccttgggttggccggga

SEQ ID NO: 2166710 - DNA, 25 bp, Homo sapien
gccatctctttacgcatattgatct

SEQ ID NO: 2166711 - DNA, 25 bp, Homo sapien
tgccatctctttacgcatattgatc

SEQ ID NO: 2166712 - DNA, 25 bp, Homo sapien
ttgccatctctttacgcatattgat

SEQ ID NO: 2166713 - DNA, 25 bp, Homo sapien
tcgtcagtcagcccgtccaggcgag

SEQ ID NO: 2166714 - DNA, 25 bp, Homo sapien
cgtcagtcagcccgtccaggcgaga

SEQ ID NO: 2166715 - DNA, 25 bp, Homo sapien
gtatccgagatctgggaatgcagct

SEQ ID NO: 2166716 - DNA, 25 bp, Homo sapien
atctcgtcagtcagcccgtccaggc

SEQ ID NO: 2166717 - DNA, 25 bp, Homo sapien
gatgctttccatgtccagggagggc

SEQ ID NO: 2166718 - DNA, 25 bp, Homo sapien
atgatgctttccatgtccagggagg

SEQ ID NO: 2166719 - DNA, 25 bp, Homo sapien
cagggagggctgttgtccacggaca

SEQ ID NO: 2166720 - DNA, 25 bp, Homo sapien
gggagggctgttgtccacggacagc

SEQ ID NO: 2166721 - DNA, 25 bp, Homo sapien
ctagctggctctcttcgccctccag

SEQ ID NO: 2166722 - DNA, 25 bp, Homo sapien
gcttgacgttagcatccttaacggc

SEQ ID NO: 2166723 - DNA, 25 bp, Homo sapien
tggtactcacgcagccgcctcgcca

SEQ ID NO: 2166724 - DNA, 25 bp, Homo sapien
ctcggacagcttgacgttagcatcc

SEQ ID NO: 2166725 - DNA, 25 bp, Homo sapien
cttgggcgggacgtcagaggacgcg

SEQ ID NO: 2166726 - DNA, 25 bp, Homo sapien
ggcgggacgtcagaggacgcggaca

SEQ ID NO: 2166727 - DNA, 25 bp, Homo sapien
tcagaccacctgcaaaaccgctggt

SEQ ID NO: 2166728 - DNA, 25 bp, Homo sapien
ctgcaaaaccgctggtggtcttcat

SEQ ID NO: 2166729 - DNA, 25 bp, Homo sapien
tgaatttcatcctatgaagaaccat

SEQ ID NO: 2166730 - DNA, 25 bp, Homo sapien
ttgcttccccaaagctttgaatttc

SEQ ID NO: 2166731 - DNA, 25 bp, Homo sapien
ctgtttttgcttccccaaagctttg

SEQ ID NO: 2166732 - DNA, 25 bp, Homo sapien
tttgaatttcatcctatgaagaacc

SEQ ID NO: 2166733 - DNA, 25 bp, Homo sapien
tcacactagggagggattgatgttg

SEQ ID NO: 2166734 - DNA, 25 bp, Homo sapien
cagtgtaggcgcctaaaacagccat

SEQ ID NO: 2166735 - DNA, 25 bp, Homo sapien
cagccatgtagttggactttgtgag

SEQ ID NO: 2166736 - DNA, 25 bp, Homo sapien
tgtcgaaatgagcaggaatctcagt

SEQ ID NO: 2166737 - DNA, 25 bp, Homo sapien
ttgggaataagagggcttctctccc

SEQ ID NO: 2166738 - DNA, 25 bp, Homo sapien
caatttgggaataagagggcttctc

SEQ ID NO: 2166739 - DNA, 25 bp, Homo sapien
tccacaatttgggaataagagggct

SEQ ID NO: 2166740 - DNA, 25 bp, Homo sapien
ctttccacaatttgggaataagagg

SEQ ID NO: 2166741 - DNA, 25 bp, Homo sapien
gtggtgggaacaggatggtcatgga

SEQ ID NO: 2166742 - DNA, 25 bp, Homo sapien
agaaaaaagagttccatctccatgc

SEQ ID NO: 2166743 - DNA, 25 bp, Homo sapien
acctccctatgggtttgctcaggct

SEQ ID NO: 2166744 - DNA, 25 bp, Homo sapien
gaaatgcattctctcgaagttctgg

SEQ ID NO: 2166745 - DNA, 25 bp, Homo sapien
cctctttagggattttaatgacgct

SEQ ID NO: 2166746 - DNA, 25 bp, Homo sapien
caaaaggaccttctaactctgggat

SEQ ID NO: 2166747 - DNA, 25 bp, Homo sapien
cagggcttgtaaaagatcatgggct

SEQ ID NO: 2166748 - DNA, 25 bp, Homo sapien
tgcagttcttgccactacttggaga

SEQ ID NO: 2166749 - DNA, 25 bp, Homo sapien
ccaggagccagtttgcatgcagggc

SEQ ID NO: 2166750 - DNA, 25 bp, Homo sapien
tcctttttaacatataacagctgct

SEQ ID NO: 2166751 - DNA, 25 bp, Homo sapien
ctttttaacatataacagctgctga

SEQ ID NO: 2166752 - DNA, 25 bp, Homo sapien
tttaacatataacagctgctgatcc

SEQ ID NO: 2166753 - DNA, 25 bp, Homo sapien
tcagctcctttttaacatataacag

SEQ ID NO: 2166754 - DNA, 25 bp, Homo sapien
gtgagaagcccgctggcaattccca

SEQ ID NO: 2166755 - DNA, 25 bp, Homo sapien
agaaggtgagaagcccgctggcaat

SEQ ID NO: 2166756 - DNA, 25 bp, Homo sapien
ttagaaggtgagaagcccgctggca

SEQ ID NO: 2166757 - DNA, 25 bp, Homo sapien
gagaagcccgctggcaattcccatc

SEQ ID NO: 2166758 - DNA, 25 bp, Homo sapien
gatatttgatcaatgggctccttgg

SEQ ID NO: 2166759 - DNA, 25 bp, Homo sapien
cctggactgctgaatggttgtagcc

SEQ ID NO: 2166760 - DNA, 25 bp, Homo sapien
ctctctgttgctggccgctgatgga

SEQ ID NO: 2166761 - DNA, 25 bp, Homo sapien
gagttttctccagcgaagttcaatg

SEQ ID NO: 2166762 - DNA, 25 bp, Homo sapien
cttccccaaagagtcgcctctaagg

SEQ ID NO: 2166763 - DNA, 25 bp, Homo sapien
tcggcccggataccggagatgagag

SEQ ID NO: 2166764 - DNA, 25 bp, Homo sapien
ctctaaggagagagcagcgagggca

SEQ ID NO: 2166765 - DNA, 25 bp, Homo sapien
gagcagcgagggcaagggaagtagg

SEQ ID NO: 2166766 - DNA, 25 bp, Homo sapien
cctccgcgagccaggtcctgatgag

SEQ ID NO: 2166767 - DNA, 25 bp, Homo sapien
gttcaggacgacttcgggcacagca

SEQ ID NO: 2166768 - DNA, 25 bp, Homo sapien
ggcacagcagaggagaactcgaagt

SEQ ID NO: 2166769 - DNA, 25 bp, Homo sapien
tgagcagcaggatcactgcggctcg

SEQ ID NO: 2166770 - DNA, 25 bp, Homo sapien
ctccaaaattcggtctcaggcggac

SEQ ID NO: 2166771 - DNA, 25 bp, Homo sapien
agcaccctgtccaaaatcttttgaa

SEQ ID NO: 2166772 - DNA, 25 bp, Homo sapien
ggtctcaggcggacatcgtatcttg

SEQ ID NO: 2166773 - DNA, 25 bp, Homo sapien
gcggacatcgtatcttgacagcacc

SEQ ID NO: 2166774 - DNA, 25 bp, Homo sapien
gctctaggacacctaacccaagttc

SEQ ID NO: 2166775 - DNA, 25 bp, Homo sapien
cccaagttctctagtgtctggatat

SEQ ID NO: 2166776 - DNA, 25 bp, Homo sapien
aagttctctagtgtctggatatgcc

SEQ ID NO: 2166777 - DNA, 25 bp, Homo sapien
taggacacctaacccaagttctcta

SEQ ID NO: 2166778 - DNA, 25 bp, Homo sapien
tgttcaatgctcgtgacataaatag

SEQ ID NO: 2166779 - DNA, 25 bp, Homo sapien
caatgctcgtgacataaatagatat

SEQ ID NO: 2166780 - DNA, 25 bp, Homo sapien
gatctgttcaatgctcgtgacataa

SEQ ID NO: 2166781 - DNA, 25 bp, Homo sapien
gctcgtgacataaatagatattctc

SEQ ID NO: 2166782 - DNA, 25 bp, Homo sapien
gaaaaaacatcgtgatcgtgtagtc

SEQ ID NO: 2166783 - DNA, 25 bp, Homo sapien
tgaaaaaacatcgtgatcgtgtagt

SEQ ID NO: 2166784 - DNA, 25 bp, Homo sapien
tgggtgaagctgaaacacgcgattc

SEQ ID NO: 2166785 - DNA, 25 bp, Homo sapien
tcagggacccacaacttctcatgca

SEQ ID NO: 2166786 - DNA, 25 bp, Homo sapien
ttcagaaagtagcagtcagggaccc

SEQ ID NO: 2166787 - DNA, 25 bp, Homo sapien
catgcatccgatagtccagggtcaa

SEQ ID NO: 2166788 - DNA, 25 bp, Homo sapien
gaatttatgcagatccagggaacaa

SEQ ID NO: 2166789 - DNA, 25 bp, Homo sapien
gcaggcctgcttgtccatagggaat

SEQ ID NO: 2166790 - DNA, 25 bp, Homo sapien
ggaacaagctgctgtagtggtgagt

SEQ ID NO: 2166791 - DNA, 25 bp, Homo sapien
tctaccaccaggttgcaggcctgct

SEQ ID NO: 2166792 - DNA, 25 bp, Homo sapien
ccaagtacggaagagggggccatag

SEQ ID NO: 2166793 - DNA, 25 bp, Homo sapien
caagtacggaagagggggccatagg

SEQ ID NO: 2166794 - DNA, 25 bp, Homo sapien
cacagccccaagtacggaagagggg

SEQ ID NO: 2166795 - DNA, 25 bp, Homo sapien
agggggccataggagacatacgtac

SEQ ID NO: 2166796 - DNA, 25 bp, Homo sapien
tgaactgagggatatgcagctcctc

SEQ ID NO: 2166797 - DNA, 25 bp, Homo sapien
ggcgttcccattgtcatcccagaat

SEQ ID NO: 2166798 - DNA, 25 bp, Homo sapien
ctcagtcatgtggatggcgttccca

SEQ ID NO: 2166799 - DNA, 25 bp, Homo sapien
ttgctagtaatcgtccttcccagga

SEQ ID NO: 2166800 - DNA, 25 bp, Homo sapien
gtgaggacagtaggccagtagactt

SEQ ID NO: 2166801 - DNA, 25 bp, Homo sapien
ggaacttcagtatcaggcgtatgta

SEQ ID NO: 2166802 - DNA, 25 bp, Homo sapien
ttcatccaaaacgatatccaagagg

SEQ ID NO: 2166803 - DNA, 25 bp, Homo sapien
tgcacaaggtagctgttaacttccc

SEQ ID NO: 2166804 - DNA, 25 bp, Homo sapien
tatcccgcagatgtgagtcgatggt

SEQ ID NO: 2166805 - DNA, 25 bp, Homo sapien
gccgaggtcctcgactgtagaaaag

SEQ ID NO: 2166806 - DNA, 25 bp, Homo sapien
agcggtagcgggcaatgactcttcg

SEQ ID NO: 2166807 - DNA, 25 bp, Homo sapien
caaagaacaagcacacgaggatata

SEQ ID NO: 2166808 - DNA, 25 bp, Homo sapien
ttgaggagataatggataggctcat

SEQ ID NO: 2166809 - DNA, 25 bp, Homo sapien
tttgaggagataatggataggctca

SEQ ID NO: 2166810 - DNA, 25 bp, Homo sapien
ctttgaggagataatggataggctc

SEQ ID NO: 2166811 - DNA, 25 bp, Homo sapien
tgaggagataatggataggctcatc

SEQ ID NO: 2166812 - DNA, 25 bp, Homo sapien
catgggcttcgacacggttgcggat

SEQ ID NO: 2166813 - DNA, 25 bp, Homo sapien
gagagagctgactccgtcttccacg

SEQ ID NO: 2166814 - DNA, 25 bp, Homo sapien
cctgctcggaggtggacgtcaaaga

SEQ ID NO: 2166815 - DNA, 25 bp, Homo sapien
taaagcgaacaccatagctgtgccg

SEQ ID NO: 2166816 - DNA, 25 bp, Homo sapien
acacttgaattgctccttaatggca

SEQ ID NO: 2166817 - DNA, 25 bp, Homo sapien
gtcattgttgtcatcaaggtcccag

SEQ ID NO: 2166818 - DNA, 25 bp, Homo sapien
tgttgaacaacccaaaggccagagg

SEQ ID NO: 2166819 - DNA, 25 bp, Homo sapien
tcgacctttgggacgtagtcaggat

SEQ ID NO: 2166820 - DNA, 25 bp, Homo sapien
gctcccgctgttctggagcactggg

SEQ ID NO: 2166821 - DNA, 25 bp, Homo sapien
gtgctcccgctgttctggagcactg

SEQ ID NO: 2166822 - DNA, 25 bp, Homo sapien
cagtgctcccgctgttctggagcac

SEQ ID NO: 2166823 - DNA, 25 bp, Homo sapien
ctcccgctgttctggagcactgggg

SEQ ID NO: 2166824 - DNA, 25 bp, Homo sapien
cagtgatgtaatgggtcagggagct

SEQ ID NO: 2166825 - DNA, 25 bp, Homo sapien
gctccattcgttttccttggaacac

SEQ ID NO: 2166826 - DNA, 25 bp, Homo sapien
gacaatgtgctttgccttccctggc

SEQ ID NO: 2166827 - DNA, 25 bp, Homo sapien
tcaagcatgcggcataagctccatt

SEQ ID NO: 2166828 - DNA, 25 bp, Homo sapien
aaaaggaaatgcctcagttgggaca

SEQ ID NO: 2166829 - DNA, 25 bp, Homo sapien
tagatttacaccactagacacggca

SEQ ID NO: 2166830 - DNA, 25 bp, Homo sapien
gctgcatatgcatacacccaggtat

SEQ ID NO: 2166831 - DNA, 25 bp, Homo sapien
tggtcaccagcctattcctgcagag

SEQ ID NO: 2166832 - DNA, 25 bp, Homo sapien
acatagatatgcagacatgccctta

SEQ ID NO: 2166833 - DNA, 25 bp, Homo sapien
cactcagcatagacccatgtgtaca

SEQ ID NO: 2166834 - DNA, 25 bp, Homo sapien
cacaagcatacacatacataagcca

SEQ ID NO: 2166835 - DNA, 25 bp, Homo sapien
cactttcacagggatgtgcacacac

SEQ ID NO: 2166836 - DNA, 25 bp, Homo sapien
tatctagctatatggatctatagag

SEQ ID NO: 2166837 - DNA, 25 bp, Homo sapien
gctctcattgcagcacgtcagggca

SEQ ID NO: 2166838 - DNA, 25 bp, Homo sapien
taacctacagagtatgagtcgcagt

SEQ ID NO: 2166839 - DNA, 25 bp, Homo sapien
gagtcgcagtagagttcaactgctc

SEQ ID NO: 2166840 - DNA, 25 bp, Homo sapien
tccagagttacctggtgtgaggtga

SEQ ID NO: 2166841 - DNA, 25 bp, Homo sapien
gggacagctgaggactcaaatgaca

SEQ ID NO: 2166842 - DNA, 25 bp, Homo sapien
cagaggacagaccacatacaagact

SEQ ID NO: 2166843 - DNA, 25 bp, Homo sapien
gcaacgtgcaggctaaaatgaccaa

SEQ ID NO: 2166844 - DNA, 25 bp, Homo sapien
tctgctgactactgaccctgggcat

SEQ ID NO: 2166845 - DNA, 25 bp, Homo sapien
tacacttctagtaggacgagtcacg

SEQ ID NO: 2166846 - DNA, 25 bp, Homo sapien
tgttaccgacttggctgacctctga

SEQ ID NO: 2166847 - DNA, 25 bp, Homo sapien
taaattcgggcacctttagctctgc

SEQ ID NO: 2166848 - DNA, 25 bp, Homo sapien
ccaggattcccactatcatttcata

SEQ ID NO: 2166849 - DNA, 25 bp, Homo sapien
ttccaggattcccactatcatttca

SEQ ID NO: 2166850 - DNA, 25 bp, Homo sapien
tccaggattcccactatcatttcat

SEQ ID NO: 2166851 - DNA, 25 bp, Homo sapien
cttccaggattcccactatcatttc

SEQ ID NO: 2166852 - DNA, 25 bp, Homo sapien
cctaaccacccctgccttggtcaca

SEQ ID NO: 2166853 - DNA, 25 bp, Homo sapien
tcctaaccacccctgccttggtcac

SEQ ID NO: 2166854 - DNA, 25 bp, Homo sapien
tctcctaaccacccctgccttggtc

SEQ ID NO: 2166855 - DNA, 25 bp, Homo sapien
ctcctaaccacccctgccttggtca

SEQ ID NO: 2166856 - DNA, 25 bp, Homo sapien
gatcttaagccacccctcaaaacca

SEQ ID NO: 2166857 - DNA, 25 bp, Homo sapien
cgggcccgctttcctccgccgatct

SEQ ID NO: 2166858 - DNA, 25 bp, Homo sapien
cgccgatcttaagccacccctcaaa

SEQ ID NO: 2166859 - DNA, 25 bp, Homo sapien
tttcctccgccgatcttaagccacc

SEQ ID NO: 2166860 - DNA, 25 bp, Homo sapien
catggggtgtccagggctgacacca

SEQ ID NO: 2166861 - DNA, 25 bp, Homo sapien
ccctccatggggtgtccagggctga

SEQ ID NO: 2166862 - DNA, 25 bp, Homo sapien
tggaagttccaaagttctcctgtgg

SEQ ID NO: 2166863 - DNA, 25 bp, Homo sapien
caaagttctcctgtgggttattcat

SEQ ID NO: 2166864 - DNA, 25 bp, Homo sapien
cctcctggtcagcctgtcccctgag

SEQ ID NO: 2166865 - DNA, 25 bp, Homo sapien
gtcctcctggtcagcctgtcccctg

SEQ ID NO: 2166866 - DNA, 25 bp, Homo sapien
cctggtcagcctgtcccctgagaat

SEQ ID NO: 2166867 - DNA, 25 bp, Homo sapien
ttctccttcagtgctcctctggggc

SEQ ID NO: 2166868 - DNA, 25 bp, Homo sapien
tgactctggtcaaggcagcaagcgg

SEQ ID NO: 2166869 - DNA, 25 bp, Homo sapien
aaggccttcctcaggcatgtagtgc

SEQ ID NO: 2166870 - DNA, 25 bp, Homo sapien
gcaggagctgggtaatggggatgca

SEQ ID NO: 2166871 - DNA, 25 bp, Homo sapien
ctctgtccaagaggcatgatgactc

SEQ ID NO: 2166872 - DNA, 25 bp, Homo sapien
ccagggtgcccatgatcagactaga

SEQ ID NO: 2166873 - DNA, 25 bp, Homo sapien
cagtgcctcagcagcacacaactcc

SEQ ID NO: 2166874 - DNA, 25 bp, Homo sapien
cccatgatcagactagaggaggaag

SEQ ID NO: 2166875 - DNA, 25 bp, Homo sapien
gactcagtgcctcagcagcacacaa

SEQ ID NO: 2166876 - DNA, 25 bp, Homo sapien
agccctcatcggattggttccatag

SEQ ID NO: 2166877 - DNA, 25 bp, Homo sapien
atgggcaaggtgattggctcctcct

SEQ ID NO: 2166878 - DNA, 25 bp, Homo sapien
ttgggatgggcaaggtgattggctc

SEQ ID NO: 2166879 - DNA, 25 bp, Homo sapien
catcggattggttccatagagtgtt

SEQ ID NO: 2166880 - DNA, 25 bp, Homo sapien
tgatttttgatgacactatccacca

SEQ ID NO: 2166881 - DNA, 25 bp, Homo sapien
gcatgtactcggaggattccttgaa

SEQ ID NO: 2166882 - DNA, 25 bp, Homo sapien
taattcgaaacttgtggagcaggac

SEQ ID NO: 2166883 - DNA, 25 bp, Homo sapien
ggagcaggacactaactaaatcaga

SEQ ID NO: 2166884 - DNA, 25 bp, Homo sapien
gggcttgctcgggtcatcaaccagc

SEQ ID NO: 2166885 - DNA, 25 bp, Homo sapien
cataggaatggccggtggggaccac

SEQ ID NO: 2166886 - DNA, 25 bp, Homo sapien
gcttgctcgggtcatcaaccagcat

SEQ ID NO: 2166887 - DNA, 25 bp, Homo sapien
ttgggcttgctcgggtcatcaacca

SEQ ID NO: 2166888 - DNA, 25 bp, Homo sapien
ctggggcgcagttgccctccgtgaa

SEQ ID NO: 2166889 - DNA, 25 bp, Homo sapien
cgcagttgccctccgtgaagatcac

SEQ ID NO: 2166890 - DNA, 25 bp, Homo sapien
gcgcagttgccctccgtgaagatca

SEQ ID NO: 2166891 - DNA, 25 bp, Homo sapien
gggcgcagttgccctccgtgaagat

SEQ ID NO: 2166892 - DNA, 25 bp, Homo sapien
tggaacgtgcactagtccaccccac

SEQ ID NO: 2166893 - DNA, 25 bp, Homo sapien
tgcatcgcctgctgaaactctctct

SEQ ID NO: 2166894 - DNA, 25 bp, Homo sapien
ggctgcatcgcctgctgaaactctc

SEQ ID NO: 2166895 - DNA, 25 bp, Homo sapien
cctggaacgtgcactagtccacccc

SEQ ID NO: 2166896 - DNA, 25 bp, Homo sapien
catccaacaggatgatcagatgtct

SEQ ID NO: 2166897 - DNA, 25 bp, Homo sapien
caaatgtatttttgctattagaggg

SEQ ID NO: 2166898 - DNA, 25 bp, Homo sapien
ttttgctattagaggggccccagtg

SEQ ID NO: 2166899 - DNA, 25 bp, Homo sapien
gaaggtctctattcaaagtcaaatg

SEQ ID NO: 2166900 - DNA, 25 bp, Homo sapien
acgtcaggccgtcgctcgttgctca

SEQ ID NO: 2166901 - DNA, 25 bp, Homo sapien
cctccgccgacgtcaggccgtcgct

SEQ ID NO: 2166902 - DNA, 25 bp, Homo sapien
ctcctcaccgagcctgggccggctt

SEQ ID NO: 2166903 - DNA, 25 bp, Homo sapien
gccgacgtcaggccgtcgctcgttg

SEQ ID NO: 2166904 - DNA, 25 bp, Homo sapien
agagttccccgtggctaaagcggcg

SEQ ID NO: 2166905 - DNA, 25 bp, Homo sapien
gaccttgattcctgccacagcgtgg

SEQ ID NO: 2166906 - DNA, 25 bp, Homo sapien
gcagcactggattatttgaggccct

SEQ ID NO: 2166907 - DNA, 25 bp, Homo sapien
gagcttccgtgacttgataccaggg

SEQ ID NO: 2166908 - DNA, 25 bp, Homo sapien
tgaagtcccactcttcagaccacag

SEQ ID NO: 2166909 - DNA, 25 bp, Homo sapien
cacagccctcaactctctggtcacc

SEQ ID NO: 2166910 - DNA, 25 bp, Homo sapien
cagaccacagccctcaactctctgg

SEQ ID NO: 2166911 - DNA, 25 bp, Homo sapien
ctgaagtcccactcttcagaccaca

SEQ ID NO: 2166912 - DNA, 25 bp, Homo sapien
ctcagggtacatccggccagcgcat

SEQ ID NO: 2166913 - DNA, 25 bp, Homo sapien
ccggccagcgcatgctgaggctgca

SEQ ID NO: 2166914 - DNA, 25 bp, Homo sapien
ggtacatccggccagcgcatgctga

SEQ ID NO: 2166915 - DNA, 25 bp, Homo sapien
atccggccagcgcatgctgaggctg

SEQ ID NO: 2166916 - DNA, 25 bp, Homo sapien
cgggggcctctggtcctccaggtca

SEQ ID NO: 2166917 - DNA, 25 bp, Homo sapien
cttcagtgctcctccgggggcctct

SEQ ID NO: 2166918 - DNA, 25 bp, Homo sapien
cctctggtcctccaggtcagcctgt

SEQ ID NO: 2166919 - DNA, 25 bp, Homo sapien
tcctccaggtcagcctgtcccctca

SEQ ID NO: 2166920 - DNA, 25 bp, Homo sapien
ggtcagggcaacaggcgggagtgtg

SEQ ID NO: 2166921 - DNA, 25 bp, Homo sapien
tggtcagggcaacaggcgggagtgt

SEQ ID NO: 2166922 - DNA, 25 bp, Homo sapien
aggatctggtgactcggcagcaggc

SEQ ID NO: 2166923 - DNA, 25 bp, Homo sapien
gctccagagagggtagttcatggta

SEQ ID NO: 2166924 - DNA, 25 bp, Homo sapien
gggaggatctggtgactcggcagca

SEQ ID NO: 2166925 - DNA, 25 bp, Homo sapien
actgatctttaccatatggtgcagg

SEQ ID NO: 2166926 - DNA, 25 bp, Homo sapien
gacgctcattcaaccatccgttaaa

SEQ ID NO: 2166927 - DNA, 25 bp, Homo sapien
gctgactgctcgcttcaaagagtga

SEQ ID NO: 2166928 - DNA, 25 bp, Homo sapien
gcctcacgtcacaggaggcagtgga

SEQ ID NO: 2166929 - DNA, 25 bp, Homo sapien
tcataaacctggatgctgacgctca

SEQ ID NO: 2166930 - DNA, 25 bp, Homo sapien
ttgagttcagaaaccctgtggaaac

SEQ ID NO: 2166931 - DNA, 25 bp, Homo sapien
cctgtggaaactaccacggagaggg

SEQ ID NO: 2166932 - DNA, 25 bp, Homo sapien
tgtgctcagttgagttcagaaaccc

SEQ ID NO: 2166933 - DNA, 25 bp, Homo sapien
ggagagggtcactgcagacgccttc

SEQ ID NO: 2166934 - DNA, 25 bp, Homo sapien
gttgctcagggcgagaatctcgctg

SEQ ID NO: 2166935 - DNA, 25 bp, Homo sapien
ccgttgctcagggcgagaatctcgc

SEQ ID NO: 2166936 - DNA, 25 bp, Homo sapien
ttgctcagggcgagaatctcgctgt

SEQ ID NO: 2166937 - DNA, 25 bp, Homo sapien
ccgacgtcaggccgttgctcagggc

SEQ ID NO: 2166938 - DNA, 25 bp, Homo sapien
cgctggattattgggggccctctgt

SEQ ID NO: 2166939 - DNA, 25 bp, Homo sapien
ctgagaagtcttcccctgcagggtg

SEQ ID NO: 2166940 - DNA, 25 bp, Homo sapien
agcctgagaagtcttcccctgcagg

SEQ ID NO: 2166941 - DNA, 25 bp, Homo sapien
cagcgctggattattgggggccctc

SEQ ID NO: 2166942 - DNA, 25 bp, Homo sapien
tgccctggtcacacaaagctcttac

SEQ ID NO: 2166943 - DNA, 25 bp, Homo sapien
tgggccctgagcacttctaaccagc

SEQ ID NO: 2166944 - DNA, 25 bp, Homo sapien
tctgggccctgagcacttctaacca

SEQ ID NO: 2166945 - DNA, 25 bp, Homo sapien
tgagtctgggccctgagcacttcta

SEQ ID NO: 2166946 - DNA, 25 bp, Homo sapien
gggatgggattggtagtgagggtag

SEQ ID NO: 2166947 - DNA, 25 bp, Homo sapien
ggatgggattggtagtgagggtagg

SEQ ID NO: 2166948 - DNA, 25 bp, Homo sapien
ggggatgggattggtagtgagggta

SEQ ID NO: 2166949 - DNA, 25 bp, Homo sapien
aggatccgcgtgcttggccgccatt

SEQ ID NO: 2166950 - DNA, 25 bp, Homo sapien
atgtgaacgtcaggatccgcgtgct

SEQ ID NO: 2166951 - DNA, 25 bp, Homo sapien
gaacgtcaggatccgcgtgcttggc

SEQ ID NO: 2166952 - DNA, 25 bp, Homo sapien
ccggagcttccgtgggttgattgca

SEQ ID NO: 2166953 - DNA, 25 bp, Homo sapien
ctgccagggactgccctttctcaac

SEQ ID NO: 2166954 - DNA, 25 bp, Homo sapien
gtgaacgttatgatggcctcctgtg

SEQ ID NO: 2166955 - DNA, 25 bp, Homo sapien
tttggttctagggtgaacgttatga

SEQ ID NO: 2166956 - DNA, 25 bp, Homo sapien
tagggtgaacgttatgatggcctcc

SEQ ID NO: 2166957 - DNA, 25 bp, Homo sapien
ttctagggtgaacgttatgatggcc

SEQ ID NO: 2166958 - DNA, 25 bp, Homo sapien
gaaccactgcatctgtcgaccagat

SEQ ID NO: 2166959 - DNA, 25 bp, Homo sapien
atctgtcgaccagatgggggcccct

SEQ ID NO: 2166960 - DNA, 25 bp, Homo sapien
ccactgcatctgtcgaccagatggg

SEQ ID NO: 2166961 - DNA, 25 bp, Homo sapien
tggatgcttggcagatcctagaacc

SEQ ID NO: 2166962 - DNA, 25 bp, Homo sapien
ctgatatggtacagaaggagatgag

SEQ ID NO: 2166963 - DNA, 25 bp, Homo sapien
gacaacgagagatgtccaaattcat

SEQ ID NO: 2166964 - DNA, 25 bp, Homo sapien
gggacccacatctggccatacgtga

SEQ ID NO: 2166965 - DNA, 25 bp, Homo sapien
tgaccaggtcctcccgcgaaggaca

SEQ ID NO: 2166966 - DNA, 25 bp, Homo sapien
gacactgactcagaccaaggcctca

SEQ ID NO: 2166967 - DNA, 25 bp, Homo sapien
gcctcactgcctggttcctggagct

SEQ ID NO: 2166968 - DNA, 25 bp, Homo sapien
gttggcactgtctgcgtcccctctg

SEQ ID NO: 2166969 - DNA, 25 bp, Homo sapien
tcagtgttggcactgtctgcgtccc

SEQ ID NO: 2166970 - DNA, 25 bp, Homo sapien
gtgcctcgggtcctacttgtcagcc

SEQ ID NO: 2166971 - DNA, 25 bp, Homo sapien
ccagtgcctcgggtcctacttgtca

SEQ ID NO: 2166972 - DNA, 25 bp, Homo sapien
cctcgggtcctacttgtcagcctgt

SEQ ID NO: 2166973 - DNA, 25 bp, Homo sapien
tcgggtcctacttgtcagcctgtcc

SEQ ID NO: 2166974 - DNA, 25 bp, Homo sapien
gcaggagctgggcaatgaagaccca

SEQ ID NO: 2166975 - DNA, 25 bp, Homo sapien
cgggcaggagctgggcaatgaagac

SEQ ID NO: 2166976 - DNA, 25 bp, Homo sapien
ggcagcaggcaggagtgcgggcagg

SEQ ID NO: 2166977 - DNA, 25 bp, Homo sapien
agggcagcaggcaggagtgcgggca

SEQ ID NO: 2166978 - DNA, 25 bp, Homo sapien
gtggggaggactcggtgagtcggca

SEQ ID NO: 2166979 - DNA, 25 bp, Homo sapien
ggggaggactcggtgagtcggcagc

SEQ ID NO: 2166980 - DNA, 25 bp, Homo sapien
gggaggactcggtgagtcggcagca

SEQ ID NO: 2166981 - DNA, 25 bp, Homo sapien
tgtggggaggactcggtgagtcggc

SEQ ID NO: 2166982 - DNA, 25 bp, Homo sapien
tgcgattatggccaggacgattatc

SEQ ID NO: 2166983 - DNA, 25 bp, Homo sapien
acaaggatgtacaagtggctgatgg

SEQ ID NO: 2166984 - DNA, 25 bp, Homo sapien
gagccctcatcggattgtctccaaa

SEQ ID NO: 2166985 - DNA, 25 bp, Homo sapien
tccaggtcgggaaacattcttggcc

SEQ ID NO: 2166986 - DNA, 25 bp, Homo sapien
ctgcaccagatcttgcatgagcagc

SEQ ID NO: 2166987 - DNA, 25 bp, Homo sapien
caccagatcttgcatgagcagcttc

SEQ ID NO: 2166988 - DNA, 25 bp, Homo sapien
gcaccagatcttgcatgagcagctt

SEQ ID NO: 2166989 - DNA, 25 bp, Homo sapien
tgcaccagatcttgcatgagcagct

SEQ ID NO: 2166990 - DNA, 25 bp, Homo sapien
accgatctttagtgtatggtgcagg

SEQ ID NO: 2166991 - DNA, 25 bp, Homo sapien
aggttctccaccgatctttagtgta

SEQ ID NO: 2166992 - DNA, 25 bp, Homo sapien
tctctcaaagcccgttcatgcaggg

SEQ ID NO: 2166993 - DNA, 25 bp, Homo sapien
atctttagtgtatggtgcaggactt

SEQ ID NO: 2166994 - DNA, 25 bp, Homo sapien
gcaggaatgggcctcatatcacacg

SEQ ID NO: 2166995 - DNA, 25 bp, Homo sapien
tcacacgaggcagtggaagctaatg

SEQ ID NO: 2166996 - DNA, 25 bp, Homo sapien
gatgctgaagttcatccaaccattt

SEQ ID NO: 2166997 - DNA, 25 bp, Homo sapien
gccctggctgcaacatgtgctgaga

SEQ ID NO: 2166998 - DNA, 25 bp, Homo sapien
actaccaacgagagggtcactacag

SEQ ID NO: 2166999 - DNA, 25 bp, Homo sapien
acagatgccttatccccaggcccaa

SEQ ID NO: 2167000 - DNA, 25 bp, Homo sapien
accaacgagagggtcactacagatg

SEQ ID NO: 2167001 - DNA, 25 bp, Homo sapien
ggtcactacagatgccttatcccca

SEQ ID NO: 2167002 - DNA, 25 bp, Homo sapien
catccaggaagaatccagttccacc

SEQ ID NO: 2167003 - DNA, 25 bp, Homo sapien
caaaggtttgccaagtgtagctctg

SEQ ID NO: 2167004 - DNA, 25 bp, Homo sapien
tatacttggaagatatgtaaaccgt

SEQ ID NO: 2167005 - DNA, 25 bp, Homo sapien
gtcaatacgatcgtgggagctcccg

SEQ ID NO: 2167006 - DNA, 25 bp, Homo sapien
gctcccgtgggaaagtgtctgtctt

SEQ ID NO: 2167007 - DNA, 25 bp, Homo sapien
tacaagcaaatttgggctgctgtgc

SEQ ID NO: 2167008 - DNA, 25 bp, Homo sapien
ctgtgctctgcttcccaaatcaacc

SEQ ID NO: 2167009 - DNA, 25 bp, Homo sapien
acaagcaaatttgggctgctgtgct

SEQ ID NO: 2167010 - DNA, 25 bp, Homo sapien
ctgctgtgctctgcttcccaaatca

SEQ ID NO: 2167011 - DNA, 25 bp, Homo sapien
agtccacctggtctccccgagcttc

SEQ ID NO: 2167012 - DNA, 25 bp, Homo sapien
gtgtctctgtacagtctactccagt

SEQ ID NO: 2167013 - DNA, 25 bp, Homo sapien
gaccagtgtctctgtacagtctact

SEQ ID NO: 2167014 - DNA, 25 bp, Homo sapien
tcaccagaccagtgtctctgtacag

SEQ ID NO: 2167015 - DNA, 25 bp, Homo sapien
ctctttggtgttgatgggtggttgt

SEQ ID NO: 2167016 - DNA, 25 bp, Homo sapien
ttgttggaaaatgggctggaggctc

SEQ ID NO: 2167017 - DNA, 25 bp, Homo sapien
gtgttgatgggtggttgttggaaaa

SEQ ID NO: 2167018 - DNA, 25 bp, Homo sapien
aaatgggctggaggctcgtggtttc

SEQ ID NO: 2167019 - DNA, 25 bp, Homo sapien
cagggatgagaggatgctttcccct

SEQ ID NO: 2167020 - DNA, 25 bp, Homo sapien
gccagggatgagaggatgctttccc

SEQ ID NO: 2167021 - DNA, 25 bp, Homo sapien
tgggccagggatgagaggatgcttt

SEQ ID NO: 2167022 - DNA, 25 bp, Homo sapien
tttgatagggcttctgggccaggga

SEQ ID NO: 2167023 - DNA, 25 bp, Homo sapien
tcatagagaaatggtacaggctggg

SEQ ID NO: 2167024 - DNA, 25 bp, Homo sapien
gtcagagcttgggtgggccattcac

SEQ ID NO: 2167025 - DNA, 25 bp, Homo sapien
gagtcagagcttgggtgggccattc

SEQ ID NO: 2167026 - DNA, 25 bp, Homo sapien
aggagtcagagcttgggtgggccat

SEQ ID NO: 2167027 - DNA, 25 bp, Homo sapien
ttagggagagccttttgttcctgga

SEQ ID NO: 2167028 - DNA, 25 bp, Homo sapien
gagagccttttgttcctggaacttc

SEQ ID NO: 2167029 - DNA, 25 bp, Homo sapien
tagggagagccttttgttcctggaa

SEQ ID NO: 2167030 - DNA, 25 bp, Homo sapien
ttttcagatagacttgaagtctctg

SEQ ID NO: 2167031 - DNA, 25 bp, Homo sapien
cagatagacttgaagtctctggcct

SEQ ID NO: 2167032 - DNA, 25 bp, Homo sapien
tagacttgaagtctctggccttgcc

SEQ ID NO: 2167033 - DNA, 25 bp, Homo sapien
gatagacttgaagtctctggccttg

SEQ ID NO: 2167034 - DNA, 25 bp, Homo sapien
ttgcaccttcgccagcatcccagat

SEQ ID NO: 2167035 - DNA, 25 bp, Homo sapien
tggtcctttgcaccttcgccagcat

SEQ ID NO: 2167036 - DNA, 25 bp, Homo sapien
caccttcgccagcatcccagatctg

SEQ ID NO: 2167037 - DNA, 25 bp, Homo sapien
gaaccctccagtggtcctttgcacc

SEQ ID NO: 2167038 - DNA, 25 bp, Homo sapien
aggagcagaagcattgtttgtcaca

SEQ ID NO: 2167039 - DNA, 25 bp, Homo sapien
ctggacacatgggaacagtaaagtc

SEQ ID NO: 2167040 - DNA, 25 bp, Homo sapien
gccagtgtgccatttccatgctttc

SEQ ID NO: 2167041 - DNA, 25 bp, Homo sapien
gctttctctccgctttcaacagcaa

SEQ ID NO: 2167042 - DNA, 25 bp, Homo sapien
tgacactggaaaacgctggagaact

SEQ ID NO: 2167043 - DNA, 25 bp, Homo sapien
aaaatactggccttcagcgtgccta

SEQ ID NO: 2167044 - DNA, 25 bp, Homo sapien
tacctcgacaggtgtacaggcgtgt

SEQ ID NO: 2167045 - DNA, 25 bp, Homo sapien
tgaaatcggactttcacagggcgtc

SEQ ID NO: 2167046 - DNA, 25 bp, Homo sapien
agatccccatccgggcagaatccgg

SEQ ID NO: 2167047 - DNA, 25 bp, Homo sapien
ccatccagatccccatccgggcaga

SEQ ID NO: 2167048 - DNA, 25 bp, Homo sapien
atccccatccgggcagaatccggtt

SEQ ID NO: 2167049 - DNA, 25 bp, Homo sapien
atccagatccccatccgggcagaat

SEQ ID NO: 2167050 - DNA, 25 bp, Homo sapien
tacaagcaaatttgggctgctgtgc

SEQ ID NO: 2167051 - DNA, 25 bp, Homo sapien
ctgtgctctgcttcccaaatcaacc

SEQ ID NO: 2167052 - DNA, 25 bp, Homo sapien
acaagcaaatttgggctgctgtgct

SEQ ID NO: 2167053 - DNA, 25 bp, Homo sapien
ctgctgtgctctgcttcccaaatca

SEQ ID NO: 2167054 - DNA, 25 bp, Homo sapien
attaatctgtccattcttggccttt

SEQ ID NO: 2167055 - DNA, 25 bp, Homo sapien
taatctgtccattcttggcctttcc

SEQ ID NO: 2167056 - DNA, 25 bp, Homo sapien
ttaatctgtccattcttggcctttc

SEQ ID NO: 2167057 - DNA, 25 bp, Homo sapien
ttatgtcttaagtcagctcaggctg

SEQ ID NO: 2167058 - DNA, 25 bp, Homo sapien
gacacatagtactagccattgcaca

SEQ ID NO: 2167059 - DNA, 25 bp, Homo sapien
tatcttgcaccatacagaaatgtaa

SEQ ID NO: 2167060 - DNA, 25 bp, Homo sapien
aaattgtgtcacctgaagttatgtc

SEQ ID NO: 2167061 - DNA, 25 bp, Homo sapien
gcgcatttttatgttagtcttgtgg

SEQ ID NO: 2167062 - DNA, 25 bp, Homo sapien
tgttagtcttgtggtagaattcctt

SEQ ID NO: 2167063 - DNA, 25 bp, Homo sapien
ttatgttagtcttgtggtagaattc

SEQ ID NO: 2167064 - DNA, 25 bp, Homo sapien
catttttatgttagtcttgtggtag

SEQ ID NO: 2167065 - DNA, 25 bp, Homo sapien
gaccagcgtctctcaacagtctact

SEQ ID NO: 2167066 - DNA, 25 bp, Homo sapien
accagaccagcgtctctcaacagtc

SEQ ID NO: 2167067 - DNA, 25 bp, Homo sapien
ttcaccagaccagcgtctctcaaca

SEQ ID NO: 2167068 - DNA, 25 bp, Homo sapien
cagaccagcgtctctcaacagtcta

SEQ ID NO: 2167069 - DNA, 25 bp, Homo sapien
caatgggctggaggctcgtggtttc

SEQ ID NO: 2167070 - DNA, 25 bp, Homo sapien
tgggtggttgttggacaatgggctg

SEQ ID NO: 2167071 - DNA, 25 bp, Homo sapien
gttggtgggtggttgttggacaatg

SEQ ID NO: 2167072 - DNA, 25 bp, Homo sapien
ttgttggacaatgggctggaggctc

SEQ ID NO: 2167073 - DNA, 25 bp, Homo sapien
gcttctgggccagggttgagaggat

SEQ ID NO: 2167074 - DNA, 25 bp, Homo sapien
ttctgggccagggttgagaggatgc

SEQ ID NO: 2167075 - DNA, 25 bp, Homo sapien
tttgatagggcttctgggccagggt

SEQ ID NO: 2167076 - DNA, 25 bp, Homo sapien
agggcttctgggccagggttgagag

SEQ ID NO: 2167077 - DNA, 25 bp, Homo sapien
tgagaacaggggcttcatagagaaa

SEQ ID NO: 2167078 - DNA, 25 bp, Homo sapien
aaggaaacagggagatcaaagaagg

SEQ ID NO: 2167079 - DNA, 25 bp, Homo sapien
gagatcaaagaagggcactggtttg

SEQ ID NO: 2167080 - DNA, 25 bp, Homo sapien
caggggcttcatagagaaatggtgc

SEQ ID NO: 2167081 - DNA, 25 bp, Homo sapien
cttttgttcctggaacttccttgat

SEQ ID NO: 2167082 - DNA, 25 bp, Homo sapien
tcctggaacttccttgatgggtccc

SEQ ID NO: 2167083 - DNA, 25 bp, Homo sapien
gttcctggaacttccttgatgggtc

SEQ ID NO: 2167084 - DNA, 25 bp, Homo sapien
ctggaacttccttgatgggtccctt

SEQ ID NO: 2167085 - DNA, 25 bp, Homo sapien
cccgctatggctcattttgattgag

SEQ ID NO: 2167086 - DNA, 25 bp, Homo sapien
ttgcccttgtggtcccgctatggct

SEQ ID NO: 2167087 - DNA, 25 bp, Homo sapien
cttgtggtcccgctatggctcattt

SEQ ID NO: 2167088 - DNA, 25 bp, Homo sapien
gtggtcccgctatggctcattttga

SEQ ID NO: 2167089 - DNA, 25 bp, Homo sapien
ttcaccagcgtcccagatgtgggaa

SEQ ID NO: 2167090 - DNA, 25 bp, Homo sapien
tcaccagcgtcccagatgtgggaac

SEQ ID NO: 2167091 - DNA, 25 bp, Homo sapien
cttcaccagcgtcccagatgtggga

SEQ ID NO: 2167092 - DNA, 25 bp, Homo sapien
caccagcgtcccagatgtgggaact

SEQ ID NO: 2167093 - DNA, 25 bp, Homo sapien
aatccagacttcaggccggtggggt

SEQ ID NO: 2167094 - DNA, 25 bp, Homo sapien
ggagagccgttgctagcgtccatga

SEQ ID NO: 2167095 - DNA, 25 bp, Homo sapien
cgttgctagcgtccatgagagagac

SEQ ID NO: 2167096 - DNA, 25 bp, Homo sapien
tgtcactccgagctctaaatccaga

SEQ ID NO: 2167097 - DNA, 25 bp, Homo sapien
tcacacgctcgaggggatgctttca

SEQ ID NO: 2167098 - DNA, 25 bp, Homo sapien
ccatgctggatttgtactcttctct

SEQ ID NO: 2167099 - DNA, 25 bp, Homo sapien
catgctggatttgtactcttctctg

SEQ ID NO: 2167100 - DNA, 25 bp, Homo sapien
ctgtctgtcacacgctcgaggggat

SEQ ID NO: 2167101 - DNA, 25 bp, Homo sapien
tcttaaagctttgagcacctgccat

SEQ ID NO: 2167102 - DNA, 25 bp, Homo sapien
tcctgcgcatcatgaaaaagaccag

SEQ ID NO: 2167103 - DNA, 25 bp, Homo sapien
gtcagtgagcaagagttcctgcgca

SEQ ID NO: 2167104 - DNA, 25 bp, Homo sapien
caagcagtcattcttgacggctcca

SEQ ID NO: 2167105 - DNA, 25 bp, Homo sapien
ggaagatttcgttcaaaaatctgaa

SEQ ID NO: 2167106 - DNA, 25 bp, Homo sapien
ctgggaagatttcgttcaaaaatct

SEQ ID NO: 2167107 - DNA, 25 bp, Homo sapien
atgaaactgggaagatttcgttcaa

SEQ ID NO: 2167108 - DNA, 25 bp, Homo sapien
aaaaatctgaaacgcgtggccaagg

SEQ ID NO: 2167109 - DNA, 25 bp, Homo sapien
taagtgaaattgataaggaagggac

SEQ ID NO: 2167110 - DNA, 25 bp, Homo sapien
agtgaaattgataaggaagggacag

SEQ ID NO: 2167111 - DNA, 25 bp, Homo sapien
ataagtgaaattgataaggaaggga

SEQ ID NO: 2167112 - DNA, 25 bp, Homo sapien
aagtgaaattgataaggaagggaca

SEQ ID NO: 2167113 - DNA, 25 bp, Homo sapien
caggagatccgggaagcttttgatc

SEQ ID NO: 2167114 - DNA, 25 bp, Homo sapien
aaagcaggagatccgggaagctttt

SEQ ID NO: 2167115 - DNA, 25 bp, Homo sapien
ttttgatcttttcgatgcggatgga

SEQ ID NO: 2167116 - DNA, 25 bp, Homo sapien
ggaactggcaccatagatgttaaag

SEQ ID NO: 2167117 - DNA, 25 bp, Homo sapien
cgcgtgagccgagaatcagccgagc

SEQ ID NO: 2167118 - DNA, 25 bp, Homo sapien
atcagccgagcttcctccaccaaga

SEQ ID NO: 2167119 - DNA, 25 bp, Homo sapien
tcagctcgcaagcaggctgcaccca

SEQ ID NO: 2167120 - DNA, 25 bp, Homo sapien
ctttactcccctcccgcgtgagccg

SEQ ID NO: 2167121 - DNA, 25 bp, Homo sapien
gctgatgagggcgtctcggcctgga

SEQ ID NO: 2167122 - DNA, 25 bp, Homo sapien
tccaaaactcctgtgactctgctga

SEQ ID NO: 2167123 - DNA, 25 bp, Homo sapien
aaaactcctgtgactctgctgatga

SEQ ID NO: 2167124 - DNA, 25 bp, Homo sapien
tctgctgatgagggcgtctcggcct

SEQ ID NO: 2167125 - DNA, 25 bp, Homo sapien
gaagcaaaatatggtcccgtttgta

SEQ ID NO: 2167126 - DNA, 25 bp, Homo sapien
aatatggtcccgtttgtaatcaact

SEQ ID NO: 2167127 - DNA, 25 bp, Homo sapien
tcgaagcaaaatatggtcccgtttg

SEQ ID NO: 2167128 - DNA, 25 bp, Homo sapien
gcaaaatatggtcccgtttgtaatc

SEQ ID NO: 2167129 - DNA, 25 bp, Homo sapien
gagtccgtgcgacttggtctctcat

SEQ ID NO: 2167130 - DNA, 25 bp, Homo sapien
cactttgggagtgtcctctgtcaaa

SEQ ID NO: 2167131 - DNA, 25 bp, Homo sapien
tctgtcaaatgagtccgtgcgactt

SEQ ID NO: 2167132 - DNA, 25 bp, Homo sapien
ctgattctggttaaccttttctatg

SEQ ID NO: 2167133 - DNA, 25 bp, Homo sapien
caccgatcactgtgcatctcttggc

SEQ ID NO: 2167134 - DNA, 25 bp, Homo sapien
aatacattgacagcatatcctcttg

SEQ ID NO: 2167135 - DNA, 25 bp, Homo sapien
cttgctggatatcaaatacattgac

SEQ ID NO: 2167136 - DNA, 25 bp, Homo sapien
gccagcaactgctccaccatgtgct

SEQ ID NO: 2167137 - DNA, 25 bp, Homo sapien
agaggtcacccagaaagaaccgcac

SEQ ID NO: 2167138 - DNA, 25 bp, Homo sapien
gcagaggtcacccagaaagaaccgc

SEQ ID NO: 2167139 - DNA, 25 bp, Homo sapien
gtcggctgcagaggtcacccagaaa

SEQ ID NO: 2167140 - DNA, 25 bp, Homo sapien
ctgtcggctgcagaggtcacccaga

SEQ ID NO: 2167141 - DNA, 25 bp, Homo sapien
gccaatgtaattcactctataaaag

SEQ ID NO: 2167142 - DNA, 25 bp, Homo sapien
ggtgacgcacagtggaaaactgtgt

SEQ ID NO: 2167143 - DNA, 25 bp, Homo sapien
gctccttgttgttactggatggtgg

SEQ ID NO: 2167144 - DNA, 25 bp, Homo sapien
ttcaatgacattcttggtgccaatg

SEQ ID NO: 2167145 - DNA, 25 bp, Homo sapien
tctcctgtaagatcttagtctctgt

SEQ ID NO: 2167146 - DNA, 25 bp, Homo sapien
cagttccattcttgatatcgacgcc

SEQ ID NO: 2167147 - DNA, 25 bp, Homo sapien
tcatggcatagggaaggtcttcagt

SEQ ID NO: 2167148 - DNA, 25 bp, Homo sapien
tagtctctgtgtagtagtcaatggg

SEQ ID NO: 2167149 - DNA, 25 bp, Homo sapien
aattcttctcaggatcgttggcgcc

SEQ ID NO: 2167150 - DNA, 25 bp, Homo sapien
cttgggccgaaaatgccatgagggc

SEQ ID NO: 2167151 - DNA, 25 bp, Homo sapien
atgggtaccaactgcgggtcccttg

SEQ ID NO: 2167152 - DNA, 25 bp, Homo sapien
caatcacgaacttcatcttgccgtt

SEQ ID NO: 2167153 - DNA, 25 bp, Homo sapien
caggaaggactagggaagagccgct

SEQ ID NO: 2167154 - DNA, 25 bp, Homo sapien
tctctgaatgcgagcatggaccagg

SEQ ID NO: 2167155 - DNA, 25 bp, Homo sapien
cagcctgcatggaccaagacagtca

SEQ ID NO: 2167156 - DNA, 25 bp, Homo sapien
gaaaagagctacaatgccatgtggc

SEQ ID NO: 2167157 - DNA, 25 bp, Homo sapien
gtcgagtctcgggagagctgctctg

SEQ ID NO: 2167158 - DNA, 25 bp, Homo sapien
cccacccagtgtcgagtctcgggag

SEQ ID NO: 2167159 - DNA, 25 bp, Homo sapien
cacccagtgtcgagtctcgggagag

SEQ ID NO: 2167160 - DNA, 25 bp, Homo sapien
ttcccacccagtgtcgagtctcggg

SEQ ID NO: 2167161 - DNA, 25 bp, Homo sapien
catggtcactagtggctggtagccc

SEQ ID NO: 2167162 - DNA, 25 bp, Homo sapien
caggtggcgaaagctctgcacggtc

SEQ ID NO: 2167163 - DNA, 25 bp, Homo sapien
gtggaatgtgccagccagtgcgacc

SEQ ID NO: 2167164 - DNA, 25 bp, Homo sapien
gtcaggatgcgagacaggaatgtcc

SEQ ID NO: 2167165 - DNA, 25 bp, Homo sapien
agtagggtgcgctctctgcctagca

SEQ ID NO: 2167166 - DNA, 25 bp, Homo sapien
caaatcggtataatatgaagctgcc

SEQ ID NO: 2167167 - DNA, 25 bp, Homo sapien
catcgtcacggaaagagtagggtgc

SEQ ID NO: 2167168 - DNA, 25 bp, Homo sapien
ctgagcaacgtgtcgagagagccca

SEQ ID NO: 2167169 - DNA, 25 bp, Homo sapien
ttggtctgcatggaaatggttctcc

SEQ ID NO: 2167170 - DNA, 25 bp, Homo sapien
gcacggcaacgtacctgaaagagaa

SEQ ID NO: 2167171 - DNA, 25 bp, Homo sapien
ggcttcactctagtattggtctgca

SEQ ID NO: 2167172 - DNA, 25 bp, Homo sapien
tgctctaagctcactgtcagtatga

SEQ ID NO: 2167173 - DNA, 25 bp, Homo sapien
acaggtaacgaatcaaaagcccttg

SEQ ID NO: 2167174 - DNA, 25 bp, Homo sapien
tatctgggcagctaagtggatggtt

SEQ ID NO: 2167175 - DNA, 25 bp, Homo sapien
caaaagcccttgaggagcaaagcag

SEQ ID NO: 2167176 - DNA, 25 bp, Homo sapien
cagttcatagagctctatctgggca

SEQ ID NO: 2167177 - DNA, 25 bp, Homo sapien
gctctgctgactgcccttgagtgcc

SEQ ID NO: 2167178 - DNA, 25 bp, Homo sapien
tctcctgtaaatgcccttggagtct

SEQ ID NO: 2167179 - DNA, 25 bp, Homo sapien
ccttggagtcttggcacatgaactg

SEQ ID NO: 2167180 - DNA, 25 bp, Homo sapien
cccagattgccaatgagttgctggc

SEQ ID NO: 2167181 - DNA, 25 bp, Homo sapien
tcgggcctttgtgaacctgccctgc

SEQ ID NO: 2167182 - DNA, 25 bp, Homo sapien
attctcgggcctttgtgaacctgcc

SEQ ID NO: 2167183 - DNA, 25 bp, Homo sapien
ggattctcgggcctttgtgaacctg

SEQ ID NO: 2167184 - DNA, 25 bp, Homo sapien
ccgctggattctcgggcctttgtga

SEQ ID NO: 2167185 - DNA, 25 bp, Homo sapien
ggcttggtctcagtgccacctagga

SEQ ID NO: 2167186 - DNA, 25 bp, Homo sapien
ccttgccttgcctctctcacagggc

SEQ ID NO: 2167187 - DNA, 25 bp, Homo sapien
gcaggcttggtctcagtgccaccta

SEQ ID NO: 2167188 - DNA, 25 bp, Homo sapien
tggtctcagtgccacctaggaccat

SEQ ID NO: 2167189 - DNA, 25 bp, Homo sapien
ggccctggacgcagagggattcttc

SEQ ID NO: 2167190 - DNA, 25 bp, Homo sapien
ggacgcagagggattcttcttggtt

SEQ ID NO: 2167191 - DNA, 25 bp, Homo sapien
ccctggacgcagagggattcttctt

SEQ ID NO: 2167192 - DNA, 25 bp, Homo sapien
cctggacgcagagggattcttcttg

SEQ ID NO: 2167193 - DNA, 25 bp, Homo sapien
gttcaagtccatcccgtgggacaca

SEQ ID NO: 2167194 - DNA, 25 bp, Homo sapien
cggtcattgtactacccatcatgtt

SEQ ID NO: 2167195 - DNA, 25 bp, Homo sapien
ttttagtggtcagtgccaggagcag

SEQ ID NO: 2167196 - DNA, 25 bp, Homo sapien
tattgaacaaagacggtcattgtac

SEQ ID NO: 2167197 - DNA, 25 bp, Homo sapien
cgcggggcgcggtgcacagcgggga

SEQ ID NO: 2167198 - DNA, 25 bp, Homo sapien
gtgcacagcggggagcgcgcaggga

SEQ ID NO: 2167199 - DNA, 25 bp, Homo sapien
tggcaccggtgcccggctcgtgggg

SEQ ID NO: 2167200 - DNA, 25 bp, Homo sapien
tggagggtcgggcagtcgcagggcg

SEQ ID NO: 2167201 - DNA, 25 bp, Homo sapien
caggcactgcctgatgtaagcattt

SEQ ID NO: 2167202 - DNA, 25 bp, Homo sapien
tcatcacaaagtggcgtgctgagcc

SEQ ID NO: 2167203 - DNA, 25 bp, Homo sapien
aagatcacagggactagaccaaggg

SEQ ID NO: 2167204 - DNA, 25 bp, Homo sapien
gcattttcaccagggatgccggttc

SEQ ID NO: 2167205 - DNA, 25 bp, Homo sapien
cttctcgccctgctctacccctgag

SEQ ID NO: 2167206 - DNA, 25 bp, Homo sapien
ctcctctcacttgattcagcagggc

SEQ ID NO: 2167207 - DNA, 25 bp, Homo sapien
cctctcacttgattcagcagggctt

SEQ ID NO: 2167208 - DNA, 25 bp, Homo sapien
agctctcctctcacttgattcagca

SEQ ID NO: 2167209 - DNA, 25 bp, Homo sapien
tcctctcacttgattcagcagggct

SEQ ID NO: 2167210 - DNA, 25 bp, Homo sapien
tttggtgcggcctccaagagctgag

SEQ ID NO: 2167211 - DNA, 25 bp, Homo sapien
ctttggtgcggcctccaagagctga

SEQ ID NO: 2167212 - DNA, 25 bp, Homo sapien
ggcctccaagagctgagatactcat

SEQ ID NO: 2167213 - DNA, 25 bp, Homo sapien
tgcggcctccaagagctgagatact

SEQ ID NO: 2167214 - DNA, 25 bp, Homo sapien
gagaacgttattgcgctcctcctcg

SEQ ID NO: 2167215 - DNA, 25 bp, Homo sapien
tggtgcgaccctccgattcatcctg

SEQ ID NO: 2167216 - DNA, 25 bp, Homo sapien
ccgattcatcctgcttggtaatcca

SEQ ID NO: 2167217 - DNA, 25 bp, Homo sapien
cagcgtggttcgcactttcatctgc

SEQ ID NO: 2167218 - DNA, 25 bp, Homo sapien
ccagctgatgaaaaggatgtggcgc

SEQ ID NO: 2167219 - DNA, 25 bp, Homo sapien
ctaggcttcggaacctccccagctg

SEQ ID NO: 2167220 - DNA, 25 bp, Homo sapien
aacctccccagctgatgaaaaggat

SEQ ID NO: 2167221 - DNA, 25 bp, Homo sapien
atgaaaaggatgtggcgcgactccg

SEQ ID NO: 2167222 - DNA, 25 bp, Homo sapien
agtgggagcccttgtgctcggaggc

SEQ ID NO: 2167223 - DNA, 25 bp, Homo sapien
aggagatgccggtgagctccctgga

SEQ ID NO: 2167224 - DNA, 25 bp, Homo sapien
agcccaggagatgccggtgagctcc

SEQ ID NO: 2167225 - DNA, 25 bp, Homo sapien
agagagcccaggagatgccggtgag

SEQ ID NO: 2167226 - DNA, 25 bp, Homo sapien
tgaaagagagcccaggagatgccgg

SEQ ID NO: 2167227 - DNA, 25 bp, Homo sapien
aagagctgtctatgggcttggtgaa

SEQ ID NO: 2167228 - DNA, 25 bp, Homo sapien
gctgtctatgggcttggtgaacact

SEQ ID NO: 2167229 - DNA, 25 bp, Homo sapien
ctgggaagagctgtctatgggcttg

SEQ ID NO: 2167230 - DNA, 25 bp, Homo sapien
gtctatgggcttggtgaacactccc

SEQ ID NO: 2167231 - DNA, 25 bp, Homo sapien
ttagctgttctcaccagactggcag

SEQ ID NO: 2167232 - DNA, 25 bp, Homo sapien
gcgttagctgttctcaccagactgg

SEQ ID NO: 2167233 - DNA, 25 bp, Homo sapien
aggaccagcgttagctgttctcacc

SEQ ID NO: 2167234 - DNA, 25 bp, Homo sapien
ccagcgttagctgttctcaccagac

SEQ ID NO: 2167235 - DNA, 25 bp, Homo sapien
gcttcttgtaatcctcagtggtcat

SEQ ID NO: 2167236 - DNA, 25 bp, Homo sapien
agcttcttgtaatcctcagtggtca

SEQ ID NO: 2167237 - DNA, 25 bp, Homo sapien
cctgatgtagagctgcgcctgatat

SEQ ID NO: 2167238 - DNA, 25 bp, Homo sapien
cctcggtgtcccctgatgtagagct

SEQ ID NO: 2167239 - DNA, 25 bp, Homo sapien
gctgcgcctgatattgtagggtgcc

SEQ ID NO: 2167240 - DNA, 25 bp, Homo sapien
tgtcccctgatgtagagctgcgcct

SEQ ID NO: 2167241 - DNA, 25 bp, Homo sapien
ctgacaggacgtaggagtgctcccg

SEQ ID NO: 2167242 - DNA, 25 bp, Homo sapien
gctgtcctcctcagaacaccgcttg

SEQ ID NO: 2167243 - DNA, 25 bp, Homo sapien
ttcttggccgctgacaggacgtagg

SEQ ID NO: 2167244 - DNA, 25 bp, Homo sapien
ccgctgacaggacgtaggagtgctc

SEQ ID NO: 2167245 - DNA, 25 bp, Homo sapien
cgcgataaacggtgcctgtgtctcc

SEQ ID NO: 2167246 - DNA, 25 bp, Homo sapien
ctcttcgcgataaacggtgcctgtg

SEQ ID NO: 2167247 - DNA, 25 bp, Homo sapien
tcgcgataaacggtgcctgtgtctc

SEQ ID NO: 2167248 - DNA, 25 bp, Homo sapien
cttcgcgataaacggtgcctgtgtc

SEQ ID NO: 2167249 - DNA, 25 bp, Homo sapien
ttctcagaaggcccgtcctcttcca

SEQ ID NO: 2167250 - DNA, 25 bp, Homo sapien
tttgagccaggagtggatcttgcca

SEQ ID NO: 2167251 - DNA, 25 bp, Homo sapien
ctgtttgagccaggagtggatcttg

SEQ ID NO: 2167252 - DNA, 25 bp, Homo sapien
tgagccaggagtggatcttgccaga

SEQ ID NO: 2167253 - DNA, 25 bp, Homo sapien
ggctctggagatgtcagagcctcct

SEQ ID NO: 2167254 - DNA, 25 bp, Homo sapien
ctggcaaagaaggtggctgtgagag

SEQ ID NO: 2167255 - DNA, 25 bp, Homo sapien
caaagaaggtggctgtgagaggctc

SEQ ID NO: 2167256 - DNA, 25 bp, Homo sapien
agaggctctggagatgtcagagcct

SEQ ID NO: 2167257 - DNA, 25 bp, Homo sapien
tgcccgagacgctttggtcctgcct

SEQ ID NO: 2167258 - DNA, 25 bp, Homo sapien
tcccagcggggctaggcatacttgg

SEQ ID NO: 2167259 - DNA, 25 bp, Homo sapien
tacttggcaggcactcgatccaaat

SEQ ID NO: 2167260 - DNA, 25 bp, Homo sapien
tcgatccaaattgcccgagacgctt

SEQ ID NO: 2167261 - DNA, 25 bp, Homo sapien
tgcaggcggacaatttcctcacctc

SEQ ID NO: 2167262 - DNA, 25 bp, Homo sapien
atctgcaggcggacaatttcctcac

SEQ ID NO: 2167263 - DNA, 25 bp, Homo sapien
caggcggacaatttcctcacctctt

SEQ ID NO: 2167264 - DNA, 25 bp, Homo sapien
tctgcaggcggacaatttcctcacc

SEQ ID NO: 2167265 - DNA, 25 bp, Homo sapien
gctgtctccacggagcttaaaacct

SEQ ID NO: 2167266 - DNA, 25 bp, Homo sapien
tgggctgttacctcatcctcaaacg

SEQ ID NO: 2167267 - DNA, 25 bp, Homo sapien
gtgtgggctgttacctcatcctcaa

SEQ ID NO: 2167268 - DNA, 25 bp, Homo sapien
agcttaaaacctgctactgggccgg

SEQ ID NO: 2167269 - DNA, 25 bp, Homo sapien
tggaagttaaccatgcagcagccat

SEQ ID NO: 2167270 - DNA, 25 bp, Homo sapien
aagaaatggaagttaaccatgcagc

SEQ ID NO: 2167271 - DNA, 25 bp, Homo sapien
gaaatggaagttaaccatgcagcag

SEQ ID NO: 2167272 - DNA, 25 bp, Homo sapien
aatggaagttaaccatgcagcagcc

SEQ ID NO: 2167273 - DNA, 25 bp, Homo sapien
cttgtctttgttgcctggggaagac

SEQ ID NO: 2167274 - DNA, 25 bp, Homo sapien
cagcatctgtgttgggggccctgaa

SEQ ID NO: 2167275 - DNA, 25 bp, Homo sapien
gcagggggcctccttgtctttgttg

SEQ ID NO: 2167276 - DNA, 25 bp, Homo sapien
ccaagtccctctggagctctctgga

SEQ ID NO: 2167277 - DNA, 25 bp, Homo sapien
tcctctctcggagccgatgtctact

SEQ ID NO: 2167278 - DNA, 25 bp, Homo sapien
cattgccatcactcaactgtgcact

SEQ ID NO: 2167279 - DNA, 25 bp, Homo sapien
cgatgtctactgcagccaagccttc

SEQ ID NO: 2167280 - DNA, 25 bp, Homo sapien
gtggctccggatcccacattgccat

SEQ ID NO: 2167281 - DNA, 25 bp, Homo sapien
agaggcaaagctagcagctgcacac

SEQ ID NO: 2167282 - DNA, 25 bp, Homo sapien
gaggcaaagctagcagctgcacaca

SEQ ID NO: 2167283 - DNA, 25 bp, Homo sapien
aagaggcaaagctagcagctgcaca

SEQ ID NO: 2167284 - DNA, 25 bp, Homo sapien
tagtccctacagcagaggttctctg

SEQ ID NO: 2167285 - DNA, 25 bp, Homo sapien
tgagcatgacgtatccttacctgac

SEQ ID NO: 2167286 - DNA, 25 bp, Homo sapien
gaaacagggcagacgcttacagcat

SEQ ID NO: 2167287 - DNA, 25 bp, Homo sapien
gggaactgagccctctaatgctggc

SEQ ID NO: 2167288 - DNA, 25 bp, Homo sapien
cagcagagactgaagtggcactgga

SEQ ID NO: 2167289 - DNA, 25 bp, Homo sapien
acagcagagactgaagtggcactgg

SEQ ID NO: 2167290 - DNA, 25 bp, Homo sapien
ggacagcagagactgaagtggcact

SEQ ID NO: 2167291 - DNA, 25 bp, Homo sapien
cagggacagcagagactgaagtggc

SEQ ID NO: 2167292 - DNA, 25 bp, Homo sapien
tctgcctttgcatcctcctgggctg

SEQ ID NO: 2167293 - DNA, 25 bp, Homo sapien
gggtctgcctttgcatcctcctggg

SEQ ID NO: 2167294 - DNA, 25 bp, Homo sapien
cctcctgggctgctgtgctgttgct

SEQ ID NO: 2167295 - DNA, 25 bp, Homo sapien
catcctcctgggctgctgtgctgtt

SEQ ID NO: 2167296 - DNA, 25 bp, Homo sapien
tcgcgcaggcgcacacgtcctgtgc

SEQ ID NO: 2167297 - DNA, 25 bp, Homo sapien
gcgcaggcgcacacgtcctgtgccc

SEQ ID NO: 2167298 - DNA, 25 bp, Homo sapien
cgcgcaggcgcacacgtcctgtgcc

SEQ ID NO: 2167299 - DNA, 25 bp, Homo sapien
cgcaggcgcacacgtcctgtgcccg

SEQ ID NO: 2167300 - DNA, 25 bp, Homo sapien
ggcttcaagaaatggcggcctacgc

SEQ ID NO: 2167301 - DNA, 25 bp, Homo sapien
gtcgcgtacgctggtggcgagcgcg

SEQ ID NO: 2167302 - DNA, 25 bp, Homo sapien
ggcgtactcactacgggcgcgtgct

SEQ ID NO: 2167303 - DNA, 25 bp, Homo sapien
tgcacaggcgcgcacgcgtcgcgta

SEQ ID NO: 2167304 - DNA, 25 bp, Homo sapien
tgtggacggtcgcattttcccggcg

SEQ ID NO: 2167305 - DNA, 25 bp, Homo sapien
atggcctcaagagaatccccgccga

SEQ ID NO: 2167306 - DNA, 25 bp, Homo sapien
gagctcgtcccgggcggccatttca

SEQ ID NO: 2167307 - DNA, 25 bp, Homo sapien
tctggcggccggcacgggcatggcc

SEQ ID NO: 2167308 - DNA, 25 bp, Homo sapien
aactctctcgtctgacaagttgctc

SEQ ID NO: 2167309 - DNA, 25 bp, Homo sapien
ctgctgccacaactctctcgtctga

SEQ ID NO: 2167310 - DNA, 25 bp, Homo sapien
tccttcccctcataatcagccaagg

SEQ ID NO: 2167311 - DNA, 25 bp, Homo sapien
cctgccaggcctctccgaccctggt

SEQ ID NO: 2167312 - DNA, 25 bp, Homo sapien
tatacactttgtgagcctccactcg

SEQ ID NO: 2167313 - DNA, 25 bp, Homo sapien
atctggcaaaatctccctcagcctt

SEQ ID NO: 2167314 - DNA, 25 bp, Homo sapien
tgccttcccaagcacgtctggcaca

SEQ ID NO: 2167315 - DNA, 25 bp, Homo sapien
aaacccagctccaacatcactctcc

SEQ ID NO: 2167316 - DNA, 25 bp, Homo sapien
gtgggtttcaagaccatataagtac

SEQ ID NO: 2167317 - DNA, 25 bp, Homo sapien
aaaattctggcaagccattgttgtg

SEQ ID NO: 2167318 - DNA, 25 bp, Homo sapien
cagaacattctagcataaagaggta

SEQ ID NO: 2167319 - DNA, 25 bp, Homo sapien
ggagttgctcatgctaaatgtaaca

SEQ ID NO: 2167320 - DNA, 25 bp, Homo sapien
gctcctttctgacaagggcaaagtc

SEQ ID NO: 2167321 - DNA, 25 bp, Homo sapien
gacgacttcaatgaggtgttaaaag

SEQ ID NO: 2167322 - DNA, 25 bp, Homo sapien
cttctggctggaaacacactggtat

SEQ ID NO: 2167323 - DNA, 25 bp, Homo sapien
gaaacacactggtattcttgtcccc

SEQ ID NO: 2167324 - DNA, 25 bp, Homo sapien
cttcccctcaaaatcagtcaacacg

SEQ ID NO: 2167325 - DNA, 25 bp, Homo sapien
ccttcccctcaaaatcagtcaacac

SEQ ID NO: 2167326 - DNA, 25 bp, Homo sapien
gtgcagctctctcgtctgacgaatt

SEQ ID NO: 2167327 - DNA, 25 bp, Homo sapien
tgccaggcctctccgaccttggtgg

SEQ ID NO: 2167328 - DNA, 25 bp, Homo sapien
gctctctcgtctgacgaattgctca

SEQ ID NO: 2167329 - DNA, 25 bp, Homo sapien
cctgccaggcctctccgaccttggt

SEQ ID NO: 2167330 - DNA, 25 bp, Homo sapien
tccatgtcagcagaatactgaaggg

SEQ ID NO: 2167331 - DNA, 25 bp, Homo sapien
cagaatactgaaggggacggcgcaa

SEQ ID NO: 2167332 - DNA, 25 bp, Homo sapien
ggtatcctgtgatccatgtcagcag

SEQ ID NO: 2167333 - DNA, 25 bp, Homo sapien
caggtgtctggtatcctgtgatcca

SEQ ID NO: 2167334 - DNA, 25 bp, Homo sapien
cccaggctatgagcctcattaccaa

SEQ ID NO: 2167335 - DNA, 25 bp, Homo sapien
tatgagcctcattaccaaagctgcc

SEQ ID NO: 2167336 - DNA, 25 bp, Homo sapien
agccaatatcggctctcactctgcc

SEQ ID NO: 2167337 - DNA, 25 bp, Homo sapien
tgcccccaggctatgagcctcatta

SEQ ID NO: 2167338 - DNA, 25 bp, Homo sapien
caacctcctcggcagcccaaaaggg

SEQ ID NO: 2167339 - DNA, 25 bp, Homo sapien
cagatatggcccttggcctggaatc

SEQ ID NO: 2167340 - DNA, 25 bp, Homo sapien
ctcggcagcccaaaagggcttttct

SEQ ID NO: 2167341 - DNA, 25 bp, Homo sapien
ttggcctggaatccaacctcctcgg

SEQ ID NO: 2167342 - DNA, 25 bp, Homo sapien
agctggagtccaattcacttgcggg

SEQ ID NO: 2167343 - DNA, 25 bp, Homo sapien
gtaacagtgaccatgcagctcgagg

SEQ ID NO: 2167344 - DNA, 25 bp, Homo sapien
tagagctggagtccaattcacttgc

SEQ ID NO: 2167345 - DNA, 25 bp, Homo sapien
cacttgcgggggctggaatataaat

SEQ ID NO: 2167346 - DNA, 25 bp, Homo sapien
tggctaatggcctgctagaaactgg

SEQ ID NO: 2167347 - DNA, 25 bp, Homo sapien
gggatccctcatgaacagctagcac

SEQ ID NO: 2167348 - DNA, 25 bp, Homo sapien
aatcccaggccatgagcgtctcttg

SEQ ID NO: 2167349 - DNA, 25 bp, Homo sapien
tgtggactcagactacaatcccagg

SEQ ID NO: 2167350 - DNA, 25 bp, Homo sapien
gacacttcactagcattcacgtact

SEQ ID NO: 2167351 - DNA, 25 bp, Homo sapien
cccagaagacacttcactagcattc

SEQ ID NO: 2167352 - DNA, 25 bp, Homo sapien
tcactagcattcacgtactccttca

SEQ ID NO: 2167353 - DNA, 25 bp, Homo sapien
cattcacgtactccttcacgaagag

SEQ ID NO: 2167354 - DNA, 25 bp, Homo sapien
ctctcagagtatggagtgctgccac

SEQ ID NO: 2167355 - DNA, 25 bp, Homo sapien
ttctccatggcgaatgagtcctcaa

SEQ ID NO: 2167356 - DNA, 25 bp, Homo sapien
ccatggcgaatgagtcctcaatgct

SEQ ID NO: 2167357 - DNA, 25 bp, Homo sapien
gcttcttctccatggcgaatgagtc

SEQ ID NO: 2167358 - DNA, 25 bp, Homo sapien
cggttgcagtaagtacagatccctc

SEQ ID NO: 2167359 - DNA, 25 bp, Homo sapien
gacagtctcggatctcacggttgca

SEQ ID NO: 2167360 - DNA, 25 bp, Homo sapien
tagggtaatctttggacagtctcgg

SEQ ID NO: 2167361 - DNA, 25 bp, Homo sapien
gcagataccaagatgttctagggta

SEQ ID NO: 2167362 - DNA, 25 bp, Homo sapien
gagatcgcccatcggtttactgcaa

SEQ ID NO: 2167363 - DNA, 25 bp, Homo sapien
tctgatccaggagatcgcccatcgg

SEQ ID NO: 2167364 - DNA, 25 bp, Homo sapien
cagtgaatggtgtcacggtgaatga

SEQ ID NO: 2167365 - DNA, 25 bp, Homo sapien
gagcttctcatagcatttcccacag

SEQ ID NO: 2167366 - DNA, 25 bp, Homo sapien
gccaaatttgtccacgagtcatcag

SEQ ID NO: 2167367 - DNA, 25 bp, Homo sapien
tataagcctcaagggagtcaggaca

SEQ ID NO: 2167368 - DNA, 25 bp, Homo sapien
catgggctctgtagcgttctgcgca

SEQ ID NO: 2167369 - DNA, 25 bp, Homo sapien
tagtgtgggtacatgccctccagag

SEQ ID NO: 2167370 - DNA, 25 bp, Homo sapien
agatgcatgggtaggagaccgtcac

SEQ ID NO: 2167371 - DNA, 25 bp, Homo sapien
gtaggagaccgtcacagatacaaac

SEQ ID NO: 2167372 - DNA, 25 bp, Homo sapien
gaggacatagagatgcatgggtagg

SEQ ID NO: 2167373 - DNA, 25 bp, Homo sapien
catgggtaggagaccgtcacagata

SEQ ID NO: 2167374 - DNA, 25 bp, Homo sapien
gcagggcactaagcaaggaggatca

SEQ ID NO: 2167375 - DNA, 25 bp, Homo sapien
taaatcattacacagaggttaccca

SEQ ID NO: 2167376 - DNA, 25 bp, Homo sapien
aagtgagggcttacaggccataagt

SEQ ID NO: 2167377 - DNA, 25 bp, Homo sapien
tgatggcttgcaggtaagggctttt

SEQ ID NO: 2167378 - DNA, 25 bp, Homo sapien
tgcacagtttccaggtaccaggtag

SEQ ID NO: 2167379 - DNA, 25 bp, Homo sapien
cactccctgtgtctgagaacgaaga

SEQ ID NO: 2167380 - DNA, 25 bp, Homo sapien
tcgatttccagattcagagaggcaa

SEQ ID NO: 2167381 - DNA, 25 bp, Homo sapien
taccaggtagccaatgaaattccca

SEQ ID NO: 2167382 - DNA, 25 bp, Homo sapien
gcacagccagagaccagccactccc

SEQ ID NO: 2167383 - DNA, 25 bp, Homo sapien
actcccaaatgcagggcctgaagca

SEQ ID NO: 2167384 - DNA, 25 bp, Homo sapien
ccactcccaaatgcagggcctgaag

SEQ ID NO: 2167385 - DNA, 25 bp, Homo sapien
acagccagagaccagccactcccaa

SEQ ID NO: 2167386 - DNA, 25 bp, Homo sapien
cttgagggagggagcctgatcagac

SEQ ID NO: 2167387 - DNA, 25 bp, Homo sapien
gctgactgttgcagtctctgacgca

SEQ ID NO: 2167388 - DNA, 25 bp, Homo sapien
ctgactgttgcagtctctgacgcag

SEQ ID NO: 2167389 - DNA, 25 bp, Homo sapien
agggagcctgatcagacaggaatgt

SEQ ID NO: 2167390 - DNA, 25 bp, Homo sapien
acggcctcctggaactcatgttcct

SEQ ID NO: 2167391 - DNA, 25 bp, Homo sapien
cacggcctcctggaactcatgttcc

SEQ ID NO: 2167392 - DNA, 25 bp, Homo sapien
tggtttaaaccctcagcgaattcca

SEQ ID NO: 2167393 - DNA, 25 bp, Homo sapien
tatttggcggggaatcaagctttgg

SEQ ID NO: 2167394 - DNA, 25 bp, Homo sapien
ccctttgcctgctatttggcgggga

SEQ ID NO: 2167395 - DNA, 25 bp, Homo sapien
aaaccctcagcgaattccaccaagg

SEQ ID NO: 2167396 - DNA, 25 bp, Homo sapien
ctgcaggtcctgtatcacctgcggc

SEQ ID NO: 2167397 - DNA, 25 bp, Homo sapien
gcaggtcctgtatcacctgcggctc

SEQ ID NO: 2167398 - DNA, 25 bp, Homo sapien
cctgtatcacctgcggctccctcat

SEQ ID NO: 2167399 - DNA, 25 bp, Homo sapien
ggtcctgtatcacctgcggctccct

SEQ ID NO: 2167400 - DNA, 25 bp, Homo sapien
gcatggtaccacagctgcagcatat

SEQ ID NO: 2167401 - DNA, 25 bp, Homo sapien
tgctccctccctgaaaagggtctca

SEQ ID NO: 2167402 - DNA, 25 bp, Homo sapien
catatccttggcgtgctccatccag

SEQ ID NO: 2167403 - DNA, 25 bp, Homo sapien
ctgaaaagggtctcagttcctggta

SEQ ID NO: 2167404 - DNA, 25 bp, Homo sapien
tcctctaggaggccgctcacaacgt

SEQ ID NO: 2167405 - DNA, 25 bp, Homo sapien
ccaagttgggatcttcctctaggag

SEQ ID NO: 2167406 - DNA, 25 bp, Homo sapien
gtccagtgccgccaagttgggatct

SEQ ID NO: 2167407 - DNA, 25 bp, Homo sapien
ccgctcacaacgtccagggctgggc

SEQ ID NO: 2167408 - DNA, 25 bp, Homo sapien
cggtttccaaacgcctgccccagca

SEQ ID NO: 2167409 - DNA, 25 bp, Homo sapien
ctggaagtcattcgagggtcccggt

SEQ ID NO: 2167410 - DNA, 25 bp, Homo sapien
ggtttccaaacgcctgccccagcac

SEQ ID NO: 2167411 - DNA, 25 bp, Homo sapien
tgcctgggcggcaactggatcttca

SEQ ID NO: 2167412 - DNA, 25 bp, Homo sapien
aggctgcacctaccgcagtcacagg

SEQ ID NO: 2167413 - DNA, 25 bp, Homo sapien
tattctggagtgcttcgccagggca

SEQ ID NO: 2167414 - DNA, 25 bp, Homo sapien
aagtagggcggcctcctctccagtg

SEQ ID NO: 2167415 - DNA, 25 bp, Homo sapien
gccgaggccgaactcgccccgatgg

SEQ ID NO: 2167416 - DNA, 25 bp, Homo sapien
agcgggcgtgacctcaggagaatcc

SEQ ID NO: 2167417 - DNA, 25 bp, Homo sapien
gccccgatggccgtttcgctttgtg

SEQ ID NO: 2167418 - DNA, 25 bp, Homo sapien
aaggccactctggccacggctgcag

SEQ ID NO: 2167419 - DNA, 25 bp, Homo sapien
cagccctgacgaccgttgtctggtg

SEQ ID NO: 2167420 - DNA, 25 bp, Homo sapien
gacgaccgttgtctggtgtcccaga

SEQ ID NO: 2167421 - DNA, 25 bp, Homo sapien
cctgacgaccgttgtctggtgtccc

SEQ ID NO: 2167422 - DNA, 25 bp, Homo sapien
ctggacagccctgacgaccgttgtc

SEQ ID NO: 2167423 - DNA, 25 bp, Homo sapien
taacaggaagactccccaacgtcaa

SEQ ID NO: 2167424 - DNA, 25 bp, Homo sapien
cctcagtaacaggaagactccccaa

SEQ ID NO: 2167425 - DNA, 25 bp, Homo sapien
gaagactccccaacgtcaaaatctc

SEQ ID NO: 2167426 - DNA, 25 bp, Homo sapien
cagtaacaggaagactccccaacgt

SEQ ID NO: 2167427 - DNA, 25 bp, Homo sapien
aagggtaaatgctaatgctggcagg

SEQ ID NO: 2167428 - DNA, 25 bp, Homo sapien
aaaagtgagtgaaggtacccatagg

SEQ ID NO: 2167429 - DNA, 25 bp, Homo sapien
aaagggtaaatgctaatgctggcag

SEQ ID NO: 2167430 - DNA, 25 bp, Homo sapien
tgagtgaaggtacccatagggaaaa

SEQ ID NO: 2167431 - DNA, 25 bp, Homo sapien
accatccccaagagaaaggctgaag

SEQ ID NO: 2167432 - DNA, 25 bp, Homo sapien
caccatccccaagagaaaggctgaa

SEQ ID NO: 2167433 - DNA, 25 bp, Homo sapien
ccatccccaagagaaaggctgaagg

SEQ ID NO: 2167434 - DNA, 25 bp, Homo sapien
accaccatccccaagagaaaggctg

SEQ ID NO: 2167435 - DNA, 25 bp, Homo sapien
gctctccgggggctatgcgcggcgg

SEQ ID NO: 2167436 - DNA, 25 bp, Homo sapien
agggctctccgggggctatgcgcgg

SEQ ID NO: 2167437 - DNA, 25 bp, Homo sapien
gggctctccgggggctatgcgcggc

SEQ ID NO: 2167438 - DNA, 25 bp, Homo sapien
tcctagggtgatcgcagaaggccca

SEQ ID NO: 2167439 - DNA, 25 bp, Homo sapien
tcaactcctagggtgatcgcagaag

SEQ ID NO: 2167440 - DNA, 25 bp, Homo sapien
catatctggatcaactcctagggtg

SEQ ID NO: 2167441 - DNA, 25 bp, Homo sapien
cagggcgtgaggcacatatctggat

SEQ ID NO: 2167442 - DNA, 25 bp, Homo sapien
gagaaattccccatctgagttacgg

SEQ ID NO: 2167443 - DNA, 25 bp, Homo sapien
gaacaattggtgtccgacccgagga

SEQ ID NO: 2167444 - DNA, 25 bp, Homo sapien
catctcagtggtgtgctcaagccag

SEQ ID NO: 2167445 - DNA, 25 bp, Homo sapien
agtcgatatcttgtgccagctccag

SEQ ID NO: 2167446 - DNA, 25 bp, Homo sapien
ttttcttgagcctcgagagccagcc

SEQ ID NO: 2167447 - DNA, 25 bp, Homo sapien
tgatgcactgtaccctgatgtggcc

SEQ ID NO: 2167448 - DNA, 25 bp, Homo sapien
tatagcagaatgtgtggcgtttccg

SEQ ID NO: 2167449 - DNA, 25 bp, Homo sapien
gatgtggccgtcttccccacagcta

SEQ ID NO: 2167450 - DNA, 25 bp, Homo sapien
cttgggatggctcttgtcccaagcc

SEQ ID NO: 2167451 - DNA, 25 bp, Homo sapien
tcccgtttcccgactcaactgcagc

SEQ ID NO: 2167452 - DNA, 25 bp, Homo sapien
tgggatggctcttgtcccaagccca

SEQ ID NO: 2167453 - DNA, 25 bp, Homo sapien
cagttcccgtttcccgactcaactg

SEQ ID NO: 2167454 - DNA, 25 bp, Homo sapien
taggaaatgttgccctgttctcccg

SEQ ID NO: 2167455 - DNA, 25 bp, Homo sapien
ctgtggtaggaaatgttgccctgtt

SEQ ID NO: 2167456 - DNA, 25 bp, Homo sapien
gaaatgttgccctgttctcccgagc

SEQ ID NO: 2167457 - DNA, 25 bp, Homo sapien
tgtggtaggaaatgttgccctgttc

SEQ ID NO: 2167458 - DNA, 25 bp, Homo sapien
cccctccttccaatatctcttttgt

SEQ ID NO: 2167459 - DNA, 25 bp, Homo sapien
ccctccttccaatatctcttttgtc

SEQ ID NO: 2167460 - DNA, 25 bp, Homo sapien
tcccctccttccaatatctcttttg

SEQ ID NO: 2167461 - DNA, 25 bp, Homo sapien
ccaggtggtcttggttgctgaagtc

SEQ ID NO: 2167462 - DNA, 25 bp, Homo sapien
gaaggcttggccttggtctggctgc

SEQ ID NO: 2167463 - DNA, 25 bp, Homo sapien
cactgagcctgttgccaggtggtct

SEQ ID NO: 2167464 - DNA, 25 bp, Homo sapien
tccagcacctcttcggggacctgga

SEQ ID NO: 2167465 - DNA, 25 bp, Homo sapien
aggtaggctcctccaggtcccatgt

SEQ ID NO: 2167466 - DNA, 25 bp, Homo sapien
caaagtccacagggtgggtatttag

SEQ ID NO: 2167467 - DNA, 25 bp, Homo sapien
cagtgggcatgttcagctcaaagtc

SEQ ID NO: 2167468 - DNA, 25 bp, Homo sapien
ggttggatgagcaggacagaacccc

SEQ ID NO: 2167469 - DNA, 25 bp, Homo sapien
ctggggctcccctagtgcagtgtag

SEQ ID NO: 2167470 - DNA, 25 bp, Homo sapien
ggctcccctagtgcagtgtagatga

SEQ ID NO: 2167471 - DNA, 25 bp, Homo sapien
ctcccctagtgcagtgtagatgatc

SEQ ID NO: 2167472 - DNA, 25 bp, Homo sapien
gggctcccctagtgcagtgtagatg

SEQ ID NO: 2167473 - DNA, 25 bp, Homo sapien
catcaatctttggtctccttgcctg

SEQ ID NO: 2167474 - DNA, 25 bp, Homo sapien
agggcactggcctgccgggtaccca

SEQ ID NO: 2167475 - DNA, 25 bp, Homo sapien
cctggtccaagtcaactgtgagggc

SEQ ID NO: 2167476 - DNA, 25 bp, Homo sapien
ggtccaagtcaactgtgagggcact

SEQ ID NO: 2167477 - DNA, 25 bp, Homo sapien
gggtctgcctcttgccaggaaggta

SEQ ID NO: 2167478 - DNA, 25 bp, Homo sapien
tgcacaggaacaacggctagcggtg

SEQ ID NO: 2167479 - DNA, 25 bp, Homo sapien
gaagctcacagcatgtgccttgggc

SEQ ID NO: 2167480 - DNA, 25 bp, Homo sapien
cacctgggtgggtgcatagcacact

SEQ ID NO: 2167481 - DNA, 25 bp, Homo sapien
aagatgttcaaaccggagggcttcg

SEQ ID NO: 2167482 - DNA, 25 bp, Homo sapien
tggatgccccgcagacatttcagag

SEQ ID NO: 2167483 - DNA, 25 bp, Homo sapien
catttcagagctaagatgttcaaac

SEQ ID NO: 2167484 - DNA, 25 bp, Homo sapien
cagagctaagatgttcaaaccggag

SEQ ID NO: 2167485 - DNA, 25 bp, Homo sapien
gacaaatagagctgtggagggccac

SEQ ID NO: 2167486 - DNA, 25 bp, Homo sapien
caaaggctgttgcaacctgacacaa

SEQ ID NO: 2167487 - DNA, 25 bp, Homo sapien
gggttcccatgcacgaatgcctgat

SEQ ID NO: 2167488 - DNA, 25 bp, Homo sapien
caaataatacttctgtgaggacacc

SEQ ID NO: 2167489 - DNA, 25 bp, Homo sapien
ctccccgcgcgggcgttccctctga

SEQ ID NO: 2167490 - DNA, 25 bp, Homo sapien
cgcgcgggcgttccctctgactgtg

SEQ ID NO: 2167491 - DNA, 25 bp, Homo sapien
cacagggcgcgtcgggggctgcgcg

SEQ ID NO: 2167492 - DNA, 25 bp, Homo sapien
cccacagggcgcgtcgggggctgcg

SEQ ID NO: 2167493 - DNA, 25 bp, Homo sapien
gcgggcgagagcgaggttaatgccc

SEQ ID NO: 2167494 - DNA, 25 bp, Homo sapien
gagcgggcgagagcgaggttaatgc

SEQ ID NO: 2167495 - DNA, 25 bp, Homo sapien
agcgggcgagagcgaggttaatgcc

SEQ ID NO: 2167496 - DNA, 25 bp, Homo sapien
ctgacacgaggggcaggatagggtt

SEQ ID NO: 2167497 - DNA, 25 bp, Homo sapien
tgtggggggatgaactggggtcgga

SEQ ID NO: 2167498 - DNA, 25 bp, Homo sapien
tcccagcgcggaccagggtggcacg

SEQ ID NO: 2167499 - DNA, 25 bp, Homo sapien
gggatgaactggggtcggagcccag

SEQ ID NO: 2167500 - DNA, 25 bp, Homo sapien
gcccgcgattctggccagtgccggg

SEQ ID NO: 2167501 - DNA, 25 bp, Homo sapien
agcatttcggtggtgtggtctagcc

SEQ ID NO: 2167502 - DNA, 25 bp, Homo sapien
gagggactcttggaattcggcatca

SEQ ID NO: 2167503 - DNA, 25 bp, Homo sapien
tcttgctccgggaagtggaacacgc

SEQ ID NO: 2167504 - DNA, 25 bp, Homo sapien
aaagcatagttgacttcccggtcga

SEQ ID NO: 2167505 - DNA, 25 bp, Homo sapien
tgggaccgcctctactttagtgctg

SEQ ID NO: 2167506 - DNA, 25 bp, Homo sapien
tcctgggaccgcctctactttagtg

SEQ ID NO: 2167507 - DNA, 25 bp, Homo sapien
gaccgcctctactttagtgctggct

SEQ ID NO: 2167508 - DNA, 25 bp, Homo sapien
cctctactttagtgctggctctggc

SEQ ID NO: 2167509 - DNA, 25 bp, Homo sapien
cccaccccatttggtattaaatgtg

SEQ ID NO: 2167510 - DNA, 25 bp, Homo sapien
cacgatacgggagagcagtgagcac

SEQ ID NO: 2167511 - DNA, 25 bp, Homo sapien
ggaggactcgcgctgggctgcctcc

SEQ ID NO: 2167512 - DNA, 25 bp, Homo sapien
aatgtggtcatctgggtcaccggga

SEQ ID NO: 2167513 - DNA, 25 bp, Homo sapien
gctgtcacgggatgagtgtccactg

SEQ ID NO: 2167514 - DNA, 25 bp, Homo sapien
gctgctcagagaagaacacacacgg

SEQ ID NO: 2167515 - DNA, 25 bp, Homo sapien
acagaagctgcaaatggccaccaca

SEQ ID NO: 2167516 - DNA, 25 bp, Homo sapien
caccccaggtctaggaaactcagta

SEQ ID NO: 2167517 - DNA, 25 bp, Homo sapien
cgccgccgcagcggcgcgcagcccc

SEQ ID NO: 2167518 - DNA, 25 bp, Homo sapien
ccgccgccgcagcggcgcgcagccc

SEQ ID NO: 2167519 - DNA, 25 bp, Homo sapien
cgcagcggcgcgcagcccccgacgc

SEQ ID NO: 2167520 - DNA, 25 bp, Homo sapien
agcggcgcgcagcccccgacgcgcc

SEQ ID NO: 2167521 - DNA, 25 bp, Homo sapien
agtccttgtgcgaatggtggtcgca

SEQ ID NO: 2167522 - DNA, 25 bp, Homo sapien
gaggagagtccttgtgcgaatggtg

SEQ ID NO: 2167523 - DNA, 25 bp, Homo sapien
gaaggaggagagtccttgtgcgaat

SEQ ID NO: 2167524 - DNA, 25 bp, Homo sapien
tgcgaatggtggtcgcagatagcat

SEQ ID NO: 2167525 - DNA, 25 bp, Homo sapien
gaacaacatccttcagagtccaggg

SEQ ID NO: 2167526 - DNA, 25 bp, Homo sapien
tctgaggaacaacatccttcagagt

SEQ ID NO: 2167527 - DNA, 25 bp, Homo sapien
catccttcagagtccagggaattgg

SEQ ID NO: 2167528 - DNA, 25 bp, Homo sapien
caacatccttcagagtccagggaat

SEQ ID NO: 2167529 - DNA, 25 bp, Homo sapien
cattagcactaaatgcaacattgcc

SEQ ID NO: 2167530 - DNA, 25 bp, Homo sapien
caacattgccatcaaggtcactcgt

SEQ ID NO: 2167531 - DNA, 25 bp, Homo sapien
gccatcaaggtcactcgtagacact

SEQ ID NO: 2167532 - DNA, 25 bp, Homo sapien
ctcattagcactaaatgcaacattg

SEQ ID NO: 2167533 - DNA, 25 bp, Homo sapien
atacttgaggctgccgaaaccccac

SEQ ID NO: 2167534 - DNA, 25 bp, Homo sapien
tcagtgtgggaagtggacggatact

SEQ ID NO: 2167535 - DNA, 25 bp, Homo sapien
gacggatacttgaggctgccgaaac

SEQ ID NO: 2167536 - DNA, 25 bp, Homo sapien
aagtggacggatacttgaggctgcc

SEQ ID NO: 2167537 - DNA, 25 bp, Homo sapien
tttcatctttgcaggccgtaaataa

SEQ ID NO: 2167538 - DNA, 25 bp, Homo sapien
ctttgcccaggtatgacagtatttc

SEQ ID NO: 2167539 - DNA, 25 bp, Homo sapien
ggccgtaaataagccgtgagcactt

SEQ ID NO: 2167540 - DNA, 25 bp, Homo sapien
taaaagttggtctccatgccaaagt

SEQ ID NO: 2167541 - DNA, 25 bp, Homo sapien
tgtagaagtcctctggatgtcccat

SEQ ID NO: 2167542 - DNA, 25 bp, Homo sapien
catgacaggccacattccttttcct

SEQ ID NO: 2167543 - DNA, 25 bp, Homo sapien
tgacaggccacattccttttccttg

SEQ ID NO: 2167544 - DNA, 25 bp, Homo sapien
tccttgtagaagtcctctggatgtc

SEQ ID NO: 2167545 - DNA, 25 bp, Homo sapien
tcacgtgcaatttggccagtcgtaa

SEQ ID NO: 2167546 - DNA, 25 bp, Homo sapien
taagcaagatttcgtgtggtgacaa

SEQ ID NO: 2167547 - DNA, 25 bp, Homo sapien
gatttcgtgtggtgacaaaatgaat

SEQ ID NO: 2167548 - DNA, 25 bp, Homo sapien
tggccagtcgtaagcaagatttcgt

SEQ ID NO: 2167549 - DNA, 25 bp, Homo sapien
ctgccaacgtgacaatcaaatttgg

SEQ ID NO: 2167550 - DNA, 25 bp, Homo sapien
aacgtgacaatcaaatttgggctgc

SEQ ID NO: 2167551 - DNA, 25 bp, Homo sapien
ccaacgtgacaatcaaatttgggct

SEQ ID NO: 2167552 - DNA, 25 bp, Homo sapien
acgtgacaatcaaatttgggctgct

SEQ ID NO: 2167553 - DNA, 25 bp, Homo sapien
caaggttcaggagtcgtctctagcc

SEQ ID NO: 2167554 - DNA, 25 bp, Homo sapien
ccttagtgtgtctttgcactcacaa

SEQ ID NO: 2167555 - DNA, 25 bp, Homo sapien
ctgggttccttagtgtgtctttgca

SEQ ID NO: 2167556 - DNA, 25 bp, Homo sapien
ggagtcgtctctagcctcccaggac

SEQ ID NO: 2167557 - DNA, 25 bp, Homo sapien
agaggagcatcaaggtgccaggtcc

SEQ ID NO: 2167558 - DNA, 25 bp, Homo sapien
agcatcaaggtgccaggtcctggag

SEQ ID NO: 2167559 - DNA, 25 bp, Homo sapien
tcagaggagcatcaaggtgccaggt

SEQ ID NO: 2167560 - DNA, 25 bp, Homo sapien
catcaaggtgccaggtcctggaggt

SEQ ID NO: 2167561 - DNA, 25 bp, Homo sapien
cccgaggttctgctggatgacgact

SEQ ID NO: 2167562 - DNA, 25 bp, Homo sapien
gatgacgacttgctacggagagcag

SEQ ID NO: 2167563 - DNA, 25 bp, Homo sapien
cggagagcaggaagcgccaatacat

SEQ ID NO: 2167564 - DNA, 25 bp, Homo sapien
tggttgtcatagaaaccgaagtgtc

SEQ ID NO: 2167565 - DNA, 25 bp, Homo sapien
cacatcgaaatactctgctagcctg

SEQ ID NO: 2167566 - DNA, 25 bp, Homo sapien
gaaatactctgctagcctgttgttg

SEQ ID NO: 2167567 - DNA, 25 bp, Homo sapien
cttccacatcgaaatactctgctag

SEQ ID NO: 2167568 - DNA, 25 bp, Homo sapien
catcgaaatactctgctagcctgtt

SEQ ID NO: 2167569 - DNA, 25 bp, Homo sapien
tcacgagggacagaactggctggct

SEQ ID NO: 2167570 - DNA, 25 bp, Homo sapien
agggcacgcttactctctgaaggga

SEQ ID NO: 2167571 - DNA, 25 bp, Homo sapien
caagagcataggacgtactccgagt

SEQ ID NO: 2167572 - DNA, 25 bp, Homo sapien
catctactgcgaggatttgaacttc

SEQ ID NO: 2167573 - DNA, 25 bp, Homo sapien
cccgggcagggcgcctggagtaggg

SEQ ID NO: 2167574 - DNA, 25 bp, Homo sapien
ctgtccccgggcagggcgcctggag

SEQ ID NO: 2167575 - DNA, 25 bp, Homo sapien
ctggagtaggggcaatggctgtggg

SEQ ID NO: 2167576 - DNA, 25 bp, Homo sapien
gagtaggggcaatggctgtgggctc

SEQ ID NO: 2167577 - DNA, 25 bp, Homo sapien
caatggccttgcacgcagatgacgt

SEQ ID NO: 2167578 - DNA, 25 bp, Homo sapien
cacaggacacctggagtaagggcaa

SEQ ID NO: 2167579 - DNA, 25 bp, Homo sapien
ggtaatgtcctttggcacccgtgac

SEQ ID NO: 2167580 - DNA, 25 bp, Homo sapien
ccagggcgcccagattaggtgcaat

SEQ ID NO: 2167581 - DNA, 25 bp, Homo sapien
taggggcaatgtccgtgcgtgccgc

SEQ ID NO: 2167582 - DNA, 25 bp, Homo sapien
ggcaatgtccgtgcgtgccgctgac

SEQ ID NO: 2167583 - DNA, 25 bp, Homo sapien
ggggcaatgtccgtgcgtgccgctg

SEQ ID NO: 2167584 - DNA, 25 bp, Homo sapien
gggcaatgtccgtgcgtgccgctga

SEQ ID NO: 2167585 - DNA, 25 bp, Homo sapien
tgtaactgctcagagtgcctggagt

SEQ ID NO: 2167586 - DNA, 25 bp, Homo sapien
ggcaatggccctgcgcgtccatgac

SEQ ID NO: 2167587 - DNA, 25 bp, Homo sapien
aactgctcagagtgcctggagtagg

SEQ ID NO: 2167588 - DNA, 25 bp, Homo sapien
gagtaggggcaatggccctgcgcgt

SEQ ID NO: 2167589 - DNA, 25 bp, Homo sapien
ggctgtgagctctcgtgacctgtca

SEQ ID NO: 2167590 - DNA, 25 bp, Homo sapien
cacaatgggcatgtagtagggacaa

SEQ ID NO: 2167591 - DNA, 25 bp, Homo sapien
cctggagtaggatcaatggctgtga

SEQ ID NO: 2167592 - DNA, 25 bp, Homo sapien
cgtgacttttcaccacgcagggtgg

SEQ ID NO: 2167593 - DNA, 25 bp, Homo sapien
acccgggacctttcactgcacaaag

SEQ ID NO: 2167594 - DNA, 25 bp, Homo sapien
ttcccgcacagtgcgcatggagtag

SEQ ID NO: 2167595 - DNA, 25 bp, Homo sapien
cctgcgcagtgcacctggagtaggg

SEQ ID NO: 2167596 - DNA, 25 bp, Homo sapien
aacagtgcggatggagtaggtgcaa

SEQ ID NO: 2167597 - DNA, 25 bp, Homo sapien
gaagggcaatgcctgtgcccacccg

SEQ ID NO: 2167598 - DNA, 25 bp, Homo sapien
gagcaacggccctgcgcaccggtga

SEQ ID NO: 2167599 - DNA, 25 bp, Homo sapien
aaccagtggccgtgcattttcgtga

SEQ ID NO: 2167600 - DNA, 25 bp, Homo sapien
cctggagtagaaccagtggccgtgc

SEQ ID NO: 2167601 - DNA, 25 bp, Homo sapien
ttttcgtgacccgtcacagtgcagg

SEQ ID NO: 2167602 - DNA, 25 bp, Homo sapien
caatgctcctgcgtgcgcgggacct

SEQ ID NO: 2167603 - DNA, 25 bp, Homo sapien
atgctcctgcgtgcgcgggaccttt

SEQ ID NO: 2167604 - DNA, 25 bp, Homo sapien
taaacatggagtaggggcaatgctc

SEQ ID NO: 2167605 - DNA, 25 bp, Homo sapien
ctgtccccgcacagtaaacatggag

SEQ ID NO: 2167606 - DNA, 25 bp, Homo sapien
accacgcagggcgccgggagtaata

SEQ ID NO: 2167607 - DNA, 25 bp, Homo sapien
tccttgatttgccaccaagcagggc

SEQ ID NO: 2167608 - DNA, 25 bp, Homo sapien
cgccgggagtaatagcaatggccct

SEQ ID NO: 2167609 - DNA, 25 bp, Homo sapien
gcctggagtaggtgcaatgcccata

SEQ ID NO: 2167610 - DNA, 25 bp, Homo sapien
tataagtccatgacccgtcaccgtg

SEQ ID NO: 2167611 - DNA, 25 bp, Homo sapien
gaaggaataatggacgtgcgccctg

SEQ ID NO: 2167612 - DNA, 25 bp, Homo sapien
caatggccatgcgagctgttgagct

SEQ ID NO: 2167613 - DNA, 25 bp, Homo sapien
cctggagttggaacaatggccctga

SEQ ID NO: 2167614 - DNA, 25 bp, Homo sapien
cgatggccttgtgcgctgatgagct

SEQ ID NO: 2167615 - DNA, 25 bp, Homo sapien
ttgtgcgctgatgagctgccaccgc

SEQ ID NO: 2167616 - DNA, 25 bp, Homo sapien
gccttgtgcgctgatgagctgccac

SEQ ID NO: 2167617 - DNA, 25 bp, Homo sapien
agaaggagcgatggccttgtgcgct

SEQ ID NO: 2167618 - DNA, 25 bp, Homo sapien
tcgatggccgtatgtgtctgtgacc

SEQ ID NO: 2167619 - DNA, 25 bp, Homo sapien
gcctagaataggagcaacggccctg

SEQ ID NO: 2167620 - DNA, 25 bp, Homo sapien
gacacttggagtaggatcgatggcc

SEQ ID NO: 2167621 - DNA, 25 bp, Homo sapien
taagagtaatgtcctggtgcgctgg

SEQ ID NO: 2167622 - DNA, 25 bp, Homo sapien
gcgaaagcgtcagggaatcctggca

SEQ ID NO: 2167623 - DNA, 25 bp, Homo sapien
gatgcaccctcctccgttactgtgg

SEQ ID NO: 2167624 - DNA, 25 bp, Homo sapien
gacataagagttgaggcgtttgccc

SEQ ID NO: 2167625 - DNA, 25 bp, Homo sapien
tctcacaaacatgccgcgaaagcgt

SEQ ID NO: 2167626 - DNA, 25 bp, Homo sapien
tcaccaggcgtctgaggtccttgag

SEQ ID NO: 2167627 - DNA, 25 bp, Homo sapien
gaaaatctggacctggacgcttcct

SEQ ID NO: 2167628 - DNA, 25 bp, Homo sapien
ttagcaagcttagcgtcaccaggcg

SEQ ID NO: 2167629 - DNA, 25 bp, Homo sapien
gccagccctttgaatggtggtgaca

SEQ ID NO: 2167630 - DNA, 25 bp, Homo sapien
tgaatgccccgctttccatggtgca

SEQ ID NO: 2167631 - DNA, 25 bp, Homo sapien
ccaggtgcttcagccttcgaagagg

SEQ ID NO: 2167632 - DNA, 25 bp, Homo sapien
tcttgaaatttgaaccagaccatcg

SEQ ID NO: 2167633 - DNA, 25 bp, Homo sapien
cactgctggccaaaacggatgatct

SEQ ID NO: 2167634 - DNA, 25 bp, Homo sapien
gttgacgctttgcttgtaggccttc

SEQ ID NO: 2167635 - DNA, 25 bp, Homo sapien
tagtgggagatcagtgagaagcacc

SEQ ID NO: 2167636 - DNA, 25 bp, Homo sapien
gctttgcttgtaggccttctgggct

SEQ ID NO: 2167637 - DNA, 25 bp, Homo sapien
agtgagaagcaccagttgacgcttt

SEQ ID NO: 2167638 - DNA, 25 bp, Homo sapien
tgtaatccagcccatcaagtgcggc

SEQ ID NO: 2167639 - DNA, 25 bp, Homo sapien
caagtgcggcgatggtacaaatcat

SEQ ID NO: 2167640 - DNA, 25 bp, Homo sapien
ccaggtatgtttcaatgcagtgcaa

SEQ ID NO: 2167641 - DNA, 25 bp, Homo sapien
tgtgtggcttcagaaacgcggtcag

SEQ ID NO: 2167642 - DNA, 25 bp, Homo sapien
tgtatgggtggttgctggttctctt

SEQ ID NO: 2167643 - DNA, 25 bp, Homo sapien
tagctgtatgggtggttgctggttc

SEQ ID NO: 2167644 - DNA, 25 bp, Homo sapien
taattagctgtatgggtggttgctg

SEQ ID NO: 2167645 - DNA, 25 bp, Homo sapien
ctaattagctgtatgggtggttgct

SEQ ID NO: 2167646 - DNA, 25 bp, Homo sapien
gatggtttctatccacgtatcgcca

SEQ ID NO: 2167647 - DNA, 25 bp, Homo sapien
gcgacaatcttgcatgaggctgaca

SEQ ID NO: 2167648 - DNA, 25 bp, Homo sapien
tatggactacgtgcaagccattcgg

SEQ ID NO: 2167649 - DNA, 25 bp, Homo sapien
tctctcatgggattcaactctcggg

SEQ ID NO: 2167650 - DNA, 25 bp, Homo sapien
gagccggcccgtgaataagttggaa

SEQ ID NO: 2167651 - DNA, 25 bp, Homo sapien
acttagcggaatgaaggctgcccct

SEQ ID NO: 2167652 - DNA, 25 bp, Homo sapien
tagattgttgggacctgttggagcc

SEQ ID NO: 2167653 - DNA, 25 bp, Homo sapien
tactccagtttacgggcaggtagac

SEQ ID NO: 2167654 - DNA, 25 bp, Homo sapien
ggtaattttgtgtcaccgtctggac

SEQ ID NO: 2167655 - DNA, 25 bp, Homo sapien
ttttgtgtcaccgtctggaccctgc

SEQ ID NO: 2167656 - DNA, 25 bp, Homo sapien
tttgtgtcaccgtctggaccctgcc

SEQ ID NO: 2167657 - DNA, 25 bp, Homo sapien
taattttgtgtcaccgtctggaccc

SEQ ID NO: 2167658 - DNA, 25 bp, Homo sapien
aagtttctgctctgtgggggccttt

SEQ ID NO: 2167659 - DNA, 25 bp, Homo sapien
tacttgtcttctattcccagaagtt

SEQ ID NO: 2167660 - DNA, 25 bp, Homo sapien
tttctgctctgtgggggcctttgtc

SEQ ID NO: 2167661 - DNA, 25 bp, Homo sapien
ttacttgtcttctattcccagaagt

SEQ ID NO: 2167662 - DNA, 25 bp, Homo sapien
tccattgtacgttctccgtttgttc

SEQ ID NO: 2167663 - DNA, 25 bp, Homo sapien
cttccattgtacgttctccgtttgt

SEQ ID NO: 2167664 - DNA, 25 bp, Homo sapien
ccattgtacgttctccgtttgttct

SEQ ID NO: 2167665 - DNA, 25 bp, Homo sapien
cattgtacgttctccgtttgttctc

SEQ ID NO: 2167666 - DNA, 25 bp, Homo sapien
tcaggttctcgaatcccggtggtgg

SEQ ID NO: 2167667 - DNA, 25 bp, Homo sapien
ccggtggtggaagtccctcgttctg

SEQ ID NO: 2167668 - DNA, 25 bp, Homo sapien
ggccacagacattggcgcctggtga

SEQ ID NO: 2167669 - DNA, 25 bp, Homo sapien
cacaggtcgagctggccctggatac

SEQ ID NO: 2167670 - DNA, 25 bp, Homo sapien
ttgccgttgcctcctgtagtcccgt

SEQ ID NO: 2167671 - DNA, 25 bp, Homo sapien
cgtagtgcctttctcgcttaaacgg

SEQ ID NO: 2167672 - DNA, 25 bp, Homo sapien
ccccgtttgggatcttagcacacat

SEQ ID NO: 2167673 - DNA, 25 bp, Homo sapien
tgctgctttcgggatcccctctggg

SEQ ID NO: 2167674 - DNA, 25 bp, Homo sapien
cttgggccaaccagcgagtagccat

SEQ ID NO: 2167675 - DNA, 25 bp, Homo sapien
cctggtcgctgttagcgttaaccgt

SEQ ID NO: 2167676 - DNA, 25 bp, Homo sapien
tgttagcgttaaccgtgcctttcat

SEQ ID NO: 2167677 - DNA, 25 bp, Homo sapien
tcgctgttagcgttaaccgtgcctt

SEQ ID NO: 2167678 - DNA, 25 bp, Homo sapien
tggtcgctgttagcgttaaccgtgc

SEQ ID NO: 2167679 - DNA, 25 bp, Homo sapien
cagtcctcggaggagatgcattctg

SEQ ID NO: 2167680 - DNA, 25 bp, Homo sapien
tgcattgaatgagactgggagccac

SEQ ID NO: 2167681 - DNA, 25 bp, Homo sapien
cacatggtacttgggctgcgtgtgt

SEQ ID NO: 2167682 - DNA, 25 bp, Homo sapien
gccacttgggagcacagaactcagt

SEQ ID NO: 2167683 - DNA, 25 bp, Homo sapien
ctgggttctgcatagtgtggccaca

SEQ ID NO: 2167684 - DNA, 25 bp, Homo sapien
ggttctgcatagtgtggccacactg

SEQ ID NO: 2167685 - DNA, 25 bp, Homo sapien
tgggttctgcatagtgtggccacac

SEQ ID NO: 2167686 - DNA, 25 bp, Homo sapien
tctgcatagtgtggccacactgcat

SEQ ID NO: 2167687 - DNA, 25 bp, Homo sapien
ccagaacctcattgtgagccacagc

SEQ ID NO: 2167688 - DNA, 25 bp, Homo sapien
gctcctggctccacgtgcctgcttg

SEQ ID NO: 2167689 - DNA, 25 bp, Homo sapien
ctggctccacgtgcctgcttgggct

SEQ ID NO: 2167690 - DNA, 25 bp, Homo sapien
tatccccagaacctcattgtgagcc

SEQ ID NO: 2167691 - DNA, 25 bp, Homo sapien
cagtgcaggcatgggaggggtagtt

SEQ ID NO: 2167692 - DNA, 25 bp, Homo sapien
ctgggagacactcggcatacacagg

SEQ ID NO: 2167693 - DNA, 25 bp, Homo sapien
tacacaggccagtgcaggcatggga

SEQ ID NO: 2167694 - DNA, 25 bp, Homo sapien
cactcggcatacacaggccagtgca

SEQ ID NO: 2167695 - DNA, 25 bp, Homo sapien
gaggaatcctggatctaggcgacct

SEQ ID NO: 2167696 - DNA, 25 bp, Homo sapien
taggcgacctgtctgcttgagcgga

SEQ ID NO: 2167697 - DNA, 25 bp, Homo sapien
tggatctaggcgacctgtctgcttg

SEQ ID NO: 2167698 - DNA, 25 bp, Homo sapien
gaatcctggatctaggcgacctgtc

SEQ ID NO: 2167699 - DNA, 25 bp, Homo sapien
gcaagaggcggaccctggggccctc

SEQ ID NO: 2167700 - DNA, 25 bp, Homo sapien
tgagcatgaccacgatggtgcccgt

SEQ ID NO: 2167701 - DNA, 25 bp, Homo sapien
aagaaccggacctgggacagagcag

SEQ ID NO: 2167702 - DNA, 25 bp, Homo sapien
catgactgtgtgaggaagaaccgga

SEQ ID NO: 2167703 - DNA, 25 bp, Homo sapien
catcctgtgactgctatggtgagca

SEQ ID NO: 2167704 - DNA, 25 bp, Homo sapien
ctgaccatagtcgagaacataaagc

SEQ ID NO: 2167705 - DNA, 25 bp, Homo sapien
gggctgaccatagtcgagaacataa

SEQ ID NO: 2167706 - DNA, 25 bp, Homo sapien
ggctgaccatagtcgagaacataaa

SEQ ID NO: 2167707 - DNA, 25 bp, Homo sapien
gaccatagtcgagaacataaagcat

SEQ ID NO: 2167708 - DNA, 25 bp, Homo sapien
cgcggccctcggtggagcggcgctg

SEQ ID NO: 2167709 - DNA, 25 bp, Homo sapien
ggcaggaagcgccacggagccgccc

SEQ ID NO: 2167710 - DNA, 25 bp, Homo sapien
gtgcccagccgagctaacagccccg

SEQ ID NO: 2167711 - DNA, 25 bp, Homo sapien
gcgcgtttccggagccgtgagcgcc

SEQ ID NO: 2167712 - DNA, 25 bp, Homo sapien
gtctctcttggggtatttgtgtctg

SEQ ID NO: 2167713 - DNA, 25 bp, Homo sapien
tctctcttggggtatttgtgtctgt

SEQ ID NO: 2167714 - DNA, 25 bp, Homo sapien
tgtctctcttggggtatttgtgtct

SEQ ID NO: 2167715 - DNA, 25 bp, Homo sapien
tcatgcctcagaactactccaaggg

SEQ ID NO: 2167716 - DNA, 25 bp, Homo sapien
ctactccaagggatcagcctggcag

SEQ ID NO: 2167717 - DNA, 25 bp, Homo sapien
ggatgactcatcatgcctcagaact

SEQ ID NO: 2167718 - DNA, 25 bp, Homo sapien
gacacacacggatgactcatcatgc

SEQ ID NO: 2167719 - DNA, 25 bp, Homo sapien
tccaactttgtagaggcaacaaaaa

SEQ ID NO: 2167720 - DNA, 25 bp, Homo sapien
aggcaacaaaaaaccggatgaagat

SEQ ID NO: 2167721 - DNA, 25 bp, Homo sapien
ggcaacaaaaaaccggatgaagatg

SEQ ID NO: 2167722 - DNA, 25 bp, Homo sapien
gctgaatgacaagccagggcacgga

SEQ ID NO: 2167723 - DNA, 25 bp, Homo sapien
aaggccatgagtgacgacagccctg

SEQ ID NO: 2167724 - DNA, 25 bp, Homo sapien
gcacggagatgcctgagaaaacaca

SEQ ID NO: 2167725 - DNA, 25 bp, Homo sapien
gagtaggtggaactaaagaaagtga

SEQ ID NO: 2167726 - DNA, 25 bp, Homo sapien
tgatcaagcactaggatccctgggc

SEQ ID NO: 2167727 - DNA, 25 bp, Homo sapien
tgagagaatcccaagcaaggcagag

SEQ ID NO: 2167728 - DNA, 25 bp, Homo sapien
tctgttgctaacatggaggcctaac

SEQ ID NO: 2167729 - DNA, 25 bp, Homo sapien
gattggaactccaagcccagtggac

SEQ ID NO: 2167730 - DNA, 25 bp, Homo sapien
gaattcccagggctcatcagtcttt

SEQ ID NO: 2167731 - DNA, 25 bp, Homo sapien
aattcccagggctcatcagtctttc

SEQ ID NO: 2167732 - DNA, 25 bp, Homo sapien
ctgaaagaattcccagggctcatca

SEQ ID NO: 2167733 - DNA, 25 bp, Homo sapien
aaagaattcccagggctcatcagtc

SEQ ID NO: 2167734 - DNA, 25 bp, Homo sapien
tcccataatattccagtgccctctg

SEQ ID NO: 2167735 - DNA, 25 bp, Homo sapien
ggtgaggtaccatgccacatcatca

SEQ ID NO: 2167736 - DNA, 25 bp, Homo sapien
cacgttcccataatattccagtgcc

SEQ ID NO: 2167737 - DNA, 25 bp, Homo sapien
cccttgtggtgaggtaccatgccac

SEQ ID NO: 2167738 - DNA, 25 bp, Homo sapien
gacaccagtagcacttgtccttgtg

SEQ ID NO: 2167739 - DNA, 25 bp, Homo sapien
tacttagcaggatcagtgttgggcg

SEQ ID NO: 2167740 - DNA, 25 bp, Homo sapien
acttgtccttgtgccaggtgaggga

SEQ ID NO: 2167741 - DNA, 25 bp, Homo sapien
ttgggcgatgggtctgacaccagta

SEQ ID NO: 2167742 - DNA, 25 bp, Homo sapien
ccttcatctggtgtcgggtcgcgga

SEQ ID NO: 2167743 - DNA, 25 bp, Homo sapien
tgctgtggaccctcagatgctgact

SEQ ID NO: 2167744 - DNA, 25 bp, Homo sapien
tgcttgagaagctcctggcgatcca

SEQ ID NO: 2167745 - DNA, 25 bp, Homo sapien
gtgttgactttgaacgaccgcccgc

SEQ ID NO: 2167746 - DNA, 25 bp, Homo sapien
tgcgctggtgctcggccagcccgtt

SEQ ID NO: 2167747 - DNA, 25 bp, Homo sapien
agagcttgccgcagtggggacaccc

SEQ ID NO: 2167748 - DNA, 25 bp, Homo sapien
tgagctccgagctccttcggaagag

SEQ ID NO: 2167749 - DNA, 25 bp, Homo sapien
ggcttggccccactgtggatgcgct

SEQ ID NO: 2167750 - DNA, 25 bp, Homo sapien
cactgtggatgcgtgcgtgctccag

SEQ ID NO: 2167751 - DNA, 25 bp, Homo sapien
ctgtggatgcgtgcgtgctccagga

SEQ ID NO: 2167752 - DNA, 25 bp, Homo sapien
tcgccactgtggatgcgtgcgtgct

SEQ ID NO: 2167753 - DNA, 25 bp, Homo sapien
gccactgtggatgcgtgcgtgctcc

SEQ ID NO: 2167754 - DNA, 25 bp, Homo sapien
cactcatagggtttcagtccgctgt

SEQ ID NO: 2167755 - DNA, 25 bp, Homo sapien
aggccttgccgcatttgtcgcactc

SEQ ID NO: 2167756 - DNA, 25 bp, Homo sapien
gactgaggccggagctccggcggaa

SEQ ID NO: 2167757 - DNA, 25 bp, Homo sapien
tggatccgccggtggcgactgaggc

SEQ ID NO: 2167758 - DNA, 25 bp, Homo sapien
tgaacacgcggccacactggctgca

SEQ ID NO: 2167759 - DNA, 25 bp, Homo sapien
tgccgagcgcctcttgaacacgcgg

SEQ ID NO: 2167760 - DNA, 25 bp, Homo sapien
tggtgggttggctgatgcttctgca

SEQ ID NO: 2167761 - DNA, 25 bp, Homo sapien
actggctgcattcgcagcgccgcgc

SEQ ID NO: 2167762 - DNA, 25 bp, Homo sapien
tagcagtacacctagagagcccaag

SEQ ID NO: 2167763 - DNA, 25 bp, Homo sapien
tatgaggacgccatcgtggaacagc

SEQ ID NO: 2167764 - DNA, 25 bp, Homo sapien
tccattgatctaggtgaggccaagc

SEQ ID NO: 2167765 - DNA, 25 bp, Homo sapien
tcatgaagggatcgtcactgagcga

SEQ ID NO: 2167766 - DNA, 25 bp, Homo sapien
gcgtggaaacccaattgtcatgtgt

SEQ ID NO: 2167767 - DNA, 25 bp, Homo sapien
tcatgcacgtgcgtggaaacccaat

SEQ ID NO: 2167768 - DNA, 25 bp, Homo sapien
tgcacgtgcgtggaaacccaattgt

SEQ ID NO: 2167769 - DNA, 25 bp, Homo sapien
cgtgcgtggaaacccaattgtcatg

SEQ ID NO: 2167770 - DNA, 25 bp, Homo sapien
caggcgctgtgccagttctaggaca

SEQ ID NO: 2167771 - DNA, 25 bp, Homo sapien
aaacatgcccgctgcaattgggtag

SEQ ID NO: 2167772 - DNA, 25 bp, Homo sapien
gatgattgcttgctgcccttgggtc

SEQ ID NO: 2167773 - DNA, 25 bp, Homo sapien
aaatcacatggtacgcaacagggcc

SEQ ID NO: 2167774 - DNA, 25 bp, Homo sapien
tcactgagactagaaggcatcgact

SEQ ID NO: 2167775 - DNA, 25 bp, Homo sapien
gacatgctggaaatcgtgaaacact

SEQ ID NO: 2167776 - DNA, 25 bp, Homo sapien
cacgtggaccaatgagggctgctgc

SEQ ID NO: 2167777 - DNA, 25 bp, Homo sapien
aacaggtgttcatgcagtcaggtgc

SEQ ID NO: 2167778 - DNA, 25 bp, Homo sapien
tctgtgtatttgcctgccagttcct

SEQ ID NO: 2167779 - DNA, 25 bp, Homo sapien
ctctgtgtatttgcctgccagttcc

SEQ ID NO: 2167780 - DNA, 25 bp, Homo sapien
gctctgtgtatttgcctgccagttc

SEQ ID NO: 2167781 - DNA, 25 bp, Homo sapien
catgagctgcagaatcctccaagtg

SEQ ID NO: 2167782 - DNA, 25 bp, Homo sapien
tgcatgagctgcagaatcctccaag

SEQ ID NO: 2167783 - DNA, 25 bp, Homo sapien
gagctgcagaatcctccaagtgcac

SEQ ID NO: 2167784 - DNA, 25 bp, Homo sapien
ctgcatgagctgcagaatcctccaa

SEQ ID NO: 2167785 - DNA, 25 bp, Homo sapien
aggagtctgctttgggcaccagagg

SEQ ID NO: 2167786 - DNA, 25 bp, Homo sapien
cagcaggaagtgggtaagtgcccaa

SEQ ID NO: 2167787 - DNA, 25 bp, Homo sapien
gagtctgctttgggcaccagagggc

SEQ ID NO: 2167788 - DNA, 25 bp, Homo sapien
gcaggaagtgggtaagtgcccaata

SEQ ID NO: 2167789 - DNA, 25 bp, Homo sapien
tggctgctctaggagcatcaggtgt

SEQ ID NO: 2167790 - DNA, 25 bp, Homo sapien
tgctctaggagcatcaggtgtcatg

SEQ ID NO: 2167791 - DNA, 25 bp, Homo sapien
agttggctgctctaggagcatcagg

SEQ ID NO: 2167792 - DNA, 25 bp, Homo sapien
tcagttggctgctctaggagcatca

SEQ ID NO: 2167793 - DNA, 25 bp, Homo sapien
tatgactgctatagatgctggaagt

SEQ ID NO: 2167794 - DNA, 25 bp, Homo sapien
aaggaaatcttgtgactatgactgc

SEQ ID NO: 2167795 - DNA, 25 bp, Homo sapien
caactgttaatcctaggagccaggt

SEQ ID NO: 2167796 - DNA, 25 bp, Homo sapien
cagactttacagaatgccttaggaa

SEQ ID NO: 2167797 - DNA, 25 bp, Homo sapien
tggaagtcaaccaggtacagcacca

SEQ ID NO: 2167798 - DNA, 25 bp, Homo sapien
gctgctggcatggaagaacccatgg

SEQ ID NO: 2167799 - DNA, 25 bp, Homo sapien
tcatgagtaatgagcgaggtgcctg

SEQ ID NO: 2167800 - DNA, 25 bp, Homo sapien
gggcccagatagcaggagttcatga

SEQ ID NO: 2167801 - DNA, 25 bp, Homo sapien
ggcaccttgtaggacccaaagccca

SEQ ID NO: 2167802 - DNA, 25 bp, Homo sapien
gtccactggagaagggctacagaga

SEQ ID NO: 2167803 - DNA, 25 bp, Homo sapien
gagtattactgagaggccaccctgg

SEQ ID NO: 2167804 - DNA, 25 bp, Homo sapien
gagtgacttggtgcctgcttcttgg

SEQ ID NO: 2167805 - DNA, 25 bp, Homo sapien
tttggtgtggaagcctgagtattac

SEQ ID NO: 2167806 - DNA, 25 bp, Homo sapien
actgcctgagtggcagcttctctca

SEQ ID NO: 2167807 - DNA, 25 bp, Homo sapien
ctgcctgagtggcagcttctctcat

SEQ ID NO: 2167808 - DNA, 25 bp, Homo sapien
gcttgtctcgacttcgcctctgggt

SEQ ID NO: 2167809 - DNA, 25 bp, Homo sapien
gcagccgagggagtcggcctccctt

SEQ ID NO: 2167810 - DNA, 25 bp, Homo sapien
ctcctcctagaagccctccgaggcc

SEQ ID NO: 2167811 - DNA, 25 bp, Homo sapien
tctgggtaccgctcgcgaagagcgt

SEQ ID NO: 2167812 - DNA, 25 bp, Homo sapien
cagatcagcgacaggatgctcttta

SEQ ID NO: 2167813 - DNA, 25 bp, Homo sapien
gcagatcagcgacaggatgctcttt

SEQ ID NO: 2167814 - DNA, 25 bp, Homo sapien
caggcagatcagcgacaggatgctc

SEQ ID NO: 2167815 - DNA, 25 bp, Homo sapien
ggcagatcagcgacaggatgctctt

SEQ ID NO: 2167816 - DNA, 25 bp, Homo sapien
cacctgataccctctggagcacaat

SEQ ID NO: 2167817 - DNA, 25 bp, Homo sapien
ccctctggagcacaattttgggcat

SEQ ID NO: 2167818 - DNA, 25 bp, Homo sapien
gtcaacatcccgcaccaccgcgagg

SEQ ID NO: 2167819 - DNA, 25 bp, Homo sapien
gataccctctggagcacaattttgg

SEQ ID NO: 2167820 - DNA, 25 bp, Homo sapien
ctggcagaacggctggagaaggaaa

SEQ ID NO: 2167821 - DNA, 25 bp, Homo sapien
cagaacggctggagaaggaaactgg

SEQ ID NO: 2167822 - DNA, 25 bp, Homo sapien
tggcagaacggctggagaaggaaac

SEQ ID NO: 2167823 - DNA, 25 bp, Homo sapien
ggcagaacggctggagaaggaaact

SEQ ID NO: 2167824 - DNA, 25 bp, Homo sapien
gcgcagaggatgacaccacgtggga

SEQ ID NO: 2167825 - DNA, 25 bp, Homo sapien
gcagaggatgacaccacgtgggacc

SEQ ID NO: 2167826 - DNA, 25 bp, Homo sapien
cgcagaggatgacaccacgtgggac

SEQ ID NO: 2167827 - DNA, 25 bp, Homo sapien
cctggccctcagatggtcctgcatt

SEQ ID NO: 2167828 - DNA, 25 bp, Homo sapien
ctggccctcagatggtcctgcattt

SEQ ID NO: 2167829 - DNA, 25 bp, Homo sapien
tggccctcagatggtcctgcatttg

SEQ ID NO: 2167830 - DNA, 25 bp, Homo sapien
atggctgccatcaccagggcgcaga

SEQ ID NO: 2167831 - DNA, 25 bp, Homo sapien
tcaggagaatggctgccatcaccag

SEQ ID NO: 2167832 - DNA, 25 bp, Homo sapien
tggtcaggagaatggctgccatcac

SEQ ID NO: 2167833 - DNA, 25 bp, Homo sapien
gagaatggctgccatcaccagggcg

SEQ ID NO: 2167834 - DNA, 25 bp, Homo sapien
tgtagaggaccttttgtctgaggtc

SEQ ID NO: 2167835 - DNA, 25 bp, Homo sapien
ctttgtgaagtacacggacacatcc

SEQ ID NO: 2167836 - DNA, 25 bp, Homo sapien
gtctttgtgaagtacacggacacat

SEQ ID NO: 2167837 - DNA, 25 bp, Homo sapien
tctgaggtccagaagcttccattct

SEQ ID NO: 2167838 - DNA, 25 bp, Homo sapien
ggttctggggatgtctgctacccag

SEQ ID NO: 2167839 - DNA, 25 bp, Homo sapien
gggatgtctgctacccagggtcctt

SEQ ID NO: 2167840 - DNA, 25 bp, Homo sapien
ctatgtgcaatcctgcggtggccca

SEQ ID NO: 2167841 - DNA, 25 bp, Homo sapien
cgttccaattgggagatcaggtgag

SEQ ID NO: 2167842 - DNA, 25 bp, Homo sapien
tccagaatgcttctgcgttgaagtc

SEQ ID NO: 2167843 - DNA, 25 bp, Homo sapien
cccggggagttgtcgtccagaatgc

SEQ ID NO: 2167844 - DNA, 25 bp, Homo sapien
tgcgttgaagtcgacgtcttgctct

SEQ ID NO: 2167845 - DNA, 25 bp, Homo sapien
ttgccaccttgtggatcggccccgg

SEQ ID NO: 2167846 - DNA, 25 bp, Homo sapien
tgcgagacgcccttgaaggccttgg

SEQ ID NO: 2167847 - DNA, 25 bp, Homo sapien
tcgccactgtggatgatgcggtgct

SEQ ID NO: 2167848 - DNA, 25 bp, Homo sapien
cggcgaaacagcttgccgcactcgg

SEQ ID NO: 2167849 - DNA, 25 bp, Homo sapien
ggcggaacagtttgccgcagtcgcc

SEQ ID NO: 2167850 - DNA, 25 bp, Homo sapien
cggctgtgctcggccgcggggggct

SEQ ID NO: 2167851 - DNA, 25 bp, Homo sapien
gccgtctccgccttcgcagggcgcc

SEQ ID NO: 2167852 - DNA, 25 bp, Homo sapien
gtgctcggccgcggggggctggtgg

SEQ ID NO: 2167853 - DNA, 25 bp, Homo sapien
gggcccgctagcctccgcgccgtct

SEQ ID NO: 2167854 - DNA, 25 bp, Homo sapien
gaaacccgttcagctcacgtggcat

SEQ ID NO: 2167855 - DNA, 25 bp, Homo sapien
caacggaaatgggtatcagagtgcg

SEQ ID NO: 2167856 - DNA, 25 bp, Homo sapien
cacgaggattgcatttctgggccca

SEQ ID NO: 2167857 - DNA, 25 bp, Homo sapien
gagggagcccaatttcaaggcacca

SEQ ID NO: 2167858 - DNA, 25 bp, Homo sapien
cacatgaatattccccggcggtgga

SEQ ID NO: 2167859 - DNA, 25 bp, Homo sapien
cctgaacacaaaaggagggcactgc

SEQ ID NO: 2167860 - DNA, 25 bp, Homo sapien
tcctctcaaaagtccaaggccttcg

SEQ ID NO: 2167861 - DNA, 25 bp, Homo sapien
tggtgtcaaagacgtcccctctcat

SEQ ID NO: 2167862 - DNA, 25 bp, Homo sapien
tctatagtgacagcaagccaagcag

SEQ ID NO: 2167863 - DNA, 25 bp, Homo sapien
ggagtggcggatcaattcactgtct

SEQ ID NO: 2167864 - DNA, 25 bp, Homo sapien
ggtttcatgggtgtccacacatgcc

SEQ ID NO: 2167865 - DNA, 25 bp, Homo sapien
tattcaacaggtattgtggtccacc

SEQ ID NO: 2167866 - DNA, 25 bp, Homo sapien
ctcctagccgtatatccaagagaaa

SEQ ID NO: 2167867 - DNA, 25 bp, Homo sapien
attccactcctagccgtatatccaa

SEQ ID NO: 2167868 - DNA, 25 bp, Homo sapien
acagttgaacacagagttaccacat

SEQ ID NO: 2167869 - DNA, 25 bp, Homo sapien
gcacagttgaacacagagttaccac

SEQ ID NO: 2167870 - DNA, 25 bp, Homo sapien
aatgaaacactttggtccaccaaag

SEQ ID NO: 2167871 - DNA, 25 bp, Homo sapien
ttgtaaatcacatgactgatgaggg

SEQ ID NO: 2167872 - DNA, 25 bp, Homo sapien
ggcggtaaatagttgtaaatcacat

SEQ ID NO: 2167873 - DNA, 25 bp, Homo sapien
gatgagggacttgtatcccgaatct

SEQ ID NO: 2167874 - DNA, 25 bp, Homo sapien
tcacagtgttgtatgaccaccacct

SEQ ID NO: 2167875 - DNA, 25 bp, Homo sapien
gggcataagcacattcacggttctg

SEQ ID NO: 2167876 - DNA, 25 bp, Homo sapien
gaccctgaaccactgagtagccact

SEQ ID NO: 2167877 - DNA, 25 bp, Homo sapien
catccagccgcagaacttgttcatc

SEQ ID NO: 2167878 - DNA, 25 bp, Homo sapien
catctgcaaggatagggctgggttt

SEQ ID NO: 2167879 - DNA, 25 bp, Homo sapien
cctgctttcgtgttctccatccctt

SEQ ID NO: 2167880 - DNA, 25 bp, Homo sapien
atggcgtgggctgcccgcaagacct

SEQ ID NO: 2167881 - DNA, 25 bp, Homo sapien
tgcccgcaagacctgggtactgagc

SEQ ID NO: 2167882 - DNA, 25 bp, Homo sapien
atggcgatggtggtaccatgctgac

SEQ ID NO: 2167883 - DNA, 25 bp, Homo sapien
taccatgctgactgcgctgcggaat

SEQ ID NO: 2167884 - DNA, 25 bp, Homo sapien
actgcgctgcggaatgtgctcttgc

SEQ ID NO: 2167885 - DNA, 25 bp, Homo sapien
tggtggtaccatgctgactgcgctg

SEQ ID NO: 2167886 - DNA, 25 bp, Homo sapien
agggtcgccctaggtcgcaggccct

SEQ ID NO: 2167887 - DNA, 25 bp, Homo sapien
acagggcggggtaggtgatggtagc

SEQ ID NO: 2167888 - DNA, 25 bp, Homo sapien
cctcagagcaagggtcgccctaggt

SEQ ID NO: 2167889 - DNA, 25 bp, Homo sapien
tcagagcaagggtcgccctaggtcg

SEQ ID NO: 2167890 - DNA, 25 bp, Homo sapien
tcagcaaatgcctctggagtcaggg

SEQ ID NO: 2167891 - DNA, 25 bp, Homo sapien
tatgctgccaagactaagtgaagct

SEQ ID NO: 2167892 - DNA, 25 bp, Homo sapien
gggcacggcagacttgaagtatgct

SEQ ID NO: 2167893 - DNA, 25 bp, Homo sapien
cagctgccgaagctgggacagggta

SEQ ID NO: 2167894 - DNA, 25 bp, Homo sapien
cgctccagctaacagtcccgtagga

SEQ ID NO: 2167895 - DNA, 25 bp, Homo sapien
gctatatccagggtaccctcgccat

SEQ ID NO: 2167896 - DNA, 25 bp, Homo sapien
aacagtcccgtaggagccacatggg

SEQ ID NO: 2167897 - DNA, 25 bp, Homo sapien
gggctccttgaggagctgccgctcc

SEQ ID NO: 2167898 - DNA, 25 bp, Homo sapien
gctcttcagggccagtattgaggaa

SEQ ID NO: 2167899 - DNA, 25 bp, Homo sapien
cagccctgtccagcgttgacttagg

SEQ ID NO: 2167900 - DNA, 25 bp, Homo sapien
gaagcttttcctacagccctgtcca

SEQ ID NO: 2167901 - DNA, 25 bp, Homo sapien
ttggaagcgatcttaagaaatgagt

SEQ ID NO: 2167902 - DNA, 25 bp, Homo sapien
tgccaaggccgtgggcttctgccgt

SEQ ID NO: 2167903 - DNA, 25 bp, Homo sapien
cacagagcgggtcggccaccgcagg

SEQ ID NO: 2167904 - DNA, 25 bp, Homo sapien
tgcatccatggctgcgaaaggagag

SEQ ID NO: 2167905 - DNA, 25 bp, Homo sapien
ggcttctgccgtgggcagcactgtg

SEQ ID NO: 2167906 - DNA, 25 bp, Homo sapien
gcagctgcagggtagccaagcccat

SEQ ID NO: 2167907 - DNA, 25 bp, Homo sapien
ggttggtggggcccctcctgagcag

SEQ ID NO: 2167908 - DNA, 25 bp, Homo sapien
gttggtggggcccctcctgagcagc

SEQ ID NO: 2167909 - DNA, 25 bp, Homo sapien
gggttggtggggcccctcctgagca

SEQ ID NO: 2167910 - DNA, 25 bp, Homo sapien
tgggaagcgctttccagccagtgga

SEQ ID NO: 2167911 - DNA, 25 bp, Homo sapien
actcagcgaccaggcccttgttgtg

SEQ ID NO: 2167912 - DNA, 25 bp, Homo sapien
cctcaggcttgtctgggtggccgat

SEQ ID NO: 2167913 - DNA, 25 bp, Homo sapien
ggctgatcccgcaactggtccagct

SEQ ID NO: 2167914 - DNA, 25 bp, Homo sapien
cctcggctgcggtccttctgtgggc

SEQ ID NO: 2167915 - DNA, 25 bp, Homo sapien
ttcatcttgacattgccacaggcga

SEQ ID NO: 2167916 - DNA, 25 bp, Homo sapien
ccacaggcgatgactgcctgggcca

SEQ ID NO: 2167917 - DNA, 25 bp, Homo sapien
ccggatcctcagcccaggttgatgg

SEQ ID NO: 2167918 - DNA, 25 bp, Homo sapien
cagccccaggaacgtgtgggctggg

SEQ ID NO: 2167919 - DNA, 25 bp, Homo sapien
gggggtgcaggcctcggggatccag

SEQ ID NO: 2167920 - DNA, 25 bp, Homo sapien
caggcctcggggatccagcttgttc

SEQ ID NO: 2167921 - DNA, 25 bp, Homo sapien
gcagccccaggaacgtgtgggctgg

SEQ ID NO: 2167922 - DNA, 25 bp, Homo sapien
gagttcccaaccaggttcagccgct

SEQ ID NO: 2167923 - DNA, 25 bp, Homo sapien
tcagcgagttcccaaccaggttcag

SEQ ID NO: 2167924 - DNA, 25 bp, Homo sapien
ccgggactgtggtcagcgagttccc

SEQ ID NO: 2167925 - DNA, 25 bp, Homo sapien
ccctgcaggaggttgtcgttgagtt

SEQ ID NO: 2167926 - DNA, 25 bp, Homo sapien
caggcctgccccctcggtccctgcc

SEQ ID NO: 2167927 - DNA, 25 bp, Homo sapien
tccctgcccccggaactcgcccgca

SEQ ID NO: 2167928 - DNA, 25 bp, Homo sapien
ctccagcgtcaacagctggctgagc

SEQ ID NO: 2167929 - DNA, 25 bp, Homo sapien
tccagcgtcaacagctggctgagcc

SEQ ID NO: 2167930 - DNA, 25 bp, Homo sapien
tctgtgcaactcaggtgccagtctc

SEQ ID NO: 2167931 - DNA, 25 bp, Homo sapien
gtctgtgcaactcaggtgccagtct

SEQ ID NO: 2167932 - DNA, 25 bp, Homo sapien
tggccacctggtcaggctccaactc

SEQ ID NO: 2167933 - DNA, 25 bp, Homo sapien
gttggccacctggtcaggctccaac

SEQ ID NO: 2167934 - DNA, 25 bp, Homo sapien
tccgccacctcctcgatgaggttgg

SEQ ID NO: 2167935 - DNA, 25 bp, Homo sapien
atgtggctcagtgcgccctccgcca

SEQ ID NO: 2167936 - DNA, 25 bp, Homo sapien
ccacctcctcgatgaggttggtgcc

SEQ ID NO: 2167937 - DNA, 25 bp, Homo sapien
acctcctcgatgaggttggtgccca

SEQ ID NO: 2167938 - DNA, 25 bp, Homo sapien
taggcctggcttcatgtgcgcgaac

SEQ ID NO: 2167939 - DNA, 25 bp, Homo sapien
ggacaggtgcaggaactctaggcct

SEQ ID NO: 2167940 - DNA, 25 bp, Homo sapien
tgcaccagccggttgtaggacaggt

SEQ ID NO: 2167941 - DNA, 25 bp, Homo sapien
ggttatgatccaggagcagctccgc

SEQ ID NO: 2167942 - DNA, 25 bp, Homo sapien
tgttcaagtacaaaccagtgccacc

SEQ ID NO: 2167943 - DNA, 25 bp, Homo sapien
aagcggcctcaccagtcaatgggaa

SEQ ID NO: 2167944 - DNA, 25 bp, Homo sapien
ccacgctgtgataggctcgggtgca

SEQ ID NO: 2167945 - DNA, 25 bp, Homo sapien
tgtcacagatggaattcaagggcac

SEQ ID NO: 2167946 - DNA, 25 bp, Homo sapien
ctcatataaatacggtccttgtacc

SEQ ID NO: 2167947 - DNA, 25 bp, Homo sapien
tataaatacggtccttgtacctgga

SEQ ID NO: 2167948 - DNA, 25 bp, Homo sapien
ttgtatctgtggtttgcagtctgca

SEQ ID NO: 2167949 - DNA, 25 bp, Homo sapien
cttctgggggcaatactcatataaa

SEQ ID NO: 2167950 - DNA, 25 bp, Homo sapien
gtccggcggaccgaaagcagctact

SEQ ID NO: 2167951 - DNA, 25 bp, Homo sapien
gtggtgggccgtccgcacgtctatc

SEQ ID NO: 2167952 - DNA, 25 bp, Homo sapien
tatctgtccggtgtgtccggcggac

SEQ ID NO: 2167953 - DNA, 25 bp, Homo sapien
caggcgcaggctgactagttggcgg

SEQ ID NO: 2167954 - DNA, 25 bp, Homo sapien
ggaccagggcttgggacagcggagg

SEQ ID NO: 2167955 - DNA, 25 bp, Homo sapien
accagggcttgggacagcggaggca

SEQ ID NO: 2167956 - DNA, 25 bp, Homo sapien
cctcgcggcactggggacagcagga

SEQ ID NO: 2167957 - DNA, 25 bp, Homo sapien
agggcttgggacagcggaggcagca

SEQ ID NO: 2167958 - DNA, 25 bp, Homo sapien
agagcaccggggaaatctgtggaca

SEQ ID NO: 2167959 - DNA, 25 bp, Homo sapien
gagagcaccggggaaatctgtggac

SEQ ID NO: 2167960 - DNA, 25 bp, Homo sapien
gagcaccggggaaatctgtggacac

SEQ ID NO: 2167961 - DNA, 25 bp, Homo sapien
agagagcaccggggaaatctgtgga

SEQ ID NO: 2167962 - DNA, 25 bp, Homo sapien
ggcccctgatctcccaacccagcat

SEQ ID NO: 2167963 - DNA, 25 bp, Homo sapien
aaagggctctgagtggccgagctgt

SEQ ID NO: 2167964 - DNA, 25 bp, Homo sapien
gcggaaagggctctgagtggccgag

SEQ ID NO: 2167965 - DNA, 25 bp, Homo sapien
tggccgagctgtggcccctgatctc

SEQ ID NO: 2167966 - DNA, 25 bp, Homo sapien
ccgatgcctgctgccgctgtaggac

SEQ ID NO: 2167967 - DNA, 25 bp, Homo sapien
ctccgatgcctgctgccgctgtagg

SEQ ID NO: 2167968 - DNA, 25 bp, Homo sapien
gcctgctgccgctgtaggaccctct

SEQ ID NO: 2167969 - DNA, 25 bp, Homo sapien
cagtggacacccgggggcagaagga

SEQ ID NO: 2167970 - DNA, 25 bp, Homo sapien
taatcaggcgatgaaatgtctcctc

SEQ ID NO: 2167971 - DNA, 25 bp, Homo sapien
tccccatcccggacaggacttggct

SEQ ID NO: 2167972 - DNA, 25 bp, Homo sapien
gacaggacttggcttaatcaggcga

SEQ ID NO: 2167973 - DNA, 25 bp, Homo sapien
gacttggcttaatcaggcgatgaaa

SEQ ID NO: 2167974 - DNA, 25 bp, Homo sapien
ctcagggccagcagagacacgaggc

SEQ ID NO: 2167975 - DNA, 25 bp, Homo sapien
cagcagagacacgaggcgccacagg

SEQ ID NO: 2167976 - DNA, 25 bp, Homo sapien
gggccagcagagacacgaggcgcca

SEQ ID NO: 2167977 - DNA, 25 bp, Homo sapien
gccagcagagacacgaggcgccaca

SEQ ID NO: 2167978 - DNA, 25 bp, Homo sapien
tggcccatcgtccagggtgaagtcc

SEQ ID NO: 2167979 - DNA, 25 bp, Homo sapien
gaagcttcctcatcgttcatcatga

SEQ ID NO: 2167980 - DNA, 25 bp, Homo sapien
cgttcatcatgaatggcccatcgtc

SEQ ID NO: 2167981 - DNA, 25 bp, Homo sapien
gtgtcagcgcccgaagcttcctcat

SEQ ID NO: 2167982 - DNA, 25 bp, Homo sapien
gacagagtccgggtccaggacgccc

SEQ ID NO: 2167983 - DNA, 25 bp, Homo sapien
ggtggcagtggcagccgaaaggaca

SEQ ID NO: 2167984 - DNA, 25 bp, Homo sapien
ggagcactgaaccacccgcaggtgg

SEQ ID NO: 2167985 - DNA, 25 bp, Homo sapien
gtggcagtggcagccgaaaggacac

SEQ ID NO: 2167986 - DNA, 25 bp, Homo sapien
aggtcggagcactgaaccacccgca

SEQ ID NO: 2167987 - DNA, 25 bp, Homo sapien
tgagcctccctgcatgccccgctcc

SEQ ID NO: 2167988 - DNA, 25 bp, Homo sapien
ctgagcctccctgcatgccccgctc

SEQ ID NO: 2167989 - DNA, 25 bp, Homo sapien
ctgcatgccccgctccccatcactc

SEQ ID NO: 2167990 - DNA, 25 bp, Homo sapien
ccccgctccccatcactcagggaca

SEQ ID NO: 2167991 - DNA, 25 bp, Homo sapien
acacacagggacactgacgggcaca

SEQ ID NO: 2167992 - DNA, 25 bp, Homo sapien
tacacttacatcatgctcgccaccg

SEQ ID NO: 2167993 - DNA, 25 bp, Homo sapien
gtgggcacaaactgcacagctcaca

SEQ ID NO: 2167994 - DNA, 25 bp, Homo sapien
gggatgccaccacaagtgggcacaa

SEQ ID NO: 2167995 - DNA, 25 bp, Homo sapien
atcaccagcatgaacttggagccat

SEQ ID NO: 2167996 - DNA, 25 bp, Homo sapien
gaacttggagccatccagccgacta

SEQ ID NO: 2167997 - DNA, 25 bp, Homo sapien
acttggagccatccagccgactagc

SEQ ID NO: 2167998 - DNA, 25 bp, Homo sapien
caccatcaccagcatgaacttggag

SEQ ID NO: 2167999 - DNA, 25 bp, Homo sapien
ccccaccaccagcatgaactcgaga

SEQ ID NO: 2168000 - DNA, 25 bp, Homo sapien
ccacccccaccaccagcatgaactc

SEQ ID NO: 2168001 - DNA, 25 bp, Homo sapien
acccccaccaccagcatgaactcga

SEQ ID NO: 2168002 - DNA, 25 bp, Homo sapien
cccaccaccagcatgaactcgagac

SEQ ID NO: 2168003 - DNA, 25 bp, Homo sapien
ccacccccatcaccagcatgaactt

SEQ ID NO: 2168004 - DNA, 25 bp, Homo sapien
ctaggggccccacccccatcaccag

SEQ ID NO: 2168005 - DNA, 25 bp, Homo sapien
acccccatcaccagcatgaacttga

SEQ ID NO: 2168006 - DNA, 25 bp, Homo sapien
ccccatcaccagcatgaacttgaga

SEQ ID NO: 2168007 - DNA, 25 bp, Homo sapien
gcgtggtgtcaggggagatctcttt

SEQ ID NO: 2168008 - DNA, 25 bp, Homo sapien
agcgtggtgtcaggggagatctctt

SEQ ID NO: 2168009 - DNA, 25 bp, Homo sapien
cagcgtggtgtcaggggagatctct

SEQ ID NO: 2168010 - DNA, 25 bp, Homo sapien
ccttgcggagctcggagatgtcgtt

SEQ ID NO: 2168011 - DNA, 25 bp, Homo sapien
tcatccttgcggagctcggagatgt

SEQ ID NO: 2168012 - DNA, 25 bp, Homo sapien
agctcggagatgtcgttgttctgca

SEQ ID NO: 2168013 - DNA, 25 bp, Homo sapien
cggagctcggagatgtcgttgttct

SEQ ID NO: 2168014 - DNA, 25 bp, Homo sapien
cctgccctctgctgtaggcctgctg

SEQ ID NO: 2168015 - DNA, 25 bp, Homo sapien
tgccctctgctgtaggcctgctggt

SEQ ID NO: 2168016 - DNA, 25 bp, Homo sapien
ctgccctctgctgtaggcctgctgg

SEQ ID NO: 2168017 - DNA, 25 bp, Homo sapien
gaggttcagtccatgcttgtgagca

SEQ ID NO: 2168018 - DNA, 25 bp, Homo sapien
acgaagggagccgaactgagcgatc

SEQ ID NO: 2168019 - DNA, 25 bp, Homo sapien
tggttgctcaaacccacatgagtga

SEQ ID NO: 2168020 - DNA, 25 bp, Homo sapien
aatccgttctcctctgttgctggga

SEQ ID NO: 2168021 - DNA, 25 bp, Homo sapien
ttggagatcttgttgttcaccagga

SEQ ID NO: 2168022 - DNA, 25 bp, Homo sapien
tcttgttgttcaccaggacgagggc

SEQ ID NO: 2168023 - DNA, 25 bp, Homo sapien
cttccgcagtgggctgaaggccttc

SEQ ID NO: 2168024 - DNA, 25 bp, Homo sapien
aaggccttctcatggatcttggaga

SEQ ID NO: 2168025 - DNA, 25 bp, Homo sapien
cgatgcagttcatgttccggagccc

SEQ ID NO: 2168026 - DNA, 25 bp, Homo sapien
ggcgggatctccaccaggtggttct

SEQ ID NO: 2168027 - DNA, 25 bp, Homo sapien
ggagcccgctgaacactcccttggg

SEQ ID NO: 2168028 - DNA, 25 bp, Homo sapien
caccttgcggatgcggttgtcgtgg

SEQ ID NO: 2168029 - DNA, 25 bp, Homo sapien
gcctctaaaggtatcccttggtctc

SEQ ID NO: 2168030 - DNA, 25 bp, Homo sapien
ccatgcctcgagacaaggctctgga

SEQ ID NO: 2168031 - DNA, 25 bp, Homo sapien
ctcaccatactctttcttgaactga

SEQ ID NO: 2168032 - DNA, 25 bp, Homo sapien
gattttcttttgaccgttctcacca

SEQ ID NO: 2168033 - DNA, 25 bp, Homo sapien
tccaggttcaaagccactgttctcc

SEQ ID NO: 2168034 - DNA, 25 bp, Homo sapien
tgttctccagtgggttcccgcccat

SEQ ID NO: 2168035 - DNA, 25 bp, Homo sapien
tctgagatgcgcaggtagttgagct

SEQ ID NO: 2168036 - DNA, 25 bp, Homo sapien
caggccatcgaaggctccaggttca

SEQ ID NO: 2168037 - DNA, 25 bp, Homo sapien
ctttggggatgccagtcagcttggc

SEQ ID NO: 2168038 - DNA, 25 bp, Homo sapien
cagcttggagtagcgaagcaggtcc

SEQ ID NO: 2168039 - DNA, 25 bp, Homo sapien
tctaggtggagttcattcagggtct

SEQ ID NO: 2168040 - DNA, 25 bp, Homo sapien
caggtcctccagttcgatggcctgg

SEQ ID NO: 2168041 - DNA, 25 bp, Homo sapien
cgatggcctggattttgttgtggtc

SEQ ID NO: 2168042 - DNA, 25 bp, Homo sapien
cctgatctggttgtggcctaggccc

SEQ ID NO: 2168043 - DNA, 25 bp, Homo sapien
ggctcccgttctcgatcatcctgat

SEQ ID NO: 2168044 - DNA, 25 bp, Homo sapien
ttgttgtccaagtggagctcccgga

SEQ ID NO: 2168045 - DNA, 25 bp, Homo sapien
gccctgagggcaccctggccaactt

SEQ ID NO: 2168046 - DNA, 25 bp, Homo sapien
gggacagaagtcgttgacacccact

SEQ ID NO: 2168047 - DNA, 25 bp, Homo sapien
tgccgttgtagtaggcccgcttcac

SEQ ID NO: 2168048 - DNA, 25 bp, Homo sapien
tgttgttggagtgcagatagaccac

SEQ ID NO: 2168049 - DNA, 25 bp, Homo sapien
aaagtggccggctgcacctcccagt

SEQ ID NO: 2168050 - DNA, 25 bp, Homo sapien
atcaggatgtctggctgtgttcccc

SEQ ID NO: 2168051 - DNA, 25 bp, Homo sapien
ggctgggttggacgcagctgggccc

SEQ ID NO: 2168052 - DNA, 25 bp, Homo sapien
agctgggccctggcttagcttcctg

SEQ ID NO: 2168053 - DNA, 25 bp, Homo sapien
ctctgaggccaagggaacatgtgat

SEQ ID NO: 2168054 - DNA, 25 bp, Homo sapien
tcatctgcgcgggatgctgggcctc

SEQ ID NO: 2168055 - DNA, 25 bp, Homo sapien
cagggactgttctcctaggactgga

SEQ ID NO: 2168056 - DNA, 25 bp, Homo sapien
cctcctccgggacagtacaggtttg

SEQ ID NO: 2168057 - DNA, 25 bp, Homo sapien
aggaaaaccggtgtctgggactctg

SEQ ID NO: 2168058 - DNA, 25 bp, Homo sapien
taatggaaagacagccaccgacctc

SEQ ID NO: 2168059 - DNA, 25 bp, Homo sapien
aatggaaagacagccaccgacctca

SEQ ID NO: 2168060 - DNA, 25 bp, Homo sapien
cagccaccgacctcagaagcagccc

SEQ ID NO: 2168061 - DNA, 25 bp, Homo sapien
aacgctccacgctgagagggcaggt

SEQ ID NO: 2168062 - DNA, 25 bp, Homo sapien
gcaggtgccattcaggcctggttgg

SEQ ID NO: 2168063 - DNA, 25 bp, Homo sapien
tggttggattctggagccgcgtctc

SEQ ID NO: 2168064 - DNA, 25 bp, Homo sapien
cggcgtgctcttggcaaacgctcca

SEQ ID NO: 2168065 - DNA, 25 bp, Homo sapien
gggcgggcgtcaggcgggcaacgat

SEQ ID NO: 2168066 - DNA, 25 bp, Homo sapien
ccaaccgcagctctgagcgcggagg

SEQ ID NO: 2168067 - DNA, 25 bp, Homo sapien
gcaacgatccgctccaaggatggaa

SEQ ID NO: 2168068 - DNA, 25 bp, Homo sapien
acgcgaccctctgcggcgggcgagg

SEQ ID NO: 2168069 - DNA, 25 bp, Homo sapien
gatccatcagttagagtaaggccca

SEQ ID NO: 2168070 - DNA, 25 bp, Homo sapien
tcatgaatgcaacaggctatagggc

SEQ ID NO: 2168071 - DNA, 25 bp, Homo sapien
tatggagtcggcaggaagtctaccg

SEQ ID NO: 2168072 - DNA, 25 bp, Homo sapien
taaggcccatttagagcgactgttg

SEQ ID NO: 2168073 - DNA, 25 bp, Homo sapien
ctcagccacagctagggacaggcgg

SEQ ID NO: 2168074 - DNA, 25 bp, Homo sapien
tgagaaagctgctaagcgtggacac

SEQ ID NO: 2168075 - DNA, 25 bp, Homo sapien
tgcccaggcaaggtttggcggcggt

SEQ ID NO: 2168076 - DNA, 25 bp, Homo sapien
ggccttctcacaagtgcaatcttgg

SEQ ID NO: 2168077 - DNA, 25 bp, Homo sapien
ggtggaactcgatggaactattggc

SEQ ID NO: 2168078 - DNA, 25 bp, Homo sapien
gtgaggtcttcagcctccggcagag

SEQ ID NO: 2168079 - DNA, 25 bp, Homo sapien
tgacatccccgtaggcctcctcgat

SEQ ID NO: 2168080 - DNA, 25 bp, Homo sapien
agctccatgagggtgcgcagctccg

SEQ ID NO: 2168081 - DNA, 25 bp, Homo sapien
tccatcttcactcctccctgcagcc

SEQ ID NO: 2168082 - DNA, 25 bp, Homo sapien
ctggcccgcagcccccctcctccat

SEQ ID NO: 2168083 - DNA, 25 bp, Homo sapien
tggcccgcagcccccctcctccatc

SEQ ID NO: 2168084 - DNA, 25 bp, Homo sapien
cctcctccatcttcactcctccctg

SEQ ID NO: 2168085 - DNA, 25 bp, Homo sapien
caggcacgcaagagctcctgagctc

SEQ ID NO: 2168086 - DNA, 25 bp, Homo sapien
tccatggcagaatcgggcaggttcc

SEQ ID NO: 2168087 - DNA, 25 bp, Homo sapien
tgagctccatggcagaatcgggcag

SEQ ID NO: 2168088 - DNA, 25 bp, Homo sapien
acaggcacgcaagagctcctgagct

SEQ ID NO: 2168089 - DNA, 25 bp, Homo sapien
ggcttggggcacaacaaagccagct

SEQ ID NO: 2168090 - DNA, 25 bp, Homo sapien
cttgtcaggggattggcatggggct

SEQ ID NO: 2168091 - DNA, 25 bp, Homo sapien
tgtcaggggattggcatggggcttg

SEQ ID NO: 2168092 - DNA, 25 bp, Homo sapien
cttggggcacaacaaagccagctgc

SEQ ID NO: 2168093 - DNA, 25 bp, Homo sapien
ggtcccgacggctgccccactgcag

SEQ ID NO: 2168094 - DNA, 25 bp, Homo sapien
gctgtagccttgctcgtttctcctt

SEQ ID NO: 2168095 - DNA, 25 bp, Homo sapien
tcgtttctccttagccttcctgtgg

SEQ ID NO: 2168096 - DNA, 25 bp, Homo sapien
cccattgacggggaggaggaacaca

SEQ ID NO: 2168097 - DNA, 25 bp, Homo sapien
tgggtctgggaaggcacacaagacc

SEQ ID NO: 2168098 - DNA, 25 bp, Homo sapien
agaacaggcgcatgctaaccttggg

SEQ ID NO: 2168099 - DNA, 25 bp, Homo sapien
ggagaacaggcgcatgctaaccttg

SEQ ID NO: 2168100 - DNA, 25 bp, Homo sapien
ctggagaacaggcgcatgctaacct

SEQ ID NO: 2168101 - DNA, 25 bp, Homo sapien
gcgcccagtgctgtcgcggccgtga

SEQ ID NO: 2168102 - DNA, 25 bp, Homo sapien
accagacccacactgacacctggtg

SEQ ID NO: 2168103 - DNA, 25 bp, Homo sapien
cagacagcagcttgcagctcccagc

SEQ ID NO: 2168104 - DNA, 25 bp, Homo sapien
ctgacacctggtggacagacagcag

SEQ ID NO: 2168105 - DNA, 25 bp, Homo sapien
aatcagcagtctccagggtgcctgt

SEQ ID NO: 2168106 - DNA, 25 bp, Homo sapien
ggagcggaggcttactttccagaag

SEQ ID NO: 2168107 - DNA, 25 bp, Homo sapien
agggagcggaggcttactttccaga

SEQ ID NO: 2168108 - DNA, 25 bp, Homo sapien
catgagcacggccagtgccgaggaa

SEQ ID NO: 2168109 - DNA, 25 bp, Homo sapien
tgcccgtagatctgcctgcgcttct

SEQ ID NO: 2168110 - DNA, 25 bp, Homo sapien
tccaggtcattggtgttgtccgcca

SEQ ID NO: 2168111 - DNA, 25 bp, Homo sapien
gcgcatagaacgagaggcccagaga

SEQ ID NO: 2168112 - DNA, 25 bp, Homo sapien
cagctgcaggaaggtcttgggttgc

SEQ ID NO: 2168113 - DNA, 25 bp, Homo sapien
tgcaggcctcggaactgcttctcct

SEQ ID NO: 2168114 - DNA, 25 bp, Homo sapien
caccacacagatgacggacagcagg

SEQ ID NO: 2168115 - DNA, 25 bp, Homo sapien
cgtacttgacctgggcaatgtcccc

SEQ ID NO: 2168116 - DNA, 25 bp, Homo sapien
gaggagctgcccgttccggatgacc

SEQ ID NO: 2168117 - DNA, 25 bp, Homo sapien
tgtcagctgacttgcgcacgtggtc

SEQ ID NO: 2168118 - DNA, 25 bp, Homo sapien
agagcagcatgggatctttgtcagc

SEQ ID NO: 2168119 - DNA, 25 bp, Homo sapien
tcagggagctctcgtcgatcttgag

SEQ ID NO: 2168120 - DNA, 25 bp, Homo sapien
acgtggtcagactcgcccgtcaggg

SEQ ID NO: 2168121 - DNA, 25 bp, Homo sapien
ccagctccaagcagcgtgaagatga

SEQ ID NO: 2168122 - DNA, 25 bp, Homo sapien
cctgtctgggaattcacgccaacgg

SEQ ID NO: 2168123 - DNA, 25 bp, Homo sapien
ggaattcacgccaacggcggtcacc

SEQ ID NO: 2168124 - DNA, 25 bp, Homo sapien
aagcagcgtgaagatgatgcctgtc

SEQ ID NO: 2168125 - DNA, 25 bp, Homo sapien
gaatgggcagcgtggaaggagccgc

SEQ ID NO: 2168126 - DNA, 25 bp, Homo sapien
agaatgggcagcgtggaaggagccg

SEQ ID NO: 2168127 - DNA, 25 bp, Homo sapien
aatgggcagcgtggaaggagccgcc

SEQ ID NO: 2168128 - DNA, 25 bp, Homo sapien
tgggcagcgtggaaggagccgccac

SEQ ID NO: 2168129 - DNA, 25 bp, Homo sapien
ggctctccctgagcccccagtggca

SEQ ID NO: 2168130 - DNA, 25 bp, Homo sapien
gctggctctccctgagcccccagtg

SEQ ID NO: 2168131 - DNA, 25 bp, Homo sapien
ttgggctggctctccctgagccccc

SEQ ID NO: 2168132 - DNA, 25 bp, Homo sapien
tgggctggctctccctgagccccca

SEQ ID NO: 2168133 - DNA, 25 bp, Homo sapien
gatgacagacacgaaggcttgagga

SEQ ID NO: 2168134 - DNA, 25 bp, Homo sapien
ctacaatggaagagggatgacagac

SEQ ID NO: 2168135 - DNA, 25 bp, Homo sapien
gacacgaaggcttgaggacaccagc

SEQ ID NO: 2168136 - DNA, 25 bp, Homo sapien
aagagggatgacagacacgaaggct

SEQ ID NO: 2168137 - DNA, 25 bp, Homo sapien
ctttggtctggctactctccatggc

SEQ ID NO: 2168138 - DNA, 25 bp, Homo sapien
cttctcctttttgggtgcgttggct

SEQ ID NO: 2168139 - DNA, 25 bp, Homo sapien
tcccgatctgcacggctagctttgt

SEQ ID NO: 2168140 - DNA, 25 bp, Homo sapien
ctgctttcccgatctgcacggctag

SEQ ID NO: 2168141 - DNA, 25 bp, Homo sapien
ctgcacggctagctttgtgagcttc

SEQ ID NO: 2168142 - DNA, 25 bp, Homo sapien
gaacttcacgaagtattgtacatag

SEQ ID NO: 2168143 - DNA, 25 bp, Homo sapien
agagtaagctaaggagatggtgaca

SEQ ID NO: 2168144 - DNA, 25 bp, Homo sapien
atgtccggccttccacgacaaacgt

SEQ ID NO: 2168145 - DNA, 25 bp, Homo sapien
atagaccggcgtgcactctgccagc

SEQ ID NO: 2168146 - DNA, 25 bp, Homo sapien
ggcgcaccaggttgttgtctttcat

SEQ ID NO: 2168147 - DNA, 25 bp, Homo sapien
tgtcggagcagatggctgtggcgtt

SEQ ID NO: 2168148 - DNA, 25 bp, Homo sapien
ggcgttgcccatggtctcgcaggca

SEQ ID NO: 2168149 - DNA, 25 bp, Homo sapien
caggcatccaggtggcgcaccaggt

SEQ ID NO: 2168150 - DNA, 25 bp, Homo sapien
taggtaggactggaccacggtcata

SEQ ID NO: 2168151 - DNA, 25 bp, Homo sapien
ctaggtaggactggaccacggtcat

SEQ ID NO: 2168152 - DNA, 25 bp, Homo sapien
aggtaggactggaccacggtcatac

SEQ ID NO: 2168153 - DNA, 25 bp, Homo sapien
caggaggtcgaggatcttaggggtc

SEQ ID NO: 2168154 - DNA, 25 bp, Homo sapien
ggaatctctttgtagtgggtgtctc

SEQ ID NO: 2168155 - DNA, 25 bp, Homo sapien
tcgaggatcttaggggtcagggcgc

SEQ ID NO: 2168156 - DNA, 25 bp, Homo sapien
cgctgggggccggaatctctttgta

SEQ ID NO: 2168157 - DNA, 25 bp, Homo sapien
gtgggagggcgccttccttctcagg

SEQ ID NO: 2168158 - DNA, 25 bp, Homo sapien
gtcccgcttcaggtccaagacgaag

SEQ ID NO: 2168159 - DNA, 25 bp, Homo sapien
tgtaaagcttgtcttccgggatctg

SEQ ID NO: 2168160 - DNA, 25 bp, Homo sapien
aagccaccgtcgggcatgcggatga

SEQ ID NO: 2168161 - DNA, 25 bp, Homo sapien
ctgcagagaagtcccggtaggcgat

SEQ ID NO: 2168162 - DNA, 25 bp, Homo sapien
aaagccccggagttcgccattgctg

SEQ ID NO: 2168163 - DNA, 25 bp, Homo sapien
ctcattctcgttgtcccagtcgggc

SEQ ID NO: 2168164 - DNA, 25 bp, Homo sapien
tcaatgcccacgacagctatgcagg

SEQ ID NO: 2168165 - DNA, 25 bp, Homo sapien
gggcacagttaccagggcagctcac

SEQ ID NO: 2168166 - DNA, 25 bp, Homo sapien
cagtccggacaagctcgggcagagg

SEQ ID NO: 2168167 - DNA, 25 bp, Homo sapien
tgtgtgtgaaggaaggccgccccta

SEQ ID NO: 2168168 - DNA, 25 bp, Homo sapien
ctgtgtgtgaaggaaggccgcccct

SEQ ID NO: 2168169 - DNA, 25 bp, Homo sapien
gtgtgtgaaggaaggccgcccctac

SEQ ID NO: 2168170 - DNA, 25 bp, Homo sapien
cccaggacggggctcaagtgtacta

SEQ ID NO: 2168171 - DNA, 25 bp, Homo sapien
aggcaggacagagcctttgtgcggg

SEQ ID NO: 2168172 - DNA, 25 bp, Homo sapien
tttgtgcgggtgtcagggtgagagc

SEQ ID NO: 2168173 - DNA, 25 bp, Homo sapien
cccataggtcaagcgggaagggctt

SEQ ID NO: 2168174 - DNA, 25 bp, Homo sapien
gccgtgttgatgttgtccccagtca

SEQ ID NO: 2168175 - DNA, 25 bp, Homo sapien
gcctttctcattgcggatccgccgg

SEQ ID NO: 2168176 - DNA, 25 bp, Homo sapien
tcaccatgcggactgtgatgccagc

SEQ ID NO: 2168177 - DNA, 25 bp, Homo sapien
ggcattttcggatagcttcagggac

SEQ ID NO: 2168178 - DNA, 25 bp, Homo sapien
ctttgaccagtgtgtgcttgtcggt

SEQ ID NO: 2168179 - DNA, 25 bp, Homo sapien
gccagcaccctcagcttgggccaca

SEQ ID NO: 2168180 - DNA, 25 bp, Homo sapien
gcttgtcggtgggagacgaccgggc

SEQ ID NO: 2168181 - DNA, 25 bp, Homo sapien
ggtgggagacgaccgggccagcacc

SEQ ID NO: 2168182 - DNA, 25 bp, Homo sapien
agggccggcccatcgttggtgccat

SEQ ID NO: 2168183 - DNA, 25 bp, Homo sapien
tcaccagtggtgctgtcgataatcc

SEQ ID NO: 2168184 - DNA, 25 bp, Homo sapien
gccgctgctcaccagtggtgctgtc

SEQ ID NO: 2168185 - DNA, 25 bp, Homo sapien
ttcttgagggccggcccatcgttgg

SEQ ID NO: 2168186 - DNA, 25 bp, Homo sapien
cgtcagttgaaactgcaggaacttg

SEQ ID NO: 2168187 - DNA, 25 bp, Homo sapien
ccacattgaccgtcagttgaaactg

SEQ ID NO: 2168188 - DNA, 25 bp, Homo sapien
gagtaatgcaggcacctgtgaaggc

SEQ ID NO: 2168189 - DNA, 25 bp, Homo sapien
cattgaccgtcagttgaaactgcag

SEQ ID NO: 2168190 - DNA, 25 bp, Homo sapien
caggtgtcctagctggggcatggca

SEQ ID NO: 2168191 - DNA, 25 bp, Homo sapien
gcccaggtgtcctagctggggcatg

SEQ ID NO: 2168192 - DNA, 25 bp, Homo sapien
ccaggtgtcctagctggggcatggc

SEQ ID NO: 2168193 - DNA, 25 bp, Homo sapien
cccaggtgtcctagctggggcatgg

SEQ ID NO: 2168194 - DNA, 25 bp, Homo sapien
aatgtgtccatgatcaagttcaccc

SEQ ID NO: 2168195 - DNA, 25 bp, Homo sapien
gactctgtgggtggctccgtcgcca

SEQ ID NO: 2168196 - DNA, 25 bp, Homo sapien
ggtacacggcgtggcccagaatgtt

SEQ ID NO: 2168197 - DNA, 25 bp, Homo sapien
ggtgaagatgatggcgagctggtac

SEQ ID NO: 2168198 - DNA, 25 bp, Homo sapien
atctgagcccgaggtggtggcaaca

SEQ ID NO: 2168199 - DNA, 25 bp, Homo sapien
acagaatctgagcccgaggtggtgg

SEQ ID NO: 2168200 - DNA, 25 bp, Homo sapien
cagaatctgagcccgaggtggtggc

SEQ ID NO: 2168201 - DNA, 25 bp, Homo sapien
gaatctgagcccgaggtggtggcaa

SEQ ID NO: 2168202 - DNA, 25 bp, Homo sapien
ctgtcgatgtcgaagaagagctccc

SEQ ID NO: 2168203 - DNA, 25 bp, Homo sapien
cgaacacgttcctctcgccgtggat

SEQ ID NO: 2168204 - DNA, 25 bp, Homo sapien
gttgctgaagatgccgtcgaacacg

SEQ ID NO: 2168205 - DNA, 25 bp, Homo sapien
tgaatcccgaaagtgcccaaaacga

SEQ ID NO: 2168206 - DNA, 25 bp, Homo sapien
ctctccgacatgcagagaggacggg

SEQ ID NO: 2168207 - DNA, 25 bp, Homo sapien
aaggccctctccgacatgcagagag

SEQ ID NO: 2168208 - DNA, 25 bp, Homo sapien
ggaagatgaagaaggccctctccga

SEQ ID NO: 2168209 - DNA, 25 bp, Homo sapien
ttctggaagccagcgcgctcaccca

SEQ ID NO: 2168210 - DNA, 25 bp, Homo sapien
agctccccaacaccaacaaacaggc

SEQ ID NO: 2168211 - DNA, 25 bp, Homo sapien
tcccgccaaactggacgatgacaat

SEQ ID NO: 2168212 - DNA, 25 bp, Homo sapien
ggcttcccgccaaactggacgatga

SEQ ID NO: 2168213 - DNA, 25 bp, Homo sapien
agggcttcccgccaaactggacgat

SEQ ID NO: 2168214 - DNA, 25 bp, Homo sapien
ggtgaggaccccaaggctctgaagc

SEQ ID NO: 2168215 - DNA, 25 bp, Homo sapien
agtgggcccatcacagaagctgtct

SEQ ID NO: 2168216 - DNA, 25 bp, Homo sapien
ggcaagtgggcccatcacagaagct

SEQ ID NO: 2168217 - DNA, 25 bp, Homo sapien
ccctcagtgtgcttcctagggtgag

SEQ ID NO: 2168218 - DNA, 25 bp, Homo sapien
agctcctcgtcggtcatctcgtcct

SEQ ID NO: 2168219 - DNA, 25 bp, Homo sapien
tcccgctcggcatggtcgatctctt

SEQ ID NO: 2168220 - DNA, 25 bp, Homo sapien
tggtcgatctcttcctcgccttcgg

SEQ ID NO: 2168221 - DNA, 25 bp, Homo sapien
cgtctgaatccggttcaggccccgg

SEQ ID NO: 2168222 - DNA, 25 bp, Homo sapien
ggaggagggtcagtcgctccatgtc

SEQ ID NO: 2168223 - DNA, 25 bp, Homo sapien
attgcaactggggatcctggacagg

SEQ ID NO: 2168224 - DNA, 25 bp, Homo sapien
ccatgtcaggggcattgcaactggg

SEQ ID NO: 2168225 - DNA, 25 bp, Homo sapien
aggagggtcagtcgctccatgtcag

SEQ ID NO: 2168226 - DNA, 25 bp, Homo sapien
ttattgcagggaacgagaacagact

SEQ ID NO: 2168227 - DNA, 25 bp, Homo sapien
gcaccgacaattggaacagcctgga

SEQ ID NO: 2168228 - DNA, 25 bp, Homo sapien
gatgggactcgcttctactagccag

SEQ ID NO: 2168229 - DNA, 25 bp, Homo sapien
catggatgattctttgggacaggcc

SEQ ID NO: 2168230 - DNA, 25 bp, Homo sapien
aagtcaaagcgaaaagccatggggg

SEQ ID NO: 2168231 - DNA, 25 bp, Homo sapien
atagctggctaaaagaaccgactgg

SEQ ID NO: 2168232 - DNA, 25 bp, Homo sapien
gaaacatggtgagttggatgtgaca

SEQ ID NO: 2168233 - DNA, 25 bp, Homo sapien
caggagcccgtggaagagtcggatc

SEQ ID NO: 2168234 - DNA, 25 bp, Homo sapien
tgacgggcttctcccaagctttagc

SEQ ID NO: 2168235 - DNA, 25 bp, Homo sapien
caagcaggtgtttcgaatcaaagag

SEQ ID NO: 2168236 - DNA, 25 bp, Homo sapien
ccatggtgcgagcaggttacaaaat

SEQ ID NO: 2168237 - DNA, 25 bp, Homo sapien
gggcatacgtacaacctgacgggct

SEQ ID NO: 2168238 - DNA, 25 bp, Homo sapien
cgactggcagccgtggcttcgcttt

SEQ ID NO: 2168239 - DNA, 25 bp, Homo sapien
tggcttcgctttgtccccactctta

SEQ ID NO: 2168240 - DNA, 25 bp, Homo sapien
gccgtggcttcgctttgtccccact

SEQ ID NO: 2168241 - DNA, 25 bp, Homo sapien
actggcagccgtggcttcgctttgt

SEQ ID NO: 2168242 - DNA, 25 bp, Homo sapien
ttctcaaccttgtttttcctctcca

SEQ ID NO: 2168243 - DNA, 25 bp, Homo sapien
catagttctcaaccttgtttttcct

SEQ ID NO: 2168244 - DNA, 25 bp, Homo sapien
tcaaccttgtttttcctctccaaca

SEQ ID NO: 2168245 - DNA, 25 bp, Homo sapien
ttcatagttctcaaccttgtttttc

SEQ ID NO: 2168246 - DNA, 25 bp, Homo sapien
taaagtttggcttgcactgttgtcc

SEQ ID NO: 2168247 - DNA, 25 bp, Homo sapien
agtttggcttgcactgttgtccagg

SEQ ID NO: 2168248 - DNA, 25 bp, Homo sapien
gaaaatgagataaagtttggcttgc

SEQ ID NO: 2168249 - DNA, 25 bp, Homo sapien
tgagataaagtttggcttgcactgt

SEQ ID NO: 2168250 - DNA, 25 bp, Homo sapien
tgaagctggctgaggaccgaagacc

SEQ ID NO: 2168251 - DNA, 25 bp, Homo sapien
gtcatgaagctggctgaggaccgaa

SEQ ID NO: 2168252 - DNA, 25 bp, Homo sapien
gccggcgcacagcaccctgaactga

SEQ ID NO: 2168253 - DNA, 25 bp, Homo sapien
catgaagctggctgaggaccgaaga

SEQ ID NO: 2168254 - DNA, 25 bp, Homo sapien
cagcactggtaggattggcagcaga

SEQ ID NO: 2168255 - DNA, 25 bp, Homo sapien
cagcagagagaattgcgtgagtagg

SEQ ID NO: 2168256 - DNA, 25 bp, Homo sapien
gcagcagagagaattgcgtgagtag

SEQ ID NO: 2168257 - DNA, 25 bp, Homo sapien
ccagcagcactggtaggattggcag

SEQ ID NO: 2168258 - DNA, 25 bp, Homo sapien
cggtgagcggaatgcaagactgcaa

SEQ ID NO: 2168259 - DNA, 25 bp, Homo sapien
tggacagggcggtaaagaaagaaca

SEQ ID NO: 2168260 - DNA, 25 bp, Homo sapien
tatggctttcgagagacaccgtctg

SEQ ID NO: 2168261 - DNA, 25 bp, Homo sapien
acagaaaagccacggtgagcggaat

SEQ ID NO: 2168262 - DNA, 25 bp, Homo sapien
cagcggcatccttaggaaaccactt

SEQ ID NO: 2168263 - DNA, 25 bp, Homo sapien
agcggcatccttaggaaaccacttc

SEQ ID NO: 2168264 - DNA, 25 bp, Homo sapien
gacagcggcatccttaggaaaccac

SEQ ID NO: 2168265 - DNA, 25 bp, Homo sapien
acagcggcatccttaggaaaccact

SEQ ID NO: 2168266 - DNA, 25 bp, Homo sapien
aggggagtggcgtgttcgtgttggc

SEQ ID NO: 2168267 - DNA, 25 bp, Homo sapien
agtggcgtgttcgtgttggcagagg

SEQ ID NO: 2168268 - DNA, 25 bp, Homo sapien
tggcagaggggagcgcttcgggggc

SEQ ID NO: 2168269 - DNA, 25 bp, Homo sapien
gggagtggcgtgttcgtgttggcag

SEQ ID NO: 2168270 - DNA, 25 bp, Homo sapien
cagatggccacggaatgaaggcagg

SEQ ID NO: 2168271 - DNA, 25 bp, Homo sapien
gacagatggccacggaatgaaggca

SEQ ID NO: 2168272 - DNA, 25 bp, Homo sapien
gatggccacggaatgaaggcaggaa

SEQ ID NO: 2168273 - DNA, 25 bp, Homo sapien
ggacagatggccacggaatgaaggc

SEQ ID NO: 2168274 - DNA, 25 bp, Homo sapien
ggcgagtcagtgtcgggtggtcgga

SEQ ID NO: 2168275 - DNA, 25 bp, Homo sapien
gggcgcggcgagtcagtgtcgggtg

SEQ ID NO: 2168276 - DNA, 25 bp, Homo sapien
ggcgcggcgagtcagtgtcgggtgg

SEQ ID NO: 2168277 - DNA, 25 bp, Homo sapien
cgcggcgagtcagtgtcgggtggtc

SEQ ID NO: 2168278 - DNA, 25 bp, Homo sapien
gggcgggtgacgctgcagactgaca

SEQ ID NO: 2168279 - DNA, 25 bp, Homo sapien
gccacactgagccaaagcggaaggg

SEQ ID NO: 2168280 - DNA, 25 bp, Homo sapien
agtgccatgtgcgatgccactgccg

SEQ ID NO: 2168281 - DNA, 25 bp, Homo sapien
agacgtgcccctggttagccttcaa

SEQ ID NO: 2168282 - DNA, 25 bp, Homo sapien
tctgccacacttctccgttccccat

SEQ ID NO: 2168283 - DNA, 25 bp, Homo sapien
ctctgccacacttctccgttcccca

SEQ ID NO: 2168284 - DNA, 25 bp, Homo sapien
gtctccacgctgtggagcgggctcc

SEQ ID NO: 2168285 - DNA, 25 bp, Homo sapien
tccacgtccgtgtcgtcaatgagcg

SEQ ID NO: 2168286 - DNA, 25 bp, Homo sapien
tagctgacttggtgacatgcgtggt

SEQ ID NO: 2168287 - DNA, 25 bp, Homo sapien
ggtagatgccgctgtctatggcgtt

SEQ ID NO: 2168288 - DNA, 25 bp, Homo sapien
catcaaggtggtctaccgaggactc

SEQ ID NO: 2168289 - DNA, 25 bp, Homo sapien
caaagcaaacagtgggagtccatcc

SEQ ID NO: 2168290 - DNA, 25 bp, Homo sapien
aaagattccaggtcatggtaccccg

SEQ ID NO: 2168291 - DNA, 25 bp, Homo sapien
tgcatgggtgcaacaaaagctcccc

SEQ ID NO: 2168292 - DNA, 25 bp, Homo sapien
ggcgcctcatggaagccccggaggc

SEQ ID NO: 2168293 - DNA, 25 bp, Homo sapien
tgcacttccgagtggcgaggttcat

SEQ ID NO: 2168294 - DNA, 25 bp, Homo sapien
agttctgccggcttctgcgcgccgg

SEQ ID NO: 2168295 - DNA, 25 bp, Homo sapien
gccagggtgcacttccgagtggcga

SEQ ID NO: 2168296 - DNA, 25 bp, Homo sapien
cgtggtgtcggcctctgcgcctgcg

SEQ ID NO: 2168297 - DNA, 25 bp, Homo sapien
accagccgccccgtggtgtcggcct

SEQ ID NO: 2168298 - DNA, 25 bp, Homo sapien
gggccggtggacacataccagccgc

SEQ ID NO: 2168299 - DNA, 25 bp, Homo sapien
gccccgtggtgtcggcctctgcgcc

SEQ ID NO: 2168300 - DNA, 25 bp, Homo sapien
tttgcggctcgggtgaccggaggtg

SEQ ID NO: 2168301 - DNA, 25 bp, Homo sapien
ctaagccacgctgggccgacagccc

SEQ ID NO: 2168302 - DNA, 25 bp, Homo sapien
gaggagcctgcgtctcccaggggcg

SEQ ID NO: 2168303 - DNA, 25 bp, Homo sapien
acggcggggatttgcggctcgggtg

SEQ ID NO: 2168304 - DNA, 25 bp, Homo sapien
tattaggctcctactgtgcgtcgcg

SEQ ID NO: 2168305 - DNA, 25 bp, Homo sapien
catgcgtctattcgaaaaggccctc

SEQ ID NO: 2168306 - DNA, 25 bp, Homo sapien
tagattcccaatcgatcccgggagg

SEQ ID NO: 2168307 - DNA, 25 bp, Homo sapien
cgtcgcgctggaaaggcaagcagaa

SEQ ID NO: 2168308 - DNA, 25 bp, Homo sapien
cagatcccccgggaactggaagagg

SEQ ID NO: 2168309 - DNA, 25 bp, Homo sapien
acacctggatcttaggcttctggcc

SEQ ID NO: 2168310 - DNA, 25 bp, Homo sapien
gaatacagtggtgccgccacaagcc

SEQ ID NO: 2168311 - DNA, 25 bp, Homo sapien
acagagaatacagtggtgccgccac

SEQ ID NO: 2168312 - DNA, 25 bp, Homo sapien
gagaacaacatccatgggctttgca

SEQ ID NO: 2168313 - DNA, 25 bp, Homo sapien
tctcccgccggagagcatgagcttc

SEQ ID NO: 2168314 - DNA, 25 bp, Homo sapien
cgttctgcagatcgacagtgcctgt

SEQ ID NO: 2168315 - DNA, 25 bp, Homo sapien
ttgtcatcttggtcgttggcaaagc

SEQ ID NO: 2168316 - DNA, 25 bp, Homo sapien
ccggttctgacagctcggcgacatc

SEQ ID NO: 2168317 - DNA, 25 bp, Homo sapien
gttctgacagctcggcgacatccag

SEQ ID NO: 2168318 - DNA, 25 bp, Homo sapien
acttcctccggttctgacagctcgg

SEQ ID NO: 2168319 - DNA, 25 bp, Homo sapien
tcctccggttctgacagctcggcga

SEQ ID NO: 2168320 - DNA, 25 bp, Homo sapien
agcgtgctccgcttccacaggtacg

SEQ ID NO: 2168321 - DNA, 25 bp, Homo sapien
aggcggttgaggatgctcctccgaa

SEQ ID NO: 2168322 - DNA, 25 bp, Homo sapien
tacgcccgccagtgcttgtcagcga

SEQ ID NO: 2168323 - DNA, 25 bp, Homo sapien
gttcgtctctatcctctgggccagc

SEQ ID NO: 2168324 - DNA, 25 bp, Homo sapien
gaatccattggctgtaaaccaccga

SEQ ID NO: 2168325 - DNA, 25 bp, Homo sapien
agaatccattggctgtaaaccaccg

SEQ ID NO: 2168326 - DNA, 25 bp, Homo sapien
aatccattggctgtaaaccaccgac

SEQ ID NO: 2168327 - DNA, 25 bp, Homo sapien
cagagcgtggacagagtaaaataga

SEQ ID NO: 2168328 - DNA, 25 bp, Homo sapien
agcgtggacagagtaaaatagagaa

SEQ ID NO: 2168329 - DNA, 25 bp, Homo sapien
gagcgtggacagagtaaaatagaga

SEQ ID NO: 2168330 - DNA, 25 bp, Homo sapien
acagagcgtggacagagtaaaatag

SEQ ID NO: 2168331 - DNA, 25 bp, Homo sapien
agttcgagacctggcaaactgcctt

SEQ ID NO: 2168332 - DNA, 25 bp, Homo sapien
taatgttccgttgcctggatatgcc

SEQ ID NO: 2168333 - DNA, 25 bp, Homo sapien
tgcctgttccaatctgtcatagaaa

SEQ ID NO: 2168334 - DNA, 25 bp, Homo sapien
ggaaccctgtatcaactaagcacta

SEQ ID NO: 2168335 - DNA, 25 bp, Homo sapien
cgcacgcgcacgctggagcggtgtg

SEQ ID NO: 2168336 - DNA, 25 bp, Homo sapien
cacgctggagcggtgtggcttttgg

SEQ ID NO: 2168337 - DNA, 25 bp, Homo sapien
ctctgccccctagcggcagctgcgg

SEQ ID NO: 2168338 - DNA, 25 bp, Homo sapien
cttttggtgtagacggctctgcccc

SEQ ID NO: 2168339 - DNA, 25 bp, Homo sapien
ctatttctgggacccgagcccagtt

SEQ ID NO: 2168340 - DNA, 25 bp, Homo sapien
tcttcactagttgtgtattttgctg

SEQ ID NO: 2168341 - DNA, 25 bp, Homo sapien
tctgggacccgagcccagttcttca

SEQ ID NO: 2168342 - DNA, 25 bp, Homo sapien
cagttcttcactagttgtgtatttt

SEQ ID NO: 2168343 - DNA, 25 bp, Homo sapien
gaagcagggaggatattcccgtcac

SEQ ID NO: 2168344 - DNA, 25 bp, Homo sapien
gggaagcagggaggatattcccgtc

SEQ ID NO: 2168345 - DNA, 25 bp, Homo sapien
ggaagcagggaggatattcccgtca

SEQ ID NO: 2168346 - DNA, 25 bp, Homo sapien
cgggaagcagggaggatattcccgt

SEQ ID NO: 2168347 - DNA, 25 bp, Homo sapien
cagcagcatcccgtcgcggcaaatg

SEQ ID NO: 2168348 - DNA, 25 bp, Homo sapien
gcagcagcatcccgtcgcggcaaat

SEQ ID NO: 2168349 - DNA, 25 bp, Homo sapien
agcagcatcccgtcgcggcaaatgg

SEQ ID NO: 2168350 - DNA, 25 bp, Homo sapien
cggcagcagcatcccgtcgcggcaa

SEQ ID NO: 2168351 - DNA, 25 bp, Homo sapien
cacagacaggtgctgactctagcat

SEQ ID NO: 2168352 - DNA, 25 bp, Homo sapien
ttgtgctgtgccagctccggacctg

SEQ ID NO: 2168353 - DNA, 25 bp, Homo sapien
gagtccttgagcagactgggtccaa

SEQ ID NO: 2168354 - DNA, 25 bp, Homo sapien
tttctccgtggtgggcgggtctcca

SEQ ID NO: 2168355 - DNA, 25 bp, Homo sapien
taaagtagatgatctggttgccaga

SEQ ID NO: 2168356 - DNA, 25 bp, Homo sapien
tttgcccttgggctggcgttgcccc

SEQ ID NO: 2168357 - DNA, 25 bp, Homo sapien
gttgccagagccttttgcacagggt

SEQ ID NO: 2168358 - DNA, 25 bp, Homo sapien
tgtgcccgcagctgtcgtgcccggc

SEQ ID NO: 2168359 - DNA, 25 bp, Homo sapien
caagcactttgaaaccaattcactg

SEQ ID NO: 2168360 - DNA, 25 bp, Homo sapien
tctgtctttgcgaacggattgcttg

SEQ ID NO: 2168361 - DNA, 25 bp, Homo sapien
cagcggctgtagcttaatcagttct

SEQ ID NO: 2168362 - DNA, 25 bp, Homo sapien
gttctggttttaagaaatcaagcac

SEQ ID NO: 2168363 - DNA, 25 bp, Homo sapien
gtcatggagctgaagcaccaggcca

SEQ ID NO: 2168364 - DNA, 25 bp, Homo sapien
gaggtcatggagctgaagcaccagg

SEQ ID NO: 2168365 - DNA, 25 bp, Homo sapien
ccagaggtcatggagctgaagcacc

SEQ ID NO: 2168366 - DNA, 25 bp, Homo sapien
ttgaagccagaggtcatggagctga

SEQ ID NO: 2168367 - DNA, 25 bp, Homo sapien
tggccgctttgcaagtggcttctgg

SEQ ID NO: 2168368 - DNA, 25 bp, Homo sapien
gccaatgcccggaggggtggcgcga

SEQ ID NO: 2168369 - DNA, 25 bp, Homo sapien
tgacctgccgggcagtggccgcttt

SEQ ID NO: 2168370 - DNA, 25 bp, Homo sapien
ggactgctgacctgccgggcagtgg

SEQ ID NO: 2168371 - DNA, 25 bp, Homo sapien
tcctcccttggctctgccaggggct

SEQ ID NO: 2168372 - DNA, 25 bp, Homo sapien
tctttctcctcccttggctctgcca

SEQ ID NO: 2168373 - DNA, 25 bp, Homo sapien
tcccttggctctgccaggggctgtc

SEQ ID NO: 2168374 - DNA, 25 bp, Homo sapien
ctttctcctcccttggctctgccag

SEQ ID NO: 2168375 - DNA, 25 bp, Homo sapien
acagctgtgggacggcgcttgctcc

SEQ ID NO: 2168376 - DNA, 25 bp, Homo sapien
tgggacggcgcttgctcccctgtgc

SEQ ID NO: 2168377 - DNA, 25 bp, Homo sapien
ctgtgccccggctacctcgcctgcc

SEQ ID NO: 2168378 - DNA, 25 bp, Homo sapien
ccacagctgtgggacggcgcttgct

SEQ ID NO: 2168379 - DNA, 25 bp, Homo sapien
caatgtgtccacacacgcggtgcca

SEQ ID NO: 2168380 - DNA, 25 bp, Homo sapien
tgtgtccacacacgcggtgccaaca

SEQ ID NO: 2168381 - DNA, 25 bp, Homo sapien
aatgtgtccacacacgcggtgccaa

SEQ ID NO: 2168382 - DNA, 25 bp, Homo sapien
atgtgtccacacacgcggtgccaac

SEQ ID NO: 2168383 - DNA, 25 bp, Homo sapien
ctaggcgtcgcgctcttcagctgac

SEQ ID NO: 2168384 - DNA, 25 bp, Homo sapien
tttccatgtgggcagatgcctgcgg

SEQ ID NO: 2168385 - DNA, 25 bp, Homo sapien
ggcgatggctgtctgggcctgtcct

SEQ ID NO: 2168386 - DNA, 25 bp, Homo sapien
tgtgggcagatgcctgcggcgatgg

SEQ ID NO: 2168387 - DNA, 25 bp, Homo sapien
ccttgctttccatgtgggcagatgc

SEQ ID NO: 2168388 - DNA, 25 bp, Homo sapien
ttgaagagccgggatgtgccacacg

SEQ ID NO: 2168389 - DNA, 25 bp, Homo sapien
tgcgtgtgcacgcaagtgtgtagat

SEQ ID NO: 2168390 - DNA, 25 bp, Homo sapien
gggatgtgccacacggctgccacct

SEQ ID NO: 2168391 - DNA, 25 bp, Homo sapien
cgcaagtgtgtagatattcaggata

SEQ ID NO: 2168392 - DNA, 25 bp, Homo sapien
gatgtgcgccgagagcctggctgct

SEQ ID NO: 2168393 - DNA, 25 bp, Homo sapien
tcaggcagagtgcgcctccgtgagg

SEQ ID NO: 2168394 - DNA, 25 bp, Homo sapien
tgtgcgccgagagcctggctgctcc

SEQ ID NO: 2168395 - DNA, 25 bp, Homo sapien
ggctcagagatgtgcgccgagagcc

SEQ ID NO: 2168396 - DNA, 25 bp, Homo sapien
tcaagggccccaagggagccacagt

SEQ ID NO: 2168397 - DNA, 25 bp, Homo sapien
cttgctcggcctctgaagggtcttt

SEQ ID NO: 2168398 - DNA, 25 bp, Homo sapien
ggtcggtgctacctgtcgcttgtca

SEQ ID NO: 2168399 - DNA, 25 bp, Homo sapien
tgtcctcatagtttgggtcggtgct

SEQ ID NO: 2168400 - DNA, 25 bp, Homo sapien
agggcctgagactcgttcttcactg

SEQ ID NO: 2168401 - DNA, 25 bp, Homo sapien
ctgagactcgttcttcactgccttt

SEQ ID NO: 2168402 - DNA, 25 bp, Homo sapien
gggcctgagactcgttcttcactgc

SEQ ID NO: 2168403 - DNA, 25 bp, Homo sapien
gaaggacggctgtggctgacatggg

SEQ ID NO: 2168404 - DNA, 25 bp, Homo sapien
agaggagagcagtgcagatgcggtg

SEQ ID NO: 2168405 - DNA, 25 bp, Homo sapien
tgcagatgcggtgccacgtgacctg

SEQ ID NO: 2168406 - DNA, 25 bp, Homo sapien
ttcccacatcggtggctgatttggg

SEQ ID NO: 2168407 - DNA, 25 bp, Homo sapien
gagagcagtgcagatgcggtgccac

SEQ ID NO: 2168408 - DNA, 25 bp, Homo sapien
tgaccgtgaggacaagccatgctgt

SEQ ID NO: 2168409 - DNA, 25 bp, Homo sapien
gccatgctgtttgctgcacttcttg

SEQ ID NO: 2168410 - DNA, 25 bp, Homo sapien
gaccgggctatgtgctcagttccac

SEQ ID NO: 2168411 - DNA, 25 bp, Homo sapien
cggtgaccgggctatgtgctcagtt

SEQ ID NO: 2168412 - DNA, 25 bp, Homo sapien
tccgcgccggttccctgcgtcgcgg

SEQ ID NO: 2168413 - DNA, 25 bp, Homo sapien
cgggcggcgggaagcgccactgctg

SEQ ID NO: 2168414 - DNA, 25 bp, Homo sapien
ctgctgcagcctaacgccaccggaa

SEQ ID NO: 2168415 - DNA, 25 bp, Homo sapien
ggcctctcctggagccgaggggcag

SEQ ID NO: 2168416 - DNA, 25 bp, Homo sapien
ctgctgagcctctgccgaaggggag

SEQ ID NO: 2168417 - DNA, 25 bp, Homo sapien
tctagagcccgcgtgccaggtgttg

SEQ ID NO: 2168418 - DNA, 25 bp, Homo sapien
ctgcagcctctagagcccgcgtgcc

SEQ ID NO: 2168419 - DNA, 25 bp, Homo sapien
ctgagcctctgccgaaggggagcca

SEQ ID NO: 2168420 - DNA, 25 bp, Homo sapien
cacatctaagtaccctaccttggac

SEQ ID NO: 2168421 - DNA, 25 bp, Homo sapien
ttgcttccacatctaagtaccctac

SEQ ID NO: 2168422 - DNA, 25 bp, Homo sapien
ggccccttgcttccacatctaagta

SEQ ID NO: 2168423 - DNA, 25 bp, Homo sapien
gggccccttgcttccacatctaagt

SEQ ID NO: 2168424 - DNA, 25 bp, Homo sapien
ctactacgtgcttgccgggcagctg

SEQ ID NO: 2168425 - DNA, 25 bp, Homo sapien
gcagctggcgcccctttggtcccac

SEQ ID NO: 2168426 - DNA, 25 bp, Homo sapien
ttgccgggcagctggcgcccctttg

SEQ ID NO: 2168427 - DNA, 25 bp, Homo sapien
tactacgtgcttgccgggcagctgg

SEQ ID NO: 2168428 - DNA, 25 bp, Homo sapien
ctggagcgagatccggcggtggacg

SEQ ID NO: 2168429 - DNA, 25 bp, Homo sapien
cgtggacgttctggccacggccact

SEQ ID NO: 2168430 - DNA, 25 bp, Homo sapien
actgccacggcggaacgcgaggcgc

SEQ ID NO: 2168431 - DNA, 25 bp, Homo sapien
ggtgcaggctcgcacgtggaagccg

SEQ ID NO: 2168432 - DNA, 25 bp, Homo sapien
tgtctcggtcttctcgcgaacgctc

SEQ ID NO: 2168433 - DNA, 25 bp, Homo sapien
ggcctcagcgagtcctctcagaggt

SEQ ID NO: 2168434 - DNA, 25 bp, Homo sapien
cccaagttcgagcttccgactctgg

SEQ ID NO: 2168435 - DNA, 25 bp, Homo sapien
ggagtgccgttcgaggcctagatct

SEQ ID NO: 2168436 - DNA, 25 bp, Homo sapien
ctccctacacgctggaccacgggcg

SEQ ID NO: 2168437 - DNA, 25 bp, Homo sapien
cggctccctacacgctggaccacgg

SEQ ID NO: 2168438 - DNA, 25 bp, Homo sapien
gatcggctccctacacgctggacca

SEQ ID NO: 2168439 - DNA, 25 bp, Homo sapien
gggcgatcggctccctacacgctgg

SEQ ID NO: 2168440 - DNA, 25 bp, Homo sapien
agcgccccaccgatgcgcgccgact

SEQ ID NO: 2168441 - DNA, 25 bp, Homo sapien
gactcgtacagctcgcggctgcggc

SEQ ID NO: 2168442 - DNA, 25 bp, Homo sapien
gcgggggcgacagctcccgacgcag

SEQ ID NO: 2168443 - DNA, 25 bp, Homo sapien
gacgcagccacaggcacgagcggcc

SEQ ID NO: 2168444 - DNA, 25 bp, Homo sapien
ggggcaggcgggggcggctgcagcg

SEQ ID NO: 2168445 - DNA, 25 bp, Homo sapien
gggcaggcgggggcggctgcagcgg

SEQ ID NO: 2168446 - DNA, 25 bp, Homo sapien
gggggcaggcgggggcggctgcagc

SEQ ID NO: 2168447 - DNA, 25 bp, Homo sapien
cgcgccggcgccggcccccgccctg

SEQ ID NO: 2168448 - DNA, 25 bp, Homo sapien
gcccccgccctggtcgtacaggagc

SEQ ID NO: 2168449 - DNA, 25 bp, Homo sapien
cccccgccctggtcgtacaggagca

SEQ ID NO: 2168450 - DNA, 25 bp, Homo sapien
ccccgccctggtcgtacaggagcac

SEQ ID NO: 2168451 - DNA, 25 bp, Homo sapien
aggccaggtagccttcctctcgcag

SEQ ID NO: 2168452 - DNA, 25 bp, Homo sapien
cctggaggtagtaggccaggtagcc

SEQ ID NO: 2168453 - DNA, 25 bp, Homo sapien
gtagtaggccaggtagccttcctct

SEQ ID NO: 2168454 - DNA, 25 bp, Homo sapien
gaggtagtaggccaggtagccttcc

SEQ ID NO: 2168455 - DNA, 25 bp, Homo sapien
gatgtagcggatgcccagtttggcc

SEQ ID NO: 2168456 - DNA, 25 bp, Homo sapien
caatgaactcaatggcctccggaaa

SEQ ID NO: 2168457 - DNA, 25 bp, Homo sapien
gctctccaaattggcggaatcccgg

SEQ ID NO: 2168458 - DNA, 25 bp, Homo sapien
ccacagctcatggagtcgcggtcag

SEQ ID NO: 2168459 - DNA, 25 bp, Homo sapien
gttggaggccgcagatgcctgcccc

SEQ ID NO: 2168460 - DNA, 25 bp, Homo sapien
ccacagtgacggtgacagaacggct

SEQ ID NO: 2168461 - DNA, 25 bp, Homo sapien
tccagccgcaagctgcgctcaaagt

SEQ ID NO: 2168462 - DNA, 25 bp, Homo sapien
ttgaccaggtcataggcatcgttga

SEQ ID NO: 2168463 - DNA, 25 bp, Homo sapien
ggggccagctcgaaggcgccatcac

SEQ ID NO: 2168464 - DNA, 25 bp, Homo sapien
aggtgggggccagctcgaaggcgcc

SEQ ID NO: 2168465 - DNA, 25 bp, Homo sapien
gtgggggccagctcgaaggcgccat

SEQ ID NO: 2168466 - DNA, 25 bp, Homo sapien
ctaggtgggggccagctcgaaggcg

SEQ ID NO: 2168467 - DNA, 25 bp, Homo sapien
ccagtagctcctaggccatggatgt

SEQ ID NO: 2168468 - DNA, 25 bp, Homo sapien
gcacgttgattaggacggcagcccg

SEQ ID NO: 2168469 - DNA, 25 bp, Homo sapien
aaaagtaacagtcgcagaagaggca

SEQ ID NO: 2168470 - DNA, 25 bp, Homo sapien
ggagaaacagggaggtgacaacacc

SEQ ID NO: 2168471 - DNA, 25 bp, Homo sapien
gagccccagtgatcccgtcaagaca

SEQ ID NO: 2168472 - DNA, 25 bp, Homo sapien
agccccagtgatcccgtcaagacat

SEQ ID NO: 2168473 - DNA, 25 bp, Homo sapien
ccccaaagtagcagcggctgtgtgg

SEQ ID NO: 2168474 - DNA, 25 bp, Homo sapien
ccccgcagcagcaaaagtgaggcct

SEQ ID NO: 2168475 - DNA, 25 bp, Homo sapien
tctcctccggcggtagtttggccac

SEQ ID NO: 2168476 - DNA, 25 bp, Homo sapien
tgtgtgagcgccgacacgtgcgcac

SEQ ID NO: 2168477 - DNA, 25 bp, Homo sapien
ggcgtcctctgcgctcgccgccacc

SEQ ID NO: 2168478 - DNA, 25 bp, Homo sapien
gcgtcctctgcgctcgccgccaccc

SEQ ID NO: 2168479 - DNA, 25 bp, Homo sapien
accacctggtactctagtcgtgtgc

SEQ ID NO: 2168480 - DNA, 25 bp, Homo sapien
ctggtactctagtcgtgtgcccggg

SEQ ID NO: 2168481 - DNA, 25 bp, Homo sapien
acctggtactctagtcgtgtgcccg

SEQ ID NO: 2168482 - DNA, 25 bp, Homo sapien
ccaccacctggtactctagtcgtgt

SEQ ID NO: 2168483 - DNA, 25 bp, Homo sapien
aactgcttgacggtcggccggcggc

SEQ ID NO: 2168484 - DNA, 25 bp, Homo sapien
aagcgtggtttgtgctgacggcgca

SEQ ID NO: 2168485 - DNA, 25 bp, Homo sapien
ttagaagaaggtatcgggcctcttg

SEQ ID NO: 2168486 - DNA, 25 bp, Homo sapien
ctgatctggatggagtgggcccggg

SEQ ID NO: 2168487 - DNA, 25 bp, Homo sapien
cgttcctgagtttatttggggcaca

SEQ ID NO: 2168488 - DNA, 25 bp, Homo sapien
gcacacccgggcgagggccctgccc

SEQ ID NO: 2168489 - DNA, 25 bp, Homo sapien
ggcgttcctgagtttatttggggca

SEQ ID NO: 2168490 - DNA, 25 bp, Homo sapien
gggcacacccgggcgagggccctgc

SEQ ID NO: 2168491 - DNA, 25 bp, Homo sapien
tggctattcacttcacaagtgtgat

SEQ ID NO: 2168492 - DNA, 25 bp, Homo sapien
tacggacacctgatggacatagcac

SEQ ID NO: 2168493 - DNA, 25 bp, Homo sapien
agtacggacacctgatggacatagc

SEQ ID NO: 2168494 - DNA, 25 bp, Homo sapien
cagtggctattcacttcacaagtgt

SEQ ID NO: 2168495 - DNA, 25 bp, Homo sapien
tttagatgtcggtcccaggaaacca

SEQ ID NO: 2168496 - DNA, 25 bp, Homo sapien
aacctcatgggactggatggcgagc

SEQ ID NO: 2168497 - DNA, 25 bp, Homo sapien
tgaagacgtcgtgtcatgccagggc

SEQ ID NO: 2168498 - DNA, 25 bp, Homo sapien
gcaggattgaattcggtcacccgca

SEQ ID NO: 2168499 - DNA, 25 bp, Homo sapien
ctcccacgagctgctgagcagttgg

SEQ ID NO: 2168500 - DNA, 25 bp, Homo sapien
ctgctcccacgagctgctgagcagt

SEQ ID NO: 2168501 - DNA, 25 bp, Homo sapien
gggaacaaaggcaaagcgatttcca

SEQ ID NO: 2168502 - DNA, 25 bp, Homo sapien
ggaacaaaggcaaagcgatttccat

SEQ ID NO: 2168503 - DNA, 25 bp, Homo sapien
gcgactcgccacctcgctccgacta

SEQ ID NO: 2168504 - DNA, 25 bp, Homo sapien
cacctcgctccgactatccctctct

SEQ ID NO: 2168505 - DNA, 25 bp, Homo sapien
tcgccacctcgctccgactatccct

SEQ ID NO: 2168506 - DNA, 25 bp, Homo sapien
ctcgctccgactatccctctcttcc

SEQ ID NO: 2168507 - DNA, 25 bp, Homo sapien
agcagtccacgaagcacttgaaagt

SEQ ID NO: 2168508 - DNA, 25 bp, Homo sapien
cacttgaaagtgagcctgaagaatc

SEQ ID NO: 2168509 - DNA, 25 bp, Homo sapien
tccacgaagcacttgaaagtgagcc

SEQ ID NO: 2168510 - DNA, 25 bp, Homo sapien
gaagcacttgaaagtgagcctgaag

SEQ ID NO: 2168511 - DNA, 25 bp, Homo sapien
gtcgcggcgcctcacggggggcggc

SEQ ID NO: 2168512 - DNA, 25 bp, Homo sapien
tcaggcggggggcaccggcggcacc

SEQ ID NO: 2168513 - DNA, 25 bp, Homo sapien
ctcggcgggccgcacggccgggccg

SEQ ID NO: 2168514 - DNA, 25 bp, Homo sapien
ctcacggggggcggcggtcaggcgg

SEQ ID NO: 2168515 - DNA, 25 bp, Homo sapien
agatgccgttctcggcgctcttctt

SEQ ID NO: 2168516 - DNA, 25 bp, Homo sapien
tgccgttctcggcgctcttcttcgc

SEQ ID NO: 2168517 - DNA, 25 bp, Homo sapien
gatgccgttctcggcgctcttcttc

SEQ ID NO: 2168518 - DNA, 25 bp, Homo sapien
ccgttctcggcgctcttcttcgcca

SEQ ID NO: 2168519 - DNA, 25 bp, Homo sapien
cgggcgcgatgagggggcccttctt

SEQ ID NO: 2168520 - DNA, 25 bp, Homo sapien
ccgggcgcgatgagggggcccttct

SEQ ID NO: 2168521 - DNA, 25 bp, Homo sapien
gtccaggtctcgcgcggcggcacgg

SEQ ID NO: 2168522 - DNA, 25 bp, Homo sapien
gcgcgtccaggtctcgcgcggcggc

SEQ ID NO: 2168523 - DNA, 25 bp, Homo sapien
aggtctcgcgcggcggcacggccag

SEQ ID NO: 2168524 - DNA, 25 bp, Homo sapien
ggtctcgcgcggcggcacggccagg

SEQ ID NO: 2168525 - DNA, 25 bp, Homo sapien
ctctgtttcccacccatcaccgggt

SEQ ID NO: 2168526 - DNA, 25 bp, Homo sapien
acccatcaccgggtcacttcggctt

SEQ ID NO: 2168527 - DNA, 25 bp, Homo sapien
atcaccgggtcacttcggcttccag

SEQ ID NO: 2168528 - DNA, 25 bp, Homo sapien
gtcacttcggcttccagcaacccca

SEQ ID NO: 2168529 - DNA, 25 bp, Homo sapien
gatcaggacgtagggaataaggaac

SEQ ID NO: 2168530 - DNA, 25 bp, Homo sapien
tccaaccagggcgatcaggacgtag

SEQ ID NO: 2168531 - DNA, 25 bp, Homo sapien
cagggcgatcaggacgtagggaata

SEQ ID NO: 2168532 - DNA, 25 bp, Homo sapien
ccaaccagggcgatcaggacgtagg

SEQ ID NO: 2168533 - DNA, 25 bp, Homo sapien
tcacgacaggaaaagatttctcaag

SEQ ID NO: 2168534 - DNA, 25 bp, Homo sapien
ctcgagactgggacgccatcacgtg

SEQ ID NO: 2168535 - DNA, 25 bp, Homo sapien
tgggacgccatcacgtggccccagg

SEQ ID NO: 2168536 - DNA, 25 bp, Homo sapien
ggcctggtgctcacgacaggaaaag

SEQ ID NO: 2168537 - DNA, 25 bp, Homo sapien
tcagtacgtcgctccacctgtctgt

SEQ ID NO: 2168538 - DNA, 25 bp, Homo sapien
agtacgtcgctccacctgtctgtgc

SEQ ID NO: 2168539 - DNA, 25 bp, Homo sapien
agtgggcaacctcagtacgtcgctc

SEQ ID NO: 2168540 - DNA, 25 bp, Homo sapien
tgggcaacctcagtacgtcgctcca

SEQ ID NO: 2168541 - DNA, 25 bp, Homo sapien
taaaggacttgaccaggtaatagaa

SEQ ID NO: 2168542 - DNA, 25 bp, Homo sapien
aaggacttgaccaggtaatagaagc

SEQ ID NO: 2168543 - DNA, 25 bp, Homo sapien
caggccagcaccatgatgtagtagg

SEQ ID NO: 2168544 - DNA, 25 bp, Homo sapien
taggtgttgcagtagaagacgatca

SEQ ID NO: 2168545 - DNA, 25 bp, Homo sapien
ccacgatcccctggccattgggagg

SEQ ID NO: 2168546 - DNA, 25 bp, Homo sapien
tgaccaggacagtgatcggctgccg

SEQ ID NO: 2168547 - DNA, 25 bp, Homo sapien
acagcccagggttcagcgggtccct

SEQ ID NO: 2168548 - DNA, 25 bp, Homo sapien
cctcttgtccaattgggctgggcct

SEQ ID NO: 2168549 - DNA, 25 bp, Homo sapien
cccagttgagggcccctggcacctc

SEQ ID NO: 2168550 - DNA, 25 bp, Homo sapien
cccagacagcctcaagactttgttc

SEQ ID NO: 2168551 - DNA, 25 bp, Homo sapien
tttgtctgcagggacgcgtgtcggt

SEQ ID NO: 2168552 - DNA, 25 bp, Homo sapien
cctgccagggcctctatccccagga

SEQ ID NO: 2168553 - DNA, 25 bp, Homo sapien
tcggtggggagcaggcgagcctctg

SEQ ID NO: 2168554 - DNA, 25 bp, Homo sapien
cctctatccccaggagcaaaggctg

SEQ ID NO: 2168555 - DNA, 25 bp, Homo sapien
gaccagtcaggcttgagatagtaaa

SEQ ID NO: 2168556 - DNA, 25 bp, Homo sapien
agctttgaccagtcaggcttgagat

SEQ ID NO: 2168557 - DNA, 25 bp, Homo sapien
gcacgaccaggaccacgtaggggaa

SEQ ID NO: 2168558 - DNA, 25 bp, Homo sapien
caggaccacgtaggggaatgtagca

SEQ ID NO: 2168559 - DNA, 25 bp, Homo sapien
caggccaatggcgtaagaaaagaaa

SEQ ID NO: 2168560 - DNA, 25 bp, Homo sapien
ttgttgaagcggttgtagctgccca

SEQ ID NO: 2168561 - DNA, 25 bp, Homo sapien
gggcccccaggccaatggcgtaaga

SEQ ID NO: 2168562 - DNA, 25 bp, Homo sapien
aagaaaatctgggtccccgcatcta

SEQ ID NO: 2168563 - DNA, 25 bp, Homo sapien
gagaagaccacgaagccagcaaaga

SEQ ID NO: 2168564 - DNA, 25 bp, Homo sapien
gcatcagcgtgacagcccgcgggta

SEQ ID NO: 2168565 - DNA, 25 bp, Homo sapien
catcagcgtgacagcccgcgggtag

SEQ ID NO: 2168566 - DNA, 25 bp, Homo sapien
cctttccttgcctgcagccctccct

SEQ ID NO: 2168567 - DNA, 25 bp, Homo sapien
cagggcagctcaggccgagccccgc

SEQ ID NO: 2168568 - DNA, 25 bp, Homo sapien
ctccacccctttccttgcctgcagc

SEQ ID NO: 2168569 - DNA, 25 bp, Homo sapien
acccctttccttgcctgcagccctc

SEQ ID NO: 2168570 - DNA, 25 bp, Homo sapien
gcacaacagagggccacagagatct

SEQ ID NO: 2168571 - DNA, 25 bp, Homo sapien
cacaacagagggccacagagatctc

SEQ ID NO: 2168572 - DNA, 25 bp, Homo sapien
gggacagagcccagtcagggaggat

SEQ ID NO: 2168573 - DNA, 25 bp, Homo sapien
ggaggatggcagacggccaccagag

SEQ ID NO: 2168574 - DNA, 25 bp, Homo sapien
gccaccagaggtcacaggcagaccc

SEQ ID NO: 2168575 - DNA, 25 bp, Homo sapien
cagagcccagtcagggaggatggca

SEQ ID NO: 2168576 - DNA, 25 bp, Homo sapien
ccaccaccacgcactcccaaaaggc

SEQ ID NO: 2168577 - DNA, 25 bp, Homo sapien
ccaccacgcactcccaaaaggcctg

SEQ ID NO: 2168578 - DNA, 25 bp, Homo sapien
cacgcactcccaaaaggcctgccag

SEQ ID NO: 2168579 - DNA, 25 bp, Homo sapien
cgcactcccaaaaggcctgccagag

SEQ ID NO: 2168580 - DNA, 25 bp, Homo sapien
ctgcggcgaggtgaggcgggagggc

SEQ ID NO: 2168581 - DNA, 25 bp, Homo sapien
ggtgaggcgggagggccaagctgga

SEQ ID NO: 2168582 - DNA, 25 bp, Homo sapien
ctggagacctgccttccccgccacc

SEQ ID NO: 2168583 - DNA, 25 bp, Homo sapien
cgggagggccaagctggagacctgc

SEQ ID NO: 2168584 - DNA, 25 bp, Homo sapien
cccgatcatacaggcaatgtcgtcc

SEQ ID NO: 2168585 - DNA, 25 bp, Homo sapien
agcaccatttcatccaggggcaagg

SEQ ID NO: 2168586 - DNA, 25 bp, Homo sapien
tcggtacccgatcatacaggcaatg

SEQ ID NO: 2168587 - DNA, 25 bp, Homo sapien
gggcaaggtcggtacccgatcatac

SEQ ID NO: 2168588 - DNA, 25 bp, Homo sapien
gtagtacacaacgttgaagatgaag

SEQ ID NO: 2168589 - DNA, 25 bp, Homo sapien
agtacacaacgttgaagatgaagat

SEQ ID NO: 2168590 - DNA, 25 bp, Homo sapien
tagtacacaacgttgaagatgaaga

SEQ ID NO: 2168591 - DNA, 25 bp, Homo sapien
ctcagccatggtgcccttggccctg

SEQ ID NO: 2168592 - DNA, 25 bp, Homo sapien
cttggccctgaggaggcagcccagg

SEQ ID NO: 2168593 - DNA, 25 bp, Homo sapien
aggaggcagcccaggaggtgcagcg

SEQ ID NO: 2168594 - DNA, 25 bp, Homo sapien
aggcagcccaggaggtgcagcggca

SEQ ID NO: 2168595 - DNA, 25 bp, Homo sapien
ccttgctgctctcggacactggggt

SEQ ID NO: 2168596 - DNA, 25 bp, Homo sapien
tgagctcggtactccaagtggtgga

SEQ ID NO: 2168597 - DNA, 25 bp, Homo sapien
cctgagctcggtactccaagtggtg

SEQ ID NO: 2168598 - DNA, 25 bp, Homo sapien
tgctgctctcggacactggggtcag

SEQ ID NO: 2168599 - DNA, 25 bp, Homo sapien
tgagctggtgatgtgagctgagttg

SEQ ID NO: 2168600 - DNA, 25 bp, Homo sapien
ggtgagctggtgatgtgagctgagt

SEQ ID NO: 2168601 - DNA, 25 bp, Homo sapien
gaggtgagctggtgatgtgagctga

SEQ ID NO: 2168602 - DNA, 25 bp, Homo sapien
cagaggtgagctggtgatgtgagct

SEQ ID NO: 2168603 - DNA, 25 bp, Homo sapien
gaaaaagttgttttagtgagcactc

SEQ ID NO: 2168604 - DNA, 25 bp, Homo sapien
gcctaggaccagctcggctagggct

SEQ ID NO: 2168605 - DNA, 25 bp, Homo sapien
actaggcggggcctaggaccagctc

SEQ ID NO: 2168606 - DNA, 25 bp, Homo sapien
agaggggtatagcccagctgaaata

SEQ ID NO: 2168607 - DNA, 25 bp, Homo sapien
atggggagaggggtatagcccagct

SEQ ID NO: 2168608 - DNA, 25 bp, Homo sapien
acagacttgtggcaaagggacagcg

SEQ ID NO: 2168609 - DNA, 25 bp, Homo sapien
aagtgcatccaccttaagcctggac

SEQ ID NO: 2168610 - DNA, 25 bp, Homo sapien
ggtgtgccccgcacagggtgggaag

SEQ ID NO: 2168611 - DNA, 25 bp, Homo sapien
accttaagcctggacgtgggagccg

SEQ ID NO: 2168612 - DNA, 25 bp, Homo sapien
cctttcttggggtcactcagccgtc

SEQ ID NO: 2168613 - DNA, 25 bp, Homo sapien
gggaagcctttcttggggtcactca

SEQ ID NO: 2168614 - DNA, 25 bp, Homo sapien
agcctttcttggggtcactcagccg

SEQ ID NO: 2168615 - DNA, 25 bp, Homo sapien
gaagcctttcttggggtcactcagc

SEQ ID NO: 2168616 - DNA, 25 bp, Homo sapien
ccacgcctgagcgtggagagcacga

SEQ ID NO: 2168617 - DNA, 25 bp, Homo sapien
agttagttgtagtccggcttgcggt

SEQ ID NO: 2168618 - DNA, 25 bp, Homo sapien
acagctcatagctcgtcatctcggc

SEQ ID NO: 2168619 - DNA, 25 bp, Homo sapien
gggacctgattgctacacgttcaga

SEQ ID NO: 2168620 - DNA, 25 bp, Homo sapien
tggttctcaatagccgggaagggcc

SEQ ID NO: 2168621 - DNA, 25 bp, Homo sapien
tgtcagctgaagagtgcagacccca

SEQ ID NO: 2168622 - DNA, 25 bp, Homo sapien
catataaacggatggcagccacgca

SEQ ID NO: 2168623 - DNA, 25 bp, Homo sapien
ggtagaatcccatcgctgccattag

SEQ ID NO: 2168624 - DNA, 25 bp, Homo sapien
tgcacacgcagctctgaggtgtggc

SEQ ID NO: 2168625 - DNA, 25 bp, Homo sapien
gggcagcctgcacacgcagctctga

SEQ ID NO: 2168626 - DNA, 25 bp, Homo sapien
catagcgctgtcctcgggtcccagg

SEQ ID NO: 2168627 - DNA, 25 bp, Homo sapien
cagctctgaggtgtggcacttggca

SEQ ID NO: 2168628 - DNA, 25 bp, Homo sapien
tcttcgtgaatctccgaggcttccc

SEQ ID NO: 2168629 - DNA, 25 bp, Homo sapien
agccggcacctcctcttcgtgaatc

SEQ ID NO: 2168630 - DNA, 25 bp, Homo sapien
ggagcctgttccgaggggcccacac

SEQ ID NO: 2168631 - DNA, 25 bp, Homo sapien
gtgaatctccgaggcttccctgtgg

SEQ ID NO: 2168632 - DNA, 25 bp, Homo sapien
tgtcaagtagccaacctccagaagt

SEQ ID NO: 2168633 - DNA, 25 bp, Homo sapien
cactagttttcagcgggactgggct

SEQ ID NO: 2168634 - DNA, 25 bp, Homo sapien
tctgctgtggacttgcggaatcgag

SEQ ID NO: 2168635 - DNA, 25 bp, Homo sapien
tctcatgggagagcctcacgtaaca

SEQ ID NO: 2168636 - DNA, 25 bp, Homo sapien
agttggaggttgtcagtgagacttg

SEQ ID NO: 2168637 - DNA, 25 bp, Homo sapien
gttgtcagtgagacttgctgggaac

SEQ ID NO: 2168638 - DNA, 25 bp, Homo sapien
aggttgtcagtgagacttgctggga

SEQ ID NO: 2168639 - DNA, 25 bp, Homo sapien
ttggaggttgtcagtgagacttgct

SEQ ID NO: 2168640 - DNA, 25 bp, Homo sapien
tgcaagggtgtatgggttggagtgg

SEQ ID NO: 2168641 - DNA, 25 bp, Homo sapien
ttttgcaagggtgtatgggttggag

SEQ ID NO: 2168642 - DNA, 25 bp, Homo sapien
ttgcaagggtgtatgggttggagtg

SEQ ID NO: 2168643 - DNA, 25 bp, Homo sapien
tttgcaagggtgtatgggttggagt

SEQ ID NO: 2168644 - DNA, 25 bp, Homo sapien
caacttttctgcgtggtagagagcc

SEQ ID NO: 2168645 - DNA, 25 bp, Homo sapien
tactcatggcccgagcaggttagat

SEQ ID NO: 2168646 - DNA, 25 bp, Homo sapien
tctttatgtcccactgagaggctca

SEQ ID NO: 2168647 - DNA, 25 bp, Homo sapien
tcagttcttgaacgcgagcaggtac

SEQ ID NO: 2168648 - DNA, 25 bp, Homo sapien
gtctctctgtgtcgctgaggccgga

SEQ ID NO: 2168649 - DNA, 25 bp, Homo sapien
tctctctgtgtcgctgaggccggag

SEQ ID NO: 2168650 - DNA, 25 bp, Homo sapien
ctctctgtgtcgctgaggccggagt

SEQ ID NO: 2168651 - DNA, 25 bp, Homo sapien
tctctgtgtcgctgaggccggagtg

SEQ ID NO: 2168652 - DNA, 25 bp, Homo sapien
ggcctgttgtctaggcaactggaaa

SEQ ID NO: 2168653 - DNA, 25 bp, Homo sapien
aactggaaaccttgcgatggcccct

SEQ ID NO: 2168654 - DNA, 25 bp, Homo sapien
ggctggaaggattgttgctctgacc

SEQ ID NO: 2168655 - DNA, 25 bp, Homo sapien
tcgggcagcccaagtggaggaactt

SEQ ID NO: 2168656 - DNA, 25 bp, Homo sapien
tgggctggctgccgcgtagggactg

SEQ ID NO: 2168657 - DNA, 25 bp, Homo sapien
ctgggctggctgccgcgtagggact

SEQ ID NO: 2168658 - DNA, 25 bp, Homo sapien
ggctggctgccgcgtagggactggg

SEQ ID NO: 2168659 - DNA, 25 bp, Homo sapien
gctggctgccgcgtagggactgggg

SEQ ID NO: 2168660 - DNA, 25 bp, Homo sapien
aatacccggttcatgccagctttgg

SEQ ID NO: 2168661 - DNA, 25 bp, Homo sapien
cgacaggaaggtgcggctcaccaag

SEQ ID NO: 2168662 - DNA, 25 bp, Homo sapien
ttgtgggctccataggccgcgaggg

SEQ ID NO: 2168663 - DNA, 25 bp, Homo sapien
cgggccacatacaccgacaggaagg

SEQ ID NO: 2168664 - DNA, 25 bp, Homo sapien
cagttggccctccaggtaacggatg

SEQ ID NO: 2168665 - DNA, 25 bp, Homo sapien
cacacgcgagtgcatgtagcgcagc

SEQ ID NO: 2168666 - DNA, 25 bp, Homo sapien
cgtccatgttgctgacccggtagta

SEQ ID NO: 2168667 - DNA, 25 bp, Homo sapien
tagaaggcgatctcctccgagttgg

SEQ ID NO: 2168668 - DNA, 25 bp, Homo sapien
agactgtccccaccgctcacggctg

SEQ ID NO: 2168669 - DNA, 25 bp, Homo sapien
tgtccccaccgctcacggctgcctg

SEQ ID NO: 2168670 - DNA, 25 bp, Homo sapien
ctgagtccacggctgcccaaaggcc

SEQ ID NO: 2168671 - DNA, 25 bp, Homo sapien
tgcctctccactgccgcgcctgagt

SEQ ID NO: 2168672 - DNA, 25 bp, Homo sapien
caggtcctggtaggagcgctgtagc

SEQ ID NO: 2168673 - DNA, 25 bp, Homo sapien
tgctccagcataacataccacaggc

SEQ ID NO: 2168674 - DNA, 25 bp, Homo sapien
tgaggttgatctgcgaggccaggtc

SEQ ID NO: 2168675 - DNA, 25 bp, Homo sapien
cacaggcgttccagaaggatgaggt

SEQ ID NO: 2168676 - DNA, 25 bp, Homo sapien
gtgcgcgcagggcaaaaggcaacaa

SEQ ID NO: 2168677 - DNA, 25 bp, Homo sapien
taacaaagggcgtgaggtgcgcgca

SEQ ID NO: 2168678 - DNA, 25 bp, Homo sapien
tgagttgggccctcgtgagctcagc

SEQ ID NO: 2168679 - DNA, 25 bp, Homo sapien
aaggcgagctcaacctctgaaagca

SEQ ID NO: 2168680 - DNA, 25 bp, Homo sapien
gtgacatgtagtgttcctgacttgc

SEQ ID NO: 2168681 - DNA, 25 bp, Homo sapien
gtgggtgagggtatctgtgcctgga

SEQ ID NO: 2168682 - DNA, 25 bp, Homo sapien
tgtagtgttcctgacttgcagtcct

SEQ ID NO: 2168683 - DNA, 25 bp, Homo sapien
ctaagtcgcagttgggttgaggaca

SEQ ID NO: 2168684 - DNA, 25 bp, Homo sapien
tccaggtactccgcacattctccca

SEQ ID NO: 2168685 - DNA, 25 bp, Homo sapien
ccaggtactccgcacattctcccac

SEQ ID NO: 2168686 - DNA, 25 bp, Homo sapien
agagctgtttcagggcgaggaaacc

SEQ ID NO: 2168687 - DNA, 25 bp, Homo sapien
cactcctctaaaacaccttagggtg

SEQ ID NO: 2168688 - DNA, 25 bp, Homo sapien
ccttagggtgcaagagctgtttcag

SEQ ID NO: 2168689 - DNA, 25 bp, Homo sapien
tgtttcagggcgaggaaaccaaggc

SEQ ID NO: 2168690 - DNA, 25 bp, Homo sapien
cctcagggctggagtgggagccaca

SEQ ID NO: 2168691 - DNA, 25 bp, Homo sapien
ggagtgggagccacaggcctgccca

SEQ ID NO: 2168692 - DNA, 25 bp, Homo sapien
ctggacagagcaaggcctcagggct

SEQ ID NO: 2168693 - DNA, 25 bp, Homo sapien
gggctggagtgggagccacaggcct

SEQ ID NO: 2168694 - DNA, 25 bp, Homo sapien
ttgggtgaataaggccagggcccca

SEQ ID NO: 2168695 - DNA, 25 bp, Homo sapien
tgggtgaataaggccagggccccag

SEQ ID NO: 2168696 - DNA, 25 bp, Homo sapien
gggtgaataaggccagggccccaga

SEQ ID NO: 2168697 - DNA, 25 bp, Homo sapien
ggtgaataaggccagggccccagag

SEQ ID NO: 2168698 - DNA, 25 bp, Homo sapien
gagctggacagtcgctgtggacaaa

SEQ ID NO: 2168699 - DNA, 25 bp, Homo sapien
ctggcgtagaaccagctgccttctg

SEQ ID NO: 2168700 - DNA, 25 bp, Homo sapien
ccttcccacggtgctctcaaggaca

SEQ ID NO: 2168701 - DNA, 25 bp, Homo sapien
cccagggcatcctggcgtagaacca

SEQ ID NO: 2168702 - DNA, 25 bp, Homo sapien
aaggacccgaggactgtatccaggg

SEQ ID NO: 2168703 - DNA, 25 bp, Homo sapien
ctgtgaaggacccgaggactgtatc

SEQ ID NO: 2168704 - DNA, 25 bp, Homo sapien
tgtgaaggacccgaggactgtatcc

SEQ ID NO: 2168705 - DNA, 25 bp, Homo sapien
tgaaggacccgaggactgtatccag

SEQ ID NO: 2168706 - DNA, 25 bp, Homo sapien
ttcttgatccttagattccccacag

SEQ ID NO: 2168707 - DNA, 25 bp, Homo sapien
ggcgaaggccgcctctgagggtgct

SEQ ID NO: 2168708 - DNA, 25 bp, Homo sapien
gatccttagattccccacaggagca

SEQ ID NO: 2168709 - DNA, 25 bp, Homo sapien
agcaagggcgaaggccgcctctgag

SEQ ID NO: 2168710 - DNA, 25 bp, Homo sapien
cctccaacactgctggcgggaaggt

SEQ ID NO: 2168711 - DNA, 25 bp, Homo sapien
aaaggtggaaccctccaacactgct

SEQ ID NO: 2168712 - DNA, 25 bp, Homo sapien
tagccacgatgaaaaggtggaaccc

SEQ ID NO: 2168713 - DNA, 25 bp, Homo sapien
cagtgctagccacgatgaaaaggtg

SEQ ID NO: 2168714 - DNA, 25 bp, Homo sapien
gttgcgggcaatagtgaaggcttct

SEQ ID NO: 2168715 - DNA, 25 bp, Homo sapien
tctgcagccgctgtcaggaggttgc

SEQ ID NO: 2168716 - DNA, 25 bp, Homo sapien
tccttgtacgacgacatgatccgct

SEQ ID NO: 2168717 - DNA, 25 bp, Homo sapien
atgatccgctcaatggcatctgcag

SEQ ID NO: 2168718 - DNA, 25 bp, Homo sapien
caaatacctggaacatctcgtgcac

SEQ ID NO: 2168719 - DNA, 25 bp, Homo sapien
gctgtgtagccagccagctccgtca

SEQ ID NO: 2168720 - DNA, 25 bp, Homo sapien
tgggcctcttgaagtgacagcgctg

SEQ ID NO: 2168721 - DNA, 25 bp, Homo sapien
acggacaccagaccggcctatggtc

SEQ ID NO: 2168722 - DNA, 25 bp, Homo sapien
tggcacactgactggaactttctct

SEQ ID NO: 2168723 - DNA, 25 bp, Homo sapien
ggcacactgactggaactttctctt

SEQ ID NO: 2168724 - DNA, 25 bp, Homo sapien
agtcagtacggtggccggcagctac

SEQ ID NO: 2168725 - DNA, 25 bp, Homo sapien
gaggccctcaaagggcgagtcagta

SEQ ID NO: 2168726 - DNA, 25 bp, Homo sapien
gatgttctcgcagatgatcccctgt

SEQ ID NO: 2168727 - DNA, 25 bp, Homo sapien
cacctctcctgagggcgtgacgatg

SEQ ID NO: 2168728 - DNA, 25 bp, Homo sapien
gggatgttctcgcagatgatcccct

SEQ ID NO: 2168729 - DNA, 25 bp, Homo sapien
ttctcgcagatgatcccctgttcca

SEQ ID NO: 2168730 - DNA, 25 bp, Homo sapien
gcccacccaggatccggaacaggga

SEQ ID NO: 2168731 - DNA, 25 bp, Homo sapien
ctctgcgggatgtagaacatgcgct

SEQ ID NO: 2168732 - DNA, 25 bp, Homo sapien
tgagcagatgcatgccttcctccac

SEQ ID NO: 2168733 - DNA, 25 bp, Homo sapien
tgtagagcacaccaccgtacgtggg

SEQ ID NO: 2168734 - DNA, 25 bp, Homo sapien
tccgagtagcccttcctttgcatgt

SEQ ID NO: 2168735 - DNA, 25 bp, Homo sapien
agatcacctggtcacgcagggagcc

SEQ ID NO: 2168736 - DNA, 25 bp, Homo sapien
atgtggtgcaggtgcacgacgtcca

SEQ ID NO: 2168737 - DNA, 25 bp, Homo sapien
atcacctggtcacgcagggagccca

SEQ ID NO: 2168738 - DNA, 25 bp, Homo sapien
ctgtgtggtgttggtcctccctggt

SEQ ID NO: 2168739 - DNA, 25 bp, Homo sapien
tgtgtggtgttggtcctccctggta

SEQ ID NO: 2168740 - DNA, 25 bp, Homo sapien
tcttctcatgttgccaccgagggag

SEQ ID NO: 2168741 - DNA, 25 bp, Homo sapien
gagccccagcaaggcgaggtccttg

SEQ ID NO: 2168742 - DNA, 25 bp, Homo sapien
tgcccgtgcccttgaaccgtgaagg

SEQ ID NO: 2168743 - DNA, 25 bp, Homo sapien
gcaggtgacaacaccccggccattt

SEQ ID NO: 2168744 - DNA, 25 bp, Homo sapien
ctaggcgggggcaatggtcttggct

SEQ ID NO: 2168745 - DNA, 25 bp, Homo sapien
ttggctcagttccaccagcacccag

SEQ ID NO: 2168746 - DNA, 25 bp, Homo sapien
gccacccgacaggacgtccttccag

SEQ ID NO: 2168747 - DNA, 25 bp, Homo sapien
ttctcgccacccgacaggacgtcct

SEQ ID NO: 2168748 - DNA, 25 bp, Homo sapien
acccgacaggacgtccttccagtca

SEQ ID NO: 2168749 - DNA, 25 bp, Homo sapien
ccgacaggacgtccttccagtcaca

SEQ ID NO: 2168750 - DNA, 25 bp, Homo sapien
ttgccttccacgtcgatgctcacgg

SEQ ID NO: 2168751 - DNA, 25 bp, Homo sapien
ccacgtcgatgctcacggcgctggt

SEQ ID NO: 2168752 - DNA, 25 bp, Homo sapien
ccttccacgtcgatgctcacggcgc

SEQ ID NO: 2168753 - DNA, 25 bp, Homo sapien
gctcacggcgctggtgcattcatcc

SEQ ID NO: 2168754 - DNA, 25 bp, Homo sapien
acggcctcgcccaggatctggcaga

SEQ ID NO: 2168755 - DNA, 25 bp, Homo sapien
tgagtccagcttctcgaacttccag

SEQ ID NO: 2168756 - DNA, 25 bp, Homo sapien
ttctcctccgtcaggctcaggcggg

SEQ ID NO: 2168757 - DNA, 25 bp, Homo sapien
ccttgcgggctaggtgccggcacat

SEQ ID NO: 2168758 - DNA, 25 bp, Homo sapien
tgggcggcttttatggcatcccacg

SEQ ID NO: 2168759 - DNA, 25 bp, Homo sapien
agtcactgtggaacagcgcccccag

SEQ ID NO: 2168760 - DNA, 25 bp, Homo sapien
gcatcccacggaacgggagccttgg

SEQ ID NO: 2168761 - DNA, 25 bp, Homo sapien
aatcatggggactcgagtctctgga

SEQ ID NO: 2168762 - DNA, 25 bp, Homo sapien
gagggcatgctggaccatgtcttct

SEQ ID NO: 2168763 - DNA, 25 bp, Homo sapien
gtgacccctctttggcactgagctg

SEQ ID NO: 2168764 - DNA, 25 bp, Homo sapien
gcatttgccagtggaggcttttact

SEQ ID NO: 2168765 - DNA, 25 bp, Homo sapien
ctgggaacatggtgtccgcactcct

SEQ ID NO: 2168766 - DNA, 25 bp, Homo sapien
tccaagccagaacccagtggtacct

SEQ ID NO: 2168767 - DNA, 25 bp, Homo sapien
gagccattccagctatgtgtcagaa

SEQ ID NO: 2168768 - DNA, 25 bp, Homo sapien
tgtcccctaaatgagatgccaagca

SEQ ID NO: 2168769 - DNA, 25 bp, Homo sapien
tatgatcaagcatgggcgacttaca

SEQ ID NO: 2168770 - DNA, 25 bp, Homo sapien
ggctctatcattatgcaggtgcaca

SEQ ID NO: 2168771 - DNA, 25 bp, Homo sapien
gtggtataatttcctgcgtggagaa

SEQ ID NO: 2168772 - DNA, 25 bp, Homo sapien
tactcattgagtctgcttaaaccag

SEQ ID NO: 2168773 - DNA, 25 bp, Homo sapien
caggtgcacacaagatcagaatggc

SEQ ID NO: 2168774 - DNA, 25 bp, Homo sapien
tggaggcggtttctcccagtgctga

SEQ ID NO: 2168775 - DNA, 25 bp, Homo sapien
gatgaatgtggaggcggtttctccc

SEQ ID NO: 2168776 - DNA, 25 bp, Homo sapien
cactgatgctcggattttacagatg

SEQ ID NO: 2168777 - DNA, 25 bp, Homo sapien
tttacagatgaatgtggaggcggtt

SEQ ID NO: 2168778 - DNA, 25 bp, Homo sapien
ggccaccggcgagggccaagtagca

SEQ ID NO: 2168779 - DNA, 25 bp, Homo sapien
caccggcgagggccaagtagcagct

SEQ ID NO: 2168780 - DNA, 25 bp, Homo sapien
ccaccggcgagggccaagtagcagc

SEQ ID NO: 2168781 - DNA, 25 bp, Homo sapien
accggcgagggccaagtagcagctg

SEQ ID NO: 2168782 - DNA, 25 bp, Homo sapien
gcatgagatggctgcgggggggcat

SEQ ID NO: 2168783 - DNA, 25 bp, Homo sapien
acgctcagttcagctgccccagggc

SEQ ID NO: 2168784 - DNA, 25 bp, Homo sapien
gctcagttcagctgccccagggcag

SEQ ID NO: 2168785 - DNA, 25 bp, Homo sapien
cagggcagtggcgatgggcatgaga

SEQ ID NO: 2168786 - DNA, 25 bp, Homo sapien
gaggggtctcctgggcggcgtggca

SEQ ID NO: 2168787 - DNA, 25 bp, Homo sapien
aggggtctcctgggcggcgtggcac

SEQ ID NO: 2168788 - DNA, 25 bp, Homo sapien
ggggtctcctgggcggcgtggcaca

SEQ ID NO: 2168789 - DNA, 25 bp, Homo sapien
aggccgaagggaggccagcgagcca

SEQ ID NO: 2168790 - DNA, 25 bp, Homo sapien
tgtcaagggcagtggcggtggggac

SEQ ID NO: 2168791 - DNA, 25 bp, Homo sapien
aggcagaggccgaagggaggccagc

SEQ ID NO: 2168792 - DNA, 25 bp, Homo sapien
agggaggccagcgagccatcacggg

SEQ ID NO: 2168793 - DNA, 25 bp, Homo sapien
tattaggtgcggagaagcgatgggc

SEQ ID NO: 2168794 - DNA, 25 bp, Homo sapien
atagagtgtgcctcggccaggtgcc

SEQ ID NO: 2168795 - DNA, 25 bp, Homo sapien
gaagaggcggttcactgcgccgaca

SEQ ID NO: 2168796 - DNA, 25 bp, Homo sapien
ggcacgcagtcagggctgtcgatta

SEQ ID NO: 2168797 - DNA, 25 bp, Homo sapien
tgttgtagtcggagaagtcgcccac

SEQ ID NO: 2168798 - DNA, 25 bp, Homo sapien
ggcaaaggccccgacgtagctgttg

SEQ ID NO: 2168799 - DNA, 25 bp, Homo sapien
tgttgttgtagtcggagaagtcgcc

SEQ ID NO: 2168800 - DNA, 25 bp, Homo sapien
gccccgacgtagctgttgttgtagt

SEQ ID NO: 2168801 - DNA, 25 bp, Homo sapien
gtacaggttggtgtcccccaggcag

SEQ ID NO: 2168802 - DNA, 25 bp, Homo sapien
gcgggccacgtaggagcggtactca

SEQ ID NO: 2168803 - DNA, 25 bp, Homo sapien
tccacgtaggagtacaggttggtgt

SEQ ID NO: 2168804 - DNA, 25 bp, Homo sapien
ccggggcaaggaaggcggcctggat

SEQ ID NO: 2168805 - DNA, 25 bp, Homo sapien
tgccccttgggcccgcggcaaacac

SEQ ID NO: 2168806 - DNA, 25 bp, Homo sapien
gtgccccttgggcccgcggcaaaca

SEQ ID NO: 2168807 - DNA, 25 bp, Homo sapien
ccgtgtagcagagtctccgggcctg

SEQ ID NO: 2168808 - DNA, 25 bp, Homo sapien
ccgcccgccgtgtagcagagtctcc

SEQ ID NO: 2168809 - DNA, 25 bp, Homo sapien
gccgtgtagcagagtctccgggcct

SEQ ID NO: 2168810 - DNA, 25 bp, Homo sapien
tgacgccgtactccacggtggcttc

SEQ ID NO: 2168811 - DNA, 25 bp, Homo sapien
tgacgcagcgcgacgtgacgccgta

SEQ ID NO: 2168812 - DNA, 25 bp, Homo sapien
acgcagcgcgacgtgacgccgtact

SEQ ID NO: 2168813 - DNA, 25 bp, Homo sapien
cgacgtgacgccgtactccacggtg

SEQ ID NO: 2168814 - DNA, 25 bp, Homo sapien
tgtgctcgtcgccacaggggtacga

SEQ ID NO: 2168815 - DNA, 25 bp, Homo sapien
ctggagagctgccacggcgctgacc

SEQ ID NO: 2168816 - DNA, 25 bp, Homo sapien
gaaggctatcatgtgcccatctgcc

SEQ ID NO: 2168817 - DNA, 25 bp, Homo sapien
tgaccggctgcccgagcttcagcag

SEQ ID NO: 2168818 - DNA, 25 bp, Homo sapien
tgaggccccgtgtaccagggacagt

SEQ ID NO: 2168819 - DNA, 25 bp, Homo sapien
ctaggacactctccagggaaccatg

SEQ ID NO: 2168820 - DNA, 25 bp, Homo sapien
ggaaccatgacaccggggcagcagc

SEQ ID NO: 2168821 - DNA, 25 bp, Homo sapien
agcagcggcaccctgggtgaggccc

SEQ ID NO: 2168822 - DNA, 25 bp, Homo sapien
aggccccacttgctgggagtggtaa

SEQ ID NO: 2168823 - DNA, 25 bp, Homo sapien
tggtgggcagtcaggacatagaggt

SEQ ID NO: 2168824 - DNA, 25 bp, Homo sapien
gccccacttgctgggagtggtaaac

SEQ ID NO: 2168825 - DNA, 25 bp, Homo sapien
caggacatagaggtgactgccactg

SEQ ID NO: 2168826 - DNA, 25 bp, Homo sapien
ggcaggctgccacaggtatccggtc

SEQ ID NO: 2168827 - DNA, 25 bp, Homo sapien
aggctgccacaggtatccggtccac

SEQ ID NO: 2168828 - DNA, 25 bp, Homo sapien
gggcaggctgccacaggtatccggt

SEQ ID NO: 2168829 - DNA, 25 bp, Homo sapien
agccacacagcgggtcctgggcctg

SEQ ID NO: 2168830 - DNA, 25 bp, Homo sapien
cagtggctgtcctcctcataactcc

SEQ ID NO: 2168831 - DNA, 25 bp, Homo sapien
tgtcctcctcataactccacagcca

SEQ ID NO: 2168832 - DNA, 25 bp, Homo sapien
tcctcctcataactccacagccact

SEQ ID NO: 2168833 - DNA, 25 bp, Homo sapien
ggctgtcctcctcataactccacag

SEQ ID NO: 2168834 - DNA, 25 bp, Homo sapien
ctggagggttaagtggcacctggtc

SEQ ID NO: 2168835 - DNA, 25 bp, Homo sapien
ttccacatgagccaagctgtcatag

SEQ ID NO: 2168836 - DNA, 25 bp, Homo sapien
gtcatagtccccgaacgcacaatgg

SEQ ID NO: 2168837 - DNA, 25 bp, Homo sapien
cgcacaatggaagtattcatctgca

SEQ ID NO: 2168838 - DNA, 25 bp, Homo sapien
acgtcctcgaacatcagggccaggg

SEQ ID NO: 2168839 - DNA, 25 bp, Homo sapien
tccaaggcctggacggcactgcagt

SEQ ID NO: 2168840 - DNA, 25 bp, Homo sapien
acagtcacgtcctcgaacatcaggg

SEQ ID NO: 2168841 - DNA, 25 bp, Homo sapien
ctgcagtcataaaaggagaagttgg

SEQ ID NO: 2168842 - DNA, 25 bp, Homo sapien
tcctgggcgctgtagatggtcctct

SEQ ID NO: 2168843 - DNA, 25 bp, Homo sapien
ggcaccagtgacaccgccagatgct

SEQ ID NO: 2168844 - DNA, 25 bp, Homo sapien
agtggctactctgcgggcaccagtg

SEQ ID NO: 2168845 - DNA, 25 bp, Homo sapien
tgggcagtgctctccgtacacgcag

SEQ ID NO: 2168846 - DNA, 25 bp, Homo sapien
tcggaaatgttgaaggttccgcacg

SEQ ID NO: 2168847 - DNA, 25 bp, Homo sapien
caggccttcgacctgtgggcaagcc

SEQ ID NO: 2168848 - DNA, 25 bp, Homo sapien
atgttgaaggttccgcacgcgtagg

SEQ ID NO: 2168849 - DNA, 25 bp, Homo sapien
aggccttcgacctgtgggcaagccc

SEQ ID NO: 2168850 - DNA, 25 bp, Homo sapien
tgtcaggagtgtggacacgctgttg

SEQ ID NO: 2168851 - DNA, 25 bp, Homo sapien
ggacacgctgttggcagacctcact

SEQ ID NO: 2168852 - DNA, 25 bp, Homo sapien
tgttggcagacctcactgccctgtc

SEQ ID NO: 2168853 - DNA, 25 bp, Homo sapien
tggggaaggacgctgtcaggagtgt

SEQ ID NO: 2168854 - DNA, 25 bp, Homo sapien
ctccagccagcagtggaaggaggca

SEQ ID NO: 2168855 - DNA, 25 bp, Homo sapien
tggatgaggcctgaatcccctgctg

SEQ ID NO: 2168856 - DNA, 25 bp, Homo sapien
gtggccggcagtccccgaagttctc

SEQ ID NO: 2168857 - DNA, 25 bp, Homo sapien
ctggcagtggatgaggcctgaatcc

SEQ ID NO: 2168858 - DNA, 25 bp, Homo sapien
gcactgggagctcccgctgggacat

SEQ ID NO: 2168859 - DNA, 25 bp, Homo sapien
taaagagcatgggtgttgtccagcc

SEQ ID NO: 2168860 - DNA, 25 bp, Homo sapien
aaagagcatgggtgttgtccagcct

SEQ ID NO: 2168861 - DNA, 25 bp, Homo sapien
cccgctgggacatggagggataaaa

SEQ ID NO: 2168862 - DNA, 25 bp, Homo sapien
agtggctgcagtccgggtggcccat

SEQ ID NO: 2168863 - DNA, 25 bp, Homo sapien
tcctgttggccgcttggcagtggct

SEQ ID NO: 2168864 - DNA, 25 bp, Homo sapien
acaagggcccatagcgacaggcagg

SEQ ID NO: 2168865 - DNA, 25 bp, Homo sapien
cccatggcgcagtcgtacaggatca

SEQ ID NO: 2168866 - DNA, 25 bp, Homo sapien
acgctcacggcgtactgcacatcgg

SEQ ID NO: 2168867 - DNA, 25 bp, Homo sapien
gctcagggttgcagggccggctggc

SEQ ID NO: 2168868 - DNA, 25 bp, Homo sapien
ggcgtactgcacatcggcgaaggcc

SEQ ID NO: 2168869 - DNA, 25 bp, Homo sapien
ggctggccacgctcacggcgtactg

SEQ ID NO: 2168870 - DNA, 25 bp, Homo sapien
agtggtgccattgggggcaggagat

SEQ ID NO: 2168871 - DNA, 25 bp, Homo sapien
tggctcttaatggccacccggacgg

SEQ ID NO: 2168872 - DNA, 25 bp, Homo sapien
ctggtaggtgaagtgctggcttgag

SEQ ID NO: 2168873 - DNA, 25 bp, Homo sapien
gaagtgctggcttgagatgcctggt

SEQ ID NO: 2168874 - DNA, 25 bp, Homo sapien
ctgggggccccagcgaggactcagg

SEQ ID NO: 2168875 - DNA, 25 bp, Homo sapien
agcgaggactcaggctcagcaggac

SEQ ID NO: 2168876 - DNA, 25 bp, Homo sapien
gggccccagcgaggactcaggctca

SEQ ID NO: 2168877 - DNA, 25 bp, Homo sapien
cagcgaggactcaggctcagcagga

SEQ ID NO: 2168878 - DNA, 25 bp, Homo sapien
tggaggtgctgacctcggatggtga

SEQ ID NO: 2168879 - DNA, 25 bp, Homo sapien
ccacgaaggcactggtgttgccacc

SEQ ID NO: 2168880 - DNA, 25 bp, Homo sapien
aggcactggtgttgccacctgtctg

SEQ ID NO: 2168881 - DNA, 25 bp, Homo sapien
gtgctgacctcggatggtgagctgg

SEQ ID NO: 2168882 - DNA, 25 bp, Homo sapien
acacgatggcctccggacacactgg

SEQ ID NO: 2168883 - DNA, 25 bp, Homo sapien
ggcctggtacggcacacgatggcct

SEQ ID NO: 2168884 - DNA, 25 bp, Homo sapien
agcagtgtgcgctgggcatggccaa

SEQ ID NO: 2168885 - DNA, 25 bp, Homo sapien
actgggctccgccgctacaagctgg

SEQ ID NO: 2168886 - DNA, 25 bp, Homo sapien
cccaccgagctggatacaagcctgg

SEQ ID NO: 2168887 - DNA, 25 bp, Homo sapien
gggccgctgcaccacgtctaggccg

SEQ ID NO: 2168888 - DNA, 25 bp, Homo sapien
ccaccgagctggatacaagcctggg

SEQ ID NO: 2168889 - DNA, 25 bp, Homo sapien
gccggtgcccctgacacggatcagt

SEQ ID NO: 2168890 - DNA, 25 bp, Homo sapien
actggcactggcgaagtccacttgc

SEQ ID NO: 2168891 - DNA, 25 bp, Homo sapien
tgtctagggtgaagaagacccgctg

SEQ ID NO: 2168892 - DNA, 25 bp, Homo sapien
acatggcctggcttgaggcggtagg

SEQ ID NO: 2168893 - DNA, 25 bp, Homo sapien
tggacgagttgacggagcagacggt

SEQ ID NO: 2168894 - DNA, 25 bp, Homo sapien
acacatgggagcctaagctgctggc

SEQ ID NO: 2168895 - DNA, 25 bp, Homo sapien
gggcagggttgaaggtggccctcac

SEQ ID NO: 2168896 - DNA, 25 bp, Homo sapien
ggacacacatgggagcctaagctgc

SEQ ID NO: 2168897 - DNA, 25 bp, Homo sapien
cacagaggcggcctgagcaccgtgg

SEQ ID NO: 2168898 - DNA, 25 bp, Homo sapien
cggccgatgtgcacgcgcacctcct

SEQ ID NO: 2168899 - DNA, 25 bp, Homo sapien
gtgcgcaggcggctcgcagtacagg

SEQ ID NO: 2168900 - DNA, 25 bp, Homo sapien
tgctgatgcccaggttgaggccctc

SEQ ID NO: 2168901 - DNA, 25 bp, Homo sapien
gtacaggtgggtgcgcgtgagcgtc

SEQ ID NO: 2168902 - DNA, 25 bp, Homo sapien
agcctcgtactgcacagggcccagg

SEQ ID NO: 2168903 - DNA, 25 bp, Homo sapien
agcgggggttcagcctcgtactgca

SEQ ID NO: 2168904 - DNA, 25 bp, Homo sapien
gagcacggcggcaatcagcactgca

SEQ ID NO: 2168905 - DNA, 25 bp, Homo sapien
ggccagctgcacattgcccatctgc

SEQ ID NO: 2168906 - DNA, 25 bp, Homo sapien
cgcctgccagggcgcccttgccaat

SEQ ID NO: 2168907 - DNA, 25 bp, Homo sapien
gcccttgccaatggcgaggagggaa

SEQ ID NO: 2168908 - DNA, 25 bp, Homo sapien
ccagggcgcccttgccaatggcgag

SEQ ID NO: 2168909 - DNA, 25 bp, Homo sapien
cagggccggggccagcatcagccag

SEQ ID NO: 2168910 - DNA, 25 bp, Homo sapien
cagctgcactagcaccttctggtag

SEQ ID NO: 2168911 - DNA, 25 bp, Homo sapien
tgtgaactccttgcggcactggtct

SEQ ID NO: 2168912 - DNA, 25 bp, Homo sapien
ccttctggtagtcccgcagggcctg

SEQ ID NO: 2168913 - DNA, 25 bp, Homo sapien
ctgtgaactccttgcggcactggtc

SEQ ID NO: 2168914 - DNA, 25 bp, Homo sapien
tcaggcctcgtgggtaccctgtccc

SEQ ID NO: 2168915 - DNA, 25 bp, Homo sapien
ttcaggcctcgtgggtaccctgtcc

SEQ ID NO: 2168916 - DNA, 25 bp, Homo sapien
tgctgaggtcggtcatctccgtcat

SEQ ID NO: 2168917 - DNA, 25 bp, Homo sapien
ttggagagctgcgtgaggccctggc

SEQ ID NO: 2168918 - DNA, 25 bp, Homo sapien
tgcagcgggcaaccgccatggccag

SEQ ID NO: 2168919 - DNA, 25 bp, Homo sapien
gctcggcgtaggtgcggtagtccag

SEQ ID NO: 2168920 - DNA, 25 bp, Homo sapien
ccttgcccactgggcactcccgcca

SEQ ID NO: 2168921 - DNA, 25 bp, Homo sapien
tccttgcccactgggcactcccgcc

SEQ ID NO: 2168922 - DNA, 25 bp, Homo sapien
ctccttgcccactgggcactcccgc

SEQ ID NO: 2168923 - DNA, 25 bp, Homo sapien
ctttgtctcaggccagtagttcccc

SEQ ID NO: 2168924 - DNA, 25 bp, Homo sapien
ttgtctcaggccagtagttccccag

SEQ ID NO: 2168925 - DNA, 25 bp, Homo sapien
tgtctcaggccagtagttccccagc

SEQ ID NO: 2168926 - DNA, 25 bp, Homo sapien
tctcaggccagtagttccccagccc

SEQ ID NO: 2168927 - DNA, 25 bp, Homo sapien
acatggcagcgatccctctgggaaa

SEQ ID NO: 2168928 - DNA, 25 bp, Homo sapien
agcttgccgtgtagcgctagcgaca

SEQ ID NO: 2168929 - DNA, 25 bp, Homo sapien
ggttcctgtgcacgtaatgggccgc

SEQ ID NO: 2168930 - DNA, 25 bp, Homo sapien
tgatgtccgtcaggtactccagctt

SEQ ID NO: 2168931 - DNA, 25 bp, Homo sapien
caggaaggcgtacaggcagatggac

SEQ ID NO: 2168932 - DNA, 25 bp, Homo sapien
cctcaggaaggcgtacaggcagatg

SEQ ID NO: 2168933 - DNA, 25 bp, Homo sapien
tcaggaaggcgtacaggcagatgga

SEQ ID NO: 2168934 - DNA, 25 bp, Homo sapien
ggaaggcgtacaggcagatggacag

SEQ ID NO: 2168935 - DNA, 25 bp, Homo sapien
gcgtcaggggctggaactccacgtc

SEQ ID NO: 2168936 - DNA, 25 bp, Homo sapien
cattcagggtccgtttggccttgcc

SEQ ID NO: 2168937 - DNA, 25 bp, Homo sapien
tgatggtgtccgtgtcgagcacccg

SEQ ID NO: 2168938 - DNA, 25 bp, Homo sapien
tggcacgcgctgcatctcgctgctg

SEQ ID NO: 2168939 - DNA, 25 bp, Homo sapien
gggtgcccttgtagacttggtccaa

SEQ ID NO: 2168940 - DNA, 25 bp, Homo sapien
ggggtgcccttgtagacttggtcca

SEQ ID NO: 2168941 - DNA, 25 bp, Homo sapien
tgcccttgtagacttggtccaacac

SEQ ID NO: 2168942 - DNA, 25 bp, Homo sapien
ggtgcccttgtagacttggtccaac

SEQ ID NO: 2168943 - DNA, 25 bp, Homo sapien
tccgatagggtcaggtgaccagcca

SEQ ID NO: 2168944 - DNA, 25 bp, Homo sapien
ttgggtcacggaggtcaagtcttcg

SEQ ID NO: 2168945 - DNA, 25 bp, Homo sapien
cttgtagtgttgcaaggtgttgagt

SEQ ID NO: 2168946 - DNA, 25 bp, Homo sapien
tcttccagtggttttgggtcacgga

SEQ ID NO: 2168947 - DNA, 25 bp, Homo sapien
gtgcagctgagggacgagccccact

SEQ ID NO: 2168948 - DNA, 25 bp, Homo sapien
agggacgagccccactgttgctcca

SEQ ID NO: 2168949 - DNA, 25 bp, Homo sapien
gctgagggacgagccccactgttgc

SEQ ID NO: 2168950 - DNA, 25 bp, Homo sapien
agatggtgctgccacggtgcagctg

SEQ ID NO: 2168951 - DNA, 25 bp, Homo sapien
gccccaggtcagggccgagggactc

SEQ ID NO: 2168952 - DNA, 25 bp, Homo sapien
tggccccaggtcagggccgagggac

SEQ ID NO: 2168953 - DNA, 25 bp, Homo sapien
cagtggccccaggtcagggccgagg

SEQ ID NO: 2168954 - DNA, 25 bp, Homo sapien
cccaggtcagggccgagggactcac

SEQ ID NO: 2168955 - DNA, 25 bp, Homo sapien
tggccttggcccttgctggctcgcg

SEQ ID NO: 2168956 - DNA, 25 bp, Homo sapien
tagatttccggaatggccttggccc

SEQ ID NO: 2168957 - DNA, 25 bp, Homo sapien
cagcagacgggtgaggtagatttcc

SEQ ID NO: 2168958 - DNA, 25 bp, Homo sapien
cctcggtggctttcaccaggtgcca

SEQ ID NO: 2168959 - DNA, 25 bp, Homo sapien
tcgatgccgtgcttctctgctagct

SEQ ID NO: 2168960 - DNA, 25 bp, Homo sapien
tgggtcctcgatgccgtgcttctct

SEQ ID NO: 2168961 - DNA, 25 bp, Homo sapien
gccggttcacgctgagaatggcctg

SEQ ID NO: 2168962 - DNA, 25 bp, Homo sapien
caaacaggtacttgacggcgatggg

SEQ ID NO: 2168963 - DNA, 25 bp, Homo sapien
tactggcaacacactcggagccagg

SEQ ID NO: 2168964 - DNA, 25 bp, Homo sapien
acctgggccctagatcttcctgtaa

SEQ ID NO: 2168965 - DNA, 25 bp, Homo sapien
gcctggtggcctaggtgacctgggc

SEQ ID NO: 2168966 - DNA, 25 bp, Homo sapien
ccaggtgggcgcatccaccctggga

SEQ ID NO: 2168967 - DNA, 25 bp, Homo sapien
cattgtccgacacccgtacatcaaa

SEQ ID NO: 2168968 - DNA, 25 bp, Homo sapien
tgacagcaaggatggcgtccacatt

SEQ ID NO: 2168969 - DNA, 25 bp, Homo sapien
cgtacatcaaagatgagctgtgggt

SEQ ID NO: 2168970 - DNA, 25 bp, Homo sapien
actttatgctccgaggtggtacagg

SEQ ID NO: 2168971 - DNA, 25 bp, Homo sapien
ggaggcgctaggcatgagctcggag

SEQ ID NO: 2168972 - DNA, 25 bp, Homo sapien
tctaggcttcccccataagcctttc

SEQ ID NO: 2168973 - DNA, 25 bp, Homo sapien
tcggaggtgaaggtgcccccatgat

SEQ ID NO: 2168974 - DNA, 25 bp, Homo sapien
gcgctaggcatgagctcggaggtga

SEQ ID NO: 2168975 - DNA, 25 bp, Homo sapien
ctgcttgtagcgtgggatctcccgg

SEQ ID NO: 2168976 - DNA, 25 bp, Homo sapien
tccaccatctgcttgtagcgtggga

SEQ ID NO: 2168977 - DNA, 25 bp, Homo sapien
ggatctcccgggcgtagagcagttt

SEQ ID NO: 2168978 - DNA, 25 bp, Homo sapien
catctgcttgtagcgtgggatctcc

SEQ ID NO: 2168979 - DNA, 25 bp, Homo sapien
tggaggagcagacttcgttaggggt

SEQ ID NO: 2168980 - DNA, 25 bp, Homo sapien
aggagcagacttcgttaggggtggg

SEQ ID NO: 2168981 - DNA, 25 bp, Homo sapien
gaggagcagacttcgttaggggtgg

SEQ ID NO: 2168982 - DNA, 25 bp, Homo sapien
ggaggagcagacttcgttaggggtg

SEQ ID NO: 2168983 - DNA, 25 bp, Homo sapien
atctcctggtagctcgccggagagc

SEQ ID NO: 2168984 - DNA, 25 bp, Homo sapien
tagctcgccggagagctctggcgaa

SEQ ID NO: 2168985 - DNA, 25 bp, Homo sapien
tcgccggagagctctggcgaatgtc

SEQ ID NO: 2168986 - DNA, 25 bp, Homo sapien
ctcctggtagctcgccggagagctc

SEQ ID NO: 2168987 - DNA, 25 bp, Homo sapien
gctagtctttccacccacgtgtgga

SEQ ID NO: 2168988 - DNA, 25 bp, Homo sapien
tctgctctgctagtctttccaccca

SEQ ID NO: 2168989 - DNA, 25 bp, Homo sapien
tctgctagtctttccacccacgtgt

SEQ ID NO: 2168990 - DNA, 25 bp, Homo sapien
gcaccacgtggaggggggcagtgag

SEQ ID NO: 2168991 - DNA, 25 bp, Homo sapien
ggttgtagagttcttgcagagcctc

SEQ ID NO: 2168992 - DNA, 25 bp, Homo sapien
gtggttgtagagttcttgcagagcc

SEQ ID NO: 2168993 - DNA, 25 bp, Homo sapien
ctccagacagtggggagcagaagtg

SEQ ID NO: 2168994 - DNA, 25 bp, Homo sapien
tggttgtagagttcttgcagagcct

SEQ ID NO: 2168995 - DNA, 25 bp, Homo sapien
gggaatcagaatgaaagccgagtcc

SEQ ID NO: 2168996 - DNA, 25 bp, Homo sapien
atcagaatgaaagccgagtcccttc

SEQ ID NO: 2168997 - DNA, 25 bp, Homo sapien
caccctgcttccatcaccgcaggag

SEQ ID NO: 2168998 - DNA, 25 bp, Homo sapien
gaatcagaatgaaagccgagtccct

SEQ ID NO: 2168999 - DNA, 25 bp, Homo sapien
cagctgcagcttctggcccacaggg

SEQ ID NO: 2169000 - DNA, 25 bp, Homo sapien
tgctgcaggcggcaggccagctgca

SEQ ID NO: 2169001 - DNA, 25 bp, Homo sapien
gctgcagcttctggcccacagggtc

SEQ ID NO: 2169002 - DNA, 25 bp, Homo sapien
ggtcctcctccagggcactgataat

SEQ ID NO: 2169003 - DNA, 25 bp, Homo sapien
agtcactttgttttccaccagggcg

SEQ ID NO: 2169004 - DNA, 25 bp, Homo sapien
cactttgttttccaccagggcggcg

SEQ ID NO: 2169005 - DNA, 25 bp, Homo sapien
gtcagtcactttgttttccaccagg

SEQ ID NO: 2169006 - DNA, 25 bp, Homo sapien
aggtcagtcactttgttttccacca

SEQ ID NO: 2169007 - DNA, 25 bp, Homo sapien
agctcccctcagtggctggctcggt

SEQ ID NO: 2169008 - DNA, 25 bp, Homo sapien
aaggcgctgcggtgttggtggatcc

SEQ ID NO: 2169009 - DNA, 25 bp, Homo sapien
tgtgattttccagcaggcaaataaa

SEQ ID NO: 2169010 - DNA, 25 bp, Homo sapien
tggtggatccggcttgctgctgtct

SEQ ID NO: 2169011 - DNA, 25 bp, Homo sapien
gcagcccgcagctccggtgccccgg

SEQ ID NO: 2169012 - DNA, 25 bp, Homo sapien
cagcccgcagctccggtgccccggg

SEQ ID NO: 2169013 - DNA, 25 bp, Homo sapien
ctgtccccaccaccgcccgtgctgg

SEQ ID NO: 2169014 - DNA, 25 bp, Homo sapien
cgctgtccccaccaccgcccgtgct

SEQ ID NO: 2169015 - DNA, 25 bp, Homo sapien
gctgtccccaccaccgcccgtgctg

SEQ ID NO: 2169016 - DNA, 25 bp, Homo sapien
gtccccaccaccgcccgtgctggcg

SEQ ID NO: 2169017 - DNA, 25 bp, Homo sapien
ggctagttcggagcccgaggactcg

SEQ ID NO: 2169018 - DNA, 25 bp, Homo sapien
tgtggccagggctagttcggagccc

SEQ ID NO: 2169019 - DNA, 25 bp, Homo sapien
actcgggcccgcaggaggcctgtga

SEQ ID NO: 2169020 - DNA, 25 bp, Homo sapien
agcccgaggactcgggcccgcagga

SEQ ID NO: 2169021 - DNA, 25 bp, Homo sapien
tcctgttcctcgtcgtcggagccca

SEQ ID NO: 2169022 - DNA, 25 bp, Homo sapien
cctgttcctcgtcgtcggagcccag

SEQ ID NO: 2169023 - DNA, 25 bp, Homo sapien
cagtttgcgcaccacgtggtaccgc

SEQ ID NO: 2169024 - DNA, 25 bp, Homo sapien
cagcagagccagacggtggagaagt

SEQ ID NO: 2169025 - DNA, 25 bp, Homo sapien
gaacacgtcgccgatcttcacaggg

SEQ ID NO: 2169026 - DNA, 25 bp, Homo sapien
gtggtaccgcccattgaacacgtcg

SEQ ID NO: 2169027 - DNA, 25 bp, Homo sapien
cactttgagggccacaaagcgcttg

SEQ ID NO: 2169028 - DNA, 25 bp, Homo sapien
tccacagctgtctccgtgtaatgcc

SEQ ID NO: 2169029 - DNA, 25 bp, Homo sapien
actcttcaccactttgagggccaca

SEQ ID NO: 2169030 - DNA, 25 bp, Homo sapien
tttcaggagcttgatctcatccaca

SEQ ID NO: 2169031 - DNA, 25 bp, Homo sapien
gggtcactggggtcgctgtcccgga

SEQ ID NO: 2169032 - DNA, 25 bp, Homo sapien
gctggacaatggtctctcttttggg

SEQ ID NO: 2169033 - DNA, 25 bp, Homo sapien
gaagtcatcaatgagctggacaatg

SEQ ID NO: 2169034 - DNA, 25 bp, Homo sapien
gactcctgagatcctgaagtcatca

SEQ ID NO: 2169035 - DNA, 25 bp, Homo sapien
gatgcaagcccattgtgcgggtctg

SEQ ID NO: 2169036 - DNA, 25 bp, Homo sapien
gtgccagaggctcccgttactggga

SEQ ID NO: 2169037 - DNA, 25 bp, Homo sapien
gggtcgtgccagaggctcccgttac

SEQ ID NO: 2169038 - DNA, 25 bp, Homo sapien
tctgcagacaggctctagcagcgag

SEQ ID NO: 2169039 - DNA, 25 bp, Homo sapien
ctgggagtgaagggcggccagtgga

SEQ ID NO: 2169040 - DNA, 25 bp, Homo sapien
agtgaagggcggccagtggacacca

SEQ ID NO: 2169041 - DNA, 25 bp, Homo sapien
ggagtgaagggcggccagtggacac

SEQ ID NO: 2169042 - DNA, 25 bp, Homo sapien
tgaagggcggccagtggacaccagc

SEQ ID NO: 2169043 - DNA, 25 bp, Homo sapien
tgcctcacgatgctcttcacgcagg

SEQ ID NO: 2169044 - DNA, 25 bp, Homo sapien
ctgcagagagtcgcacctgacctcc

SEQ ID NO: 2169045 - DNA, 25 bp, Homo sapien
tgcagagagtcgcacctgacctcct

SEQ ID NO: 2169046 - DNA, 25 bp, Homo sapien
agagagtcgcacctgacctcctcca

SEQ ID NO: 2169047 - DNA, 25 bp, Homo sapien
gagtcgcacctgacctcctccaact

SEQ ID NO: 2169048 - DNA, 25 bp, Homo sapien
tgtggatgatcttgcacttggtgtg

SEQ ID NO: 2169049 - DNA, 25 bp, Homo sapien
tcgggcttgatgtccgtgtggatga

SEQ ID NO: 2169050 - DNA, 25 bp, Homo sapien
tgttgccactccgtggcctcggcag

SEQ ID NO: 2169051 - DNA, 25 bp, Homo sapien
gccaggcgcctgatgtaagcgtccc

SEQ ID NO: 2169052 - DNA, 25 bp, Homo sapien
ggccccgacccagccccatgtgggc

SEQ ID NO: 2169053 - DNA, 25 bp, Homo sapien
ccagccccatgtgggcccttggtac

SEQ ID NO: 2169054 - DNA, 25 bp, Homo sapien
gacagggaggaacagagactcaggc

SEQ ID NO: 2169055 - DNA, 25 bp, Homo sapien
actcaggcaggggttcaggcccaga

SEQ ID NO: 2169056 - DNA, 25 bp, Homo sapien
aagacctcctggggggcagtgctga

SEQ ID NO: 2169057 - DNA, 25 bp, Homo sapien
caagacctcctggggggcagtgctg

SEQ ID NO: 2169058 - DNA, 25 bp, Homo sapien
gagatggcctccagttggctcagat

SEQ ID NO: 2169059 - DNA, 25 bp, Homo sapien
ctaaggcaggcggaagtggccattc

SEQ ID NO: 2169060 - DNA, 25 bp, Homo sapien
tggacaccagaatgtggcgccagcg

SEQ ID NO: 2169061 - DNA, 25 bp, Homo sapien
cagcctttcgggattaccaccgtgg

SEQ ID NO: 2169062 - DNA, 25 bp, Homo sapien
gccgcttctgctgtttccgtttgcg

SEQ ID NO: 2169063 - DNA, 25 bp, Homo sapien
cttcctcttgtttttggacagctta

SEQ ID NO: 2169064 - DNA, 25 bp, Homo sapien
gctgtttccgtttgcgcctcatctt

SEQ ID NO: 2169065 - DNA, 25 bp, Homo sapien
ctcttgtttttggacagcttaccgg

SEQ ID NO: 2169066 - DNA, 25 bp, Homo sapien
gctgcccccgtctagtctcaagcca

SEQ ID NO: 2169067 - DNA, 25 bp, Homo sapien
cgctgcccccgtctagtctcaagcc

SEQ ID NO: 2169068 - DNA, 25 bp, Homo sapien
ccgctgcccccgtctagtctcaagc

SEQ ID NO: 2169069 - DNA, 25 bp, Homo sapien
ctgcccccgtctagtctcaagccag

SEQ ID NO: 2169070 - DNA, 25 bp, Homo sapien
ctggggcgggggaggaagaggctgg

SEQ ID NO: 2169071 - DNA, 25 bp, Homo sapien
gtgagcccgcgctgaggctacggcc

SEQ ID NO: 2169072 - DNA, 25 bp, Homo sapien
gaggtctgtgagcccgcgctgaggc

SEQ ID NO: 2169073 - DNA, 25 bp, Homo sapien
tctgtgagcccgcgctgaggctacg

SEQ ID NO: 2169074 - DNA, 25 bp, Homo sapien
ggtctgtgagcccgcgctgaggcta

SEQ ID NO: 2169075 - DNA, 25 bp, Homo sapien
ctaggcgacaggaggcccccggtct

SEQ ID NO: 2169076 - DNA, 25 bp, Homo sapien
tctcgctgattggacgagccggaga

SEQ ID NO: 2169077 - DNA, 25 bp, Homo sapien
tctctcgctgattggacgagccgga

SEQ ID NO: 2169078 - DNA, 25 bp, Homo sapien
cccggtctctcgctgattggacgag

SEQ ID NO: 2169079 - DNA, 25 bp, Homo sapien
cttgatcttgatcttatctgcattt

SEQ ID NO: 2169080 - DNA, 25 bp, Homo sapien
gcaggcgttgcccaggtctgcgatc

SEQ ID NO: 2169081 - DNA, 25 bp, Homo sapien
accaggaggttcgaggcaccgaatg

SEQ ID NO: 2169082 - DNA, 25 bp, Homo sapien
caggaggttcgaggcaccgaatggt

SEQ ID NO: 2169083 - DNA, 25 bp, Homo sapien
tggaagcaaggggagccctggggac

SEQ ID NO: 2169084 - DNA, 25 bp, Homo sapien
ctggaagcaaggggagccctgggga

SEQ ID NO: 2169085 - DNA, 25 bp, Homo sapien
cgacggcccggtactgccgagtctg

SEQ ID NO: 2169086 - DNA, 25 bp, Homo sapien
gggccgtattcggcgccgatcagca

SEQ ID NO: 2169087 - DNA, 25 bp, Homo sapien
tcagcacctcgacggcccggtactg

SEQ ID NO: 2169088 - DNA, 25 bp, Homo sapien
ggctgtgctccagatgtctgccggg

SEQ ID NO: 2169089 - DNA, 25 bp, Homo sapien
tgcggctcgaacaggtagtcaccag

SEQ ID NO: 2169090 - DNA, 25 bp, Homo sapien
aatgcggctcgaacaggtagtcacc

SEQ ID NO: 2169091 - DNA, 25 bp, Homo sapien
agtcttctccagaatgcggctcgaa

SEQ ID NO: 2169092 - DNA, 25 bp, Homo sapien
tccagaatgcggctcgaacaggtag

SEQ ID NO: 2169093 - DNA, 25 bp, Homo sapien
ggcaggcaggccgggaggccgggag

SEQ ID NO: 2169094 - DNA, 25 bp, Homo sapien
gaaagaggaggttgggggcaggcag

SEQ ID NO: 2169095 - DNA, 25 bp, Homo sapien
gctgagcccagagccctcacccctt

SEQ ID NO: 2169096 - DNA, 25 bp, Homo sapien
aggcaggccgggaggccgggaggct

SEQ ID NO: 2169097 - DNA, 25 bp, Homo sapien
ttgaagaactcccgggaatagcggc

SEQ ID NO: 2169098 - DNA, 25 bp, Homo sapien
agaagctccactatgtgagcgatgt

SEQ ID NO: 2169099 - DNA, 25 bp, Homo sapien
aagctccactatgtgagcgatgtgg

SEQ ID NO: 2169100 - DNA, 25 bp, Homo sapien
aatagcggcctgagagggcgaaggc

SEQ ID NO: 2169101 - DNA, 25 bp, Homo sapien
tgagtacctcgtacaggccccagtg

SEQ ID NO: 2169102 - DNA, 25 bp, Homo sapien
cagaaaggcgctgaactgtgtggcc

SEQ ID NO: 2169103 - DNA, 25 bp, Homo sapien
agtcagcggcactggcccgcttttc

SEQ ID NO: 2169104 - DNA, 25 bp, Homo sapien
agattgtggatgtgccgcagctctc

SEQ ID NO: 2169105 - DNA, 25 bp, Homo sapien
ggaatacacacactttctccgagag

SEQ ID NO: 2169106 - DNA, 25 bp, Homo sapien
tttcccttaaggcacggagagctgg

SEQ ID NO: 2169107 - DNA, 25 bp, Homo sapien
tggtgggagctgtcccgcttttccc

SEQ ID NO: 2169108 - DNA, 25 bp, Homo sapien
aggcagaacacgctctgagagccgg

SEQ ID NO: 2169109 - DNA, 25 bp, Homo sapien
cacctatcccggtggcaaagaaccg

SEQ ID NO: 2169110 - DNA, 25 bp, Homo sapien
aaagaaccggactttgccagtcatc

SEQ ID NO: 2169111 - DNA, 25 bp, Homo sapien
gccctgatgggtaagaggtttgacc

SEQ ID NO: 2169112 - DNA, 25 bp, Homo sapien
ggtcttgcgtattcaggtccgagtc

SEQ ID NO: 2169113 - DNA, 25 bp, Homo sapien
gattggccgaagttggccctggacc

SEQ ID NO: 2169114 - DNA, 25 bp, Homo sapien
gggagagtgggccacggcggctgtc

SEQ ID NO: 2169115 - DNA, 25 bp, Homo sapien
ccggggttgattggccgcctccgct

SEQ ID NO: 2169116 - DNA, 25 bp, Homo sapien
ccttagtgtccttgaaggagccctt

SEQ ID NO: 2169117 - DNA, 25 bp, Homo sapien
tagccgcacccgaagcagtctggag

SEQ ID NO: 2169118 - DNA, 25 bp, Homo sapien
aaagagccacgggaccgcggcagcg

SEQ ID NO: 2169119 - DNA, 25 bp, Homo sapien
tggggtagccgcacccgaagcagtc

SEQ ID NO: 2169120 - DNA, 25 bp, Homo sapien
ggagcggtggggtagccgcacccga

SEQ ID NO: 2169121 - DNA, 25 bp, Homo sapien
gctgaaggtagcgaccgtcgccggc

SEQ ID NO: 2169122 - DNA, 25 bp, Homo sapien
ctgaaggtagcgaccgtcgccggca

SEQ ID NO: 2169123 - DNA, 25 bp, Homo sapien
gcgccgcgaaggcggtgctcgggcc

SEQ ID NO: 2169124 - DNA, 25 bp, Homo sapien
ggcgctgaaggtagcgaccgtcgcc

SEQ ID NO: 2169125 - DNA, 25 bp, Homo sapien
cccgtcgaactctcgcgagagcggt

SEQ ID NO: 2169126 - DNA, 25 bp, Homo sapien
gtgtcgggacgtgcggaggctctca

SEQ ID NO: 2169127 - DNA, 25 bp, Homo sapien
ctcgcgagagcggtatctgcgtgtc

SEQ ID NO: 2169128 - DNA, 25 bp, Homo sapien
tctgcgtgtcgggacgtgcggaggc

SEQ ID NO: 2169129 - DNA, 25 bp, Homo sapien
cggaagggggcgtgaatcggtgcga

SEQ ID NO: 2169130 - DNA, 25 bp, Homo sapien
tgcgcagtaccgggtccgcgcctgt

SEQ ID NO: 2169131 - DNA, 25 bp, Homo sapien
gtgaatcggtgcgaccgcgcgcgtg

SEQ ID NO: 2169132 - DNA, 25 bp, Homo sapien
cgcgcctgtccccgaaacttcgcac

SEQ ID NO: 2169133 - DNA, 25 bp, Homo sapien
gctgggccggcattgtgacgtctct

SEQ ID NO: 2169134 - DNA, 25 bp, Homo sapien
ggccggcattgtgacgtctctggca

SEQ ID NO: 2169135 - DNA, 25 bp, Homo sapien
gcagcactgacgtggcccctccctg

SEQ ID NO: 2169136 - DNA, 25 bp, Homo sapien
gcattgtgacgtctctggcagcact

SEQ ID NO: 2169137 - DNA, 25 bp, Homo sapien
aaacgagctcccatgaacacgaggg

SEQ ID NO: 2169138 - DNA, 25 bp, Homo sapien
gcaaacgaggaagagcgacgcgtaa

SEQ ID NO: 2169139 - DNA, 25 bp, Homo sapien
gaggaaaagaaaacgagctcccatg

SEQ ID NO: 2169140 - DNA, 25 bp, Homo sapien
acgcgtaagtggcagcggcagccaa

SEQ ID NO: 2169141 - DNA, 25 bp, Homo sapien
ccagggcgccgagagatgccatcgc

SEQ ID NO: 2169142 - DNA, 25 bp, Homo sapien
cagggcgccgagagatgccatcgcc

SEQ ID NO: 2169143 - DNA, 25 bp, Homo sapien
cagcgccagggcgccgagagatgcc

SEQ ID NO: 2169144 - DNA, 25 bp, Homo sapien
cgccagggcgccgagagatgccatc

SEQ ID NO: 2169145 - DNA, 25 bp, Homo sapien
tttttggccgcgatcgctcagcgct

SEQ ID NO: 2169146 - DNA, 25 bp, Homo sapien
taaacgtgcgcgaggtgctttggtc

SEQ ID NO: 2169147 - DNA, 25 bp, Homo sapien
ggactcctcttcgtatgggcagaca

SEQ ID NO: 2169148 - DNA, 25 bp, Homo sapien
tgaggtcccttcctagcttatgtgg

SEQ ID NO: 2169149 - DNA, 25 bp, Homo sapien
gcttgtcctctggatacgtccctga

SEQ ID NO: 2169150 - DNA, 25 bp, Homo sapien
tcacgaatgcaaatcgacgggaccc

SEQ ID NO: 2169151 - DNA, 25 bp, Homo sapien
tccggaaaagccagtcttcggcctg

SEQ ID NO: 2169152 - DNA, 25 bp, Homo sapien
gctctgccgaaaactctggtaaggg

SEQ ID NO: 2169153 - DNA, 25 bp, Homo sapien
tcagccacccgctgtccaaatgtgg

SEQ ID NO: 2169154 - DNA, 25 bp, Homo sapien
tcagagggtgtgaaacaaaggctcc

SEQ ID NO: 2169155 - DNA, 25 bp, Homo sapien
cccaaagtgggaatgttctcagcca

SEQ ID NO: 2169156 - DNA, 25 bp, Homo sapien
tgccctggcagaacgatggcttcag

SEQ ID NO: 2169157 - DNA, 25 bp, Homo sapien
ccaaaggaaaggaaggctgccgcct

SEQ ID NO: 2169158 - DNA, 25 bp, Homo sapien
cttctccataaccagaggcccaaag

SEQ ID NO: 2169159 - DNA, 25 bp, Homo sapien
gccttctccataaccagaggcccaa

SEQ ID NO: 2169160 - DNA, 25 bp, Homo sapien
cttagccttctccataaccagaggc

SEQ ID NO: 2169161 - DNA, 25 bp, Homo sapien
agagactctggttccagaagcacaa

SEQ ID NO: 2169162 - DNA, 25 bp, Homo sapien
gagactctggttccagaagcacaac

SEQ ID NO: 2169163 - DNA, 25 bp, Homo sapien
ctgaagaagtaaacgggagagactc

SEQ ID NO: 2169164 - DNA, 25 bp, Homo sapien
agaagtaaacgggagagactctggt

SEQ ID NO: 2169165 - DNA, 25 bp, Homo sapien
caggcaatgcactggggctttcaag

SEQ ID NO: 2169166 - DNA, 25 bp, Homo sapien
atcctcagcagagacatcgggggtg

SEQ ID NO: 2169167 - DNA, 25 bp, Homo sapien
aacggcctggacgagttactgaagg

SEQ ID NO: 2169168 - DNA, 25 bp, Homo sapien
ggccacgccagcctcaattcagagc

SEQ ID NO: 2169169 - DNA, 25 bp, Homo sapien
tccaagtgctcggtcacaaatgcaa

SEQ ID NO: 2169170 - DNA, 25 bp, Homo sapien
caaatgcaatggcaacgtaggcggg

SEQ ID NO: 2169171 - DNA, 25 bp, Homo sapien
ccaggtgggatatgcgagacagatc

SEQ ID NO: 2169172 - DNA, 25 bp, Homo sapien
tgcctcatagcacggatcagctggg

SEQ ID NO: 2169173 - DNA, 25 bp, Homo sapien
gacggtctcagtggaaatgacagcg

SEQ ID NO: 2169174 - DNA, 25 bp, Homo sapien
gaccctgttcttgcatgtcagggag

SEQ ID NO: 2169175 - DNA, 25 bp, Homo sapien
aatgacagcgtcagaagtggtgtag

SEQ ID NO: 2169176 - DNA, 25 bp, Homo sapien
gatctccacaatgaagacggtctca

SEQ ID NO: 2169177 - DNA, 25 bp, Homo sapien
cataggaaccctgttgactgtgagc

SEQ ID NO: 2169178 - DNA, 25 bp, Homo sapien
caacactggctaggatctggcatca

SEQ ID NO: 2169179 - DNA, 25 bp, Homo sapien
catcaactagcagtgaggagcaccc

SEQ ID NO: 2169180 - DNA, 25 bp, Homo sapien
cagggttacctcgtgtaggcacagc

SEQ ID NO: 2169181 - DNA, 25 bp, Homo sapien
cctcgagtgacagggaattgttttc

SEQ ID NO: 2169182 - DNA, 25 bp, Homo sapien
ggaattgttttccaccgacgtcagc

SEQ ID NO: 2169183 - DNA, 25 bp, Homo sapien
cctggcctcgagtgacagggaattg

SEQ ID NO: 2169184 - DNA, 25 bp, Homo sapien
ttccaccgacgtcagcatagagagc

SEQ ID NO: 2169185 - DNA, 25 bp, Homo sapien
gccaccctgaccaccagtgccgaca

SEQ ID NO: 2169186 - DNA, 25 bp, Homo sapien
agtggacacggaggggccaccctga

SEQ ID NO: 2169187 - DNA, 25 bp, Homo sapien
ctgaccaccagtgccgacactgcag

SEQ ID NO: 2169188 - DNA, 25 bp, Homo sapien
acactgcagcactccggcagccaga

SEQ ID NO: 2169189 - DNA, 25 bp, Homo sapien
tcctcgtcgaagaatctaacctcat

SEQ ID NO: 2169190 - DNA, 25 bp, Homo sapien
taacctcataggtgcctgcgtgggc

SEQ ID NO: 2169191 - DNA, 25 bp, Homo sapien
tcgaagaatctaacctcataggtgc

SEQ ID NO: 2169192 - DNA, 25 bp, Homo sapien
cctgcgtgggcgctcttgtggtcca

SEQ ID NO: 2169193 - DNA, 25 bp, Homo sapien
aaggagagaaatgggcaagagacac

SEQ ID NO: 2169194 - DNA, 25 bp, Homo sapien
caagggaggtgcaagggaggtgctg

SEQ ID NO: 2169195 - DNA, 25 bp, Homo sapien
ctgcaagggaggtgcaagggaggtg

SEQ ID NO: 2169196 - DNA, 25 bp, Homo sapien
tggggtcaggggtgcctggcgtgtg

SEQ ID NO: 2169197 - DNA, 25 bp, Homo sapien
ctggggtcaggggtgcctggcgtgt

SEQ ID NO: 2169198 - DNA, 25 bp, Homo sapien
taaacagaggcgggatgatggaaat

SEQ ID NO: 2169199 - DNA, 25 bp, Homo sapien
cgatggtccacgctgactgtaaaca

SEQ ID NO: 2169200 - DNA, 25 bp, Homo sapien
ccgatggtccacgctgactgtaaac

SEQ ID NO: 2169201 - DNA, 25 bp, Homo sapien
gctgactgtaaacagaggcgggatg

SEQ ID NO: 2169202 - DNA, 25 bp, Homo sapien
gagaggataaccttcactcagccca

SEQ ID NO: 2169203 - DNA, 25 bp, Homo sapien
agacatgctggccaatcacggccca

SEQ ID NO: 2169204 - DNA, 25 bp, Homo sapien
ccaggggaaccaagacatgctggcc

SEQ ID NO: 2169205 - DNA, 25 bp, Homo sapien
ggccaatcacggcccagcagcagag

SEQ ID NO: 2169206 - DNA, 25 bp, Homo sapien
caggggaaccaagacatgctggcca

SEQ ID NO: 2169207 - DNA, 25 bp, Homo sapien
gagtacaggtgagcagaccagccag

SEQ ID NO: 2169208 - DNA, 25 bp, Homo sapien
caagccagctcaggggagtacaggt

SEQ ID NO: 2169209 - DNA, 25 bp, Homo sapien
caggtgagcagaccagccagccctg

SEQ ID NO: 2169210 - DNA, 25 bp, Homo sapien
aaaaaaaggagatcacaagccagct

SEQ ID NO: 2169211 - DNA, 25 bp, Homo sapien
tagtagatcacaaggccgatcgccg

SEQ ID NO: 2169212 - DNA, 25 bp, Homo sapien
cactgaaggccaagtagtagatcac

SEQ ID NO: 2169213 - DNA, 25 bp, Homo sapien
ggctcttcgcactgaaggccaagta

SEQ ID NO: 2169214 - DNA, 25 bp, Homo sapien
tcaggcctggatgtggctcttcgca

SEQ ID NO: 2169215 - DNA, 25 bp, Homo sapien
cagtcccaggtcctgtgatgtttat

SEQ ID NO: 2169216 - DNA, 25 bp, Homo sapien
gcagtcccaggtcctgtgatgttta

SEQ ID NO: 2169217 - DNA, 25 bp, Homo sapien
cctgtgatgtttattgaaggaagca

SEQ ID NO: 2169218 - DNA, 25 bp, Homo sapien
tgatgtttattgaaggaagcaaggg

SEQ ID NO: 2169219 - DNA, 25 bp, Homo sapien
ggctctagaaaccaagccccatgag

SEQ ID NO: 2169220 - DNA, 25 bp, Homo sapien
aacctcctcaggatttgcacgtgtg

SEQ ID NO: 2169221 - DNA, 25 bp, Homo sapien
tgcacgtgtgaactaggctgcctgt

SEQ ID NO: 2169222 - DNA, 25 bp, Homo sapien
acttggtggcgatccgcaacctgga

SEQ ID NO: 2169223 - DNA, 25 bp, Homo sapien
agttcatgatgcagagccggctgga

SEQ ID NO: 2169224 - DNA, 25 bp, Homo sapien
gagccaccgcaaaaccatgaagaag

SEQ ID NO: 2169225 - DNA, 25 bp, Homo sapien
gatggcaagcgggtctacaaccctc

SEQ ID NO: 2169226 - DNA, 25 bp, Homo sapien
tgcgagatcggctgctgaaagcccg

SEQ ID NO: 2169227 - DNA, 25 bp, Homo sapien
ctgtccctggtgtttggccactgtg

SEQ ID NO: 2169228 - DNA, 25 bp, Homo sapien
tccctggtgtttggccactgtggcc

SEQ ID NO: 2169229 - DNA, 25 bp, Homo sapien
tcctggtcctcctggtggtggttct

SEQ ID NO: 2169230 - DNA, 25 bp, Homo sapien
gtggtggttctgaagggcatctcct

SEQ ID NO: 2169231 - DNA, 25 bp, Homo sapien
taccaggaattgtttgttcgactgc

SEQ ID NO: 2169232 - DNA, 25 bp, Homo sapien
attatgtgcgcctccattaactgca

SEQ ID NO: 2169233 - DNA, 25 bp, Homo sapien
ttaactgcacatgcggaataccagg

SEQ ID NO: 2169234 - DNA, 25 bp, Homo sapien
tacgaatgagcctccattatgtgcg

SEQ ID NO: 2169235 - DNA, 25 bp, Homo sapien
agtcaacagggttgactgccacggg

SEQ ID NO: 2169236 - DNA, 25 bp, Homo sapien
cactggagaagatgagagtcgctgg

SEQ ID NO: 2169237 - DNA, 25 bp, Homo sapien
tgatgcccagcacgtggtcaggatg

SEQ ID NO: 2169238 - DNA, 25 bp, Homo sapien
cgctaaggtgaagcatgatgcccag

SEQ ID NO: 2169239 - DNA, 25 bp, Homo sapien
gccgtcgcggcgcgctctttgtctg

SEQ ID NO: 2169240 - DNA, 25 bp, Homo sapien
gcccgtggggccgacttcgcgtcat

SEQ ID NO: 2169241 - DNA, 25 bp, Homo sapien
agtcccttgcccagcgggagatcgc

SEQ ID NO: 2169242 - DNA, 25 bp, Homo sapien
ggacgagtgtggtccgccctgctcc

SEQ ID NO: 2169243 - DNA, 25 bp, Homo sapien
tactcgttgggagatcccccgatgc

SEQ ID NO: 2169244 - DNA, 25 bp, Homo sapien
ggagatcccccgatgcctgacttgg

SEQ ID NO: 2169245 - DNA, 25 bp, Homo sapien
tgcttccaaggtgtcctggatactc

SEQ ID NO: 2169246 - DNA, 25 bp, Homo sapien
tgtcctggatactccagacggcaga

SEQ ID NO: 2169247 - DNA, 25 bp, Homo sapien
gattcccgctccgaagctggacgtc

SEQ ID NO: 2169248 - DNA, 25 bp, Homo sapien
gcagcgaagattcccgctccgaagc

SEQ ID NO: 2169249 - DNA, 25 bp, Homo sapien
cgaagattcccgctccgaagctgga

SEQ ID NO: 2169250 - DNA, 25 bp, Homo sapien
tggcgcagcgaagattcccgctccg

SEQ ID NO: 2169251 - DNA, 25 bp, Homo sapien
ttactggcaaccgtgtaagagtatc

SEQ ID NO: 2169252 - DNA, 25 bp, Homo sapien
tttgtttcaggtatgtgcttcttgg

SEQ ID NO: 2169253 - DNA, 25 bp, Homo sapien
actggcaaccgtgtaagagtatcca

SEQ ID NO: 2169254 - DNA, 25 bp, Homo sapien
tcttactggcaaccgtgtaagagta

SEQ ID NO: 2169255 - DNA, 25 bp, Homo sapien
tattaaaggatggtatgcatacaaa

SEQ ID NO: 2169256 - DNA, 25 bp, Homo sapien
attaaaggatggtatgcatacaaaa

SEQ ID NO: 2169257 - DNA, 25 bp, Homo sapien
ttaaaggatggtatgcatacaaaag

SEQ ID NO: 2169258 - DNA, 25 bp, Homo sapien
ggagcatgtgtctatggttgtaaca

SEQ ID NO: 2169259 - DNA, 25 bp, Homo sapien
accagggacagcgaacctggagcag

SEQ ID NO: 2169260 - DNA, 25 bp, Homo sapien
gggcacaagcaggtgagtggatgtt

SEQ ID NO: 2169261 - DNA, 25 bp, Homo sapien
ggcctgtgttcaagtcttgtcccca

SEQ ID NO: 2169262 - DNA, 25 bp, Homo sapien
tccctggcatggcatgggtcagcca

SEQ ID NO: 2169263 - DNA, 25 bp, Homo sapien
gggtcagccagcagtgtgccattca

SEQ ID NO: 2169264 - DNA, 25 bp, Homo sapien
ggtcagccagcagtgtgccattcat

SEQ ID NO: 2169265 - DNA, 25 bp, Homo sapien
ctgttccctggcatggcatgggtca

SEQ ID NO: 2169266 - DNA, 25 bp, Homo sapien
atattggaaggcttccctgggattt

SEQ ID NO: 2169267 - DNA, 25 bp, Homo sapien
ctccccccgttcctacccgcagcag

SEQ ID NO: 2169268 - DNA, 25 bp, Homo sapien
gttcctacccgcagcaggaatcccc

SEQ ID NO: 2169269 - DNA, 25 bp, Homo sapien
tcccagccagcagcaatattggaag

SEQ ID NO: 2169270 - DNA, 25 bp, Homo sapien
gggctgcatcaccatagaaacccgc

SEQ ID NO: 2169271 - DNA, 25 bp, Homo sapien
ggctgcatcaccatagaaacccgcc

SEQ ID NO: 2169272 - DNA, 25 bp, Homo sapien
agcaggggcagctgcgagggccagg

SEQ ID NO: 2169273 - DNA, 25 bp, Homo sapien
gggcagctgcgagggccaggggttg

SEQ ID NO: 2169274 - DNA, 25 bp, Homo sapien
aggagggtggcagcgtcctgggctc

SEQ ID NO: 2169275 - DNA, 25 bp, Homo sapien
agggtggcagcgtcctgggctccat

SEQ ID NO: 2169276 - DNA, 25 bp, Homo sapien
caggatggggatcccagccaagacc

SEQ ID NO: 2169277 - DNA, 25 bp, Homo sapien
atggggatcccagccaagaccctgg

SEQ ID NO: 2169278 - DNA, 25 bp, Homo sapien
ggatggggatcccagccaagaccct

SEQ ID NO: 2169279 - DNA, 25 bp, Homo sapien
ctgccaggatggggatcccagccaa

SEQ ID NO: 2169280 - DNA, 25 bp, Homo sapien
gctgcactgagtgcttttctgggtg

SEQ ID NO: 2169281 - DNA, 25 bp, Homo sapien
ctcgaaatggctgcactgagtgctt

SEQ ID NO: 2169282 - DNA, 25 bp, Homo sapien
ccaggagggcacgttcatgggagaa

SEQ ID NO: 2169283 - DNA, 25 bp, Homo sapien
tccctttcaaagctcgaaatggctg

SEQ ID NO: 2169284 - DNA, 25 bp, Homo sapien
cttcgtggggtgtcacttgttttct

SEQ ID NO: 2169285 - DNA, 25 bp, Homo sapien
accactggaactacagctggcgcct

SEQ ID NO: 2169286 - DNA, 25 bp, Homo sapien
gcctgagggctcctacagtgagcag

SEQ ID NO: 2169287 - DNA, 25 bp, Homo sapien
gagcagggtgcccagattgtgcccc

SEQ ID NO: 2169288 - DNA, 25 bp, Homo sapien
ggatcccacgatgggcagtcgtgta

SEQ ID NO: 2169289 - DNA, 25 bp, Homo sapien
cgctcaggatcccacgatgggcagt

SEQ ID NO: 2169290 - DNA, 25 bp, Homo sapien
cccacgatgggcagtcgtgtactgg

SEQ ID NO: 2169291 - DNA, 25 bp, Homo sapien
ccaggcgctcaggatcccacgatgg

SEQ ID NO: 2169292 - DNA, 25 bp, Homo sapien
ccccggaggcgtagggcgcctctgg

SEQ ID NO: 2169293 - DNA, 25 bp, Homo sapien
cctctggagcccgtttccacaggct

SEQ ID NO: 2169294 - DNA, 25 bp, Homo sapien
cgcctctggagcccgtttccacagg

SEQ ID NO: 2169295 - DNA, 25 bp, Homo sapien
ggaggcgtagggcgcctctggagcc

SEQ ID NO: 2169296 - DNA, 25 bp, Homo sapien
ggtgcccgagcccgacaggtgaggg

SEQ ID NO: 2169297 - DNA, 25 bp, Homo sapien
cccgacaggtgaggggtaacctgcg

SEQ ID NO: 2169298 - DNA, 25 bp, Homo sapien
gcccgagcccgacaggtgaggggta

SEQ ID NO: 2169299 - DNA, 25 bp, Homo sapien
agcccgacaggtgaggggtaacctg

SEQ ID NO: 2169300 - DNA, 25 bp, Homo sapien
cggtaaccggcgttgctgccggagc

SEQ ID NO: 2169301 - DNA, 25 bp, Homo sapien
cggcccgcggtaaccggcgttgctg

SEQ ID NO: 2169302 - DNA, 25 bp, Homo sapien
catgccgggcgtcgggctccgggca

SEQ ID NO: 2169303 - DNA, 25 bp, Homo sapien
cccacccatgccgggcgtcgggctc

SEQ ID NO: 2169304 - DNA, 25 bp, Homo sapien
aggagctccttccttctcgatcctg

SEQ ID NO: 2169305 - DNA, 25 bp, Homo sapien
ccttccttctcgatcctgtgcaggg

SEQ ID NO: 2169306 - DNA, 25 bp, Homo sapien
gggaggagctccttccttctcgatc

SEQ ID NO: 2169307 - DNA, 25 bp, Homo sapien
tggggaggagctccttccttctcga

SEQ ID NO: 2169308 - DNA, 25 bp, Homo sapien
ggaacgtagggagtgagtggaggca

SEQ ID NO: 2169309 - DNA, 25 bp, Homo sapien
gaaaggctgggaacgtagggagtga

SEQ ID NO: 2169310 - DNA, 25 bp, Homo sapien
tagattaggtaaaggatttgcagaa

SEQ ID NO: 2169311 - DNA, 25 bp, Homo sapien
atcctgatgggcatcaaaccctaga

SEQ ID NO: 2169312 - DNA, 25 bp, Homo sapien
tcgtctgtggcttctgcgtcttctg

SEQ ID NO: 2169313 - DNA, 25 bp, Homo sapien
gcttctgcgtcttctgcatgctcat

SEQ ID NO: 2169314 - DNA, 25 bp, Homo sapien
actgtcgtctgtggcttctgcgtct

SEQ ID NO: 2169315 - DNA, 25 bp, Homo sapien
tgtggcttctgcgtcttctgcatgc

SEQ ID NO: 2169316 - DNA, 25 bp, Homo sapien
atgtgctgtttccaagcgctacacc

SEQ ID NO: 2169317 - DNA, 25 bp, Homo sapien
gaacagagaaagacacgtctggctg

SEQ ID NO: 2169318 - DNA, 25 bp, Homo sapien
aaggagaacagagaaagacacgtct

SEQ ID NO: 2169319 - DNA, 25 bp, Homo sapien
gcgctacacctgagatatgaagaca

SEQ ID NO: 2169320 - DNA, 25 bp, Homo sapien
gtgtgctcacatgaagtttggatga

SEQ ID NO: 2169321 - DNA, 25 bp, Homo sapien
ttagttttgccaattggcaaattgg

SEQ ID NO: 2169322 - DNA, 25 bp, Homo sapien
aaattggcaaatttgccaattgcca

SEQ ID NO: 2169323 - DNA, 25 bp, Homo sapien
ctggactttgggaagcaaatttagt

SEQ ID NO: 2169324 - DNA, 25 bp, Homo sapien
tggcatgaaggctccaccaaaatga

SEQ ID NO: 2169325 - DNA, 25 bp, Homo sapien
ctggcatgaaggctccaccaaaatg

SEQ ID NO: 2169326 - DNA, 25 bp, Homo sapien
aatgaggataatgagtatttgggcc

SEQ ID NO: 2169327 - DNA, 25 bp, Homo sapien
tatttgggcccataagtttctctct

SEQ ID NO: 2169328 - DNA, 25 bp, Homo sapien
tgggatgcaagaagccagatcagga

SEQ ID NO: 2169329 - DNA, 25 bp, Homo sapien
ccagtgccattctgctcagccagga

SEQ ID NO: 2169330 - DNA, 25 bp, Homo sapien
cagtgccggatctcagcagcaggtt

SEQ ID NO: 2169331 - DNA, 25 bp, Homo sapien
gggtgagcagacaaccatctcctta

SEQ ID NO: 2169332 - DNA, 25 bp, Homo sapien
atggtcagacagacggatgcacaga

SEQ ID NO: 2169333 - DNA, 25 bp, Homo sapien
ggatggtcagacagacggatgcaca

SEQ ID NO: 2169334 - DNA, 25 bp, Homo sapien
gatggtcagacagacggatgcacag

SEQ ID NO: 2169335 - DNA, 25 bp, Homo sapien
gggatggtcagacagacggatgcac

SEQ ID NO: 2169336 - DNA, 25 bp, Homo sapien
ggtgatgtgcggactcagcctctgc

SEQ ID NO: 2169337 - DNA, 25 bp, Homo sapien
agcccttatagagatgccagcatgg

SEQ ID NO: 2169338 - DNA, 25 bp, Homo sapien
cctctgcctgaggagcaagttcaat

SEQ ID NO: 2169339 - DNA, 25 bp, Homo sapien
cagcatggcagatgcctgttggcgt

SEQ ID NO: 2169340 - DNA, 25 bp, Homo sapien
cggaagtggtggacgccatgagcat

SEQ ID NO: 2169341 - DNA, 25 bp, Homo sapien
aagaggggcttccctgaatcgtcaa

SEQ ID NO: 2169342 - DNA, 25 bp, Homo sapien
gggcttccctgaatcgtcaaaccca

SEQ ID NO: 2169343 - DNA, 25 bp, Homo sapien
tccctgaatcgtcaaacccactctg

SEQ ID NO: 2169344 - DNA, 25 bp, Homo sapien
cctgaatcgtcaaacccactctgcc

SEQ ID NO: 2169345 - DNA, 25 bp, Homo sapien
caggaaagccatgttatgagggata

SEQ ID NO: 2169346 - DNA, 25 bp, Homo sapien
atgagggatacacaccccaggctca

SEQ ID NO: 2169347 - DNA, 25 bp, Homo sapien
gggactcaggcctgcctcccgtgcc

SEQ ID NO: 2169348 - DNA, 25 bp, Homo sapien
gttatgagggatacacaccccaggc

SEQ ID NO: 2169349 - DNA, 25 bp, Homo sapien
ctgggcagagagggatgcccaggca

SEQ ID NO: 2169350 - DNA, 25 bp, Homo sapien
tgggcagagagggatgcccaggcac

SEQ ID NO: 2169351 - DNA, 25 bp, Homo sapien
gggcagagagggatgcccaggcaca

SEQ ID NO: 2169352 - DNA, 25 bp, Homo sapien
ggcagagagggatgcccaggcacag

SEQ ID NO: 2169353 - DNA, 25 bp, Homo sapien
cagccacaaagactatggagagcag

SEQ ID NO: 2169354 - DNA, 25 bp, Homo sapien
caatgaagacgtgtatgggtgccca

SEQ ID NO: 2169355 - DNA, 25 bp, Homo sapien
cggtccagcgtcatggccaggatca

SEQ ID NO: 2169356 - DNA, 25 bp, Homo sapien
tccatggcggtacgccagcatggga

SEQ ID NO: 2169357 - DNA, 25 bp, Homo sapien
ccatcagggcaatccaggtgacata

SEQ ID NO: 2169358 - DNA, 25 bp, Homo sapien
catagacgaccacaatcactagcgt

SEQ ID NO: 2169359 - DNA, 25 bp, Homo sapien
atacccagggtaggtgccacgaaca

SEQ ID NO: 2169360 - DNA, 25 bp, Homo sapien
cagactggcatgaatctcccggaag

SEQ ID NO: 2169361 - DNA, 25 bp, Homo sapien
gatctaggttgggttcaggatggct

SEQ ID NO: 2169362 - DNA, 25 bp, Homo sapien
gaggtggaggatctaggttgggttc

SEQ ID NO: 2169363 - DNA, 25 bp, Homo sapien
tggaggatctaggttgggttcagga

SEQ ID NO: 2169364 - DNA, 25 bp, Homo sapien
gcacaggggcatgcggccaagccca

SEQ ID NO: 2169365 - DNA, 25 bp, Homo sapien
aacatgagtagcacaaagggcgccc

SEQ ID NO: 2169366 - DNA, 25 bp, Homo sapien
tgctgaaagatgcatagatccaggg

SEQ ID NO: 2169367 - DNA, 25 bp, Homo sapien
gcacagcagagcaagcttcgcagct

SEQ ID NO: 2169368 - DNA, 25 bp, Homo sapien
ttcgcagctctgaggacacgctgct

SEQ ID NO: 2169369 - DNA, 25 bp, Homo sapien
ttctcaaagcctctagaggcaagac

SEQ ID NO: 2169370 - DNA, 25 bp, Homo sapien
tttcaggcccctgggaccgctgtct

SEQ ID NO: 2169371 - DNA, 25 bp, Homo sapien
aggctctggccaattctccacgggt

SEQ ID NO: 2169372 - DNA, 25 bp, Homo sapien
gcctgaagctctcctcatacagctg

SEQ ID NO: 2169373 - DNA, 25 bp, Homo sapien
ggctgcctgcgccatggattccaga

SEQ ID NO: 2169374 - DNA, 25 bp, Homo sapien
gctgggtggcgattcataaagacct

SEQ ID NO: 2169375 - DNA, 25 bp, Homo sapien
ataaagacctcgtgttgattccccg

SEQ ID NO: 2169376 - DNA, 25 bp, Homo sapien
tgattccccgatgggagccagctct

SEQ ID NO: 2169377 - DNA, 25 bp, Homo sapien
ttgggaaagacctctgtccgccagg

SEQ ID NO: 2169378 - DNA, 25 bp, Homo sapien
ggactctgtgtttaaggagctcttg

SEQ ID NO: 2169379 - DNA, 25 bp, Homo sapien
gagacgccatgggaggacattgact

SEQ ID NO: 2169380 - DNA, 25 bp, Homo sapien
cgcctgggcaggaacaaaggcttct

SEQ ID NO: 2169381 - DNA, 25 bp, Homo sapien
cactgtcgggctgaacgtggaagcc

SEQ ID NO: 2169382 - DNA, 25 bp, Homo sapien
cgtgctctgtaccatgggccctgtg

SEQ ID NO: 2169383 - DNA, 25 bp, Homo sapien
gccctgtgaacactgtcgggctgaa

SEQ ID NO: 2169384 - DNA, 25 bp, Homo sapien
gaagcccgcgggacagttgctaagc

SEQ ID NO: 2169385 - DNA, 25 bp, Homo sapien
cctggctgccgaggatagtggtggg

SEQ ID NO: 2169386 - DNA, 25 bp, Homo sapien
ttcacctccgagctcaggagaggcc

SEQ ID NO: 2169387 - DNA, 25 bp, Homo sapien
catcgagaacaaggtggagagcaaa

SEQ ID NO: 2169388 - DNA, 25 bp, Homo sapien
cagcaaggacctcagcgaggtcagc

SEQ ID NO: 2169389 - DNA, 25 bp, Homo sapien
gctccgggcgttgtgcaaagtcaga

SEQ ID NO: 2169390 - DNA, 25 bp, Homo sapien
gccttagactgagcgcgttccactg

SEQ ID NO: 2169391 - DNA, 25 bp, Homo sapien
gaaagcaggccgaggaaaatcccat

SEQ ID NO: 2169392 - DNA, 25 bp, Homo sapien
caaagtcagatcgtcacagtgcctg

SEQ ID NO: 2169393 - DNA, 25 bp, Homo sapien
tcacgtttagtcaccttggagccca

SEQ ID NO: 2169394 - DNA, 25 bp, Homo sapien
caaacttctgtcgaggagcaaggct

SEQ ID NO: 2169395 - DNA, 25 bp, Homo sapien
tcagaaggatttgaaccgagcagcc

SEQ ID NO: 2169396 - DNA, 25 bp, Homo sapien
tatttcgctgtggaaaatgtcacgt

SEQ ID NO: 2169397 - DNA, 25 bp, Homo sapien
taggttgcaattggtgaagttcaca

SEQ ID NO: 2169398 - DNA, 25 bp, Homo sapien
aggagaggtgtgaaatctgccacga

SEQ ID NO: 2169399 - DNA, 25 bp, Homo sapien
ttcctcatgggcgatcactccgcat

SEQ ID NO: 2169400 - DNA, 25 bp, Homo sapien
tccgcatctatagggtcgagcctag

SEQ ID NO: 2169401 - DNA, 25 bp, Homo sapien
tagcgtggtccgagtctgttcgaac

SEQ ID NO: 2169402 - DNA, 25 bp, Homo sapien
catggcacctgtgtgcgagagcctc

SEQ ID NO: 2169403 - DNA, 25 bp, Homo sapien
tgagcagcccaagcattaaggacct

SEQ ID NO: 2169404 - DNA, 25 bp, Homo sapien
actacagccatgtcgagcgtcggcg

SEQ ID NO: 2169405 - DNA, 25 bp, Homo sapien
gggcttgtcactgtggtcaaacaag

SEQ ID NO: 2169406 - DNA, 25 bp, Homo sapien
ctccgggctttagagttagccgttg

SEQ ID NO: 2169407 - DNA, 25 bp, Homo sapien
tcctcgccagtcatggtgagcgtct

SEQ ID NO: 2169408 - DNA, 25 bp, Homo sapien
aacaagcatagtcattccctccggg

SEQ ID NO: 2169409 - DNA, 25 bp, Homo sapien
cttgctccgcggccgttctctcctg

SEQ ID NO: 2169410 - DNA, 25 bp, Homo sapien
ccttgctccgcggccgttctctcct

SEQ ID NO: 2169411 - DNA, 25 bp, Homo sapien
cccttgctccgcggccgttctctcc

SEQ ID NO: 2169412 - DNA, 25 bp, Homo sapien
aaggggaggaacctctctcttcagg

SEQ ID NO: 2169413 - DNA, 25 bp, Homo sapien
ggggaggaacctctctcttcaggta

SEQ ID NO: 2169414 - DNA, 25 bp, Homo sapien
gaaggggaggaacctctctcttcag

SEQ ID NO: 2169415 - DNA, 25 bp, Homo sapien
gggaggaacctctctcttcaggtat

SEQ ID NO: 2169416 - DNA, 25 bp, Homo sapien
taatctggtgccttctggtttacaa

SEQ ID NO: 2169417 - DNA, 25 bp, Homo sapien
tcagcggcctgcgtagtcgtgtgtc

SEQ ID NO: 2169418 - DNA, 25 bp, Homo sapien
cttaggacgcagagtttaacatccg

SEQ ID NO: 2169419 - DNA, 25 bp, Homo sapien
ctgaattccagttacccctcagcgg

SEQ ID NO: 2169420 - DNA, 25 bp, Homo sapien
ccgccccggaagccggccagtgctg

SEQ ID NO: 2169421 - DNA, 25 bp, Homo sapien
tgctggggacttgggggtgtgggaa

SEQ ID NO: 2169422 - DNA, 25 bp, Homo sapien
ggccagtgctggggacttgggggtg

SEQ ID NO: 2169423 - DNA, 25 bp, Homo sapien
cagtgctggggacttgggggtgtgg

SEQ ID NO: 2169424 - DNA, 25 bp, Homo sapien
ggaagtgaggatcggacaccgcctt

SEQ ID NO: 2169425 - DNA, 25 bp, Homo sapien
tctgccgtacagttgccgcttcggg

SEQ ID NO: 2169426 - DNA, 25 bp, Homo sapien
tctttgaagcggctcctgtgggaag

SEQ ID NO: 2169427 - DNA, 25 bp, Homo sapien
accgccttgagtttggtgtgcagtg

SEQ ID NO: 2169428 - DNA, 25 bp, Homo sapien
gcctcctcgcccgaccgccggcgcc

SEQ ID NO: 2169429 - DNA, 25 bp, Homo sapien
ccgcctcctcgcccgaccgccggcg

SEQ ID NO: 2169430 - DNA, 25 bp, Homo sapien
cgcctcctcgcccgaccgccggcgc

SEQ ID NO: 2169431 - DNA, 25 bp, Homo sapien
ctgagcgcgactcgagctttagccc

SEQ ID NO: 2169432 - DNA, 25 bp, Homo sapien
gggcgaagcggtgcgagggcgagtg

SEQ ID NO: 2169433 - DNA, 25 bp, Homo sapien
cagcgcaggggtcctttaagaggct

SEQ ID NO: 2169434 - DNA, 25 bp, Homo sapien
actcgagctttagcccagcgcgcgg

SEQ ID NO: 2169435 - DNA, 25 bp, Homo sapien
taaaggcagttcttcgggcgtgcgt

SEQ ID NO: 2169436 - DNA, 25 bp, Homo sapien
gtctcatccgggcatttccgagatg

SEQ ID NO: 2169437 - DNA, 25 bp, Homo sapien
atcaacccgagagaccgttcccaag

SEQ ID NO: 2169438 - DNA, 25 bp, Homo sapien
gggcgtgcgtcccttatcaacccga

SEQ ID NO: 2169439 - DNA, 25 bp, Homo sapien
accggcccgactgcgggcctctcgg

SEQ ID NO: 2169440 - DNA, 25 bp, Homo sapien
cgactgcgggcctctcggcagtggg

SEQ ID NO: 2169441 - DNA, 25 bp, Homo sapien
tgacgcgagatgacgcggacgcctc

SEQ ID NO: 2169442 - DNA, 25 bp, Homo sapien
gcggggcgaggtgacgcgagatgac

SEQ ID NO: 2169443 - DNA, 25 bp, Homo sapien
gctgggggaaattcaaatctccgaa

SEQ ID NO: 2169444 - DNA, 25 bp, Homo sapien
tccgaaaagggaggatccgagcagc

SEQ ID NO: 2169445 - DNA, 25 bp, Homo sapien
ctcgctgggggaaattcaaatctcc

SEQ ID NO: 2169446 - DNA, 25 bp, Homo sapien
aggatccgagcagcgccggtgcgcc

SEQ ID NO: 2169447 - DNA, 25 bp, Homo sapien
gcgcgaaaaggccagctatcaccat

SEQ ID NO: 2169448 - DNA, 25 bp, Homo sapien
agtattggcgcgaaaaggccagcta

SEQ ID NO: 2169449 - DNA, 25 bp, Homo sapien
gctatcaccatacgggtatttcgcc

SEQ ID NO: 2169450 - DNA, 25 bp, Homo sapien
ggccagctatcaccatacgggtatt

SEQ ID NO: 2169451 - DNA, 25 bp, Homo sapien
tttccggctgcaggggttcagtcta

SEQ ID NO: 2169452 - DNA, 25 bp, Homo sapien
tcagtctatctgaccgggggtacgg

SEQ ID NO: 2169453 - DNA, 25 bp, Homo sapien
tcaaacactgtcaacttgatcgagg

SEQ ID NO: 2169454 - DNA, 25 bp, Homo sapien
aacttgatcgaggaagaactccagg

SEQ ID NO: 2169455 - DNA, 25 bp, Homo sapien
ctttgacctaatcgcttagaagttc

SEQ ID NO: 2169456 - DNA, 25 bp, Homo sapien
tgacctaatcgcttagaagttccag

SEQ ID NO: 2169457 - DNA, 25 bp, Homo sapien
aatcgcttagaagttccaggcctgg

SEQ ID NO: 2169458 - DNA, 25 bp, Homo sapien
cctaatcgcttagaagttccaggcc

SEQ ID NO: 2169459 - DNA, 25 bp, Homo sapien
ggcctcaggagctaccaaccatctt

SEQ ID NO: 2169460 - DNA, 25 bp, Homo sapien
ccagcaccgcctccatgttcctgac

SEQ ID NO: 2169461 - DNA, 25 bp, Homo sapien
tgtggttacaaaaggagtgtggtta

SEQ ID NO: 2169462 - DNA, 25 bp, Homo sapien
ctttgtggttacaaaaggagtgtgg

SEQ ID NO: 2169463 - DNA, 25 bp, Homo sapien
gagagcagccttcaatacgcagcct

SEQ ID NO: 2169464 - DNA, 25 bp, Homo sapien
gccagcggaggaacgttctgccttt

SEQ ID NO: 2169465 - DNA, 25 bp, Homo sapien
gaccttgccccgaaggaaggcagga

SEQ ID NO: 2169466 - DNA, 25 bp, Homo sapien
gaaagaagccccgtgatttcgtgat

SEQ ID NO: 2169467 - DNA, 25 bp, Homo sapien
ccacgtgcacgaaggcctgccccca

SEQ ID NO: 2169468 - DNA, 25 bp, Homo sapien
acgtgcacgaaggcctgcccccact

SEQ ID NO: 2169469 - DNA, 25 bp, Homo sapien
aggcctgcccccactctggattcat

SEQ ID NO: 2169470 - DNA, 25 bp, Homo sapien
gtgcacgaaggcctgcccccactct

SEQ ID NO: 2169471 - DNA, 25 bp, Homo sapien
agccgcggtctaggtagaggcacca

SEQ ID NO: 2169472 - DNA, 25 bp, Homo sapien
gaaacactgtcgaaaatgcccgtga

SEQ ID NO: 2169473 - DNA, 25 bp, Homo sapien
cacgagtgagttgaacggcatggcc

SEQ ID NO: 2169474 - DNA, 25 bp, Homo sapien
tagcccacttgcacggaaacactgt

SEQ ID NO: 2169475 - DNA, 25 bp, Homo sapien
tgaaatgcgtcagaaacaaaaacgc

SEQ ID NO: 2169476 - DNA, 25 bp, Homo sapien
agtggaactggagcacgtcacagac

SEQ ID NO: 2169477 - DNA, 25 bp, Homo sapien
caaaaacgcaaagtggaactggagc

SEQ ID NO: 2169478 - DNA, 25 bp, Homo sapien
tcccgccagagggatggaatcttgg

SEQ ID NO: 2169479 - DNA, 25 bp, Homo sapien
ccctgtgcggagatctgtgctttat

SEQ ID NO: 2169480 - DNA, 25 bp, Homo sapien
cagtcttgtgtgatcagtgcatatc

SEQ ID NO: 2169481 - DNA, 25 bp, Homo sapien
gaaagtaagttgtcgagatcacagc

SEQ ID NO: 2169482 - DNA, 25 bp, Homo sapien
gctgccatctcagagtccatttcaa

SEQ ID NO: 2169483 - DNA, 25 bp, Homo sapien
tcttaaaggccaggaataattcact

SEQ ID NO: 2169484 - DNA, 25 bp, Homo sapien
ctgtctcttaaaggccaggaataat

SEQ ID NO: 2169485 - DNA, 25 bp, Homo sapien
taattcactggaggattcactaggc

SEQ ID NO: 2169486 - DNA, 25 bp, Homo sapien
gattcactaggcctgggctgtctga

SEQ ID NO: 2169487 - DNA, 25 bp, Homo sapien
cgggcagacttctcgctaccgcctt

SEQ ID NO: 2169488 - DNA, 25 bp, Homo sapien
gctaccgccttcacggcggagcagc

SEQ ID NO: 2169489 - DNA, 25 bp, Homo sapien
atgtaacagaaatggcctcacccat

SEQ ID NO: 2169490 - DNA, 25 bp, Homo sapien
gccacccgatcgcaaatgtaacaga

SEQ ID NO: 2169491 - DNA, 25 bp, Homo sapien
ttactaaagatctccccaagagcca

SEQ ID NO: 2169492 - DNA, 25 bp, Homo sapien
tatgatccacactcggttccactcg

SEQ ID NO: 2169493 - DNA, 25 bp, Homo sapien
ggttccactcgtgatgtttggttgg

SEQ ID NO: 2169494 - DNA, 25 bp, Homo sapien
ttttactaaagatctccccaagagc

SEQ ID NO: 2169495 - DNA, 25 bp, Homo sapien
cagaaaagttgggagcatggcagac

SEQ ID NO: 2169496 - DNA, 25 bp, Homo sapien
tagttacccagacagtgagaagccc

SEQ ID NO: 2169497 - DNA, 25 bp, Homo sapien
gagatcctccagaaagtcgagcagc

SEQ ID NO: 2169498 - DNA, 25 bp, Homo sapien
ttgcgtgtccaaaagtagcccaggg

SEQ ID NO: 2169499 - DNA, 25 bp, Homo sapien
caagtaatcaaggacgatgcccagg

SEQ ID NO: 2169500 - DNA, 25 bp, Homo sapien
tggccttcaaaggtagatcccaggg

SEQ ID NO: 2169501 - DNA, 25 bp, Homo sapien
tgctagaaggtaccctcggaaggcc

SEQ ID NO: 2169502 - DNA, 25 bp, Homo sapien
tgtgtgtaagtaggaccaagtgccc

SEQ ID NO: 2169503 - DNA, 25 bp, Homo sapien
ttataagacagaagtccccctccag

SEQ ID NO: 2169504 - DNA, 25 bp, Homo sapien
tgacgcgtttgcaccttttgttggg

SEQ ID NO: 2169505 - DNA, 25 bp, Homo sapien
agcattctcgataaatctctctgtg

SEQ ID NO: 2169506 - DNA, 25 bp, Homo sapien
atgcctttctaagtgacgcgtttgc

SEQ ID NO: 2169507 - DNA, 25 bp, Homo sapien
cagaggccgagagctatggacagca

SEQ ID NO: 2169508 - DNA, 25 bp, Homo sapien
ggccgggacacacttagctggagat

SEQ ID NO: 2169509 - DNA, 25 bp, Homo sapien
gacagcattgccagtaacacaggcc

SEQ ID NO: 2169510 - DNA, 25 bp, Homo sapien
taaaagccctgtatcgtattcacct

SEQ ID NO: 2169511 - DNA, 25 bp, Homo sapien
cagagacaaatatttctagacactt

SEQ ID NO: 2169512 - DNA, 25 bp, Homo sapien
catgaggttctctctactggtcctc

SEQ ID NO: 2169513 - DNA, 25 bp, Homo sapien
cttaactgtggtgttgaggcttata

SEQ ID NO: 2169514 - DNA, 25 bp, Homo sapien
tctgtgtttgaactgaagtctgtat

SEQ ID NO: 2169515 - DNA, 25 bp, Homo sapien
tgactgacatgaaatcgacgcccga

SEQ ID NO: 2169516 - DNA, 25 bp, Homo sapien
tccacgtgcgtgttttctgactgac

SEQ ID NO: 2169517 - DNA, 25 bp, Homo sapien
ccaaagcagagagcattataatcac

SEQ ID NO: 2169518 - DNA, 25 bp, Homo sapien
taggccctttcagtggccgggctac

SEQ ID NO: 2169519 - DNA, 25 bp, Homo sapien
gtgagcccatgtggagtcagcctcg

SEQ ID NO: 2169520 - DNA, 25 bp, Homo sapien
cagtagggtccgagtgtgtttcatc

SEQ ID NO: 2169521 - DNA, 25 bp, Homo sapien
tgaagtccggaacgtagtcggcaca

SEQ ID NO: 2169522 - DNA, 25 bp, Homo sapien
tgtctcggaacctgtgagctgcacc

SEQ ID NO: 2169523 - DNA, 25 bp, Homo sapien
gcaccgactagacacacaaagcagt

SEQ ID NO: 2169524 - DNA, 25 bp, Homo sapien
aaattatacctgttgcttaattaca

SEQ ID NO: 2169525 - DNA, 25 bp, Homo sapien
taaactcattttgcttgtggctcca

SEQ ID NO: 2169526 - DNA, 25 bp, Homo sapien
tatttctgataaccatagcatagga

SEQ ID NO: 2169527 - DNA, 25 bp, Homo sapien
tacgagcaagcttttacaacagtgc

SEQ ID NO: 2169528 - DNA, 25 bp, Homo sapien
taaatcgttaggatactgcctcccc

SEQ ID NO: 2169529 - DNA, 25 bp, Homo sapien
aaaatacttagcacttggcctgaga

SEQ ID NO: 2169530 - DNA, 25 bp, Homo sapien
ctggaggtagccgacctgaggacat

SEQ ID NO: 2169531 - DNA, 25 bp, Homo sapien
gccccgttctgtttgtagagtctca

SEQ ID NO: 2169532 - DNA, 25 bp, Homo sapien
caaaggacacttatccacgagagcg

SEQ ID NO: 2169533 - DNA, 25 bp, Homo sapien
agcatccgaccaggttgtcactgag

SEQ ID NO: 2169534 - DNA, 25 bp, Homo sapien
tgctgtaaaagcaagtcctgcaacc

SEQ ID NO: 2169535 - DNA, 25 bp, Homo sapien
acatttagtccctcaagccaccaga

SEQ ID NO: 2169536 - DNA, 25 bp, Homo sapien
gaagctccgaaactctaagtgtttg

SEQ ID NO: 2169537 - DNA, 25 bp, Homo sapien
gcttgttttaaagtgggctcagcac

SEQ ID NO: 2169538 - DNA, 25 bp, Homo sapien
tcagcacatagggttcccacgaagc

SEQ ID NO: 2169539 - DNA, 25 bp, Homo sapien
ggactactgatatgtcccaaactca

SEQ ID NO: 2169540 - DNA, 25 bp, Homo sapien
gccaccagtgtccaacggactactg

SEQ ID NO: 2169541 - DNA, 25 bp, Homo sapien
cagtgtccaacggactactgatatg

SEQ ID NO: 2169542 - DNA, 25 bp, Homo sapien
caacggactactgatatgtcccaaa

SEQ ID NO: 2169543 - DNA, 25 bp, Homo sapien
atcctctggcgtaaccatcctccat

SEQ ID NO: 2169544 - DNA, 25 bp, Homo sapien
accaccacatggctagaagtcgatc

SEQ ID NO: 2169545 - DNA, 25 bp, Homo sapien
catggctagaagtcgatccatcctc

SEQ ID NO: 2169546 - DNA, 25 bp, Homo sapien
ctagaagtcgatccatcctctggcg

SEQ ID NO: 2169547 - DNA, 25 bp, Homo sapien
tactcagtttggcagttgtagttgt

SEQ ID NO: 2169548 - DNA, 25 bp, Homo sapien
cttgccagcttgtgggtggcttctc

SEQ ID NO: 2169549 - DNA, 25 bp, Homo sapien
ttcctttcttgccagcttgtgggtg

SEQ ID NO: 2169550 - DNA, 25 bp, Homo sapien
cagtttggcagttgtagttgtttca

SEQ ID NO: 2169551 - DNA, 25 bp, Homo sapien
cggaatcctcatacctccggcaggt

SEQ ID NO: 2169552 - DNA, 25 bp, Homo sapien
gtggaatcgtgtgagagctgcttct

SEQ ID NO: 2169553 - DNA, 25 bp, Homo sapien
tcttgggctctgctacggaatcctc

SEQ ID NO: 2169554 - DNA, 25 bp, Homo sapien
catgtgtttaactgtggtggaatcg

SEQ ID NO: 2169555 - DNA, 25 bp, Homo sapien
ttctatttgccaccggcaaaccgta

SEQ ID NO: 2169556 - DNA, 25 bp, Homo sapien
ctagggcactggtggttcaggtcct

SEQ ID NO: 2169557 - DNA, 25 bp, Homo sapien
aggtccttctatttgccaccggcaa

SEQ ID NO: 2169558 - DNA, 25 bp, Homo sapien
ggtggttcaggtccttctatttgcc

SEQ ID NO: 2169559 - DNA, 25 bp, Homo sapien
taaaagctcattaggttcattggtc

SEQ ID NO: 2169560 - DNA, 25 bp, Homo sapien
ccctgcacctgcttgggctactgta

SEQ ID NO: 2169561 - DNA, 25 bp, Homo sapien
ggcattattgccctgtattactctg

SEQ ID NO: 2169562 - DNA, 25 bp, Homo sapien
tcattggtcttacaagaagcagaca

SEQ ID NO: 2169563 - DNA, 25 bp, Homo sapien
gattcactgttgcataagtgagaca

SEQ ID NO: 2169564 - DNA, 25 bp, Homo sapien
tatacaggcacgtttggattcactg

SEQ ID NO: 2169565 - DNA, 25 bp, Homo sapien
gccaggtgaggcctttccttgtata

SEQ ID NO: 2169566 - DNA, 25 bp, Homo sapien
tgcacctgctcggtagcttgctaat

SEQ ID NO: 2169567 - DNA, 25 bp, Homo sapien
aattctcagctcttgcacctagcag

SEQ ID NO: 2169568 - DNA, 25 bp, Homo sapien
cataatttgggaaagcgtcctggtc

SEQ ID NO: 2169569 - DNA, 25 bp, Homo sapien
cttaggctttttgagccaggtagcc

SEQ ID NO: 2169570 - DNA, 25 bp, Homo sapien
ggtagccttgggattaattctcagc

SEQ ID NO: 2169571 - DNA, 25 bp, Homo sapien
tccatttccatcttcacacccatca

SEQ ID NO: 2169572 - DNA, 25 bp, Homo sapien
ttccatcttcacacccatcatcttg

SEQ ID NO: 2169573 - DNA, 25 bp, Homo sapien
atttccatttccatcttcacaccca

SEQ ID NO: 2169574 - DNA, 25 bp, Homo sapien
ctaggcccattcaatatttccattt

SEQ ID NO: 2169575 - DNA, 25 bp, Homo sapien
taaagtacccatgagaatggcctct

SEQ ID NO: 2169576 - DNA, 25 bp, Homo sapien
tactttctcggatggaaccttagga

SEQ ID NO: 2169577 - DNA, 25 bp, Homo sapien
tgtgttttgccaacagatgtactgc

SEQ ID NO: 2169578 - DNA, 25 bp, Homo sapien
tcccagtgcagctttgcgaaacaag

SEQ ID NO: 2169579 - DNA, 25 bp, Homo sapien
tctcctttgtagcttcagtgccagt

SEQ ID NO: 2169580 - DNA, 25 bp, Homo sapien
caatactcctttgacctcacaggca

SEQ ID NO: 2169581 - DNA, 25 bp, Homo sapien
aaacaacttttacagtggatagtgc

SEQ ID NO: 2169582 - DNA, 25 bp, Homo sapien
agtcagacgtcgttactccctggca

SEQ ID NO: 2169583 - DNA, 25 bp, Homo sapien
agccaccgcacccagcctcctgact

SEQ ID NO: 2169584 - DNA, 25 bp, Homo sapien
ctcccaaagtggtgtgagccaccgc

SEQ ID NO: 2169585 - DNA, 25 bp, Homo sapien
agcctcccaaagtggtgtgagccac

SEQ ID NO: 2169586 - DNA, 25 bp, Homo sapien
gagccaccgcacccagcctcctgac

SEQ ID NO: 2169587 - DNA, 25 bp, Homo sapien
aatagaaaaaagttatatggggctg

SEQ ID NO: 2169588 - DNA, 25 bp, Homo sapien
aaaaagttatatggggctgggcatg

SEQ ID NO: 2169589 - DNA, 25 bp, Homo sapien
gaaaaaagttatatggggctgggca

SEQ ID NO: 2169590 - DNA, 25 bp, Homo sapien
gtggctcatgcctgtaatcccagca

SEQ ID NO: 2169591 - DNA, 25 bp, Homo sapien
gactgagaccctaagtcgttctttg

SEQ ID NO: 2169592 - DNA, 25 bp, Homo sapien
cacttatgcggccattgtgattccg

SEQ ID NO: 2169593 - DNA, 25 bp, Homo sapien
cctgcttagggattatgtgagggca

SEQ ID NO: 2169594 - DNA, 25 bp, Homo sapien
gctgttgtagacatccataagaaat

SEQ ID NO: 2169595 - DNA, 25 bp, Homo sapien
ttctgtagaccagctccaacaggat

SEQ ID NO: 2169596 - DNA, 25 bp, Homo sapien
gaccagctccaacaggattccatgg

SEQ ID NO: 2169597 - DNA, 25 bp, Homo sapien
agaccagctccaacaggattccatg

SEQ ID NO: 2169598 - DNA, 25 bp, Homo sapien
tagaccagctccaacaggattccat

SEQ ID NO: 2169599 - DNA, 25 bp, Homo sapien
atgttgacctagatacatctccaag

SEQ ID NO: 2169600 - DNA, 25 bp, Homo sapien
gccatgtttttatgagttgtttggg

SEQ ID NO: 2169601 - DNA, 25 bp, Homo sapien
tgggttaaacctgggtcatgttgac

SEQ ID NO: 2169602 - DNA, 25 bp, Homo sapien
cctgggtcatgttgacctagataca

SEQ ID NO: 2169603 - DNA, 25 bp, Homo sapien
gcagccaggtaccaaacacggtggt

SEQ ID NO: 2169604 - DNA, 25 bp, Homo sapien
tccagtaccaaagagagttgccagg

SEQ ID NO: 2169605 - DNA, 25 bp, Homo sapien
cacgggtcagttgcttaagagagga

SEQ ID NO: 2169606 - DNA, 25 bp, Homo sapien
ggtccgaagacccttgtcagtgttg

SEQ ID NO: 2169607 - DNA, 25 bp, Homo sapien
tacccaagccaggcaaaggggcaaa

SEQ ID NO: 2169608 - DNA, 25 bp, Homo sapien
ttacccaagccaggcaaaggggcaa

SEQ ID NO: 2169609 - DNA, 25 bp, Homo sapien
ccaggttgacattgattctgagcct

SEQ ID NO: 2169610 - DNA, 25 bp, Homo sapien
tttgcccaggttgacattgattctg

SEQ ID NO: 2169611 - DNA, 25 bp, Homo sapien
tgattctgagcctgtcatgtctttc

SEQ ID NO: 2169612 - DNA, 25 bp, Homo sapien
gattctgagcctgtcatgtctttct

SEQ ID NO: 2169613 - DNA, 25 bp, Homo sapien
tggagatcccgtgctccgcagctgc

SEQ ID NO: 2169614 - DNA, 25 bp, Homo sapien
gcagatggagatcccgtgctccgca

SEQ ID NO: 2169615 - DNA, 25 bp, Homo sapien
gatggagatcccgtgctccgcagct

SEQ ID NO: 2169616 - DNA, 25 bp, Homo sapien
gagatcccgtgctccgcagctgcag

SEQ ID NO: 2169617 - DNA, 25 bp, Homo sapien
gagggtcacggcgctttatactggc

SEQ ID NO: 2169618 - DNA, 25 bp, Homo sapien
tgagggtcacggcgctttatactgg

SEQ ID NO: 2169619 - DNA, 25 bp, Homo sapien
cctgagggtcacggcgctttatact

SEQ ID NO: 2169620 - DNA, 25 bp, Homo sapien
cacctgagggtcacggcgctttata

SEQ ID NO: 2169621 - DNA, 25 bp, Homo sapien
tatggaaagccctgtccccgacggc

SEQ ID NO: 2169622 - DNA, 25 bp, Homo sapien
ctatggaaagccctgtccccgacgg

SEQ ID NO: 2169623 - DNA, 25 bp, Homo sapien
ggctatggaaagccctgtccccgac

SEQ ID NO: 2169624 - DNA, 25 bp, Homo sapien
tggaaagccctgtccccgacggcag

SEQ ID NO: 2169625 - DNA, 25 bp, Homo sapien
ctgcgagcctttggaggctccactg

SEQ ID NO: 2169626 - DNA, 25 bp, Homo sapien
cctttggaggctccactgctgggcc

SEQ ID NO: 2169627 - DNA, 25 bp, Homo sapien
agcctttggaggctccactgctggg

SEQ ID NO: 2169628 - DNA, 25 bp, Homo sapien
tttggaggctccactgctgggccat

SEQ ID NO: 2169629 - DNA, 25 bp, Homo sapien
tcatagctgtcctgcggatggcggc

SEQ ID NO: 2169630 - DNA, 25 bp, Homo sapien
ctcatagctgtcctgcggatggcgg

SEQ ID NO: 2169631 - DNA, 25 bp, Homo sapien
cctcatagctgtcctgcggatggcg

SEQ ID NO: 2169632 - DNA, 25 bp, Homo sapien
gcgatgacggtctctgctaggtcag

SEQ ID NO: 2169633 - DNA, 25 bp, Homo sapien
agcccatttgtgaagacggatgcag

SEQ ID NO: 2169634 - DNA, 25 bp, Homo sapien
agtgctggcgatgacggtctctgct

SEQ ID NO: 2169635 - DNA, 25 bp, Homo sapien
ttgtgaagacggatgcagtgaccac

SEQ ID NO: 2169636 - DNA, 25 bp, Homo sapien
acattgccaaagggcttgcacacca

SEQ ID NO: 2169637 - DNA, 25 bp, Homo sapien
tctcacattgccaaagggcttgcac

SEQ ID NO: 2169638 - DNA, 25 bp, Homo sapien
ctcacattgccaaagggcttgcaca

SEQ ID NO: 2169639 - DNA, 25 bp, Homo sapien
tcacattgccaaagggcttgcacac

SEQ ID NO: 2169640 - DNA, 25 bp, Homo sapien
gagcatgatgatagcgagtgggatg

SEQ ID NO: 2169641 - DNA, 25 bp, Homo sapien
tagcagagcatgatgatagcgagtg

SEQ ID NO: 2169642 - DNA, 25 bp, Homo sapien
cagagcatgatgatagcgagtggga

SEQ ID NO: 2169643 - DNA, 25 bp, Homo sapien
aggtagcagagcatgatgatagcga

SEQ ID NO: 2169644 - DNA, 25 bp, Homo sapien
ggtccccagcagacgcagtacgcaa

SEQ ID NO: 2169645 - DNA, 25 bp, Homo sapien
cagcagcaaagcatgcgaagaaggt

SEQ ID NO: 2169646 - DNA, 25 bp, Homo sapien
gacgcagtacgcaaagatcatcacc

SEQ ID NO: 2169647 - DNA, 25 bp, Homo sapien
tggcacttttggcaaagtaggccgg

SEQ ID NO: 2169648 - DNA, 25 bp, Homo sapien
ctagggcacacggtattttgagtgg

SEQ ID NO: 2169649 - DNA, 25 bp, Homo sapien
gctgcgctttaatgaagcctgtaac

SEQ ID NO: 2169650 - DNA, 25 bp, Homo sapien
cacagctgcgctttaatgaagcctg

SEQ ID NO: 2169651 - DNA, 25 bp, Homo sapien
tcacagctgcgctttaatgaagcct

SEQ ID NO: 2169652 - DNA, 25 bp, Homo sapien
cagctgcgctttaatgaagcctgta

SEQ ID NO: 2169653 - DNA, 25 bp, Homo sapien
taaccacaatgctttgaggacccag

SEQ ID NO: 2169654 - DNA, 25 bp, Homo sapien
tggtagtttgtgacggcagccccat

SEQ ID NO: 2169655 - DNA, 25 bp, Homo sapien
ggtgaggcctaggtaatgacaatct

SEQ ID NO: 2169656 - DNA, 25 bp, Homo sapien
agccaagcgtcttccggtaccagga

SEQ ID NO: 2169657 - DNA, 25 bp, Homo sapien
tgtgctgaatgtacgtgcccgagcc

SEQ ID NO: 2169658 - DNA, 25 bp, Homo sapien
cagaaagcgttattgagcagagcag

SEQ ID NO: 2169659 - DNA, 25 bp, Homo sapien
gacttagcagttgatggtgactaca

SEQ ID NO: 2169660 - DNA, 25 bp, Homo sapien
gaaaaggaacgcttggacacggaca

SEQ ID NO: 2169661 - DNA, 25 bp, Homo sapien
gagttcagagccatcgtcaaccttc

SEQ ID NO: 2169662 - DNA, 25 bp, Homo sapien
cacagatgagacctccgttttggag

SEQ ID NO: 2169663 - DNA, 25 bp, Homo sapien
tgagacctccgttttggaggcgctg

SEQ ID NO: 2169664 - DNA, 25 bp, Homo sapien
cttcttcccgaaaagctgcaagatg

SEQ ID NO: 2169665 - DNA, 25 bp, Homo sapien
cggtgggcgggatgggtaggaggca

SEQ ID NO: 2169666 - DNA, 25 bp, Homo sapien
tgggcgggatgggtaggaggcagac

SEQ ID NO: 2169667 - DNA, 25 bp, Homo sapien
gggcgggatgggtaggaggcagacc

SEQ ID NO: 2169668 - DNA, 25 bp, Homo sapien
ggtgggcgggatgggtaggaggcag

SEQ ID NO: 2169669 - DNA, 25 bp, Homo sapien
gagatcacggagaccttcaagagcc

SEQ ID NO: 2169670 - DNA, 25 bp, Homo sapien
tgttcaagttcctgagtccgcgcct

SEQ ID NO: 2169671 - DNA, 25 bp, Homo sapien
caagagccgaatatccaagctggag

SEQ ID NO: 2169672 - DNA, 25 bp, Homo sapien
tacagcaagtcacccaactggaggc

SEQ ID NO: 2169673 - DNA, 25 bp, Homo sapien
tggatgagtaaaatggtcctgggag

SEQ ID NO: 2169674 - DNA, 25 bp, Homo sapien
gaaaacccgactgtgaggagcacat

SEQ ID NO: 2169675 - DNA, 25 bp, Homo sapien
tttgtagcccgagtggtcaatgcct

SEQ ID NO: 2169676 - DNA, 25 bp, Homo sapien
gggtagatgggttgctgggacatct

SEQ ID NO: 2169677 - DNA, 25 bp, Homo sapien
gactgtgactgcttccgctggagtt

SEQ ID NO: 2169678 - DNA, 25 bp, Homo sapien
gcttgaggcccctggtaactctcct

SEQ ID NO: 2169679 - DNA, 25 bp, Homo sapien
tccttgcagaggacgttcctgggtc

SEQ ID NO: 2169680 - DNA, 25 bp, Homo sapien
cagaggacgttcctgggtcctggaa

SEQ ID NO: 2169681 - DNA, 25 bp, Homo sapien
tctttttgattctgcgaagtgcagg

SEQ ID NO: 2169682 - DNA, 25 bp, Homo sapien
tgcctggacagttcttactttttaa

SEQ ID NO: 2169683 - DNA, 25 bp, Homo sapien
gattctgcgaagtgcagggtctcta

SEQ ID NO: 2169684 - DNA, 25 bp, Homo sapien
gctgcatgcagtcatagttcactac

SEQ ID NO: 2169685 - DNA, 25 bp, Homo sapien
gaaggcttccagttgcctcacatcc

SEQ ID NO: 2169686 - DNA, 25 bp, Homo sapien
tgctggaccccgtggtgactccagg

SEQ ID NO: 2169687 - DNA, 25 bp, Homo sapien
gactccaggtgtagcgtttagagga

SEQ ID NO: 2169688 - DNA, 25 bp, Homo sapien
ttttccaacagatgtaactgtgaag

SEQ ID NO: 2169689 - DNA, 25 bp, Homo sapien
cagaggaggaaccgctcccaggagc

SEQ ID NO: 2169690 - DNA, 25 bp, Homo sapien
aaagcagaccggcaccaggtgccgc

SEQ ID NO: 2169691 - DNA, 25 bp, Homo sapien
ccagcaggcctttgagaaggtgaac

SEQ ID NO: 2169692 - DNA, 25 bp, Homo sapien
ccatcgcccagatcgagcacaggct

SEQ ID NO: 2169693 - DNA, 25 bp, Homo sapien
gaaggtgaaccagcgcgcctctgcc

SEQ ID NO: 2169694 - DNA, 25 bp, Homo sapien
ctgcgagcctttggaggctccactg

SEQ ID NO: 2169695 - DNA, 25 bp, Homo sapien
cctttggaggctccactgctgggcc

SEQ ID NO: 2169696 - DNA, 25 bp, Homo sapien
agcctttggaggctccactgctggg

SEQ ID NO: 2169697 - DNA, 25 bp, Homo sapien
tttggaggctccactgctgggccat

SEQ ID NO: 2169698 - DNA, 25 bp, Homo sapien
ggagttgctgttggtgtaggtgaag

SEQ ID NO: 2169699 - DNA, 25 bp, Homo sapien
tgctgttggtgtaggtgaagatgct

SEQ ID NO: 2169700 - DNA, 25 bp, Homo sapien
gttgctgttggtgtaggtgaagatg

SEQ ID NO: 2169701 - DNA, 25 bp, Homo sapien
aagatgctggactgggtgctgtcct

SEQ ID NO: 2169702 - DNA, 25 bp, Homo sapien
tcttgaaggcaccaaaggaatttgg

SEQ ID NO: 2169703 - DNA, 25 bp, Homo sapien
ggcaactcccaatggcaggactcgg

SEQ ID NO: 2169704 - DNA, 25 bp, Homo sapien
agggcctgcgtgcaaaactttcgga

SEQ ID NO: 2169705 - DNA, 25 bp, Homo sapien
tccgaatggaaagatggccctgggc

SEQ ID NO: 2169706 - DNA, 25 bp, Homo sapien
gggggcggtggctcacacctgtaat

SEQ ID NO: 2169707 - DNA, 25 bp, Homo sapien
gggcggtggctcacacctgtaatcc

SEQ ID NO: 2169708 - DNA, 25 bp, Homo sapien
gcggtggctcacacctgtaatccca

SEQ ID NO: 2169709 - DNA, 25 bp, Homo sapien
ttaagtggccgggggcggtggctca

SEQ ID NO: 2169710 - DNA, 25 bp, Homo sapien
cgccctcctgcctttgcaattggct

SEQ ID NO: 2169711 - DNA, 25 bp, Homo sapien
ttccgccctcctgcctttgcaattg

SEQ ID NO: 2169712 - DNA, 25 bp, Homo sapien
tccgccctcctgcctttgcaattgg

SEQ ID NO: 2169713 - DNA, 25 bp, Homo sapien
ccgccctcctgcctttgcaattggc

SEQ ID NO: 2169714 - DNA, 25 bp, Homo sapien
tccaggacacacatagggtggccca

SEQ ID NO: 2169715 - DNA, 25 bp, Homo sapien
gaagtagccatagacctggttcaca

SEQ ID NO: 2169716 - DNA, 25 bp, Homo sapien
caagcccatttgtgaagacggatgc

SEQ ID NO: 2169717 - DNA, 25 bp, Homo sapien
tagtgctggcgatgacggtctctgc

SEQ ID NO: 2169718 - DNA, 25 bp, Homo sapien
cacgatggccagcttggcatcaaat

SEQ ID NO: 2169719 - DNA, 25 bp, Homo sapien
tctcacattgccaaagggcttgcag

SEQ ID NO: 2169720 - DNA, 25 bp, Homo sapien
attgccaaagggcttgcagaccacc

SEQ ID NO: 2169721 - DNA, 25 bp, Homo sapien
ggccagcttggcatcaaatctcaca

SEQ ID NO: 2169722 - DNA, 25 bp, Homo sapien
agctgccgctgaacacgtctgggcc

SEQ ID NO: 2169723 - DNA, 25 bp, Homo sapien
tctgggccgcatgaagtcttcaggc

SEQ ID NO: 2169724 - DNA, 25 bp, Homo sapien
gaggacaatcatgtaagactgcacc

SEQ ID NO: 2169725 - DNA, 25 bp, Homo sapien
gcagagcacgatgatgctgagtggg

SEQ ID NO: 2169726 - DNA, 25 bp, Homo sapien
tagatagtggcacttttggcaaaga

SEQ ID NO: 2169727 - DNA, 25 bp, Homo sapien
ctgccggttcataaagacatagata

SEQ ID NO: 2169728 - DNA, 25 bp, Homo sapien
gcagcaaagcatgcgaagaaggcgt

SEQ ID NO: 2169729 - DNA, 25 bp, Homo sapien
accatgcgcgtcacttccttctctg

SEQ ID NO: 2169730 - DNA, 25 bp, Homo sapien
ctagggcacacggtattttgagtgg

SEQ ID NO: 2169731 - DNA, 25 bp, Homo sapien
gctgcgctttaatgaagcctgtaac

SEQ ID NO: 2169732 - DNA, 25 bp, Homo sapien
cacagctgcgctttaatgaagcctg

SEQ ID NO: 2169733 - DNA, 25 bp, Homo sapien
tcacagctgcgctttaatgaagcct

SEQ ID NO: 2169734 - DNA, 25 bp, Homo sapien
cagctgcgctttaatgaagcctgta

SEQ ID NO: 2169735 - DNA, 25 bp, Homo sapien
tgtgctgaatgtacgtgcccgagcc

SEQ ID NO: 2169736 - DNA, 25 bp, Homo sapien
cagaaagcgttattgagcagagcag

SEQ ID NO: 2169737 - DNA, 25 bp, Homo sapien
gacttagcagttgatggtgactaca

SEQ ID NO: 2169738 - DNA, 25 bp, Homo sapien
gaaaaggaacgcttggacacggaca

SEQ ID NO: 2169739 - DNA, 25 bp, Homo sapien
gagttcagagccatcgtcaaccttc

SEQ ID NO: 2169740 - DNA, 25 bp, Homo sapien
cacagatgagacctccgttttggag

SEQ ID NO: 2169741 - DNA, 25 bp, Homo sapien
tgagacctccgttttggaggcgctg

SEQ ID NO: 2169742 - DNA, 25 bp, Homo sapien
cttcttcccgaaaagctgcaagatg

SEQ ID NO: 2169743 - DNA, 25 bp, Homo sapien
cggtgggcgggatgggtaggaggca

SEQ ID NO: 2169744 - DNA, 25 bp, Homo sapien
tgggcgggatgggtaggaggcagac

SEQ ID NO: 2169745 - DNA, 25 bp, Homo sapien
gggcgggatgggtaggaggcagacc

SEQ ID NO: 2169746 - DNA, 25 bp, Homo sapien
ggtgggcgggatgggtaggaggcag

SEQ ID NO: 2169747 - DNA, 25 bp, Homo sapien
tacagcaagtcacccaactggaggc

SEQ ID NO: 2169748 - DNA, 25 bp, Homo sapien
tgttcaagttcctgagtccgcgcct

SEQ ID NO: 2169749 - DNA, 25 bp, Homo sapien
caagagccgaatatccaagctggag

SEQ ID NO: 2169750 - DNA, 25 bp, Homo sapien
gagatcacggagaccttcaagagcc

SEQ ID NO: 2169751 - DNA, 25 bp, Homo sapien
tggatgagtaaaatggtcctgggag

SEQ ID NO: 2169752 - DNA, 25 bp, Homo sapien
gaaaacccgactgtgaggagcacat

SEQ ID NO: 2169753 - DNA, 25 bp, Homo sapien
tttgtagcccgagtggtcaatgcct

SEQ ID NO: 2169754 - DNA, 25 bp, Homo sapien
gggtagatgggttgctgggacatct

SEQ ID NO: 2169755 - DNA, 25 bp, Homo sapien
gactgtgactgcttccgctggagtt

SEQ ID NO: 2169756 - DNA, 25 bp, Homo sapien
gcttgaggcccctggtaactctcct

SEQ ID NO: 2169757 - DNA, 25 bp, Homo sapien
tccttgcagaggacgttcctgggtc

SEQ ID NO: 2169758 - DNA, 25 bp, Homo sapien
cagaggacgttcctgggtcctggaa

SEQ ID NO: 2169759 - DNA, 25 bp, Homo sapien
gaaggcttccagttgcctcacatcc

SEQ ID NO: 2169760 - DNA, 25 bp, Homo sapien
tgctggaccccgtggtgactccagg

SEQ ID NO: 2169761 - DNA, 25 bp, Homo sapien
gactccaggtgtagcgtttagagga

SEQ ID NO: 2169762 - DNA, 25 bp, Homo sapien
ttttccaacagatgtaactgtgaag

SEQ ID NO: 2169763 - DNA, 25 bp, Homo sapien
cagaggaggaaccgctcccaggagc

SEQ ID NO: 2169764 - DNA, 25 bp, Homo sapien
ccagcaggcctttgagaaggtgaac

SEQ ID NO: 2169765 - DNA, 25 bp, Homo sapien
ccatcgcccagatcgagcacaggct

SEQ ID NO: 2169766 - DNA, 25 bp, Homo sapien
aaagcagaccggcaccaggtgccgc

SEQ ID NO: 2169767 - DNA, 25 bp, Homo sapien
gaaggtgaaccagcgcgcctctgcc

SEQ ID NO: 2169768 - DNA, 25 bp, Homo sapien
catggctatggaaagccctgtcccc

SEQ ID NO: 2169769 - DNA, 25 bp, Homo sapien
gctgggccatggctatggaaagccc

SEQ ID NO: 2169770 - DNA, 25 bp, Homo sapien
ctatggaaagccctgtccccgacgg

SEQ ID NO: 2169771 - DNA, 25 bp, Homo sapien
tggaaagccctgtccccgacggcag

SEQ ID NO: 2169772 - DNA, 25 bp, Homo sapien
tcatagctgtcctgcggatggcggc

SEQ ID NO: 2169773 - DNA, 25 bp, Homo sapien
ctcatagctgtcctgcggatggcgg

SEQ ID NO: 2169774 - DNA, 25 bp, Homo sapien
cctcatagctgtcctgcggatggcg

SEQ ID NO: 2169775 - DNA, 25 bp, Homo sapien
cgccctcctgcctttgcaattggct

SEQ ID NO: 2169776 - DNA, 25 bp, Homo sapien
ttccgccctcctgcctttgcaattg

SEQ ID NO: 2169777 - DNA, 25 bp, Homo sapien
tccgccctcctgcctttgcaattgg

SEQ ID NO: 2169778 - DNA, 25 bp, Homo sapien
ccgccctcctgcctttgcaattggc

SEQ ID NO: 2169779 - DNA, 25 bp, Homo sapien
tccaggacacacatagggtggccca

SEQ ID NO: 2169780 - DNA, 25 bp, Homo sapien
gaagtagccatagacctggttcaca

SEQ ID NO: 2169781 - DNA, 25 bp, Homo sapien
caagcccatttgtgaagacggatgc

SEQ ID NO: 2169782 - DNA, 25 bp, Homo sapien
tagtgctggcgatgacggtctctgc

SEQ ID NO: 2169783 - DNA, 25 bp, Homo sapien
tgaatgagtggtttccgctgagcct

SEQ ID NO: 2169784 - DNA, 25 bp, Homo sapien
agctgggccccgatcatcatgaggt

SEQ ID NO: 2169785 - DNA, 25 bp, Homo sapien
aatgagtggtttccgctgagcctgg

SEQ ID NO: 2169786 - DNA, 25 bp, Homo sapien
ccccgatcatcatgaggtggccgga

SEQ ID NO: 2169787 - DNA, 25 bp, Homo sapien
ccatcgtgggtacaatttgaggcag

SEQ ID NO: 2169788 - DNA, 25 bp, Homo sapien
cctctctggtctgggccatcgtggg

SEQ ID NO: 2169789 - DNA, 25 bp, Homo sapien
tacactatcggggtagtgccgggac

SEQ ID NO: 2169790 - DNA, 25 bp, Homo sapien
gacttggacaagcaccctctctggt

SEQ ID NO: 2169791 - DNA, 25 bp, Homo sapien
cacgatggccagcttggcatcaaat

SEQ ID NO: 2169792 - DNA, 25 bp, Homo sapien
tctcacattgccaaagggcttgcag

SEQ ID NO: 2169793 - DNA, 25 bp, Homo sapien
attgccaaagggcttgcagaccacc

SEQ ID NO: 2169794 - DNA, 25 bp, Homo sapien
ggccagcttggcatcaaatctcaca

SEQ ID NO: 2169795 - DNA, 25 bp, Homo sapien
agctgccgctgaacacgtctgggcc

SEQ ID NO: 2169796 - DNA, 25 bp, Homo sapien
tctgggccgcatgaagtcttcaggc

SEQ ID NO: 2169797 - DNA, 25 bp, Homo sapien
gaggacaatcatgtaagactgcacc

SEQ ID NO: 2169798 - DNA, 25 bp, Homo sapien
gcagagcacgatgatgctgagtggg

SEQ ID NO: 2169799 - DNA, 25 bp, Homo sapien
caaagcatgcgaagaaggcgtaggg

SEQ ID NO: 2169800 - DNA, 25 bp, Homo sapien
aaagcatgcgaagaaggcgtagggt

SEQ ID NO: 2169801 - DNA, 25 bp, Homo sapien
gcaaagcatgcgaagaaggcgtagg

SEQ ID NO: 2169802 - DNA, 25 bp, Homo sapien
agcaaagcatgcgaagaaggcgtag

SEQ ID NO: 2169803 - DNA, 25 bp, Homo sapien
ctagggcacacggtattttgagtgg

SEQ ID NO: 2169804 - DNA, 25 bp, Homo sapien
gctgcgctttaatgaagcctgtaac

SEQ ID NO: 2169805 - DNA, 25 bp, Homo sapien
cacagctgcgctttaatgaagcctg

SEQ ID NO: 2169806 - DNA, 25 bp, Homo sapien
tcacagctgcgctttaatgaagcct

SEQ ID NO: 2169807 - DNA, 25 bp, Homo sapien
cagctgcgctttaatgaagcctgta

SEQ ID NO: 2169808 - DNA, 25 bp, Homo sapien
taaccacaatgctttgaggacccag

SEQ ID NO: 2169809 - DNA, 25 bp, Homo sapien
tggtagtttgtgacggcagccccat

SEQ ID NO: 2169810 - DNA, 25 bp, Homo sapien
ggtgaggcctaggtaatgacaatct

SEQ ID NO: 2169811 - DNA, 25 bp, Homo sapien
agccaagcgtcttccggtaccagga

SEQ ID NO: 2169812 - DNA, 25 bp, Homo sapien
cagaaagcgttattgagcagagcag

SEQ ID NO: 2169813 - DNA, 25 bp, Homo sapien
gacttagcagttgatggtgactaca

SEQ ID NO: 2169814 - DNA, 25 bp, Homo sapien
gaaaaggaacgcttggacacggaca

SEQ ID NO: 2169815 - DNA, 25 bp, Homo sapien
tgtgctgaatgtacgtgcccgagcc

SEQ ID NO: 2169816 - DNA, 25 bp, Homo sapien
gagttcagagccatcgtcaaccttc

SEQ ID NO: 2169817 - DNA, 25 bp, Homo sapien
atgcaggcgataccgaggacacaga

SEQ ID NO: 2169818 - DNA, 25 bp, Homo sapien
cacagatgagacctccgttttggag

SEQ ID NO: 2169819 - DNA, 25 bp, Homo sapien
cttcttcccgaaaagctgcaagatg

SEQ ID NO: 2169820 - DNA, 25 bp, Homo sapien
cggtgggcgggatgggtaggaggca

SEQ ID NO: 2169821 - DNA, 25 bp, Homo sapien
tgggcgggatgggtaggaggcagac

SEQ ID NO: 2169822 - DNA, 25 bp, Homo sapien
gggcgggatgggtaggaggcagacc

SEQ ID NO: 2169823 - DNA, 25 bp, Homo sapien
ggtgggcgggatgggtaggaggcag

SEQ ID NO: 2169824 - DNA, 25 bp, Homo sapien
tgttcaagttcctgagtccgcgcct

SEQ ID NO: 2169825 - DNA, 25 bp, Homo sapien
tacagcaagtcacccaactggaggc

SEQ ID NO: 2169826 - DNA, 25 bp, Homo sapien
caagagccgaatatccaagctggag

SEQ ID NO: 2169827 - DNA, 25 bp, Homo sapien
gagatcacggagaccttcaagagcc

SEQ ID NO: 2169828 - DNA, 25 bp, Homo sapien
gaaaacccgactgtgaggagcacat

SEQ ID NO: 2169829 - DNA, 25 bp, Homo sapien
tggatgagtaaaatggtcctgggag

SEQ ID NO: 2169830 - DNA, 25 bp, Homo sapien
tttgtagcccgagtggtcaatgcct

SEQ ID NO: 2169831 - DNA, 25 bp, Homo sapien
gggtagatgggttgctgggacatct

SEQ ID NO: 2169832 - DNA, 25 bp, Homo sapien
tccttgcagaggacgttcctgggtc

SEQ ID NO: 2169833 - DNA, 25 bp, Homo sapien
gcttgaggcccctggtaactctcct

SEQ ID NO: 2169834 - DNA, 25 bp, Homo sapien
gactgtgactgcttccgctggagtt

SEQ ID NO: 2169835 - DNA, 25 bp, Homo sapien
cagaggacgttcctgggtcctggaa

SEQ ID NO: 2169836 - DNA, 25 bp, Homo sapien
tctttttgattctgcgaagtgcagg

SEQ ID NO: 2169837 - DNA, 25 bp, Homo sapien
tgcctggacagttcttactttttaa

SEQ ID NO: 2169838 - DNA, 25 bp, Homo sapien
gattctgcgaagtgcagggtctcta

SEQ ID NO: 2169839 - DNA, 25 bp, Homo sapien
gctgcatgcagtcatagttcactac

SEQ ID NO: 2169840 - DNA, 25 bp, Homo sapien
gaaggcttccagttgcctcacatcc

SEQ ID NO: 2169841 - DNA, 25 bp, Homo sapien
tgctggaccccgtggtgactccagg

SEQ ID NO: 2169842 - DNA, 25 bp, Homo sapien
gactccaggtgtagcgtttagagga

SEQ ID NO: 2169843 - DNA, 25 bp, Homo sapien
ttttccaacagatgtaactgtgaag

SEQ ID NO: 2169844 - DNA, 25 bp, Homo sapien
tttggagtctgaagacccactccta

SEQ ID NO: 2169845 - DNA, 25 bp, Homo sapien
ctccggcgtctgaagagcgaatggc

SEQ ID NO: 2169846 - DNA, 25 bp, Homo sapien
aatggcgcctgcgagctgcccagtg

SEQ ID NO: 2169847 - DNA, 25 bp, Homo sapien
tttatgtgatgtcggtgcagctccc

SEQ ID NO: 2169848 - DNA, 25 bp, Homo sapien
ctcagccctcgcctcagcatccgcc

SEQ ID NO: 2169849 - DNA, 25 bp, Homo sapien
tcctccgggaactcagccctcgcct

SEQ ID NO: 2169850 - DNA, 25 bp, Homo sapien
cctcctccgggaactcagccctcgc

SEQ ID NO: 2169851 - DNA, 25 bp, Homo sapien
ctcctccgggaactcagccctcgcc

SEQ ID NO: 2169852 - DNA, 25 bp, Homo sapien
ttcgcaagcggctggccatatcttg

SEQ ID NO: 2169853 - DNA, 25 bp, Homo sapien
agctcgtggagcatgtggccctgat

SEQ ID NO: 2169854 - DNA, 25 bp, Homo sapien
ctgatggaatggattcgcaagcggc

SEQ ID NO: 2169855 - DNA, 25 bp, Homo sapien
cggagctcgtggagcatgtggccct

SEQ ID NO: 2169856 - DNA, 25 bp, Homo sapien
gaaaactcaagaggccccggcagca

SEQ ID NO: 2169857 - DNA, 25 bp, Homo sapien
cattgctgggataccttgttcttta

SEQ ID NO: 2169858 - DNA, 25 bp, Homo sapien
ctgcattgctgggataccttgttct

SEQ ID NO: 2169859 - DNA, 25 bp, Homo sapien
gagaaaactcaagaggccccggcag

SEQ ID NO: 2169860 - DNA, 25 bp, Homo sapien
gctggcgtggacattctcctgcagg

SEQ ID NO: 2169861 - DNA, 25 bp, Homo sapien
tggcgtggacattctcctgcagggc

SEQ ID NO: 2169862 - DNA, 25 bp, Homo sapien
gggctggcgtggacattctcctgca

SEQ ID NO: 2169863 - DNA, 25 bp, Homo sapien
ggcgtggacattctcctgcagggct

SEQ ID NO: 2169864 - DNA, 25 bp, Homo sapien
tttccacatgccgaggaactttcag

SEQ ID NO: 2169865 - DNA, 25 bp, Homo sapien
cgcagagcaccgtggactcggggca

SEQ ID NO: 2169866 - DNA, 25 bp, Homo sapien
tctttcacatgcttaaattcatctg

SEQ ID NO: 2169867 - DNA, 25 bp, Homo sapien
agcaccgtggactcggggcaagttt

SEQ ID NO: 2169868 - DNA, 25 bp, Homo sapien
gaaagacagacatgacactggtcat

SEQ ID NO: 2169869 - DNA, 25 bp, Homo sapien
agcacacgacctcggcacatggtct

SEQ ID NO: 2169870 - DNA, 25 bp, Homo sapien
ctagcacacgacctcggcacatggt

SEQ ID NO: 2169871 - DNA, 25 bp, Homo sapien
gacagacatgacactggtcatttct

SEQ ID NO: 2169872 - DNA, 25 bp, Homo sapien
atctcagaagaactgctacatgatg

SEQ ID NO: 2169873 - DNA, 25 bp, Homo sapien
gactgcttgtacctcatgatgtaga

SEQ ID NO: 2169874 - DNA, 25 bp, Homo sapien
ctttgcgaggacaaatcggtcgttg

SEQ ID NO: 2169875 - DNA, 25 bp, Homo sapien
cttgtacctcatgatgtagaagaac

SEQ ID NO: 2169876 - DNA, 25 bp, Homo sapien
cgttgtccggattctctggatctga

SEQ ID NO: 2169877 - DNA, 25 bp, Homo sapien
aactcccagtccttgtccgagccat

SEQ ID NO: 2169878 - DNA, 25 bp, Homo sapien
tggccctgtcgaagtacttgccagt

SEQ ID NO: 2169879 - DNA, 25 bp, Homo sapien
gtatatgccattccacatgcaactc

SEQ ID NO: 2169880 - DNA, 25 bp, Homo sapien
tgtccgagccatcctgttgccacat

SEQ ID NO: 2169881 - DNA, 25 bp, Homo sapien
gaggactcgccatcactcatgaggc

SEQ ID NO: 2169882 - DNA, 25 bp, Homo sapien
ggttcacatcaaagattgccacaag

SEQ ID NO: 2169883 - DNA, 25 bp, Homo sapien
tgtttatgcagtgctcggcgggcaa

SEQ ID NO: 2169884 - DNA, 25 bp, Homo sapien
gcttcgcagcgcctctgatagatgt

SEQ ID NO: 2169885 - DNA, 25 bp, Homo sapien
gagaagcctgccagaatacctggca

SEQ ID NO: 2169886 - DNA, 25 bp, Homo sapien
ggccgtccaccacataagtgttcca

SEQ ID NO: 2169887 - DNA, 25 bp, Homo sapien
acctgagaagcctgccagaatacct

SEQ ID NO: 2169888 - DNA, 25 bp, Homo sapien
agtgcctccacgtcccggccgtcca

SEQ ID NO: 2169889 - DNA, 25 bp, Homo sapien
tctttctctcggcattggctttgca

SEQ ID NO: 2169890 - DNA, 25 bp, Homo sapien
gatgttgacttcaggtgagtcctca

SEQ ID NO: 2169891 - DNA, 25 bp, Homo sapien
caactctgtaatcaggtggagaggt

SEQ ID NO: 2169892 - DNA, 25 bp, Homo sapien
ctgtgggtcaagattcctgctggtc

SEQ ID NO: 2169893 - DNA, 25 bp, Homo sapien
aacgactctgttgttcgcgtagccc

SEQ ID NO: 2169894 - DNA, 25 bp, Homo sapien
gaaagtagagtacctggtgtcacca

SEQ ID NO: 2169895 - DNA, 25 bp, Homo sapien
tgttcagccataaagcactcgatga

SEQ ID NO: 2169896 - DNA, 25 bp, Homo sapien
gccagaccgcatgctttccgagtag

SEQ ID NO: 2169897 - DNA, 25 bp, Homo sapien
agcaatggtccgtccacgggaggca

SEQ ID NO: 2169898 - DNA, 25 bp, Homo sapien
tgttgatgttgctctcagcgaggcc

SEQ ID NO: 2169899 - DNA, 25 bp, Homo sapien
cctcctatccggatgtgatcaaatg

SEQ ID NO: 2169900 - DNA, 25 bp, Homo sapien
caaatgctcgagtcagaaaggcagc

SEQ ID NO: 2169901 - DNA, 25 bp, Homo sapien
aagatgatggcatttagaaccctta

SEQ ID NO: 2169902 - DNA, 25 bp, Homo sapien
agatgatggcatttagaacccttac

SEQ ID NO: 2169903 - DNA, 25 bp, Homo sapien
gagctgtagcagagccccataaatg

SEQ ID NO: 2169904 - DNA, 25 bp, Homo sapien
ccagagcccgatgaaaacaggagca

SEQ ID NO: 2169905 - DNA, 25 bp, Homo sapien
ggagcataaccccattaggaacctg

SEQ ID NO: 2169906 - DNA, 25 bp, Homo sapien
aagcaattattcctattgccacggg

SEQ ID NO: 2169907 - DNA, 25 bp, Homo sapien
ttggctgccagagcaacagcatgct

SEQ ID NO: 2169908 - DNA, 25 bp, Homo sapien
tcagttgggtagaagatcgtgcact

SEQ ID NO: 2169909 - DNA, 25 bp, Homo sapien
tgcacttgggaatggttcggaacat

SEQ ID NO: 2169910 - DNA, 25 bp, Homo sapien
catgctccgtggagacggcatcagt

SEQ ID NO: 2169911 - DNA, 25 bp, Homo sapien
tgctaaaccctgactgagacaggct

SEQ ID NO: 2169912 - DNA, 25 bp, Homo sapien
tctgtctgaaactagtgtcccctta

SEQ ID NO: 2169913 - DNA, 25 bp, Homo sapien
tatagtctgggactctgcctgaagc

SEQ ID NO: 2169914 - DNA, 25 bp, Homo sapien
tcagtatgaaactagcagagtccag

SEQ ID NO: 2169915 - DNA, 25 bp, Homo sapien
tcgggtggtccgaatgaagcacatc

SEQ ID NO: 2169916 - DNA, 25 bp, Homo sapien
tccgatctcaaagcgttcttgtggg

SEQ ID NO: 2169917 - DNA, 25 bp, Homo sapien
cttggcctgtccgatctcaaagcgt

SEQ ID NO: 2169918 - DNA, 25 bp, Homo sapien
aataaccatagtttctggtcgggtg

SEQ ID NO: 2169919 - DNA, 25 bp, Homo sapien
gaacattctgggcattggcaacacg

SEQ ID NO: 2169920 - DNA, 25 bp, Homo sapien
gagagctcactatggcatgcaaaga

SEQ ID NO: 2169921 - DNA, 25 bp, Homo sapien
ttgtgtgcctgaactctgagaaccc

SEQ ID NO: 2169922 - DNA, 25 bp, Homo sapien
catcaggagtctggtttgagagctc

SEQ ID NO: 2169923 - DNA, 25 bp, Homo sapien
tttgataggaaattacactgctcca

SEQ ID NO: 2169924 - DNA, 25 bp, Homo sapien
agctgtcctggagcatggatacgcc

SEQ ID NO: 2169925 - DNA, 25 bp, Homo sapien
ataggaaattacactgctccagctg

SEQ ID NO: 2169926 - DNA, 25 bp, Homo sapien
ccagctgtcctggagcatggatacg

SEQ ID NO: 2169927 - DNA, 25 bp, Homo sapien
gccagcaaaacagaatgccgtggtt

SEQ ID NO: 2169928 - DNA, 25 bp, Homo sapien
aacagaatgccgtggttactacaca

SEQ ID NO: 2169929 - DNA, 25 bp, Homo sapien
ggaaggcactttgctatgccgctat

SEQ ID NO: 2169930 - DNA, 25 bp, Homo sapien
tcactccttaataactcactactaa

SEQ ID NO: 2169931 - DNA, 25 bp, Homo sapien
tgtcactgacacagtggcggaggac

SEQ ID NO: 2169932 - DNA, 25 bp, Homo sapien
aaggcttcatacacagtaattccag

SEQ ID NO: 2169933 - DNA, 25 bp, Homo sapien
ccagctccaataactgtgaccttgt

SEQ ID NO: 2169934 - DNA, 25 bp, Homo sapien
gctcatcagcagctgctaaggcttc

SEQ ID NO: 2169935 - DNA, 25 bp, Homo sapien
cactgtaatgatccggccctctgtg

SEQ ID NO: 2169936 - DNA, 25 bp, Homo sapien
caggtcgatgacacggataaaaata

SEQ ID NO: 2169937 - DNA, 25 bp, Homo sapien
cagaggtttaatggtaaacaggtcg

SEQ ID NO: 2169938 - DNA, 25 bp, Homo sapien
gtgatcctccactgtaatgatccgg

SEQ ID NO: 2169939 - DNA, 25 bp, Homo sapien
gaatgtcaggatccatggagacggc

SEQ ID NO: 2169940 - DNA, 25 bp, Homo sapien
ctatgatatgtctggcactaattcc

SEQ ID NO: 2169941 - DNA, 25 bp, Homo sapien
ccagcgaatgaacctgaatgtcagg

SEQ ID NO: 2169942 - DNA, 25 bp, Homo sapien
gcaacatgcatttcacggccactat

SEQ ID NO: 2169943 - DNA, 25 bp, Homo sapien
cagcagtaggcgtcatggtgttatc

SEQ ID NO: 2169944 - DNA, 25 bp, Homo sapien
cttgaacagtacagtgtggaggctc

SEQ ID NO: 2169945 - DNA, 25 bp, Homo sapien
tatcgtgctgtggaaactaggctac

SEQ ID NO: 2169946 - DNA, 25 bp, Homo sapien
cagcacacagaatcccaaggtggga

SEQ ID NO: 2169947 - DNA, 25 bp, Homo sapien
tcaccagcaccttttgggctaacag

SEQ ID NO: 2169948 - DNA, 25 bp, Homo sapien
gatactgtccgtccctcgcattgta

SEQ ID NO: 2169949 - DNA, 25 bp, Homo sapien
ggttttacagatgtgtcccaccttg

SEQ ID NO: 2169950 - DNA, 25 bp, Homo sapien
taagagacactagggaattgcctcc

SEQ ID NO: 2169951 - DNA, 25 bp, Homo sapien
cgacgtccgtgccttccgagggcgg

SEQ ID NO: 2169952 - DNA, 25 bp, Homo sapien
ggcgtcggccgtgggcgcaagtgaa

SEQ ID NO: 2169953 - DNA, 25 bp, Homo sapien
tctctaagcgttccattcccgagaa

SEQ ID NO: 2169954 - DNA, 25 bp, Homo sapien
gcgacaaacgtccagaggtcgtggc

SEQ ID NO: 2169955 - DNA, 25 bp, Homo sapien
tgatctcaggcgacgcctgtccgcc

SEQ ID NO: 2169956 - DNA, 25 bp, Homo sapien
ctcaggcgacgcctgtccgcctcgt

SEQ ID NO: 2169957 - DNA, 25 bp, Homo sapien
aggcgacgcctgtccgcctcgtccc

SEQ ID NO: 2169958 - DNA, 25 bp, Homo sapien
gccctgatctcaggcgacgcctgtc

SEQ ID NO: 2169959 - DNA, 25 bp, Homo sapien
aggccccggccagtgtcagccccag

SEQ ID NO: 2169960 - DNA, 25 bp, Homo sapien
ttcaggatgtcaaagcacgccccgc

SEQ ID NO: 2169961 - DNA, 25 bp, Homo sapien
cgccctcagaaatgcaggccccggc

SEQ ID NO: 2169962 - DNA, 25 bp, Homo sapien
ctgctcccgctgacaccaaggacat

SEQ ID NO: 2169963 - DNA, 25 bp, Homo sapien
ggggtctcggtggcagagtctccct

SEQ ID NO: 2169964 - DNA, 25 bp, Homo sapien
tctcggtggcagagtctcccttctt

SEQ ID NO: 2169965 - DNA, 25 bp, Homo sapien
ggttctctgtgatgggttttgcaac

SEQ ID NO: 2169966 - DNA, 25 bp, Homo sapien
cccttcttggggttctctgtgatgg

SEQ ID NO: 2169967 - DNA, 25 bp, Homo sapien
tgggaaaggcttccatgaagagcca

SEQ ID NO: 2169968 - DNA, 25 bp, Homo sapien
ctgggaaaggcttccatgaagagcc

SEQ ID NO: 2169969 - DNA, 25 bp, Homo sapien
ctcgctgttcttcccgcgggatcgg

SEQ ID NO: 2169970 - DNA, 25 bp, Homo sapien
agggaggacacagtccccgtccagg

SEQ ID NO: 2169971 - DNA, 25 bp, Homo sapien
tcggtgggcctgaccgtgtcctgaa

SEQ ID NO: 2169972 - DNA, 25 bp, Homo sapien
tgaccgtgtcctgaagcaccccagg

SEQ ID NO: 2169973 - DNA, 25 bp, Homo sapien
tgccgaacaggtcgctaggagagca

SEQ ID NO: 2169974 - DNA, 25 bp, Homo sapien
gaacaggtcgctaggagagcactcc

SEQ ID NO: 2169975 - DNA, 25 bp, Homo sapien
ccgaacaggtcgctaggagagcact

SEQ ID NO: 2169976 - DNA, 25 bp, Homo sapien
ctgccgaacaggtcgctaggagagc

SEQ ID NO: 2169977 - DNA, 25 bp, Homo sapien
tggctgctgtcgtggctgtgcccat

SEQ ID NO: 2169978 - DNA, 25 bp, Homo sapien
cagctcctttgggaccctcaatgga

SEQ ID NO: 2169979 - DNA, 25 bp, Homo sapien
gtccggacgcccctagggtgctctg

SEQ ID NO: 2169980 - DNA, 25 bp, Homo sapien
tggagccagtaagtccaggagggcg

SEQ ID NO: 2169981 - DNA, 25 bp, Homo sapien
ggcagggcactcccgaaccaggatg

SEQ ID NO: 2169982 - DNA, 25 bp, Homo sapien
atgtatccttcctggacacggtgtc

SEQ ID NO: 2169983 - DNA, 25 bp, Homo sapien
gtatccttcctggacacggtgtcca

SEQ ID NO: 2169984 - DNA, 25 bp, Homo sapien
caacaaagggtgagcatgtatcctt

SEQ ID NO: 2169985 - DNA, 25 bp, Homo sapien
acccacgcccaactcggcacacaaa

SEQ ID NO: 2169986 - DNA, 25 bp, Homo sapien
ggacaggaagtaggtgactatggaa

SEQ ID NO: 2169987 - DNA, 25 bp, Homo sapien
gtgactatggaaagacccccgccgc

SEQ ID NO: 2169988 - DNA, 25 bp, Homo sapien
gcccaactcggcacacaaaggccca

SEQ ID NO: 2169989 - DNA, 25 bp, Homo sapien
gcatagaggtaaaggggccaagcac

SEQ ID NO: 2169990 - DNA, 25 bp, Homo sapien
ctctaaaagccaccagctgaacggg

SEQ ID NO: 2169991 - DNA, 25 bp, Homo sapien
cacactctggaagcctctaaaagcc

SEQ ID NO: 2169992 - DNA, 25 bp, Homo sapien
tgggcccaatggcatagaggtaaag

SEQ ID NO: 2169993 - DNA, 25 bp, Homo sapien
atggcacacgtcaaacccagacctt

SEQ ID NO: 2169994 - DNA, 25 bp, Homo sapien
tctcgggggcaacgctcagctttct

SEQ ID NO: 2169995 - DNA, 25 bp, Homo sapien
tctgacacgaccaggccgtagcctg

SEQ ID NO: 2169996 - DNA, 25 bp, Homo sapien
ttctgagacctcaacaccacgcgta

SEQ ID NO: 2169997 - DNA, 25 bp, Homo sapien
tcctgtacacaaccacccactagtt

SEQ ID NO: 2169998 - DNA, 25 bp, Homo sapien
ctcggctttcacttgggcagaggga

SEQ ID NO: 2169999 - DNA, 25 bp, Homo sapien
gagggagccatttggtggcgctgct

SEQ ID NO: 2170000 - DNA, 25 bp, Homo sapien
ggtggcgctgcttgtcttctttggt

SEQ ID NO: 2170001 - DNA, 25 bp, Homo sapien
ggcagcttgagtgtctaaaccttcg

SEQ ID NO: 2170002 - DNA, 25 bp, Homo sapien
ccagtgggcttcatttcacggccta

SEQ ID NO: 2170003 - DNA, 25 bp, Homo sapien
tcgccacccacagctattaggaagg

SEQ ID NO: 2170004 - DNA, 25 bp, Homo sapien
aagcaagttcctgcccgtctctgag

SEQ ID NO: 2170005 - DNA, 25 bp, Homo sapien
tctcagagacggatctcagcctgct

SEQ ID NO: 2170006 - DNA, 25 bp, Homo sapien
taaaggtcggctctgctgccgacat

SEQ ID NO: 2170007 - DNA, 25 bp, Homo sapien
tcagcctgctgacggccactgtggt

SEQ ID NO: 2170008 - DNA, 25 bp, Homo sapien
gtgacgactccatgcgtatgtccca

SEQ ID NO: 2170009 - DNA, 25 bp, Homo sapien
attgagggcccgtccaaagcagaaa

SEQ ID NO: 2170010 - DNA, 25 bp, Homo sapien
agtacaatgaacagcacgtcccagg

SEQ ID NO: 2170011 - DNA, 25 bp, Homo sapien
tgtcctacctgcctgtgctgccggg

SEQ ID NO: 2170012 - DNA, 25 bp, Homo sapien
gatgggacatgcagcgtgtcctacc

SEQ ID NO: 2170013 - DNA, 25 bp, Homo sapien
ttcaccgtcaacaccaaggatgcag

SEQ ID NO: 2170014 - DNA, 25 bp, Homo sapien
tagtgaacaagcctgccaccttcac

SEQ ID NO: 2170015 - DNA, 25 bp, Homo sapien
ggcctggcctcacccatggagtagt

SEQ ID NO: 2170016 - DNA, 25 bp, Homo sapien
ccatgtcactgcctatgggcctggc

SEQ ID NO: 2170017 - DNA, 25 bp, Homo sapien
tttgtccttatgactgatggatggc

SEQ ID NO: 2170018 - DNA, 25 bp, Homo sapien
ctatgacggcgtgcccgtgcctggc

SEQ ID NO: 2170019 - DNA, 25 bp, Homo sapien
tgaggtggaggtgacctatgacggc

SEQ ID NO: 2170020 - DNA, 25 bp, Homo sapien
tgtggtgcgcttcctgccccgtgag

SEQ ID NO: 2170021 - DNA, 25 bp, Homo sapien
gaggaagggccctatgaggtggagg

SEQ ID NO: 2170022 - DNA, 25 bp, Homo sapien
agctcgctccagctgtctagaaacc

SEQ ID NO: 2170023 - DNA, 25 bp, Homo sapien
gctccagctgtctagaaacctgctg

SEQ ID NO: 2170024 - DNA, 25 bp, Homo sapien
gctcgctccagctgtctagaaacct

SEQ ID NO: 2170025 - DNA, 25 bp, Homo sapien
tcgctccagctgtctagaaacctgc

SEQ ID NO: 2170026 - DNA, 25 bp, Homo sapien
caggtccgggccaggttcagctggg

SEQ ID NO: 2170027 - DNA, 25 bp, Homo sapien
ccaggttcagctgggatgcgtgagc

SEQ ID NO: 2170028 - DNA, 25 bp, Homo sapien
gcaggcgccagctcgcgcccaggtc

SEQ ID NO: 2170029 - DNA, 25 bp, Homo sapien
ggcttcgcgccgtagggtcgccgcg

SEQ ID NO: 2170030 - DNA, 25 bp, Homo sapien
ggcttaaacgatcctcccatctgtc

SEQ ID NO: 2170031 - DNA, 25 bp, Homo sapien
actcccgggctcaattaatccacct

SEQ ID NO: 2170032 - DNA, 25 bp, Homo sapien
gagtgtagtggtgaaattatagctc

SEQ ID NO: 2170033 - DNA, 25 bp, Homo sapien
agcagctgagactaccggtgcacgt

SEQ ID NO: 2170034 - DNA, 25 bp, Homo sapien
tccccatacggatccaagctgtttc

SEQ ID NO: 2170035 - DNA, 25 bp, Homo sapien
taagtccagccccattgcagtgcag

SEQ ID NO: 2170036 - DNA, 25 bp, Homo sapien
tagttttgacaaaatcagattcccc

SEQ ID NO: 2170037 - DNA, 25 bp, Homo sapien
tctgcaagccttctgcaatcctggc

SEQ ID NO: 2170038 - DNA, 25 bp, Homo sapien
atcaactagtgtgcccctcactggg

SEQ ID NO: 2170039 - DNA, 25 bp, Homo sapien
cctcactgggtaggccccaaactgg

SEQ ID NO: 2170040 - DNA, 25 bp, Homo sapien
gagggtgtatggaatcaactagtgt

SEQ ID NO: 2170041 - DNA, 25 bp, Homo sapien
agccagctgagggtgtatggaatca

SEQ ID NO: 2170042 - DNA, 25 bp, Homo sapien
caaacgtcatcaacgcgaggattgg

SEQ ID NO: 2170043 - DNA, 25 bp, Homo sapien
cagccgaatcgttgtcgcgtcacag

SEQ ID NO: 2170044 - DNA, 25 bp, Homo sapien
gcaagcccatatgtcacaagcacgg

SEQ ID NO: 2170045 - DNA, 25 bp, Homo sapien
cagccgaatcgttgtcgcgtcacgg

SEQ ID NO: 2170046 - DNA, 25 bp, Homo sapien
tccgaaagatctgcgtagttgtcca

SEQ ID NO: 2170047 - DNA, 25 bp, Homo sapien
caaggtggtcagctcggtatccgaa

SEQ ID NO: 2170048 - DNA, 25 bp, Homo sapien
cgcagcaaggtggtcagctcggtat

SEQ ID NO: 2170049 - DNA, 25 bp, Homo sapien
gctcggtatccgaaagatctgcgta

SEQ ID NO: 2170050 - DNA, 25 bp, Homo sapien
ctactacaggcccgtgcgggatgtt

SEQ ID NO: 2170051 - DNA, 25 bp, Homo sapien
ctacaggcccgtgcgggatgttgta

SEQ ID NO: 2170052 - DNA, 25 bp, Homo sapien
tacaggcccgtgcgggatgttgtac

SEQ ID NO: 2170053 - DNA, 25 bp, Homo sapien
tactacaggcccgtgcgggatgttg

SEQ ID NO: 2170054 - DNA, 25 bp, Homo sapien
ctggccggacacggggcggtcaggg

SEQ ID NO: 2170055 - DNA, 25 bp, Homo sapien
gaagctataagaggaggcggcggac

SEQ ID NO: 2170056 - DNA, 25 bp, Homo sapien
gcctctgggtctcgtactcgaagat

SEQ ID NO: 2170057 - DNA, 25 bp, Homo sapien
tcgaagatcttcttctcgtaaagcc

SEQ ID NO: 2170058 - DNA, 25 bp, Homo sapien
ttctcgtaaagcctacgagttgatc

SEQ ID NO: 2170059 - DNA, 25 bp, Homo sapien
tcttgggaagatcatacatatctgc

SEQ ID NO: 2170060 - DNA, 25 bp, Homo sapien
tgctctggtagagtaaagcgtcctc

SEQ ID NO: 2170061 - DNA, 25 bp, Homo sapien
gcatcccctctagtcgaattcaagt

SEQ ID NO: 2170062 - DNA, 25 bp, Homo sapien
acatatctgcatcccctctagtcga

SEQ ID NO: 2170063 - DNA, 25 bp, Homo sapien
ggcctgatggccctaatctgaatcc

SEQ ID NO: 2170064 - DNA, 25 bp, Homo sapien
gggactgaggtctcaggtcctccct

SEQ ID NO: 2170065 - DNA, 25 bp, Homo sapien
gatggccctaatctgaatcccattt

SEQ ID NO: 2170066 - DNA, 25 bp, Homo sapien
gacgaagtcgggtgaaggtgccagc

SEQ ID NO: 2170067 - DNA, 25 bp, Homo sapien
actcgggctccccataagtcctggt

SEQ ID NO: 2170068 - DNA, 25 bp, Homo sapien
ctggtggtgaagtagctctcttcat

SEQ ID NO: 2170069 - DNA, 25 bp, Homo sapien
tcttcatagtagtcgtcattgtagc

SEQ ID NO: 2170070 - DNA, 25 bp, Homo sapien
tggcggacagccctggacgggccgg

SEQ ID NO: 2170071 - DNA, 25 bp, Homo sapien
agcatctgggaatgaagtcactgac

SEQ ID NO: 2170072 - DNA, 25 bp, Homo sapien
gcgtcagcatctgggaatgaagtca

SEQ ID NO: 2170073 - DNA, 25 bp, Homo sapien
gatggaaagcgtcagcatctgggaa

SEQ ID NO: 2170074 - DNA, 25 bp, Homo sapien
ctggtgatggaaagcgtcagcatct

SEQ ID NO: 2170075 - DNA, 25 bp, Homo sapien
gtacccaagtacaggacgcctgcca

SEQ ID NO: 2170076 - DNA, 25 bp, Homo sapien
aaacacagccgcgatcccctaggtt

SEQ ID NO: 2170077 - DNA, 25 bp, Homo sapien
cgcgatcccctaggttgtacccaag

SEQ ID NO: 2170078 - DNA, 25 bp, Homo sapien
taggttgtacccaagtacaggacgc

SEQ ID NO: 2170079 - DNA, 25 bp, Homo sapien
ccctctgacctttggttagaggcca

SEQ ID NO: 2170080 - DNA, 25 bp, Homo sapien
caggaacccacaccctcctgaatgg

SEQ ID NO: 2170081 - DNA, 25 bp, Homo sapien
gggtgttcagccctttatccatggg

SEQ ID NO: 2170082 - DNA, 25 bp, Homo sapien
tgacctttggttagaggccaggaac

SEQ ID NO: 2170083 - DNA, 25 bp, Homo sapien
gaagaagacaaaagatcgtcatcat

SEQ ID NO: 2170084 - DNA, 25 bp, Homo sapien
agaagaagacaaaagatcgtcatca

SEQ ID NO: 2170085 - DNA, 25 bp, Homo sapien
agcctggacccagaaccagcccgtc

SEQ ID NO: 2170086 - DNA, 25 bp, Homo sapien
ctggacccagaaccagcccgtccct

SEQ ID NO: 2170087 - DNA, 25 bp, Homo sapien
aggagcctggacccagaaccagccc

SEQ ID NO: 2170088 - DNA, 25 bp, Homo sapien
tggacccagaaccagcccgtccctg

SEQ ID NO: 2170089 - DNA, 25 bp, Homo sapien
ctgtcccggccgtacatggggcgtt

SEQ ID NO: 2170090 - DNA, 25 bp, Homo sapien
tgtcccggccgtacatggggcgttc

SEQ ID NO: 2170091 - DNA, 25 bp, Homo sapien
gaagaagaggacgatcacaaagacc

SEQ ID NO: 2170092 - DNA, 25 bp, Homo sapien
caggagcacggttttcaggccggat

SEQ ID NO: 2170093 - DNA, 25 bp, Homo sapien
aacagggcggtagtgcgtgatgctc

SEQ ID NO: 2170094 - DNA, 25 bp, Homo sapien
cccagagcgggacctggcgatcctg

SEQ ID NO: 2170095 - DNA, 25 bp, Homo sapien
cagcgccccccaagcaaaaacacat

SEQ ID NO: 2170096 - DNA, 25 bp, Homo sapien
tgacaaagaggaccatggagggcct

SEQ ID NO: 2170097 - DNA, 25 bp, Homo sapien
gagcaagcactactctgggctaggc

SEQ ID NO: 2170098 - DNA, 25 bp, Homo sapien
ccaaagacctagctctgaagcccag

SEQ ID NO: 2170099 - DNA, 25 bp, Homo sapien
ccggcgggcggagactagggctgtc

SEQ ID NO: 2170100 - DNA, 25 bp, Homo sapien
cctcggcaccgccttccgcgcctgc

SEQ ID NO: 2170101 - DNA, 25 bp, Homo sapien
ggagcgaccgaagcggaggcgggga

SEQ ID NO: 2170102 - DNA, 25 bp, Homo sapien
ggagactagggctgtccctccacgc

SEQ ID NO: 2170103 - DNA, 25 bp, Homo sapien
agcatggtcattggcgaggacaggc

SEQ ID NO: 2170104 - DNA, 25 bp, Homo sapien
gcgaggacaggcgaagaggaggacg

SEQ ID NO: 2170105 - DNA, 25 bp, Homo sapien
cttcccgtgggcgcctggagcttac

SEQ ID NO: 2170106 - DNA, 25 bp, Homo sapien
gcgaagaggaggacggataggcggg

SEQ ID NO: 2170107 - DNA, 25 bp, Homo sapien
ctgggcagcaggagcgtcagtcaag

SEQ ID NO: 2170108 - DNA, 25 bp, Homo sapien
caggagcgtcagtcaagggcgaggg

SEQ ID NO: 2170109 - DNA, 25 bp, Homo sapien
gcgaggggcgggaattccgtgcaat

SEQ ID NO: 2170110 - DNA, 25 bp, Homo sapien
ggcagcaggagcgtcagtcaagggc

SEQ ID NO: 2170111 - DNA, 25 bp, Homo sapien
gcaggtgccacgacctctggacgtt

SEQ ID NO: 2170112 - DNA, 25 bp, Homo sapien
tcgggaatggaacgcttagagaagc

SEQ ID NO: 2170113 - DNA, 25 bp, Homo sapien
cccaaaacacaaggcggcactgttg

SEQ ID NO: 2170114 - DNA, 25 bp, Homo sapien
gcactgttgcgtgtgcaccggcgac

SEQ ID NO: 2170115 - DNA, 25 bp, Homo sapien
cggtgatggactccatgactcccgg

SEQ ID NO: 2170116 - DNA, 25 bp, Homo sapien
cgcgtgggtccgctgagataacgct

SEQ ID NO: 2170117 - DNA, 25 bp, Homo sapien
tgagataacgctccgcggtgatgga

SEQ ID NO: 2170118 - DNA, 25 bp, Homo sapien
tggactccatgactcccggagcaga

SEQ ID NO: 2170119 - DNA, 25 bp, Homo sapien
tgcggctccgcgagcgtggaccgtt

SEQ ID NO: 2170120 - DNA, 25 bp, Homo sapien
agcgtggaccgttccgtggccatga

SEQ ID NO: 2170121 - DNA, 25 bp, Homo sapien
ttccgtggccatgagcgggaagaac

SEQ ID NO: 2170122 - DNA, 25 bp, Homo sapien
ccgtggccatgagcgggaagaacca

SEQ ID NO: 2170123 - DNA, 25 bp, Homo sapien
gaaaccctgttgaatgacggaagca

SEQ ID NO: 2170124 - DNA, 25 bp, Homo sapien
caaatgtgttgcatccaagctctga

SEQ ID NO: 2170125 - DNA, 25 bp, Homo sapien
gaatgcagcacagggacagttacgg

SEQ ID NO: 2170126 - DNA, 25 bp, Homo sapien
gagtcaactgtacgtctccagggcc

SEQ ID NO: 2170127 - DNA, 25 bp, Homo sapien
aaatctgcctacagggcgggtgcag

SEQ ID NO: 2170128 - DNA, 25 bp, Homo sapien
aaaatctgcctacagggcgggtgca

SEQ ID NO: 2170129 - DNA, 25 bp, Homo sapien
aaaaatctgcctacagggcgggtgc

SEQ ID NO: 2170130 - DNA, 25 bp, Homo sapien
taggctttgccgttaactgtgacag

SEQ ID NO: 2170131 - DNA, 25 bp, Homo sapien
gggcttcgccacatggtcgcgagaa

SEQ ID NO: 2170132 - DNA, 25 bp, Homo sapien
cgaccgcgagagtgtccctgagctt

SEQ ID NO: 2170133 - DNA, 25 bp, Homo sapien
gccatcttgggcgtagaactcttgc

SEQ ID NO: 2170134 - DNA, 25 bp, Homo sapien
gggcgtagcccagcacatgcgcaga

SEQ ID NO: 2170135 - DNA, 25 bp, Homo sapien
ctgtcagacgtcatgaccatagacg

SEQ ID NO: 2170136 - DNA, 25 bp, Homo sapien
tcatgaccatagacgcagccgctct

SEQ ID NO: 2170137 - DNA, 25 bp, Homo sapien
catgcgcagatcagagaggtgaccg

SEQ ID NO: 2170138 - DNA, 25 bp, Homo sapien
catggcttatataggcggtctgtct

SEQ ID NO: 2170139 - DNA, 25 bp, Homo sapien
tatataggcggtctgtctgcgcgcg

SEQ ID NO: 2170140 - DNA, 25 bp, Homo sapien
cctccgcctgcgcatggcttatata

SEQ ID NO: 2170141 - DNA, 25 bp, Homo sapien
ctgcgcgcgtaagaaccatagagtc

SEQ ID NO: 2170142 - DNA, 25 bp, Homo sapien
cgcaagagacgacaactgcgcttac

SEQ ID NO: 2170143 - DNA, 25 bp, Homo sapien
gtgtgagaaccagcaacggcaccgc

SEQ ID NO: 2170144 - DNA, 25 bp, Homo sapien
gcaacggcaccgcaagagacgacaa

SEQ ID NO: 2170145 - DNA, 25 bp, Homo sapien
ggcaccgcaagagacgacaactgcg

SEQ ID NO: 2170146 - DNA, 25 bp, Homo sapien
ctgcaacgaaaaagagagagtcgga

SEQ ID NO: 2170147 - DNA, 25 bp, Homo sapien
caacgaaaaagagagagtcggaacg

SEQ ID NO: 2170148 - DNA, 25 bp, Homo sapien
agagtcggaacggaagacgagaaca

SEQ ID NO: 2170149 - DNA, 25 bp, Homo sapien
gtcggaacggaagacgagaacagac

SEQ ID NO: 2170150 - DNA, 25 bp, Homo sapien
tatctagcgcccgaaaatgcggtga

SEQ ID NO: 2170151 - DNA, 25 bp, Homo sapien
taagacagagaacgcacacaaaggc

SEQ ID NO: 2170152 - DNA, 25 bp, Homo sapien
caattgttttcagcgggccataggc

SEQ ID NO: 2170153 - DNA, 25 bp, Homo sapien
aaaggccccaagagcgtatctagcg

SEQ ID NO: 2170154 - DNA, 25 bp, Homo sapien
tctcttcaagacactgcgtactaca

SEQ ID NO: 2170155 - DNA, 25 bp, Homo sapien
aaatcgccgcattatcattgcacag

SEQ ID NO: 2170156 - DNA, 25 bp, Homo sapien
gctcaggtcacccaatttaagactt

SEQ ID NO: 2170157 - DNA, 25 bp, Homo sapien
tacgcttcctataaacactttgcaa

SEQ ID NO: 2170158 - DNA, 25 bp, Homo sapien
acaggttaggtgaggttcacagaaa

SEQ ID NO: 2170159 - DNA, 25 bp, Homo sapien
ctacaaagcaacagttggctgctgc

SEQ ID NO: 2170160 - DNA, 25 bp, Homo sapien
tgcacgtccacttctaaaccgtttc

SEQ ID NO: 2170161 - DNA, 25 bp, Homo sapien
agaaagcccaacaggcactttgccc

SEQ ID NO: 2170162 - DNA, 25 bp, Homo sapien
ttgggtacggcttgttcttacaata

SEQ ID NO: 2170163 - DNA, 25 bp, Homo sapien
cggacgcggagtccgcagagccaac

SEQ ID NO: 2170164 - DNA, 25 bp, Homo sapien
cagacggacgcggagtccgcagagc

SEQ ID NO: 2170165 - DNA, 25 bp, Homo sapien
acggacgcggagtccgcagagccaa

SEQ ID NO: 2170166 - DNA, 25 bp, Homo sapien
gggtgtcacagacggacgcggagtc

SEQ ID NO: 2170167 - DNA, 25 bp, Homo sapien
gccacaaagcggaaactcatccact

SEQ ID NO: 2170168 - DNA, 25 bp, Homo sapien
tttccgccccaggtcaaaaatgcga

SEQ ID NO: 2170169 - DNA, 25 bp, Homo sapien
accatgtggccacaaagcggaaact

SEQ ID NO: 2170170 - DNA, 25 bp, Homo sapien
ccgccccaggtcaaaaatgcgaatc

SEQ ID NO: 2170171 - DNA, 25 bp, Homo sapien
taatagagaaacattcaccacgact

SEQ ID NO: 2170172 - DNA, 25 bp, Homo sapien
gttttgtaaggctcatgtttcatca

SEQ ID NO: 2170173 - DNA, 25 bp, Homo sapien
caattccagtgcagtgtatgtgggt

SEQ ID NO: 2170174 - DNA, 25 bp, Homo sapien
gcaaagtgagagaagataatagaga

SEQ ID NO: 2170175 - DNA, 25 bp, Homo sapien
ccggatatggaagccatctttgcca

SEQ ID NO: 2170176 - DNA, 25 bp, Homo sapien
ttcagctacctgctggcaagatggt

SEQ ID NO: 2170177 - DNA, 25 bp, Homo sapien
gctaaaagcaagaagagctactccc

SEQ ID NO: 2170178 - DNA, 25 bp, Homo sapien
gggccacctctatgctctgataaaa

SEQ ID NO: 2170179 - DNA, 25 bp, Homo sapien
ggtcctgagtgaccactgaaagtca

SEQ ID NO: 2170180 - DNA, 25 bp, Homo sapien
agccatcgcacactgggtccccatg

SEQ ID NO: 2170181 - DNA, 25 bp, Homo sapien
tgtgtgcagccatcgcacactgggt

SEQ ID NO: 2170182 - DNA, 25 bp, Homo sapien
ccatcgcacactgggtccccatgag

SEQ ID NO: 2170183 - DNA, 25 bp, Homo sapien
ctcagtcggcttaattggctgcgga

SEQ ID NO: 2170184 - DNA, 25 bp, Homo sapien
aaggtcagaaacatgaacatccacc

SEQ ID NO: 2170185 - DNA, 25 bp, Homo sapien
caaggtcagaaacatgaacatccac

SEQ ID NO: 2170186 - DNA, 25 bp, Homo sapien
ggtcagaaacatgaacatccacctg

SEQ ID NO: 2170187 - DNA, 25 bp, Homo sapien
cagaaacatgaacatccacctgaaa

SEQ ID NO: 2170188 - DNA, 25 bp, Homo sapien
tggtgcggatggacatgataacttg

SEQ ID NO: 2170189 - DNA, 25 bp, Homo sapien
tgcggatggacatgataacttggcc

SEQ ID NO: 2170190 - DNA, 25 bp, Homo sapien
gggctttccaaaggcacctcgcatg

SEQ ID NO: 2170191 - DNA, 25 bp, Homo sapien
cttggtgcggatggacatgataact

SEQ ID NO: 2170192 - DNA, 25 bp, Homo sapien
tgcgcagggcctcaatcacatgctc

SEQ ID NO: 2170193 - DNA, 25 bp, Homo sapien
tctggcggccaggaaacttgaactt

SEQ ID NO: 2170194 - DNA, 25 bp, Homo sapien
cttctggcggccaggaaacttgaac

SEQ ID NO: 2170195 - DNA, 25 bp, Homo sapien
tggcggccaggaaacttgaacttgg

SEQ ID NO: 2170196 - DNA, 25 bp, Homo sapien
gggagaagggggctgcagcactaca

SEQ ID NO: 2170197 - DNA, 25 bp, Homo sapien
agaagggggctgcagcactacatac

SEQ ID NO: 2170198 - DNA, 25 bp, Homo sapien
ggcaaaggtgggagaagggggctgc

SEQ ID NO: 2170199 - DNA, 25 bp, Homo sapien
gtgggagaagggggctgcagcacta

SEQ ID NO: 2170200 - DNA, 25 bp, Homo sapien
ctaaggagcaatggaaagaactgag

SEQ ID NO: 2170201 - DNA, 25 bp, Homo sapien
aatggaaagaactgagtcaggaggc

SEQ ID NO: 2170202 - DNA, 25 bp, Homo sapien
caatggaaagaactgagtcaggagg

SEQ ID NO: 2170203 - DNA, 25 bp, Homo sapien
ggagcaatggaaagaactgagtcag

SEQ ID NO: 2170204 - DNA, 25 bp, Homo sapien
cgactggggatgtacttgaccccac

SEQ ID NO: 2170205 - DNA, 25 bp, Homo sapien
gccacgactggggatgtacttgacc

SEQ ID NO: 2170206 - DNA, 25 bp, Homo sapien
cacgactggggatgtacttgacccc

SEQ ID NO: 2170207 - DNA, 25 bp, Homo sapien
attcatcagcattgaacttggtgaa

SEQ ID NO: 2170208 - DNA, 25 bp, Homo sapien
aatttattggtgagtattaagaggg

SEQ ID NO: 2170209 - DNA, 25 bp, Homo sapien
tggtgagtattaagaggggggcagc

SEQ ID NO: 2170210 - DNA, 25 bp, Homo sapien
agtattaagaggggggcagcacatt

SEQ ID NO: 2170211 - DNA, 25 bp, Homo sapien
tattggtgagtattaagaggggggc

SEQ ID NO: 2170212 - DNA, 25 bp, Homo sapien
taatccggtgaacaatgcagtcagg

SEQ ID NO: 2170213 - DNA, 25 bp, Homo sapien
caaggctggtcaaggcaacatctcc

SEQ ID NO: 2170214 - DNA, 25 bp, Homo sapien
taagccccaatagctacaaggaggg

SEQ ID NO: 2170215 - DNA, 25 bp, Homo sapien
aaaacactggctgggacgctagaag

SEQ ID NO: 2170216 - DNA, 25 bp, Homo sapien
cacctgccaggtagtgtagtatcag

SEQ ID NO: 2170217 - DNA, 25 bp, Homo sapien
tagtatcaggagtggagacaaagtg

SEQ ID NO: 2170218 - DNA, 25 bp, Homo sapien
ctgagaacaaaaacccagattggtg

SEQ ID NO: 2170219 - DNA, 25 bp, Homo sapien
tgaagatgttgtatgacaagaagga

SEQ ID NO: 2170220 - DNA, 25 bp, Homo sapien
caggaaccgtcgctctctctggttc

SEQ ID NO: 2170221 - DNA, 25 bp, Homo sapien
aggaaccgtcgctctctctggttct

SEQ ID NO: 2170222 - DNA, 25 bp, Homo sapien
gccaggaaccgtcgctctctctggt

SEQ ID NO: 2170223 - DNA, 25 bp, Homo sapien
agccaggaaccgtcgctctctctgg

SEQ ID NO: 2170224 - DNA, 25 bp, Homo sapien
gacttccagctcctgcgccttcccc

SEQ ID NO: 2170225 - DNA, 25 bp, Homo sapien
cagctcctgcgccttccccagcaac

SEQ ID NO: 2170226 - DNA, 25 bp, Homo sapien
tcctgcgccttccccagcaactgct

SEQ ID NO: 2170227 - DNA, 25 bp, Homo sapien
acttccagctcctgcgccttcccca

SEQ ID NO: 2170228 - DNA, 25 bp, Homo sapien
tggggtgcccggtctcgtggcatca

SEQ ID NO: 2170229 - DNA, 25 bp, Homo sapien
ccttggggtgcccggtctcgtggca

SEQ ID NO: 2170230 - DNA, 25 bp, Homo sapien
ggtgcccggtctcgtggcatcaggc

SEQ ID NO: 2170231 - DNA, 25 bp, Homo sapien
gggtgcccggtctcgtggcatcagg

SEQ ID NO: 2170232 - DNA, 25 bp, Homo sapien
ggaaacgggaaagcgggcgctggca

SEQ ID NO: 2170233 - DNA, 25 bp, Homo sapien
cgcaacagggtactggaccgaggtc

SEQ ID NO: 2170234 - DNA, 25 bp, Homo sapien
tctccgaagtcacaggccgtgggcg

SEQ ID NO: 2170235 - DNA, 25 bp, Homo sapien
tctctcgtcactggggagcggtctc

SEQ ID NO: 2170236 - DNA, 25 bp, Homo sapien
ccttcgcaggtcaggccggagcagc

SEQ ID NO: 2170237 - DNA, 25 bp, Homo sapien
gcccctgactggcccgcgcacggac

SEQ ID NO: 2170238 - DNA, 25 bp, Homo sapien
tggcccctgactggcccgcgcacgg

SEQ ID NO: 2170239 - DNA, 25 bp, Homo sapien
ggcccctgactggcccgcgcacgga

SEQ ID NO: 2170240 - DNA, 25 bp, Homo sapien
cctgtggaacgcctctaggctgcga

SEQ ID NO: 2170241 - DNA, 25 bp, Homo sapien
gccgacctgtggaacgcctctaggc

SEQ ID NO: 2170242 - DNA, 25 bp, Homo sapien
ctgcgacctctaccgcctcgacaca

SEQ ID NO: 2170243 - DNA, 25 bp, Homo sapien
ggaacgcctctaggctgcgacctct

SEQ ID NO: 2170244 - DNA, 25 bp, Homo sapien
gtccaggtgagcggcggcaccgcgg

SEQ ID NO: 2170245 - DNA, 25 bp, Homo sapien
aagcagctgtaggtgcccaccaagc

SEQ ID NO: 2170246 - DNA, 25 bp, Homo sapien
gtccagaagcagctgtaggtgccca

SEQ ID NO: 2170247 - DNA, 25 bp, Homo sapien
agaagcagctgtaggtgcccaccaa

SEQ ID NO: 2170248 - DNA, 25 bp, Homo sapien
tggtccagaagcagctgtaggtgcc

SEQ ID NO: 2170249 - DNA, 25 bp, Homo sapien
gcatgggtacccgggcgggcctgcc

SEQ ID NO: 2170250 - DNA, 25 bp, Homo sapien
ggcatgggtacccgggcgggcctgc

SEQ ID NO: 2170251 - DNA, 25 bp, Homo sapien
catgggtacccgggcgggcctgcct

SEQ ID NO: 2170252 - DNA, 25 bp, Homo sapien
agaggtcaggcgctccgggctcgcc

SEQ ID NO: 2170253 - DNA, 25 bp, Homo sapien
ctcgcccgctaggtcggggccgcgg

SEQ ID NO: 2170254 - DNA, 25 bp, Homo sapien
ggctcgcccgctaggtcggggccgc

SEQ ID NO: 2170255 - DNA, 25 bp, Homo sapien
aaggagaggtcaggcgctccgggct

SEQ ID NO: 2170256 - DNA, 25 bp, Homo sapien
tgttgtgcacggtcaggtggttcat

SEQ ID NO: 2170257 - DNA, 25 bp, Homo sapien
ccagagatgagggtcgtccatgcag

SEQ ID NO: 2170258 - DNA, 25 bp, Homo sapien
gccgggcctcgcttctcgatgagct

SEQ ID NO: 2170259 - DNA, 25 bp, Homo sapien
gactggtgattggacacggtgatga

SEQ ID NO: 2170260 - DNA, 25 bp, Homo sapien
tgctgcaggagccacaaatccaagt

SEQ ID NO: 2170261 - DNA, 25 bp, Homo sapien
ctggaggcctgacgttaaaggagct

SEQ ID NO: 2170262 - DNA, 25 bp, Homo sapien
tgccagggctccatgaaaaggcagc

SEQ ID NO: 2170263 - DNA, 25 bp, Homo sapien
ggagctgtaagatatgccctgtggc

SEQ ID NO: 2170264 - DNA, 25 bp, Homo sapien
tctctgttcaggagtggaagcccca

SEQ ID NO: 2170265 - DNA, 25 bp, Homo sapien
ggctccccatgaactctaggacagt

SEQ ID NO: 2170266 - DNA, 25 bp, Homo sapien
gctccagtgtggctaggtggctccc

SEQ ID NO: 2170267 - DNA, 25 bp, Homo sapien
tgtgacatctataggcctttctcca

SEQ ID NO: 2170268 - DNA, 25 bp, Homo sapien
acatacttggacaatgcccattctt

SEQ ID NO: 2170269 - DNA, 25 bp, Homo sapien
ctgcaaccagcccagtctaggctag

SEQ ID NO: 2170270 - DNA, 25 bp, Homo sapien
ccaacatacttggacaatgcccatt

SEQ ID NO: 2170271 - DNA, 25 bp, Homo sapien
ggctagtggatggctccaagtcctc

SEQ ID NO: 2170272 - DNA, 25 bp, Homo sapien
ccatctcagggaatgagggacagca

SEQ ID NO: 2170273 - DNA, 25 bp, Homo sapien
tttccctacagcccaaagtggcatc

SEQ ID NO: 2170274 - DNA, 25 bp, Homo sapien
gaatgagggacagcagcactaccat

SEQ ID NO: 2170275 - DNA, 25 bp, Homo sapien
gcatctttcagacccttaggccaga

SEQ ID NO: 2170276 - DNA, 25 bp, Homo sapien
ccagatgtggcggagtttcaggatc

SEQ ID NO: 2170277 - DNA, 25 bp, Homo sapien
ttcaggttccagatgtggcggagtt

SEQ ID NO: 2170278 - DNA, 25 bp, Homo sapien
cagatgtggcggagtttcaggatcc

SEQ ID NO: 2170279 - DNA, 25 bp, Homo sapien
aggttccagatgtggcggagtttca

SEQ ID NO: 2170280 - DNA, 25 bp, Homo sapien
gcccacttcgaggggcccattcctc

SEQ ID NO: 2170281 - DNA, 25 bp, Homo sapien
caggggagggcctgcggtgccccac

SEQ ID NO: 2170282 - DNA, 25 bp, Homo sapien
tgcccccagcatcagcatgcagaag

SEQ ID NO: 2170283 - DNA, 25 bp, Homo sapien
atcagcatgcagaagggaggcacag

SEQ ID NO: 2170284 - DNA, 25 bp, Homo sapien
cccagcatcagcatgcagaagggag

SEQ ID NO: 2170285 - DNA, 25 bp, Homo sapien
ctaagcagggacagatgcaattagt

SEQ ID NO: 2170286 - DNA, 25 bp, Homo sapien
agatgcaattagtcctgccccctgc

SEQ ID NO: 2170287 - DNA, 25 bp, Homo sapien
agggacagatgcaattagtcctgcc

SEQ ID NO: 2170288 - DNA, 25 bp, Homo sapien
taagcagggacagatgcaattagtc

SEQ ID NO: 2170289 - DNA, 25 bp, Homo sapien
agtgggagtgtagctccttggtgaa

SEQ ID NO: 2170290 - DNA, 25 bp, Homo sapien
gtgggagtgtagctccttggtgaag

SEQ ID NO: 2170291 - DNA, 25 bp, Homo sapien
aagaagtgggagtgtagctccttgg

SEQ ID NO: 2170292 - DNA, 25 bp, Homo sapien
gaagtgggagtgtagctccttggtg

SEQ ID NO: 2170293 - DNA, 25 bp, Homo sapien
ctgcctgtgtctagaacacctttcc

SEQ ID NO: 2170294 - DNA, 25 bp, Homo sapien
cctgcctgtgtctagaacacctttc

SEQ ID NO: 2170295 - DNA, 25 bp, Homo sapien
catattctacatacaactcatattt

SEQ ID NO: 2170296 - DNA, 25 bp, Homo sapien
taggattattctagaaccttcatat

SEQ ID NO: 2170297 - DNA, 25 bp, Homo sapien
tattctacatacaactcatattttc

SEQ ID NO: 2170298 - DNA, 25 bp, Homo sapien
taataggattattctagaaccttca

SEQ ID NO: 2170299 - DNA, 25 bp, Homo sapien
ccaccccacctggctatctaatcta

SEQ ID NO: 2170300 - DNA, 25 bp, Homo sapien
ttacagcgtgcgccaccacatccag

SEQ ID NO: 2170301 - DNA, 25 bp, Homo sapien
accccacctggctatctaatctatc

SEQ ID NO: 2170302 - DNA, 25 bp, Homo sapien
atctaatctatctaatcaatctatc

SEQ ID NO: 2170303 - DNA, 25 bp, Homo sapien
gtgacacccgcgcccagcctcggct

SEQ ID NO: 2170304 - DNA, 25 bp, Homo sapien
gcgtgacacccgcgcccagcctcgg

SEQ ID NO: 2170305 - DNA, 25 bp, Homo sapien
gacacccgcgcccagcctcggctaa

SEQ ID NO: 2170306 - DNA, 25 bp, Homo sapien
tgacacccgcgcccagcctcggcta

SEQ ID NO: 2170307 - DNA, 25 bp, Homo sapien
ggaaaaggcctctccctatcagtaa

SEQ ID NO: 2170308 - DNA, 25 bp, Homo sapien
tgccagctgctagagaaaccaagtg

SEQ ID NO: 2170309 - DNA, 25 bp, Homo sapien
caatgttggctgctgcgtgctggct

SEQ ID NO: 2170310 - DNA, 25 bp, Homo sapien
ttctaaacccctatgtgccaggcag

SEQ ID NO: 2170311 - DNA, 25 bp, Homo sapien
aagatatgcacccagtccccatggt

SEQ ID NO: 2170312 - DNA, 25 bp, Homo sapien
gggaagatatgcacccagtccccat

SEQ ID NO: 2170313 - DNA, 25 bp, Homo sapien
ccatccccttctggtagacgccatc

SEQ ID NO: 2170314 - DNA, 25 bp, Homo sapien
ggaagatatgcacccagtccccatg

SEQ ID NO: 2170315 - DNA, 25 bp, Homo sapien
gagcccatcccgctcatactggggg

SEQ ID NO: 2170316 - DNA, 25 bp, Homo sapien
gggggctcgacccagtcagccctgc

SEQ ID NO: 2170317 - DNA, 25 bp, Homo sapien
ctgggggggctcgacccagtcagcc

SEQ ID NO: 2170318 - DNA, 25 bp, Homo sapien
catcccgctcatactgggggggctc

SEQ ID NO: 2170319 - DNA, 25 bp, Homo sapien
tgaaacgcaggaattcggaactcat

SEQ ID NO: 2170320 - DNA, 25 bp, Homo sapien
aattcggaactcatgttcactttcc

SEQ ID NO: 2170321 - DNA, 25 bp, Homo sapien
aacgcaggaattcggaactcatgtt

SEQ ID NO: 2170322 - DNA, 25 bp, Homo sapien
caggaattcggaactcatgttcact

SEQ ID NO: 2170323 - DNA, 25 bp, Homo sapien
gcaagcccctgcgagaggcaggcct

SEQ ID NO: 2170324 - DNA, 25 bp, Homo sapien
ggtagaaatgttagcataagctggg

SEQ ID NO: 2170325 - DNA, 25 bp, Homo sapien
tggcgctacaaacacgcccatctac

SEQ ID NO: 2170326 - DNA, 25 bp, Homo sapien
tgtccccttcctggcgctacaaaca

SEQ ID NO: 2170327 - DNA, 25 bp, Homo sapien
cactcagcaatcaggcgcccgattc

SEQ ID NO: 2170328 - DNA, 25 bp, Homo sapien
ggttgagatgacactcagcaatcag

SEQ ID NO: 2170329 - DNA, 25 bp, Homo sapien
gggttgagatgacactcagcaatca

SEQ ID NO: 2170330 - DNA, 25 bp, Homo sapien
ctgggaccagagggagtcccaggcc

SEQ ID NO: 2170331 - DNA, 25 bp, Homo sapien
cagatgccatctctctgtccccgtc

SEQ ID NO: 2170332 - DNA, 25 bp, Homo sapien
accccagatgccatctctctgtccc

SEQ ID NO: 2170333 - DNA, 25 bp, Homo sapien
tgggaccagagggagtcccaggccc

SEQ ID NO: 2170334 - DNA, 25 bp, Homo sapien
gaaggccagacgtggggtggagcag

SEQ ID NO: 2170335 - DNA, 25 bp, Homo sapien
gcacagtggacagaaggccagacgt

SEQ ID NO: 2170336 - DNA, 25 bp, Homo sapien
aaggccagacgtggggtggagcagg

SEQ ID NO: 2170337 - DNA, 25 bp, Homo sapien
cacagtggacagaaggccagacgtg

SEQ ID NO: 2170338 - DNA, 25 bp, Homo sapien
gggcggactgttaggaaggacgtca

SEQ ID NO: 2170339 - DNA, 25 bp, Homo sapien
cggactgttaggaaggacgtcattc

SEQ ID NO: 2170340 - DNA, 25 bp, Homo sapien
gactgttaggaaggacgtcattcat

SEQ ID NO: 2170341 - DNA, 25 bp, Homo sapien
ctgttaggaaggacgtcattcattc

SEQ ID NO: 2170342 - DNA, 25 bp, Homo sapien
cccggagccgctcgagtacaggcag

SEQ ID NO: 2170343 - DNA, 25 bp, Homo sapien
cgcccggagccgctcgagtacaggc

SEQ ID NO: 2170344 - DNA, 25 bp, Homo sapien
actgaagggcttcccgatcagcaca

SEQ ID NO: 2170345 - DNA, 25 bp, Homo sapien
gcactgaagggcttcccgatcagca

SEQ ID NO: 2170346 - DNA, 25 bp, Homo sapien
aagcttggccaaggtgccctgggag

SEQ ID NO: 2170347 - DNA, 25 bp, Homo sapien
gaaaggaccagggatggcctgcacc

SEQ ID NO: 2170348 - DNA, 25 bp, Homo sapien
agggatggcctgcacccctcgggaa

SEQ ID NO: 2170349 - DNA, 25 bp, Homo sapien
cacccctcgggaagcttggccaagg

SEQ ID NO: 2170350 - DNA, 25 bp, Homo sapien
aagtccgtcagggctttccgcatct

SEQ ID NO: 2170351 - DNA, 25 bp, Homo sapien
cttgaatgaagtccgtcagggcttt

SEQ ID NO: 2170352 - DNA, 25 bp, Homo sapien
agtccgtcagggctttccgcatctc

SEQ ID NO: 2170353 - DNA, 25 bp, Homo sapien
cctcttgaatgaagtccgtcagggc

SEQ ID NO: 2170354 - DNA, 25 bp, Homo sapien
agggcacttgagagggtctatgaac

SEQ ID NO: 2170355 - DNA, 25 bp, Homo sapien
aatctgtctaaaagccacgtttgag

SEQ ID NO: 2170356 - DNA, 25 bp, Homo sapien
gctaaaagcatcagtccatccctca

SEQ ID NO: 2170357 - DNA, 25 bp, Homo sapien
agctctgtgcgggccaagaatccag

SEQ ID NO: 2170358 - DNA, 25 bp, Homo sapien
gctgaggtcctttgtgtaactgagg

SEQ ID NO: 2170359 - DNA, 25 bp, Homo sapien
ctgaggtcctttgtgtaactgagga

SEQ ID NO: 2170360 - DNA, 25 bp, Homo sapien
tgggagaagcagctgaggtcctttg

SEQ ID NO: 2170361 - DNA, 25 bp, Homo sapien
cctcctgaagccagcccctgggaga

SEQ ID NO: 2170362 - DNA, 25 bp, Homo sapien
tgccttctatgctccctcctgaagc

SEQ ID NO: 2170363 - DNA, 25 bp, Homo sapien
gaagccagcccctgggagagaacat

SEQ ID NO: 2170364 - DNA, 25 bp, Homo sapien
ctgccttctatgctccctcctgaag

SEQ ID NO: 2170365 - DNA, 25 bp, Homo sapien
caacggccatccctgaggaggtagt

SEQ ID NO: 2170366 - DNA, 25 bp, Homo sapien
gaaggaagacgtggccaacggccat

SEQ ID NO: 2170367 - DNA, 25 bp, Homo sapien
tatgctttatggttctgtttcaaaa

SEQ ID NO: 2170368 - DNA, 25 bp, Homo sapien
gattcaagtgatgttgagaggcaga

SEQ ID NO: 2170369 - DNA, 25 bp, Homo sapien
agcctccactgcctcagcggcctcg

SEQ ID NO: 2170370 - DNA, 25 bp, Homo sapien
tcagcctccactgcctcagcggcct

SEQ ID NO: 2170371 - DNA, 25 bp, Homo sapien
tccactgcctcagcggcctcgacag

SEQ ID NO: 2170372 - DNA, 25 bp, Homo sapien
ctccactgcctcagcggcctcgaca

SEQ ID NO: 2170373 - DNA, 25 bp, Homo sapien
cccatccgcactcgagccgtcgcca

SEQ ID NO: 2170374 - DNA, 25 bp, Homo sapien
ccatccgcactcgagccgtcgccat

SEQ ID NO: 2170375 - DNA, 25 bp, Homo sapien
ggccccatccgcactcgagccgtcg

SEQ ID NO: 2170376 - DNA, 25 bp, Homo sapien
cgcggccccatccgcactcgagccg

SEQ ID NO: 2170377 - DNA, 25 bp, Homo sapien
gccacggcatgcgccagagcgcctg

SEQ ID NO: 2170378 - DNA, 25 bp, Homo sapien
agccacggcatgcgccagagcgcct

SEQ ID NO: 2170379 - DNA, 25 bp, Homo sapien
gccgccgccgccaacgacaaaaaca

SEQ ID NO: 2170380 - DNA, 25 bp, Homo sapien
ggtcactcgaccacagcaccagcgg

SEQ ID NO: 2170381 - DNA, 25 bp, Homo sapien
cggtcactcgaccacagcaccagcg

SEQ ID NO: 2170382 - DNA, 25 bp, Homo sapien
ctcgcctaggacagcgccggagtcg

SEQ ID NO: 2170383 - DNA, 25 bp, Homo sapien
tgtcgccggcagattcgctgcgagc

SEQ ID NO: 2170384 - DNA, 25 bp, Homo sapien
gactggagctctgtcgccggcagat

SEQ ID NO: 2170385 - DNA, 25 bp, Homo sapien
gagcaaggaacagtccacctccggg

SEQ ID NO: 2170386 - DNA, 25 bp, Homo sapien
tgatgtggccttcatgagtgtcggc

SEQ ID NO: 2170387 - DNA, 25 bp, Homo sapien
tagagagctgcaagtcgctggtgat

SEQ ID NO: 2170388 - DNA, 25 bp, Homo sapien
ctccagggcgggatctaagtaggta

SEQ ID NO: 2170389 - DNA, 25 bp, Homo sapien
gccttcatgagtgtcggccgcagga

SEQ ID NO: 2170390 - DNA, 25 bp, Homo sapien
tgtttggtatacacactcgcccagc

SEQ ID NO: 2170391 - DNA, 25 bp, Homo sapien
taactcaggagtaggagtcagccgc

SEQ ID NO: 2170392 - DNA, 25 bp, Homo sapien
taatgacatcagtgtagcaagtgcc

SEQ ID NO: 2170393 - DNA, 25 bp, Homo sapien
aacagcatgcgggttatgagctcca

SEQ ID NO: 2170394 - DNA, 25 bp, Homo sapien
ttagaaaaggcgctgtcctgcttgt

SEQ ID NO: 2170395 - DNA, 25 bp, Homo sapien
ctctaggttagaaaaggcgctgtcc

SEQ ID NO: 2170396 - DNA, 25 bp, Homo sapien
acacaccgccatatgctgtgaaatc

SEQ ID NO: 2170397 - DNA, 25 bp, Homo sapien
gcttgtttccaaacacaccgccata

SEQ ID NO: 2170398 - DNA, 25 bp, Homo sapien
gactgcataccagtcgacggcagga

SEQ ID NO: 2170399 - DNA, 25 bp, Homo sapien
caggtaagtggtcagagtgctgact

SEQ ID NO: 2170400 - DNA, 25 bp, Homo sapien
tgcataccagtcgacggcaggaagc

SEQ ID NO: 2170401 - DNA, 25 bp, Homo sapien
tggtcagagtgctgactgcatacca

SEQ ID NO: 2170402 - DNA, 25 bp, Homo sapien
gcaaggggctggccccgagcttctc

SEQ ID NO: 2170403 - DNA, 25 bp, Homo sapien
gtagggcaggcgaatgagcagcaga

SEQ ID NO: 2170404 - DNA, 25 bp, Homo sapien
ctgtgtagggcaggcgaatgagcag

SEQ ID NO: 2170405 - DNA, 25 bp, Homo sapien
gtgtagggcaggcgaatgagcagca

SEQ ID NO: 2170406 - DNA, 25 bp, Homo sapien
ggctgtgtagggcaggcgaatgagc

SEQ ID NO: 2170407 - DNA, 25 bp, Homo sapien
gacttccctgggtgccatcagacca

SEQ ID NO: 2170408 - DNA, 25 bp, Homo sapien
catcttcggacttgagtgtgctcag

SEQ ID NO: 2170409 - DNA, 25 bp, Homo sapien
gtgctcaggacctgcccgatgacct

SEQ ID NO: 2170410 - DNA, 25 bp, Homo sapien
ggccgctgtgtatgggacatcttcg

SEQ ID NO: 2170411 - DNA, 25 bp, Homo sapien
cggaccgctgtgagggccgctgtgt

SEQ ID NO: 2170412 - DNA, 25 bp, Homo sapien
taactcacaggaggatggatcacag

SEQ ID NO: 2170413 - DNA, 25 bp, Homo sapien
ttttgtagcagctggcgacctagcc

SEQ ID NO: 2170414 - DNA, 25 bp, Homo sapien
ggccaccacggctacatcacgggcc

SEQ ID NO: 2170415 - DNA, 25 bp, Homo sapien
tggatcacaggtgatactggctgtt

SEQ ID NO: 2170416 - DNA, 25 bp, Homo sapien
ccttgtacgccacagagaagttttg

SEQ ID NO: 2170417 - DNA, 25 bp, Homo sapien
cttgtacgccacagagaagttttgg

SEQ ID NO: 2170418 - DNA, 25 bp, Homo sapien
ttgtacgccacagagaagttttggg

SEQ ID NO: 2170419 - DNA, 25 bp, Homo sapien
gtccttgtacgccacagagaagttt

SEQ ID NO: 2170420 - DNA, 25 bp, Homo sapien
cagaaggagccagtcaggttgagtt

SEQ ID NO: 2170421 - DNA, 25 bp, Homo sapien
aaggagccagtcaggttgagttcct

SEQ ID NO: 2170422 - DNA, 25 bp, Homo sapien
caaaggtgaggggagtcaggtcctc

SEQ ID NO: 2170423 - DNA, 25 bp, Homo sapien
ccaaaggtgaggggagtcaggtcct

SEQ ID NO: 2170424 - DNA, 25 bp, Homo sapien
tgtggtaccaaagagtcgttcatag

SEQ ID NO: 2170425 - DNA, 25 bp, Homo sapien
cactgtggtaccaaagagtcgttca

SEQ ID NO: 2170426 - DNA, 25 bp, Homo sapien
taccaaagagtcgttcataggtcag

SEQ ID NO: 2170427 - DNA, 25 bp, Homo sapien
gagtcgttcataggtcagtgagagc

SEQ ID NO: 2170428 - DNA, 25 bp, Homo sapien
ctgggtagaggcggttggccagaat

SEQ ID NO: 2170429 - DNA, 25 bp, Homo sapien
ggtagaggcggttggccagaatgaa

SEQ ID NO: 2170430 - DNA, 25 bp, Homo sapien
gggtagaggcggttggccagaatga

SEQ ID NO: 2170431 - DNA, 25 bp, Homo sapien
gtagaggcggttggccagaatgaac

SEQ ID NO: 2170432 - DNA, 25 bp, Homo sapien
gaggagactacccttcttgctcagg

SEQ ID NO: 2170433 - DNA, 25 bp, Homo sapien
aagcattgaagtaggcgacggagcc

SEQ ID NO: 2170434 - DNA, 25 bp, Homo sapien
tgtggacttcgaggcgctccatggt

SEQ ID NO: 2170435 - DNA, 25 bp, Homo sapien
tgctgacatactcgcagtggaagga

SEQ ID NO: 2170436 - DNA, 25 bp, Homo sapien
tcttgaggctgaggatcatgtgcag

SEQ ID NO: 2170437 - DNA, 25 bp, Homo sapien
gtcgctggcgtaggagaactgctcc

SEQ ID NO: 2170438 - DNA, 25 bp, Homo sapien
caaagcgatccatggtcttgaggct

SEQ ID NO: 2170439 - DNA, 25 bp, Homo sapien
gaactgctcccccattacgttgaaa

SEQ ID NO: 2170440 - DNA, 25 bp, Homo sapien
cacagccagggatgatgtagccaca

SEQ ID NO: 2170441 - DNA, 25 bp, Homo sapien
gacagccaagcaggacagacagtta

SEQ ID NO: 2170442 - DNA, 25 bp, Homo sapien
ccttaaggagggagcatttgctaca

SEQ ID NO: 2170443 - DNA, 25 bp, Homo sapien
gggaacatgccaaacagccggcgat

SEQ ID NO: 2170444 - DNA, 25 bp, Homo sapien
cgccaccgcactggaccaaagatgg

SEQ ID NO: 2170445 - DNA, 25 bp, Homo sapien
cactggaccaaagatggcggcgcgt

SEQ ID NO: 2170446 - DNA, 25 bp, Homo sapien
cgctgctcgccgagagtctagagag

SEQ ID NO: 2170447 - DNA, 25 bp, Homo sapien
gccgcgtcaaagagtcccgcctctt

SEQ ID NO: 2170448 - DNA, 25 bp, Homo sapien
ggtcaggcctcggtgccagcgcccg

SEQ ID NO: 2170449 - DNA, 25 bp, Homo sapien
cgatcacatcgtattcctcgtccat

SEQ ID NO: 2170450 - DNA, 25 bp, Homo sapien
cagcacgatcacatcgtattcctcg

SEQ ID NO: 2170451 - DNA, 25 bp, Homo sapien
agaccggtccccagcacgatcacat

SEQ ID NO: 2170452 - DNA, 25 bp, Homo sapien
ggtccccagcacgatcacatcgtat

SEQ ID NO: 2170453 - DNA, 25 bp, Homo sapien
cgggggatggcgagggcacgacgca

SEQ ID NO: 2170454 - DNA, 25 bp, Homo sapien
gcgagggcacgacgcagggccaggg

SEQ ID NO: 2170455 - DNA, 25 bp, Homo sapien
gccggcggccgcatcatcgcggggg

SEQ ID NO: 2170456 - DNA, 25 bp, Homo sapien
ggatggcgagggcacgacgcagggc

SEQ ID NO: 2170457 - DNA, 25 bp, Homo sapien
cacggcgccggcttttcggggagcg

SEQ ID NO: 2170458 - DNA, 25 bp, Homo sapien
tcggggagcggagcgcagaagatgg

SEQ ID NO: 2170459 - DNA, 25 bp, Homo sapien
cggcttttcggggagcggagcgcag

SEQ ID NO: 2170460 - DNA, 25 bp, Homo sapien
gcacggcgccggcttttcggggagc

SEQ ID NO: 2170461 - DNA, 25 bp, Homo sapien
taggcgggcaatgggtgcgggcgac

SEQ ID NO: 2170462 - DNA, 25 bp, Homo sapien
tgcgggcgacgggtggatgccgtga

SEQ ID NO: 2170463 - DNA, 25 bp, Homo sapien
gctgagaggcaacgctaggcgggca

SEQ ID NO: 2170464 - DNA, 25 bp, Homo sapien
tgcgttttccggtccagcgggcagg

SEQ ID NO: 2170465 - DNA, 25 bp, Homo sapien
ggaggagctctcgcccccgtagtag

SEQ ID NO: 2170466 - DNA, 25 bp, Homo sapien
aggggttccggtccatgtgcagcac

SEQ ID NO: 2170467 - DNA, 25 bp, Homo sapien
aggagctctcgcccccgtagtaggg

SEQ ID NO: 2170468 - DNA, 25 bp, Homo sapien
cgtagtaggggttccggtccatgtg

SEQ ID NO: 2170469 - DNA, 25 bp, Homo sapien
tgaggaatttgggaatcaggtcaac

SEQ ID NO: 2170470 - DNA, 25 bp, Homo sapien
tcggcctcggcccatcgactcaggg

SEQ ID NO: 2170471 - DNA, 25 bp, Homo sapien
caacattccagtctcggcctcggcc

SEQ ID NO: 2170472 - DNA, 25 bp, Homo sapien
ccagcaactgaaaacgcttatacag

SEQ ID NO: 2170473 - DNA, 25 bp, Homo sapien
ctgcaatacctccttcctgtccctc

SEQ ID NO: 2170474 - DNA, 25 bp, Homo sapien
tgcaatacctccttcctgtccctca

SEQ ID NO: 2170475 - DNA, 25 bp, Homo sapien
gcaatacctccttcctgtccctcac

SEQ ID NO: 2170476 - DNA, 25 bp, Homo sapien
agccaaggcctcagtctcagtggac

SEQ ID NO: 2170477 - DNA, 25 bp, Homo sapien
cgagtcacctctgtatacagtagca

SEQ ID NO: 2170478 - DNA, 25 bp, Homo sapien
gacggcactttgtagatcttgcccc

SEQ ID NO: 2170479 - DNA, 25 bp, Homo sapien
gatcttgccccccttgtagacaaag

SEQ ID NO: 2170480 - DNA, 25 bp, Homo sapien
gaagaggggattggcctggatgggc

SEQ ID NO: 2170481 - DNA, 25 bp, Homo sapien
gcctggatgggctctaagggccttc

SEQ ID NO: 2170482 - DNA, 25 bp, Homo sapien
tggatgggctctaagggccttcctg

SEQ ID NO: 2170483 - DNA, 25 bp, Homo sapien
cacttggcgatgtctcggggattca

SEQ ID NO: 2170484 - DNA, 25 bp, Homo sapien
gggtcattctcatcgaagtttgcca

SEQ ID NO: 2170485 - DNA, 25 bp, Homo sapien
acgtcacgcatgctggtagtctggg

SEQ ID NO: 2170486 - DNA, 25 bp, Homo sapien
tggcccagatcaaacttccggtaga

SEQ ID NO: 2170487 - DNA, 25 bp, Homo sapien
gaacttgcggaagcgccgtttctca

SEQ ID NO: 2170488 - DNA, 25 bp, Homo sapien
gagcctgtggctgagtacaagagac

SEQ ID NO: 2170489 - DNA, 25 bp, Homo sapien
tgtggctgagtacaagagacatgcg

SEQ ID NO: 2170490 - DNA, 25 bp, Homo sapien
atggaaagggtgataggtgagcctg

SEQ ID NO: 2170491 - DNA, 25 bp, Homo sapien
gggaatagcagcacccctgatttac

SEQ ID NO: 2170492 - DNA, 25 bp, Homo sapien
aatatgggctcttgccataccgggc

SEQ ID NO: 2170493 - DNA, 25 bp, Homo sapien
tgatgcggttgacggtctcaaggca

SEQ ID NO: 2170494 - DNA, 25 bp, Homo sapien
tcgcccaagccgtagagcgggtata

SEQ ID NO: 2170495 - DNA, 25 bp, Homo sapien
gactcactgtacaacttgatgcggt

SEQ ID NO: 2170496 - DNA, 25 bp, Homo sapien
taagccctgactcaaggttctggga

SEQ ID NO: 2170497 - DNA, 25 bp, Homo sapien
cctgagggaccagaatggactctct

SEQ ID NO: 2170498 - DNA, 25 bp, Homo sapien
gaaaatgctcaaggcggccatctcc

SEQ ID NO: 2170499 - DNA, 25 bp, Homo sapien
tatgccaactgaaaaaacccatgtc

SEQ ID NO: 2170500 - DNA, 25 bp, Homo sapien
tatatgtccccccatagatggcact

SEQ ID NO: 2170501 - DNA, 25 bp, Homo sapien
gcccaccaccttgccgttctccatg

SEQ ID NO: 2170502 - DNA, 25 bp, Homo sapien
tctccctcagacttcacgcccacca

SEQ ID NO: 2170503 - DNA, 25 bp, Homo sapien
caccttgccgttctccatgatgatg

SEQ ID NO: 2170504 - DNA, 25 bp, Homo sapien
cccagaggcactgtgatcaagaaca

SEQ ID NO: 2170505 - DNA, 25 bp, Homo sapien
taccctgccgctcagataggtgggc

SEQ ID NO: 2170506 - DNA, 25 bp, Homo sapien
tgtggcctctgaaagagacctctca

SEQ ID NO: 2170507 - DNA, 25 bp, Homo sapien
tctggcagacaagacgttcctcgga

SEQ ID NO: 2170508 - DNA, 25 bp, Homo sapien
acagatcagctgcttgcagcgggcc

SEQ ID NO: 2170509 - DNA, 25 bp, Homo sapien
agatcagctgcttgcagcgggccac

SEQ ID NO: 2170510 - DNA, 25 bp, Homo sapien
ctggggtcacagatcagctgcttgc

SEQ ID NO: 2170511 - DNA, 25 bp, Homo sapien
gggtcacagatcagctgcttgcagc

SEQ ID NO: 2170512 - DNA, 25 bp, Homo sapien
tggctaaggatacagatgatgcgga

SEQ ID NO: 2170513 - DNA, 25 bp, Homo sapien
cttccgcacacggtccgggatgtag

SEQ ID NO: 2170514 - DNA, 25 bp, Homo sapien
tttggcaggagttggcgtcgttggt

SEQ ID NO: 2170515 - DNA, 25 bp, Homo sapien
atgatgcggataacctggccagcct

SEQ ID NO: 2170516 - DNA, 25 bp, Homo sapien
caaaccctagggctccaagttgtgg

SEQ ID NO: 2170517 - DNA, 25 bp, Homo sapien
aggaagagctccgtcaactcaggcc

SEQ ID NO: 2170518 - DNA, 25 bp, Homo sapien
gttgtggtggctacaatgtggctca

SEQ ID NO: 2170519 - DNA, 25 bp, Homo sapien
gagaacaccctagaggaagctgtac

SEQ ID NO: 2170520 - DNA, 25 bp, Homo sapien
cctgggccgccacgttgtgtgcata

SEQ ID NO: 2170521 - DNA, 25 bp, Homo sapien
tccacagtagtgctggcaatagcta

SEQ ID NO: 2170522 - DNA, 25 bp, Homo sapien
atagctatgtacttgccctgggccg

SEQ ID NO: 2170523 - DNA, 25 bp, Homo sapien
tgcataggagatcatgcacacgtag

SEQ ID NO: 2170524 - DNA, 25 bp, Homo sapien
accatcatcaatgggctcatacaag

SEQ ID NO: 2170525 - DNA, 25 bp, Homo sapien
acaaccatcatcaatgggctcatac

SEQ ID NO: 2170526 - DNA, 25 bp, Homo sapien
tgggctcatacaagtcactgatagc

SEQ ID NO: 2170527 - DNA, 25 bp, Homo sapien
catacaagtcactgatagccacaaa

SEQ ID NO: 2170528 - DNA, 25 bp, Homo sapien
ggtgagtcagacaggtatcctgggc

SEQ ID NO: 2170529 - DNA, 25 bp, Homo sapien
cagacaggtatcctgggcgggcagc

SEQ ID NO: 2170530 - DNA, 25 bp, Homo sapien
agtcagacaggtatcctgggcgggc

SEQ ID NO: 2170531 - DNA, 25 bp, Homo sapien
tgagtcagacaggtatcctgggcgg

SEQ ID NO: 2170532 - DNA, 25 bp, Homo sapien
ccgtgccagccatgcgtttgtagat

SEQ ID NO: 2170533 - DNA, 25 bp, Homo sapien
catcgtaggagcaggaacagaacac

SEQ ID NO: 2170534 - DNA, 25 bp, Homo sapien
gatgtcgttgcaggttgtctcaaag

SEQ ID NO: 2170535 - DNA, 25 bp, Homo sapien
gacgtcgttctgtttgcgcttcatg

SEQ ID NO: 2170536 - DNA, 25 bp, Homo sapien
tctcagcaagtaccacagaacacaa

SEQ ID NO: 2170537 - DNA, 25 bp, Homo sapien
catctcccaagccatcgctagggtt

SEQ ID NO: 2170538 - DNA, 25 bp, Homo sapien
ttctctccaacacgcgagagttggt

SEQ ID NO: 2170539 - DNA, 25 bp, Homo sapien
cctcaggccacacgggaaggctgca

SEQ ID NO: 2170540 - DNA, 25 bp, Homo sapien
gcggcggcggcgacagcgacagcgg

SEQ ID NO: 2170541 - DNA, 25 bp, Homo sapien
gcggcggcgacagcgacagcggcag

SEQ ID NO: 2170542 - DNA, 25 bp, Homo sapien
ggcggcgacagcgacagcggcagcg

SEQ ID NO: 2170543 - DNA, 25 bp, Homo sapien
ggcgacagcgacagcggcagcggca

SEQ ID NO: 2170544 - DNA, 25 bp, Homo sapien
tcgcggcgcccttgtattgagccat

SEQ ID NO: 2170545 - DNA, 25 bp, Homo sapien
ctcgcggcgcccttgtattgagcca

SEQ ID NO: 2170546 - DNA, 25 bp, Homo sapien
tgcttctcccgcttcttcatcaggt

SEQ ID NO: 2170547 - DNA, 25 bp, Homo sapien
cgatgcgctgcttcatctgctccat

SEQ ID NO: 2170548 - DNA, 25 bp, Homo sapien
tctgctccatctgctcgcgctgctt

SEQ ID NO: 2170549 - DNA, 25 bp, Homo sapien
tctcccgcttcttcatcaggtgcat

SEQ ID NO: 2170550 - DNA, 25 bp, Homo sapien
atgctccgaggctccccggctcgca

SEQ ID NO: 2170551 - DNA, 25 bp, Homo sapien
ctgggcagcgcgcatgctccgaggc

SEQ ID NO: 2170552 - DNA, 25 bp, Homo sapien
agcgcgcatgctccgaggctccccg

SEQ ID NO: 2170553 - DNA, 25 bp, Homo sapien
gcgcatgctccgaggctccccggct

SEQ ID NO: 2170554 - DNA, 25 bp, Homo sapien
ggtcatcagctagtggcctcagcct

SEQ ID NO: 2170555 - DNA, 25 bp, Homo sapien
ccggtgtccataggaccagggcaga

SEQ ID NO: 2170556 - DNA, 25 bp, Homo sapien
aagcagtgggtgaaccgctggcacc

SEQ ID NO: 2170557 - DNA, 25 bp, Homo sapien
cagatgagactgtcgctggcttgct

SEQ ID NO: 2170558 - DNA, 25 bp, Homo sapien
gcagagaacttcttgtcaatgttgg

SEQ ID NO: 2170559 - DNA, 25 bp, Homo sapien
ctccaccgcgtcgtagtgcgcagag

SEQ ID NO: 2170560 - DNA, 25 bp, Homo sapien
caatgttggatttcatgatgttctc

SEQ ID NO: 2170561 - DNA, 25 bp, Homo sapien
ggacttgagctctgcctccaccgcg

SEQ ID NO: 2170562 - DNA, 25 bp, Homo sapien
ttcatgtcattcagggtcacgagac

SEQ ID NO: 2170563 - DNA, 25 bp, Homo sapien
cgctccttcaccagagcctcctgct

SEQ ID NO: 2170564 - DNA, 25 bp, Homo sapien
agctccttggactgctccttcttgg

SEQ ID NO: 2170565 - DNA, 25 bp, Homo sapien
tgcttggccttcatgtcattcaggg

SEQ ID NO: 2170566 - DNA, 25 bp, Homo sapien
ctagctccatgttgagggctgcggc

SEQ ID NO: 2170567 - DNA, 25 bp, Homo sapien
ccatgttgagggctgcggcgagagg

SEQ ID NO: 2170568 - DNA, 25 bp, Homo sapien
agctccatgttgagggctgcggcga

SEQ ID NO: 2170569 - DNA, 25 bp, Homo sapien
atgttgagggctgcggcgagaggac

SEQ ID NO: 2170570 - DNA, 25 bp, Homo sapien
catgtccttcccgaccctgacccag

SEQ ID NO: 2170571 - DNA, 25 bp, Homo sapien
tcatgtccttcccgaccctgaccca

SEQ ID NO: 2170572 - DNA, 25 bp, Homo sapien
cttctctcgaagcttctccagcttc

SEQ ID NO: 2170573 - DNA, 25 bp, Homo sapien
gctccttctctcgaagcttctccag

SEQ ID NO: 2170574 - DNA, 25 bp, Homo sapien
tccttctctcgaagcttctccagct

SEQ ID NO: 2170575 - DNA, 25 bp, Homo sapien
ccttctctcgaagcttctccagctt

SEQ ID NO: 2170576 - DNA, 25 bp, Homo sapien
ggctggagatcttccgcttggcttc

SEQ ID NO: 2170577 - DNA, 25 bp, Homo sapien
gctggagatcttccgcttggcttcc

SEQ ID NO: 2170578 - DNA, 25 bp, Homo sapien
ctggagatcttccgcttggcttcct

SEQ ID NO: 2170579 - DNA, 25 bp, Homo sapien
tggagatcttccgcttggcttcctt

SEQ ID NO: 2170580 - DNA, 25 bp, Homo sapien
ttccctttccatctcctcctcatac

SEQ ID NO: 2170581 - DNA, 25 bp, Homo sapien
cttccctttccatctcctcctcata

SEQ ID NO: 2170582 - DNA, 25 bp, Homo sapien
ccctttccatctcctcctcatacat

SEQ ID NO: 2170583 - DNA, 25 bp, Homo sapien
tccctttccatctcctcctcataca

SEQ ID NO: 2170584 - DNA, 25 bp, Homo sapien
tgtgtcaacgtctgggttcttcccc

SEQ ID NO: 2170585 - DNA, 25 bp, Homo sapien
ctcacggtctcgatcaggcaagaag

SEQ ID NO: 2170586 - DNA, 25 bp, Homo sapien
caagaagcttgtgtcaacgtctggg

SEQ ID NO: 2170587 - DNA, 25 bp, Homo sapien
gtctcgatcaggcaagaagcttgtg

SEQ ID NO: 2170588 - DNA, 25 bp, Homo sapien
gctcttcccgaagccgattctcctc

SEQ ID NO: 2170589 - DNA, 25 bp, Homo sapien
agctcttcccgaagccgattctcct

SEQ ID NO: 2170590 - DNA, 25 bp, Homo sapien
gcagctcttcccgaagccgattctc

SEQ ID NO: 2170591 - DNA, 25 bp, Homo sapien
gccgcagctcttcccgaagccgatt

SEQ ID NO: 2170592 - DNA, 25 bp, Homo sapien
cctcgcgtctgactccgcaaacact

SEQ ID NO: 2170593 - DNA, 25 bp, Homo sapien
ggcccctcgcgtctgactccgcaaa

SEQ ID NO: 2170594 - DNA, 25 bp, Homo sapien
caggcccctcgcgtctgactccgca

SEQ ID NO: 2170595 - DNA, 25 bp, Homo sapien
tcgcgtctgactccgcaaacactca

SEQ ID NO: 2170596 - DNA, 25 bp, Homo sapien
agagcagccttggggctcagcgcac

SEQ ID NO: 2170597 - DNA, 25 bp, Homo sapien
tgagagcagccttggggctcagcgc

SEQ ID NO: 2170598 - DNA, 25 bp, Homo sapien
ctgagagcagccttggggctcagcg

SEQ ID NO: 2170599 - DNA, 25 bp, Homo sapien
gagagcagccttggggctcagcgca

SEQ ID NO: 2170600 - DNA, 25 bp, Homo sapien
agagctgcctcttggtctccagccc

SEQ ID NO: 2170601 - DNA, 25 bp, Homo sapien
aaggcagagctgcctcttggtctcc

SEQ ID NO: 2170602 - DNA, 25 bp, Homo sapien
gcagagctgcctcttggtctccagc

SEQ ID NO: 2170603 - DNA, 25 bp, Homo sapien
agctgcctcttggtctccagcccca

SEQ ID NO: 2170604 - DNA, 25 bp, Homo sapien
ctgaaggtgatctcgatctcctcac

SEQ ID NO: 2170605 - DNA, 25 bp, Homo sapien
cttgactgtccgccggtgcccagag

SEQ ID NO: 2170606 - DNA, 25 bp, Homo sapien
ccggtgcccagagccatcccagtag

SEQ ID NO: 2170607 - DNA, 25 bp, Homo sapien
ttgactgtccgccggtgcccagagc

SEQ ID NO: 2170608 - DNA, 25 bp, Homo sapien
ccgccggtgcccagagccatcccag

SEQ ID NO: 2170609 - DNA, 25 bp, Homo sapien
cagttccttcccacggaacctgagg

SEQ ID NO: 2170610 - DNA, 25 bp, Homo sapien
caggaaggtcagttccttcccacgg

SEQ ID NO: 2170611 - DNA, 25 bp, Homo sapien
ctggggcttcccaagtcaggaaggt

SEQ ID NO: 2170612 - DNA, 25 bp, Homo sapien
gcagaagggctctcaacaaggcaga

SEQ ID NO: 2170613 - DNA, 25 bp, Homo sapien
tatccgggaatccaggagttgggaa

SEQ ID NO: 2170614 - DNA, 25 bp, Homo sapien
atccaggagttgggaagggaaggcg

SEQ ID NO: 2170615 - DNA, 25 bp, Homo sapien
ctgtatccgggaatccaggagttgg

SEQ ID NO: 2170616 - DNA, 25 bp, Homo sapien
atccgggaatccaggagttgggaag

SEQ ID NO: 2170617 - DNA, 25 bp, Homo sapien
tgcaggaactgctgcatggtgttgc

SEQ ID NO: 2170618 - DNA, 25 bp, Homo sapien
cgaaggatctcgagcgccttctgca

SEQ ID NO: 2170619 - DNA, 25 bp, Homo sapien
actgaagtctttccgaaggatctcg

SEQ ID NO: 2170620 - DNA, 25 bp, Homo sapien
aactgctgcatggtgttgccctttc

SEQ ID NO: 2170621 - DNA, 25 bp, Homo sapien
caccgtgcacacacgcacacctcac

SEQ ID NO: 2170622 - DNA, 25 bp, Homo sapien
ccgtgcacacacgcacacctcacac

SEQ ID NO: 2170623 - DNA, 25 bp, Homo sapien
accgtgcacacacgcacacctcaca

SEQ ID NO: 2170624 - DNA, 25 bp, Homo sapien
tcctccttgatgtacatgagctgct

SEQ ID NO: 2170625 - DNA, 25 bp, Homo sapien
gatgtacatgagctgctccacccct

SEQ ID NO: 2170626 - DNA, 25 bp, Homo sapien
tccttgatgtacatgagctgctcca

SEQ ID NO: 2170627 - DNA, 25 bp, Homo sapien
atcaagtcctccttgatgtacatga

SEQ ID NO: 2170628 - DNA, 25 bp, Homo sapien
caggaaagcggcgtcttgatggtcc

SEQ ID NO: 2170629 - DNA, 25 bp, Homo sapien
gagccaaagcccagggtgctgcacc

SEQ ID NO: 2170630 - DNA, 25 bp, Homo sapien
tgctgcacccactgcgggtactggg

SEQ ID NO: 2170631 - DNA, 25 bp, Homo sapien
gtcttgatggtccatctcggcccct

SEQ ID NO: 2170632 - DNA, 25 bp, Homo sapien
ccccgtgccttggtgacgatgaagt

SEQ ID NO: 2170633 - DNA, 25 bp, Homo sapien
cttcccccgtgccttggtgacgatg

SEQ ID NO: 2170634 - DNA, 25 bp, Homo sapien
ccttggtgacgatgaagtcgtagaa

SEQ ID NO: 2170635 - DNA, 25 bp, Homo sapien
cgtgccttggtgacgatgaagtcgt

SEQ ID NO: 2170636 - DNA, 25 bp, Homo sapien
ctatgggggcggctgggtcggcggc

SEQ ID NO: 2170637 - DNA, 25 bp, Homo sapien
gggcggctgggtcggcggcactcac

SEQ ID NO: 2170638 - DNA, 25 bp, Homo sapien
gggggcggctgggtcggcggcactc

SEQ ID NO: 2170639 - DNA, 25 bp, Homo sapien
atgggggcggctgggtcggcggcac

SEQ ID NO: 2170640 - DNA, 25 bp, Homo sapien
cagtgacaacatcggcggcaaggtg

SEQ ID NO: 2170641 - DNA, 25 bp, Homo sapien
tgcaggggagaagtgacagcccaat

SEQ ID NO: 2170642 - DNA, 25 bp, Homo sapien
ccagtgacaacatcggcggcaaggt

SEQ ID NO: 2170643 - DNA, 25 bp, Homo sapien
acagcccaatgtcccgctgctgccc

SEQ ID NO: 2170644 - DNA, 25 bp, Homo sapien
gcacatcgtcatgaacatcaaagtt

SEQ ID NO: 2170645 - DNA, 25 bp, Homo sapien
gtggcgtcactgagcaaccgcacat

SEQ ID NO: 2170646 - DNA, 25 bp, Homo sapien
gagcaaccgcacatcgtcatgaaca

SEQ ID NO: 2170647 - DNA, 25 bp, Homo sapien
tccacagtggcgtcactgagcaacc

SEQ ID NO: 2170648 - DNA, 25 bp, Homo sapien
tggcttctcctccatagcccaggga

SEQ ID NO: 2170649 - DNA, 25 bp, Homo sapien
cccttggcttctcctccatagccca

SEQ ID NO: 2170650 - DNA, 25 bp, Homo sapien
cctcacacggccccctacgctgtac

SEQ ID NO: 2170651 - DNA, 25 bp, Homo sapien
ctccatagcccagggacacccgttc

SEQ ID NO: 2170652 - DNA, 25 bp, Homo sapien
agggaggaagagggcacagggccgc

SEQ ID NO: 2170653 - DNA, 25 bp, Homo sapien
taagggaggaagagggcacagggcc

SEQ ID NO: 2170654 - DNA, 25 bp, Homo sapien
ctaagggaggaagagggcacagggc

SEQ ID NO: 2170655 - DNA, 25 bp, Homo sapien
aagggaggaagagggcacagggccg

SEQ ID NO: 2170656 - DNA, 25 bp, Homo sapien
tgtacttgtcccacttcttttcagg

SEQ ID NO: 2170657 - DNA, 25 bp, Homo sapien
ggtcgtagggttcccagcggctggc

SEQ ID NO: 2170658 - DNA, 25 bp, Homo sapien
ctggcgggaaagatgtgcttgttct

SEQ ID NO: 2170659 - DNA, 25 bp, Homo sapien
tgttcttctcgtaccagctcctcag

SEQ ID NO: 2170660 - DNA, 25 bp, Homo sapien
cctggagtcccggtgacaccacggg

SEQ ID NO: 2170661 - DNA, 25 bp, Homo sapien
cccagcgtgcctggcatggtcgcag

SEQ ID NO: 2170662 - DNA, 25 bp, Homo sapien
gtgcctggagtcccggtgacaccac

SEQ ID NO: 2170663 - DNA, 25 bp, Homo sapien
ctcccagcgtgcctggcatggtcgc

SEQ ID NO: 2170664 - DNA, 25 bp, Homo sapien
aacgactgtgctgggacggcccaca

SEQ ID NO: 2170665 - DNA, 25 bp, Homo sapien
ggttttcgtggccacaggacggcca

SEQ ID NO: 2170666 - DNA, 25 bp, Homo sapien
agcacagggcaccacagcagaacga

SEQ ID NO: 2170667 - DNA, 25 bp, Homo sapien
caggcaagtgtcgagcacagggcac

SEQ ID NO: 2170668 - DNA, 25 bp, Homo sapien
tacccccgatctggatcctgcccca

SEQ ID NO: 2170669 - DNA, 25 bp, Homo sapien
ctacccccgatctggatcctgcccc

SEQ ID NO: 2170670 - DNA, 25 bp, Homo sapien
ccccgatctggatcctgccccaagg

SEQ ID NO: 2170671 - DNA, 25 bp, Homo sapien
acccccgatctggatcctgccccaa

SEQ ID NO: 2170672 - DNA, 25 bp, Homo sapien
ccccgggccccaagcgcgcagccgc

SEQ ID NO: 2170673 - DNA, 25 bp, Homo sapien
tctggccacgtggacgcgcccccga

SEQ ID NO: 2170674 - DNA, 25 bp, Homo sapien
tggccacgtggacgcgcccccgagc

SEQ ID NO: 2170675 - DNA, 25 bp, Homo sapien
ctggccacgtggacgcgcccccgag

SEQ ID NO: 2170676 - DNA, 25 bp, Homo sapien
tgggggccatcaatcgtccctcagc

SEQ ID NO: 2170677 - DNA, 25 bp, Homo sapien
gcatgagtgagcagccagcgagggc

SEQ ID NO: 2170678 - DNA, 25 bp, Homo sapien
gggcctccgccagggcgcatgagtg

SEQ ID NO: 2170679 - DNA, 25 bp, Homo sapien
cttgggggccatcaatcgtccctca

SEQ ID NO: 2170680 - DNA, 25 bp, Homo sapien
gccggcagccgcgcctggggacagg

SEQ ID NO: 2170681 - DNA, 25 bp, Homo sapien
ccggcagccgcgcctggggacaggc

SEQ ID NO: 2170682 - DNA, 25 bp, Homo sapien
ggccggcagccgcgcctggggacag

SEQ ID NO: 2170683 - DNA, 25 bp, Homo sapien
gaagtactccgacttgccgtcgaca

SEQ ID NO: 2170684 - DNA, 25 bp, Homo sapien
tagcagcgagcgttgtcctcgacgg

SEQ ID NO: 2170685 - DNA, 25 bp, Homo sapien
acaatgacaccagccatggagtcgg

SEQ ID NO: 2170686 - DNA, 25 bp, Homo sapien
agcttaaagactcggttcactgcgc

SEQ ID NO: 2170687 - DNA, 25 bp, Homo sapien
tgatcacagaggcccaggccagaaa

SEQ ID NO: 2170688 - DNA, 25 bp, Homo sapien
ctggatgatcacagaggcccaggcc

SEQ ID NO: 2170689 - DNA, 25 bp, Homo sapien
tggatgatcacagaggcccaggcca

SEQ ID NO: 2170690 - DNA, 25 bp, Homo sapien
gatgatcacagaggcccaggccaga

SEQ ID NO: 2170691 - DNA, 25 bp, Homo sapien
cctgtgccaacatcacgggccaccg

SEQ ID NO: 2170692 - DNA, 25 bp, Homo sapien
gccctgtgccaacatcacgggccac

SEQ ID NO: 2170693 - DNA, 25 bp, Homo sapien
ctgtgccaacatcacgggccaccgc

SEQ ID NO: 2170694 - DNA, 25 bp, Homo sapien
gtgccaacatcacgggccaccgcca

SEQ ID NO: 2170695 - DNA, 25 bp, Homo sapien
gaagaggacgtcctcatcagccggc

SEQ ID NO: 2170696 - DNA, 25 bp, Homo sapien
tgacgaagccgtagatgtagtagat

SEQ ID NO: 2170697 - DNA, 25 bp, Homo sapien
tcaggaagtacacgaaggaggcgct

SEQ ID NO: 2170698 - DNA, 25 bp, Homo sapien
gggatcttgatctgggaggacacaa

SEQ ID NO: 2170699 - DNA, 25 bp, Homo sapien
cagaggaccagtgtggggtgatgag

SEQ ID NO: 2170700 - DNA, 25 bp, Homo sapien
agggcagaggaccagtgtggggtga

SEQ ID NO: 2170701 - DNA, 25 bp, Homo sapien
tgggcatggtagacctgggacaggg

SEQ ID NO: 2170702 - DNA, 25 bp, Homo sapien
gctgggcatggtagacctgggacag

SEQ ID NO: 2170703 - DNA, 25 bp, Homo sapien
caatgaagaccacagagtgctggcg

SEQ ID NO: 2170704 - DNA, 25 bp, Homo sapien
gccatgccgtcggtgctgtcggcca

SEQ ID NO: 2170705 - DNA, 25 bp, Homo sapien
ctgccgctgcgcgtgccaatgaaga

SEQ ID NO: 2170706 - DNA, 25 bp, Homo sapien
cagaagttgccgttgatctgcatgg

SEQ ID NO: 2170707 - DNA, 25 bp, Homo sapien
cggtggtccgggctgaagagcaggt

SEQ ID NO: 2170708 - DNA, 25 bp, Homo sapien
tgaagagcaggtctcggaggatggg

SEQ ID NO: 2170709 - DNA, 25 bp, Homo sapien
tgtctcatacaggtgggcatcctgg

SEQ ID NO: 2170710 - DNA, 25 bp, Homo sapien
tctcactcaggagatagatgtgccg

SEQ ID NO: 2170711 - DNA, 25 bp, Homo sapien
cacatcagcacccagcccacccccg

SEQ ID NO: 2170712 - DNA, 25 bp, Homo sapien
cgccccaccagccaccgccacccac

SEQ ID NO: 2170713 - DNA, 25 bp, Homo sapien
ccacatcagcacccagcccaccccc

SEQ ID NO: 2170714 - DNA, 25 bp, Homo sapien
ccaccgccacccaccacaggcccac

SEQ ID NO: 2170715 - DNA, 25 bp, Homo sapien
gctgcgcagctctggtactgctcac

SEQ ID NO: 2170716 - DNA, 25 bp, Homo sapien
tcacaggtctccaccgggagctggc

SEQ ID NO: 2170717 - DNA, 25 bp, Homo sapien
cgcagctctggtactgctcacaggt

SEQ ID NO: 2170718 - DNA, 25 bp, Homo sapien
tgcgcagctctggtactgctcacag

SEQ ID NO: 2170719 - DNA, 25 bp, Homo sapien
gacacattgttgggccggacccgca

SEQ ID NO: 2170720 - DNA, 25 bp, Homo sapien
cagacaggccccttcgcggcagcac

SEQ ID NO: 2170721 - DNA, 25 bp, Homo sapien
agctcctcagcaaagccgtgtgggg

SEQ ID NO: 2170722 - DNA, 25 bp, Homo sapien
ccaggtgacgtcactgacacattgt

SEQ ID NO: 2170723 - DNA, 25 bp, Homo sapien
ggcgcagctcacgcccgcactgagg

SEQ ID NO: 2170724 - DNA, 25 bp, Homo sapien
gtctggcacgttgtgcagggtgacg

SEQ ID NO: 2170725 - DNA, 25 bp, Homo sapien
agctcacgcccgcactgaggtctgg

SEQ ID NO: 2170726 - DNA, 25 bp, Homo sapien
gcccgcactgaggtctggcacgttg

SEQ ID NO: 2170727 - DNA, 25 bp, Homo sapien
ctggtaagagctcggagctcctgga

SEQ ID NO: 2170728 - DNA, 25 bp, Homo sapien
ccctggtaagagctcggagctcctg

SEQ ID NO: 2170729 - DNA, 25 bp, Homo sapien
cctggtaagagctcggagctcctgg

SEQ ID NO: 2170730 - DNA, 25 bp, Homo sapien
ggtaagagctcggagctcctggagg

SEQ ID NO: 2170731 - DNA, 25 bp, Homo sapien
tggagagaagctgcagccgcacagt

SEQ ID NO: 2170732 - DNA, 25 bp, Homo sapien
ccggcaaacctcacgcctgtctcct

SEQ ID NO: 2170733 - DNA, 25 bp, Homo sapien
acaaagtcagcaccggcaaacctca

SEQ ID NO: 2170734 - DNA, 25 bp, Homo sapien
gaagacaaagtcagcaccggcaaac

SEQ ID NO: 2170735 - DNA, 25 bp, Homo sapien
tgtggcggtacttacaccagtggca

SEQ ID NO: 2170736 - DNA, 25 bp, Homo sapien
gggcggctggtacacgtgtggcggt

SEQ ID NO: 2170737 - DNA, 25 bp, Homo sapien
ggtaagggctgccaacacaggacat

SEQ ID NO: 2170738 - DNA, 25 bp, Homo sapien
acacgtgtggcggtacttacaccag

SEQ ID NO: 2170739 - DNA, 25 bp, Homo sapien
ttctggcccgactgcggctgaggta

SEQ ID NO: 2170740 - DNA, 25 bp, Homo sapien
tgttgaagcgcacggcaggcacccg

SEQ ID NO: 2170741 - DNA, 25 bp, Homo sapien
gaggcgttctggcactgcacactgc

SEQ ID NO: 2170742 - DNA, 25 bp, Homo sapien
tgaggtaggttcttagcccgcaagg

SEQ ID NO: 2170743 - DNA, 25 bp, Homo sapien
catgctcatcaccttcataggagta

SEQ ID NO: 2170744 - DNA, 25 bp, Homo sapien
aggcttgtctatggggaagtctcca

SEQ ID NO: 2170745 - DNA, 25 bp, Homo sapien
agaccacggagaagtccagctcggt

SEQ ID NO: 2170746 - DNA, 25 bp, Homo sapien
cagctcggtgtcaccatgctcatca

SEQ ID NO: 2170747 - DNA, 25 bp, Homo sapien
gccacagttgaagcggggatcagcc

SEQ ID NO: 2170748 - DNA, 25 bp, Homo sapien
caggtgcatccagttggtcttcggg

SEQ ID NO: 2170749 - DNA, 25 bp, Homo sapien
caccagccacagttgaagcggggat

SEQ ID NO: 2170750 - DNA, 25 bp, Homo sapien
cgctgcgcccagcacttgtacagga

SEQ ID NO: 2170751 - DNA, 25 bp, Homo sapien
aggcccacctctcgggacaagaggc

SEQ ID NO: 2170752 - DNA, 25 bp, Homo sapien
agaggcccaggttgtcacccacgat

SEQ ID NO: 2170753 - DNA, 25 bp, Homo sapien
atggagttgcaacgcacgccagcca

SEQ ID NO: 2170754 - DNA, 25 bp, Homo sapien
tctcagcactgatgtactcggccgg

SEQ ID NO: 2170755 - DNA, 25 bp, Homo sapien
gctcagagagcgtcagggccggcca

SEQ ID NO: 2170756 - DNA, 25 bp, Homo sapien
ctcagagagcgtcagggccggccag

SEQ ID NO: 2170757 - DNA, 25 bp, Homo sapien
ggctcagagagcgtcagggccggcc

SEQ ID NO: 2170758 - DNA, 25 bp, Homo sapien
gggctcagagagcgtcagggccggc

SEQ ID NO: 2170759 - DNA, 25 bp, Homo sapien
ggaagtcggctgaacagtcacccac

SEQ ID NO: 2170760 - DNA, 25 bp, Homo sapien
tgcggaagtcggctgaacagtcacc

SEQ ID NO: 2170761 - DNA, 25 bp, Homo sapien
actgcgtgcggaagtcggctgaaca

SEQ ID NO: 2170762 - DNA, 25 bp, Homo sapien
ctgctccgactgcgtgcggaagtcg

SEQ ID NO: 2170763 - DNA, 25 bp, Homo sapien
ggctgctccacacgccccttgcggg

SEQ ID NO: 2170764 - DNA, 25 bp, Homo sapien
cacacgccccttgcgggagagagaa

SEQ ID NO: 2170765 - DNA, 25 bp, Homo sapien
ccgggctgctccacacgccccttgc

SEQ ID NO: 2170766 - DNA, 25 bp, Homo sapien
tccacacgccccttgcgggagagag

SEQ ID NO: 2170767 - DNA, 25 bp, Homo sapien
gcctgagatggtaagccgtgtgccc

SEQ ID NO: 2170768 - DNA, 25 bp, Homo sapien
tggcactcgctgtccctcacagtca

SEQ ID NO: 2170769 - DNA, 25 bp, Homo sapien
tgggactcacttggtcaaacgttgg

SEQ ID NO: 2170770 - DNA, 25 bp, Homo sapien
agagctgcctgagatggtaagccgt

SEQ ID NO: 2170771 - DNA, 25 bp, Homo sapien
aggtgggctcaaggcgggtgacggt

SEQ ID NO: 2170772 - DNA, 25 bp, Homo sapien
tgagatgcacacgatcgccttggca

SEQ ID NO: 2170773 - DNA, 25 bp, Homo sapien
tagcccggtcaatggcaagtgtgat

SEQ ID NO: 2170774 - DNA, 25 bp, Homo sapien
ggctggagatgttagcccggtcaat

SEQ ID NO: 2170775 - DNA, 25 bp, Homo sapien
aatgccgcggtacttggcacggacc

SEQ ID NO: 2170776 - DNA, 25 bp, Homo sapien
ctcctggaccgtcagcaggtgggtc

SEQ ID NO: 2170777 - DNA, 25 bp, Homo sapien
ttggtggtctcaatgccgcggtact

SEQ ID NO: 2170778 - DNA, 25 bp, Homo sapien
ctggaccgtcagcaggtgggtccca

SEQ ID NO: 2170779 - DNA, 25 bp, Homo sapien
acagccaggcacgtgaagccatggg

SEQ ID NO: 2170780 - DNA, 25 bp, Homo sapien
tggacagccaggcacgtgaagccat

SEQ ID NO: 2170781 - DNA, 25 bp, Homo sapien
caggcacgtgaagccatgggctgca

SEQ ID NO: 2170782 - DNA, 25 bp, Homo sapien
agccaggcacgtgaagccatgggct

SEQ ID NO: 2170783 - DNA, 25 bp, Homo sapien
ggccttacacagcatggcagtgtcg

SEQ ID NO: 2170784 - DNA, 25 bp, Homo sapien
gccgtttgcacgtggtccagcagga

SEQ ID NO: 2170785 - DNA, 25 bp, Homo sapien
aactcatcagggtgctcgccttgcg

SEQ ID NO: 2170786 - DNA, 25 bp, Homo sapien
gctcaaagctgggatcagggtagta

SEQ ID NO: 2170787 - DNA, 25 bp, Homo sapien
ctgggggtggaggacaacttcagcc

SEQ ID NO: 2170788 - DNA, 25 bp, Homo sapien
caggactctccactttcccgcccct

SEQ ID NO: 2170789 - DNA, 25 bp, Homo sapien
tggaggacaacttcagcccaggact

SEQ ID NO: 2170790 - DNA, 25 bp, Homo sapien
ggggtggaggacaacttcagcccag

SEQ ID NO: 2170791 - DNA, 25 bp, Homo sapien
tccgagacagtgagcgaacacggct

SEQ ID NO: 2170792 - DNA, 25 bp, Homo sapien
cggctgccgcgggaatcaggttctt

SEQ ID NO: 2170793 - DNA, 25 bp, Homo sapien
cacaggagttgtgtgtccgagacag

SEQ ID NO: 2170794 - DNA, 25 bp, Homo sapien
ggcctcctatcagcacagtgtagtt

SEQ ID NO: 2170795 - DNA, 25 bp, Homo sapien
gagtcttgcgcttgtacgccaccag

SEQ ID NO: 2170796 - DNA, 25 bp, Homo sapien
atcatggccggtagggtcagcgccc

SEQ ID NO: 2170797 - DNA, 25 bp, Homo sapien
cgcttgagggtacggtccgcgtcct

SEQ ID NO: 2170798 - DNA, 25 bp, Homo sapien
ctctgccgagatgtgcagggtgccc

SEQ ID NO: 2170799 - DNA, 25 bp, Homo sapien
cacggcgtaagtccggtagtccagg

SEQ ID NO: 2170800 - DNA, 25 bp, Homo sapien
tgcacctcgtccatgtggttagtca

SEQ ID NO: 2170801 - DNA, 25 bp, Homo sapien
ttgagcaccgggtgggcctcgatgc

SEQ ID NO: 2170802 - DNA, 25 bp, Homo sapien
tcgatgcccgggaagagcacgcgca

SEQ ID NO: 2170803 - DNA, 25 bp, Homo sapien
ggagcaggaggtctcagagggtggg

SEQ ID NO: 2170804 - DNA, 25 bp, Homo sapien
gaggtctcagagggtgggggcggcc

SEQ ID NO: 2170805 - DNA, 25 bp, Homo sapien
gccctgaagggaatggtggggggca

SEQ ID NO: 2170806 - DNA, 25 bp, Homo sapien
gcaggaggtctcagagggtgggggc

SEQ ID NO: 2170807 - DNA, 25 bp, Homo sapien
cgtgtggatgaaggtaagcacgaac

SEQ ID NO: 2170808 - DNA, 25 bp, Homo sapien
cgtggcatagtcgagccggctctgc

SEQ ID NO: 2170809 - DNA, 25 bp, Homo sapien
aaggtaagcacgaacgcgcggctgt

SEQ ID NO: 2170810 - DNA, 25 bp, Homo sapien
ccaccatggtgagcgaggccacggt

SEQ ID NO: 2170811 - DNA, 25 bp, Homo sapien
gaaccagttggtaagcatcttctca

SEQ ID NO: 2170812 - DNA, 25 bp, Homo sapien
tgcagcaggaacgtgaaccagttgg

SEQ ID NO: 2170813 - DNA, 25 bp, Homo sapien
cagcaggaacgtgaaccagttggta

SEQ ID NO: 2170814 - DNA, 25 bp, Homo sapien
ttatgcagcaggaacgtgaaccagt

SEQ ID NO: 2170815 - DNA, 25 bp, Homo sapien
cctgaccactggccggtcctctgcc

SEQ ID NO: 2170816 - DNA, 25 bp, Homo sapien
cactggccggtcctctgccaccacc

SEQ ID NO: 2170817 - DNA, 25 bp, Homo sapien
ctgaccactggccggtcctctgcca

SEQ ID NO: 2170818 - DNA, 25 bp, Homo sapien
ccactggccggtcctctgccaccac

SEQ ID NO: 2170819 - DNA, 25 bp, Homo sapien
ctcgctcagggagtatcgtgcctcg

SEQ ID NO: 2170820 - DNA, 25 bp, Homo sapien
cagtgtcttgtagtcgatctgctga

SEQ ID NO: 2170821 - DNA, 25 bp, Homo sapien
tgtcttgtagtcgatctgctgacgg

SEQ ID NO: 2170822 - DNA, 25 bp, Homo sapien
ttgatggcacagtaaagcaggaaga

SEQ ID NO: 2170823 - DNA, 25 bp, Homo sapien
ctggcccgcctggccctgcgctcac

SEQ ID NO: 2170824 - DNA, 25 bp, Homo sapien
tctggcccgcctggccctgcgctca

SEQ ID NO: 2170825 - DNA, 25 bp, Homo sapien
ctctggcccgcctggccctgcgctc

SEQ ID NO: 2170826 - DNA, 25 bp, Homo sapien
aaccttcactgggacctgggcgctg

SEQ ID NO: 2170827 - DNA, 25 bp, Homo sapien
ctttgggacgctgggagtacggaat

SEQ ID NO: 2170828 - DNA, 25 bp, Homo sapien
ggcctgggtgatgctgtcacagttg

SEQ ID NO: 2170829 - DNA, 25 bp, Homo sapien
gtacggaatgcccttgtacacagtg

SEQ ID NO: 2170830 - DNA, 25 bp, Homo sapien
gcccacggaggtcacacggcacagg

SEQ ID NO: 2170831 - DNA, 25 bp, Homo sapien
tcttccagtcacactcgatcttggt

SEQ ID NO: 2170832 - DNA, 25 bp, Homo sapien
gaggatgatgcgagtcatgcggccc

SEQ ID NO: 2170833 - DNA, 25 bp, Homo sapien
actcgatcttggtggtgacatcctc

SEQ ID NO: 2170834 - DNA, 25 bp, Homo sapien
tagtgggccagtgagttgagcctct

SEQ ID NO: 2170835 - DNA, 25 bp, Homo sapien
ggagttggccatgttataggcagac

SEQ ID NO: 2170836 - DNA, 25 bp, Homo sapien
aatgccaccaaggaaccgtctgtca

SEQ ID NO: 2170837 - DNA, 25 bp, Homo sapien
gcaccaatgccaccaaggaaccgtc

SEQ ID NO: 2170838 - DNA, 25 bp, Homo sapien
aaggagttggccatgttataggcag

SEQ ID NO: 2170839 - DNA, 25 bp, Homo sapien
ccctcgcgatggtcggcatggtcgt

SEQ ID NO: 2170840 - DNA, 25 bp, Homo sapien
tcggcatggtcgtggtttttcacca

SEQ ID NO: 2170841 - DNA, 25 bp, Homo sapien
gccacaatttggtgcctgtctcctg

SEQ ID NO: 2170842 - DNA, 25 bp, Homo sapien
caggcgtaatcatgggtgcccgtga

SEQ ID NO: 2170843 - DNA, 25 bp, Homo sapien
acatcggggtcgctgatctggcgct

SEQ ID NO: 2170844 - DNA, 25 bp, Homo sapien
cgcacatcggggtcgctgatctggc

SEQ ID NO: 2170845 - DNA, 25 bp, Homo sapien
ggtgtggcgcacatcggggtcgctg

SEQ ID NO: 2170846 - DNA, 25 bp, Homo sapien
ggtcgctgatctggcgctggtccgc

SEQ ID NO: 2170847 - DNA, 25 bp, Homo sapien
ctggcagcccagcacggggtgatac

SEQ ID NO: 2170848 - DNA, 25 bp, Homo sapien
agtctccagacaggctgctggcagc

SEQ ID NO: 2170849 - DNA, 25 bp, Homo sapien
ctgctggcagcccagcacggggtga

SEQ ID NO: 2170850 - DNA, 25 bp, Homo sapien
cagtctccagacaggctgctggcag

SEQ ID NO: 2170851 - DNA, 25 bp, Homo sapien
cctgcgaccgaccaccagcatctct

SEQ ID NO: 2170852 - DNA, 25 bp, Homo sapien
ctgcgaccgaccaccagcatctcta

SEQ ID NO: 2170853 - DNA, 25 bp, Homo sapien
ggccggctcacatcttgtccagagg

SEQ ID NO: 2170854 - DNA, 25 bp, Homo sapien
gctgaacttctgttctcaatagggc

SEQ ID NO: 2170855 - DNA, 25 bp, Homo sapien
tctgttctcaatagggctcaacccc

SEQ ID NO: 2170856 - DNA, 25 bp, Homo sapien
atctctttcctgtccggccggctca

SEQ ID NO: 2170857 - DNA, 25 bp, Homo sapien
ctgtggacaacagagggacgtgcgc

SEQ ID NO: 2170858 - DNA, 25 bp, Homo sapien
gtggacaacagagggacgtgcgcct

SEQ ID NO: 2170859 - DNA, 25 bp, Homo sapien
acagagggacgtgcgcctgaggctc

SEQ ID NO: 2170860 - DNA, 25 bp, Homo sapien
acaacagagggacgtgcgcctgagg

SEQ ID NO: 2170861 - DNA, 25 bp, Homo sapien
gggctaccaccgacaggcaggcatc

SEQ ID NO: 2170862 - DNA, 25 bp, Homo sapien
tccccaggcggtgctcggatgtaga

SEQ ID NO: 2170863 - DNA, 25 bp, Homo sapien
ctgggctaccaccgacaggcaggca

SEQ ID NO: 2170864 - DNA, 25 bp, Homo sapien
gctcggatgtagagcaggagtccat

SEQ ID NO: 2170865 - DNA, 25 bp, Homo sapien
catctttgcaatgtctcgataatac

SEQ ID NO: 2170866 - DNA, 25 bp, Homo sapien
cactcaggacgctgaagtcgctggc

SEQ ID NO: 2170867 - DNA, 25 bp, Homo sapien
tggtcgctgatggatgccatctttg

SEQ ID NO: 2170868 - DNA, 25 bp, Homo sapien
tacagctcgttgagcgcactcagga

SEQ ID NO: 2170869 - DNA, 25 bp, Homo sapien
tatgcttccgacaagaggcatctcg

SEQ ID NO: 2170870 - DNA, 25 bp, Homo sapien
ggcatctcggtccagagccgtgaga

SEQ ID NO: 2170871 - DNA, 25 bp, Homo sapien
cagtttctgccgcaacttatgcttc

SEQ ID NO: 2170872 - DNA, 25 bp, Homo sapien
tggacacgaggctgatgatctgttc

SEQ ID NO: 2170873 - DNA, 25 bp, Homo sapien
acagagtagtaaggcacggccgcct

SEQ ID NO: 2170874 - DNA, 25 bp, Homo sapien
gtgctcagagagaatagggccccga

SEQ ID NO: 2170875 - DNA, 25 bp, Homo sapien
gataatgctacacaaaggagcccag

SEQ ID NO: 2170876 - DNA, 25 bp, Homo sapien
tcggagcaggtgcagacaacactga

SEQ ID NO: 2170877 - DNA, 25 bp, Homo sapien
ccacaatggggctccagctcatgca

SEQ ID NO: 2170878 - DNA, 25 bp, Homo sapien
tgggtcgggtatggccctgaacctc

SEQ ID NO: 2170879 - DNA, 25 bp, Homo sapien
tctgggaccctgcaaggagtggtcc

SEQ ID NO: 2170880 - DNA, 25 bp, Homo sapien
aggtctactgacctgccccaaggac

SEQ ID NO: 2170881 - DNA, 25 bp, Homo sapien
tgtcatcccgcaacttctctttatc

SEQ ID NO: 2170882 - DNA, 25 bp, Homo sapien
catatgatggtagtattttcaacca

SEQ ID NO: 2170883 - DNA, 25 bp, Homo sapien
tctctttatcctgggctacaatcca

SEQ ID NO: 2170884 - DNA, 25 bp, Homo sapien
atggttctgtctgggccgacggcac

SEQ ID NO: 2170885 - DNA, 25 bp, Homo sapien
tactctgcattccatatattttgtc

SEQ ID NO: 2170886 - DNA, 25 bp, Homo sapien
tcatttggcatgacatatccagtcc

SEQ ID NO: 2170887 - DNA, 25 bp, Homo sapien
aacagtttccctttgtagaatctgg

SEQ ID NO: 2170888 - DNA, 25 bp, Homo sapien
tttgtctggtttggcgtgttctttc

SEQ ID NO: 2170889 - DNA, 25 bp, Homo sapien
acacaggacactgggccagtcgcat

SEQ ID NO: 2170890 - DNA, 25 bp, Homo sapien
caactcctaaagtccgggtgtctgc

SEQ ID NO: 2170891 - DNA, 25 bp, Homo sapien
ccaggaaactccacacaggacactg

SEQ ID NO: 2170892 - DNA, 25 bp, Homo sapien
ggaaactccacacaggacactgggc

SEQ ID NO: 2170893 - DNA, 25 bp, Homo sapien
gatggccttccctggtcttgggtag

SEQ ID NO: 2170894 - DNA, 25 bp, Homo sapien
gccagtgctgcctaggtgaacatga

SEQ ID NO: 2170895 - DNA, 25 bp, Homo sapien
tgctcaccagtagtcgtagtccgct

SEQ ID NO: 2170896 - DNA, 25 bp, Homo sapien
gtagtccgctgcacactggaacggg

SEQ ID NO: 2170897 - DNA, 25 bp, Homo sapien
tgtcattcaggattaactactgtca

SEQ ID NO: 2170898 - DNA, 25 bp, Homo sapien
tcctcagttttacagttgcacttac

SEQ ID NO: 2170899 - DNA, 25 bp, Homo sapien
ttcagatattcaaggagtacaagga

SEQ ID NO: 2170900 - DNA, 25 bp, Homo sapien
gggcacctcccaatattcttgttgt

SEQ ID NO: 2170901 - DNA, 25 bp, Homo sapien
gaatttccgtcatcaactttcttga

SEQ ID NO: 2170902 - DNA, 25 bp, Homo sapien
gctttccctggtggtgcggaccatg

SEQ ID NO: 2170903 - DNA, 25 bp, Homo sapien
tccttgtaggcagtgcgtccatcct

SEQ ID NO: 2170904 - DNA, 25 bp, Homo sapien
aatggagcgaggtcccactttgcgt

SEQ ID NO: 2170905 - DNA, 25 bp, Homo sapien
gtgagtggcaggatcctggtcgtgt

SEQ ID NO: 2170906 - DNA, 25 bp, Homo sapien
ccccttggaggcggaaatcgcccat

SEQ ID NO: 2170907 - DNA, 25 bp, Homo sapien
tggcaggatcctggtcgtgtaagtt

SEQ ID NO: 2170908 - DNA, 25 bp, Homo sapien
cccttggaggcggaaatcgcccatg

SEQ ID NO: 2170909 - DNA, 25 bp, Homo sapien
tctcaaccgctgaccgggtctcaga

SEQ ID NO: 2170910 - DNA, 25 bp, Homo sapien
catattgtatcctttccgagctggg

SEQ ID NO: 2170911 - DNA, 25 bp, Homo sapien
ttacgcgcgaaagggcagagtttct

SEQ ID NO: 2170912 - DNA, 25 bp, Homo sapien
ttggcgggaactgaccacgcgccag

SEQ ID NO: 2170913 - DNA, 25 bp, Homo sapien
cggtgtcttcaaaagccccgtcagg

SEQ ID NO: 2170914 - DNA, 25 bp, Homo sapien
agcgcaggcgcgctaaggtcacaag

SEQ ID NO: 2170915 - DNA, 25 bp, Homo sapien
cgcctctgggataggcgaccacggt

SEQ ID NO: 2170916 - DNA, 25 bp, Homo sapien
ctaaggtcacaaggcgcgcttaggg

SEQ ID NO: 2170917 - DNA, 25 bp, Homo sapien
ggcttcaaagccactacggcaggga

SEQ ID NO: 2170918 - DNA, 25 bp, Homo sapien
cattggcagcaggtgagcaatttca

SEQ ID NO: 2170919 - DNA, 25 bp, Homo sapien
ggcagggacacactcgtgagcatgt

SEQ ID NO: 2170920 - DNA, 25 bp, Homo sapien
gcgttggtatctgctacatcccagg

SEQ ID NO: 2170921 - DNA, 25 bp, Homo sapien
agtcagtgtcctctgtctcacaggg

SEQ ID NO: 2170922 - DNA, 25 bp, Homo sapien
aaatgaagccgtggccaagcgtgac

SEQ ID NO: 2170923 - DNA, 25 bp, Homo sapien
ccatggactctatacagtgagggcc

SEQ ID NO: 2170924 - DNA, 25 bp, Homo sapien
ttgtctcgtccaggaagcgttaggg

SEQ ID NO: 2170925 - DNA, 25 bp, Homo sapien
tttggcagatgggaaacgactctcg

SEQ ID NO: 2170926 - DNA, 25 bp, Homo sapien
gattacgagaggtccctgagtcgcc

SEQ ID NO: 2170927 - DNA, 25 bp, Homo sapien
tctcggattatagcatcgggcccaa

SEQ ID NO: 2170928 - DNA, 25 bp, Homo sapien
gtgctactagaagaaggcgaggccc

SEQ ID NO: 2170929 - DNA, 25 bp, Homo sapien
gcactgcgggctaaacatgtttcca

SEQ ID NO: 2170930 - DNA, 25 bp, Homo sapien
gaagtagctggagcccgatcacagt

SEQ ID NO: 2170931 - DNA, 25 bp, Homo sapien
tccccatcttgagtcctggaacggc

SEQ ID NO: 2170932 - DNA, 25 bp, Homo sapien
tagccctgccgcactttgtcacggg

SEQ ID NO: 2170933 - DNA, 25 bp, Homo sapien
ggcctgcgtggagccagacggcgca

SEQ ID NO: 2170934 - DNA, 25 bp, Homo sapien
atgcggcggccagcgcgagcggtag

SEQ ID NO: 2170935 - DNA, 25 bp, Homo sapien
gccgacgagggatccaggggcggga

SEQ ID NO: 2170936 - DNA, 25 bp, Homo sapien
gcgagcggtagaggcgggtctggag

SEQ ID NO: 2170937 - DNA, 25 bp, Homo sapien
gcagctcaagggtgtgagtaacctg

SEQ ID NO: 2170938 - DNA, 25 bp, Homo sapien
ttgtctttgaaaaacaccggctggc

SEQ ID NO: 2170939 - DNA, 25 bp, Homo sapien
aaatgcctgctctgaacaacatgta

SEQ ID NO: 2170940 - DNA, 25 bp, Homo sapien
aacctggagcttcttcgactgggcc

SEQ ID NO: 2170941 - DNA, 25 bp, Homo sapien
cccgccatagggcggttcttctccg

SEQ ID NO: 2170942 - DNA, 25 bp, Homo sapien
gagaaggtcagcaaaaaacgtgagc

SEQ ID NO: 2170943 - DNA, 25 bp, Homo sapien
agaaggtcagcaaaaaacgtgagca

SEQ ID NO: 2170944 - DNA, 25 bp, Homo sapien
gccatagggcggttcttctccgatc

SEQ ID NO: 2170945 - DNA, 25 bp, Homo sapien
aggactccgggaccattgacctcag

SEQ ID NO: 2170946 - DNA, 25 bp, Homo sapien
ggtttccagtatgagggcacctaca

SEQ ID NO: 2170947 - DNA, 25 bp, Homo sapien
tgtcccagagcttattggccactgg

SEQ ID NO: 2170948 - DNA, 25 bp, Homo sapien
gcacccacgtgagagaatctgcctg

SEQ ID NO: 2170949 - DNA, 25 bp, Homo sapien
tctagttaatcccaaagggagcagc

SEQ ID NO: 2170950 - DNA, 25 bp, Homo sapien
cccagcagacggtcggtcggttgca

SEQ ID NO: 2170951 - DNA, 25 bp, Homo sapien
gtgagccggttcaatctctagttaa

SEQ ID NO: 2170952 - DNA, 25 bp, Homo sapien
cagggcctgagctgaaacaaggtga

SEQ ID NO: 2170953 - DNA, 25 bp, Homo sapien
gatagtctgcggggtcctcacttct

SEQ ID NO: 2170954 - DNA, 25 bp, Homo sapien
ctgatgggacctcgatgatgctgga

SEQ ID NO: 2170955 - DNA, 25 bp, Homo sapien
cctcgatgatgctggagagcttcac

SEQ ID NO: 2170956 - DNA, 25 bp, Homo sapien
gaagagactgggattgatagtctgc

SEQ ID NO: 2170957 - DNA, 25 bp, Homo sapien
actagtgtgcgcctggaacagcatc

SEQ ID NO: 2170958 - DNA, 25 bp, Homo sapien
tgtgcgcctggaacagcatctttcc

SEQ ID NO: 2170959 - DNA, 25 bp, Homo sapien
tgtagactagtgtgcgcctggaaca

SEQ ID NO: 2170960 - DNA, 25 bp, Homo sapien
tggccttgtagactagtgtgcgcct

SEQ ID NO: 2170961 - DNA, 25 bp, Homo sapien
ttagggactgtctagatggacttct

SEQ ID NO: 2170962 - DNA, 25 bp, Homo sapien
tgtgcctagccgctgaatgtagccc

SEQ ID NO: 2170963 - DNA, 25 bp, Homo sapien
agttgcaggctctttagggactgtc

SEQ ID NO: 2170964 - DNA, 25 bp, Homo sapien
tagcccttaatcctggagttgcagg

SEQ ID NO: 2170965 - DNA, 25 bp, Homo sapien
gatcatcccggctctacctggtgtg

SEQ ID NO: 2170966 - DNA, 25 bp, Homo sapien
ggatcatcccggctctacctggtgt

SEQ ID NO: 2170967 - DNA, 25 bp, Homo sapien
ctagtgcgccaggatcatcccggct

SEQ ID NO: 2170968 - DNA, 25 bp, Homo sapien
gtgcgccaggatcatcccggctcta

SEQ ID NO: 2170969 - DNA, 25 bp, Homo sapien
catagctgtgggatccggaagtaaa

SEQ ID NO: 2170970 - DNA, 25 bp, Homo sapien
gcccgcggaagctcggtaatgataa

SEQ ID NO: 2170971 - DNA, 25 bp, Homo sapien
taatgataagcacgccggccacttt

SEQ ID NO: 2170972 - DNA, 25 bp, Homo sapien
catcccgctccggagagaagtctga

SEQ ID NO: 2170973 - DNA, 25 bp, Homo sapien
cagcagagtccgtcagacgtgagaa

SEQ ID NO: 2170974 - DNA, 25 bp, Homo sapien
gagaaagtcccagtttcgcggtcgc

SEQ ID NO: 2170975 - DNA, 25 bp, Homo sapien
ggactgtgaacgctggtagggcccc

SEQ ID NO: 2170976 - DNA, 25 bp, Homo sapien
agaagggtgggagcggcggactgtg

SEQ ID NO: 2170977 - DNA, 25 bp, Homo sapien
tgggtcctgaatcggcccgccttgg

SEQ ID NO: 2170978 - DNA, 25 bp, Homo sapien
ctgggtcctgaatcggcccgccttg

SEQ ID NO: 2170979 - DNA, 25 bp, Homo sapien
cagtgctccagaagcgcggagcagg

SEQ ID NO: 2170980 - DNA, 25 bp, Homo sapien
tccagaagcgcggagcaggaacggg

SEQ ID NO: 2170981 - DNA, 25 bp, Homo sapien
ggagtagaaacagtccagctcgccg

SEQ ID NO: 2170982 - DNA, 25 bp, Homo sapien
tcacacaaggagtagggtcagaccc

SEQ ID NO: 2170983 - DNA, 25 bp, Homo sapien
tagagcgcagtcaagtttggtgaac

SEQ ID NO: 2170984 - DNA, 25 bp, Homo sapien
gaatttaacgacctcgatagagcgc

SEQ ID NO: 2170985 - DNA, 25 bp, Homo sapien
tcacacagttggctcttccagaggt

SEQ ID NO: 2170986 - DNA, 25 bp, Homo sapien
acacagttggctcttccagaggtgc

SEQ ID NO: 2170987 - DNA, 25 bp, Homo sapien
cacacagttggctcttccagaggtg

SEQ ID NO: 2170988 - DNA, 25 bp, Homo sapien
ctcacacagttggctcttccagagg

SEQ ID NO: 2170989 - DNA, 25 bp, Homo sapien
cagaggagactcttcgcccagtacg

SEQ ID NO: 2170990 - DNA, 25 bp, Homo sapien
gactcttcgcccagtacgtcctgat

SEQ ID NO: 2170991 - DNA, 25 bp, Homo sapien
tcgcccagtacgtcctgatctgctg

SEQ ID NO: 2170992 - DNA, 25 bp, Homo sapien
cagtacgtcctgatctgctgccggg

SEQ ID NO: 2170993 - DNA, 25 bp, Homo sapien
caggcagcgctggagggtctcagga

SEQ ID NO: 2170994 - DNA, 25 bp, Homo sapien
tctcctccaggcagcgctggagggt

SEQ ID NO: 2170995 - DNA, 25 bp, Homo sapien
agggtctcaggagcgccctgttctg

SEQ ID NO: 2170996 - DNA, 25 bp, Homo sapien
tcggagctcttgattctcctccagg

SEQ ID NO: 2170997 - DNA, 25 bp, Homo sapien
gctggcttggaaatgcagaagctcc

SEQ ID NO: 2170998 - DNA, 25 bp, Homo sapien
tggaacttgcacatgaggaactcct

SEQ ID NO: 2170999 - DNA, 25 bp, Homo sapien
agcgctcccgcagaatctggttgct

SEQ ID NO: 2171000 - DNA, 25 bp, Homo sapien
gcagcgctcccgcagaatctggttg

SEQ ID NO: 2171001 - DNA, 25 bp, Homo sapien
cttcagatcgagcttctccaggccg

SEQ ID NO: 2171002 - DNA, 25 bp, Homo sapien
gcatctcttcaggtgctccacctcc

SEQ ID NO: 2171003 - DNA, 25 bp, Homo sapien
tgcctcttcagatcgagcttctcca

SEQ ID NO: 2171004 - DNA, 25 bp, Homo sapien
tcttcagatcgagcttctccaggcc

SEQ ID NO: 2171005 - DNA, 25 bp, Homo sapien
tcaccgcgggttttcagaacctggc

SEQ ID NO: 2171006 - DNA, 25 bp, Homo sapien
tgagcttcccggttgtgactccgtg

SEQ ID NO: 2171007 - DNA, 25 bp, Homo sapien
gctgtcccacactgttgccgaaaga

SEQ ID NO: 2171008 - DNA, 25 bp, Homo sapien
tgccgaaagaaacaggtgccgtctg

SEQ ID NO: 2171009 - DNA, 25 bp, Homo sapien
gtctgcacaactcccctgggcgagg

SEQ ID NO: 2171010 - DNA, 25 bp, Homo sapien
ctgcaggataaaaagccacttcctg

SEQ ID NO: 2171011 - DNA, 25 bp, Homo sapien
gctttctccccagcggcccactcct

SEQ ID NO: 2171012 - DNA, 25 bp, Homo sapien
actgctttctccccagcggcccact

SEQ ID NO: 2171013 - DNA, 25 bp, Homo sapien
agcactgctttctccccagcggccc

SEQ ID NO: 2171014 - DNA, 25 bp, Homo sapien
agagcctggcattccttagtggcag

SEQ ID NO: 2171015 - DNA, 25 bp, Homo sapien
tggcagcctccaagcgactctggct

SEQ ID NO: 2171016 - DNA, 25 bp, Homo sapien
ctgcagctccccgagcaaggacgtc

SEQ ID NO: 2171017 - DNA, 25 bp, Homo sapien
acgtcacctgggctttcacagaggc

SEQ ID NO: 2171018 - DNA, 25 bp, Homo sapien
ggcccccctggcagctgatccatct

SEQ ID NO: 2171019 - DNA, 25 bp, Homo sapien
gggcccccctggcagctgatccatc

SEQ ID NO: 2171020 - DNA, 25 bp, Homo sapien
gcccccctggcagctgatccatctg

SEQ ID NO: 2171021 - DNA, 25 bp, Homo sapien
ctgggcgtgcaagcactgagctcaa

SEQ ID NO: 2171022 - DNA, 25 bp, Homo sapien
actgagctcaatgcagaccgggcct

SEQ ID NO: 2171023 - DNA, 25 bp, Homo sapien
ctgctggagtcccagacgacctgct

SEQ ID NO: 2171024 - DNA, 25 bp, Homo sapien
gacctgctcggatgctcagttccca

SEQ ID NO: 2171025 - DNA, 25 bp, Homo sapien
ccctgcatgcgcagctggtccacct

SEQ ID NO: 2171026 - DNA, 25 bp, Homo sapien
ctggcgctccatgcggagcgcggcc

SEQ ID NO: 2171027 - DNA, 25 bp, Homo sapien
tggcgctccatgcggagcgcggcct

SEQ ID NO: 2171028 - DNA, 25 bp, Homo sapien
cttgatgtggttgtcgtattcttgg

SEQ ID NO: 2171029 - DNA, 25 bp, Homo sapien
tgatgtggttgtcgtattcttggaa

SEQ ID NO: 2171030 - DNA, 25 bp, Homo sapien
gtggttgtcgtattcttggaagagc

SEQ ID NO: 2171031 - DNA, 25 bp, Homo sapien
gatgtggttgtcgtattcttggaag

SEQ ID NO: 2171032 - DNA, 25 bp, Homo sapien
cttggcttgggggaagctgagccag

SEQ ID NO: 2171033 - DNA, 25 bp, Homo sapien
gctgagccaggtgccagatggcgat

SEQ ID NO: 2171034 - DNA, 25 bp, Homo sapien
tgagccaggtgccagatggcgatgg

SEQ ID NO: 2171035 - DNA, 25 bp, Homo sapien
ggaagctgagccaggtgccagatgg

SEQ ID NO: 2171036 - DNA, 25 bp, Homo sapien
ctgaagaggccgctgaggtcatctg

SEQ ID NO: 2171037 - DNA, 25 bp, Homo sapien
ccctccagagattaagtggccagtt

SEQ ID NO: 2171038 - DNA, 25 bp, Homo sapien
agctcagctgagagccctcagtcct

SEQ ID NO: 2171039 - DNA, 25 bp, Homo sapien
tgtcacggcccaaaacgacagagga

SEQ ID NO: 2171040 - DNA, 25 bp, Homo sapien
caggatctcagcgtgcacagggaga

SEQ ID NO: 2171041 - DNA, 25 bp, Homo sapien
gctgggtgatgccagcccctgattt

SEQ ID NO: 2171042 - DNA, 25 bp, Homo sapien
gcccattgcaggatctcagcgtgca

SEQ ID NO: 2171043 - DNA, 25 bp, Homo sapien
gcccctgatttgagggcccattgca

SEQ ID NO: 2171044 - DNA, 25 bp, Homo sapien
agaaggatgaaagagtggccctggc

SEQ ID NO: 2171045 - DNA, 25 bp, Homo sapien
agctgacggagcctcgtcagcccag

SEQ ID NO: 2171046 - DNA, 25 bp, Homo sapien
aaggatgaaagagtggccctggctg

SEQ ID NO: 2171047 - DNA, 25 bp, Homo sapien
ctgacggagcctcgtcagcccaggg

SEQ ID NO: 2171048 - DNA, 25 bp, Homo sapien
accggaacggtctccatcacaatct

SEQ ID NO: 2171049 - DNA, 25 bp, Homo sapien
cttcagcttatcgatcacctcctgt

SEQ ID NO: 2171050 - DNA, 25 bp, Homo sapien
gctgtttgagatcttccagctgcat

SEQ ID NO: 2171051 - DNA, 25 bp, Homo sapien
tgggccttcagcaccggaacggtct

SEQ ID NO: 2171052 - DNA, 25 bp, Homo sapien
cagcctggaagtccgccttgtagat

SEQ ID NO: 2171053 - DNA, 25 bp, Homo sapien
ggaagtccgccttgtagatatccgc

SEQ ID NO: 2171054 - DNA, 25 bp, Homo sapien
tcagcctggaagtccgccttgtaga

SEQ ID NO: 2171055 - DNA, 25 bp, Homo sapien
cctggaagtccgccttgtagatatc

SEQ ID NO: 2171056 - DNA, 25 bp, Homo sapien
gaaaacagaaaccgtccagtcaagc

SEQ ID NO: 2171057 - DNA, 25 bp, Homo sapien
aagctccttggctggactagtgtca

SEQ ID NO: 2171058 - DNA, 25 bp, Homo sapien
gtcaagccacgcatttctgtaaagc

SEQ ID NO: 2171059 - DNA, 25 bp, Homo sapien
tccttggctggactagtgtcaaagc

SEQ ID NO: 2171060 - DNA, 25 bp, Homo sapien
gacatgccgcttcctcatgtcctcg

SEQ ID NO: 2171061 - DNA, 25 bp, Homo sapien
atgccgcttcctcatgtcctcgatc

SEQ ID NO: 2171062 - DNA, 25 bp, Homo sapien
catgccgcttcctcatgtcctcgat

SEQ ID NO: 2171063 - DNA, 25 bp, Homo sapien
ctcgacatgccgcttcctcatgtcc

SEQ ID NO: 2171064 - DNA, 25 bp, Homo sapien
gagagcaacaggaaggtcgaactgt

SEQ ID NO: 2171065 - DNA, 25 bp, Homo sapien
gcaggcccagttctcgctcactcac

SEQ ID NO: 2171066 - DNA, 25 bp, Homo sapien
gctaccgatggggtggcctacacga

SEQ ID NO: 2171067 - DNA, 25 bp, Homo sapien
aaggtcgaactgtgacctcccgcgg

SEQ ID NO: 2171068 - DNA, 25 bp, Homo sapien
cagggccaggggagaggagaggtag

SEQ ID NO: 2171069 - DNA, 25 bp, Homo sapien
agggccaggggagaggagaggtagg

SEQ ID NO: 2171070 - DNA, 25 bp, Homo sapien
ggcagggccaggggagaggagaggt

SEQ ID NO: 2171071 - DNA, 25 bp, Homo sapien
gcagggccaggggagaggagaggta

SEQ ID NO: 2171072 - DNA, 25 bp, Homo sapien
ctccatgacatgtatctgcagggtg

SEQ ID NO: 2171073 - DNA, 25 bp, Homo sapien
gtatctgcagggtgtccatatcagg

SEQ ID NO: 2171074 - DNA, 25 bp, Homo sapien
catgacatgtatctgcagggtgtcc

SEQ ID NO: 2171075 - DNA, 25 bp, Homo sapien
catgtatctgcagggtgtccatatc

SEQ ID NO: 2171076 - DNA, 25 bp, Homo sapien
gcaggcgggagaggaaagcgcagac

SEQ ID NO: 2171077 - DNA, 25 bp, Homo sapien
acggtcccgggcacgtcctcggcag

SEQ ID NO: 2171078 - DNA, 25 bp, Homo sapien
ctgcacggtcccgggcacgtcctcg

SEQ ID NO: 2171079 - DNA, 25 bp, Homo sapien
aggcgggagaggaaagcgcagactg

SEQ ID NO: 2171080 - DNA, 25 bp, Homo sapien
cccaaaagaggggaccagcggatca

SEQ ID NO: 2171081 - DNA, 25 bp, Homo sapien
ccagcggatcaacagctgaagcgta

SEQ ID NO: 2171082 - DNA, 25 bp, Homo sapien
agctgaagcgtaaggtgccgcggcc

SEQ ID NO: 2171083 - DNA, 25 bp, Homo sapien
gaagcgtaaggtgccgcggccagct

SEQ ID NO: 2171084 - DNA, 25 bp, Homo sapien
tgcatggtaagagggcagcactccc

SEQ ID NO: 2171085 - DNA, 25 bp, Homo sapien
aacaaaaagagcagcgagtcaggcc

SEQ ID NO: 2171086 - DNA, 25 bp, Homo sapien
ccgaggcaagtggttcgagcagaca

SEQ ID NO: 2171087 - DNA, 25 bp, Homo sapien
ggttaaatacacatcggtctggctg

SEQ ID NO: 2171088 - DNA, 25 bp, Homo sapien
tctatgccaaagatacgcacgacta

SEQ ID NO: 2171089 - DNA, 25 bp, Homo sapien
gccaaagatacgcacgactaatgca

SEQ ID NO: 2171090 - DNA, 25 bp, Homo sapien
aagatacgcacgactaatgcacaag

SEQ ID NO: 2171091 - DNA, 25 bp, Homo sapien
gatacgcacgactaatgcacaagga

SEQ ID NO: 2171092 - DNA, 25 bp, Homo sapien
gtttaagctcactcttaacagagaa

SEQ ID NO: 2171093 - DNA, 25 bp, Homo sapien
gaactgcatggcctagcgaatgaca

SEQ ID NO: 2171094 - DNA, 25 bp, Homo sapien
gatgtttaagctcactcttaacaga

SEQ ID NO: 2171095 - DNA, 25 bp, Homo sapien
atggcctagcgaatgacaaaaaccc

SEQ ID NO: 2171096 - DNA, 25 bp, Homo sapien
aacggataaaagatatgagcagccc

SEQ ID NO: 2171097 - DNA, 25 bp, Homo sapien
aagagtttctaaaagctgagcaaca

SEQ ID NO: 2171098 - DNA, 25 bp, Homo sapien
tgagcaacaaaagataacccagtag

SEQ ID NO: 2171099 - DNA, 25 bp, Homo sapien
tcctgctcatggacaaagagtttct

SEQ ID NO: 2171100 - DNA, 25 bp, Homo sapien
ggagcgcgcatgaacaccagagaac

SEQ ID NO: 2171101 - DNA, 25 bp, Homo sapien
tgttcttgtgcattggtcggcagga

SEQ ID NO: 2171102 - DNA, 25 bp, Homo sapien
taatccaaccagttgttctggaagc

SEQ ID NO: 2171103 - DNA, 25 bp, Homo sapien
tggttccctcccaagagtaatccaa

SEQ ID NO: 2171104 - DNA, 25 bp, Homo sapien
cacctagggcttcatcggttgccat

SEQ ID NO: 2171105 - DNA, 25 bp, Homo sapien
gtgccggaccacatcgttacatacg

SEQ ID NO: 2171106 - DNA, 25 bp, Homo sapien
tctcttagggttacgcaccagggct

SEQ ID NO: 2171107 - DNA, 25 bp, Homo sapien
gttcacaccaacatgctacaaggca

SEQ ID NO: 2171108 - DNA, 25 bp, Homo sapien
ttccagggcaactgaagggcatggc

SEQ ID NO: 2171109 - DNA, 25 bp, Homo sapien
gaaatcggccatgcaaagatgaggg

SEQ ID NO: 2171110 - DNA, 25 bp, Homo sapien
gacaacaaggacaagcgccgtgtgt

SEQ ID NO: 2171111 - DNA, 25 bp, Homo sapien
cagcaggagagggacataacgtgac

SEQ ID NO: 2171112 - DNA, 25 bp, Homo sapien
tgatctatccatccgaattccaaat

SEQ ID NO: 2171113 - DNA, 25 bp, Homo sapien
tgcttataagaagtccccccatgct

SEQ ID NO: 2171114 - DNA, 25 bp, Homo sapien
aacatgacaatacctgcatctctgc

SEQ ID NO: 2171115 - DNA, 25 bp, Homo sapien
caggcaacatgacaatacctgcatc

SEQ ID NO: 2171116 - DNA, 25 bp, Homo sapien
aatggaaaatccagtttgggacgtg

SEQ ID NO: 2171117 - DNA, 25 bp, Homo sapien
tcgtcggtactctgctgcacacgga

SEQ ID NO: 2171118 - DNA, 25 bp, Homo sapien
ggacgtggtgtaaactggaattgct

SEQ ID NO: 2171119 - DNA, 25 bp, Homo sapien
gccctgggcaacaaccaatcgactt

SEQ ID NO: 2171120 - DNA, 25 bp, Homo sapien
aacgacttgaggtttaattcacatg

SEQ ID NO: 2171121 - DNA, 25 bp, Homo sapien
gggagaaggacaggaccgaggaaga

SEQ ID NO: 2171122 - DNA, 25 bp, Homo sapien
agaaggacaggaccgaggaagagag

SEQ ID NO: 2171123 - DNA, 25 bp, Homo sapien
gccgactcccttccttactccacaa

SEQ ID NO: 2171124 - DNA, 25 bp, Homo sapien
gcggaggatcgtgcttcacactggt

SEQ ID NO: 2171125 - DNA, 25 bp, Homo sapien
gacactgctgcgctcagcggaggat

SEQ ID NO: 2171126 - DNA, 25 bp, Homo sapien
gccctccacgctttccttgagtggg

SEQ ID NO: 2171127 - DNA, 25 bp, Homo sapien
gcgggcggagcagaaaatcgtcatt

SEQ ID NO: 2171128 - DNA, 25 bp, Homo sapien
gttgtcagtggatctatgattcggg

SEQ ID NO: 2171129 - DNA, 25 bp, Homo sapien
gcttttccaggagtataatgcgagt

SEQ ID NO: 2171130 - DNA, 25 bp, Homo sapien
cgtgcggaggaaactacatctgtgg

SEQ ID NO: 2171131 - DNA, 25 bp, Homo sapien
tacggcttaagccgccggtggatgc

SEQ ID NO: 2171132 - DNA, 25 bp, Homo sapien
agccgccggtggatgccactgcaga

SEQ ID NO: 2171133 - DNA, 25 bp, Homo sapien
cccctaaaacgccatggaggccatg

SEQ ID NO: 2171134 - DNA, 25 bp, Homo sapien
taaaacgccatggaggccatggacc

SEQ ID NO: 2171135 - DNA, 25 bp, Homo sapien
ttcgaaggtgtctttgtcggttaca

SEQ ID NO: 2171136 - DNA, 25 bp, Homo sapien
aaggtgtctttgtcggttacagcaa

SEQ ID NO: 2171137 - DNA, 25 bp, Homo sapien
gaaggtgtctttgtcggttacagca

SEQ ID NO: 2171138 - DNA, 25 bp, Homo sapien
cgaaggtgtctttgtcggttacagc

SEQ ID NO: 2171139 - DNA, 25 bp, Homo sapien
aacccatgaggtttgaagtgcttgg

SEQ ID NO: 2171140 - DNA, 25 bp, Homo sapien
catgaggtttgaagtgcttggccac

SEQ ID NO: 2171141 - DNA, 25 bp, Homo sapien
cccatgaggtttgaagtgcttggcc

SEQ ID NO: 2171142 - DNA, 25 bp, Homo sapien
gaggtttgaagtgcttggccacctc

SEQ ID NO: 2171143 - DNA, 25 bp, Homo sapien
tcctccttgccatcgttggaggcac

SEQ ID NO: 2171144 - DNA, 25 bp, Homo sapien
gaaagcatcctccttgccatcgttg

SEQ ID NO: 2171145 - DNA, 25 bp, Homo sapien
aaagaaagcatcctccttgccatcg

SEQ ID NO: 2171146 - DNA, 25 bp, Homo sapien
ctgtcccaaagaaagcatcctcctt

SEQ ID NO: 2171147 - DNA, 25 bp, Homo sapien
gatcacacgagtcatccaacgtggc

SEQ ID NO: 2171148 - DNA, 25 bp, Homo sapien
ccagaagctcgtctggcatggtttc

SEQ ID NO: 2171149 - DNA, 25 bp, Homo sapien
gtcgaactccttcagatcagttttc

SEQ ID NO: 2171150 - DNA, 25 bp, Homo sapien
tccaacgtggccagaagctcgtctg

SEQ ID NO: 2171151 - DNA, 25 bp, Homo sapien
ctgggagatggcaaatcgggttcac

SEQ ID NO: 2171152 - DNA, 25 bp, Homo sapien
tttctgggagatggcaaatcgggtt

SEQ ID NO: 2171153 - DNA, 25 bp, Homo sapien
tctgggagatggcaaatcgggttca

SEQ ID NO: 2171154 - DNA, 25 bp, Homo sapien
ttctgggagatggcaaatcgggttc

SEQ ID NO: 2171155 - DNA, 25 bp, Homo sapien
aaggggaagaggttgcaagaaggtg

SEQ ID NO: 2171156 - DNA, 25 bp, Homo sapien
ggggaagaggttgcaagaaggtgaa

SEQ ID NO: 2171157 - DNA, 25 bp, Homo sapien
gggaagaggttgcaagaaggtgaag

SEQ ID NO: 2171158 - DNA, 25 bp, Homo sapien
ggaagaggttgcaagaaggtgaagg

SEQ ID NO: 2171159 - DNA, 25 bp, Homo sapien
tcttggaaatgtaagcagtggagtc

SEQ ID NO: 2171160 - DNA, 25 bp, Homo sapien
ctcctttgtgcagtgagggatcttg

SEQ ID NO: 2171161 - DNA, 25 bp, Homo sapien
gcgtcttcctcctttgtgcagtgag

SEQ ID NO: 2171162 - DNA, 25 bp, Homo sapien
gagggatcttggaaatgtaagcagt

SEQ ID NO: 2171163 - DNA, 25 bp, Homo sapien
agggtcataaggtttggggcaggca

SEQ ID NO: 2171164 - DNA, 25 bp, Homo sapien
aggagggtcataaggtttggggcag

SEQ ID NO: 2171165 - DNA, 25 bp, Homo sapien
gagggtcataaggtttggggcaggc

SEQ ID NO: 2171166 - DNA, 25 bp, Homo sapien
tttcagcttcttatccagtttctca

SEQ ID NO: 2171167 - DNA, 25 bp, Homo sapien
ttcagcttcttatccagtttctcac

SEQ ID NO: 2171168 - DNA, 25 bp, Homo sapien
ttttttcagcttcttatccagtttc

SEQ ID NO: 2171169 - DNA, 25 bp, Homo sapien
ttttcagcttcttatccagtttctc

SEQ ID NO: 2171170 - DNA, 25 bp, Homo sapien
ccctcttcttctggcgatacctagt

SEQ ID NO: 2171171 - DNA, 25 bp, Homo sapien
ccaccctcttcttctggcgatacct

SEQ ID NO: 2171172 - DNA, 25 bp, Homo sapien
accctcttcttctggcgatacctag

SEQ ID NO: 2171173 - DNA, 25 bp, Homo sapien
ctcttcttctggcgatacctagttc

SEQ ID NO: 2171174 - DNA, 25 bp, Homo sapien
agggaatccgccctctcttgcagag

SEQ ID NO: 2171175 - DNA, 25 bp, Homo sapien
catgtactggatctcctcggccagg

SEQ ID NO: 2171176 - DNA, 25 bp, Homo sapien
cgttcttcttttccaccgctttgca

SEQ ID NO: 2171177 - DNA, 25 bp, Homo sapien
gccttgcagacctcttctatcgaat

SEQ ID NO: 2171178 - DNA, 25 bp, Homo sapien
acacacagctacagcgcgagactcc

SEQ ID NO: 2171179 - DNA, 25 bp, Homo sapien
cgcgagactcctatgtacaagcaca

SEQ ID NO: 2171180 - DNA, 25 bp, Homo sapien
agcgcgagactcctatgtacaagca

SEQ ID NO: 2171181 - DNA, 25 bp, Homo sapien
cagcgcgagactcctatgtacaagc

SEQ ID NO: 2171182 - DNA, 25 bp, Homo sapien
gcccggctctcagagagaaggtcag

SEQ ID NO: 2171183 - DNA, 25 bp, Homo sapien
ggctccggagcctctgcccggctct

SEQ ID NO: 2171184 - DNA, 25 bp, Homo sapien
ctctgcccggctctcagagagaagg

SEQ ID NO: 2171185 - DNA, 25 bp, Homo sapien
tctgcccggctctcagagagaaggt

SEQ ID NO: 2171186 - DNA, 25 bp, Homo sapien
tgggccgccagcattgccccctggg

SEQ ID NO: 2171187 - DNA, 25 bp, Homo sapien
aactcaagcaggcggctctccggcc

SEQ ID NO: 2171188 - DNA, 25 bp, Homo sapien
ctgtgccccggccttcggcctgcat

SEQ ID NO: 2171189 - DNA, 25 bp, Homo sapien
cctgggccatcagcatcgcccgtcg

SEQ ID NO: 2171190 - DNA, 25 bp, Homo sapien
aagcacccctggcacgggaagcggt

SEQ ID NO: 2171191 - DNA, 25 bp, Homo sapien
atagtcagtatgttgccggacacag

SEQ ID NO: 2171192 - DNA, 25 bp, Homo sapien
cttccatgggtgtcgcgaaaggcat

SEQ ID NO: 2171193 - DNA, 25 bp, Homo sapien
gttgccggacacagtgaactccttc

SEQ ID NO: 2171194 - DNA, 25 bp, Homo sapien
caggccccatccctgtcctggtcct

SEQ ID NO: 2171195 - DNA, 25 bp, Homo sapien
cccatccctgtcctggtcctgaact

SEQ ID NO: 2171196 - DNA, 25 bp, Homo sapien
ccaggccccatccctgtcctggtcc

SEQ ID NO: 2171197 - DNA, 25 bp, Homo sapien
atccctgtcctggtcctgaactgac

SEQ ID NO: 2171198 - DNA, 25 bp, Homo sapien
gctccctcgggtggcggcgggcctg

SEQ ID NO: 2171199 - DNA, 25 bp, Homo sapien
tttctagcagcctgaccgtggggtg

SEQ ID NO: 2171200 - DNA, 25 bp, Homo sapien
taccaggtctctgttctgagaccct

SEQ ID NO: 2171201 - DNA, 25 bp, Homo sapien
gaacatcacgttaaaggcgacacct

SEQ ID NO: 2171202 - DNA, 25 bp, Homo sapien
ggcagaaagcactgcgtgatccaca

SEQ ID NO: 2171203 - DNA, 25 bp, Homo sapien
tgatggagagctgcagttggcggtg

SEQ ID NO: 2171204 - DNA, 25 bp, Homo sapien
ctgcagttggcggtggtctgcagca

SEQ ID NO: 2171205 - DNA, 25 bp, Homo sapien
aagcactgcgtgatccacatcaaca

SEQ ID NO: 2171206 - DNA, 25 bp, Homo sapien
cactcgtgctgggaccattccctag

SEQ ID NO: 2171207 - DNA, 25 bp, Homo sapien
gaaacaaacatgtaagccgtcctcc

SEQ ID NO: 2171208 - DNA, 25 bp, Homo sapien
tcctccagcgacaaacaatcaggcc

SEQ ID NO: 2171209 - DNA, 25 bp, Homo sapien
gcatgacctaggaaggggcgccagg

SEQ ID NO: 2171210 - DNA, 25 bp, Homo sapien
cttgtgctacttcaatctgtgaatc

SEQ ID NO: 2171211 - DNA, 25 bp, Homo sapien
tacttcaatctgtgaatcccagagc

SEQ ID NO: 2171212 - DNA, 25 bp, Homo sapien
ttcaatctgtgaatcccagagcctc

SEQ ID NO: 2171213 - DNA, 25 bp, Homo sapien
tgctacttcaatctgtgaatcccag

SEQ ID NO: 2171214 - DNA, 25 bp, Homo sapien
ggttacatgtggcagcaccatggaa

SEQ ID NO: 2171215 - DNA, 25 bp, Homo sapien
gcctgggttggaagcaaggttgagt

SEQ ID NO: 2171216 - DNA, 25 bp, Homo sapien
tggaagcaaggttgagttctgcagc

SEQ ID NO: 2171217 - DNA, 25 bp, Homo sapien
gaagtccacaggagtctctactcct

SEQ ID NO: 2171218 - DNA, 25 bp, Homo sapien
ttaaatagaggcgaacacgggactc

SEQ ID NO: 2171219 - DNA, 25 bp, Homo sapien
tcagaagaatttgctggcagctctt

SEQ ID NO: 2171220 - DNA, 25 bp, Homo sapien
gaccgtttatgtcttatgtgccaac

SEQ ID NO: 2171221 - DNA, 25 bp, Homo sapien
tcgaggagtcagcaaggtctgcaac

SEQ ID NO: 2171222 - DNA, 25 bp, Homo sapien
tttggctgactgcagtacctgagac

SEQ ID NO: 2171223 - DNA, 25 bp, Homo sapien
tgagacacggtctgctccataagag

SEQ ID NO: 2171224 - DNA, 25 bp, Homo sapien
cacttgatctgttctttggctgact

SEQ ID NO: 2171225 - DNA, 25 bp, Homo sapien
cactgaaggagtgaccacttgatct

SEQ ID NO: 2171226 - DNA, 25 bp, Homo sapien
ttcgacgggcgatgctgatggccca

SEQ ID NO: 2171227 - DNA, 25 bp, Homo sapien
gcacagggggttcgacgggcgatgc

SEQ ID NO: 2171228 - DNA, 25 bp, Homo sapien
ttcctgatggcccagggggcaatgc

SEQ ID NO: 2171229 - DNA, 25 bp, Homo sapien
cagggggttcgacgggcgatgctga

SEQ ID NO: 2171230 - DNA, 25 bp, Homo sapien
tgcctccgcatcctcgtgggccctg

SEQ ID NO: 2171231 - DNA, 25 bp, Homo sapien
tcacgccagggggcggaacttcctg

SEQ ID NO: 2171232 - DNA, 25 bp, Homo sapien
tctgcctccgcatcctcgtgggccc

SEQ ID NO: 2171233 - DNA, 25 bp, Homo sapien
gggggcggaacttcctgcagcctct

SEQ ID NO: 2171234 - DNA, 25 bp, Homo sapien
ttaggacttcctttcttgacttgat

SEQ ID NO: 2171235 - DNA, 25 bp, Homo sapien
gcaggaactaggtatcgccagaaga

SEQ ID NO: 2171236 - DNA, 25 bp, Homo sapien
caggaactaggtatcgccagaagaa

SEQ ID NO: 2171237 - DNA, 25 bp, Homo sapien
agcaggaactaggtatcgccagaag

SEQ ID NO: 2171238 - DNA, 25 bp, Homo sapien
ccaataagggctcaaaacgttgtct

SEQ ID NO: 2171239 - DNA, 25 bp, Homo sapien
cacgaaagcaattccagtttacacc

SEQ ID NO: 2171240 - DNA, 25 bp, Homo sapien
taaggaaagtcgattggttgttgcc

SEQ ID NO: 2171241 - DNA, 25 bp, Homo sapien
tgccccacccaaggcacaaggaaaa

SEQ ID NO: 2171242 - DNA, 25 bp, Homo sapien
tgtcccaagtgccagtatcaggccc

SEQ ID NO: 2171243 - DNA, 25 bp, Homo sapien
agcccccccgaggagccacctgact

SEQ ID NO: 2171244 - DNA, 25 bp, Homo sapien
atgtcgaggtctcccaggccccctt

SEQ ID NO: 2171245 - DNA, 25 bp, Homo sapien
tcgaggtctcccaggcccccttgcc

SEQ ID NO: 2171246 - DNA, 25 bp, Homo sapien
gtcgaggtctcccaggcccccttgc

SEQ ID NO: 2171247 - DNA, 25 bp, Homo sapien
tgtcgaggtctcccaggcccccttg

SEQ ID NO: 2171248 - DNA, 25 bp, Homo sapien
ttcgacgggcgatgctgatggccca

SEQ ID NO: 2171249 - DNA, 25 bp, Homo sapien
cagggggttcgacgggcgatgctga

SEQ ID NO: 2171250 - DNA, 25 bp, Homo sapien
gcacagggggttcgacgggcgatgc

SEQ ID NO: 2171251 - DNA, 25 bp, Homo sapien
ttcctgatggcccagggggcaatgc

SEQ ID NO: 2171252 - DNA, 25 bp, Homo sapien
tcacgccagggggcggaacttcctg

SEQ ID NO: 2171253 - DNA, 25 bp, Homo sapien
tgcctccgcatcctcgtgggccctg

SEQ ID NO: 2171254 - DNA, 25 bp, Homo sapien
tctgcctccgcatcctcgtgggccc

SEQ ID NO: 2171255 - DNA, 25 bp, Homo sapien
gggggcggaacttcctgcagcctct

SEQ ID NO: 2171256 - DNA, 25 bp, Homo sapien
ggtccaagctggcattgcggccacc

SEQ ID NO: 2171257 - DNA, 25 bp, Homo sapien
agctggcattgcggccaccttccgg

SEQ ID NO: 2171258 - DNA, 25 bp, Homo sapien
ggcattgcggccaccttccggcccg

SEQ ID NO: 2171259 - DNA, 25 bp, Homo sapien
gtccaagctggcattgcggccacct

SEQ ID NO: 2171260 - DNA, 25 bp, Homo sapien
gtgtgcctgttaccgaaataccaag

SEQ ID NO: 2171261 - DNA, 25 bp, Homo sapien
atgactgactgagacgaagagcatt

SEQ ID NO: 2171262 - DNA, 25 bp, Homo sapien
gtttggtctacgtcctgctgctggc

SEQ ID NO: 2171263 - DNA, 25 bp, Homo sapien
actgactgagacgaagagcattacc

SEQ ID NO: 2171264 - DNA, 25 bp, Homo sapien
ctagaggtggtagccgtgtccgggg

SEQ ID NO: 2171265 - DNA, 25 bp, Homo sapien
tctgaggactggatgtggcacagac

SEQ ID NO: 2171266 - DNA, 25 bp, Homo sapien
tgcgggaagtgcattcgctttaagc

SEQ ID NO: 2171267 - DNA, 25 bp, Homo sapien
gacatacataggttaaagctgctac

SEQ ID NO: 2171268 - DNA, 25 bp, Homo sapien
gagatgcgggaagtgcattcgcttt

SEQ ID NO: 2171269 - DNA, 25 bp, Homo sapien
gcacagtagaatgtccccgcaggcc

SEQ ID NO: 2171270 - DNA, 25 bp, Homo sapien
ctgcagcctctgtctgggtgtcggg

SEQ ID NO: 2171271 - DNA, 25 bp, Homo sapien
tgctatgtctgcagtggctttttag

SEQ ID NO: 2171272 - DNA, 25 bp, Homo sapien
gcagcctctgtctgggtgtcgggga

SEQ ID NO: 2171273 - DNA, 25 bp, Homo sapien
cactggtggctctaaggatattgca

SEQ ID NO: 2171274 - DNA, 25 bp, Homo sapien
cactgatggtcaacacaggtcaaaa

SEQ ID NO: 2171275 - DNA, 25 bp, Homo sapien
tgcaattaagcagctacctgtagcc

SEQ ID NO: 2171276 - DNA, 25 bp, Homo sapien
tgagagaatctagcctcccctctgt

SEQ ID NO: 2171277 - DNA, 25 bp, Homo sapien
tcgtccgtttagaaagctcatgagc

SEQ ID NO: 2171278 - DNA, 25 bp, Homo sapien
catgagctgtgtcacatagagggcc

SEQ ID NO: 2171279 - DNA, 25 bp, Homo sapien
cagtatttcaagatagctcagggct

SEQ ID NO: 2171280 - DNA, 25 bp, Homo sapien
tgatgtcctgtttgaccccaatagg

SEQ ID NO: 2171281 - DNA, 25 bp, Homo sapien
taaacagtaactagaatctactaag

SEQ ID NO: 2171282 - DNA, 25 bp, Homo sapien
gcagtcagtaattgagttgttaggt

SEQ ID NO: 2171283 - DNA, 25 bp, Homo sapien
ccaaaattcctaggggccttgcaag

SEQ ID NO: 2171284 - DNA, 25 bp, Homo sapien
ggagcaggtcttgggaggttaccaa

SEQ ID NO: 2171285 - DNA, 25 bp, Homo sapien
cggaaaccgaaatcgcacgtcgagc

SEQ ID NO: 2171286 - DNA, 25 bp, Homo sapien
tgctgtctggaaccctacacagtgt

SEQ ID NO: 2171287 - DNA, 25 bp, Homo sapien
cagggagacatctcgaaagcgtgcc

SEQ ID NO: 2171288 - DNA, 25 bp, Homo sapien
tgtagctgtcatcggacactgctgt

SEQ ID NO: 2171289 - DNA, 25 bp, Homo sapien
ggcggaatccgaggcgcccgctggt

SEQ ID NO: 2171290 - DNA, 25 bp, Homo sapien
gggcggaatccgaggcgcccgctgg

SEQ ID NO: 2171291 - DNA, 25 bp, Homo sapien
acccacccgcgcactgccctgtgcg

SEQ ID NO: 2171292 - DNA, 25 bp, Homo sapien
gcactgccctgtgcgtgccttgccg

SEQ ID NO: 2171293 - DNA, 25 bp, Homo sapien
ttggtcccgtcaggccgcgctgcta

SEQ ID NO: 2171294 - DNA, 25 bp, Homo sapien
gactcccgccgccttggtcccgtca

SEQ ID NO: 2171295 - DNA, 25 bp, Homo sapien
tgcaccgcgtgcgtgccgcccggtc

SEQ ID NO: 2171296 - DNA, 25 bp, Homo sapien
agccgagggaacgaccgcagactcc

SEQ ID NO: 2171297 - DNA, 25 bp, Homo sapien
gggcagcacggcagatgtctttcga

SEQ ID NO: 2171298 - DNA, 25 bp, Homo sapien
gtgagagggccgagccccatcatgc

SEQ ID NO: 2171299 - DNA, 25 bp, Homo sapien
cctagtcgcatggagctgtaacggc

SEQ ID NO: 2171300 - DNA, 25 bp, Homo sapien
tagaactttcttgcaactcggagct

SEQ ID NO: 2171301 - DNA, 25 bp, Homo sapien
tggcaatgacttccgctcctttttc

SEQ ID NO: 2171302 - DNA, 25 bp, Homo sapien
cttctggcaatgacttccgctcctt

SEQ ID NO: 2171303 - DNA, 25 bp, Homo sapien
tctggcaatgacttccgctcctttt

SEQ ID NO: 2171304 - DNA, 25 bp, Homo sapien
gcaatgacttccgctcctttttctt

SEQ ID NO: 2171305 - DNA, 25 bp, Homo sapien
tggattcaggtttgataagaaattc

SEQ ID NO: 2171306 - DNA, 25 bp, Homo sapien
gagacgtgtccaacttagcaacttt

SEQ ID NO: 2171307 - DNA, 25 bp, Homo sapien
gggccactgagacgtgtccaactta

SEQ ID NO: 2171308 - DNA, 25 bp, Homo sapien
taagaaattcttcagcgtgttgtat

SEQ ID NO: 2171309 - DNA, 25 bp, Homo sapien
gatttgaaccacatgcaagaggtgt

SEQ ID NO: 2171310 - DNA, 25 bp, Homo sapien
atgcaagaggtgtatagtgtgttgt

SEQ ID NO: 2171311 - DNA, 25 bp, Homo sapien
catgcaagaggtgtatagtgtgttg

SEQ ID NO: 2171312 - DNA, 25 bp, Homo sapien
gtatagtgtgttgtccttacattca

SEQ ID NO: 2171313 - DNA, 25 bp, Homo sapien
tccaggctaccacctcatgggaaga

SEQ ID NO: 2171314 - DNA, 25 bp, Homo sapien
ccttgggatccagcgtaccactgtg

SEQ ID NO: 2171315 - DNA, 25 bp, Homo sapien
caagcgagtggctcgttctatgcac

SEQ ID NO: 2171316 - DNA, 25 bp, Homo sapien
gaagtatccgtcgaatccaggctac

SEQ ID NO: 2171317 - DNA, 25 bp, Homo sapien
tgtgcagccggacaatccccacata

SEQ ID NO: 2171318 - DNA, 25 bp, Homo sapien
tagcattgtgcagccggacaatccc

SEQ ID NO: 2171319 - DNA, 25 bp, Homo sapien
tgggtccccccttcaatagcattgt

SEQ ID NO: 2171320 - DNA, 25 bp, Homo sapien
ccccttcaatagcattgtgcagccg

SEQ ID NO: 2171321 - DNA, 25 bp, Homo sapien
cctctttactgcagcaataagtggg

SEQ ID NO: 2171322 - DNA, 25 bp, Homo sapien
gtcctcactcggagctgcctcttta

SEQ ID NO: 2171323 - DNA, 25 bp, Homo sapien
tcaatcattttgctctcgtagatgg

SEQ ID NO: 2171324 - DNA, 25 bp, Homo sapien
cttctttcaggatcgtattcaatca

SEQ ID NO: 2171325 - DNA, 25 bp, Homo sapien
ataatgtccgaatgtaggtgccagc

SEQ ID NO: 2171326 - DNA, 25 bp, Homo sapien
caaaccaaggtgcacacataatgtc

SEQ ID NO: 2171327 - DNA, 25 bp, Homo sapien
caactcccaataacaaaccaaggtg

SEQ ID NO: 2171328 - DNA, 25 bp, Homo sapien
ttttcactcatgactccagaacgaa

SEQ ID NO: 2171329 - DNA, 25 bp, Homo sapien
cttagcccattttaatgtcccaaag

SEQ ID NO: 2171330 - DNA, 25 bp, Homo sapien
tgccctggactgaactcaacacttt

SEQ ID NO: 2171331 - DNA, 25 bp, Homo sapien
ctggactgaactcaacactttggaa

SEQ ID NO: 2171332 - DNA, 25 bp, Homo sapien
gaataatactttctacccaatcatc

SEQ ID NO: 2171333 - DNA, 25 bp, Homo sapien
tgaagtattagaccccaagcaggca

SEQ ID NO: 2171334 - DNA, 25 bp, Homo sapien
ccgttgaagtattagaccccaagca

SEQ ID NO: 2171335 - DNA, 25 bp, Homo sapien
gttgaagtattagaccccaagcagg

SEQ ID NO: 2171336 - DNA, 25 bp, Homo sapien
gaagtattagaccccaagcaggcat

SEQ ID NO: 2171337 - DNA, 25 bp, Homo sapien
ccaaagggtaaacaactcgccgcag

SEQ ID NO: 2171338 - DNA, 25 bp, Homo sapien
cgcaggtaactctcatccttgtggt

SEQ ID NO: 2171339 - DNA, 25 bp, Homo sapien
cactgtctttcataaccagccgttt

SEQ ID NO: 2171340 - DNA, 25 bp, Homo sapien
tggttatcatacagccactgagcat

SEQ ID NO: 2171341 - DNA, 25 bp, Homo sapien
aggaaacagggatgacacttatagc

SEQ ID NO: 2171342 - DNA, 25 bp, Homo sapien
gaaacagggatgacacttatagccc

SEQ ID NO: 2171343 - DNA, 25 bp, Homo sapien
aacagggatgacacttatagcccac

SEQ ID NO: 2171344 - DNA, 25 bp, Homo sapien
ggaaacagggatgacacttatagcc

SEQ ID NO: 2171345 - DNA, 25 bp, Homo sapien
caccaagtgtaaggggcccagctgc

SEQ ID NO: 2171346 - DNA, 25 bp, Homo sapien
tggcaccaagtgtaaggggcccagc

SEQ ID NO: 2171347 - DNA, 25 bp, Homo sapien
ctgcagagatggcaccaagtgtaag

SEQ ID NO: 2171348 - DNA, 25 bp, Homo sapien
tgcagagatggcaccaagtgtaagg

SEQ ID NO: 2171349 - DNA, 25 bp, Homo sapien
cgtcctcatatcgaagaacacctgg

SEQ ID NO: 2171350 - DNA, 25 bp, Homo sapien
tggtggtgataaccacaatctcctg

SEQ ID NO: 2171351 - DNA, 25 bp, Homo sapien
gattgacctcaatgccgtcctcata

SEQ ID NO: 2171352 - DNA, 25 bp, Homo sapien
ccatgcagattgcttctcctttggt

SEQ ID NO: 2171353 - DNA, 25 bp, Homo sapien
cttgatcttggctactataccatgg

SEQ ID NO: 2171354 - DNA, 25 bp, Homo sapien
ccatggtcgcaggtagagatgaccg

SEQ ID NO: 2171355 - DNA, 25 bp, Homo sapien
tgtctctctccatgatcactctctt

SEQ ID NO: 2171356 - DNA, 25 bp, Homo sapien
ttccgagggtaagtgtctctctcca

SEQ ID NO: 2171357 - DNA, 25 bp, Homo sapien
gaaggccctgcttgatcatcagctt

SEQ ID NO: 2171358 - DNA, 25 bp, Homo sapien
gcttcccatgcttgtccagaaggcc

SEQ ID NO: 2171359 - DNA, 25 bp, Homo sapien
aggtggcaggtgtgctgtctgtggg

SEQ ID NO: 2171360 - DNA, 25 bp, Homo sapien
gtccagaaggccctgcttgatcatc

SEQ ID NO: 2171361 - DNA, 25 bp, Homo sapien
gtccatgtactcctgcgtccagatg

SEQ ID NO: 2171362 - DNA, 25 bp, Homo sapien
tgtactcctgcgtccagatggcaag

SEQ ID NO: 2171363 - DNA, 25 bp, Homo sapien
tactcctgcgtccagatggcaagtg

SEQ ID NO: 2171364 - DNA, 25 bp, Homo sapien
ccagatggcaagtgggctctacctt

SEQ ID NO: 2171365 - DNA, 25 bp, Homo sapien
tctagagtcccacgagccagactag

SEQ ID NO: 2171366 - DNA, 25 bp, Homo sapien
tcaaaatactgacgctggacagaag

SEQ ID NO: 2171367 - DNA, 25 bp, Homo sapien
gttatctggcaagtctaaagccacc

SEQ ID NO: 2171368 - DNA, 25 bp, Homo sapien
ggacagaagaactcaccacttactg

SEQ ID NO: 2171369 - DNA, 25 bp, Homo sapien
aaagaggtagcaataggtcaaattc

SEQ ID NO: 2171370 - DNA, 25 bp, Homo sapien
ggtagcaataggtcaaattcactga

SEQ ID NO: 2171371 - DNA, 25 bp, Homo sapien
ctgaaaaagaggtagcaataggtca

SEQ ID NO: 2171372 - DNA, 25 bp, Homo sapien
caataggtcaaattcactgaatggc

SEQ ID NO: 2171373 - DNA, 25 bp, Homo sapien
tacctgcggggcttttaccacttca

SEQ ID NO: 2171374 - DNA, 25 bp, Homo sapien
tgctgcttcggcaactacctgcggg

SEQ ID NO: 2171375 - DNA, 25 bp, Homo sapien
tgcggggcttttaccacttcagcaa

SEQ ID NO: 2171376 - DNA, 25 bp, Homo sapien
agtttttgctgcttcggcaactacc

SEQ ID NO: 2171377 - DNA, 25 bp, Homo sapien
tagctgaggtaggagtcgaggccca

SEQ ID NO: 2171378 - DNA, 25 bp, Homo sapien
ggtaggagtcgaggcccatctgatt

SEQ ID NO: 2171379 - DNA, 25 bp, Homo sapien
gacagagaatacaaatcagaggagc

SEQ ID NO: 2171380 - DNA, 25 bp, Homo sapien
ctgaggtaggagtcgaggcccatct

SEQ ID NO: 2171381 - DNA, 25 bp, Homo sapien
ctggaggagtctcgtcactttcact

SEQ ID NO: 2171382 - DNA, 25 bp, Homo sapien
ccttcttgatcaactgaggagctgc

SEQ ID NO: 2171383 - DNA, 25 bp, Homo sapien
ggctcggccccgctctccagaccag

SEQ ID NO: 2171384 - DNA, 25 bp, Homo sapien
ctgctggaggagtctcgtcactttc

SEQ ID NO: 2171385 - DNA, 25 bp, Homo sapien
caaagctatgactctcccagaagga

SEQ ID NO: 2171386 - DNA, 25 bp, Homo sapien
gataccatccactaacaaagctatg

SEQ ID NO: 2171387 - DNA, 25 bp, Homo sapien
gagaatgaaagctcacagataccat

SEQ ID NO: 2171388 - DNA, 25 bp, Homo sapien
aggtccacagtcaagcaagcctttt

SEQ ID NO: 2171389 - DNA, 25 bp, Homo sapien
tcttcttcttggtggtatcactgtc

SEQ ID NO: 2171390 - DNA, 25 bp, Homo sapien
accaattctacctcttttgctttct

SEQ ID NO: 2171391 - DNA, 25 bp, Homo sapien
actcagaaaccaattctacctcttt

SEQ ID NO: 2171392 - DNA, 25 bp, Homo sapien
ctactcagaaaccaattctacctct

SEQ ID NO: 2171393 - DNA, 25 bp, Homo sapien
tgggatgaccacaccaggtaacatc

SEQ ID NO: 2171394 - DNA, 25 bp, Homo sapien
ggtaacatcaccgaggtctcaaagt

SEQ ID NO: 2171395 - DNA, 25 bp, Homo sapien
caaagtagcagctaaaatgtgccag

SEQ ID NO: 2171396 - DNA, 25 bp, Homo sapien
taaaacaggacaagatgggatgacc

SEQ ID NO: 2171397 - DNA, 25 bp, Homo sapien
gaagtgcaaaggactgacctctagg

SEQ ID NO: 2171398 - DNA, 25 bp, Homo sapien
gaagtcattgggataaactctgcct

SEQ ID NO: 2171399 - DNA, 25 bp, Homo sapien
ggtgagcactgtacacaagctttga

SEQ ID NO: 2171400 - DNA, 25 bp, Homo sapien
gacctctaggccagaacaagatgga

SEQ ID NO: 2171401 - DNA, 25 bp, Homo sapien
ataggacataaaggtccctagattt

SEQ ID NO: 2171402 - DNA, 25 bp, Homo sapien
tctgctagcatgagatcaacaagaa

SEQ ID NO: 2171403 - DNA, 25 bp, Homo sapien
tttttgctctgctagcatgagatca

SEQ ID NO: 2171404 - DNA, 25 bp, Homo sapien
ttttacaatttttgctctgctagca

SEQ ID NO: 2171405 - DNA, 25 bp, Homo sapien
tgtatgcccctctccagcatttgga

SEQ ID NO: 2171406 - DNA, 25 bp, Homo sapien
taattcagccagtaaggttcagtct

SEQ ID NO: 2171407 - DNA, 25 bp, Homo sapien
gacaaacagggctgctccaactagt

SEQ ID NO: 2171408 - DNA, 25 bp, Homo sapien
tacaagaagccttcgaccaagcgtg

SEQ ID NO: 2171409 - DNA, 25 bp, Homo sapien
agatgacgaggaacatctctgccaa

SEQ ID NO: 2171410 - DNA, 25 bp, Homo sapien
taccaaggcaacatgtttggcacca

SEQ ID NO: 2171411 - DNA, 25 bp, Homo sapien
caatgagttcttggagtttggcagc

SEQ ID NO: 2171412 - DNA, 25 bp, Homo sapien
gagtaccactttatctcaacggagg

SEQ ID NO: 2171413 - DNA, 25 bp, Homo sapien
ccctagctctggaaatgaacactgc

SEQ ID NO: 2171414 - DNA, 25 bp, Homo sapien
caggcagaaccgagatagcattggc

SEQ ID NO: 2171415 - DNA, 25 bp, Homo sapien
agtcgttcggctccctgcattcaag

SEQ ID NO: 2171416 - DNA, 25 bp, Homo sapien
tccctgcttgttgagatgtcgcgag

SEQ ID NO: 2171417 - DNA, 25 bp, Homo sapien
cacttcagcgtttcaatttctcttt

SEQ ID NO: 2171418 - DNA, 25 bp, Homo sapien
tctcatgccttcttgttaaagggat

SEQ ID NO: 2171419 - DNA, 25 bp, Homo sapien
gggattcattctgacccctccgcaa

SEQ ID NO: 2171420 - DNA, 25 bp, Homo sapien
ccccaccattcttacctccctgttg

SEQ ID NO: 2171421 - DNA, 25 bp, Homo sapien
tcagcttcaccagttatgagtattg

SEQ ID NO: 2171422 - DNA, 25 bp, Homo sapien
tatggaagccatatcacttacattc

SEQ ID NO: 2171423 - DNA, 25 bp, Homo sapien
tactgttgagtattgagcactctct

SEQ ID NO: 2171424 - DNA, 25 bp, Homo sapien
tctaggtgaatatccaggagtgtca

SEQ ID NO: 2171425 - DNA, 25 bp, Homo sapien
tggagctgaccttcctcttgggcat

SEQ ID NO: 2171426 - DNA, 25 bp, Homo sapien
ttggcggcccctttggtggagctga

SEQ ID NO: 2171427 - DNA, 25 bp, Homo sapien
cttggcggcccctttggtggagctg

SEQ ID NO: 2171428 - DNA, 25 bp, Homo sapien
tggtggagctgaccttcctcttggg

SEQ ID NO: 2171429 - DNA, 25 bp, Homo sapien
cgctgctgccttttttggcttcact

SEQ ID NO: 2171430 - DNA, 25 bp, Homo sapien
tttagctgacaaccgcgccgatctc

SEQ ID NO: 2171431 - DNA, 25 bp, Homo sapien
tttggcttcacttccacttttgcag

SEQ ID NO: 2171432 - DNA, 25 bp, Homo sapien
gtttagctgacaaccgcgccgatct

SEQ ID NO: 2171433 - DNA, 25 bp, Homo sapien
aggctggactctcctcagttttcgt

SEQ ID NO: 2171434 - DNA, 25 bp, Homo sapien
ctctcctcagttttcgtttccctgt

SEQ ID NO: 2171435 - DNA, 25 bp, Homo sapien
tcgtttccctgtttactgcaggtaa

SEQ ID NO: 2171436 - DNA, 25 bp, Homo sapien
ttcgtttccctgtttactgcaggta

SEQ ID NO: 2171437 - DNA, 25 bp, Homo sapien
tatggaatgttaagctgacacccga

SEQ ID NO: 2171438 - DNA, 25 bp, Homo sapien
aactaacccccccatctatggaatg

SEQ ID NO: 2171439 - DNA, 25 bp, Homo sapien
caacatgggaatagaagtaatttaa

SEQ ID NO: 2171440 - DNA, 25 bp, Homo sapien
cagggagagccatgatcaaagagtg

SEQ ID NO: 2171441 - DNA, 25 bp, Homo sapien
tcaagtaccagtatcttcacatgtt

SEQ ID NO: 2171442 - DNA, 25 bp, Homo sapien
agctgttacatacggcccaccagtt

SEQ ID NO: 2171443 - DNA, 25 bp, Homo sapien
atcttaacatacataacgaaattct

SEQ ID NO: 2171444 - DNA, 25 bp, Homo sapien
aatagcacgtacactacatgttcaa

SEQ ID NO: 2171445 - DNA, 25 bp, Homo sapien
atcctctgctgcttcacgtaagctt

SEQ ID NO: 2171446 - DNA, 25 bp, Homo sapien
ggatcctctgctgcttcacgtaagc

SEQ ID NO: 2171447 - DNA, 25 bp, Homo sapien
ggggatcctctgctgcttcacgtaa

SEQ ID NO: 2171448 - DNA, 25 bp, Homo sapien
ctcagcactaatggggatcctctgc

SEQ ID NO: 2171449 - DNA, 25 bp, Homo sapien
cagccattgttgcttttcttctcac

SEQ ID NO: 2171450 - DNA, 25 bp, Homo sapien
cagcagccattgttgcttttcttct

SEQ ID NO: 2171451 - DNA, 25 bp, Homo sapien
gcagccattgttgcttttcttctca

SEQ ID NO: 2171452 - DNA, 25 bp, Homo sapien
ctccagcagccattgttgcttttct

SEQ ID NO: 2171453 - DNA, 25 bp, Homo sapien
tttggaatatgagctaaaccatcat

SEQ ID NO: 2171454 - DNA, 25 bp, Homo sapien
ttatgttcgtgatggtgagaagatt

SEQ ID NO: 2171455 - DNA, 25 bp, Homo sapien
tatgttcgtgatggtgagaagattt

SEQ ID NO: 2171456 - DNA, 25 bp, Homo sapien
accatcattgtctaacttttcagac

SEQ ID NO: 2171457 - DNA, 25 bp, Homo sapien
tgcaggtgcaaatggtttatagccc

SEQ ID NO: 2171458 - DNA, 25 bp, Homo sapien
gaaactataacatagctgtcacagt

SEQ ID NO: 2171459 - DNA, 25 bp, Homo sapien
tgacccttatctgacctctttggaa

SEQ ID NO: 2171460 - DNA, 25 bp, Homo sapien
caatccacaaatgatgcaggtgcaa

SEQ ID NO: 2171461 - DNA, 25 bp, Homo sapien
gacattaggcttctaaaggacatac

SEQ ID NO: 2171462 - DNA, 25 bp, Homo sapien
tgaccccttcactatgactacacag

SEQ ID NO: 2171463 - DNA, 25 bp, Homo sapien
tatataccgtgactgaaaactagag

SEQ ID NO: 2171464 - DNA, 25 bp, Homo sapien
cacagaatctcctgatagtaaaggg

SEQ ID NO: 2171465 - DNA, 25 bp, Homo sapien
ggcgggcggatcacgcggtcaggag

SEQ ID NO: 2171466 - DNA, 25 bp, Homo sapien
catggtgaaaccccgtctctactaa

SEQ ID NO: 2171467 - DNA, 25 bp, Homo sapien
atcgaggccatcctggctaacatgg

SEQ ID NO: 2171468 - DNA, 25 bp, Homo sapien
taatttcagcagtttcggaggccga

SEQ ID NO: 2171469 - DNA, 25 bp, Homo sapien
tgacgcgactgcgactcaatcctcg

SEQ ID NO: 2171470 - DNA, 25 bp, Homo sapien
cctcgcctggtgaagaatattttac

SEQ ID NO: 2171471 - DNA, 25 bp, Homo sapien
cgactcaatcctcgcctggtgaaga

SEQ ID NO: 2171472 - DNA, 25 bp, Homo sapien
ctggaggcgagttcctgacgcgact

SEQ ID NO: 2171473 - DNA, 25 bp, Homo sapien
gcagtctccgcaagcggctacatca

SEQ ID NO: 2171474 - DNA, 25 bp, Homo sapien
ggctgcttgcagtctccgcaagcgg

SEQ ID NO: 2171475 - DNA, 25 bp, Homo sapien
tccgcaagcggctacatcacagagc

SEQ ID NO: 2171476 - DNA, 25 bp, Homo sapien
tgcttgcagtctccgcaagcggcta

SEQ ID NO: 2171477 - DNA, 25 bp, Homo sapien
gcagttgtcgccaccacttggcttc

SEQ ID NO: 2171478 - DNA, 25 bp, Homo sapien
cacgtagaggatctgcgcggtaggc

SEQ ID NO: 2171479 - DNA, 25 bp, Homo sapien
gatctgcgcggtaggccgcggagtg

SEQ ID NO: 2171480 - DNA, 25 bp, Homo sapien
gagtggcgcgcagttgtcgccacca

SEQ ID NO: 2171481 - DNA, 25 bp, Homo sapien
agacacgcgcgtgaccttggccgga

SEQ ID NO: 2171482 - DNA, 25 bp, Homo sapien
tccgagaacggggacagaatgtctt

SEQ ID NO: 2171483 - DNA, 25 bp, Homo sapien
actggagacgacaccccagggtggt

SEQ ID NO: 2171484 - DNA, 25 bp, Homo sapien
ccagggtggttaggccccagacacg

SEQ ID NO: 2171485 - DNA, 25 bp, Homo sapien
tctcttcagaagtagctcaatgcta

SEQ ID NO: 2171486 - DNA, 25 bp, Homo sapien
tgctattcagtaatccacaaatttt

SEQ ID NO: 2171487 - DNA, 25 bp, Homo sapien
acgtggatctccagtgataatgaag

SEQ ID NO: 2171488 - DNA, 25 bp, Homo sapien
caaattttctaagtactacgtggat

SEQ ID NO: 2171489 - DNA, 25 bp, Homo sapien
atactaatgtctatattacagggaa

SEQ ID NO: 2171490 - DNA, 25 bp, Homo sapien
tacttttatacctaactagattgag

SEQ ID NO: 2171491 - DNA, 25 bp, Homo sapien
aagttgcaattttggaaaatcagac

SEQ ID NO: 2171492 - DNA, 25 bp, Homo sapien
cataaatgtaataagaaacctccaa

SEQ ID NO: 2171493 - DNA, 25 bp, Homo sapien
cttagcaattccgcaaggtccagtg

SEQ ID NO: 2171494 - DNA, 25 bp, Homo sapien
ttagcaattccgcaaggtccagtga

SEQ ID NO: 2171495 - DNA, 25 bp, Homo sapien
tagcaattccgcaaggtccagtgac

SEQ ID NO: 2171496 - DNA, 25 bp, Homo sapien
gcaattccgcaaggtccagtgactc

SEQ ID NO: 2171497 - DNA, 25 bp, Homo sapien
cttttctgctgaaggtccagattcc

SEQ ID NO: 2171498 - DNA, 25 bp, Homo sapien
cttctggaatatgaaacctgtgcac

SEQ ID NO: 2171499 - DNA, 25 bp, Homo sapien
tccaaccttctggaatatgaaacct

SEQ ID NO: 2171500 - DNA, 25 bp, Homo sapien
aaaaaatccacctcccacagctgtt

SEQ ID NO: 2171501 - DNA, 25 bp, Homo sapien
aaccttctggaatatgaaacctgtg

SEQ ID NO: 2171502 - DNA, 25 bp, Homo sapien
tccctgtaccccttgaatattggaa

SEQ ID NO: 2171503 - DNA, 25 bp, Homo sapien
aaaatctcattttgaggtgcctttc

SEQ ID NO: 2171504 - DNA, 25 bp, Homo sapien
tgtccctgtaccccttgaatattgg

SEQ ID NO: 2171505 - DNA, 25 bp, Homo sapien
cagtgtccctgtaccccttgaatat

SEQ ID NO: 2171506 - DNA, 25 bp, Homo sapien
gaagaaatctagcatctggccccac

SEQ ID NO: 2171507 - DNA, 25 bp, Homo sapien
cccaggccaggattgcgaggtgact

SEQ ID NO: 2171508 - DNA, 25 bp, Homo sapien
gaagtagactctcgaaaccctctga

SEQ ID NO: 2171509 - DNA, 25 bp, Homo sapien
tgcagcacaacaagtagagggagcc

SEQ ID NO: 2171510 - DNA, 25 bp, Homo sapien
tgatgtacccagtatggtttgcaag

SEQ ID NO: 2171511 - DNA, 25 bp, Homo sapien
tgctcttacggatcttcagctgctc

SEQ ID NO: 2171512 - DNA, 25 bp, Homo sapien
ctcgttgccagtcaactttgatgta

SEQ ID NO: 2171513 - DNA, 25 bp, Homo sapien
gtaggtatctgattgctcttacgga

SEQ ID NO: 2171514 - DNA, 25 bp, Homo sapien
cacacactacacgtgaacaatgcaa

SEQ ID NO: 2171515 - DNA, 25 bp, Homo sapien
acactacacgtgaacaatgcaagtc

SEQ ID NO: 2171516 - DNA, 25 bp, Homo sapien
acacactacacgtgaacaatgcaag

SEQ ID NO: 2171517 - DNA, 25 bp, Homo sapien
cacactacacgtgaacaatgcaagt

SEQ ID NO: 2171518 - DNA, 25 bp, Homo sapien
ttatggcgaaagagtaaagctgcac

SEQ ID NO: 2171519 - DNA, 25 bp, Homo sapien
tacccaaagggcaatggacttacac

SEQ ID NO: 2171520 - DNA, 25 bp, Homo sapien
gagaataagactagagggagcctga

SEQ ID NO: 2171521 - DNA, 25 bp, Homo sapien
gacaatggctctttgaatcaaggac

SEQ ID NO: 2171522 - DNA, 25 bp, Homo sapien
caagcagaaagcctccgaaaaatcc

SEQ ID NO: 2171523 - DNA, 25 bp, Homo sapien
ttaggatgccatgccaagcagaaag

SEQ ID NO: 2171524 - DNA, 25 bp, Homo sapien
cccagttactagaacattcttcttc

SEQ ID NO: 2171525 - DNA, 25 bp, Homo sapien
aatcccccagttactagaacattct

SEQ ID NO: 2171526 - DNA, 25 bp, Homo sapien
tcctgtacggtagaaagcattcctg

SEQ ID NO: 2171527 - DNA, 25 bp, Homo sapien
tgctaggccctgtgagtataatggt

SEQ ID NO: 2171528 - DNA, 25 bp, Homo sapien
aataaaccctttggaaacagccatg

SEQ ID NO: 2171529 - DNA, 25 bp, Homo sapien
cagaggagttatggccacccctaat

SEQ ID NO: 2171530 - DNA, 25 bp, Homo sapien
tgctgttaccatcccattgctgtgg

SEQ ID NO: 2171531 - DNA, 25 bp, Homo sapien
agaggcattgggtggccagtctccc

SEQ ID NO: 2171532 - DNA, 25 bp, Homo sapien
tatatggcataacccagagacccag

SEQ ID NO: 2171533 - DNA, 25 bp, Homo sapien
aagtcacacaggtaaagtggctgca

SEQ ID NO: 2171534 - DNA, 25 bp, Homo sapien
caaaagttctacctctcctgtagca

SEQ ID NO: 2171535 - DNA, 25 bp, Homo sapien
ccagctcccgtgtcagcaatgagga

SEQ ID NO: 2171536 - DNA, 25 bp, Homo sapien
gactccatctgttgagcccgagcag

SEQ ID NO: 2171537 - DNA, 25 bp, Homo sapien
cactcatgacaatgggctgctcagg

SEQ ID NO: 2171538 - DNA, 25 bp, Homo sapien
tgtgacctcttagaaaattgggcag

SEQ ID NO: 2171539 - DNA, 25 bp, Homo sapien
gaatgcaagcatcggaaatataagc

SEQ ID NO: 2171540 - DNA, 25 bp, Homo sapien
caattactcagatgttagtgtgacc

SEQ ID NO: 2171541 - DNA, 25 bp, Homo sapien
catgaccccttaaaaagaatgcaag

SEQ ID NO: 2171542 - DNA, 25 bp, Homo sapien
gactgacagaccttttagctagaaa

SEQ ID NO: 2171543 - DNA, 25 bp, Homo sapien
tgctataaaaagtgcctgagactcg

SEQ ID NO: 2171544 - DNA, 25 bp, Homo sapien
ctccattagggaatacggttcaaca

SEQ ID NO: 2171545 - DNA, 25 bp, Homo sapien
cggttcaacatgacattcggtggct

SEQ ID NO: 2171546 - DNA, 25 bp, Homo sapien
taaaaacctgttacagaggatccag

SEQ ID NO: 2171547 - DNA, 25 bp, Homo sapien
cagacaacattaatacaaagctgct

SEQ ID NO: 2171548 - DNA, 25 bp, Homo sapien
gaagcctgttgacagctgtcagtca

SEQ ID NO: 2171549 - DNA, 25 bp, Homo sapien
tgaatgaagcctgttgacagctgtc

SEQ ID NO: 2171550 - DNA, 25 bp, Homo sapien
gccaacagctacatggaatcaaagt

SEQ ID NO: 2171551 - DNA, 25 bp, Homo sapien
caagaactgcgtaagtgttgtgctc

SEQ ID NO: 2171552 - DNA, 25 bp, Homo sapien
tgttgtgctcagtatcccaagggaa

SEQ ID NO: 2171553 - DNA, 25 bp, Homo sapien
gaatcaaagtgtcaggctgtcatcc

SEQ ID NO: 2171554 - DNA, 25 bp, Homo sapien
aagcaagcctgtgagatacagaaat

SEQ ID NO: 2171555 - DNA, 25 bp, Homo sapien
tttgtagctggcagtattccttgag

SEQ ID NO: 2171556 - DNA, 25 bp, Homo sapien
ctctggccccgaaatcaaggtgacc

SEQ ID NO: 2171557 - DNA, 25 bp, Homo sapien
gacaatctcttctagtggatgataa

SEQ ID NO: 2171558 - DNA, 25 bp, Homo sapien
taaagttatgcagttatctaaacat

SEQ ID NO: 2171559 - DNA, 25 bp, Homo sapien
tcaacctggcaattaaagcaaacta

SEQ ID NO: 2171560 - DNA, 25 bp, Homo sapien
aaagacacaaaagaatttattctgt

SEQ ID NO: 2171561 - DNA, 25 bp, Homo sapien
tgatagttttacttagattactacc

SEQ ID NO: 2171562 - DNA, 25 bp, Homo sapien
tactacctaaggaagcccttctatc

SEQ ID NO: 2171563 - DNA, 25 bp, Homo sapien
acttggtcctgaccaaccgggtgct

SEQ ID NO: 2171564 - DNA, 25 bp, Homo sapien
cgcctcgggcccacttggtcctgac

SEQ ID NO: 2171565 - DNA, 25 bp, Homo sapien
gacccttctcacgtccgcctcgggc

SEQ ID NO: 2171566 - DNA, 25 bp, Homo sapien
tcgggcccacttggtcctgaccaac

SEQ ID NO: 2171567 - DNA, 25 bp, Homo sapien
gaggaaagcgtcagactcgagatga

SEQ ID NO: 2171568 - DNA, 25 bp, Homo sapien
acaaacgaggaaagcgtcagactcg

SEQ ID NO: 2171569 - DNA, 25 bp, Homo sapien
gaaagcgtcagactcgagatgaacc

SEQ ID NO: 2171570 - DNA, 25 bp, Homo sapien
cgtcagactcgagatgaaccgcctg

SEQ ID NO: 2171571 - DNA, 25 bp, Homo sapien
gggacacactgggactgctcagcag

SEQ ID NO: 2171572 - DNA, 25 bp, Homo sapien
cttttcagcaactgtgcgcatttca

SEQ ID NO: 2171573 - DNA, 25 bp, Homo sapien
ttcagcaactgtgcgcatttcagtt

SEQ ID NO: 2171574 - DNA, 25 bp, Homo sapien
gcaactgtgcgcatttcagttccag

SEQ ID NO: 2171575 - DNA, 25 bp, Homo sapien
agcaactgtgcgcatttcagttcca

SEQ ID NO: 2171576 - DNA, 25 bp, Homo sapien
tggagaaatttctactcggtccttc

SEQ ID NO: 2171577 - DNA, 25 bp, Homo sapien
gatgatgacagaatgaatgtgaaca

SEQ ID NO: 2171578 - DNA, 25 bp, Homo sapien
ccttcctcttatcagaacgtcgtaa

SEQ ID NO: 2171579 - DNA, 25 bp, Homo sapien
tgtgaacaattctgacggcatcaac

SEQ ID NO: 2171580 - DNA, 25 bp, Homo sapien
ctctgcctctgttgaagctgcagac

SEQ ID NO: 2171581 - DNA, 25 bp, Homo sapien
agcaatgcggcccaggaaccccaga

SEQ ID NO: 2171582 - DNA, 25 bp, Homo sapien
ccagagcacataaaagcttctattg

SEQ ID NO: 2171583 - DNA, 25 bp, Homo sapien
ccaggaaccccagagcacataaaag

SEQ ID NO: 2171584 - DNA, 25 bp, Homo sapien
aaaagcttctattgaccagtaagga

SEQ ID NO: 2171585 - DNA, 25 bp, Homo sapien
tgatgctaataagggctcagaaagc

SEQ ID NO: 2171586 - DNA, 25 bp, Homo sapien
aaataagcttattacaatttaatgg

SEQ ID NO: 2171587 - DNA, 25 bp, Homo sapien
aaatttatgatgctaataagggctc

SEQ ID NO: 2171588 - DNA, 25 bp, Homo sapien
gaacaaaatttatgatgctaataag

SEQ ID NO: 2171589 - DNA, 25 bp, Homo sapien
tgtgaaggccaaacagttatatgag

SEQ ID NO: 2171590 - DNA, 25 bp, Homo sapien
gataccagcccacaactctcatggg

SEQ ID NO: 2171591 - DNA, 25 bp, Homo sapien
ggatgggaatgataccagcccacaa

SEQ ID NO: 2171592 - DNA, 25 bp, Homo sapien
caaacagttatatgaggatgggaat

SEQ ID NO: 2171593 - DNA, 25 bp, Homo sapien
tctgctaaaggacagtcaaattttg

SEQ ID NO: 2171594 - DNA, 25 bp, Homo sapien
taaacattgcaaccccatgatactt

SEQ ID NO: 2171595 - DNA, 25 bp, Homo sapien
accataccctatgtaatggaaaagg

SEQ ID NO: 2171596 - DNA, 25 bp, Homo sapien
taatgacatctgctaaaggacagtc

SEQ ID NO: 2171597 - DNA, 25 bp, Homo sapien
tacaaagccttgatccatcatctgg

SEQ ID NO: 2171598 - DNA, 25 bp, Homo sapien
ctacaaagccttgatccatcatctg

SEQ ID NO: 2171599 - DNA, 25 bp, Homo sapien
cctacaaagccttgatccatcatct

SEQ ID NO: 2171600 - DNA, 25 bp, Homo sapien
aagcaagtgtagagtacccggccag

SEQ ID NO: 2171601 - DNA, 25 bp, Homo sapien
gaagcaagtgtagagtacccggcca

SEQ ID NO: 2171602 - DNA, 25 bp, Homo sapien
actcttttgggcctgtatggattgg

SEQ ID NO: 2171603 - DNA, 25 bp, Homo sapien
cctgtatggattggaagcaagtgta

SEQ ID NO: 2171604 - DNA, 25 bp, Homo sapien
tctggccctcaatggagatgtgctg

SEQ ID NO: 2171605 - DNA, 25 bp, Homo sapien
ttctggccctcaatggagatgtgct

SEQ ID NO: 2171606 - DNA, 25 bp, Homo sapien
cttctggccctcaatggagatgtgc

SEQ ID NO: 2171607 - DNA, 25 bp, Homo sapien
catccaggaccagactaaaggtttt

SEQ ID NO: 2171608 - DNA, 25 bp, Homo sapien
gagaatgtcgtcgttctttcagaaa

SEQ ID NO: 2171609 - DNA, 25 bp, Homo sapien
cctgatacggataatgatattctgg

SEQ ID NO: 2171610 - DNA, 25 bp, Homo sapien
actgaagaggtatcatgtgtgcaac

SEQ ID NO: 2171611 - DNA, 25 bp, Homo sapien
tatagggacgactgatttaaggcaa

SEQ ID NO: 2171612 - DNA, 25 bp, Homo sapien
tgccaggtcaattggatacacacgt

SEQ ID NO: 2171613 - DNA, 25 bp, Homo sapien
caaaacagaattcgcctagagtcca

SEQ ID NO: 2171614 - DNA, 25 bp, Homo sapien
catttatatccataaggctgctgga

SEQ ID NO: 2171615 - DNA, 25 bp, Homo sapien
tattgggtgaagatagtggtccagc

SEQ ID NO: 2171616 - DNA, 25 bp, Homo sapien
tcatggcacagttgttgaagatcaa

SEQ ID NO: 2171617 - DNA, 25 bp, Homo sapien
aattagtgccaaattgaaggtcatg

SEQ ID NO: 2171618 - DNA, 25 bp, Homo sapien
tgtacaggttgacttatggactcac

SEQ ID NO: 2171619 - DNA, 25 bp, Homo sapien
tgcatctgtccttttgtgaatagct

SEQ ID NO: 2171620 - DNA, 25 bp, Homo sapien
gagtctcctgctagtccctctggtg

SEQ ID NO: 2171621 - DNA, 25 bp, Homo sapien
tgatcccttctgctatacctgagtc

SEQ ID NO: 2171622 - DNA, 25 bp, Homo sapien
cagggttctttcatgctgtaggttg

SEQ ID NO: 2171623 - DNA, 25 bp, Homo sapien
cctttagctgctataatgtgcctat

SEQ ID NO: 2171624 - DNA, 25 bp, Homo sapien
gagaagtcagccatcgttcttatca

SEQ ID NO: 2171625 - DNA, 25 bp, Homo sapien
catgcacattaaagatgtcacccca

SEQ ID NO: 2171626 - DNA, 25 bp, Homo sapien
gattggctgagattcatgcatctat

SEQ ID NO: 2171627 - DNA, 25 bp, Homo sapien
agcaggttcagtggagaattcaggt

SEQ ID NO: 2171628 - DNA, 25 bp, Homo sapien
caggttcagtggagaattcaggttg

SEQ ID NO: 2171629 - DNA, 25 bp, Homo sapien
cagcaggttcagtggagaattcagg

SEQ ID NO: 2171630 - DNA, 25 bp, Homo sapien
gcaggttcagtggagaattcaggtt

SEQ ID NO: 2171631 - DNA, 25 bp, Homo sapien
attcacaaatattcacatgctcatg

SEQ ID NO: 2171632 - DNA, 25 bp, Homo sapien
aataggtaagaaattcacaaatatt

SEQ ID NO: 2171633 - DNA, 25 bp, Homo sapien
gaaataggtaagaaattcacaaata

SEQ ID NO: 2171634 - DNA, 25 bp, Homo sapien
gaaattcacaaatattcacatgctc

SEQ ID NO: 2171635 - DNA, 25 bp, Homo sapien
cagtggccctcacttcccattttct

SEQ ID NO: 2171636 - DNA, 25 bp, Homo sapien
ctttcccgatagtgacatgaggtac

SEQ ID NO: 2171637 - DNA, 25 bp, Homo sapien
cttgggcagctctactgctgattca

SEQ ID NO: 2171638 - DNA, 25 bp, Homo sapien
tgacatgaggtacaatatggattgg

SEQ ID NO: 2171639 - DNA, 25 bp, Homo sapien
tatggattgggatttcgattctctc

SEQ ID NO: 2171640 - DNA, 25 bp, Homo sapien
cattatggatcttggttactgagtc

SEQ ID NO: 2171641 - DNA, 25 bp, Homo sapien
gccattatggatcttggttactgag

SEQ ID NO: 2171642 - DNA, 25 bp, Homo sapien
ctgagccattatggatcttggttac

SEQ ID NO: 2171643 - DNA, 25 bp, Homo sapien
tggatcttggttactgagtccagat

SEQ ID NO: 2171644 - DNA, 25 bp, Homo sapien
tgaaaagtaaccgcctataacactc

SEQ ID NO: 2171645 - DNA, 25 bp, Homo sapien
tatcctgagaccgaaattatgggac

SEQ ID NO: 2171646 - DNA, 25 bp, Homo sapien
gacagatagaccaagccatttctcc

SEQ ID NO: 2171647 - DNA, 25 bp, Homo sapien
tataacactcaaaagcctccccttc

SEQ ID NO: 2171648 - DNA, 25 bp, Homo sapien
gactgccgacatctgactgcacaga

SEQ ID NO: 2171649 - DNA, 25 bp, Homo sapien
aggagaggcccgctgactgccgaca

SEQ ID NO: 2171650 - DNA, 25 bp, Homo sapien
gttgtaattcctgcaaatgctgttg

SEQ ID NO: 2171651 - DNA, 25 bp, Homo sapien
tcctccaaccactgtaggagaggcc

SEQ ID NO: 2171652 - DNA, 25 bp, Homo sapien
tgtttagtacacaaattgaaaaaga

SEQ ID NO: 2171653 - DNA, 25 bp, Homo sapien
gactgtgtttagtacacaaattgaa

SEQ ID NO: 2171654 - DNA, 25 bp, Homo sapien
cattttcagactgtgtttagtacac

SEQ ID NO: 2171655 - DNA, 25 bp, Homo sapien
tttcagactgtgtttagtacacaaa

SEQ ID NO: 2171656 - DNA, 25 bp, Homo sapien
tccccagagatagagtatgaccttc

SEQ ID NO: 2171657 - DNA, 25 bp, Homo sapien
tttccagtatgcaacaagcacacag

SEQ ID NO: 2171658 - DNA, 25 bp, Homo sapien
caggtggttctggacaacactttga

SEQ ID NO: 2171659 - DNA, 25 bp, Homo sapien
cattccatatgctcaaggctagtgg

SEQ ID NO: 2171660 - DNA, 25 bp, Homo sapien
cctgtcagcaatgtataaaatatcc

SEQ ID NO: 2171661 - DNA, 25 bp, Homo sapien
tcctcgccatgggtgtctaattgct

SEQ ID NO: 2171662 - DNA, 25 bp, Homo sapien
taagtaagtcatagcctcgctgtgg

SEQ ID NO: 2171663 - DNA, 25 bp, Homo sapien
tgtcacctagcccaagatcctgaag

SEQ ID NO: 2171664 - DNA, 25 bp, Homo sapien
tctgacattgagaaacctagctccc

SEQ ID NO: 2171665 - DNA, 25 bp, Homo sapien
tatgtgccattaagacagccaagtg

SEQ ID NO: 2171666 - DNA, 25 bp, Homo sapien
tgcttaatgtagcacactgctggct

SEQ ID NO: 2171667 - DNA, 25 bp, Homo sapien
tcaggcactttgacacctccatgta

SEQ ID NO: 2171668 - DNA, 25 bp, Homo sapien
gacggagctgagacagatatgtaca

SEQ ID NO: 2171669 - DNA, 25 bp, Homo sapien
tatacacatacctttctcagctctg

SEQ ID NO: 2171670 - DNA, 25 bp, Homo sapien
tgctcataaccactgggtgtcactt

SEQ ID NO: 2171671 - DNA, 25 bp, Homo sapien
tagtccctcttggtggacggagctg

SEQ ID NO: 2171672 - DNA, 25 bp, Homo sapien
tggtgactagtaacgtcaagcatct

SEQ ID NO: 2171673 - DNA, 25 bp, Homo sapien
tagaaatgcccttgctaggtcttat

SEQ ID NO: 2171674 - DNA, 25 bp, Homo sapien
cagttctgtgggatatacacctaga

SEQ ID NO: 2171675 - DNA, 25 bp, Homo sapien
agttttggaggagccatcagccagt

SEQ ID NO: 2171676 - DNA, 25 bp, Homo sapien
gctgttgcagaccaggagctcattt

SEQ ID NO: 2171677 - DNA, 25 bp, Homo sapien
caaactgtataaggagttgggtctt

SEQ ID NO: 2171678 - DNA, 25 bp, Homo sapien
gatcatccagtcatcttgctgaaaa

SEQ ID NO: 2171679 - DNA, 25 bp, Homo sapien
gcagacattacaataaccaatagct

SEQ ID NO: 2171680 - DNA, 25 bp, Homo sapien
aagtagctgagatgttagcggcccc

SEQ ID NO: 2171681 - DNA, 25 bp, Homo sapien
ggacttctgaaacaaggcctgcatg

SEQ ID NO: 2171682 - DNA, 25 bp, Homo sapien
tgaggagccccttttagactgcagc

SEQ ID NO: 2171683 - DNA, 25 bp, Homo sapien
taagaagttgtagtgacctcagcag

SEQ ID NO: 2171684 - DNA, 25 bp, Homo sapien
ggatttgaacttgcgaggagctcgg

SEQ ID NO: 2171685 - DNA, 25 bp, Homo sapien
caggtaccacgcacttgcttggttt

SEQ ID NO: 2171686 - DNA, 25 bp, Homo sapien
aggcaggtaccacgcacttgcttgg

SEQ ID NO: 2171687 - DNA, 25 bp, Homo sapien
gaaggcaggtaccacgcacttgctt

SEQ ID NO: 2171688 - DNA, 25 bp, Homo sapien
catgcagcctgacgcagacatccag

SEQ ID NO: 2171689 - DNA, 25 bp, Homo sapien
agaccctgagcagggtaccggcacc

SEQ ID NO: 2171690 - DNA, 25 bp, Homo sapien
ggtgatggcgacagagtccagcccc

SEQ ID NO: 2171691 - DNA, 25 bp, Homo sapien
cttccagaccctgagcagggtaccg

SEQ ID NO: 2171692 - DNA, 25 bp, Homo sapien
gtgatggcgacagagtccagcccca

SEQ ID NO: 2171693 - DNA, 25 bp, Homo sapien
agccagtttcggctcaggctccatg

SEQ ID NO: 2171694 - DNA, 25 bp, Homo sapien
aggctccatgggctcatcggtggtc

SEQ ID NO: 2171695 - DNA, 25 bp, Homo sapien
cccgagggcagccttggacgcagat

SEQ ID NO: 2171696 - DNA, 25 bp, Homo sapien
cagccttggacgcagataaccccat

SEQ ID NO: 2171697 - DNA, 25 bp, Homo sapien
tagtttcactgatgtactgtattag

SEQ ID NO: 2171698 - DNA, 25 bp, Homo sapien
acattagccagatgttcaacgctta

SEQ ID NO: 2171699 - DNA, 25 bp, Homo sapien
gccagatgttcaacgcttatgttag

SEQ ID NO: 2171700 - DNA, 25 bp, Homo sapien
tcaacgcttatgttagtttcactga

SEQ ID NO: 2171701 - DNA, 25 bp, Homo sapien
accatgaggtgatgtacagtaacca

SEQ ID NO: 2171702 - DNA, 25 bp, Homo sapien
catgaggtgatgtacagtaaccagg

SEQ ID NO: 2171703 - DNA, 25 bp, Homo sapien
ccatgaggtgatgtacagtaaccag

SEQ ID NO: 2171704 - DNA, 25 bp, Homo sapien
aaagagctctgacatgaaacatgtt

SEQ ID NO: 2171705 - DNA, 25 bp, Homo sapien
gagctctgacatgaaacatgtttaa

SEQ ID NO: 2171706 - DNA, 25 bp, Homo sapien
gctctgacatgaaacatgtttaatg

SEQ ID NO: 2171707 - DNA, 25 bp, Homo sapien
agagctctgacatgaaacatgttta

SEQ ID NO: 2171708 - DNA, 25 bp, Homo sapien
agtacttgctgtatcgtctgatgaa

SEQ ID NO: 2171709 - DNA, 25 bp, Homo sapien
tctgatgaagttgacatagtatagc

SEQ ID NO: 2171710 - DNA, 25 bp, Homo sapien
tttttgtgatgtcagatgagatcat

SEQ ID NO: 2171711 - DNA, 25 bp, Homo sapien
tgagatcattctatatgcgagtgac

SEQ ID NO: 2171712 - DNA, 25 bp, Homo sapien
caccacagttagaaaattatttctc

SEQ ID NO: 2171713 - DNA, 25 bp, Homo sapien
taaccaattaacaccacagttagaa

SEQ ID NO: 2171714 - DNA, 25 bp, Homo sapien
attaacaccacagttagaaaattat

SEQ ID NO: 2171715 - DNA, 25 bp, Homo sapien
caattaacaccacagttagaaaatt

SEQ ID NO: 2171716 - DNA, 25 bp, Homo sapien
agcatgtattataccattagttagt

SEQ ID NO: 2171717 - DNA, 25 bp, Homo sapien
gcagcatgtattataccattagtta

SEQ ID NO: 2171718 - DNA, 25 bp, Homo sapien
cagcatgtattataccattagttag

SEQ ID NO: 2171719 - DNA, 25 bp, Homo sapien
aagcagcatgtattataccattagt

SEQ ID NO: 2171720 - DNA, 25 bp, Homo sapien
agattaaggatcccttcattataag

SEQ ID NO: 2171721 - DNA, 25 bp, Homo sapien
cagattaaggatcccttcattataa

SEQ ID NO: 2171722 - DNA, 25 bp, Homo sapien
aactttccctgcattggttcttcct

SEQ ID NO: 2171723 - DNA, 25 bp, Homo sapien
tctaaggaacctgatgtaaatatcc

SEQ ID NO: 2171724 - DNA, 25 bp, Homo sapien
ctaaggaacctgatgtaaatatcca

SEQ ID NO: 2171725 - DNA, 25 bp, Homo sapien
caaactttccctgcattggttcttc

SEQ ID NO: 2171726 - DNA, 25 bp, Homo sapien
tatggaatgttgttgctctggtcag

SEQ ID NO: 2171727 - DNA, 25 bp, Homo sapien
atgttgttgctctggtcagttccaa

SEQ ID NO: 2171728 - DNA, 25 bp, Homo sapien
atatggaatgttgttgctctggtca

SEQ ID NO: 2171729 - DNA, 25 bp, Homo sapien
ggaatgttgttgctctggtcagttc

SEQ ID NO: 2171730 - DNA, 25 bp, Homo sapien
gagcacgtctgccaactgaaggcct

SEQ ID NO: 2171731 - DNA, 25 bp, Homo sapien
gtttctgggacacccgagaaagcac

SEQ ID NO: 2171732 - DNA, 25 bp, Homo sapien
tgctctcccacgtagccctgcattt

SEQ ID NO: 2171733 - DNA, 25 bp, Homo sapien
gagaaagcacgtagtccagggagca

SEQ ID NO: 2171734 - DNA, 25 bp, Homo sapien
tccatgaaccaccaaactctttttg

SEQ ID NO: 2171735 - DNA, 25 bp, Homo sapien
catgaaccaccaaactctttttgga

SEQ ID NO: 2171736 - DNA, 25 bp, Homo sapien
ccatctctttccatgaaccaccaaa

SEQ ID NO: 2171737 - DNA, 25 bp, Homo sapien
atctctttccatgaaccaccaaact

SEQ ID NO: 2171738 - DNA, 25 bp, Homo sapien
ttcgtgggcttgtgaaggtaatgat

SEQ ID NO: 2171739 - DNA, 25 bp, Homo sapien
taatcgttccaccttgctgtctggc

SEQ ID NO: 2171740 - DNA, 25 bp, Homo sapien
ggttgtaatgtatcatgtagtcaaa

SEQ ID NO: 2171741 - DNA, 25 bp, Homo sapien
gctgtctggctccaataggttcgtg

SEQ ID NO: 2171742 - DNA, 25 bp, Homo sapien
atttcttaaatttctgagaactcat

SEQ ID NO: 2171743 - DNA, 25 bp, Homo sapien
gtatttcttaaatttctgagaactc

SEQ ID NO: 2171744 - DNA, 25 bp, Homo sapien
ttgtgtatttcttaaatttctgaga

SEQ ID NO: 2171745 - DNA, 25 bp, Homo sapien
cctttgtgtatttcttaaatttctg

SEQ ID NO: 2171746 - DNA, 25 bp, Homo sapien
gtggcatgcactgttactacttcct

SEQ ID NO: 2171747 - DNA, 25 bp, Homo sapien
taagaggttggctcatctttgcaga

SEQ ID NO: 2171748 - DNA, 25 bp, Homo sapien
gcaagtggcatgcactgttactact

SEQ ID NO: 2171749 - DNA, 25 bp, Homo sapien
gaggttggctcatctttgcagaact

SEQ ID NO: 2171750 - DNA, 25 bp, Homo sapien
cacattcattggtgcgcagggagcg

SEQ ID NO: 2171751 - DNA, 25 bp, Homo sapien
gattggcttgttcgcacttgcaggc

SEQ ID NO: 2171752 - DNA, 25 bp, Homo sapien
tggccgaaagtagcccaacctctag

SEQ ID NO: 2171753 - DNA, 25 bp, Homo sapien
aacctctaggtgctgattggctgcg

SEQ ID NO: 2171754 - DNA, 25 bp, Homo sapien
ggagccgccgcccattccctgtggc

SEQ ID NO: 2171755 - DNA, 25 bp, Homo sapien
ttgccacaactgtccttaacggccg

SEQ ID NO: 2171756 - DNA, 25 bp, Homo sapien
aaacacggcctcaggaatccccagg

SEQ ID NO: 2171757 - DNA, 25 bp, Homo sapien
tcctttgccacaactgtccttaacg

SEQ ID NO: 2171758 - DNA, 25 bp, Homo sapien
gaaaacaaattactgcctcagcggg

SEQ ID NO: 2171759 - DNA, 25 bp, Homo sapien
cagaccctggtctatttagaggcca

SEQ ID NO: 2171760 - DNA, 25 bp, Homo sapien
taaggttaagcagcaactgggaagc

SEQ ID NO: 2171761 - DNA, 25 bp, Homo sapien
gaatggactgggtctgacttctaac

SEQ ID NO: 2171762 - DNA, 25 bp, Homo sapien
tgttcatccagcttctttaatactg

SEQ ID NO: 2171763 - DNA, 25 bp, Homo sapien
tacttctggtactgttcatccagct

SEQ ID NO: 2171764 - DNA, 25 bp, Homo sapien
tgagcaaggttgagttccataaact

SEQ ID NO: 2171765 - DNA, 25 bp, Homo sapien
tttcttttgagcaaggttgagttcc

SEQ ID NO: 2171766 - DNA, 25 bp, Homo sapien
aatttcaggaatctgaccttttagc

SEQ ID NO: 2171767 - DNA, 25 bp, Homo sapien
atttccaaagtctgtttaatttcag

SEQ ID NO: 2171768 - DNA, 25 bp, Homo sapien
ttccaaagtctgtttaatttcagga

SEQ ID NO: 2171769 - DNA, 25 bp, Homo sapien
ttttcttctgcatgtattttagaat

SEQ ID NO: 2171770 - DNA, 25 bp, Homo sapien
tggtctccattgagttggtggactc

SEQ ID NO: 2171771 - DNA, 25 bp, Homo sapien
cagacacattttatcggtaggagga

SEQ ID NO: 2171772 - DNA, 25 bp, Homo sapien
tgaagctttgcaatacaggttatct

SEQ ID NO: 2171773 - DNA, 25 bp, Homo sapien
gttatctgccagcaagaatctggtc

SEQ ID NO: 2171774 - DNA, 25 bp, Homo sapien
gctctgtgctccaacaatgtgggaa

SEQ ID NO: 2171775 - DNA, 25 bp, Homo sapien
tgtaaggacaggaagaacatatgca

SEQ ID NO: 2171776 - DNA, 25 bp, Homo sapien
caatatttacacgaagaactaggat

SEQ ID NO: 2171777 - DNA, 25 bp, Homo sapien
gagagagcaaacagtatataatggc

SEQ ID NO: 2171778 - DNA, 25 bp, Homo sapien
tgatctcgaagaaagtcaaggtctt

SEQ ID NO: 2171779 - DNA, 25 bp, Homo sapien
tccaacaatgcctgagcttcatcaa

SEQ ID NO: 2171780 - DNA, 25 bp, Homo sapien
tctgtggtagtaaattgatctcgaa

SEQ ID NO: 2171781 - DNA, 25 bp, Homo sapien
tgtggcagtcgataaattcttttcc

SEQ ID NO: 2171782 - DNA, 25 bp, Homo sapien
taggccctcgtcatctcatagctgg

SEQ ID NO: 2171783 - DNA, 25 bp, Homo sapien
gctcctgtacccatctaagtcactg

SEQ ID NO: 2171784 - DNA, 25 bp, Homo sapien
agtttccacactacccgtcagatga

SEQ ID NO: 2171785 - DNA, 25 bp, Homo sapien
gcagtactagcaataacaaatggca

SEQ ID NO: 2171786 - DNA, 25 bp, Homo sapien
tcccaattataaaccctggccatat

SEQ ID NO: 2171787 - DNA, 25 bp, Homo sapien
tttgttcttggtagagtcatccttg

SEQ ID NO: 2171788 - DNA, 25 bp, Homo sapien
ttcttctttttacatcccaattata

SEQ ID NO: 2171789 - DNA, 25 bp, Homo sapien
ttggtagagtcatccttgtttcttc

SEQ ID NO: 2171790 - DNA, 25 bp, Homo sapien
ccctcttaatgtgtagcaaggcaaa

SEQ ID NO: 2171791 - DNA, 25 bp, Homo sapien
cacatcaagtgagagtaacatcagc

SEQ ID NO: 2171792 - DNA, 25 bp, Homo sapien
tagcgtccggcattcagcttccata

SEQ ID NO: 2171793 - DNA, 25 bp, Homo sapien
aaaagtaaactgtgctagcgtccgg

SEQ ID NO: 2171794 - DNA, 25 bp, Homo sapien
tactttttactacatggagatgaac

SEQ ID NO: 2171795 - DNA, 25 bp, Homo sapien
gctctggagaactgttaagaactac

SEQ ID NO: 2171796 - DNA, 25 bp, Homo sapien
taagaactacaaaatcaccttaggc

SEQ ID NO: 2171797 - DNA, 25 bp, Homo sapien
agaatctgtatcacccagcgctggt

SEQ ID NO: 2171798 - DNA, 25 bp, Homo sapien
gctataatcctgagggaacatggga

SEQ ID NO: 2171799 - DNA, 25 bp, Homo sapien
caaaatgaccttggccacctgtctg

SEQ ID NO: 2171800 - DNA, 25 bp, Homo sapien
aaaggaaccacgtacagcaatgcgg

SEQ ID NO: 2171801 - DNA, 25 bp, Homo sapien
tgagttcctgtctacccaagagagt

SEQ ID NO: 2171802 - DNA, 25 bp, Homo sapien
tgatcatcataacaggcctacgagg

SEQ ID NO: 2171803 - DNA, 25 bp, Homo sapien
gcttgcttcttcaggcacgtgacag

SEQ ID NO: 2171804 - DNA, 25 bp, Homo sapien
gcacctgcaatctggaagtaaacag

SEQ ID NO: 2171805 - DNA, 25 bp, Homo sapien
tgctgaacaggaggcactgtaaccc

SEQ ID NO: 2171806 - DNA, 25 bp, Homo sapien
gaaactggctgctgcatacggcatg

SEQ ID NO: 2171807 - DNA, 25 bp, Homo sapien
tatttgacattaccaaccgcaggtc

SEQ ID NO: 2171808 - DNA, 25 bp, Homo sapien
tgaagtacattgaaacgtcagcccg

SEQ ID NO: 2171809 - DNA, 25 bp, Homo sapien
tcagcccgagatgccattaatgtgg

SEQ ID NO: 2171810 - DNA, 25 bp, Homo sapien
agtttggcccaattggaaactcaca

SEQ ID NO: 2171811 - DNA, 25 bp, Homo sapien
gtagtagtatggaatgccatttgta

SEQ ID NO: 2171812 - DNA, 25 bp, Homo sapien
gcccaattggaaactcacatattag

SEQ ID NO: 2171813 - DNA, 25 bp, Homo sapien
ttggaaactcacatattagtagtag

SEQ ID NO: 2171814 - DNA, 25 bp, Homo sapien
ggaaaatgcctaaaagttcatgaac

SEQ ID NO: 2171815 - DNA, 25 bp, Homo sapien
gaaaatgcctaaaagttcatgaaca

SEQ ID NO: 2171816 - DNA, 25 bp, Homo sapien
aaaatgcctaaaagttcatgaacat

SEQ ID NO: 2171817 - DNA, 25 bp, Homo sapien
aatgcctaaaagttcatgaacattc

SEQ ID NO: 2171818 - DNA, 25 bp, Homo sapien
tcaactgctagcatttgtaatgaac

SEQ ID NO: 2171819 - DNA, 25 bp, Homo sapien
aactgctagcatttgtaatgaactc

SEQ ID NO: 2171820 - DNA, 25 bp, Homo sapien
tttcaactgctagcatttgtaatga

SEQ ID NO: 2171821 - DNA, 25 bp, Homo sapien
caactgctagcatttgtaatgaact

SEQ ID NO: 2171822 - DNA, 25 bp, Homo sapien
cactcgtatgtgagcactaaaacaa

SEQ ID NO: 2171823 - DNA, 25 bp, Homo sapien
tctcactcgtatgtgagcactaaaa

SEQ ID NO: 2171824 - DNA, 25 bp, Homo sapien
tgaatagaactggaggatattatat

SEQ ID NO: 2171825 - DNA, 25 bp, Homo sapien
tgtctgacaggtacacaatgaaata

SEQ ID NO: 2171826 - DNA, 25 bp, Homo sapien
attcccatgacatgagttcacctat

SEQ ID NO: 2171827 - DNA, 25 bp, Homo sapien
aattcccatgacatgagttcaccta

SEQ ID NO: 2171828 - DNA, 25 bp, Homo sapien
ttcccatgacatgagttcacctatg

SEQ ID NO: 2171829 - DNA, 25 bp, Homo sapien
gaacagatgaacagacatacatggg

SEQ ID NO: 2171830 - DNA, 25 bp, Homo sapien
tccagtgtctataaggagcttaaat

SEQ ID NO: 2171831 - DNA, 25 bp, Homo sapien
ctagccctatgcagacgattgaagc

SEQ ID NO: 2171832 - DNA, 25 bp, Homo sapien
aaaaatcgcattcaaatgtgggcaa

SEQ ID NO: 2171833 - DNA, 25 bp, Homo sapien
catccttcgaggactgcgctccggg

SEQ ID NO: 2171834 - DNA, 25 bp, Homo sapien
aatttcatccttcgaggactgcgct

SEQ ID NO: 2171835 - DNA, 25 bp, Homo sapien
tcaatttcatccttcgaggactgcg

SEQ ID NO: 2171836 - DNA, 25 bp, Homo sapien
ttcatccttcgaggactgcgctccg

SEQ ID NO: 2171837 - DNA, 25 bp, Homo sapien
tctcaggtagagtttctccttgtga

SEQ ID NO: 2171838 - DNA, 25 bp, Homo sapien
tattcctttatcgttaaaacaatca

SEQ ID NO: 2171839 - DNA, 25 bp, Homo sapien
gctggatattcctttatcgttaaaa

SEQ ID NO: 2171840 - DNA, 25 bp, Homo sapien
tggatattcctttatcgttaaaaca

SEQ ID NO: 2171841 - DNA, 25 bp, Homo sapien
ctttatcgttaaaacaatcacttca

SEQ ID NO: 2171842 - DNA, 25 bp, Homo sapien
caggcactttactggcttcaacttt

SEQ ID NO: 2171843 - DNA, 25 bp, Homo sapien
aggcactttactggcttcaactttc

SEQ ID NO: 2171844 - DNA, 25 bp, Homo sapien
tcaggcactttactggcttcaactt

SEQ ID NO: 2171845 - DNA, 25 bp, Homo sapien
ctcaggcactttactggcttcaact

SEQ ID NO: 2171846 - DNA, 25 bp, Homo sapien
cctggataacgtgtctgcaagtcaa

SEQ ID NO: 2171847 - DNA, 25 bp, Homo sapien
ggcacctggataacgtgtctgcaag

SEQ ID NO: 2171848 - DNA, 25 bp, Homo sapien
tcccttgaggcacctggataacgtg

SEQ ID NO: 2171849 - DNA, 25 bp, Homo sapien
cttgaggcacctggataacgtgtct

SEQ ID NO: 2171850 - DNA, 25 bp, Homo sapien
tccagagtggcctcgtacagggctg

SEQ ID NO: 2171851 - DNA, 25 bp, Homo sapien
ccagagtggcctcgtacagggctgt

SEQ ID NO: 2171852 - DNA, 25 bp, Homo sapien
cagagtggcctcgtacagggctgtg

SEQ ID NO: 2171853 - DNA, 25 bp, Homo sapien
tcaaccatcttcgccgtcatctgaa

SEQ ID NO: 2171854 - DNA, 25 bp, Homo sapien
tcgccgtcatctgaatcaccgtcac

SEQ ID NO: 2171855 - DNA, 25 bp, Homo sapien
atcttcgccgtcatctgaatcaccg

SEQ ID NO: 2171856 - DNA, 25 bp, Homo sapien
ctcaaccatcttcgccgtcatctga

SEQ ID NO: 2171857 - DNA, 25 bp, Homo sapien
agcatttggaatgactttgggcttg

SEQ ID NO: 2171858 - DNA, 25 bp, Homo sapien
gcatttggaatgactttgggcttgt

SEQ ID NO: 2171859 - DNA, 25 bp, Homo sapien
ttgtggttttcccatgagagtcgag

SEQ ID NO: 2171860 - DNA, 25 bp, Homo sapien
ttttcccatgagagtcgagggtcat

SEQ ID NO: 2171861 - DNA, 25 bp, Homo sapien
catacagaggtcattaggctgtttg

SEQ ID NO: 2171862 - DNA, 25 bp, Homo sapien
cagaggtcattaggctgtttgttgt

SEQ ID NO: 2171863 - DNA, 25 bp, Homo sapien
tctgaaccaactacacctcataaat

SEQ ID NO: 2171864 - DNA, 25 bp, Homo sapien
ctctataatcatctgaaccaactac

SEQ ID NO: 2171865 - DNA, 25 bp, Homo sapien
gagaaccttgactaacacacccatg

SEQ ID NO: 2171866 - DNA, 25 bp, Homo sapien
cacctcataaatcctctctcatata

SEQ ID NO: 2171867 - DNA, 25 bp, Homo sapien
tcaatctaggcagaatacatgggag

SEQ ID NO: 2171868 - DNA, 25 bp, Homo sapien
gggatatgttgctcagaggatacat

SEQ ID NO: 2171869 - DNA, 25 bp, Homo sapien
tacaagagattaatacccggagtat

SEQ ID NO: 2171870 - DNA, 25 bp, Homo sapien
tcaacggagtgaagagataactcac

SEQ ID NO: 2171871 - DNA, 25 bp, Homo sapien
tacaaggacgaatacagcagacacg

SEQ ID NO: 2171872 - DNA, 25 bp, Homo sapien
gctaggcagtgcgtcaggcattaaa

SEQ ID NO: 2171873 - DNA, 25 bp, Homo sapien
tatatgcgcaccagctacatgctag

SEQ ID NO: 2171874 - DNA, 25 bp, Homo sapien
tagtggaccattcacccagggatct

SEQ ID NO: 2171875 - DNA, 25 bp, Homo sapien
tctatcgttagagtccggtgtgctg

SEQ ID NO: 2171876 - DNA, 25 bp, Homo sapien
taaggaacggtattgatgacagccc

SEQ ID NO: 2171877 - DNA, 25 bp, Homo sapien
tgtgctgtataccagcgatggacga

SEQ ID NO: 2171878 - DNA, 25 bp, Homo sapien
gacagcccggtcatagttgttgtac

SEQ ID NO: 2171879 - DNA, 25 bp, Homo sapien
ttgacatctttagagattaggaccc

SEQ ID NO: 2171880 - DNA, 25 bp, Homo sapien
aagtaagtacccgttcttcactgct

SEQ ID NO: 2171881 - DNA, 25 bp, Homo sapien
gcttgcttgacatctttagagatta

SEQ ID NO: 2171882 - DNA, 25 bp, Homo sapien
tcttcactgcttcagtattacaagc

SEQ ID NO: 2171883 - DNA, 25 bp, Homo sapien
ttggcggtagccagtgaagcattcc

SEQ ID NO: 2171884 - DNA, 25 bp, Homo sapien
gaagcattccctgccatgtaggaca

SEQ ID NO: 2171885 - DNA, 25 bp, Homo sapien
ttaaatagcagccacacagttggcg

SEQ ID NO: 2171886 - DNA, 25 bp, Homo sapien
gccccaagaggcgagcagtgtttaa

SEQ ID NO: 2171887 - DNA, 25 bp, Homo sapien
cagggtgccaggtgtattcataatc

SEQ ID NO: 2171888 - DNA, 25 bp, Homo sapien
tgttataacatgaggaagagagctg

SEQ ID NO: 2171889 - DNA, 25 bp, Homo sapien
cattagataactcagagtcccgcct

SEQ ID NO: 2171890 - DNA, 25 bp, Homo sapien
gctgccccactagatgtctgacatt

SEQ ID NO: 2171891 - DNA, 25 bp, Homo sapien
tcaaggtagtcgctagcccatgggt

SEQ ID NO: 2171892 - DNA, 25 bp, Homo sapien
tggaacacattttggagcactggat

SEQ ID NO: 2171893 - DNA, 25 bp, Homo sapien
tgccaaatgtgatctaggaactccc

SEQ ID NO: 2171894 - DNA, 25 bp, Homo sapien
taatccacaggcctaggtaaaggac

SEQ ID NO: 2171895 - DNA, 25 bp, Homo sapien
aagcctggaggccggaacagctaag

SEQ ID NO: 2171896 - DNA, 25 bp, Homo sapien
tggaggccggaacagctaagtcgcc

SEQ ID NO: 2171897 - DNA, 25 bp, Homo sapien
caaagcctggaggccggaacagcta

SEQ ID NO: 2171898 - DNA, 25 bp, Homo sapien
gaggccggaacagctaagtcgccca

SEQ ID NO: 2171899 - DNA, 25 bp, Homo sapien
tcccactatcattgcctggcagtct

SEQ ID NO: 2171900 - DNA, 25 bp, Homo sapien
tggcagtctaagtctctgtgaaggc

SEQ ID NO: 2171901 - DNA, 25 bp, Homo sapien
gtgcccagaggtgttcacaatattc

SEQ ID NO: 2171902 - DNA, 25 bp, Homo sapien
cttgtttacaatcccacagacagtg

SEQ ID NO: 2171903 - DNA, 25 bp, Homo sapien
tctggcctcgtaactaagagttgag

SEQ ID NO: 2171904 - DNA, 25 bp, Homo sapien
tggcctcgtaactaagagttgagct

SEQ ID NO: 2171905 - DNA, 25 bp, Homo sapien
atgcagacatgttctggcctcgtaa

SEQ ID NO: 2171906 - DNA, 25 bp, Homo sapien
cctcgtaactaagagttgagctaat

SEQ ID NO: 2171907 - DNA, 25 bp, Homo sapien
gcccttgtgatctttagtcgtgcag

SEQ ID NO: 2171908 - DNA, 25 bp, Homo sapien
gataaattaccgtgcctgcctgccc

SEQ ID NO: 2171909 - DNA, 25 bp, Homo sapien
aagtaagctagaacaccactactaa

SEQ ID NO: 2171910 - DNA, 25 bp, Homo sapien
ttttacacagcattagcccttgtga

SEQ ID NO: 2171911 - DNA, 25 bp, Homo sapien
ggaaatgcatcctttgggccgaagt

SEQ ID NO: 2171912 - DNA, 25 bp, Homo sapien
tggtgacaacaagaactcttcagaa

SEQ ID NO: 2171913 - DNA, 25 bp, Homo sapien
tgtgagttgagtgcctccaaatggg

SEQ ID NO: 2171914 - DNA, 25 bp, Homo sapien
gggccgaagttgcacacaatcctga

SEQ ID NO: 2171915 - DNA, 25 bp, Homo sapien
gcacggtacgtcttcatgggagtca

SEQ ID NO: 2171916 - DNA, 25 bp, Homo sapien
gaagccatcaagtcgctgcaggtgg

SEQ ID NO: 2171917 - DNA, 25 bp, Homo sapien
aaaagacatcgttcccgcttctgcg

SEQ ID NO: 2171918 - DNA, 25 bp, Homo sapien
tggtcatggctacccacgaaaagga

SEQ ID NO: 2171919 - DNA, 25 bp, Homo sapien
tggtatcgaacaagctgaagaagcg

SEQ ID NO: 2171920 - DNA, 25 bp, Homo sapien
tgcggaagccgaacgtggcggaggc

SEQ ID NO: 2171921 - DNA, 25 bp, Homo sapien
gaagaagcggttcctgcggaagccg

SEQ ID NO: 2171922 - DNA, 25 bp, Homo sapien
ttcctggcccgctaccggctggtat

SEQ ID NO: 2171923 - DNA, 25 bp, Homo sapien
gcatccagatcggaaaggaacaagt

SEQ ID NO: 2171924 - DNA, 25 bp, Homo sapien
tcaggaatgccacttgtaactcaac

SEQ ID NO: 2171925 - DNA, 25 bp, Homo sapien
tattaacagaatgcatggcggagcg

SEQ ID NO: 2171926 - DNA, 25 bp, Homo sapien
gacaaaacgcagtaccctttcatga

SEQ ID NO: 2171927 - DNA, 25 bp, Homo sapien
tagaggcaaatcagaccacgtcact

SEQ ID NO: 2171928 - DNA, 25 bp, Homo sapien
tcacgagctcctagtacaagtctgg

SEQ ID NO: 2171929 - DNA, 25 bp, Homo sapien
tcatgtctccagctaggttcgccag

SEQ ID NO: 2171930 - DNA, 25 bp, Homo sapien
cacagtgggttcagtgtagcctaca

SEQ ID NO: 2171931 - DNA, 25 bp, Homo sapien
taagggatatagacctcgccagctc

SEQ ID NO: 2171932 - DNA, 25 bp, Homo sapien
tcagcgatagttaagggaatcccca

SEQ ID NO: 2171933 - DNA, 25 bp, Homo sapien
tgggcttaccccacaaggtgtgtat

SEQ ID NO: 2171934 - DNA, 25 bp, Homo sapien
gaaagtaaacccatgaagctgtgta

SEQ ID NO: 2171935 - DNA, 25 bp, Homo sapien
gatgaagcatgcacactctactgaa

SEQ ID NO: 2171936 - DNA, 25 bp, Homo sapien
cacacaaatcgaaacaagggcatgg

SEQ ID NO: 2171937 - DNA, 25 bp, Homo sapien
ttaaagacacctaagcacgtgcgcg

SEQ ID NO: 2171938 - DNA, 25 bp, Homo sapien
cagtggtgtgaacagagagagctct

SEQ ID NO: 2171939 - DNA, 25 bp, Homo sapien
cctagatttcaccagcggtaggaag

SEQ ID NO: 2171940 - DNA, 25 bp, Homo sapien
tttgtgaacagaagccctcaactgc

SEQ ID NO: 2171941 - DNA, 25 bp, Homo sapien
tagatttcaccagcggtaggaaggc

SEQ ID NO: 2171942 - DNA, 25 bp, Homo sapien
ctttgtgaacagaagccctcaactg

SEQ ID NO: 2171943 - DNA, 25 bp, Homo sapien
tttgcttagggcaggattcccatca

SEQ ID NO: 2171944 - DNA, 25 bp, Homo sapien
cttttaaatggtcacatataataaa

SEQ ID NO: 2171945 - DNA, 25 bp, Homo sapien
ttttaaatggtcacatataataaat

SEQ ID NO: 2171946 - DNA, 25 bp, Homo sapien
gcttttaaatggtcacatataataa

SEQ ID NO: 2171947 - DNA, 25 bp, Homo sapien
tagttaaggtggagcacatacttcc

SEQ ID NO: 2171948 - DNA, 25 bp, Homo sapien
gcagacacccatgctcgtgatgatg

SEQ ID NO: 2171949 - DNA, 25 bp, Homo sapien
tcaaaggctggaccaaggtaactct

SEQ ID NO: 2171950 - DNA, 25 bp, Homo sapien
gaagcctggagtgttattccctgga

SEQ ID NO: 2171951 - DNA, 25 bp, Homo sapien
agagagtaggcaagttgtgaagcac

SEQ ID NO: 2171952 - DNA, 25 bp, Homo sapien
tgaagcacagatatattggcaagac

SEQ ID NO: 2171953 - DNA, 25 bp, Homo sapien
tggcaagacatctgaacttctaggc

SEQ ID NO: 2171954 - DNA, 25 bp, Homo sapien
ggttttggcagtccgaaggctgaga

SEQ ID NO: 2171955 - DNA, 25 bp, Homo sapien
gctgtttgggcgacttagctgttcc

SEQ ID NO: 2171956 - DNA, 25 bp, Homo sapien
tgtgaaagcatggacagactgcttc

SEQ ID NO: 2171957 - DNA, 25 bp, Homo sapien
gtggaagcagtgccccagcacagca

SEQ ID NO: 2171958 - DNA, 25 bp, Homo sapien
gtctgtacctcgctgggccggagct

SEQ ID NO: 2171959 - DNA, 25 bp, Homo sapien
ccttctcaacaatgtgctcccttta

SEQ ID NO: 2171960 - DNA, 25 bp, Homo sapien
tcaacaatgtgctccctttagtaca

SEQ ID NO: 2171961 - DNA, 25 bp, Homo sapien
tggaaatttgcaaccggtccttctc

SEQ ID NO: 2171962 - DNA, 25 bp, Homo sapien
ggaaatttgcaaccggtccttctca

SEQ ID NO: 2171963 - DNA, 25 bp, Homo sapien
gaacgaatgattgaagatccctggg

SEQ ID NO: 2171964 - DNA, 25 bp, Homo sapien
tacaggtaacagctcaaatgtcgct

SEQ ID NO: 2171965 - DNA, 25 bp, Homo sapien
cactaggctatagctgggattcctc

SEQ ID NO: 2171966 - DNA, 25 bp, Homo sapien
cagtggcttcccatggtactcagaa

SEQ ID NO: 2171967 - DNA, 25 bp, Homo sapien
tctagtagatttacggtgtcaggtc

SEQ ID NO: 2171968 - DNA, 25 bp, Homo sapien
tacaatggccatattcccatactgt

SEQ ID NO: 2171969 - DNA, 25 bp, Homo sapien
tacttgccaacgtctgtcatttttg

SEQ ID NO: 2171970 - DNA, 25 bp, Homo sapien
gaccaatatcatagagttataccat

SEQ ID NO: 2171971 - DNA, 25 bp, Homo sapien
gtctttcaaaaaacacccattcatg

SEQ ID NO: 2171972 - DNA, 25 bp, Homo sapien
ttgtatgtctttcaaaaaacaccca

SEQ ID NO: 2171973 - DNA, 25 bp, Homo sapien
tgactggtgtaagatagtattgttt

SEQ ID NO: 2171974 - DNA, 25 bp, Homo sapien
ccactaacagtgcataagcattact

SEQ ID NO: 2171975 - DNA, 25 bp, Homo sapien
ttgctgcatctactgtccctggaaa

SEQ ID NO: 2171976 - DNA, 25 bp, Homo sapien
tgctgcatctactgtccctggaaaa

SEQ ID NO: 2171977 - DNA, 25 bp, Homo sapien
tgtagtaaccataaagatatcgaag

SEQ ID NO: 2171978 - DNA, 25 bp, Homo sapien
tcgaagttggcccatatgcagttgc

SEQ ID NO: 2171979 - DNA, 25 bp, Homo sapien
aactgcggccattccccagacattt

SEQ ID NO: 2171980 - DNA, 25 bp, Homo sapien
gttgctgctctgactagagtttcca

SEQ ID NO: 2171981 - DNA, 25 bp, Homo sapien
gaagagacccttgaatacctttggc

SEQ ID NO: 2171982 - DNA, 25 bp, Homo sapien
tcagtcatactagagaagttgggcc

SEQ ID NO: 2171983 - DNA, 25 bp, Homo sapien
tctggagccccagatatattgagtc

SEQ ID NO: 2171984 - DNA, 25 bp, Homo sapien
caagcattgctggtaatacactgaa

SEQ ID NO: 2171985 - DNA, 25 bp, Homo sapien
aattagctgccatcaaaaattgttg

SEQ ID NO: 2171986 - DNA, 25 bp, Homo sapien
gtttgaggagccatgaatttccatt

SEQ ID NO: 2171987 - DNA, 25 bp, Homo sapien
gaactgggtttgaggagccatgaat

SEQ ID NO: 2171988 - DNA, 25 bp, Homo sapien
gtgcccggcctggtctatgaacttt

SEQ ID NO: 2171989 - DNA, 25 bp, Homo sapien
caaaatgcttgtgccggagaatgag

SEQ ID NO: 2171990 - DNA, 25 bp, Homo sapien
tatccctggcattcgtacagagtcc

SEQ ID NO: 2171991 - DNA, 25 bp, Homo sapien
actacactttcacatggcaagcagg

SEQ ID NO: 2171992 - DNA, 25 bp, Homo sapien
taaagctgcacaacccaatacaatg

SEQ ID NO: 2171993 - DNA, 25 bp, Homo sapien
gaacctcctcaaagctctattccag

SEQ ID NO: 2171994 - DNA, 25 bp, Homo sapien
tcaatgatcaactctcaagtcggaa

SEQ ID NO: 2171995 - DNA, 25 bp, Homo sapien
caagtcggaaacctgggagtcttct

SEQ ID NO: 2171996 - DNA, 25 bp, Homo sapien
tgccaaaaatctgtttacgcttctg

SEQ ID NO: 2171997 - DNA, 25 bp, Homo sapien
aacacaggaataacacaaaagaggc

SEQ ID NO: 2171998 - DNA, 25 bp, Homo sapien
gaataacacaaaagaggcccaagat

SEQ ID NO: 2171999 - DNA, 25 bp, Homo sapien
aggaataacacaaaagaggcccaag

SEQ ID NO: 2172000 - DNA, 25 bp, Homo sapien
ataacacaaaagaggcccaagatgt

SEQ ID NO: 2172001 - DNA, 25 bp, Homo sapien
ttaatatcttcaatagccgatccga

SEQ ID NO: 2172002 - DNA, 25 bp, Homo sapien
tcttcaatagccgatccgaactgac

SEQ ID NO: 2172003 - DNA, 25 bp, Homo sapien
tagccgatccgaactgactgaaaga

SEQ ID NO: 2172004 - DNA, 25 bp, Homo sapien
ttcaatagccgatccgaactgactg

SEQ ID NO: 2172005 - DNA, 25 bp, Homo sapien
tcaatgccataatgccagaggttct

SEQ ID NO: 2172006 - DNA, 25 bp, Homo sapien
tgttcctccagcatagctactgata

SEQ ID NO: 2172007 - DNA, 25 bp, Homo sapien
tttctgggagcacccgttgaggttc

SEQ ID NO: 2172008 - DNA, 25 bp, Homo sapien
tatccagtgggagtttcttgttcct

SEQ ID NO: 2172009 - DNA, 25 bp, Homo sapien
ttctgttatggaaagactctggtac

SEQ ID NO: 2172010 - DNA, 25 bp, Homo sapien
ctgttatggaaagactctggtacat

SEQ ID NO: 2172011 - DNA, 25 bp, Homo sapien
tctgttatggaaagactctggtaca

SEQ ID NO: 2172012 - DNA, 25 bp, Homo sapien
attctgttatggaaagactctggta

SEQ ID NO: 2172013 - DNA, 25 bp, Homo sapien
gcaagatgccttgagtcttagactg

SEQ ID NO: 2172014 - DNA, 25 bp, Homo sapien
gagtcgcaagatgccttgagtctta

SEQ ID NO: 2172015 - DNA, 25 bp, Homo sapien
tgaagtctcagagtcgcaagatgcc

SEQ ID NO: 2172016 - DNA, 25 bp, Homo sapien
gccttgagtcttagactgtcttcca

SEQ ID NO: 2172017 - DNA, 25 bp, Homo sapien
gttacagtgtttgtgcagtcatgca

SEQ ID NO: 2172018 - DNA, 25 bp, Homo sapien
taacgctcgctcttattcctggtcc

SEQ ID NO: 2172019 - DNA, 25 bp, Homo sapien
tttcaaatgtgtctgaatacagagc

SEQ ID NO: 2172020 - DNA, 25 bp, Homo sapien
tcatgcagtttggacttgagccaag

SEQ ID NO: 2172021 - DNA, 25 bp, Homo sapien
gacgtatttcccaaagaaagctcag

SEQ ID NO: 2172022 - DNA, 25 bp, Homo sapien
gaatgaaaactccttcactggcagg

SEQ ID NO: 2172023 - DNA, 25 bp, Homo sapien
gcgagtcaaacctgtagtggcatat

SEQ ID NO: 2172024 - DNA, 25 bp, Homo sapien
gccccatctggctcaaaggatctct

SEQ ID NO: 2172025 - DNA, 25 bp, Homo sapien
gagcccttgtagttacatggatttc

SEQ ID NO: 2172026 - DNA, 25 bp, Homo sapien
ctctgagtggttttaagtcagggtg

SEQ ID NO: 2172027 - DNA, 25 bp, Homo sapien
cacttatggtgataaagaggagccc

SEQ ID NO: 2172028 - DNA, 25 bp, Homo sapien
tttagctctgagtggttttaagtca

SEQ ID NO: 2172029 - DNA, 25 bp, Homo sapien
tagagcgcagctgttcaataggcag

SEQ ID NO: 2172030 - DNA, 25 bp, Homo sapien
ggtagccagagaccaatcagacttg

SEQ ID NO: 2172031 - DNA, 25 bp, Homo sapien
cattgctagcatgagtagagcgcag

SEQ ID NO: 2172032 - DNA, 25 bp, Homo sapien
ggccgttccacgtagtcattgctag

SEQ ID NO: 2172033 - DNA, 25 bp, Homo sapien
tgaagaggtgctcactagggtgccc

SEQ ID NO: 2172034 - DNA, 25 bp, Homo sapien
tgccctgcagattgctcagcttctc

SEQ ID NO: 2172035 - DNA, 25 bp, Homo sapien
ggtgagggtgtaatgctggccaaga

SEQ ID NO: 2172036 - DNA, 25 bp, Homo sapien
ctgctccaggttgggttcggatgat

SEQ ID NO: 2172037 - DNA, 25 bp, Homo sapien
caagtgccataatcgaggaggctct

SEQ ID NO: 2172038 - DNA, 25 bp, Homo sapien
cagcagagacaagtgccataatcga

SEQ ID NO: 2172039 - DNA, 25 bp, Homo sapien
caaaggcagcgctggttgcacagcc

SEQ ID NO: 2172040 - DNA, 25 bp, Homo sapien
tgcaggggacgcacttgcagcgccc

SEQ ID NO: 2172041 - DNA, 25 bp, Homo sapien
gaactaggcccacaagagcagggct

SEQ ID NO: 2172042 - DNA, 25 bp, Homo sapien
cctggtcgccggaggctatcatagc

SEQ ID NO: 2172043 - DNA, 25 bp, Homo sapien
tgttggtgtgcctcttgcagcggca

SEQ ID NO: 2172044 - DNA, 25 bp, Homo sapien
tcttcatcatcagtggagcagtggt

SEQ ID NO: 2172045 - DNA, 25 bp, Homo sapien
ttcctgggccttggggaagggtgca

SEQ ID NO: 2172046 - DNA, 25 bp, Homo sapien
tgggccttggggaagggtgcactac

SEQ ID NO: 2172047 - DNA, 25 bp, Homo sapien
cctgggccttggggaagggtgcact

SEQ ID NO: 2172048 - DNA, 25 bp, Homo sapien
ctgggccttggggaagggtgcacta

SEQ ID NO: 2172049 - DNA, 25 bp, Homo sapien
tttggctagtttatcactcctcccc

SEQ ID NO: 2172050 - DNA, 25 bp, Homo sapien
gatgaggcctatgctttgctgttgg

SEQ ID NO: 2172051 - DNA, 25 bp, Homo sapien
aagagaggccctaactttggctagt

SEQ ID NO: 2172052 - DNA, 25 bp, Homo sapien
ggagaaaagctctggatccaccttg

SEQ ID NO: 2172053 - DNA, 25 bp, Homo sapien
gatgtacttggtcattcccctgaca

SEQ ID NO: 2172054 - DNA, 25 bp, Homo sapien
actgaagaggagtgggatagatact

SEQ ID NO: 2172055 - DNA, 25 bp, Homo sapien
ccatatatcacctgaatttgccatg

SEQ ID NO: 2172056 - DNA, 25 bp, Homo sapien
aaagactgaagaggagtgggataga

SEQ ID NO: 2172057 - DNA, 25 bp, Homo sapien
tattaacgcctgagccatgcagtct

SEQ ID NO: 2172058 - DNA, 25 bp, Homo sapien
tataagataacttcgcctcatgcgc

SEQ ID NO: 2172059 - DNA, 25 bp, Homo sapien
aacagagtgacgatcagagcctgca

SEQ ID NO: 2172060 - DNA, 25 bp, Homo sapien
taattagctacccaccatgcactgg

SEQ ID NO: 2172061 - DNA, 25 bp, Homo sapien
tgcaatggcgaagatacagcttggt

SEQ ID NO: 2172062 - DNA, 25 bp, Homo sapien
gatacagcttggttagggcttcttt

SEQ ID NO: 2172063 - DNA, 25 bp, Homo sapien
gcacagtgtgtgcagcaaagagtag

SEQ ID NO: 2172064 - DNA, 25 bp, Homo sapien
caaagagtagatgcaatggcgaaga

SEQ ID NO: 2172065 - DNA, 25 bp, Homo sapien
tagcttgccaaggaacagaccgtgg

SEQ ID NO: 2172066 - DNA, 25 bp, Homo sapien
tggacacaagtgaaagccctgactc

SEQ ID NO: 2172067 - DNA, 25 bp, Homo sapien
taactcctaggttgcaggtggacca

SEQ ID NO: 2172068 - DNA, 25 bp, Homo sapien
gcagatgcagtccatatcaggccaa

SEQ ID NO: 2172069 - DNA, 25 bp, Homo sapien
tataacttggattgtaatgacagca

SEQ ID NO: 2172070 - DNA, 25 bp, Homo sapien
attagtcagtgtcattcccaaaatg

SEQ ID NO: 2172071 - DNA, 25 bp, Homo sapien
tgacagcaagattcctaacattagt

SEQ ID NO: 2172072 - DNA, 25 bp, Homo sapien
catatgggagcaaacatatataact

SEQ ID NO: 2172073 - DNA, 25 bp, Homo sapien
caaaaggattgccaggttagtttgg

SEQ ID NO: 2172074 - DNA, 25 bp, Homo sapien
ttgccaggttagtttgggaatgaca

SEQ ID NO: 2172075 - DNA, 25 bp, Homo sapien
ctggtatggtcaaaaggattgccag

SEQ ID NO: 2172076 - DNA, 25 bp, Homo sapien
ccaggttagtttgggaatgacaatg

SEQ ID NO: 2172077 - DNA, 25 bp, Homo sapien
tttaccatcagagggatgactatta

SEQ ID NO: 2172078 - DNA, 25 bp, Homo sapien
tagttcttcaaggacctgggagctt

SEQ ID NO: 2172079 - DNA, 25 bp, Homo sapien
ttagttcttcaaggacctgggagct

SEQ ID NO: 2172080 - DNA, 25 bp, Homo sapien
ttttaccatcagagggatgactatt

SEQ ID NO: 2172081 - DNA, 25 bp, Homo sapien
taccacttctgtgttcagcagttta

SEQ ID NO: 2172082 - DNA, 25 bp, Homo sapien
accacttctgtgttcagcagtttag

SEQ ID NO: 2172083 - DNA, 25 bp, Homo sapien
ttaccacttctgtgttcagcagttt

SEQ ID NO: 2172084 - DNA, 25 bp, Homo sapien
attaccacttctgtgttcagcagtt

SEQ ID NO: 2172085 - DNA, 25 bp, Homo sapien
tacgagttccattgaaaccctgggc

SEQ ID NO: 2172086 - DNA, 25 bp, Homo sapien
taagccttggtgtgcgaatccccat

SEQ ID NO: 2172087 - DNA, 25 bp, Homo sapien
gacttggtcactaactcacggtgtg

SEQ ID NO: 2172088 - DNA, 25 bp, Homo sapien
tcctcagatgctccaagtcagaaag

SEQ ID NO: 2172089 - DNA, 25 bp, Homo sapien
aaacattgaggactgcagggtaaag

SEQ ID NO: 2172090 - DNA, 25 bp, Homo sapien
gcagatgtggcccaaaacattgagg

SEQ ID NO: 2172091 - DNA, 25 bp, Homo sapien
tgtggcccaaaacattgaggactgc

SEQ ID NO: 2172092 - DNA, 25 bp, Homo sapien
ccaaaacattgaggactgcagggta

SEQ ID NO: 2172093 - DNA, 25 bp, Homo sapien
ctgctagcttttgagtttctttgct

SEQ ID NO: 2172094 - DNA, 25 bp, Homo sapien
tgatgttaggtgtcgattttagatc

SEQ ID NO: 2172095 - DNA, 25 bp, Homo sapien
ctacacactgtttaaatgtgtccca

SEQ ID NO: 2172096 - DNA, 25 bp, Homo sapien
agcttttgagtttctttgctcttgc

SEQ ID NO: 2172097 - DNA, 25 bp, Homo sapien
ctttaagcgaggaaaatttgtgacg

SEQ ID NO: 2172098 - DNA, 25 bp, Homo sapien
cctatgatgacctgatcagaaaagt

SEQ ID NO: 2172099 - DNA, 25 bp, Homo sapien
gttctaaatgttgcacagtgctttc

SEQ ID NO: 2172100 - DNA, 25 bp, Homo sapien
gaaaatttgtgacgaccttgtatgt

SEQ ID NO: 2172101 - DNA, 25 bp, Homo sapien
cccaaatggagcagcatattgtatg

SEQ ID NO: 2172102 - DNA, 25 bp, Homo sapien
cagtgggtttgactcgattcaaagc

SEQ ID NO: 2172103 - DNA, 25 bp, Homo sapien
tcattaagccttttcaccaagggta

SEQ ID NO: 2172104 - DNA, 25 bp, Homo sapien
tgtggtaccaccctcttgctgaaag

SEQ ID NO: 2172105 - DNA, 25 bp, Homo sapien
caatcatatgtgtgacaaaaactga

SEQ ID NO: 2172106 - DNA, 25 bp, Homo sapien
aatcatatgtgtgacaaaaactgac

SEQ ID NO: 2172107 - DNA, 25 bp, Homo sapien
tcaatcatatgtgtgacaaaaactg

SEQ ID NO: 2172108 - DNA, 25 bp, Homo sapien
caccaagagattctgtagcagtgct

SEQ ID NO: 2172109 - DNA, 25 bp, Homo sapien
tggaagggatctgggctctccacca

SEQ ID NO: 2172110 - DNA, 25 bp, Homo sapien
caagagattctgtagcagtgctggc

SEQ ID NO: 2172111 - DNA, 25 bp, Homo sapien
tctgggctctccaccaagagattct

SEQ ID NO: 2172112 - DNA, 25 bp, Homo sapien
agtggactcgaggaccgctaccttt

SEQ ID NO: 2172113 - DNA, 25 bp, Homo sapien
ctctgggaaggcgtcctccccgttg

SEQ ID NO: 2172114 - DNA, 25 bp, Homo sapien
cttctgaatgcgaggtcgtggcccg

SEQ ID NO: 2172115 - DNA, 25 bp, Homo sapien
cctttagatgctgaacgtgacttct

SEQ ID NO: 2172116 - DNA, 25 bp, Homo sapien
gcagagcttgaagcgagccggggac

SEQ ID NO: 2172117 - DNA, 25 bp, Homo sapien
cagagcttgaagcgagccggggaca

SEQ ID NO: 2172118 - DNA, 25 bp, Homo sapien
gagcttgaagcgagccggggacagg

SEQ ID NO: 2172119 - DNA, 25 bp, Homo sapien
agagcttgaagcgagccggggacag

SEQ ID NO: 2172120 - DNA, 25 bp, Homo sapien
catggagcacgcattccacagcaaa

SEQ ID NO: 2172121 - DNA, 25 bp, Homo sapien
cataaagtgtttgcttctgcgctcc

SEQ ID NO: 2172122 - DNA, 25 bp, Homo sapien
tggttgaccaaagcgaacagttcca

SEQ ID NO: 2172123 - DNA, 25 bp, Homo sapien
tgagatttgcctcccacgctcttgg

SEQ ID NO: 2172124 - DNA, 25 bp, Homo sapien
tgaaaggtgctggatctgtttctct

SEQ ID NO: 2172125 - DNA, 25 bp, Homo sapien
gatctgtttctctgcgcatatactg

SEQ ID NO: 2172126 - DNA, 25 bp, Homo sapien
tcatcaatcactttaataatgagaa

SEQ ID NO: 2172127 - DNA, 25 bp, Homo sapien
gcgcatatactgatctttgtcatca

SEQ ID NO: 2172128 - DNA, 25 bp, Homo sapien
atgaagcgccccgtctacgcgtggc

SEQ ID NO: 2172129 - DNA, 25 bp, Homo sapien
gggacggagggacgcgggtcagtgc

SEQ ID NO: 2172130 - DNA, 25 bp, Homo sapien
gacgccgctgacttccgcatgaagc

SEQ ID NO: 2172131 - DNA, 25 bp, Homo sapien
gtcagtgcagggtcgccaactgccc

SEQ ID NO: 2172132 - DNA, 25 bp, Homo sapien
caggaagtttcctccacaccaagca

SEQ ID NO: 2172133 - DNA, 25 bp, Homo sapien
tggcaaggatagtggtccccctggc

SEQ ID NO: 2172134 - DNA, 25 bp, Homo sapien
aggaagtttcctccacaccaagcat

SEQ ID NO: 2172135 - DNA, 25 bp, Homo sapien
atagtggtccccctggcaacaacag

SEQ ID NO: 2172136 - DNA, 25 bp, Homo sapien
ttttcagaaggtatcttagccagaa

SEQ ID NO: 2172137 - DNA, 25 bp, Homo sapien
agaaggtatcttagccagaatctgc

SEQ ID NO: 2172138 - DNA, 25 bp, Homo sapien
catgtgagtacgttagtttgttatt

SEQ ID NO: 2172139 - DNA, 25 bp, Homo sapien
ttgccatgtgagtacgttagtttgt

SEQ ID NO: 2172140 - DNA, 25 bp, Homo sapien
tacaaagatatacaatcctgtcttg

SEQ ID NO: 2172141 - DNA, 25 bp, Homo sapien
acaaagatatacaatcctgtcttgg

SEQ ID NO: 2172142 - DNA, 25 bp, Homo sapien
agaactcgctattcatggcatatgg

SEQ ID NO: 2172143 - DNA, 25 bp, Homo sapien
ccgtaagtagtctggaacctcttct

SEQ ID NO: 2172144 - DNA, 25 bp, Homo sapien
cagctgtgcagctaagacacttgag

SEQ ID NO: 2172145 - DNA, 25 bp, Homo sapien
tgctgtctgtgctcttgaaccgtaa

SEQ ID NO: 2172146 - DNA, 25 bp, Homo sapien
gttcatccacttgggcttgagtctc

SEQ ID NO: 2172147 - DNA, 25 bp, Homo sapien
tgagtctccatcactttgtctaggc

SEQ ID NO: 2172148 - DNA, 25 bp, Homo sapien
cacttgggcttgagtctccatcact

SEQ ID NO: 2172149 - DNA, 25 bp, Homo sapien
catcactttgtctaggcccttattc

SEQ ID NO: 2172150 - DNA, 25 bp, Homo sapien
tctgttttgtcaatcaataattcca

SEQ ID NO: 2172151 - DNA, 25 bp, Homo sapien
aattccaatctttctcctcgctgag

SEQ ID NO: 2172152 - DNA, 25 bp, Homo sapien
ctttctcctcgctgagctaccagat

SEQ ID NO: 2172153 - DNA, 25 bp, Homo sapien
aataattccaatctttctcctcgct

SEQ ID NO: 2172154 - DNA, 25 bp, Homo sapien
catccatagtttctccactttacat

SEQ ID NO: 2172155 - DNA, 25 bp, Homo sapien
tacatcagactccatattatcagat

SEQ ID NO: 2172156 - DNA, 25 bp, Homo sapien
tagtttctccactttacatcagact

SEQ ID NO: 2172157 - DNA, 25 bp, Homo sapien
ttacatcagactccatattatcaga

SEQ ID NO: 2172158 - DNA, 25 bp, Homo sapien
tacggaaccatagtataagcagctc

SEQ ID NO: 2172159 - DNA, 25 bp, Homo sapien
gattcatactgggtcacaaacggct

SEQ ID NO: 2172160 - DNA, 25 bp, Homo sapien
ccttaaaatgctctgaagtgggtac

SEQ ID NO: 2172161 - DNA, 25 bp, Homo sapien
tacaatccagctgtcagtcacaacg

SEQ ID NO: 2172162 - DNA, 25 bp, Homo sapien
aaagcagagatatgtcacgttcatg

SEQ ID NO: 2172163 - DNA, 25 bp, Homo sapien
tatactgtcaagataccaatgtccc

SEQ ID NO: 2172164 - DNA, 25 bp, Homo sapien
tacacaatacaaaagcatgatattc

SEQ ID NO: 2172165 - DNA, 25 bp, Homo sapien
catggaccgaaaaactctatactgt

SEQ ID NO: 2172166 - DNA, 25 bp, Homo sapien
agtatgcacatgttaaggagacaca

SEQ ID NO: 2172167 - DNA, 25 bp, Homo sapien
tacacaggacagaaacagcagattg

SEQ ID NO: 2172168 - DNA, 25 bp, Homo sapien
ctcaaggtagaggaaagtatgcaca

SEQ ID NO: 2172169 - DNA, 25 bp, Homo sapien
cagcagattgcgaactgcagaagaa

SEQ ID NO: 2172170 - DNA, 25 bp, Homo sapien
taaggtgacggagctaacggataaa

SEQ ID NO: 2172171 - DNA, 25 bp, Homo sapien
aatcgaaggtctgtggaaaccccat

SEQ ID NO: 2172172 - DNA, 25 bp, Homo sapien
ttctaacagcatgtggtcgcctcat

SEQ ID NO: 2172173 - DNA, 25 bp, Homo sapien
taaactgtgcctatataaggtgacg

SEQ ID NO: 2172174 - DNA, 25 bp, Homo sapien
gaatatctgggaataagcctcccca

SEQ ID NO: 2172175 - DNA, 25 bp, Homo sapien
catccaacacgggacaagaatatct

SEQ ID NO: 2172176 - DNA, 25 bp, Homo sapien
acgtctttccatccaacacgggaca

SEQ ID NO: 2172177 - DNA, 25 bp, Homo sapien
taaacttatatctaaaatgctgatc

SEQ ID NO: 2172178 - DNA, 25 bp, Homo sapien
gagaaggatcaataatcaagggact

SEQ ID NO: 2172179 - DNA, 25 bp, Homo sapien
catttcagacctccaagcttttgtt

SEQ ID NO: 2172180 - DNA, 25 bp, Homo sapien
ggaaaactgatcaagcaaatccagg

SEQ ID NO: 2172181 - DNA, 25 bp, Homo sapien
ctaaaaggacctacccaccatgtgg

SEQ ID NO: 2172182 - DNA, 25 bp, Homo sapien
catggctcgagcaagatttctgctg

SEQ ID NO: 2172183 - DNA, 25 bp, Homo sapien
tcttcatacacatggctcgagcaag

SEQ ID NO: 2172184 - DNA, 25 bp, Homo sapien
gatgataatagtgagcttgaggttc

SEQ ID NO: 2172185 - DNA, 25 bp, Homo sapien
gagcttgaggttcttcatacacatg

SEQ ID NO: 2172186 - DNA, 25 bp, Homo sapien
cttggccatgtaaatccaccacaga

SEQ ID NO: 2172187 - DNA, 25 bp, Homo sapien
cagcttggccatgtaaatccaccac

SEQ ID NO: 2172188 - DNA, 25 bp, Homo sapien
ttcacacagcttggccatgtaaatc

SEQ ID NO: 2172189 - DNA, 25 bp, Homo sapien
acacagcttggccatgtaaatccac

SEQ ID NO: 2172190 - DNA, 25 bp, Homo sapien
catatccttggttaatggtaacttc

SEQ ID NO: 2172191 - DNA, 25 bp, Homo sapien
ccttgttctctcatatccttggtta

SEQ ID NO: 2172192 - DNA, 25 bp, Homo sapien
ctctcatatccttggttaatggtaa

SEQ ID NO: 2172193 - DNA, 25 bp, Homo sapien
gttctctcatatccttggttaatgg

SEQ ID NO: 2172194 - DNA, 25 bp, Homo sapien
cctggaggcatggaacaagatttta

SEQ ID NO: 2172195 - DNA, 25 bp, Homo sapien
ctaatgggctagcaaaatgttcccc

SEQ ID NO: 2172196 - DNA, 25 bp, Homo sapien
tagatagctcataagactagcggcg

SEQ ID NO: 2172197 - DNA, 25 bp, Homo sapien
gctcttagaaggaagcagcaccaac

SEQ ID NO: 2172198 - DNA, 25 bp, Homo sapien
tattctattagcgacacgattgccc

SEQ ID NO: 2172199 - DNA, 25 bp, Homo sapien
caagtgggcctaagatctatgtcaa

SEQ ID NO: 2172200 - DNA, 25 bp, Homo sapien
aaaccctggagttgactgctgaccg

SEQ ID NO: 2172201 - DNA, 25 bp, Homo sapien
gaagaacaggtaccatgagccagat

SEQ ID NO: 2172202 - DNA, 25 bp, Homo sapien
ctgcctatgctcatgtggctcagcc

SEQ ID NO: 2172203 - DNA, 25 bp, Homo sapien
tgtttcctctaactccagggcgatg

SEQ ID NO: 2172204 - DNA, 25 bp, Homo sapien
gatgccaccctttaagctcaggacc

SEQ ID NO: 2172205 - DNA, 25 bp, Homo sapien
cacagcttcaccatttggggccagg

SEQ ID NO: 2172206 - DNA, 25 bp, Homo sapien
gcggtccccgtgaatctctgaaaat

SEQ ID NO: 2172207 - DNA, 25 bp, Homo sapien
gcagtacaggatgctcaggcgctca

SEQ ID NO: 2172208 - DNA, 25 bp, Homo sapien
tgcccataggctgcggtctgcggtc

SEQ ID NO: 2172209 - DNA, 25 bp, Homo sapien
cgctcacgatttagtggtgcccata

SEQ ID NO: 2172210 - DNA, 25 bp, Homo sapien
aacctgagaacaaagcttggtcctc

SEQ ID NO: 2172211 - DNA, 25 bp, Homo sapien
acctgagaacaaagcttggtcctca

SEQ ID NO: 2172212 - DNA, 25 bp, Homo sapien
gaggagaaggagatttgggtcctcc

SEQ ID NO: 2172213 - DNA, 25 bp, Homo sapien
tgttccttagccacagagggtctcc

SEQ ID NO: 2172214 - DNA, 25 bp, Homo sapien
cccaggtgttccttagccacagagg

SEQ ID NO: 2172215 - DNA, 25 bp, Homo sapien
tgaatcagaatctccgctacactcc

SEQ ID NO: 2172216 - DNA, 25 bp, Homo sapien
tatcaagtttagatctccatcctgg

SEQ ID NO: 2172217 - DNA, 25 bp, Homo sapien
taattcaccactgaacagtatcaag

SEQ ID NO: 2172218 - DNA, 25 bp, Homo sapien
tctccgctacactccgagttgtgga

SEQ ID NO: 2172219 - DNA, 25 bp, Homo sapien
ccccaacctggaggtgatttgtcac

SEQ ID NO: 2172220 - DNA, 25 bp, Homo sapien
gatttgtcacccaactatctctggg

SEQ ID NO: 2172221 - DNA, 25 bp, Homo sapien
gcaaagaccctcagcctgattcagg

SEQ ID NO: 2172222 - DNA, 25 bp, Homo sapien
cagcagttggtgacgtgagctttgc

SEQ ID NO: 2172223 - DNA, 25 bp, Homo sapien
ggctgcccttgcttctggacggtgt

SEQ ID NO: 2172224 - DNA, 25 bp, Homo sapien
cagaggctgcccttgcttctggacg

SEQ ID NO: 2172225 - DNA, 25 bp, Homo sapien
tgcccttgcttctggacggtgttca

SEQ ID NO: 2172226 - DNA, 25 bp, Homo sapien
gaggctgcccttgcttctggacggt

SEQ ID NO: 2172227 - DNA, 25 bp, Homo sapien
agcacagtgggaatccccaatgctg

SEQ ID NO: 2172228 - DNA, 25 bp, Homo sapien
cagcacagtgggaatccccaatgct

SEQ ID NO: 2172229 - DNA, 25 bp, Homo sapien
actcacctaatacagagcaggccac

SEQ ID NO: 2172230 - DNA, 25 bp, Homo sapien
gcacactctccaagttgccctcaca

SEQ ID NO: 2172231 - DNA, 25 bp, Homo sapien
tttcctgaacactcacctaatacag

SEQ ID NO: 2172232 - DNA, 25 bp, Homo sapien
gttgccctcacaccagttactgcat

SEQ ID NO: 2172233 - DNA, 25 bp, Homo sapien
ctgcgaggcaccactcagcacatgc

SEQ ID NO: 2172234 - DNA, 25 bp, Homo sapien
accacagtgctttataaatggggtg

SEQ ID NO: 2172235 - DNA, 25 bp, Homo sapien
tgctttataaatggggtggagctgc

SEQ ID NO: 2172236 - DNA, 25 bp, Homo sapien
gcgaggcaccactcagcacatgccc

SEQ ID NO: 2172237 - DNA, 25 bp, Homo sapien
gcctgtgaacttcccgagggcagtg

SEQ ID NO: 2172238 - DNA, 25 bp, Homo sapien
ccagcttccacataagcctgtgaac

SEQ ID NO: 2172239 - DNA, 25 bp, Homo sapien
cagcttccacataagcctgtgaact

SEQ ID NO: 2172240 - DNA, 25 bp, Homo sapien
aaggcagtcagcctgctcttgggat

SEQ ID NO: 2172241 - DNA, 25 bp, Homo sapien
aggcagtcagcctgctcttgggata

SEQ ID NO: 2172242 - DNA, 25 bp, Homo sapien
agcagtgtctgtccgttcttgcagc

SEQ ID NO: 2172243 - DNA, 25 bp, Homo sapien
cctttcctagaatggagcgtgcagc

SEQ ID NO: 2172244 - DNA, 25 bp, Homo sapien
ctagaatggagcgtgcagcctggaa

SEQ ID NO: 2172245 - DNA, 25 bp, Homo sapien
ttcctagaatggagcgtgcagcctg

SEQ ID NO: 2172246 - DNA, 25 bp, Homo sapien
tagaatggagcgtgcagcctggaac

SEQ ID NO: 2172247 - DNA, 25 bp, Homo sapien
accccatttgcaactccagatggta

SEQ ID NO: 2172248 - DNA, 25 bp, Homo sapien
cccggatgctggagcgtgaggcctg

SEQ ID NO: 2172249 - DNA, 25 bp, Homo sapien
ctgggtgtcaggaagtgcttgggtg

SEQ ID NO: 2172250 - DNA, 25 bp, Homo sapien
actccagatggtacaccgatagccc

SEQ ID NO: 2172251 - DNA, 25 bp, Homo sapien
gcaacagatggcactttctgaactc

SEQ ID NO: 2172252 - DNA, 25 bp, Homo sapien
cccagaaaggtggacgagggtggca

SEQ ID NO: 2172253 - DNA, 25 bp, Homo sapien
agcagggtatccatgcaacagatgg

SEQ ID NO: 2172254 - DNA, 25 bp, Homo sapien
aataaagacccatccaactgttctg

SEQ ID NO: 2172255 - DNA, 25 bp, Homo sapien
gcctcagggcctcactctccaaggt

SEQ ID NO: 2172256 - DNA, 25 bp, Homo sapien
agggcctcactctccaaggtccagc

SEQ ID NO: 2172257 - DNA, 25 bp, Homo sapien
gtctcgcctcagggcctcactctcc

SEQ ID NO: 2172258 - DNA, 25 bp, Homo sapien
tcagggcctcactctccaaggtcca

SEQ ID NO: 2172259 - DNA, 25 bp, Homo sapien
cttgtccttcccctgtgacagagac

SEQ ID NO: 2172260 - DNA, 25 bp, Homo sapien
ttcccctgtgacagagactcccaag

SEQ ID NO: 2172261 - DNA, 25 bp, Homo sapien
cagacacaggtgcagatgcagatgc

SEQ ID NO: 2172262 - DNA, 25 bp, Homo sapien
gtgcagatgcagatgcaggccagga

SEQ ID NO: 2172263 - DNA, 25 bp, Homo sapien
ggcaggtgaaggttctagaccttgg

SEQ ID NO: 2172264 - DNA, 25 bp, Homo sapien
aggcaggtgaaggttctagaccttg

SEQ ID NO: 2172265 - DNA, 25 bp, Homo sapien
caggtgaaggttctagaccttggcc

SEQ ID NO: 2172266 - DNA, 25 bp, Homo sapien
ctggggcagaccagtggcaatcgat

SEQ ID NO: 2172267 - DNA, 25 bp, Homo sapien
tggggcagaccagtggcaatcgatc

SEQ ID NO: 2172268 - DNA, 25 bp, Homo sapien
ctggtgaagaggagccaggggctgg

SEQ ID NO: 2172269 - DNA, 25 bp, Homo sapien
aggagccaggggctggagccctgtc

SEQ ID NO: 2172270 - DNA, 25 bp, Homo sapien
gagccaggggctggagccctgtccc

SEQ ID NO: 2172271 - DNA, 25 bp, Homo sapien
gccaggggctggagccctgtcccag

SEQ ID NO: 2172272 - DNA, 25 bp, Homo sapien
ctgctacactgtcctggcatagctg

SEQ ID NO: 2172273 - DNA, 25 bp, Homo sapien
gtcctggcatagctgcttcaatcct

SEQ ID NO: 2172274 - DNA, 25 bp, Homo sapien
gatgcacttatgtgtgccgccagga

SEQ ID NO: 2172275 - DNA, 25 bp, Homo sapien
gcaagatgcacttatgtgtgccgcc

SEQ ID NO: 2172276 - DNA, 25 bp, Homo sapien
aagatgcacttatgtgtgccgccag

SEQ ID NO: 2172277 - DNA, 25 bp, Homo sapien
ccgcaagatgcacttatgtgtgccg

SEQ ID NO: 2172278 - DNA, 25 bp, Homo sapien
attgtcagatggcacgagcactgcc

SEQ ID NO: 2172279 - DNA, 25 bp, Homo sapien
aattgtcagatggcacgagcactgc

SEQ ID NO: 2172280 - DNA, 25 bp, Homo sapien
aagtcagagggcgggtccagcttaa

SEQ ID NO: 2172281 - DNA, 25 bp, Homo sapien
ctgcaagtcagagggcgggtccagc

SEQ ID NO: 2172282 - DNA, 25 bp, Homo sapien
tgcaagtcagagggcgggtccagct

SEQ ID NO: 2172283 - DNA, 25 bp, Homo sapien
caagtcagagggcgggtccagctta

SEQ ID NO: 2172284 - DNA, 25 bp, Homo sapien
ccaggtcaggatgcagtggccagaa

SEQ ID NO: 2172285 - DNA, 25 bp, Homo sapien
cattggctccaaggcaggactgatg

SEQ ID NO: 2172286 - DNA, 25 bp, Homo sapien
tgagaagtgtggtcattggctccaa

SEQ ID NO: 2172287 - DNA, 25 bp, Homo sapien
tgcagtggccagaactgatgttgct

SEQ ID NO: 2172288 - DNA, 25 bp, Homo sapien
cctgtataacgctcctcctctacca

SEQ ID NO: 2172289 - DNA, 25 bp, Homo sapien
ggcctgtataacgctcctcctctac

SEQ ID NO: 2172290 - DNA, 25 bp, Homo sapien
gcctgtataacgctcctcctctacc

SEQ ID NO: 2172291 - DNA, 25 bp, Homo sapien
tctctggggagcctggaagcacaca

SEQ ID NO: 2172292 - DNA, 25 bp, Homo sapien
cttgtctctggggagcctggaagca

SEQ ID NO: 2172293 - DNA, 25 bp, Homo sapien
gggagcctggaagcacacaggctgg

SEQ ID NO: 2172294 - DNA, 25 bp, Homo sapien
tggggagcctggaagcacacaggct

SEQ ID NO: 2172295 - DNA, 25 bp, Homo sapien
caaggtgggtcataaagtccctggg

SEQ ID NO: 2172296 - DNA, 25 bp, Homo sapien
ggtgggtcataaagtccctgggcca

SEQ ID NO: 2172297 - DNA, 25 bp, Homo sapien
gggtcataaagtccctgggccatct

SEQ ID NO: 2172298 - DNA, 25 bp, Homo sapien
tcataaagtccctgggccatctcag

SEQ ID NO: 2172299 - DNA, 25 bp, Homo sapien
caaaggtgcgccctttagtgccctg

SEQ ID NO: 2172300 - DNA, 25 bp, Homo sapien
cttgtgtgaaccacactcctgggcc

SEQ ID NO: 2172301 - DNA, 25 bp, Homo sapien
ctttagtgccctgggccaaagtgga

SEQ ID NO: 2172302 - DNA, 25 bp, Homo sapien
gctgaaggaccttgtgatgggcctt

SEQ ID NO: 2172303 - DNA, 25 bp, Homo sapien
tgggcgacagcttgaacaggaggta

SEQ ID NO: 2172304 - DNA, 25 bp, Homo sapien
gcgacagcttgaacaggaggtaggt

SEQ ID NO: 2172305 - DNA, 25 bp, Homo sapien
ggcgacagcttgaacaggaggtagg

SEQ ID NO: 2172306 - DNA, 25 bp, Homo sapien
ctgggcgacagcttgaacaggaggt

SEQ ID NO: 2172307 - DNA, 25 bp, Homo sapien
gagggcacgttctggtagaagattc

SEQ ID NO: 2172308 - DNA, 25 bp, Homo sapien
cacgttctggtagaagattctcttc

SEQ ID NO: 2172309 - DNA, 25 bp, Homo sapien
ctggaagaacatcgctggagagggc

SEQ ID NO: 2172310 - DNA, 25 bp, Homo sapien
agaacatcgctggagagggcacgtt

SEQ ID NO: 2172311 - DNA, 25 bp, Homo sapien
gacagacaccttcgcagaaggagga

SEQ ID NO: 2172312 - DNA, 25 bp, Homo sapien
cagacaccttcgcagaaggaggagg

SEQ ID NO: 2172313 - DNA, 25 bp, Homo sapien
agacaccttcgcagaaggaggaggt

SEQ ID NO: 2172314 - DNA, 25 bp, Homo sapien
aggacagacaccttcgcagaaggag

SEQ ID NO: 2172315 - DNA, 25 bp, Homo sapien
tcaacagcacaccggccccgtgggc

SEQ ID NO: 2172316 - DNA, 25 bp, Homo sapien
caacagcacaccggccccgtgggcc

SEQ ID NO: 2172317 - DNA, 25 bp, Homo sapien
ctctgagctcaggttccccgggagc

SEQ ID NO: 2172318 - DNA, 25 bp, Homo sapien
ctgagctcaggttccccgggagcct

SEQ ID NO: 2172319 - DNA, 25 bp, Homo sapien
tgagctcaggttccccgggagcctg

SEQ ID NO: 2172320 - DNA, 25 bp, Homo sapien
tctgagctcaggttccccgggagcc

SEQ ID NO: 2172321 - DNA, 25 bp, Homo sapien
catagcagcccaaggcacagtagtt

SEQ ID NO: 2172322 - DNA, 25 bp, Homo sapien
atagcagcccaaggcacagtagttg

SEQ ID NO: 2172323 - DNA, 25 bp, Homo sapien
tgggggagccggcctagtcagggac

SEQ ID NO: 2172324 - DNA, 25 bp, Homo sapien
gcagcccaaggcacagtagttgttg

SEQ ID NO: 2172325 - DNA, 25 bp, Homo sapien
cttctcaggaggttcagtctcagac

SEQ ID NO: 2172326 - DNA, 25 bp, Homo sapien
cagacaagggctccagaaacttcag

SEQ ID NO: 2172327 - DNA, 25 bp, Homo sapien
catgatgcatctggcgagtcaggga

SEQ ID NO: 2172328 - DNA, 25 bp, Homo sapien
aaatggacatgatgcatctggcgag

SEQ ID NO: 2172329 - DNA, 25 bp, Homo sapien
tctcagagaggtcagggataaagaa

SEQ ID NO: 2172330 - DNA, 25 bp, Homo sapien
atgagggcagaacagctgagagacc

SEQ ID NO: 2172331 - DNA, 25 bp, Homo sapien
gggtatgagggcagaacagctgaga

SEQ ID NO: 2172332 - DNA, 25 bp, Homo sapien
ttaagggtatgagggcagaacagct

SEQ ID NO: 2172333 - DNA, 25 bp, Homo sapien
ctttaagggtatgagggcagaacag

SEQ ID NO: 2172334 - DNA, 25 bp, Homo sapien
ctgtgtccactgggcccaggctggc

SEQ ID NO: 2172335 - DNA, 25 bp, Homo sapien
tgtgtccactgggcccaggctggcc

SEQ ID NO: 2172336 - DNA, 25 bp, Homo sapien
ctctagaaaggtgcctcagtaaggc

SEQ ID NO: 2172337 - DNA, 25 bp, Homo sapien
tgctatctctagagcccggaaagcc

SEQ ID NO: 2172338 - DNA, 25 bp, Homo sapien
gagcctacaccatgctatctctaga

SEQ ID NO: 2172339 - DNA, 25 bp, Homo sapien
ggaacagccatcaagccccttttaa

SEQ ID NO: 2172340 - DNA, 25 bp, Homo sapien
gactgtctggaagctccaggctcag

SEQ ID NO: 2172341 - DNA, 25 bp, Homo sapien
ctgactgtctggaagctccaggctc

SEQ ID NO: 2172342 - DNA, 25 bp, Homo sapien
cagcactgactgtctggaagctcca

SEQ ID NO: 2172343 - DNA, 25 bp, Homo sapien
gcactgactgtctggaagctccagg

SEQ ID NO: 2172344 - DNA, 25 bp, Homo sapien
gctcctccacaagcccaccccatga

SEQ ID NO: 2172345 - DNA, 25 bp, Homo sapien
gtggttctaagctaaccattttgtg

SEQ ID NO: 2172346 - DNA, 25 bp, Homo sapien
ttctaagctaaccattttgtggcac

SEQ ID NO: 2172347 - DNA, 25 bp, Homo sapien
gtgagacaacaaatctctgtggttc

SEQ ID NO: 2172348 - DNA, 25 bp, Homo sapien
gggcagtaatttccagctgttacca

SEQ ID NO: 2172349 - DNA, 25 bp, Homo sapien
gaaaggggcagtaatttccagctgt

SEQ ID NO: 2172350 - DNA, 25 bp, Homo sapien
ccatgagaacggcaaactcacttgg

SEQ ID NO: 2172351 - DNA, 25 bp, Homo sapien
ggcaaactcacttggcaccagtggg

SEQ ID NO: 2172352 - DNA, 25 bp, Homo sapien
aaagatacattctggggcctgcctc

SEQ ID NO: 2172353 - DNA, 25 bp, Homo sapien
tcccactctctggatgctaaagata

SEQ ID NO: 2172354 - DNA, 25 bp, Homo sapien
cactctctggatgctaaagatacat

SEQ ID NO: 2172355 - DNA, 25 bp, Homo sapien
tctgctgaggctccccacaaaaccc

SEQ ID NO: 2172356 - DNA, 25 bp, Homo sapien
agagatgccctcgtgaggtcgggga

SEQ ID NO: 2172357 - DNA, 25 bp, Homo sapien
agatgccctcgtgaggtcggggacc

SEQ ID NO: 2172358 - DNA, 25 bp, Homo sapien
gagatgccctcgtgaggtcggggac

SEQ ID NO: 2172359 - DNA, 25 bp, Homo sapien
cagagatgccctcgtgaggtcgggg

SEQ ID NO: 2172360 - DNA, 25 bp, Homo sapien
acgtccgcgatgaggacatctctgg

SEQ ID NO: 2172361 - DNA, 25 bp, Homo sapien
cacgtccgcgatgaggacatctctg

SEQ ID NO: 2172362 - DNA, 25 bp, Homo sapien
gccacgtccgcgatgaggacatctc

SEQ ID NO: 2172363 - DNA, 25 bp, Homo sapien
tggggctgcatctccgggacacctg

SEQ ID NO: 2172364 - DNA, 25 bp, Homo sapien
caggaggggccatggcttcgagaca

SEQ ID NO: 2172365 - DNA, 25 bp, Homo sapien
ccaggaggggccatggcttcgagac

SEQ ID NO: 2172366 - DNA, 25 bp, Homo sapien
aggaggggccatggcttcgagacac

SEQ ID NO: 2172367 - DNA, 25 bp, Homo sapien
cagtagaactgcgtctgatccgtac

SEQ ID NO: 2172368 - DNA, 25 bp, Homo sapien
ctgatccgtacagcggcatccctgg

SEQ ID NO: 2172369 - DNA, 25 bp, Homo sapien
ccggagcgccacagtagaactgcgt

SEQ ID NO: 2172370 - DNA, 25 bp, Homo sapien
aggactgtgaggacggagttttctc

SEQ ID NO: 2172371 - DNA, 25 bp, Homo sapien
tccacggctgccattagggggcccg

SEQ ID NO: 2172372 - DNA, 25 bp, Homo sapien
cggctgccattagggggcccggcca

SEQ ID NO: 2172373 - DNA, 25 bp, Homo sapien
ctccacggctgccattagggggccc

SEQ ID NO: 2172374 - DNA, 25 bp, Homo sapien
gctgccattagggggcccggccaaa

SEQ ID NO: 2172375 - DNA, 25 bp, Homo sapien
aaaatcacggcatggaaaaatccaa

SEQ ID NO: 2172376 - DNA, 25 bp, Homo sapien
agggccacactccacgtgcagagca

SEQ ID NO: 2172377 - DNA, 25 bp, Homo sapien
gcctcagcattcaccgggcacgagc

SEQ ID NO: 2172378 - DNA, 25 bp, Homo sapien
aaggcagaggcgtgactggggttca

SEQ ID NO: 2172379 - DNA, 25 bp, Homo sapien
ttcaccgggcacgagcgagcctgtg

SEQ ID NO: 2172380 - DNA, 25 bp, Homo sapien
tccagggggcctctacaaggataat

SEQ ID NO: 2172381 - DNA, 25 bp, Homo sapien
atccagggggcctctacaaggataa

SEQ ID NO: 2172382 - DNA, 25 bp, Homo sapien
ccatggagaagatcacagaggctgg

SEQ ID NO: 2172383 - DNA, 25 bp, Homo sapien
ctgccatggagaagatcacagaggc

SEQ ID NO: 2172384 - DNA, 25 bp, Homo sapien
tcctgcttctaacagcagagctgcc

SEQ ID NO: 2172385 - DNA, 25 bp, Homo sapien
tgcacacctcctgcttctaacagca

SEQ ID NO: 2172386 - DNA, 25 bp, Homo sapien
aggagaccttctctccaatggcctg

SEQ ID NO: 2172387 - DNA, 25 bp, Homo sapien
tgggccaaggagaccttctctccaa

SEQ ID NO: 2172388 - DNA, 25 bp, Homo sapien
gcccttgatcttctcaatcttggcc

SEQ ID NO: 2172389 - DNA, 25 bp, Homo sapien
tcaatcttggcctgggccaaggaga

SEQ ID NO: 2172390 - DNA, 25 bp, Homo sapien
aatggagggactgcccagtagcctc

SEQ ID NO: 2172391 - DNA, 25 bp, Homo sapien
agttggaagcctgggcgagaagaaa

SEQ ID NO: 2172392 - DNA, 25 bp, Homo sapien
gaaatggagggactgcccagtagcc

SEQ ID NO: 2172393 - DNA, 25 bp, Homo sapien
aggctcagagggctaggattgcttg

SEQ ID NO: 2172394 - DNA, 25 bp, Homo sapien
cagggcccgctcgtccagggggcgg

SEQ ID NO: 2172395 - DNA, 25 bp, Homo sapien
ggagccatattcctgcaggcgctct

SEQ ID NO: 2172396 - DNA, 25 bp, Homo sapien
agggtcctgggcgcccgtgaagatg

SEQ ID NO: 2172397 - DNA, 25 bp, Homo sapien
cggtgcttgctctggatcctgtggc

SEQ ID NO: 2172398 - DNA, 25 bp, Homo sapien
ttggtgctcacgcacacaggaaagt

SEQ ID NO: 2172399 - DNA, 25 bp, Homo sapien
agtccctcttctgcatcgtcctcgg

SEQ ID NO: 2172400 - DNA, 25 bp, Homo sapien
tggtgctcacgcacacaggaaagtc

SEQ ID NO: 2172401 - DNA, 25 bp, Homo sapien
aaggagctgacagagctgatgttgc

SEQ ID NO: 2172402 - DNA, 25 bp, Homo sapien
ctgggtccccactaagccaggccgg

SEQ ID NO: 2172403 - DNA, 25 bp, Homo sapien
gccctgggtccccactaagccaggc

SEQ ID NO: 2172404 - DNA, 25 bp, Homo sapien
tgccctgggtccccactaagccagg

SEQ ID NO: 2172405 - DNA, 25 bp, Homo sapien
ggggtcaggcaagctgacacccgct

SEQ ID NO: 2172406 - DNA, 25 bp, Homo sapien
tgagcccatgttcctctcccacatc

SEQ ID NO: 2172407 - DNA, 25 bp, Homo sapien
gtcaggcaagctgacacccgctgtc

SEQ ID NO: 2172408 - DNA, 25 bp, Homo sapien
acatgggggtcaggcaagctgacac

SEQ ID NO: 2172409 - DNA, 25 bp, Homo sapien
gatggacaagggggcatcaaacagc

SEQ ID NO: 2172410 - DNA, 25 bp, Homo sapien
atggacaagggggcatcaaacagct

SEQ ID NO: 2172411 - DNA, 25 bp, Homo sapien
tggacaagggggcatcaaacagctt

SEQ ID NO: 2172412 - DNA, 25 bp, Homo sapien
tgatggacaagggggcatcaaacag

SEQ ID NO: 2172413 - DNA, 25 bp, Homo sapien
ggctcggctacctcagtgtggaagg

SEQ ID NO: 2172414 - DNA, 25 bp, Homo sapien
gtggtgttagtaccccatcttgtag

SEQ ID NO: 2172415 - DNA, 25 bp, Homo sapien
ctacaggggccgcggttgagggtgg

SEQ ID NO: 2172416 - DNA, 25 bp, Homo sapien
ggtggtgttagtaccccatcttgta

SEQ ID NO: 2172417 - DNA, 25 bp, Homo sapien
ctgaaggagacgcgctgctgctgcc

SEQ ID NO: 2172418 - DNA, 25 bp, Homo sapien
tgctgctgccgtcgtcctgcctggc

SEQ ID NO: 2172419 - DNA, 25 bp, Homo sapien
ccgtcgtcctgcctggcgccttggc

SEQ ID NO: 2172420 - DNA, 25 bp, Homo sapien
ctgccgtcgtcctgcctggcgcctt

SEQ ID NO: 2172421 - DNA, 25 bp, Homo sapien
gaagtccagagctctacagtttgaa

SEQ ID NO: 2172422 - DNA, 25 bp, Homo sapien
aatccacccgagtgcactgagcacg

SEQ ID NO: 2172423 - DNA, 25 bp, Homo sapien
cctctgccctagaagtgagaagtcc

SEQ ID NO: 2172424 - DNA, 25 bp, Homo sapien
tgagcacgccagaaatcaggtggcc

SEQ ID NO: 2172425 - DNA, 25 bp, Homo sapien
ctgtgtgcagatactccctgcttcc

SEQ ID NO: 2172426 - DNA, 25 bp, Homo sapien
gtgtgcagatactccctgcttcctc

SEQ ID NO: 2172427 - DNA, 25 bp, Homo sapien
tccctgcttcctctctagcccccac

SEQ ID NO: 2172428 - DNA, 25 bp, Homo sapien
actccctgcttcctctctagccccc

SEQ ID NO: 2172429 - DNA, 25 bp, Homo sapien
ctgcaaccacctgagcgcgggcatc

SEQ ID NO: 2172430 - DNA, 25 bp, Homo sapien
gaggccggacctttggagactgtgt

SEQ ID NO: 2172431 - DNA, 25 bp, Homo sapien
ctcaaacgaggagccccgcgctggg

SEQ ID NO: 2172432 - DNA, 25 bp, Homo sapien
ggggggcctgggcactgacttctgc

SEQ ID NO: 2172433 - DNA, 25 bp, Homo sapien
ggaagcttactgtgtccaagagcct

SEQ ID NO: 2172434 - DNA, 25 bp, Homo sapien
ggctggggaagcttactgtgtccaa

SEQ ID NO: 2172435 - DNA, 25 bp, Homo sapien
tggggaagcttactgtgtccaagag

SEQ ID NO: 2172436 - DNA, 25 bp, Homo sapien
gggaagcttactgtgtccaagagcc

SEQ ID NO: 2172437 - DNA, 25 bp, Homo sapien
ctggagccgggaggtggggaacagg

SEQ ID NO: 2172438 - DNA, 25 bp, Homo sapien
gaggtggggaacagggcaaggagga

SEQ ID NO: 2172439 - DNA, 25 bp, Homo sapien
gagccgggaggtggggaacagggca

SEQ ID NO: 2172440 - DNA, 25 bp, Homo sapien
ggcggatggactctagcagagtggc

SEQ ID NO: 2172441 - DNA, 25 bp, Homo sapien
tcttcttctccagctttcgctcctt

SEQ ID NO: 2172442 - DNA, 25 bp, Homo sapien
ttcttctccagctttcgctccttca

SEQ ID NO: 2172443 - DNA, 25 bp, Homo sapien
gcttcttcttctccagctttcgctc

SEQ ID NO: 2172444 - DNA, 25 bp, Homo sapien
cttcttcttctccagctttcgctcc

SEQ ID NO: 2172445 - DNA, 25 bp, Homo sapien
gctcaaaaccatagtgcccagggca

SEQ ID NO: 2172446 - DNA, 25 bp, Homo sapien
gcaaaagcagcgctgggtacaagct

SEQ ID NO: 2172447 - DNA, 25 bp, Homo sapien
tgaccattgccttggaccgctcttg

SEQ ID NO: 2172448 - DNA, 25 bp, Homo sapien
gtgtctgcgttcacagcaggcatca

SEQ ID NO: 2172449 - DNA, 25 bp, Homo sapien
tgaagagttcagtcacatgcgaccg

SEQ ID NO: 2172450 - DNA, 25 bp, Homo sapien
gaagagttcagtcacatgcgaccgg

SEQ ID NO: 2172451 - DNA, 25 bp, Homo sapien
gggtgaagagttcagtcacatgcga

SEQ ID NO: 2172452 - DNA, 25 bp, Homo sapien
agagttcagtcacatgcgaccggtg

SEQ ID NO: 2172453 - DNA, 25 bp, Homo sapien
ttgaagagatccgacatcaagtgcc

SEQ ID NO: 2172454 - DNA, 25 bp, Homo sapien
aagagatccgacatcaagtgcccac

SEQ ID NO: 2172455 - DNA, 25 bp, Homo sapien
tgttgaagagatccgacatcaagtg

SEQ ID NO: 2172456 - DNA, 25 bp, Homo sapien
tgaagagatccgacatcaagtgccc

SEQ ID NO: 2172457 - DNA, 25 bp, Homo sapien
cagcccccggagacttaaatacagg

SEQ ID NO: 2172458 - DNA, 25 bp, Homo sapien
ccagcccccggagacttaaatacag

SEQ ID NO: 2172459 - DNA, 25 bp, Homo sapien
cctgtggctgttgcggtgggggcac

SEQ ID NO: 2172460 - DNA, 25 bp, Homo sapien
tgacacgcgggcaaaggctcctccg

SEQ ID NO: 2172461 - DNA, 25 bp, Homo sapien
gcacaggagggatggagtctgacac

SEQ ID NO: 2172462 - DNA, 25 bp, Homo sapien
caggagggatggagtctgacacgcg

SEQ ID NO: 2172463 - DNA, 25 bp, Homo sapien
tggtctccacacagtgctggttccg

SEQ ID NO: 2172464 - DNA, 25 bp, Homo sapien
gtcagagcaacagcccaagtctggg

SEQ ID NO: 2172465 - DNA, 25 bp, Homo sapien
aaggtgtcatggagccccctaggat

SEQ ID NO: 2172466 - DNA, 25 bp, Homo sapien
gaagcaggtctgagcagcttgtcct

SEQ ID NO: 2172467 - DNA, 25 bp, Homo sapien
aagaacacagtggcgcaggctgggt

SEQ ID NO: 2172468 - DNA, 25 bp, Homo sapien
agttctttattgattggtgtgccgt

SEQ ID NO: 2172469 - DNA, 25 bp, Homo sapien
tattgattggtgtgccgttttctct

SEQ ID NO: 2172470 - DNA, 25 bp, Homo sapien
ctttattgattggtgtgccgttttc

SEQ ID NO: 2172471 - DNA, 25 bp, Homo sapien
ccccaacaccagcaattgtgccaag

SEQ ID NO: 2172472 - DNA, 25 bp, Homo sapien
ctctcaaccacttgagcaaactcca

SEQ ID NO: 2172473 - DNA, 25 bp, Homo sapien
cctccctctcaaccacttgagcaaa

SEQ ID NO: 2172474 - DNA, 25 bp, Homo sapien
accccaacaccagcaattgtgccaa

SEQ ID NO: 2172475 - DNA, 25 bp, Homo sapien
acagccttgcctggatttctatctc

SEQ ID NO: 2172476 - DNA, 25 bp, Homo sapien
ggatttctatctccctggcttggtg

SEQ ID NO: 2172477 - DNA, 25 bp, Homo sapien
cttggtgccagttcctccaagttga

SEQ ID NO: 2172478 - DNA, 25 bp, Homo sapien
gccagttcctccaagttgatggcac

SEQ ID NO: 2172479 - DNA, 25 bp, Homo sapien
gagtccagagtgttgccaggaccca

SEQ ID NO: 2172480 - DNA, 25 bp, Homo sapien
gtgtggagtccagagtgttgccagg

SEQ ID NO: 2172481 - DNA, 25 bp, Homo sapien
tggagtccagagtgttgccaggacc

SEQ ID NO: 2172482 - DNA, 25 bp, Homo sapien
gtccagagtgttgccaggacccagg

SEQ ID NO: 2172483 - DNA, 25 bp, Homo sapien
gagccctcgtggaggtcaaagccac

SEQ ID NO: 2172484 - DNA, 25 bp, Homo sapien
ctggagacggtgtttgtcatgggcc

SEQ ID NO: 2172485 - DNA, 25 bp, Homo sapien
ttctcactgccttttgtctgcccag

SEQ ID NO: 2172486 - DNA, 25 bp, Homo sapien
tgctgtgtggaagttcactcctgcc

SEQ ID NO: 2172487 - DNA, 25 bp, Homo sapien
tgcatgaaggctgtcaaccagtcca

SEQ ID NO: 2172488 - DNA, 25 bp, Homo sapien
tgtcaaccagtccataggcaagcct

SEQ ID NO: 2172489 - DNA, 25 bp, Homo sapien
agtccataggcaagcctggctgcct

SEQ ID NO: 2172490 - DNA, 25 bp, Homo sapien
tggagaacctgtgcatgaaggctgt

SEQ ID NO: 2172491 - DNA, 25 bp, Homo sapien
tggagaggcttcgatgcccctccac

SEQ ID NO: 2172492 - DNA, 25 bp, Homo sapien
tagggctctactgggccggcgtctc

SEQ ID NO: 2172493 - DNA, 25 bp, Homo sapien
ctagggctctactgggccggcgtct

SEQ ID NO: 2172494 - DNA, 25 bp, Homo sapien
gtctcctggagaggcttcgatgccc

SEQ ID NO: 2172495 - DNA, 25 bp, Homo sapien
tgactgctcagaccagccggctgga

SEQ ID NO: 2172496 - DNA, 25 bp, Homo sapien
tctgctgccatcggagcccaaagcc

SEQ ID NO: 2172497 - DNA, 25 bp, Homo sapien
actgctcagaccagccggctggagg

SEQ ID NO: 2172498 - DNA, 25 bp, Homo sapien
ctgtgactgctcagaccagccggct

SEQ ID NO: 2172499 - DNA, 25 bp, Homo sapien
tgctgtggtcttgatctgcaggtgt

SEQ ID NO: 2172500 - DNA, 25 bp, Homo sapien
ctgtgccagggtgcaagctgagcac

SEQ ID NO: 2172501 - DNA, 25 bp, Homo sapien
tgtgccagggtgcaagctgagcact

SEQ ID NO: 2172502 - DNA, 25 bp, Homo sapien
gtcttgatctgcaggtgtctgactt

SEQ ID NO: 2172503 - DNA, 25 bp, Homo sapien
tggaagctcagcaaagaacggatct

SEQ ID NO: 2172504 - DNA, 25 bp, Homo sapien
gaaaaagaagtatcctccagtgagc

SEQ ID NO: 2172505 - DNA, 25 bp, Homo sapien
gaacggatctatgcctgcacacagg

SEQ ID NO: 2172506 - DNA, 25 bp, Homo sapien
gagatgaggcctcccgatattgtcc

SEQ ID NO: 2172507 - DNA, 25 bp, Homo sapien
atccgtgcggcaccgcgaaggtacg

SEQ ID NO: 2172508 - DNA, 25 bp, Homo sapien
tgacaaaacattaaaacgagatggg

SEQ ID NO: 2172509 - DNA, 25 bp, Homo sapien
tgtcttccctgcaacgttctcgtgg

SEQ ID NO: 2172510 - DNA, 25 bp, Homo sapien
cgtgggtgccgtattgacaaaacat

SEQ ID NO: 2172511 - DNA, 25 bp, Homo sapien
tcagtcccggatgttggtgaagaca

SEQ ID NO: 2172512 - DNA, 25 bp, Homo sapien
agattatccccggacgttggcgaga

SEQ ID NO: 2172513 - DNA, 25 bp, Homo sapien
tctgcatgtttggtgaatgttgatg

SEQ ID NO: 2172514 - DNA, 25 bp, Homo sapien
aagacaaggtcattctggatgttga

SEQ ID NO: 2172515 - DNA, 25 bp, Homo sapien
ttcttcaaagtcagctcggttgtgg

SEQ ID NO: 2172516 - DNA, 25 bp, Homo sapien
cgtcgggttcacagcgggcaataaa

SEQ ID NO: 2172517 - DNA, 25 bp, Homo sapien
cattcccgcagcagcgtcgggttca

SEQ ID NO: 2172518 - DNA, 25 bp, Homo sapien
taaaggcagccgttcttcaaagtca

SEQ ID NO: 2172519 - DNA, 25 bp, Homo sapien
cccatgctcagtgccattggctcaa

SEQ ID NO: 2172520 - DNA, 25 bp, Homo sapien
aggcccctctggtgacgtgagccac

SEQ ID NO: 2172521 - DNA, 25 bp, Homo sapien
ccattggctcaaaggtgcagcagga

SEQ ID NO: 2172522 - DNA, 25 bp, Homo sapien
tctggtgacgtgagccacccgggca

SEQ ID NO: 2172523 - DNA, 25 bp, Homo sapien
ttcttccctgcgtggaaacaacagg

SEQ ID NO: 2172524 - DNA, 25 bp, Homo sapien
tctgtcgttggcttcaaggtcggcg

SEQ ID NO: 2172525 - DNA, 25 bp, Homo sapien
gcggcgtctgaaccgcctctaaggg

SEQ ID NO: 2172526 - DNA, 25 bp, Homo sapien
gaacgcccgtgtggatttgcagacg

SEQ ID NO: 2172527 - DNA, 25 bp, Homo sapien
gtaagactcagcttcggagacacaa

SEQ ID NO: 2172528 - DNA, 25 bp, Homo sapien
gactcagcttcggagacacaattct

SEQ ID NO: 2172529 - DNA, 25 bp, Homo sapien
tctcggcaaggacaggggaaaacag

SEQ ID NO: 2172530 - DNA, 25 bp, Homo sapien
ttctctggtaaaggggtaagactca

SEQ ID NO: 2172531 - DNA, 25 bp, Homo sapien
gagaccacagtccacatcacaccag

SEQ ID NO: 2172532 - DNA, 25 bp, Homo sapien
gaagggccgggcactgtgacctccg

SEQ ID NO: 2172533 - DNA, 25 bp, Homo sapien
gtccctcagcccacgtgatgtcctc

SEQ ID NO: 2172534 - DNA, 25 bp, Homo sapien
gaggcacggacgacacgtccctcag

SEQ ID NO: 2172535 - DNA, 25 bp, Homo sapien
gggaggagccacttccaccgacgga

SEQ ID NO: 2172536 - DNA, 25 bp, Homo sapien
gatcgcaggcgtgggctgcgctggg

SEQ ID NO: 2172537 - DNA, 25 bp, Homo sapien
tgcaggcttgggactgccggcccca

SEQ ID NO: 2172538 - DNA, 25 bp, Homo sapien
gtttgctggccaaggcgctcagagc

SEQ ID NO: 2172539 - DNA, 25 bp, Homo sapien
aaactacctgggtgcgtgatgggca

SEQ ID NO: 2172540 - DNA, 25 bp, Homo sapien
tccgagtccctggagaagatgacgc

SEQ ID NO: 2172541 - DNA, 25 bp, Homo sapien
gaacctgcagtacgttctggcgcac

SEQ ID NO: 2172542 - DNA, 25 bp, Homo sapien
ggttcacggtgcaccaacatcatcg

SEQ ID NO: 2172543 - DNA, 25 bp, Homo sapien
cctcaagaacgttatggagtccatg

SEQ ID NO: 2172544 - DNA, 25 bp, Homo sapien
tgctacggtgaaatgaaggtgcccc

SEQ ID NO: 2172545 - DNA, 25 bp, Homo sapien
caggccccgcggagatgaagaattt

SEQ ID NO: 2172546 - DNA, 25 bp, Homo sapien
gttcaagttcccagccagccaatgg

SEQ ID NO: 2172547 - DNA, 25 bp, Homo sapien
aatgcagccaagacacctctggcag

SEQ ID NO: 2172548 - DNA, 25 bp, Homo sapien
aatgttaattcaggaggccgggtgc

SEQ ID NO: 2172549 - DNA, 25 bp, Homo sapien
gatagcacgccagaagcatctttag

SEQ ID NO: 2172550 - DNA, 25 bp, Homo sapien
gcagctttcaggatagcacgccaga

SEQ ID NO: 2172551 - DNA, 25 bp, Homo sapien
cctgaccgacatggtgaaaatacaa

SEQ ID NO: 2172552 - DNA, 25 bp, Homo sapien
gacagagtgacactcattccgtcta

SEQ ID NO: 2172553 - DNA, 25 bp, Homo sapien
cagagtgacactcattccgtctaaa

SEQ ID NO: 2172554 - DNA, 25 bp, Homo sapien
agtgacactcattccgtctaaaaaa

SEQ ID NO: 2172555 - DNA, 25 bp, Homo sapien
tcatttccccgacaccaccatggga

SEQ ID NO: 2172556 - DNA, 25 bp, Homo sapien
cccgacaccaccatgggaaacgaga

SEQ ID NO: 2172557 - DNA, 25 bp, Homo sapien
ctacttttgtggaagggttctctgt

SEQ ID NO: 2172558 - DNA, 25 bp, Homo sapien
tgggaaacgagaccatctgtgaaca

SEQ ID NO: 2172559 - DNA, 25 bp, Homo sapien
gcaccgagggcccactggaattgtg

SEQ ID NO: 2172560 - DNA, 25 bp, Homo sapien
agacgggtgcagaaccagacaagga

SEQ ID NO: 2172561 - DNA, 25 bp, Homo sapien
tggaattgtgtggatgctcaggctt

SEQ ID NO: 2172562 - DNA, 25 bp, Homo sapien
gaaacattccgagggaaagcagttc

SEQ ID NO: 2172563 - DNA, 25 bp, Homo sapien
cccgcaggcctctgtgggcgtccgt

SEQ ID NO: 2172564 - DNA, 25 bp, Homo sapien
cccccaccccgcaggcctctgtggg

SEQ ID NO: 2172565 - DNA, 25 bp, Homo sapien
caccccgcaggcctctgtgggcgtc

SEQ ID NO: 2172566 - DNA, 25 bp, Homo sapien
gcccccaccccgcaggcctctgtgg

SEQ ID NO: 2172567 - DNA, 25 bp, Homo sapien
tcatcctggaaagagcttccggaat

SEQ ID NO: 2172568 - DNA, 25 bp, Homo sapien
gatgatgaccctcacgtcggccgcc

SEQ ID NO: 2172569 - DNA, 25 bp, Homo sapien
gcttccggaatttgccgtaggctga

SEQ ID NO: 2172570 - DNA, 25 bp, Homo sapien
tgccgtaggctgagttgctgatgat

SEQ ID NO: 2172571 - DNA, 25 bp, Homo sapien
aactgtggcctccttatacagccag

SEQ ID NO: 2172572 - DNA, 25 bp, Homo sapien
gaactgtggcctccttatacagcca

SEQ ID NO: 2172573 - DNA, 25 bp, Homo sapien
gagcttgctttcttattggtaggga

SEQ ID NO: 2172574 - DNA, 25 bp, Homo sapien
cacggcatccagctggagcttgctt

SEQ ID NO: 2172575 - DNA, 25 bp, Homo sapien
cctgtgccacggcatccagctggag

SEQ ID NO: 2172576 - DNA, 25 bp, Homo sapien
ggagcttgctttcttattggtaggg

SEQ ID NO: 2172577 - DNA, 25 bp, Homo sapien
gaaatgtacattttggctgtcaagc

SEQ ID NO: 2172578 - DNA, 25 bp, Homo sapien
tacattttggctgtcaagcacagat

SEQ ID NO: 2172579 - DNA, 25 bp, Homo sapien
cataattaggcacctgttgtatcca

SEQ ID NO: 2172580 - DNA, 25 bp, Homo sapien
tttcactgtcagcataattaggcac

SEQ ID NO: 2172581 - DNA, 25 bp, Homo sapien
gatgcaaacccattcatctcgtctg

SEQ ID NO: 2172582 - DNA, 25 bp, Homo sapien
tctcaagcgcagattaggcacctct

SEQ ID NO: 2172583 - DNA, 25 bp, Homo sapien
ttgtgcacccacgaagagcccgttt

SEQ ID NO: 2172584 - DNA, 25 bp, Homo sapien
gtcaagcacagattaggcacccgtt

SEQ ID NO: 2172585 - DNA, 25 bp, Homo sapien
cacacggagagtgaggatctgtctc

SEQ ID NO: 2172586 - DNA, 25 bp, Homo sapien
gcagacacgggcacgacgttcggtt

SEQ ID NO: 2172587 - DNA, 25 bp, Homo sapien
aaaccgccgcatcgagctcagcttt

SEQ ID NO: 2172588 - DNA, 25 bp, Homo sapien
atctgtctccccgtcgccttcaaaa

SEQ ID NO: 2172589 - DNA, 25 bp, Homo sapien
tgttgtgaacctccaccatggagtc

SEQ ID NO: 2172590 - DNA, 25 bp, Homo sapien
tgacgtccctcacgtgcaagatgag

SEQ ID NO: 2172591 - DNA, 25 bp, Homo sapien
ggacagaacgctgcatttctggagc

SEQ ID NO: 2172592 - DNA, 25 bp, Homo sapien
ggcacgaggtccaccttgttgtgaa

SEQ ID NO: 2172593 - DNA, 25 bp, Homo sapien
gcagcagctccgcacccccagaccc

SEQ ID NO: 2172594 - DNA, 25 bp, Homo sapien
cagacccacacgcaagggggtgcca

SEQ ID NO: 2172595 - DNA, 25 bp, Homo sapien
ccaaccttccaagccacaggcagca

SEQ ID NO: 2172596 - DNA, 25 bp, Homo sapien
acaggcagcagctccgcacccccag

SEQ ID NO: 2172597 - DNA, 25 bp, Homo sapien
gccgtagcctgaatgtgacaatctc

SEQ ID NO: 2172598 - DNA, 25 bp, Homo sapien
cataatttattgtcgggaggagtcg

SEQ ID NO: 2172599 - DNA, 25 bp, Homo sapien
cacttggaaagtctacggtacggat

SEQ ID NO: 2172600 - DNA, 25 bp, Homo sapien
gaattaagatctctgcggatgcagc

SEQ ID NO: 2172601 - DNA, 25 bp, Homo sapien
tcctatttctacacgggctcacggc

SEQ ID NO: 2172602 - DNA, 25 bp, Homo sapien
aggcagttgttgttccggccccgag

SEQ ID NO: 2172603 - DNA, 25 bp, Homo sapien
tcaggcacataagccgggagaggac

SEQ ID NO: 2172604 - DNA, 25 bp, Homo sapien
ggtgcacccgggaacacgcttatgt

SEQ ID NO: 2172605 - DNA, 25 bp, Homo sapien
atggtgtccacgtacaggacggtca

SEQ ID NO: 2172606 - DNA, 25 bp, Homo sapien
ccacgtcttccagggtggcggagaa

SEQ ID NO: 2172607 - DNA, 25 bp, Homo sapien
tcagtgccttgatcagcgtggtctt

SEQ ID NO: 2172608 - DNA, 25 bp, Homo sapien
ctggatggcggcatcgcccgtcagt

SEQ ID NO: 2172609 - DNA, 25 bp, Homo sapien
tcctgggtgagctctcacagcagct

SEQ ID NO: 2172610 - DNA, 25 bp, Homo sapien
gtagatgacatcctcaccttggctg

SEQ ID NO: 2172611 - DNA, 25 bp, Homo sapien
tgggacaaagccaccgtcgctgttc

SEQ ID NO: 2172612 - DNA, 25 bp, Homo sapien
tggatatagatacggcagtggtgcc

SEQ ID NO: 2172613 - DNA, 25 bp, Homo sapien
tgccctcccccgggcgagtcctcac

SEQ ID NO: 2172614 - DNA, 25 bp, Homo sapien
gcccctcccctgggcgcgtgctcac

SEQ ID NO: 2172615 - DNA, 25 bp, Homo sapien
gagatcacggggaactcccgcctcg

SEQ ID NO: 2172616 - DNA, 25 bp, Homo sapien
aggtgcctcttcttgcgaagcctgt

SEQ ID NO: 2172617 - DNA, 25 bp, Homo sapien
ctcttcttgcgaagcctgtccaagg

SEQ ID NO: 2172618 - DNA, 25 bp, Homo sapien
gcagttggtgtaccccaccacggag

SEQ ID NO: 2172619 - DNA, 25 bp, Homo sapien
acgggatctcgcctccgggtgtcca

SEQ ID NO: 2172620 - DNA, 25 bp, Homo sapien
gccccgacacgtcctgttccatgag

SEQ ID NO: 2172621 - DNA, 25 bp, Homo sapien
ccacgccgggaaaggcacaagtgcg

SEQ ID NO: 2172622 - DNA, 25 bp, Homo sapien
aagtgcgggcggtgccgcggagggt

SEQ ID NO: 2172623 - DNA, 25 bp, Homo sapien
ctgaccccatgatgtagcgcgagcc

SEQ ID NO: 2172624 - DNA, 25 bp, Homo sapien
ccgactcctcggtacaggtgggcga

SEQ ID NO: 2172625 - DNA, 25 bp, Homo sapien
tacaggtgggcgacgtcccttttca

SEQ ID NO: 2172626 - DNA, 25 bp, Homo sapien
atgatgtagcgcgagccgactcctc

SEQ ID NO: 2172627 - DNA, 25 bp, Homo sapien
acactgtgagtgacgcgtgtcccgg

SEQ ID NO: 2172628 - DNA, 25 bp, Homo sapien
gtgtgggaacgggagtggctcggtc

SEQ ID NO: 2172629 - DNA, 25 bp, Homo sapien
aggagccgctgttgcggccccgctc

SEQ ID NO: 2172630 - DNA, 25 bp, Homo sapien
tctgcggacgctgtctccctcccgg

SEQ ID NO: 2172631 - DNA, 25 bp, Homo sapien
tctgagtcataaaggcctcccgctc

SEQ ID NO: 2172632 - DNA, 25 bp, Homo sapien
ccgggagccgtgtcttctctaggaa

SEQ ID NO: 2172633 - DNA, 25 bp, Homo sapien
tctgctgtagccacgcagcagcgtc

SEQ ID NO: 2172634 - DNA, 25 bp, Homo sapien
tcttgccgggtgcgtggccttgtct

SEQ ID NO: 2172635 - DNA, 25 bp, Homo sapien
ctgacccttcgcagacccaggtggg

SEQ ID NO: 2172636 - DNA, 25 bp, Homo sapien
gggtcacgggaccaccctgtgcgtc

SEQ ID NO: 2172637 - DNA, 25 bp, Homo sapien
gggttgttcccatggtcaccacctg

SEQ ID NO: 2172638 - DNA, 25 bp, Homo sapien
tccttcacagcgacggctgccggtg

SEQ ID NO: 2172639 - DNA, 25 bp, Homo sapien
tgtgggaacccgtcccattcacgcg

SEQ ID NO: 2172640 - DNA, 25 bp, Homo sapien
gtttatcattccgtacaaacgcact

SEQ ID NO: 2172641 - DNA, 25 bp, Homo sapien
gttgtgcgcacacggaccctttcca

SEQ ID NO: 2172642 - DNA, 25 bp, Homo sapien
gcggcaatcaacacgcttctgtgaa

SEQ ID NO: 2172643 - DNA, 25 bp, Homo sapien
cccggtggtggcacgtggggagcgg

SEQ ID NO: 2172644 - DNA, 25 bp, Homo sapien
gccccgcggcggcgttctcgcgggc

SEQ ID NO: 2172645 - DNA, 25 bp, Homo sapien
tactcgtacaggtccacggcgccca

SEQ ID NO: 2172646 - DNA, 25 bp, Homo sapien
actcgtacaggtccacggcgcccag

SEQ ID NO: 2172647 - DNA, 25 bp, Homo sapien
gaggacgccggctccacgaatgctc

SEQ ID NO: 2172648 - DNA, 25 bp, Homo sapien
ggatggcgaagacgtggccagcagc

SEQ ID NO: 2172649 - DNA, 25 bp, Homo sapien
tggcgaagacgtggccagcagcgcg

SEQ ID NO: 2172650 - DNA, 25 bp, Homo sapien
cctggctgaggacgccggctccacg

SEQ ID NO: 2172651 - DNA, 25 bp, Homo sapien
tacaactgggtcgtggtgtccacac

SEQ ID NO: 2172652 - DNA, 25 bp, Homo sapien
cgagctgcacgggacctgtgtttac

SEQ ID NO: 2172653 - DNA, 25 bp, Homo sapien
ccccgggcgtgagctacacacagag

SEQ ID NO: 2172654 - DNA, 25 bp, Homo sapien
caggaccacagtttagacacattct

SEQ ID NO: 2172655 - DNA, 25 bp, Homo sapien
tggcactgagctccccgcggtcacc

SEQ ID NO: 2172656 - DNA, 25 bp, Homo sapien
tgaaggcagtcgaccccagcgtgct

SEQ ID NO: 2172657 - DNA, 25 bp, Homo sapien
ctggctgtgccgcagacacaaagcc

SEQ ID NO: 2172658 - DNA, 25 bp, Homo sapien
caaagccgggcagccgtgggggtgg

SEQ ID NO: 2172659 - DNA, 25 bp, Homo sapien
ggctgtgccgcagacacaaagccgg

SEQ ID NO: 2172660 - DNA, 25 bp, Homo sapien
gagcaggggttaaaatgcacgtcca

SEQ ID NO: 2172661 - DNA, 25 bp, Homo sapien
tgccttagggtgtccgacaggagaa

SEQ ID NO: 2172662 - DNA, 25 bp, Homo sapien
aaaatgcacgtccatggaacccatg

SEQ ID NO: 2172663 - DNA, 25 bp, Homo sapien
aacaatgaccacgaggaggacggac

SEQ ID NO: 2172664 - DNA, 25 bp, Homo sapien
gctgcgtgaggggagacgtccccca

SEQ ID NO: 2172665 - DNA, 25 bp, Homo sapien
tgcgtgaggggagacgtcccccagg

SEQ ID NO: 2172666 - DNA, 25 bp, Homo sapien
gcgtgaggggagacgtcccccagga

SEQ ID NO: 2172667 - DNA, 25 bp, Homo sapien
cgctgcgtgaggggagacgtccccc

SEQ ID NO: 2172668 - DNA, 25 bp, Homo sapien
ggaacggacagacgcgtgcagcagt

SEQ ID NO: 2172669 - DNA, 25 bp, Homo sapien
ggagcccgcacacggcacagtcacg

SEQ ID NO: 2172670 - DNA, 25 bp, Homo sapien
ctctgccgcgggaacggacagacgc

SEQ ID NO: 2172671 - DNA, 25 bp, Homo sapien
cgaggcaacgctgcggcctgcaaag

SEQ ID NO: 2172672 - DNA, 25 bp, Homo sapien
ggctctcccgcagtctcctcggcca

SEQ ID NO: 2172673 - DNA, 25 bp, Homo sapien
agggctctcccgcagtctcctcggc

SEQ ID NO: 2172674 - DNA, 25 bp, Homo sapien
gtcctcccagggctctcccgcagtc

SEQ ID NO: 2172675 - DNA, 25 bp, Homo sapien
tcccagggctctcccgcagtctcct

SEQ ID NO: 2172676 - DNA, 25 bp, Homo sapien
acttctcccagtccgagagctcggg

SEQ ID NO: 2172677 - DNA, 25 bp, Homo sapien
tgtcgtactcctcggccgcgtactt

SEQ ID NO: 2172678 - DNA, 25 bp, Homo sapien
caggatgtcgtactcctcggccgcg

SEQ ID NO: 2172679 - DNA, 25 bp, Homo sapien
gcgtacttctcccagtccgagagct

SEQ ID NO: 2172680 - DNA, 25 bp, Homo sapien
tttctgctcgtggtcgaggtacttc

SEQ ID NO: 2172681 - DNA, 25 bp, Homo sapien
tagccagcttgcagcgcttcaggtc

SEQ ID NO: 2172682 - DNA, 25 bp, Homo sapien
tgtcgaagaagacgttagccagctt

SEQ ID NO: 2172683 - DNA, 25 bp, Homo sapien
ggtcgaggtacttctcgatgttgaa

SEQ ID NO: 2172684 - DNA, 25 bp, Homo sapien
ttcagtcctcggcttgaccaggtcc

SEQ ID NO: 2172685 - DNA, 25 bp, Homo sapien
ccaggtccagcatctggcagaggca

SEQ ID NO: 2172686 - DNA, 25 bp, Homo sapien
tcggcactgctcctcgtagaagtac

SEQ ID NO: 2172687 - DNA, 25 bp, Homo sapien
tagaagtactcgagctcgaacatgg

SEQ ID NO: 2172688 - DNA, 25 bp, Homo sapien
aaccagacaaagtcggcatagctga

SEQ ID NO: 2172689 - DNA, 25 bp, Homo sapien
atcaaaaaccagacaaagtcggcat

SEQ ID NO: 2172690 - DNA, 25 bp, Homo sapien
gacaaagtcggcatagctgatcttc

SEQ ID NO: 2172691 - DNA, 25 bp, Homo sapien
gtcggcatagctgatcttcccttcc

SEQ ID NO: 2172692 - DNA, 25 bp, Homo sapien
ccaggatggagagacgaagatgcat

SEQ ID NO: 2172693 - DNA, 25 bp, Homo sapien
tcaggagtgcaccttcgttactgct

SEQ ID NO: 2172694 - DNA, 25 bp, Homo sapien
gacttcgcgtgacagtcttgtgcca

SEQ ID NO: 2172695 - DNA, 25 bp, Homo sapien
cactagggattcacgtgacagagac

SEQ ID NO: 2172696 - DNA, 25 bp, Homo sapien
cgtcaggcgcctgagccgtacgtac

SEQ ID NO: 2172697 - DNA, 25 bp, Homo sapien
gcaatggctgccgtcaggcgcctga

SEQ ID NO: 2172698 - DNA, 25 bp, Homo sapien
atggctgccgtcaggcgcctgagcc

SEQ ID NO: 2172699 - DNA, 25 bp, Homo sapien
tcctcgcaggggcaatggctgccgt

SEQ ID NO: 2172700 - DNA, 25 bp, Homo sapien
tgtgactgctcctgagaagatcctg

SEQ ID NO: 2172701 - DNA, 25 bp, Homo sapien
cgtgtgactgctcctgagaagatcc

SEQ ID NO: 2172702 - DNA, 25 bp, Homo sapien
gtgtgactgctcctgagaagatcct

SEQ ID NO: 2172703 - DNA, 25 bp, Homo sapien
aaaggaatgcggttgatgggcagcc

SEQ ID NO: 2172704 - DNA, 25 bp, Homo sapien
aaaagctgagaggacgcctgggtct

SEQ ID NO: 2172705 - DNA, 25 bp, Homo sapien
ggaccgaaaagctgagaggacgcct

SEQ ID NO: 2172706 - DNA, 25 bp, Homo sapien
gatgcccctgcacggcccatcctag

SEQ ID NO: 2172707 - DNA, 25 bp, Homo sapien
gagcagaatattcaggcctcaaagg

SEQ ID NO: 2172708 - DNA, 25 bp, Homo sapien
gctttcccgtcgagcagagccaagt

SEQ ID NO: 2172709 - DNA, 25 bp, Homo sapien
caagaccgacttgtaaagagcagaa

SEQ ID NO: 2172710 - DNA, 25 bp, Homo sapien
gaaatccacagagcgcaaagctgac

SEQ ID NO: 2172711 - DNA, 25 bp, Homo sapien
gtcagcttgggccacgagaaggtcc

SEQ ID NO: 2172712 - DNA, 25 bp, Homo sapien
ttcaggccgcagtgcgtgagaaaca

SEQ ID NO: 2172713 - DNA, 25 bp, Homo sapien
agtgcgtgagaaacagcgcagcccg

SEQ ID NO: 2172714 - DNA, 25 bp, Homo sapien
cggtgtccctgggacgcacgagcca

SEQ ID NO: 2172715 - DNA, 25 bp, Homo sapien
tcgtccgcgtcgatgagcaggtcgt

SEQ ID NO: 2172716 - DNA, 25 bp, Homo sapien
cagtagatgacgtagaaatgctcgt

SEQ ID NO: 2172717 - DNA, 25 bp, Homo sapien
tcgtacgagaagaattcggtcagct

SEQ ID NO: 2172718 - DNA, 25 bp, Homo sapien
ggtcagctggttgatgtccgcctcc

SEQ ID NO: 2172719 - DNA, 25 bp, Homo sapien
agcgcggggcctctgcggggatgcc

SEQ ID NO: 2172720 - DNA, 25 bp, Homo sapien
gcggggatgccccaagtccgcctgg

SEQ ID NO: 2172721 - DNA, 25 bp, Homo sapien
tgcggggatgccccaagtccgcctg

SEQ ID NO: 2172722 - DNA, 25 bp, Homo sapien
cgcagctcggcgcaggtgatcctgc

SEQ ID NO: 2172723 - DNA, 25 bp, Homo sapien
tgatcctgccggaccaggaccggtt

SEQ ID NO: 2172724 - DNA, 25 bp, Homo sapien
cggcgtagaagatccgctggatgac

SEQ ID NO: 2172725 - DNA, 25 bp, Homo sapien
caggaccggttcacggcgtagaaga

SEQ ID NO: 2172726 - DNA, 25 bp, Homo sapien
tcgccccgcacggagaccgggagcc

SEQ ID NO: 2172727 - DNA, 25 bp, Homo sapien
tctggccggggacgccccggagcta

SEQ ID NO: 2172728 - DNA, 25 bp, Homo sapien
agtgcggtgggtgcgcagagacccc

SEQ ID NO: 2172729 - DNA, 25 bp, Homo sapien
tgcgggggcgctgtcagtgcggtgg

SEQ ID NO: 2172730 - DNA, 25 bp, Homo sapien
cgcgccccgcgctggaaccgacggc

SEQ ID NO: 2172731 - DNA, 25 bp, Homo sapien
gcgccccgcgctggaaccgacggcc

SEQ ID NO: 2172732 - DNA, 25 bp, Homo sapien
cttcaggaacgacagccccgggtgc

SEQ ID NO: 2172733 - DNA, 25 bp, Homo sapien
gtgatgtagcgcgagtggaactcgg

SEQ ID NO: 2172734 - DNA, 25 bp, Homo sapien
gcgagtggaactcggacgcctcctt

SEQ ID NO: 2172735 - DNA, 25 bp, Homo sapien
agccccgggtgcgtgttcaccacgt

SEQ ID NO: 2172736 - DNA, 25 bp, Homo sapien
ctgcgggtgggaagacacgaggcgc

SEQ ID NO: 2172737 - DNA, 25 bp, Homo sapien
agacgccggccctcccgtgaggtgt

SEQ ID NO: 2172738 - DNA, 25 bp, Homo sapien
acacgaggcgcgtggtgtagacgcc

SEQ ID NO: 2172739 - DNA, 25 bp, Homo sapien
tcccgtgaggtgtgcggtgtggacg

SEQ ID NO: 2172740 - DNA, 25 bp, Homo sapien
caccaggtagttgcagccggggctc

SEQ ID NO: 2172741 - DNA, 25 bp, Homo sapien
gatggacgaacttggccgcgtcgtc

SEQ ID NO: 2172742 - DNA, 25 bp, Homo sapien
catgagcagatggacgaacttggcc

SEQ ID NO: 2172743 - DNA, 25 bp, Homo sapien
ttggccgcgtcgtcgtggcagttct

SEQ ID NO: 2172744 - DNA, 25 bp, Homo sapien
ggcgccatagaagagcggccccttc

SEQ ID NO: 2172745 - DNA, 25 bp, Homo sapien
tctccacatggcgacgaacttgtgg

SEQ ID NO: 2172746 - DNA, 25 bp, Homo sapien
aacttgtggacggacacggagcccg

SEQ ID NO: 2172747 - DNA, 25 bp, Homo sapien
ccttccagtagagggggcagccgca

SEQ ID NO: 2172748 - DNA, 25 bp, Homo sapien
agcagggcctggacgccggcgctcc

SEQ ID NO: 2172749 - DNA, 25 bp, Homo sapien
gcagggcctggacgccggcgctcct

SEQ ID NO: 2172750 - DNA, 25 bp, Homo sapien
cgctcagcgcggcctgtctgggcat

SEQ ID NO: 2172751 - DNA, 25 bp, Homo sapien
agcacgctcagcgcggcctgtctgg

SEQ ID NO: 2172752 - DNA, 25 bp, Homo sapien
gcgcctgaccgacgccgcccagaga

SEQ ID NO: 2172753 - DNA, 25 bp, Homo sapien
cacagcacgctcagcgcggcctgtc

SEQ ID NO: 2172754 - DNA, 25 bp, Homo sapien
gcactgtaaccagaggcggctgcat

SEQ ID NO: 2172755 - DNA, 25 bp, Homo sapien
tctggaaatcaagcggcacgtacta

SEQ ID NO: 2172756 - DNA, 25 bp, Homo sapien
tctcatggaatgtgtgggacgcacc

SEQ ID NO: 2172757 - DNA, 25 bp, Homo sapien
ggttcacagccttaaatacacgcgt

SEQ ID NO: 2172758 - DNA, 25 bp, Homo sapien
acgcagcgggaaggcgccgtcgatg

SEQ ID NO: 2172759 - DNA, 25 bp, Homo sapien
ctgccacaccgagatcttccagcct

SEQ ID NO: 2172760 - DNA, 25 bp, Homo sapien
ggcgccgtcgatgaaccaggcacca

SEQ ID NO: 2172761 - DNA, 25 bp, Homo sapien
cgtgaggacgcagcgggaaggcgcc

SEQ ID NO: 2172762 - DNA, 25 bp, Homo sapien
ggcagacaaagtcccgagcgtctac

SEQ ID NO: 2172763 - DNA, 25 bp, Homo sapien
aaggcccacgtgatggtgctgctga

SEQ ID NO: 2172764 - DNA, 25 bp, Homo sapien
gttcagcacgcgttcctcggcgggt

SEQ ID NO: 2172765 - DNA, 25 bp, Homo sapien
gagcgtctacagtcgcacagggcac

SEQ ID NO: 2172766 - DNA, 25 bp, Homo sapien
agggttctgccgccacagcgcaggt

SEQ ID NO: 2172767 - DNA, 25 bp, Homo sapien
ccacagcgcaggtggattaagtcgc

SEQ ID NO: 2172768 - DNA, 25 bp, Homo sapien
ggtggattaagtcgcgacagcgcac

SEQ ID NO: 2172769 - DNA, 25 bp, Homo sapien
cgcaggtggattaagtcgcgacagc

SEQ ID NO: 2172770 - DNA, 25 bp, Homo sapien
gggtgctcgagcaccatgctctccg

SEQ ID NO: 2172771 - DNA, 25 bp, Homo sapien
gcctgtggaggtgtctctcggactc

SEQ ID NO: 2172772 - DNA, 25 bp, Homo sapien
tgcagggccgggtcggtgcgtgcag

SEQ ID NO: 2172773 - DNA, 25 bp, Homo sapien
tctgcccacagtcacggtgggtgct

SEQ ID NO: 2172774 - DNA, 25 bp, Homo sapien
ctgtgcgtggaagcgaggtgacacc

SEQ ID NO: 2172775 - DNA, 25 bp, Homo sapien
accaaggccagtgccgctgtgcgtg

SEQ ID NO: 2172776 - DNA, 25 bp, Homo sapien
agcgaggtgacaccgagaactgagt

SEQ ID NO: 2172777 - DNA, 25 bp, Homo sapien
cttagacggccaccaaggccagtgc

SEQ ID NO: 2172778 - DNA, 25 bp, Homo sapien
atgtaccgtgcaccgaggctctggg

SEQ ID NO: 2172779 - DNA, 25 bp, Homo sapien
acatgtaccgtgcaccgaggctctg

SEQ ID NO: 2172780 - DNA, 25 bp, Homo sapien
gggctcacatgtaccgtgcaccgag

SEQ ID NO: 2172781 - DNA, 25 bp, Homo sapien
ggctcacatgtaccgtgcaccgagg

SEQ ID NO: 2172782 - DNA, 25 bp, Homo sapien
tggagggtaggaggctggagatgcg

SEQ ID NO: 2172783 - DNA, 25 bp, Homo sapien
agatgcgggcacaggtccctggaaa

SEQ ID NO: 2172784 - DNA, 25 bp, Homo sapien
ggtaggaggctggagatgcgggcac

SEQ ID NO: 2172785 - DNA, 25 bp, Homo sapien
gcacaggtccctggaaacacaacca

SEQ ID NO: 2172786 - DNA, 25 bp, Homo sapien
ccatctgtgggcgtccaggcggtca

SEQ ID NO: 2172787 - DNA, 25 bp, Homo sapien
cagacacgcatctctggtgtaggcc

SEQ ID NO: 2172788 - DNA, 25 bp, Homo sapien
gccttgccttggtaacggacagaca

SEQ ID NO: 2172789 - DNA, 25 bp, Homo sapien
taaactgagtgtgctccatctgtgg

SEQ ID NO: 2172790 - DNA, 25 bp, Homo sapien
tggccaccaggcccatgtcatccat

SEQ ID NO: 2172791 - DNA, 25 bp, Homo sapien
ttggccaccaggcccatgtcatcca

SEQ ID NO: 2172792 - DNA, 25 bp, Homo sapien
cttggccaccaggcccatgtcatcc

SEQ ID NO: 2172793 - DNA, 25 bp, Homo sapien
ctgatgacggcatccacgttgacgg

SEQ ID NO: 2172794 - DNA, 25 bp, Homo sapien
ggaaccgggcgaaggtgctctcgat

SEQ ID NO: 2172795 - DNA, 25 bp, Homo sapien
gggaaccgggcgaaggtgctctcga

SEQ ID NO: 2172796 - DNA, 25 bp, Homo sapien
atgacggcatccacgttgacggagt

SEQ ID NO: 2172797 - DNA, 25 bp, Homo sapien
agtagaaggtcggaatgctttggct

SEQ ID NO: 2172798 - DNA, 25 bp, Homo sapien
agaaggtcggaatgctttggctcgt

SEQ ID NO: 2172799 - DNA, 25 bp, Homo sapien
tcggaatgctttggctcgtggccgg

SEQ ID NO: 2172800 - DNA, 25 bp, Homo sapien
ggaagtagaaggtcggaatgctttg

SEQ ID NO: 2172801 - DNA, 25 bp, Homo sapien
tggcggctctgcgccactgagcccc

SEQ ID NO: 2172802 - DNA, 25 bp, Homo sapien
gaactgacggctacagccgactctc

SEQ ID NO: 2172803 - DNA, 25 bp, Homo sapien
aagaggaggcaaaacgcagggtcct

SEQ ID NO: 2172804 - DNA, 25 bp, Homo sapien
cagaacgcgtcaccttcagtgggaa

SEQ ID NO: 2172805 - DNA, 25 bp, Homo sapien
gaatgaaagtagcagccttcacctg

SEQ ID NO: 2172806 - DNA, 25 bp, Homo sapien
ggaccggacaccacgatcaaagcca

SEQ ID NO: 2172807 - DNA, 25 bp, Homo sapien
gcagcaggaccggacaccacgatca

SEQ ID NO: 2172808 - DNA, 25 bp, Homo sapien
gggccggcggaagggacgctcagta

SEQ ID NO: 2172809 - DNA, 25 bp, Homo sapien
ggacgctcagtacgggctgcaacgc

SEQ ID NO: 2172810 - DNA, 25 bp, Homo sapien
gccatgcgtggtgccgtgtagggtc

SEQ ID NO: 2172811 - DNA, 25 bp, Homo sapien
agttccaagtacagcggggctgccg

SEQ ID NO: 2172812 - DNA, 25 bp, Homo sapien
gacggcgctttcagccatgcgtggt

SEQ ID NO: 2172813 - DNA, 25 bp, Homo sapien
gggtctgtgcgtccacccgaaggac

SEQ ID NO: 2172814 - DNA, 25 bp, Homo sapien
tcacacgggagcctccccggaccca

SEQ ID NO: 2172815 - DNA, 25 bp, Homo sapien
ccacggcgtgaacgcatgctgttcc

SEQ ID NO: 2172816 - DNA, 25 bp, Homo sapien
tcgcacagtcagaagatcaagctca

SEQ ID NO: 2172817 - DNA, 25 bp, Homo sapien
atgctgttccgttcccaaggccggc

SEQ ID NO: 2172818 - DNA, 25 bp, Homo sapien
gtgtaacacgccatcgtcacacggg

SEQ ID NO: 2172819 - DNA, 25 bp, Homo sapien
cacgaagtcgcagccgcgggccagt

SEQ ID NO: 2172820 - DNA, 25 bp, Homo sapien
ttcagccgcttcttgaaccgagagg

SEQ ID NO: 2172821 - DNA, 25 bp, Homo sapien
ttcttgaaccgagagggcagcacga

SEQ ID NO: 2172822 - DNA, 25 bp, Homo sapien
ggtcctggcgcagcgagcgctcgcg

SEQ ID NO: 2172823 - DNA, 25 bp, Homo sapien
aggagacaggataccttcgggctga

SEQ ID NO: 2172824 - DNA, 25 bp, Homo sapien
tgctcactgtgataactgcgcttgt

SEQ ID NO: 2172825 - DNA, 25 bp, Homo sapien
cgggcaactttaaatgagggtgagc

SEQ ID NO: 2172826 - DNA, 25 bp, Homo sapien
gaatacagctaagctgcagtgggca

SEQ ID NO: 2172827 - DNA, 25 bp, Homo sapien
accaggagacgatttaaacaagtgc

SEQ ID NO: 2172828 - DNA, 25 bp, Homo sapien
agaggtgcggcccagtaacccatga

SEQ ID NO: 2172829 - DNA, 25 bp, Homo sapien
aacccatgatgtggggcacaaactc

SEQ ID NO: 2172830 - DNA, 25 bp, Homo sapien
accaccaggagacgatttaaacaag

SEQ ID NO: 2172831 - DNA, 25 bp, Homo sapien
ctggagccctcgaaccacctctgga

SEQ ID NO: 2172832 - DNA, 25 bp, Homo sapien
cttgcgtcctgtcccgatgcagaac

SEQ ID NO: 2172833 - DNA, 25 bp, Homo sapien
tcgaaccacctctggatgcagtccc

SEQ ID NO: 2172834 - DNA, 25 bp, Homo sapien
accacctctggatgcagtcccactg

SEQ ID NO: 2172835 - DNA, 25 bp, Homo sapien
gggccatccactaccgtgtacaggg

SEQ ID NO: 2172836 - DNA, 25 bp, Homo sapien
cagggctgtccacactcgacagagc

SEQ ID NO: 2172837 - DNA, 25 bp, Homo sapien
tatgcagggacgggccgtccacacc

SEQ ID NO: 2172838 - DNA, 25 bp, Homo sapien
cactaccgtgtacagggacgggccg

SEQ ID NO: 2172839 - DNA, 25 bp, Homo sapien
ctctgctgtcgggacacaatcttac

SEQ ID NO: 2172840 - DNA, 25 bp, Homo sapien
tcttaccatcaacctctaaaggctc

SEQ ID NO: 2172841 - DNA, 25 bp, Homo sapien
atctgggccgatgaagcccctcacg

SEQ ID NO: 2172842 - DNA, 25 bp, Homo sapien
caacattgccatctgggccgatgaa

SEQ ID NO: 2172843 - DNA, 25 bp, Homo sapien
caggaattccagagcactctaggta

SEQ ID NO: 2172844 - DNA, 25 bp, Homo sapien
atcaccttctatgaaataaatggcg

SEQ ID NO: 2172845 - DNA, 25 bp, Homo sapien
tctcacctgcggtgtataatcacct

SEQ ID NO: 2172846 - DNA, 25 bp, Homo sapien
tacaggtacattagccagaggctgc

SEQ ID NO: 2172847 - DNA, 25 bp, Homo sapien
gctgcagcactttgccgggcggcat

SEQ ID NO: 2172848 - DNA, 25 bp, Homo sapien
ttgatccggcgcaggcagtcctgca

SEQ ID NO: 2172849 - DNA, 25 bp, Homo sapien
cggatctacgggtgcctcgaacgtg

SEQ ID NO: 2172850 - DNA, 25 bp, Homo sapien
accttcatcttcaggaccggctgca

SEQ ID NO: 2172851 - DNA, 25 bp, Homo sapien
tgctcagggcagcttcaaaacgggc

SEQ ID NO: 2172852 - DNA, 25 bp, Homo sapien
cgacgatgtcatcacgaggcgacgc

SEQ ID NO: 2172853 - DNA, 25 bp, Homo sapien
ggaccgacctcggtgatgcgagcac

SEQ ID NO: 2172854 - DNA, 25 bp, Homo sapien
ccgagctctttctgcgtttaggatt

SEQ ID NO: 2172855 - DNA, 25 bp, Homo sapien
tggtttcagagcacaagtggtgttt

SEQ ID NO: 2172856 - DNA, 25 bp, Homo sapien
ctgtggtttcagagcacaagtggtg

SEQ ID NO: 2172857 - DNA, 25 bp, Homo sapien
tcagagcacaagtggtgttttatgg

SEQ ID NO: 2172858 - DNA, 25 bp, Homo sapien
tgcaccgtttttccgggtccaggca

SEQ ID NO: 2172859 - DNA, 25 bp, Homo sapien
ttgagaacgtttctgttgacttgcc

SEQ ID NO: 2172860 - DNA, 25 bp, Homo sapien
catttgtacctgtttgcacgcagca

SEQ ID NO: 2172861 - DNA, 25 bp, Homo sapien
tccgtggatgacgtgggaagctctc

SEQ ID NO: 2172862 - DNA, 25 bp, Homo sapien
cagttgttagtgagacggatgcctc

SEQ ID NO: 2172863 - DNA, 25 bp, Homo sapien
tcactcgatcgtgggcctgctgagt

SEQ ID NO: 2172864 - DNA, 25 bp, Homo sapien
tgtgcccgtcactcgatcgtgggcc

SEQ ID NO: 2172865 - DNA, 25 bp, Homo sapien
tgcccgtcactcgatcgtgggcctg

SEQ ID NO: 2172866 - DNA, 25 bp, Homo sapien
ccgtcactcgatcgtgggcctgctg

SEQ ID NO: 2172867 - DNA, 25 bp, Homo sapien
aggagcttgtcctcctgacttggag

SEQ ID NO: 2172868 - DNA, 25 bp, Homo sapien
gccgcgcaggagcttgtcctcctga

SEQ ID NO: 2172869 - DNA, 25 bp, Homo sapien
gagcggccacgcaggccgcgcagga

SEQ ID NO: 2172870 - DNA, 25 bp, Homo sapien
caggccgcgcaggagcttgtcctcc

SEQ ID NO: 2172871 - DNA, 25 bp, Homo sapien
cgtaaaggctggcaggtccttcctc

SEQ ID NO: 2172872 - DNA, 25 bp, Homo sapien
ccacctgcgtgctggggcggcaaag

SEQ ID NO: 2172873 - DNA, 25 bp, Homo sapien
gtgctggggcggcaaagcgtaaagg

SEQ ID NO: 2172874 - DNA, 25 bp, Homo sapien
ctggggcggcaaagcgtaaaggctg

SEQ ID NO: 2172875 - DNA, 25 bp, Homo sapien
ctgcaacggaataggtcggcccctg

SEQ ID NO: 2172876 - DNA, 25 bp, Homo sapien
tctctgggcaatgacggtgcaacct

SEQ ID NO: 2172877 - DNA, 25 bp, Homo sapien
tcggcccctgggaccacattgtgaa

SEQ ID NO: 2172878 - DNA, 25 bp, Homo sapien
ggtccccagcgcagacattgaacct

SEQ ID NO: 2172879 - DNA, 25 bp, Homo sapien
cgacggcgcccagagcgaccttcat

SEQ ID NO: 2172880 - DNA, 25 bp, Homo sapien
ccgacggcgcccagagcgaccttca

SEQ ID NO: 2172881 - DNA, 25 bp, Homo sapien
gacccgaggctgttgtccggtcgta

SEQ ID NO: 2172882 - DNA, 25 bp, Homo sapien
tgttggcggtgtagacgcgggtccc

SEQ ID NO: 2172883 - DNA, 25 bp, Homo sapien
gtcaccctgactcgtcaacctgcaa

SEQ ID NO: 2172884 - DNA, 25 bp, Homo sapien
aacctgcaaaaacggcccaggacag

SEQ ID NO: 2172885 - DNA, 25 bp, Homo sapien
ggctacttcggaactgacgtcgtga

SEQ ID NO: 2172886 - DNA, 25 bp, Homo sapien
gagtgagcaatggtctagcccagga

SEQ ID NO: 2172887 - DNA, 25 bp, Homo sapien
aacagaagctgtcgggagtgagcaa

SEQ ID NO: 2172888 - DNA, 25 bp, Homo sapien
cctttgctcgactgtgtttctgacg

SEQ ID NO: 2172889 - DNA, 25 bp, Homo sapien
ctgggtgctgcagggtgctaactct

SEQ ID NO: 2172890 - DNA, 25 bp, Homo sapien
gctaactctcttgatgaggccgtcc

SEQ ID NO: 2172891 - DNA, 25 bp, Homo sapien
ctgatgtttgggactggaggactct

SEQ ID NO: 2172892 - DNA, 25 bp, Homo sapien
ccgtcctgggtactgtagggtactg

SEQ ID NO: 2172893 - DNA, 25 bp, Homo sapien
caggctggagtgcggtggtgccatc

SEQ ID NO: 2172894 - DNA, 25 bp, Homo sapien
ttgagacaaagtcgtgctcttgtcg

SEQ ID NO: 2172895 - DNA, 25 bp, Homo sapien
gagacaaagtcgtgctcttgtcgcc

SEQ ID NO: 2172896 - DNA, 25 bp, Homo sapien
tgagacaaagtcgtgctcttgtcgc

SEQ ID NO: 2172897 - DNA, 25 bp, Homo sapien
gccgacctgggatgacaccttgggc

SEQ ID NO: 2172898 - DNA, 25 bp, Homo sapien
tgcttgagccgaaatgtcaccagct

SEQ ID NO: 2172899 - DNA, 25 bp, Homo sapien
tcccgttcaccggtcaagacgctga

SEQ ID NO: 2172900 - DNA, 25 bp, Homo sapien
tgaaactcgggagcttttggcggcc

SEQ ID NO: 2172901 - DNA, 25 bp, Homo sapien
attcagcaatctttgtattaattac

SEQ ID NO: 2172902 - DNA, 25 bp, Homo sapien
tataaaatcacagcgatcgtctgcc

SEQ ID NO: 2172903 - DNA, 25 bp, Homo sapien
ctccgcataggtacgctttgattgg

SEQ ID NO: 2172904 - DNA, 25 bp, Homo sapien
gccttaagataaatagatgagagtt

SEQ ID NO: 2172905 - DNA, 25 bp, Homo sapien
gattgggagcgctttcttataaaat

SEQ ID NO: 2172906 - DNA, 25 bp, Homo sapien
agcgccgtgagaggcacctgtgtct

SEQ ID NO: 2172907 - DNA, 25 bp, Homo sapien
agctgaggacggatgacatttgtac

SEQ ID NO: 2172908 - DNA, 25 bp, Homo sapien
gctgtcagcgccgtgagaggcacct

SEQ ID NO: 2172909 - DNA, 25 bp, Homo sapien
tgtgtctccccgagctgaggacgga

SEQ ID NO: 2172910 - DNA, 25 bp, Homo sapien
acaggtttgtatacggtcctgggag

SEQ ID NO: 2172911 - DNA, 25 bp, Homo sapien
tacaggtttgtatacggtcctggga

SEQ ID NO: 2172912 - DNA, 25 bp, Homo sapien
ctacaggtttgtatacggtcctggg

SEQ ID NO: 2172913 - DNA, 25 bp, Homo sapien
gcgtcaaagggcaaagcttccccat

SEQ ID NO: 2172914 - DNA, 25 bp, Homo sapien
caagggcgtcaaagggcaaagcttc

SEQ ID NO: 2172915 - DNA, 25 bp, Homo sapien
tcaggacagcacgatgatctcaagg

SEQ ID NO: 2172916 - DNA, 25 bp, Homo sapien
ggacagcacgatgatctcaagggcg

SEQ ID NO: 2172917 - DNA, 25 bp, Homo sapien
tgtacccaccatgggtcgaaggtgg

SEQ ID NO: 2172918 - DNA, 25 bp, Homo sapien
caaggcacacggagttcacattgta

SEQ ID NO: 2172919 - DNA, 25 bp, Homo sapien
ccaaggcacacggagttcacattgt

SEQ ID NO: 2172920 - DNA, 25 bp, Homo sapien
gtcgaaggtgggcgtctgattcctc

SEQ ID NO: 2172921 - DNA, 25 bp, Homo sapien
ctgctctgaagttttcctctcggtg

SEQ ID NO: 2172922 - DNA, 25 bp, Homo sapien
tctgaagttttcctctcggtggtac

SEQ ID NO: 2172923 - DNA, 25 bp, Homo sapien
tgctctgaagttttcctctcggtgg

SEQ ID NO: 2172924 - DNA, 25 bp, Homo sapien
gctctgaagttttcctctcggtggt

SEQ ID NO: 2172925 - DNA, 25 bp, Homo sapien
cttggattgtgcgtctccatccgat

SEQ ID NO: 2172926 - DNA, 25 bp, Homo sapien
cctcttggattgtgcgtctccatcc

SEQ ID NO: 2172927 - DNA, 25 bp, Homo sapien
ttggattgtgcgtctccatccgatg

SEQ ID NO: 2172928 - DNA, 25 bp, Homo sapien
ttctccaggccttttgccggtggag

SEQ ID NO: 2172929 - DNA, 25 bp, Homo sapien
gtagataatttcagctcccccattg

SEQ ID NO: 2172930 - DNA, 25 bp, Homo sapien
tggaaggtcctcagcgttagaggga

SEQ ID NO: 2172931 - DNA, 25 bp, Homo sapien
ggaagtaggcattgagtagataatt

SEQ ID NO: 2172932 - DNA, 25 bp, Homo sapien
tcctcagcgttagagggactgtttc

SEQ ID NO: 2172933 - DNA, 25 bp, Homo sapien
aagcccaggtggacagtgtctcctt

SEQ ID NO: 2172934 - DNA, 25 bp, Homo sapien
gagaatgcccgggtcacaagcccag

SEQ ID NO: 2172935 - DNA, 25 bp, Homo sapien
gagaaagatagcagtggccccctgc

SEQ ID NO: 2172936 - DNA, 25 bp, Homo sapien
gtctccttgtgcctcggaagagaat

SEQ ID NO: 2172937 - DNA, 25 bp, Homo sapien
gatcctcccatccttgttcgtcctg

SEQ ID NO: 2172938 - DNA, 25 bp, Homo sapien
caggagcagacacgccgtggtgggc

SEQ ID NO: 2172939 - DNA, 25 bp, Homo sapien
ctgggcttgcgggatgagtctgtca

SEQ ID NO: 2172940 - DNA, 25 bp, Homo sapien
gtcactgtcggctccgcaggatcct

SEQ ID NO: 2172941 - DNA, 25 bp, Homo sapien
cagaagtcctttccccgaggaggag

SEQ ID NO: 2172942 - DNA, 25 bp, Homo sapien
tctcttctgagactgtggtaccggc

SEQ ID NO: 2172943 - DNA, 25 bp, Homo sapien
acctgtgggccctcactgctctctt

SEQ ID NO: 2172944 - DNA, 25 bp, Homo sapien
cttctgagactgtggtaccggccat

SEQ ID NO: 2172945 - DNA, 25 bp, Homo sapien
tcttctgagactgtggtaccggcca

SEQ ID NO: 2172946 - DNA, 25 bp, Homo sapien
aacctgctcacagatatacccggtc

SEQ ID NO: 2172947 - DNA, 25 bp, Homo sapien
cctttcggaaattggtgtattgtct

SEQ ID NO: 2172948 - DNA, 25 bp, Homo sapien
ttggtgtattgtctttggaaaatga

SEQ ID NO: 2172949 - DNA, 25 bp, Homo sapien
cagatatacccggtcccagatatgc

SEQ ID NO: 2172950 - DNA, 25 bp, Homo sapien
atcatgcgaacgtctccaccaggta

SEQ ID NO: 2172951 - DNA, 25 bp, Homo sapien
ggaaagtcccacatcatgcgaacgt

SEQ ID NO: 2172952 - DNA, 25 bp, Homo sapien
tcagagcatccccaaagtggcttcc

SEQ ID NO: 2172953 - DNA, 25 bp, Homo sapien
cagagcatccccaaagtggcttcct

SEQ ID NO: 2172954 - DNA, 25 bp, Homo sapien
ggcaggtggatcacctgaggttggg

SEQ ID NO: 2172955 - DNA, 25 bp, Homo sapien
ggttgggagttccagatcagcctga

SEQ ID NO: 2172956 - DNA, 25 bp, Homo sapien
caacctgtaggttagaatgccttaa

SEQ ID NO: 2172957 - DNA, 25 bp, Homo sapien
gaatgccttaacctggggaggccga

SEQ ID NO: 2172958 - DNA, 25 bp, Homo sapien
gcactggagactctgacgtgtgctt

SEQ ID NO: 2172959 - DNA, 25 bp, Homo sapien
aggtgtgcattggagactctgacgt

SEQ ID NO: 2172960 - DNA, 25 bp, Homo sapien
ctctgacgtgggcattggagactga

SEQ ID NO: 2172961 - DNA, 25 bp, Homo sapien
ctctgagatgtgctttggagattcc

SEQ ID NO: 2172962 - DNA, 25 bp, Homo sapien
taaccccttagctttgtctggccag

SEQ ID NO: 2172963 - DNA, 25 bp, Homo sapien
aattgcacctgatgaaatggacgta

SEQ ID NO: 2172964 - DNA, 25 bp, Homo sapien
gcaaggatgtctcgattttcaaagc

SEQ ID NO: 2172965 - DNA, 25 bp, Homo sapien
tgtccatggccatcaagcggccagg

SEQ ID NO: 2172966 - DNA, 25 bp, Homo sapien
gctgaatcattccaaagggaaccgg

SEQ ID NO: 2172967 - DNA, 25 bp, Homo sapien
taggcaaagctcagcgaagtgggct

SEQ ID NO: 2172968 - DNA, 25 bp, Homo sapien
tctccgaggcgttgggtgaaattca

SEQ ID NO: 2172969 - DNA, 25 bp, Homo sapien
aagccgtaccgtagtctctccgagg

SEQ ID NO: 2172970 - DNA, 25 bp, Homo sapien
gcgttaatgaggcaagactagtccc

SEQ ID NO: 2172971 - DNA, 25 bp, Homo sapien
gacacagaggcgttaatgaggcaag

SEQ ID NO: 2172972 - DNA, 25 bp, Homo sapien
tcagggcctttgctgcggccgctgc

SEQ ID NO: 2172973 - DNA, 25 bp, Homo sapien
tgaggcaagactagtccccatgtcc

SEQ ID NO: 2172974 - DNA, 25 bp, Homo sapien
tgctatgtagatggctattaggtct

SEQ ID NO: 2172975 - DNA, 25 bp, Homo sapien
cattaggtcccaggatgtggctgca

SEQ ID NO: 2172976 - DNA, 25 bp, Homo sapien
cattggaccctgctgtgtagagagc

SEQ ID NO: 2172977 - DNA, 25 bp, Homo sapien
agctacatctgagcctgctgcatgg

SEQ ID NO: 2172978 - DNA, 25 bp, Homo sapien
gtgtagacggccaaaataaataaca

SEQ ID NO: 2172979 - DNA, 25 bp, Homo sapien
tgtgtagacggccaaaataaataac

SEQ ID NO: 2172980 - DNA, 25 bp, Homo sapien
ctgtgtagacggccaaaataaataa

SEQ ID NO: 2172981 - DNA, 25 bp, Homo sapien
tgtagacggccaaaataaataacaa

SEQ ID NO: 2172982 - DNA, 25 bp, Homo sapien
accgacagacgaaccactgggctct

SEQ ID NO: 2172983 - DNA, 25 bp, Homo sapien
gcggtgaccgacagacgaaccactg

SEQ ID NO: 2172984 - DNA, 25 bp, Homo sapien
tgttggcaggcggtgaccgacagac

SEQ ID NO: 2172985 - DNA, 25 bp, Homo sapien
caggcggtgaccgacagacgaacca

SEQ ID NO: 2172986 - DNA, 25 bp, Homo sapien
agctcagcataaaactcgacggaac

SEQ ID NO: 2172987 - DNA, 25 bp, Homo sapien
tagctcagcataaaactcgacggaa

SEQ ID NO: 2172988 - DNA, 25 bp, Homo sapien
catagctcagcataaaactcgacgg

SEQ ID NO: 2172989 - DNA, 25 bp, Homo sapien
tcatagctcagcataaaactcgacg

SEQ ID NO: 2172990 - DNA, 25 bp, Homo sapien
gcgcggccgcagctgaataaactcg

SEQ ID NO: 2172991 - DNA, 25 bp, Homo sapien
agtctccacggcatgacggcgcggc

SEQ ID NO: 2172992 - DNA, 25 bp, Homo sapien
ccggaaaaagccgacagtctccacg

SEQ ID NO: 2172993 - DNA, 25 bp, Homo sapien
gcggccgcagctgaataaactcggg

SEQ ID NO: 2172994 - DNA, 25 bp, Homo sapien
tgcatagacggccattaggtcccgg

SEQ ID NO: 2172995 - DNA, 25 bp, Homo sapien
gattcgagcctgctgtgtagacagc

SEQ ID NO: 2172996 - DNA, 25 bp, Homo sapien
tgtagacagccattaggtcccggga

SEQ ID NO: 2172997 - DNA, 25 bp, Homo sapien
ttcgagtctgctgcatagacggcca

SEQ ID NO: 2172998 - DNA, 25 bp, Homo sapien
caggatggagctggatttgagtctg

SEQ ID NO: 2172999 - DNA, 25 bp, Homo sapien
tcccaggatggagctggatttgagt

SEQ ID NO: 2173000 - DNA, 25 bp, Homo sapien
tggatttgagtctgctgcgtagatg

SEQ ID NO: 2173001 - DNA, 25 bp, Homo sapien
tttgagtctgctgcgtagatgacca

SEQ ID NO: 2173002 - DNA, 25 bp, Homo sapien
ctcccagggtacaggaacactgtct

SEQ ID NO: 2173003 - DNA, 25 bp, Homo sapien
atcacacagtccgacactaatttcc

SEQ ID NO: 2173004 - DNA, 25 bp, Homo sapien
gaggtgactttgctcatcacacagt

SEQ ID NO: 2173005 - DNA, 25 bp, Homo sapien
tcacgatacaatctggttcggccat

SEQ ID NO: 2173006 - DNA, 25 bp, Homo sapien
tcagactcctagttccttcacgtat

SEQ ID NO: 2173007 - DNA, 25 bp, Homo sapien
ctgttggatgggggccaattcctta

SEQ ID NO: 2173008 - DNA, 25 bp, Homo sapien
gactcctagttccttcacgtattca

SEQ ID NO: 2173009 - DNA, 25 bp, Homo sapien
cagactcctagttccttcacgtatt

SEQ ID NO: 2173010 - DNA, 25 bp, Homo sapien
ggcttcggagcacgcgttgatagtc

SEQ ID NO: 2173011 - DNA, 25 bp, Homo sapien
cacgcgttgatagtcctgatttttg

SEQ ID NO: 2173012 - DNA, 25 bp, Homo sapien
tccccagtaggtgtggttccttctg

SEQ ID NO: 2173013 - DNA, 25 bp, Homo sapien
caggccacagtgcaacccagggctt

SEQ ID NO: 2173014 - DNA, 25 bp, Homo sapien
aatttcacaaggtaaagtcatcgct

SEQ ID NO: 2173015 - DNA, 25 bp, Homo sapien
catcgcttaaggcaggaacaagcca

SEQ ID NO: 2173016 - DNA, 25 bp, Homo sapien
ggcatgcgcctatatgtgtctgtag

SEQ ID NO: 2173017 - DNA, 25 bp, Homo sapien
gcaggtgacacaaggtgctcattga

SEQ ID NO: 2173018 - DNA, 25 bp, Homo sapien
tggcttatccagaaggagtttgaat

SEQ ID NO: 2173019 - DNA, 25 bp, Homo sapien
tttagggaagcagaaccctaggcca

SEQ ID NO: 2173020 - DNA, 25 bp, Homo sapien
gattcaaagattagacgattgcctt

SEQ ID NO: 2173021 - DNA, 25 bp, Homo sapien
aatgacttctgtgggtggcttatcc

SEQ ID NO: 2173022 - DNA, 25 bp, Homo sapien
tgtgttcacagctggttgccaccga

SEQ ID NO: 2173023 - DNA, 25 bp, Homo sapien
gttgccacggatgcctggtgtacag

SEQ ID NO: 2173024 - DNA, 25 bp, Homo sapien
ttttctcaggtgaatacccaacagt

SEQ ID NO: 2173025 - DNA, 25 bp, Homo sapien
caacagtcaagttatcccagtccat

SEQ ID NO: 2173026 - DNA, 25 bp, Homo sapien
atgctaaacaggtggtcccccgaga

SEQ ID NO: 2173027 - DNA, 25 bp, Homo sapien
agaggctccagcatgactcgttgct

SEQ ID NO: 2173028 - DNA, 25 bp, Homo sapien
cagcatgactcgttgctggatgcta

SEQ ID NO: 2173029 - DNA, 25 bp, Homo sapien
tgactcgttgctggatgctaaacag

SEQ ID NO: 2173030 - DNA, 25 bp, Homo sapien
gctgcaaaccccaatgaggggcagg

SEQ ID NO: 2173031 - DNA, 25 bp, Homo sapien
gctgagctgcaaaccccaatgaggg

SEQ ID NO: 2173032 - DNA, 25 bp, Homo sapien
gcaaaccccaatgaggggcaggtgc

SEQ ID NO: 2173033 - DNA, 25 bp, Homo sapien
aggtgctcccggagacctgcttccc

SEQ ID NO: 2173034 - DNA, 25 bp, Homo sapien
ttttgccgtccaagcatccaccggt

SEQ ID NO: 2173035 - DNA, 25 bp, Homo sapien
gacataactcgtcttcctctgcaga

SEQ ID NO: 2173036 - DNA, 25 bp, Homo sapien
caacccttctggacataactcgtct

SEQ ID NO: 2173037 - DNA, 25 bp, Homo sapien
tcctctgcagattggaacagatgat

SEQ ID NO: 2173038 - DNA, 25 bp, Homo sapien
aattgttttagttccacagagcagc

SEQ ID NO: 2173039 - DNA, 25 bp, Homo sapien
aaagtgtcacccaaacccaggagat

SEQ ID NO: 2173040 - DNA, 25 bp, Homo sapien
cagccacgggtgcaccgtctgtgta

SEQ ID NO: 2173041 - DNA, 25 bp, Homo sapien
tatctctgtcagtgatgcaatccaa

SEQ ID NO: 2173042 - DNA, 25 bp, Homo sapien
cgaggaaggcccattcgagtggcct

SEQ ID NO: 2173043 - DNA, 25 bp, Homo sapien
tgaaagctccatacaccttccctgt

SEQ ID NO: 2173044 - DNA, 25 bp, Homo sapien
atgctgaaagctccatacaccttcc

SEQ ID NO: 2173045 - DNA, 25 bp, Homo sapien
tcgagtggcctgtaaaaatgctgaa

SEQ ID NO: 2173046 - DNA, 25 bp, Homo sapien
gaaacgacctgtttccaagaatgac

SEQ ID NO: 2173047 - DNA, 25 bp, Homo sapien
caagaatgacattatatagcatccc

SEQ ID NO: 2173048 - DNA, 25 bp, Homo sapien
gaaaaatcgtgttgtcatctctgca

SEQ ID NO: 2173049 - DNA, 25 bp, Homo sapien
catctctgcaccgtacaaggacaga

SEQ ID NO: 2173050 - DNA, 25 bp, Homo sapien
ggacttggaggtgatgaaagcctcc

SEQ ID NO: 2173051 - DNA, 25 bp, Homo sapien
tggaggtgatgaaagcctccctggg

SEQ ID NO: 2173052 - DNA, 25 bp, Homo sapien
tgatgaaagcctccctggggacaaa

SEQ ID NO: 2173053 - DNA, 25 bp, Homo sapien
ggtgatgaaagcctccctggggaca

SEQ ID NO: 2173054 - DNA, 25 bp, Homo sapien
tcacttctctaatatcaagcttcag

SEQ ID NO: 2173055 - DNA, 25 bp, Homo sapien
cacttctctaatatcaagcttcagc

SEQ ID NO: 2173056 - DNA, 25 bp, Homo sapien
cttctctaatatcaagcttcagcaa

SEQ ID NO: 2173057 - DNA, 25 bp, Homo sapien
cttcacttctctaatatcaagcttc

SEQ ID NO: 2173058 - DNA, 25 bp, Homo sapien
aatggaagggttgattcctcctgga

SEQ ID NO: 2173059 - DNA, 25 bp, Homo sapien
caaaaggaggaactgactctctttg

SEQ ID NO: 2173060 - DNA, 25 bp, Homo sapien
cctcctggaggcgtcgagggagatg

SEQ ID NO: 2173061 - DNA, 25 bp, Homo sapien
ttgaccaacgtcacatgatagcaac

SEQ ID NO: 2173062 - DNA, 25 bp, Homo sapien
gatgtttgatttccgaattccttta

SEQ ID NO: 2173063 - DNA, 25 bp, Homo sapien
ctgacgatgtttgatttccgaattc

SEQ ID NO: 2173064 - DNA, 25 bp, Homo sapien
tgatttccgaattcctttaatttca

SEQ ID NO: 2173065 - DNA, 25 bp, Homo sapien
ttccgaattcctttaatttcagcaa

SEQ ID NO: 2173066 - DNA, 25 bp, Homo sapien
gctgtgtcctccagtaagatgggaa

SEQ ID NO: 2173067 - DNA, 25 bp, Homo sapien
tctgattttcgactgatgtatttcc

SEQ ID NO: 2173068 - DNA, 25 bp, Homo sapien
taagatgggaactcggtgagaacag

SEQ ID NO: 2173069 - DNA, 25 bp, Homo sapien
gagattgtatctgattttcgactga

SEQ ID NO: 2173070 - DNA, 25 bp, Homo sapien
ccgcggggtcgagctgtctctccag

SEQ ID NO: 2173071 - DNA, 25 bp, Homo sapien
tgtccccgcggaagttctgttccag

SEQ ID NO: 2173072 - DNA, 25 bp, Homo sapien
cggggtcgagctgtctctccagaag

SEQ ID NO: 2173073 - DNA, 25 bp, Homo sapien
ccagaagctgcgcttggtcaggact

SEQ ID NO: 2173074 - DNA, 25 bp, Homo sapien
ggatcagacgcccaggacgcagcag

SEQ ID NO: 2173075 - DNA, 25 bp, Homo sapien
agcccgagtccgcacagggtttgcg

SEQ ID NO: 2173076 - DNA, 25 bp, Homo sapien
gtttccgcgcgtctctttctactgc

SEQ ID NO: 2173077 - DNA, 25 bp, Homo sapien
gtggacaggcgggtaggagcggatc

SEQ ID NO: 2173078 - DNA, 25 bp, Homo sapien
ctcggacagcgtcttgaattggcaa

SEQ ID NO: 2173079 - DNA, 25 bp, Homo sapien
tgtggggtagaaaaagctctcgtct

SEQ ID NO: 2173080 - DNA, 25 bp, Homo sapien
gactggagctgcggcctctcggaca

SEQ ID NO: 2173081 - DNA, 25 bp, Homo sapien
tgaattggcaacgaaaaacgtgtgg

SEQ ID NO: 2173082 - DNA, 25 bp, Homo sapien
tgcagcccggtaggacccactttgg

SEQ ID NO: 2173083 - DNA, 25 bp, Homo sapien
ttcacgttgcgctgtgtagactcct

SEQ ID NO: 2173084 - DNA, 25 bp, Homo sapien
gaaaagccagttccgaaagctgggc

SEQ ID NO: 2173085 - DNA, 25 bp, Homo sapien
tccgtgttgggttcaagagcaagtt

SEQ ID NO: 2173086 - DNA, 25 bp, Homo sapien
cgccttggcggaggacgcctgttct

SEQ ID NO: 2173087 - DNA, 25 bp, Homo sapien
tgactgccttgtgggtcaaggtgca

SEQ ID NO: 2173088 - DNA, 25 bp, Homo sapien
cctgttctctggacgaatcatttct

SEQ ID NO: 2173089 - DNA, 25 bp, Homo sapien
aggacgcctgttctctggacgaatc

SEQ ID NO: 2173090 - DNA, 25 bp, Homo sapien
ctgatgttccccccgccgcccttcg

SEQ ID NO: 2173091 - DNA, 25 bp, Homo sapien
ccccgccgcccttcgggctgcccat

SEQ ID NO: 2173092 - DNA, 25 bp, Homo sapien
taaagagatgggacagattctgtgc

SEQ ID NO: 2173093 - DNA, 25 bp, Homo sapien
tctccagcgccgtggataaagagat

SEQ ID NO: 2173094 - DNA, 25 bp, Homo sapien
tcagtcgccgcagttgagcaaaaaa

SEQ ID NO: 2173095 - DNA, 25 bp, Homo sapien
ttgccaagagttagaaaaatgcacc

SEQ ID NO: 2173096 - DNA, 25 bp, Homo sapien
ggtcccatttccttggaagcctgag

SEQ ID NO: 2173097 - DNA, 25 bp, Homo sapien
tggtgcgacgggcttggtgtctccc

SEQ ID NO: 2173098 - DNA, 25 bp, Homo sapien
tgtcgtaggaatggcctctccatcc

SEQ ID NO: 2173099 - DNA, 25 bp, Homo sapien
tttgggccgctccaaagacgccctg

SEQ ID NO: 2173100 - DNA, 25 bp, Homo sapien
gagtgtaaatttgacatcgcgttgc

SEQ ID NO: 2173101 - DNA, 25 bp, Homo sapien
tgtaaatttgacatcgcgttgcatt

SEQ ID NO: 2173102 - DNA, 25 bp, Homo sapien
tcgagtgtaaatttgacatcgcgtt

SEQ ID NO: 2173103 - DNA, 25 bp, Homo sapien
tatgtcgagtgtaaatttgacatcg

SEQ ID NO: 2173104 - DNA, 25 bp, Homo sapien
cggtgtgacgggtggcgtggatgac

SEQ ID NO: 2173105 - DNA, 25 bp, Homo sapien
atgcagttaagagagccggccagcc

SEQ ID NO: 2173106 - DNA, 25 bp, Homo sapien
aatgcagttaagagagccggccagc

SEQ ID NO: 2173107 - DNA, 25 bp, Homo sapien
ctcccgatggcggtgtgacgggtgg

SEQ ID NO: 2173108 - DNA, 25 bp, Homo sapien
cagcgttcggcttcacatttttgcc

SEQ ID NO: 2173109 - DNA, 25 bp, Homo sapien
tgatgagcttggaccgcgttgccac

SEQ ID NO: 2173110 - DNA, 25 bp, Homo sapien
tctgcacggagcagcgttcggcttc

SEQ ID NO: 2173111 - DNA, 25 bp, Homo sapien
caccggttcgaatggcctttgccag

SEQ ID NO: 2173112 - DNA, 25 bp, Homo sapien
agtgcaatggatccatcttggctca

SEQ ID NO: 2173113 - DNA, 25 bp, Homo sapien
ctggagtgcaatggatccatcttgg

SEQ ID NO: 2173114 - DNA, 25 bp, Homo sapien
ctgcaacctgtgcctcctgggttca

SEQ ID NO: 2173115 - DNA, 25 bp, Homo sapien
tgtgcctcctgggttcacgccattc

SEQ ID NO: 2173116 - DNA, 25 bp, Homo sapien
gtggatttgttgcttttccatcttc

SEQ ID NO: 2173117 - DNA, 25 bp, Homo sapien
tcttctctgcggctgacactcttac

SEQ ID NO: 2173118 - DNA, 25 bp, Homo sapien
ttttccatcttctctgcggctgaca

SEQ ID NO: 2173119 - DNA, 25 bp, Homo sapien
tggcttctccggctgtggatttgtt

SEQ ID NO: 2173120 - DNA, 25 bp, Homo sapien
gcatcgtggctctctgtgaggaaga

SEQ ID NO: 2173121 - DNA, 25 bp, Homo sapien
gagaatttcggttgcctcccagagc

SEQ ID NO: 2173122 - DNA, 25 bp, Homo sapien
agctgcagccggaagacgcaaggac

SEQ ID NO: 2173123 - DNA, 25 bp, Homo sapien
acgcaaggaccaacgaaaacatttg

SEQ ID NO: 2173124 - DNA, 25 bp, Homo sapien
aacaggtcgtgttgatacggttgcc

SEQ ID NO: 2173125 - DNA, 25 bp, Homo sapien
tacggttgcctcgtgaggacccatc

SEQ ID NO: 2173126 - DNA, 25 bp, Homo sapien
gctaacactgacaactcgtggcaag

SEQ ID NO: 2173127 - DNA, 25 bp, Homo sapien
taagagcacacagcaccgtctttct

SEQ ID NO: 2173128 - DNA, 25 bp, Homo sapien
cacagctcgtagagtgagaacacgg

SEQ ID NO: 2173129 - DNA, 25 bp, Homo sapien
cattgaatgcattgatgacctgtcc

SEQ ID NO: 2173130 - DNA, 25 bp, Homo sapien
gatgacctgtccatgacaaaatcct

SEQ ID NO: 2173131 - DNA, 25 bp, Homo sapien
cagtagcattggatagagtcacagc

SEQ ID NO: 2173132 - DNA, 25 bp, Homo sapien
cctttgcttgatgggtctttcagga

SEQ ID NO: 2173133 - DNA, 25 bp, Homo sapien
tttctgtacaaagccgggacgcaca

SEQ ID NO: 2173134 - DNA, 25 bp, Homo sapien
taacaaacacctgtctattgaggag

SEQ ID NO: 2173135 - DNA, 25 bp, Homo sapien
gaaacagaggctgcaacattctagt

SEQ ID NO: 2173136 - DNA, 25 bp, Homo sapien
ggtggtcctacctggcttcgtggct

SEQ ID NO: 2173137 - DNA, 25 bp, Homo sapien
ttctgggttcttgggacagtcggct

SEQ ID NO: 2173138 - DNA, 25 bp, Homo sapien
ttcttgggacagtcggcttctggtg

SEQ ID NO: 2173139 - DNA, 25 bp, Homo sapien
gcttctggtggtcctacctggcttc

SEQ ID NO: 2173140 - DNA, 25 bp, Homo sapien
cataaaccggattccaaagtcgtgg

SEQ ID NO: 2173141 - DNA, 25 bp, Homo sapien
gtctcatggaagaaccattttactt

SEQ ID NO: 2173142 - DNA, 25 bp, Homo sapien
tcatggaagaaccattttacttcat

SEQ ID NO: 2173143 - DNA, 25 bp, Homo sapien
ccataaaccggattccaaagtcgtg

SEQ ID NO: 2173144 - DNA, 25 bp, Homo sapien
gctattaaggatttagacttcttaa

SEQ ID NO: 2173145 - DNA, 25 bp, Homo sapien
tctgtctttgcagctattaaggatt

SEQ ID NO: 2173146 - DNA, 25 bp, Homo sapien
tttgcagctattaaggatttagact

SEQ ID NO: 2173147 - DNA, 25 bp, Homo sapien
gcagctattaaggatttagacttct

SEQ ID NO: 2173148 - DNA, 25 bp, Homo sapien
cctggatgtttaccaagcctgccat

SEQ ID NO: 2173149 - DNA, 25 bp, Homo sapien
gacctggatgtttaccaagcctgcc

SEQ ID NO: 2173150 - DNA, 25 bp, Homo sapien
agacctggatgtttaccaagcctgc

SEQ ID NO: 2173151 - DNA, 25 bp, Homo sapien
tttatcagaacaatagcagggaaag

SEQ ID NO: 2173152 - DNA, 25 bp, Homo sapien
tttgccatgaagtggaactctgggt

SEQ ID NO: 2173153 - DNA, 25 bp, Homo sapien
tctgggtcgcagaacatgtaacgtc

SEQ ID NO: 2173154 - DNA, 25 bp, Homo sapien
gaagtggaactctgggtcgcagaac

SEQ ID NO: 2173155 - DNA, 25 bp, Homo sapien
gaacatgtaacgtctgtgttggcca

SEQ ID NO: 2173156 - DNA, 25 bp, Homo sapien
ctccacagagagaaattttcttttt

SEQ ID NO: 2173157 - DNA, 25 bp, Homo sapien
attggaggaaaggaattttgatcat

SEQ ID NO: 2173158 - DNA, 25 bp, Homo sapien
tccacagagagaaattttcttttta

SEQ ID NO: 2173159 - DNA, 25 bp, Homo sapien
aattggaggaaaggaattttgatca

SEQ ID NO: 2173160 - DNA, 25 bp, Homo sapien
ccacgtaggtggtggtcgtagcttc

SEQ ID NO: 2173161 - DNA, 25 bp, Homo sapien
ccaggtacgagtgcccacgtaggtg

SEQ ID NO: 2173162 - DNA, 25 bp, Homo sapien
gtagcttctgttctcatcagcttga

SEQ ID NO: 2173163 - DNA, 25 bp, Homo sapien
tcatcatgtcccaggtacgagtgcc

SEQ ID NO: 2173164 - DNA, 25 bp, Homo sapien
acggcttccctttgatgtcagggtt

SEQ ID NO: 2173165 - DNA, 25 bp, Homo sapien
ggcttccctttgatgtcagggtttc

SEQ ID NO: 2173166 - DNA, 25 bp, Homo sapien
tacggcttccctttgatgtcagggt

SEQ ID NO: 2173167 - DNA, 25 bp, Homo sapien
ttacggcttccctttgatgtcaggg

SEQ ID NO: 2173168 - DNA, 25 bp, Homo sapien
cactgcggttaactattttcacatg

SEQ ID NO: 2173169 - DNA, 25 bp, Homo sapien
gaagactctgtttcccgggctgctc

SEQ ID NO: 2173170 - DNA, 25 bp, Homo sapien
caaagtgcagggctgggacgtttca

SEQ ID NO: 2173171 - DNA, 25 bp, Homo sapien
cgggctgctccgtggaaaacttaat

SEQ ID NO: 2173172 - DNA, 25 bp, Homo sapien
cctggcggttagagctcacggagat

SEQ ID NO: 2173173 - DNA, 25 bp, Homo sapien
gacgtcttgcaacggcctggcggtt

SEQ ID NO: 2173174 - DNA, 25 bp, Homo sapien
caattagatgcttcgtaaacctgct

SEQ ID NO: 2173175 - DNA, 25 bp, Homo sapien
gcaggctgccttatgtccgggacgt

SEQ ID NO: 2173176 - DNA, 25 bp, Homo sapien
gagttcatgaagtagaaagggtgtc

SEQ ID NO: 2173177 - DNA, 25 bp, Homo sapien
atgaagtagaaagggtgtcaccagc

SEQ ID NO: 2173178 - DNA, 25 bp, Homo sapien
agaaagggtgtcaccagcccacagc

SEQ ID NO: 2173179 - DNA, 25 bp, Homo sapien
gcttccttgctgtgatgagttcatg

SEQ ID NO: 2173180 - DNA, 25 bp, Homo sapien
ctgcacaggaccaggacttcaatgc

SEQ ID NO: 2173181 - DNA, 25 bp, Homo sapien
cacaggaccaggacttcaatgcact

SEQ ID NO: 2173182 - DNA, 25 bp, Homo sapien
tgcacaggaccaggacttcaatgca

SEQ ID NO: 2173183 - DNA, 25 bp, Homo sapien
gcacaggaccaggacttcaatgcac

SEQ ID NO: 2173184 - DNA, 25 bp, Homo sapien
caggatgaggacctcaatacacttg

SEQ ID NO: 2173185 - DNA, 25 bp, Homo sapien
tgaggacctcaatacacttgtccac

SEQ ID NO: 2173186 - DNA, 25 bp, Homo sapien
gacctcaatacacttgtccactctt

SEQ ID NO: 2173187 - DNA, 25 bp, Homo sapien
gagcctgcacaggatgaggacctca

SEQ ID NO: 2173188 - DNA, 25 bp, Homo sapien
tcaggacctcaatacacttgacctg

SEQ ID NO: 2173189 - DNA, 25 bp, Homo sapien
cacaggatcaggacctcaatacact

SEQ ID NO: 2173190 - DNA, 25 bp, Homo sapien
cagagcctccacaggatcaggacct

SEQ ID NO: 2173191 - DNA, 25 bp, Homo sapien
gacctcaatacacttgacctgtcct

SEQ ID NO: 2173192 - DNA, 25 bp, Homo sapien
ccagatatggggatgtagcaaactt

SEQ ID NO: 2173193 - DNA, 25 bp, Homo sapien
ttccccgggacatggaataaatcca

SEQ ID NO: 2173194 - DNA, 25 bp, Homo sapien
tctgtttcttccccgggacatggaa

SEQ ID NO: 2173195 - DNA, 25 bp, Homo sapien
aataaatccaccctggactttgagc

SEQ ID NO: 2173196 - DNA, 25 bp, Homo sapien
gcgggggtcagacgaagccggcttc

SEQ ID NO: 2173197 - DNA, 25 bp, Homo sapien
cacagggcgggggtcagacgaagcc

SEQ ID NO: 2173198 - DNA, 25 bp, Homo sapien
gggtcagacgaagccggcttctgta

SEQ ID NO: 2173199 - DNA, 25 bp, Homo sapien
acagggcgggggtcagacgaagccg

SEQ ID NO: 2173200 - DNA, 25 bp, Homo sapien
tctgaaacgacggtgtgtgtgctgc

SEQ ID NO: 2173201 - DNA, 25 bp, Homo sapien
tctgtctctgaaacgacggtgtgtg

SEQ ID NO: 2173202 - DNA, 25 bp, Homo sapien
atcgtctgtctctgaaacgacggtg

SEQ ID NO: 2173203 - DNA, 25 bp, Homo sapien
tgtgtgctgcgttgaaggtgaacac

SEQ ID NO: 2173204 - DNA, 25 bp, Homo sapien
catggttaattttccgcagcgagcc

SEQ ID NO: 2173205 - DNA, 25 bp, Homo sapien
cataaactgcaggaagtctcgggct

SEQ ID NO: 2173206 - DNA, 25 bp, Homo sapien
gcagcgagcccagaacgtcggagcc

SEQ ID NO: 2173207 - DNA, 25 bp, Homo sapien
agaatgcagatgagagactcatggt

SEQ ID NO: 2173208 - DNA, 25 bp, Homo sapien
caacccagggggtcttcaccaatag

SEQ ID NO: 2173209 - DNA, 25 bp, Homo sapien
cagggggtcttcaccaataggacac

SEQ ID NO: 2173210 - DNA, 25 bp, Homo sapien
tggccaacccagggggtcttcacca

SEQ ID NO: 2173211 - DNA, 25 bp, Homo sapien
ggtcttcaccaataggacaccgcat

SEQ ID NO: 2173212 - DNA, 25 bp, Homo sapien
ttgaaccgtgcacggcggcactgcc

SEQ ID NO: 2173213 - DNA, 25 bp, Homo sapien
tcggggtctccccaagaggctgttg

SEQ ID NO: 2173214 - DNA, 25 bp, Homo sapien
gttttgaactcccaacctgctgatc

SEQ ID NO: 2173215 - DNA, 25 bp, Homo sapien
ctccccaagaggctgttgatgtctg

SEQ ID NO: 2173216 - DNA, 25 bp, Homo sapien
tttcggaacaggtgctaccagccac

SEQ ID NO: 2173217 - DNA, 25 bp, Homo sapien
gcctagaaagtttagcatgtccaga

SEQ ID NO: 2173218 - DNA, 25 bp, Homo sapien
attttataaatcaacgcctagaaag

SEQ ID NO: 2173219 - DNA, 25 bp, Homo sapien
catgtccagaatctttcggaacagg

SEQ ID NO: 2173220 - DNA, 25 bp, Homo sapien
ccgggctgatgtggattcagccaaa

SEQ ID NO: 2173221 - DNA, 25 bp, Homo sapien
ctgatctgaactccgggctgatgtg

SEQ ID NO: 2173222 - DNA, 25 bp, Homo sapien
atgacaaagagctccgcggtgattt

SEQ ID NO: 2173223 - DNA, 25 bp, Homo sapien
cattcaatccattacgcggctccct

SEQ ID NO: 2173224 - DNA, 25 bp, Homo sapien
cccatgaagttggtaattcaaggcc

SEQ ID NO: 2173225 - DNA, 25 bp, Homo sapien
tggaggtgccccatgaagttggtaa

SEQ ID NO: 2173226 - DNA, 25 bp, Homo sapien
caggctcatggtggatatcaggaaa

SEQ ID NO: 2173227 - DNA, 25 bp, Homo sapien
gttggtaattcaaggccaggctcat

SEQ ID NO: 2173228 - DNA, 25 bp, Homo sapien
gacaaaagcttggaacgaagctggt

SEQ ID NO: 2173229 - DNA, 25 bp, Homo sapien
aatccgtgcaacttcagacaaaagc

SEQ ID NO: 2173230 - DNA, 25 bp, Homo sapien
tgggttggaaggtccaatccgtgca

SEQ ID NO: 2173231 - DNA, 25 bp, Homo sapien
gcttggaacgaagctggttcaccat

SEQ ID NO: 2173232 - DNA, 25 bp, Homo sapien
tggcccagaggactcacagcacggg

SEQ ID NO: 2173233 - DNA, 25 bp, Homo sapien
tcttcttgccggctccgccagatta

SEQ ID NO: 2173234 - DNA, 25 bp, Homo sapien
tccgccagattacagccagaattcc

SEQ ID NO: 2173235 - DNA, 25 bp, Homo sapien
caaacatgaaaccagtgagcgctcc

SEQ ID NO: 2173236 - DNA, 25 bp, Homo sapien
ctgaagcaaatggacgtggcatccg

SEQ ID NO: 2173237 - DNA, 25 bp, Homo sapien
tgaagcaaatggacgtggcatccgc

SEQ ID NO: 2173238 - DNA, 25 bp, Homo sapien
agacaccccttctaaacctgcaggg

SEQ ID NO: 2173239 - DNA, 25 bp, Homo sapien
ctgaagcaaatggacgtggcatcct

SEQ ID NO: 2173240 - DNA, 25 bp, Homo sapien
ttccctcgtagcttctgggctcaga

SEQ ID NO: 2173241 - DNA, 25 bp, Homo sapien
tttccctcgtagcttctgggctcag

SEQ ID NO: 2173242 - DNA, 25 bp, Homo sapien
cactttccctcgtagcttctgggct

SEQ ID NO: 2173243 - DNA, 25 bp, Homo sapien
ctttccctcgtagcttctgggctca

SEQ ID NO: 2173244 - DNA, 25 bp, Homo sapien
caactcccgcatctccccttagggc

SEQ ID NO: 2173245 - DNA, 25 bp, Homo sapien
actcccgcatctccccttagggcgg

SEQ ID NO: 2173246 - DNA, 25 bp, Homo sapien
cccaactcccgcatctccccttagg

SEQ ID NO: 2173247 - DNA, 25 bp, Homo sapien
cgcatctccccttagggcgggtttg

SEQ ID NO: 2173248 - DNA, 25 bp, Homo sapien
gaacacggggtgtcatcggtagaac

SEQ ID NO: 2173249 - DNA, 25 bp, Homo sapien
ctgaagtcactccggtttagtagaa

SEQ ID NO: 2173250 - DNA, 25 bp, Homo sapien
tgtcatcggtagaactttgtccata

SEQ ID NO: 2173251 - DNA, 25 bp, Homo sapien
gggtgtcatcggtagaactttgtcc

SEQ ID NO: 2173252 - DNA, 25 bp, Homo sapien
cattcatgtaaggtttcccaatgag

SEQ ID NO: 2173253 - DNA, 25 bp, Homo sapien
acattcatgtaaggtttcccaatga

SEQ ID NO: 2173254 - DNA, 25 bp, Homo sapien
attcatgtaaggtttcccaatgagt

SEQ ID NO: 2173255 - DNA, 25 bp, Homo sapien
cacattcatgtaaggtttcccaatg

SEQ ID NO: 2173256 - DNA, 25 bp, Homo sapien
cagccaacaaaatggtaacgacaag

SEQ ID NO: 2173257 - DNA, 25 bp, Homo sapien
tcgagtttcccttcagacaggagga

SEQ ID NO: 2173258 - DNA, 25 bp, Homo sapien
tctgctgtctgtaaagtcggggcgt

SEQ ID NO: 2173259 - DNA, 25 bp, Homo sapien
ggaggaaggcgccagcaacagccaa

SEQ ID NO: 2173260 - DNA, 25 bp, Homo sapien
gaaggctgaggtgcctatggacttg

SEQ ID NO: 2173261 - DNA, 25 bp, Homo sapien
gaaaattgcctctgcatgttacaaa

SEQ ID NO: 2173262 - DNA, 25 bp, Homo sapien
aagggacagaaaattgcctctgcat

SEQ ID NO: 2173263 - DNA, 25 bp, Homo sapien
acgtgaaaggcagaaaacgccatcc

SEQ ID NO: 2173264 - DNA, 25 bp, Homo sapien
aagcccaaacccagataacagacag

SEQ ID NO: 2173265 - DNA, 25 bp, Homo sapien
caggaagtgatacggtgaagcccaa

SEQ ID NO: 2173266 - DNA, 25 bp, Homo sapien
caggttctcaggaagtgatacggtg

SEQ ID NO: 2173267 - DNA, 25 bp, Homo sapien
aacccagataacagacagacgccat

SEQ ID NO: 2173268 - DNA, 25 bp, Homo sapien
tatgatgagaagtcggttctctgtg

SEQ ID NO: 2173269 - DNA, 25 bp, Homo sapien
gtggccttccactgtacgataattc

SEQ ID NO: 2173270 - DNA, 25 bp, Homo sapien
agaggctatgatgagaagtcggttc

SEQ ID NO: 2173271 - DNA, 25 bp, Homo sapien
ttccagaaccacacgatggcatgac

SEQ ID NO: 2173272 - DNA, 25 bp, Homo sapien
taatgaaaggaagatgataggtgat

SEQ ID NO: 2173273 - DNA, 25 bp, Homo sapien
atagataaatggagacagacaatag

SEQ ID NO: 2173274 - DNA, 25 bp, Homo sapien
ctacataggtgattgatagacaata

SEQ ID NO: 2173275 - DNA, 25 bp, Homo sapien
gagagattgcagataggtagataag

SEQ ID NO: 2173276 - DNA, 25 bp, Homo sapien
ccagtatgctctggtgaccttcggg

SEQ ID NO: 2173277 - DNA, 25 bp, Homo sapien
ggagagagactacccttcacatctg

SEQ ID NO: 2173278 - DNA, 25 bp, Homo sapien
tgtgttatgtgcttctacagcctcc

SEQ ID NO: 2173279 - DNA, 25 bp, Homo sapien
ggcatcctcaagcaaaaggtttctg

SEQ ID NO: 2173280 - DNA, 25 bp, Homo sapien
tcaggtcctaatggaattcaaccgg

SEQ ID NO: 2173281 - DNA, 25 bp, Homo sapien
gacaggattcaggtgagaattccaa

SEQ ID NO: 2173282 - DNA, 25 bp, Homo sapien
gaattcaaccggactggattcacgt

SEQ ID NO: 2173283 - DNA, 25 bp, Homo sapien
ccggcgctggctccgttgattttct

SEQ ID NO: 2173284 - DNA, 25 bp, Homo sapien
cctggtgccctttgatctctgcaga

SEQ ID NO: 2173285 - DNA, 25 bp, Homo sapien
ccctggtgccctttgatctctgcag

SEQ ID NO: 2173286 - DNA, 25 bp, Homo sapien
tgccctttgatctctgcagattcct

SEQ ID NO: 2173287 - DNA, 25 bp, Homo sapien
ggtgccctttgatctctgcagattc

SEQ ID NO: 2173288 - DNA, 25 bp, Homo sapien
gcttggtggcgaagacacgcggagt

SEQ ID NO: 2173289 - DNA, 25 bp, Homo sapien
gtggcgaagacacgcggagtggcca

SEQ ID NO: 2173290 - DNA, 25 bp, Homo sapien
cttggtggcgaagacacgcggagtg

SEQ ID NO: 2173291 - DNA, 25 bp, Homo sapien
tggtggcgaagacacgcggagtggc

SEQ ID NO: 2173292 - DNA, 25 bp, Homo sapien
gaattccaaggaatagacattctgg

SEQ ID NO: 2173293 - DNA, 25 bp, Homo sapien
cctgctccggtgttaatattttggg

SEQ ID NO: 2173294 - DNA, 25 bp, Homo sapien
cattctggtagatgctacattcgtg

SEQ ID NO: 2173295 - DNA, 25 bp, Homo sapien
tagatgctacattcgtgccctgctc

SEQ ID NO: 2173296 - DNA, 25 bp, Homo sapien
aattaatgagcgttttgccccgata

SEQ ID NO: 2173297 - DNA, 25 bp, Homo sapien
tctttctcaaattaatgagcgtttt

SEQ ID NO: 2173298 - DNA, 25 bp, Homo sapien
ttctcaaattaatgagcgttttgcc

SEQ ID NO: 2173299 - DNA, 25 bp, Homo sapien
tcaaattaatgagcgttttgccccg

SEQ ID NO: 2173300 - DNA, 25 bp, Homo sapien
ccgcgtccctcggaagacgatgctg

SEQ ID NO: 2173301 - DNA, 25 bp, Homo sapien
ggaagacgatgctgaaatcccgttg

SEQ ID NO: 2173302 - DNA, 25 bp, Homo sapien
agacgatgctgaaatcccgttgtgt

SEQ ID NO: 2173303 - DNA, 25 bp, Homo sapien
cctcggaagacgatgctgaaatccc

SEQ ID NO: 2173304 - DNA, 25 bp, Homo sapien
cagccgtaccccttagcagcaggtg

SEQ ID NO: 2173305 - DNA, 25 bp, Homo sapien
ttgaagcgtcttaactttattctcg

SEQ ID NO: 2173306 - DNA, 25 bp, Homo sapien
tttattctcgataattctgttcctc

SEQ ID NO: 2173307 - DNA, 25 bp, Homo sapien
gcagctgcagccgtaccccttagca

SEQ ID NO: 2173308 - DNA, 25 bp, Homo sapien
tcatttcattcctgatggttgtgtt

SEQ ID NO: 2173309 - DNA, 25 bp, Homo sapien
tcattcctgatggttgtgttcccat

SEQ ID NO: 2173310 - DNA, 25 bp, Homo sapien
ctgatggttgtgttcccatgttctt

SEQ ID NO: 2173311 - DNA, 25 bp, Homo sapien
tggttgtgttcccatgttctttgct

SEQ ID NO: 2173312 - DNA, 25 bp, Homo sapien
gattgaactgtgtcattttgccttt

SEQ ID NO: 2173313 - DNA, 25 bp, Homo sapien
cctcctttgagtgcacggtccatca

SEQ ID NO: 2173314 - DNA, 25 bp, Homo sapien
ttctgccaggcctgtcggacgtacc

SEQ ID NO: 2173315 - DNA, 25 bp, Homo sapien
aataacatctgtagtcgcgaccggt

SEQ ID NO: 2173316 - DNA, 25 bp, Homo sapien
aaagcagacgtaggccacccgggca

SEQ ID NO: 2173317 - DNA, 25 bp, Homo sapien
gtagcctgaagctacatcagggctc

SEQ ID NO: 2173318 - DNA, 25 bp, Homo sapien
aggtagcctgaagctacatcagggc

SEQ ID NO: 2173319 - DNA, 25 bp, Homo sapien
ggtagcctgaagctacatcagggct

SEQ ID NO: 2173320 - DNA, 25 bp, Homo sapien
ggtcatgttgaaccgggacgtcatc

SEQ ID NO: 2173321 - DNA, 25 bp, Homo sapien
tcccagtgatggctcgtcacggctg

SEQ ID NO: 2173322 - DNA, 25 bp, Homo sapien
cggctgatatctgccccagtggtca

SEQ ID NO: 2173323 - DNA, 25 bp, Homo sapien
gatggctcgtcacggctgatatctg

SEQ ID NO: 2173324 - DNA, 25 bp, Homo sapien
aggcccatgaagtagtgactaatgt

SEQ ID NO: 2173325 - DNA, 25 bp, Homo sapien
ccatgaagtagtgactaatgtccac

SEQ ID NO: 2173326 - DNA, 25 bp, Homo sapien
gaagtagtgactaatgtccactctg

SEQ ID NO: 2173327 - DNA, 25 bp, Homo sapien
tagtgactaatgtccactctgaaat

SEQ ID NO: 2173328 - DNA, 25 bp, Homo sapien
agttggccttcacctccaagatgac

SEQ ID NO: 2173329 - DNA, 25 bp, Homo sapien
actgccaagttgagtggcctccacc

SEQ ID NO: 2173330 - DNA, 25 bp, Homo sapien
tctacctccaagctggctctaacct

SEQ ID NO: 2173331 - DNA, 25 bp, Homo sapien
cctccactgccaagttgagtggcct

SEQ ID NO: 2173332 - DNA, 25 bp, Homo sapien
gtcctgggagcacgcccaagcccga

SEQ ID NO: 2173333 - DNA, 25 bp, Homo sapien
agccaagccagccaagatctccggg

SEQ ID NO: 2173334 - DNA, 25 bp, Homo sapien
cgcccaagcccgaggttggacttgg

SEQ ID NO: 2173335 - DNA, 25 bp, Homo sapien
gagcacgcccaagcccgaggttgga

SEQ ID NO: 2173336 - DNA, 25 bp, Homo sapien
tggtaaggaatattccttctcccca

SEQ ID NO: 2173337 - DNA, 25 bp, Homo sapien
tcacgtctcctcaattcctcccagc

SEQ ID NO: 2173338 - DNA, 25 bp, Homo sapien
cgctgtgatgataggtctgtggtaa

SEQ ID NO: 2173339 - DNA, 25 bp, Homo sapien
ccagccatttgtgccgctgtgatga

SEQ ID NO: 2173340 - DNA, 25 bp, Homo sapien
gcattcctcgtagtacttctgtttg

SEQ ID NO: 2173341 - DNA, 25 bp, Homo sapien
gaacaggcattcctcgtagtacttc

SEQ ID NO: 2173342 - DNA, 25 bp, Homo sapien
ctggaacaggcattcctcgtagtac

SEQ ID NO: 2173343 - DNA, 25 bp, Homo sapien
tcctcgtagtacttctgtttgctac

SEQ ID NO: 2173344 - DNA, 25 bp, Homo sapien
tctaggaatggagtggagaaatcac

SEQ ID NO: 2173345 - DNA, 25 bp, Homo sapien
ctctaggaatggagtggagaaatca

SEQ ID NO: 2173346 - DNA, 25 bp, Homo sapien
gtctttctgggtagtgccttcactc

SEQ ID NO: 2173347 - DNA, 25 bp, Homo sapien
tttctgggtagtgccttcactcctc

SEQ ID NO: 2173348 - DNA, 25 bp, Homo sapien
tgggtagtgccttcactcctctctg

SEQ ID NO: 2173349 - DNA, 25 bp, Homo sapien
ctacgtctttctgggtagtgccttc

SEQ ID NO: 2173350 - DNA, 25 bp, Homo sapien
cgtgggtttccaacatagactgtgg

SEQ ID NO: 2173351 - DNA, 25 bp, Homo sapien
ccaacagcgtttaaggtcaccgtca

SEQ ID NO: 2173352 - DNA, 25 bp, Homo sapien
tggtcccagtcgtgactcccattga

SEQ ID NO: 2173353 - DNA, 25 bp, Homo sapien
ggatcattgatgcttaccacgtggg

SEQ ID NO: 2173354 - DNA, 25 bp, Homo sapien
caagttcagcttgacaattacaaag

SEQ ID NO: 2173355 - DNA, 25 bp, Homo sapien
aatgagtgtttcatagggtgagacc

SEQ ID NO: 2173356 - DNA, 25 bp, Homo sapien
ttcatagggtgagaccgtcaggcgc

SEQ ID NO: 2173357 - DNA, 25 bp, Homo sapien
gatgttgtattcgtgacaatgagtg

SEQ ID NO: 2173358 - DNA, 25 bp, Homo sapien
ttagtggtggcttttgcgttcactc

SEQ ID NO: 2173359 - DNA, 25 bp, Homo sapien
gcttttgcgttcactctgacagcgg

SEQ ID NO: 2173360 - DNA, 25 bp, Homo sapien
gttctatggtccaacgtggacggca

SEQ ID NO: 2173361 - DNA, 25 bp, Homo sapien
tgacagcggttctatggtccaacgt

SEQ ID NO: 2173362 - DNA, 25 bp, Homo sapien
taaatataatgtggtccagccacac

SEQ ID NO: 2173363 - DNA, 25 bp, Homo sapien
gccctcatacccatctatagacgaa

SEQ ID NO: 2173364 - DNA, 25 bp, Homo sapien
aatataatgtggtccagccacacag

SEQ ID NO: 2173365 - DNA, 25 bp, Homo sapien
gagaaatataatgtggtccagccac

SEQ ID NO: 2173366 - DNA, 25 bp, Homo sapien
tacccccatctatagatgaagggag

SEQ ID NO: 2173367 - DNA, 25 bp, Homo sapien
catacccccatctatagatgaaggg

SEQ ID NO: 2173368 - DNA, 25 bp, Homo sapien
ctcatacccccatctatagatgaag

SEQ ID NO: 2173369 - DNA, 25 bp, Homo sapien
acccccatctatagatgaagggaga

SEQ ID NO: 2173370 - DNA, 25 bp, Homo sapien
aggctctgccacaggtggcaatgtg

SEQ ID NO: 2173371 - DNA, 25 bp, Homo sapien
atgtgggtgaatgctgaggacatca

SEQ ID NO: 2173372 - DNA, 25 bp, Homo sapien
ctctgccacaggtggcaatgtgggt

SEQ ID NO: 2173373 - DNA, 25 bp, Homo sapien
acaggtggcaatgtgggtgaatgct

SEQ ID NO: 2173374 - DNA, 25 bp, Homo sapien
cgggtctttaatgggtctggagtct

SEQ ID NO: 2173375 - DNA, 25 bp, Homo sapien
tccatttattccctatgtccagata

SEQ ID NO: 2173376 - DNA, 25 bp, Homo sapien
agtctccttttggggtcgtgacaat

SEQ ID NO: 2173377 - DNA, 25 bp, Homo sapien
ttattccctatgtccagatacaggc

SEQ ID NO: 2173378 - DNA, 25 bp, Homo sapien
tagaggcatgcacacatatagaccc

SEQ ID NO: 2173379 - DNA, 25 bp, Homo sapien
catgcagtcctgcaaatgtgcaaac

SEQ ID NO: 2173380 - DNA, 25 bp, Homo sapien
tgacttctacatgcgcaaaggcgca

SEQ ID NO: 2173381 - DNA, 25 bp, Homo sapien
gacaagggcgagtctccatcaggaa

SEQ ID NO: 2173382 - DNA, 25 bp, Homo sapien
ctctggaaggggcaagcgtccttca

SEQ ID NO: 2173383 - DNA, 25 bp, Homo sapien
agtccccgctgcctgactctcgttt

SEQ ID NO: 2173384 - DNA, 25 bp, Homo sapien
cgctgcctgactctcgtttctcctc

SEQ ID NO: 2173385 - DNA, 25 bp, Homo sapien
tcattacccgcaacccagtttcaca

SEQ ID NO: 2173386 - DNA, 25 bp, Homo sapien
tctattactgcagggtttcacttta

SEQ ID NO: 2173387 - DNA, 25 bp, Homo sapien
ttcattggtttttacagtctattac

SEQ ID NO: 2173388 - DNA, 25 bp, Homo sapien
gacacagagtttcattctggtcgcc

SEQ ID NO: 2173389 - DNA, 25 bp, Homo sapien
tggagtgtaatagcgtgaccatggc

SEQ ID NO: 2173390 - DNA, 25 bp, Homo sapien
gattgctataagaatacacaagtag

SEQ ID NO: 2173391 - DNA, 25 bp, Homo sapien
tataagaatacacaagtaggccggg

SEQ ID NO: 2173392 - DNA, 25 bp, Homo sapien
ttgctataagaatacacaagtaggc

SEQ ID NO: 2173393 - DNA, 25 bp, Homo sapien
gctataagaatacacaagtaggccg

SEQ ID NO: 2173394 - DNA, 25 bp, Homo sapien
tagctattgccagtttggagcaatt

SEQ ID NO: 2173395 - DNA, 25 bp, Homo sapien
gccagtttggagcaatttccttatg

SEQ ID NO: 2173396 - DNA, 25 bp, Homo sapien
aagtgaccaactacaccgtccgagt

SEQ ID NO: 2173397 - DNA, 25 bp, Homo sapien
tccttatgtgaagtgaccaactaca

SEQ ID NO: 2173398 - DNA, 25 bp, Homo sapien
cgatttcagcttaccgcaaactccg

SEQ ID NO: 2173399 - DNA, 25 bp, Homo sapien
tgcgatttcagcttaccgcaaactc

SEQ ID NO: 2173400 - DNA, 25 bp, Homo sapien
gtttttctgtgatggagtcttgttc

SEQ ID NO: 2173401 - DNA, 25 bp, Homo sapien
ggtgcgatttcagcttaccgcaaac

SEQ ID NO: 2173402 - DNA, 25 bp, Homo sapien
tttggctgtaaaagtgctccttggg

SEQ ID NO: 2173403 - DNA, 25 bp, Homo sapien
gtgggtttggctgtaaaagtgctcc

SEQ ID NO: 2173404 - DNA, 25 bp, Homo sapien
tcctgggttgcagggatataagcag

SEQ ID NO: 2173405 - DNA, 25 bp, Homo sapien
caactgtcttgaaatggcaaaattt

SEQ ID NO: 2173406 - DNA, 25 bp, Homo sapien
tgtggtgagccattgagctccagcc

SEQ ID NO: 2173407 - DNA, 25 bp, Homo sapien
tggtgagccattgagctccagcctg

SEQ ID NO: 2173408 - DNA, 25 bp, Homo sapien
ttgtggtgagccattgagctccagc

SEQ ID NO: 2173409 - DNA, 25 bp, Homo sapien
ggttgtggtgagccattgagctcca

SEQ ID NO: 2173410 - DNA, 25 bp, Homo sapien
tcttcactacaaaacggatgctcag

SEQ ID NO: 2173411 - DNA, 25 bp, Homo sapien
gaacgttgccaagtaggtgtgcccg

SEQ ID NO: 2173412 - DNA, 25 bp, Homo sapien
gatgctcagggaacacgtatcgggt

SEQ ID NO: 2173413 - DNA, 25 bp, Homo sapien
cgcagcaggcgtcaacagtacgagt

SEQ ID NO: 2173414 - DNA, 25 bp, Homo sapien
ggtcaaagtgtaggagtctgcatct

SEQ ID NO: 2173415 - DNA, 25 bp, Homo sapien
tgataacgtcacagaaggcatggat

SEQ ID NO: 2173416 - DNA, 25 bp, Homo sapien
tatttttggtaagtcgcactctggg

SEQ ID NO: 2173417 - DNA, 25 bp, Homo sapien
cttgaaacgggcaacaatctcctct

SEQ ID NO: 2173418 - DNA, 25 bp, Homo sapien
tttgatccacagttcgttggatcag

SEQ ID NO: 2173419 - DNA, 25 bp, Homo sapien
tatttattgagccactctggctctg

SEQ ID NO: 2173420 - DNA, 25 bp, Homo sapien
tggatcagttgaacataaatattga

SEQ ID NO: 2173421 - DNA, 25 bp, Homo sapien
gattcaatgcaagcttcccagatat

SEQ ID NO: 2173422 - DNA, 25 bp, Homo sapien
gggtcttgtttgtccaccggcctca

SEQ ID NO: 2173423 - DNA, 25 bp, Homo sapien
cgtagctagtctgatgttgcacccc

SEQ ID NO: 2173424 - DNA, 25 bp, Homo sapien
tgtctgtggctacccctgagtgcat

SEQ ID NO: 2173425 - DNA, 25 bp, Homo sapien
tacctagttcgctggcctggcatag

SEQ ID NO: 2173426 - DNA, 25 bp, Homo sapien
caaacaaaccttttggtcaggtgct

SEQ ID NO: 2173427 - DNA, 25 bp, Homo sapien
aacaaaccttttggtcaggtgctat

SEQ ID NO: 2173428 - DNA, 25 bp, Homo sapien
tggtctctgtctcccccctccccat

SEQ ID NO: 2173429 - DNA, 25 bp, Homo sapien
tgtctctgtaaccttctccatttct

SEQ ID NO: 2173430 - DNA, 25 bp, Homo sapien
tctctctccccgttcccatctctct

SEQ ID NO: 2173431 - DNA, 25 bp, Homo sapien
tctcctggtctctgtctcccccctc

SEQ ID NO: 2173432 - DNA, 25 bp, Homo sapien
tgcccggcccctctctttatctttc

SEQ ID NO: 2173433 - DNA, 25 bp, Homo sapien
tatctttctagctctctccctgtct

SEQ ID NO: 2173434 - DNA, 25 bp, Homo sapien
ctttatctttctagctctctccctg

SEQ ID NO: 2173435 - DNA, 25 bp, Homo sapien
tctctttatctttctagctctctcc

SEQ ID NO: 2173436 - DNA, 25 bp, Homo sapien
ctctctcccttcccctctctgtctc

SEQ ID NO: 2173437 - DNA, 25 bp, Homo sapien
tgtctctctctcccttcccctctgt

SEQ ID NO: 2173438 - DNA, 25 bp, Homo sapien
tctcccttcccctctctgtctctct

SEQ ID NO: 2173439 - DNA, 25 bp, Homo sapien
ctctctcccttcccctctgtctctc

SEQ ID NO: 2173440 - DNA, 25 bp, Homo sapien
tgggccttgtaataaagaccgaggc

SEQ ID NO: 2173441 - DNA, 25 bp, Homo sapien
gggctgggaggtccggaagtcgctc

SEQ ID NO: 2173442 - DNA, 25 bp, Homo sapien
gggatccctggtggtctttccgctc

SEQ ID NO: 2173443 - DNA, 25 bp, Homo sapien
aagtcgctcccggtcctggtactca

SEQ ID NO: 2173444 - DNA, 25 bp, Homo sapien
ccgtgtcccgagcaccaggcagaca

SEQ ID NO: 2173445 - DNA, 25 bp, Homo sapien
gagggcgtccgcgagcgtcgcttgt

SEQ ID NO: 2173446 - DNA, 25 bp, Homo sapien
ctggcggacgtcgctgctgatcgcg

SEQ ID NO: 2173447 - DNA, 25 bp, Homo sapien
gcgagcgtcgcttgtttccagtgtg

SEQ ID NO: 2173448 - DNA, 25 bp, Homo sapien
atctgcagaaggtgagccctcgagg

SEQ ID NO: 2173449 - DNA, 25 bp, Homo sapien
tacctgtgtccctaagagaaaggaa

SEQ ID NO: 2173450 - DNA, 25 bp, Homo sapien
ttcaacaagtttttagtgatacctg

SEQ ID NO: 2173451 - DNA, 25 bp, Homo sapien
caagtttttagtgatacctgtgtcc

SEQ ID NO: 2173452 - DNA, 25 bp, Homo sapien
ttttagtgatacctgtgtccctaag

SEQ ID NO: 2173453 - DNA, 25 bp, Homo sapien
cacagagcagatctgagatgggaca

SEQ ID NO: 2173454 - DNA, 25 bp, Homo sapien
cttcccggttgaaggttcaagcgat

SEQ ID NO: 2173455 - DNA, 25 bp, Homo sapien
gcagatctgagatgggacaggcccc

SEQ ID NO: 2173456 - DNA, 25 bp, Homo sapien
gcagttttgttcgttgccccggctg

SEQ ID NO: 2173457 - DNA, 25 bp, Homo sapien
aatggacattcctaacgggtggtgg

SEQ ID NO: 2173458 - DNA, 25 bp, Homo sapien
cgcacgcagcccaggaatggacatt

SEQ ID NO: 2173459 - DNA, 25 bp, Homo sapien
cctgcacagactggctgctggacct

SEQ ID NO: 2173460 - DNA, 25 bp, Homo sapien
tgtctggtgactgaagtacaggtcg

SEQ ID NO: 2173461 - DNA, 25 bp, Homo sapien
actggtcccggtctctggattcagc

SEQ ID NO: 2173462 - DNA, 25 bp, Homo sapien
tcactggtcccggtctctggattca

SEQ ID NO: 2173463 - DNA, 25 bp, Homo sapien
actcactggtcccggtctctggatt

SEQ ID NO: 2173464 - DNA, 25 bp, Homo sapien
tgtgtttatttcatgataaagtgat

SEQ ID NO: 2173465 - DNA, 25 bp, Homo sapien
tcttttttcagaccgagtctcggtc

SEQ ID NO: 2173466 - DNA, 25 bp, Homo sapien
taatttttatattagccggtctcga

SEQ ID NO: 2173467 - DNA, 25 bp, Homo sapien
gctaatttttatattagccggtctc

SEQ ID NO: 2173468 - DNA, 25 bp, Homo sapien
tgcctcagcctctcgaatagctgag

SEQ ID NO: 2173469 - DNA, 25 bp, Homo sapien
tagagtctgcctttcgggccaggag

SEQ ID NO: 2173470 - DNA, 25 bp, Homo sapien
taaaatctattaagtgccgggcgcg

SEQ ID NO: 2173471 - DNA, 25 bp, Homo sapien
gtcacgtgaccaagacgagggctca

SEQ ID NO: 2173472 - DNA, 25 bp, Homo sapien
gagttgagccgttaccacaccattg

SEQ ID NO: 2173473 - DNA, 25 bp, Homo sapien
cgggagagccggctctggaacccca

SEQ ID NO: 2173474 - DNA, 25 bp, Homo sapien
tggccctgccgtgcgctgacaccaa

SEQ ID NO: 2173475 - DNA, 25 bp, Homo sapien
aaccccagggctgtagtctctgtgg

SEQ ID NO: 2173476 - DNA, 25 bp, Homo sapien
gctgtagtctctgtggccctgccgt

SEQ ID NO: 2173477 - DNA, 25 bp, Homo sapien
ctccagcatttatcagggagcccgg

SEQ ID NO: 2173478 - DNA, 25 bp, Homo sapien
agaaggcgccatctagaagccagga

SEQ ID NO: 2173479 - DNA, 25 bp, Homo sapien
gagactgaatctaccataccttggt

SEQ ID NO: 2173480 - DNA, 25 bp, Homo sapien
agcactgcagaccaggaacgtgggc

SEQ ID NO: 2173481 - DNA, 25 bp, Homo sapien
tgtttattgttttgcagcaggaggc

SEQ ID NO: 2173482 - DNA, 25 bp, Homo sapien
cccaacatagaacatactcgccagt

SEQ ID NO: 2173483 - DNA, 25 bp, Homo sapien
tgttttgcagcaggaggcccaacat

SEQ ID NO: 2173484 - DNA, 25 bp, Homo sapien
gccagtactcggctgtgcaaaacag

SEQ ID NO: 2173485 - DNA, 25 bp, Homo sapien
aatttctcgaaggttgatggtccgc

SEQ ID NO: 2173486 - DNA, 25 bp, Homo sapien
aatacttagaacacgacttggctcc

SEQ ID NO: 2173487 - DNA, 25 bp, Homo sapien
gatcaagacacggaatcggctgccg

SEQ ID NO: 2173488 - DNA, 25 bp, Homo sapien
ggatgcggctgggaaaaagacaact

SEQ ID NO: 2173489 - DNA, 25 bp, Homo sapien
gcaggacgttggaccacgcaccctt

SEQ ID NO: 2173490 - DNA, 25 bp, Homo sapien
gacgttggaccacgcacccttgaag

SEQ ID NO: 2173491 - DNA, 25 bp, Homo sapien
ggaccagcacgaaggcgccccccat

SEQ ID NO: 2173492 - DNA, 25 bp, Homo sapien
ccatgccccgcaggacgttggacca

SEQ ID NO: 2173493 - DNA, 25 bp, Homo sapien
gcctagggcaaggagcttggttccc

SEQ ID NO: 2173494 - DNA, 25 bp, Homo sapien
gggcctagggcaaggagcttggttc

SEQ ID NO: 2173495 - DNA, 25 bp, Homo sapien
ctcccacgggcctagggcaaggagc

SEQ ID NO: 2173496 - DNA, 25 bp, Homo sapien
cccacgggcctagggcaaggagctt

SEQ ID NO: 2173497 - DNA, 25 bp, Homo sapien
tgcgcccggactgcatcatcatgcg

SEQ ID NO: 2173498 - DNA, 25 bp, Homo sapien
gactgcatcatcatgcgccgccgca

SEQ ID NO: 2173499 - DNA, 25 bp, Homo sapien
cccggactgcatcatcatgcgccgc

SEQ ID NO: 2173500 - DNA, 25 bp, Homo sapien
ttgcgcccggactgcatcatcatgc

SEQ ID NO: 2173501 - DNA, 25 bp, Homo sapien
caccacgccggccacggccgtcacg

SEQ ID NO: 2173502 - DNA, 25 bp, Homo sapien
aggacaccacgccggccacggccgt

SEQ ID NO: 2173503 - DNA, 25 bp, Homo sapien
ggtaggacaccacgccggccacggc

SEQ ID NO: 2173504 - DNA, 25 bp, Homo sapien
atcatccagctcaccacgatgtgcg

SEQ ID NO: 2173505 - DNA, 25 bp, Homo sapien
ctgcgcgggaacggcacgtcaccgt

SEQ ID NO: 2173506 - DNA, 25 bp, Homo sapien
gggaacggcacgtcaccgtctccag

SEQ ID NO: 2173507 - DNA, 25 bp, Homo sapien
gcgggaacggcacgtcaccgtctcc

SEQ ID NO: 2173508 - DNA, 25 bp, Homo sapien
gcgcgggaacggcacgtcaccgtct

SEQ ID NO: 2173509 - DNA, 25 bp, Homo sapien
gccccctccacgtggctgctcagtg

SEQ ID NO: 2173510 - DNA, 25 bp, Homo sapien
cccctgaggtggtgccgagctcttc

SEQ ID NO: 2173511 - DNA, 25 bp, Homo sapien
agctgacgtttacaacacgagaggt

SEQ ID NO: 2173512 - DNA, 25 bp, Homo sapien
cgagctcttccgagaccaccagtgc

SEQ ID NO: 2173513 - DNA, 25 bp, Homo sapien
gagcccagcaagacagtcccagagg

SEQ ID NO: 2173514 - DNA, 25 bp, Homo sapien
cccagcaagacagtcccagaggccg

SEQ ID NO: 2173515 - DNA, 25 bp, Homo sapien
cggagcccagcaagacagtcccaga

SEQ ID NO: 2173516 - DNA, 25 bp, Homo sapien
agcccagcaagacagtcccagaggc

SEQ ID NO: 2173517 - DNA, 25 bp, Homo sapien
acttcgcgatggcagccacacgtac

SEQ ID NO: 2173518 - DNA, 25 bp, Homo sapien
tgttgagcccgtctctgggacttcg

SEQ ID NO: 2173519 - DNA, 25 bp, Homo sapien
ggaacgtctgtgtgttgagcccgtc

SEQ ID NO: 2173520 - DNA, 25 bp, Homo sapien
aagacggcgtctccaagtccaggag

SEQ ID NO: 2173521 - DNA, 25 bp, Homo sapien
ttctggcgaaatccagcgggtacac

SEQ ID NO: 2173522 - DNA, 25 bp, Homo sapien
taggccgcccggtagatgatgatgc

SEQ ID NO: 2173523 - DNA, 25 bp, Homo sapien
atcgtacacgccgaagtaggccgcc

SEQ ID NO: 2173524 - DNA, 25 bp, Homo sapien
gcgggtacacgaagcagagggaggt

SEQ ID NO: 2173525 - DNA, 25 bp, Homo sapien
tgtactgcttgtcggcggcgatctg

SEQ ID NO: 2173526 - DNA, 25 bp, Homo sapien
cttgtcggcggcgatctgcttgctg

SEQ ID NO: 2173527 - DNA, 25 bp, Homo sapien
cgatctgcttgctggcgtgctggac

SEQ ID NO: 2173528 - DNA, 25 bp, Homo sapien
ggcggcgatctgcttgctggcgtgc

SEQ ID NO: 2173529 - DNA, 25 bp, Homo sapien
ctcttgaagcgctgggacatcccgc

SEQ ID NO: 2173530 - DNA, 25 bp, Homo sapien
tgggcctcttgaagcgctgggacat

SEQ ID NO: 2173531 - DNA, 25 bp, Homo sapien
atggagtcttgctacgatgaccaag

SEQ ID NO: 2173532 - DNA, 25 bp, Homo sapien
gctacgatgaccaagctgctctcaa

SEQ ID NO: 2173533 - DNA, 25 bp, Homo sapien
ggagcggccgcgcccgcgtccccac

SEQ ID NO: 2173534 - DNA, 25 bp, Homo sapien
cggagcggccgcgcccgcgtcccca

SEQ ID NO: 2173535 - DNA, 25 bp, Homo sapien
ctagtccccggagcggccgcgcccg

SEQ ID NO: 2173536 - DNA, 25 bp, Homo sapien
tccccggagcggccgcgcccgcgtc

SEQ ID NO: 2173537 - DNA, 25 bp, Homo sapien
gcggcgatgcctccggccaagaagt

SEQ ID NO: 2173538 - DNA, 25 bp, Homo sapien
gatgcctccggccaagaagtctttg

SEQ ID NO: 2173539 - DNA, 25 bp, Homo sapien
ttgacccgctcgatcggagccacgg

SEQ ID NO: 2173540 - DNA, 25 bp, Homo sapien
ccaagaagtctttggcgaaggagat

SEQ ID NO: 2173541 - DNA, 25 bp, Homo sapien
ggttccgcggcagccttgaccttgt

SEQ ID NO: 2173542 - DNA, 25 bp, Homo sapien
gatgtgcgacatgtggtgccccgac

SEQ ID NO: 2173543 - DNA, 25 bp, Homo sapien
gtgcgtcgtccgctttctcccggag

SEQ ID NO: 2173544 - DNA, 25 bp, Homo sapien
ctgatgcccagttcgctccgagtgc

SEQ ID NO: 2173545 - DNA, 25 bp, Homo sapien
gataattggatgggtaatgggtggg

SEQ ID NO: 2173546 - DNA, 25 bp, Homo sapien
ataattggatgggtaatgggtgggt

SEQ ID NO: 2173547 - DNA, 25 bp, Homo sapien
tggataattggatgggtaatgggtg

SEQ ID NO: 2173548 - DNA, 25 bp, Homo sapien
ggataattggatgggtaatgggtgg

SEQ ID NO: 2173549 - DNA, 25 bp, Homo sapien
tggatggatgcgctcgatcggcaaa

SEQ ID NO: 2173550 - DNA, 25 bp, Homo sapien
gatggatgtgctcactcagcaaatg

SEQ ID NO: 2173551 - DNA, 25 bp, Homo sapien
tggatagatggatgtgctcactcag

SEQ ID NO: 2173552 - DNA, 25 bp, Homo sapien
gcgctcgatcggcaaatgcttctgg

SEQ ID NO: 2173553 - DNA, 25 bp, Homo sapien
cttttgctttctttattcagtcacg

SEQ ID NO: 2173554 - DNA, 25 bp, Homo sapien
tatgtgactgtcctatggtacttgg

SEQ ID NO: 2173555 - DNA, 25 bp, Homo sapien
actacacgctcctatgtgactgtcc

SEQ ID NO: 2173556 - DNA, 25 bp, Homo sapien
cacgctcctatgtgactgtcctatg

SEQ ID NO: 2173557 - DNA, 25 bp, Homo sapien
gctcctatgtgactgtcctatggta

SEQ ID NO: 2173558 - DNA, 25 bp, Homo sapien
ctataatgaacatgctgcctgggct

SEQ ID NO: 2173559 - DNA, 25 bp, Homo sapien
caggacaccccccaagtgcaccacc

SEQ ID NO: 2173560 - DNA, 25 bp, Homo sapien
acaccccccaagtgcaccacctgca

SEQ ID NO: 2173561 - DNA, 25 bp, Homo sapien
cctgcacctggtggaagccgtgcag

SEQ ID NO: 2173562 - DNA, 25 bp, Homo sapien
ctgcacctggtggaagccgtgcagc

SEQ ID NO: 2173563 - DNA, 25 bp, Homo sapien
tgcaccagcatgttcagtgactgca

SEQ ID NO: 2173564 - DNA, 25 bp, Homo sapien
gactgcatcagggcgcgctgcgcca

SEQ ID NO: 2173565 - DNA, 25 bp, Homo sapien
agtgactgcatcagggcgcgctgcg

SEQ ID NO: 2173566 - DNA, 25 bp, Homo sapien
gtgactgcatcagggcgcgctgcgc

SEQ ID NO: 2173567 - DNA, 25 bp, Homo sapien
acaggagctcagaacggtgagcaga

SEQ ID NO: 2173568 - DNA, 25 bp, Homo sapien
aacaggagctcagaacggtgagcag

SEQ ID NO: 2173569 - DNA, 25 bp, Homo sapien
ctctcggcgaccctgctgagtaact

SEQ ID NO: 2173570 - DNA, 25 bp, Homo sapien
agtcatgcaggatccggcacaggac

SEQ ID NO: 2173571 - DNA, 25 bp, Homo sapien
actttgtcgtctggccagtcatgca

SEQ ID NO: 2173572 - DNA, 25 bp, Homo sapien
cacaggacgtacagctcagcgctgg

SEQ ID NO: 2173573 - DNA, 25 bp, Homo sapien
aagaagcagtcctccccggacagat

SEQ ID NO: 2173574 - DNA, 25 bp, Homo sapien
tacgtccgtcaggtatggaagaagc

SEQ ID NO: 2173575 - DNA, 25 bp, Homo sapien
aagacaaaacgagatacgtccgtca

SEQ ID NO: 2173576 - DNA, 25 bp, Homo sapien
ggtatggaagaagcagtcctccccg

SEQ ID NO: 2173577 - DNA, 25 bp, Homo sapien
tcggcaccgtggatgcccatgaatg

SEQ ID NO: 2173578 - DNA, 25 bp, Homo sapien
taaggccacactgtgacggctctcg

SEQ ID NO: 2173579 - DNA, 25 bp, Homo sapien
tctcggctacttgcactgatgataa

SEQ ID NO: 2173580 - DNA, 25 bp, Homo sapien
catgaatgctgatctcggctgttcc

SEQ ID NO: 2173581 - DNA, 25 bp, Homo sapien
tctgggaggtcaaacacagtcacct

SEQ ID NO: 2173582 - DNA, 25 bp, Homo sapien
agtgggcggccagctcgataatgtc

SEQ ID NO: 2173583 - DNA, 25 bp, Homo sapien
tggatctgcactgcctgcggtccgg

SEQ ID NO: 2173584 - DNA, 25 bp, Homo sapien
atacgagggtactcacgggccagct

SEQ ID NO: 2173585 - DNA, 25 bp, Homo sapien
gagaagcgggacagattgaaggccg

SEQ ID NO: 2173586 - DNA, 25 bp, Homo sapien
ggacagattgaaggccgtggccacc

SEQ ID NO: 2173587 - DNA, 25 bp, Homo sapien
gtgcatggcccgcatgaacctcagc

SEQ ID NO: 2173588 - DNA, 25 bp, Homo sapien
tggcacgcagtcagcttcgtcatgc

SEQ ID NO: 2173589 - DNA, 25 bp, Homo sapien
tggtttgttccctctcggatggcaa

SEQ ID NO: 2173590 - DNA, 25 bp, Homo sapien
catccgatgccaggtagacgttcgc

SEQ ID NO: 2173591 - DNA, 25 bp, Homo sapien
aagccgtgcagagagtattcgccat

SEQ ID NO: 2173592 - DNA, 25 bp, Homo sapien
tgtaaagaggttccatgtgaggtca

SEQ ID NO: 2173593 - DNA, 25 bp, Homo sapien
ggagaaatggggacagtcgtgtgac

SEQ ID NO: 2173594 - DNA, 25 bp, Homo sapien
agaaatggggacagtcgtgtgacct

SEQ ID NO: 2173595 - DNA, 25 bp, Homo sapien
gaaatggggacagtcgtgtgacctc

SEQ ID NO: 2173596 - DNA, 25 bp, Homo sapien
ctggagaaatggggacagtcgtgtg

SEQ ID NO: 2173597 - DNA, 25 bp, Homo sapien
gcttctcctatgtgctcgcggctgc

SEQ ID NO: 2173598 - DNA, 25 bp, Homo sapien
gatacagcccctttgagactagagc

SEQ ID NO: 2173599 - DNA, 25 bp, Homo sapien
ttctcaacctttcgggaaaagcagc

SEQ ID NO: 2173600 - DNA, 25 bp, Homo sapien
tagagcccataaggaggtcacgctt

SEQ ID NO: 2173601 - DNA, 25 bp, Homo sapien
acgcagaggcgtccactttgctggc

SEQ ID NO: 2173602 - DNA, 25 bp, Homo sapien
ttcagtttgcaagcggtgagcaggc

SEQ ID NO: 2173603 - DNA, 25 bp, Homo sapien
tgctggcaatatccgcagccttctg

SEQ ID NO: 2173604 - DNA, 25 bp, Homo sapien
tcttttaacaaatcgaacaccttca

SEQ ID NO: 2173605 - DNA, 25 bp, Homo sapien
gcagggtctcccgagtcctgtgaca

SEQ ID NO: 2173606 - DNA, 25 bp, Homo sapien
ccgggatggagtcgtgcttgacact

SEQ ID NO: 2173607 - DNA, 25 bp, Homo sapien
gcataaagccctcaatcagctccag

SEQ ID NO: 2173608 - DNA, 25 bp, Homo sapien
tccacgtcactgaggtcttcgaagg

SEQ ID NO: 2173609 - DNA, 25 bp, Homo sapien
cagaagtggttcagcgggaatccca

SEQ ID NO: 2173610 - DNA, 25 bp, Homo sapien
cacgttcagaaagtccccgtgtacg

SEQ ID NO: 2173611 - DNA, 25 bp, Homo sapien
ctggatcccgtagccgccagctttg

SEQ ID NO: 2173612 - DNA, 25 bp, Homo sapien
gtgtacggactccaccagcatgccg

SEQ ID NO: 2173613 - DNA, 25 bp, Homo sapien
gttaattgcagccagcgtcctgggc

SEQ ID NO: 2173614 - DNA, 25 bp, Homo sapien
gacaccccacgtgtgagggtggcca

SEQ ID NO: 2173615 - DNA, 25 bp, Homo sapien
tttgagcctccatgggtcagtgtgg

SEQ ID NO: 2173616 - DNA, 25 bp, Homo sapien
tattcgtgttaattgcagccagcgt

SEQ ID NO: 2173617 - DNA, 25 bp, Homo sapien
gacagctccgagaacttcaccttcg

SEQ ID NO: 2173618 - DNA, 25 bp, Homo sapien
tgggctccccgctgtggacgtattc

SEQ ID NO: 2173619 - DNA, 25 bp, Homo sapien
cgagaccctggtgtccagctgatgg

SEQ ID NO: 2173620 - DNA, 25 bp, Homo sapien
tcaccttcgtttcctcgtagaattc

SEQ ID NO: 2173621 - DNA, 25 bp, Homo sapien
gcgacacctgtgaacacgctgtgtt

SEQ ID NO: 2173622 - DNA, 25 bp, Homo sapien
ctggagcagtggacgatcgcgacac

SEQ ID NO: 2173623 - DNA, 25 bp, Homo sapien
gatcgcgacacctgtgaacacgctg

SEQ ID NO: 2173624 - DNA, 25 bp, Homo sapien
gtggacgatcgcgacacctgtgaac

SEQ ID NO: 2173625 - DNA, 25 bp, Homo sapien
gcagcgaggcgtccttaatcctgga

SEQ ID NO: 2173626 - DNA, 25 bp, Homo sapien
gggagctacaaagcgagtttctcaa

SEQ ID NO: 2173627 - DNA, 25 bp, Homo sapien
tgtaagacaacaacgggtgaccacg

SEQ ID NO: 2173628 - DNA, 25 bp, Homo sapien
accatgctgtgacccgtgggagcta

SEQ ID NO: 2173629 - DNA, 25 bp, Homo sapien
tgtccaccggcttctccagaatcag

SEQ ID NO: 2173630 - DNA, 25 bp, Homo sapien
aggcgtcctgcttgtccaccggctt

SEQ ID NO: 2173631 - DNA, 25 bp, Homo sapien
cgggacagcatcctgtaggcgtcct

SEQ ID NO: 2173632 - DNA, 25 bp, Homo sapien
catcctgtaggcgtcctgcttgtcc

SEQ ID NO: 2173633 - DNA, 25 bp, Homo sapien
tgtccgctccaatgaccacgtcggg

SEQ ID NO: 2173634 - DNA, 25 bp, Homo sapien
cacgatcgtgtccgctccaatgacc

SEQ ID NO: 2173635 - DNA, 25 bp, Homo sapien
gatcgtgtccgctccaatgaccacg

SEQ ID NO: 2173636 - DNA, 25 bp, Homo sapien
gtgtccgctccaatgaccacgtcgg

SEQ ID NO: 2173637 - DNA, 25 bp, Homo sapien
cagattccggtttaccggtgacgtg

SEQ ID NO: 2173638 - DNA, 25 bp, Homo sapien
gtcggtacgggcgtgaaagagcacc

SEQ ID NO: 2173639 - DNA, 25 bp, Homo sapien
tacgggcgtgaaagagcaccgcagg

SEQ ID NO: 2173640 - DNA, 25 bp, Homo sapien
gccgtgggtctcacagagaagtttt

SEQ ID NO: 2173641 - DNA, 25 bp, Homo sapien
gtatcacaacacatagtaatggatg

SEQ ID NO: 2173642 - DNA, 25 bp, Homo sapien
aatggatgttaattctatatcgtaa

SEQ ID NO: 2173643 - DNA, 25 bp, Homo sapien
tatcacacagtaacatattaattct

SEQ ID NO: 2173644 - DNA, 25 bp, Homo sapien
tattcaaacatagtaacaagctaca

SEQ ID NO: 2173645 - DNA, 25 bp, Homo sapien
tgatactgtatcaattgcgagaaat

SEQ ID NO: 2173646 - DNA, 25 bp, Homo sapien
tagcaatagctaagctgtgccacca

SEQ ID NO: 2173647 - DNA, 25 bp, Homo sapien
attaggttactgcaatagtgcatta

SEQ ID NO: 2173648 - DNA, 25 bp, Homo sapien
tgtatatttaccacccgcaaatccc

SEQ ID NO: 2173649 - DNA, 25 bp, Homo sapien
gcaaaggaattttcataagggccga

SEQ ID NO: 2173650 - DNA, 25 bp, Homo sapien
cagcaaaggaattttcataagggcc

SEQ ID NO: 2173651 - DNA, 25 bp, Homo sapien
cacagcaaaggaattttcataaggg

SEQ ID NO: 2173652 - DNA, 25 bp, Homo sapien
gaattttcataagggccgaagggca

SEQ ID NO: 2173653 - DNA, 25 bp, Homo sapien
ttggcggtctccatggcgtacccat

SEQ ID NO: 2173654 - DNA, 25 bp, Homo sapien
ggcgtacccatacggagtagcgaag

SEQ ID NO: 2173655 - DNA, 25 bp, Homo sapien
ggaggggaccacctcaaacctgaga

SEQ ID NO: 2173656 - DNA, 25 bp, Homo sapien
ggagtagcgaaggaggctttgtcca

SEQ ID NO: 2173657 - DNA, 25 bp, Homo sapien
tcttggctctcgagggaagagattg

SEQ ID NO: 2173658 - DNA, 25 bp, Homo sapien
ccaacagtgtccgaggattcccaga

SEQ ID NO: 2173659 - DNA, 25 bp, Homo sapien
ggaggtattgactcgggccttgaac

SEQ ID NO: 2173660 - DNA, 25 bp, Homo sapien
ttgactcgggccttgaacccacgag

SEQ ID NO: 2173661 - DNA, 25 bp, Homo sapien
aggaaattcaggaaaaacgccagca

SEQ ID NO: 2173662 - DNA, 25 bp, Homo sapien
tgaaggttggggcagagtacaaaac

SEQ ID NO: 2173663 - DNA, 25 bp, Homo sapien
gggcagagtacaaaacccaacctgc

SEQ ID NO: 2173664 - DNA, 25 bp, Homo sapien
caacctgcccacaggaaattcagga

SEQ ID NO: 2173665 - DNA, 25 bp, Homo sapien
ccgtcgtggacacacgccgccatct

SEQ ID NO: 2173666 - DNA, 25 bp, Homo sapien
cacaccgccatcgtggacacacact

SEQ ID NO: 2173667 - DNA, 25 bp, Homo sapien
ccgtcgtcgtggacacacaccgccg

SEQ ID NO: 2173668 - DNA, 25 bp, Homo sapien
tcgtcgtggacacacaccgccgtcg

SEQ ID NO: 2173669 - DNA, 25 bp, Homo sapien
gggcaccaggaaacacttcccatac

SEQ ID NO: 2173670 - DNA, 25 bp, Homo sapien
catgggggcaccaggaaacacttcc

SEQ ID NO: 2173671 - DNA, 25 bp, Homo sapien
ccaggaaacacttcccataccccag

SEQ ID NO: 2173672 - DNA, 25 bp, Homo sapien
tcatgggggcaccaggaaacacttc

SEQ ID NO: 2173673 - DNA, 25 bp, Homo sapien
cacgcgcttgtgcagcagcttccca

SEQ ID NO: 2173674 - DNA, 25 bp, Homo sapien
gctgaggatctcctgacggcgtggg

SEQ ID NO: 2173675 - DNA, 25 bp, Homo sapien
gcttcccaatcaccgggcacagcac

SEQ ID NO: 2173676 - DNA, 25 bp, Homo sapien
tcctgacggcgtggggaggcgctgg

SEQ ID NO: 2173677 - DNA, 25 bp, Homo sapien
ggagcccgcggtgcgcgcagcgcgg

SEQ ID NO: 2173678 - DNA, 25 bp, Homo sapien
tccgcacttctgagcccggagcccg

SEQ ID NO: 2173679 - DNA, 25 bp, Homo sapien
gagccgggcgtccgcacttctgagc

SEQ ID NO: 2173680 - DNA, 25 bp, Homo sapien
cgggagccgggcgtccgcacttctg

SEQ ID NO: 2173681 - DNA, 25 bp, Homo sapien
tccaaacggtctcatgggtcaggcc

SEQ ID NO: 2173682 - DNA, 25 bp, Homo sapien
gaatggtctttctcgcccaagagag

SEQ ID NO: 2173683 - DNA, 25 bp, Homo sapien
tgtaaatgcagtatggcctcgcctt

SEQ ID NO: 2173684 - DNA, 25 bp, Homo sapien
gagagcctgggatccaattccacgt

SEQ ID NO: 2173685 - DNA, 25 bp, Homo sapien
cagtgcccctgagtgaaataaacag

SEQ ID NO: 2173686 - DNA, 25 bp, Homo sapien
caggcgctcctctgaaagaagaatt

SEQ ID NO: 2173687 - DNA, 25 bp, Homo sapien
taaacagaaatttcggcgtgcaccg

SEQ ID NO: 2173688 - DNA, 25 bp, Homo sapien
agaagaattccaaccacagcaacca

SEQ ID NO: 2173689 - DNA, 25 bp, Homo sapien
agttcgcccacggaggatatccaga

SEQ ID NO: 2173690 - DNA, 25 bp, Homo sapien
cacaactaagggacgatgtcagcag

SEQ ID NO: 2173691 - DNA, 25 bp, Homo sapien
tctctaccctgagtgaagcctggag

SEQ ID NO: 2173692 - DNA, 25 bp, Homo sapien
gctggttgaatatccaccctcgggt

SEQ ID NO: 2173693 - DNA, 25 bp, Homo sapien
tcagaacacactctcctgcctctgg

SEQ ID NO: 2173694 - DNA, 25 bp, Homo sapien
ccctccatcccttcagggtgcgcac

SEQ ID NO: 2173695 - DNA, 25 bp, Homo sapien
cactctcctgcctctggaggccggg

SEQ ID NO: 2173696 - DNA, 25 bp, Homo sapien
tccctccatcccttcagggtgcgca

SEQ ID NO: 2173697 - DNA, 25 bp, Homo sapien
taacaagccacggtgatcacgaacg

SEQ ID NO: 2173698 - DNA, 25 bp, Homo sapien
tacatgtttgcgtaaaaggccacgg

SEQ ID NO: 2173699 - DNA, 25 bp, Homo sapien
tccacttgaggacgtcgaagcaggt

SEQ ID NO: 2173700 - DNA, 25 bp, Homo sapien
gaatacccagtggtggcggttgcaa

SEQ ID NO: 2173701 - DNA, 25 bp, Homo sapien
agctggctttaaaatggcccggagt

SEQ ID NO: 2173702 - DNA, 25 bp, Homo sapien
caactgctctacaaacagcttcctc

SEQ ID NO: 2173703 - DNA, 25 bp, Homo sapien
cgccggtccgtgcccaggtgtgaaa

SEQ ID NO: 2173704 - DNA, 25 bp, Homo sapien
tgctctacaaacagcttcctcaagc

SEQ ID NO: 2173705 - DNA, 25 bp, Homo sapien
tctgttgccatttcgagtctgtgcc

SEQ ID NO: 2173706 - DNA, 25 bp, Homo sapien
cagatctgttgccatttcgagtctg

SEQ ID NO: 2173707 - DNA, 25 bp, Homo sapien
ggatccagcaagcagcctcttggca

SEQ ID NO: 2173708 - DNA, 25 bp, Homo sapien
ggtctggggatccagcaagcagcct

SEQ ID NO: 2173709 - DNA, 25 bp, Homo sapien
caacggttgttcttggcggtgtctg

SEQ ID NO: 2173710 - DNA, 25 bp, Homo sapien
aggtggctgtccagaaatttctggg

SEQ ID NO: 2173711 - DNA, 25 bp, Homo sapien
tagaaaatcagcacaacggttgttc

SEQ ID NO: 2173712 - DNA, 25 bp, Homo sapien
cacaggcttgcggtttgggccccgc

SEQ ID NO: 2173713 - DNA, 25 bp, Homo sapien
cagcagggattgcatgccggtgaca

SEQ ID NO: 2173714 - DNA, 25 bp, Homo sapien
gggttgggatgagaaatagacaaaa

SEQ ID NO: 2173715 - DNA, 25 bp, Homo sapien
cagctattgtcttctggctataacc

SEQ ID NO: 2173716 - DNA, 25 bp, Homo sapien
gacagacccttttttgccagctatt

SEQ ID NO: 2173717 - DNA, 25 bp, Homo sapien
gatagacaagggcaacactcattct

SEQ ID NO: 2173718 - DNA, 25 bp, Homo sapien
agctgatagacaagggcaacactca

SEQ ID NO: 2173719 - DNA, 25 bp, Homo sapien
gacaagggcaacactcattctcaca

SEQ ID NO: 2173720 - DNA, 25 bp, Homo sapien
cactcattctcacaccctcatcaac

SEQ ID NO: 2173721 - DNA, 25 bp, Homo sapien
ttctgcaaaggcagcggccgcgttt

SEQ ID NO: 2173722 - DNA, 25 bp, Homo sapien
cagacgccccgtggagattttgatc

SEQ ID NO: 2173723 - DNA, 25 bp, Homo sapien
gagatttgcatgctgtcctccgcag

SEQ ID NO: 2173724 - DNA, 25 bp, Homo sapien
tcattctcagagtatatagcacggg

SEQ ID NO: 2173725 - DNA, 25 bp, Homo sapien
tctgtggtcactatggctgatttga

SEQ ID NO: 2173726 - DNA, 25 bp, Homo sapien
tgtctgtggtcactatggctgattt

SEQ ID NO: 2173727 - DNA, 25 bp, Homo sapien
caagccttccctgtctgtggtcact

SEQ ID NO: 2173728 - DNA, 25 bp, Homo sapien
tggtcactatggctgatttgagctt

SEQ ID NO: 2173729 - DNA, 25 bp, Homo sapien
ggtacagtggtctacctggccctgc

SEQ ID NO: 2173730 - DNA, 25 bp, Homo sapien
tatgccagtttccttggtacagtgg

SEQ ID NO: 2173731 - DNA, 25 bp, Homo sapien
ggtgtttcccctgctcgctgtcagg

SEQ ID NO: 2173732 - DNA, 25 bp, Homo sapien
gctgtcaggcacagatgatgtgctt

SEQ ID NO: 2173733 - DNA, 25 bp, Homo sapien
agcacagtcttgagtgacaccttca

SEQ ID NO: 2173734 - DNA, 25 bp, Homo sapien
tgcacccagcacagtcttgagtgac

SEQ ID NO: 2173735 - DNA, 25 bp, Homo sapien
agatatctccttgccctagctcctg

SEQ ID NO: 2173736 - DNA, 25 bp, Homo sapien
ggaagtctgcatttcattccagccc

SEQ ID NO: 2173737 - DNA, 25 bp, Homo sapien
tctgagcagccgtcaagctaggcag

SEQ ID NO: 2173738 - DNA, 25 bp, Homo sapien
ctatgggagtgagctccgcacagga

SEQ ID NO: 2173739 - DNA, 25 bp, Homo sapien
cgcaccttgagacagacaccagcag

SEQ ID NO: 2173740 - DNA, 25 bp, Homo sapien
gagggcagacgtcctgggtgatgct

SEQ ID NO: 2173741 - DNA, 25 bp, Homo sapien
agagcctggaatgacgcggccacaa

SEQ ID NO: 2173742 - DNA, 25 bp, Homo sapien
taaatccaatgacaggtgccctggt

SEQ ID NO: 2173743 - DNA, 25 bp, Homo sapien
gagcacggacctgagacattttgat

SEQ ID NO: 2173744 - DNA, 25 bp, Homo sapien
ggccacgtggagacggagacagagc

SEQ ID NO: 2173745 - DNA, 25 bp, Homo sapien
ccaccaggctatagatggagatgtc

SEQ ID NO: 2173746 - DNA, 25 bp, Homo sapien
tgacgacatcaccatgagctccgtg

SEQ ID NO: 2173747 - DNA, 25 bp, Homo sapien
ccaggaggctaattgggtagacaaa

SEQ ID NO: 2173748 - DNA, 25 bp, Homo sapien
cacgttgaccagaatcttgacgaca

SEQ ID NO: 2173749 - DNA, 25 bp, Homo sapien
gagtccctgcagtactggcgacata

SEQ ID NO: 2173750 - DNA, 25 bp, Homo sapien
aaatcatcactgagccagaaaagct

SEQ ID NO: 2173751 - DNA, 25 bp, Homo sapien
gaaaagctgtcgctcatatccccgg

SEQ ID NO: 2173752 - DNA, 25 bp, Homo sapien
atatccccggtgaccgccgacggtg

SEQ ID NO: 2173753 - DNA, 25 bp, Homo sapien
ctgttgtgtggattgctaaactgag

SEQ ID NO: 2173754 - DNA, 25 bp, Homo sapien
tgttgtgtggattgctaaactgagg

SEQ ID NO: 2173755 - DNA, 25 bp, Homo sapien
ttcaccccgtatggcgtgtgcctga

SEQ ID NO: 2173756 - DNA, 25 bp, Homo sapien
ctctttcaccccgtatggcgtgtgc

SEQ ID NO: 2173757 - DNA, 25 bp, Homo sapien
tttcaccccgtatggcgtgtgcctg

SEQ ID NO: 2173758 - DNA, 25 bp, Homo sapien
ccccgtatggcgtgtgcctgatgac

SEQ ID NO: 2173759 - DNA, 25 bp, Homo sapien
ctagggcaggtcacataagattcct

SEQ ID NO: 2173760 - DNA, 25 bp, Homo sapien
gaaaaatccagcaatggcctagggc

SEQ ID NO: 2173761 - DNA, 25 bp, Homo sapien
gattcctcacaacagactctgatgt

SEQ ID NO: 2173762 - DNA, 25 bp, Homo sapien
ggtcacataagattcctcacaacag

SEQ ID NO: 2173763 - DNA, 25 bp, Homo sapien
atgtctacggatggccagctgggtc

SEQ ID NO: 2173764 - DNA, 25 bp, Homo sapien
gggctccagacacgattctcttagc

SEQ ID NO: 2173765 - DNA, 25 bp, Homo sapien
gagcattgccttcaacggcatgtct

SEQ ID NO: 2173766 - DNA, 25 bp, Homo sapien
tccattctcttgacggcactgagca

SEQ ID NO: 2173767 - DNA, 25 bp, Homo sapien
gcaataaacatagacccgtgaagat

SEQ ID NO: 2173768 - DNA, 25 bp, Homo sapien
tgcaataaacatagacccgtgaaga

SEQ ID NO: 2173769 - DNA, 25 bp, Homo sapien
aaacatagacccgtgaagattatta

SEQ ID NO: 2173770 - DNA, 25 bp, Homo sapien
tagacccgtgaagattattacaatt

SEQ ID NO: 2173771 - DNA, 25 bp, Homo sapien
aatcacctccctggtttctaatatt

SEQ ID NO: 2173772 - DNA, 25 bp, Homo sapien
catctttctgattccaatattctct

SEQ ID NO: 2173773 - DNA, 25 bp, Homo sapien
ttctaatattgtctctaatccccaa

SEQ ID NO: 2173774 - DNA, 25 bp, Homo sapien
tctgatctccaataatatctctgat

SEQ ID NO: 2173775 - DNA, 25 bp, Homo sapien
tcctcggtctctaataatctctctg

SEQ ID NO: 2173776 - DNA, 25 bp, Homo sapien
cttcttaaccccaataatgtccctg

SEQ ID NO: 2173777 - DNA, 25 bp, Homo sapien
cctggtttccaacattatctctggt

SEQ ID NO: 2173778 - DNA, 25 bp, Homo sapien
ggtcccaagtattctctctgatccc

SEQ ID NO: 2173779 - DNA, 25 bp, Homo sapien
ggagattccatcagagctactgctg

SEQ ID NO: 2173780 - DNA, 25 bp, Homo sapien
tgctgcacaactgccccttgaggag

SEQ ID NO: 2173781 - DNA, 25 bp, Homo sapien
aatgtgcgtggatttgagtctcctc

SEQ ID NO: 2173782 - DNA, 25 bp, Homo sapien
gtcagcaccgtgtgaactcaaagtc

SEQ ID NO: 2173783 - DNA, 25 bp, Homo sapien
gtaaatgggttacgtgcagcagccg

SEQ ID NO: 2173784 - DNA, 25 bp, Homo sapien
ttctcccctaagtgacgaagcggct

SEQ ID NO: 2173785 - DNA, 25 bp, Homo sapien
tttttgggaacagagccacgtgacc

SEQ ID NO: 2173786 - DNA, 25 bp, Homo sapien
tcaagtgggctatgcaaggaggaac

SEQ ID NO: 2173787 - DNA, 25 bp, Homo sapien
ccgtggtcactcaaagtgcttgaga

SEQ ID NO: 2173788 - DNA, 25 bp, Homo sapien
ggtaacaggatgcaacgcttaagtc

SEQ ID NO: 2173789 - DNA, 25 bp, Homo sapien
aagtcgacggccgtgcctcagagcc

SEQ ID NO: 2173790 - DNA, 25 bp, Homo sapien
gcggcagacggctgcccttccagtt

SEQ ID NO: 2173791 - DNA, 25 bp, Homo sapien
caaccttgcaaaggcggccgcttcg

SEQ ID NO: 2173792 - DNA, 25 bp, Homo sapien
agcaaccttgcaaaggcggccgctt

SEQ ID NO: 2173793 - DNA, 25 bp, Homo sapien
tccagcaaccttgcaaaggcggccg

SEQ ID NO: 2173794 - DNA, 25 bp, Homo sapien
ctgtccagcaaccttgcaaaggcgg

SEQ ID NO: 2173795 - DNA, 25 bp, Homo sapien
ggcacgactgtctccgaatgcaaat

SEQ ID NO: 2173796 - DNA, 25 bp, Homo sapien
tgtaactgtctgaacactcatgtgc

SEQ ID NO: 2173797 - DNA, 25 bp, Homo sapien
accacggttgcgactcaggcttagg

SEQ ID NO: 2173798 - DNA, 25 bp, Homo sapien
tgagcccactggagtaacgtcgctg

SEQ ID NO: 2173799 - DNA, 25 bp, Homo sapien
aaatgggctcttcacggcgaaagct

SEQ ID NO: 2173800 - DNA, 25 bp, Homo sapien
ccaagtgttgctcaaataagtggag

SEQ ID NO: 2173801 - DNA, 25 bp, Homo sapien
gaggttgtaggaatatttggacacc

SEQ ID NO: 2173802 - DNA, 25 bp, Homo sapien
tcttcacggcgaaagctgtgatctt

SEQ ID NO: 2173803 - DNA, 25 bp, Homo sapien
tgttgttgacccgtaagttcctggc

SEQ ID NO: 2173804 - DNA, 25 bp, Homo sapien
caggatgtgttcatgtcccgggaga

SEQ ID NO: 2173805 - DNA, 25 bp, Homo sapien
gatgccagctgaaccccagtgggtt

SEQ ID NO: 2173806 - DNA, 25 bp, Homo sapien
gatctgagctgatccgaggatgcca

SEQ ID NO: 2173807 - DNA, 25 bp, Homo sapien
cgggctgaacattaacctggtacat

SEQ ID NO: 2173808 - DNA, 25 bp, Homo sapien
gggacgattcctcagactgacgggc

SEQ ID NO: 2173809 - DNA, 25 bp, Homo sapien
cagactgacgggctgaacattaacc

SEQ ID NO: 2173810 - DNA, 25 bp, Homo sapien
cgattcctcagactgacgggctgaa

SEQ ID NO: 2173811 - DNA, 25 bp, Homo sapien
gtcagtcacaacagacacgtaacgt

SEQ ID NO: 2173812 - DNA, 25 bp, Homo sapien
acgttacgtgtctgttgtgactgac

SEQ ID NO: 2173813 - DNA, 25 bp, Homo sapien
tttgtaatcacattataaattgtca

SEQ ID NO: 2173814 - DNA, 25 bp, Homo sapien
tgtaatcacattataaattgtcatt

SEQ ID NO: 2173815 - DNA, 25 bp, Homo sapien
tattttgtaatcacattataaattg

SEQ ID NO: 2173816 - DNA, 25 bp, Homo sapien
acctggcctcatttattattttgta

SEQ ID NO: 2173817 - DNA, 25 bp, Homo sapien
cctggaacaggtaatgacgggcacg

SEQ ID NO: 2173818 - DNA, 25 bp, Homo sapien
tcagaacaggacaagtgcaaccggg

SEQ ID NO: 2173819 - DNA, 25 bp, Homo sapien
gatagctttaatgcggccggtcctc

SEQ ID NO: 2173820 - DNA, 25 bp, Homo sapien
ggaaaattgcacagaccgacagtcg

SEQ ID NO: 2173821 - DNA, 25 bp, Homo sapien
gcagctgatgtaacccggcttcctt

SEQ ID NO: 2173822 - DNA, 25 bp, Homo sapien
tccggaagagcgagaaccggtgcct

SEQ ID NO: 2173823 - DNA, 25 bp, Homo sapien
gggccatggcaacatgtggaccatt

SEQ ID NO: 2173824 - DNA, 25 bp, Homo sapien
cggcttccttcgctccaagattgca

SEQ ID NO: 2173825 - DNA, 25 bp, Homo sapien
ccacatccagaagagatttctctgg

SEQ ID NO: 2173826 - DNA, 25 bp, Homo sapien
catccagaagagatttctctggaag

SEQ ID NO: 2173827 - DNA, 25 bp, Homo sapien
ctttgccttgaatggaagcaattgt

SEQ ID NO: 2173828 - DNA, 25 bp, Homo sapien
atggaagcaattgtcctgatggcca

SEQ ID NO: 2173829 - DNA, 25 bp, Homo sapien
ggggatccggtgagatgcggggcat

SEQ ID NO: 2173830 - DNA, 25 bp, Homo sapien
tccggggatccggtgagatgcgggg

SEQ ID NO: 2173831 - DNA, 25 bp, Homo sapien
gcttccggggatccggtgagatgcg

SEQ ID NO: 2173832 - DNA, 25 bp, Homo sapien
ccagcttccggggatccggtgagat

SEQ ID NO: 2173833 - DNA, 25 bp, Homo sapien
gggcgtgccggccacttcacttttc

SEQ ID NO: 2173834 - DNA, 25 bp, Homo sapien
aacctgacatttcattcaccgcagc

SEQ ID NO: 2173835 - DNA, 25 bp, Homo sapien
cagcaacgttcatgaggctttctgg

SEQ ID NO: 2173836 - DNA, 25 bp, Homo sapien
tttcatttccagcaacgttcatgag

SEQ ID NO: 2173837 - DNA, 25 bp, Homo sapien
tccgcaggtgtctaggacagccaaa

SEQ ID NO: 2173838 - DNA, 25 bp, Homo sapien
gactgattgtcaggtcacccctgtg

SEQ ID NO: 2173839 - DNA, 25 bp, Homo sapien
gtattgttttccacgccactgacgc

SEQ ID NO: 2173840 - DNA, 25 bp, Homo sapien
ttccagactttcaggcgtccgcagg

SEQ ID NO: 2173841 - DNA, 25 bp, Homo sapien
tctgatgttcacttcaagagatggt

SEQ ID NO: 2173842 - DNA, 25 bp, Homo sapien
cagctgcatagtttctgctattctg

SEQ ID NO: 2173843 - DNA, 25 bp, Homo sapien
ttcacttcaagagatggtggacact

SEQ ID NO: 2173844 - DNA, 25 bp, Homo sapien
gatcctctcataagcttcacacgca

SEQ ID NO: 2173845 - DNA, 25 bp, Homo sapien
cttatatacagacagttttttgctg

SEQ ID NO: 2173846 - DNA, 25 bp, Homo sapien
tcagattaatttctgctctggggtg

SEQ ID NO: 2173847 - DNA, 25 bp, Homo sapien
ttaatttctgctctggggtgttgga

SEQ ID NO: 2173848 - DNA, 25 bp, Homo sapien
tatatacagacagttttttgctgct

SEQ ID NO: 2173849 - DNA, 25 bp, Homo sapien
ggggtggctgggagtatccagcctt

SEQ ID NO: 2173850 - DNA, 25 bp, Homo sapien
ggtggctgggagtatccagcctttt

SEQ ID NO: 2173851 - DNA, 25 bp, Homo sapien
ctgcatacttcatcctgtatctggt

SEQ ID NO: 2173852 - DNA, 25 bp, Homo sapien
cctgcatacttcatcctgtatctgg

SEQ ID NO: 2173853 - DNA, 25 bp, Homo sapien
cacgttttggggctgttgaaggcac

SEQ ID NO: 2173854 - DNA, 25 bp, Homo sapien
gggagatcttgcacatccaagagag

SEQ ID NO: 2173855 - DNA, 25 bp, Homo sapien
gcacatccaagagaggagcaggtac

SEQ ID NO: 2173856 - DNA, 25 bp, Homo sapien
cttcagtgtttgcatggggagatct

SEQ ID NO: 2173857 - DNA, 25 bp, Homo sapien
aagtctcggacagggaccttctgca

SEQ ID NO: 2173858 - DNA, 25 bp, Homo sapien
tccaggatcggtatttgaagtctcg

SEQ ID NO: 2173859 - DNA, 25 bp, Homo sapien
tgtgagacatcctcagggaacagca

SEQ ID NO: 2173860 - DNA, 25 bp, Homo sapien
cgtgccgcaggtacgaatctctggt

SEQ ID NO: 2173861 - DNA, 25 bp, Homo sapien
aagcaccgtcgtttctcaggacgca

SEQ ID NO: 2173862 - DNA, 25 bp, Homo sapien
taatttctccggttagtgttgattc

SEQ ID NO: 2173863 - DNA, 25 bp, Homo sapien
tagtgttgattcgtgctgttaacat

SEQ ID NO: 2173864 - DNA, 25 bp, Homo sapien
caggacgcaccatcccatcattttt

SEQ ID NO: 2173865 - DNA, 25 bp, Homo sapien
ttgcccgtgccagatgcccttcggg

SEQ ID NO: 2173866 - DNA, 25 bp, Homo sapien
tctgctttgcttggagtagcacagg

SEQ ID NO: 2173867 - DNA, 25 bp, Homo sapien
gcttggagtagcacaggagcttgat

SEQ ID NO: 2173868 - DNA, 25 bp, Homo sapien
ccttcgggggacagtctgcgtctgc

SEQ ID NO: 2173869 - DNA, 25 bp, Homo sapien
gacactgaagttggcagctgaactt

SEQ ID NO: 2173870 - DNA, 25 bp, Homo sapien
tataggtggcatttgctacatagct

SEQ ID NO: 2173871 - DNA, 25 bp, Homo sapien
catttgctacatagctggacactga

SEQ ID NO: 2173872 - DNA, 25 bp, Homo sapien
ggacactgaagttggcagctgaact

SEQ ID NO: 2173873 - DNA, 25 bp, Homo sapien
cagcatgtcaatgtagcgtggaaag

SEQ ID NO: 2173874 - DNA, 25 bp, Homo sapien
catgtcaatgtagcgtggaaagtgg

SEQ ID NO: 2173875 - DNA, 25 bp, Homo sapien
atcagcagcatgtcaatgtagcgtg

SEQ ID NO: 2173876 - DNA, 25 bp, Homo sapien
cagcagcatgtcaatgtagcgtgga

SEQ ID NO: 2173877 - DNA, 25 bp, Homo sapien
tcacggctgccactgcaaactttcg

SEQ ID NO: 2173878 - DNA, 25 bp, Homo sapien
aaatttgccacgtctgacttgaagg

SEQ ID NO: 2173879 - DNA, 25 bp, Homo sapien
gaagaccccctttctgactcatctg

SEQ ID NO: 2173880 - DNA, 25 bp, Homo sapien
caaactttcgtatggatagaagacc

SEQ ID NO: 2173881 - DNA, 25 bp, Homo sapien
cctgggtattggctctggacgatga

SEQ ID NO: 2173882 - DNA, 25 bp, Homo sapien
tggacgatgacttttgagcagcttt

SEQ ID NO: 2173883 - DNA, 25 bp, Homo sapien
tattggctctggacgatgacttttg

SEQ ID NO: 2173884 - DNA, 25 bp, Homo sapien
taaccatggaaacggggaagccagc

SEQ ID NO: 2173885 - DNA, 25 bp, Homo sapien
gctccgtggaagaggacgcgtcctg

SEQ ID NO: 2173886 - DNA, 25 bp, Homo sapien
tccgtggaagaggacgcgtcctgtg

SEQ ID NO: 2173887 - DNA, 25 bp, Homo sapien
cgtggaagaggacgcgtcctgtgcc

SEQ ID NO: 2173888 - DNA, 25 bp, Homo sapien
tggaagaggacgcgtcctgtgcctc

SEQ ID NO: 2173889 - DNA, 25 bp, Homo sapien
gctctgggtataatcagtccctgct

SEQ ID NO: 2173890 - DNA, 25 bp, Homo sapien
tgggtataatcagtccctgctccaa

SEQ ID NO: 2173891 - DNA, 25 bp, Homo sapien
cttgacattggctgttgtgatgctc

SEQ ID NO: 2173892 - DNA, 25 bp, Homo sapien
ggctgttgtgatgctctgggtataa

SEQ ID NO: 2173893 - DNA, 25 bp, Homo sapien
actcagggctttcttggaagcatag

SEQ ID NO: 2173894 - DNA, 25 bp, Homo sapien
tcttggaagcatagggagttgctcc

SEQ ID NO: 2173895 - DNA, 25 bp, Homo sapien
tggagctagccatctcactcagggc

SEQ ID NO: 2173896 - DNA, 25 bp, Homo sapien
tctctgcatccacatagttggagct

SEQ ID NO: 2173897 - DNA, 25 bp, Homo sapien
agggttaagcatgattttccaaatg

SEQ ID NO: 2173898 - DNA, 25 bp, Homo sapien
aaagcttcaaaagataccttatgca

SEQ ID NO: 2173899 - DNA, 25 bp, Homo sapien
tcttcgttgccactaggaggtggtg

SEQ ID NO: 2173900 - DNA, 25 bp, Homo sapien
tttgagttgacttgccaagaagacc

SEQ ID NO: 2173901 - DNA, 25 bp, Homo sapien
actgatggccattgctggtggcctt

SEQ ID NO: 2173902 - DNA, 25 bp, Homo sapien
ctgatggccattgctggtggccttg

SEQ ID NO: 2173903 - DNA, 25 bp, Homo sapien
cactgatggccattgctggtggcct

SEQ ID NO: 2173904 - DNA, 25 bp, Homo sapien
tctgagaacatcaggctctttttct

SEQ ID NO: 2173905 - DNA, 25 bp, Homo sapien
tagcctgaatcaggctggatgtcag

SEQ ID NO: 2173906 - DNA, 25 bp, Homo sapien
ctttgatctccagcctagcctgaat

SEQ ID NO: 2173907 - DNA, 25 bp, Homo sapien
ctctgagaacatcaggctctttttc

SEQ ID NO: 2173908 - DNA, 25 bp, Homo sapien
gagcgcagaaacttaacagctgtag

SEQ ID NO: 2173909 - DNA, 25 bp, Homo sapien
tgagatccgtctacaagagcgcaga

SEQ ID NO: 2173910 - DNA, 25 bp, Homo sapien
cattcgtcttgtaaatgcagaggtc

SEQ ID NO: 2173911 - DNA, 25 bp, Homo sapien
caattcgatgcacatttggaaacat

SEQ ID NO: 2173912 - DNA, 25 bp, Homo sapien
tagtctcatgggtggcctggtccat

SEQ ID NO: 2173913 - DNA, 25 bp, Homo sapien
tcatgggtggcctggtccatgctcc

SEQ ID NO: 2173914 - DNA, 25 bp, Homo sapien
tgatagtctcatgggtggcctggtc

SEQ ID NO: 2173915 - DNA, 25 bp, Homo sapien
ctgcccatgatagtctcatgggtgg
